United States Patent Application Publication US 2015/0141320 A1 - sequence listing, part 10

SEQ ID NO: 199351 - DNA, 15 bp, Homo sapiens
tggccagggcagggg

SEQ ID NO: 199352 - DNA, 15 bp, Homo sapiens
ctggccagggcaggg

SEQ ID NO: 199353 - DNA, 15 bp, Homo sapiens
actggccagggcagg

SEQ ID NO: 199354 - DNA, 15 bp, Homo sapiens
aactggccagggcag

SEQ ID NO: 199355 - DNA, 15 bp, Homo sapiens
aaactggccagggca

SEQ ID NO: 199356 - DNA, 15 bp, Homo sapiens
aaaactggccagggc

SEQ ID NO: 199357 - DNA, 15 bp, Homo sapiens
gaaaactggccaggg

SEQ ID NO: 199358 - DNA, 15 bp, Homo sapiens
agaaaactggccagg

SEQ ID NO: 199359 - DNA, 15 bp, Homo sapiens
aagaaaactggccag

SEQ ID NO: 199360 - DNA, 15 bp, Homo sapiens
gaagaaaactggcca

SEQ ID NO: 199361 - DNA, 15 bp, Homo sapiens
agaagaaaactggcc

SEQ ID NO: 199362 - DNA, 15 bp, Homo sapiens
cagaagaaaactggc

SEQ ID NO: 199363 - DNA, 15 bp, Homo sapiens
ccagaagaaaactgg

SEQ ID NO: 199364 - DNA, 15 bp, Homo sapiens
tccagaagaaaactg

SEQ ID NO: 199365 - DNA, 15 bp, Homo sapiens
atccagaagaaaact

SEQ ID NO: 199366 - DNA, 15 bp, Homo sapiens
catccagaagaaaac

SEQ ID NO: 199367 - DNA, 15 bp, Homo sapiens
acatccagaagaaaa

SEQ ID NO: 199368 - DNA, 15 bp, Homo sapiens
tacatccagaagaaa

SEQ ID NO: 199369 - DNA, 15 bp, Homo sapiens
atacatccagaagaa

SEQ ID NO: 199370 - DNA, 15 bp, Homo sapiens
gatacatccagaaga

SEQ ID NO: 199371 - DNA, 15 bp, Homo sapiens
agatacatccagaag

SEQ ID NO: 199372 - DNA, 15 bp, Homo sapiens
cagatacatccagaa

SEQ ID NO: 199373 - DNA, 15 bp, Homo sapiens
gcagatacatccaga

SEQ ID NO: 199374 - DNA, 15 bp, Homo sapiens
ggcagatacatccag

SEQ ID NO: 199375 - DNA, 15 bp, Homo sapiens
tggcagatacatcca

SEQ ID NO: 199376 - DNA, 15 bp, Homo sapiens
atggcagatacatcc

SEQ ID NO: 199377 - DNA, 15 bp, Homo sapiens
catggcagatacatc

SEQ ID NO: 199378 - DNA, 15 bp, Homo sapiens
acatggcagatacat

SEQ ID NO: 199379 - DNA, 15 bp, Homo sapiens
cacatggcagataca

SEQ ID NO: 199380 - DNA, 15 bp, Homo sapiens
tcacatggcagatac

SEQ ID NO: 199381 - DNA, 15 bp, Homo sapiens
atcacatggcagata

SEQ ID NO: 199382 - DNA, 15 bp, Homo sapiens
aatcacatggcagat

SEQ ID NO: 199383 - DNA, 15 bp, Homo sapiens
gaatcacatggcaga

SEQ ID NO: 199384 - DNA, 15 bp, Homo sapiens
ggaatcacatggcag

SEQ ID NO: 199385 - DNA, 15 bp, Homo sapiens
gggaatcacatggca

SEQ ID NO: 199386 - DNA, 15 bp, Homo sapiens
tgggaatcacatggc

SEQ ID NO: 199387 - DNA, 15 bp, Homo sapiens
ctgggaatcacatgg

SEQ ID NO: 199388 - DNA, 15 bp, Homo sapiens
cctgggaatcacatg

SEQ ID NO: 199389 - DNA, 15 bp, Homo sapiens
ccctgggaatcacat

SEQ ID NO: 199390 - DNA, 15 bp, Homo sapiens
gccctgggaatcaca

SEQ ID NO: 199391 - DNA, 15 bp, Homo sapiens
agccctgggaatcac

SEQ ID NO: 199392 - DNA, 15 bp, Homo sapiens
aagccctgggaatca

SEQ ID NO: 199393 - DNA, 15 bp, Homo sapiens
gaagccctgggaatc

SEQ ID NO: 199394 - DNA, 15 bp, Homo sapiens
agaagccctgggaat

SEQ ID NO: 199395 - DNA, 15 bp, Homo sapiens
gagaagccctgggaa

SEQ ID NO: 199396 - DNA, 15 bp, Homo sapiens
tgagaagccctggga

SEQ ID NO: 199397 - DNA, 15 bp, Homo sapiens
ctgagaagccctggg

SEQ ID NO: 199398 - DNA, 15 bp, Homo sapiens
tctgagaagccctgg

SEQ ID NO: 199399 - DNA, 15 bp, Homo sapiens
ctctgagaagccctg

SEQ ID NO: 199400 - DNA, 15 bp, Homo sapiens
gctctgagaagccct

SEQ ID NO: 199401 - DNA, 15 bp, Homo sapiens
agctctgagaagccc

SEQ ID NO: 199402 - DNA, 15 bp, Homo sapiens
cagctctgagaagcc

SEQ ID NO: 199403 - DNA, 15 bp, Homo sapiens
gcagctctgagaagc

SEQ ID NO: 199404 - DNA, 15 bp, Homo sapiens
agcagctctgagaag

SEQ ID NO: 199405 - DNA, 15 bp, Homo sapiens
cagcagctctgagaa

SEQ ID NO: 199406 - DNA, 15 bp, Homo sapiens
gcagcagctctgaga

SEQ ID NO: 199407 - DNA, 15 bp, Homo sapiens
agcagcagctctgag

SEQ ID NO: 199408 - DNA, 15 bp, Homo sapiens
cagcagcagctctga

SEQ ID NO: 199409 - DNA, 15 bp, Homo sapiens
gcagcagcagctctg

SEQ ID NO: 199410 - DNA, 15 bp, Homo sapiens
agcagcagcagctct

SEQ ID NO: 199411 - DNA, 15 bp, Homo sapiens
cagcagcagcagctc

SEQ ID NO: 199412 - DNA, 15 bp, Homo sapiens
gcagcagcagcagct

SEQ ID NO: 199413 - DNA, 15 bp, Homo sapiens
agcagcagcagcagc

SEQ ID NO: 199414 - DNA, 15 bp, Homo sapiens
cagcagcagcagcag

SEQ ID NO: 199415 - DNA, 15 bp, Homo sapiens
tcagcagcagcagca

SEQ ID NO: 199416 - DNA, 15 bp, Homo sapiens
ttcagcagcagcagc

SEQ ID NO: 199417 - DNA, 15 bp, Homo sapiens
gttcagcagcagcag

SEQ ID NO: 199418 - DNA, 15 bp, Homo sapiens
tgttcagcagcagca

SEQ ID NO: 199419 - DNA, 15 bp, Homo sapiens
gtgttcagcagcagc

SEQ ID NO: 199420 - DNA, 15 bp, Homo sapiens
agtgttcagcagcag

SEQ ID NO: 199421 - DNA, 15 bp, Homo sapiens
cagtgttcagcagca

SEQ ID NO: 199422 - DNA, 15 bp, Homo sapiens
gcagtgttcagcagc

SEQ ID NO: 199423 - DNA, 15 bp, Homo sapiens
agcagtgttcagcag

SEQ ID NO: 199424 - DNA, 15 bp, Homo sapiens
cagcagtgttcagca

SEQ ID NO: 199425 - DNA, 15 bp, Homo sapiens
acagcagtgttcagc

SEQ ID NO: 199426 - DNA, 15 bp, Homo sapiens
cacagcagtgttcag

SEQ ID NO: 199427 - DNA, 15 bp, Homo sapiens
tcacagcagtgttca

SEQ ID NO: 199428 - DNA, 15 bp, Homo sapiens
atcacagcagtgttc

SEQ ID NO: 199429 - DNA, 15 bp, Homo sapiens
gatcacagcagtgtt

SEQ ID NO: 199430 - DNA, 15 bp, Homo sapiens
ggatcacagcagtgt

SEQ ID NO: 199431 - DNA, 15 bp, Homo sapiens
tggatcacagcagtg

SEQ ID NO: 199432 - DNA, 15 bp, Homo sapiens
atggatcacagcagt

SEQ ID NO: 199433 - DNA, 15 bp, Homo sapiens
tatggatcacagcag

SEQ ID NO: 199434 - DNA, 15 bp, Homo sapiens
ctatggatcacagca

SEQ ID NO: 199435 - DNA, 15 bp, Homo sapiens
actatggatcacagc

SEQ ID NO: 199436 - DNA, 15 bp, Homo sapiens
cactatggatcacag

SEQ ID NO: 199437 - DNA, 15 bp, Homo sapiens
tcactatggatcaca

SEQ ID NO: 199438 - DNA, 15 bp, Homo sapiens
gtcactatggatcac

SEQ ID NO: 199439 - DNA, 15 bp, Homo sapiens
ggtcactatggatca

SEQ ID NO: 199440 - DNA, 15 bp, Homo sapiens
tggtcactatggatc

SEQ ID NO: 199441 - DNA, 15 bp, Homo sapiens
ctggtcactatggat

SEQ ID NO: 199442 - DNA, 15 bp, Homo sapiens
cctggtcactatgga

SEQ ID NO: 199443 - DNA, 15 bp, Homo sapiens
ccctggtcactatgg

SEQ ID NO: 199444 - DNA, 15 bp, Homo sapiens
tccctggtcactatg

SEQ ID NO: 199445 - DNA, 15 bp, Homo sapiens
ctccctggtcactat

SEQ ID NO: 199446 - DNA, 15 bp, Homo sapiens
actccctggtcacta

SEQ ID NO: 199447 - DNA, 15 bp, Homo sapiens
gactccctggtcact

SEQ ID NO: 199448 - DNA, 15 bp, Homo sapiens
ggactccctggtcac

SEQ ID NO: 199449 - DNA, 15 bp, Homo sapiens
gggactccctggtca

SEQ ID NO: 199450 - DNA, 15 bp, Homo sapiens
cgggactccctggtc

SEQ ID NO: 199451 - DNA, 15 bp, Homo sapiens
ccgggactccctggt

SEQ ID NO: 199452 - DNA, 15 bp, Homo sapiens
accgggactccctgg

SEQ ID NO: 199453 - DNA, 15 bp, Homo sapiens
caccgggactccctg

SEQ ID NO: 199454 - DNA, 15 bp, Homo sapiens
gcaccgggactccct

SEQ ID NO: 199455 - DNA, 15 bp, Homo sapiens
ggcaccgggactccc

SEQ ID NO: 199456 - DNA, 15 bp, Homo sapiens
aggcaccgggactcc

SEQ ID NO: 199457 - DNA, 15 bp, Homo sapiens
caggcaccgggactc

SEQ ID NO: 199458 - DNA, 15 bp, Homo sapiens
tcaggcaccgggact

SEQ ID NO: 199459 - DNA, 15 bp, Homo sapiens
atcaggcaccgggac

SEQ ID NO: 199460 - DNA, 15 bp, Homo sapiens
tatcaggcaccggga

SEQ ID NO: 199461 - DNA, 15 bp, Homo sapiens
gtatcaggcaccggg

SEQ ID NO: 199462 - DNA, 15 bp, Homo sapiens
agtatcaggcaccgg

SEQ ID NO: 199463 - DNA, 15 bp, Homo sapiens
aagtatcaggcaccg

SEQ ID NO: 199464 - DNA, 15 bp, Homo sapiens
caagtatcaggcacc

SEQ ID NO: 199465 - DNA, 15 bp, Homo sapiens
ccaagtatcaggcac

SEQ ID NO: 199466 - DNA, 15 bp, Homo sapiens
gccaagtatcaggca

SEQ ID NO: 199467 - DNA, 15 bp, Homo sapiens
agccaagtatcaggc

SEQ ID NO: 199468 - DNA, 15 bp, Homo sapiens
gagccaagtatcagg

SEQ ID NO: 199469 - DNA, 15 bp, Homo sapiens
tgagccaagtatcag

SEQ ID NO: 199470 - DNA, 15 bp, Homo sapiens
gtgagccaagtatca

SEQ ID NO: 199471 - DNA, 15 bp, Homo sapiens
ggtgagccaagtatc

SEQ ID NO: 199472 - DNA, 15 bp, Homo sapiens
aggtgagccaagtat

SEQ ID NO: 199473 - DNA, 15 bp, Homo sapiens
gaggtgagccaagta

SEQ ID NO: 199474 - DNA, 15 bp, Homo sapiens
ggaggtgagccaagt

SEQ ID NO: 199475 - DNA, 15 bp, Homo sapiens
gggaggtgagccaag

SEQ ID NO: 199476 - DNA, 15 bp, Homo sapiens
agggaggtgagccaa

SEQ ID NO: 199477 - DNA, 15 bp, Homo sapiens
cagggaggtgagcca

SEQ ID NO: 199478 - DNA, 15 bp, Homo sapiens
acagggaggtgagcc

SEQ ID NO: 199479 - DNA, 15 bp, Homo sapiens
aacagggaggtgagc

SEQ ID NO: 199480 - DNA, 15 bp, Homo sapiens
gaacagggaggtgag

SEQ ID NO: 199481 - DNA, 15 bp, Homo sapiens
tgaacagggaggtga

SEQ ID NO: 199482 - DNA, 15 bp, Homo sapiens
ctgaacagggaggtg

SEQ ID NO: 199483 - DNA, 15 bp, Homo sapiens
gctgaacagggaggt

SEQ ID NO: 199484 - DNA, 15 bp, Homo sapiens
ggctgaacagggagg

SEQ ID NO: 199485 - DNA, 15 bp, Homo sapiens
gggctgaacagggag

SEQ ID NO: 199486 - DNA, 15 bp, Homo sapiens
agggctgaacaggga

SEQ ID NO: 199487 - DNA, 15 bp, Homo sapiens
tagggctgaacaggg

SEQ ID NO: 199488 - DNA, 15 bp, Homo sapiens
gtagggctgaacagg

SEQ ID NO: 199489 - DNA, 15 bp, Homo sapiens
agtagggctgaacag

SEQ ID NO: 199490 - DNA, 15 bp, Homo sapiens
cagtagggctgaaca

SEQ ID NO: 199491 - DNA, 15 bp, Homo sapiens
tcagtagggctgaac

SEQ ID NO: 199492 - DNA, 15 bp, Homo sapiens
atcagtagggctgaa

SEQ ID NO: 199493 - DNA, 15 bp, Homo sapiens
catcagtagggctga

SEQ ID NO: 199494 - DNA, 15 bp, Homo sapiens
acatcagtagggctg

SEQ ID NO: 199495 - DNA, 15 bp, Homo sapiens
tacatcagtagggct

SEQ ID NO: 199496 - DNA, 15 bp, Homo sapiens
ctacatcagtagggc

SEQ ID NO: 199497 - DNA, 15 bp, Homo sapiens
cctacatcagtaggg

SEQ ID NO: 199498 - DNA, 15 bp, Homo sapiens
gcctacatcagtagg

SEQ ID NO: 199499 - DNA, 15 bp, Homo sapiens
tgcctacatcagtag

SEQ ID NO: 199500 - DNA, 15 bp, Homo sapiens
ctgcctacatcagta

SEQ ID NO: 199501 - DNA, 15 bp, Homo sapiens
gctgcctacatcagt

SEQ ID NO: 199502 - DNA, 15 bp, Homo sapiens
agctgcctacatcag

SEQ ID NO: 199503 - DNA, 15 bp, Homo sapiens
gagctgcctacatca

SEQ ID NO: 199504 - DNA, 15 bp, Homo sapiens
agagctgcctacatc

SEQ ID NO: 199505 - DNA, 15 bp, Homo sapiens
cagagctgcctacat

SEQ ID NO: 199506 - DNA, 15 bp, Homo sapiens
tcagagctgcctaca

SEQ ID NO: 199507 - DNA, 15 bp, Homo sapiens
atcagagctgcctac

SEQ ID NO: 199508 - DNA, 15 bp, Homo sapiens
catcagagctgccta

SEQ ID NO: 199509 - DNA, 15 bp, Homo sapiens
acatcagagctgcct

SEQ ID NO: 199510 - DNA, 15 bp, Homo sapiens
cacatcagagctgcc

SEQ ID NO: 199511 - DNA, 15 bp, Homo sapiens
tcacatcagagctgc

SEQ ID NO: 199512 - DNA, 15 bp, Homo sapiens
ctcacatcagagctg

SEQ ID NO: 199513 - DNA, 15 bp, Homo sapiens
cctcacatcagagct

SEQ ID NO: 199514 - DNA, 15 bp, Homo sapiens
acctcacatcagagc

SEQ ID NO: 199515 - DNA, 15 bp, Homo sapiens
aacctcacatcagag

SEQ ID NO: 199516 - DNA, 15 bp, Homo sapiens
gaacctcacatcaga

SEQ ID NO: 199517 - DNA, 15 bp, Homo sapiens
agaacctcacatcag

SEQ ID NO: 199518 - DNA, 15 bp, Homo sapiens
aagaacctcacatca

SEQ ID NO: 199519 - DNA, 15 bp, Homo sapiens
gaagaacctcacatc

SEQ ID NO: 199520 - DNA, 15 bp, Homo sapiens
tgaagaacctcacat

SEQ ID NO: 199521 - DNA, 15 bp, Homo sapiens
ttgaagaacctcaca

SEQ ID NO: 199522 - DNA, 15 bp, Homo sapiens
cttgaagaacctcac

SEQ ID NO: 199523 - DNA, 15 bp, Homo sapiens
ccttgaagaacctca

SEQ ID NO: 199524 - DNA, 15 bp, Homo sapiens
cccttgaagaacctc

SEQ ID NO: 199525 - DNA, 15 bp, Homo sapiens
gcccttgaagaacct

SEQ ID NO: 199526 - DNA, 15 bp, Homo sapiens
ggcccttgaagaacc

SEQ ID NO: 199527 - DNA, 15 bp, Homo sapiens
aggcccttgaagaac

SEQ ID NO: 199528 - DNA, 15 bp, Homo sapiens
gaggcccttgaagaa

SEQ ID NO: 199529 - DNA, 15 bp, Homo sapiens
tgaggcccttgaaga

SEQ ID NO: 199530 - DNA, 15 bp, Homo sapiens
gtgaggcccttgaag

SEQ ID NO: 199531 - DNA, 15 bp, Homo sapiens
agtgaggcccttgaa

SEQ ID NO: 199532 - DNA, 15 bp, Homo sapiens
gagtgaggcccttga

SEQ ID NO: 199533 - DNA, 15 bp, Homo sapiens
ggagtgaggcccttg

SEQ ID NO: 199534 - DNA, 15 bp, Homo sapiens
aggagtgaggccctt

SEQ ID NO: 199535 - DNA, 15 bp, Homo sapiens
aaggagtgaggccct

SEQ ID NO: 199536 - DNA, 15 bp, Homo sapiens
caaggagtgaggccc

SEQ ID NO: 199537 - DNA, 15 bp, Homo sapiens
acaaggagtgaggcc

SEQ ID NO: 199538 - DNA, 15 bp, Homo sapiens
aacaaggagtgaggc

SEQ ID NO: 199539 - DNA, 15 bp, Homo sapiens
gctgaaagtgaccat

SEQ ID NO: 199540 - DNA, 15 bp, Homo sapiens
tgctgaaagtgacca

SEQ ID NO: 199541 - DNA, 15 bp, Homo sapiens
ctgctgaaagtgacc

SEQ ID NO: 199542 - DNA, 15 bp, Homo sapiens
tctgctgaaagtgac

SEQ ID NO: 199543 - DNA, 15 bp, Homo sapiens
ctctgctgaaagtga

SEQ ID NO: 199544 - DNA, 15 bp, Homo sapiens
cctctgctgaaagtg

SEQ ID NO: 199545 - DNA, 15 bp, Homo sapiens
tcctctgctgaaagt

SEQ ID NO: 199546 - DNA, 15 bp, Homo sapiens
ctcctctgctgaaag

SEQ ID NO: 199547 - DNA, 15 bp, Homo sapiens
cctcctctgctgaaa

SEQ ID NO: 199548 - DNA, 15 bp, Homo sapiens
acctcctctgctgaa

SEQ ID NO: 199549 - DNA, 15 bp, Homo sapiens
aacctcctctgctga

SEQ ID NO: 199550 - DNA, 15 bp, Homo sapiens
gaacctcctctgctg

SEQ ID NO: 199551 - DNA, 15 bp, Homo sapiens
tgaacctcctctgct

SEQ ID NO: 199552 - DNA, 15 bp, Homo sapiens
ctgaacctcctctgc

SEQ ID NO: 199553 - DNA, 15 bp, Homo sapiens
tctgaacctcctctg

SEQ ID NO: 199554 - DNA, 15 bp, Homo sapiens
ttctgaacctcctct

SEQ ID NO: 199555 - DNA, 15 bp, Homo sapiens
cttctgaacctcctc

SEQ ID NO: 199556 - DNA, 15 bp, Homo sapiens
tcttctgaacctcct

SEQ ID NO: 199557 - DNA, 15 bp, Homo sapiens
ttcttctgaacctcc

SEQ ID NO: 199558 - DNA, 15 bp, Homo sapiens
cttcttctgaacctc

SEQ ID NO: 199559 - DNA, 15 bp, Homo sapiens
ccttcttctgaacct

SEQ ID NO: 199560 - DNA, 15 bp, Homo sapiens
tccttcttctgaacc

SEQ ID NO: 199561 - DNA, 15 bp, Homo sapiens
ctccttcttctgaac

SEQ ID NO: 199562 - DNA, 15 bp, Homo sapiens
tctccttcttctgaa

SEQ ID NO: 199563 - DNA, 15 bp, Homo sapiens
ctctccttcttctga

SEQ ID NO: 199564 - DNA, 15 bp, Homo sapiens
tctctccttcttctg

SEQ ID NO: 199565 - DNA, 15 bp, Homo sapiens
ctctctccttcttct

SEQ ID NO: 199566 - DNA, 15 bp, Homo sapiens
actctctccttcttc

SEQ ID NO: 199567 - DNA, 15 bp, Homo sapiens
cactctctccttctt

SEQ ID NO: 199568 - DNA, 15 bp, Homo sapiens
tcactctctccttct

SEQ ID NO: 199569 - DNA, 15 bp, Homo sapiens
ctcactctctccttc

SEQ ID NO: 199570 - DNA, 15 bp, Homo sapiens
actcactctctcctt

SEQ ID NO: 199571 - DNA, 15 bp, Homo sapiens
gactcactctctcct

SEQ ID NO: 199572 - DNA, 15 bp, Homo sapiens
agactcactctctcc

SEQ ID NO: 199573 - DNA, 15 bp, Homo sapiens
aagactcactctctc

SEQ ID NO: 199574 - DNA, 15 bp, Homo sapiens
taagactcactctct

SEQ ID NO: 199575 - DNA, 15 bp, Homo sapiens
ctaagactcactctc

SEQ ID NO: 199576 - DNA, 15 bp, Homo sapiens
tctaagactcactct

SEQ ID NO: 199577 - DNA, 15 bp, Homo sapiens
ctctaagactcactc

SEQ ID NO: 199578 - DNA, 15 bp, Homo sapiens
actctaagactcact

SEQ ID NO: 199579 - DNA, 15 bp, Homo sapiens
tactctaagactcac

SEQ ID NO: 199580 - DNA, 15 bp, Homo sapiens
ttactctaagactca

SEQ ID NO: 199581 - DNA, 15 bp, Homo sapiens
tttactctaagactc

SEQ ID NO: 199582 - DNA, 15 bp, Homo sapiens
atttactctaagact

SEQ ID NO: 199583 - DNA, 15 bp, Homo sapiens
aatttactctaagac

SEQ ID NO: 199584 - DNA, 15 bp, Homo sapiens
caatttactctaaga

SEQ ID NO: 199585 - DNA, 15 bp, Homo sapiens
ccaatttactctaag

SEQ ID NO: 199586 - DNA, 15 bp, Homo sapiens
gccaatttactctaa

SEQ ID NO: 199587 - DNA, 15 bp, Homo sapiens
agccaatttactcta

SEQ ID NO: 199588 - DNA, 15 bp, Homo sapiens
aagccaatttactct

SEQ ID NO: 199589 - DNA, 15 bp, Homo sapiens
taagccaatttactc

SEQ ID NO: 199590 - DNA, 15 bp, Homo sapiens
ctaagccaatttact

SEQ ID NO: 199591 - DNA, 15 bp, Homo sapiens
tctaagccaatttac

SEQ ID NO: 199592 - DNA, 15 bp, Homo sapiens
ttctaagccaattta

SEQ ID NO: 199593 - DNA, 15 bp, Homo sapiens
gttctaagccaattt

SEQ ID NO: 199594 - DNA, 15 bp, Homo sapiens
tgttctaagccaatt

SEQ ID NO: 199595 - DNA, 15 bp, Homo sapiens
atgttctaagccaat

SEQ ID NO: 199596 - DNA, 15 bp, Homo sapiens
gatgttctaagccaa

SEQ ID NO: 199597 - DNA, 15 bp, Homo sapiens
ggatgttctaagcca

SEQ ID NO: 199598 - DNA, 15 bp, Homo sapiens
gggatgttctaagcc

SEQ ID NO: 199599 - DNA, 15 bp, Homo sapiens
agggatgttctaagc

SEQ ID NO: 199600 - DNA, 15 bp, Homo sapiens
aagggatgttctaag

SEQ ID NO: 199601 - DNA, 15 bp, Homo sapiens
taagggatgttctaa

SEQ ID NO: 199602 - DNA, 15 bp, Homo sapiens
ctaagggatgttcta

SEQ ID NO: 199603 - DNA, 15 bp, Homo sapiens
actaagggatgttct

SEQ ID NO: 199604 - DNA, 15 bp, Homo sapiens
aactaagggatgttc

SEQ ID NO: 199605 - DNA, 15 bp, Homo sapiens
caactaagggatgtt

SEQ ID NO: 199606 - DNA, 15 bp, Homo sapiens
tcaactaagggatgt

SEQ ID NO: 199607 - DNA, 15 bp, Homo sapiens
atcaactaagggatg

SEQ ID NO: 199608 - DNA, 15 bp, Homo sapiens
catcaactaagggat

SEQ ID NO: 199609 - DNA, 15 bp, Homo sapiens
acatcaactaaggga

SEQ ID NO: 199610 - DNA, 15 bp, Homo sapiens
aacatcaactaaggg

SEQ ID NO: 199611 - DNA, 15 bp, Homo sapiens
aaacatcaactaagg

SEQ ID NO: 199612 - DNA, 15 bp, Homo sapiens
taaacatcaactaag

SEQ ID NO: 199613 - DNA, 15 bp, Homo sapiens
ttaaacatcaactaa

SEQ ID NO: 199614 - DNA, 15 bp, Homo sapiens
attaaacatcaacta

SEQ ID NO: 199615 - DNA, 15 bp, Homo sapiens
cattaaacatcaact

SEQ ID NO: 199616 - DNA, 15 bp, Homo sapiens
gcattaaacatcaac

SEQ ID NO: 199617 - DNA, 15 bp, Homo sapiens
tgcattaaacatcaa

SEQ ID NO: 199618 - DNA, 15 bp, Homo sapiens
ctgcattaaacatca

SEQ ID NO: 199619 - DNA, 15 bp, Homo sapiens
tctgcattaaacatc

SEQ ID NO: 199620 - DNA, 15 bp, Homo sapiens
atctgcattaaacat

SEQ ID NO: 199621 - DNA, 15 bp, Homo sapiens
catctgcattaaaca

SEQ ID NO: 199622 - DNA, 15 bp, Homo sapiens
tcatctgcattaaac

SEQ ID NO: 199623 - DNA, 15 bp, Homo sapiens
atcatctgcattaaa

SEQ ID NO: 199624 - DNA, 15 bp, Homo sapiens
catcatctgcattaa

SEQ ID NO: 199625 - DNA, 15 bp, Homo sapiens
gcatcatctgcatta

SEQ ID NO: 199626 - DNA, 15 bp, Homo sapiens
agcatcatctgcatt

SEQ ID NO: 199627 - DNA, 15 bp, Homo sapiens
aagcatcatctgcat

SEQ ID NO: 199628 - DNA, 15 bp, Homo sapiens
taagcatcatctgca

SEQ ID NO: 199629 - DNA, 15 bp, Homo sapiens
ttaagcatcatctgc

SEQ ID NO: 199630 - DNA, 15 bp, Homo sapiens
cttaagcatcatctg

SEQ ID NO: 199631 - DNA, 15 bp, Homo sapiens
acttaagcatcatct

SEQ ID NO: 199632 - DNA, 15 bp, Homo sapiens
cacttaagcatcatc

SEQ ID NO: 199633 - DNA, 15 bp, Homo sapiens
acacttaagcatcat

SEQ ID NO: 199634 - DNA, 15 bp, Homo sapiens
aacacttaagcatca

SEQ ID NO: 199635 - DNA, 15 bp, Homo sapiens
aaacacttaagcatc

SEQ ID NO: 199636 - DNA, 15 bp, Homo sapiens
gaaacacttaagcat

SEQ ID NO: 199637 - DNA, 15 bp, Homo sapiens
agaaacacttaagca

SEQ ID NO: 199638 - DNA, 15 bp, Homo sapiens
cagaaacacttaagc

SEQ ID NO: 199639 - DNA, 15 bp, Homo sapiens
ccagaaacacttaag

SEQ ID NO: 199640 - DNA, 15 bp, Homo sapiens
tccagaaacacttaa

SEQ ID NO: 199641 - DNA, 15 bp, Homo sapiens
atccagaaacactta

SEQ ID NO: 199642 - DNA, 15 bp, Homo sapiens
catccagaaacactt

SEQ ID NO: 199643 - DNA, 15 bp, Homo sapiens
ccatccagaaacact

SEQ ID NO: 199644 - DNA, 15 bp, Homo sapiens
accatccagaaacac

SEQ ID NO: 199645 - DNA, 15 bp, Homo sapiens
caccatccagaaaca

SEQ ID NO: 199646 - DNA, 15 bp, Homo sapiens
acaccatccagaaac

SEQ ID NO: 199647 - DNA, 15 bp, Homo sapiens
cacaccatccagaaa

SEQ ID NO: 199648 - DNA, 15 bp, Homo sapiens
acacaccatccagaa

SEQ ID NO: 199649 - DNA, 15 bp, Homo sapiens
cacacaccatccaga

SEQ ID NO: 199650 - DNA, 15 bp, Homo sapiens
tcacacaccatccag

SEQ ID NO: 199651 - DNA, 15 bp, Homo sapiens
atcacacaccatcca

SEQ ID NO: 199652 - DNA, 15 bp, Homo sapiens
aatcacacaccatcc

SEQ ID NO: 199653 - DNA, 15 bp, Homo sapiens
aaatcacacaccatc

SEQ ID NO: 199654 - DNA, 15 bp, Homo sapiens
gaaatcacacaccat

SEQ ID NO: 199655 - DNA, 15 bp, Homo sapiens
agaaatcacacacca

SEQ ID NO: 199656 - DNA, 15 bp, Homo sapiens
aagaaatcacacacc

SEQ ID NO: 199657 - DNA, 15 bp, Homo sapiens
caagaaatcacacac

SEQ ID NO: 199658 - DNA, 15 bp, Homo sapiens
ccaagaaatcacaca

SEQ ID NO: 199659 - DNA, 15 bp, Homo sapiens
tccaagaaatcacac

SEQ ID NO: 199660 - DNA, 15 bp, Homo sapiens
ctccaagaaatcaca

SEQ ID NO: 199661 - DNA, 15 bp, Homo sapiens
gctccaagaaatcac

SEQ ID NO: 199662 - DNA, 15 bp, Homo sapiens
cgctccaagaaatca

SEQ ID NO: 199663 - DNA, 15 bp, Homo sapiens
tcgctccaagaaatc

SEQ ID NO: 199664 - DNA, 15 bp, Homo sapiens
atcgctccaagaaat

SEQ ID NO: 199665 - DNA, 15 bp, Homo sapiens
aatcgctccaagaaa

SEQ ID NO: 199666 - DNA, 15 bp, Homo sapiens
aaatcgctccaagaa

SEQ ID NO: 199667 - DNA, 15 bp, Homo sapiens
aaaatcgctccaaga

SEQ ID NO: 199668 - DNA, 15 bp, Homo sapiens
caaaatcgctccaag

SEQ ID NO: 199669 - DNA, 15 bp, Homo sapiens
acaaaatcgctccaa

SEQ ID NO: 199670 - DNA, 15 bp, Homo sapiens
cacaaaatcgctcca

SEQ ID NO: 199671 - DNA, 15 bp, Homo sapiens
gcacaaaatcgctcc

SEQ ID NO: 199672 - DNA, 15 bp, Homo sapiens
tgcacaaaatcgctc

SEQ ID NO: 199673 - DNA, 15 bp, Homo sapiens
atgcacaaaatcgct

SEQ ID NO: 199674 - DNA, 15 bp, Homo sapiens
gatgcacaaaatcgc

SEQ ID NO: 199675 - DNA, 15 bp, Homo sapiens
tgatgcacaaaatcg

SEQ ID NO: 199676 - DNA, 15 bp, Homo sapiens
ctgatgcacaaaatc

SEQ ID NO: 199677 - DNA, 15 bp, Homo sapiens
cctgatgcacaaaat

SEQ ID NO: 199678 - DNA, 15 bp, Homo sapiens
tcctgatgcacaaaa

SEQ ID NO: 199679 - DNA, 15 bp, Homo sapiens
ttcctgatgcacaaa

SEQ ID NO: 199680 - DNA, 15 bp, Homo sapiens
cttcctgatgcacaa

SEQ ID NO: 199681 - DNA, 15 bp, Homo sapiens
acttcctgatgcaca

SEQ ID NO: 199682 - DNA, 15 bp, Homo sapiens
cacttcctgatgcac

SEQ ID NO: 199683 - DNA, 15 bp, Homo sapiens
tcacttcctgatgca

SEQ ID NO: 199684 - DNA, 15 bp, Homo sapiens
ttcacttcctgatgc

SEQ ID NO: 199685 - DNA, 15 bp, Homo sapiens
gttcacttcctgatg

SEQ ID NO: 199686 - DNA, 15 bp, Homo sapiens
agttcacttcctgat

SEQ ID NO: 199687 - DNA, 15 bp, Homo sapiens
aagttcacttcctga

SEQ ID NO: 199688 - DNA, 15 bp, Homo sapiens
gaagttcacttcctg

SEQ ID NO: 199689 - DNA, 15 bp, Homo sapiens
ggaagttcacttcct

SEQ ID NO: 199690 - DNA, 15 bp, Homo sapiens
aggaagttcacttcc

SEQ ID NO: 199691 - DNA, 15 bp, Homo sapiens
caggaagttcacttc

SEQ ID NO: 199692 - DNA, 15 bp, Homo sapiens
gcaggaagttcactt

SEQ ID NO: 199693 - DNA, 15 bp, Homo sapiens
tgcaggaagttcact

SEQ ID NO: 199694 - DNA, 15 bp, Homo sapiens
ctgcaggaagttcac

SEQ ID NO: 199695 - DNA, 15 bp, Homo sapiens
gctgcaggaagttca

SEQ ID NO: 199696 - DNA, 15 bp, Homo sapiens
ggctgcaggaagttc

SEQ ID NO: 199697 - DNA, 15 bp, Homo sapiens
tggctgcaggaagtt

SEQ ID NO: 199698 - DNA, 15 bp, Homo sapiens
gtggctgcaggaagt

SEQ ID NO: 199699 - DNA, 15 bp, Homo sapiens
tgtggctgcaggaag

SEQ ID NO: 199700 - DNA, 15 bp, Homo sapiens
atgtggctgcaggaa

SEQ ID NO: 199701 - DNA, 15 bp, Homo sapiens
aatgtggctgcagga

SEQ ID NO: 199702 - DNA, 15 bp, Homo sapiens
aaatgtggctgcagg

SEQ ID NO: 199703 - DNA, 15 bp, Homo sapiens
aaaatgtggctgcag

SEQ ID NO: 199704 - DNA, 15 bp, Homo sapiens
caaaatgtggctgca

SEQ ID NO: 199705 - DNA, 15 bp, Homo sapiens
gcaaaatgtggctgc

SEQ ID NO: 199706 - DNA, 15 bp, Homo sapiens
tgcaaaatgtggctg

SEQ ID NO: 199707 - DNA, 15 bp, Homo sapiens
gtgcaaaatgtggct

SEQ ID NO: 199708 - DNA, 15 bp, Homo sapiens
tgtgcaaaatgtggc

SEQ ID NO: 199709 - DNA, 15 bp, Homo sapiens
atgtgcaaaatgtgg

SEQ ID NO: 199710 - DNA, 15 bp, Homo sapiens
gatgtgcaaaatgtg

SEQ ID NO: 199711 - DNA, 15 bp, Homo sapiens
agatgtgcaaaatgt

SEQ ID NO: 199712 - DNA, 15 bp, Homo sapiens
aagatgtgcaaaatg

SEQ ID NO: 199713 - DNA, 15 bp, Homo sapiens
caagatgtgcaaaat

SEQ ID NO: 199714 - DNA, 15 bp, Homo sapiens
acaagatgtgcaaaa

SEQ ID NO: 199715 - DNA, 15 bp, Homo sapiens
aacaagatgtgcaaa

SEQ ID NO: 199716 - DNA, 15 bp, Homo sapiens
gaacaagatgtgcaa

SEQ ID NO: 199717 - DNA, 15 bp, Homo sapiens
ggaacaagatgtgca

SEQ ID NO: 199718 - DNA, 15 bp, Homo sapiens
tggaacaagatgtgc

SEQ ID NO: 199719 - DNA, 15 bp, Homo sapiens
atggaacaagatgtg

SEQ ID NO: 199720 - DNA, 15 bp, Homo sapiens
aatggaacaagatgt

SEQ ID NO: 199721 - DNA, 15 bp, Homo sapiens
taatggaacaagatg

SEQ ID NO: 199722 - DNA, 15 bp, Homo sapiens
gtaatggaacaagat

SEQ ID NO: 199723 - DNA, 15 bp, Homo sapiens
agtaatggaacaaga

SEQ ID NO: 199724 - DNA, 15 bp, Homo sapiens
aagtaatggaacaag

SEQ ID NO: 199725 - DNA, 15 bp, Homo sapiens
caagtaatggaacaa

SEQ ID NO: 199726 - DNA, 15 bp, Homo sapiens
acaagtaatggaaca

SEQ ID NO: 199727 - DNA, 15 bp, Homo sapiens
gacaagtaatggaac

SEQ ID NO: 199728 - DNA, 15 bp, Homo sapiens
agacaagtaatggaa

SEQ ID NO: 199729 - DNA, 15 bp, Homo sapiens
tagacaagtaatgga

SEQ ID NO: 199730 - DNA, 15 bp, Homo sapiens
ttagacaagtaatgg

SEQ ID NO: 199731 - DNA, 15 bp, Homo sapiens
gttagacaagtaatg

SEQ ID NO: 199732 - DNA, 15 bp, Homo sapiens
tgttagacaagtaat

SEQ ID NO: 199733 - DNA, 15 bp, Homo sapiens
ctgttagacaagtaa

SEQ ID NO: 199734 - DNA, 15 bp, Homo sapiens
cctgttagacaagta

SEQ ID NO: 199735 - DNA, 15 bp, Homo sapiens
tcctgttagacaagt

SEQ ID NO: 199736 - DNA, 15 bp, Homo sapiens
atcctgttagacaag

SEQ ID NO: 199737 - DNA, 15 bp, Homo sapiens
catcctgttagacaa

SEQ ID NO: 199738 - DNA, 15 bp, Homo sapiens
gcatcctgttagaca

SEQ ID NO: 199739 - DNA, 15 bp, Homo sapiens
agcatcctgttagac

SEQ ID NO: 199740 - DNA, 15 bp, Homo sapiens
gagcatcctgttaga

SEQ ID NO: 199741 - DNA, 15 bp, Homo sapiens
tgagcatcctgttag

SEQ ID NO: 199742 - DNA, 15 bp, Homo sapiens
gtgagcatcctgtta

SEQ ID NO: 199743 - DNA, 15 bp, Homo sapiens
tgtgagcatcctgtt

SEQ ID NO: 199744 - DNA, 15 bp, Homo sapiens
atgtgagcatcctgt

SEQ ID NO: 199745 - DNA, 15 bp, Homo sapiens
aatgtgagcatcctg

SEQ ID NO: 199746 - DNA, 15 bp, Homo sapiens
taatgtgagcatcct

SEQ ID NO: 199747 - DNA, 15 bp, Homo sapiens
ctaatgtgagcatcc

SEQ ID NO: 199748 - DNA, 15 bp, Homo sapiens
gctaatgtgagcatc

SEQ ID NO: 199749 - DNA, 15 bp, Homo sapiens
agctaatgtgagcat

SEQ ID NO: 199750 - DNA, 15 bp, Homo sapiens
aagctaatgtgagca

SEQ ID NO: 199751 - DNA, 15 bp, Homo sapiens
caagctaatgtgagc

SEQ ID NO: 199752 - DNA, 15 bp, Homo sapiens
acaagctaatgtgag

SEQ ID NO: 199753 - DNA, 15 bp, Homo sapiens
cacaagctaatgtga

SEQ ID NO: 199754 - DNA, 15 bp, Homo sapiens
ccacaagctaatgtg

SEQ ID NO: 199755 - DNA, 15 bp, Homo sapiens
cccacaagctaatgt

SEQ ID NO: 199756 - DNA, 15 bp, Homo sapiens
acccacaagctaatg

SEQ ID NO: 199757 - DNA, 15 bp, Homo sapiens
cacccacaagctaat

SEQ ID NO: 199758 - DNA, 15 bp, Homo sapiens
tcacccacaagctaa

SEQ ID NO: 199759 - DNA, 15 bp, Homo sapiens
gtcacccacaagcta

SEQ ID NO: 199760 - DNA, 15 bp, Homo sapiens
tgtcacccacaagct

SEQ ID NO: 199761 - DNA, 15 bp, Homo sapiens
ttgtcacccacaagc

SEQ ID NO: 199762 - DNA, 15 bp, Homo sapiens
cttgtcacccacaag

SEQ ID NO: 199763 - DNA, 15 bp, Homo sapiens
tcttgtcacccacaa

SEQ ID NO: 199764 - DNA, 15 bp, Homo sapiens
ctcttgtcacccaca

SEQ ID NO: 199765 - DNA, 15 bp, Homo sapiens
cctcttgtcacccac

SEQ ID NO: 199766 - DNA, 15 bp, Homo sapiens
gcctcttgtcaccca

SEQ ID NO: 199767 - DNA, 15 bp, Homo sapiens
tgcctcttgtcaccc

SEQ ID NO: 199768 - DNA, 15 bp, Homo sapiens
ctgcctcttgtcacc

SEQ ID NO: 199769 - DNA, 15 bp, Homo sapiens
cctgcctcttgtcac

SEQ ID NO: 199770 - DNA, 15 bp, Homo sapiens
gcctgcctcttgtca

SEQ ID NO: 199771 - DNA, 15 bp, Homo sapiens
agcctgcctcttgtc

SEQ ID NO: 199772 - DNA, 15 bp, Homo sapiens
tagcctgcctcttgt

SEQ ID NO: 199773 - DNA, 15 bp, Homo sapiens
ctagcctgcctcttg

SEQ ID NO: 199774 - DNA, 15 bp, Homo sapiens
tctagcctgcctctt

SEQ ID NO: 199775 - DNA, 15 bp, Homo sapiens
gtctagcctgcctct

SEQ ID NO: 199776 - DNA, 15 bp, Homo sapiens
tgtctagcctgcctc

SEQ ID NO: 199777 - DNA, 15 bp, Homo sapiens
ctgtctagcctgcct

SEQ ID NO: 199778 - DNA, 15 bp, Homo sapiens
tctgtctagcctgcc

SEQ ID NO: 199779 - DNA, 15 bp, Homo sapiens
ctctgtctagcctgc

SEQ ID NO: 199780 - DNA, 15 bp, Homo sapiens
gctctgtctagcctg

SEQ ID NO: 199781 - DNA, 15 bp, Homo sapiens
tgctctgtctagcct

SEQ ID NO: 199782 - DNA, 15 bp, Homo sapiens
ctgctctgtctagcc

SEQ ID NO: 199783 - DNA, 15 bp, Homo sapiens
tctgctctgtctagc

SEQ ID NO: 199784 - DNA, 15 bp, Homo sapiens
ctctgctctgtctag

SEQ ID NO: 199785 - DNA, 15 bp, Homo sapiens
cctctgctctgtcta

SEQ ID NO: 199786 - DNA, 15 bp, Homo sapiens
acctctgctctgtct

SEQ ID NO: 199787 - DNA, 15 bp, Homo sapiens
aacctctgctctgtc

SEQ ID NO: 199788 - DNA, 15 bp, Homo sapiens
gaacctctgctctgt

SEQ ID NO: 199789 - DNA, 15 bp, Homo sapiens
agaacctctgctctg

SEQ ID NO: 199790 - DNA, 15 bp, Homo sapiens
gagaacctctgctct

SEQ ID NO: 199791 - DNA, 15 bp, Homo sapiens
tgagaacctctgctc

SEQ ID NO: 199792 - DNA, 15 bp, Homo sapiens
ttgagaacctctgct

SEQ ID NO: 199793 - DNA, 15 bp, Homo sapiens
tttgagaacctctgc

SEQ ID NO: 199794 - DNA, 15 bp, Homo sapiens
ctttgagaacctctg

SEQ ID NO: 199795 - DNA, 15 bp, Homo sapiens
actttgagaacctct

SEQ ID NO: 199796 - DNA, 15 bp, Homo sapiens
cactttgagaacctc

SEQ ID NO: 199797 - DNA, 15 bp, Homo sapiens
ccactttgagaacct

SEQ ID NO: 199798 - DNA, 15 bp, Homo sapiens
tccactttgagaacc

SEQ ID NO: 199799 - DNA, 15 bp, Homo sapiens
ctccactttgagaac

SEQ ID NO: 199800 - DNA, 15 bp, Homo sapiens
actccactttgagaa

SEQ ID NO: 199801 - DNA, 15 bp, Homo sapiens
aactccactttgaga

SEQ ID NO: 199802 - DNA, 15 bp, Homo sapiens
aaactccactttgag

SEQ ID NO: 199803 - DNA, 15 bp, Homo sapiens
aaaactccactttga

SEQ ID NO: 199804 - DNA, 15 bp, Homo sapiens
gaaaactccactttg

SEQ ID NO: 199805 - DNA, 15 bp, Homo sapiens
tgaaaactccacttt

SEQ ID NO: 199806 - DNA, 15 bp, Homo sapiens
atgaaaactccactt

SEQ ID NO: 199807 - DNA, 15 bp, Homo sapiens
tatgaaaactccact

SEQ ID NO: 199808 - DNA, 15 bp, Homo sapiens
atatgaaaactccac

SEQ ID NO: 199809 - DNA, 15 bp, Homo sapiens
gatatgaaaactcca

SEQ ID NO: 199810 - DNA, 15 bp, Homo sapiens
tgatatgaaaactcc

SEQ ID NO: 199811 - DNA, 15 bp, Homo sapiens
ctgatatgaaaactc

SEQ ID NO: 199812 - DNA, 15 bp, Homo sapiens
gctgatatgaaaact

SEQ ID NO: 199813 - DNA, 15 bp, Homo sapiens
tgctgatatgaaaac

SEQ ID NO: 199814 - DNA, 15 bp, Homo sapiens
ctgctgatatgaaaa

SEQ ID NO: 199815 - DNA, 15 bp, Homo sapiens
actgctgatatgaaa

SEQ ID NO: 199816 - DNA, 15 bp, Homo sapiens
tactgctgatatgaa

SEQ ID NO: 199817 - DNA, 15 bp, Homo sapiens
ttactgctgatatga

SEQ ID NO: 199818 - DNA, 15 bp, Homo sapiens
cttactgctgatatg

SEQ ID NO: 199819 - DNA, 15 bp, Homo sapiens
tcttactgctgatat

SEQ ID NO: 199820 - DNA, 15 bp, Homo sapiens
ctcttactgctgata

SEQ ID NO: 199821 - DNA, 15 bp, Homo sapiens
gctcttactgctgat

SEQ ID NO: 199822 - DNA, 15 bp, Homo sapiens
ggctcttactgctga

SEQ ID NO: 199823 - DNA, 15 bp, Homo sapiens
aggctcttactgctg

SEQ ID NO: 199824 - DNA, 15 bp, Homo sapiens
gaggctcttactgct

SEQ ID NO: 199825 - DNA, 15 bp, Homo sapiens
tgaggctcttactgc

SEQ ID NO: 199826 - DNA, 15 bp, Homo sapiens
gtgaggctcttactg

SEQ ID NO: 199827 - DNA, 15 bp, Homo sapiens
agtgaggctcttact

SEQ ID NO: 199828 - DNA, 15 bp, Homo sapiens
aagtgaggctcttac

SEQ ID NO: 199829 - DNA, 15 bp, Homo sapiens
caagtgaggctctta

SEQ ID NO: 199830 - DNA, 15 bp, Homo sapiens
ccaagtgaggctctt

SEQ ID NO: 199831 - DNA, 15 bp, Homo sapiens
cccaagtgaggctct

SEQ ID NO: 199832 - DNA, 15 bp, Homo sapiens
tcccaagtgaggctc

SEQ ID NO: 199833 - DNA, 15 bp, Homo sapiens
ttcccaagtgaggct

SEQ ID NO: 199834 - DNA, 15 bp, Homo sapiens
cttcccaagtgaggc

SEQ ID NO: 199835 - DNA, 15 bp, Homo sapiens
acttcccaagtgagg

SEQ ID NO: 199836 - DNA, 15 bp, Homo sapiens
aacttcccaagtgag

SEQ ID NO: 199837 - DNA, 15 bp, Homo sapiens
caacttcccaagtga

SEQ ID NO: 199838 - DNA, 15 bp, Homo sapiens
acaacttcccaagtg

SEQ ID NO: 199839 - DNA, 15 bp, Homo sapiens
aacaacttcccaagt

SEQ ID NO: 199840 - DNA, 15 bp, Homo sapiens
caacaacttcccaag

SEQ ID NO: 199841 - DNA, 15 bp, Homo sapiens
ccaacaacttcccaa

SEQ ID NO: 199842 - DNA, 15 bp, Homo sapiens
gccaacaacttccca

SEQ ID NO: 199843 - DNA, 15 bp, Homo sapiens
cgccaacaacttccc

SEQ ID NO: 199844 - DNA, 15 bp, Homo sapiens
tcgccaacaacttcc

SEQ ID NO: 199845 - DNA, 15 bp, Homo sapiens
atcgccaacaacttc

SEQ ID NO: 199846 - DNA, 15 bp, Homo sapiens
catcgccaacaactt

SEQ ID NO: 199847 - DNA, 15 bp, Homo sapiens
gcatcgccaacaact

SEQ ID NO: 199848 - DNA, 15 bp, Homo sapiens
tgcatcgccaacaac

SEQ ID NO: 199849 - DNA, 15 bp, Homo sapiens
ctgcatcgccaacaa

SEQ ID NO: 199850 - DNA, 15 bp, Homo sapiens
tctgcatcgccaaca

SEQ ID NO: 199851 - DNA, 15 bp, Homo sapiens
atctgcatcgccaac

SEQ ID NO: 199852 - DNA, 15 bp, Homo sapiens
aatctgcatcgccaa

SEQ ID NO: 199853 - DNA, 15 bp, Homo sapiens
gaatctgcatcgcca

SEQ ID NO: 199854 - DNA, 15 bp, Homo sapiens
agaatctgcatcgcc

SEQ ID NO: 199855 - DNA, 15 bp, Homo sapiens
aagaatctgcatcgc

SEQ ID NO: 199856 - DNA, 15 bp, Homo sapiens
taagaatctgcatcg

SEQ ID NO: 199857 - DNA, 15 bp, Homo sapiens
ctaagaatctgcatc

SEQ ID NO: 199858 - DNA, 15 bp, Homo sapiens
cctaagaatctgcat

SEQ ID NO: 199859 - DNA, 15 bp, Homo sapiens
gcctaagaatctgca

SEQ ID NO: 199860 - DNA, 15 bp, Homo sapiens
agcctaagaatctgc

SEQ ID NO: 199861 - DNA, 15 bp, Homo sapiens
aagcctaagaatctg

SEQ ID NO: 199862 - DNA, 15 bp, Homo sapiens
caagcctaagaatct

SEQ ID NO: 199863 - DNA, 15 bp, Homo sapiens
gcaagcctaagaatc

SEQ ID NO: 199864 - DNA, 15 bp, Homo sapiens
agcaagcctaagaat

SEQ ID NO: 199865 - DNA, 15 bp, Homo sapiens
aagcaagcctaagaa

SEQ ID NO: 199866 - DNA, 15 bp, Homo sapiens
aaagcaagcctaaga

SEQ ID NO: 199867 - DNA, 15 bp, Homo sapiens
gaaagcaagcctaag

SEQ ID NO: 199868 - DNA, 15 bp, Homo sapiens
tgaaagcaagcctaa

SEQ ID NO: 199869 - DNA, 15 bp, Homo sapiens
ctgaaagcaagccta

SEQ ID NO: 199870 - DNA, 15 bp, Homo sapiens
gctgaaagcaagcct

SEQ ID NO: 199871 - DNA, 15 bp, Homo sapiens
ggctgaaagcaagcc

SEQ ID NO: 199872 - DNA, 15 bp, Homo sapiens
gggctgaaagcaagc

SEQ ID NO: 199873 - DNA, 15 bp, Homo sapiens
ggggctgaaagcaag

SEQ ID NO: 199874 - DNA, 15 bp, Homo sapiens
tggggctgaaagcaa

SEQ ID NO: 199875 - DNA, 15 bp, Homo sapiens
gtggggctgaaagca

SEQ ID NO: 199876 - DNA, 15 bp, Homo sapiens
agtggggctgaaagc

SEQ ID NO: 199877 - DNA, 15 bp, Homo sapiens
cagtggggctgaaag

SEQ ID NO: 199878 - DNA, 15 bp, Homo sapiens
tcagtggggctgaaa

SEQ ID NO: 199879 - DNA, 15 bp, Homo sapiens
gtcagtggggctgaa

SEQ ID NO: 199880 - DNA, 15 bp, Homo sapiens
agtcagtggggctga

SEQ ID NO: 199881 - DNA, 15 bp, Homo sapiens
aagtcagtggggctg

SEQ ID NO: 199882 - DNA, 15 bp, Homo sapiens
taagtcagtggggct

SEQ ID NO: 199883 - DNA, 15 bp, Homo sapiens
ctaagtcagtggggc

SEQ ID NO: 199884 - DNA, 15 bp, Homo sapiens
gctaagtcagtgggg

SEQ ID NO: 199885 - DNA, 15 bp, Homo sapiens
cgctaagtcagtggg

SEQ ID NO: 199886 - DNA, 15 bp, Homo sapiens
tcgctaagtcagtgg

SEQ ID NO: 199887 - DNA, 15 bp, Homo sapiens
gtcgctaagtcagtg

SEQ ID NO: 199888 - DNA, 15 bp, Homo sapiens
agtcgctaagtcagt

SEQ ID NO: 199889 - DNA, 15 bp, Homo sapiens
gagtcgctaagtcag

SEQ ID NO: 199890 - DNA, 15 bp, Homo sapiens
agagtcgctaagtca

SEQ ID NO: 199891 - DNA, 15 bp, Homo sapiens
aagagtcgctaagtc

SEQ ID NO: 199892 - DNA, 15 bp, Homo sapiens
aaagagtcgctaagt

SEQ ID NO: 199893 - DNA, 15 bp, Homo sapiens
caaagagtcgctaag

SEQ ID NO: 199894 - DNA, 15 bp, Homo sapiens
ccaaagagtcgctaa

SEQ ID NO: 199895 - DNA, 15 bp, Homo sapiens
cccaaagagtcgcta

SEQ ID NO: 199896 - DNA, 15 bp, Homo sapiens
acccaaagagtcgct

SEQ ID NO: 199897 - DNA, 15 bp, Homo sapiens
cacccaaagagtcgc

SEQ ID NO: 199898 - DNA, 15 bp, Homo sapiens
ccacccaaagagtcg

SEQ ID NO: 199899 - DNA, 15 bp, Homo sapiens
cccacccaaagagtc

SEQ ID NO: 199900 - DNA, 15 bp, Homo sapiens
ccccacccaaagagt

SEQ ID NO: 199901 - DNA, 15 bp, Homo sapiens
gccccacccaaagag

SEQ ID NO: 199902 - DNA, 15 bp, Homo sapiens
ggccccacccaaaga

SEQ ID NO: 199903 - DNA, 15 bp, Homo sapiens
gggccccacccaaag

SEQ ID NO: 199904 - DNA, 15 bp, Homo sapiens
tgggccccacccaaa

SEQ ID NO: 199905 - DNA, 15 bp, Homo sapiens
ctgggccccacccaa

SEQ ID NO: 199906 - DNA, 15 bp, Homo sapiens
gctgggccccaccca

SEQ ID NO: 199907 - DNA, 15 bp, Homo sapiens
tgctgggccccaccc

SEQ ID NO: 199908 - DNA, 15 bp, Homo sapiens
atgctgggccccacc

SEQ ID NO: 199909 - DNA, 15 bp, Homo sapiens
catgctgggccccac

SEQ ID NO: 199910 - DNA, 15 bp, Homo sapiens
acatgctgggcccca

SEQ ID NO: 199911 - DNA, 15 bp, Homo sapiens
gacatgctgggcccc

SEQ ID NO: 199912 - DNA, 15 bp, Homo sapiens
agacatgctgggccc

SEQ ID NO: 199913 - DNA, 15 bp, Homo sapiens
aagacatgctgggcc

SEQ ID NO: 199914 - DNA, 15 bp, Homo sapiens
caagacatgctgggc

SEQ ID NO: 199915 - DNA, 15 bp, Homo sapiens
acaagacatgctggg

SEQ ID NO: 199916 - DNA, 15 bp, Homo sapiens
aacaagacatgctgg

SEQ ID NO: 199917 - DNA, 15 bp, Homo sapiens
aaacaagacatgctg

SEQ ID NO: 199918 - DNA, 15 bp, Homo sapiens
caaacaagacatgct

SEQ ID NO: 199919 - DNA, 15 bp, Homo sapiens
ccaaacaagacatgc

SEQ ID NO: 199920 - DNA, 15 bp, Homo sapiens
tccaaacaagacatg

SEQ ID NO: 199921 - DNA, 15 bp, Homo sapiens
gtccaaacaagacat

SEQ ID NO: 199922 - DNA, 15 bp, Homo sapiens
ggtccaaacaagaca

SEQ ID NO: 199923 - DNA, 15 bp, Homo sapiens
tggtccaaacaagac

SEQ ID NO: 199924 - DNA, 15 bp, Homo sapiens
atggtccaaacaaga

SEQ ID NO: 199925 - DNA, 15 bp, Homo sapiens
aatggtccaaacaag

SEQ ID NO: 199926 - DNA, 15 bp, Homo sapiens
aaatggtccaaacaa

SEQ ID NO: 199927 - DNA, 15 bp, Homo sapiens
caaatggtccaaaca

SEQ ID NO: 199928 - DNA, 15 bp, Homo sapiens
acaaatggtccaaac

SEQ ID NO: 199929 - DNA, 15 bp, Homo sapiens
gacaaatggtccaaa

SEQ ID NO: 199930 - DNA, 15 bp, Homo sapiens
ggacaaatggtccaa

SEQ ID NO: 199931 - DNA, 15 bp, Homo sapiens
tggacaaatggtcca

SEQ ID NO: 199932 - DNA, 15 bp, Homo sapiens
ctggacaaatggtcc

SEQ ID NO: 199933 - DNA, 15 bp, Homo sapiens
cctggacaaatggtc

SEQ ID NO: 199934 - DNA, 15 bp, Homo sapiens
acctggacaaatggt

SEQ ID NO: 199935 - DNA, 15 bp, Homo sapiens
cacctggacaaatgg

SEQ ID NO: 199936 - DNA, 15 bp, Homo sapiens
tcacctggacaaatg

SEQ ID NO: 199937 - DNA, 15 bp, Homo sapiens
atcacctggacaaat

SEQ ID NO: 199938 - DNA, 15 bp, Homo sapiens
catcacctggacaaa

SEQ ID NO: 199939 - DNA, 15 bp, Homo sapiens
gcatcacctggacaa

SEQ ID NO: 199940 - DNA, 15 bp, Homo sapiens
agcatcacctggaca

SEQ ID NO: 199941 - DNA, 15 bp, Homo sapiens
cagcatcacctggac

SEQ ID NO: 199942 - DNA, 15 bp, Homo sapiens
tcagcatcacctgga

SEQ ID NO: 199943 - DNA, 15 bp, Homo sapiens
atcagcatcacctgg

SEQ ID NO: 199944 - DNA, 15 bp, Homo sapiens
catcagcatcacctg

SEQ ID NO: 199945 - DNA, 15 bp, Homo sapiens
tcatcagcatcacct

SEQ ID NO: 199946 - DNA, 15 bp, Homo sapiens
atcatcagcatcacc

SEQ ID NO: 199947 - DNA, 15 bp, Homo sapiens
tatcatcagcatcac

SEQ ID NO: 199948 - DNA, 15 bp, Homo sapiens
ctatcatcagcatca

SEQ ID NO: 199949 - DNA, 15 bp, Homo sapiens
cctatcatcagcatc

SEQ ID NO: 199950 - DNA, 15 bp, Homo sapiens
gcctatcatcagcat

SEQ ID NO: 199951 - DNA, 15 bp, Homo sapiens
tgcctatcatcagca

SEQ ID NO: 199952 - DNA, 15 bp, Homo sapiens
ttgcctatcatcagc

SEQ ID NO: 199953 - DNA, 15 bp, Homo sapiens
cttgcctatcatcag

SEQ ID NO: 199954 - DNA, 15 bp, Homo sapiens
tcttgcctatcatca

SEQ ID NO: 199955 - DNA, 15 bp, Homo sapiens
atcttgcctatcatc

SEQ ID NO: 199956 - DNA, 15 bp, Homo sapiens
aatcttgcctatcat

SEQ ID NO: 199957 - DNA, 15 bp, Homo sapiens
caatcttgcctatca

SEQ ID NO: 199958 - DNA, 15 bp, Homo sapiens
tcaatcttgcctatc

SEQ ID NO: 199959 - DNA, 15 bp, Homo sapiens
ctcaatcttgcctat

SEQ ID NO: 199960 - DNA, 15 bp, Homo sapiens
tctcaatcttgccta

SEQ ID NO: 199961 - DNA, 15 bp, Homo sapiens
ttctcaatcttgcct

SEQ ID NO: 199962 - DNA, 15 bp, Homo sapiens
gttctcaatcttgcc

SEQ ID NO: 199963 - DNA, 15 bp, Homo sapiens
ggttctcaatcttgc

SEQ ID NO: 199964 - DNA, 15 bp, Homo sapiens
tggttctcaatcttg

SEQ ID NO: 199965 - DNA, 15 bp, Homo sapiens
atggttctcaatctt

SEQ ID NO: 199966 - DNA, 15 bp, Homo sapiens
catggttctcaatct

SEQ ID NO: 199967 - DNA, 15 bp, Homo sapiens
ccatggttctcaatc

SEQ ID NO: 199968 - DNA, 15 bp, Homo sapiens
tccatggttctcaat

SEQ ID NO: 199969 - DNA, 15 bp, Homo sapiens
ctccatggttctcaa

SEQ ID NO: 199970 - DNA, 15 bp, Homo sapiens
tctccatggttctca

SEQ ID NO: 199971 - DNA, 15 bp, Homo sapiens
atctccatggttctc

SEQ ID NO: 199972 - DNA, 15 bp, Homo sapiens
tatctccatggttct

SEQ ID NO: 199973 - DNA, 15 bp, Homo sapiens
gtatctccatggttc

SEQ ID NO: 199974 - DNA, 15 bp, Homo sapiens
tgtatctccatggtt

SEQ ID NO: 199975 - DNA, 15 bp, Homo sapiens
gtgtatctccatggt

SEQ ID NO: 199976 - DNA, 15 bp, Homo sapiens
tgtgtatctccatgg

SEQ ID NO: 199977 - DNA, 15 bp, Homo sapiens
ctgtgtatctccatg

SEQ ID NO: 199978 - DNA, 15 bp, Homo sapiens
cctgtgtatctccat

SEQ ID NO: 199979 - DNA, 15 bp, Homo sapiens
gcctgtgtatctcca

SEQ ID NO: 199980 - DNA, 15 bp, Homo sapiens
tgcctgtgtatctcc

SEQ ID NO: 199981 - DNA, 15 bp, Homo sapiens
ctgcctgtgtatctc

SEQ ID NO: 199982 - DNA, 15 bp, Homo sapiens
cctgcctgtgtatct

SEQ ID NO: 199983 - DNA, 15 bp, Homo sapiens
ccctgcctgtgtatc

SEQ ID NO: 199984 - DNA, 15 bp, Homo sapiens
cccctgcctgtgtat

SEQ ID NO: 199985 - DNA, 15 bp, Homo sapiens
gcccctgcctgtgta

SEQ ID NO: 199986 - DNA, 15 bp, Homo sapiens
tgcccctgcctgtgt

SEQ ID NO: 199987 - DNA, 15 bp, Homo sapiens
gtgcccctgcctgtg

SEQ ID NO: 199988 - DNA, 15 bp, Homo sapiens
tgtgcccctgcctgt

SEQ ID NO: 199989 - DNA, 15 bp, Homo sapiens
gtgtgcccctgcctg

SEQ ID NO: 199990 - DNA, 15 bp, Homo sapiens
tgtgtgcccctgcct

SEQ ID NO: 199991 - DNA, 15 bp, Homo sapiens
ctgtgtgcccctgcc

SEQ ID NO: 199992 - DNA, 15 bp, Homo sapiens
actgtgtgcccctgc

SEQ ID NO: 199993 - DNA, 15 bp, Homo sapiens
aactgtgtgcccctg

SEQ ID NO: 199994 - DNA, 15 bp, Homo sapiens
aaactgtgtgcccct

SEQ ID NO: 199995 - DNA, 15 bp, Homo sapiens
caaactgtgtgcccc

SEQ ID NO: 199996 - DNA, 15 bp, Homo sapiens
tcaaactgtgtgccc

SEQ ID NO: 199997 - DNA, 15 bp, Homo sapiens
ttcaaactgtgtgcc

SEQ ID NO: 199998 - DNA, 15 bp, Homo sapiens
attcaaactgtgtgc

SEQ ID NO: 199999 - DNA, 15 bp, Homo sapiens
gattcaaactgtgtg

SEQ ID NO: 200000 - DNA, 15 bp, Homo sapiens
ggattcaaactgtgt

SEQ ID NO: 200001 - DNA, 15 bp, Homo sapiens
aggattcaaactgtg

SEQ ID NO: 200002 - DNA, 15 bp, Homo sapiens
caggattcaaactgt

SEQ ID NO: 200003 - DNA, 15 bp, Homo sapiens
ccaggattcaaactg

SEQ ID NO: 200004 - DNA, 15 bp, Homo sapiens
accaggattcaaact

SEQ ID NO: 200005 - DNA, 15 bp, Homo sapiens
aaccaggattcaaac

SEQ ID NO: 200006 - DNA, 15 bp, Homo sapiens
gaaccaggattcaaa

SEQ ID NO: 200007 - DNA, 15 bp, Homo sapiens
agaaccaggattcaa

SEQ ID NO: 200008 - DNA, 15 bp, Homo sapiens
cagaaccaggattca

SEQ ID NO: 200009 - DNA, 15 bp, Homo sapiens
gcagaaccaggattc

SEQ ID NO: 200010 - DNA, 15 bp, Homo sapiens
agcagaaccaggatt

SEQ ID NO: 200011 - DNA, 15 bp, Homo sapiens
gagcagaaccaggat

SEQ ID NO: 200012 - DNA, 15 bp, Homo sapiens
ggagcagaaccagga

SEQ ID NO: 200013 - DNA, 15 bp, Homo sapiens
aggagcagaaccagg

SEQ ID NO: 200014 - DNA, 15 bp, Homo sapiens
caggagcagaaccag

SEQ ID NO: 200015 - DNA, 15 bp, Homo sapiens
gcaggagcagaacca

SEQ ID NO: 200016 - DNA, 15 bp, Homo sapiens
agcaggagcagaacc

SEQ ID NO: 200017 - DNA, 15 bp, Homo sapiens
cagcaggagcagaac

SEQ ID NO: 200018 - DNA, 15 bp, Homo sapiens
gcagcaggagcagaa

SEQ ID NO: 200019 - DNA, 15 bp, Homo sapiens
agcagcaggagcaga

SEQ ID NO: 200020 - DNA, 15 bp, Homo sapiens
aagcagcaggagcag

SEQ ID NO: 200021 - DNA, 15 bp, Homo sapiens
gaagcagcaggagca

SEQ ID NO: 200022 - DNA, 15 bp, Homo sapiens
agaagcagcaggagc

SEQ ID NO: 200023 - DNA, 15 bp, Homo sapiens
cagaagcagcaggag

SEQ ID NO: 200024 - DNA, 15 bp, Homo sapiens
acagaagcagcagga

SEQ ID NO: 200025 - DNA, 15 bp, Homo sapiens
cacagaagcagcagg

SEQ ID NO: 200026 - DNA, 15 bp, Homo sapiens
ccacagaagcagcag

SEQ ID NO: 200027 - DNA, 15 bp, Homo sapiens
gccacagaagcagca

SEQ ID NO: 200028 - DNA, 15 bp, Homo sapiens
ggccacagaagcagc

SEQ ID NO: 200029 - DNA, 15 bp, Homo sapiens
aggccacagaagcag

SEQ ID NO: 200030 - DNA, 15 bp, Homo sapiens
caggccacagaagca

SEQ ID NO: 200031 - DNA, 15 bp, Homo sapiens
ccaggccacagaagc

SEQ ID NO: 200032 - DNA, 15 bp, Homo sapiens
cccaggccacagaag

SEQ ID NO: 200033 - DNA, 15 bp, Homo sapiens
tcccaggccacagaa

SEQ ID NO: 200034 - DNA, 15 bp, Homo sapiens
gtcccaggccacaga

SEQ ID NO: 200035 - DNA, 15 bp, Homo sapiens
tgtcccaggccacag

SEQ ID NO: 200036 - DNA, 15 bp, Homo sapiens
ttgtcccaggccaca

SEQ ID NO: 200037 - DNA, 15 bp, Homo sapiens
cttgtcccaggccac

SEQ ID NO: 200038 - DNA, 15 bp, Homo sapiens
acttgtcccaggcca

SEQ ID NO: 200039 - DNA, 15 bp, Homo sapiens
gtcacttgtcccagg

SEQ ID NO: 200040 - DNA, 15 bp, Homo sapiens
agtcacttgtcccag

SEQ ID NO: 200041 - DNA, 15 bp, Homo sapiens
cagtcacttgtccca

SEQ ID NO: 200042 - DNA, 15 bp, Homo sapiens
tcagtcacttgtccc

SEQ ID NO: 200043 - DNA, 15 bp, Homo sapiens
atcagtcacttgtcc

SEQ ID NO: 200044 - DNA, 15 bp, Homo sapiens
catcagtcacttgtc

SEQ ID NO: 200045 - DNA, 15 bp, Homo sapiens
ccatcagtcacttgt

SEQ ID NO: 200046 - DNA, 15 bp, Homo sapiens
gccatcagtcacttg

SEQ ID NO: 200047 - DNA, 15 bp, Homo sapiens
ggccatcagtcactt

SEQ ID NO: 200048 - DNA, 15 bp, Homo sapiens
gggccatcagtcact

SEQ ID NO: 200049 - DNA, 15 bp, Homo sapiens
tgggccatcagtcac

SEQ ID NO: 200050 - DNA, 15 bp, Homo sapiens
ctgggccatcagtca

SEQ ID NO: 200051 - DNA, 15 bp, Homo sapiens
tctgggccatcagtc

SEQ ID NO: 200052 - DNA, 15 bp, Homo sapiens
ctctgggccatcagt

SEQ ID NO: 200053 - DNA, 15 bp, Homo sapiens
gctctgggccatcag

SEQ ID NO: 200054 - DNA, 15 bp, Homo sapiens
ggctctgggccatca

SEQ ID NO: 200055 - DNA, 15 bp, Homo sapiens
aggctctgggccatc

SEQ ID NO: 200056 - DNA, 15 bp, Homo sapiens
aaggctctgggccat

SEQ ID NO: 200057 - DNA, 15 bp, Homo sapiens
caaggctctgggcca

SEQ ID NO: 200058 - DNA, 15 bp, Homo sapiens
tcaaggctctgggcc

SEQ ID NO: 200059 - DNA, 15 bp, Homo sapiens
atcaaggctctgggc

SEQ ID NO: 200060 - DNA, 15 bp, Homo sapiens
aatcaaggctctggg

SEQ ID NO: 200061 - DNA, 15 bp, Homo sapiens
aaatcaaggctctgg

SEQ ID NO: 200062 - DNA, 15 bp, Homo sapiens
gaaatcaaggctctg

SEQ ID NO: 200063 - DNA, 15 bp, Homo sapiens
ggaaatcaaggctct

SEQ ID NO: 200064 - DNA, 15 bp, Homo sapiens
gggaaatcaaggctc

SEQ ID NO: 200065 - DNA, 15 bp, Homo sapiens
ggggaaatcaaggct

SEQ ID NO: 200066 - DNA, 15 bp, Homo sapiens
tggggaaatcaaggc

SEQ ID NO: 200067 - DNA, 15 bp, Homo sapiens
atggggaaatcaagg

SEQ ID NO: 200068 - DNA, 15 bp, Homo sapiens
gatggggaaatcaag

SEQ ID NO: 200069 - DNA, 15 bp, Homo sapiens
agatggggaaatcaa

SEQ ID NO: 200070 - DNA, 15 bp, Homo sapiens
cagatggggaaatca

SEQ ID NO: 200071 - DNA, 15 bp, Homo sapiens
tcagatggggaaatc

SEQ ID NO: 200072 - DNA, 15 bp, Homo sapiens
gtcagatggggaaat

SEQ ID NO: 200073 - DNA, 15 bp, Homo sapiens
tgtcagatggggaaa

SEQ ID NO: 200074 - DNA, 15 bp, Homo sapiens
ttgtcagatggggaa

SEQ ID NO: 200075 - DNA, 15 bp, Homo sapiens
tttgtcagatgggga

SEQ ID NO: 200076 - DNA, 15 bp, Homo sapiens
atttgtcagatgggg

SEQ ID NO: 200077 - DNA, 15 bp, Homo sapiens
catttgtcagatggg

SEQ ID NO: 200078 - DNA, 15 bp, Homo sapiens
tcatttgtcagatgg

SEQ ID NO: 200079 - DNA, 15 bp, Homo sapiens
ctcatttgtcagatg

SEQ ID NO: 200080 - DNA, 15 bp, Homo sapiens
tctcatttgtcagat

SEQ ID NO: 200081 - DNA, 15 bp, Homo sapiens
ctctcatttgtcaga

SEQ ID NO: 200082 - DNA, 15 bp, Homo sapiens
actctcatttgtcag

SEQ ID NO: 200083 - DNA, 15 bp, Homo sapiens
cactctcatttgtca

SEQ ID NO: 200084 - DNA, 15 bp, Homo sapiens
tcactctcatttgtc

SEQ ID NO: 200085 - DNA, 15 bp, Homo sapiens
atcactctcatttgt

SEQ ID NO: 200086 - DNA, 15 bp, Homo sapiens
tatcactctcatttg

SEQ ID NO: 200087 - DNA, 15 bp, Homo sapiens
ttatcactctcattt

SEQ ID NO: 200088 - DNA, 15 bp, Homo sapiens
gttatcactctcatt

SEQ ID NO: 200089 - DNA, 15 bp, Homo sapiens
tgttatcactctcat

SEQ ID NO: 200090 - DNA, 15 bp, Homo sapiens
gtgttatcactctca

SEQ ID NO: 200091 - DNA, 15 bp, Homo sapiens
ggtgttatcactctc

SEQ ID NO: 200092 - DNA, 15 bp, Homo sapiens
aggtgttatcactct

SEQ ID NO: 200093 - DNA, 15 bp, Homo sapiens
gaggtgttatcactc

SEQ ID NO: 200094 - DNA, 15 bp, Homo sapiens
agaggtgttatcact

SEQ ID NO: 200095 - DNA, 15 bp, Homo sapiens
gagaggtgttatcac

SEQ ID NO: 200096 - DNA, 15 bp, Homo sapiens
agagaggtgttatca

SEQ ID NO: 200097 - DNA, 15 bp, Homo sapiens
gagagaggtgttatc

SEQ ID NO: 200098 - DNA, 15 bp, Homo sapiens
ggagagaggtgttat

SEQ ID NO: 200099 - DNA, 15 bp, Homo sapiens
aggagagaggtgtta

SEQ ID NO: 200100 - DNA, 15 bp, Homo sapiens
caggagagaggtgtt

SEQ ID NO: 200101 - DNA, 15 bp, Homo sapiens
ccaggagagaggtgt

SEQ ID NO: 200102 - DNA, 15 bp, Homo sapiens
gccaggagagaggtg

SEQ ID NO: 200103 - DNA, 15 bp, Homo sapiens
tgccaggagagaggt

SEQ ID NO: 200104 - DNA, 15 bp, Homo sapiens
atgccaggagagagg

SEQ ID NO: 200105 - DNA, 15 bp, Homo sapiens
aatgccaggagagag

SEQ ID NO: 200106 - DNA, 15 bp, Homo sapiens
taatgccaggagaga

SEQ ID NO: 200107 - DNA, 15 bp, Homo sapiens
ctaatgccaggagag

SEQ ID NO: 200108 - DNA, 15 bp, Homo sapiens
actaatgccaggaga

SEQ ID NO: 200109 - DNA, 15 bp, Homo sapiens
tactaatgccaggag

SEQ ID NO: 200110 - DNA, 15 bp, Homo sapiens
atactaatgccagga

SEQ ID NO: 200111 - DNA, 15 bp, Homo sapiens
catactaatgccagg

SEQ ID NO: 200112 - DNA, 15 bp, Homo sapiens
tcatactaatgccag

SEQ ID NO: 200113 - DNA, 15 bp, Homo sapiens
ctcatactaatgcca

SEQ ID NO: 200114 - DNA, 15 bp, Homo sapiens
cctcatactaatgcc

SEQ ID NO: 200115 - DNA, 15 bp, Homo sapiens
tcctcatactaatgc

SEQ ID NO: 200116 - DNA, 15 bp, Homo sapiens
atcctcatactaatg

SEQ ID NO: 200117 - DNA, 15 bp, Homo sapiens
aatcctcatactaat

SEQ ID NO: 200118 - DNA, 15 bp, Homo sapiens
taatcctcatactaa

SEQ ID NO: 200119 - DNA, 15 bp, Homo sapiens
ttaatcctcatacta

SEQ ID NO: 200120 - DNA, 15 bp, Homo sapiens
tttaatcctcatact

SEQ ID NO: 200121 - DNA, 15 bp, Homo sapiens
ttttaatcctcatac

SEQ ID NO: 200122 - DNA, 15 bp, Homo sapiens
attttaatcctcata

SEQ ID NO: 200123 - DNA, 15 bp, Homo sapiens
tattttaatcctcat

SEQ ID NO: 200124 - DNA, 15 bp, Homo sapiens
ctattttaatcctca

SEQ ID NO: 200125 - DNA, 15 bp, Homo sapiens
cctattttaatcctc

SEQ ID NO: 200126 - DNA, 15 bp, Homo sapiens
tcctattttaatcct

SEQ ID NO: 200127 - DNA, 15 bp, Homo sapiens
ctcctattttaatcc

SEQ ID NO: 200128 - DNA, 15 bp, Homo sapiens
tctcctattttaatc

SEQ ID NO: 200129 - DNA, 15 bp, Homo sapiens
gtctcctattttaat

SEQ ID NO: 200130 - DNA, 15 bp, Homo sapiens
tgtctcctattttaa

SEQ ID NO: 200131 - DNA, 15 bp, Homo sapiens
ttgtctcctatttta

SEQ ID NO: 200132 - DNA, 15 bp, Homo sapiens
gttgtctcctatttt

SEQ ID NO: 200133 - DNA, 15 bp, Homo sapiens
agttgtctcctattt

SEQ ID NO: 200134 - DNA, 15 bp, Homo sapiens
cagttgtctcctatt

SEQ ID NO: 200135 - DNA, 15 bp, Homo sapiens
tcagttgtctcctat

SEQ ID NO: 200136 - DNA, 15 bp, Homo sapiens
atcagttgtctccta

SEQ ID NO: 200137 - DNA, 15 bp, Homo sapiens
catcagttgtctcct

SEQ ID NO: 200138 - DNA, 15 bp, Homo sapiens
acatcagttgtctcc

SEQ ID NO: 200139 - DNA, 15 bp, Homo sapiens
tacatcagttgtctc

SEQ ID NO: 200140 - DNA, 15 bp, Homo sapiens
ttacatcagttgtct

SEQ ID NO: 200141 - DNA, 15 bp, Homo sapiens
tttacatcagttgtc

SEQ ID NO: 200142 - DNA, 15 bp, Homo sapiens
ctttacatcagttgt

SEQ ID NO: 200143 - DNA, 15 bp, Homo sapiens
actttacatcagttg

SEQ ID NO: 200144 - DNA, 15 bp, Homo sapiens
cactttacatcagtt

SEQ ID NO: 200145 - DNA, 15 bp, Homo sapiens
gcactttacatcagt

SEQ ID NO: 200146 - DNA, 15 bp, Homo sapiens
agcactttacatcag

SEQ ID NO: 200147 - DNA, 15 bp, Homo sapiens
aagcactttacatca

SEQ ID NO: 200148 - DNA, 15 bp, Homo sapiens
taagcactttacatc

SEQ ID NO: 200149 - DNA, 15 bp, Homo sapiens
ctaagcactttacat

SEQ ID NO: 200150 - DNA, 15 bp, Homo sapiens
gctaagcactttaca

SEQ ID NO: 200151 - DNA, 15 bp, Homo sapiens
tgctaagcactttac

SEQ ID NO: 200152 - DNA, 15 bp, Homo sapiens
gtgctaagcacttta

SEQ ID NO: 200153 - DNA, 15 bp, Homo sapiens
agtgctaagcacttt

SEQ ID NO: 200154 - DNA, 15 bp, Homo sapiens
cagtgctaagcactt

SEQ ID NO: 200155 - DNA, 15 bp, Homo sapiens
acagtgctaagcact

SEQ ID NO: 200156 - DNA, 15 bp, Homo sapiens
cacagtgctaagcac

SEQ ID NO: 200157 - DNA, 15 bp, Homo sapiens
gcacagtgctaagca

SEQ ID NO: 200158 - DNA, 15 bp, Homo sapiens
tgcacagtgctaagc

SEQ ID NO: 200159 - DNA, 15 bp, Homo sapiens
ctgcacagtgctaag

SEQ ID NO: 200160 - DNA, 15 bp, Homo sapiens
tctgcacagtgctaa

SEQ ID NO: 200161 - DNA, 15 bp, Homo sapiens
ctctgcacagtgcta

SEQ ID NO: 200162 - DNA, 15 bp, Homo sapiens
gctctgcacagtgct

SEQ ID NO: 200163 - DNA, 15 bp, Homo sapiens
tgctctgcacagtgc

SEQ ID NO: 200164 - DNA, 15 bp, Homo sapiens
gtgctctgcacagtg

SEQ ID NO: 200165 - DNA, 15 bp, Homo sapiens
tgtgctctgcacagt

SEQ ID NO: 200166 - DNA, 15 bp, Homo sapiens
ttgtgctctgcacag

SEQ ID NO: 200167 - DNA, 15 bp, Homo sapiens
cttgtgctctgcaca

SEQ ID NO: 200168 - DNA, 15 bp, Homo sapiens
ccttgtgctctgcac

SEQ ID NO: 200169 - DNA, 15 bp, Homo sapiens
tccttgtgctctgca

SEQ ID NO: 200170 - DNA, 15 bp, Homo sapiens
ctccttgtgctctgc

SEQ ID NO: 200171 - DNA, 15 bp, Homo sapiens
actccttgtgctctg

SEQ ID NO: 200172 - DNA, 15 bp, Homo sapiens
aactccttgtgctct

SEQ ID NO: 200173 - DNA, 15 bp, Homo sapiens
taactccttgtgctc

SEQ ID NO: 200174 - DNA, 15 bp, Homo sapiens
gtaactccttgtgct

SEQ ID NO: 200175 - DNA, 15 bp, Homo sapiens
agtaactccttgtgc

SEQ ID NO: 200176 - DNA, 15 bp, Homo sapiens
cagtaactccttgtg

SEQ ID NO: 200177 - DNA, 15 bp, Homo sapiens
gcagtaactccttgt

SEQ ID NO: 200178 - DNA, 15 bp, Homo sapiens
tgcagtaactccttg

SEQ ID NO: 200179 - DNA, 15 bp, Homo sapiens
atgcagtaactcctt

SEQ ID NO: 200180 - DNA, 15 bp, Homo sapiens
tatgcagtaactcct

SEQ ID NO: 200181 - DNA, 15 bp, Homo sapiens
atatgcagtaactcc

SEQ ID NO: 200182 - DNA, 15 bp, Homo sapiens
gatatgcagtaactc

SEQ ID NO: 200183 - DNA, 15 bp, Homo sapiens
agatatgcagtaact

SEQ ID NO: 200184 - DNA, 15 bp, Homo sapiens
tagatatgcagtaac

SEQ ID NO: 200185 - DNA, 15 bp, Homo sapiens
ctagatatgcagtaa

SEQ ID NO: 200186 - DNA, 15 bp, Homo sapiens
gctagatatgcagta

SEQ ID NO: 200187 - DNA, 15 bp, Homo sapiens
ggctagatatgcagt

SEQ ID NO: 200188 - DNA, 15 bp, Homo sapiens
aggctagatatgcag

SEQ ID NO: 200189 - DNA, 15 bp, Homo sapiens
gaggctagatatgca

SEQ ID NO: 200190 - DNA, 15 bp, Homo sapiens
tgaggctagatatgc

SEQ ID NO: 200191 - DNA, 15 bp, Homo sapiens
ctgaggctagatatg

SEQ ID NO: 200192 - DNA, 15 bp, Homo sapiens
actgaggctagatat

SEQ ID NO: 200193 - DNA, 15 bp, Homo sapiens
aactgaggctagata

SEQ ID NO: 200194 - DNA, 15 bp, Homo sapiens
caactgaggctagat

SEQ ID NO: 200195 - DNA, 15 bp, Homo sapiens
acaactgaggctaga

SEQ ID NO: 200196 - DNA, 15 bp, Homo sapiens
cacaactgaggctag

SEQ ID NO: 200197 - DNA, 15 bp, Homo sapiens
tcacaactgaggcta

SEQ ID NO: 200198 - DNA, 15 bp, Homo sapiens
atcacaactgaggct

SEQ ID NO: 200199 - DNA, 15 bp, Homo sapiens
aatcacaactgaggc

SEQ ID NO: 200200 - DNA, 15 bp, Homo sapiens
aaatcacaactgagg

SEQ ID NO: 200201 - DNA, 15 bp, Homo sapiens
aaaatcacaactgag

SEQ ID NO: 200202 - DNA, 15 bp, Homo sapiens
aaaaatcacaactga

SEQ ID NO: 200203 - DNA, 15 bp, Homo sapiens
taaaaatcacaactg

SEQ ID NO: 200204 - DNA, 15 bp, Homo sapiens
gtaaaaatcacaact

SEQ ID NO: 200205 - DNA, 15 bp, Homo sapiens
ggtaaaaatcacaac

SEQ ID NO: 200206 - DNA, 15 bp, Homo sapiens
tggtaaaaatcacaa

SEQ ID NO: 200207 - DNA, 15 bp, Homo sapiens
atggtaaaaatcaca

SEQ ID NO: 200208 - DNA, 15 bp, Homo sapiens
aatggtaaaaatcac

SEQ ID NO: 200209 - DNA, 15 bp, Homo sapiens
taatggtaaaaatca

SEQ ID NO: 200210 - DNA, 15 bp, Homo sapiens
ttaatggtaaaaatc

SEQ ID NO: 200211 - DNA, 15 bp, Homo sapiens
attaatggtaaaaat

SEQ ID NO: 200212 - DNA, 15 bp, Homo sapiens
aattaatggtaaaaa

SEQ ID NO: 200213 - DNA, 15 bp, Homo sapiens
caattaatggtaaaa

SEQ ID NO: 200214 - DNA, 15 bp, Homo sapiens
ccaattaatggtaaa

SEQ ID NO: 200215 - DNA, 15 bp, Homo sapiens
tccaattaatggtaa

SEQ ID NO: 200216 - DNA, 15 bp, Homo sapiens
atccaattaatggta

SEQ ID NO: 200217 - DNA, 15 bp, Homo sapiens
aatccaattaatggt

SEQ ID NO: 200218 - DNA, 15 bp, Homo sapiens
taatccaattaatgg

SEQ ID NO: 200219 - DNA, 15 bp, Homo sapiens
ataatccaattaatg

SEQ ID NO: 200220 - DNA, 15 bp, Homo sapiens
cataatccaattaat

SEQ ID NO: 200221 - DNA, 15 bp, Homo sapiens
tcataatccaattaa

SEQ ID NO: 200222 - DNA, 15 bp, Homo sapiens
atcataatccaatta

SEQ ID NO: 200223 - DNA, 15 bp, Homo sapiens
catcataatccaatt

SEQ ID NO: 200224 - DNA, 15 bp, Homo sapiens
ccatcataatccaat

SEQ ID NO: 200225 - DNA, 15 bp, Homo sapiens
cccatcataatccaa

SEQ ID NO: 200226 - DNA, 15 bp, Homo sapiens
ccccatcataatcca

SEQ ID NO: 200227 - DNA, 15 bp, Homo sapiens
cccccatcataatcc

SEQ ID NO: 200228 - DNA, 15 bp, Homo sapiens
tcccccatcataatc

SEQ ID NO: 200229 - DNA, 15 bp, Homo sapiens
gtcccccatcataat

SEQ ID NO: 200230 - DNA, 15 bp, Homo sapiens
cgtcccccatcataa

SEQ ID NO: 200231 - DNA, 15 bp, Homo sapiens
ccgtcccccatcata

SEQ ID NO: 200232 - DNA, 15 bp, Homo sapiens
gccgtcccccatcat

SEQ ID NO: 200233 - DNA, 15 bp, Homo sapiens
tgccgtcccccatca

SEQ ID NO: 200234 - DNA, 15 bp, Homo sapiens
ttgccgtcccccatc

SEQ ID NO: 200235 - DNA, 15 bp, Homo sapiens
gttgccgtcccccat

SEQ ID NO: 200236 - DNA, 15 bp, Homo sapiens
agttgccgtccccca

SEQ ID NO: 200237 - DNA, 15 bp, Homo sapiens
aagttgccgtccccc

SEQ ID NO: 200238 - DNA, 15 bp, Homo sapiens
gaagttgccgtcccc

SEQ ID NO: 200239 - DNA, 15 bp, Homo sapiens
agaagttgccgtccc

SEQ ID NO: 200240 - DNA, 15 bp, Homo sapiens
tagaagttgccgtcc

SEQ ID NO: 200241 - DNA, 15 bp, Homo sapiens
atagaagttgccgtc

SEQ ID NO: 200242 - DNA, 15 bp, Homo sapiens
tatagaagttgccgt

SEQ ID NO: 200243 - DNA, 15 bp, Homo sapiens
ttatagaagttgccg

SEQ ID NO: 200244 - DNA, 15 bp, Homo sapiens
cttatagaagttgcc

SEQ ID NO: 200245 - DNA, 15 bp, Homo sapiens
ccttatagaagttgc

SEQ ID NO: 200246 - DNA, 15 bp, Homo sapiens
tccttatagaagttg

SEQ ID NO: 200247 - DNA, 15 bp, Homo sapiens
ctccttatagaagtt

SEQ ID NO: 200248 - DNA, 15 bp, Homo sapiens
cctccttatagaagt

SEQ ID NO: 200249 - DNA, 15 bp, Homo sapiens
acctccttatagaag

SEQ ID NO: 200250 - DNA, 15 bp, Homo sapiens
cacctccttatagaa

SEQ ID NO: 200251 - DNA, 15 bp, Homo sapiens
ccacctccttataga

SEQ ID NO: 200252 - DNA, 15 bp, Homo sapiens
gccacctccttatag

SEQ ID NO: 200253 - DNA, 15 bp, Homo sapiens
tgccacctccttata

SEQ ID NO: 200254 - DNA, 15 bp, Homo sapiens
gtgccacctccttat

SEQ ID NO: 200255 - DNA, 15 bp, Homo sapiens
tgtgccacctcctta

SEQ ID NO: 200256 - DNA, 15 bp, Homo sapiens
ctgtgccacctcctt

SEQ ID NO: 200257 - DNA, 15 bp, Homo sapiens
tctgtgccacctcct

SEQ ID NO: 200258 - DNA, 15 bp, Homo sapiens
ttctgtgccacctcc

SEQ ID NO: 200259 - DNA, 15 bp, Homo sapiens
tttctgtgccacctc

SEQ ID NO: 200260 - DNA, 15 bp, Homo sapiens
atttctgtgccacct

SEQ ID NO: 200261 - DNA, 15 bp, Homo sapiens
catttctgtgccacc

SEQ ID NO: 200262 - DNA, 15 bp, Homo sapiens
acatttctgtgccac

SEQ ID NO: 200263 - DNA, 15 bp, Homo sapiens
gacatttctgtgcca

SEQ ID NO: 200264 - DNA, 15 bp, Homo sapiens
agacatttctgtgcc

SEQ ID NO: 200265 - DNA, 15 bp, Homo sapiens
cagacatttctgtgc

SEQ ID NO: 200266 - DNA, 15 bp, Homo sapiens
tcagacatttctgtg

SEQ ID NO: 200267 - DNA, 15 bp, Homo sapiens
atcagacatttctgt

SEQ ID NO: 200268 - DNA, 15 bp, Homo sapiens
aatcagacatttctg

SEQ ID NO: 200269 - DNA, 15 bp, Homo sapiens
aaatcagacatttct

SEQ ID NO: 200270 - DNA, 15 bp, Homo sapiens
gaaatcagacatttc

SEQ ID NO: 200271 - DNA, 15 bp, Homo sapiens
agaaatcagacattt

SEQ ID NO: 200272 - DNA, 15 bp, Homo sapiens
gagaaatcagacatt

SEQ ID NO: 200273 - DNA, 15 bp, Homo sapiens
ggagaaatcagacat

SEQ ID NO: 200274 - DNA, 15 bp, Homo sapiens
aggagaaatcagaca

SEQ ID NO: 200275 - DNA, 15 bp, Homo sapiens
aaggagaaatcagac

SEQ ID NO: 200276 - DNA, 15 bp, Homo sapiens
gaaggagaaatcaga

SEQ ID NO: 200277 - DNA, 15 bp, Homo sapiens
ggaaggagaaatcag

SEQ ID NO: 200278 - DNA, 15 bp, Homo sapiens
aggaaggagaaatca

SEQ ID NO: 200279 - DNA, 15 bp, Homo sapiens
aaggaaggagaaatc

SEQ ID NO: 200280 - DNA, 15 bp, Homo sapiens
gaaggaaggagaaat

SEQ ID NO: 200281 - DNA, 15 bp, Homo sapiens
agaaggaaggagaaa

SEQ ID NO: 200282 - DNA, 15 bp, Homo sapiens
aagaaggaaggagaa

SEQ ID NO: 200283 - DNA, 15 bp, Homo sapiens
aaagaaggaaggaga

SEQ ID NO: 200284 - DNA, 15 bp, Homo sapiens
gaaagaaggaaggag

SEQ ID NO: 200285 - DNA, 15 bp, Homo sapiens
tgaaagaaggaagga

SEQ ID NO: 200286 - DNA, 15 bp, Homo sapiens
ctgaaagaaggaagg

SEQ ID NO: 200287 - DNA, 15 bp, Homo sapiens
actgaaagaaggaag

SEQ ID NO: 200288 - DNA, 15 bp, Homo sapiens
tactgaaagaaggaa

SEQ ID NO: 200289 - DNA, 15 bp, Homo sapiens
ctactgaaagaagga

SEQ ID NO: 200290 - DNA, 15 bp, Homo sapiens
gctactgaaagaagg

SEQ ID NO: 200291 - DNA, 15 bp, Homo sapiens
agctactgaaagaag

SEQ ID NO: 200292 - DNA, 15 bp, Homo sapiens
gagctactgaaagaa

SEQ ID NO: 200293 - DNA, 15 bp, Homo sapiens
agagctactgaaaga

SEQ ID NO: 200294 - DNA, 15 bp, Homo sapiens
cagagctactgaaag

SEQ ID NO: 200295 - DNA, 15 bp, Homo sapiens
acagagctactgaaa

SEQ ID NO: 200296 - DNA, 15 bp, Homo sapiens
cacagagctactgaa

SEQ ID NO: 200297 - DNA, 15 bp, Homo sapiens
tcacagagctactga

SEQ ID NO: 200298 - DNA, 15 bp, Homo sapiens
gtcacagagctactg

SEQ ID NO: 200299 - DNA, 15 bp, Homo sapiens
ggtcacagagctact

SEQ ID NO: 200300 - DNA, 15 bp, Homo sapiens
aggtcacagagctac

SEQ ID NO: 200301 - DNA, 15 bp, Homo sapiens
aaggtcacagagcta

SEQ ID NO: 200302 - DNA, 15 bp, Homo sapiens
caaggtcacagagct

SEQ ID NO: 200303 - DNA, 15 bp, Homo sapiens
ccaaggtcacagagc

SEQ ID NO: 200304 - DNA, 15 bp, Homo sapiens
cccaaggtcacagag

SEQ ID NO: 200305 - DNA, 15 bp, Homo sapiens
gcccaaggtcacaga

SEQ ID NO: 200306 - DNA, 15 bp, Homo sapiens
tgcccaaggtcacag

SEQ ID NO: 200307 - DNA, 15 bp, Homo sapiens
gtgcccaaggtcaca

SEQ ID NO: 200308 - DNA, 15 bp, Homo sapiens
tgtgcccaaggtcac

SEQ ID NO: 200309 - DNA, 15 bp, Homo sapiens
atgtgcccaaggtca

SEQ ID NO: 200310 - DNA, 15 bp, Homo sapiens
gatgtgcccaaggtc

SEQ ID NO: 200311 - DNA, 15 bp, Homo sapiens
tgatgtgcccaaggt

SEQ ID NO: 200312 - DNA, 15 bp, Homo sapiens
atgatgtgcccaagg

SEQ ID NO: 200313 - DNA, 15 bp, Homo sapiens
aatgatgtgcccaag

SEQ ID NO: 200314 - DNA, 15 bp, Homo sapiens
aaatgatgtgcccaa

SEQ ID NO: 200315 - DNA, 15 bp, Homo sapiens
aaaatgatgtgccca

SEQ ID NO: 200316 - DNA, 15 bp, Homo sapiens
gaaaatgatgtgccc

SEQ ID NO: 200317 - DNA, 15 bp, Homo sapiens
ggaaaatgatgtgcc

SEQ ID NO: 200318 - DNA, 15 bp, Homo sapiens
aggaaaatgatgtgc

SEQ ID NO: 200319 - DNA, 15 bp, Homo sapiens
aaggaaaatgatgtg

SEQ ID NO: 200320 - DNA, 15 bp, Homo sapiens
caaggaaaatgatgt

SEQ ID NO: 200321 - DNA, 15 bp, Homo sapiens
gcaaggaaaatgatg

SEQ ID NO: 200322 - DNA, 15 bp, Homo sapiens
ggcaaggaaaatgat

SEQ ID NO: 200323 - DNA, 15 bp, Homo sapiens
aggcaaggaaaatga

SEQ ID NO: 200324 - DNA, 15 bp, Homo sapiens
taggcaaggaaaatg

SEQ ID NO: 200325 - DNA, 15 bp, Homo sapiens
ataggcaaggaaaat

SEQ ID NO: 200326 - DNA, 15 bp, Homo sapiens
tataggcaaggaaaa

SEQ ID NO: 200327 - DNA, 15 bp, Homo sapiens
ttataggcaaggaaa

SEQ ID NO: 200328 - DNA, 15 bp, Homo sapiens
cttataggcaaggaa

SEQ ID NO: 200329 - DNA, 15 bp, Homo sapiens
tcttataggcaagga

SEQ ID NO: 200330 - DNA, 15 bp, Homo sapiens
atcttataggcaagg

SEQ ID NO: 200331 - DNA, 15 bp, Homo sapiens
catcttataggcaag

SEQ ID NO: 200332 - DNA, 15 bp, Homo sapiens
acatcttataggcaa

SEQ ID NO: 200333 - DNA, 15 bp, Homo sapiens
tacatcttataggca

SEQ ID NO: 200334 - DNA, 15 bp, Homo sapiens
ctacatcttataggc

SEQ ID NO: 200335 - DNA, 15 bp, Homo sapiens
tctacatcttatagg

SEQ ID NO: 200336 - DNA, 15 bp, Homo sapiens
atctacatcttatag

SEQ ID NO: 200337 - DNA, 15 bp, Homo sapiens
tatctacatcttata

SEQ ID NO: 200338 - DNA, 15 bp, Homo sapiens
ttatctacatcttat

SEQ ID NO: 200339 - DNA, 15 bp, Homo sapiens
gttatctacatctta

SEQ ID NO: 200340 - DNA, 15 bp, Homo sapiens
cgttatctacatctt

SEQ ID NO: 200341 - DNA, 15 bp, Homo sapiens
tcgttatctacatct

SEQ ID NO: 200342 - DNA, 15 bp, Homo sapiens
gtcgttatctacatc

SEQ ID NO: 200343 - DNA, 15 bp, Homo sapiens
tgtcgttatctacat

SEQ ID NO: 200344 - DNA, 15 bp, Homo sapiens
gtgtcgttatctaca

SEQ ID NO: 200345 - DNA, 15 bp, Homo sapiens
ggtgtcgttatctac

SEQ ID NO: 200346 - DNA, 15 bp, Homo sapiens
gggtgtcgttatcta

SEQ ID NO: 200347 - DNA, 15 bp, Homo sapiens
tgggtgtcgttatct

SEQ ID NO: 200348 - DNA, 15 bp, Homo sapiens
gtgggtgtcgttatc

SEQ ID NO: 200349 - DNA, 15 bp, Homo sapiens
cgtgggtgtcgttat

SEQ ID NO: 200350 - DNA, 15 bp, Homo sapiens
acgtgggtgtcgtta

SEQ ID NO: 200351 - DNA, 15 bp, Homo sapiens
tacgtgggtgtcgtt

SEQ ID NO: 200352 - DNA, 15 bp, Homo sapiens
ttacgtgggtgtcgt

SEQ ID NO: 200353 - DNA, 15 bp, Homo sapiens
gttacgtgggtgtcg

SEQ ID NO: 200354 - DNA, 15 bp, Homo sapiens
cgttacgtgggtgtc

SEQ ID NO: 200355 - DNA, 15 bp, Homo sapiens
ccgttacgtgggtgt

SEQ ID NO: 200356 - DNA, 15 bp, Homo sapiens
cccgttacgtgggtg

SEQ ID NO: 200357 - DNA, 15 bp, Homo sapiens
tcccgttacgtgggt

SEQ ID NO: 200358 - DNA, 15 bp, Homo sapiens
atcccgttacgtggg

SEQ ID NO: 200359 - DNA, 15 bp, Homo sapiens
tatcccgttacgtgg

SEQ ID NO: 200360 - DNA, 15 bp, Homo sapiens
ttatcccgttacgtg

SEQ ID NO: 200361 - DNA, 15 bp, Homo sapiens
cttatcccgttacgt

SEQ ID NO: 200362 - DNA, 15 bp, Homo sapiens
acttatcccgttacg

SEQ ID NO: 200363 - DNA, 15 bp, Homo sapiens
cacttatcccgttac

SEQ ID NO: 200364 - DNA, 15 bp, Homo sapiens
tcacttatcccgtta

SEQ ID NO: 200365 - DNA, 15 bp, Homo sapiens
ttcacttatcccgtt

SEQ ID NO: 200366 - DNA, 15 bp, Homo sapiens
attcacttatcccgt

SEQ ID NO: 200367 - DNA, 15 bp, Homo sapiens
cattcacttatcccg

SEQ ID NO: 200368 - DNA, 15 bp, Homo sapiens
ccattcacttatccc

SEQ ID NO: 200369 - DNA, 15 bp, Homo sapiens
tccattcacttatcc

SEQ ID NO: 200370 - DNA, 15 bp, Homo sapiens
ctccattcacttatc

SEQ ID NO: 200371 - DNA, 15 bp, Homo sapiens
cctccattcacttat

SEQ ID NO: 200372 - DNA, 15 bp, Homo sapiens
acctccattcactta

SEQ ID NO: 200373 - DNA, 15 bp, Homo sapiens
cacctccattcactt

SEQ ID NO: 200374 - DNA, 15 bp, Homo sapiens
gcacctccattcact

SEQ ID NO: 200375 - DNA, 15 bp, Homo sapiens
ggcacctccattcac

SEQ ID NO: 200376 - DNA, 15 bp, Homo sapiens
aggcacctccattca

SEQ ID NO: 200377 - DNA, 15 bp, Homo sapiens
caggcacctccattc

SEQ ID NO: 200378 - DNA, 15 bp, Homo sapiens
gcaggcacctccatt

SEQ ID NO: 200379 - DNA, 15 bp, Homo sapiens
tgcaggcacctccat

SEQ ID NO: 200380 - DNA, 15 bp, Homo sapiens
ctgcaggcacctcca

SEQ ID NO: 200381 - DNA, 15 bp, Homo sapiens
actgcaggcacctcc

SEQ ID NO: 200382 - DNA, 15 bp, Homo sapiens
cactgcaggcacctc

SEQ ID NO: 200383 - DNA, 15 bp, Homo sapiens
gcactgcaggcacct

SEQ ID NO: 200384 - DNA, 15 bp, Homo sapiens
agcactgcaggcacc

SEQ ID NO: 200385 - DNA, 15 bp, Homo sapiens
aagcactgcaggcac

SEQ ID NO: 200386 - DNA, 15 bp, Homo sapiens
aaagcactgcaggca

SEQ ID NO: 200387 - DNA, 15 bp, Homo sapiens
caaagcactgcaggc

SEQ ID NO: 200388 - DNA, 15 bp, Homo sapiens
gcaaagcactgcagg

SEQ ID NO: 200389 - DNA, 15 bp, Homo sapiens
tgcaaagcactgcag

SEQ ID NO: 200390 - DNA, 15 bp, Homo sapiens
gtgcaaagcactgca

SEQ ID NO: 200391 - DNA, 15 bp, Homo sapiens
agtgcaaagcactgc

SEQ ID NO: 200392 - DNA, 15 bp, Homo sapiens
aagtgcaaagcactg

SEQ ID NO: 200393 - DNA, 15 bp, Homo sapiens
aaagtgcaaagcact

SEQ ID NO: 200394 - DNA, 15 bp, Homo sapiens
caaagtgcaaagcac

SEQ ID NO: 200395 - DNA, 15 bp, Homo sapiens
acaaagtgcaaagca

SEQ ID NO: 200396 - DNA, 15 bp, Homo sapiens
tacaaagtgcaaagc

SEQ ID NO: 200397 - DNA, 15 bp, Homo sapiens
ttacaaagtgcaaag

SEQ ID NO: 200398 - DNA, 15 bp, Homo sapiens
tttacaaagtgcaaa

SEQ ID NO: 200399 - DNA, 15 bp, Homo sapiens
ttttacaaagtgcaa

SEQ ID NO: 200400 - DNA, 15 bp, Homo sapiens
gttttacaaagtgca

SEQ ID NO: 200401 - DNA, 15 bp, Homo sapiens
tgttttacaaagtgc

SEQ ID NO: 200402 - DNA, 15 bp, Homo sapiens
gtgttttacaaagtg

SEQ ID NO: 200403 - DNA, 15 bp, Homo sapiens
ggtgttttacaaagt

SEQ ID NO: 200404 - DNA, 15 bp, Homo sapiens
tggtgttttacaaag

SEQ ID NO: 200405 - DNA, 15 bp, Homo sapiens
ttggtgttttacaaa

SEQ ID NO: 200406 - DNA, 15 bp, Homo sapiens
gttggtgttttacaa

SEQ ID NO: 200407 - DNA, 15 bp, Homo sapiens
agttggtgttttaca

SEQ ID NO: 200408 - DNA, 15 bp, Homo sapiens
cagttggtgttttac

SEQ ID NO: 200409 - DNA, 15 bp, Homo sapiens
tcagttggtgtttta

SEQ ID NO: 200410 - DNA, 15 bp, Homo sapiens
ttcagttggtgtttt

SEQ ID NO: 200411 - DNA, 15 bp, Homo sapiens
attcagttggtgttt

SEQ ID NO: 200412 - DNA, 15 bp, Homo sapiens
tattcagttggtgtt

SEQ ID NO: 200413 - DNA, 15 bp, Homo sapiens
ctattcagttggtgt

SEQ ID NO: 200414 - DNA, 15 bp, Homo sapiens
cctattcagttggtg

SEQ ID NO: 200415 - DNA, 15 bp, Homo sapiens
tcctattcagttggt

SEQ ID NO: 200416 - DNA, 15 bp, Homo sapiens
ctcctattcagttgg

SEQ ID NO: 200417 - DNA, 15 bp, Homo sapiens
tctcctattcagttg

SEQ ID NO: 200418 - DNA, 15 bp, Homo sapiens
ttctcctattcagtt

SEQ ID NO: 200419 - DNA, 15 bp, Homo sapiens
cttctcctattcagt

SEQ ID NO: 200420 - DNA, 15 bp, Homo sapiens
acttctcctattcag

SEQ ID NO: 200421 - DNA, 15 bp, Homo sapiens
aacttctcctattca

SEQ ID NO: 200422 - DNA, 15 bp, Homo sapiens
aaacttctcctattc

SEQ ID NO: 200423 - DNA, 15 bp, Homo sapiens
gaaacttctcctatt

SEQ ID NO: 200424 - DNA, 15 bp, Homo sapiens
agaaacttctcctat

SEQ ID NO: 200425 - DNA, 15 bp, Homo sapiens
tagaaacttctccta

SEQ ID NO: 200426 - DNA, 15 bp, Homo sapiens
ctagaaacttctcct

SEQ ID NO: 200427 - DNA, 15 bp, Homo sapiens
tctagaaacttctcc

SEQ ID NO: 200428 - DNA, 15 bp, Homo sapiens
ctctagaaacttctc

SEQ ID NO: 200429 - DNA, 15 bp, Homo sapiens
tctctagaaacttct

SEQ ID NO: 200430 - DNA, 15 bp, Homo sapiens
ctctctagaaacttc

SEQ ID NO: 200431 - DNA, 15 bp, Homo sapiens
gctctctagaaactt

SEQ ID NO: 200432 - DNA, 15 bp, Homo sapiens
agctctctagaaact

SEQ ID NO: 200433 - DNA, 15 bp, Homo sapiens
gagctctctagaaac

SEQ ID NO: 200434 - DNA, 15 bp, Homo sapiens
agagctctctagaaa

SEQ ID NO: 200435 - DNA, 15 bp, Homo sapiens
aagagctctctagaa

SEQ ID NO: 200436 - DNA, 15 bp, Homo sapiens
aaagagctctctaga

SEQ ID NO: 200437 - DNA, 15 bp, Homo sapiens
taaagagctctctag

SEQ ID NO: 200438 - DNA, 15 bp, Homo sapiens
gtaaagagctctcta

SEQ ID NO: 200439 - DNA, 15 bp, Homo sapiens
agtaaagagctctct

SEQ ID NO: 200440 - DNA, 15 bp, Homo sapiens
cagtaaagagctctc

SEQ ID NO: 200441 - DNA, 15 bp, Homo sapiens
tcagtaaagagctct

SEQ ID NO: 200442 - DNA, 15 bp, Homo sapiens
ctcagtaaagagctc

SEQ ID NO: 200443 - DNA, 15 bp, Homo sapiens
cctcagtaaagagct

SEQ ID NO: 200444 - DNA, 15 bp, Homo sapiens
gcctcagtaaagagc

SEQ ID NO: 200445 - DNA, 15 bp, Homo sapiens
agcctcagtaaagag

SEQ ID NO: 200446 - DNA, 15 bp, Homo sapiens
cagcctcagtaaaga

SEQ ID NO: 200447 - DNA, 15 bp, Homo sapiens
gcagcctcagtaaag

SEQ ID NO: 200448 - DNA, 15 bp, Homo sapiens
agcagcctcagtaaa

SEQ ID NO: 200449 - DNA, 15 bp, Homo sapiens
aagcagcctcagtaa

SEQ ID NO: 200450 - DNA, 15 bp, Homo sapiens
gaagcagcctcagta

SEQ ID NO: 200451 - DNA, 15 bp, Homo sapiens
agaagcagcctcagt

SEQ ID NO: 200452 - DNA, 15 bp, Homo sapiens
tagaagcagcctcag

SEQ ID NO: 200453 - DNA, 15 bp, Homo sapiens
gtagaagcagcctca

SEQ ID NO: 200454 - DNA, 15 bp, Homo sapiens
agtagaagcagcctc

SEQ ID NO: 200455 - DNA, 15 bp, Homo sapiens
aagtagaagcagcct

SEQ ID NO: 200456 - DNA, 15 bp, Homo sapiens
aaagtagaagcagcc

SEQ ID NO: 200457 - DNA, 15 bp, Homo sapiens
caaagtagaagcagc

SEQ ID NO: 200458 - DNA, 15 bp, Homo sapiens
acaaagtagaagcag

SEQ ID NO: 200459 - DNA, 15 bp, Homo sapiens
gacaaagtagaagca

SEQ ID NO: 200460 - DNA, 15 bp, Homo sapiens
ggacaaagtagaagc

SEQ ID NO: 200461 - DNA, 15 bp, Homo sapiens
aggacaaagtagaag

SEQ ID NO: 200462 - DNA, 15 bp, Homo sapiens
aaggacaaagtagaa

SEQ ID NO: 200463 - DNA, 15 bp, Homo sapiens
aaaggacaaagtaga

SEQ ID NO: 200464 - DNA, 15 bp, Homo sapiens
gaaaggacaaagtag

SEQ ID NO: 200465 - DNA, 15 bp, Homo sapiens
agaaaggacaaagta

SEQ ID NO: 200466 - DNA, 15 bp, Homo sapiens
cagaaaggacaaagt

SEQ ID NO: 200467 - DNA, 15 bp, Homo sapiens
ccagaaaggacaaag

SEQ ID NO: 200468 - DNA, 15 bp, Homo sapiens
tccagaaaggacaaa

SEQ ID NO: 200469 - DNA, 15 bp, Homo sapiens
ttccagaaaggacaa

SEQ ID NO: 200470 - DNA, 15 bp, Homo sapiens
tttccagaaaggaca

SEQ ID NO: 200471 - DNA, 15 bp, Homo sapiens
ttttccagaaaggac

SEQ ID NO: 200472 - DNA, 15 bp, Homo sapiens
attttccagaaagga

SEQ ID NO: 200473 - DNA, 15 bp, Homo sapiens
tattttccagaaagg

SEQ ID NO: 200474 - DNA, 15 bp, Homo sapiens
gtattttccagaaag

SEQ ID NO: 200475 - DNA, 15 bp, Homo sapiens
agtattttccagaaa

SEQ ID NO: 200476 - DNA, 15 bp, Homo sapiens
aagtattttccagaa

SEQ ID NO: 200477 - DNA, 15 bp, Homo sapiens
gaagtattttccaga

SEQ ID NO: 200478 - DNA, 15 bp, Homo sapiens
ggaagtattttccag

SEQ ID NO: 200479 - DNA, 15 bp, Homo sapiens
gggaagtattttcca

SEQ ID NO: 200480 - DNA, 15 bp, Homo sapiens
ggggaagtattttcc

SEQ ID NO: 200481 - DNA, 15 bp, Homo sapiens
aggggaagtattttc

SEQ ID NO: 200482 - DNA, 15 bp, Homo sapiens
gaggggaagtatttt

SEQ ID NO: 200483 - DNA, 15 bp, Homo sapiens
agaggggaagtattt

SEQ ID NO: 200484 - DNA, 15 bp, Homo sapiens
cagaggggaagtatt

SEQ ID NO: 200485 - DNA, 15 bp, Homo sapiens
gcagaggggaagtat

SEQ ID NO: 200486 - DNA, 15 bp, Homo sapiens
ggcagaggggaagta

SEQ ID NO: 200487 - DNA, 15 bp, Homo sapiens
gggcagaggggaagt

SEQ ID NO: 200488 - DNA, 15 bp, Homo sapiens
tgggcagaggggaag

SEQ ID NO: 200489 - DNA, 15 bp, Homo sapiens
ttgggcagaggggaa

SEQ ID NO: 200490 - DNA, 15 bp, Homo sapiens
tttgggcagagggga

SEQ ID NO: 200491 - DNA, 15 bp, Homo sapiens
atttgggcagagggg

SEQ ID NO: 200492 - DNA, 15 bp, Homo sapiens
tatttgggcagaggg

SEQ ID NO: 200493 - DNA, 15 bp, Homo sapiens
ctatttgggcagagg

SEQ ID NO: 200494 - DNA, 15 bp, Homo sapiens
actatttgggcagag

SEQ ID NO: 200495 - DNA, 15 bp, Homo sapiens
tactatttgggcaga

SEQ ID NO: 200496 - DNA, 15 bp, Homo sapiens
ttactatttgggcag

SEQ ID NO: 200497 - DNA, 15 bp, Homo sapiens
tttactatttgggca

SEQ ID NO: 200498 - DNA, 15 bp, Homo sapiens
atttactatttgggc

SEQ ID NO: 200499 - DNA, 15 bp, Homo sapiens
catttactatttggg

SEQ ID NO: 200500 - DNA, 15 bp, Homo sapiens
tcatttactatttgg

SEQ ID NO: 200501 - DNA, 15 bp, Homo sapiens
ctcatttactatttg

SEQ ID NO: 200502 - DNA, 15 bp, Homo sapiens
tctcatttactattt

SEQ ID NO: 200503 - DNA, 15 bp, Homo sapiens
ctctcatttactatt

SEQ ID NO: 200504 - DNA, 15 bp, Homo sapiens
tctctcatttactat

SEQ ID NO: 200505 - DNA, 15 bp, Homo sapiens
ctctctcatttacta

SEQ ID NO: 200506 - DNA, 15 bp, Homo sapiens
cctctctcatttact

SEQ ID NO: 200507 - DNA, 15 bp, Homo sapiens
tcctctctcatttac

SEQ ID NO: 200508 - DNA, 15 bp, Homo sapiens
ctcctctctcattta

SEQ ID NO: 200509 - DNA, 15 bp, Homo sapiens
tctcctctctcattt

SEQ ID NO: 200510 - DNA, 15 bp, Homo sapiens
ttctcctctctcatt

SEQ ID NO: 200511 - DNA, 15 bp, Homo sapiens
tttctcctctctcat

SEQ ID NO: 200512 - DNA, 15 bp, Homo sapiens
ttttctcctctctca

SEQ ID NO: 200513 - DNA, 15 bp, Homo sapiens
tttttctcctctctc

SEQ ID NO: 200514 - DNA, 15 bp, Homo sapiens
ttttttctcctctct

SEQ ID NO: 200515 - DNA, 15 bp, Homo sapiens
cttttttctcctctc

SEQ ID NO: 200516 - DNA, 15 bp, Homo sapiens
gcttttttctcctct

SEQ ID NO: 200517 - DNA, 15 bp, Homo sapiens
ggcttttttctcctc

SEQ ID NO: 200518 - DNA, 15 bp, Homo sapiens
tggcttttttctcct

SEQ ID NO: 200519 - DNA, 15 bp, Homo sapiens
ctggcttttttctcc

SEQ ID NO: 200520 - DNA, 15 bp, Homo sapiens
tctggcttttttctc

SEQ ID NO: 200521 - DNA, 15 bp, Homo sapiens
ttctggcttttttct

SEQ ID NO: 200522 - DNA, 15 bp, Homo sapiens
tttctggcttttttc

SEQ ID NO: 200523 - DNA, 15 bp, Homo sapiens
atttctggctttttt

SEQ ID NO: 200524 - DNA, 15 bp, Homo sapiens
gatttctggcttttt

SEQ ID NO: 200525 - DNA, 15 bp, Homo sapiens
ggatttctggctttt

SEQ ID NO: 200526 - DNA, 15 bp, Homo sapiens
gggatttctggcttt

SEQ ID NO: 200527 - DNA, 15 bp, Homo sapiens
tgggatttctggctt

SEQ ID NO: 200528 - DNA, 15 bp, Homo sapiens
gtgggatttctggct

SEQ ID NO: 200529 - DNA, 15 bp, Homo sapiens
cgtgggatttctggc

SEQ ID NO: 200530 - DNA, 15 bp, Homo sapiens
ccgtgggatttctgg

SEQ ID NO: 200531 - DNA, 15 bp, Homo sapiens
accgtgggatttctg

SEQ ID NO: 200532 - DNA, 15 bp, Homo sapiens
caccgtgggatttct

SEQ ID NO: 200533 - DNA, 15 bp, Homo sapiens
gcaccgtgggatttc

SEQ ID NO: 200534 - DNA, 15 bp, Homo sapiens
ggcaccgtgggattt

SEQ ID NO: 200535 - DNA, 15 bp, Homo sapiens
tggcaccgtgggatt

SEQ ID NO: 200536 - DNA, 15 bp, Homo sapiens
ctggcaccgtgggat

SEQ ID NO: 200537 - DNA, 15 bp, Homo sapiens
tctggcaccgtggga

SEQ ID NO: 200538 - DNA, 15 bp, Homo sapiens
gtctggcaccgtggg

SEQ ID NO: 200539 - DNA, 15 bp, Homo sapiens
agtctggcaccgtgg

SEQ ID NO: 200540 - DNA, 15 bp, Homo sapiens
aagtctggcaccgtg

SEQ ID NO: 200541 - DNA, 15 bp, Homo sapiens
caagtctggcaccgt

SEQ ID NO: 200542 - DNA, 15 bp, Homo sapiens
gcaagtctggcaccg

SEQ ID NO: 200543 - DNA, 15 bp, Homo sapiens
tgcaagtctggcacc

SEQ ID NO: 200544 - DNA, 15 bp, Homo sapiens
ctgcaagtctggcac

SEQ ID NO: 200545 - DNA, 15 bp, Homo sapiens
cctgcaagtctggca

SEQ ID NO: 200546 - DNA, 15 bp, Homo sapiens
gcctgcaagtctggc

SEQ ID NO: 200547 - DNA, 15 bp, Homo sapiens
tgcctgcaagtctgg

SEQ ID NO: 200548 - DNA, 15 bp, Homo sapiens
gtgcctgcaagtctg

SEQ ID NO: 200549 - DNA, 15 bp, Homo sapiens
tgtgcctgcaagtct

SEQ ID NO: 200550 - DNA, 15 bp, Homo sapiens
ttgtgcctgcaagtc

SEQ ID NO: 200551 - DNA, 15 bp, Homo sapiens
tttgtgcctgcaagt

SEQ ID NO: 200552 - DNA, 15 bp, Homo sapiens
ctttgtgcctgcaag

SEQ ID NO: 200553 - DNA, 15 bp, Homo sapiens
tctttgtgcctgcaa

SEQ ID NO: 200554 - DNA, 15 bp, Homo sapiens
ctctttgtgcctgca

SEQ ID NO: 200555 - DNA, 15 bp, Homo sapiens
gctctttgtgcctgc

SEQ ID NO: 200556 - DNA, 15 bp, Homo sapiens
ggctctttgtgcctg

SEQ ID NO: 200557 - DNA, 15 bp, Homo sapiens
aggctctttgtgcct

SEQ ID NO: 200558 - DNA, 15 bp, Homo sapiens
aaggctctttgtgcc

SEQ ID NO: 200559 - DNA, 15 bp, Homo sapiens
aaaggctctttgtgc

SEQ ID NO: 200560 - DNA, 15 bp, Homo sapiens
caaaggctctttgtg

SEQ ID NO: 200561 - DNA, 15 bp, Homo sapiens
gcaaaggctctttgt

SEQ ID NO: 200562 - DNA, 15 bp, Homo sapiens
tgcaaaggctctttg

SEQ ID NO: 200563 - DNA, 15 bp, Homo sapiens
gtgcaaaggctcttt

SEQ ID NO: 200564 - DNA, 15 bp, Homo sapiens
ggtgcaaaggctctt

SEQ ID NO: 200565 - DNA, 15 bp, Homo sapiens
cggtgcaaaggctct

SEQ ID NO: 200566 - DNA, 15 bp, Homo sapiens
acggtgcaaaggctc

SEQ ID NO: 200567 - DNA, 15 bp, Homo sapiens
tacggtgcaaaggct

SEQ ID NO: 200568 - DNA, 15 bp, Homo sapiens
ctacggtgcaaaggc

SEQ ID NO: 200569 - DNA, 15 bp, Homo sapiens
cctacggtgcaaagg

SEQ ID NO: 200570 - DNA, 15 bp, Homo sapiens
acctacggtgcaaag

SEQ ID NO: 200571 - DNA, 15 bp, Homo sapiens
cacctacggtgcaaa

SEQ ID NO: 200572 - DNA, 15 bp, Homo sapiens
tcacctacggtgcaa

SEQ ID NO: 200573 - DNA, 15 bp, Homo sapiens
gtcacctacggtgca

SEQ ID NO: 200574 - DNA, 15 bp, Homo sapiens
agtcacctacggtgc

SEQ ID NO: 200575 - DNA, 15 bp, Homo sapiens
aagtcacctacggtg

SEQ ID NO: 200576 - DNA, 15 bp, Homo sapiens
aaagtcacctacggt

SEQ ID NO: 200577 - DNA, 15 bp, Homo sapiens
caaagtcacctacgg

SEQ ID NO: 200578 - DNA, 15 bp, Homo sapiens
acaaagtcacctacg

SEQ ID NO: 200579 - DNA, 15 bp, Homo sapiens
aacaaagtcacctac

SEQ ID NO: 200580 - DNA, 15 bp, Homo sapiens
aaacaaagtcaccta

SEQ ID NO: 200581 - DNA, 15 bp, Homo sapiens
gaaacaaagtcacct

SEQ ID NO: 200582 - DNA, 15 bp, Homo sapiens
ggaaacaaagtcacc

SEQ ID NO: 200583 - DNA, 15 bp, Homo sapiens
aggaaacaaagtcac

SEQ ID NO: 200584 - DNA, 15 bp, Homo sapiens
caggaaacaaagtca

SEQ ID NO: 200585 - DNA, 15 bp, Homo sapiens
tcaggaaacaaagtc

SEQ ID NO: 200586 - DNA, 15 bp, Homo sapiens
ctcaggaaacaaagt

SEQ ID NO: 200587 - DNA, 15 bp, Homo sapiens
actcaggaaacaaag

SEQ ID NO: 200588 - DNA, 15 bp, Homo sapiens
cactcaggaaacaaa

SEQ ID NO: 200589 - DNA, 15 bp, Homo sapiens
gcactcaggaaacaa

SEQ ID NO: 200590 - DNA, 15 bp, Homo sapiens
ggcactcaggaaaca

SEQ ID NO: 200591 - DNA, 15 bp, Homo sapiens
tggcactcaggaaac

SEQ ID NO: 200592 - DNA, 15 bp, Homo sapiens
atggcactcaggaaa

SEQ ID NO: 200593 - DNA, 15 bp, Homo sapiens
aatggcactcaggaa

SEQ ID NO: 200594 - DNA, 15 bp, Homo sapiens
aaatggcactcagga

SEQ ID NO: 200595 - DNA, 15 bp, Homo sapiens
aaaatggcactcagg

SEQ ID NO: 200596 - DNA, 15 bp, Homo sapiens
aaaaatggcactcag

SEQ ID NO: 200597 - DNA, 15 bp, Homo sapiens
caaaaatggcactca

SEQ ID NO: 200598 - DNA, 15 bp, Homo sapiens
ccaaaaatggcactc

SEQ ID NO: 200599 - DNA, 15 bp, Homo sapiens
gccaaaaatggcact

SEQ ID NO: 200600 - DNA, 15 bp, Homo sapiens
ggccaaaaatggcac

SEQ ID NO: 200601 - DNA, 15 bp, Homo sapiens
gggccaaaaatggca

SEQ ID NO: 200602 - DNA, 15 bp, Homo sapiens
ggggccaaaaatggc

SEQ ID NO: 200603 - DNA, 15 bp, Homo sapiens
aggggccaaaaatgg

SEQ ID NO: 200604 - DNA, 15 bp, Homo sapiens
gaggggccaaaaatg

SEQ ID NO: 200605 - DNA, 15 bp, Homo sapiens
ggaggggccaaaaat

SEQ ID NO: 200606 - DNA, 15 bp, Homo sapiens
gggaggggccaaaaa

SEQ ID NO: 200607 - DNA, 15 bp, Homo sapiens
tgggaggggccaaaa

SEQ ID NO: 200608 - DNA, 15 bp, Homo sapiens
gtgggaggggccaaa

SEQ ID NO: 200609 - DNA, 15 bp, Homo sapiens
ggtgggaggggccaa

SEQ ID NO: 200610 - DNA, 15 bp, Homo sapiens
gggtgggaggggcca

SEQ ID NO: 200611 - DNA, 15 bp, Homo sapiens
agggtgggaggggcc

SEQ ID NO: 200612 - DNA, 15 bp, Homo sapiens
cagggtgggaggggc

SEQ ID NO: 200613 - DNA, 15 bp, Homo sapiens
ccagggtgggagggg

SEQ ID NO: 200614 - DNA, 15 bp, Homo sapiens
accagggtgggaggg

SEQ ID NO: 200615 - DNA, 15 bp, Homo sapiens
gaccagggtgggagg

SEQ ID NO: 200616 - DNA, 15 bp, Homo sapiens
ggaccagggtgggag

SEQ ID NO: 200617 - DNA, 15 bp, Homo sapiens
aggaccagggtggga

SEQ ID NO: 200618 - DNA, 15 bp, Homo sapiens
gaggaccagggtggg

SEQ ID NO: 200619 - DNA, 15 bp, Homo sapiens
ggaggaccagggtgg

SEQ ID NO: 200620 - DNA, 15 bp, Homo sapiens
aggaggaccagggtg

SEQ ID NO: 200621 - DNA, 15 bp, Homo sapiens
taggaggaccagggt

SEQ ID NO: 200622 - DNA, 15 bp, Homo sapiens
ctaggaggaccaggg

SEQ ID NO: 200623 - DNA, 15 bp, Homo sapiens
tctaggaggaccagg

SEQ ID NO: 200624 - DNA, 15 bp, Homo sapiens
atctaggaggaccag

SEQ ID NO: 200625 - DNA, 15 bp, Homo sapiens
gatctaggaggacca

SEQ ID NO: 200626 - DNA, 15 bp, Homo sapiens
ggatctaggaggacc

SEQ ID NO: 200627 - DNA, 15 bp, Homo sapiens
aggatctaggaggac

SEQ ID NO: 200628 - DNA, 15 bp, Homo sapiens
caggatctaggagga

SEQ ID NO: 200629 - DNA, 15 bp, Homo sapiens
ccaggatctaggagg

SEQ ID NO: 200630 - DNA, 15 bp, Homo sapiens
gccaggatctaggag

SEQ ID NO: 200631 - DNA, 15 bp, Homo sapiens
ggccaggatctagga

SEQ ID NO: 200632 - DNA, 15 bp, Homo sapiens
aggccaggatctagg

SEQ ID NO: 200633 - DNA, 15 bp, Homo sapiens
gaggccaggatctag

SEQ ID NO: 200634 - DNA, 15 bp, Homo sapiens
tgaggccaggatcta

SEQ ID NO: 200635 - DNA, 15 bp, Homo sapiens
ctgaggccaggatct

SEQ ID NO: 200636 - DNA, 15 bp, Homo sapiens
gctgaggccaggatc

SEQ ID NO: 200637 - DNA, 15 bp, Homo sapiens
agctgaggccaggat

SEQ ID NO: 200638 - DNA, 15 bp, Homo sapiens
aagctgaggccagga

SEQ ID NO: 200639 - DNA, 15 bp, Homo sapiens
taagctgaggccagg

SEQ ID NO: 200640 - DNA, 15 bp, Homo sapiens
gtaagctgaggccag

SEQ ID NO: 200641 - DNA, 15 bp, Homo sapiens
agtaagctgaggcca

SEQ ID NO: 200642 - DNA, 15 bp, Homo sapiens
aagtaagctgaggcc

SEQ ID NO: 200643 - DNA, 15 bp, Homo sapiens
gaagtaagctgaggc

SEQ ID NO: 200644 - DNA, 15 bp, Homo sapiens
ggaagtaagctgagg

SEQ ID NO: 200645 - DNA, 15 bp, Homo sapiens
gggaagtaagctgag

SEQ ID NO: 200646 - DNA, 15 bp, Homo sapiens
ggggaagtaagctga

SEQ ID NO: 200647 - DNA, 15 bp, Homo sapiens
aggggaagtaagctg

SEQ ID NO: 200648 - DNA, 15 bp, Homo sapiens
caggggaagtaagct

SEQ ID NO: 200649 - DNA, 15 bp, Homo sapiens
acaggggaagtaagc

SEQ ID NO: 200650 - DNA, 15 bp, Homo sapiens
cacaggggaagtaag

SEQ ID NO: 200651 - DNA, 15 bp, Homo sapiens
ccacaggggaagtaa

SEQ ID NO: 200652 - DNA, 15 bp, Homo sapiens
accacaggggaagta

SEQ ID NO: 200653 - DNA, 15 bp, Homo sapiens
aaccacaggggaagt

SEQ ID NO: 200654 - DNA, 15 bp, Homo sapiens
gaaccacaggggaag

SEQ ID NO: 200655 - DNA, 15 bp, Homo sapiens
ggaaccacaggggaa

SEQ ID NO: 200656 - DNA, 15 bp, Homo sapiens
tggaaccacagggga

SEQ ID NO: 200657 - DNA, 15 bp, Homo sapiens
atggaaccacagggg

SEQ ID NO: 200658 - DNA, 15 bp, Homo sapiens
catggaaccacaggg

SEQ ID NO: 200659 - DNA, 15 bp, Homo sapiens
acatggaaccacagg

SEQ ID NO: 200660 - DNA, 15 bp, Homo sapiens
aacatggaaccacag

SEQ ID NO: 200661 - DNA, 15 bp, Homo sapiens
caacatggaaccaca

SEQ ID NO: 200662 - DNA, 15 bp, Homo sapiens
tcaacatggaaccac

SEQ ID NO: 200663 - DNA, 15 bp, Homo sapiens
atcaacatggaacca

SEQ ID NO: 200664 - DNA, 15 bp, Homo sapiens
aatcaacatggaacc

SEQ ID NO: 200665 - DNA, 15 bp, Homo sapiens
gaatcaacatggaac

SEQ ID NO: 200666 - DNA, 15 bp, Homo sapiens
ggaatcaacatggaa

SEQ ID NO: 200667 - DNA, 15 bp, Homo sapiens
aggaatcaacatgga

SEQ ID NO: 200668 - DNA, 15 bp, Homo sapiens
aaggaatcaacatgg

SEQ ID NO: 200669 - DNA, 15 bp, Homo sapiens
taaggaatcaacatg

SEQ ID NO: 200670 - DNA, 15 bp, Homo sapiens
ataaggaatcaacat

SEQ ID NO: 200671 - DNA, 15 bp, Homo sapiens
aataaggaatcaaca

SEQ ID NO: 200672 - DNA, 15 bp, Homo sapiens
taataaggaatcaac

SEQ ID NO: 200673 - DNA, 15 bp, Homo sapiens
ttaataaggaatcaa

SEQ ID NO: 200674 - DNA, 15 bp, Homo sapiens
tttaataaggaatca

SEQ ID NO: 200675 - DNA, 15 bp, Homo sapiens
ttttaataaggaatc

SEQ ID NO: 200676 - DNA, 15 bp, Homo sapiens
attttaataaggaat

SEQ ID NO: 200677 - DNA, 15 bp, Homo sapiens
cattttaataaggaa

SEQ ID NO: 200678 - DNA, 15 bp, Homo sapiens
acattttaataagga

SEQ ID NO: 200679 - DNA, 15 bp, Homo sapiens
gacattttaataagg

SEQ ID NO: 200680 - DNA, 15 bp, Homo sapiens
tgacattttaataag

SEQ ID NO: 200681 - DNA, 15 bp, Homo sapiens
gtgacattttaataa

SEQ ID NO: 200682 - DNA, 15 bp, Homo sapiens
ggtgacattttaata

SEQ ID NO: 200683 - DNA, 15 bp, Homo sapiens
aggtgacattttaat

SEQ ID NO: 200684 - DNA, 15 bp, Homo sapiens
caggtgacattttaa

SEQ ID NO: 200685 - DNA, 15 bp, Homo sapiens
gcaggtgacatttta

SEQ ID NO: 200686 - DNA, 15 bp, Homo sapiens
tgcaggtgacatttt

SEQ ID NO: 200687 - DNA, 15 bp, Homo sapiens
ttgcaggtgacattt

SEQ ID NO: 200688 - DNA, 15 bp, Homo sapiens
cttgcaggtgacatt

SEQ ID NO: 200689 - DNA, 15 bp, Homo sapiens
acttgcaggtgacat

SEQ ID NO: 200690 - DNA, 15 bp, Homo sapiens
gacttgcaggtgaca

SEQ ID NO: 200691 - DNA, 15 bp, Homo sapiens
tgacttgcaggtgac

SEQ ID NO: 200692 - DNA, 15 bp, Homo sapiens
atgacttgcaggtga

SEQ ID NO: 200693 - DNA, 15 bp, Homo sapiens
catgacttgcaggtg

SEQ ID NO: 200694 - DNA, 15 bp, Homo sapiens
tcatgacttgcaggt

SEQ ID NO: 200695 - DNA, 15 bp, Homo sapiens
ttcatgacttgcagg

SEQ ID NO: 200696 - DNA, 15 bp, Homo sapiens
tttcatgacttgcag

SEQ ID NO: 200697 - DNA, 15 bp, Homo sapiens
ttttcatgacttgca

SEQ ID NO: 200698 - DNA, 15 bp, Homo sapiens
gttttcatgacttgc

SEQ ID NO: 200699 - DNA, 15 bp, Homo sapiens
agttttcatgacttg

SEQ ID NO: 200700 - DNA, 15 bp, Homo sapiens
gagttttcatgactt

SEQ ID NO: 200701 - DNA, 15 bp, Homo sapiens
tgagttttcatgact

SEQ ID NO: 200702 - DNA, 15 bp, Homo sapiens
ctgagttttcatgac

SEQ ID NO: 200703 - DNA, 15 bp, Homo sapiens
actgagttttcatga

SEQ ID NO: 200704 - DNA, 15 bp, Homo sapiens
cactgagttttcatg

SEQ ID NO: 200705 - DNA, 15 bp, Homo sapiens
acactgagttttcat

SEQ ID NO: 200706 - DNA, 15 bp, Homo sapiens
cacactgagttttca

SEQ ID NO: 200707 - DNA, 15 bp, Homo sapiens
ccacactgagttttc

SEQ ID NO: 200708 - DNA, 15 bp, Homo sapiens
accacactgagtttt

SEQ ID NO: 200709 - DNA, 15 bp, Homo sapiens
aaccacactgagttt

SEQ ID NO: 200710 - DNA, 15 bp, Homo sapiens
aaaccacactgagtt

SEQ ID NO: 200711 - DNA, 15 bp, Homo sapiens
gaaaccacactgagt

SEQ ID NO: 200712 - DNA, 15 bp, Homo sapiens
ggaaaccacactgag

SEQ ID NO: 200713 - DNA, 15 bp, Homo sapiens
aggaaaccacactga

SEQ ID NO: 200714 - DNA, 15 bp, Homo sapiens
caggaaaccacactg

SEQ ID NO: 200715 - DNA, 15 bp, Homo sapiens
tcaggaaaccacact

SEQ ID NO: 200716 - DNA, 15 bp, Homo sapiens
ttcaggaaaccacac

SEQ ID NO: 200717 - DNA, 15 bp, Homo sapiens
tttcaggaaaccaca

SEQ ID NO: 200718 - DNA, 15 bp, Homo sapiens
ctttcaggaaaccac

SEQ ID NO: 200719 - DNA, 15 bp, Homo sapiens
tctttcaggaaacca

SEQ ID NO: 200720 - DNA, 15 bp, Homo sapiens
ctctttcaggaaacc

SEQ ID NO: 200721 - DNA, 15 bp, Homo sapiens
cctctttcaggaaac

SEQ ID NO: 200722 - DNA, 15 bp, Homo sapiens
tcctctttcaggaaa

SEQ ID NO: 200723 - DNA, 15 bp, Homo sapiens
ctcctctttcaggaa

SEQ ID NO: 200724 - DNA, 15 bp, Homo sapiens
cctcctctttcagga

SEQ ID NO: 200725 - DNA, 15 bp, Homo sapiens
ccctcctctttcagg

SEQ ID NO: 200726 - DNA, 15 bp, Homo sapiens
cccctcctctttcag

SEQ ID NO: 200727 - DNA, 15 bp, Homo sapiens
gcccctcctctttca

SEQ ID NO: 200728 - DNA, 15 bp, Homo sapiens
tgcccctcctctttc

SEQ ID NO: 200729 - DNA, 15 bp, Homo sapiens
ctgcccctcctcttt

SEQ ID NO: 200730 - DNA, 15 bp, Homo sapiens
actgcccctcctctt

SEQ ID NO: 200731 - DNA, 15 bp, Homo sapiens
cactgcccctcctct

SEQ ID NO: 200732 - DNA, 15 bp, Homo sapiens
tcactgcccctcctc

SEQ ID NO: 200733 - DNA, 15 bp, Homo sapiens
atcactgcccctcct

SEQ ID NO: 200734 - DNA, 15 bp, Homo sapiens
aatcactgcccctcc

SEQ ID NO: 200735 - DNA, 15 bp, Homo sapiens
caatcactgcccctc

SEQ ID NO: 200736 - DNA, 15 bp, Homo sapiens
acaatcactgcccct

SEQ ID NO: 200737 - DNA, 15 bp, Homo sapiens
gacaatcactgcccc

SEQ ID NO: 200738 - DNA, 15 bp, Homo sapiens
ggacaatcactgccc

SEQ ID NO: 200739 - DNA, 15 bp, Homo sapiens
tggacaatcactgcc

SEQ ID NO: 200740 - DNA, 15 bp, Homo sapiens
ctggacaatcactgc

SEQ ID NO: 200741 - DNA, 15 bp, Homo sapiens
tctggacaatcactg

SEQ ID NO: 200742 - DNA, 15 bp, Homo sapiens
ctctggacaatcact

SEQ ID NO: 200743 - DNA, 15 bp, Homo sapiens
actctggacaatcac

SEQ ID NO: 200744 - DNA, 15 bp, Homo sapiens
cactctggacaatca

SEQ ID NO: 200745 - DNA, 15 bp, Homo sapiens
acactctggacaatc

SEQ ID NO: 200746 - DNA, 15 bp, Homo sapiens
aacactctggacaat

SEQ ID NO: 200747 - DNA, 15 bp, Homo sapiens
gaacactctggacaa

SEQ ID NO: 200748 - DNA, 15 bp, Homo sapiens
agaacactctggaca

SEQ ID NO: 200749 - DNA, 15 bp, Homo sapiens
aagaacactctggac

SEQ ID NO: 200750 - DNA, 15 bp, Homo sapiens
aaagaacactctgga

SEQ ID NO: 200751 - DNA, 15 bp, Homo sapiens
aaaagaacactctgg

SEQ ID NO: 200752 - DNA, 15 bp, Homo sapiens
caaaagaacactctg

SEQ ID NO: 200753 - DNA, 15 bp, Homo sapiens
acaaaagaacactct

SEQ ID NO: 200754 - DNA, 15 bp, Homo sapiens
gacaaaagaacactc

SEQ ID NO: 200755 - DNA, 15 bp, Homo sapiens
tgacaaaagaacact

SEQ ID NO: 200756 - DNA, 15 bp, Homo sapiens
gtgacaaaagaacac

SEQ ID NO: 200757 - DNA, 15 bp, Homo sapiens
cgtgacaaaagaaca

SEQ ID NO: 200758 - DNA, 15 bp, Homo sapiens
tcgtgacaaaagaac

SEQ ID NO: 200759 - DNA, 15 bp, Homo sapiens
atcgtgacaaaagaa

SEQ ID NO: 200760 - DNA, 15 bp, Homo sapiens
catcgtgacaaaaga

SEQ ID NO: 200761 - DNA, 15 bp, Homo sapiens
tcatcgtgacaaaag

SEQ ID NO: 200762 - DNA, 15 bp, Homo sapiens
ctcatcgtgacaaaa

SEQ ID NO: 200763 - DNA, 15 bp, Homo sapiens
tctcatcgtgacaaa

SEQ ID NO: 200764 - DNA, 15 bp, Homo sapiens
ttctcatcgtgacaa

SEQ ID NO: 200765 - DNA, 15 bp, Homo sapiens
attctcatcgtgaca

SEQ ID NO: 200766 - DNA, 15 bp, Homo sapiens
aattctcatcgtgac

SEQ ID NO: 200767 - DNA, 15 bp, Homo sapiens
caattctcatcgtga

SEQ ID NO: 200768 - DNA, 15 bp, Homo sapiens
gcaattctcatcgtg

SEQ ID NO: 200769 - DNA, 15 bp, Homo sapiens
agcaattctcatcgt

SEQ ID NO: 200770 - DNA, 15 bp, Homo sapiens
aagcaattctcatcg

SEQ ID NO: 200771 - DNA, 15 bp, Homo sapiens
caagcaattctcatc

SEQ ID NO: 200772 - DNA, 15 bp, Homo sapiens
ccaagcaattctcat

SEQ ID NO: 200773 - DNA, 15 bp, Homo sapiens
cccaagcaattctca

SEQ ID NO: 200774 - DNA, 15 bp, Homo sapiens
gcccaagcaattctc

SEQ ID NO: 200775 - DNA, 15 bp, Homo sapiens
cgcccaagcaattct

SEQ ID NO: 200776 - DNA, 15 bp, Homo sapiens
tcgcccaagcaattc

SEQ ID NO: 200777 - DNA, 15 bp, Homo sapiens
gtcgcccaagcaatt

SEQ ID NO: 200778 - DNA, 15 bp, Homo sapiens
tgtcgcccaagcaat

SEQ ID NO: 200779 - DNA, 15 bp, Homo sapiens
ctgtcgcccaagcaa

SEQ ID NO: 200780 - DNA, 15 bp, Homo sapiens
actgtcgcccaagca

SEQ ID NO: 200781 - DNA, 15 bp, Homo sapiens
cactgtcgcccaagc

SEQ ID NO: 200782 - DNA, 15 bp, Homo sapiens
acactgtcgcccaag

SEQ ID NO: 200783 - DNA, 15 bp, Homo sapiens
gacactgtcgcccaa

SEQ ID NO: 200784 - DNA, 15 bp, Homo sapiens
tgacactgtcgccca

SEQ ID NO: 200785 - DNA, 15 bp, Homo sapiens
ttgacactgtcgccc

SEQ ID NO: 200786 - DNA, 15 bp, Homo sapiens
cttgacactgtcgcc

SEQ ID NO: 200787 - DNA, 15 bp, Homo sapiens
tcttgacactgtcgc

SEQ ID NO: 200788 - DNA, 15 bp, Homo sapiens
gtcttgacactgtcg

SEQ ID NO: 200789 - DNA, 15 bp, Homo sapiens
tgtcttgacactgtc

SEQ ID NO: 200790 - DNA, 15 bp, Homo sapiens
ctgtcttgacactgt

SEQ ID NO: 200791 - DNA, 15 bp, Homo sapiens
gctgtcttgacactg

SEQ ID NO: 200792 - DNA, 15 bp, Homo sapiens
tgctgtcttgacact

SEQ ID NO: 200793 - DNA, 15 bp, Homo sapiens
ttgctgtcttgacac

SEQ ID NO: 200794 - DNA, 15 bp, Homo sapiens
tttgctgtcttgaca

SEQ ID NO: 200795 - DNA, 15 bp, Homo sapiens
atttgctgtcttgac

SEQ ID NO: 200796 - DNA, 15 bp, Homo sapiens
tatttgctgtcttga

SEQ ID NO: 200797 - DNA, 15 bp, Homo sapiens
ttatttgctgtcttg

SEQ ID NO: 200798 - DNA, 15 bp, Homo sapiens
tttatttgctgtctt

SEQ ID NO: 200799 - DNA, 15 bp, Homo sapiens
atttatttgctgtct

SEQ ID NO: 200800 - DNA, 15 bp, Homo sapiens
aatttatttgctgtc

SEQ ID NO: 200801 - DNA, 15 bp, Homo sapiens
caatttatttgctgt

SEQ ID NO: 200802 - DNA, 15 bp, Homo sapiens
gcaatttatttgctg

SEQ ID NO: 200803 - DNA, 15 bp, Homo sapiens
ggcaatttatttgct

SEQ ID NO: 200804 - DNA, 15 bp, Homo sapiens
aggcaatttatttgc

SEQ ID NO: 200805 - DNA, 15 bp, Homo sapiens
gaggcaatttatttg

SEQ ID NO: 200806 - DNA, 15 bp, Homo sapiens
ggaggcaatttattt

SEQ ID NO: 200807 - DNA, 15 bp, Homo sapiens
aggaggcaatttatt

SEQ ID NO: 200808 - DNA, 15 bp, Homo sapiens
gaggaggcaatttat

SEQ ID NO: 200809 - DNA, 15 bp, Homo sapiens
ggaggaggcaattta

SEQ ID NO: 200810 - DNA, 15 bp, Homo sapiens
gggaggaggcaattt

SEQ ID NO: 200811 - DNA, 15 bp, Homo sapiens
ggggaggaggcaatt

SEQ ID NO: 200812 - DNA, 15 bp, Homo sapiens
aggggaggaggcaat

SEQ ID NO: 200813 - DNA, 15 bp, Homo sapiens
aaggggaggaggcaa

SEQ ID NO: 200814 - DNA, 15 bp, Homo sapiens
gaaggggaggaggca

SEQ ID NO: 200815 - DNA, 15 bp, Homo sapiens
tgaaggggaggaggc

SEQ ID NO: 200816 - DNA, 15 bp, Homo sapiens
ttgaaggggaggagg

SEQ ID NO: 200817 - DNA, 15 bp, Homo sapiens
attgaaggggaggag

SEQ ID NO: 200818 - DNA, 15 bp, Homo sapiens
cattgaaggggagga

SEQ ID NO: 200819 - DNA, 15 bp, Homo sapiens
acattgaaggggagg

SEQ ID NO: 200820 - DNA, 15 bp, Homo sapiens
gacattgaaggggag

SEQ ID NO: 200821 - DNA, 15 bp, Homo sapiens
agacattgaagggga

SEQ ID NO: 200822 - DNA, 15 bp, Homo sapiens
gagacattgaagggg

SEQ ID NO: 200823 - DNA, 15 bp, Homo sapiens
tgagacattgaaggg

SEQ ID NO: 200824 - DNA, 15 bp, Homo sapiens
ctgagacattgaagg

SEQ ID NO: 200825 - DNA, 15 bp, Homo sapiens
actgagacattgaag

SEQ ID NO: 200826 - DNA, 15 bp, Homo sapiens
cactgagacattgaa

SEQ ID NO: 200827 - DNA, 15 bp, Homo sapiens
gcactgagacattga

SEQ ID NO: 200828 - DNA, 15 bp, Homo sapiens
agcactgagacattg

SEQ ID NO: 200829 - DNA, 15 bp, Homo sapiens
cagcactgagacatt

SEQ ID NO: 200830 - DNA, 15 bp, Homo sapiens
acagcactgagacat

SEQ ID NO: 200831 - DNA, 15 bp, Homo sapiens
aacagcactgagaca

SEQ ID NO: 200832 - DNA, 15 bp, Homo sapiens
aaacagcactgagac

SEQ ID NO: 200833 - DNA, 15 bp, Homo sapiens
aaaacagcactgaga

SEQ ID NO: 200834 - DNA, 15 bp, Homo sapiens
aaaaacagcactgag

SEQ ID NO: 200835 - DNA, 15 bp, Homo sapiens
caaaaacagcactga

SEQ ID NO: 200836 - DNA, 15 bp, Homo sapiens
gcaaaaacagcactg

SEQ ID NO: 200837 - DNA, 15 bp, Homo sapiens
tgcaaaaacagcact

SEQ ID NO: 200838 - DNA, 15 bp, Homo sapiens
ctgcaaaaacagcac

SEQ ID NO: 200839 - DNA, 15 bp, Homo sapiens
gctgcaaaaacagca

SEQ ID NO: 200840 - DNA, 15 bp, Homo sapiens
tgctgcaaaaacagc

SEQ ID NO: 200841 - DNA, 15 bp, Homo sapiens
atgctgcaaaaacag

SEQ ID NO: 200842 - DNA, 15 bp, Homo sapiens
catgctgcaaaaaca

SEQ ID NO: 200843 - DNA, 15 bp, Homo sapiens
tcatgctgcaaaaac

SEQ ID NO: 200844 - DNA, 15 bp, Homo sapiens
ttcatgctgcaaaaa

SEQ ID NO: 200845 - DNA, 15 bp, Homo sapiens
attcatgctgcaaaa

SEQ ID NO: 200846 - DNA, 15 bp, Homo sapiens
cattcatgctgcaaa

SEQ ID NO: 200847 - DNA, 15 bp, Homo sapiens
ccattcatgctgcaa

SEQ ID NO: 200848 - DNA, 15 bp, Homo sapiens
accattcatgctgca

SEQ ID NO: 200849 - DNA, 15 bp, Homo sapiens
aaccattcatgctgc

SEQ ID NO: 200850 - DNA, 15 bp, Homo sapiens
gaaccattcatgctg

SEQ ID NO: 200851 - DNA, 15 bp, Homo sapiens
ggaaccattcatgct

SEQ ID NO: 200852 - DNA, 15 bp, Homo sapiens
tggaaccattcatgc

SEQ ID NO: 200853 - DNA, 15 bp, Homo sapiens
ctggaaccattcatg

SEQ ID NO: 200854 - DNA, 15 bp, Homo sapiens
actggaaccattcat

SEQ ID NO: 200855 - DNA, 15 bp, Homo sapiens
cactggaaccattca

SEQ ID NO: 200856 - DNA, 15 bp, Homo sapiens
acactggaaccattc

SEQ ID NO: 200857 - DNA, 15 bp, Homo sapiens
cacactggaaccatt

SEQ ID NO: 200858 - DNA, 15 bp, Homo sapiens
ccacactggaaccat

SEQ ID NO: 200859 - DNA, 15 bp, Homo sapiens
tccacactggaacca

SEQ ID NO: 200860 - DNA, 15 bp, Homo sapiens
ctccacactggaacc

SEQ ID NO: 200861 - DNA, 15 bp, Homo sapiens
tctccacactggaac

SEQ ID NO: 200862 - DNA, 15 bp, Homo sapiens
atctccacactggaa

SEQ ID NO: 200863 - DNA, 15 bp, Homo sapiens
tatctccacactgga

SEQ ID NO: 200864 - DNA, 15 bp, Homo sapiens
ttatctccacactgg

SEQ ID NO: 200865 - DNA, 15 bp, Homo sapiens
attatctccacactg

SEQ ID NO: 200866 - DNA, 15 bp, Homo sapiens
gattatctccacact

SEQ ID NO: 200867 - DNA, 15 bp, Homo sapiens
ggattatctccacac

SEQ ID NO: 200868 - DNA, 15 bp, Homo sapiens
aggattatctccaca

SEQ ID NO: 200869 - DNA, 15 bp, Homo sapiens
aaggattatctccac

SEQ ID NO: 200870 - DNA, 15 bp, Homo sapiens
caaggattatctcca

SEQ ID NO: 200871 - DNA, 15 bp, Homo sapiens
gcaaggattatctcc

SEQ ID NO: 200872 - DNA, 15 bp, Homo sapiens
agcaaggattatctc

SEQ ID NO: 200873 - DNA, 15 bp, Homo sapiens
gagcaaggattatct

SEQ ID NO: 200874 - DNA, 15 bp, Homo sapiens
tgagcaaggattatc

SEQ ID NO: 200875 - DNA, 15 bp, Homo sapiens
atgagcaaggattat

SEQ ID NO: 200876 - DNA, 15 bp, Homo sapiens
gatgagcaaggatta

SEQ ID NO: 200877 - DNA, 15 bp, Homo sapiens
agatgagcaaggatt

SEQ ID NO: 200878 - DNA, 15 bp, Homo sapiens
aagatgagcaaggat

SEQ ID NO: 200879 - DNA, 15 bp, Homo sapiens
aaagatgagcaagga

SEQ ID NO: 200880 - DNA, 15 bp, Homo sapiens
aaaagatgagcaagg

SEQ ID NO: 200881 - DNA, 15 bp, Homo sapiens
gaaaagatgagcaag

SEQ ID NO: 200882 - DNA, 15 bp, Homo sapiens
tgaaaagatgagcaa

SEQ ID NO: 200883 - DNA, 15 bp, Homo sapiens
gtgaaaagatgagca

SEQ ID NO: 200884 - DNA, 15 bp, Homo sapiens
ggtgaaaagatgagc

SEQ ID NO: 200885 - DNA, 15 bp, Homo sapiens
tggtgaaaagatgag

SEQ ID NO: 200886 - DNA, 15 bp, Homo sapiens
ctggtgaaaagatga

SEQ ID NO: 200887 - DNA, 15 bp, Homo sapiens
cctggtgaaaagatg

SEQ ID NO: 200888 - DNA, 15 bp, Homo sapiens
acctggtgaaaagat

SEQ ID NO: 200889 - DNA, 15 bp, Homo sapiens
aacctggtgaaaaga

SEQ ID NO: 200890 - DNA, 15 bp, Homo sapiens
gaacctggtgaaaag

SEQ ID NO: 200891 - DNA, 15 bp, Homo sapiens
agaacctggtgaaaa

SEQ ID NO: 200892 - DNA, 15 bp, Homo sapiens
aagaacctggtgaaa

SEQ ID NO: 200893 - DNA, 15 bp, Homo sapiens
caagaacctggtgaa

SEQ ID NO: 200894 - DNA, 15 bp, Homo sapiens
tcaagaacctggtga

SEQ ID NO: 200895 - DNA, 15 bp, Homo sapiens
ttcaagaacctggtg

SEQ ID NO: 200896 - DNA, 15 bp, Homo sapiens
attcaagaacctggt

SEQ ID NO: 200897 - DNA, 15 bp, Homo sapiens
cattcaagaacctgg

SEQ ID NO: 200898 - DNA, 15 bp, Homo sapiens
acattcaagaacctg

SEQ ID NO: 200899 - DNA, 15 bp, Homo sapiens
cacattcaagaacct

SEQ ID NO: 200900 - DNA, 15 bp, Homo sapiens
ccacattcaagaacc

SEQ ID NO: 200901 - DNA, 15 bp, Homo sapiens
tccacattcaagaac

SEQ ID NO: 200902 - DNA, 15 bp, Homo sapiens
ttccacattcaagaa

SEQ ID NO: 200903 - DNA, 15 bp, Homo sapiens
tttccacattcaaga

SEQ ID NO: 200904 - DNA, 15 bp, Homo sapiens
ttttccacattcaag

SEQ ID NO: 200905 - DNA, 15 bp, Homo sapiens
attttccacattcaa

SEQ ID NO: 200906 - DNA, 15 bp, Homo sapiens
cattttccacattca

SEQ ID NO: 200907 - DNA, 15 bp, Homo sapiens
ccattttccacattc

SEQ ID NO: 200908 - DNA, 15 bp, Homo sapiens
cccattttccacatt

SEQ ID NO: 200909 - DNA, 15 bp, Homo sapiens
gcccattttccacat

SEQ ID NO: 200910 - DNA, 15 bp, Homo sapiens
tgcccattttccaca

SEQ ID NO: 200911 - DNA, 15 bp, Homo sapiens
ttgcccattttccac

SEQ ID NO: 200912 - DNA, 15 bp, Homo sapiens
tttgcccattttcca

SEQ ID NO: 200913 - DNA, 15 bp, Homo sapiens
gtttgcccattttcc

SEQ ID NO: 200914 - DNA, 15 bp, Homo sapiens
tgtttgcccattttc

SEQ ID NO: 200915 - DNA, 15 bp, Homo sapiens
ctgtttgcccatttt

SEQ ID NO: 200916 - DNA, 15 bp, Homo sapiens
actgtttgcccattt

SEQ ID NO: 200917 - DNA, 15 bp, Homo sapiens
aactgtttgcccatt

SEQ ID NO: 200918 - DNA, 15 bp, Homo sapiens
gaactgtttgcccat

SEQ ID NO: 200919 - DNA, 15 bp, Homo sapiens
agaactgtttgccca

SEQ ID NO: 200920 - DNA, 15 bp, Homo sapiens
gagaactgtttgccc

SEQ ID NO: 200921 - DNA, 15 bp, Homo sapiens
ggagaactgtttgcc

SEQ ID NO: 200922 - DNA, 15 bp, Homo sapiens
gggagaactgtttgc

SEQ ID NO: 200923 - DNA, 15 bp, Homo sapiens
agggagaactgtttg

SEQ ID NO: 200924 - DNA, 15 bp, Homo sapiens
gagggagaactgttt

SEQ ID NO: 200925 - DNA, 15 bp, Homo sapiens
tgagggagaactgtt

SEQ ID NO: 200926 - DNA, 15 bp, Homo sapiens
gtgagggagaactgt

SEQ ID NO: 200927 - DNA, 15 bp, Homo sapiens
ggtgagggagaactg

SEQ ID NO: 200928 - DNA, 15 bp, Homo sapiens
tggtgagggagaact

SEQ ID NO: 200929 - DNA, 15 bp, Homo sapiens
gtggtgagggagaac

SEQ ID NO: 200930 - DNA, 15 bp, Homo sapiens
tgtggtgagggagaa

SEQ ID NO: 200931 - DNA, 15 bp, Homo sapiens
gtgtggtgagggaga

SEQ ID NO: 200932 - DNA, 15 bp, Homo sapiens
tgtgtggtgagggag

SEQ ID NO: 200933 - DNA, 15 bp, Homo sapiens
gtgtgtggtgaggga

SEQ ID NO: 200934 - DNA, 15 bp, Homo sapiens
agtgtgtggtgaggg

SEQ ID NO: 200935 - DNA, 15 bp, Homo sapiens
gagtgtgtggtgagg

SEQ ID NO: 200936 - DNA, 15 bp, Homo sapiens
ggagtgtgtggtgag

SEQ ID NO: 200937 - DNA, 15 bp, Homo sapiens
aggagtgtgtggtga

SEQ ID NO: 200938 - DNA, 15 bp, Homo sapiens
caggagtgtgtggtg

SEQ ID NO: 200939 - DNA, 15 bp, Homo sapiens
acaggagtgtgtggt

SEQ ID NO: 200940 - DNA, 15 bp, Homo sapiens
aacaggagtgtgtgg

SEQ ID NO: 200941 - DNA, 15 bp, Homo sapiens
taacaggagtgtgtg

SEQ ID NO: 200942 - DNA, 15 bp, Homo sapiens
ataacaggagtgtgt

SEQ ID NO: 200943 - DNA, 15 bp, Homo sapiens
aataacaggagtgtg

SEQ ID NO: 200944 - DNA, 15 bp, Homo sapiens
aaataacaggagtgt

SEQ ID NO: 200945 - DNA, 15 bp, Homo sapiens
gaaataacaggagtg

SEQ ID NO: 200946 - DNA, 15 bp, Homo sapiens
ggaaataacaggagt

SEQ ID NO: 200947 - DNA, 15 bp, Homo sapiens
tggaaataacaggag

SEQ ID NO: 200948 - DNA, 15 bp, Homo sapiens
ctggaaataacagga

SEQ ID NO: 200949 - DNA, 15 bp, Homo sapiens
actggaaataacagg

SEQ ID NO: 200950 - DNA, 15 bp, Homo sapiens
cactggaaataacag

SEQ ID NO: 200951 - DNA, 15 bp, Homo sapiens
acactggaaataaca

SEQ ID NO: 200952 - DNA, 15 bp, Homo sapiens
gacactggaaataac

SEQ ID NO: 200953 - DNA, 15 bp, Homo sapiens
ggacactggaaataa

SEQ ID NO: 200954 - DNA, 15 bp, Homo sapiens
gggacactggaaata

SEQ ID NO: 200955 - DNA, 15 bp, Homo sapiens
cgggacactggaaat

SEQ ID NO: 200956 - DNA, 15 bp, Homo sapiens
acgggacactggaaa

SEQ ID NO: 200957 - DNA, 15 bp, Homo sapiens
cacgggacactggaa

SEQ ID NO: 200958 - DNA, 15 bp, Homo sapiens
ccacgggacactgga

SEQ ID NO: 200959 - DNA, 15 bp, Homo sapiens
gccacgggacactgg

SEQ ID NO: 200960 - DNA, 15 bp, Homo sapiens
ggccacgggacactg

SEQ ID NO: 200961 - DNA, 15 bp, Homo sapiens
tggccacgggacact

SEQ ID NO: 200962 - DNA, 15 bp, Homo sapiens
atggccacgggacac

SEQ ID NO: 200963 - DNA, 15 bp, Homo sapiens
tatggccacgggaca

SEQ ID NO: 200964 - DNA, 15 bp, Homo sapiens
gtatggccacgggac

SEQ ID NO: 200965 - DNA, 15 bp, Homo sapiens
tgtatggccacggga

SEQ ID NO: 200966 - DNA, 15 bp, Homo sapiens
gtgtatggccacggg

SEQ ID NO: 200967 - DNA, 15 bp, Homo sapiens
ggtgtatggccacgg

SEQ ID NO: 200968 - DNA, 15 bp, Homo sapiens
gggtgtatggccacg

SEQ ID NO: 200969 - DNA, 15 bp, Homo sapiens
tgggtgtatggccac

SEQ ID NO: 200970 - DNA, 15 bp, Homo sapiens
atgggtgtatggcca

SEQ ID NO: 200971 - DNA, 15 bp, Homo sapiens
gatgggtgtatggcc

SEQ ID NO: 200972 - DNA, 15 bp, Homo sapiens
tgatgggtgtatggc

SEQ ID NO: 200973 - DNA, 15 bp, Homo sapiens
ctgatgggtgtatgg

SEQ ID NO: 200974 - DNA, 15 bp, Homo sapiens
gctgatgggtgtatg

SEQ ID NO: 200975 - DNA, 15 bp, Homo sapiens
tgctgatgggtgtat

SEQ ID NO: 200976 - DNA, 15 bp, Homo sapiens
ctgctgatgggtgta

SEQ ID NO: 200977 - DNA, 15 bp, Homo sapiens
tctgctgatgggtgt

SEQ ID NO: 200978 - DNA, 15 bp, Homo sapiens
ctctgctgatgggtg

SEQ ID NO: 200979 - DNA, 15 bp, Homo sapiens
tctctgctgatgggt

SEQ ID NO: 200980 - DNA, 15 bp, Homo sapiens
ctctctgctgatggg

SEQ ID NO: 200981 - DNA, 15 bp, Homo sapiens
cctctctgctgatgg

SEQ ID NO: 200982 - DNA, 15 bp, Homo sapiens
gcctctctgctgatg

SEQ ID NO: 200983 - DNA, 15 bp, Homo sapiens
ggcctctctgctgat

SEQ ID NO: 200984 - DNA, 15 bp, Homo sapiens
aggcctctctgctga

SEQ ID NO: 200985 - DNA, 15 bp, Homo sapiens
caggcctctctgctg

SEQ ID NO: 200986 - DNA, 15 bp, Homo sapiens
ccaggcctctctgct

SEQ ID NO: 200987 - DNA, 15 bp, Homo sapiens
tccaggcctctctgc

SEQ ID NO: 200988 - DNA, 15 bp, Homo sapiens
ctccaggcctctctg

SEQ ID NO: 200989 - DNA, 15 bp, Homo sapiens
actccaggcctctct

SEQ ID NO: 200990 - DNA, 15 bp, Homo sapiens
cactccaggcctctc

SEQ ID NO: 200991 - DNA, 15 bp, Homo sapiens
ccactccaggcctct

SEQ ID NO: 200992 - DNA, 15 bp, Homo sapiens
gccactccaggcctc

SEQ ID NO: 200993 - DNA, 15 bp, Homo sapiens
tgccactccaggcct

SEQ ID NO: 200994 - DNA, 15 bp, Homo sapiens
ttgccactccaggcc

SEQ ID NO: 200995 - DNA, 15 bp, Homo sapiens
cttgccactccaggc

SEQ ID NO: 200996 - DNA, 15 bp, Homo sapiens
gcttgccactccagg

SEQ ID NO: 200997 - DNA, 15 bp, Homo sapiens
tgcttgccactccag

SEQ ID NO: 200998 - DNA, 15 bp, Homo sapiens
ctgcttgccactcca

SEQ ID NO: 200999 - DNA, 15 bp, Homo sapiens
cctgcttgccactcc

SEQ ID NO: 201000 - DNA, 15 bp, Homo sapiens
ccctgcttgccactc

SEQ ID NO: 201001 - DNA, 15 bp, Homo sapiens
cccctgcttgccact

SEQ ID NO: 201002 - DNA, 15 bp, Homo sapiens
acccctgcttgccac

SEQ ID NO: 201003 - DNA, 15 bp, Homo sapiens
cacccctgcttgcca

SEQ ID NO: 201004 - DNA, 15 bp, Homo sapiens
ccacccctgcttgcc

SEQ ID NO: 201005 - DNA, 15 bp, Homo sapiens
gccacccctgcttgc

SEQ ID NO: 201006 - DNA, 15 bp, Homo sapiens
agccacccctgcttg

SEQ ID NO: 201007 - DNA, 15 bp, Homo sapiens
cagccacccctgctt

SEQ ID NO: 201008 - DNA, 15 bp, Homo sapiens
ccagccacccctgct

SEQ ID NO: 201009 - DNA, 15 bp, Homo sapiens
tccagccacccctgc

SEQ ID NO: 201010 - DNA, 15 bp, Homo sapiens
ttccagccacccctg

SEQ ID NO: 201011 - DNA, 15 bp, Homo sapiens
cttccagccacccct

SEQ ID NO: 201012 - DNA, 15 bp, Homo sapiens
acttccagccacccc

SEQ ID NO: 201013 - DNA, 15 bp, Homo sapiens
gacttccagccaccc

SEQ ID NO: 201014 - DNA, 15 bp, Homo sapiens
agacttccagccacc

SEQ ID NO: 201015 - DNA, 15 bp, Homo sapiens
cagacttccagccac

SEQ ID NO: 201016 - DNA, 15 bp, Homo sapiens
gcagacttccagcca

SEQ ID NO: 201017 - DNA, 15 bp, Homo sapiens
agcagacttccagcc

SEQ ID NO: 201018 - DNA, 15 bp, Homo sapiens
gagcagacttccagc

SEQ ID NO: 201019 - DNA, 15 bp, Homo sapiens
agagcagacttccag

SEQ ID NO: 201020 - DNA, 15 bp, Homo sapiens
gagagcagacttcca

SEQ ID NO: 201021 - DNA, 15 bp, Homo sapiens
agagagcagacttcc

SEQ ID NO: 201022 - DNA, 15 bp, Homo sapiens
aagagagcagacttc

SEQ ID NO: 201023 - DNA, 15 bp, Homo sapiens
gaagagagcagactt

SEQ ID NO: 201024 - DNA, 15 bp, Homo sapiens
agaagagagcagact

SEQ ID NO: 201025 - DNA, 15 bp, Homo sapiens
gagaagagagcagac

SEQ ID NO: 201026 - DNA, 15 bp, Homo sapiens
tgagaagagagcaga

SEQ ID NO: 201027 - DNA, 15 bp, Homo sapiens
atgagaagagagcag

SEQ ID NO: 201028 - DNA, 15 bp, Homo sapiens
catgagaagagagca

SEQ ID NO: 201029 - DNA, 15 bp, Homo sapiens
tcatgagaagagagc

SEQ ID NO: 201030 - DNA, 15 bp, Homo sapiens
ctcatgagaagagag

SEQ ID NO: 201031 - DNA, 15 bp, Homo sapiens
tctcatgagaagaga

SEQ ID NO: 201032 - DNA, 15 bp, Homo sapiens
ctctcatgagaagag

SEQ ID NO: 201033 - DNA, 15 bp, Homo sapiens
actctcatgagaaga

SEQ ID NO: 201034 - DNA, 15 bp, Homo sapiens
tactctcatgagaag

SEQ ID NO: 201035 - DNA, 15 bp, Homo sapiens
gtactctcatgagaa

SEQ ID NO: 201036 - DNA, 15 bp, Homo sapiens
agtactctcatgaga

SEQ ID NO: 201037 - DNA, 15 bp, Homo sapiens
cagtactctcatgag

SEQ ID NO: 201038 - DNA, 15 bp, Homo sapiens
tcagtactctcatga

SEQ ID NO: 201039 - DNA, 15 bp, Homo sapiens
ctcagtactctcatg

SEQ ID NO: 201040 - DNA, 15 bp, Homo sapiens
cctcagtactctcat

SEQ ID NO: 201041 - DNA, 15 bp, Homo sapiens
ccctcagtactctca

SEQ ID NO: 201042 - DNA, 15 bp, Homo sapiens
gccctcagtactctc

SEQ ID NO: 201043 - DNA, 15 bp, Homo sapiens
ggccctcagtactct

SEQ ID NO: 201044 - DNA, 15 bp, Homo sapiens
gggccctcagtactc

SEQ ID NO: 201045 - DNA, 15 bp, Homo sapiens
tgggccctcagtact

SEQ ID NO: 201046 - DNA, 15 bp, Homo sapiens
ctgggccctcagtac

SEQ ID NO: 201047 - DNA, 15 bp, Homo sapiens
actgggccctcagta

SEQ ID NO: 201048 - DNA, 15 bp, Homo sapiens
cactgggccctcagt

SEQ ID NO: 201049 - DNA, 15 bp, Homo sapiens
tcactgggccctcag

SEQ ID NO: 201050 - DNA, 15 bp, Homo sapiens
ctcactgggccctca

SEQ ID NO: 201051 - DNA, 15 bp, Homo sapiens
cctcactgggccctc

SEQ ID NO: 201052 - DNA, 15 bp, Homo sapiens
acctcactgggccct

SEQ ID NO: 201053 - DNA, 15 bp, Homo sapiens
cacctcactgggccc

SEQ ID NO: 201054 - DNA, 15 bp, Homo sapiens
acacctcactgggcc

SEQ ID NO: 201055 - DNA, 15 bp, Homo sapiens
gacacctcactgggc

SEQ ID NO: 201056 - DNA, 15 bp, Homo sapiens
agacacctcactggg

SEQ ID NO: 201057 - DNA, 15 bp, Homo sapiens
cagacacctcactgg

SEQ ID NO: 201058 - DNA, 15 bp, Homo sapiens
acagacacctcactg

SEQ ID NO: 201059 - DNA, 15 bp, Homo sapiens
tacagacacctcact

SEQ ID NO: 201060 - DNA, 15 bp, Homo sapiens
ctacagacacctcac

SEQ ID NO: 201061 - DNA, 15 bp, Homo sapiens
tctacagacacctca

SEQ ID NO: 201062 - DNA, 15 bp, Homo sapiens
ctctacagacacctc

SEQ ID NO: 201063 - DNA, 15 bp, Homo sapiens
gctctacagacacct

SEQ ID NO: 201064 - DNA, 15 bp, Homo sapiens
tgctctacagacacc

SEQ ID NO: 201065 - DNA, 15 bp, Homo sapiens
ttgctctacagacac

SEQ ID NO: 201066 - DNA, 15 bp, Homo sapiens
cttgctctacagaca

SEQ ID NO: 201067 - DNA, 15 bp, Homo sapiens
tcttgctctacagac

SEQ ID NO: 201068 - DNA, 15 bp, Homo sapiens
atcttgctctacaga

SEQ ID NO: 201069 - DNA, 15 bp, Homo sapiens
tatcttgctctacag

SEQ ID NO: 201070 - DNA, 15 bp, Homo sapiens
ctatcttgctctaca

SEQ ID NO: 201071 - DNA, 15 bp, Homo sapiens
tctatcttgctctac

SEQ ID NO: 201072 - DNA, 15 bp, Homo sapiens
ctctatcttgctcta

SEQ ID NO: 201073 - DNA, 15 bp, Homo sapiens
gctctatcttgctct

SEQ ID NO: 201074 - DNA, 15 bp, Homo sapiens
ggctctatcttgctc

SEQ ID NO: 201075 - DNA, 15 bp, Homo sapiens
tggctctatcttgct

SEQ ID NO: 201076 - DNA, 15 bp, Homo sapiens
ctggctctatcttgc

SEQ ID NO: 201077 - DNA, 15 bp, Homo sapiens
cctggctctatcttg

SEQ ID NO: 201078 - DNA, 15 bp, Homo sapiens
acctggctctatctt

SEQ ID NO: 201079 - DNA, 15 bp, Homo sapiens
cacctggctctatct

SEQ ID NO: 201080 - DNA, 15 bp, Homo sapiens
tcacctggctctatc

SEQ ID NO: 201081 - DNA, 15 bp, Homo sapiens
atcacctggctctat

SEQ ID NO: 201082 - DNA, 15 bp, Homo sapiens
gatcacctggctcta

SEQ ID NO: 201083 - DNA, 15 bp, Homo sapiens
cgatcacctggctct

SEQ ID NO: 201084 - DNA, 15 bp, Homo sapiens
ccgatcacctggctc

SEQ ID NO: 201085 - DNA, 15 bp, Homo sapiens
cccgatcacctggct

SEQ ID NO: 201086 - DNA, 15 bp, Homo sapiens
ccccgatcacctggc

SEQ ID NO: 201087 - DNA, 15 bp, Homo sapiens
tccccgatcacctgg

SEQ ID NO: 201088 - DNA, 15 bp, Homo sapiens
ttccccgatcacctg

SEQ ID NO: 201089 - DNA, 15 bp, Homo sapiens
cttccccgatcacct

SEQ ID NO: 201090 - DNA, 15 bp, Homo sapiens
tcttccccgatcacc

SEQ ID NO: 201091 - DNA, 15 bp, Homo sapiens
ctcttccccgatcac

SEQ ID NO: 201092 - DNA, 15 bp, Homo sapiens
tctcttccccgatca

SEQ ID NO: 201093 - DNA, 15 bp, Homo sapiens
ctctcttccccgatc

SEQ ID NO: 201094 - DNA, 15 bp, Homo sapiens
gctctcttccccgat

SEQ ID NO: 201095 - DNA, 15 bp, Homo sapiens
ggctctcttccccga

SEQ ID NO: 201096 - DNA, 15 bp, Homo sapiens
gggctctcttccccg

SEQ ID NO: 201097 - DNA, 15 bp, Homo sapiens
agggctctcttcccc

SEQ ID NO: 201098 - DNA, 15 bp, Homo sapiens
gagggctctcttccc

SEQ ID NO: 201099 - DNA, 15 bp, Homo sapiens
ggagggctctcttcc

SEQ ID NO: 201100 - DNA, 15 bp, Homo sapiens
tggagggctctcttc

SEQ ID NO: 201101 - DNA, 15 bp, Homo sapiens
gtggagggctctctt

SEQ ID NO: 201102 - DNA, 15 bp, Homo sapiens
ggtggagggctctct

SEQ ID NO: 201103 - DNA, 15 bp, Homo sapiens
gggtggagggctctc

SEQ ID NO: 201104 - DNA, 15 bp, Homo sapiens
ggggtggagggctct

SEQ ID NO: 201105 - DNA, 15 bp, Homo sapiens
tggggtggagggctc

SEQ ID NO: 201106 - DNA, 15 bp, Homo sapiens
ctggggtggagggct

SEQ ID NO: 201107 - DNA, 15 bp, Homo sapiens
actggggtggagggc

SEQ ID NO: 201108 - DNA, 15 bp, Homo sapiens
aactggggtggaggg

SEQ ID NO: 201109 - DNA, 15 bp, Homo sapiens
aaactggggtggagg

SEQ ID NO: 201110 - DNA, 15 bp, Homo sapiens
aaaactggggtggag

SEQ ID NO: 201111 - DNA, 15 bp, Homo sapiens
gaaaactggggtgga

SEQ ID NO: 201112 - DNA, 15 bp, Homo sapiens
ggaaaactggggtgg

SEQ ID NO: 201113 - DNA, 15 bp, Homo sapiens
gggaaaactggggtg

SEQ ID NO: 201114 - DNA, 15 bp, Homo sapiens
tgggaaaactggggt

SEQ ID NO: 201115 - DNA, 15 bp, Homo sapiens
ctgggaaaactgggg

SEQ ID NO: 201116 - DNA, 15 bp, Homo sapiens
cctgggaaaactggg

SEQ ID NO: 201117 - DNA, 15 bp, Homo sapiens
tcctgggaaaactgg

SEQ ID NO: 201118 - DNA, 15 bp, Homo sapiens
ctcctgggaaaactg

SEQ ID NO: 201119 - DNA, 15 bp, Homo sapiens
cctcctgggaaaact

SEQ ID NO: 201120 - DNA, 15 bp, Homo sapiens
gcctcctgggaaaac

SEQ ID NO: 201121 - DNA, 15 bp, Homo sapiens
cgcctcctgggaaaa

SEQ ID NO: 201122 - DNA, 15 bp, Homo sapiens
tcgcctcctgggaaa

SEQ ID NO: 201123 - DNA, 15 bp, Homo sapiens
gtcgcctcctgggaa

SEQ ID NO: 201124 - DNA, 15 bp, Homo sapiens
tgtcgcctcctggga

SEQ ID NO: 201125 - DNA, 15 bp, Homo sapiens
ctgtcgcctcctggg

SEQ ID NO: 201126 - DNA, 15 bp, Homo sapiens
cctgtcgcctcctgg

SEQ ID NO: 201127 - DNA, 15 bp, Homo sapiens
gcctgtcgcctcctg

SEQ ID NO: 201128 - DNA, 15 bp, Homo sapiens
ggcctgtcgcctcct

SEQ ID NO: 201129 - DNA, 15 bp, Homo sapiens
gggcctgtcgcctcc

SEQ ID NO: 201130 - DNA, 15 bp, Homo sapiens
ggggcctgtcgcctc

SEQ ID NO: 201131 - DNA, 15 bp, Homo sapiens
tggggcctgtcgcct

SEQ ID NO: 201132 - DNA, 15 bp, Homo sapiens
atggggcctgtcgcc

SEQ ID NO: 201133 - DNA, 15 bp, Homo sapiens
gatggggcctgtcgc

SEQ ID NO: 201134 - DNA, 15 bp, Homo sapiens
agatggggcctgtcg

SEQ ID NO: 201135 - DNA, 15 bp, Homo sapiens
gagatggggcctgtc

SEQ ID NO: 201136 - DNA, 15 bp, Homo sapiens
agagatggggcctgt

SEQ ID NO: 201137 - DNA, 15 bp, Homo sapiens
cagagatggggcctg

SEQ ID NO: 201138 - DNA, 15 bp, Homo sapiens
ccagagatggggcct

SEQ ID NO: 201139 - DNA, 15 bp, Homo sapiens
cccagagatggggcc

SEQ ID NO: 201140 - DNA, 15 bp, Homo sapiens
ccccagagatggggc

SEQ ID NO: 201141 - DNA, 15 bp, Homo sapiens
cccccagagatgggg

SEQ ID NO: 201142 - DNA, 15 bp, Homo sapiens
ccccccagagatggg

SEQ ID NO: 201143 - DNA, 15 bp, Homo sapiens
tccccccagagatgg

SEQ ID NO: 201144 - DNA, 15 bp, Homo sapiens
ctccccccagagatg

SEQ ID NO: 201145 - DNA, 15 bp, Homo sapiens
actccccccagagat

SEQ ID NO: 201146 - DNA, 15 bp, Homo sapiens
cactccccccagaga

SEQ ID NO: 201147 - DNA, 15 bp, Homo sapiens
ccactccccccagag

SEQ ID NO: 201148 - DNA, 15 bp, Homo sapiens
gccactccccccaga

SEQ ID NO: 201149 - DNA, 15 bp, Homo sapiens
cgccactccccccag

SEQ ID NO: 201150 - DNA, 15 bp, Homo sapiens
gcgccactcccccca

SEQ ID NO: 201151 - DNA, 15 bp, Homo sapiens
tgcgccactcccccc

SEQ ID NO: 201152 - DNA, 15 bp, Homo sapiens
atgcgccactccccc

SEQ ID NO: 201153 - DNA, 15 bp, Homo sapiens
catgcgccactcccc

SEQ ID NO: 201154 - DNA, 15 bp, Homo sapiens
gcatgcgccactccc

SEQ ID NO: 201155 - DNA, 15 bp, Homo sapiens
ggcatgcgccactcc

SEQ ID NO: 201156 - DNA, 15 bp, Homo sapiens
aggcatgcgccactc

SEQ ID NO: 201157 - DNA, 15 bp, Homo sapiens
aaggcatgcgccact

SEQ ID NO: 201158 - DNA, 15 bp, Homo sapiens
aaaggcatgcgccac

SEQ ID NO: 201159 - DNA, 15 bp, Homo sapiens
gaaaggcatgcgcca

SEQ ID NO: 201160 - DNA, 15 bp, Homo sapiens
agaaaggcatgcgcc

SEQ ID NO: 201161 - DNA, 15 bp, Homo sapiens
gagaaaggcatgcgc

SEQ ID NO: 201162 - DNA, 15 bp, Homo sapiens
ggagaaaggcatgcg

SEQ ID NO: 201163 - DNA, 15 bp, Homo sapiens
aggagaaaggcatgc

SEQ ID NO: 201164 - DNA, 15 bp, Homo sapiens
gaggagaaaggcatg

SEQ ID NO: 201165 - DNA, 15 bp, Homo sapiens
cgaggagaaaggcat

SEQ ID NO: 201166 - DNA, 15 bp, Homo sapiens
acgaggagaaaggca

SEQ ID NO: 201167 - DNA, 15 bp, Homo sapiens
gacgaggagaaaggc

SEQ ID NO: 201168 - DNA, 15 bp, Homo sapiens
tgacgaggagaaagg

SEQ ID NO: 201169 - DNA, 15 bp, Homo sapiens
gtgacgaggagaaag

SEQ ID NO: 201170 - DNA, 15 bp, Homo sapiens
ggtgacgaggagaaa

SEQ ID NO: 201171 - DNA, 15 bp, Homo sapiens
aggtgacgaggagaa

SEQ ID NO: 201172 - DNA, 15 bp, Homo sapiens
caggtgacgaggaga

SEQ ID NO: 201173 - DNA, 15 bp, Homo sapiens
gcaggtgacgaggag

SEQ ID NO: 201174 - DNA, 15 bp, Homo sapiens
ggcaggtgacgagga

SEQ ID NO: 201175 - DNA, 15 bp, Homo sapiens
gggcaggtgacgagg

SEQ ID NO: 201176 - DNA, 15 bp, Homo sapiens
ggggcaggtgacgag

SEQ ID NO: 201177 - DNA, 15 bp, Homo sapiens
cggggcaggtgacga

SEQ ID NO: 201178 - DNA, 15 bp, Homo sapiens
tcggggcaggtgacg

SEQ ID NO: 201179 - DNA, 15 bp, Homo sapiens
atcggggcaggtgac

SEQ ID NO: 201180 - DNA, 15 bp, Homo sapiens
catcggggcaggtga

SEQ ID NO: 201181 - DNA, 15 bp, Homo sapiens
tcatcggggcaggtg

SEQ ID NO: 201182 - DNA, 15 bp, Homo sapiens
ctcatcggggcaggt

SEQ ID NO: 201183 - DNA, 15 bp, Homo sapiens
gctcatcggggcagg

SEQ ID NO: 201184 - DNA, 15 bp, Homo sapiens
ggctcatcggggcag

SEQ ID NO: 201185 - DNA, 15 bp, Homo sapiens
gggctcatcggggca

SEQ ID NO: 201186 - DNA, 15 bp, Homo sapiens
ggggctcatcggggc

SEQ ID NO: 201187 - DNA, 15 bp, Homo sapiens
tggggctcatcgggg

SEQ ID NO: 201188 - DNA, 15 bp, Homo sapiens
gtggggctcatcggg

SEQ ID NO: 201189 - DNA, 15 bp, Homo sapiens
tgtggggctcatcgg

SEQ ID NO: 201190 - DNA, 15 bp, Homo sapiens
atgtggggctcatcg

SEQ ID NO: 201191 - DNA, 15 bp, Homo sapiens
catgtggggctcatc

SEQ ID NO: 201192 - DNA, 15 bp, Homo sapiens
ccatgtggggctcat

SEQ ID NO: 201193 - DNA, 15 bp, Homo sapiens
tccatgtggggctca

SEQ ID NO: 201194 - DNA, 15 bp, Homo sapiens
atccatgtggggctc

SEQ ID NO: 201195 - DNA, 15 bp, Homo sapiens
catccatgtggggct

SEQ ID NO: 201196 - DNA, 15 bp, Homo sapiens
tcatccatgtggggc

SEQ ID NO: 201197 - DNA, 15 bp, Homo sapiens
ttcatccatgtgggg

SEQ ID NO: 201198 - DNA, 15 bp, Homo sapiens
cttcatccatgtggg

SEQ ID NO: 201199 - DNA, 15 bp, Homo sapiens
acttcatccatgtgg

SEQ ID NO: 201200 - DNA, 15 bp, Homo sapiens
cacttcatccatgtg

SEQ ID NO: 201201 - DNA, 15 bp, Homo sapiens
tcacttcatccatgt

SEQ ID NO: 201202 - DNA, 15 bp, Homo sapiens
ctcacttcatccatg

SEQ ID NO: 201203 - DNA, 15 bp, Homo sapiens
tctcacttcatccat

SEQ ID NO: 201204 - DNA, 15 bp, Homo sapiens
ctctcacttcatcca

SEQ ID NO: 201205 - DNA, 15 bp, Homo sapiens
gctctcacttcatcc

SEQ ID NO: 201206 - DNA, 15 bp, Homo sapiens
ggctctcacttcatc

SEQ ID NO: 201207 - DNA, 15 bp, Homo sapiens
aggctctcacttcat

SEQ ID NO: 201208 - DNA, 15 bp, Homo sapiens
caggctctcacttca

SEQ ID NO: 201209 - DNA, 15 bp, Homo sapiens
acaggctctcacttc

SEQ ID NO: 201210 - DNA, 15 bp, Homo sapiens
cacaggctctcactt

SEQ ID NO: 201211 - DNA, 15 bp, Homo sapiens
acacaggctctcact

SEQ ID NO: 201212 - DNA, 15 bp, Homo sapiens
gacacaggctctcac

SEQ ID NO: 201213 - DNA, 15 bp, Homo sapiens
tgacacaggctctca

SEQ ID NO: 201214 - DNA, 15 bp, Homo sapiens
gtgacacaggctctc

SEQ ID NO: 201215 - DNA, 15 bp, Homo sapiens
ggtgacacaggctct

SEQ ID NO: 201216 - DNA, 15 bp, Homo sapiens
tggtgacacaggctc

SEQ ID NO: 201217 - DNA, 15 bp, Homo sapiens
gtggtgacacaggct

SEQ ID NO: 201218 - DNA, 15 bp, Homo sapiens
ggtggtgacacaggc

SEQ ID NO: 201219 - DNA, 15 bp, Homo sapiens
gggtggtgacacagg

SEQ ID NO: 201220 - DNA, 15 bp, Homo sapiens
ggggtggtgacacag

SEQ ID NO: 201221 - DNA, 15 bp, Homo sapiens
cggggtggtgacaca

SEQ ID NO: 201222 - DNA, 15 bp, Homo sapiens
ccggggtggtgacac

SEQ ID NO: 201223 - DNA, 15 bp, Homo sapiens
gccggggtggtgaca

SEQ ID NO: 201224 - DNA, 15 bp, Homo sapiens
agccggggtggtgac

SEQ ID NO: 201225 - DNA, 15 bp, Homo sapiens
gagccggggtggtga

SEQ ID NO: 201226 - DNA, 15 bp, Homo sapiens
ggagccggggtggtg

SEQ ID NO: 201227 - DNA, 15 bp, Homo sapiens
aggagccggggtggt

SEQ ID NO: 201228 - DNA, 15 bp, Homo sapiens
gaggagccggggtgg

SEQ ID NO: 201229 - DNA, 15 bp, Homo sapiens
tgaggagccggggtg

SEQ ID NO: 201230 - DNA, 15 bp, Homo sapiens
ctgaggagccggggt

SEQ ID NO: 201231 - DNA, 15 bp, Homo sapiens
cctgaggagccgggg

SEQ ID NO: 201232 - DNA, 15 bp, Homo sapiens
tcctgaggagccggg

SEQ ID NO: 201233 - DNA, 15 bp, Homo sapiens
ctcctgaggagccgg

SEQ ID NO: 201234 - DNA, 15 bp, Homo sapiens
cctcctgaggagccg

SEQ ID NO: 201235 - DNA, 15 bp, Homo sapiens
gcctcctgaggagcc

SEQ ID NO: 201236 - DNA, 15 bp, Homo sapiens
agcctcctgaggagc

SEQ ID NO: 201237 - DNA, 15 bp, Homo sapiens
cagcctcctgaggag

SEQ ID NO: 201238 - DNA, 15 bp, Homo sapiens
ccagcctcctgagga

SEQ ID NO: 201239 - DNA, 15 bp, Homo sapiens
accagcctcctgagg

SEQ ID NO: 201240 - DNA, 15 bp, Homo sapiens
caccagcctcctgag

SEQ ID NO: 201241 - DNA, 15 bp, Homo sapiens
tcaccagcctcctga

SEQ ID NO: 201242 - DNA, 15 bp, Homo sapiens
atcaccagcctcctg

SEQ ID NO: 201243 - DNA, 15 bp, Homo sapiens
catcaccagcctcct

SEQ ID NO: 201244 - DNA, 15 bp, Homo sapiens
tcatcaccagcctcc

SEQ ID NO: 201245 - DNA, 15 bp, Homo sapiens
ttcatcaccagcctc

SEQ ID NO: 201246 - DNA, 15 bp, Homo sapiens
attcatcaccagcct

SEQ ID NO: 201247 - DNA, 15 bp, Homo sapiens
tattcatcaccagcc

SEQ ID NO: 201248 - DNA, 15 bp, Homo sapiens
ctattcatcaccagc

SEQ ID NO: 201249 - DNA, 15 bp, Homo sapiens
cctattcatcaccag

SEQ ID NO: 201250 - DNA, 15 bp, Homo sapiens
ccctattcatcacca

SEQ ID NO: 201251 - DNA, 15 bp, Homo sapiens
tccctattcatcacc

SEQ ID NO: 201252 - DNA, 15 bp, Homo sapiens
atccctattcatcac

SEQ ID NO: 201253 - DNA, 15 bp, Homo sapiens
catccctattcatca

SEQ ID NO: 201254 - DNA, 15 bp, Homo sapiens
ccatccctattcatc

SEQ ID NO: 201255 - DNA, 15 bp, Homo sapiens
gccatccctattcat

SEQ ID NO: 201256 - DNA, 15 bp, Homo sapiens
tgccatccctattca

SEQ ID NO: 201257 - DNA, 15 bp, Homo sapiens
ctgccatccctattc

SEQ ID NO: 201258 - DNA, 15 bp, Homo sapiens
cctgccatccctatt

SEQ ID NO: 201259 - DNA, 15 bp, Homo sapiens
tcctgccatccctat

SEQ ID NO: 201260 - DNA, 15 bp, Homo sapiens
ttcctgccatcccta

SEQ ID NO: 201261 - DNA, 15 bp, Homo sapiens
tttcctgccatccct

SEQ ID NO: 201262 - DNA, 15 bp, Homo sapiens
ttttcctgccatccc

SEQ ID NO: 201263 - DNA, 15 bp, Homo sapiens
tttttcctgccatcc

SEQ ID NO: 201264 - DNA, 15 bp, Homo sapiens
ctttttcctgccatc

SEQ ID NO: 201265 - DNA, 15 bp, Homo sapiens
cctttttcctgccat

SEQ ID NO: 201266 - DNA, 15 bp, Homo sapiens
tcctttttcctgcca

SEQ ID NO: 201267 - DNA, 15 bp, Homo sapiens
ctcctttttcctgcc

SEQ ID NO: 201268 - DNA, 15 bp, Homo sapiens
gctcctttttcctgc

SEQ ID NO: 201269 - DNA, 15 bp, Homo sapiens
agctcctttttcctg

SEQ ID NO: 201270 - DNA, 15 bp, Homo sapiens
cagctcctttttcct

SEQ ID NO: 201271 - DNA, 15 bp, Homo sapiens
ccagctcctttttcc

SEQ ID NO: 201272 - DNA, 15 bp, Homo sapiens
cccagctcctttttc

SEQ ID NO: 201273 - DNA, 15 bp, Homo sapiens
gcccagctccttttt

SEQ ID NO: 201274 - DNA, 15 bp, Homo sapiens
agcccagctcctttt

SEQ ID NO: 201275 - DNA, 15 bp, Homo sapiens
gagcccagctccttt

SEQ ID NO: 201276 - DNA, 15 bp, Homo sapiens
agagcccagctcctt

SEQ ID NO: 201277 - DNA, 15 bp, Homo sapiens
cagagcccagctcct

SEQ ID NO: 201278 - DNA, 15 bp, Homo sapiens
gcagagcccagctcc

SEQ ID NO: 201279 - DNA, 15 bp, Homo sapiens
agcagagcccagctc

SEQ ID NO: 201280 - DNA, 15 bp, Homo sapiens
cagcagagcccagct

SEQ ID NO: 201281 - DNA, 15 bp, Homo sapiens
acagcagagcccagc

SEQ ID NO: 201282 - DNA, 15 bp, Homo sapiens
cacagcagagcccag

SEQ ID NO: 201283 - DNA, 15 bp, Homo sapiens
tcacagcagagccca

SEQ ID NO: 201284 - DNA, 15 bp, Homo sapiens
gtcacagcagagccc

SEQ ID NO: 201285 - DNA, 15 bp, Homo sapiens
tgtcacagcagagcc

SEQ ID NO: 201286 - DNA, 15 bp, Homo sapiens
atgtcacagcagagc

SEQ ID NO: 201287 - DNA, 15 bp, Homo sapiens
catgtcacagcagag

SEQ ID NO: 201288 - DNA, 15 bp, Homo sapiens
acatgtcacagcaga

SEQ ID NO: 201289 - DNA, 15 bp, Homo sapiens
gacatgtcacagcag

SEQ ID NO: 201290 - DNA, 15 bp, Homo sapiens
agacatgtcacagca

SEQ ID NO: 201291 - DNA, 15 bp, Homo sapiens
gagacatgtcacagc

SEQ ID NO: 201292 - DNA, 15 bp, Homo sapiens
agagacatgtcacag

SEQ ID NO: 201293 - DNA, 15 bp, Homo sapiens
tagagacatgtcaca

SEQ ID NO: 201294 - DNA, 15 bp, Homo sapiens
atagagacatgtcac

SEQ ID NO: 201295 - DNA, 15 bp, Homo sapiens
aatagagacatgtca

SEQ ID NO: 201296 - DNA, 15 bp, Homo sapiens
aaatagagacatgtc

SEQ ID NO: 201297 - DNA, 15 bp, Homo sapiens
aaaatagagacatgt

SEQ ID NO: 201298 - DNA, 15 bp, Homo sapiens
aaaaatagagacatg

SEQ ID NO: 201299 - DNA, 15 bp, Homo sapiens
gaaaaatagagacat

SEQ ID NO: 201300 - DNA, 15 bp, Homo sapiens
ggaaaaatagagaca

SEQ ID NO: 201301 - DNA, 15 bp, Homo sapiens
tggaaaaatagagac

SEQ ID NO: 201302 - DNA, 15 bp, Homo sapiens
ctggaaaaatagaga

SEQ ID NO: 201303 - DNA, 15 bp, Homo sapiens
tctggaaaaatagag

SEQ ID NO: 201304 - DNA, 15 bp, Homo sapiens
ttctggaaaaataga

SEQ ID NO: 201305 - DNA, 15 bp, Homo sapiens
tttctggaaaaatag

SEQ ID NO: 201306 - DNA, 15 bp, Homo sapiens
ttttctggaaaaata

SEQ ID NO: 201307 - DNA, 15 bp, Homo sapiens
gttttctggaaaaat

SEQ ID NO: 201308 - DNA, 15 bp, Homo sapiens
agttttctggaaaaa

SEQ ID NO: 201309 - DNA, 15 bp, Homo sapiens
cagttttctggaaaa

SEQ ID NO: 201310 - DNA, 15 bp, Homo sapiens
gcagttttctggaaa

SEQ ID NO: 201311 - DNA, 15 bp, Homo sapiens
ggcagttttctggaa

SEQ ID NO: 201312 - DNA, 15 bp, Homo sapiens
cggcagttttctgga

SEQ ID NO: 201313 - DNA, 15 bp, Homo sapiens
ccggcagttttctgg

SEQ ID NO: 201314 - DNA, 15 bp, Homo sapiens
tccggcagttttctg

SEQ ID NO: 201315 - DNA, 15 bp, Homo sapiens
atccggcagttttct

SEQ ID NO: 201316 - DNA, 15 bp, Homo sapiens
catccggcagttttc

SEQ ID NO: 201317 - DNA, 15 bp, Homo sapiens
acatccggcagtttt

SEQ ID NO: 201318 - DNA, 15 bp, Homo sapiens
gacatccggcagttt

SEQ ID NO: 201319 - DNA, 15 bp, Homo sapiens
ggacatccggcagtt

SEQ ID NO: 201320 - DNA, 15 bp, Homo sapiens
aggacatccggcagt

SEQ ID NO: 201321 - DNA, 15 bp, Homo sapiens
aaggacatccggcag

SEQ ID NO: 201322 - DNA, 15 bp, Homo sapiens
gaaggacatccggca

SEQ ID NO: 201323 - DNA, 15 bp, Homo sapiens
ggaaggacatccggc

SEQ ID NO: 201324 - DNA, 15 bp, Homo sapiens
gggaaggacatccgg

SEQ ID NO: 201325 - DNA, 15 bp, Homo sapiens
agggaaggacatccg

SEQ ID NO: 201326 - DNA, 15 bp, Homo sapiens
aagggaaggacatcc

SEQ ID NO: 201327 - DNA, 15 bp, Homo sapiens
caagggaaggacatc

SEQ ID NO: 201328 - DNA, 15 bp, Homo sapiens
acaagggaaggacat

SEQ ID NO: 201329 - DNA, 15 bp, Homo sapiens
tacaagggaaggaca

SEQ ID NO: 201330 - DNA, 15 bp, Homo sapiens
ttacaagggaaggac

SEQ ID NO: 201331 - DNA, 15 bp, Homo sapiens
tttacaagggaagga

SEQ ID NO: 201332 - DNA, 15 bp, Homo sapiens
ttttacaagggaagg

SEQ ID NO: 201333 - DNA, 15 bp, Homo sapiens
cttttacaagggaag

SEQ ID NO: 201334 - DNA, 15 bp, Homo sapiens
acttttacaagggaa

SEQ ID NO: 201335 - DNA, 15 bp, Homo sapiens
aacttttacaaggga

SEQ ID NO: 201336 - DNA, 15 bp, Homo sapiens
caacttttacaaggg

SEQ ID NO: 201337 - DNA, 15 bp, Homo sapiens
tcaacttttacaagg

SEQ ID NO: 201338 - DNA, 15 bp, Homo sapiens
ttcaacttttacaag

SEQ ID NO: 201339 - DNA, 15 bp, Homo sapiens
cttcaacttttacaa

SEQ ID NO: 201340 - DNA, 15 bp, Homo sapiens
tcttcaacttttaca

SEQ ID NO: 201341 - DNA, 15 bp, Homo sapiens
ctcttcaacttttac

SEQ ID NO: 201342 - DNA, 15 bp, Homo sapiens
tctcttcaactttta

SEQ ID NO: 201343 - DNA, 15 bp, Homo sapiens
ttctcttcaactttt

SEQ ID NO: 201344 - DNA, 15 bp, Homo sapiens
gttctcttcaacttt

SEQ ID NO: 201345 - DNA, 15 bp, Homo sapiens
tgttctcttcaactt

SEQ ID NO: 201346 - DNA, 15 bp, Homo sapiens
ctgttctcttcaact

SEQ ID NO: 201347 - DNA, 15 bp, Homo sapiens
tctgttctcttcaac

SEQ ID NO: 201348 - DNA, 15 bp, Homo sapiens
ctctgttctcttcaa

SEQ ID NO: 201349 - DNA, 15 bp, Homo sapiens
cctctgttctcttca

SEQ ID NO: 201350 - DNA, 15 bp, Homo sapiens
tcctctgttctcttc

SEQ ID NO: 201351 - DNA, 15 bp, Homo sapiens
ctcctctgttctctt

SEQ ID NO: 201352 - DNA, 15 bp, Homo sapiens
tctcctctgttctct

SEQ ID NO: 201353 - DNA, 15 bp, Homo sapiens
ctctcctctgttctc

SEQ ID NO: 201354 - DNA, 15 bp, Homo sapiens
cctctcctctgttct

SEQ ID NO: 201355 - DNA, 15 bp, Homo sapiens
tcctctcctctgttc

SEQ ID NO: 201356 - DNA, 15 bp, Homo sapiens
ctcctctcctctgtt

SEQ ID NO: 201357 - DNA, 15 bp, Homo sapiens
tctcctctcctctgt

SEQ ID NO: 201358 - DNA, 15 bp, Homo sapiens
ttctcctctcctctg

SEQ ID NO: 201359 - DNA, 15 bp, Homo sapiens
cttctcctctcctct

SEQ ID NO: 201360 - DNA, 15 bp, Homo sapiens
ccttctcctctcctc

SEQ ID NO: 201361 - DNA, 15 bp, Homo sapiens
cccttctcctctcct

SEQ ID NO: 201362 - DNA, 15 bp, Homo sapiens
acccttctcctctcc

SEQ ID NO: 201363 - DNA, 15 bp, Homo sapiens
gacccttctcctctc

SEQ ID NO: 201364 - DNA, 15 bp, Homo sapiens
cgacccttctcctct

SEQ ID NO: 201365 - DNA, 15 bp, Homo sapiens
ccgacccttctcctc

SEQ ID NO: 201366 - DNA, 15 bp, Homo sapiens
tccgacccttctcct

SEQ ID NO: 201367 - DNA, 15 bp, Homo sapiens
ctccgacccttctcc

SEQ ID NO: 201368 - DNA, 15 bp, Homo sapiens
gctccgacccttctc

SEQ ID NO: 201369 - DNA, 15 bp, Homo sapiens
tgctccgacccttct

SEQ ID NO: 201370 - DNA, 15 bp, Homo sapiens
ctgctccgacccttc

SEQ ID NO: 201371 - DNA, 15 bp, Homo sapiens
tctgctccgaccctt

SEQ ID NO: 201372 - DNA, 15 bp, Homo sapiens
ctctgctccgaccct

SEQ ID NO: 201373 - DNA, 15 bp, Homo sapiens
tctctgctccgaccc

SEQ ID NO: 201374 - DNA, 15 bp, Homo sapiens
ctctctgctccgacc

SEQ ID NO: 201375 - DNA, 15 bp, Homo sapiens
tctctctgctccgac

SEQ ID NO: 201376 - DNA, 15 bp, Homo sapiens
atctctctgctccga

SEQ ID NO: 201377 - DNA, 15 bp, Homo sapiens
aatctctctgctccg

SEQ ID NO: 201378 - DNA, 15 bp, Homo sapiens
aaatctctctgctcc

SEQ ID NO: 201379 - DNA, 15 bp, Homo sapiens
gaaatctctctgctc

SEQ ID NO: 201380 - DNA, 15 bp, Homo sapiens
agaaatctctctgct

SEQ ID NO: 201381 - DNA, 15 bp, Homo sapiens
cagaaatctctctgc

SEQ ID NO: 201382 - DNA, 15 bp, Homo sapiens
tcagaaatctctctg

SEQ ID NO: 201383 - DNA, 15 bp, Homo sapiens
atcagaaatctctct

SEQ ID NO: 201384 - DNA, 15 bp, Homo sapiens
tatcagaaatctctc

SEQ ID NO: 201385 - DNA, 15 bp, Homo sapiens
atatcagaaatctct

SEQ ID NO: 201386 - DNA, 15 bp, Homo sapiens
catatcagaaatctc

SEQ ID NO: 201387 - DNA, 15 bp, Homo sapiens
gcatatcagaaatct

SEQ ID NO: 201388 - DNA, 15 bp, Homo sapiens
agcatatcagaaatc

SEQ ID NO: 201389 - DNA, 15 bp, Homo sapiens
cagcatatcagaaat

SEQ ID NO: 201390 - DNA, 15 bp, Homo sapiens
acagcatatcagaaa

SEQ ID NO: 201391 - DNA, 15 bp, Homo sapiens
aacagcatatcagaa

SEQ ID NO: 201392 - DNA, 15 bp, Homo sapiens
taacagcatatcaga

SEQ ID NO: 201393 - DNA, 15 bp, Homo sapiens
ctaacagcatatcag

SEQ ID NO: 201394 - DNA, 15 bp, Homo sapiens
actaacagcatatca

SEQ ID NO: 201395 - DNA, 15 bp, Homo sapiens
cactaacagcatatc

SEQ ID NO: 201396 - DNA, 15 bp, Homo sapiens
ccactaacagcatat

SEQ ID NO: 201397 - DNA, 15 bp, Homo sapiens
gccactaacagcata

SEQ ID NO: 201398 - DNA, 15 bp, Homo sapiens
cgccactaacagcat

SEQ ID NO: 201399 - DNA, 15 bp, Homo sapiens
gcgccactaacagca

SEQ ID NO: 201400 - DNA, 15 bp, Homo sapiens
agcgccactaacagc

SEQ ID NO: 201401 - DNA, 15 bp, Homo sapiens
cagcgccactaacag

SEQ ID NO: 201402 - DNA, 15 bp, Homo sapiens
gcagcgccactaaca

SEQ ID NO: 201403 - DNA, 15 bp, Homo sapiens
ggcagcgccactaac

SEQ ID NO: 201404 - DNA, 15 bp, Homo sapiens
tggcagcgccactaa

SEQ ID NO: 201405 - DNA, 15 bp, Homo sapiens
ttggcagcgccacta

SEQ ID NO: 201406 - DNA, 15 bp, Homo sapiens
attggcagcgccact

SEQ ID NO: 201407 - DNA, 15 bp, Homo sapiens
aattggcagcgccac

SEQ ID NO: 201408 - DNA, 15 bp, Homo sapiens
taattggcagcgcca

SEQ ID NO: 201409 - DNA, 15 bp, Homo sapiens
ttaattggcagcgcc

SEQ ID NO: 201410 - DNA, 15 bp, Homo sapiens
tttaattggcagcgc

SEQ ID NO: 201411 - DNA, 15 bp, Homo sapiens
ttttaattggcagcg

SEQ ID NO: 201412 - DNA, 15 bp, Homo sapiens
tttttaattggcagc

SEQ ID NO: 201413 - DNA, 15 bp, Homo sapiens
ctttttaattggcag

SEQ ID NO: 201414 - DNA, 15 bp, Homo sapiens
tctttttaattggca

SEQ ID NO: 201415 - DNA, 15 bp, Homo sapiens
ttctttttaattggc

SEQ ID NO: 201416 - DNA, 15 bp, Homo sapiens
tttctttttaattgg

SEQ ID NO: 201417 - DNA, 15 bp, Homo sapiens
atttctttttaattg

SEQ ID NO: 201418 - DNA, 15 bp, Homo sapiens
aatttctttttaatt

SEQ ID NO: 201419 - DNA, 15 bp, Homo sapiens
taatttctttttaat

SEQ ID NO: 201420 - DNA, 15 bp, Homo sapiens
ttaatttctttttaa

SEQ ID NO: 201421 - DNA, 15 bp, Homo sapiens
tttaatttcttttta

SEQ ID NO: 201422 - DNA, 15 bp, Homo sapiens
ttttaatttcttttt

SEQ ID NO: 201423 - DNA, 15 bp, Homo sapiens
gttttaatttctttt

SEQ ID NO: 201424 - DNA, 15 bp, Homo sapiens
tgttttaatttcttt

SEQ ID NO: 201425 - DNA, 15 bp, Homo sapiens
ctgttttaatttctt

SEQ ID NO: 201426 - DNA, 15 bp, Homo sapiens
tctgttttaatttct

SEQ ID NO: 201427 - DNA, 15 bp, Homo sapiens
ttctgttttaatttc

SEQ ID NO: 201428 - DNA, 15 bp, Homo sapiens
tttctgttttaattt

SEQ ID NO: 201429 - DNA, 15 bp, Homo sapiens
atttctgttttaatt

SEQ ID NO: 201430 - DNA, 15 bp, Homo sapiens
gatttctgttttaat

SEQ ID NO: 201431 - DNA, 15 bp, Homo sapiens
agatttctgttttaa

SEQ ID NO: 201432 - DNA, 15 bp, Homo sapiens
gagatttctgtttta

SEQ ID NO: 201433 - DNA, 15 bp, Homo sapiens
ggagatttctgtttt

SEQ ID NO: 201434 - DNA, 15 bp, Homo sapiens
cggagatttctgttt

SEQ ID NO: 201435 - DNA, 15 bp, Homo sapiens
acggagatttctgtt

SEQ ID NO: 201436 - DNA, 15 bp, Homo sapiens
cacggagatttctgt

SEQ ID NO: 201437 - DNA, 15 bp, Homo sapiens
ccacggagatttctg

SEQ ID NO: 201438 - DNA, 15 bp, Homo sapiens
cccacggagatttct

SEQ ID NO: 201439 - DNA, 15 bp, Homo sapiens
gcccacggagatttc

SEQ ID NO: 201440 - DNA, 15 bp, Homo sapiens
agcccacggagattt

SEQ ID NO: 201441 - DNA, 15 bp, Homo sapiens
cagcccacggagatt

SEQ ID NO: 201442 - DNA, 15 bp, Homo sapiens
gcagcccacggagat

SEQ ID NO: 201443 - DNA, 15 bp, Homo sapiens
agcagcccacggaga

SEQ ID NO: 201444 - DNA, 15 bp, Homo sapiens
cagcagcccacggag

SEQ ID NO: 201445 - DNA, 15 bp, Homo sapiens
ccagcagcccacgga

SEQ ID NO: 201446 - DNA, 15 bp, Homo sapiens
tccagcagcccacgg

SEQ ID NO: 201447 - DNA, 15 bp, Homo sapiens
ctccagcagcccacg

SEQ ID NO: 201448 - DNA, 15 bp, Homo sapiens
actccagcagcccac

SEQ ID NO: 201449 - DNA, 15 bp, Homo sapiens
cactccagcagccca

SEQ ID NO: 201450 - DNA, 15 bp, Homo sapiens
tcactccagcagccc

SEQ ID NO: 201451 - DNA, 15 bp, Homo sapiens
ttcactccagcagcc

SEQ ID NO: 201452 - DNA, 15 bp, Homo sapiens
tttcactccagcagc

SEQ ID NO: 201453 - DNA, 15 bp, Homo sapiens
ttttcactccagcag

SEQ ID NO: 201454 - DNA, 15 bp, Homo sapiens
tttttcactccagca

SEQ ID NO: 201455 - DNA, 15 bp, Homo sapiens
ctttttcactccagc

SEQ ID NO: 201456 - DNA, 15 bp, Homo sapiens
actttttcactccag

SEQ ID NO: 201457 - DNA, 15 bp, Homo sapiens
gactttttcactcca

SEQ ID NO: 201458 - DNA, 15 bp, Homo sapiens
agactttttcactcc

SEQ ID NO: 201459 - DNA, 15 bp, Homo sapiens
gagactttttcactc

SEQ ID NO: 201460 - DNA, 15 bp, Homo sapiens
ggagactttttcact

SEQ ID NO: 201461 - DNA, 15 bp, Homo sapiens
aggagactttttcac

SEQ ID NO: 201462 - DNA, 15 bp, Homo sapiens
gaggagactttttca

SEQ ID NO: 201463 - DNA, 15 bp, Homo sapiens
agaggagactttttc

SEQ ID NO: 201464 - DNA, 15 bp, Homo sapiens
gagaggagacttttt

SEQ ID NO: 201465 - DNA, 15 bp, Homo sapiens
ggagaggagactttt

SEQ ID NO: 201466 - DNA, 15 bp, Homo sapiens
aggagaggagacttt

SEQ ID NO: 201467 - DNA, 15 bp, Homo sapiens
caggagaggagactt

SEQ ID NO: 201468 - DNA, 15 bp, Homo sapiens
ccaggagaggagact

SEQ ID NO: 201469 - DNA, 15 bp, Homo sapiens
gccaggagaggagac

SEQ ID NO: 201470 - DNA, 15 bp, Homo sapiens
ggccaggagaggaga

SEQ ID NO: 201471 - DNA, 15 bp, Homo sapiens
gggccaggagaggag

SEQ ID NO: 201472 - DNA, 15 bp, Homo sapiens
ggggccaggagagga

SEQ ID NO: 201473 - DNA, 15 bp, Homo sapiens
aggggccaggagagg

SEQ ID NO: 201474 - DNA, 15 bp, Homo sapiens
gaggggccaggagag

SEQ ID NO: 201475 - DNA, 15 bp, Homo sapiens
agaggggccaggaga

SEQ ID NO: 201476 - DNA, 15 bp, Homo sapiens
tagaggggccaggag

SEQ ID NO: 201477 - DNA, 15 bp, Homo sapiens
ttagaggggccagga

SEQ ID NO: 201478 - DNA, 15 bp, Homo sapiens
tttagaggggccagg

SEQ ID NO: 201479 - DNA, 15 bp, Homo sapiens
gtttagaggggccag

SEQ ID NO: 201480 - DNA, 15 bp, Homo sapiens
ggtttagaggggcca

SEQ ID NO: 201481 - DNA, 15 bp, Homo sapiens
gggtttagaggggcc

SEQ ID NO: 201482 - DNA, 15 bp, Homo sapiens
agggtttagaggggc

SEQ ID NO: 201483 - DNA, 15 bp, Homo sapiens
aagggtttagagggg

SEQ ID NO: 201484 - DNA, 15 bp, Homo sapiens
caagggtttagaggg

SEQ ID NO: 201485 - DNA, 15 bp, Homo sapiens
tcaagggtttagagg

SEQ ID NO: 201486 - DNA, 15 bp, Homo sapiens
ttcaagggtttagag

SEQ ID NO: 201487 - DNA, 15 bp, Homo sapiens
gttcaagggtttaga

SEQ ID NO: 201488 - DNA, 15 bp, Homo sapiens
tgttcaagggtttag

SEQ ID NO: 201489 - DNA, 15 bp, Homo sapiens
ttgttcaagggttta

SEQ ID NO: 201490 - DNA, 15 bp, Homo sapiens
tttgttcaagggttt

SEQ ID NO: 201491 - DNA, 15 bp, Homo sapiens
atttgttcaagggtt

SEQ ID NO: 201492 - DNA, 15 bp, Homo sapiens
aatttgttcaagggt

SEQ ID NO: 201493 - DNA, 15 bp, Homo sapiens
taatttgttcaaggg

SEQ ID NO: 201494 - DNA, 15 bp, Homo sapiens
ttaatttgttcaagg

SEQ ID NO: 201495 - DNA, 15 bp, Homo sapiens
attaatttgttcaag

SEQ ID NO: 201496 - DNA, 15 bp, Homo sapiens
aattaatttgttcaa

SEQ ID NO: 201497 - DNA, 15 bp, Homo sapiens
caattaatttgttca

SEQ ID NO: 201498 - DNA, 15 bp, Homo sapiens
ccaattaatttgttc

SEQ ID NO: 201499 - DNA, 15 bp, Homo sapiens
accaattaatttgtt

SEQ ID NO: 201500 - DNA, 15 bp, Homo sapiens
aaccaattaatttgt

SEQ ID NO: 201501 - DNA, 15 bp, Homo sapiens
caaccaattaatttg

SEQ ID NO: 201502 - DNA, 15 bp, Homo sapiens
ccaaccaattaattt

SEQ ID NO: 201503 - DNA, 15 bp, Homo sapiens
tccaaccaattaatt

SEQ ID NO: 201504 - DNA, 15 bp, Homo sapiens
atccaaccaattaat

SEQ ID NO: 201505 - DNA, 15 bp, Homo sapiens
catccaaccaattaa

SEQ ID NO: 201506 - DNA, 15 bp, Homo sapiens
acatccaaccaatta

SEQ ID NO: 201507 - DNA, 15 bp, Homo sapiens
aacatccaaccaatt

SEQ ID NO: 201508 - DNA, 15 bp, Homo sapiens
caacatccaaccaat

SEQ ID NO: 201509 - DNA, 15 bp, Homo sapiens
tcaacatccaaccaa

SEQ ID NO: 201510 - DNA, 15 bp, Homo sapiens
gtcaacatccaacca

SEQ ID NO: 201511 - DNA, 15 bp, Homo sapiens
agtcaacatccaacc

SEQ ID NO: 201512 - DNA, 15 bp, Homo sapiens
cagtcaacatccaac

SEQ ID NO: 201513 - DNA, 15 bp, Homo sapiens
ccagtcaacatccaa

SEQ ID NO: 201514 - DNA, 15 bp, Homo sapiens
cccagtcaacatcca

SEQ ID NO: 201515 - DNA, 15 bp, Homo sapiens
acccagtcaacatcc

SEQ ID NO: 201516 - DNA, 15 bp, Homo sapiens
tacccagtcaacatc

SEQ ID NO: 201517 - DNA, 15 bp, Homo sapiens
gtacccagtcaacat

SEQ ID NO: 201518 - DNA, 15 bp, Homo sapiens
ggtacccagtcaaca

SEQ ID NO: 201519 - DNA, 15 bp, Homo sapiens
tggtacccagtcaac

SEQ ID NO: 201520 - DNA, 15 bp, Homo sapiens
ctggtacccagtcaa

SEQ ID NO: 201521 - DNA, 15 bp, Homo sapiens
actggtacccagtca

SEQ ID NO: 201522 - DNA, 15 bp, Homo sapiens
cactggtacccagtc

SEQ ID NO: 201523 - DNA, 15 bp, Homo sapiens
tcactggtacccagt

SEQ ID NO: 201524 - DNA, 15 bp, Homo sapiens
ttcactggtacccag

SEQ ID NO: 201525 - DNA, 15 bp, Homo sapiens
tttcactggtaccca

SEQ ID NO: 201526 - DNA, 15 bp, Homo sapiens
atttcactggtaccc

SEQ ID NO: 201527 - DNA, 15 bp, Homo sapiens
aatttcactggtacc

SEQ ID NO: 201528 - DNA, 15 bp, Homo sapiens
gaatttcactggtac

SEQ ID NO: 201529 - DNA, 15 bp, Homo sapiens
agaatttcactggta

SEQ ID NO: 201530 - DNA, 15 bp, Homo sapiens
aagaatttcactggt

SEQ ID NO: 201531 - DNA, 15 bp, Homo sapiens
taagaatttcactgg

SEQ ID NO: 201532 - DNA, 15 bp, Homo sapiens
ctaagaatttcactg

SEQ ID NO: 201533 - DNA, 15 bp, Homo sapiens
tctaagaatttcact

SEQ ID NO: 201534 - DNA, 15 bp, Homo sapiens
atctaagaatttcac

SEQ ID NO: 201535 - DNA, 15 bp, Homo sapiens
tatctaagaatttca

SEQ ID NO: 201536 - DNA, 15 bp, Homo sapiens
atatctaagaatttc

SEQ ID NO: 201537 - DNA, 15 bp, Homo sapiens
aatatctaagaattt

SEQ ID NO: 201538 - DNA, 15 bp, Homo sapiens
taatatctaagaatt

SEQ ID NO: 201539 - DNA, 15 bp, Homo sapiens
ctaatatctaagaat

SEQ ID NO: 201540 - DNA, 15 bp, Homo sapiens
cctaatatctaagaa

SEQ ID NO: 201541 - DNA, 15 bp, Homo sapiens
acctaatatctaaga

SEQ ID NO: 201542 - DNA, 15 bp, Homo sapiens
gacctaatatctaag

SEQ ID NO: 201543 - DNA, 15 bp, Homo sapiens
agacctaatatctaa

SEQ ID NO: 201544 - DNA, 15 bp, Homo sapiens
aagacctaatatcta

SEQ ID NO: 201545 - DNA, 15 bp, Homo sapiens
caagacctaatatct

SEQ ID NO: 201546 - DNA, 15 bp, Homo sapiens
acaagacctaatatc

SEQ ID NO: 201547 - DNA, 15 bp, Homo sapiens
aacaagacctaatat

SEQ ID NO: 201548 - DNA, 15 bp, Homo sapiens
gaacaagacctaata

SEQ ID NO: 201549 - DNA, 15 bp, Homo sapiens
agaacaagacctaat

SEQ ID NO: 201550 - DNA, 15 bp, Homo sapiens
tagaacaagacctaa

SEQ ID NO: 201551 - DNA, 15 bp, Homo sapiens
atagaacaagaccta

SEQ ID NO: 201552 - DNA, 15 bp, Homo sapiens
catagaacaagacct

SEQ ID NO: 201553 - DNA, 15 bp, Homo sapiens
ccatagaacaagacc

SEQ ID NO: 201554 - DNA, 15 bp, Homo sapiens
accatagaacaagac

SEQ ID NO: 201555 - DNA, 15 bp, Homo sapiens
taccatagaacaaga

SEQ ID NO: 201556 - DNA, 15 bp, Homo sapiens
ctaccatagaacaag

SEQ ID NO: 201557 - DNA, 15 bp, Homo sapiens
cctaccatagaacaa

SEQ ID NO: 201558 - DNA, 15 bp, Homo sapiens
gcctaccatagaaca

SEQ ID NO: 201559 - DNA, 15 bp, Homo sapiens
tgcctaccatagaac

SEQ ID NO: 201560 - DNA, 15 bp, Homo sapiens
gtgcctaccatagaa

SEQ ID NO: 201561 - DNA, 15 bp, Homo sapiens
tgtgcctaccataga

SEQ ID NO: 201562 - DNA, 15 bp, Homo sapiens
ctgtgcctaccatag

SEQ ID NO: 201563 - DNA, 15 bp, Homo sapiens
tctgtgcctaccata

SEQ ID NO: 201564 - DNA, 15 bp, Homo sapiens
ttctgtgcctaccat

SEQ ID NO: 201565 - DNA, 15 bp, Homo sapiens
cttctgtgcctacca

SEQ ID NO: 201566 - DNA, 15 bp, Homo sapiens
tcttctgtgcctacc

SEQ ID NO: 201567 - DNA, 15 bp, Homo sapiens
ttcttctgtgcctac

SEQ ID NO: 201568 - DNA, 15 bp, Homo sapiens
gttcttctgtgccta

SEQ ID NO: 201569 - DNA, 15 bp, Homo sapiens
tgttcttctgtgcct

SEQ ID NO: 201570 - DNA, 15 bp, Homo sapiens
ttgttcttctgtgcc

SEQ ID NO: 201571 - DNA, 15 bp, Homo sapiens
cttgttcttctgtgc

SEQ ID NO: 201572 - DNA, 15 bp, Homo sapiens
ccttgttcttctgtg

SEQ ID NO: 201573 - DNA, 15 bp, Homo sapiens
cccttgttcttctgt

SEQ ID NO: 201574 - DNA, 15 bp, Homo sapiens
ccccttgttcttctg

SEQ ID NO: 201575 - DNA, 15 bp, Homo sapiens
accccttgttcttct

SEQ ID NO: 201576 - DNA, 15 bp, Homo sapiens
caccccttgttcttc

SEQ ID NO: 201577 - DNA, 15 bp, Homo sapiens
acaccccttgttctt

SEQ ID NO: 201578 - DNA, 15 bp, Homo sapiens
cacaccccttgttct

SEQ ID NO: 201579 - DNA, 15 bp, Homo sapiens
acacaccccttgttc

SEQ ID NO: 201580 - DNA, 15 bp, Homo sapiens
cacacaccccttgtt

SEQ ID NO: 201581 - DNA, 15 bp, Homo sapiens
acacacaccccttgt

SEQ ID NO: 201582 - DNA, 15 bp, Homo sapiens
cacacacaccccttg

SEQ ID NO: 201583 - DNA, 15 bp, Homo sapiens
acacacacacccctt

SEQ ID NO: 201584 - DNA, 15 bp, Homo sapiens
tcacatacacacaca

SEQ ID NO: 201585 - DNA, 15 bp, Homo sapiens
ctcacatacacacac

SEQ ID NO: 201586 - DNA, 15 bp, Homo sapiens
tctcacatacacaca

SEQ ID NO: 201587 - DNA, 15 bp, Homo sapiens
ctctcacatacacac

SEQ ID NO: 201588 - DNA, 15 bp, Homo sapiens
tctctcacatacaca

SEQ ID NO: 201589 - DNA, 15 bp, Homo sapiens
ctctctcacatacac

SEQ ID NO: 201590 - DNA, 15 bp, Homo sapiens
tctctctcacataca

SEQ ID NO: 201591 - DNA, 15 bp, Homo sapiens
ctctctctcacatac

SEQ ID NO: 201592 - DNA, 15 bp, Homo sapiens
tctctctctcacata

SEQ ID NO: 201593 - DNA, 15 bp, Homo sapiens
ctctctctctcacat

SEQ ID NO: 201594 - DNA, 15 bp, Homo sapiens
tctctctctctcaca

SEQ ID NO: 201595 - DNA, 15 bp, Homo sapiens
ctctctctctctcac

SEQ ID NO: 201596 - DNA, 15 bp, Homo sapiens
tctctctctctctca

SEQ ID NO: 201597 - DNA, 15 bp, Homo sapiens
ttctctctctctctc

SEQ ID NO: 201598 - DNA, 15 bp, Homo sapiens
cttctctctctctct

SEQ ID NO: 201599 - DNA, 15 bp, Homo sapiens
tcttctctctctctc

SEQ ID NO: 201600 - DNA, 15 bp, Homo sapiens
ctcttctctctctct

SEQ ID NO: 201601 - DNA, 15 bp, Homo sapiens
tctcttctctctctc

SEQ ID NO: 201602 - DNA, 15 bp, Homo sapiens
ctctcttctctctct

SEQ ID NO: 201603 - DNA, 15 bp, Homo sapiens
cctctcttctctctc

SEQ ID NO: 201604 - DNA, 15 bp, Homo sapiens
tcctctcttctctct

SEQ ID NO: 201605 - DNA, 15 bp, Homo sapiens
ttcctctcttctctc

SEQ ID NO: 201606 - DNA, 15 bp, Homo sapiens
cttcctctcttctct

SEQ ID NO: 201607 - DNA, 15 bp, Homo sapiens
ccttcctctcttctc

SEQ ID NO: 201608 - DNA, 15 bp, Homo sapiens
tccttcctctcttct

SEQ ID NO: 201609 - DNA, 15 bp, Homo sapiens
atccttcctctcttc

SEQ ID NO: 201610 - DNA, 15 bp, Homo sapiens
catccttcctctctt

SEQ ID NO: 201611 - DNA, 15 bp, Homo sapiens
ccatccttcctctct

SEQ ID NO: 201612 - DNA, 15 bp, Homo sapiens
cccatccttcctctc

SEQ ID NO: 201613 - DNA, 15 bp, Homo sapiens
ccccatccttcctct

SEQ ID NO: 201614 - DNA, 15 bp, Homo sapiens
cccccatccttcctc

SEQ ID NO: 201615 - DNA, 15 bp, Homo sapiens
tcccccatccttcct

SEQ ID NO: 201616 - DNA, 15 bp, Homo sapiens
ctcccccatccttcc

SEQ ID NO: 201617 - DNA, 15 bp, Homo sapiens
tctcccccatccttc

SEQ ID NO: 201618 - DNA, 15 bp, Homo sapiens
ctctcccccatcctt

SEQ ID NO: 201619 - DNA, 15 bp, Homo sapiens
tctctcccccatcct

SEQ ID NO: 201620 - DNA, 15 bp, Homo sapiens
ttctctcccccatcc

SEQ ID NO: 201621 - DNA, 15 bp, Homo sapiens
cttctctcccccatc

SEQ ID NO: 201622 - DNA, 15 bp, Homo sapiens
tcttctctcccccat

SEQ ID NO: 201623 - DNA, 15 bp, Homo sapiens
ttcttctctccccca

SEQ ID NO: 201624 - DNA, 15 bp, Homo sapiens
cttcttctctccccc

SEQ ID NO: 201625 - DNA, 15 bp, Homo sapiens
ccttcttctctcccc

SEQ ID NO: 201626 - DNA, 15 bp, Homo sapiens
cccttcttctctccc

SEQ ID NO: 201627 - DNA, 15 bp, Homo sapiens
tcccttcttctctcc

SEQ ID NO: 201628 - DNA, 15 bp, Homo sapiens
ttcccttcttctctc

SEQ ID NO: 201629 - DNA, 15 bp, Homo sapiens
cttcccttcttctct

SEQ ID NO: 201630 - DNA, 15 bp, Homo sapiens
ccttcccttcttctc

SEQ ID NO: 201631 - DNA, 15 bp, Homo sapiens
tccttcccttcttct

SEQ ID NO: 201632 - DNA, 15 bp, Homo sapiens
ctccttcccttcttc

SEQ ID NO: 201633 - DNA, 15 bp, Homo sapiens
cctccttcccttctt

SEQ ID NO: 201634 - DNA, 15 bp, Homo sapiens
ccctccttcccttct

SEQ ID NO: 201635 - DNA, 15 bp, Homo sapiens
tccctccttcccttc

SEQ ID NO: 201636 - DNA, 15 bp, Homo sapiens
ctccctccttccctt

SEQ ID NO: 201637 - DNA, 15 bp, Homo sapiens
tctccctccttccct

SEQ ID NO: 201638 - DNA, 15 bp, Homo sapiens
ctttctccctccttc

SEQ ID NO: 201639 - DNA, 15 bp, Homo sapiens
cctttctccctcctt

SEQ ID NO: 201640 - DNA, 15 bp, Homo sapiens
ccctttctccctcct

SEQ ID NO: 201641 - DNA, 15 bp, Homo sapiens
tccctttctccctcc

SEQ ID NO: 201642 - DNA, 15 bp, Homo sapiens
ttccctttctccctc

SEQ ID NO: 201643 - DNA, 15 bp, Homo sapiens
cttccctttctccct

SEQ ID NO: 201644 - DNA, 15 bp, Homo sapiens
ccttccctttctccc

SEQ ID NO: 201645 - DNA, 15 bp, Homo sapiens
tccttccctttctcc

SEQ ID NO: 201646 - DNA, 15 bp, Homo sapiens
ctccttccctttctc

SEQ ID NO: 201647 - DNA, 15 bp, Homo sapiens
cctccttccctttct

SEQ ID NO: 201648 - DNA, 15 bp, Homo sapiens
tcctccttccctttc

SEQ ID NO: 201649 - DNA, 15 bp, Homo sapiens
ttcctccttcccttt

SEQ ID NO: 201650 - DNA, 15 bp, Homo sapiens
tttcctccttccctt

SEQ ID NO: 201651 - DNA, 15 bp, Homo sapiens
ctttcctccttccct

SEQ ID NO: 201652 - DNA, 15 bp, Homo sapiens
cctttcctccttccc

SEQ ID NO: 201653 - DNA, 15 bp, Homo sapiens
tcctttcctccttcc

SEQ ID NO: 201654 - DNA, 15 bp, Homo sapiens
ctcctttcctccttc

SEQ ID NO: 201655 - DNA, 15 bp, Homo sapiens
cctcctttcctcctt

SEQ ID NO: 201656 - DNA, 15 bp, Homo sapiens
ccctcctttcctcct

SEQ ID NO: 201657 - DNA, 15 bp, Homo sapiens
tccctcctttcctcc

SEQ ID NO: 201658 - DNA, 15 bp, Homo sapiens
ttccctcctttcctc

SEQ ID NO: 201659 - DNA, 15 bp, Homo sapiens
cttccctcctttcct

SEQ ID NO: 201660 - DNA, 15 bp, Homo sapiens
ccttccctcctttcc

SEQ ID NO: 201661 - DNA, 15 bp, Homo sapiens
tccttccctcctttc

SEQ ID NO: 201662 - DNA, 15 bp, Homo sapiens
ctccttccctccttt

SEQ ID NO: 201663 - DNA, 15 bp, Homo sapiens
tctccttccctcctt

SEQ ID NO: 201664 - DNA, 15 bp, Homo sapiens
ctctccttccctcct

SEQ ID NO: 201665 - DNA, 15 bp, Homo sapiens
gctctccttccctcc

SEQ ID NO: 201666 - DNA, 15 bp, Homo sapiens
tgctctccttccctc

SEQ ID NO: 201667 - DNA, 15 bp, Homo sapiens
ttgctctccttccct

SEQ ID NO: 201668 - DNA, 15 bp, Homo sapiens
cttgctctccttccc

SEQ ID NO: 201669 - DNA, 15 bp, Homo sapiens
tcttgctctccttcc

SEQ ID NO: 201670 - DNA, 15 bp, Homo sapiens
ctcttgctctccttc

SEQ ID NO: 201671 - DNA, 15 bp, Homo sapiens
tctcttgctctcctt

SEQ ID NO: 201672 - DNA, 15 bp, Homo sapiens
ctctcttgctctcct

SEQ ID NO: 201673 - DNA, 15 bp, Homo sapiens
tctctcttgctctcc

SEQ ID NO: 201674 - DNA, 15 bp, Homo sapiens
ctctctcttgctctc

SEQ ID NO: 201675 - DNA, 15 bp, Homo sapiens
tctctctcttgctct

SEQ ID NO: 201676 - DNA, 15 bp, Homo sapiens
gtctctctcttgctc

SEQ ID NO: 201677 - DNA, 15 bp, Homo sapiens
agtctctctcttgct

SEQ ID NO: 201678 - DNA, 15 bp, Homo sapiens
aagtctctctcttgc

SEQ ID NO: 201679 - DNA, 15 bp, Homo sapiens
caagtctctctcttg

SEQ ID NO: 201680 - DNA, 15 bp, Homo sapiens
ccaagtctctctctt

SEQ ID NO: 201681 - DNA, 15 bp, Homo sapiens
cccaagtctctctct

SEQ ID NO: 201682 - DNA, 15 bp, Homo sapiens
ccccaagtctctctc

SEQ ID NO: 201683 - DNA, 15 bp, Homo sapiens
cccccaagtctctct

SEQ ID NO: 201684 - DNA, 15 bp, Homo sapiens
gcccccaagtctctc

SEQ ID NO: 201685 - DNA, 15 bp, Homo sapiens
tgcccccaagtctct

SEQ ID NO: 201686 - DNA, 15 bp, Homo sapiens
atgcccccaagtctc

SEQ ID NO: 201687 - DNA, 15 bp, Homo sapiens
gatgcccccaagtct

SEQ ID NO: 201688 - DNA, 15 bp, Homo sapiens
cgatgcccccaagtc

SEQ ID NO: 201689 - DNA, 15 bp, Homo sapiens
ccgatgcccccaagt

SEQ ID NO: 201690 - DNA, 15 bp, Homo sapiens
cccgatgcccccaag

SEQ ID NO: 201691 - DNA, 15 bp, Homo sapiens
ccccgatgcccccaa

SEQ ID NO: 201692 - DNA, 15 bp, Homo sapiens
accccgatgccccca

SEQ ID NO: 201693 - DNA, 15 bp, Homo sapiens
caccccgatgccccc

SEQ ID NO: 201694 - DNA, 15 bp, Homo sapiens
ccaccccgatgcccc

SEQ ID NO: 201695 - DNA, 15 bp, Homo sapiens
cccaccccgatgccc

SEQ ID NO: 201696 - DNA, 15 bp, Homo sapiens
acccaccccgatgcc

SEQ ID NO: 201697 - DNA, 15 bp, Homo sapiens
aacccaccccgatgc

SEQ ID NO: 201698 - DNA, 15 bp, Homo sapiens
caacccaccccgatg

SEQ ID NO: 201699 - DNA, 15 bp, Homo sapiens
ccaacccaccccgat

SEQ ID NO: 201700 - DNA, 15 bp, Homo sapiens
tccaacccaccccga

SEQ ID NO: 201701 - DNA, 15 bp, Homo sapiens
ctccaacccaccccg

SEQ ID NO: 201702 - DNA, 15 bp, Homo sapiens
gctccaacccacccc

SEQ ID NO: 201703 - DNA, 15 bp, Homo sapiens
tgctccaacccaccc

SEQ ID NO: 201704 - DNA, 15 bp, Homo sapiens
ctgctccaacccacc

SEQ ID NO: 201705 - DNA, 15 bp, Homo sapiens
actgctccaacccac

SEQ ID NO: 201706 - DNA, 15 bp, Homo sapiens
aactgctccaaccca

SEQ ID NO: 201707 - DNA, 15 bp, Homo sapiens
gaactgctccaaccc

SEQ ID NO: 201708 - DNA, 15 bp, Homo sapiens
tgaactgctccaacc

SEQ ID NO: 201709 - DNA, 15 bp, Homo sapiens
ctgaactgctccaac

SEQ ID NO: 201710 - DNA, 15 bp, Homo sapiens
cctgaactgctccaa

SEQ ID NO: 201711 - DNA, 15 bp, Homo sapiens
ccctgaactgctcca

SEQ ID NO: 201712 - DNA, 15 bp, Homo sapiens
tccctgaactgctcc

SEQ ID NO: 201713 - DNA, 15 bp, Homo sapiens
atccctgaactgctc

SEQ ID NO: 201714 - DNA, 15 bp, Homo sapiens
aatccctgaactgct

SEQ ID NO: 201715 - DNA, 15 bp, Homo sapiens
caatccctgaactgc

SEQ ID NO: 201716 - DNA, 15 bp, Homo sapiens
tcaatccctgaactg

SEQ ID NO: 201717 - DNA, 15 bp, Homo sapiens
ttcaatccctgaact

SEQ ID NO: 201718 - DNA, 15 bp, Homo sapiens
tttcaatccctgaac

SEQ ID NO: 201719 - DNA, 15 bp, Homo sapiens
atttcaatccctgaa

SEQ ID NO: 201720 - DNA, 15 bp, Homo sapiens
gatttcaatccctga

SEQ ID NO: 201721 - DNA, 15 bp, Homo sapiens
tgatttcaatccctg

SEQ ID NO: 201722 - DNA, 15 bp, Homo sapiens
atgatttcaatccct

SEQ ID NO: 201723 - DNA, 15 bp, Homo sapiens
catgatttcaatccc

SEQ ID NO: 201724 - DNA, 15 bp, Homo sapiens
gcatgatttcaatcc

SEQ ID NO: 201725 - DNA, 15 bp, Homo sapiens
agcatgatttcaatc

SEQ ID NO: 201726 - DNA, 15 bp, Homo sapiens
cagcatgatttcaat

SEQ ID NO: 201727 - DNA, 15 bp, Homo sapiens
gcagcatgatttcaa

SEQ ID NO: 201728 - DNA, 15 bp, Homo sapiens
tgcagcatgatttca

SEQ ID NO: 201729 - DNA, 15 bp, Homo sapiens
atgcagcatgatttc

SEQ ID NO: 201730 - DNA, 15 bp, Homo sapiens
catgcagcatgattt

SEQ ID NO: 201731 - DNA, 15 bp, Homo sapiens
tcatgcagcatgatt

SEQ ID NO: 201732 - DNA, 15 bp, Homo sapiens
gtcatgcagcatgat

SEQ ID NO: 201733 - DNA, 15 bp, Homo sapiens
tgtcatgcagcatga

SEQ ID NO: 201734 - DNA, 15 bp, Homo sapiens
atgtcatgcagcatg

SEQ ID NO: 201735 - DNA, 15 bp, Homo sapiens
aatgtcatgcagcat

SEQ ID NO: 201736 - DNA, 15 bp, Homo sapiens
aaatgtcatgcagca

SEQ ID NO: 201737 - DNA, 15 bp, Homo sapiens
caaatgtcatgcagc

SEQ ID NO: 201738 - DNA, 15 bp, Homo sapiens
ccaaatgtcatgcag

SEQ ID NO: 201739 - DNA, 15 bp, Homo sapiens
cccaaatgtcatgca

SEQ ID NO: 201740 - DNA, 15 bp, Homo sapiens
gcccaaatgtcatgc

SEQ ID NO: 201741 - DNA, 15 bp, Homo sapiens
tgcccaaatgtcatg

SEQ ID NO: 201742 - DNA, 15 bp, Homo sapiens
atgcccaaatgtcat

SEQ ID NO: 201743 - DNA, 15 bp, Homo sapiens
aatgcccaaatgtca

SEQ ID NO: 201744 - DNA, 15 bp, Homo sapiens
aaatgcccaaatgtc

SEQ ID NO: 201745 - DNA, 15 bp, Homo sapiens
aaaatgcccaaatgt

SEQ ID NO: 201746 - DNA, 15 bp, Homo sapiens
caaaatgcccaaatg

SEQ ID NO: 201747 - DNA, 15 bp, Homo sapiens
ccaaaatgcccaaat

SEQ ID NO: 201748 - DNA, 15 bp, Homo sapiens
cccaaaatgcccaaa

SEQ ID NO: 201749 - DNA, 15 bp, Homo sapiens
ccccaaaatgcccaa

SEQ ID NO: 201750 - DNA, 15 bp, Homo sapiens
accccaaaatgccca

SEQ ID NO: 201751 - DNA, 15 bp, Homo sapiens
taccccaaaatgccc

SEQ ID NO: 201752 - DNA, 15 bp, Homo sapiens
ctaccccaaaatgcc

SEQ ID NO: 201753 - DNA, 15 bp, Homo sapiens
gctaccccaaaatgc

SEQ ID NO: 201754 - DNA, 15 bp, Homo sapiens
agctaccccaaaatg

SEQ ID NO: 201755 - DNA, 15 bp, Homo sapiens
cagctaccccaaaat

SEQ ID NO: 201756 - DNA, 15 bp, Homo sapiens
tcagctaccccaaaa

SEQ ID NO: 201757 - DNA, 15 bp, Homo sapiens
ctcagctaccccaaa

SEQ ID NO: 201758 - DNA, 15 bp, Homo sapiens
tctcagctaccccaa

SEQ ID NO: 201759 - DNA, 15 bp, Homo sapiens
gtctcagctacccca

SEQ ID NO: 201760 - DNA, 15 bp, Homo sapiens
tgtctcagctacccc

SEQ ID NO: 201761 - DNA, 15 bp, Homo sapiens
ttgtctcagctaccc

SEQ ID NO: 201762 - DNA, 15 bp, Homo sapiens
tttgtctcagctacc

SEQ ID NO: 201763 - DNA, 15 bp, Homo sapiens
ttttgtctcagctac

SEQ ID NO: 201764 - DNA, 15 bp, Homo sapiens
tttttgtctcagcta

SEQ ID NO: 201765 - DNA, 15 bp, Homo sapiens
gtttttgtctcagct

SEQ ID NO: 201766 - DNA, 15 bp, Homo sapiens
agtttttgtctcagc

SEQ ID NO: 201767 - DNA, 15 bp, Homo sapiens
cagtttttgtctcag

SEQ ID NO: 201768 - DNA, 15 bp, Homo sapiens
gcagtttttgtctca

SEQ ID NO: 201769 - DNA, 15 bp, Homo sapiens
agcagtttttgtctc

SEQ ID NO: 201770 - DNA, 15 bp, Homo sapiens
cagcagtttttgtct

SEQ ID NO: 201771 - DNA, 15 bp, Homo sapiens
ccagcagtttttgtc

SEQ ID NO: 201772 - DNA, 15 bp, Homo sapiens
tccagcagtttttgt

SEQ ID NO: 201773 - DNA, 15 bp, Homo sapiens
ttccagcagtttttg

SEQ ID NO: 201774 - DNA, 15 bp, Homo sapiens
attccagcagttttt

SEQ ID NO: 201775 - DNA, 15 bp, Homo sapiens
aattccagcagtttt

SEQ ID NO: 201776 - DNA, 15 bp, Homo sapiens
aaattccagcagttt

SEQ ID NO: 201777 - DNA, 15 bp, Homo sapiens
gaaattccagcagtt

SEQ ID NO: 201778 - DNA, 15 bp, Homo sapiens
tgaaattccagcagt

SEQ ID NO: 201779 - DNA, 15 bp, Homo sapiens
atgaaattccagcag

SEQ ID NO: 201780 - DNA, 15 bp, Homo sapiens
aatgaaattccagca

SEQ ID NO: 201781 - DNA, 15 bp, Homo sapiens
aaatgaaattccagc

SEQ ID NO: 201782 - DNA, 15 bp, Homo sapiens
aaaatgaaattccag

SEQ ID NO: 201783 - DNA, 15 bp, Homo sapiens
caaaatgaaattcca

SEQ ID NO: 201784 - DNA, 15 bp, Homo sapiens
tcaaaatgaaattcc

SEQ ID NO: 201785 - DNA, 15 bp, Homo sapiens
ttcaaaatgaaattc

SEQ ID NO: 201786 - DNA, 15 bp, Homo sapiens
cttcaaaatgaaatt

SEQ ID NO: 201787 - DNA, 15 bp, Homo sapiens
tcttcaaaatgaaat

SEQ ID NO: 201788 - DNA, 15 bp, Homo sapiens
atcttcaaaatgaaa

SEQ ID NO: 201789 - DNA, 15 bp, Homo sapiens
tatcttcaaaatgaa

SEQ ID NO: 201790 - DNA, 15 bp, Homo sapiens
ttatcttcaaaatga

SEQ ID NO: 201791 - DNA, 15 bp, Homo sapiens
cttatcttcaaaatg

SEQ ID NO: 201792 - DNA, 15 bp, Homo sapiens
tcttatcttcaaaat

SEQ ID NO: 201793 - DNA, 15 bp, Homo sapiens
ttcttatcttcaaaa

SEQ ID NO: 201794 - DNA, 15 bp, Homo sapiens
tttcttatcttcaaa

SEQ ID NO: 201795 - DNA, 15 bp, Homo sapiens
ttttcttatcttcaa

SEQ ID NO: 201796 - DNA, 15 bp, Homo sapiens
cttttcttatcttca

SEQ ID NO: 201797 - DNA, 15 bp, Homo sapiens
ccttttcttatcttc

SEQ ID NO: 201798 - DNA, 15 bp, Homo sapiens
tccttttcttatctt

SEQ ID NO: 201799 - DNA, 15 bp, Homo sapiens
gtccttttcttatct

SEQ ID NO: 201800 - DNA, 15 bp, Homo sapiens
agtccttttcttatc

SEQ ID NO: 201801 - DNA, 15 bp, Homo sapiens
tagtccttttcttat

SEQ ID NO: 201802 - DNA, 15 bp, Homo sapiens
ctagtccttttctta

SEQ ID NO: 201803 - DNA, 15 bp, Homo sapiens
cctagtccttttctt

SEQ ID NO: 201804 - DNA, 15 bp, Homo sapiens
tcctagtccttttct

SEQ ID NO: 201805 - DNA, 15 bp, Homo sapiens
ttcctagtccttttc

SEQ ID NO: 201806 - DNA, 15 bp, Homo sapiens
tttcctagtcctttt

SEQ ID NO: 201807 - DNA, 15 bp, Homo sapiens
ctttcctagtccttt

SEQ ID NO: 201808 - DNA, 15 bp, Homo sapiens
tctttcctagtcctt

SEQ ID NO: 201809 - DNA, 15 bp, Homo sapiens
ctctttcctagtcct

SEQ ID NO: 201810 - DNA, 15 bp, Homo sapiens
tctctttcctagtcc

SEQ ID NO: 201811 - DNA, 15 bp, Homo sapiens
ctctctttcctagtc

SEQ ID NO: 201812 - DNA, 15 bp, Homo sapiens
gctctctttcctagt

SEQ ID NO: 201813 - DNA, 15 bp, Homo sapiens
agctctctttcctag

SEQ ID NO: 201814 - DNA, 15 bp, Homo sapiens
aagctctctttccta

SEQ ID NO: 201815 - DNA, 15 bp, Homo sapiens
gaagctctctttcct

SEQ ID NO: 201816 - DNA, 15 bp, Homo sapiens
agaagctctctttcc

SEQ ID NO: 201817 - DNA, 15 bp, Homo sapiens
aagaagctctctttc

SEQ ID NO: 201818 - DNA, 15 bp, Homo sapiens
aaagaagctctcttt

SEQ ID NO: 201819 - DNA, 15 bp, Homo sapiens
taaagaagctctctt

SEQ ID NO: 201820 - DNA, 15 bp, Homo sapiens
ctaaagaagctctct

SEQ ID NO: 201821 - DNA, 15 bp, Homo sapiens
cctaaagaagctctc

SEQ ID NO: 201822 - DNA, 15 bp, Homo sapiens
gcctaaagaagctct

SEQ ID NO: 201823 - DNA, 15 bp, Homo sapiens
ggcctaaagaagctc

SEQ ID NO: 201824 - DNA, 15 bp, Homo sapiens
tggcctaaagaagct

SEQ ID NO: 201825 - DNA, 15 bp, Homo sapiens
ctggcctaaagaagc

SEQ ID NO: 201826 - DNA, 15 bp, Homo sapiens
tctggcctaaagaag

SEQ ID NO: 201827 - DNA, 15 bp, Homo sapiens
ctctggcctaaagaa

SEQ ID NO: 201828 - DNA, 15 bp, Homo sapiens
cctctggcctaaaga

SEQ ID NO: 201829 - DNA, 15 bp, Homo sapiens
tcctctggcctaaag

SEQ ID NO: 201830 - DNA, 15 bp, Homo sapiens
ctcctctggcctaaa

SEQ ID NO: 201831 - DNA, 15 bp, Homo sapiens
tctcctctggcctaa

SEQ ID NO: 201832 - DNA, 15 bp, Homo sapiens
ttctcctctggccta

SEQ ID NO: 201833 - DNA, 15 bp, Homo sapiens
gttctcctctggcct

SEQ ID NO: 201834 - DNA, 15 bp, Homo sapiens
tgttctcctctggcc

SEQ ID NO: 201835 - DNA, 15 bp, Homo sapiens
ctgttctcctctggc

SEQ ID NO: 201836 - DNA, 15 bp, Homo sapiens
tctgttctcctctgg

SEQ ID NO: 201837 - DNA, 15 bp, Homo sapiens
atctgttctcctctg

SEQ ID NO: 201838 - DNA, 15 bp, Homo sapiens
aatctgttctcctct

SEQ ID NO: 201839 - DNA, 15 bp, Homo sapiens
caatctgttctcctc

SEQ ID NO: 201840 - DNA, 15 bp, Homo sapiens
tcaatctgttctcct

SEQ ID NO: 201841 - DNA, 15 bp, Homo sapiens
ctcaatctgttctcc

SEQ ID NO: 201842 - DNA, 15 bp, Homo sapiens
cctcaatctgttctc

SEQ ID NO: 201843 - DNA, 15 bp, Homo sapiens
gcctcaatctgttct

SEQ ID NO: 201844 - DNA, 15 bp, Homo sapiens
agcctcaatctgttc

SEQ ID NO: 201845 - DNA, 15 bp, Homo sapiens
cagcctcaatctgtt

SEQ ID NO: 201846 - DNA, 15 bp, Homo sapiens
acagcctcaatctgt

SEQ ID NO: 201847 - DNA, 15 bp, Homo sapiens
cacagcctcaatctg

SEQ ID NO: 201848 - DNA, 15 bp, Homo sapiens
tcacagcctcaatct

SEQ ID NO: 201849 - DNA, 15 bp, Homo sapiens
ttcacagcctcaatc

SEQ ID NO: 201850 - DNA, 15 bp, Homo sapiens
cttcacagcctcaat

SEQ ID NO: 201851 - DNA, 15 bp, Homo sapiens
ccttcacagcctcaa

SEQ ID NO: 201852 - DNA, 15 bp, Homo sapiens
tccttcacagcctca

SEQ ID NO: 201853 - DNA, 15 bp, Homo sapiens
gtccttcacagcctc

SEQ ID NO: 201854 - DNA, 15 bp, Homo sapiens
agtccttcacagcct

SEQ ID NO: 201855 - DNA, 15 bp, Homo sapiens
gagtccttcacagcc

SEQ ID NO: 201856 - DNA, 15 bp, Homo sapiens
agagtccttcacagc

SEQ ID NO: 201857 - DNA, 15 bp, Homo sapiens
aagagtccttcacag

SEQ ID NO: 201858 - DNA, 15 bp, Homo sapiens
caagagtccttcaca

SEQ ID NO: 201859 - DNA, 15 bp, Homo sapiens
ccaagagtccttcac

SEQ ID NO: 201860 - DNA, 15 bp, Homo sapiens
gccaagagtccttca

SEQ ID NO: 201861 - DNA, 15 bp, Homo sapiens
agccaagagtccttc

SEQ ID NO: 201862 - DNA, 15 bp, Homo sapiens
gagccaagagtcctt

SEQ ID NO: 201863 - DNA, 15 bp, Homo sapiens
ggagccaagagtcct

SEQ ID NO: 201864 - DNA, 15 bp, Homo sapiens
gggagccaagagtcc

SEQ ID NO: 201865 - DNA, 15 bp, Homo sapiens
tgggagccaagagtc

SEQ ID NO: 201866 - DNA, 15 bp, Homo sapiens
ctgggagccaagagt

SEQ ID NO: 201867 - DNA, 15 bp, Homo sapiens
gctgggagccaagag

SEQ ID NO: 201868 - DNA, 15 bp, Homo sapiens
agctgggagccaaga

SEQ ID NO: 201869 - DNA, 15 bp, Homo sapiens
gagctgggagccaag

SEQ ID NO: 201870 - DNA, 15 bp, Homo sapiens
agagctgggagccaa

SEQ ID NO: 201871 - DNA, 15 bp, Homo sapiens
aagagctgggagcca

SEQ ID NO: 201872 - DNA, 15 bp, Homo sapiens
gaagagctgggagcc

SEQ ID NO: 201873 - DNA, 15 bp, Homo sapiens
agaagagctgggagc

SEQ ID NO: 201874 - DNA, 15 bp, Homo sapiens
aagaagagctgggag

SEQ ID NO: 201875 - DNA, 15 bp, Homo sapiens
caagaagagctggga

SEQ ID NO: 201876 - DNA, 15 bp, Homo sapiens
acaagaagagctggg

SEQ ID NO: 201877 - DNA, 15 bp, Homo sapiens
aacaagaagagctgg

SEQ ID NO: 201878 - DNA, 15 bp, Homo sapiens
gaacaagaagagctg

SEQ ID NO: 201879 - DNA, 15 bp, Homo sapiens
agaacaagaagagct

SEQ ID NO: 201880 - DNA, 15 bp, Homo sapiens
gagaacaagaagagc

SEQ ID NO: 201881 - DNA, 15 bp, Homo sapiens
agagaacaagaagag

SEQ ID NO: 201882 - DNA, 15 bp, Homo sapiens
cagagaacaagaaga

SEQ ID NO: 201883 - DNA, 15 bp, Homo sapiens
acagagaacaagaag

SEQ ID NO: 201884 - DNA, 15 bp, Homo sapiens
cacagagaacaagaa

SEQ ID NO: 201885 - DNA, 15 bp, Homo sapiens
ccacagagaacaaga

SEQ ID NO: 201886 - DNA, 15 bp, Homo sapiens
tccacagagaacaag

SEQ ID NO: 201887 - DNA, 15 bp, Homo sapiens
gtccacagagaacaa

SEQ ID NO: 201888 - DNA, 15 bp, Homo sapiens
agtccacagagaaca

SEQ ID NO: 201889 - DNA, 15 bp, Homo sapiens
aagtccacagagaac

SEQ ID NO: 201890 - DNA, 15 bp, Homo sapiens
aaagtccacagagaa

SEQ ID NO: 201891 - DNA, 15 bp, Homo sapiens
gaaagtccacagaga

SEQ ID NO: 201892 - DNA, 15 bp, Homo sapiens
tgaaagtccacagag

SEQ ID NO: 201893 - DNA, 15 bp, Homo sapiens
ttgaaagtccacaga

SEQ ID NO: 201894 - DNA, 15 bp, Homo sapiens
cttgaaagtccacag

SEQ ID NO: 201895 - DNA, 15 bp, Homo sapiens
gcttgaaagtccaca

SEQ ID NO: 201896 - DNA, 15 bp, Homo sapiens
agcttgaaagtccac

SEQ ID NO: 201897 - DNA, 15 bp, Homo sapiens
aagcttgaaagtcca

SEQ ID NO: 201898 - DNA, 15 bp, Homo sapiens
gaagcttgaaagtcc

SEQ ID NO: 201899 - DNA, 15 bp, Homo sapiens
agaagcttgaaagtc

SEQ ID NO: 201900 - DNA, 15 bp, Homo sapiens
cagaagcttgaaagt

SEQ ID NO: 201901 - DNA, 15 bp, Homo sapiens
gcagaagcttgaaag

SEQ ID NO: 201902 - DNA, 15 bp, Homo sapiens
tgcagaagcttgaaa

SEQ ID NO: 201903 - DNA, 15 bp, Homo sapiens
ctgcagaagcttgaa

SEQ ID NO: 201904 - DNA, 15 bp, Homo sapiens
cctgcagaagcttga

SEQ ID NO: 201905 - DNA, 15 bp, Homo sapiens
ccctgcagaagcttg

SEQ ID NO: 201906 - DNA, 15 bp, Homo sapiens
tccctgcagaagctt

SEQ ID NO: 201907 - DNA, 15 bp, Homo sapiens
ctccctgcagaagct

SEQ ID NO: 201908 - DNA, 15 bp, Homo sapiens
tctccctgcagaagc

SEQ ID NO: 201909 - DNA, 15 bp, Homo sapiens
gtctccctgcagaag

SEQ ID NO: 201910 - DNA, 15 bp, Homo sapiens
tgtctccctgcagaa

SEQ ID NO: 201911 - DNA, 15 bp, Homo sapiens
ctgtctccctgcaga

SEQ ID NO: 201912 - DNA, 15 bp, Homo sapiens
actgtctccctgcag

SEQ ID NO: 201913 - DNA, 15 bp, Homo sapiens
cactgtctccctgca

SEQ ID NO: 201914 - DNA, 15 bp, Homo sapiens
tcactgtctccctgc

SEQ ID NO: 201915 - DNA, 15 bp, Homo sapiens
ttcactgtctccctg

SEQ ID NO: 201916 - DNA, 15 bp, Homo sapiens
gttcactgtctccct

SEQ ID NO: 201917 - DNA, 15 bp, Homo sapiens
agttcactgtctccc

SEQ ID NO: 201918 - DNA, 15 bp, Homo sapiens
cagttcactgtctcc

SEQ ID NO: 201919 - DNA, 15 bp, Homo sapiens
ccagttcactgtctc

SEQ ID NO: 201920 - DNA, 15 bp, Homo sapiens
cccagttcactgtct

SEQ ID NO: 201921 - DNA, 15 bp, Homo sapiens
tcccagttcactgtc

SEQ ID NO: 201922 - DNA, 15 bp, Homo sapiens
ctcccagttcactgt

SEQ ID NO: 201923 - DNA, 15 bp, Homo sapiens
cctcccagttcactg

SEQ ID NO: 201924 - DNA, 15 bp, Homo sapiens
tcctcccagttcact

SEQ ID NO: 201925 - DNA, 15 bp, Homo sapiens
ttcctcccagttcac

SEQ ID NO: 201926 - DNA, 15 bp, Homo sapiens
attcctcccagttca

SEQ ID NO: 201927 - DNA, 15 bp, Homo sapiens
tattcctcccagttc

SEQ ID NO: 201928 - DNA, 15 bp, Homo sapiens
atattcctcccagtt

SEQ ID NO: 201929 - DNA, 15 bp, Homo sapiens
catattcctcccagt

SEQ ID NO: 201930 - DNA, 15 bp, Homo sapiens
acatattcctcccag

SEQ ID NO: 201931 - DNA, 15 bp, Homo sapiens
tacatattcctccca

SEQ ID NO: 201932 - DNA, 15 bp, Homo sapiens
ctacatattcctccc

SEQ ID NO: 201933 - DNA, 15 bp, Homo sapiens
actacatattcctcc

SEQ ID NO: 201934 - DNA, 15 bp, Homo sapiens
cactacatattcctc

SEQ ID NO: 201935 - DNA, 15 bp, Homo sapiens
tcactacatattcct

SEQ ID NO: 201936 - DNA, 15 bp, Homo sapiens
gtcactacatattcc

SEQ ID NO: 201937 - DNA, 15 bp, Homo sapiens
agtcactacatattc

SEQ ID NO: 201938 - DNA, 15 bp, Homo sapiens
cagtcactacatatt

SEQ ID NO: 201939 - DNA, 15 bp, Homo sapiens
acagtcactacatat

SEQ ID NO: 201940 - DNA, 15 bp, Homo sapiens
cacagtcactacata

SEQ ID NO: 201941 - DNA, 15 bp, Homo sapiens
tcacagtcactacat

SEQ ID NO: 201942 - DNA, 15 bp, Homo sapiens
ttcacagtcactaca

SEQ ID NO: 201943 - DNA, 15 bp, Homo sapiens
cttcacagtcactac

SEQ ID NO: 201944 - DNA, 15 bp, Homo sapiens
ccttcacagtcacta

SEQ ID NO: 201945 - DNA, 15 bp, Homo sapiens
accttcacagtcact

SEQ ID NO: 201946 - DNA, 15 bp, Homo sapiens
aaccttcacagtcac

SEQ ID NO: 201947 - DNA, 15 bp, Homo sapiens
taaccttcacagtca

SEQ ID NO: 201948 - DNA, 15 bp, Homo sapiens
gtaaccttcacagtc

SEQ ID NO: 201949 - DNA, 15 bp, Homo sapiens
tgtaaccttcacagt

SEQ ID NO: 201950 - DNA, 15 bp, Homo sapiens
atgtaaccttcacag

SEQ ID NO: 201951 - DNA, 15 bp, Homo sapiens
catgtaaccttcaca

SEQ ID NO: 201952 - DNA, 15 bp, Homo sapiens
acatgtaaccttcac

SEQ ID NO: 201953 - DNA, 15 bp, Homo sapiens
cacatgtaaccttca

SEQ ID NO: 201954 - DNA, 15 bp, Homo sapiens
ccacatgtaaccttc

SEQ ID NO: 201955 - DNA, 15 bp, Homo sapiens
gccacatgtaacctt

SEQ ID NO: 201956 - DNA, 15 bp, Homo sapiens
agccacatgtaacct

SEQ ID NO: 201957 - DNA, 15 bp, Homo sapiens
cagccacatgtaacc

SEQ ID NO: 201958 - DNA, 15 bp, Homo sapiens
ccagccacatgtaac

SEQ ID NO: 201959 - DNA, 15 bp, Homo sapiens
tccagccacatgtaa

SEQ ID NO: 201960 - DNA, 15 bp, Homo sapiens
ttccagccacatgta

SEQ ID NO: 201961 - DNA, 15 bp, Homo sapiens
cttccagccacatgt

SEQ ID NO: 201962 - DNA, 15 bp, Homo sapiens
ccttccagccacatg

SEQ ID NO: 201963 - DNA, 15 bp, Homo sapiens
cccttccagccacat

SEQ ID NO: 201964 - DNA, 15 bp, Homo sapiens
ccccttccagccaca

SEQ ID NO: 201965 - DNA, 15 bp, Homo sapiens
gccccttccagccac

SEQ ID NO: 201966 - DNA, 15 bp, Homo sapiens
tgccccttccagcca

SEQ ID NO: 201967 - DNA, 15 bp, Homo sapiens
ctgccccttccagcc

SEQ ID NO: 201968 - DNA, 15 bp, Homo sapiens
cctgccccttccagc

SEQ ID NO: 201969 - DNA, 15 bp, Homo sapiens
gcctgccccttccag

SEQ ID NO: 201970 - DNA, 15 bp, Homo sapiens
tgcctgccccttcca

SEQ ID NO: 201971 - DNA, 15 bp, Homo sapiens
ttgcctgccccttcc

SEQ ID NO: 201972 - DNA, 15 bp, Homo sapiens
tttgcctgccccttc

SEQ ID NO: 201973 - DNA, 15 bp, Homo sapiens
ttttgcctgcccctt

SEQ ID NO: 201974 - DNA, 15 bp, Homo sapiens
cttttgcctgcccct

SEQ ID NO: 201975 - DNA, 15 bp, Homo sapiens
ccttttgcctgcccc

SEQ ID NO: 201976 - DNA, 15 bp, Homo sapiens
accttttgcctgccc

SEQ ID NO: 201977 - DNA, 15 bp, Homo sapiens
gaccttttgcctgcc

SEQ ID NO: 201978 - DNA, 15 bp, Homo sapiens
ggaccttttgcctgc

SEQ ID NO: 201979 - DNA, 15 bp, Homo sapiens
gggaccttttgcctg

SEQ ID NO: 201980 - DNA, 15 bp, Homo sapiens
tgggaccttttgcct

SEQ ID NO: 201981 - DNA, 15 bp, Homo sapiens
ttgggaccttttgcc

SEQ ID NO: 201982 - DNA, 15 bp, Homo sapiens
tttgggaccttttgc

SEQ ID NO: 201983 - DNA, 15 bp, Homo sapiens
atttgggaccttttg

SEQ ID NO: 201984 - DNA, 15 bp, Homo sapiens
catttgggacctttt

SEQ ID NO: 201985 - DNA, 15 bp, Homo sapiens
ccatttgggaccttt

SEQ ID NO: 201986 - DNA, 15 bp, Homo sapiens
gccatttgggacctt

SEQ ID NO: 201987 - DNA, 15 bp, Homo sapiens
ggccatttgggacct

SEQ ID NO: 201988 - DNA, 15 bp, Homo sapiens
gggccatttgggacc

SEQ ID NO: 201989 - DNA, 15 bp, Homo sapiens
agggccatttgggac

SEQ ID NO: 201990 - DNA, 15 bp, Homo sapiens
cagggccatttggga

SEQ ID NO: 201991 - DNA, 15 bp, Homo sapiens
acagggccatttggg

SEQ ID NO: 201992 - DNA, 15 bp, Homo sapiens
cacagggccatttgg

SEQ ID NO: 201993 - DNA, 15 bp, Homo sapiens
ccacagggccatttg

SEQ ID NO: 201994 - DNA, 15 bp, Homo sapiens
accacagggccattt

SEQ ID NO: 201995 - DNA, 15 bp, Homo sapiens
caccacagggccatt

SEQ ID NO: 201996 - DNA, 15 bp, Homo sapiens
gcaccacagggccat

SEQ ID NO: 201997 - DNA, 15 bp, Homo sapiens
agcaccacagggcca

SEQ ID NO: 201998 - DNA, 15 bp, Homo sapiens
aagcaccacagggcc

SEQ ID NO: 201999 - DNA, 15 bp, Homo sapiens
aaagcaccacagggc

SEQ ID NO: 202000 - DNA, 15 bp, Homo sapiens
taaagcaccacaggg

SEQ ID NO: 202001 - DNA, 15 bp, Homo sapiens
ctaaagcaccacagg

SEQ ID NO: 202002 - DNA, 15 bp, Homo sapiens
actaaagcaccacag

SEQ ID NO: 202003 - DNA, 15 bp, Homo sapiens
aactaaagcaccaca

SEQ ID NO: 202004 - DNA, 15 bp, Homo sapiens
caactaaagcaccac

SEQ ID NO: 202005 - DNA, 15 bp, Homo sapiens
ccaactaaagcacca

SEQ ID NO: 202006 - DNA, 15 bp, Homo sapiens
gccaactaaagcacc

SEQ ID NO: 202007 - DNA, 15 bp, Homo sapiens
tgccaactaaagcac

SEQ ID NO: 202008 - DNA, 15 bp, Homo sapiens
ctgccaactaaagca

SEQ ID NO: 202009 - DNA, 15 bp, Homo sapiens
tctgccaactaaagc

SEQ ID NO: 202010 - DNA, 15 bp, Homo sapiens
ctctgccaactaaag

SEQ ID NO: 202011 - DNA, 15 bp, Homo sapiens
tctctgccaactaaa

SEQ ID NO: 202012 - DNA, 15 bp, Homo sapiens
ctctctgccaactaa

SEQ ID NO: 202013 - DNA, 15 bp, Homo sapiens
tctctctgccaacta

SEQ ID NO: 202014 - DNA, 15 bp, Homo sapiens
atctctctgccaact

SEQ ID NO: 202015 - DNA, 15 bp, Homo sapiens
catctctctgccaac

SEQ ID NO: 202016 - DNA, 15 bp, Homo sapiens
ccatctctctgccaa

SEQ ID NO: 202017 - DNA, 15 bp, Homo sapiens
tccatctctctgcca

SEQ ID NO: 202018 - DNA, 15 bp, Homo sapiens
gtccatctctctgcc

SEQ ID NO: 202019 - DNA, 15 bp, Homo sapiens
tgtccatctctctgc

SEQ ID NO: 202020 - DNA, 15 bp, Homo sapiens
ttgtccatctctctg

SEQ ID NO: 202021 - DNA, 15 bp, Homo sapiens
cttgtccatctctct

SEQ ID NO: 202022 - DNA, 15 bp, Homo sapiens
acttgtccatctctc

SEQ ID NO: 202023 - DNA, 15 bp, Homo sapiens
aacttgtccatctct

SEQ ID NO: 202024 - DNA, 15 bp, Homo sapiens
caacttgtccatctc

SEQ ID NO: 202025 - DNA, 15 bp, Homo sapiens
tcaacttgtccatct

SEQ ID NO: 202026 - DNA, 15 bp, Homo sapiens
atcaacttgtccatc

SEQ ID NO: 202027 - DNA, 15 bp, Homo sapiens
gatcaacttgtccat

SEQ ID NO: 202028 - DNA, 15 bp, Homo sapiens
ggatcaacttgtcca

SEQ ID NO: 202029 - DNA, 15 bp, Homo sapiens
aggatcaacttgtcc

SEQ ID NO: 202030 - DNA, 15 bp, Homo sapiens
caggatcaacttgtc

SEQ ID NO: 202031 - DNA, 15 bp, Homo sapiens
gcaggatcaacttgt

SEQ ID NO: 202032 - DNA, 15 bp, Homo sapiens
ggcaggatcaacttg

SEQ ID NO: 202033 - DNA, 15 bp, Homo sapiens
gggcaggatcaactt

SEQ ID NO: 202034 - DNA, 15 bp, Homo sapiens
agggcaggatcaact

SEQ ID NO: 202035 - DNA, 15 bp, Homo sapiens
aagggcaggatcaac

SEQ ID NO: 202036 - DNA, 15 bp, Homo sapiens
taagggcaggatcaa

SEQ ID NO: 202037 - DNA, 15 bp, Homo sapiens
ataagggcaggatca

SEQ ID NO: 202038 - DNA, 15 bp, Homo sapiens
cataagggcaggatc

SEQ ID NO: 202039 - DNA, 15 bp, Homo sapiens
gcataagggcaggat

SEQ ID NO: 202040 - DNA, 15 bp, Homo sapiens
ggcataagggcagga

SEQ ID NO: 202041 - DNA, 15 bp, Homo sapiens
cggcataagggcagg

SEQ ID NO: 202042 - DNA, 15 bp, Homo sapiens
acggcataagggcag

SEQ ID NO: 202043 - DNA, 15 bp, Homo sapiens
gacggcataagggca

SEQ ID NO: 202044 - DNA, 15 bp, Homo sapiens
agacggcataagggc

SEQ ID NO: 202045 - DNA, 15 bp, Homo sapiens
gagacggcataaggg

SEQ ID NO: 202046 - DNA, 15 bp, Homo sapiens
tgagacggcataagg

SEQ ID NO: 202047 - DNA, 15 bp, Homo sapiens
atgagacggcataag

SEQ ID NO: 202048 - DNA, 15 bp, Homo sapiens
catgagacggcataa

SEQ ID NO: 202049 - DNA, 15 bp, Homo sapiens
gcatgagacggcata

SEQ ID NO: 202050 - DNA, 15 bp, Homo sapiens
tgcatgagacggcat

SEQ ID NO: 202051 - DNA, 15 bp, Homo sapiens
atgcatgagacggca

SEQ ID NO: 202052 - DNA, 15 bp, Homo sapiens
aatgcatgagacggc

SEQ ID NO: 202053 - DNA, 15 bp, Homo sapiens
aaatgcatgagacgg

SEQ ID NO: 202054 - DNA, 15 bp, Homo sapiens
caaatgcatgagacg

SEQ ID NO: 202055 - DNA, 15 bp, Homo sapiens
acaaatgcatgagac

SEQ ID NO: 202056 - DNA, 15 bp, Homo sapiens
gacaaatgcatgaga

SEQ ID NO: 202057 - DNA, 15 bp, Homo sapiens
ggacaaatgcatgag

SEQ ID NO: 202058 - DNA, 15 bp, Homo sapiens
tggacaaatgcatga

SEQ ID NO: 202059 - DNA, 15 bp, Homo sapiens
ttggacaaatgcatg

SEQ ID NO: 202060 - DNA, 15 bp, Homo sapiens
tttggacaaatgcat

SEQ ID NO: 202061 - DNA, 15 bp, Homo sapiens
ttttggacaaatgca

SEQ ID NO: 202062 - DNA, 15 bp, Homo sapiens
cttttggacaaatgc

SEQ ID NO: 202063 - DNA, 15 bp, Homo sapiens
gcttttggacaaatg

SEQ ID NO: 202064 - DNA, 15 bp, Homo sapiens
agcttttggacaaat

SEQ ID NO: 202065 - DNA, 15 bp, Homo sapiens
aagcttttggacaaa

SEQ ID NO: 202066 - DNA, 15 bp, Homo sapiens
aaagcttttggacaa

SEQ ID NO: 202067 - DNA, 15 bp, Homo sapiens
caaagcttttggaca

SEQ ID NO: 202068 - DNA, 15 bp, Homo sapiens
acaaagcttttggac

SEQ ID NO: 202069 - DNA, 15 bp, Homo sapiens
aacaaagcttttgga

SEQ ID NO: 202070 - DNA, 15 bp, Homo sapiens
aaacaaagcttttgg

SEQ ID NO: 202071 - DNA, 15 bp, Homo sapiens
gaaacaaagcttttg

SEQ ID NO: 202072 - DNA, 15 bp, Homo sapiens
agaaacaaagctttt

SEQ ID NO: 202073 - DNA, 15 bp, Homo sapiens
cagaaacaaagcttt

SEQ ID NO: 202074 - DNA, 15 bp, Homo sapiens
gcagaaacaaagctt

SEQ ID NO: 202075 - DNA, 15 bp, Homo sapiens
agcagaaacaaagct

SEQ ID NO: 202076 - DNA, 15 bp, Homo sapiens
cagcagaaacaaagc

SEQ ID NO: 202077 - DNA, 15 bp, Homo sapiens
gcagcagaaacaaag

SEQ ID NO: 202078 - DNA, 15 bp, Homo sapiens
cgcagcagaaacaaa

SEQ ID NO: 202079 - DNA, 15 bp, Homo sapiens
acgcagcagaaacaa

SEQ ID NO: 202080 - DNA, 15 bp, Homo sapiens
cacgcagcagaaaca

SEQ ID NO: 202081 - DNA, 15 bp, Homo sapiens
ccacgcagcagaaac

SEQ ID NO: 202082 - DNA, 15 bp, Homo sapiens
accacgcagcagaaa

SEQ ID NO: 202083 - DNA, 15 bp, Homo sapiens
gaccacgcagcagaa

SEQ ID NO: 202084 - DNA, 15 bp, Homo sapiens
tgaccacgcagcaga

SEQ ID NO: 202085 - DNA, 15 bp, Homo sapiens
ctgaccacgcagcag

SEQ ID NO: 202086 - DNA, 15 bp, Homo sapiens
tctgaccacgcagca

SEQ ID NO: 202087 - DNA, 15 bp, Homo sapiens
ctctgaccacgcagc

SEQ ID NO: 202088 - DNA, 15 bp, Homo sapiens
tctctgaccacgcag

SEQ ID NO: 202089 - DNA, 15 bp, Homo sapiens
gtctctgaccacgca

SEQ ID NO: 202090 - DNA, 15 bp, Homo sapiens
tgtctctgaccacgc

SEQ ID NO: 202091 - DNA, 15 bp, Homo sapiens
ctgtctctgaccacg

SEQ ID NO: 202092 - DNA, 15 bp, Homo sapiens
tctgtctctgaccac

SEQ ID NO: 202093 - DNA, 15 bp, Homo sapiens
ttctgtctctgacca

SEQ ID NO: 202094 - DNA, 15 bp, Homo sapiens
cttctgtctctgacc

SEQ ID NO: 202095 - DNA, 15 bp, Homo sapiens
ccttctgtctctgac

SEQ ID NO: 202096 - DNA, 15 bp, Homo sapiens
tccttctgtctctga

SEQ ID NO: 202097 - DNA, 15 bp, Homo sapiens
ctccttctgtctctg

SEQ ID NO: 202098 - DNA, 15 bp, Homo sapiens
cctccttctgtctct

SEQ ID NO: 202099 - DNA, 15 bp, Homo sapiens
tcctccttctgtctc

SEQ ID NO: 202100 - DNA, 15 bp, Homo sapiens
ctcctccttctgtct

SEQ ID NO: 202101 - DNA, 15 bp, Homo sapiens
cctcctccttctgtc

SEQ ID NO: 202102 - DNA, 15 bp, Homo sapiens
gcctcctccttctgt

SEQ ID NO: 202103 - DNA, 15 bp, Homo sapiens
agcctcctccttctg

SEQ ID NO: 202104 - DNA, 15 bp, Homo sapiens
cagcctcctccttct

SEQ ID NO: 202105 - DNA, 15 bp, Homo sapiens
gcagcctcctccttc

SEQ ID NO: 202106 - DNA, 15 bp, Homo sapiens
ggcagcctcctcctt

SEQ ID NO: 202107 - DNA, 15 bp, Homo sapiens
aggcagcctcctcct

SEQ ID NO: 202108 - DNA, 15 bp, Homo sapiens
gaggcagcctcctcc

SEQ ID NO: 202109 - DNA, 15 bp, Homo sapiens
ggaggcagcctcctc

SEQ ID NO: 202110 - DNA, 15 bp, Homo sapiens
gggaggcagcctcct

SEQ ID NO: 202111 - DNA, 15 bp, Homo sapiens
ggggaggcagcctcc

SEQ ID NO: 202112 - DNA, 15 bp, Homo sapiens
aggggaggcagcctc

SEQ ID NO: 202113 - DNA, 15 bp, Homo sapiens
aaggggaggcagcct

SEQ ID NO: 202114 - DNA, 15 bp, Homo sapiens
gaaggggaggcagcc

SEQ ID NO: 202115 - DNA, 15 bp, Homo sapiens
ggaaggggaggcagc

SEQ ID NO: 202116 - DNA, 15 bp, Homo sapiens
aggaaggggaggcag

SEQ ID NO: 202117 - DNA, 15 bp, Homo sapiens
caggaaggggaggca

SEQ ID NO: 202118 - DNA, 15 bp, Homo sapiens
ccaggaaggggaggc

SEQ ID NO: 202119 - DNA, 15 bp, Homo sapiens
cccaggaaggggagg

SEQ ID NO: 202120 - DNA, 15 bp, Homo sapiens
tcccaggaaggggag

SEQ ID NO: 202121 - DNA, 15 bp, Homo sapiens
gtcccaggaagggga

SEQ ID NO: 202122 - DNA, 15 bp, Homo sapiens
ggtcccaggaagggg

SEQ ID NO: 202123 - DNA, 15 bp, Homo sapiens
aggtcccaggaaggg

SEQ ID NO: 202124 - DNA, 15 bp, Homo sapiens
caggtcccaggaagg

SEQ ID NO: 202125 - DNA, 15 bp, Homo sapiens
ccaggtcccaggaag

SEQ ID NO: 202126 - DNA, 15 bp, Homo sapiens
tccaggtcccaggaa

SEQ ID NO: 202127 - DNA, 15 bp, Homo sapiens
atccaggtcccagga

SEQ ID NO: 202128 - DNA, 15 bp, Homo sapiens
catccaggtcccagg

SEQ ID NO: 202129 - DNA, 15 bp, Homo sapiens
acatccaggtcccag

SEQ ID NO: 202130 - DNA, 15 bp, Homo sapiens
aacatccaggtccca

SEQ ID NO: 202131 - DNA, 15 bp, Homo sapiens
aaacatccaggtccc

SEQ ID NO: 202132 - DNA, 15 bp, Homo sapiens
aaaacatccaggtcc

SEQ ID NO: 202133 - DNA, 15 bp, Homo sapiens
caaaacatccaggtc

SEQ ID NO: 202134 - DNA, 15 bp, Homo sapiens
ccaaaacatccaggt

SEQ ID NO: 202135 - DNA, 15 bp, Homo sapiens
accaaaacatccagg

SEQ ID NO: 202136 - DNA, 15 bp, Homo sapiens
aaccaaaacatccag

SEQ ID NO: 202137 - DNA, 15 bp, Homo sapiens
gaaccaaaacatcca

SEQ ID NO: 202138 - DNA, 15 bp, Homo sapiens
tgaaccaaaacatcc

SEQ ID NO: 202139 - DNA, 15 bp, Homo sapiens
atgaaccaaaacatc

SEQ ID NO: 202140 - DNA, 15 bp, Homo sapiens
gatgaaccaaaacat

SEQ ID NO: 202141 - DNA, 15 bp, Homo sapiens
agatgaaccaaaaca

SEQ ID NO: 202142 - DNA, 15 bp, Homo sapiens
cagatgaaccaaaac

SEQ ID NO: 202143 - DNA, 15 bp, Homo sapiens
ccagatgaaccaaaa

SEQ ID NO: 202144 - DNA, 15 bp, Homo sapiens
cccagatgaaccaaa

SEQ ID NO: 202145 - DNA, 15 bp, Homo sapiens
acccagatgaaccaa

SEQ ID NO: 202146 - DNA, 15 bp, Homo sapiens
aacccagatgaacca

SEQ ID NO: 202147 - DNA, 15 bp, Homo sapiens
gaacccagatgaacc

SEQ ID NO: 202148 - DNA, 15 bp, Homo sapiens
ggaacccagatgaac

SEQ ID NO: 202149 - DNA, 15 bp, Homo sapiens
aggaacccagatgaa

SEQ ID NO: 202150 - DNA, 15 bp, Homo sapiens
aaggaacccagatga

SEQ ID NO: 202151 - DNA, 15 bp, Homo sapiens
aaaggaacccagatg

SEQ ID NO: 202152 - DNA, 15 bp, Homo sapiens
gaaaggaacccagat

SEQ ID NO: 202153 - DNA, 15 bp, Homo sapiens
agaaaggaacccaga

SEQ ID NO: 202154 - DNA, 15 bp, Homo sapiens
cagaaaggaacccag

SEQ ID NO: 202155 - DNA, 15 bp, Homo sapiens
tcagaaaggaaccca

SEQ ID NO: 202156 - DNA, 15 bp, Homo sapiens
atcagaaaggaaccc

SEQ ID NO: 202157 - DNA, 15 bp, Homo sapiens
aatcagaaaggaacc

SEQ ID NO: 202158 - DNA, 15 bp, Homo sapiens
aaatcagaaaggaac

SEQ ID NO: 202159 - DNA, 15 bp, Homo sapiens
aaaatcagaaaggaa

SEQ ID NO: 202160 - DNA, 15 bp, Homo sapiens
caaaatcagaaagga

SEQ ID NO: 202161 - DNA, 15 bp, Homo sapiens
acaaaatcagaaagg

SEQ ID NO: 202162 - DNA, 15 bp, Homo sapiens
cacaaaatcagaaag

SEQ ID NO: 202163 - DNA, 15 bp, Homo sapiens
tcacaaaatcagaaa

SEQ ID NO: 202164 - DNA, 15 bp, Homo sapiens
atcacaaaatcagaa

SEQ ID NO: 202165 - DNA, 15 bp, Homo sapiens
catcacaaaatcaga

SEQ ID NO: 202166 - DNA, 15 bp, Homo sapiens
gcatcacaaaatcag

SEQ ID NO: 202167 - DNA, 15 bp, Homo sapiens
ggcatcacaaaatca

SEQ ID NO: 202168 - DNA, 15 bp, Homo sapiens
gggcatcacaaaatc

SEQ ID NO: 202169 - DNA, 15 bp, Homo sapiens
agggcatcacaaaat

SEQ ID NO: 202170 - DNA, 15 bp, Homo sapiens
tagggcatcacaaaa

SEQ ID NO: 202171 - DNA, 15 bp, Homo sapiens
ttagggcatcacaaa

SEQ ID NO: 202172 - DNA, 15 bp, Homo sapiens
cttagggcatcacaa

SEQ ID NO: 202173 - DNA, 15 bp, Homo sapiens
gcttagggcatcaca

SEQ ID NO: 202174 - DNA, 15 bp, Homo sapiens
ggcttagggcatcac

SEQ ID NO: 202175 - DNA, 15 bp, Homo sapiens
aggcttagggcatca

SEQ ID NO: 202176 - DNA, 15 bp, Homo sapiens
gaggcttagggcatc

SEQ ID NO: 202177 - DNA, 15 bp, Homo sapiens
ggaggcttagggcat

SEQ ID NO: 202178 - DNA, 15 bp, Homo sapiens
aggaggcttagggca

SEQ ID NO: 202179 - DNA, 15 bp, Homo sapiens
caggaggcttagggc

SEQ ID NO: 202180 - DNA, 15 bp, Homo sapiens
acaggaggcttaggg

SEQ ID NO: 202181 - DNA, 15 bp, Homo sapiens
gacaggaggcttagg

SEQ ID NO: 202182 - DNA, 15 bp, Homo sapiens
ggacaggaggcttag

SEQ ID NO: 202183 - DNA, 15 bp, Homo sapiens
gggacaggaggctta

SEQ ID NO: 202184 - DNA, 15 bp, Homo sapiens
ggggacaggaggctt

SEQ ID NO: 202185 - DNA, 15 bp, Homo sapiens
tggggacaggaggct

SEQ ID NO: 202186 - DNA, 15 bp, Homo sapiens
gtggggacaggaggc

SEQ ID NO: 202187 - DNA, 15 bp, Homo sapiens
tgtggggacaggagg

SEQ ID NO: 202188 - DNA, 15 bp, Homo sapiens
ctgtggggacaggag

SEQ ID NO: 202189 - DNA, 15 bp, Homo sapiens
gctgtggggacagga

SEQ ID NO: 202190 - DNA, 15 bp, Homo sapiens
ggctgtggggacagg

SEQ ID NO: 202191 - DNA, 15 bp, Homo sapiens
gggctgtggggacag

SEQ ID NO: 202192 - DNA, 15 bp, Homo sapiens
agggctgtggggaca

SEQ ID NO: 202193 - DNA, 15 bp, Homo sapiens
aagggctgtggggac

SEQ ID NO: 202194 - DNA, 15 bp, Homo sapiens
gaagggctgtgggga

SEQ ID NO: 202195 - DNA, 15 bp, Homo sapiens
agaagggctgtgggg

SEQ ID NO: 202196 - DNA, 15 bp, Homo sapiens
aagaagggctgtggg

SEQ ID NO: 202197 - DNA, 15 bp, Homo sapiens
aaagaagggctgtgg

SEQ ID NO: 202198 - DNA, 15 bp, Homo sapiens
gaaagaagggctgtg

SEQ ID NO: 202199 - DNA, 15 bp, Homo sapiens
ggaaagaagggctgt

SEQ ID NO: 202200 - DNA, 15 bp, Homo sapiens
aggaaagaagggctg

SEQ ID NO: 202201 - DNA, 15 bp, Homo sapiens
aaggaaagaagggct

SEQ ID NO: 202202 - DNA, 15 bp, Homo sapiens
aaaggaaagaagggc

SEQ ID NO: 202203 - DNA, 15 bp, Homo sapiens
aaaaggaaagaaggg

SEQ ID NO: 202204 - DNA, 15 bp, Homo sapiens
aaaaaggaaagaagg

SEQ ID NO: 202205 - DNA, 15 bp, Homo sapiens
caaaaaggaaagaag

SEQ ID NO: 202206 - DNA, 15 bp, Homo sapiens
acaaaaaggaaagaa

SEQ ID NO: 202207 - DNA, 15 bp, Homo sapiens
tacaaaaaggaaaga

SEQ ID NO: 202208 - DNA, 15 bp, Homo sapiens
ctacaaaaaggaaag

SEQ ID NO: 202209 - DNA, 15 bp, Homo sapiens
tctacaaaaaggaaa

SEQ ID NO: 202210 - DNA, 15 bp, Homo sapiens
atctacaaaaaggaa

SEQ ID NO: 202211 - DNA, 15 bp, Homo sapiens
aatctacaaaaagga

SEQ ID NO: 202212 - DNA, 15 bp, Homo sapiens
gaatctacaaaaagg

SEQ ID NO: 202213 - DNA, 15 bp, Homo sapiens
agaatctacaaaaag

SEQ ID NO: 202214 - DNA, 15 bp, Homo sapiens
gagaatctacaaaaa

SEQ ID NO: 202215 - DNA, 15 bp, Homo sapiens
agagaatctacaaaa

SEQ ID NO: 202216 - DNA, 15 bp, Homo sapiens
aagagaatctacaaa

SEQ ID NO: 202217 - DNA, 15 bp, Homo sapiens
caagagaatctacaa

SEQ ID NO: 202218 - DNA, 15 bp, Homo sapiens
gcaagagaatctaca

SEQ ID NO: 202219 - DNA, 15 bp, Homo sapiens
tgcaagagaatctac

SEQ ID NO: 202220 - DNA, 15 bp, Homo sapiens
ttgcaagagaatcta

SEQ ID NO: 202221 - DNA, 15 bp, Homo sapiens
tttgcaagagaatct

SEQ ID NO: 202222 - DNA, 15 bp, Homo sapiens
gtttgcaagagaatc

SEQ ID NO: 202223 - DNA, 15 bp, Homo sapiens
agtttgcaagagaat

SEQ ID NO: 202224 - DNA, 15 bp, Homo sapiens
aagtttgcaagagaa

SEQ ID NO: 202225 - DNA, 15 bp, Homo sapiens
taagtttgcaagaga

SEQ ID NO: 202226 - DNA, 15 bp, Homo sapiens
gtaagtttgcaagag

SEQ ID NO: 202227 - DNA, 15 bp, Homo sapiens
tgtaagtttgcaaga

SEQ ID NO: 202228 - DNA, 15 bp, Homo sapiens
ttgtaagtttgcaag

SEQ ID NO: 202229 - DNA, 15 bp, Homo sapiens
tttgtaagtttgcaa

SEQ ID NO: 202230 - DNA, 15 bp, Homo sapiens
ctttgtaagtttgca

SEQ ID NO: 202231 - DNA, 15 bp, Homo sapiens
actttgtaagtttgc

SEQ ID NO: 202232 - DNA, 15 bp, Homo sapiens
cactttgtaagtttg

SEQ ID NO: 202233 - DNA, 15 bp, Homo sapiens
acactttgtaagttt

SEQ ID NO: 202234 - DNA, 15 bp, Homo sapiens
gacactttgtaagtt

SEQ ID NO: 202235 - DNA, 15 bp, Homo sapiens
agacactttgtaagt

SEQ ID NO: 202236 - DNA, 15 bp, Homo sapiens
cagacactttgtaag

SEQ ID NO: 202237 - DNA, 15 bp, Homo sapiens
acagacactttgtaa

SEQ ID NO: 202238 - DNA, 15 bp, Homo sapiens
tacagacactttgta

SEQ ID NO: 202239 - DNA, 15 bp, Homo sapiens
ttacagacactttgt

SEQ ID NO: 202240 - DNA, 15 bp, Homo sapiens
gttacagacactttg

SEQ ID NO: 202241 - DNA, 15 bp, Homo sapiens
ggttacagacacttt

SEQ ID NO: 202242 - DNA, 15 bp, Homo sapiens
aggttacagacactt

SEQ ID NO: 202243 - DNA, 15 bp, Homo sapiens
aaggttacagacact

SEQ ID NO: 202244 - DNA, 15 bp, Homo sapiens
aaaggttacagacac

SEQ ID NO: 202245 - DNA, 15 bp, Homo sapiens
caaaggttacagaca

SEQ ID NO: 202246 - DNA, 15 bp, Homo sapiens
ccaaaggttacagac

SEQ ID NO: 202247 - DNA, 15 bp, Homo sapiens
gccaaaggttacaga

SEQ ID NO: 202248 - DNA, 15 bp, Homo sapiens
ggccaaaggttacag

SEQ ID NO: 202249 - DNA, 15 bp, Homo sapiens
gggccaaaggttaca

SEQ ID NO: 202250 - DNA, 15 bp, Homo sapiens
agggccaaaggttac

SEQ ID NO: 202251 - DNA, 15 bp, Homo sapiens
cagggccaaaggtta

SEQ ID NO: 202252 - DNA, 15 bp, Homo sapiens
ccagggccaaaggtt

SEQ ID NO: 202253 - DNA, 15 bp, Homo sapiens
cccagggccaaaggt

SEQ ID NO: 202254 - DNA, 15 bp, Homo sapiens
tcccagggccaaagg

SEQ ID NO: 202255 - DNA, 15 bp, Homo sapiens
gtcccagggccaaag

SEQ ID NO: 202256 - DNA, 15 bp, Homo sapiens
ggtcccagggccaaa

SEQ ID NO: 202257 - DNA, 15 bp, Homo sapiens
gggtcccagggccaa

SEQ ID NO: 202258 - DNA, 15 bp, Homo sapiens
tgggtcccagggcca

SEQ ID NO: 202259 - DNA, 15 bp, Homo sapiens
ctgggtcccagggcc

SEQ ID NO: 202260 - DNA, 15 bp, Homo sapiens
gctgggtcccagggc

SEQ ID NO: 202261 - DNA, 15 bp, Homo sapiens
tgctgggtcccaggg

SEQ ID NO: 202262 - DNA, 15 bp, Homo sapiens
atgctgggtcccagg

SEQ ID NO: 202263 - DNA, 15 bp, Homo sapiens
catgctgggtcccag

SEQ ID NO: 202264 - DNA, 15 bp, Homo sapiens
tcatgctgggtccca

SEQ ID NO: 202265 - DNA, 15 bp, Homo sapiens
ctcatgctgggtccc

SEQ ID NO: 202266 - DNA, 15 bp, Homo sapiens
gctcatgctgggtcc

SEQ ID NO: 202267 - DNA, 15 bp, Homo sapiens
tgctcatgctgggtc

SEQ ID NO: 202268 - DNA, 15 bp, Homo sapiens
ctgctcatgctgggt

SEQ ID NO: 202269 - DNA, 15 bp, Homo sapiens
gctgctcatgctggg

SEQ ID NO: 202270 - DNA, 15 bp, Homo sapiens
agctgctcatgctgg

SEQ ID NO: 202271 - DNA, 15 bp, Homo sapiens
aagctgctcatgctg

SEQ ID NO: 202272 - DNA, 15 bp, Homo sapiens
taagctgctcatgct

SEQ ID NO: 202273 - DNA, 15 bp, Homo sapiens
gtaagctgctcatgc

SEQ ID NO: 202274 - DNA, 15 bp, Homo sapiens
agtaagctgctcatg

SEQ ID NO: 202275 - DNA, 15 bp, Homo sapiens
cagtaagctgctcat

SEQ ID NO: 202276 - DNA, 15 bp, Homo sapiens
ccagtaagctgctca

SEQ ID NO: 202277 - DNA, 15 bp, Homo sapiens
tccagtaagctgctc

SEQ ID NO: 202278 - DNA, 15 bp, Homo sapiens
ctccagtaagctgct

SEQ ID NO: 202279 - DNA, 15 bp, Homo sapiens
actccagtaagctgc

SEQ ID NO: 202280 - DNA, 15 bp, Homo sapiens
gactccagtaagctg

SEQ ID NO: 202281 - DNA, 15 bp, Homo sapiens
tgactccagtaagct

SEQ ID NO: 202282 - DNA, 15 bp, Homo sapiens
ctgactccagtaagc

SEQ ID NO: 202283 - DNA, 15 bp, Homo sapiens
cctgactccagtaag

SEQ ID NO: 202284 - DNA, 15 bp, Homo sapiens
tcctgactccagtaa

SEQ ID NO: 202285 - DNA, 15 bp, Homo sapiens
gtcctgactccagta

SEQ ID NO: 202286 - DNA, 15 bp, Homo sapiens
tgtcctgactccagt

SEQ ID NO: 202287 - DNA, 15 bp, Homo sapiens
ctgtcctgactccag

SEQ ID NO: 202288 - DNA, 15 bp, Homo sapiens
tctgtcctgactcca

SEQ ID NO: 202289 - DNA, 15 bp, Homo sapiens
atctgtcctgactcc

SEQ ID NO: 202290 - DNA, 15 bp, Homo sapiens
catctgtcctgactc

SEQ ID NO: 202291 - DNA, 15 bp, Homo sapiens
gcatctgtcctgact

SEQ ID NO: 202292 - DNA, 15 bp, Homo sapiens
tgcatctgtcctgac

SEQ ID NO: 202293 - DNA, 15 bp, Homo sapiens
gtgcatctgtcctga

SEQ ID NO: 202294 - DNA, 15 bp, Homo sapiens
cgtgcatctgtcctg

SEQ ID NO: 202295 - DNA, 15 bp, Homo sapiens
acgtgcatctgtcct

SEQ ID NO: 202296 - DNA, 15 bp, Homo sapiens
cacgtgcatctgtcc

SEQ ID NO: 202297 - DNA, 15 bp, Homo sapiens
ccacgtgcatctgtc

SEQ ID NO: 202298 - DNA, 15 bp, Homo sapiens
cccacgtgcatctgt

SEQ ID NO: 202299 - DNA, 15 bp, Homo sapiens
acccacgtgcatctg

SEQ ID NO: 202300 - DNA, 15 bp, Homo sapiens
cacccacgtgcatct

SEQ ID NO: 202301 - DNA, 15 bp, Homo sapiens
gcacccacgtgcatc

SEQ ID NO: 202302 - DNA, 15 bp, Homo sapiens
agcacccacgtgcat

SEQ ID NO: 202303 - DNA, 15 bp, Homo sapiens
cagcacccacgtgca

SEQ ID NO: 202304 - DNA, 15 bp, Homo sapiens
tcagcacccacgtgc

SEQ ID NO: 202305 - DNA, 15 bp, Homo sapiens
ctcagcacccacgtg

SEQ ID NO: 202306 - DNA, 15 bp, Homo sapiens
gctcagcacccacgt

SEQ ID NO: 202307 - DNA, 15 bp, Homo sapiens
tgctcagcacccacg

SEQ ID NO: 202308 - DNA, 15 bp, Homo sapiens
ctgctcagcacccac

SEQ ID NO: 202309 - DNA, 15 bp, Homo sapiens
tctgctcagcaccca

SEQ ID NO: 202310 - DNA, 15 bp, Homo sapiens
ctctgctcagcaccc

SEQ ID NO: 202311 - DNA, 15 bp, Homo sapiens
gctctgctcagcacc

SEQ ID NO: 202312 - DNA, 15 bp, Homo sapiens
ggctctgctcagcac

SEQ ID NO: 202313 - DNA, 15 bp, Homo sapiens
gggctctgctcagca

SEQ ID NO: 202314 - DNA, 15 bp, Homo sapiens
agggctctgctcagc

SEQ ID NO: 202315 - DNA, 15 bp, Homo sapiens
cagggctctgctcag

SEQ ID NO: 202316 - DNA, 15 bp, Homo sapiens
acagggctctgctca

SEQ ID NO: 202317 - DNA, 15 bp, Homo sapiens
cacagggctctgctc

SEQ ID NO: 202318 - DNA, 15 bp, Homo sapiens
ccacagggctctgct

SEQ ID NO: 202319 - DNA, 15 bp, Homo sapiens
tccacagggctctgc

SEQ ID NO: 202320 - DNA, 15 bp, Homo sapiens
ctccacagggctctg

SEQ ID NO: 202321 - DNA, 15 bp, Homo sapiens
gctccacagggctct

SEQ ID NO: 202322 - DNA, 15 bp, Homo sapiens
ggctccacagggctc

SEQ ID NO: 202323 - DNA, 15 bp, Homo sapiens
aggctccacagggct

SEQ ID NO: 202324 - DNA, 15 bp, Homo sapiens
gaggctccacagggc

SEQ ID NO: 202325 - DNA, 15 bp, Homo sapiens
cgaggctccacaggg

SEQ ID NO: 202326 - DNA, 15 bp, Homo sapiens
ccgaggctccacagg

SEQ ID NO: 202327 - DNA, 15 bp, Homo sapiens
gccgaggctccacag

SEQ ID NO: 202328 - DNA, 15 bp, Homo sapiens
ggccgaggctccaca

SEQ ID NO: 202329 - DNA, 15 bp, Homo sapiens
aggccgaggctccac

SEQ ID NO: 202330 - DNA, 15 bp, Homo sapiens
gaggccgaggctcca

SEQ ID NO: 202331 - DNA, 15 bp, Homo sapiens
agaggccgaggctcc

SEQ ID NO: 202332 - DNA, 15 bp, Homo sapiens
cagaggccgaggctc

SEQ ID NO: 202333 - DNA, 15 bp, Homo sapiens
ccagaggccgaggct

SEQ ID NO: 202334 - DNA, 15 bp, Homo sapiens
gccagaggccgaggc

SEQ ID NO: 202335 - DNA, 15 bp, Homo sapiens
ggccagaggccgagg

SEQ ID NO: 202336 - DNA, 15 bp, Homo sapiens
aggccagaggccgag

SEQ ID NO: 202337 - DNA, 15 bp, Homo sapiens
gaggccagaggccga

SEQ ID NO: 202338 - DNA, 15 bp, Homo sapiens
ggaggccagaggccg

SEQ ID NO: 202339 - DNA, 15 bp, Homo sapiens
aggaggccagaggcc

SEQ ID NO: 202340 - DNA, 15 bp, Homo sapiens
aaggaggccagaggc

SEQ ID NO: 202341 - DNA, 15 bp, Homo sapiens
caaggaggccagagg

SEQ ID NO: 202342 - DNA, 15 bp, Homo sapiens
ccaaggaggccagag

SEQ ID NO: 202343 - DNA, 15 bp, Homo sapiens
gccaaggaggccaga

SEQ ID NO: 202344 - DNA, 15 bp, Homo sapiens
ggccaaggaggccag

SEQ ID NO: 202345 - DNA, 15 bp, Homo sapiens
tggccaaggaggcca

SEQ ID NO: 202346 - DNA, 15 bp, Homo sapiens
ctggccaaggaggcc

SEQ ID NO: 202347 - DNA, 15 bp, Homo sapiens
gctggccaaggaggc

SEQ ID NO: 202348 - DNA, 15 bp, Homo sapiens
agctggccaaggagg

SEQ ID NO: 202349 - DNA, 15 bp, Homo sapiens
cagctggccaaggag

SEQ ID NO: 202350 - DNA, 15 bp, Homo sapiens
gcagctggccaagga

SEQ ID NO: 202351 - DNA, 15 bp, Homo sapiens
agcagctggccaagg

SEQ ID NO: 202352 - DNA, 15 bp, Homo sapiens
cagcagctggccaag

SEQ ID NO: 202353 - DNA, 15 bp, Homo sapiens
gcagcagctggccaa

SEQ ID NO: 202354 - DNA, 15 bp, Homo sapiens
ggcagcagctggcca

SEQ ID NO: 202355 - DNA, 15 bp, Homo sapiens
gggcagcagctggcc

SEQ ID NO: 202356 - DNA, 15 bp, Homo sapiens
agggcagcagctggc

SEQ ID NO: 202357 - DNA, 15 bp, Homo sapiens
cagggcagcagctgg

SEQ ID NO: 202358 - DNA, 15 bp, Homo sapiens
acagggcagcagctg

SEQ ID NO: 202359 - DNA, 15 bp, Homo sapiens
gacagggcagcagct

SEQ ID NO: 202360 - DNA, 15 bp, Homo sapiens
ggacagggcagcagc

SEQ ID NO: 202361 - DNA, 15 bp, Homo sapiens
gggacagggcagcag

SEQ ID NO: 202362 - DNA, 15 bp, Homo sapiens
tgggacagggcagca

SEQ ID NO: 202363 - DNA, 15 bp, Homo sapiens
ctgggacagggcagc

SEQ ID NO: 202364 - DNA, 15 bp, Homo sapiens
cctgggacagggcag

SEQ ID NO: 202365 - DNA, 15 bp, Homo sapiens
ccctgggacagggca

SEQ ID NO: 202366 - DNA, 15 bp, Homo sapiens
tccctgggacagggc

SEQ ID NO: 202367 - DNA, 15 bp, Homo sapiens
gtccctgggacaggg

SEQ ID NO: 202368 - DNA, 15 bp, Homo sapiens
tgtccctgggacagg

SEQ ID NO: 202369 - DNA, 15 bp, Homo sapiens
ctgtccctgggacag

SEQ ID NO: 202370 - DNA, 15 bp, Homo sapiens
actgtccctgggaca

SEQ ID NO: 202371 - DNA, 15 bp, Homo sapiens
cactgtccctgggac

SEQ ID NO: 202372 - DNA, 15 bp, Homo sapiens
acactgtccctggga

SEQ ID NO: 202373 - DNA, 15 bp, Homo sapiens
cacactgtccctggg

SEQ ID NO: 202374 - DNA, 15 bp, Homo sapiens
ccacactgtccctgg

SEQ ID NO: 202375 - DNA, 15 bp, Homo sapiens
gccacactgtccctg

SEQ ID NO: 202376 - DNA, 15 bp, Homo sapiens
agccacactgtccct

SEQ ID NO: 202377 - DNA, 15 bp, Homo sapiens
aagccacactgtccc

SEQ ID NO: 202378 - DNA, 15 bp, Homo sapiens
gaagccacactgtcc

SEQ ID NO: 202379 - DNA, 15 bp, Homo sapiens
ggaagccacactgtc

SEQ ID NO: 202380 - DNA, 15 bp, Homo sapiens
gggaagccacactgt

SEQ ID NO: 202381 - DNA, 15 bp, Homo sapiens
tgggaagccacactg

SEQ ID NO: 202382 - DNA, 15 bp, Homo sapiens
ctgggaagccacact

SEQ ID NO: 202383 - DNA, 15 bp, Homo sapiens
cctgggaagccacac

SEQ ID NO: 202384 - DNA, 15 bp, Homo sapiens
ccctgggaagccaca

SEQ ID NO: 202385 - DNA, 15 bp, Homo sapiens
tccctgggaagccac

SEQ ID NO: 202386 - DNA, 15 bp, Homo sapiens
ctccctgggaagcca

SEQ ID NO: 202387 - DNA, 15 bp, Homo sapiens
gctccctgggaagcc

SEQ ID NO: 202388 - DNA, 15 bp, Homo sapiens
tgctccctgggaagc

SEQ ID NO: 202389 - DNA, 15 bp, Homo sapiens
gtgctccctgggaag

SEQ ID NO: 202390 - DNA, 15 bp, Homo sapiens
agtgctccctgggaa

SEQ ID NO: 202391 - DNA, 15 bp, Homo sapiens
aagtgctccctggga

SEQ ID NO: 202392 - DNA, 15 bp, Homo sapiens
gaagtgctccctggg

SEQ ID NO: 202393 - DNA, 15 bp, Homo sapiens
tgaagtgctccctgg

SEQ ID NO: 202394 - DNA, 15 bp, Homo sapiens
gtgaagtgctccctg

SEQ ID NO: 202395 - DNA, 15 bp, Homo sapiens
agtgaagtgctccct

SEQ ID NO: 202396 - DNA, 15 bp, Homo sapiens
gagtgaagtgctccc

SEQ ID NO: 202397 - DNA, 15 bp, Homo sapiens
ggagtgaagtgctcc

SEQ ID NO: 202398 - DNA, 15 bp, Homo sapiens
tggagtgaagtgctc

SEQ ID NO: 202399 - DNA, 15 bp, Homo sapiens
ttggagtgaagtgct

SEQ ID NO: 202400 - DNA, 15 bp, Homo sapiens
attggagtgaagtgc

SEQ ID NO: 202401 - DNA, 15 bp, Homo sapiens
gattggagtgaagtg

SEQ ID NO: 202402 - DNA, 15 bp, Homo sapiens
agattggagtgaagt

SEQ ID NO: 202403 - DNA, 15 bp, Homo sapiens
gagattggagtgaag

SEQ ID NO: 202404 - DNA, 15 bp, Homo sapiens
agagattggagtgaa

SEQ ID NO: 202405 - DNA, 15 bp, Homo sapiens
cagagattggagtga

SEQ ID NO: 202406 - DNA, 15 bp, Homo sapiens
tcagagattggagtg

SEQ ID NO: 202407 - DNA, 15 bp, Homo sapiens
ctcagagattggagt

SEQ ID NO: 202408 - DNA, 15 bp, Homo sapiens
gctcagagattggag

SEQ ID NO: 202409 - DNA, 15 bp, Homo sapiens
ggctcagagattgga

SEQ ID NO: 202410 - DNA, 15 bp, Homo sapiens
tggctcagagattgg

SEQ ID NO: 202411 - DNA, 15 bp, Homo sapiens
atggctcagagattg

SEQ ID NO: 202412 - DNA, 15 bp, Homo sapiens
tatggctcagagatt

SEQ ID NO: 202413 - DNA, 15 bp, Homo sapiens
ttatggctcagagat

SEQ ID NO: 202414 - DNA, 15 bp, Homo sapiens
tttatggctcagaga

SEQ ID NO: 202415 - DNA, 15 bp, Homo sapiens
ttttatggctcagag

SEQ ID NO: 202416 - DNA, 15 bp, Homo sapiens
tttttatggctcaga

SEQ ID NO: 202417 - DNA, 15 bp, Homo sapiens
ttttttatggctcag

SEQ ID NO: 202418 - DNA, 15 bp, Homo sapiens
attttttatggctca

SEQ ID NO: 202419 - DNA, 15 bp, Homo sapiens
aattttttatggctc

SEQ ID NO: 202420 - DNA, 15 bp, Homo sapiens
taattttttatggct

SEQ ID NO: 202421 - DNA, 15 bp, Homo sapiens
ttaattttttatggc

SEQ ID NO: 202422 - DNA, 15 bp, Homo sapiens
tttaattttttatgg

SEQ ID NO: 202423 - DNA, 15 bp, Homo sapiens
gtttaattttttatg

SEQ ID NO: 202424 - DNA, 15 bp, Homo sapiens
agtttaattttttat

SEQ ID NO: 202425 - DNA, 15 bp, Homo sapiens
tagtttaatttttta

SEQ ID NO: 202426 - DNA, 15 bp, Homo sapiens
gtagtttaatttttt

SEQ ID NO: 202427 - DNA, 15 bp, Homo sapiens
tgtagtttaattttt

SEQ ID NO: 202428 - DNA, 15 bp, Homo sapiens
ctgtagtttaatttt

SEQ ID NO: 202429 - DNA, 15 bp, Homo sapiens
cctgtagtttaattt

SEQ ID NO: 202430 - DNA, 15 bp, Homo sapiens
ccctgtagtttaatt

SEQ ID NO: 202431 - DNA, 15 bp, Homo sapiens
gccctgtagtttaat

SEQ ID NO: 202432 - DNA, 15 bp, Homo sapiens
agccctgtagtttaa

SEQ ID NO: 202433 - DNA, 15 bp, Homo sapiens
tagccctgtagttta

SEQ ID NO: 202434 - DNA, 15 bp, Homo sapiens
atagccctgtagttt

SEQ ID NO: 202435 - DNA, 15 bp, Homo sapiens
gatagccctgtagtt

SEQ ID NO: 202436 - DNA, 15 bp, Homo sapiens
tgatagccctgtagt

SEQ ID NO: 202437 - DNA, 15 bp, Homo sapiens
ttgatagccctgtag

SEQ ID NO: 202438 - DNA, 15 bp, Homo sapiens
tttgatagccctgta

SEQ ID NO: 202439 - DNA, 15 bp, Homo sapiens
atttgatagccctgt

SEQ ID NO: 202440 - DNA, 15 bp, Homo sapiens
tatttgatagccctg

SEQ ID NO: 202441 - DNA, 15 bp, Homo sapiens
atatttgatagccct

SEQ ID NO: 202442 - DNA, 15 bp, Homo sapiens
aatatttgatagccc

SEQ ID NO: 202443 - DNA, 15 bp, Homo sapiens
aaatatttgatagcc

SEQ ID NO: 202444 - DNA, 15 bp, Homo sapiens
taaatatttgatagc

SEQ ID NO: 202445 - DNA, 15 bp, Homo sapiens
ttaaatatttgatag

SEQ ID NO: 202446 - DNA, 15 bp, Homo sapiens
attaaatatttgata

SEQ ID NO: 202447 - DNA, 15 bp, Homo sapiens
gattaaatatttgat

SEQ ID NO: 202448 - DNA, 15 bp, Homo sapiens
agattaaatatttga

SEQ ID NO: 202449 - DNA, 15 bp, Homo sapiens
cagattaaatatttg

SEQ ID NO: 202450 - DNA, 15 bp, Homo sapiens
gcagattaaatattt

SEQ ID NO: 202451 - DNA, 15 bp, Homo sapiens
ggcagattaaatatt

SEQ ID NO: 202452 - DNA, 15 bp, Homo sapiens
aggcagattaaatat

SEQ ID NO: 202453 - DNA, 15 bp, Homo sapiens
caggcagattaaata

SEQ ID NO: 202454 - DNA, 15 bp, Homo sapiens
tcaggcagattaaat

SEQ ID NO: 202455 - DNA, 15 bp, Homo sapiens
ttcaggcagattaaa

SEQ ID NO: 202456 - DNA, 15 bp, Homo sapiens
attcaggcagattaa

SEQ ID NO: 202457 - DNA, 15 bp, Homo sapiens
tattcaggcagatta

SEQ ID NO: 202458 - DNA, 15 bp, Homo sapiens
ttattcaggcagatt

SEQ ID NO: 202459 - DNA, 15 bp, Homo sapiens
attattcaggcagat

SEQ ID NO: 202460 - DNA, 15 bp, Homo sapiens
cattattcaggcaga

SEQ ID NO: 202461 - DNA, 15 bp, Homo sapiens
tcattattcaggcag

SEQ ID NO: 202462 - DNA, 15 bp, Homo sapiens
ttcattattcaggca

SEQ ID NO: 202463 - DNA, 15 bp, Homo sapiens
gttcattattcaggc

SEQ ID NO: 202464 - DNA, 15 bp, Homo sapiens
tgttcattattcagg

SEQ ID NO: 202465 - DNA, 15 bp, Homo sapiens
atgttcattattcag

SEQ ID NO: 202466 - DNA, 15 bp, Homo sapiens
catgttcattattca

SEQ ID NO: 202467 - DNA, 15 bp, Homo sapiens
ccatgttcattattc

SEQ ID NO: 202468 - DNA, 15 bp, Homo sapiens
cccatgttcattatt

SEQ ID NO: 202469 - DNA, 15 bp, Homo sapiens
gcccatgttcattat

SEQ ID NO: 202470 - DNA, 15 bp, Homo sapiens
tgcccatgttcatta

SEQ ID NO: 202471 - DNA, 15 bp, Homo sapiens
ctgcccatgttcatt

SEQ ID NO: 202472 - DNA, 15 bp, Homo sapiens
tctgcccatgttcat

SEQ ID NO: 202473 - DNA, 15 bp, Homo sapiens
atctgcccatgttca

SEQ ID NO: 202474 - DNA, 15 bp, Homo sapiens
aatctgcccatgttc

SEQ ID NO: 202475 - DNA, 15 bp, Homo sapiens
gaatctgcccatgtt

SEQ ID NO: 202476 - DNA, 15 bp, Homo sapiens
agaatctgcccatgt

SEQ ID NO: 202477 - DNA, 15 bp, Homo sapiens
aagaatctgcccatg

SEQ ID NO: 202478 - DNA, 15 bp, Homo sapiens
taagaatctgcccat

SEQ ID NO: 202479 - DNA, 15 bp, Homo sapiens
ataagaatctgccca

SEQ ID NO: 202480 - DNA, 15 bp, Homo sapiens
cataagaatctgccc

SEQ ID NO: 202481 - DNA, 15 bp, Homo sapiens
tcataagaatctgcc

SEQ ID NO: 202482 - DNA, 15 bp, Homo sapiens
ttcataagaatctgc

SEQ ID NO: 202483 - DNA, 15 bp, Homo sapiens
attcataagaatctg

SEQ ID NO: 202484 - DNA, 15 bp, Homo sapiens
aattcataagaatct

SEQ ID NO: 202485 - DNA, 15 bp, Homo sapiens
gaattcataagaatc

SEQ ID NO: 202486 - DNA, 15 bp, Homo sapiens
agaattcataagaat

SEQ ID NO: 202487 - DNA, 15 bp, Homo sapiens
aagaattcataagaa

SEQ ID NO: 202488 - DNA, 15 bp, Homo sapiens
aaagaattcataaga

SEQ ID NO: 202489 - DNA, 15 bp, Homo sapiens
caaagaattcataag

SEQ ID NO: 202490 - DNA, 15 bp, Homo sapiens
gcaaagaattcataa

SEQ ID NO: 202491 - DNA, 15 bp, Homo sapiens
agcaaagaattcata

SEQ ID NO: 202492 - DNA, 15 bp, Homo sapiens
aagcaaagaattcat

SEQ ID NO: 202493 - DNA, 15 bp, Homo sapiens
aaagcaaagaattca

SEQ ID NO: 202494 - DNA, 15 bp, Homo sapiens
caaagcaaagaattc

SEQ ID NO: 202495 - DNA, 15 bp, Homo sapiens
tcaaagcaaagaatt

SEQ ID NO: 202496 - DNA, 15 bp, Homo sapiens
atcaaagcaaagaat

SEQ ID NO: 202497 - DNA, 15 bp, Homo sapiens
aatcaaagcaaagaa

SEQ ID NO: 202498 - DNA, 15 bp, Homo sapiens
taatcaaagcaaaga

SEQ ID NO: 202499 - DNA, 15 bp, Homo sapiens
ttaatcaaagcaaag

SEQ ID NO: 202500 - DNA, 15 bp, Homo sapiens
tttaatcaaagcaaa

SEQ ID NO: 202501 - DNA, 15 bp, Homo sapiens
atttaatcaaagcaa

SEQ ID NO: 202502 - DNA, 15 bp, Homo sapiens
tatttaatcaaagca

SEQ ID NO: 202503 - DNA, 15 bp, Homo sapiens
ttatttaatcaaagc

SEQ ID NO: 202504 - DNA, 15 bp, Homo sapiens
tttatttaatcaaag

SEQ ID NO: 202505 - DNA, 15 bp, Homo sapiens
ttttatttaatcaaa

SEQ ID NO: 202506 - DNA, 15 bp, Homo sapiens
attttatttaatcaa

SEQ ID NO: 202507 - DNA, 15 bp, Homo sapiens
aattttatttaatca

SEQ ID NO: 202508 - DNA, 15 bp, Homo sapiens
caattttatttaatc

SEQ ID NO: 202509 - DNA, 15 bp, Homo sapiens
tcaattttatttaat

SEQ ID NO: 202510 - DNA, 15 bp, Homo sapiens
ttcaattttatttaa

SEQ ID NO: 202511 - DNA, 15 bp, Homo sapiens
cttcaattttattta

SEQ ID NO: 202512 - DNA, 15 bp, Homo sapiens
ccttcaattttattt

SEQ ID NO: 202513 - DNA, 15 bp, Homo sapiens
tccttcaattttatt

SEQ ID NO: 202514 - DNA, 15 bp, Homo sapiens
atccttcaattttat

SEQ ID NO: 202515 - DNA, 15 bp, Homo sapiens
catccttcaatttta

SEQ ID NO: 202516 - DNA, 15 bp, Homo sapiens
ccatccttcaatttt

SEQ ID NO: 202517 - DNA, 15 bp, Homo sapiens
cccatccttcaattt

SEQ ID NO: 202518 - DNA, 15 bp, Homo sapiens
tcccatccttcaatt

SEQ ID NO: 202519 - DNA, 15 bp, Homo sapiens
ttcccatccttcaat

SEQ ID NO: 202520 - DNA, 15 bp, Homo sapiens
gttcccatccttcaa

SEQ ID NO: 202521 - DNA, 15 bp, Homo sapiens
agttcccatccttca

SEQ ID NO: 202522 - DNA, 15 bp, Homo sapiens
cagttcccatccttc

SEQ ID NO: 202523 - DNA, 15 bp, Homo sapiens
acagttcccatcctt

SEQ ID NO: 202524 - DNA, 15 bp, Homo sapiens
gacagttcccatcct

SEQ ID NO: 202525 - DNA, 15 bp, Homo sapiens
agacagttcccatcc

SEQ ID NO: 202526 - DNA, 15 bp, Homo sapiens
cagacagttcccatc

SEQ ID NO: 202527 - DNA, 15 bp, Homo sapiens
gcagacagttcccat

SEQ ID NO: 202528 - DNA, 15 bp, Homo sapiens
agcagacagttccca

SEQ ID NO: 202529 - DNA, 15 bp, Homo sapiens
aagcagacagttccc

SEQ ID NO: 202530 - DNA, 15 bp, Homo sapiens
caagcagacagttcc

SEQ ID NO: 202531 - DNA, 15 bp, Homo sapiens
ccaagcagacagttc

SEQ ID NO: 202532 - DNA, 15 bp, Homo sapiens
gccaagcagacagtt

SEQ ID NO: 202533 - DNA, 15 bp, Homo sapiens
tgccaagcagacagt

SEQ ID NO: 202534 - DNA, 15 bp, Homo sapiens
gtgccaagcagacag

SEQ ID NO: 202535 - DNA, 15 bp, Homo sapiens
cgtgccaagcagaca

SEQ ID NO: 202536 - DNA, 15 bp, Homo sapiens
acgtgccaagcagac

SEQ ID NO: 202537 - DNA, 15 bp, Homo sapiens
aacgtgccaagcaga

SEQ ID NO: 202538 - DNA, 15 bp, Homo sapiens
taacgtgccaagcag

SEQ ID NO: 202539 - DNA, 15 bp, Homo sapiens
ctaacgtgccaagca

SEQ ID NO: 202540 - DNA, 15 bp, Homo sapiens
gctaacgtgccaagc

SEQ ID NO: 202541 - DNA, 15 bp, Homo sapiens
agctaacgtgccaag

SEQ ID NO: 202542 - DNA, 15 bp, Homo sapiens
cagctaacgtgccaa

SEQ ID NO: 202543 - DNA, 15 bp, Homo sapiens
tcagctaacgtgcca

SEQ ID NO: 202544 - DNA, 15 bp, Homo sapiens
ttcagctaacgtgcc

SEQ ID NO: 202545 - DNA, 15 bp, Homo sapiens
cttcagctaacgtgc

SEQ ID NO: 202546 - DNA, 15 bp, Homo sapiens
ccttcagctaacgtg

SEQ ID NO: 202547 - DNA, 15 bp, Homo sapiens
gccttcagctaacgt

SEQ ID NO: 202548 - DNA, 15 bp, Homo sapiens
tgccttcagctaacg

SEQ ID NO: 202549 - DNA, 15 bp, Homo sapiens
ttgccttcagctaac

SEQ ID NO: 202550 - DNA, 15 bp, Homo sapiens
attgccttcagctaa

SEQ ID NO: 202551 - DNA, 15 bp, Homo sapiens
cattgccttcagcta

SEQ ID NO: 202552 - DNA, 15 bp, Homo sapiens
gcattgccttcagct

SEQ ID NO: 202553 - DNA, 15 bp, Homo sapiens
tgcattgccttcagc

SEQ ID NO: 202554 - DNA, 15 bp, Homo sapiens
ctgcattgccttcag

SEQ ID NO: 202555 - DNA, 15 bp, Homo sapiens
cctgcattgccttca

SEQ ID NO: 202556 - DNA, 15 bp, Homo sapiens
ccctgcattgccttc

SEQ ID NO: 202557 - DNA, 15 bp, Homo sapiens
accctgcattgcctt

SEQ ID NO: 202558 - DNA, 15 bp, Homo sapiens
taccctgcattgcct

SEQ ID NO: 202559 - DNA, 15 bp, Homo sapiens
ctaccctgcattgcc

SEQ ID NO: 202560 - DNA, 15 bp, Homo sapiens
cctaccctgcattgc

SEQ ID NO: 202561 - DNA, 15 bp, Homo sapiens
gcctaccctgcattg

SEQ ID NO: 202562 - DNA, 15 bp, Homo sapiens
tgcctaccctgcatt

SEQ ID NO: 202563 - DNA, 15 bp, Homo sapiens
gtgcctaccctgcat

SEQ ID NO: 202564 - DNA, 15 bp, Homo sapiens
agtgcctaccctgca

SEQ ID NO: 202565 - DNA, 15 bp, Homo sapiens
aagtgcctaccctgc

SEQ ID NO: 202566 - DNA, 15 bp, Homo sapiens
aaagtgcctaccctg

SEQ ID NO: 202567 - DNA, 15 bp, Homo sapiens
caaagtgcctaccct

SEQ ID NO: 202568 - DNA, 15 bp, Homo sapiens
acaaagtgcctaccc

SEQ ID NO: 202569 - DNA, 15 bp, Homo sapiens
cacaaagtgcctacc

SEQ ID NO: 202570 - DNA, 15 bp, Homo sapiens
gcacaaagtgcctac

SEQ ID NO: 202571 - DNA, 15 bp, Homo sapiens
ggcacaaagtgccta

SEQ ID NO: 202572 - DNA, 15 bp, Homo sapiens
tggcacaaagtgcct

SEQ ID NO: 202573 - DNA, 15 bp, Homo sapiens
ctggcacaaagtgcc

SEQ ID NO: 202574 - DNA, 15 bp, Homo sapiens
cctggcacaaagtgc

SEQ ID NO: 202575 - DNA, 15 bp, Homo sapiens
ccctggcacaaagtg

SEQ ID NO: 202576 - DNA, 15 bp, Homo sapiens
tccctggcacaaagt

SEQ ID NO: 202577 - DNA, 15 bp, Homo sapiens
atccctggcacaaag

SEQ ID NO: 202578 - DNA, 15 bp, Homo sapiens
gatccctggcacaaa

SEQ ID NO: 202579 - DNA, 15 bp, Homo sapiens
agatccctggcacaa

SEQ ID NO: 202580 - DNA, 15 bp, Homo sapiens
cagatccctggcaca

SEQ ID NO: 202581 - DNA, 15 bp, Homo sapiens
ccagatccctggcac

SEQ ID NO: 202582 - DNA, 15 bp, Homo sapiens
gccagatccctggca

SEQ ID NO: 202583 - DNA, 15 bp, Homo sapiens
ggccagatccctggc

SEQ ID NO: 202584 - DNA, 15 bp, Homo sapiens
gggccagatccctgg

SEQ ID NO: 202585 - DNA, 15 bp, Homo sapiens
agggccagatccctg

SEQ ID NO: 202586 - DNA, 15 bp, Homo sapiens
cagggccagatccct

SEQ ID NO: 202587 - DNA, 15 bp, Homo sapiens
tcagggccagatccc

SEQ ID NO: 202588 - DNA, 15 bp, Homo sapiens
ctcagggccagatcc

SEQ ID NO: 202589 - DNA, 15 bp, Homo sapiens
actcagggccagatc

SEQ ID NO: 202590 - DNA, 15 bp, Homo sapiens
gactcagggccagat

SEQ ID NO: 202591 - DNA, 15 bp, Homo sapiens
agactcagggccaga

SEQ ID NO: 202592 - DNA, 15 bp, Homo sapiens
cagactcagggccag

SEQ ID NO: 202593 - DNA, 15 bp, Homo sapiens
ccagactcagggcca

SEQ ID NO: 202594 - DNA, 15 bp, Homo sapiens
tccagactcagggcc

SEQ ID NO: 202595 - DNA, 15 bp, Homo sapiens
ttccagactcagggc

SEQ ID NO: 202596 - DNA, 15 bp, Homo sapiens
cttccagactcaggg

SEQ ID NO: 202597 - DNA, 15 bp, Homo sapiens
tcttccagactcagg

SEQ ID NO: 202598 - DNA, 15 bp, Homo sapiens
ttcttccagactcag

SEQ ID NO: 202599 - DNA, 15 bp, Homo sapiens
gttcttccagactca

SEQ ID NO: 202600 - DNA, 15 bp, Homo sapiens
ggttcttccagactc

SEQ ID NO: 202601 - DNA, 15 bp, Homo sapiens
tggttcttccagact

SEQ ID NO: 202602 - DNA, 15 bp, Homo sapiens
atggttcttccagac

SEQ ID NO: 202603 - DNA, 15 bp, Homo sapiens
aatggttcttccaga

SEQ ID NO: 202604 - DNA, 15 bp, Homo sapiens
aaatggttcttccag

SEQ ID NO: 202605 - DNA, 15 bp, Homo sapiens
caaatggttcttcca

SEQ ID NO: 202606 - DNA, 15 bp, Homo sapiens
ccaaatggttcttcc

SEQ ID NO: 202607 - DNA, 15 bp, Homo sapiens
accaaatggttcttc

SEQ ID NO: 202608 - DNA, 15 bp, Homo sapiens
aaccaaatggttctt

SEQ ID NO: 202609 - DNA, 15 bp, Homo sapiens
gaaccaaatggttct

SEQ ID NO: 202610 - DNA, 15 bp, Homo sapiens
tgaaccaaatggttc

SEQ ID NO: 202611 - DNA, 15 bp, Homo sapiens
atgaaccaaatggtt

SEQ ID NO: 202612 - DNA, 15 bp, Homo sapiens
catgaaccaaatggt

SEQ ID NO: 202613 - DNA, 15 bp, Homo sapiens
acatgaaccaaatgg

SEQ ID NO: 202614 - DNA, 15 bp, Homo sapiens
aacatgaaccaaatg

SEQ ID NO: 202615 - DNA, 15 bp, Homo sapiens
aaacatgaaccaaat

SEQ ID NO: 202616 - DNA, 15 bp, Homo sapiens
gaaacatgaaccaaa

SEQ ID NO: 202617 - DNA, 15 bp, Homo sapiens
ggaaacatgaaccaa

SEQ ID NO: 202618 - DNA, 15 bp, Homo sapiens
aggaaacatgaacca

SEQ ID NO: 202619 - DNA, 15 bp, Homo sapiens
gaggaaacatgaacc

SEQ ID NO: 202620 - DNA, 15 bp, Homo sapiens
tgaggaaacatgaac

SEQ ID NO: 202621 - DNA, 15 bp, Homo sapiens
gtgaggaaacatgaa

SEQ ID NO: 202622 - DNA, 15 bp, Homo sapiens
ggtgaggaaacatga

SEQ ID NO: 202623 - DNA, 15 bp, Homo sapiens
gggtgaggaaacatg

SEQ ID NO: 202624 - DNA, 15 bp, Homo sapiens
tgggtgaggaaacat

SEQ ID NO: 202625 - DNA, 15 bp, Homo sapiens
gtgggtgaggaaaca

SEQ ID NO: 202626 - DNA, 15 bp, Homo sapiens
agtgggtgaggaaac

SEQ ID NO: 202627 - DNA, 15 bp, Homo sapiens
cagtgggtgaggaaa

SEQ ID NO: 202628 - DNA, 15 bp, Homo sapiens
acagtgggtgaggaa

SEQ ID NO: 202629 - DNA, 15 bp, Homo sapiens
gacagtgggtgagga

SEQ ID NO: 202630 - DNA, 15 bp, Homo sapiens
agacagtgggtgagg

SEQ ID NO: 202631 - DNA, 15 bp, Homo sapiens
tagacagtgggtgag

SEQ ID NO: 202632 - DNA, 15 bp, Homo sapiens
atagacagtgggtga

SEQ ID NO: 202633 - DNA, 15 bp, Homo sapiens
tatagacagtgggtg

SEQ ID NO: 202634 - DNA, 15 bp, Homo sapiens
gtatagacagtgggt

SEQ ID NO: 202635 - DNA, 15 bp, Homo sapiens
agtatagacagtggg

SEQ ID NO: 202636 - DNA, 15 bp, Homo sapiens
aagtatagacagtgg

SEQ ID NO: 202637 - DNA, 15 bp, Homo sapiens
gaagtatagacagtg

SEQ ID NO: 202638 - DNA, 15 bp, Homo sapiens
tgaagtatagacagt

SEQ ID NO: 202639 - DNA, 15 bp, Homo sapiens
ctgaagtatagacag

SEQ ID NO: 202640 - DNA, 15 bp, Homo sapiens
actgaagtatagaca

SEQ ID NO: 202641 - DNA, 15 bp, Homo sapiens
aactgaagtatagac

SEQ ID NO: 202642 - DNA, 15 bp, Homo sapiens
caactgaagtataga

SEQ ID NO: 202643 - DNA, 15 bp, Homo sapiens
acaactgaagtatag

SEQ ID NO: 202644 - DNA, 15 bp, Homo sapiens
cacaactgaagtata

SEQ ID NO: 202645 - DNA, 15 bp, Homo sapiens
ccacaactgaagtat

SEQ ID NO: 202646 - DNA, 15 bp, Homo sapiens
tccacaactgaagta

SEQ ID NO: 202647 - DNA, 15 bp, Homo sapiens
atccacaactgaagt

SEQ ID NO: 202648 - DNA, 15 bp, Homo sapiens
tatccacaactgaag

SEQ ID NO: 202649 - DNA, 15 bp, Homo sapiens
ctatccacaactgaa

SEQ ID NO: 202650 - DNA, 15 bp, Homo sapiens
gctatccacaactga

SEQ ID NO: 202651 - DNA, 15 bp, Homo sapiens
ggctatccacaactg

SEQ ID NO: 202652 - DNA, 15 bp, Homo sapiens
gggctatccacaact

SEQ ID NO: 202653 - DNA, 15 bp, Homo sapiens
agggctatccacaac

SEQ ID NO: 202654 - DNA, 15 bp, Homo sapiens
gagggctatccacaa

SEQ ID NO: 202655 - DNA, 15 bp, Homo sapiens
agagggctatccaca

SEQ ID NO: 202656 - DNA, 15 bp, Homo sapiens
cagagggctatccac

SEQ ID NO: 202657 - DNA, 15 bp, Homo sapiens
ccagagggctatcca

SEQ ID NO: 202658 - DNA, 15 bp, Homo sapiens
accagagggctatcc

SEQ ID NO: 202659 - DNA, 15 bp, Homo sapiens
gaccagagggctatc

SEQ ID NO: 202660 - DNA, 15 bp, Homo sapiens
agaccagagggctat

SEQ ID NO: 202661 - DNA, 15 bp, Homo sapiens
aagaccagagggcta

SEQ ID NO: 202662 - DNA, 15 bp, Homo sapiens
aaagaccagagggct

SEQ ID NO: 202663 - DNA, 15 bp, Homo sapiens
taaagaccagagggc

SEQ ID NO: 202664 - DNA, 15 bp, Homo sapiens
ataaagaccagaggg

SEQ ID NO: 202665 - DNA, 15 bp, Homo sapiens
aataaagaccagagg

SEQ ID NO: 202666 - DNA, 15 bp, Homo sapiens
gaataaagaccagag

SEQ ID NO: 202667 - DNA, 15 bp, Homo sapiens
agaataaagaccaga

SEQ ID NO: 202668 - DNA, 15 bp, Homo sapiens
aagaataaagaccag

SEQ ID NO: 202669 - DNA, 15 bp, Homo sapiens
gaagaataaagacca

SEQ ID NO: 202670 - DNA, 15 bp, Homo sapiens
agaagaataaagacc

SEQ ID NO: 202671 - DNA, 15 bp, Homo sapiens
aagaagaataaagac

SEQ ID NO: 202672 - DNA, 15 bp, Homo sapiens
taagaagaataaaga

SEQ ID NO: 202673 - DNA, 15 bp, Homo sapiens
gtaagaagaataaag

SEQ ID NO: 202674 - DNA, 15 bp, Homo sapiens
ggtaagaagaataaa

SEQ ID NO: 202675 - DNA, 15 bp, Homo sapiens
aggtaagaagaataa

SEQ ID NO: 202676 - DNA, 15 bp, Homo sapiens
caggtaagaagaata

SEQ ID NO: 202677 - DNA, 15 bp, Homo sapiens
acaggtaagaagaat

SEQ ID NO: 202678 - DNA, 15 bp, Homo sapiens
tacaggtaagaagaa

SEQ ID NO: 202679 - DNA, 15 bp, Homo sapiens
ttacaggtaagaaga

SEQ ID NO: 202680 - DNA, 15 bp, Homo sapiens
tttacaggtaagaag

SEQ ID NO: 202681 - DNA, 15 bp, Homo sapiens
ttttacaggtaagaa

SEQ ID NO: 202682 - DNA, 15 bp, Homo sapiens
attttacaggtaaga

SEQ ID NO: 202683 - DNA, 15 bp, Homo sapiens
cattttacaggtaag

SEQ ID NO: 202684 - DNA, 15 bp, Homo sapiens
ccattttacaggtaa

SEQ ID NO: 202685 - DNA, 15 bp, Homo sapiens
cccattttacaggta

SEQ ID NO: 202686 - DNA, 15 bp, Homo sapiens
ccccattttacaggt

SEQ ID NO: 202687 - DNA, 15 bp, Homo sapiens
tccccattttacagg

SEQ ID NO: 202688 - DNA, 15 bp, Homo sapiens
atccccattttacag

SEQ ID NO: 202689 - DNA, 15 bp, Homo sapiens
tatccccattttaca

SEQ ID NO: 202690 - DNA, 15 bp, Homo sapiens
ttatccccattttac

SEQ ID NO: 202691 - DNA, 15 bp, Homo sapiens
attatccccatttta

SEQ ID NO: 202692 - DNA, 15 bp, Homo sapiens
tattatccccatttt

SEQ ID NO: 202693 - DNA, 15 bp, Homo sapiens
ttattatccccattt

SEQ ID NO: 202694 - DNA, 15 bp, Homo sapiens
attattatccccatt

SEQ ID NO: 202695 - DNA, 15 bp, Homo sapiens
cattattatccccat

SEQ ID NO: 202696 - DNA, 15 bp, Homo sapiens
tcattattatcccca

SEQ ID NO: 202697 - DNA, 15 bp, Homo sapiens
atcattattatcccc

SEQ ID NO: 202698 - DNA, 15 bp, Homo sapiens
tatcattattatccc

SEQ ID NO: 202699 - DNA, 15 bp, Homo sapiens
ttatcattattatcc

SEQ ID NO: 202700 - DNA, 15 bp, Homo sapiens
attatcattattatc

SEQ ID NO: 202701 - DNA, 15 bp, Homo sapiens
tattatcattattat

SEQ ID NO: 202702 - DNA, 15 bp, Homo sapiens
gtattatcattatta

SEQ ID NO: 202703 - DNA, 15 bp, Homo sapiens
agtattatcattatt

SEQ ID NO: 202704 - DNA, 15 bp, Homo sapiens
tagtattatcattat

SEQ ID NO: 202705 - DNA, 15 bp, Homo sapiens
gtagtattatcatta

SEQ ID NO: 202706 - DNA, 15 bp, Homo sapiens
ggtagtattatcatt

SEQ ID NO: 202707 - DNA, 15 bp, Homo sapiens
aggtagtattatcat

SEQ ID NO: 202708 - DNA, 15 bp, Homo sapiens
gaggtagtattatca

SEQ ID NO: 202709 - DNA, 15 bp, Homo sapiens
tgaggtagtattatc

SEQ ID NO: 202710 - DNA, 15 bp, Homo sapiens
gtgaggtagtattat

SEQ ID NO: 202711 - DNA, 15 bp, Homo sapiens
agtgaggtagtatta

SEQ ID NO: 202712 - DNA, 15 bp, Homo sapiens
aagtgaggtagtatt

SEQ ID NO: 202713 - DNA, 15 bp, Homo sapiens
taagtgaggtagtat

SEQ ID NO: 202714 - DNA, 15 bp, Homo sapiens
gtaagtgaggtagta

SEQ ID NO: 202715 - DNA, 15 bp, Homo sapiens
tgtaagtgaggtagt

SEQ ID NO: 202716 - DNA, 15 bp, Homo sapiens
ttgtaagtgaggtag

SEQ ID NO: 202717 - DNA, 15 bp, Homo sapiens
cttgtaagtgaggta

SEQ ID NO: 202718 - DNA, 15 bp, Homo sapiens
tcttgtaagtgaggt

SEQ ID NO: 202719 - DNA, 15 bp, Homo sapiens
atcttgtaagtgagg

SEQ ID NO: 202720 - DNA, 15 bp, Homo sapiens
aatcttgtaagtgag

SEQ ID NO: 202721 - DNA, 15 bp, Homo sapiens
taatcttgtaagtga

SEQ ID NO: 202722 - DNA, 15 bp, Homo sapiens
ttaatcttgtaagtg

SEQ ID NO: 202723 - DNA, 15 bp, Homo sapiens
gttaatcttgtaagt

SEQ ID NO: 202724 - DNA, 15 bp, Homo sapiens
cgttaatcttgtaag

SEQ ID NO: 202725 - DNA, 15 bp, Homo sapiens
acgttaatcttgtaa

SEQ ID NO: 202726 - DNA, 15 bp, Homo sapiens
tacgttaatcttgta

SEQ ID NO: 202727 - DNA, 15 bp, Homo sapiens
atacgttaatcttgt

SEQ ID NO: 202728 - DNA, 15 bp, Homo sapiens
catacgttaatcttg

SEQ ID NO: 202729 - DNA, 15 bp, Homo sapiens
tcatacgttaatctt

SEQ ID NO: 202730 - DNA, 15 bp, Homo sapiens
ctcatacgttaatct

SEQ ID NO: 202731 - DNA, 15 bp, Homo sapiens
tctcatacgttaatc

SEQ ID NO: 202732 - DNA, 15 bp, Homo sapiens
atctcatacgttaat

SEQ ID NO: 202733 - DNA, 15 bp, Homo sapiens
aatctcatacgttaa

SEQ ID NO: 202734 - DNA, 15 bp, Homo sapiens
aaatctcatacgtta

SEQ ID NO: 202735 - DNA, 15 bp, Homo sapiens
taaatctcatacgtt

SEQ ID NO: 202736 - DNA, 15 bp, Homo sapiens
ataaatctcatacgt

SEQ ID NO: 202737 - DNA, 15 bp, Homo sapiens
tataaatctcatacg

SEQ ID NO: 202738 - DNA, 15 bp, Homo sapiens
atataaatctcatac

SEQ ID NO: 202739 - DNA, 15 bp, Homo sapiens
gatataaatctcata

SEQ ID NO: 202740 - DNA, 15 bp, Homo sapiens
tgatataaatctcat

SEQ ID NO: 202741 - DNA, 15 bp, Homo sapiens
ttgatataaatctca

SEQ ID NO: 202742 - DNA, 15 bp, Homo sapiens
tttgatataaatctc

SEQ ID NO: 202743 - DNA, 15 bp, Homo sapiens
ttttgatataaatct

SEQ ID NO: 202744 - DNA, 15 bp, Homo sapiens
cttttgatataaatc

SEQ ID NO: 202745 - DNA, 15 bp, Homo sapiens
gcttttgatataaat

SEQ ID NO: 202746 - DNA, 15 bp, Homo sapiens
ggcttttgatataaa

SEQ ID NO: 202747 - DNA, 15 bp, Homo sapiens
aggcttttgatataa

SEQ ID NO: 202748 - DNA, 15 bp, Homo sapiens
taggcttttgatata

SEQ ID NO: 202749 - DNA, 15 bp, Homo sapiens
ctaggcttttgatat

SEQ ID NO: 202750 - DNA, 15 bp, Homo sapiens
actaggcttttgata

SEQ ID NO: 202751 - DNA, 15 bp, Homo sapiens
tactaggcttttgat

SEQ ID NO: 202752 - DNA, 15 bp, Homo sapiens
gtactaggcttttga

SEQ ID NO: 202753 - DNA, 15 bp, Homo sapiens
ggtactaggcttttg

SEQ ID NO: 202754 - DNA, 15 bp, Homo sapiens
aggtactaggctttt

SEQ ID NO: 202755 - DNA, 15 bp, Homo sapiens
caggtactaggcttt

SEQ ID NO: 202756 - DNA, 15 bp, Homo sapiens
ccaggtactaggctt

SEQ ID NO: 202757 - DNA, 15 bp, Homo sapiens
gccaggtactaggct

SEQ ID NO: 202758 - DNA, 15 bp, Homo sapiens
tgccaggtactaggc

SEQ ID NO: 202759 - DNA, 15 bp, Homo sapiens
gtgccaggtactagg

SEQ ID NO: 202760 - DNA, 15 bp, Homo sapiens
ggtgccaggtactag

SEQ ID NO: 202761 - DNA, 15 bp, Homo sapiens
aggtgccaggtacta

SEQ ID NO: 202762 - DNA, 15 bp, Homo sapiens
caggtgccaggtact

SEQ ID NO: 202763 - DNA, 15 bp, Homo sapiens
acaggtgccaggtac

SEQ ID NO: 202764 - DNA, 15 bp, Homo sapiens
aacaggtgccaggta

SEQ ID NO: 202765 - DNA, 15 bp, Homo sapiens
taacaggtgccaggt

SEQ ID NO: 202766 - DNA, 15 bp, Homo sapiens
ctaacaggtgccagg

SEQ ID NO: 202767 - DNA, 15 bp, Homo sapiens
actaacaggtgccag

SEQ ID NO: 202768 - DNA, 15 bp, Homo sapiens
aactaacaggtgcca

SEQ ID NO: 202769 - DNA, 15 bp, Homo sapiens
aaactaacaggtgcc

SEQ ID NO: 202770 - DNA, 15 bp, Homo sapiens
gaaactaacaggtgc

SEQ ID NO: 202771 - DNA, 15 bp, Homo sapiens
agaaactaacaggtg

SEQ ID NO: 202772 - DNA, 15 bp, Homo sapiens
aagaaactaacaggt

SEQ ID NO: 202773 - DNA, 15 bp, Homo sapiens
aaagaaactaacagg

SEQ ID NO: 202774 - DNA, 15 bp, Homo sapiens
gaaagaaactaacag

SEQ ID NO: 202775 - DNA, 15 bp, Homo sapiens
agaaagaaactaaca

SEQ ID NO: 202776 - DNA, 15 bp, Homo sapiens
aagaaagaaactaac

SEQ ID NO: 202777 - DNA, 15 bp, Homo sapiens
aaagaaagaaactaa

SEQ ID NO: 202778 - DNA, 15 bp, Homo sapiens
aaaagaaagaaacta

SEQ ID NO: 202779 - DNA, 15 bp, Homo sapiens
aaaaagaaagaaact

SEQ ID NO: 202780 - DNA, 15 bp, Homo sapiens
aaaaaagaaagaaac

SEQ ID NO: 202781 - DNA, 15 bp, Homo sapiens
agagactctgtctca

SEQ ID NO: 202782 - DNA, 15 bp, Homo sapiens
gagagactctgtctc

SEQ ID NO: 202783 - DNA, 15 bp, Homo sapiens
agagagactctgtct

SEQ ID NO: 202784 - DNA, 15 bp, Homo sapiens
gagagagactctgtc

SEQ ID NO: 202785 - DNA, 15 bp, Homo sapiens
agagagagactctgt

SEQ ID NO: 202786 - DNA, 15 bp, Homo sapiens
cagagagagactctg

SEQ ID NO: 202787 - DNA, 15 bp, Homo sapiens
acagagagagactct

SEQ ID NO: 202788 - DNA, 15 bp, Homo sapiens
aacagagagagactc

SEQ ID NO: 202789 - DNA, 15 bp, Homo sapiens
caacagagagagact

SEQ ID NO: 202790 - DNA, 15 bp, Homo sapiens
gcaacagagagagac

SEQ ID NO: 202791 - DNA, 15 bp, Homo sapiens
ggcaacagagagaga

SEQ ID NO: 202792 - DNA, 15 bp, Homo sapiens
gggcaacagagagag

SEQ ID NO: 202793 - DNA, 15 bp, Homo sapiens
tgggcaacagagaga

SEQ ID NO: 202794 - DNA, 15 bp, Homo sapiens
ctgggcaacagagag

SEQ ID NO: 202795 - DNA, 15 bp, Homo sapiens
cctgggcaacagaga

SEQ ID NO: 202796 - DNA, 15 bp, Homo sapiens
gtagcctgggcaaca

SEQ ID NO: 202797 - DNA, 15 bp, Homo sapiens
tgtagcctgggcaac

SEQ ID NO: 202798 - DNA, 15 bp, Homo sapiens
ctgtagcctgggcaa

SEQ ID NO: 202799 - DNA, 15 bp, Homo sapiens
actgtagcctgggca

SEQ ID NO: 202800 - DNA, 15 bp, Homo sapiens
cactgtagcctgggc

SEQ ID NO: 202801 - DNA, 15 bp, Homo sapiens
gcactgtagcctggg

SEQ ID NO: 202802 - DNA, 15 bp, Homo sapiens
tgcactgtagcctgg

SEQ ID NO: 202803 - DNA, 15 bp, Homo sapiens
ctgcactgtagcctg

SEQ ID NO: 202804 - DNA, 15 bp, Homo sapiens
actgcactgtagcct

SEQ ID NO: 202805 - DNA, 15 bp, Homo sapiens
cactgcactgtagcc

SEQ ID NO: 202806 - DNA, 15 bp, Homo sapiens
ccactgcactgtagc

SEQ ID NO: 202807 - DNA, 15 bp, Homo sapiens
accactgcactgtag

SEQ ID NO: 202808 - DNA, 15 bp, Homo sapiens
caccactgcactgta

SEQ ID NO: 202809 - DNA, 15 bp, Homo sapiens
gcaccactgcactgt

SEQ ID NO: 202810 - DNA, 15 bp, Homo sapiens
cgcaccactgcactg

SEQ ID NO: 202811 - DNA, 15 bp, Homo sapiens
gagatcgcaccactg

SEQ ID NO: 202812 - DNA, 15 bp, Homo sapiens
cgagatcgcaccact

SEQ ID NO: 202813 - DNA, 15 bp, Homo sapiens
ccgagatcgcaccac

SEQ ID NO: 202814 - DNA, 15 bp, Homo sapiens
gccgagatcgcacca

SEQ ID NO: 202815 - DNA, 15 bp, Homo sapiens
agccgagatcgcacc

SEQ ID NO: 202816 - DNA, 15 bp, Homo sapiens
gagccgagatcgcac

SEQ ID NO: 202817 - DNA, 15 bp, Homo sapiens
tgagccgagatcgca

SEQ ID NO: 202818 - DNA, 15 bp, Homo sapiens
gtgagccgagatcgc

SEQ ID NO: 202819 - DNA, 15 bp, Homo sapiens
agtgagccgagatcg

SEQ ID NO: 202820 - DNA, 15 bp, Homo sapiens
tggaggcagagcttg

SEQ ID NO: 202821 - DNA, 15 bp, Homo sapiens
ctggaggcagagctt

SEQ ID NO: 202822 - DNA, 15 bp, Homo sapiens
cctggaggcagagct

SEQ ID NO: 202823 - DNA, 15 bp, Homo sapiens
ccctggaggcagagc

SEQ ID NO: 202824 - DNA, 15 bp, Homo sapiens
accctggaggcagag

SEQ ID NO: 202825 - DNA, 15 bp, Homo sapiens
aaccctggaggcaga

SEQ ID NO: 202826 - DNA, 15 bp, Homo sapiens
gaaccctggaggcag

SEQ ID NO: 202827 - DNA, 15 bp, Homo sapiens
tgaaccctggaggca

SEQ ID NO: 202828 - DNA, 15 bp, Homo sapiens
gtgaaccctggaggc

SEQ ID NO: 202829 - DNA, 15 bp, Homo sapiens
cgtgaaccctggagg

SEQ ID NO: 202830 - DNA, 15 bp, Homo sapiens
gcgtgaaccctggag

SEQ ID NO: 202831 - DNA, 15 bp, Homo sapiens
ggcgtgaaccctgga

SEQ ID NO: 202832 - DNA, 15 bp, Homo sapiens
tggcgtgaaccctgg

SEQ ID NO: 202833 - DNA, 15 bp, Homo sapiens
atggcgtgaaccctg

SEQ ID NO: 202834 - DNA, 15 bp, Homo sapiens
aatggcgtgaaccct

SEQ ID NO: 202835 - DNA, 15 bp, Homo sapiens
acaggagaatggcgt

SEQ ID NO: 202836 - DNA, 15 bp, Homo sapiens
gacaggagaatggcg

SEQ ID NO: 202837 - DNA, 15 bp, Homo sapiens
agacaggagaatggc

SEQ ID NO: 202838 - DNA, 15 bp, Homo sapiens
gagacaggagaatgg

SEQ ID NO: 202839 - DNA, 15 bp, Homo sapiens
tgagacaggagaatg

SEQ ID NO: 202840 - DNA, 15 bp, Homo sapiens
ctgagacaggagaat

SEQ ID NO: 202841 - DNA, 15 bp, Homo sapiens
gctgagacaggagaa

SEQ ID NO: 202842 - DNA, 15 bp, Homo sapiens
ggctgagacaggaga

SEQ ID NO: 202843 - DNA, 15 bp, Homo sapiens
aggctgagacaggag

SEQ ID NO: 202844 - DNA, 15 bp, Homo sapiens
gaggctgagacagga

SEQ ID NO: 202845 - DNA, 15 bp, Homo sapiens
ggaggctgagacagg

SEQ ID NO: 202846 - DNA, 15 bp, Homo sapiens
gggaggctgagacag

SEQ ID NO: 202847 - DNA, 15 bp, Homo sapiens
tgggaggctgagaca

SEQ ID NO: 202848 - DNA, 15 bp, Homo sapiens
ttgggaggctgagac

SEQ ID NO: 202849 - DNA, 15 bp, Homo sapiens
cttgggaggctgaga

SEQ ID NO: 202850 - DNA, 15 bp, Homo sapiens
ccctgtagtcccagc

SEQ ID NO: 202851 - DNA, 15 bp, Homo sapiens
cccctgtagtcccag

SEQ ID NO: 202852 - DNA, 15 bp, Homo sapiens
gcccctgtagtccca

SEQ ID NO: 202853 - DNA, 15 bp, Homo sapiens
ggcccctgtagtccc

SEQ ID NO: 202854 - DNA, 15 bp, Homo sapiens
aggcccctgtagtcc

SEQ ID NO: 202855 - DNA, 15 bp, Homo sapiens
caggcccctgtagtc

SEQ ID NO: 202856 - DNA, 15 bp, Homo sapiens
gcaggcccctgtagt

SEQ ID NO: 202857 - DNA, 15 bp, Homo sapiens
ggcaggcccctgtag

SEQ ID NO: 202858 - DNA, 15 bp, Homo sapiens
tggcaggcccctgta

SEQ ID NO: 202859 - DNA, 15 bp, Homo sapiens
gtggcaggcccctgt

SEQ ID NO: 202860 - DNA, 15 bp, Homo sapiens
ggtggcaggcccctg

SEQ ID NO: 202861 - DNA, 15 bp, Homo sapiens
tggtggcaggcccct

SEQ ID NO: 202862 - DNA, 15 bp, Homo sapiens
atggtggcaggcccc

SEQ ID NO: 202863 - DNA, 15 bp, Homo sapiens
catggtggcaggccc

SEQ ID NO: 202864 - DNA, 15 bp, Homo sapiens
gcatggtggcaggcc

SEQ ID NO: 202865 - DNA, 15 bp, Homo sapiens
ggcatggtggcaggc

SEQ ID NO: 202866 - DNA, 15 bp, Homo sapiens
gggcatggtggcagg

SEQ ID NO: 202867 - DNA, 15 bp, Homo sapiens
tgggcatggtggcag

SEQ ID NO: 202868 - DNA, 15 bp, Homo sapiens
gaaaaattagctggg

SEQ ID NO: 202869 - DNA, 15 bp, Homo sapiens
agaaaaattagctgg

SEQ ID NO: 202870 - DNA, 15 bp, Homo sapiens
tagaaaaattagctg

SEQ ID NO: 202871 - DNA, 15 bp, Homo sapiens
atagaaaaattagct

SEQ ID NO: 202872 - DNA, 15 bp, Homo sapiens
tatagaaaaattagc

SEQ ID NO: 202873 - DNA, 15 bp, Homo sapiens
atatagaaaaattag

SEQ ID NO: 202874 - DNA, 15 bp, Homo sapiens
aatatagaaaaatta

SEQ ID NO: 202875 - DNA, 15 bp, Homo sapiens
aaatatagaaaaatt

SEQ ID NO: 202876 - DNA, 15 bp, Homo sapiens
aaaatatagaaaaat

SEQ ID NO: 202877 - DNA, 15 bp, Homo sapiens
aaaaatatagaaaaa

SEQ ID NO: 202878 - DNA, 15 bp, Homo sapiens
taaaaatatagaaaa

SEQ ID NO: 202879 - DNA, 15 bp, Homo sapiens
ctaaaaatatagaaa

SEQ ID NO: 202880 - DNA, 15 bp, Homo sapiens
actaaaaatatagaa

SEQ ID NO: 202881 - DNA, 15 bp, Homo sapiens
tactaaaaatataga

SEQ ID NO: 202882 - DNA, 15 bp, Homo sapiens
ctactaaaaatatag

SEQ ID NO: 202883 - DNA, 15 bp, Homo sapiens
tctactaaaaatata

SEQ ID NO: 202884 - DNA, 15 bp, Homo sapiens
ctctactaaaaatat

SEQ ID NO: 202885 - DNA, 15 bp, Homo sapiens
gcccatctctactaa

SEQ ID NO: 202886 - DNA, 15 bp, Homo sapiens
agcccatctctacta

SEQ ID NO: 202887 - DNA, 15 bp, Homo sapiens
aagcccatctctact

SEQ ID NO: 202888 - DNA, 15 bp, Homo sapiens
aaagcccatctctac

SEQ ID NO: 202889 - DNA, 15 bp, Homo sapiens
gaaagcccatctcta

SEQ ID NO: 202890 - DNA, 15 bp, Homo sapiens
tgaaagcccatctct

SEQ ID NO: 202891 - DNA, 15 bp, Homo sapiens
gtgaaagcccatctc

SEQ ID NO: 202892 - DNA, 15 bp, Homo sapiens
agtgaaagcccatct

SEQ ID NO: 202893 - DNA, 15 bp, Homo sapiens
cagtgaaagcccatc

SEQ ID NO: 202894 - DNA, 15 bp, Homo sapiens
acagtgaaagcccat

SEQ ID NO: 202895 - DNA, 15 bp, Homo sapiens
cacagtgaaagccca

SEQ ID NO: 202896 - DNA, 15 bp, Homo sapiens
acacagtgaaagccc

SEQ ID NO: 202897 - DNA, 15 bp, Homo sapiens
aacacagtgaaagcc

SEQ ID NO: 202898 - DNA, 15 bp, Homo sapiens
gaacacagtgaaagc

SEQ ID NO: 202899 - DNA, 15 bp, Homo sapiens
tgaacacagtgaaag

SEQ ID NO: 202900 - DNA, 15 bp, Homo sapiens
gtgaacacagtgaaa

SEQ ID NO: 202901 - DNA, 15 bp, Homo sapiens
ggtgaacacagtgaa

SEQ ID NO: 202902 - DNA, 15 bp, Homo sapiens
tggtgaacacagtga

SEQ ID NO: 202903 - DNA, 15 bp, Homo sapiens
ctggtgaacacagtg

SEQ ID NO: 202904 - DNA, 15 bp, Homo sapiens
cctggtgaacacagt

SEQ ID NO: 202905 - DNA, 15 bp, Homo sapiens
tcctggtgaacacag

SEQ ID NO: 202906 - DNA, 15 bp, Homo sapiens
atcctggtgaacaca

SEQ ID NO: 202907 - DNA, 15 bp, Homo sapiens
catcctggtgaacac

SEQ ID NO: 202908 - DNA, 15 bp, Homo sapiens
ccatcctggtgaaca

SEQ ID NO: 202909 - DNA, 15 bp, Homo sapiens
accatcctggtgaac

SEQ ID NO: 202910 - DNA, 15 bp, Homo sapiens
gaccatcctggtgaa

SEQ ID NO: 202911 - DNA, 15 bp, Homo sapiens
agaccatcctggtga

SEQ ID NO: 202912 - DNA, 15 bp, Homo sapiens
gagaccatcctggtg

SEQ ID NO: 202913 - DNA, 15 bp, Homo sapiens
cgagaccatcctggt

SEQ ID NO: 202914 - DNA, 15 bp, Homo sapiens
tcgagaccatcctgg

SEQ ID NO: 202915 - DNA, 15 bp, Homo sapiens
atcgagaccatcctg

SEQ ID NO: 202916 - DNA, 15 bp, Homo sapiens
gatcgagaccatcct

SEQ ID NO: 202917 - DNA, 15 bp, Homo sapiens
agatcgagaccatcc

SEQ ID NO: 202918 - DNA, 15 bp, Homo sapiens
gatcacaaggtcagg

SEQ ID NO: 202919 - DNA, 15 bp, Homo sapiens
ggatcacaaggtcag

SEQ ID NO: 202920 - DNA, 15 bp, Homo sapiens
cggatcacaaggtca

SEQ ID NO: 202921 - DNA, 15 bp, Homo sapiens
gcggatcacaaggtc

SEQ ID NO: 202922 - DNA, 15 bp, Homo sapiens
ggcggatcacaaggt

SEQ ID NO: 202923 - DNA, 15 bp, Homo sapiens
gggcggatcacaagg

SEQ ID NO: 202924 - DNA, 15 bp, Homo sapiens
cgggcggatcacaag

SEQ ID NO: 202925 - DNA, 15 bp, Homo sapiens
acgggcggatcacaa

SEQ ID NO: 202926 - DNA, 15 bp, Homo sapiens
gacgggcggatcaca

SEQ ID NO: 202927 - DNA, 15 bp, Homo sapiens
agacgggcggatcac

SEQ ID NO: 202928 - DNA, 15 bp, Homo sapiens
gagacgggcggatca

SEQ ID NO: 202929 - DNA, 15 bp, Homo sapiens
cgagacgggcggatc

SEQ ID NO: 202930 - DNA, 15 bp, Homo sapiens
ccgagacgggcggat

SEQ ID NO: 202931 - DNA, 15 bp, Homo sapiens
gccgagacgggcgga

SEQ ID NO: 202932 - DNA, 15 bp, Homo sapiens
ggccgagacgggcgg

SEQ ID NO: 202933 - DNA, 15 bp, Homo sapiens
aggccgagacgggcg

SEQ ID NO: 202934 - DNA, 15 bp, Homo sapiens
gaggccgagacgggc

SEQ ID NO: 202935 - DNA, 15 bp, Homo sapiens
ggaggccgagacggg

SEQ ID NO: 202936 - DNA, 15 bp, Homo sapiens
gggaggccgagacgg

SEQ ID NO: 202937 - DNA, 15 bp, Homo sapiens
tgggaggccgagacg

SEQ ID NO: 202938 - DNA, 15 bp, Homo sapiens
ttgggaggccgagac

SEQ ID NO: 202939 - DNA, 15 bp, Homo sapiens
gcctataatcccagc

SEQ ID NO: 202940 - DNA, 15 bp, Homo sapiens
cgcctataatcccag

SEQ ID NO: 202941 - DNA, 15 bp, Homo sapiens
acgcctataatccca

SEQ ID NO: 202942 - DNA, 15 bp, Homo sapiens
cacgcctataatccc

SEQ ID NO: 202943 - DNA, 15 bp, Homo sapiens
tcacgcctataatcc

SEQ ID NO: 202944 - DNA, 15 bp, Homo sapiens
ctcacgcctataatc

SEQ ID NO: 202945 - DNA, 15 bp, Homo sapiens
gctcacgcctataat

SEQ ID NO: 202946 - DNA, 15 bp, Homo sapiens
ggctcacgcctataa

SEQ ID NO: 202947 - DNA, 15 bp, Homo sapiens
tggctcacgcctata

SEQ ID NO: 202948 - DNA, 15 bp, Homo sapiens
atggctcacgcctat

SEQ ID NO: 202949 - DNA, 15 bp, Homo sapiens
gatggctcacgccta

SEQ ID NO: 202950 - DNA, 15 bp, Homo sapiens
cgatggctcacgcct

SEQ ID NO: 202951 - DNA, 15 bp, Homo sapiens
acgatggctcacgcc

SEQ ID NO: 202952 - DNA, 15 bp, Homo sapiens
cacgatggctcacgc

SEQ ID NO: 202953 - DNA, 15 bp, Homo sapiens
gcacgatggctcacg

SEQ ID NO: 202954 - DNA, 15 bp, Homo sapiens
ggcacgatggctcac

SEQ ID NO: 202955 - DNA, 15 bp, Homo sapiens
aggcacgatggctca

SEQ ID NO: 202956 - DNA, 15 bp, Homo sapiens
caggcacgatggctc

SEQ ID NO: 202957 - DNA, 15 bp, Homo sapiens
ccaggcacgatggct

SEQ ID NO: 202958 - DNA, 15 bp, Homo sapiens
gccaggcacgatggc

SEQ ID NO: 202959 - DNA, 15 bp, Homo sapiens
ggccaggcacgatgg

SEQ ID NO: 202960 - DNA, 15 bp, Homo sapiens
tggccaggcacgatg

SEQ ID NO: 202961 - DNA, 15 bp, Homo sapiens
ctggccaggcacgat

SEQ ID NO: 202962 - DNA, 15 bp, Homo sapiens
cctggccaggcacga

SEQ ID NO: 202963 - DNA, 15 bp, Homo sapiens
gcctggccaggcacg

SEQ ID NO: 202964 - DNA, 15 bp, Homo sapiens
tgcctggccaggcac

SEQ ID NO: 202965 - DNA, 15 bp, Homo sapiens
gtgcctggccaggca

SEQ ID NO: 202966 - DNA, 15 bp, Homo sapiens
ggtgcctggccaggc

SEQ ID NO: 202967 - DNA, 15 bp, Homo sapiens
aggtgcctggccagg

SEQ ID NO: 202968 - DNA, 15 bp, Homo sapiens
caggtgcctggccag

SEQ ID NO: 202969 - DNA, 15 bp, Homo sapiens
acaggtgcctggcca

SEQ ID NO: 202970 - DNA, 15 bp, Homo sapiens
aacaggtgcctggcc

SEQ ID NO: 202971 - DNA, 15 bp, Homo sapiens
taacaggtgcctggc

SEQ ID NO: 202972 - DNA, 15 bp, Homo sapiens
ctaacaggtgcctgg

SEQ ID NO: 202973 - DNA, 15 bp, Homo sapiens
actaacaggtgcctg

SEQ ID NO: 202974 - DNA, 15 bp, Homo sapiens
aactaacaggtgcct

SEQ ID NO: 202975 - DNA, 15 bp, Homo sapiens
tagaaactaacaggt

SEQ ID NO: 202976 - DNA, 15 bp, Homo sapiens
ttagaaactaacagg

SEQ ID NO: 202977 - DNA, 15 bp, Homo sapiens
tttagaaactaacag

SEQ ID NO: 202978 - DNA, 15 bp, Homo sapiens
gtttagaaactaaca

SEQ ID NO: 202979 - DNA, 15 bp, Homo sapiens
tgtttagaaactaac

SEQ ID NO: 202980 - DNA, 15 bp, Homo sapiens
ttgtttagaaactaa

SEQ ID NO: 202981 - DNA, 15 bp, Homo sapiens
attgtttagaaacta

SEQ ID NO: 202982 - DNA, 15 bp, Homo sapiens
aattgtttagaaact

SEQ ID NO: 202983 - DNA, 15 bp, Homo sapiens
caattgtttagaaac

SEQ ID NO: 202984 - DNA, 15 bp, Homo sapiens
acaattgtttagaaa

SEQ ID NO: 202985 - DNA, 15 bp, Homo sapiens
aacaattgtttagaa

SEQ ID NO: 202986 - DNA, 15 bp, Homo sapiens
taacaattgtttaga

SEQ ID NO: 202987 - DNA, 15 bp, Homo sapiens
ttaacaattgtttag

SEQ ID NO: 202988 - DNA, 15 bp, Homo sapiens
attaacaattgttta

SEQ ID NO: 202989 - DNA, 15 bp, Homo sapiens
tattaacaattgttt

SEQ ID NO: 202990 - DNA, 15 bp, Homo sapiens
atattaacaattgtt

SEQ ID NO: 202991 - DNA, 15 bp, Homo sapiens
gatattaacaattgt

SEQ ID NO: 202992 - DNA, 15 bp, Homo sapiens
tgatattaacaattg

SEQ ID NO: 202993 - DNA, 15 bp, Homo sapiens
atgatattaacaatt

SEQ ID NO: 202994 - DNA, 15 bp, Homo sapiens
aatgatattaacaat

SEQ ID NO: 202995 - DNA, 15 bp, Homo sapiens
gaatgatattaacaa

SEQ ID NO: 202996 - DNA, 15 bp, Homo sapiens
tgaatgatattaaca

SEQ ID NO: 202997 - DNA, 15 bp, Homo sapiens
atgaatgatattaac

SEQ ID NO: 202998 - DNA, 15 bp, Homo sapiens
aatgaatgatattaa

SEQ ID NO: 202999 - DNA, 15 bp, Homo sapiens
taatgaatgatatta

SEQ ID NO: 203000 - DNA, 15 bp, Homo sapiens
gtaatgaatgatatt

SEQ ID NO: 203001 - DNA, 15 bp, Homo sapiens
agtaatgaatgatat

SEQ ID NO: 203002 - DNA, 15 bp, Homo sapiens
aagtaatgaatgata

SEQ ID NO: 203003 - DNA, 15 bp, Homo sapiens
aaagtaatgaatgat

SEQ ID NO: 203004 - DNA, 15 bp, Homo sapiens
taaagtaatgaatga

SEQ ID NO: 203005 - DNA, 15 bp, Homo sapiens
ataaagtaatgaatg

SEQ ID NO: 203006 - DNA, 15 bp, Homo sapiens
aataaagtaatgaat

SEQ ID NO: 203007 - DNA, 15 bp, Homo sapiens
aaataaagtaatgaa

SEQ ID NO: 203008 - DNA, 15 bp, Homo sapiens
gaaataaagtaatga

SEQ ID NO: 203009 - DNA, 15 bp, Homo sapiens
agaaataaagtaatg

SEQ ID NO: 203010 - DNA, 15 bp, Homo sapiens
tagaaataaagtaat

SEQ ID NO: 203011 - DNA, 15 bp, Homo sapiens
ttagaaataaagtaa

SEQ ID NO: 203012 - DNA, 15 bp, Homo sapiens
tttagaaataaagta

SEQ ID NO: 203013 - DNA, 15 bp, Homo sapiens
ttttagaaataaagt

SEQ ID NO: 203014 - DNA, 15 bp, Homo sapiens
gttttagaaataaag

SEQ ID NO: 203015 - DNA, 15 bp, Homo sapiens
tgttttagaaataaa

SEQ ID NO: 203016 - DNA, 15 bp, Homo sapiens
ctgttttagaaataa

SEQ ID NO: 203017 - DNA, 15 bp, Homo sapiens
gctgttttagaaata

SEQ ID NO: 203018 - DNA, 15 bp, Homo sapiens
tgctgttttagaaat

SEQ ID NO: 203019 - DNA, 15 bp, Homo sapiens
atgctgttttagaaa

SEQ ID NO: 203020 - DNA, 15 bp, Homo sapiens
catgctgttttagaa

SEQ ID NO: 203021 - DNA, 15 bp, Homo sapiens
tcatgctgttttaga

SEQ ID NO: 203022 - DNA, 15 bp, Homo sapiens
atcatgctgttttag

SEQ ID NO: 203023 - DNA, 15 bp, Homo sapiens
aatcatgctgtttta

SEQ ID NO: 203024 - DNA, 15 bp, Homo sapiens
caatcatgctgtttt

SEQ ID NO: 203025 - DNA, 15 bp, Homo sapiens
tcaatcatgctgttt

SEQ ID NO: 203026 - DNA, 15 bp, Homo sapiens
ttcaatcatgctgtt

SEQ ID NO: 203027 - DNA, 15 bp, Homo sapiens
attcaatcatgctgt

SEQ ID NO: 203028 - DNA, 15 bp, Homo sapiens
aattcaatcatgctg

SEQ ID NO: 203029 - DNA, 15 bp, Homo sapiens
caattcaatcatgct

SEQ ID NO: 203030 - DNA, 15 bp, Homo sapiens
tcaattcaatcatgc

SEQ ID NO: 203031 - DNA, 15 bp, Homo sapiens
ctcaattcaatcatg

SEQ ID NO: 203032 - DNA, 15 bp, Homo sapiens
gctcaattcaatcat

SEQ ID NO: 203033 - DNA, 15 bp, Homo sapiens
tgctcaattcaatca

SEQ ID NO: 203034 - DNA, 15 bp, Homo sapiens
atgctcaattcaatc

SEQ ID NO: 203035 - DNA, 15 bp, Homo sapiens
aatgctcaattcaat

SEQ ID NO: 203036 - DNA, 15 bp, Homo sapiens
aaatgctcaattcaa

SEQ ID NO: 203037 - DNA, 15 bp, Homo sapiens
gaaatgctcaattca

SEQ ID NO: 203038 - DNA, 15 bp, Homo sapiens
ggaaatgctcaattc

SEQ ID NO: 203039 - DNA, 15 bp, Homo sapiens
aggaaatgctcaatt

SEQ ID NO: 203040 - DNA, 15 bp, Homo sapiens
aaggaaatgctcaat

SEQ ID NO: 203041 - DNA, 15 bp, Homo sapiens
caaggaaatgctcaa

SEQ ID NO: 203042 - DNA, 15 bp, Homo sapiens
ccaaggaaatgctca

SEQ ID NO: 203043 - DNA, 15 bp, Homo sapiens
tccaaggaaatgctc

SEQ ID NO: 203044 - DNA, 15 bp, Homo sapiens
gtccaaggaaatgct

SEQ ID NO: 203045 - DNA, 15 bp, Homo sapiens
agtccaaggaaatgc

SEQ ID NO: 203046 - DNA, 15 bp, Homo sapiens
aagtccaaggaaatg

SEQ ID NO: 203047 - DNA, 15 bp, Homo sapiens
caagtccaaggaaat

SEQ ID NO: 203048 - DNA, 15 bp, Homo sapiens
ccaagtccaaggaaa

SEQ ID NO: 203049 - DNA, 15 bp, Homo sapiens
tccaagtccaaggaa

SEQ ID NO: 203050 - DNA, 15 bp, Homo sapiens
ttccaagtccaagga

SEQ ID NO: 203051 - DNA, 15 bp, Homo sapiens
tttccaagtccaagg

SEQ ID NO: 203052 - DNA, 15 bp, Homo sapiens
ctttccaagtccaag

SEQ ID NO: 203053 - DNA, 15 bp, Homo sapiens
cctttccaagtccaa

SEQ ID NO: 203054 - DNA, 15 bp, Homo sapiens
acctttccaagtcca

SEQ ID NO: 203055 - DNA, 15 bp, Homo sapiens
tacctttccaagtcc

SEQ ID NO: 203056 - DNA, 15 bp, Homo sapiens
atacctttccaagtc

SEQ ID NO: 203057 - DNA, 15 bp, Homo sapiens
catacctttccaagt

SEQ ID NO: 203058 - DNA, 15 bp, Homo sapiens
tcatacctttccaag

SEQ ID NO: 203059 - DNA, 15 bp, Homo sapiens
atcatacctttccaa

SEQ ID NO: 203060 - DNA, 15 bp, Homo sapiens
aatcatacctttcca

SEQ ID NO: 203061 - DNA, 15 bp, Homo sapiens
aaatcatacctttcc

SEQ ID NO: 203062 - DNA, 15 bp, Homo sapiens
aaaatcatacctttc

SEQ ID NO: 203063 - DNA, 15 bp, Homo sapiens
caaaatcataccttt

SEQ ID NO: 203064 - DNA, 15 bp, Homo sapiens
ccaaaatcatacctt

SEQ ID NO: 203065 - DNA, 15 bp, Homo sapiens
tccaaaatcatacct

SEQ ID NO: 203066 - DNA, 15 bp, Homo sapiens
ctccaaaatcatacc

SEQ ID NO: 203067 - DNA, 15 bp, Homo sapiens
cctccaaaatcatac

SEQ ID NO: 203068 - DNA, 15 bp, Homo sapiens
tcctccaaaatcata

SEQ ID NO: 203069 - DNA, 15 bp, Homo sapiens
ctcctccaaaatcat

SEQ ID NO: 203070 - DNA, 15 bp, Homo sapiens
cctcctccaaaatca

SEQ ID NO: 203071 - DNA, 15 bp, Homo sapiens
ccctcctccaaaatc

SEQ ID NO: 203072 - DNA, 15 bp, Homo sapiens
accctcctccaaaat

SEQ ID NO: 203073 - DNA, 15 bp, Homo sapiens
caccctcctccaaaa

SEQ ID NO: 203074 - DNA, 15 bp, Homo sapiens
tcaccctcctccaaa

SEQ ID NO: 203075 - DNA, 15 bp, Homo sapiens
ttcaccctcctccaa

SEQ ID NO: 203076 - DNA, 15 bp, Homo sapiens
gttcaccctcctcca

SEQ ID NO: 203077 - DNA, 15 bp, Homo sapiens
ggttcaccctcctcc

SEQ ID NO: 203078 - DNA, 15 bp, Homo sapiens
aggttcaccctcctc

SEQ ID NO: 203079 - DNA, 15 bp, Homo sapiens
caggttcaccctcct

SEQ ID NO: 203080 - DNA, 15 bp, Homo sapiens
acaggttcaccctcc

SEQ ID NO: 203081 - DNA, 15 bp, Homo sapiens
cacaggttcaccctc

SEQ ID NO: 203082 - DNA, 15 bp, Homo sapiens
acacaggttcaccct

SEQ ID NO: 203083 - DNA, 15 bp, Homo sapiens
tacacaggttcaccc

SEQ ID NO: 203084 - DNA, 15 bp, Homo sapiens
ctacacaggttcacc

SEQ ID NO: 203085 - DNA, 15 bp, Homo sapiens
cctacacaggttcac

SEQ ID NO: 203086 - DNA, 15 bp, Homo sapiens
gcctacacaggttca

SEQ ID NO: 203087 - DNA, 15 bp, Homo sapiens
agcctacacaggttc

SEQ ID NO: 203088 - DNA, 15 bp, Homo sapiens
cagcctacacaggtt

SEQ ID NO: 203089 - DNA, 15 bp, Homo sapiens
acagcctacacaggt

SEQ ID NO: 203090 - DNA, 15 bp, Homo sapiens
aacagcctacacagg

SEQ ID NO: 203091 - DNA, 15 bp, Homo sapiens
caacagcctacacag

SEQ ID NO: 203092 - DNA, 15 bp, Homo sapiens
gcaacagcctacaca

SEQ ID NO: 203093 - DNA, 15 bp, Homo sapiens
tgcaacagcctacac

SEQ ID NO: 203094 - DNA, 15 bp, Homo sapiens
ctgcaacagcctaca

SEQ ID NO: 203095 - DNA, 15 bp, Homo sapiens
cctgcaacagcctac

SEQ ID NO: 203096 - DNA, 15 bp, Homo sapiens
ccctgcaacagccta

SEQ ID NO: 203097 - DNA, 15 bp, Homo sapiens
tccctgcaacagcct

SEQ ID NO: 203098 - DNA, 15 bp, Homo sapiens
ctccctgcaacagcc

SEQ ID NO: 203099 - DNA, 15 bp, Homo sapiens
actccctgcaacagc

SEQ ID NO: 203100 - DNA, 15 bp, Homo sapiens
aactccctgcaacag

SEQ ID NO: 203101 - DNA, 15 bp, Homo sapiens
gaactccctgcaaca

SEQ ID NO: 203102 - DNA, 15 bp, Homo sapiens
ggaactccctgcaac

SEQ ID NO: 203103 - DNA, 15 bp, Homo sapiens
aggaactccctgcaa

SEQ ID NO: 203104 - DNA, 15 bp, Homo sapiens
aaggaactccctgca

SEQ ID NO: 203105 - DNA, 15 bp, Homo sapiens
caaggaactccctgc

SEQ ID NO: 203106 - DNA, 15 bp, Homo sapiens
tcaaggaactccctg

SEQ ID NO: 203107 - DNA, 15 bp, Homo sapiens
gtcaaggaactccct

SEQ ID NO: 203108 - DNA, 15 bp, Homo sapiens
tgtcaaggaactccc

SEQ ID NO: 203109 - DNA, 15 bp, Homo sapiens
atgtcaaggaactcc

SEQ ID NO: 203110 - DNA, 15 bp, Homo sapiens
aatgtcaaggaactc

SEQ ID NO: 203111 - DNA, 15 bp, Homo sapiens
taatgtcaaggaact

SEQ ID NO: 203112 - DNA, 15 bp, Homo sapiens
ataatgtcaaggaac

SEQ ID NO: 203113 - DNA, 15 bp, Homo sapiens
gataatgtcaaggaa

SEQ ID NO: 203114 - DNA, 15 bp, Homo sapiens
tgataatgtcaagga

SEQ ID NO: 203115 - DNA, 15 bp, Homo sapiens
ttgataatgtcaagg

SEQ ID NO: 203116 - DNA, 15 bp, Homo sapiens
gttgataatgtcaag

SEQ ID NO: 203117 - DNA, 15 bp, Homo sapiens
agttgataatgtcaa

SEQ ID NO: 203118 - DNA, 15 bp, Homo sapiens
cagttgataatgtca

SEQ ID NO: 203119 - DNA, 15 bp, Homo sapiens
tcagttgataatgtc

SEQ ID NO: 203120 - DNA, 15 bp, Homo sapiens
gtcagttgataatgt

SEQ ID NO: 203121 - DNA, 15 bp, Homo sapiens
ggtcagttgataatg

SEQ ID NO: 203122 - DNA, 15 bp, Homo sapiens
tggtcagttgataat

SEQ ID NO: 203123 - DNA, 15 bp, Homo sapiens
ctggtcagttgataa

SEQ ID NO: 203124 - DNA, 15 bp, Homo sapiens
actggtcagttgata

SEQ ID NO: 203125 - DNA, 15 bp, Homo sapiens
gactggtcagttgat

SEQ ID NO: 203126 - DNA, 15 bp, Homo sapiens
ggactggtcagttga

SEQ ID NO: 203127 - DNA, 15 bp, Homo sapiens
tggactggtcagttg

SEQ ID NO: 203128 - DNA, 15 bp, Homo sapiens
atggactggtcagtt

SEQ ID NO: 203129 - DNA, 15 bp, Homo sapiens
gatggactggtcagt

SEQ ID NO: 203130 - DNA, 15 bp, Homo sapiens
tgatggactggtcag

SEQ ID NO: 203131 - DNA, 15 bp, Homo sapiens
ttgatggactggtca

SEQ ID NO: 203132 - DNA, 15 bp, Homo sapiens
gttgatggactggtc

SEQ ID NO: 203133 - DNA, 15 bp, Homo sapiens
tgttgatggactggt

SEQ ID NO: 203134 - DNA, 15 bp, Homo sapiens
ttgttgatggactgg

SEQ ID NO: 203135 - DNA, 15 bp, Homo sapiens
tttgttgatggactg

SEQ ID NO: 203136 - DNA, 15 bp, Homo sapiens
atttgttgatggact

SEQ ID NO: 203137 - DNA, 15 bp, Homo sapiens
aatttgttgatggac

SEQ ID NO: 203138 - DNA, 15 bp, Homo sapiens
aaatttgttgatgga

SEQ ID NO: 203139 - DNA, 15 bp, Homo sapiens
taaatttgttgatgg

SEQ ID NO: 203140 - DNA, 15 bp, Homo sapiens
ataaatttgttgatg

SEQ ID NO: 203141 - DNA, 15 bp, Homo sapiens
aataaatttgttgat

SEQ ID NO: 203142 - DNA, 15 bp, Homo sapiens
aaataaatttgttga

SEQ ID NO: 203143 - DNA, 15 bp, Homo sapiens
caaataaatttgttg

SEQ ID NO: 203144 - DNA, 15 bp, Homo sapiens
acaaataaatttgtt

SEQ ID NO: 203145 - DNA, 15 bp, Homo sapiens
aacaaataaatttgt

SEQ ID NO: 203146 - DNA, 15 bp, Homo sapiens
gaacaaataaatttg

SEQ ID NO: 203147 - DNA, 15 bp, Homo sapiens
tgaacaaataaattt

SEQ ID NO: 203148 - DNA, 15 bp, Homo sapiens
atgaacaaataaatt

SEQ ID NO: 203149 - DNA, 15 bp, Homo sapiens
aatgaacaaataaat

SEQ ID NO: 203150 - DNA, 15 bp, Homo sapiens
aaatgaacaaataaa

SEQ ID NO: 203151 - DNA, 15 bp, Homo sapiens
taaatgaacaaataa

SEQ ID NO: 203152 - DNA, 15 bp, Homo sapiens
ataaatgaacaaata

SEQ ID NO: 203153 - DNA, 15 bp, Homo sapiens
aataaatgaacaaat

SEQ ID NO: 203154 - DNA, 15 bp, Homo sapiens
aaataaatgaacaaa

SEQ ID NO: 203155 - DNA, 15 bp, Homo sapiens
taaataaatgaacaa

SEQ ID NO: 203156 - DNA, 15 bp, Homo sapiens
ataaataaatgaaca

SEQ ID NO: 203157 - DNA, 15 bp, Homo sapiens
aataaataaatgaac

SEQ ID NO: 203158 - DNA, 15 bp, Homo sapiens
taataaataaatgaa

SEQ ID NO: 203159 - DNA, 15 bp, Homo sapiens
ttaataaataaatga

SEQ ID NO: 203160 - DNA, 15 bp, Homo sapiens
attaataaataaatg

SEQ ID NO: 203161 - DNA, 15 bp, Homo sapiens
aattaataaataaat

SEQ ID NO: 203162 - DNA, 15 bp, Homo sapiens
gaattaataaataaa

SEQ ID NO: 203163 - DNA, 15 bp, Homo sapiens
tgaattaataaataa

SEQ ID NO: 203164 - DNA, 15 bp, Homo sapiens
ttgaattaataaata

SEQ ID NO: 203165 - DNA, 15 bp, Homo sapiens
cttgaattaataaat

SEQ ID NO: 203166 - DNA, 15 bp, Homo sapiens
ccttgaattaataaa

SEQ ID NO: 203167 - DNA, 15 bp, Homo sapiens
tccttgaattaataa

SEQ ID NO: 203168 - DNA, 15 bp, Homo sapiens
atccttgaattaata

SEQ ID NO: 203169 - DNA, 15 bp, Homo sapiens
catccttgaattaat

SEQ ID NO: 203170 - DNA, 15 bp, Homo sapiens
acatccttgaattaa

SEQ ID NO: 203171 - DNA, 15 bp, Homo sapiens
aacatccttgaatta

SEQ ID NO: 203172 - DNA, 15 bp, Homo sapiens
caacatccttgaatt

SEQ ID NO: 203173 - DNA, 15 bp, Homo sapiens
ccaacatccttgaat

SEQ ID NO: 203174 - DNA, 15 bp, Homo sapiens
cccaacatccttgaa

SEQ ID NO: 203175 - DNA, 15 bp, Homo sapiens
acccaacatccttga

SEQ ID NO: 203176 - DNA, 15 bp, Homo sapiens
gacccaacatccttg

SEQ ID NO: 203177 - DNA, 15 bp, Homo sapiens
ggacccaacatcctt

SEQ ID NO: 203178 - DNA, 15 bp, Homo sapiens
tggacccaacatcct

SEQ ID NO: 203179 - DNA, 15 bp, Homo sapiens
atggacccaacatcc

SEQ ID NO: 203180 - DNA, 15 bp, Homo sapiens
aatggacccaacatc

SEQ ID NO: 203181 - DNA, 15 bp, Homo sapiens
aaatggacccaacat

SEQ ID NO: 203182 - DNA, 15 bp, Homo sapiens
aaaatggacccaaca

SEQ ID NO: 203183 - DNA, 15 bp, Homo sapiens
aaaaatggacccaac

SEQ ID NO: 203184 - DNA, 15 bp, Homo sapiens
gaaaaatggacccaa

SEQ ID NO: 203185 - DNA, 15 bp, Homo sapiens
tgaaaaatggaccca

SEQ ID NO: 203186 - DNA, 15 bp, Homo sapiens
ctgaaaaatggaccc

SEQ ID NO: 203187 - DNA, 15 bp, Homo sapiens
actgaaaaatggacc

SEQ ID NO: 203188 - DNA, 15 bp, Homo sapiens
aactgaaaaatggac

SEQ ID NO: 203189 - DNA, 15 bp, Homo sapiens
taactgaaaaatgga

SEQ ID NO: 203190 - DNA, 15 bp, Homo sapiens
ctaactgaaaaatgg

SEQ ID NO: 203191 - DNA, 15 bp, Homo sapiens
tctaactgaaaaatg

SEQ ID NO: 203192 - DNA, 15 bp, Homo sapiens
gtctaactgaaaaat

SEQ ID NO: 203193 - DNA, 15 bp, Homo sapiens
agtctaactgaaaaa

SEQ ID NO: 203194 - DNA, 15 bp, Homo sapiens
gagtctaactgaaaa

SEQ ID NO: 203195 - DNA, 15 bp, Homo sapiens
agagtctaactgaaa

SEQ ID NO: 203196 - DNA, 15 bp, Homo sapiens
cagagtctaactgaa

SEQ ID NO: 203197 - DNA, 15 bp, Homo sapiens
ccagagtctaactga

SEQ ID NO: 203198 - DNA, 15 bp, Homo sapiens
tccagagtctaactg

SEQ ID NO: 203199 - DNA, 15 bp, Homo sapiens
ttccagagtctaact

SEQ ID NO: 203200 - DNA, 15 bp, Homo sapiens
tttccagagtctaac

SEQ ID NO: 203201 - DNA, 15 bp, Homo sapiens
ctttccagagtctaa

SEQ ID NO: 203202 - DNA, 15 bp, Homo sapiens
tctttccagagtcta

SEQ ID NO: 203203 - DNA, 15 bp, Homo sapiens
atctttccagagtct

SEQ ID NO: 203204 - DNA, 15 bp, Homo sapiens
tatctttccagagtc

SEQ ID NO: 203205 - DNA, 15 bp, Homo sapiens
ttatctttccagagt

SEQ ID NO: 203206 - DNA, 15 bp, Homo sapiens
cttatctttccagag

SEQ ID NO: 203207 - DNA, 15 bp, Homo sapiens
acttatctttccaga

SEQ ID NO: 203208 - DNA, 15 bp, Homo sapiens
cacttatctttccag

SEQ ID NO: 203209 - DNA, 15 bp, Homo sapiens
tcacttatctttcca

SEQ ID NO: 203210 - DNA, 15 bp, Homo sapiens
atcacttatctttcc

SEQ ID NO: 203211 - DNA, 15 bp, Homo sapiens
aatcacttatctttc

SEQ ID NO: 203212 - DNA, 15 bp, Homo sapiens
caatcacttatcttt

SEQ ID NO: 203213 - DNA, 15 bp, Homo sapiens
ccaatcacttatctt

SEQ ID NO: 203214 - DNA, 15 bp, Homo sapiens
accaatcacttatct

SEQ ID NO: 203215 - DNA, 15 bp, Homo sapiens
gaccaatcacttatc

SEQ ID NO: 203216 - DNA, 15 bp, Homo sapiens
ggaccaatcacttat

SEQ ID NO: 203217 - DNA, 15 bp, Homo sapiens
aggaccaatcactta

SEQ ID NO: 203218 - DNA, 15 bp, Homo sapiens
taggaccaatcactt

SEQ ID NO: 203219 - DNA, 15 bp, Homo sapiens
ataggaccaatcact

SEQ ID NO: 203220 - DNA, 15 bp, Homo sapiens
gataggaccaatcac

SEQ ID NO: 203221 - DNA, 15 bp, Homo sapiens
ggataggaccaatca

SEQ ID NO: 203222 - DNA, 15 bp, Homo sapiens
gggataggaccaatc

SEQ ID NO: 203223 - DNA, 15 bp, Homo sapiens
agggataggaccaat

SEQ ID NO: 203224 - DNA, 15 bp, Homo sapiens
aagggataggaccaa

SEQ ID NO: 203225 - DNA, 15 bp, Homo sapiens
taagggataggacca

SEQ ID NO: 203226 - DNA, 15 bp, Homo sapiens
ttaagggataggacc

SEQ ID NO: 203227 - DNA, 15 bp, Homo sapiens
cttaagggataggac

SEQ ID NO: 203228 - DNA, 15 bp, Homo sapiens
ccttaagggatagga

SEQ ID NO: 203229 - DNA, 15 bp, Homo sapiens
cccttaagggatagg

SEQ ID NO: 203230 - DNA, 15 bp, Homo sapiens
tcccttaagggatag

SEQ ID NO: 203231 - DNA, 15 bp, Homo sapiens
ttcccttaagggata

SEQ ID NO: 203232 - DNA, 15 bp, Homo sapiens
tttcccttaagggat

SEQ ID NO: 203233 - DNA, 15 bp, Homo sapiens
atttcccttaaggga

SEQ ID NO: 203234 - DNA, 15 bp, Homo sapiens
tatttcccttaaggg

SEQ ID NO: 203235 - DNA, 15 bp, Homo sapiens
atatttcccttaagg

SEQ ID NO: 203236 - DNA, 15 bp, Homo sapiens
catatttcccttaag

SEQ ID NO: 203237 - DNA, 15 bp, Homo sapiens
gcatatttcccttaa

SEQ ID NO: 203238 - DNA, 15 bp, Homo sapiens
agcatatttccctta

SEQ ID NO: 203239 - DNA, 15 bp, Homo sapiens
aagcatatttccctt

SEQ ID NO: 203240 - DNA, 15 bp, Homo sapiens
aaagcatatttccct

SEQ ID NO: 203241 - DNA, 15 bp, Homo sapiens
gaaagcatatttccc

SEQ ID NO: 203242 - DNA, 15 bp, Homo sapiens
tgaaagcatatttcc

SEQ ID NO: 203243 - DNA, 15 bp, Homo sapiens
atgaaagcatatttc

SEQ ID NO: 203244 - DNA, 15 bp, Homo sapiens
aatgaaagcatattt

SEQ ID NO: 203245 - DNA, 15 bp, Homo sapiens
caatgaaagcatatt

SEQ ID NO: 203246 - DNA, 15 bp, Homo sapiens
ccaatgaaagcatat

SEQ ID NO: 203247 - DNA, 15 bp, Homo sapiens
tccaatgaaagcata

SEQ ID NO: 203248 - DNA, 15 bp, Homo sapiens
ctccaatgaaagcat

SEQ ID NO: 203249 - DNA, 15 bp, Homo sapiens
tctccaatgaaagca

SEQ ID NO: 203250 - DNA, 15 bp, Homo sapiens
ttctccaatgaaagc

SEQ ID NO: 203251 - DNA, 15 bp, Homo sapiens
tttctccaatgaaag

SEQ ID NO: 203252 - DNA, 15 bp, Homo sapiens
atttctccaatgaaa

SEQ ID NO: 203253 - DNA, 15 bp, Homo sapiens
tatttctccaatgaa

SEQ ID NO: 203254 - DNA, 15 bp, Homo sapiens
ttatttctccaatga

SEQ ID NO: 203255 - DNA, 15 bp, Homo sapiens
gttatttctccaatg

SEQ ID NO: 203256 - DNA, 15 bp, Homo sapiens
tgttatttctccaat

SEQ ID NO: 203257 - DNA, 15 bp, Homo sapiens
atgttatttctccaa

SEQ ID NO: 203258 - DNA, 15 bp, Homo sapiens
catgttatttctcca

SEQ ID NO: 203259 - DNA, 15 bp, Homo sapiens
acatgttatttctcc

SEQ ID NO: 203260 - DNA, 15 bp, Homo sapiens
tacatgttatttctc

SEQ ID NO: 203261 - DNA, 15 bp, Homo sapiens
gtacatgttatttct

SEQ ID NO: 203262 - DNA, 15 bp, Homo sapiens
tgtacatgttatttc

SEQ ID NO: 203263 - DNA, 15 bp, Homo sapiens
gtgtacatgttattt

SEQ ID NO: 203264 - DNA, 15 bp, Homo sapiens
cgtgtacatgttatt

SEQ ID NO: 203265 - DNA, 15 bp, Homo sapiens
gcgtgtacatgttat

SEQ ID NO: 203266 - DNA, 15 bp, Homo sapiens
agcgtgtacatgtta

SEQ ID NO: 203267 - DNA, 15 bp, Homo sapiens
cagcgtgtacatgtt

SEQ ID NO: 203268 - DNA, 15 bp, Homo sapiens
acagcgtgtacatgt

SEQ ID NO: 203269 - DNA, 15 bp, Homo sapiens
cacagcgtgtacatg

SEQ ID NO: 203270 - DNA, 15 bp, Homo sapiens
acacagcgtgtacat

SEQ ID NO: 203271 - DNA, 15 bp, Homo sapiens
cacacagcgtgtaca

SEQ ID NO: 203272 - DNA, 15 bp, Homo sapiens
acacacagcgtgtac

SEQ ID NO: 203273 - DNA, 15 bp, Homo sapiens
tacacacagcgtgta

SEQ ID NO: 203274 - DNA, 15 bp, Homo sapiens
atacacacagcgtgt

SEQ ID NO: 203275 - DNA, 15 bp, Homo sapiens
catacacacagcgtg

SEQ ID NO: 203276 - DNA, 15 bp, Homo sapiens
acatacacacagcgt

SEQ ID NO: 203277 - DNA, 15 bp, Homo sapiens
cacatacacacagcg

SEQ ID NO: 203278 - DNA, 15 bp, Homo sapiens
acacatacacacagc

SEQ ID NO: 203279 - DNA, 15 bp, Homo sapiens
cacacatacacacag

SEQ ID NO: 203280 - DNA, 15 bp, Homo sapiens
gtgcacacacacaca

SEQ ID NO: 203281 - DNA, 15 bp, Homo sapiens
cgtgcacacacacac

SEQ ID NO: 203282 - DNA, 15 bp, Homo sapiens
gcgtgcacacacaca

SEQ ID NO: 203283 - DNA, 15 bp, Homo sapiens
cgcgtgcacacacac

SEQ ID NO: 203284 - DNA, 15 bp, Homo sapiens
acgcgtgcacacaca

SEQ ID NO: 203285 - DNA, 15 bp, Homo sapiens
cacgcgtgcacacac

SEQ ID NO: 203286 - DNA, 15 bp, Homo sapiens
acacgcgtgcacaca

SEQ ID NO: 203287 - DNA, 15 bp, Homo sapiens
cacacgcgtgcacac

SEQ ID NO: 203288 - DNA, 15 bp, Homo sapiens
acacacgcgtgcaca

SEQ ID NO: 203289 - DNA, 15 bp, Homo sapiens
tacacacgcgtgcac

SEQ ID NO: 203290 - DNA, 15 bp, Homo sapiens
atacacacgcgtgca

SEQ ID NO: 203291 - DNA, 15 bp, Homo sapiens
catacacacgcgtgc

SEQ ID NO: 203292 - DNA, 15 bp, Homo sapiens
acatacacacgcgtg

SEQ ID NO: 203293 - DNA, 15 bp, Homo sapiens
cacatacacacgcgt

SEQ ID NO: 203294 - DNA, 15 bp, Homo sapiens
gcacatacacacgcg

SEQ ID NO: 203295 - DNA, 15 bp, Homo sapiens
tgcacatacacacgc

SEQ ID NO: 203296 - DNA, 15 bp, Homo sapiens
atgcacatacacacg

SEQ ID NO: 203297 - DNA, 15 bp, Homo sapiens
tatgcacatacacac

SEQ ID NO: 203298 - DNA, 15 bp, Homo sapiens
gtatgcacatacaca

SEQ ID NO: 203299 - DNA, 15 bp, Homo sapiens
tgtatgcacatacac

SEQ ID NO: 203300 - DNA, 15 bp, Homo sapiens
gtgtatgcacataca

SEQ ID NO: 203301 - DNA, 15 bp, Homo sapiens
tgtgtatgcacatac

SEQ ID NO: 203302 - DNA, 15 bp, Homo sapiens
atgtgtatgcacata

SEQ ID NO: 203303 - DNA, 15 bp, Homo sapiens
catgtgtatgcacat

SEQ ID NO: 203304 - DNA, 15 bp, Homo sapiens
acatgtgtatgcaca

SEQ ID NO: 203305 - DNA, 15 bp, Homo sapiens
cacatgtgtatgcac

SEQ ID NO: 203306 - DNA, 15 bp, Homo sapiens
acacatgtgtatgca

SEQ ID NO: 203307 - DNA, 15 bp, Homo sapiens
tacacatgtgtatgc

SEQ ID NO: 203308 - DNA, 15 bp, Homo sapiens
atacacatgtgtatg

SEQ ID NO: 203309 - DNA, 15 bp, Homo sapiens
gatacacatgtgtat

SEQ ID NO: 203310 - DNA, 15 bp, Homo sapiens
agatacacatgtgta

SEQ ID NO: 203311 - DNA, 15 bp, Homo sapiens
aagatacacatgtgt

SEQ ID NO: 203312 - DNA, 15 bp, Homo sapiens
aaagatacacatgtg

SEQ ID NO: 203313 - DNA, 15 bp, Homo sapiens
aaaagatacacatgt

SEQ ID NO: 203314 - DNA, 15 bp, Homo sapiens
aaaaagatacacatg

SEQ ID NO: 203315 - DNA, 15 bp, Homo sapiens
aaaaaagatacacat

SEQ ID NO: 203316 - DNA, 15 bp, Homo sapiens
aaaaaaagatacaca

SEQ ID NO: 203317 - DNA, 15 bp, Homo sapiens
aaaaaaaagatacac

SEQ ID NO: 203318 - DNA, 15 bp, Homo sapiens
aaaaaaaaagataca

SEQ ID NO: 203319 - DNA, 15 bp, Homo sapiens
aaaaaaaaaagatac

SEQ ID NO: 203320 - DNA, 15 bp, Homo sapiens
aaaaaaaaaaagata

SEQ ID NO: 203321 - DNA, 15 bp, Homo sapiens
aaaaaaaaaaaagat

SEQ ID NO: 203322 - DNA, 15 bp, Homo sapiens
tgagactccatctca

SEQ ID NO: 203323 - DNA, 15 bp, Homo sapiens
gtgagactccatctc

SEQ ID NO: 203324 - DNA, 15 bp, Homo sapiens
agtgagactccatct

SEQ ID NO: 203325 - DNA, 15 bp, Homo sapiens
gagtgagactccatc

SEQ ID NO: 203326 - DNA, 15 bp, Homo sapiens
agagtgagactccat

SEQ ID NO: 203327 - DNA, 15 bp, Homo sapiens
cagagtgagactcca

SEQ ID NO: 203328 - DNA, 15 bp, Homo sapiens
acagagtgagactcc

SEQ ID NO: 203329 - DNA, 15 bp, Homo sapiens
aacagagtgagactc

SEQ ID NO: 203330 - DNA, 15 bp, Homo sapiens
tgagatcatgccact

SEQ ID NO: 203331 - DNA, 15 bp, Homo sapiens
ctgagatcatgccac

SEQ ID NO: 203332 - DNA, 15 bp, Homo sapiens
gctgagatcatgcca

SEQ ID NO: 203333 - DNA, 15 bp, Homo sapiens
agctgagatcatgcc

SEQ ID NO: 203334 - DNA, 15 bp, Homo sapiens
gagctgagatcatgc

SEQ ID NO: 203335 - DNA, 15 bp, Homo sapiens
tgagctgagatcatg

SEQ ID NO: 203336 - DNA, 15 bp, Homo sapiens
gtgagctgagatcat

SEQ ID NO: 203337 - DNA, 15 bp, Homo sapiens
agtgagctgagatca

SEQ ID NO: 203338 - DNA, 15 bp, Homo sapiens
cagtgagctgagatc

SEQ ID NO: 203339 - DNA, 15 bp, Homo sapiens
ccagtgagctgagat

SEQ ID NO: 203340 - DNA, 15 bp, Homo sapiens
tccagtgagctgaga

SEQ ID NO: 203341 - DNA, 15 bp, Homo sapiens
ttccagtgagctgag

SEQ ID NO: 203342 - DNA, 15 bp, Homo sapiens
gttccagtgagctga

SEQ ID NO: 203343 - DNA, 15 bp, Homo sapiens
ggttccagtgagctg

SEQ ID NO: 203344 - DNA, 15 bp, Homo sapiens
aggttccagtgagct

SEQ ID NO: 203345 - DNA, 15 bp, Homo sapiens
gaggttccagtgagc

SEQ ID NO: 203346 - DNA, 15 bp, Homo sapiens
ggaggttccagtgag

SEQ ID NO: 203347 - DNA, 15 bp, Homo sapiens
gggaggttccagtga

SEQ ID NO: 203348 - DNA, 15 bp, Homo sapiens
ggggaggttccagtg

SEQ ID NO: 203349 - DNA, 15 bp, Homo sapiens
gggggaggttccagt

SEQ ID NO: 203350 - DNA, 15 bp, Homo sapiens
agggggaggttccag

SEQ ID NO: 203351 - DNA, 15 bp, Homo sapiens
aagggggaggttcca

SEQ ID NO: 203352 - DNA, 15 bp, Homo sapiens
gaagggggaggttcc

SEQ ID NO: 203353 - DNA, 15 bp, Homo sapiens
ggaagggggaggttc

SEQ ID NO: 203354 - DNA, 15 bp, Homo sapiens
tggaagggggaggtt

SEQ ID NO: 203355 - DNA, 15 bp, Homo sapiens
ctggaagggggaggt

SEQ ID NO: 203356 - DNA, 15 bp, Homo sapiens
cctggaagggggagg

SEQ ID NO: 203357 - DNA, 15 bp, Homo sapiens
acctggaagggggag

SEQ ID NO: 203358 - DNA, 15 bp, Homo sapiens
aacctggaaggggga

SEQ ID NO: 203359 - DNA, 15 bp, Homo sapiens
gaacctggaaggggg

SEQ ID NO: 203360 - DNA, 15 bp, Homo sapiens
cgaacctggaagggg

SEQ ID NO: 203361 - DNA, 15 bp, Homo sapiens
tcgaacctggaaggg

SEQ ID NO: 203362 - DNA, 15 bp, Homo sapiens
ctcgaacctggaagg

SEQ ID NO: 203363 - DNA, 15 bp, Homo sapiens
tctcgaacctggaag

SEQ ID NO: 203364 - DNA, 15 bp, Homo sapiens
atctcgaacctggaa

SEQ ID NO: 203365 - DNA, 15 bp, Homo sapiens
aatctcgaacctgga

SEQ ID NO: 203366 - DNA, 15 bp, Homo sapiens
gaatctcgaacctgg

SEQ ID NO: 203367 - DNA, 15 bp, Homo sapiens
agaatctcgaacctg

SEQ ID NO: 203368 - DNA, 15 bp, Homo sapiens
gagaatctcgaacct

SEQ ID NO: 203369 - DNA, 15 bp, Homo sapiens
ggagaatctcgaacc

SEQ ID NO: 203370 - DNA, 15 bp, Homo sapiens
aggagaatctcgaac

SEQ ID NO: 203371 - DNA, 15 bp, Homo sapiens
caggagaatctcgaa

SEQ ID NO: 203372 - DNA, 15 bp, Homo sapiens
gcaggagaatctcga

SEQ ID NO: 203373 - DNA, 15 bp, Homo sapiens
ggcaggagaatctcg

SEQ ID NO: 203374 - DNA, 15 bp, Homo sapiens
aggcaggagaatctc

SEQ ID NO: 203375 - DNA, 15 bp, Homo sapiens
aaggcaggagaatct

SEQ ID NO: 203376 - DNA, 15 bp, Homo sapiens
gggaggctaaggcag

SEQ ID NO: 203377 - DNA, 15 bp, Homo sapiens
tgggaggctaaggca

SEQ ID NO: 203378 - DNA, 15 bp, Homo sapiens
ttgggaggctaaggc

SEQ ID NO: 203379 - DNA, 15 bp, Homo sapiens
cttgggaggctaagg

SEQ ID NO: 203380 - DNA, 15 bp, Homo sapiens
acttgggaggctaag

SEQ ID NO: 203381 - DNA, 15 bp, Homo sapiens
tacttgggaggctaa

SEQ ID NO: 203382 - DNA, 15 bp, Homo sapiens
ctacttgggaggcta

SEQ ID NO: 203383 - DNA, 15 bp, Homo sapiens
atcccagctacttgg

SEQ ID NO: 203384 - DNA, 15 bp, Homo sapiens
aatcccagctacttg

SEQ ID NO: 203385 - DNA, 15 bp, Homo sapiens
taatcccagctactt

SEQ ID NO: 203386 - DNA, 15 bp, Homo sapiens
gcgcctgtaatccca

SEQ ID NO: 203387 - DNA, 15 bp, Homo sapiens
ggcgcctgtaatccc

SEQ ID NO: 203388 - DNA, 15 bp, Homo sapiens
gggcgcctgtaatcc

SEQ ID NO: 203389 - DNA, 15 bp, Homo sapiens
cgggcgcctgtaatc

SEQ ID NO: 203390 - DNA, 15 bp, Homo sapiens
gcgggcgcctgtaat

SEQ ID NO: 203391 - DNA, 15 bp, Homo sapiens
ggcgggcgcctgtaa

SEQ ID NO: 203392 - DNA, 15 bp, Homo sapiens
agtggcgggcgcctg

SEQ ID NO: 203393 - DNA, 15 bp, Homo sapiens
tagtggcgggcgcct

SEQ ID NO: 203394 - DNA, 15 bp, Homo sapiens
gtagtggcgggcgcc

SEQ ID NO: 203395 - DNA, 15 bp, Homo sapiens
ggtagtggcgggcgc

SEQ ID NO: 203396 - DNA, 15 bp, Homo sapiens
aggtagtggcgggcg

SEQ ID NO: 203397 - DNA, 15 bp, Homo sapiens
gaggtagtggcgggc

SEQ ID NO: 203398 - DNA, 15 bp, Homo sapiens
ggaggtagtggcggg

SEQ ID NO: 203399 - DNA, 15 bp, Homo sapiens
cggaggtagtggcgg

SEQ ID NO: 203400 - DNA, 15 bp, Homo sapiens
ccggaggtagtggcg

SEQ ID NO: 203401 - DNA, 15 bp, Homo sapiens
gccggaggtagtggc

SEQ ID NO: 203402 - DNA, 15 bp, Homo sapiens
agccggaggtagtgg

SEQ ID NO: 203403 - DNA, 15 bp, Homo sapiens
tagccggaggtagtg

SEQ ID NO: 203404 - DNA, 15 bp, Homo sapiens
atagccggaggtagt

SEQ ID NO: 203405 - DNA, 15 bp, Homo sapiens
aatagccggaggtag

SEQ ID NO: 203406 - DNA, 15 bp, Homo sapiens
aaatagccggaggta

SEQ ID NO: 203407 - DNA, 15 bp, Homo sapiens
aaaatagccggaggt

SEQ ID NO: 203408 - DNA, 15 bp, Homo sapiens
aaaaatagccggagg

SEQ ID NO: 203409 - DNA, 15 bp, Homo sapiens
aaaaaatagccggag

SEQ ID NO: 203410 - DNA, 15 bp, Homo sapiens
aaaaaaatagccgga

SEQ ID NO: 203411 - DNA, 15 bp, Homo sapiens
aaaaaaaatagccgg

SEQ ID NO: 203412 - DNA, 15 bp, Homo sapiens
aaaaaaaaatagccg

SEQ ID NO: 203413 - DNA, 15 bp, Homo sapiens
aaaaaaaaaatagcc

SEQ ID NO: 203414 - DNA, 15 bp, Homo sapiens
tcctgtctctactaa

SEQ ID NO: 203415 - DNA, 15 bp, Homo sapiens
atcctgtctctacta

SEQ ID NO: 203416 - DNA, 15 bp, Homo sapiens
aatcctgtctctact

SEQ ID NO: 203417 - DNA, 15 bp, Homo sapiens
aaatcctgtctctac

SEQ ID NO: 203418 - DNA, 15 bp, Homo sapiens
gaaatcctgtctcta

SEQ ID NO: 203419 - DNA, 15 bp, Homo sapiens
tgaaatcctgtctct

SEQ ID NO: 203420 - DNA, 15 bp, Homo sapiens
gtgaaatcctgtctc

SEQ ID NO: 203421 - DNA, 15 bp, Homo sapiens
ggtgaaatcctgtct

SEQ ID NO: 203422 - DNA, 15 bp, Homo sapiens
tggtgaaatcctgtc

SEQ ID NO: 203423 - DNA, 15 bp, Homo sapiens
atggtgaaatcctgt

SEQ ID NO: 203424 - DNA, 15 bp, Homo sapiens
catggtgaaatcctg

SEQ ID NO: 203425 - DNA, 15 bp, Homo sapiens
acatggtgaaatcct

SEQ ID NO: 203426 - DNA, 15 bp, Homo sapiens
aacatggtgaaatcc

SEQ ID NO: 203427 - DNA, 15 bp, Homo sapiens
caacatggtgaaatc

SEQ ID NO: 203428 - DNA, 15 bp, Homo sapiens
ccaacatggtgaaat

SEQ ID NO: 203429 - DNA, 15 bp, Homo sapiens
ggtcaggagttcgag

SEQ ID NO: 203430 - DNA, 15 bp, Homo sapiens
aggtcaggagttcga

SEQ ID NO: 203431 - DNA, 15 bp, Homo sapiens
tgggcagatcacctg

SEQ ID NO: 203432 - DNA, 15 bp, Homo sapiens
gtgggcagatcacct

SEQ ID NO: 203433 - DNA, 15 bp, Homo sapiens
ggtgggcagatcacc

SEQ ID NO: 203434 - DNA, 15 bp, Homo sapiens
aggtgggcagatcac

SEQ ID NO: 203435 - DNA, 15 bp, Homo sapiens
gaggtgggcagatca

SEQ ID NO: 203436 - DNA, 15 bp, Homo sapiens
ggaggtgggcagatc

SEQ ID NO: 203437 - DNA, 15 bp, Homo sapiens
cggaggtgggcagat

SEQ ID NO: 203438 - DNA, 15 bp, Homo sapiens
gcggaggtgggcaga

SEQ ID NO: 203439 - DNA, 15 bp, Homo sapiens
ggcggaggtgggcag

SEQ ID NO: 203440 - DNA, 15 bp, Homo sapiens
aggcggaggtgggca

SEQ ID NO: 203441 - DNA, 15 bp, Homo sapiens
gaggcggaggtgggc

SEQ ID NO: 203442 - DNA, 15 bp, Homo sapiens
ggaggcggaggtggg

SEQ ID NO: 203443 - DNA, 15 bp, Homo sapiens
gggaggcggaggtgg

SEQ ID NO: 203444 - DNA, 15 bp, Homo sapiens
tgggaggcggaggtg

SEQ ID NO: 203445 - DNA, 15 bp, Homo sapiens
ttgggaggcggaggt

SEQ ID NO: 203446 - DNA, 15 bp, Homo sapiens
tttgggaggcggagg

SEQ ID NO: 203447 - DNA, 15 bp, Homo sapiens
ctttgggaggcggag

SEQ ID NO: 203448 - DNA, 15 bp, Homo sapiens
actttgggaggcgga

SEQ ID NO: 203449 - DNA, 15 bp, Homo sapiens
cactttgggaggcgg

SEQ ID NO: 203450 - DNA, 15 bp, Homo sapiens
gcactttgggaggcg

SEQ ID NO: 203451 - DNA, 15 bp, Homo sapiens
ggtggctcacacctg

SEQ ID NO: 203452 - DNA, 15 bp, Homo sapiens
cggtggctcacacct

SEQ ID NO: 203453 - DNA, 15 bp, Homo sapiens
acggtggctcacacc

SEQ ID NO: 203454 - DNA, 15 bp, Homo sapiens
cacggtggctcacac

SEQ ID NO: 203455 - DNA, 15 bp, Homo sapiens
gcacggtggctcaca

SEQ ID NO: 203456 - DNA, 15 bp, Homo sapiens
agccgggcacggtgg

SEQ ID NO: 203457 - DNA, 15 bp, Homo sapiens
cagccgggcacggtg

SEQ ID NO: 203458 - DNA, 15 bp, Homo sapiens
gcagccgggcacggt

SEQ ID NO: 203459 - DNA, 15 bp, Homo sapiens
tgcagccgggcacgg

SEQ ID NO: 203460 - DNA, 15 bp, Homo sapiens
gtgcagccgggcacg

SEQ ID NO: 203461 - DNA, 15 bp, Homo sapiens
cgtgcagccgggcac

SEQ ID NO: 203462 - DNA, 15 bp, Homo sapiens
acgtgcagccgggca

SEQ ID NO: 203463 - DNA, 15 bp, Homo sapiens
cacgtgcagccgggc

SEQ ID NO: 203464 - DNA, 15 bp, Homo sapiens
acacgtgcagccggg

SEQ ID NO: 203465 - DNA, 15 bp, Homo sapiens
cacacgtgcagccgg

SEQ ID NO: 203466 - DNA, 15 bp, Homo sapiens
acacacgtgcagccg

SEQ ID NO: 203467 - DNA, 15 bp, Homo sapiens
cacacacgtgcagcc

SEQ ID NO: 203468 - DNA, 15 bp, Homo sapiens
acacacacgtgcagc

SEQ ID NO: 203469 - DNA, 15 bp, Homo sapiens
gacacacacgtgcag

SEQ ID NO: 203470 - DNA, 15 bp, Homo sapiens
agacacacacgtgca

SEQ ID NO: 203471 - DNA, 15 bp, Homo sapiens
aagacacacacgtgc

SEQ ID NO: 203472 - DNA, 15 bp, Homo sapiens
aaagacacacacgtg

SEQ ID NO: 203473 - DNA, 15 bp, Homo sapiens
taaagacacacacgt

SEQ ID NO: 203474 - DNA, 15 bp, Homo sapiens
ataaagacacacacg

SEQ ID NO: 203475 - DNA, 15 bp, Homo sapiens
cataaagacacacac

SEQ ID NO: 203476 - DNA, 15 bp, Homo sapiens
acataaagacacaca

SEQ ID NO: 203477 - DNA, 15 bp, Homo sapiens
cacataaagacacac

SEQ ID NO: 203478 - DNA, 15 bp, Homo sapiens
acacataaagacaca

SEQ ID NO: 203479 - DNA, 15 bp, Homo sapiens
aacacataaagacac

SEQ ID NO: 203480 - DNA, 15 bp, Homo sapiens
gaacacataaagaca

SEQ ID NO: 203481 - DNA, 15 bp, Homo sapiens
tgaacacataaagac

SEQ ID NO: 203482 - DNA, 15 bp, Homo sapiens
gtgaacacataaaga

SEQ ID NO: 203483 - DNA, 15 bp, Homo sapiens
ggtgaacacataaag

SEQ ID NO: 203484 - DNA, 15 bp, Homo sapiens
gggtgaacacataaa

SEQ ID NO: 203485 - DNA, 15 bp, Homo sapiens
agggtgaacacataa

SEQ ID NO: 203486 - DNA, 15 bp, Homo sapiens
tagggtgaacacata

SEQ ID NO: 203487 - DNA, 15 bp, Homo sapiens
atagggtgaacacat

SEQ ID NO: 203488 - DNA, 15 bp, Homo sapiens
catagggtgaacaca

SEQ ID NO: 203489 - DNA, 15 bp, Homo sapiens
ccatagggtgaacac

SEQ ID NO: 203490 - DNA, 15 bp, Homo sapiens
cccatagggtgaaca

SEQ ID NO: 203491 - DNA, 15 bp, Homo sapiens
ccccatagggtgaac

SEQ ID NO: 203492 - DNA, 15 bp, Homo sapiens
tccccatagggtgaa

SEQ ID NO: 203493 - DNA, 15 bp, Homo sapiens
ctccccatagggtga

SEQ ID NO: 203494 - DNA, 15 bp, Homo sapiens
tctccccatagggtg

SEQ ID NO: 203495 - DNA, 15 bp, Homo sapiens
ctctccccatagggt

SEQ ID NO: 203496 - DNA, 15 bp, Homo sapiens
tctctccccataggg

SEQ ID NO: 203497 - DNA, 15 bp, Homo sapiens
ttctctccccatagg

SEQ ID NO: 203498 - DNA, 15 bp, Homo sapiens
tttctctccccatag

SEQ ID NO: 203499 - DNA, 15 bp, Homo sapiens
ttttctctccccata

SEQ ID NO: 203500 - DNA, 15 bp, Homo sapiens
cttttctctccccat

SEQ ID NO: 203501 - DNA, 15 bp, Homo sapiens
ccttttctctcccca

SEQ ID NO: 203502 - DNA, 15 bp, Homo sapiens
accttttctctcccc

SEQ ID NO: 203503 - DNA, 15 bp, Homo sapiens
aaccttttctctccc

SEQ ID NO: 203504 - DNA, 15 bp, Homo sapiens
gaaccttttctctcc

SEQ ID NO: 203505 - DNA, 15 bp, Homo sapiens
tgaaccttttctctc

SEQ ID NO: 203506 - DNA, 15 bp, Homo sapiens
atgaaccttttctct

SEQ ID NO: 203507 - DNA, 15 bp, Homo sapiens
catgaaccttttctc

SEQ ID NO: 203508 - DNA, 15 bp, Homo sapiens
tcatgaaccttttct

SEQ ID NO: 203509 - DNA, 15 bp, Homo sapiens
ttcatgaaccttttc

SEQ ID NO: 203510 - DNA, 15 bp, Homo sapiens
tttcatgaacctttt

SEQ ID NO: 203511 - DNA, 15 bp, Homo sapiens
ctttcatgaaccttt

SEQ ID NO: 203512 - DNA, 15 bp, Homo sapiens
actttcatgaacctt

SEQ ID NO: 203513 - DNA, 15 bp, Homo sapiens
aactttcatgaacct

SEQ ID NO: 203514 - DNA, 15 bp, Homo sapiens
caactttcatgaacc

SEQ ID NO: 203515 - DNA, 15 bp, Homo sapiens
tcaactttcatgaac

SEQ ID NO: 203516 - DNA, 15 bp, Homo sapiens
ctcaactttcatgaa

SEQ ID NO: 203517 - DNA, 15 bp, Homo sapiens
tctcaactttcatga

SEQ ID NO: 203518 - DNA, 15 bp, Homo sapiens
atctcaactttcatg

SEQ ID NO: 203519 - DNA, 15 bp, Homo sapiens
aatctcaactttcat

SEQ ID NO: 203520 - DNA, 15 bp, Homo sapiens
taatctcaactttca

SEQ ID NO: 203521 - DNA, 15 bp, Homo sapiens
gtaatctcaactttc

SEQ ID NO: 203522 - DNA, 15 bp, Homo sapiens
agtaatctcaacttt

SEQ ID NO: 203523 - DNA, 15 bp, Homo sapiens
cagtaatctcaactt

SEQ ID NO: 203524 - DNA, 15 bp, Homo sapiens
acagtaatctcaact

SEQ ID NO: 203525 - DNA, 15 bp, Homo sapiens
cacagtaatctcaac

SEQ ID NO: 203526 - DNA, 15 bp, Homo sapiens
ccacagtaatctcaa

SEQ ID NO: 203527 - DNA, 15 bp, Homo sapiens
cccacagtaatctca

SEQ ID NO: 203528 - DNA, 15 bp, Homo sapiens
acccacagtaatctc

SEQ ID NO: 203529 - DNA, 15 bp, Homo sapiens
tacccacagtaatct

SEQ ID NO: 203530 - DNA, 15 bp, Homo sapiens
ctacccacagtaatc

SEQ ID NO: 203531 - DNA, 15 bp, Homo sapiens
cctacccacagtaat

SEQ ID NO: 203532 - DNA, 15 bp, Homo sapiens
ccctacccacagtaa

SEQ ID NO: 203533 - DNA, 15 bp, Homo sapiens
accctacccacagta

SEQ ID NO: 203534 - DNA, 15 bp, Homo sapiens
aaccctacccacagt

SEQ ID NO: 203535 - DNA, 15 bp, Homo sapiens
caaccctacccacag

SEQ ID NO: 203536 - DNA, 15 bp, Homo sapiens
acaaccctacccaca

SEQ ID NO: 203537 - DNA, 15 bp, Homo sapiens
gacaaccctacccac

SEQ ID NO: 203538 - DNA, 15 bp, Homo sapiens
tgacaaccctaccca

SEQ ID NO: 203539 - DNA, 15 bp, Homo sapiens
ctgacaaccctaccc

SEQ ID NO: 203540 - DNA, 15 bp, Homo sapiens
cctgacaaccctacc

SEQ ID NO: 203541 - DNA, 15 bp, Homo sapiens
ccctgacaaccctac

SEQ ID NO: 203542 - DNA, 15 bp, Homo sapiens
tccctgacaacccta

SEQ ID NO: 203543 - DNA, 15 bp, Homo sapiens
ctccctgacaaccct

SEQ ID NO: 203544 - DNA, 15 bp, Homo sapiens
cctccctgacaaccc

SEQ ID NO: 203545 - DNA, 15 bp, Homo sapiens
ccctccctgacaacc

SEQ ID NO: 203546 - DNA, 15 bp, Homo sapiens
gccctccctgacaac

SEQ ID NO: 203547 - DNA, 15 bp, Homo sapiens
agccctccctgacaa

SEQ ID NO: 203548 - DNA, 15 bp, Homo sapiens
aagccctccctgaca

SEQ ID NO: 203549 - DNA, 15 bp, Homo sapiens
aaagccctccctgac

SEQ ID NO: 203550 - DNA, 15 bp, Homo sapiens
caaagccctccctga

SEQ ID NO: 203551 - DNA, 15 bp, Homo sapiens
gcaaagccctccctg

SEQ ID NO: 203552 - DNA, 15 bp, Homo sapiens
ggcaaagccctccct

SEQ ID NO: 203553 - DNA, 15 bp, Homo sapiens
cggcaaagccctccc

SEQ ID NO: 203554 - DNA, 15 bp, Homo sapiens
ccggcaaagccctcc

SEQ ID NO: 203555 - DNA, 15 bp, Homo sapiens
cccggcaaagccctc

SEQ ID NO: 203556 - DNA, 15 bp, Homo sapiens
tcccggcaaagccct

SEQ ID NO: 203557 - DNA, 15 bp, Homo sapiens
ctcccggcaaagccc

SEQ ID NO: 203558 - DNA, 15 bp, Homo sapiens
cctcccggcaaagcc

SEQ ID NO: 203559 - DNA, 15 bp, Homo sapiens
ccctcccggcaaagc

SEQ ID NO: 203560 - DNA, 15 bp, Homo sapiens
cccctcccggcaaag

SEQ ID NO: 203561 - DNA, 15 bp, Homo sapiens
ccccctcccggcaaa

SEQ ID NO: 203562 - DNA, 15 bp, Homo sapiens
tccccctcccggcaa

SEQ ID NO: 203563 - DNA, 15 bp, Homo sapiens
ttccccctcccggca

SEQ ID NO: 203564 - DNA, 15 bp, Homo sapiens
cttccccctcccggc

SEQ ID NO: 203565 - DNA, 15 bp, Homo sapiens
gcttccccctcccgg

SEQ ID NO: 203566 - DNA, 15 bp, Homo sapiens
agcttccccctcccg

SEQ ID NO: 203567 - DNA, 15 bp, Homo sapiens
cagcttccccctccc

SEQ ID NO: 203568 - DNA, 15 bp, Homo sapiens
gcagcttccccctcc

SEQ ID NO: 203569 - DNA, 15 bp, Homo sapiens
cgcagcttccccctc

SEQ ID NO: 203570 - DNA, 15 bp, Homo sapiens
gcgcagcttccccct

SEQ ID NO: 203571 - DNA, 15 bp, Homo sapiens
agcgcagcttccccc

SEQ ID NO: 203572 - DNA, 15 bp, Homo sapiens
tagcgcagcttcccc

SEQ ID NO: 203573 - DNA, 15 bp, Homo sapiens
ctagcgcagcttccc

SEQ ID NO: 203574 - DNA, 15 bp, Homo sapiens
cctagcgcagcttcc

SEQ ID NO: 203575 - DNA, 15 bp, Homo sapiens
gcctagcgcagcttc

SEQ ID NO: 203576 - DNA, 15 bp, Homo sapiens
tgcctagcgcagctt

SEQ ID NO: 203577 - DNA, 15 bp, Homo sapiens
ttgcctagcgcagct

SEQ ID NO: 203578 - DNA, 15 bp, Homo sapiens
cttgcctagcgcagc

SEQ ID NO: 203579 - DNA, 15 bp, Homo sapiens
gcttgcctagcgcag

SEQ ID NO: 203580 - DNA, 15 bp, Homo sapiens
agcttgcctagcgca

SEQ ID NO: 203581 - DNA, 15 bp, Homo sapiens
cagcttgcctagcgc

SEQ ID NO: 203582 - DNA, 15 bp, Homo sapiens
acagcttgcctagcg

SEQ ID NO: 203583 - DNA, 15 bp, Homo sapiens
cacagcttgcctagc

SEQ ID NO: 203584 - DNA, 15 bp, Homo sapiens
ccacagcttgcctag

SEQ ID NO: 203585 - DNA, 15 bp, Homo sapiens
gccacagcttgccta

SEQ ID NO: 203586 - DNA, 15 bp, Homo sapiens
agccacagcttgcct

SEQ ID NO: 203587 - DNA, 15 bp, Homo sapiens
gagccacagcttgcc

SEQ ID NO: 203588 - DNA, 15 bp, Homo sapiens
ggagccacagcttgc

SEQ ID NO: 203589 - DNA, 15 bp, Homo sapiens
tggagccacagcttg

SEQ ID NO: 203590 - DNA, 15 bp, Homo sapiens
ctggagccacagctt

SEQ ID NO: 203591 - DNA, 15 bp, Homo sapiens
tctggagccacagct

SEQ ID NO: 203592 - DNA, 15 bp, Homo sapiens
ctctggagccacagc

SEQ ID NO: 203593 - DNA, 15 bp, Homo sapiens
actctggagccacag

SEQ ID NO: 203594 - DNA, 15 bp, Homo sapiens
gactctggagccaca

SEQ ID NO: 203595 - DNA, 15 bp, Homo sapiens
agactctggagccac

SEQ ID NO: 203596 - DNA, 15 bp, Homo sapiens
aagactctggagcca

SEQ ID NO: 203597 - DNA, 15 bp, Homo sapiens
caagactctggagcc

SEQ ID NO: 203598 - DNA, 15 bp, Homo sapiens
ccaagactctggagc

SEQ ID NO: 203599 - DNA, 15 bp, Homo sapiens
tccaagactctggag

SEQ ID NO: 203600 - DNA, 15 bp, Homo sapiens
ctccaagactctgga

SEQ ID NO: 203601 - DNA, 15 bp, Homo sapiens
cctccaagactctgg

SEQ ID NO: 203602 - DNA, 15 bp, Homo sapiens
gcctccaagactctg

SEQ ID NO: 203603 - DNA, 15 bp, Homo sapiens
cgcctccaagactct

SEQ ID NO: 203604 - DNA, 15 bp, Homo sapiens
gcgcctccaagactc

SEQ ID NO: 203605 - DNA, 15 bp, Homo sapiens
ggcgcctccaagact

SEQ ID NO: 203606 - DNA, 15 bp, Homo sapiens
aggcgcctccaagac

SEQ ID NO: 203607 - DNA, 15 bp, Homo sapiens
caggcgcctccaaga

SEQ ID NO: 203608 - DNA, 15 bp, Homo sapiens
acaggcgcctccaag

SEQ ID NO: 203609 - DNA, 15 bp, Homo sapiens
tacaggcgcctccaa

SEQ ID NO: 203610 - DNA, 15 bp, Homo sapiens
ttacaggcgcctcca

SEQ ID NO: 203611 - DNA, 15 bp, Homo sapiens
gttacaggcgcctcc

SEQ ID NO: 203612 - DNA, 15 bp, Homo sapiens
tgttacaggcgcctc

SEQ ID NO: 203613 - DNA, 15 bp, Homo sapiens
ctgttacaggcgcct

SEQ ID NO: 203614 - DNA, 15 bp, Homo sapiens
actgttacaggcgcc

SEQ ID NO: 203615 - DNA, 15 bp, Homo sapiens
gactgttacaggcgc

SEQ ID NO: 203616 - DNA, 15 bp, Homo sapiens
ggactgttacaggcg

SEQ ID NO: 203617 - DNA, 15 bp, Homo sapiens
gggactgttacaggc

SEQ ID NO: 203618 - DNA, 15 bp, Homo sapiens
agggactgttacagg

SEQ ID NO: 203619 - DNA, 15 bp, Homo sapiens
cagggactgttacag

SEQ ID NO: 203620 - DNA, 15 bp, Homo sapiens
gcagggactgttaca

SEQ ID NO: 203621 - DNA, 15 bp, Homo sapiens
cgcagggactgttac

SEQ ID NO: 203622 - DNA, 15 bp, Homo sapiens
ccgcagggactgtta

SEQ ID NO: 203623 - DNA, 15 bp, Homo sapiens
accgcagggactgtt

SEQ ID NO: 203624 - DNA, 15 bp, Homo sapiens
aaccgcagggactgt

SEQ ID NO: 203625 - DNA, 15 bp, Homo sapiens
aaaccgcagggactg

SEQ ID NO: 203626 - DNA, 15 bp, Homo sapiens
gaaaccgcagggact

SEQ ID NO: 203627 - DNA, 15 bp, Homo sapiens
tgaaaccgcagggac

SEQ ID NO: 203628 - DNA, 15 bp, Homo sapiens
ttgaaaccgcaggga

SEQ ID NO: 203629 - DNA, 15 bp, Homo sapiens
tttgaaaccgcaggg

SEQ ID NO: 203630 - DNA, 15 bp, Homo sapiens
ttttgaaaccgcagg

SEQ ID NO: 203631 - DNA, 15 bp, Homo sapiens
cttttgaaaccgcag

SEQ ID NO: 203632 - DNA, 15 bp, Homo sapiens
tcttttgaaaccgca

SEQ ID NO: 203633 - DNA, 15 bp, Homo sapiens
ttcttttgaaaccgc

SEQ ID NO: 203634 - DNA, 15 bp, Homo sapiens
attcttttgaaaccg

SEQ ID NO: 203635 - DNA, 15 bp, Homo sapiens
aattcttttgaaacc

SEQ ID NO: 203636 - DNA, 15 bp, Homo sapiens
gaattcttttgaaac

SEQ ID NO: 203637 - DNA, 15 bp, Homo sapiens
tgaattcttttgaaa

SEQ ID NO: 203638 - DNA, 15 bp, Homo sapiens
ctgaattcttttgaa

SEQ ID NO: 203639 - DNA, 15 bp, Homo sapiens
tctgaattcttttga

SEQ ID NO: 203640 - DNA, 15 bp, Homo sapiens
ctctgaattcttttg

SEQ ID NO: 203641 - DNA, 15 bp, Homo sapiens
tctctgaattctttt

SEQ ID NO: 203642 - DNA, 15 bp, Homo sapiens
ctctctgaattcttt

SEQ ID NO: 203643 - DNA, 15 bp, Homo sapiens
cctctctgaattctt

SEQ ID NO: 203644 - DNA, 15 bp, Homo sapiens
ccctctctgaattct

SEQ ID NO: 203645 - DNA, 15 bp, Homo sapiens
cccctctctgaattc

SEQ ID NO: 203646 - DNA, 15 bp, Homo sapiens
tcccctctctgaatt

SEQ ID NO: 203647 - DNA, 15 bp, Homo sapiens
ctcccctctctgaat

SEQ ID NO: 203648 - DNA, 15 bp, Homo sapiens
gctcccctctctgaa

SEQ ID NO: 203649 - DNA, 15 bp, Homo sapiens
ggctcccctctctga

SEQ ID NO: 203650 - DNA, 15 bp, Homo sapiens
tggctcccctctctg

SEQ ID NO: 203651 - DNA, 15 bp, Homo sapiens
atggctcccctctct

SEQ ID NO: 203652 - DNA, 15 bp, Homo sapiens
tatggctcccctctc

SEQ ID NO: 203653 - DNA, 15 bp, Homo sapiens
ctatggctcccctct

SEQ ID NO: 203654 - DNA, 15 bp, Homo sapiens
gctatggctcccctc

SEQ ID NO: 203655 - DNA, 15 bp, Homo sapiens
ggctatggctcccct

SEQ ID NO: 203656 - DNA, 15 bp, Homo sapiens
aggctatggctcccc

SEQ ID NO: 203657 - DNA, 15 bp, Homo sapiens
caggctatggctccc

SEQ ID NO: 203658 - DNA, 15 bp, Homo sapiens
ccaggctatggctcc

SEQ ID NO: 203659 - DNA, 15 bp, Homo sapiens
accaggctatggctc

SEQ ID NO: 203660 - DNA, 15 bp, Homo sapiens
gaccaggctatggct

SEQ ID NO: 203661 - DNA, 15 bp, Homo sapiens
agaccaggctatggc

SEQ ID NO: 203662 - DNA, 15 bp, Homo sapiens
gagaccaggctatgg

SEQ ID NO: 203663 - DNA, 15 bp, Homo sapiens
ggagaccaggctatg

SEQ ID NO: 203664 - DNA, 15 bp, Homo sapiens
tggagaccaggctat

SEQ ID NO: 203665 - DNA, 15 bp, Homo sapiens
ttggagaccaggcta

SEQ ID NO: 203666 - DNA, 15 bp, Homo sapiens
tttggagaccaggct

SEQ ID NO: 203667 - DNA, 15 bp, Homo sapiens
atttggagaccaggc

SEQ ID NO: 203668 - DNA, 15 bp, Homo sapiens
catttggagaccagg

SEQ ID NO: 203669 - DNA, 15 bp, Homo sapiens
acatttggagaccag

SEQ ID NO: 203670 - DNA, 15 bp, Homo sapiens
cacatttggagacca

SEQ ID NO: 203671 - DNA, 15 bp, Homo sapiens
gcacatttggagacc

SEQ ID NO: 203672 - DNA, 15 bp, Homo sapiens
tgcacatttggagac

SEQ ID NO: 203673 - DNA, 15 bp, Homo sapiens
ctgcacatttggaga

SEQ ID NO: 203674 - DNA, 15 bp, Homo sapiens
gctgcacatttggag

SEQ ID NO: 203675 - DNA, 15 bp, Homo sapiens
tgctgcacatttgga

SEQ ID NO: 203676 - DNA, 15 bp, Homo sapiens
gtgctgcacatttgg

SEQ ID NO: 203677 - DNA, 15 bp, Homo sapiens
ggtgctgcacatttg

SEQ ID NO: 203678 - DNA, 15 bp, Homo sapiens
aggtgctgcacattt

SEQ ID NO: 203679 - DNA, 15 bp, Homo sapiens
aaggtgctgcacatt

SEQ ID NO: 203680 - DNA, 15 bp, Homo sapiens
gaaggtgctgcacat

SEQ ID NO: 203681 - DNA, 15 bp, Homo sapiens
agaaggtgctgcaca

SEQ ID NO: 203682 - DNA, 15 bp, Homo sapiens
cagaaggtgctgcac

SEQ ID NO: 203683 - DNA, 15 bp, Homo sapiens
ccagaaggtgctgca

SEQ ID NO: 203684 - DNA, 15 bp, Homo sapiens
cccagaaggtgctgc

SEQ ID NO: 203685 - DNA, 15 bp, Homo sapiens
gcccagaaggtgctg

SEQ ID NO: 203686 - DNA, 15 bp, Homo sapiens
tgcccagaaggtgct

SEQ ID NO: 203687 - DNA, 15 bp, Homo sapiens
ttgcccagaaggtgc

SEQ ID NO: 203688 - DNA, 15 bp, Homo sapiens
cttgcccagaaggtg

SEQ ID NO: 203689 - DNA, 15 bp, Homo sapiens
gcttgcccagaaggt

SEQ ID NO: 203690 - DNA, 15 bp, Homo sapiens
agcttgcccagaagg

SEQ ID NO: 203691 - DNA, 15 bp, Homo sapiens
aagcttgcccagaag

SEQ ID NO: 203692 - DNA, 15 bp, Homo sapiens
taagcttgcccagaa

SEQ ID NO: 203693 - DNA, 15 bp, Homo sapiens
ctaagcttgcccaga

SEQ ID NO: 203694 - DNA, 15 bp, Homo sapiens
tctaagcttgcccag

SEQ ID NO: 203695 - DNA, 15 bp, Homo sapiens
gtctaagcttgccca

SEQ ID NO: 203696 - DNA, 15 bp, Homo sapiens
agtctaagcttgccc

SEQ ID NO: 203697 - DNA, 15 bp, Homo sapiens
aagtctaagcttgcc

SEQ ID NO: 203698 - DNA, 15 bp, Homo sapiens
taagtctaagcttgc

SEQ ID NO: 203699 - DNA, 15 bp, Homo sapiens
ttaagtctaagcttg

SEQ ID NO: 203700 - DNA, 15 bp, Homo sapiens
tttaagtctaagctt

SEQ ID NO: 203701 - DNA, 15 bp, Homo sapiens
ctttaagtctaagct

SEQ ID NO: 203702 - DNA, 15 bp, Homo sapiens
cctttaagtctaagc

SEQ ID NO: 203703 - DNA, 15 bp, Homo sapiens
tcctttaagtctaag

SEQ ID NO: 203704 - DNA, 15 bp, Homo sapiens
atcctttaagtctaa

SEQ ID NO: 203705 - DNA, 15 bp, Homo sapiens
tatcctttaagtcta

SEQ ID NO: 203706 - DNA, 15 bp, Homo sapiens
atatcctttaagtct

SEQ ID NO: 203707 - DNA, 15 bp, Homo sapiens
gatatcctttaagtc

SEQ ID NO: 203708 - DNA, 15 bp, Homo sapiens
tgatatcctttaagt

SEQ ID NO: 203709 - DNA, 15 bp, Homo sapiens
atgatatcctttaag

SEQ ID NO: 203710 - DNA, 15 bp, Homo sapiens
aatgatatcctttaa

SEQ ID NO: 203711 - DNA, 15 bp, Homo sapiens
caatgatatccttta

SEQ ID NO: 203712 - DNA, 15 bp, Homo sapiens
acaatgatatccttt

SEQ ID NO: 203713 - DNA, 15 bp, Homo sapiens
tacaatgatatcctt

SEQ ID NO: 203714 - DNA, 15 bp, Homo sapiens
ctacaatgatatcct

SEQ ID NO: 203715 - DNA, 15 bp, Homo sapiens
tctacaatgatatcc

SEQ ID NO: 203716 - DNA, 15 bp, Homo sapiens
atctacaatgatatc

SEQ ID NO: 203717 - DNA, 15 bp, Homo sapiens
tatctacaatgatat

SEQ ID NO: 203718 - DNA, 15 bp, Homo sapiens
ttatctacaatgata

SEQ ID NO: 203719 - DNA, 15 bp, Homo sapiens
attatctacaatgat

SEQ ID NO: 203720 - DNA, 15 bp, Homo sapiens
cattatctacaatga

SEQ ID NO: 203721 - DNA, 15 bp, Homo sapiens
tcattatctacaatg

SEQ ID NO: 203722 - DNA, 15 bp, Homo sapiens
atcattatctacaat

SEQ ID NO: 203723 - DNA, 15 bp, Homo sapiens
aatcattatctacaa

SEQ ID NO: 203724 - DNA, 15 bp, Homo sapiens
aaatcattatctaca

SEQ ID NO: 203725 - DNA, 15 bp, Homo sapiens
caaatcattatctac

SEQ ID NO: 203726 - DNA, 15 bp, Homo sapiens
gcaaatcattatcta

SEQ ID NO: 203727 - DNA, 15 bp, Homo sapiens
agcaaatcattatct

SEQ ID NO: 203728 - DNA, 15 bp, Homo sapiens
aagcaaatcattatc

SEQ ID NO: 203729 - DNA, 15 bp, Homo sapiens
taagcaaatcattat

SEQ ID NO: 203730 - DNA, 15 bp, Homo sapiens
ataagcaaatcatta

SEQ ID NO: 203731 - DNA, 15 bp, Homo sapiens
aataagcaaatcatt

SEQ ID NO: 203732 - DNA, 15 bp, Homo sapiens
aaataagcaaatcat

SEQ ID NO: 203733 - DNA, 15 bp, Homo sapiens
gaaataagcaaatca

SEQ ID NO: 203734 - DNA, 15 bp, Homo sapiens
agaaataagcaaatc

SEQ ID NO: 203735 - DNA, 15 bp, Homo sapiens
aagaaataagcaaat

SEQ ID NO: 203736 - DNA, 15 bp, Homo sapiens
caagaaataagcaaa

SEQ ID NO: 203737 - DNA, 15 bp, Homo sapiens
gcaagaaataagcaa

SEQ ID NO: 203738 - DNA, 15 bp, Homo sapiens
agcaagaaataagca

SEQ ID NO: 203739 - DNA, 15 bp, Homo sapiens
gagcaagaaataagc

SEQ ID NO: 203740 - DNA, 15 bp, Homo sapiens
agagcaagaaataag

SEQ ID NO: 203741 - DNA, 15 bp, Homo sapiens
tagagcaagaaataa

SEQ ID NO: 203742 - DNA, 15 bp, Homo sapiens
ctagagcaagaaata

SEQ ID NO: 203743 - DNA, 15 bp, Homo sapiens
cctagagcaagaaat

SEQ ID NO: 203744 - DNA, 15 bp, Homo sapiens
tcctagagcaagaaa

SEQ ID NO: 203745 - DNA, 15 bp, Homo sapiens
atcctagagcaagaa

SEQ ID NO: 203746 - DNA, 15 bp, Homo sapiens
tatcctagagcaaga

SEQ ID NO: 203747 - DNA, 15 bp, Homo sapiens
atatcctagagcaag

SEQ ID NO: 203748 - DNA, 15 bp, Homo sapiens
catatcctagagcaa

SEQ ID NO: 203749 - DNA, 15 bp, Homo sapiens
ccatatcctagagca

SEQ ID NO: 203750 - DNA, 15 bp, Homo sapiens
cccatatcctagagc

SEQ ID NO: 203751 - DNA, 15 bp, Homo sapiens
ccccatatcctagag

SEQ ID NO: 203752 - DNA, 15 bp, Homo sapiens
tccccatatcctaga

SEQ ID NO: 203753 - DNA, 15 bp, Homo sapiens
gtccccatatcctag

SEQ ID NO: 203754 - DNA, 15 bp, Homo sapiens
agtccccatatccta

SEQ ID NO: 203755 - DNA, 15 bp, Homo sapiens
cagtccccatatcct

SEQ ID NO: 203756 - DNA, 15 bp, Homo sapiens
acagtccccatatcc

SEQ ID NO: 203757 - DNA, 15 bp, Homo sapiens
aacagtccccatatc

SEQ ID NO: 203758 - DNA, 15 bp, Homo sapiens
aaacagtccccatat

SEQ ID NO: 203759 - DNA, 15 bp, Homo sapiens
gaaacagtccccata

SEQ ID NO: 203760 - DNA, 15 bp, Homo sapiens
agaaacagtccccat

SEQ ID NO: 203761 - DNA, 15 bp, Homo sapiens
aagaaacagtcccca

SEQ ID NO: 203762 - DNA, 15 bp, Homo sapiens
aaagaaacagtcccc

SEQ ID NO: 203763 - DNA, 15 bp, Homo sapiens
aaaagaaacagtccc

SEQ ID NO: 203764 - DNA, 15 bp, Homo sapiens
aaaaagaaacagtcc

SEQ ID NO: 203765 - DNA, 15 bp, Homo sapiens
aaaaaagaaacagtc

SEQ ID NO: 203766 - DNA, 15 bp, Homo sapiens
aaaaaaagaaacagt

SEQ ID NO: 203767 - DNA, 15 bp, Homo sapiens
gaaaaaaagaaacag

SEQ ID NO: 203768 - DNA, 15 bp, Homo sapiens
agaaaaaaagaaaca

SEQ ID NO: 203769 - DNA, 15 bp, Homo sapiens
cagaaaaaaagaaac

SEQ ID NO: 203770 - DNA, 15 bp, Homo sapiens
ccagaaaaaaagaaa

SEQ ID NO: 203771 - DNA, 15 bp, Homo sapiens
cccagaaaaaaagaa

SEQ ID NO: 203772 - DNA, 15 bp, Homo sapiens
tcccagaaaaaaaga

SEQ ID NO: 203773 - DNA, 15 bp, Homo sapiens
atcccagaaaaaaag

SEQ ID NO: 203774 - DNA, 15 bp, Homo sapiens
catcccagaaaaaaa

SEQ ID NO: 203775 - DNA, 15 bp, Homo sapiens
gcatcccagaaaaaa

SEQ ID NO: 203776 - DNA, 15 bp, Homo sapiens
agcatcccagaaaaa

SEQ ID NO: 203777 - DNA, 15 bp, Homo sapiens
aagcatcccagaaaa

SEQ ID NO: 203778 - DNA, 15 bp, Homo sapiens
aaagcatcccagaaa

SEQ ID NO: 203779 - DNA, 15 bp, Homo sapiens
taaagcatcccagaa

SEQ ID NO: 203780 - DNA, 15 bp, Homo sapiens
ttaaagcatcccaga

SEQ ID NO: 203781 - DNA, 15 bp, Homo sapiens
attaaagcatcccag

SEQ ID NO: 203782 - DNA, 15 bp, Homo sapiens
tattaaagcatccca

SEQ ID NO: 203783 - DNA, 15 bp, Homo sapiens
ctattaaagcatccc

SEQ ID NO: 203784 - DNA, 15 bp, Homo sapiens
cctattaaagcatcc

SEQ ID NO: 203785 - DNA, 15 bp, Homo sapiens
tcctattaaagcatc

SEQ ID NO: 203786 - DNA, 15 bp, Homo sapiens
atcctattaaagcat

SEQ ID NO: 203787 - DNA, 15 bp, Homo sapiens
tatcctattaaagca

SEQ ID NO: 203788 - DNA, 15 bp, Homo sapiens
ctatcctattaaagc

SEQ ID NO: 203789 - DNA, 15 bp, Homo sapiens
actatcctattaaag

SEQ ID NO: 203790 - DNA, 15 bp, Homo sapiens
tactatcctattaaa

SEQ ID NO: 203791 - DNA, 15 bp, Homo sapiens
ttactatcctattaa

SEQ ID NO: 203792 - DNA, 15 bp, Homo sapiens
tttactatcctatta

SEQ ID NO: 203793 - DNA, 15 bp, Homo sapiens
ttttactatcctatt

SEQ ID NO: 203794 - DNA, 15 bp, Homo sapiens
cttttactatcctat

SEQ ID NO: 203795 - DNA, 15 bp, Homo sapiens
acttttactatccta

SEQ ID NO: 203796 - DNA, 15 bp, Homo sapiens
tacttttactatcct

SEQ ID NO: 203797 - DNA, 15 bp, Homo sapiens
ttacttttactatcc

SEQ ID NO: 203798 - DNA, 15 bp, Homo sapiens
tttacttttactatc

SEQ ID NO: 203799 - DNA, 15 bp, Homo sapiens
gtttacttttactat

SEQ ID NO: 203800 - DNA, 15 bp, Homo sapiens
cgtttacttttacta

SEQ ID NO: 203801 - DNA, 15 bp, Homo sapiens
acgtttacttttact

SEQ ID NO: 203802 - DNA, 15 bp, Homo sapiens
cacgtttacttttac

SEQ ID NO: 203803 - DNA, 15 bp, Homo sapiens
acacgtttactttta

SEQ ID NO: 203804 - DNA, 15 bp, Homo sapiens
gacacgtttactttt

SEQ ID NO: 203805 - DNA, 15 bp, Homo sapiens
ggacacgtttacttt

SEQ ID NO: 203806 - DNA, 15 bp, Homo sapiens
gggacacgtttactt

SEQ ID NO: 203807 - DNA, 15 bp, Homo sapiens
agggacacgtttact

SEQ ID NO: 203808 - DNA, 15 bp, Homo sapiens
cagggacacgtttac

SEQ ID NO: 203809 - DNA, 15 bp, Homo sapiens
acagggacacgttta

SEQ ID NO: 203810 - DNA, 15 bp, Homo sapiens
gacagggacacgttt

SEQ ID NO: 203811 - DNA, 15 bp, Homo sapiens
agacagggacacgtt

SEQ ID NO: 203812 - DNA, 15 bp, Homo sapiens
cagacagggacacgt

SEQ ID NO: 203813 - DNA, 15 bp, Homo sapiens
tcagacagggacacg

SEQ ID NO: 203814 - DNA, 15 bp, Homo sapiens
atcagacagggacac

SEQ ID NO: 203815 - DNA, 15 bp, Homo sapiens
catcagacagggaca

SEQ ID NO: 203816 - DNA, 15 bp, Homo sapiens
ccatcagacagggac

SEQ ID NO: 203817 - DNA, 15 bp, Homo sapiens
gccatcagacaggga

SEQ ID NO: 203818 - DNA, 15 bp, Homo sapiens
ggccatcagacaggg

SEQ ID NO: 203819 - DNA, 15 bp, Homo sapiens
gggccatcagacagg

SEQ ID NO: 203820 - DNA, 15 bp, Homo sapiens
agggccatcagacag

SEQ ID NO: 203821 - DNA, 15 bp, Homo sapiens
aagggccatcagaca

SEQ ID NO: 203822 - DNA, 15 bp, Homo sapiens
caagggccatcagac

SEQ ID NO: 203823 - DNA, 15 bp, Homo sapiens
ccaagggccatcaga

SEQ ID NO: 203824 - DNA, 15 bp, Homo sapiens
gccaagggccatcag

SEQ ID NO: 203825 - DNA, 15 bp, Homo sapiens
agccaagggccatca

SEQ ID NO: 203826 - DNA, 15 bp, Homo sapiens
gagccaagggccatc

SEQ ID NO: 203827 - DNA, 15 bp, Homo sapiens
tgagccaagggccat

SEQ ID NO: 203828 - DNA, 15 bp, Homo sapiens
ctgagccaagggcca

SEQ ID NO: 203829 - DNA, 15 bp, Homo sapiens
gctgagccaagggcc

SEQ ID NO: 203830 - DNA, 15 bp, Homo sapiens
agctgagccaagggc

SEQ ID NO: 203831 - DNA, 15 bp, Homo sapiens
cagctgagccaaggg

SEQ ID NO: 203832 - DNA, 15 bp, Homo sapiens
ccagctgagccaagg

SEQ ID NO: 203833 - DNA, 15 bp, Homo sapiens
tccagctgagccaag

SEQ ID NO: 203834 - DNA, 15 bp, Homo sapiens
ttccagctgagccaa

SEQ ID NO: 203835 - DNA, 15 bp, Homo sapiens
cttccagctgagcca

SEQ ID NO: 203836 - DNA, 15 bp, Homo sapiens
tcttccagctgagcc

SEQ ID NO: 203837 - DNA, 15 bp, Homo sapiens
ttcttccagctgagc

SEQ ID NO: 203838 - DNA, 15 bp, Homo sapiens
cttcttccagctgag

SEQ ID NO: 203839 - DNA, 15 bp, Homo sapiens
tcttcttccagctga

SEQ ID NO: 203840 - DNA, 15 bp, Homo sapiens
atcttcttccagctg

SEQ ID NO: 203841 - DNA, 15 bp, Homo sapiens
gatcttcttccagct

SEQ ID NO: 203842 - DNA, 15 bp, Homo sapiens
tgatcttcttccagc

SEQ ID NO: 203843 - DNA, 15 bp, Homo sapiens
ctgatcttcttccag

SEQ ID NO: 203844 - DNA, 15 bp, Homo sapiens
gctgatcttcttcca

SEQ ID NO: 203845 - DNA, 15 bp, Homo sapiens
agctgatcttcttcc

SEQ ID NO: 203846 - DNA, 15 bp, Homo sapiens
gagctgatcttcttc

SEQ ID NO: 203847 - DNA, 15 bp, Homo sapiens
agagctgatcttctt

SEQ ID NO: 203848 - DNA, 15 bp, Homo sapiens
cagagctgatcttct

SEQ ID NO: 203849 - DNA, 15 bp, Homo sapiens
gcagagctgatcttc

SEQ ID NO: 203850 - DNA, 15 bp, Homo sapiens
agcagagctgatctt

SEQ ID NO: 203851 - DNA, 15 bp, Homo sapiens
cagcagagctgatct

SEQ ID NO: 203852 - DNA, 15 bp, Homo sapiens
gcagcagagctgatc

SEQ ID NO: 203853 - DNA, 15 bp, Homo sapiens
tgcagcagagctgat

SEQ ID NO: 203854 - DNA, 15 bp, Homo sapiens
ttgcagcagagctga

SEQ ID NO: 203855 - DNA, 15 bp, Homo sapiens
attgcagcagagctg

SEQ ID NO: 203856 - DNA, 15 bp, Homo sapiens
aattgcagcagagct

SEQ ID NO: 203857 - DNA, 15 bp, Homo sapiens
aaattgcagcagagc

SEQ ID NO: 203858 - DNA, 15 bp, Homo sapiens
taaattgcagcagag

SEQ ID NO: 203859 - DNA, 15 bp, Homo sapiens
ctaaattgcagcaga

SEQ ID NO: 203860 - DNA, 15 bp, Homo sapiens
cctaaattgcagcag

SEQ ID NO: 203861 - DNA, 15 bp, Homo sapiens
tcctaaattgcagca

SEQ ID NO: 203862 - DNA, 15 bp, Homo sapiens
ttcctaaattgcagc

SEQ ID NO: 203863 - DNA, 15 bp, Homo sapiens
cttcctaaattgcag

SEQ ID NO: 203864 - DNA, 15 bp, Homo sapiens
tcttcctaaattgca

SEQ ID NO: 203865 - DNA, 15 bp, Homo sapiens
ctcttcctaaattgc

SEQ ID NO: 203866 - DNA, 15 bp, Homo sapiens
tctcttcctaaattg

SEQ ID NO: 203867 - DNA, 15 bp, Homo sapiens
atctcttcctaaatt

SEQ ID NO: 203868 - DNA, 15 bp, Homo sapiens
tatctcttcctaaat

SEQ ID NO: 203869 - DNA, 15 bp, Homo sapiens
ttatctcttcctaaa

SEQ ID NO: 203870 - DNA, 15 bp, Homo sapiens
gttatctcttcctaa

SEQ ID NO: 203871 - DNA, 15 bp, Homo sapiens
agttatctcttccta

SEQ ID NO: 203872 - DNA, 15 bp, Homo sapiens
cagttatctcttcct

SEQ ID NO: 203873 - DNA, 15 bp, Homo sapiens
ccagttatctcttcc

SEQ ID NO: 203874 - DNA, 15 bp, Homo sapiens
cccagttatctcttc

SEQ ID NO: 203875 - DNA, 15 bp, Homo sapiens
ccccagttatctctt

SEQ ID NO: 203876 - DNA, 15 bp, Homo sapiens
accccagttatctct

SEQ ID NO: 203877 - DNA, 15 bp, Homo sapiens
gaccccagttatctc

SEQ ID NO: 203878 - DNA, 15 bp, Homo sapiens
ggaccccagttatct

SEQ ID NO: 203879 - DNA, 15 bp, Homo sapiens
tggaccccagttatc

SEQ ID NO: 203880 - DNA, 15 bp, Homo sapiens
atggaccccagttat

SEQ ID NO: 203881 - DNA, 15 bp, Homo sapiens
gatggaccccagtta

SEQ ID NO: 203882 - DNA, 15 bp, Homo sapiens
tgatggaccccagtt

SEQ ID NO: 203883 - DNA, 15 bp, Homo sapiens
gtgatggaccccagt

SEQ ID NO: 203884 - DNA, 15 bp, Homo sapiens
cgtgatggaccccag

SEQ ID NO: 203885 - DNA, 15 bp, Homo sapiens
acgtgatggacccca

SEQ ID NO: 203886 - DNA, 15 bp, Homo sapiens
cacgtgatggacccc

SEQ ID NO: 203887 - DNA, 15 bp, Homo sapiens
ccacgtgatggaccc

SEQ ID NO: 203888 - DNA, 15 bp, Homo sapiens
gccacgtgatggacc

SEQ ID NO: 203889 - DNA, 15 bp, Homo sapiens
agccacgtgatggac

SEQ ID NO: 203890 - DNA, 15 bp, Homo sapiens
cagccacgtgatgga

SEQ ID NO: 203891 - DNA, 15 bp, Homo sapiens
ccagccacgtgatgg

SEQ ID NO: 203892 - DNA, 15 bp, Homo sapiens
accagccacgtgatg

SEQ ID NO: 203893 - DNA, 15 bp, Homo sapiens
aaccagccacgtgat

SEQ ID NO: 203894 - DNA, 15 bp, Homo sapiens
gaaccagccacgtga

SEQ ID NO: 203895 - DNA, 15 bp, Homo sapiens
tgaaccagccacgtg

SEQ ID NO: 203896 - DNA, 15 bp, Homo sapiens
ctgaaccagccacgt

SEQ ID NO: 203897 - DNA, 15 bp, Homo sapiens
tctgaaccagccacg

SEQ ID NO: 203898 - DNA, 15 bp, Homo sapiens
gtctgaaccagccac

SEQ ID NO: 203899 - DNA, 15 bp, Homo sapiens
ggtctgaaccagcca

SEQ ID NO: 203900 - DNA, 15 bp, Homo sapiens
tggtctgaaccagcc

SEQ ID NO: 203901 - DNA, 15 bp, Homo sapiens
ctggtctgaaccagc

SEQ ID NO: 203902 - DNA, 15 bp, Homo sapiens
cctggtctgaaccag

SEQ ID NO: 203903 - DNA, 15 bp, Homo sapiens
ccctggtctgaacca

SEQ ID NO: 203904 - DNA, 15 bp, Homo sapiens
accctggtctgaacc

SEQ ID NO: 203905 - DNA, 15 bp, Homo sapiens
aaccctggtctgaac

SEQ ID NO: 203906 - DNA, 15 bp, Homo sapiens
aaaccctggtctgaa

SEQ ID NO: 203907 - DNA, 15 bp, Homo sapiens
aaaaccctggtctga

SEQ ID NO: 203908 - DNA, 15 bp, Homo sapiens
taaaaccctggtctg

SEQ ID NO: 203909 - DNA, 15 bp, Homo sapiens
ataaaaccctggtct

SEQ ID NO: 203910 - DNA, 15 bp, Homo sapiens
cataaaaccctggtc

SEQ ID NO: 203911 - DNA, 15 bp, Homo sapiens
tcataaaaccctggt

SEQ ID NO: 203912 - DNA, 15 bp, Homo sapiens
gtcataaaaccctgg

SEQ ID NO: 203913 - DNA, 15 bp, Homo sapiens
agtcataaaaccctg

SEQ ID NO: 203914 - DNA, 15 bp, Homo sapiens
cagtcataaaaccct

SEQ ID NO: 203915 - DNA, 15 bp, Homo sapiens
ccagtcataaaaccc

SEQ ID NO: 203916 - DNA, 15 bp, Homo sapiens
cccagtcataaaacc

SEQ ID NO: 203917 - DNA, 15 bp, Homo sapiens
tcccagtcataaaac

SEQ ID NO: 203918 - DNA, 15 bp, Homo sapiens
atcccagtcataaaa

SEQ ID NO: 203919 - DNA, 15 bp, Homo sapiens
aatcccagtcataaa

SEQ ID NO: 203920 - DNA, 15 bp, Homo sapiens
aaatcccagtcataa

SEQ ID NO: 203921 - DNA, 15 bp, Homo sapiens
caaatcccagtcata

SEQ ID NO: 203922 - DNA, 15 bp, Homo sapiens
gcaaatcccagtcat

SEQ ID NO: 203923 - DNA, 15 bp, Homo sapiens
ggcaaatcccagtca

SEQ ID NO: 203924 - DNA, 15 bp, Homo sapiens
aggcaaatcccagtc

SEQ ID NO: 203925 - DNA, 15 bp, Homo sapiens
caggcaaatcccagt

SEQ ID NO: 203926 - DNA, 15 bp, Homo sapiens
gcaggcaaatcccag

SEQ ID NO: 203927 - DNA, 15 bp, Homo sapiens
agcaggcaaatccca

SEQ ID NO: 203928 - DNA, 15 bp, Homo sapiens
cagcaggcaaatccc

SEQ ID NO: 203929 - DNA, 15 bp, Homo sapiens
ccagcaggcaaatcc

SEQ ID NO: 203930 - DNA, 15 bp, Homo sapiens
tccagcaggcaaatc

SEQ ID NO: 203931 - DNA, 15 bp, Homo sapiens
ctccagcaggcaaat

SEQ ID NO: 203932 - DNA, 15 bp, Homo sapiens
gctccagcaggcaaa

SEQ ID NO: 203933 - DNA, 15 bp, Homo sapiens
ggctccagcaggcaa

SEQ ID NO: 203934 - DNA, 15 bp, Homo sapiens
gggctccagcaggca

SEQ ID NO: 203935 - DNA, 15 bp, Homo sapiens
agggctccagcaggc

SEQ ID NO: 203936 - DNA, 15 bp, Homo sapiens
cagggctccagcagg

SEQ ID NO: 203937 - DNA, 15 bp, Homo sapiens
ccagggctccagcag

SEQ ID NO: 203938 - DNA, 15 bp, Homo sapiens
cccagggctccagca

SEQ ID NO: 203939 - DNA, 15 bp, Homo sapiens
acccagggctccagc

SEQ ID NO: 203940 - DNA, 15 bp, Homo sapiens
gacccagggctccag

SEQ ID NO: 203941 - DNA, 15 bp, Homo sapiens
tgacccagggctcca

SEQ ID NO: 203942 - DNA, 15 bp, Homo sapiens
gtgacccagggctcc

SEQ ID NO: 203943 - DNA, 15 bp, Homo sapiens
agtgacccagggctc

SEQ ID NO: 203944 - DNA, 15 bp, Homo sapiens
cagtgacccagggct

SEQ ID NO: 203945 - DNA, 15 bp, Homo sapiens
acagtgacccagggc

SEQ ID NO: 203946 - DNA, 15 bp, Homo sapiens
cacagtgacccaggg

SEQ ID NO: 203947 - DNA, 15 bp, Homo sapiens
gcacagtgacccagg

SEQ ID NO: 203948 - DNA, 15 bp, Homo sapiens
ggcacagtgacccag

SEQ ID NO: 203949 - DNA, 15 bp, Homo sapiens
tggcacagtgaccca

SEQ ID NO: 203950 - DNA, 15 bp, Homo sapiens
ctggcacagtgaccc

SEQ ID NO: 203951 - DNA, 15 bp, Homo sapiens
tctggcacagtgacc

SEQ ID NO: 203952 - DNA, 15 bp, Homo sapiens
gtctggcacagtgac

SEQ ID NO: 203953 - DNA, 15 bp, Homo sapiens
agtctggcacagtga

SEQ ID NO: 203954 - DNA, 15 bp, Homo sapiens
gagtctggcacagtg

SEQ ID NO: 203955 - DNA, 15 bp, Homo sapiens
tgagtctggcacagt

SEQ ID NO: 203956 - DNA, 15 bp, Homo sapiens
ttgagtctggcacag

SEQ ID NO: 203957 - DNA, 15 bp, Homo sapiens
gttgagtctggcaca

SEQ ID NO: 203958 - DNA, 15 bp, Homo sapiens
ggttgagtctggcac

SEQ ID NO: 203959 - DNA, 15 bp, Homo sapiens
tggttgagtctggca

SEQ ID NO: 203960 - DNA, 15 bp, Homo sapiens
gtggttgagtctggc

SEQ ID NO: 203961 - DNA, 15 bp, Homo sapiens
tgtggttgagtctgg

SEQ ID NO: 203962 - DNA, 15 bp, Homo sapiens
ctgtggttgagtctg

SEQ ID NO: 203963 - DNA, 15 bp, Homo sapiens
cctgtggttgagtct

SEQ ID NO: 203964 - DNA, 15 bp, Homo sapiens
acctgtggttgagtc

SEQ ID NO: 203965 - DNA, 15 bp, Homo sapiens
gacctgtggttgagt

SEQ ID NO: 203966 - DNA, 15 bp, Homo sapiens
tgacctgtggttgag

SEQ ID NO: 203967 - DNA, 15 bp, Homo sapiens
gtgacctgtggttga

SEQ ID NO: 203968 - DNA, 15 bp, Homo sapiens
tgtgacctgtggttg

SEQ ID NO: 203969 - DNA, 15 bp, Homo sapiens
ttgtgacctgtggtt

SEQ ID NO: 203970 - DNA, 15 bp, Homo sapiens
attgtgacctgtggt

SEQ ID NO: 203971 - DNA, 15 bp, Homo sapiens
gattgtgacctgtgg

SEQ ID NO: 203972 - DNA, 15 bp, Homo sapiens
agattgtgacctgtg

SEQ ID NO: 203973 - DNA, 15 bp, Homo sapiens
cagattgtgacctgt

SEQ ID NO: 203974 - DNA, 15 bp, Homo sapiens
ccagattgtgacctg

SEQ ID NO: 203975 - DNA, 15 bp, Homo sapiens
tccagattgtgacct

SEQ ID NO: 203976 - DNA, 15 bp, Homo sapiens
ttccagattgtgacc

SEQ ID NO: 203977 - DNA, 15 bp, Homo sapiens
gttccagattgtgac

SEQ ID NO: 203978 - DNA, 15 bp, Homo sapiens
agttccagattgtga

SEQ ID NO: 203979 - DNA, 15 bp, Homo sapiens
cagttccagattgtg

SEQ ID NO: 203980 - DNA, 15 bp, Homo sapiens
ccagttccagattgt

SEQ ID NO: 203981 - DNA, 15 bp, Homo sapiens
tccagttccagattg

SEQ ID NO: 203982 - DNA, 15 bp, Homo sapiens
atccagttccagatt

SEQ ID NO: 203983 - DNA, 15 bp, Homo sapiens
gatccagttccagat

SEQ ID NO: 203984 - DNA, 15 bp, Homo sapiens
ggatccagttccaga

SEQ ID NO: 203985 - DNA, 15 bp, Homo sapiens
aggatccagttccag

SEQ ID NO: 203986 - DNA, 15 bp, Homo sapiens
aaggatccagttcca

SEQ ID NO: 203987 - DNA, 15 bp, Homo sapiens
caaggatccagttcc

SEQ ID NO: 203988 - DNA, 15 bp, Homo sapiens
gcaaggatccagttc

SEQ ID NO: 203989 - DNA, 15 bp, Homo sapiens
agcaaggatccagtt

SEQ ID NO: 203990 - DNA, 15 bp, Homo sapiens
cagcaaggatccagt

SEQ ID NO: 203991 - DNA, 15 bp, Homo sapiens
gcagcaaggatccag

SEQ ID NO: 203992 - DNA, 15 bp, Homo sapiens
ggcagcaaggatcca

SEQ ID NO: 203993 - DNA, 15 bp, Homo sapiens
tggcagcaaggatcc

SEQ ID NO: 203994 - DNA, 15 bp, Homo sapiens
ctggcagcaaggatc

SEQ ID NO: 203995 - DNA, 15 bp, Homo sapiens
tctggcagcaaggat

SEQ ID NO: 203996 - DNA, 15 bp, Homo sapiens
atctggcagcaagga

SEQ ID NO: 203997 - DNA, 15 bp, Homo sapiens
catctggcagcaagg

SEQ ID NO: 203998 - DNA, 15 bp, Homo sapiens
ccatctggcagcaag

SEQ ID NO: 203999 - DNA, 15 bp, Homo sapiens
cccatctggcagcaa

SEQ ID NO: 204000 - DNA, 15 bp, Homo sapiens
tcccatctggcagca

SEQ ID NO: 204001 - DNA, 15 bp, Homo sapiens
ctcccatctggcagc

SEQ ID NO: 204002 - DNA, 15 bp, Homo sapiens
cctcccatctggcag

SEQ ID NO: 204003 - DNA, 15 bp, Homo sapiens
gcctcccatctggca

SEQ ID NO: 204004 - DNA, 15 bp, Homo sapiens
cgcctcccatctggc

SEQ ID NO: 204005 - DNA, 15 bp, Homo sapiens
ccgcctcccatctgg

SEQ ID NO: 204006 - DNA, 15 bp, Homo sapiens
cccgcctcccatctg

SEQ ID NO: 204007 - DNA, 15 bp, Homo sapiens
gcccgcctcccatct

SEQ ID NO: 204008 - DNA, 15 bp, Homo sapiens
tgcccgcctcccatc

SEQ ID NO: 204009 - DNA, 15 bp, Homo sapiens
ctgcccgcctcccat

SEQ ID NO: 204010 - DNA, 15 bp, Homo sapiens
cctgcccgcctccca

SEQ ID NO: 204011 - DNA, 15 bp, Homo sapiens
ccctgcccgcctccc

SEQ ID NO: 204012 - DNA, 15 bp, Homo sapiens
gccctgcccgcctcc

SEQ ID NO: 204013 - DNA, 15 bp, Homo sapiens
ggccctgcccgcctc

SEQ ID NO: 204014 - DNA, 15 bp, Homo sapiens
tggccctgcccgcct

SEQ ID NO: 204015 - DNA, 15 bp, Homo sapiens
ctggccctgcccgcc

SEQ ID NO: 204016 - DNA, 15 bp, Homo sapiens
gctggccctgcccgc

SEQ ID NO: 204017 - DNA, 15 bp, Homo sapiens
ggctggccctgcccg

SEQ ID NO: 204018 - DNA, 15 bp, Homo sapiens
gggctggccctgccc

SEQ ID NO: 204019 - DNA, 15 bp, Homo sapiens
agggctggccctgcc

SEQ ID NO: 204020 - DNA, 15 bp, Homo sapiens
tagggctggccctgc

SEQ ID NO: 204021 - DNA, 15 bp, Homo sapiens
atagggctggccctg

SEQ ID NO: 204022 - DNA, 15 bp, Homo sapiens
catagggctggccct

SEQ ID NO: 204023 - DNA, 15 bp, Homo sapiens
gcatagggctggccc

SEQ ID NO: 204024 - DNA, 15 bp, Homo sapiens
agcatagggctggcc

SEQ ID NO: 204025 - DNA, 15 bp, Homo sapiens
cagcatagggctggc

SEQ ID NO: 204026 - DNA, 15 bp, Homo sapiens
acagcatagggctgg

SEQ ID NO: 204027 - DNA, 15 bp, Homo sapiens
gacagcatagggctg

SEQ ID NO: 204028 - DNA, 15 bp, Homo sapiens
tgacagcatagggct

SEQ ID NO: 204029 - DNA, 15 bp, Homo sapiens
atgacagcatagggc

SEQ ID NO: 204030 - DNA, 15 bp, Homo sapiens
aatgacagcataggg

SEQ ID NO: 204031 - DNA, 15 bp, Homo sapiens
caatgacagcatagg

SEQ ID NO: 204032 - DNA, 15 bp, Homo sapiens
ccaatgacagcatag

SEQ ID NO: 204033 - DNA, 15 bp, Homo sapiens
gccaatgacagcata

SEQ ID NO: 204034 - DNA, 15 bp, Homo sapiens
ggccaatgacagcat

SEQ ID NO: 204035 - DNA, 15 bp, Homo sapiens
aggccaatgacagca

SEQ ID NO: 204036 - DNA, 15 bp, Homo sapiens
caggccaatgacagc

SEQ ID NO: 204037 - DNA, 15 bp, Homo sapiens
acaggccaatgacag

SEQ ID NO: 204038 - DNA, 15 bp, Homo sapiens
tacaggccaatgaca

SEQ ID NO: 204039 - DNA, 15 bp, Homo sapiens
ctacaggccaatgac

SEQ ID NO: 204040 - DNA, 15 bp, Homo sapiens
gctacaggccaatga

SEQ ID NO: 204041 - DNA, 15 bp, Homo sapiens
ggctacaggccaatg

SEQ ID NO: 204042 - DNA, 15 bp, Homo sapiens
tggctacaggccaat

SEQ ID NO: 204043 - DNA, 15 bp, Homo sapiens
ctggctacaggccaa

SEQ ID NO: 204044 - DNA, 15 bp, Homo sapiens
gctggctacaggcca

SEQ ID NO: 204045 - DNA, 15 bp, Homo sapiens
agctggctacaggcc

SEQ ID NO: 204046 - DNA, 15 bp, Homo sapiens
gagctggctacaggc

SEQ ID NO: 204047 - DNA, 15 bp, Homo sapiens
tgagctggctacagg

SEQ ID NO: 204048 - DNA, 15 bp, Homo sapiens
ctgagctggctacag

SEQ ID NO: 204049 - DNA, 15 bp, Homo sapiens
cctgagctggctaca

SEQ ID NO: 204050 - DNA, 15 bp, Homo sapiens
acctgagctggctac

SEQ ID NO: 204051 - DNA, 15 bp, Homo sapiens
gacctgagctggcta

SEQ ID NO: 204052 - DNA, 15 bp, Homo sapiens
agacctgagctggct

SEQ ID NO: 204053 - DNA, 15 bp, Homo sapiens
cagacctgagctggc

SEQ ID NO: 204054 - DNA, 15 bp, Homo sapiens
ccagacctgagctgg

SEQ ID NO: 204055 - DNA, 15 bp, Homo sapiens
accagacctgagctg

SEQ ID NO: 204056 - DNA, 15 bp, Homo sapiens
caccagacctgagct

SEQ ID NO: 204057 - DNA, 15 bp, Homo sapiens
ccaccagacctgagc

SEQ ID NO: 204058 - DNA, 15 bp, Homo sapiens
gccaccagacctgag

SEQ ID NO: 204059 - DNA, 15 bp, Homo sapiens
tgccaccagacctga

SEQ ID NO: 204060 - DNA, 15 bp, Homo sapiens
ttgccaccagacctg

SEQ ID NO: 204061 - DNA, 15 bp, Homo sapiens
cttgccaccagacct

SEQ ID NO: 204062 - DNA, 15 bp, Homo sapiens
acttgccaccagacc

SEQ ID NO: 204063 - DNA, 15 bp, Homo sapiens
cacttgccaccagac

SEQ ID NO: 204064 - DNA, 15 bp, Homo sapiens
tcacttgccaccaga

SEQ ID NO: 204065 - DNA, 15 bp, Homo sapiens
ttcacttgccaccag

SEQ ID NO: 204066 - DNA, 15 bp, Homo sapiens
cttcacttgccacca

SEQ ID NO: 204067 - DNA, 15 bp, Homo sapiens
ccttcacttgccacc

SEQ ID NO: 204068 - DNA, 15 bp, Homo sapiens
tccttcacttgccac

SEQ ID NO: 204069 - DNA, 15 bp, Homo sapiens
gtccttcacttgcca

SEQ ID NO: 204070 - DNA, 15 bp, Homo sapiens
tgtccttcacttgcc

SEQ ID NO: 204071 - DNA, 15 bp, Homo sapiens
gtgtccttcacttgc

SEQ ID NO: 204072 - DNA, 15 bp, Homo sapiens
tgtgtccttcacttg

SEQ ID NO: 204073 - DNA, 15 bp, Homo sapiens
atgtgtccttcactt

SEQ ID NO: 204074 - DNA, 15 bp, Homo sapiens
gatgtgtccttcact

SEQ ID NO: 204075 - DNA, 15 bp, Homo sapiens
ggatgtgtccttcac

SEQ ID NO: 204076 - DNA, 15 bp, Homo sapiens
aggatgtgtccttca

SEQ ID NO: 204077 - DNA, 15 bp, Homo sapiens
caggatgtgtccttc

SEQ ID NO: 204078 - DNA, 15 bp, Homo sapiens
tcaggatgtgtcctt

SEQ ID NO: 204079 - DNA, 15 bp, Homo sapiens
atcaggatgtgtcct

SEQ ID NO: 204080 - DNA, 15 bp, Homo sapiens
catcaggatgtgtcc

SEQ ID NO: 204081 - DNA, 15 bp, Homo sapiens
acatcaggatgtgtc

SEQ ID NO: 204082 - DNA, 15 bp, Homo sapiens
gacatcaggatgtgt

SEQ ID NO: 204083 - DNA, 15 bp, Homo sapiens
agacatcaggatgtg

SEQ ID NO: 204084 - DNA, 15 bp, Homo sapiens
cagacatcaggatgt

SEQ ID NO: 204085 - DNA, 15 bp, Homo sapiens
tcagacatcaggatg

SEQ ID NO: 204086 - DNA, 15 bp, Homo sapiens
ctcagacatcaggat

SEQ ID NO: 204087 - DNA, 15 bp, Homo sapiens
actcagacatcagga

SEQ ID NO: 204088 - DNA, 15 bp, Homo sapiens
cactcagacatcagg

SEQ ID NO: 204089 - DNA, 15 bp, Homo sapiens
gcactcagacatcag

SEQ ID NO: 204090 - DNA, 15 bp, Homo sapiens
ggcactcagacatca

SEQ ID NO: 204091 - DNA, 15 bp, Homo sapiens
gggcactcagacatc

SEQ ID NO: 204092 - DNA, 15 bp, Homo sapiens
agggcactcagacat

SEQ ID NO: 204093 - DNA, 15 bp, Homo sapiens
cagggcactcagaca

SEQ ID NO: 204094 - DNA, 15 bp, Homo sapiens
gcagggcactcagac

SEQ ID NO: 204095 - DNA, 15 bp, Homo sapiens
tgcagggcactcaga

SEQ ID NO: 204096 - DNA, 15 bp, Homo sapiens
ttgcagggcactcag

SEQ ID NO: 204097 - DNA, 15 bp, Homo sapiens
attgcagggcactca

SEQ ID NO: 204098 - DNA, 15 bp, Homo sapiens
aattgcagggcactc

SEQ ID NO: 204099 - DNA, 15 bp, Homo sapiens
aaattgcagggcact

SEQ ID NO: 204100 - DNA, 15 bp, Homo sapiens
taaattgcagggcac

SEQ ID NO: 204101 - DNA, 15 bp, Homo sapiens
ataaattgcagggca

SEQ ID NO: 204102 - DNA, 15 bp, Homo sapiens
aataaattgcagggc

SEQ ID NO: 204103 - DNA, 15 bp, Homo sapiens
caataaattgcaggg

SEQ ID NO: 204104 - DNA, 15 bp, Homo sapiens
ccaataaattgcagg

SEQ ID NO: 204105 - DNA, 15 bp, Homo sapiens
gccaataaattgcag

SEQ ID NO: 204106 - DNA, 15 bp, Homo sapiens
agccaataaattgca

SEQ ID NO: 204107 - DNA, 15 bp, Homo sapiens
aagccaataaattgc

SEQ ID NO: 204108 - DNA, 15 bp, Homo sapiens
caagccaataaattg

SEQ ID NO: 204109 - DNA, 15 bp, Homo sapiens
acaagccaataaatt

SEQ ID NO: 204110 - DNA, 15 bp, Homo sapiens
cacaagccaataaat

SEQ ID NO: 204111 - DNA, 15 bp, Homo sapiens
ccacaagccaataaa

SEQ ID NO: 204112 - DNA, 15 bp, Homo sapiens
accacaagccaataa

SEQ ID NO: 204113 - DNA, 15 bp, Homo sapiens
aaccacaagccaata

SEQ ID NO: 204114 - DNA, 15 bp, Homo sapiens
aaaccacaagccaat

SEQ ID NO: 204115 - DNA, 15 bp, Homo sapiens
taaaccacaagccaa

SEQ ID NO: 204116 - DNA, 15 bp, Homo sapiens
ctaaaccacaagcca

SEQ ID NO: 204117 - DNA, 15 bp, Homo sapiens
cctaaaccacaagcc

SEQ ID NO: 204118 - DNA, 15 bp, Homo sapiens
ccctaaaccacaagc

SEQ ID NO: 204119 - DNA, 15 bp, Homo sapiens
cccctaaaccacaag

SEQ ID NO: 204120 - DNA, 15 bp, Homo sapiens
acccctaaaccacaa

SEQ ID NO: 204121 - DNA, 15 bp, Homo sapiens
cacccctaaaccaca

SEQ ID NO: 204122 - DNA, 15 bp, Homo sapiens
acacccctaaaccac

SEQ ID NO: 204123 - DNA, 15 bp, Homo sapiens
cacacccctaaacca

SEQ ID NO: 204124 - DNA, 15 bp, Homo sapiens
ccacacccctaaacc

SEQ ID NO: 204125 - DNA, 15 bp, Homo sapiens
cccacacccctaaac

SEQ ID NO: 204126 - DNA, 15 bp, Homo sapiens
ccccacacccctaaa

SEQ ID NO: 204127 - DNA, 15 bp, Homo sapiens
cccccacacccctaa

SEQ ID NO: 204128 - DNA, 15 bp, Homo sapiens
tcccccacaccccta

SEQ ID NO: 204129 - DNA, 15 bp, Homo sapiens
gtcccccacacccct

SEQ ID NO: 204130 - DNA, 15 bp, Homo sapiens
tgtcccccacacccc

SEQ ID NO: 204131 - DNA, 15 bp, Homo sapiens
ttgtcccccacaccc

SEQ ID NO: 204132 - DNA, 15 bp, Homo sapiens
tttgtcccccacacc

SEQ ID NO: 204133 - DNA, 15 bp, Homo sapiens
gtttgtcccccacac

SEQ ID NO: 204134 - DNA, 15 bp, Homo sapiens
tgtttgtcccccaca

SEQ ID NO: 204135 - DNA, 15 bp, Homo sapiens
gtgtttgtcccccac

SEQ ID NO: 204136 - DNA, 15 bp, Homo sapiens
ggtgtttgtccccca

SEQ ID NO: 204137 - DNA, 15 bp, Homo sapiens
tggtgtttgtccccc

SEQ ID NO: 204138 - DNA, 15 bp, Homo sapiens
ttggtgtttgtcccc

SEQ ID NO: 204139 - DNA, 15 bp, Homo sapiens
attggtgtttgtccc

SEQ ID NO: 204140 - DNA, 15 bp, Homo sapiens
cattggtgtttgtcc

SEQ ID NO: 204141 - DNA, 15 bp, Homo sapiens
gcattggtgtttgtc

SEQ ID NO: 204142 - DNA, 15 bp, Homo sapiens
ggcattggtgtttgt

SEQ ID NO: 204143 - DNA, 15 bp, Homo sapiens
tggcattggtgtttg

SEQ ID NO: 204144 - DNA, 15 bp, Homo sapiens
gtggcattggtgttt

SEQ ID NO: 204145 - DNA, 15 bp, Homo sapiens
tgtggcattggtgtt

SEQ ID NO: 204146 - DNA, 15 bp, Homo sapiens
ctgtggcattggtgt

SEQ ID NO: 204147 - DNA, 15 bp, Homo sapiens
actgtggcattggtg

SEQ ID NO: 204148 - DNA, 15 bp, Homo sapiens
aactgtggcattggt

SEQ ID NO: 204149 - DNA, 15 bp, Homo sapiens
caactgtggcattgg

SEQ ID NO: 204150 - DNA, 15 bp, Homo sapiens
tcaactgtggcattg

SEQ ID NO: 204151 - DNA, 15 bp, Homo sapiens
gtcaactgtggcatt

SEQ ID NO: 204152 - DNA, 15 bp, Homo sapiens
tgtcaactgtggcat

SEQ ID NO: 204153 - DNA, 15 bp, Homo sapiens
atgtcaactgtggca

SEQ ID NO: 204154 - DNA, 15 bp, Homo sapiens
tatgtcaactgtggc

SEQ ID NO: 204155 - DNA, 15 bp, Homo sapiens
atatgtcaactgtgg

SEQ ID NO: 204156 - DNA, 15 bp, Homo sapiens
tatatgtcaactgtg

SEQ ID NO: 204157 - DNA, 15 bp, Homo sapiens
atatatgtcaactgt

SEQ ID NO: 204158 - DNA, 15 bp, Homo sapiens
catatatgtcaactg

SEQ ID NO: 204159 - DNA, 15 bp, Homo sapiens
ccatatatgtcaact

SEQ ID NO: 204160 - DNA, 15 bp, Homo sapiens
cccatatatgtcaac

SEQ ID NO: 204161 - DNA, 15 bp, Homo sapiens
gcccatatatgtcaa

SEQ ID NO: 204162 - DNA, 15 bp, Homo sapiens
cgcccatatatgtca

SEQ ID NO: 204163 - DNA, 15 bp, Homo sapiens
acgcccatatatgtc

SEQ ID NO: 204164 - DNA, 15 bp, Homo sapiens
gacgcccatatatgt

SEQ ID NO: 204165 - DNA, 15 bp, Homo sapiens
cgacgcccatatatg

SEQ ID NO: 204166 - DNA, 15 bp, Homo sapiens
acgacgcccatatat

SEQ ID NO: 204167 - DNA, 15 bp, Homo sapiens
tacgacgcccatata

SEQ ID NO: 204168 - DNA, 15 bp, Homo sapiens
atacgacgcccatat

SEQ ID NO: 204169 - DNA, 15 bp, Homo sapiens
aatacgacgcccata

SEQ ID NO: 204170 - DNA, 15 bp, Homo sapiens
aaatacgacgcccat

SEQ ID NO: 204171 - DNA, 15 bp, Homo sapiens
caaatacgacgccca

SEQ ID NO: 204172 - DNA, 15 bp, Homo sapiens
ccaaatacgacgccc

SEQ ID NO: 204173 - DNA, 15 bp, Homo sapiens
accaaatacgacgcc

SEQ ID NO: 204174 - DNA, 15 bp, Homo sapiens
caccaaatacgacgc

SEQ ID NO: 204175 - DNA, 15 bp, Homo sapiens
ccaccaaatacgacg

SEQ ID NO: 204176 - DNA, 15 bp, Homo sapiens
cccaccaaatacgac

SEQ ID NO: 204177 - DNA, 15 bp, Homo sapiens
ccccaccaaatacga

SEQ ID NO: 204178 - DNA, 15 bp, Homo sapiens
accccaccaaatacg

SEQ ID NO: 204179 - DNA, 15 bp, Homo sapiens
gaccccaccaaatac

SEQ ID NO: 204180 - DNA, 15 bp, Homo sapiens
tgaccccaccaaata

SEQ ID NO: 204181 - DNA, 15 bp, Homo sapiens
ttgaccccaccaaat

SEQ ID NO: 204182 - DNA, 15 bp, Homo sapiens
cttgaccccaccaaa

SEQ ID NO: 204183 - DNA, 15 bp, Homo sapiens
tcttgaccccaccaa

SEQ ID NO: 204184 - DNA, 15 bp, Homo sapiens
ctcttgaccccacca

SEQ ID NO: 204185 - DNA, 15 bp, Homo sapiens
actcttgaccccacc

SEQ ID NO: 204186 - DNA, 15 bp, Homo sapiens
gactcttgaccccac

SEQ ID NO: 204187 - DNA, 15 bp, Homo sapiens
ggactcttgacccca

SEQ ID NO: 204188 - DNA, 15 bp, Homo sapiens
cggactcttgacccc

SEQ ID NO: 204189 - DNA, 15 bp, Homo sapiens
ccggactcttgaccc

SEQ ID NO: 204190 - DNA, 15 bp, Homo sapiens
tccggactcttgacc

SEQ ID NO: 204191 - DNA, 15 bp, Homo sapiens
ctccggactcttgac

SEQ ID NO: 204192 - DNA, 15 bp, Homo sapiens
cctccggactcttga

SEQ ID NO: 204193 - DNA, 15 bp, Homo sapiens
ccctccggactcttg

SEQ ID NO: 204194 - DNA, 15 bp, Homo sapiens
tccctccggactctt

SEQ ID NO: 204195 - DNA, 15 bp, Homo sapiens
ctccctccggactct

SEQ ID NO: 204196 - DNA, 15 bp, Homo sapiens
cctccctccggactc

SEQ ID NO: 204197 - DNA, 15 bp, Homo sapiens
gcctccctccggact

SEQ ID NO: 204198 - DNA, 15 bp, Homo sapiens
cgcctccctccggac

SEQ ID NO: 204199 - DNA, 15 bp, Homo sapiens
gcgcctccctccgga

SEQ ID NO: 204200 - DNA, 15 bp, Homo sapiens
tgcgcctccctccgg

SEQ ID NO: 204201 - DNA, 15 bp, Homo sapiens
atgcgcctccctccg

SEQ ID NO: 204202 - DNA, 15 bp, Homo sapiens
gatgcgcctccctcc

SEQ ID NO: 204203 - DNA, 15 bp, Homo sapiens
ggatgcgcctccctc

SEQ ID NO: 204204 - DNA, 15 bp, Homo sapiens
tggatgcgcctccct

SEQ ID NO: 204205 - DNA, 15 bp, Homo sapiens
ctggatgcgcctccc

SEQ ID NO: 204206 - DNA, 15 bp, Homo sapiens
gctggatgcgcctcc

SEQ ID NO: 204207 - DNA, 15 bp, Homo sapiens
agctggatgcgcctc

SEQ ID NO: 204208 - DNA, 15 bp, Homo sapiens
aagctggatgcgcct

SEQ ID NO: 204209 - DNA, 15 bp, Homo sapiens
gaagctggatgcgcc

SEQ ID NO: 204210 - DNA, 15 bp, Homo sapiens
agaagctggatgcgc

SEQ ID NO: 204211 - DNA, 15 bp, Homo sapiens
cagaagctggatgcg

SEQ ID NO: 204212 - DNA, 15 bp, Homo sapiens
acagaagctggatgc

SEQ ID NO: 204213 - DNA, 15 bp, Homo sapiens
gacagaagctggatg

SEQ ID NO: 204214 - DNA, 15 bp, Homo sapiens
agacagaagctggat

SEQ ID NO: 204215 - DNA, 15 bp, Homo sapiens
aagacagaagctgga

SEQ ID NO: 204216 - DNA, 15 bp, Homo sapiens
caagacagaagctgg

SEQ ID NO: 204217 - DNA, 15 bp, Homo sapiens
ccaagacagaagctg

SEQ ID NO: 204218 - DNA, 15 bp, Homo sapiens
gccaagacagaagct

SEQ ID NO: 204219 - DNA, 15 bp, Homo sapiens
agccaagacagaagc

SEQ ID NO: 204220 - DNA, 15 bp, Homo sapiens
cagccaagacagaag

SEQ ID NO: 204221 - DNA, 15 bp, Homo sapiens
gcagccaagacagaa

SEQ ID NO: 204222 - DNA, 15 bp, Homo sapiens
tgcagccaagacaga

SEQ ID NO: 204223 - DNA, 15 bp, Homo sapiens
ctgcagccaagacag

SEQ ID NO: 204224 - DNA, 15 bp, Homo sapiens
cctgcagccaagaca

SEQ ID NO: 204225 - DNA, 15 bp, Homo sapiens
gcctgcagccaagac

SEQ ID NO: 204226 - DNA, 15 bp, Homo sapiens
ggcctgcagccaaga

SEQ ID NO: 204227 - DNA, 15 bp, Homo sapiens
tggcctgcagccaag

SEQ ID NO: 204228 - DNA, 15 bp, Homo sapiens
ctggcctgcagccaa

SEQ ID NO: 204229 - DNA, 15 bp, Homo sapiens
cctggcctgcagcca

SEQ ID NO: 204230 - DNA, 15 bp, Homo sapiens
acctggcctgcagcc

SEQ ID NO: 204231 - DNA, 15 bp, Homo sapiens
gacctggcctgcagc

SEQ ID NO: 204232 - DNA, 15 bp, Homo sapiens
agacctggcctgcag

SEQ ID NO: 204233 - DNA, 15 bp, Homo sapiens
cagacctggcctgca

SEQ ID NO: 204234 - DNA, 15 bp, Homo sapiens
gcagacctggcctgc

SEQ ID NO: 204235 - DNA, 15 bp, Homo sapiens
ggcagacctggcctg

SEQ ID NO: 204236 - DNA, 15 bp, Homo sapiens
gggcagacctggcct

SEQ ID NO: 204237 - DNA, 15 bp, Homo sapiens
tgggcagacctggcc

SEQ ID NO: 204238 - DNA, 15 bp, Homo sapiens
atgggcagacctggc

SEQ ID NO: 204239 - DNA, 15 bp, Homo sapiens
catgggcagacctgg

SEQ ID NO: 204240 - DNA, 15 bp, Homo sapiens
tcatgggcagacctg

SEQ ID NO: 204241 - DNA, 15 bp, Homo sapiens
ctcatgggcagacct

SEQ ID NO: 204242 - DNA, 15 bp, Homo sapiens
tctcatgggcagacc

SEQ ID NO: 204243 - DNA, 15 bp, Homo sapiens
gtctcatgggcagac

SEQ ID NO: 204244 - DNA, 15 bp, Homo sapiens
cgtctcatgggcaga

SEQ ID NO: 204245 - DNA, 15 bp, Homo sapiens
ccgtctcatgggcag

SEQ ID NO: 204246 - DNA, 15 bp, Homo sapiens
accgtctcatgggca

SEQ ID NO: 204247 - DNA, 15 bp, Homo sapiens
aaccgtctcatgggc

SEQ ID NO: 204248 - DNA, 15 bp, Homo sapiens
gaaccgtctcatggg

SEQ ID NO: 204249 - DNA, 15 bp, Homo sapiens
agaaccgtctcatgg

SEQ ID NO: 204250 - DNA, 15 bp, Homo sapiens
gagaaccgtctcatg

SEQ ID NO: 204251 - DNA, 15 bp, Homo sapiens
ggagaaccgtctcat

SEQ ID NO: 204252 - DNA, 15 bp, Homo sapiens
aggagaaccgtctca

SEQ ID NO: 204253 - DNA, 15 bp, Homo sapiens
gaggagaaccgtctc

SEQ ID NO: 204254 - DNA, 15 bp, Homo sapiens
ggaggagaaccgtct

SEQ ID NO: 204255 - DNA, 15 bp, Homo sapiens
aggaggagaaccgtc

SEQ ID NO: 204256 - DNA, 15 bp, Homo sapiens
aaggaggagaaccgt

SEQ ID NO: 204257 - DNA, 15 bp, Homo sapiens
taaggaggagaaccg

SEQ ID NO: 204258 - DNA, 15 bp, Homo sapiens
ttaaggaggagaacc

SEQ ID NO: 204259 - DNA, 15 bp, Homo sapiens
gttaaggaggagaac

SEQ ID NO: 204260 - DNA, 15 bp, Homo sapiens
ggttaaggaggagaa

SEQ ID NO: 204261 - DNA, 15 bp, Homo sapiens
aggttaaggaggaga

SEQ ID NO: 204262 - DNA, 15 bp, Homo sapiens
taggttaaggaggag

SEQ ID NO: 204263 - DNA, 15 bp, Homo sapiens
ataggttaaggagga

SEQ ID NO: 204264 - DNA, 15 bp, Homo sapiens
aataggttaaggagg

SEQ ID NO: 204265 - DNA, 15 bp, Homo sapiens
gaataggttaaggag

SEQ ID NO: 204266 - DNA, 15 bp, Homo sapiens
tgaataggttaagga

SEQ ID NO: 204267 - DNA, 15 bp, Homo sapiens
ttgaataggttaagg

SEQ ID NO: 204268 - DNA, 15 bp, Homo sapiens
attgaataggttaag

SEQ ID NO: 204269 - DNA, 15 bp, Homo sapiens
gattgaataggttaa

SEQ ID NO: 204270 - DNA, 15 bp, Homo sapiens
ggattgaataggtta

SEQ ID NO: 204271 - DNA, 15 bp, Homo sapiens
tggattgaataggtt

SEQ ID NO: 204272 - DNA, 15 bp, Homo sapiens
ttggattgaataggt

SEQ ID NO: 204273 - DNA, 15 bp, Homo sapiens
attggattgaatagg

SEQ ID NO: 204274 - DNA, 15 bp, Homo sapiens
tattggattgaatag

SEQ ID NO: 204275 - DNA, 15 bp, Homo sapiens
ttattggattgaata

SEQ ID NO: 204276 - DNA, 15 bp, Homo sapiens
attattggattgaat

SEQ ID NO: 204277 - DNA, 15 bp, Homo sapiens
gattattggattgaa

SEQ ID NO: 204278 - DNA, 15 bp, Homo sapiens
cgattattggattga

SEQ ID NO: 204279 - DNA, 15 bp, Homo sapiens
tcgattattggattg

SEQ ID NO: 204280 - DNA, 15 bp, Homo sapiens
atcgattattggatt

SEQ ID NO: 204281 - DNA, 15 bp, Homo sapiens
catcgattattggat

SEQ ID NO: 204282 - DNA, 15 bp, Homo sapiens
tcatcgattattgga

SEQ ID NO: 204283 - DNA, 15 bp, Homo sapiens
ctcatcgattattgg

SEQ ID NO: 204284 - DNA, 15 bp, Homo sapiens
gctcatcgattattg

SEQ ID NO: 204285 - DNA, 15 bp, Homo sapiens
tgctcatcgattatt

SEQ ID NO: 204286 - DNA, 15 bp, Homo sapiens
ctgctcatcgattat

SEQ ID NO: 204287 - DNA, 15 bp, Homo sapiens
cctgctcatcgatta

SEQ ID NO: 204288 - DNA, 15 bp, Homo sapiens
acctgctcatcgatt

SEQ ID NO: 204289 - DNA, 15 bp, Homo sapiens
tacctgctcatcgat

SEQ ID NO: 204290 - DNA, 15 bp, Homo sapiens
atacctgctcatcga

SEQ ID NO: 204291 - DNA, 15 bp, Homo sapiens
aatacctgctcatcg

SEQ ID NO: 204292 - DNA, 15 bp, Homo sapiens
aaatacctgctcatc

SEQ ID NO: 204293 - DNA, 15 bp, Homo sapiens
aaaatacctgctcat

SEQ ID NO: 204294 - DNA, 15 bp, Homo sapiens
gaaaatacctgctca

SEQ ID NO: 204295 - DNA, 15 bp, Homo sapiens
agaaaatacctgctc

SEQ ID NO: 204296 - DNA, 15 bp, Homo sapiens
cagaaaatacctgct

SEQ ID NO: 204297 - DNA, 15 bp, Homo sapiens
tcagaaaatacctgc

SEQ ID NO: 204298 - DNA, 15 bp, Homo sapiens
ctcagaaaatacctg

SEQ ID NO: 204299 - DNA, 15 bp, Homo sapiens
tctcagaaaatacct

SEQ ID NO: 204300 - DNA, 15 bp, Homo sapiens
atctcagaaaatacc

SEQ ID NO: 204301 - DNA, 15 bp, Homo sapiens
gatctcagaaaatac

SEQ ID NO: 204302 - DNA, 15 bp, Homo sapiens
agatctcagaaaata

SEQ ID NO: 204303 - DNA, 15 bp, Homo sapiens
cagatctcagaaaat

SEQ ID NO: 204304 - DNA, 15 bp, Homo sapiens
tcagatctcagaaaa

SEQ ID NO: 204305 - DNA, 15 bp, Homo sapiens
ttcagatctcagaaa

SEQ ID NO: 204306 - DNA, 15 bp, Homo sapiens
cttcagatctcagaa

SEQ ID NO: 204307 - DNA, 15 bp, Homo sapiens
acttcagatctcaga

SEQ ID NO: 204308 - DNA, 15 bp, Homo sapiens
cacttcagatctcag

SEQ ID NO: 204309 - DNA, 15 bp, Homo sapiens
acacttcagatctca

SEQ ID NO: 204310 - DNA, 15 bp, Homo sapiens
gacacttcagatctc

SEQ ID NO: 204311 - DNA, 15 bp, Homo sapiens
tgacacttcagatct

SEQ ID NO: 204312 - DNA, 15 bp, Homo sapiens
ttgacacttcagatc

SEQ ID NO: 204313 - DNA, 15 bp, Homo sapiens
cttgacacttcagat

SEQ ID NO: 204314 - DNA, 15 bp, Homo sapiens
acttgacacttcaga

SEQ ID NO: 204315 - DNA, 15 bp, Homo sapiens
tacttgacacttcag

SEQ ID NO: 204316 - DNA, 15 bp, Homo sapiens
gtacttgacacttca

SEQ ID NO: 204317 - DNA, 15 bp, Homo sapiens
agtacttgacacttc

SEQ ID NO: 204318 - DNA, 15 bp, Homo sapiens
cagtacttgacactt

SEQ ID NO: 204319 - DNA, 15 bp, Homo sapiens
tcagtacttgacact

SEQ ID NO: 204320 - DNA, 15 bp, Homo sapiens
ttcagtacttgacac

SEQ ID NO: 204321 - DNA, 15 bp, Homo sapiens
cttcagtacttgaca

SEQ ID NO: 204322 - DNA, 15 bp, Homo sapiens
tcttcagtacttgac

SEQ ID NO: 204323 - DNA, 15 bp, Homo sapiens
gtcttcagtacttga

SEQ ID NO: 204324 - DNA, 15 bp, Homo sapiens
tgtcttcagtacttg

SEQ ID NO: 204325 - DNA, 15 bp, Homo sapiens
atgtcttcagtactt

SEQ ID NO: 204326 - DNA, 15 bp, Homo sapiens
gatgtcttcagtact

SEQ ID NO: 204327 - DNA, 15 bp, Homo sapiens
tgatgtcttcagtac

SEQ ID NO: 204328 - DNA, 15 bp, Homo sapiens
gtgatgtcttcagta

SEQ ID NO: 204329 - DNA, 15 bp, Homo sapiens
ggtgatgtcttcagt

SEQ ID NO: 204330 - DNA, 15 bp, Homo sapiens
tggtgatgtcttcag

SEQ ID NO: 204331 - DNA, 15 bp, Homo sapiens
ctggtgatgtcttca

SEQ ID NO: 204332 - DNA, 15 bp, Homo sapiens
cctggtgatgtcttc

SEQ ID NO: 204333 - DNA, 15 bp, Homo sapiens
gcctggtgatgtctt

SEQ ID NO: 204334 - DNA, 15 bp, Homo sapiens
agcctggtgatgtct

SEQ ID NO: 204335 - DNA, 15 bp, Homo sapiens
aagcctggtgatgtc

SEQ ID NO: 204336 - DNA, 15 bp, Homo sapiens
caagcctggtgatgt

SEQ ID NO: 204337 - DNA, 15 bp, Homo sapiens
ccaagcctggtgatg

SEQ ID NO: 204338 - DNA, 15 bp, Homo sapiens
gccaagcctggtgat

SEQ ID NO: 204339 - DNA, 15 bp, Homo sapiens
agccaagcctggtga

SEQ ID NO: 204340 - DNA, 15 bp, Homo sapiens
gagccaagcctggtg

SEQ ID NO: 204341 - DNA, 15 bp, Homo sapiens
ggagccaagcctggt

SEQ ID NO: 204342 - DNA, 15 bp, Homo sapiens
cggagccaagcctgg

SEQ ID NO: 204343 - DNA, 15 bp, Homo sapiens
acggagccaagcctg

SEQ ID NO: 204344 - DNA, 15 bp, Homo sapiens
cacggagccaagcct

SEQ ID NO: 204345 - DNA, 15 bp, Homo sapiens
ccacggagccaagcc

SEQ ID NO: 204346 - DNA, 15 bp, Homo sapiens
cccacggagccaagc

SEQ ID NO: 204347 - DNA, 15 bp, Homo sapiens
tcccacggagccaag

SEQ ID NO: 204348 - DNA, 15 bp, Homo sapiens
gtcccacggagccaa

SEQ ID NO: 204349 - DNA, 15 bp, Homo sapiens
tgtcccacggagcca

SEQ ID NO: 204350 - DNA, 15 bp, Homo sapiens
gtgtcccacggagcc

SEQ ID NO: 204351 - DNA, 15 bp, Homo sapiens
tgtgtcccacggagc

SEQ ID NO: 204352 - DNA, 15 bp, Homo sapiens
gtgtgtcccacggag

SEQ ID NO: 204353 - DNA, 15 bp, Homo sapiens
tgtgtgtcccacgga

SEQ ID NO: 204354 - DNA, 15 bp, Homo sapiens
ttgtgtgtcccacgg

SEQ ID NO: 204355 - DNA, 15 bp, Homo sapiens
cttgtgtgtcccacg

SEQ ID NO: 204356 - DNA, 15 bp, Homo sapiens
ccttgtgtgtcccac

SEQ ID NO: 204357 - DNA, 15 bp, Homo sapiens
tccttgtgtgtccca

SEQ ID NO: 204358 - DNA, 15 bp, Homo sapiens
ttccttgtgtgtccc

SEQ ID NO: 204359 - DNA, 15 bp, Homo sapiens
attccttgtgtgtcc

SEQ ID NO: 204360 - DNA, 15 bp, Homo sapiens
aattccttgtgtgtc

SEQ ID NO: 204361 - DNA, 15 bp, Homo sapiens
taattccttgtgtgt

SEQ ID NO: 204362 - DNA, 15 bp, Homo sapiens
ataattccttgtgtg

SEQ ID NO: 204363 - DNA, 15 bp, Homo sapiens
tataattccttgtgt

SEQ ID NO: 204364 - DNA, 15 bp, Homo sapiens
ttataattccttgtg

SEQ ID NO: 204365 - DNA, 15 bp, Homo sapiens
tttataattccttgt

SEQ ID NO: 204366 - DNA, 15 bp, Homo sapiens
ctttataattccttg

SEQ ID NO: 204367 - DNA, 15 bp, Homo sapiens
gctttataattcctt

SEQ ID NO: 204368 - DNA, 15 bp, Homo sapiens
tgctttataattcct

SEQ ID NO: 204369 - DNA, 15 bp, Homo sapiens
ctgctttataattcc

SEQ ID NO: 204370 - DNA, 15 bp, Homo sapiens
cctgctttataattc

SEQ ID NO: 204371 - DNA, 15 bp, Homo sapiens
tcctgctttataatt

SEQ ID NO: 204372 - DNA, 15 bp, Homo sapiens
gtcctgctttataat

SEQ ID NO: 204373 - DNA, 15 bp, Homo sapiens
ggtcctgctttataa

SEQ ID NO: 204374 - DNA, 15 bp, Homo sapiens
gggtcctgctttata

SEQ ID NO: 204375 - DNA, 15 bp, Homo sapiens
ggggtcctgctttat

SEQ ID NO: 204376 - DNA, 15 bp, Homo sapiens
gggggtcctgcttta

SEQ ID NO: 204377 - DNA, 15 bp, Homo sapiens
agggggtcctgcttt

SEQ ID NO: 204378 - DNA, 15 bp, Homo sapiens
gagggggtcctgctt

SEQ ID NO: 204379 - DNA, 15 bp, Homo sapiens
tgagggggtcctgct

SEQ ID NO: 204380 - DNA, 15 bp, Homo sapiens
atgagggggtcctgc

SEQ ID NO: 204381 - DNA, 15 bp, Homo sapiens
gatgagggggtcctg

SEQ ID NO: 204382 - DNA, 15 bp, Homo sapiens
ggatgagggggtcct

SEQ ID NO: 204383 - DNA, 15 bp, Homo sapiens
gggatgagggggtcc

SEQ ID NO: 204384 - DNA, 15 bp, Homo sapiens
ggggatgagggggtc

SEQ ID NO: 204385 - DNA, 15 bp, Homo sapiens
gggggatgagggggt

SEQ ID NO: 204386 - DNA, 15 bp, Homo sapiens
agggggatgaggggg

SEQ ID NO: 204387 - DNA, 15 bp, Homo sapiens
gagggggatgagggg

SEQ ID NO: 204388 - DNA, 15 bp, Homo sapiens
tgagggggatgaggg

SEQ ID NO: 204389 - DNA, 15 bp, Homo sapiens
ctgagggggatgagg

SEQ ID NO: 204390 - DNA, 15 bp, Homo sapiens
cctgagggggatgag

SEQ ID NO: 204391 - DNA, 15 bp, Homo sapiens
tcctgagggggatga

SEQ ID NO: 204392 - DNA, 15 bp, Homo sapiens
ctcctgagggggatg

SEQ ID NO: 204393 - DNA, 15 bp, Homo sapiens
gctcctgagggggat

SEQ ID NO: 204394 - DNA, 15 bp, Homo sapiens
agctcctgaggggga

SEQ ID NO: 204395 - DNA, 15 bp, Homo sapiens
tagctcctgaggggg

SEQ ID NO: 204396 - DNA, 15 bp, Homo sapiens
ttagctcctgagggg

SEQ ID NO: 204397 - DNA, 15 bp, Homo sapiens
gttagctcctgaggg

SEQ ID NO: 204398 - DNA, 15 bp, Homo sapiens
tgttagctcctgagg

SEQ ID NO: 204399 - DNA, 15 bp, Homo sapiens
ctgttagctcctgag

SEQ ID NO: 204400 - DNA, 15 bp, Homo sapiens
actgttagctcctga

SEQ ID NO: 204401 - DNA, 15 bp, Homo sapiens
gactgttagctcctg

SEQ ID NO: 204402 - DNA, 15 bp, Homo sapiens
ggactgttagctcct

SEQ ID NO: 204403 - DNA, 15 bp, Homo sapiens
tggactgttagctcc

SEQ ID NO: 204404 - DNA, 15 bp, Homo sapiens
ttggactgttagctc

SEQ ID NO: 204405 - DNA, 15 bp, Homo sapiens
attggactgttagct

SEQ ID NO: 204406 - DNA, 15 bp, Homo sapiens
aattggactgttagc

SEQ ID NO: 204407 - DNA, 15 bp, Homo sapiens
caattggactgttag

SEQ ID NO: 204408 - DNA, 15 bp, Homo sapiens
tcaattggactgtta

SEQ ID NO: 204409 - DNA, 15 bp, Homo sapiens
ctcaattggactgtt

SEQ ID NO: 204410 - DNA, 15 bp, Homo sapiens
cctcaattggactgt

SEQ ID NO: 204411 - DNA, 15 bp, Homo sapiens
ccctcaattggactg

SEQ ID NO: 204412 - DNA, 15 bp, Homo sapiens
tccctcaattggact

SEQ ID NO: 204413 - DNA, 15 bp, Homo sapiens
ttccctcaattggac

SEQ ID NO: 204414 - DNA, 15 bp, Homo sapiens
cttccctcaattgga

SEQ ID NO: 204415 - DNA, 15 bp, Homo sapiens
gcttccctcaattgg

SEQ ID NO: 204416 - DNA, 15 bp, Homo sapiens
tgcttccctcaattg

SEQ ID NO: 204417 - DNA, 15 bp, Homo sapiens
ttgcttccctcaatt

SEQ ID NO: 204418 - DNA, 15 bp, Homo sapiens
cttgcttccctcaat

SEQ ID NO: 204419 - DNA, 15 bp, Homo sapiens
tcttgcttccctcaa

SEQ ID NO: 204420 - DNA, 15 bp, Homo sapiens
ctcttgcttccctca

SEQ ID NO: 204421 - DNA, 15 bp, Homo sapiens
tctcttgcttccctc

SEQ ID NO: 204422 - DNA, 15 bp, Homo sapiens
ctctcttgcttccct

SEQ ID NO: 204423 - DNA, 15 bp, Homo sapiens
tctctcttgcttccc

SEQ ID NO: 204424 - DNA, 15 bp, Homo sapiens
gtctctcttgcttcc

SEQ ID NO: 204425 - DNA, 15 bp, Homo sapiens
tgtctctcttgcttc

SEQ ID NO: 204426 - DNA, 15 bp, Homo sapiens
ctgtctctcttgctt

SEQ ID NO: 204427 - DNA, 15 bp, Homo sapiens
tctgtctctcttgct

SEQ ID NO: 204428 - DNA, 15 bp, Homo sapiens
gtctgtctctcttgc

SEQ ID NO: 204429 - DNA, 15 bp, Homo sapiens
cgtctgtctctcttg

SEQ ID NO: 204430 - DNA, 15 bp, Homo sapiens
gcgtctgtctctctt

SEQ ID NO: 204431 - DNA, 15 bp, Homo sapiens
tgcgtctgtctctct

SEQ ID NO: 204432 - DNA, 15 bp, Homo sapiens
gtgcgtctgtctctc

SEQ ID NO: 204433 - DNA, 15 bp, Homo sapiens
cgtgcgtctgtctct

SEQ ID NO: 204434 - DNA, 15 bp, Homo sapiens
acgtgcgtctgtctc

SEQ ID NO: 204435 - DNA, 15 bp, Homo sapiens
cacgtgcgtctgtct

SEQ ID NO: 204436 - DNA, 15 bp, Homo sapiens
tcacgtgcgtctgtc

SEQ ID NO: 204437 - DNA, 15 bp, Homo sapiens
ttcacgtgcgtctgt

SEQ ID NO: 204438 - DNA, 15 bp, Homo sapiens
tttcacgtgcgtctg

SEQ ID NO: 204439 - DNA, 15 bp, Homo sapiens
ctttcacgtgcgtct

SEQ ID NO: 204440 - DNA, 15 bp, Homo sapiens
cctttcacgtgcgtc

SEQ ID NO: 204441 - DNA, 15 bp, Homo sapiens
acctttcacgtgcgt

SEQ ID NO: 204442 - DNA, 15 bp, Homo sapiens
aacctttcacgtgcg

SEQ ID NO: 204443 - DNA, 15 bp, Homo sapiens
taacctttcacgtgc

SEQ ID NO: 204444 - DNA, 15 bp, Homo sapiens
ttaacctttcacgtg

SEQ ID NO: 204445 - DNA, 15 bp, Homo sapiens
tttaacctttcacgt

SEQ ID NO: 204446 - DNA, 15 bp, Homo sapiens
gtttaacctttcacg

SEQ ID NO: 204447 - DNA, 15 bp, Homo sapiens
tgtttaacctttcac

SEQ ID NO: 204448 - DNA, 15 bp, Homo sapiens
ttgtttaacctttca

SEQ ID NO: 204449 - DNA, 15 bp, Homo sapiens
gttgtttaacctttc

SEQ ID NO: 204450 - DNA, 15 bp, Homo sapiens
agttgtttaaccttt

SEQ ID NO: 204451 - DNA, 15 bp, Homo sapiens
aagttgtttaacctt

SEQ ID NO: 204452 - DNA, 15 bp, Homo sapiens
caagttgtttaacct

SEQ ID NO: 204453 - DNA, 15 bp, Homo sapiens
acaagttgtttaacc

SEQ ID NO: 204454 - DNA, 15 bp, Homo sapiens
gacaagttgtttaac

SEQ ID NO: 204455 - DNA, 15 bp, Homo sapiens
ggacaagttgtttaa

SEQ ID NO: 204456 - DNA, 15 bp, Homo sapiens
aggacaagttgttta

SEQ ID NO: 204457 - DNA, 15 bp, Homo sapiens
taggacaagttgttt

SEQ ID NO: 204458 - DNA, 15 bp, Homo sapiens
ctaggacaagttgtt

SEQ ID NO: 204459 - DNA, 15 bp, Homo sapiens
gctaggacaagttgt

SEQ ID NO: 204460 - DNA, 15 bp, Homo sapiens
ggctaggacaagttg

SEQ ID NO: 204461 - DNA, 15 bp, Homo sapiens
aggctaggacaagtt

SEQ ID NO: 204462 - DNA, 15 bp, Homo sapiens
caggctaggacaagt

SEQ ID NO: 204463 - DNA, 15 bp, Homo sapiens
tcaggctaggacaag

SEQ ID NO: 204464 - DNA, 15 bp, Homo sapiens
ttcaggctaggacaa

SEQ ID NO: 204465 - DNA, 15 bp, Homo sapiens
tttcaggctaggaca

SEQ ID NO: 204466 - DNA, 15 bp, Homo sapiens
ctttcaggctaggac

SEQ ID NO: 204467 - DNA, 15 bp, Homo sapiens
tctttcaggctagga

SEQ ID NO: 204468 - DNA, 15 bp, Homo sapiens
gtctttcaggctagg

SEQ ID NO: 204469 - DNA, 15 bp, Homo sapiens
tgtctttcaggctag

SEQ ID NO: 204470 - DNA, 15 bp, Homo sapiens
ttgtctttcaggcta

SEQ ID NO: 204471 - DNA, 15 bp, Homo sapiens
cttgtctttcaggct

SEQ ID NO: 204472 - DNA, 15 bp, Homo sapiens
tcttgtctttcaggc

SEQ ID NO: 204473 - DNA, 15 bp, Homo sapiens
gtcttgtctttcagg

SEQ ID NO: 204474 - DNA, 15 bp, Homo sapiens
ggtcttgtctttcag

SEQ ID NO: 204475 - DNA, 15 bp, Homo sapiens
gggtcttgtctttca

SEQ ID NO: 204476 - DNA, 15 bp, Homo sapiens
cgggtcttgtctttc

SEQ ID NO: 204477 - DNA, 15 bp, Homo sapiens
acgggtcttgtcttt

SEQ ID NO: 204478 - DNA, 15 bp, Homo sapiens
cacgggtcttgtctt

SEQ ID NO: 204479 - DNA, 15 bp, Homo sapiens
ccacgggtcttgtct

SEQ ID NO: 204480 - DNA, 15 bp, Homo sapiens
cccacgggtcttgtc

SEQ ID NO: 204481 - DNA, 15 bp, Homo sapiens
tcccacgggtcttgt

SEQ ID NO: 204482 - DNA, 15 bp, Homo sapiens
ttcccacgggtcttg

SEQ ID NO: 204483 - DNA, 15 bp, Homo sapiens
tttcccacgggtctt

SEQ ID NO: 204484 - DNA, 15 bp, Homo sapiens
gtttcccacgggtct

SEQ ID NO: 204485 - DNA, 15 bp, Homo sapiens
tgtttcccacgggtc

SEQ ID NO: 204486 - DNA, 15 bp, Homo sapiens
ttgtttcccacgggt

SEQ ID NO: 204487 - DNA, 15 bp, Homo sapiens
attgtttcccacggg

SEQ ID NO: 204488 - DNA, 15 bp, Homo sapiens
aattgtttcccacgg

SEQ ID NO: 204489 - DNA, 15 bp, Homo sapiens
gaattgtttcccacg

SEQ ID NO: 204490 - DNA, 15 bp, Homo sapiens
tgaattgtttcccac

SEQ ID NO: 204491 - DNA, 15 bp, Homo sapiens
ctgaattgtttccca

SEQ ID NO: 204492 - DNA, 15 bp, Homo sapiens
cctgaattgtttccc

SEQ ID NO: 204493 - DNA, 15 bp, Homo sapiens
tcctgaattgtttcc

SEQ ID NO: 204494 - DNA, 15 bp, Homo sapiens
ttcctgaattgtttc

SEQ ID NO: 204495 - DNA, 15 bp, Homo sapiens
tttcctgaattgttt

SEQ ID NO: 204496 - DNA, 15 bp, Homo sapiens
atttcctgaattgtt

SEQ ID NO: 204497 - DNA, 15 bp, Homo sapiens
catttcctgaattgt

SEQ ID NO: 204498 - DNA, 15 bp, Homo sapiens
acatttcctgaattg

SEQ ID NO: 204499 - DNA, 15 bp, Homo sapiens
gacatttcctgaatt

SEQ ID NO: 204500 - DNA, 15 bp, Homo sapiens
tgacatttcctgaat

SEQ ID NO: 204501 - DNA, 15 bp, Homo sapiens
gtgacatttcctgaa

SEQ ID NO: 204502 - DNA, 15 bp, Homo sapiens
ggtgacatttcctga

SEQ ID NO: 204503 - DNA, 15 bp, Homo sapiens
tggtgacatttcctg

SEQ ID NO: 204504 - DNA, 15 bp, Homo sapiens
ctggtgacatttcct

SEQ ID NO: 204505 - DNA, 15 bp, Homo sapiens
cctggtgacatttcc

SEQ ID NO: 204506 - DNA, 15 bp, Homo sapiens
gcctggtgacatttc

SEQ ID NO: 204507 - DNA, 15 bp, Homo sapiens
tgcctggtgacattt

SEQ ID NO: 204508 - DNA, 15 bp, Homo sapiens
ctgcctggtgacatt

SEQ ID NO: 204509 - DNA, 15 bp, Homo sapiens
gctgcctggtgacat

SEQ ID NO: 204510 - DNA, 15 bp, Homo sapiens
tgctgcctggtgaca

SEQ ID NO: 204511 - DNA, 15 bp, Homo sapiens
atgctgcctggtgac

SEQ ID NO: 204512 - DNA, 15 bp, Homo sapiens
gatgctgcctggtga

SEQ ID NO: 204513 - DNA, 15 bp, Homo sapiens
agatgctgcctggtg

SEQ ID NO: 204514 - DNA, 15 bp, Homo sapiens
aagatgctgcctggt

SEQ ID NO: 204515 - DNA, 15 bp, Homo sapiens
gaagatgctgcctgg

SEQ ID NO: 204516 - DNA, 15 bp, Homo sapiens
agaagatgctgcctg

SEQ ID NO: 204517 - DNA, 15 bp, Homo sapiens
aagaagatgctgcct

SEQ ID NO: 204518 - DNA, 15 bp, Homo sapiens
taagaagatgctgcc

SEQ ID NO: 204519 - DNA, 15 bp, Homo sapiens
ctaagaagatgctgc

SEQ ID NO: 204520 - DNA, 15 bp, Homo sapiens
actaagaagatgctg

SEQ ID NO: 204521 - DNA, 15 bp, Homo sapiens
cactaagaagatgct

SEQ ID NO: 204522 - DNA, 15 bp, Homo sapiens
gcactaagaagatgc

SEQ ID NO: 204523 - DNA, 15 bp, Homo sapiens
agcactaagaagatg

SEQ ID NO: 204524 - DNA, 15 bp, Homo sapiens
cagcactaagaagat

SEQ ID NO: 204525 - DNA, 15 bp, Homo sapiens
gcagcactaagaaga

SEQ ID NO: 204526 - DNA, 15 bp, Homo sapiens
tgcagcactaagaag

SEQ ID NO: 204527 - DNA, 15 bp, Homo sapiens
ttgcagcactaagaa

SEQ ID NO: 204528 - DNA, 15 bp, Homo sapiens
tttgcagcactaaga

SEQ ID NO: 204529 - DNA, 15 bp, Homo sapiens
ctttgcagcactaag

SEQ ID NO: 204530 - DNA, 15 bp, Homo sapiens
tctttgcagcactaa

SEQ ID NO: 204531 - DNA, 15 bp, Homo sapiens
atctttgcagcacta

SEQ ID NO: 204532 - DNA, 15 bp, Homo sapiens
gatctttgcagcact

SEQ ID NO: 204533 - DNA, 15 bp, Homo sapiens
agatctttgcagcac

SEQ ID NO: 204534 - DNA, 15 bp, Homo sapiens
cagatctttgcagca

SEQ ID NO: 204535 - DNA, 15 bp, Homo sapiens
ccagatctttgcagc

SEQ ID NO: 204536 - DNA, 15 bp, Homo sapiens
tccagatctttgcag

SEQ ID NO: 204537 - DNA, 15 bp, Homo sapiens
ctccagatctttgca

SEQ ID NO: 204538 - DNA, 15 bp, Homo sapiens
cctccagatctttgc

SEQ ID NO: 204539 - DNA, 15 bp, Homo sapiens
tcctccagatctttg

SEQ ID NO: 204540 - DNA, 15 bp, Homo sapiens
ttcctccagatcttt

SEQ ID NO: 204541 - DNA, 15 bp, Homo sapiens
gttcctccagatctt

SEQ ID NO: 204542 - DNA, 15 bp, Homo sapiens
cgttcctccagatct

SEQ ID NO: 204543 - DNA, 15 bp, Homo sapiens
tcgttcctccagatc

SEQ ID NO: 204544 - DNA, 15 bp, Homo sapiens
ttcgttcctccagat

SEQ ID NO: 204545 - DNA, 15 bp, Homo sapiens
attcgttcctccaga

SEQ ID NO: 204546 - DNA, 15 bp, Homo sapiens
cattcgttcctccag

SEQ ID NO: 204547 - DNA, 15 bp, Homo sapiens
tcattcgttcctcca

SEQ ID NO: 204548 - DNA, 15 bp, Homo sapiens
gtcattcgttcctcc

SEQ ID NO: 204549 - DNA, 15 bp, Homo sapiens
ggtcattcgttcctc

SEQ ID NO: 204550 - DNA, 15 bp, Homo sapiens
tggtcattcgttcct

SEQ ID NO: 204551 - DNA, 15 bp, Homo sapiens
ctggtcattcgttcc

SEQ ID NO: 204552 - DNA, 15 bp, Homo sapiens
gctggtcattcgttc

SEQ ID NO: 204553 - DNA, 15 bp, Homo sapiens
ggctggtcattcgtt

SEQ ID NO: 204554 - DNA, 15 bp, Homo sapiens
cggctggtcattcgt

SEQ ID NO: 204555 - DNA, 15 bp, Homo sapiens
ccggctggtcattcg

SEQ ID NO: 204556 - DNA, 15 bp, Homo sapiens
cccggctggtcattc

SEQ ID NO: 204557 - DNA, 15 bp, Homo sapiens
ccccggctggtcatt

SEQ ID NO: 204558 - DNA, 15 bp, Homo sapiens
gccccggctggtcat

SEQ ID NO: 204559 - DNA, 15 bp, Homo sapiens
tgccccggctggtca

SEQ ID NO: 204560 - DNA, 15 bp, Homo sapiens
gtgccccggctggtc

SEQ ID NO: 204561 - DNA, 15 bp, Homo sapiens
tgtgccccggctggt

SEQ ID NO: 204562 - DNA, 15 bp, Homo sapiens
ctgtgccccggctgg

SEQ ID NO: 204563 - DNA, 15 bp, Homo sapiens
cctgtgccccggctg

SEQ ID NO: 204564 - DNA, 15 bp, Homo sapiens
ccctgtgccccggct

SEQ ID NO: 204565 - DNA, 15 bp, Homo sapiens
cccctgtgccccggc

SEQ ID NO: 204566 - DNA, 15 bp, Homo sapiens
gcccctgtgccccgg

SEQ ID NO: 204567 - DNA, 15 bp, Homo sapiens
cgcccctgtgccccg

SEQ ID NO: 204568 - DNA, 15 bp, Homo sapiens
tcgcccctgtgcccc

SEQ ID NO: 204569 - DNA, 15 bp, Homo sapiens
ctcgcccctgtgccc

SEQ ID NO: 204570 - DNA, 15 bp, Homo sapiens
cctcgcccctgtgcc

SEQ ID NO: 204571 - DNA, 15 bp, Homo sapiens
ccctcgcccctgtgc

SEQ ID NO: 204572 - DNA, 15 bp, Homo sapiens
gccctcgcccctgtg

SEQ ID NO: 204573 - DNA, 15 bp, Homo sapiens
agccctcgcccctgt

SEQ ID NO: 204574 - DNA, 15 bp, Homo sapiens
aagccctcgcccctg

SEQ ID NO: 204575 - DNA, 15 bp, Homo sapiens
taagccctcgcccct

SEQ ID NO: 204576 - DNA, 15 bp, Homo sapiens
ctaagccctcgcccc

SEQ ID NO: 204577 - DNA, 15 bp, Homo sapiens
cctaagccctcgccc

SEQ ID NO: 204578 - DNA, 15 bp, Homo sapiens
gcctaagccctcgcc

SEQ ID NO: 204579 - DNA, 15 bp, Homo sapiens
agcctaagccctcgc

SEQ ID NO: 204580 - DNA, 15 bp, Homo sapiens
aagcctaagccctcg

SEQ ID NO: 204581 - DNA, 15 bp, Homo sapiens
gaagcctaagccctc

SEQ ID NO: 204582 - DNA, 15 bp, Homo sapiens
agaagcctaagccct

SEQ ID NO: 204583 - DNA, 15 bp, Homo sapiens
cagaagcctaagccc

SEQ ID NO: 204584 - DNA, 15 bp, Homo sapiens
ccagaagcctaagcc

SEQ ID NO: 204585 - DNA, 15 bp, Homo sapiens
cccagaagcctaagc

SEQ ID NO: 204586 - DNA, 15 bp, Homo sapiens
ccccagaagcctaag

SEQ ID NO: 204587 - DNA, 15 bp, Homo sapiens
accccagaagcctaa

SEQ ID NO: 204588 - DNA, 15 bp, Homo sapiens
gaccccagaagccta

SEQ ID NO: 204589 - DNA, 15 bp, Homo sapiens
ggaccccagaagcct

SEQ ID NO: 204590 - DNA, 15 bp, Homo sapiens
cggaccccagaagcc

SEQ ID NO: 204591 - DNA, 15 bp, Homo sapiens
ccggaccccagaagc

SEQ ID NO: 204592 - DNA, 15 bp, Homo sapiens
accggaccccagaag

SEQ ID NO: 204593 - DNA, 15 bp, Homo sapiens
aaccggaccccagaa

SEQ ID NO: 204594 - DNA, 15 bp, Homo sapiens
taaccggaccccaga

SEQ ID NO: 204595 - DNA, 15 bp, Homo sapiens
gtaaccggaccccag

SEQ ID NO: 204596 - DNA, 15 bp, Homo sapiens
tgtaaccggacccca

SEQ ID NO: 204597 - DNA, 15 bp, Homo sapiens
ttgtaaccggacccc

SEQ ID NO: 204598 - DNA, 15 bp, Homo sapiens
tttgtaaccggaccc

SEQ ID NO: 204599 - DNA, 15 bp, Homo sapiens
gtttgtaaccggacc

SEQ ID NO: 204600 - DNA, 15 bp, Homo sapiens
agtttgtaaccggac

SEQ ID NO: 204601 - DNA, 15 bp, Homo sapiens
cagtttgtaaccgga

SEQ ID NO: 204602 - DNA, 15 bp, Homo sapiens
acagtttgtaaccgg

SEQ ID NO: 204603 - DNA, 15 bp, Homo sapiens
cacagtttgtaaccg

SEQ ID NO: 204604 - DNA, 15 bp, Homo sapiens
tcacagtttgtaacc

SEQ ID NO: 204605 - DNA, 15 bp, Homo sapiens
gtcacagtttgtaac

SEQ ID NO: 204606 - DNA, 15 bp, Homo sapiens
tgtcacagtttgtaa

SEQ ID NO: 204607 - DNA, 15 bp, Homo sapiens
gtgtcacagtttgta

SEQ ID NO: 204608 - DNA, 15 bp, Homo sapiens
ggtgtcacagtttgt

SEQ ID NO: 204609 - DNA, 15 bp, Homo sapiens
aggtgtcacagtttg

SEQ ID NO: 204610 - DNA, 15 bp, Homo sapiens
aaggtgtcacagttt

SEQ ID NO: 204611 - DNA, 15 bp, Homo sapiens
caaggtgtcacagtt

SEQ ID NO: 204612 - DNA, 15 bp, Homo sapiens
ccaaggtgtcacagt

SEQ ID NO: 204613 - DNA, 15 bp, Homo sapiens
gccaaggtgtcacag

SEQ ID NO: 204614 - DNA, 15 bp, Homo sapiens
ggccaaggtgtcaca

SEQ ID NO: 204615 - DNA, 15 bp, Homo sapiens
tggccaaggtgtcac

SEQ ID NO: 204616 - DNA, 15 bp, Homo sapiens
gtggccaaggtgtca

SEQ ID NO: 204617 - DNA, 15 bp, Homo sapiens
ggtggccaaggtgtc

SEQ ID NO: 204618 - DNA, 15 bp, Homo sapiens
aggtggccaaggtgt

SEQ ID NO: 204619 - DNA, 15 bp, Homo sapiens
caggtggccaaggtg

SEQ ID NO: 204620 - DNA, 15 bp, Homo sapiens
ccaggtggccaaggt

SEQ ID NO: 204621 - DNA, 15 bp, Homo sapiens
cccaggtggccaagg

SEQ ID NO: 204622 - DNA, 15 bp, Homo sapiens
acccaggtggccaag

SEQ ID NO: 204623 - DNA, 15 bp, Homo sapiens
aacccaggtggccaa

SEQ ID NO: 204624 - DNA, 15 bp, Homo sapiens
aaacccaggtggcca

SEQ ID NO: 204625 - DNA, 15 bp, Homo sapiens
taaacccaggtggcc

SEQ ID NO: 204626 - DNA, 15 bp, Homo sapiens
gtaaacccaggtggc

SEQ ID NO: 204627 - DNA, 15 bp, Homo sapiens
ggtaaacccaggtgg

SEQ ID NO: 204628 - DNA, 15 bp, Homo sapiens
aggtaaacccaggtg

SEQ ID NO: 204629 - DNA, 15 bp, Homo sapiens
caggtaaacccaggt

SEQ ID NO: 204630 - DNA, 15 bp, Homo sapiens
acaggtaaacccagg

SEQ ID NO: 204631 - DNA, 15 bp, Homo sapiens
cacaggtaaacccag

SEQ ID NO: 204632 - DNA, 15 bp, Homo sapiens
acacaggtaaaccca

SEQ ID NO: 204633 - DNA, 15 bp, Homo sapiens
cacacaggtaaaccc

SEQ ID NO: 204634 - DNA, 15 bp, Homo sapiens
tcacacaggtaaacc

SEQ ID NO: 204635 - DNA, 15 bp, Homo sapiens
ctcacacaggtaaac

SEQ ID NO: 204636 - DNA, 15 bp, Homo sapiens
actcacacaggtaaa

SEQ ID NO: 204637 - DNA, 15 bp, Homo sapiens
gactcacacaggtaa

SEQ ID NO: 204638 - DNA, 15 bp, Homo sapiens
ggactcacacaggta

SEQ ID NO: 204639 - DNA, 15 bp, Homo sapiens
aggactcacacaggt

SEQ ID NO: 204640 - DNA, 15 bp, Homo sapiens
caggactcacacagg

SEQ ID NO: 204641 - DNA, 15 bp, Homo sapiens
ccaggactcacacag

SEQ ID NO: 204642 - DNA, 15 bp, Homo sapiens
accaggactcacaca

SEQ ID NO: 204643 - DNA, 15 bp, Homo sapiens
gaccaggactcacac

SEQ ID NO: 204644 - DNA, 15 bp, Homo sapiens
agaccaggactcaca

SEQ ID NO: 204645 - DNA, 15 bp, Homo sapiens
gagaccaggactcac

SEQ ID NO: 204646 - DNA, 15 bp, Homo sapiens
agagaccaggactca

SEQ ID NO: 204647 - DNA, 15 bp, Homo sapiens
tagagaccaggactc

SEQ ID NO: 204648 - DNA, 15 bp, Homo sapiens
atagagaccaggact

SEQ ID NO: 204649 - DNA, 15 bp, Homo sapiens
tatagagaccaggac

SEQ ID NO: 204650 - DNA, 15 bp, Homo sapiens
atatagagaccagga

SEQ ID NO: 204651 - DNA, 15 bp, Homo sapiens
gatatagagaccagg

SEQ ID NO: 204652 - DNA, 15 bp, Homo sapiens
ggatatagagaccag

SEQ ID NO: 204653 - DNA, 15 bp, Homo sapiens
gggatatagagacca

SEQ ID NO: 204654 - DNA, 15 bp, Homo sapiens
agggatatagagacc

SEQ ID NO: 204655 - DNA, 15 bp, Homo sapiens
gagggatatagagac

SEQ ID NO: 204656 - DNA, 15 bp, Homo sapiens
tgagggatatagaga

SEQ ID NO: 204657 - DNA, 15 bp, Homo sapiens
ctgagggatatagag

SEQ ID NO: 204658 - DNA, 15 bp, Homo sapiens
tctgagggatataga

SEQ ID NO: 204659 - DNA, 15 bp, Homo sapiens
atctgagggatatag

SEQ ID NO: 204660 - DNA, 15 bp, Homo sapiens
catctgagggatata

SEQ ID NO: 204661 - DNA, 15 bp, Homo sapiens
ccatctgagggatat

SEQ ID NO: 204662 - DNA, 15 bp, Homo sapiens
cccatctgagggata

SEQ ID NO: 204663 - DNA, 15 bp, Homo sapiens
gcccatctgagggat

SEQ ID NO: 204664 - DNA, 15 bp, Homo sapiens
tgcccatctgaggga

SEQ ID NO: 204665 - DNA, 15 bp, Homo sapiens
gtgcccatctgaggg

SEQ ID NO: 204666 - DNA, 15 bp, Homo sapiens
tgtgcccatctgagg

SEQ ID NO: 204667 - DNA, 15 bp, Homo sapiens
ctgtgcccatctgag

SEQ ID NO: 204668 - DNA, 15 bp, Homo sapiens
actgtgcccatctga

SEQ ID NO: 204669 - DNA, 15 bp, Homo sapiens
tactgtgcccatctg

SEQ ID NO: 204670 - DNA, 15 bp, Homo sapiens
ttactgtgcccatct

SEQ ID NO: 204671 - DNA, 15 bp, Homo sapiens
cttactgtgcccatc

SEQ ID NO: 204672 - DNA, 15 bp, Homo sapiens
tcttactgtgcccat

SEQ ID NO: 204673 - DNA, 15 bp, Homo sapiens
gtcttactgtgccca

SEQ ID NO: 204674 - DNA, 15 bp, Homo sapiens
ggtcttactgtgccc

SEQ ID NO: 204675 - DNA, 15 bp, Homo sapiens
aggtcttactgtgcc

SEQ ID NO: 204676 - DNA, 15 bp, Homo sapiens
caggtcttactgtgc

SEQ ID NO: 204677 - DNA, 15 bp, Homo sapiens
gcaggtcttactgtg

SEQ ID NO: 204678 - DNA, 15 bp, Homo sapiens
ggcaggtcttactgt

SEQ ID NO: 204679 - DNA, 15 bp, Homo sapiens
aggcaggtcttactg

SEQ ID NO: 204680 - DNA, 15 bp, Homo sapiens
gaggcaggtcttact

SEQ ID NO: 204681 - DNA, 15 bp, Homo sapiens
tgaggcaggtcttac

SEQ ID NO: 204682 - DNA, 15 bp, Homo sapiens
ctgaggcaggtctta

SEQ ID NO: 204683 - DNA, 15 bp, Homo sapiens
tctgaggcaggtctt

SEQ ID NO: 204684 - DNA, 15 bp, Homo sapiens
ctctgaggcaggtct

SEQ ID NO: 204685 - DNA, 15 bp, Homo sapiens
tctctgaggcaggtc

SEQ ID NO: 204686 - DNA, 15 bp, Homo sapiens
gtctctgaggcaggt

SEQ ID NO: 204687 - DNA, 15 bp, Homo sapiens
tgtctctgaggcagg

SEQ ID NO: 204688 - DNA, 15 bp, Homo sapiens
atgtctctgaggcag

SEQ ID NO: 204689 - DNA, 15 bp, Homo sapiens
catgtctctgaggca

SEQ ID NO: 204690 - DNA, 15 bp, Homo sapiens
ccatgtctctgaggc

SEQ ID NO: 204691 - DNA, 15 bp, Homo sapiens
cccatgtctctgagg

SEQ ID NO: 204692 - DNA, 15 bp, Homo sapiens
ccccatgtctctgag

SEQ ID NO: 204693 - DNA, 15 bp, Homo sapiens
tccccatgtctctga

SEQ ID NO: 204694 - DNA, 15 bp, Homo sapiens
ctccccatgtctctg

SEQ ID NO: 204695 - DNA, 15 bp, Homo sapiens
cctccccatgtctct

SEQ ID NO: 204696 - DNA, 15 bp, Homo sapiens
tcctccccatgtctc

SEQ ID NO: 204697 - DNA, 15 bp, Homo sapiens
atcctccccatgtct

SEQ ID NO: 204698 - DNA, 15 bp, Homo sapiens
aatcctccccatgtc

SEQ ID NO: 204699 - DNA, 15 bp, Homo sapiens
aaatcctccccatgt

SEQ ID NO: 204700 - DNA, 15 bp, Homo sapiens
taaatcctccccatg

SEQ ID NO: 204701 - DNA, 15 bp, Homo sapiens
ttaaatcctccccat

SEQ ID NO: 204702 - DNA, 15 bp, Homo sapiens
attaaatcctcccca

SEQ ID NO: 204703 - DNA, 15 bp, Homo sapiens
cattaaatcctcccc

SEQ ID NO: 204704 - DNA, 15 bp, Homo sapiens
tcattaaatcctccc

SEQ ID NO: 204705 - DNA, 15 bp, Homo sapiens
ctcattaaatcctcc

SEQ ID NO: 204706 - DNA, 15 bp, Homo sapiens
tctcattaaatcctc

SEQ ID NO: 204707 - DNA, 15 bp, Homo sapiens
gtctcattaaatcct

SEQ ID NO: 204708 - DNA, 15 bp, Homo sapiens
tgtctcattaaatcc

SEQ ID NO: 204709 - DNA, 15 bp, Homo sapiens
ttgtctcattaaatc

SEQ ID NO: 204710 - DNA, 15 bp, Homo sapiens
attgtctcattaaat

SEQ ID NO: 204711 - DNA, 15 bp, Homo sapiens
cattgtctcattaaa

SEQ ID NO: 204712 - DNA, 15 bp, Homo sapiens
acattgtctcattaa

SEQ ID NO: 204713 - DNA, 15 bp, Homo sapiens
cacattgtctcatta

SEQ ID NO: 204714 - DNA, 15 bp, Homo sapiens
acacattgtctcatt

SEQ ID NO: 204715 - DNA, 15 bp, Homo sapiens
tacacattgtctcat

SEQ ID NO: 204716 - DNA, 15 bp, Homo sapiens
atacacattgtctca

SEQ ID NO: 204717 - DNA, 15 bp, Homo sapiens
tatacacattgtctc

SEQ ID NO: 204718 - DNA, 15 bp, Homo sapiens
ctatacacattgtct

SEQ ID NO: 204719 - DNA, 15 bp, Homo sapiens
gctatacacattgtc

SEQ ID NO: 204720 - DNA, 15 bp, Homo sapiens
tgctatacacattgt

SEQ ID NO: 204721 - DNA, 15 bp, Homo sapiens
gtgctatacacattg

SEQ ID NO: 204722 - DNA, 15 bp, Homo sapiens
tgtgctatacacatt

SEQ ID NO: 204723 - DNA, 15 bp, Homo sapiens
atgtgctatacacat

SEQ ID NO: 204724 - DNA, 15 bp, Homo sapiens
aatgtgctatacaca

SEQ ID NO: 204725 - DNA, 15 bp, Homo sapiens
caatgtgctatacac

SEQ ID NO: 204726 - DNA, 15 bp, Homo sapiens
gcaatgtgctataca

SEQ ID NO: 204727 - DNA, 15 bp, Homo sapiens
ggcaatgtgctatac

SEQ ID NO: 204728 - DNA, 15 bp, Homo sapiens
aggcaatgtgctata

SEQ ID NO: 204729 - DNA, 15 bp, Homo sapiens
caggcaatgtgctat

SEQ ID NO: 204730 - DNA, 15 bp, Homo sapiens
tcaggcaatgtgcta

SEQ ID NO: 204731 - DNA, 15 bp, Homo sapiens
gtcaggcaatgtgct

SEQ ID NO: 204732 - DNA, 15 bp, Homo sapiens
cgtcaggcaatgtgc

SEQ ID NO: 204733 - DNA, 15 bp, Homo sapiens
tcgtcaggcaatgtg

SEQ ID NO: 204734 - DNA, 15 bp, Homo sapiens
ttcgtcaggcaatgt

SEQ ID NO: 204735 - DNA, 15 bp, Homo sapiens
cttcgtcaggcaatg

SEQ ID NO: 204736 - DNA, 15 bp, Homo sapiens
ccttcgtcaggcaat

SEQ ID NO: 204737 - DNA, 15 bp, Homo sapiens
cccttcgtcaggcaa

SEQ ID NO: 204738 - DNA, 15 bp, Homo sapiens
ccccttcgtcaggca

SEQ ID NO: 204739 - DNA, 15 bp, Homo sapiens
tccccttcgtcaggc

SEQ ID NO: 204740 - DNA, 15 bp, Homo sapiens
ttccccttcgtcagg

SEQ ID NO: 204741 - DNA, 15 bp, Homo sapiens
tttccccttcgtcag

SEQ ID NO: 204742 - DNA, 15 bp, Homo sapiens
ttttccccttcgtca

SEQ ID NO: 204743 - DNA, 15 bp, Homo sapiens
tttttccccttcgtc

SEQ ID NO: 204744 - DNA, 15 bp, Homo sapiens
gtttttccccttcgt

SEQ ID NO: 204745 - DNA, 15 bp, Homo sapiens
ggtttttccccttcg

SEQ ID NO: 204746 - DNA, 15 bp, Homo sapiens
aggtttttccccttc

SEQ ID NO: 204747 - DNA, 15 bp, Homo sapiens
gaggtttttcccctt

SEQ ID NO: 204748 - DNA, 15 bp, Homo sapiens
tgaggtttttcccct

SEQ ID NO: 204749 - DNA, 15 bp, Homo sapiens
gtgaggtttttcccc

SEQ ID NO: 204750 - DNA, 15 bp, Homo sapiens
agtgaggtttttccc

SEQ ID NO: 204751 - DNA, 15 bp, Homo sapiens
cagtgaggtttttcc

SEQ ID NO: 204752 - DNA, 15 bp, Homo sapiens
acagtgaggtttttc

SEQ ID NO: 204753 - DNA, 15 bp, Homo sapiens
cacagtgaggttttt

SEQ ID NO: 204754 - DNA, 15 bp, Homo sapiens
tcacagtgaggtttt

SEQ ID NO: 204755 - DNA, 15 bp, Homo sapiens
atcacagtgaggttt

SEQ ID NO: 204756 - DNA, 15 bp, Homo sapiens
tatcacagtgaggtt

SEQ ID NO: 204757 - DNA, 15 bp, Homo sapiens
ctatcacagtgaggt

SEQ ID NO: 204758 - DNA, 15 bp, Homo sapiens
actatcacagtgagg

SEQ ID NO: 204759 - DNA, 15 bp, Homo sapiens
aactatcacagtgag

SEQ ID NO: 204760 - DNA, 15 bp, Homo sapiens
taactatcacagtga

SEQ ID NO: 204761 - DNA, 15 bp, Homo sapiens
ttaactatcacagtg

SEQ ID NO: 204762 - DNA, 15 bp, Homo sapiens
attaactatcacagt

SEQ ID NO: 204763 - DNA, 15 bp, Homo sapiens
aattaactatcacag

SEQ ID NO: 204764 - DNA, 15 bp, Homo sapiens
aaattaactatcaca

SEQ ID NO: 204765 - DNA, 15 bp, Homo sapiens
taaattaactatcac

SEQ ID NO: 204766 - DNA, 15 bp, Homo sapiens
ataaattaactatca

SEQ ID NO: 204767 - DNA, 15 bp, Homo sapiens
aataaattaactatc

SEQ ID NO: 204768 - DNA, 15 bp, Homo sapiens
caataaattaactat

SEQ ID NO: 204769 - DNA, 15 bp, Homo sapiens
acaataaattaacta

SEQ ID NO: 204770 - DNA, 15 bp, Homo sapiens
gacaataaattaact

SEQ ID NO: 204771 - DNA, 15 bp, Homo sapiens
tgacaataaattaac

SEQ ID NO: 204772 - DNA, 15 bp, Homo sapiens
atgacaataaattaa

SEQ ID NO: 204773 - DNA, 15 bp, Homo sapiens
aatgacaataaatta

SEQ ID NO: 204774 - DNA, 15 bp, Homo sapiens
caatgacaataaatt

SEQ ID NO: 204775 - DNA, 15 bp, Homo sapiens
ccaatgacaataaat

SEQ ID NO: 204776 - DNA, 15 bp, Homo sapiens
gccaatgacaataaa

SEQ ID NO: 204777 - DNA, 15 bp, Homo sapiens
agccaatgacaataa

SEQ ID NO: 204778 - DNA, 15 bp, Homo sapiens
cagccaatgacaata

SEQ ID NO: 204779 - DNA, 15 bp, Homo sapiens
gcagccaatgacaat

SEQ ID NO: 204780 - DNA, 15 bp, Homo sapiens
tgcagccaatgacaa

SEQ ID NO: 204781 - DNA, 15 bp, Homo sapiens
ctgcagccaatgaca

SEQ ID NO: 204782 - DNA, 15 bp, Homo sapiens
cctgcagccaatgac

SEQ ID NO: 204783 - DNA, 15 bp, Homo sapiens
ccctgcagccaatga

SEQ ID NO: 204784 - DNA, 15 bp, Homo sapiens
cccctgcagccaatg

SEQ ID NO: 204785 - DNA, 15 bp, Homo sapiens
gcccctgcagccaat

SEQ ID NO: 204786 - DNA, 15 bp, Homo sapiens
ggcccctgcagccaa

SEQ ID NO: 204787 - DNA, 15 bp, Homo sapiens
tggcccctgcagcca

SEQ ID NO: 204788 - DNA, 15 bp, Homo sapiens
ctggcccctgcagcc

SEQ ID NO: 204789 - DNA, 15 bp, Homo sapiens
tctggcccctgcagc

SEQ ID NO: 204790 - DNA, 15 bp, Homo sapiens
ctctggcccctgcag

SEQ ID NO: 204791 - DNA, 15 bp, Homo sapiens
tctctggcccctgca

SEQ ID NO: 204792 - DNA, 15 bp, Homo sapiens
ctctctggcccctgc

SEQ ID NO: 204793 - DNA, 15 bp, Homo sapiens
actctctggcccctg

SEQ ID NO: 204794 - DNA, 15 bp, Homo sapiens
gactctctggcccct

SEQ ID NO: 204795 - DNA, 15 bp, Homo sapiens
agactctctggcccc

SEQ ID NO: 204796 - DNA, 15 bp, Homo sapiens
aagactctctggccc

SEQ ID NO: 204797 - DNA, 15 bp, Homo sapiens
aaagactctctggcc

SEQ ID NO: 204798 - DNA, 15 bp, Homo sapiens
caaagactctctggc

SEQ ID NO: 204799 - DNA, 15 bp, Homo sapiens
ccaaagactctctgg

SEQ ID NO: 204800 - DNA, 15 bp, Homo sapiens
cccaaagactctctg

SEQ ID NO: 204801 - DNA, 15 bp, Homo sapiens
ccccaaagactctct

SEQ ID NO: 204802 - DNA, 15 bp, Homo sapiens
tccccaaagactctc

SEQ ID NO: 204803 - DNA, 15 bp, Homo sapiens
ctccccaaagactct

SEQ ID NO: 204804 - DNA, 15 bp, Homo sapiens
cctccccaaagactc

SEQ ID NO: 204805 - DNA, 15 bp, Homo sapiens
gcctccccaaagact

SEQ ID NO: 204806 - DNA, 15 bp, Homo sapiens
agcctccccaaagac

SEQ ID NO: 204807 - DNA, 15 bp, Homo sapiens
gagcctccccaaaga

SEQ ID NO: 204808 - DNA, 15 bp, Homo sapiens
agagcctccccaaag

SEQ ID NO: 204809 - DNA, 15 bp, Homo sapiens
cagagcctccccaaa

SEQ ID NO: 204810 - DNA, 15 bp, Homo sapiens
gcagagcctccccaa

SEQ ID NO: 204811 - DNA, 15 bp, Homo sapiens
agcagagcctcccca

SEQ ID NO: 204812 - DNA, 15 bp, Homo sapiens
cagcagagcctcccc

SEQ ID NO: 204813 - DNA, 15 bp, Homo sapiens
ccagcagagcctccc

SEQ ID NO: 204814 - DNA, 15 bp, Homo sapiens
accagcagagcctcc

SEQ ID NO: 204815 - DNA, 15 bp, Homo sapiens
taccagcagagcctc

SEQ ID NO: 204816 - DNA, 15 bp, Homo sapiens
ttaccagcagagcct

SEQ ID NO: 204817 - DNA, 15 bp, Homo sapiens
tttaccagcagagcc

SEQ ID NO: 204818 - DNA, 15 bp, Homo sapiens
ctttaccagcagagc

SEQ ID NO: 204819 - DNA, 15 bp, Homo sapiens
cctttaccagcagag

SEQ ID NO: 204820 - DNA, 15 bp, Homo sapiens
gcctttaccagcaga

SEQ ID NO: 204821 - DNA, 15 bp, Homo sapiens
agcctttaccagcag

SEQ ID NO: 204822 - DNA, 15 bp, Homo sapiens
cagcctttaccagca

SEQ ID NO: 204823 - DNA, 15 bp, Homo sapiens
tcagcctttaccagc

SEQ ID NO: 204824 - DNA, 15 bp, Homo sapiens
ctcagcctttaccag

SEQ ID NO: 204825 - DNA, 15 bp, Homo sapiens
gctcagcctttacca

SEQ ID NO: 204826 - DNA, 15 bp, Homo sapiens
ggctcagcctttacc

SEQ ID NO: 204827 - DNA, 15 bp, Homo sapiens
aggctcagcctttac

SEQ ID NO: 204828 - DNA, 15 bp, Homo sapiens
taggctcagccttta

SEQ ID NO: 204829 - DNA, 15 bp, Homo sapiens
ctaggctcagccttt

SEQ ID NO: 204830 - DNA, 15 bp, Homo sapiens
gctaggctcagcctt

SEQ ID NO: 204831 - DNA, 15 bp, Homo sapiens
ggctaggctcagcct

SEQ ID NO: 204832 - DNA, 15 bp, Homo sapiens
aggctaggctcagcc

SEQ ID NO: 204833 - DNA, 15 bp, Homo sapiens
aaggctaggctcagc

SEQ ID NO: 204834 - DNA, 15 bp, Homo sapiens
caaggctaggctcag

SEQ ID NO: 204835 - DNA, 15 bp, Homo sapiens
acaaggctaggctca

SEQ ID NO: 204836 - DNA, 15 bp, Homo sapiens
tacaaggctaggctc

SEQ ID NO: 204837 - DNA, 15 bp, Homo sapiens
atacaaggctaggct

SEQ ID NO: 204838 - DNA, 15 bp, Homo sapiens
aatacaaggctaggc

SEQ ID NO: 204839 - DNA, 15 bp, Homo sapiens
caatacaaggctagg

SEQ ID NO: 204840 - DNA, 15 bp, Homo sapiens
gcaatacaaggctag

SEQ ID NO: 204841 - DNA, 15 bp, Homo sapiens
agcaatacaaggcta

SEQ ID NO: 204842 - DNA, 15 bp, Homo sapiens
gagcaatacaaggct

SEQ ID NO: 204843 - DNA, 15 bp, Homo sapiens
tgagcaatacaaggc

SEQ ID NO: 204844 - DNA, 15 bp, Homo sapiens
atgagcaatacaagg

SEQ ID NO: 204845 - DNA, 15 bp, Homo sapiens
gatgagcaatacaag

SEQ ID NO: 204846 - DNA, 15 bp, Homo sapiens
agatgagcaatacaa

SEQ ID NO: 204847 - DNA, 15 bp, Homo sapiens
aagatgagcaataca

SEQ ID NO: 204848 - DNA, 15 bp, Homo sapiens
aaagatgagcaatac

SEQ ID NO: 204849 - DNA, 15 bp, Homo sapiens
aaaagatgagcaata

SEQ ID NO: 204850 - DNA, 15 bp, Homo sapiens
caaaagatgagcaat

SEQ ID NO: 204851 - DNA, 15 bp, Homo sapiens
ccaaaagatgagcaa

SEQ ID NO: 204852 - DNA, 15 bp, Homo sapiens
tccaaaagatgagca

SEQ ID NO: 204853 - DNA, 15 bp, Homo sapiens
atccaaaagatgagc

SEQ ID NO: 204854 - DNA, 15 bp, Homo sapiens
tatccaaaagatgag

SEQ ID NO: 204855 - DNA, 15 bp, Homo sapiens
ttatccaaaagatga

SEQ ID NO: 204856 - DNA, 15 bp, Homo sapiens
cttatccaaaagatg

SEQ ID NO: 204857 - DNA, 15 bp, Homo sapiens
ccttatccaaaagat

SEQ ID NO: 204858 - DNA, 15 bp, Homo sapiens
accttatccaaaaga

SEQ ID NO: 204859 - DNA, 15 bp, Homo sapiens
taccttatccaaaag

SEQ ID NO: 204860 - DNA, 15 bp, Homo sapiens
ttaccttatccaaaa

SEQ ID NO: 204861 - DNA, 15 bp, Homo sapiens
cttaccttatccaaa

SEQ ID NO: 204862 - DNA, 15 bp, Homo sapiens
ccttaccttatccaa

SEQ ID NO: 204863 - DNA, 15 bp, Homo sapiens
tccttaccttatcca

SEQ ID NO: 204864 - DNA, 15 bp, Homo sapiens
atccttaccttatcc

SEQ ID NO: 204865 - DNA, 15 bp, Homo sapiens
catccttaccttatc

SEQ ID NO: 204866 - DNA, 15 bp, Homo sapiens
ccatccttaccttat

SEQ ID NO: 204867 - DNA, 15 bp, Homo sapiens
tccatccttacctta

SEQ ID NO: 204868 - DNA, 15 bp, Homo sapiens
ttccatccttacctt

SEQ ID NO: 204869 - DNA, 15 bp, Homo sapiens
gttccatccttacct

SEQ ID NO: 204870 - DNA, 15 bp, Homo sapiens
ggttccatccttacc

SEQ ID NO: 204871 - DNA, 15 bp, Homo sapiens
aggttccatccttac

SEQ ID NO: 204872 - DNA, 15 bp, Homo sapiens
aaggttccatcctta

SEQ ID NO: 204873 - DNA, 15 bp, Homo sapiens
aaaggttccatcctt

SEQ ID NO: 204874 - DNA, 15 bp, Homo sapiens
caaaggttccatcct

SEQ ID NO: 204875 - DNA, 15 bp, Homo sapiens
acaaaggttccatcc

SEQ ID NO: 204876 - DNA, 15 bp, Homo sapiens
cacaaaggttccatc

SEQ ID NO: 204877 - DNA, 15 bp, Homo sapiens
tcacaaaggttccat

SEQ ID NO: 204878 - DNA, 15 bp, Homo sapiens
ttcacaaaggttcca

SEQ ID NO: 204879 - DNA, 15 bp, Homo sapiens
cttcacaaaggttcc

SEQ ID NO: 204880 - DNA, 15 bp, Homo sapiens
tcttcacaaaggttc

SEQ ID NO: 204881 - DNA, 15 bp, Homo sapiens
ctcttcacaaaggtt

SEQ ID NO: 204882 - DNA, 15 bp, Homo sapiens
cctcttcacaaaggt

SEQ ID NO: 204883 - DNA, 15 bp, Homo sapiens
tcctcttcacaaagg

SEQ ID NO: 204884 - DNA, 15 bp, Homo sapiens
ttcctcttcacaaag

SEQ ID NO: 204885 - DNA, 15 bp, Homo sapiens
cttcctcttcacaaa

SEQ ID NO: 204886 - DNA, 15 bp, Homo sapiens
tcttcctcttcacaa

SEQ ID NO: 204887 - DNA, 15 bp, Homo sapiens
gtcttcctcttcaca

SEQ ID NO: 204888 - DNA, 15 bp, Homo sapiens
agtcttcctcttcac

SEQ ID NO: 204889 - DNA, 15 bp, Homo sapiens
cagtcttcctcttca

SEQ ID NO: 204890 - DNA, 15 bp, Homo sapiens
ccagtcttcctcttc

SEQ ID NO: 204891 - DNA, 15 bp, Homo sapiens
tccagtcttcctctt

SEQ ID NO: 204892 - DNA, 15 bp, Homo sapiens
gtccagtcttcctct

SEQ ID NO: 204893 - DNA, 15 bp, Homo sapiens
tgtccagtcttcctc

SEQ ID NO: 204894 - DNA, 15 bp, Homo sapiens
gtgtccagtcttcct

SEQ ID NO: 204895 - DNA, 15 bp, Homo sapiens
ggtgtccagtcttcc

SEQ ID NO: 204896 - DNA, 15 bp, Homo sapiens
aggtgtccagtcttc

SEQ ID NO: 204897 - DNA, 15 bp, Homo sapiens
gaggtgtccagtctt

SEQ ID NO: 204898 - DNA, 15 bp, Homo sapiens
ggaggtgtccagtct

SEQ ID NO: 204899 - DNA, 15 bp, Homo sapiens
aggaggtgtccagtc

SEQ ID NO: 204900 - DNA, 15 bp, Homo sapiens
caggaggtgtccagt

SEQ ID NO: 204901 - DNA, 15 bp, Homo sapiens
gcaggaggtgtccag

SEQ ID NO: 204902 - DNA, 15 bp, Homo sapiens
ggcaggaggtgtcca

SEQ ID NO: 204903 - DNA, 15 bp, Homo sapiens
gggcaggaggtgtcc

SEQ ID NO: 204904 - DNA, 15 bp, Homo sapiens
ggggcaggaggtgtc

SEQ ID NO: 204905 - DNA, 15 bp, Homo sapiens
gggggcaggaggtgt

SEQ ID NO: 204906 - DNA, 15 bp, Homo sapiens
agggggcaggaggtg

SEQ ID NO: 204907 - DNA, 15 bp, Homo sapiens
gagggggcaggaggt

SEQ ID NO: 204908 - DNA, 15 bp, Homo sapiens
ggagggggcaggagg

SEQ ID NO: 204909 - DNA, 15 bp, Homo sapiens
gggagggggcaggag

SEQ ID NO: 204910 - DNA, 15 bp, Homo sapiens
tgggagggggcagga

SEQ ID NO: 204911 - DNA, 15 bp, Homo sapiens
gtgggagggggcagg

SEQ ID NO: 204912 - DNA, 15 bp, Homo sapiens
agtgggagggggcag

SEQ ID NO: 204913 - DNA, 15 bp, Homo sapiens
cagtgggagggggca

SEQ ID NO: 204914 - DNA, 15 bp, Homo sapiens
acagtgggagggggc

SEQ ID NO: 204915 - DNA, 15 bp, Homo sapiens
cacagtgggaggggg

SEQ ID NO: 204916 - DNA, 15 bp, Homo sapiens
ccacagtgggagggg

SEQ ID NO: 204917 - DNA, 15 bp, Homo sapiens
accacagtgggaggg

SEQ ID NO: 204918 - DNA, 15 bp, Homo sapiens
aaccacagtgggagg

SEQ ID NO: 204919 - DNA, 15 bp, Homo sapiens
aaaccacagtgggag

SEQ ID NO: 204920 - DNA, 15 bp, Homo sapiens
caaaccacagtggga

SEQ ID NO: 204921 - DNA, 15 bp, Homo sapiens
tcaaaccacagtggg

SEQ ID NO: 204922 - DNA, 15 bp, Homo sapiens
ctcaaaccacagtgg

SEQ ID NO: 204923 - DNA, 15 bp, Homo sapiens
actcaaaccacagtg

SEQ ID NO: 204924 - DNA, 15 bp, Homo sapiens
cactcaaaccacagt

SEQ ID NO: 204925 - DNA, 15 bp, Homo sapiens
ccactcaaaccacag

SEQ ID NO: 204926 - DNA, 15 bp, Homo sapiens
tccactcaaaccaca

SEQ ID NO: 204927 - DNA, 15 bp, Homo sapiens
atccactcaaaccac

SEQ ID NO: 204928 - DNA, 15 bp, Homo sapiens
aatccactcaaacca

SEQ ID NO: 204929 - DNA, 15 bp, Homo sapiens
aaatccactcaaacc

SEQ ID NO: 204930 - DNA, 15 bp, Homo sapiens
aaaatccactcaaac

SEQ ID NO: 204931 - DNA, 15 bp, Homo sapiens
taaaatccactcaaa

SEQ ID NO: 204932 - DNA, 15 bp, Homo sapiens
ataaaatccactcaa

SEQ ID NO: 204933 - DNA, 15 bp, Homo sapiens
gataaaatccactca

SEQ ID NO: 204934 - DNA, 15 bp, Homo sapiens
ggataaaatccactc

SEQ ID NO: 204935 - DNA, 15 bp, Homo sapiens
gggataaaatccact

SEQ ID NO: 204936 - DNA, 15 bp, Homo sapiens
cgggataaaatccac

SEQ ID NO: 204937 - DNA, 15 bp, Homo sapiens
gcgggataaaatcca

SEQ ID NO: 204938 - DNA, 15 bp, Homo sapiens
tgcgggataaaatcc

SEQ ID NO: 204939 - DNA, 15 bp, Homo sapiens
atgcgggataaaatc

SEQ ID NO: 204940 - DNA, 15 bp, Homo sapiens
gatgcgggataaaat

SEQ ID NO: 204941 - DNA, 15 bp, Homo sapiens
agatgcgggataaaa

SEQ ID NO: 204942 - DNA, 15 bp, Homo sapiens
cagatgcgggataaa

SEQ ID NO: 204943 - DNA, 15 bp, Homo sapiens
acagatgcgggataa

SEQ ID NO: 204944 - DNA, 15 bp, Homo sapiens
aacagatgcgggata

SEQ ID NO: 204945 - DNA, 15 bp, Homo sapiens
caacagatgcgggat

SEQ ID NO: 204946 - DNA, 15 bp, Homo sapiens
acaacagatgcggga

SEQ ID NO: 204947 - DNA, 15 bp, Homo sapiens
aacaacagatgcggg

SEQ ID NO: 204948 - DNA, 15 bp, Homo sapiens
aaacaacagatgcgg

SEQ ID NO: 204949 - DNA, 15 bp, Homo sapiens
caaacaacagatgcg

SEQ ID NO: 204950 - DNA, 15 bp, Homo sapiens
gcaaacaacagatgc

SEQ ID NO: 204951 - DNA, 15 bp, Homo sapiens
ggcaaacaacagatg

SEQ ID NO: 204952 - DNA, 15 bp, Homo sapiens
aggcaaacaacagat

SEQ ID NO: 204953 - DNA, 15 bp, Homo sapiens
caggcaaacaacaga

SEQ ID NO: 204954 - DNA, 15 bp, Homo sapiens
ccaggcaaacaacag

SEQ ID NO: 204955 - DNA, 15 bp, Homo sapiens
gccaggcaaacaaca

SEQ ID NO: 204956 - DNA, 15 bp, Homo sapiens
tgccaggcaaacaac

SEQ ID NO: 204957 - DNA, 15 bp, Homo sapiens
atgccaggcaaacaa

SEQ ID NO: 204958 - DNA, 15 bp, Homo sapiens
aatgccaggcaaaca

SEQ ID NO: 204959 - DNA, 15 bp, Homo sapiens
caatgccaggcaaac

SEQ ID NO: 204960 - DNA, 15 bp, Homo sapiens
ccaatgccaggcaaa

SEQ ID NO: 204961 - DNA, 15 bp, Homo sapiens
tccaatgccaggcaa

SEQ ID NO: 204962 - DNA, 15 bp, Homo sapiens
atccaatgccaggca

SEQ ID NO: 204963 - DNA, 15 bp, Homo sapiens
catccaatgccaggc

SEQ ID NO: 204964 - DNA, 15 bp, Homo sapiens
ccatccaatgccagg

SEQ ID NO: 204965 - DNA, 15 bp, Homo sapiens
gccatccaatgccag

SEQ ID NO: 204966 - DNA, 15 bp, Homo sapiens
ggccatccaatgcca

SEQ ID NO: 204967 - DNA, 15 bp, Homo sapiens
gggccatccaatgcc

SEQ ID NO: 204968 - DNA, 15 bp, Homo sapiens
agggccatccaatgc

SEQ ID NO: 204969 - DNA, 15 bp, Homo sapiens
gagggccatccaatg

SEQ ID NO: 204970 - DNA, 15 bp, Homo sapiens
ggagggccatccaat

SEQ ID NO: 204971 - DNA, 15 bp, Homo sapiens
tggagggccatccaa

SEQ ID NO: 204972 - DNA, 15 bp, Homo sapiens
gtggagggccatcca

SEQ ID NO: 204973 - DNA, 15 bp, Homo sapiens
tgtggagggccatcc

SEQ ID NO: 204974 - DNA, 15 bp, Homo sapiens
gtgtggagggccatc

SEQ ID NO: 204975 - DNA, 15 bp, Homo sapiens
ggtgtggagggccat

SEQ ID NO: 204976 - DNA, 15 bp, Homo sapiens
tggtgtggagggcca

SEQ ID NO: 204977 - DNA, 15 bp, Homo sapiens
ctggtgtggagggcc

SEQ ID NO: 204978 - DNA, 15 bp, Homo sapiens
tctggtgtggagggc

SEQ ID NO: 204979 - DNA, 15 bp, Homo sapiens
ctctggtgtggaggg

SEQ ID NO: 204980 - DNA, 15 bp, Homo sapiens
tctctggtgtggagg

SEQ ID NO: 204981 - DNA, 15 bp, Homo sapiens
ctctctggtgtggag

SEQ ID NO: 204982 - DNA, 15 bp, Homo sapiens
gctctctggtgtgga

SEQ ID NO: 204983 - DNA, 15 bp, Homo sapiens
agctctctggtgtgg

SEQ ID NO: 204984 - DNA, 15 bp, Homo sapiens
tagctctctggtgtg

SEQ ID NO: 204985 - DNA, 15 bp, Homo sapiens
ttagctctctggtgt

SEQ ID NO: 204986 - DNA, 15 bp, Homo sapiens
attagctctctggtg

SEQ ID NO: 204987 - DNA, 15 bp, Homo sapiens
cattagctctctggt

SEQ ID NO: 204988 - DNA, 15 bp, Homo sapiens
gcattagctctctgg

SEQ ID NO: 204989 - DNA, 15 bp, Homo sapiens
ggcattagctctctg

SEQ ID NO: 204990 - DNA, 15 bp, Homo sapiens
aggcattagctctct

SEQ ID NO: 204991 - DNA, 15 bp, Homo sapiens
caggcattagctctc

SEQ ID NO: 204992 - DNA, 15 bp, Homo sapiens
gcaggcattagctct

SEQ ID NO: 204993 - DNA, 15 bp, Homo sapiens
ggcaggcattagctc

SEQ ID NO: 204994 - DNA, 15 bp, Homo sapiens
aggcaggcattagct

SEQ ID NO: 204995 - DNA, 15 bp, Homo sapiens
aaggcaggcattagc

SEQ ID NO: 204996 - DNA, 15 bp, Homo sapiens
gaaggcaggcattag

SEQ ID NO: 204997 - DNA, 15 bp, Homo sapiens
tgaaggcaggcatta

SEQ ID NO: 204998 - DNA, 15 bp, Homo sapiens
atgaaggcaggcatt

SEQ ID NO: 204999 - DNA, 15 bp, Homo sapiens
gatgaaggcaggcat

SEQ ID NO: 205000 - DNA, 15 bp, Homo sapiens
tgatgaaggcaggca

SEQ ID NO: 205001 - DNA, 15 bp, Homo sapiens
gtgatgaaggcaggc

SEQ ID NO: 205002 - DNA, 15 bp, Homo sapiens
agtgatgaaggcagg

SEQ ID NO: 205003 - DNA, 15 bp, Homo sapiens
tagtgatgaaggcag

SEQ ID NO: 205004 - DNA, 15 bp, Homo sapiens
ctagtgatgaaggca

SEQ ID NO: 205005 - DNA, 15 bp, Homo sapiens
actagtgatgaaggc

SEQ ID NO: 205006 - DNA, 15 bp, Homo sapiens
cactagtgatgaagg

SEQ ID NO: 205007 - DNA, 15 bp, Homo sapiens
acactagtgatgaag

SEQ ID NO: 205008 - DNA, 15 bp, Homo sapiens
gacactagtgatgaa

SEQ ID NO: 205009 - DNA, 15 bp, Homo sapiens
agacactagtgatga

SEQ ID NO: 205010 - DNA, 15 bp, Homo sapiens
gagacactagtgatg

SEQ ID NO: 205011 - DNA, 15 bp, Homo sapiens
agagacactagtgat

SEQ ID NO: 205012 - DNA, 15 bp, Homo sapiens
cagagacactagtga

SEQ ID NO: 205013 - DNA, 15 bp, Homo sapiens
acagagacactagtg

SEQ ID NO: 205014 - DNA, 15 bp, Homo sapiens
gacagagacactagt

SEQ ID NO: 205015 - DNA, 15 bp, Homo sapiens
agacagagacactag

SEQ ID NO: 205016 - DNA, 15 bp, Homo sapiens
gagacagagacacta

SEQ ID NO: 205017 - DNA, 15 bp, Homo sapiens
agagacagagacact

SEQ ID NO: 205018 - DNA, 15 bp, Homo sapiens
aagagacagagacac

SEQ ID NO: 205019 - DNA, 15 bp, Homo sapiens
aaagagacagagaca

SEQ ID NO: 205020 - DNA, 15 bp, Homo sapiens
caaagagacagagac

SEQ ID NO: 205021 - DNA, 15 bp, Homo sapiens
acaaagagacagaga

SEQ ID NO: 205022 - DNA, 15 bp, Homo sapiens
aacaaagagacagag

SEQ ID NO: 205023 - DNA, 15 bp, Homo sapiens
aaacaaagagacaga

SEQ ID NO: 205024 - DNA, 15 bp, Homo sapiens
gaaacaaagagacag

SEQ ID NO: 205025 - DNA, 15 bp, Homo sapiens
tgaaacaaagagaca

SEQ ID NO: 205026 - DNA, 15 bp, Homo sapiens
atgaaacaaagagac

SEQ ID NO: 205027 - DNA, 15 bp, Homo sapiens
gatgaaacaaagaga

SEQ ID NO: 205028 - DNA, 15 bp, Homo sapiens
tgatgaaacaaagag

SEQ ID NO: 205029 - DNA, 15 bp, Homo sapiens
ctgatgaaacaaaga

SEQ ID NO: 205030 - DNA, 15 bp, Homo sapiens
gctgatgaaacaaag

SEQ ID NO: 205031 - DNA, 15 bp, Homo sapiens
agctgatgaaacaaa

SEQ ID NO: 205032 - DNA, 15 bp, Homo sapiens
aagctgatgaaacaa

SEQ ID NO: 205033 - DNA, 15 bp, Homo sapiens
gaagctgatgaaaca

SEQ ID NO: 205034 - DNA, 15 bp, Homo sapiens
agaagctgatgaaac

SEQ ID NO: 205035 - DNA, 15 bp, Homo sapiens
aagaagctgatgaaa

SEQ ID NO: 205036 - DNA, 15 bp, Homo sapiens
aaagaagctgatgaa

SEQ ID NO: 205037 - DNA, 15 bp, Homo sapiens
taaagaagctgatga

SEQ ID NO: 205038 - DNA, 15 bp, Homo sapiens
ataaagaagctgatg

SEQ ID NO: 205039 - DNA, 15 bp, Homo sapiens
cataaagaagctgat

SEQ ID NO: 205040 - DNA, 15 bp, Homo sapiens
acataaagaagctga

SEQ ID NO: 205041 - DNA, 15 bp, Homo sapiens
cacataaagaagctg

SEQ ID NO: 205042 - DNA, 15 bp, Homo sapiens
tcacataaagaagct

SEQ ID NO: 205043 - DNA, 15 bp, Homo sapiens
ttcacataaagaagc

SEQ ID NO: 205044 - DNA, 15 bp, Homo sapiens
tttcacataaagaag

SEQ ID NO: 205045 - DNA, 15 bp, Homo sapiens
ttttcacataaagaa

SEQ ID NO: 205046 - DNA, 15 bp, Homo sapiens
cttttcacataaaga

SEQ ID NO: 205047 - DNA, 15 bp, Homo sapiens
tcttttcacataaag

SEQ ID NO: 205048 - DNA, 15 bp, Homo sapiens
ctcttttcacataaa

SEQ ID NO: 205049 - DNA, 15 bp, Homo sapiens
tctcttttcacataa

SEQ ID NO: 205050 - DNA, 15 bp, Homo sapiens
ctctcttttcacata

SEQ ID NO: 205051 - DNA, 15 bp, Homo sapiens
tctctcttttcacat

SEQ ID NO: 205052 - DNA, 15 bp, Homo sapiens
ttctctcttttcaca

SEQ ID NO: 205053 - DNA, 15 bp, Homo sapiens
tttctctcttttcac

SEQ ID NO: 205054 - DNA, 15 bp, Homo sapiens
atttctctcttttca

SEQ ID NO: 205055 - DNA, 15 bp, Homo sapiens
catttctctcttttc

SEQ ID NO: 205056 - DNA, 15 bp, Homo sapiens
tcatttctctctttt

SEQ ID NO: 205057 - DNA, 15 bp, Homo sapiens
atcatttctctcttt

SEQ ID NO: 205058 - DNA, 15 bp, Homo sapiens
gatcatttctctctt

SEQ ID NO: 205059 - DNA, 15 bp, Homo sapiens
agatcatttctctct

SEQ ID NO: 205060 - DNA, 15 bp, Homo sapiens
gagatcatttctctc

SEQ ID NO: 205061 - DNA, 15 bp, Homo sapiens
agagatcatttctct

SEQ ID NO: 205062 - DNA, 15 bp, Homo sapiens
cagagatcatttctc

SEQ ID NO: 205063 - DNA, 15 bp, Homo sapiens
acagagatcatttct

SEQ ID NO: 205064 - DNA, 15 bp, Homo sapiens
gacagagatcatttc

SEQ ID NO: 205065 - DNA, 15 bp, Homo sapiens
agacagagatcattt

SEQ ID NO: 205066 - DNA, 15 bp, Homo sapiens
gagacagagatcatt

SEQ ID NO: 205067 - DNA, 15 bp, Homo sapiens
agagacagagatcat

SEQ ID NO: 205068 - DNA, 15 bp, Homo sapiens
aagagacagagatca

SEQ ID NO: 205069 - DNA, 15 bp, Homo sapiens
aaagagacagagatc

SEQ ID NO: 205070 - DNA, 15 bp, Homo sapiens
gaaagagacagagat

SEQ ID NO: 205071 - DNA, 15 bp, Homo sapiens
ggaaagagacagaga

SEQ ID NO: 205072 - DNA, 15 bp, Homo sapiens
tggaaagagacagag

SEQ ID NO: 205073 - DNA, 15 bp, Homo sapiens
ttggaaagagacaga

SEQ ID NO: 205074 - DNA, 15 bp, Homo sapiens
tttggaaagagacag

SEQ ID NO: 205075 - DNA, 15 bp, Homo sapiens
atttggaaagagaca

SEQ ID NO: 205076 - DNA, 15 bp, Homo sapiens
gatttggaaagagac

SEQ ID NO: 205077 - DNA, 15 bp, Homo sapiens
ggatttggaaagaga

SEQ ID NO: 205078 - DNA, 15 bp, Homo sapiens
gggatttggaaagag

SEQ ID NO: 205079 - DNA, 15 bp, Homo sapiens
tgggatttggaaaga

SEQ ID NO: 205080 - DNA, 15 bp, Homo sapiens
ctgggatttggaaag

SEQ ID NO: 205081 - DNA, 15 bp, Homo sapiens
gctgggatttggaaa

SEQ ID NO: 205082 - DNA, 15 bp, Homo sapiens
tgctgggatttggaa

SEQ ID NO: 205083 - DNA, 15 bp, Homo sapiens
ttgctgggatttgga

SEQ ID NO: 205084 - DNA, 15 bp, Homo sapiens
cttgctgggatttgg

SEQ ID NO: 205085 - DNA, 15 bp, Homo sapiens
ccttgctgggatttg

SEQ ID NO: 205086 - DNA, 15 bp, Homo sapiens
gccttgctgggattt

SEQ ID NO: 205087 - DNA, 15 bp, Homo sapiens
agccttgctgggatt

SEQ ID NO: 205088 - DNA, 15 bp, Homo sapiens
cagccttgctgggat

SEQ ID NO: 205089 - DNA, 15 bp, Homo sapiens
tcagccttgctggga

SEQ ID NO: 205090 - DNA, 15 bp, Homo sapiens
ttcagccttgctggg

SEQ ID NO: 205091 - DNA, 15 bp, Homo sapiens
attcagccttgctgg

SEQ ID NO: 205092 - DNA, 15 bp, Homo sapiens
tattcagccttgctg

SEQ ID NO: 205093 - DNA, 15 bp, Homo sapiens
ttattcagccttgct

SEQ ID NO: 205094 - DNA, 15 bp, Homo sapiens
attattcagccttgc

SEQ ID NO: 205095 - DNA, 15 bp, Homo sapiens
tattattcagccttg

SEQ ID NO: 205096 - DNA, 15 bp, Homo sapiens
atattattcagcctt

SEQ ID NO: 205097 - DNA, 15 bp, Homo sapiens
gatattattcagcct

SEQ ID NO: 205098 - DNA, 15 bp, Homo sapiens
agatattattcagcc

SEQ ID NO: 205099 - DNA, 15 bp, Homo sapiens
cagatattattcagc

SEQ ID NO: 205100 - DNA, 15 bp, Homo sapiens
acagatattattcag

SEQ ID NO: 205101 - DNA, 15 bp, Homo sapiens
cacagatattattca

SEQ ID NO: 205102 - DNA, 15 bp, Homo sapiens
ccacagatattattc

SEQ ID NO: 205103 - DNA, 15 bp, Homo sapiens
tccacagatattatt

SEQ ID NO: 205104 - DNA, 15 bp, Homo sapiens
atccacagatattat

SEQ ID NO: 205105 - DNA, 15 bp, Homo sapiens
tatccacagatatta

SEQ ID NO: 205106 - DNA, 15 bp, Homo sapiens
atatccacagatatt

SEQ ID NO: 205107 - DNA, 15 bp, Homo sapiens
aatatccacagatat

SEQ ID NO: 205108 - DNA, 15 bp, Homo sapiens
gaatatccacagata

SEQ ID NO: 205109 - DNA, 15 bp, Homo sapiens
agaatatccacagat

SEQ ID NO: 205110 - DNA, 15 bp, Homo sapiens
aagaatatccacaga

SEQ ID NO: 205111 - DNA, 15 bp, Homo sapiens
aaagaatatccacag

SEQ ID NO: 205112 - DNA, 15 bp, Homo sapiens
aaaagaatatccaca

SEQ ID NO: 205113 - DNA, 15 bp, Homo sapiens
gaaaagaatatccac

SEQ ID NO: 205114 - DNA, 15 bp, Homo sapiens
agaaaagaatatcca

SEQ ID NO: 205115 - DNA, 15 bp, Homo sapiens
tagaaaagaatatcc

SEQ ID NO: 205116 - DNA, 15 bp, Homo sapiens
atagaaaagaatatc

SEQ ID NO: 205117 - DNA, 15 bp, Homo sapiens
aatagaaaagaatat

SEQ ID NO: 205118 - DNA, 15 bp, Homo sapiens
aaatagaaaagaata

SEQ ID NO: 205119 - DNA, 15 bp, Homo sapiens
gaaatagaaaagaat

SEQ ID NO: 205120 - DNA, 15 bp, Homo sapiens
agaaatagaaaagaa

SEQ ID NO: 205121 - DNA, 15 bp, Homo sapiens
aagaaatagaaaaga

SEQ ID NO: 205122 - DNA, 15 bp, Homo sapiens
taagaaatagaaaag

SEQ ID NO: 205123 - DNA, 15 bp, Homo sapiens
ttaagaaatagaaaa

SEQ ID NO: 205124 - DNA, 15 bp, Homo sapiens
attaagaaatagaaa

SEQ ID NO: 205125 - DNA, 15 bp, Homo sapiens
tattaagaaatagaa

SEQ ID NO: 205126 - DNA, 15 bp, Homo sapiens
gtattaagaaataga

SEQ ID NO: 205127 - DNA, 15 bp, Homo sapiens
ggtattaagaaatag

SEQ ID NO: 205128 - DNA, 15 bp, Homo sapiens
gggtattaagaaata

SEQ ID NO: 205129 - DNA, 15 bp, Homo sapiens
agggtattaagaaat

SEQ ID NO: 205130 - DNA, 15 bp, Homo sapiens
gagggtattaagaaa

SEQ ID NO: 205131 - DNA, 15 bp, Homo sapiens
cgagggtattaagaa

SEQ ID NO: 205132 - DNA, 15 bp, Homo sapiens
gcgagggtattaaga

SEQ ID NO: 205133 - DNA, 15 bp, Homo sapiens
tgcgagggtattaag

SEQ ID NO: 205134 - DNA, 15 bp, Homo sapiens
atgcgagggtattaa

SEQ ID NO: 205135 - DNA, 15 bp, Homo sapiens
aatgcgagggtatta

SEQ ID NO: 205136 - DNA, 15 bp, Homo sapiens
caatgcgagggtatt

SEQ ID NO: 205137 - DNA, 15 bp, Homo sapiens
gcaatgcgagggtat

SEQ ID NO: 205138 - DNA, 15 bp, Homo sapiens
agcaatgcgagggta

SEQ ID NO: 205139 - DNA, 15 bp, Homo sapiens
aagcaatgcgagggt

SEQ ID NO: 205140 - DNA, 15 bp, Homo sapiens
taagcaatgcgaggg

SEQ ID NO: 205141 - DNA, 15 bp, Homo sapiens
ataagcaatgcgagg

SEQ ID NO: 205142 - DNA, 15 bp, Homo sapiens
cataagcaatgcgag

SEQ ID NO: 205143 - DNA, 15 bp, Homo sapiens
tcataagcaatgcga

SEQ ID NO: 205144 - DNA, 15 bp, Homo sapiens
ttcataagcaatgcg

SEQ ID NO: 205145 - DNA, 15 bp, Homo sapiens
tttcataagcaatgc

SEQ ID NO: 205146 - DNA, 15 bp, Homo sapiens
ttttcataagcaatg

SEQ ID NO: 205147 - DNA, 15 bp, Homo sapiens
attttcataagcaat

SEQ ID NO: 205148 - DNA, 15 bp, Homo sapiens
gattttcataagcaa

SEQ ID NO: 205149 - DNA, 15 bp, Homo sapiens
ggattttcataagca

SEQ ID NO: 205150 - DNA, 15 bp, Homo sapiens
aggattttcataagc

SEQ ID NO: 205151 - DNA, 15 bp, Homo sapiens
taggattttcataag

SEQ ID NO: 205152 - DNA, 15 bp, Homo sapiens
ataggattttcataa

SEQ ID NO: 205153 - DNA, 15 bp, Homo sapiens
cataggattttcata

SEQ ID NO: 205154 - DNA, 15 bp, Homo sapiens
ccataggattttcat

SEQ ID NO: 205155 - DNA, 15 bp, Homo sapiens
cccataggattttca

SEQ ID NO: 205156 - DNA, 15 bp, Homo sapiens
gcccataggattttc

SEQ ID NO: 205157 - DNA, 15 bp, Homo sapiens
tgcccataggatttt

SEQ ID NO: 205158 - DNA, 15 bp, Homo sapiens
gtgcccataggattt

SEQ ID NO: 205159 - DNA, 15 bp, Homo sapiens
tgtgcccataggatt

SEQ ID NO: 205160 - DNA, 15 bp, Homo sapiens
atgtgcccataggat

SEQ ID NO: 205161 - DNA, 15 bp, Homo sapiens
aatgtgcccatagga

SEQ ID NO: 205162 - DNA, 15 bp, Homo sapiens
caatgtgcccatagg

SEQ ID NO: 205163 - DNA, 15 bp, Homo sapiens
acaatgtgcccatag

SEQ ID NO: 205164 - DNA, 15 bp, Homo sapiens
tacaatgtgcccata

SEQ ID NO: 205165 - DNA, 15 bp, Homo sapiens
ttacaatgtgcccat

SEQ ID NO: 205166 - DNA, 15 bp, Homo sapiens
tttacaatgtgccca

SEQ ID NO: 205167 - DNA, 15 bp, Homo sapiens
atttacaatgtgccc

SEQ ID NO: 205168 - DNA, 15 bp, Homo sapiens
aatttacaatgtgcc

SEQ ID NO: 205169 - DNA, 15 bp, Homo sapiens
taatttacaatgtgc

SEQ ID NO: 205170 - DNA, 15 bp, Homo sapiens
ataatttacaatgtg

SEQ ID NO: 205171 - DNA, 15 bp, Homo sapiens
gataatttacaatgt

SEQ ID NO: 205172 - DNA, 15 bp, Homo sapiens
agataatttacaatg

SEQ ID NO: 205173 - DNA, 15 bp, Homo sapiens
cagataatttacaat

SEQ ID NO: 205174 - DNA, 15 bp, Homo sapiens
gcagataatttacaa

SEQ ID NO: 205175 - DNA, 15 bp, Homo sapiens
tgcagataatttaca

SEQ ID NO: 205176 - DNA, 15 bp, Homo sapiens
ttgcagataatttac

SEQ ID NO: 205177 - DNA, 15 bp, Homo sapiens
tttgcagataattta

SEQ ID NO: 205178 - DNA, 15 bp, Homo sapiens
ttttgcagataattt

SEQ ID NO: 205179 - DNA, 15 bp, Homo sapiens
tttttgcagataatt

SEQ ID NO: 205180 - DNA, 15 bp, Homo sapiens
ttttttgcagataat

SEQ ID NO: 205181 - DNA, 15 bp, Homo sapiens
gttttttgcagataa

SEQ ID NO: 205182 - DNA, 15 bp, Homo sapiens
tgttttttgcagata

SEQ ID NO: 205183 - DNA, 15 bp, Homo sapiens
ctgttttttgcagat

SEQ ID NO: 205184 - DNA, 15 bp, Homo sapiens
gctgttttttgcaga

SEQ ID NO: 205185 - DNA, 15 bp, Homo sapiens
tgctgttttttgcag

SEQ ID NO: 205186 - DNA, 15 bp, Homo sapiens
ctgctgttttttgca

SEQ ID NO: 205187 - DNA, 15 bp, Homo sapiens
tctgctgttttttgc

SEQ ID NO: 205188 - DNA, 15 bp, Homo sapiens
ctctgctgttttttg

SEQ ID NO: 205189 - DNA, 15 bp, Homo sapiens
actctgctgtttttt

SEQ ID NO: 205190 - DNA, 15 bp, Homo sapiens
cactctgctgttttt

SEQ ID NO: 205191 - DNA, 15 bp, Homo sapiens
gcactctgctgtttt

SEQ ID NO: 205192 - DNA, 15 bp, Homo sapiens
tgcactctgctgttt

SEQ ID NO: 205193 - DNA, 15 bp, Homo sapiens
ttgcactctgctgtt

SEQ ID NO: 205194 - DNA, 15 bp, Homo sapiens
tttgcactctgctgt

SEQ ID NO: 205195 - DNA, 15 bp, Homo sapiens
ctttgcactctgctg

SEQ ID NO: 205196 - DNA, 15 bp, Homo sapiens
tctttgcactctgct

SEQ ID NO: 205197 - DNA, 15 bp, Homo sapiens
ttctttgcactctgc

SEQ ID NO: 205198 - DNA, 15 bp, Homo sapiens
cttctttgcactctg

SEQ ID NO: 205199 - DNA, 15 bp, Homo sapiens
gcttctttgcactct

SEQ ID NO: 205200 - DNA, 15 bp, Homo sapiens
tgcttctttgcactc

SEQ ID NO: 205201 - DNA, 15 bp, Homo sapiens
ctgcttctttgcact

SEQ ID NO: 205202 - DNA, 15 bp, Homo sapiens
tctgcttctttgcac

SEQ ID NO: 205203 - DNA, 15 bp, Homo sapiens
ttctgcttctttgca

SEQ ID NO: 205204 - DNA, 15 bp, Homo sapiens
tttctgcttctttgc

SEQ ID NO: 205205 - DNA, 15 bp, Homo sapiens
atttctgcttctttg

SEQ ID NO: 205206 - DNA, 15 bp, Homo sapiens
tatttctgcttcttt

SEQ ID NO: 205207 - DNA, 15 bp, Homo sapiens
ggggacctctctctt

SEQ ID NO: 205208 - DNA, 15 bp, Homo sapiens
aggggacctctctct

SEQ ID NO: 205209 - DNA, 15 bp, Homo sapiens
aaggggacctctctc

SEQ ID NO: 205210 - DNA, 15 bp, Homo sapiens
aaaggggacctctct

SEQ ID NO: 205211 - DNA, 15 bp, Homo sapiens
taaaggggacctctc

SEQ ID NO: 205212 - DNA, 15 bp, Homo sapiens
ttaaaggggacctct

SEQ ID NO: 205213 - DNA, 15 bp, Homo sapiens
tttaaaggggacctc

SEQ ID NO: 205214 - DNA, 15 bp, Homo sapiens
ttttaaaggggacct

SEQ ID NO: 205215 - DNA, 15 bp, Homo sapiens
gttttaaaggggacc

SEQ ID NO: 205216 - DNA, 15 bp, Homo sapiens
cgttttaaaggggac

SEQ ID NO: 205217 - DNA, 15 bp, Homo sapiens
gcgttttaaagggga

SEQ ID NO: 205218 - DNA, 15 bp, Homo sapiens
tgcgttttaaagggg

SEQ ID NO: 205219 - DNA, 15 bp, Homo sapiens
ttgcgttttaaaggg

SEQ ID NO: 205220 - DNA, 15 bp, Homo sapiens
cttgcgttttaaagg

SEQ ID NO: 205221 - DNA, 15 bp, Homo sapiens
gcttgcgttttaaag

SEQ ID NO: 205222 - DNA, 15 bp, Homo sapiens
tgcttgcgttttaaa

SEQ ID NO: 205223 - DNA, 15 bp, Homo sapiens
ctgcttgcgttttaa

SEQ ID NO: 205224 - DNA, 15 bp, Homo sapiens
cctgcttgcgtttta

SEQ ID NO: 205225 - DNA, 15 bp, Homo sapiens
ccctgcttgcgtttt

SEQ ID NO: 205226 - DNA, 15 bp, Homo sapiens
accctgcttgcgttt

SEQ ID NO: 205227 - DNA, 15 bp, Homo sapiens
taccctgcttgcgtt

SEQ ID NO: 205228 - DNA, 15 bp, Homo sapiens
ttaccctgcttgcgt

SEQ ID NO: 205229 - DNA, 15 bp, Homo sapiens
tttaccctgcttgcg

SEQ ID NO: 205230 - DNA, 15 bp, Homo sapiens
atttaccctgcttgc

SEQ ID NO: 205231 - DNA, 15 bp, Homo sapiens
tatttaccctgcttg

SEQ ID NO: 205232 - DNA, 15 bp, Homo sapiens
atatttaccctgctt

SEQ ID NO: 205233 - DNA, 15 bp, Homo sapiens
aatatttaccctgct

SEQ ID NO: 205234 - DNA, 15 bp, Homo sapiens
taatatttaccctgc

SEQ ID NO: 205235 - DNA, 15 bp, Homo sapiens
ctaatatttaccctg

SEQ ID NO: 205236 - DNA, 15 bp, Homo sapiens
tctaatatttaccct

SEQ ID NO: 205237 - DNA, 15 bp, Homo sapiens
ttctaatatttaccc

SEQ ID NO: 205238 - DNA, 15 bp, Homo sapiens
tttctaatatttacc

SEQ ID NO: 205239 - DNA, 15 bp, Homo sapiens
ttttctaatatttac

SEQ ID NO: 205240 - DNA, 15 bp, Homo sapiens
tttttctaatattta

SEQ ID NO: 205241 - DNA, 15 bp, Homo sapiens
atttttctaatattt

SEQ ID NO: 205242 - DNA, 15 bp, Homo sapiens
catttttctaatatt

SEQ ID NO: 205243 - DNA, 15 bp, Homo sapiens
ccatttttctaatat

SEQ ID NO: 205244 - DNA, 15 bp, Homo sapiens
gccatttttctaata

SEQ ID NO: 205245 - DNA, 15 bp, Homo sapiens
tgccatttttctaat

SEQ ID NO: 205246 - DNA, 15 bp, Homo sapiens
ttgccatttttctaa

SEQ ID NO: 205247 - DNA, 15 bp, Homo sapiens
cttgccatttttcta

SEQ ID NO: 205248 - DNA, 15 bp, Homo sapiens
tcttgccatttttct

SEQ ID NO: 205249 - DNA, 15 bp, Homo sapiens
ttcttgccatttttc

SEQ ID NO: 205250 - DNA, 15 bp, Homo sapiens
attcttgccattttt

SEQ ID NO: 205251 - DNA, 15 bp, Homo sapiens
aattcttgccatttt

SEQ ID NO: 205252 - DNA, 15 bp, Homo sapiens
gaattcttgccattt

SEQ ID NO: 205253 - DNA, 15 bp, Homo sapiens
tgaattcttgccatt

SEQ ID NO: 205254 - DNA, 15 bp, Homo sapiens
atgaattcttgccat

SEQ ID NO: 205255 - DNA, 15 bp, Homo sapiens
tatgaattcttgcca

SEQ ID NO: 205256 - DNA, 15 bp, Homo sapiens
ctatgaattcttgcc

SEQ ID NO: 205257 - DNA, 15 bp, Homo sapiens
tctatgaattcttgc

SEQ ID NO: 205258 - DNA, 15 bp, Homo sapiens
ctctatgaattcttg

SEQ ID NO: 205259 - DNA, 15 bp, Homo sapiens
gctctatgaattctt

SEQ ID NO: 205260 - DNA, 15 bp, Homo sapiens
tgctctatgaattct

SEQ ID NO: 205261 - DNA, 15 bp, Homo sapiens
atgctctatgaattc

SEQ ID NO: 205262 - DNA, 15 bp, Homo sapiens
tatgctctatgaatt

SEQ ID NO: 205263 - DNA, 15 bp, Homo sapiens
ttatgctctatgaat

SEQ ID NO: 205264 - DNA, 15 bp, Homo sapiens
tttatgctctatgaa

SEQ ID NO: 205265 - DNA, 15 bp, Homo sapiens
ctttatgctctatga

SEQ ID NO: 205266 - DNA, 15 bp, Homo sapiens
gctttatgctctatg

SEQ ID NO: 205267 - DNA, 15 bp, Homo sapiens
agctttatgctctat

SEQ ID NO: 205268 - DNA, 15 bp, Homo sapiens
gagctttatgctcta

SEQ ID NO: 205269 - DNA, 15 bp, Homo sapiens
tgagctttatgctct

SEQ ID NO: 205270 - DNA, 15 bp, Homo sapiens
atgagctttatgctc

SEQ ID NO: 205271 - DNA, 15 bp, Homo sapiens
tatgagctttatgct

SEQ ID NO: 205272 - DNA, 15 bp, Homo sapiens
ttatgagctttatgc

SEQ ID NO: 205273 - DNA, 15 bp, Homo sapiens
attatgagctttatg

SEQ ID NO: 205274 - DNA, 15 bp, Homo sapiens
tattatgagctttat

SEQ ID NO: 205275 - DNA, 15 bp, Homo sapiens
ttattatgagcttta

SEQ ID NO: 205276 - DNA, 15 bp, Homo sapiens
tttattatgagcttt

SEQ ID NO: 205277 - DNA, 15 bp, Homo sapiens
gtttattatgagctt

SEQ ID NO: 205278 - DNA, 15 bp, Homo sapiens
agtttattatgagct

SEQ ID NO: 205279 - DNA, 15 bp, Homo sapiens
gagtttattatgagc

SEQ ID NO: 205280 - DNA, 15 bp, Homo sapiens
tgagtttattatgag

SEQ ID NO: 205281 - DNA, 15 bp, Homo sapiens
ctgagtttattatga

SEQ ID NO: 205282 - DNA, 15 bp, Homo sapiens
tctgagtttattatg

SEQ ID NO: 205283 - DNA, 15 bp, Homo sapiens
ctctgagtttattat

SEQ ID NO: 205284 - DNA, 15 bp, Homo sapiens
tctctgagtttatta

SEQ ID NO: 205285 - DNA, 15 bp, Homo sapiens
ttctctgagtttatt

SEQ ID NO: 205286 - DNA, 15 bp, Homo sapiens
attctctgagtttat

SEQ ID NO: 205287 - DNA, 15 bp, Homo sapiens
cattctctgagttta

SEQ ID NO: 205288 - DNA, 15 bp, Homo sapiens
gcattctctgagttt

SEQ ID NO: 205289 - DNA, 15 bp, Homo sapiens
tgcattctctgagtt

SEQ ID NO: 205290 - DNA, 15 bp, Homo sapiens
atgcattctctgagt

SEQ ID NO: 205291 - DNA, 15 bp, Homo sapiens
aatgcattctctgag

SEQ ID NO: 205292 - DNA, 15 bp, Homo sapiens
caatgcattctctga

SEQ ID NO: 205293 - DNA, 15 bp, Homo sapiens
acaatgcattctctg

SEQ ID NO: 205294 - DNA, 15 bp, Homo sapiens
gacaatgcattctct

SEQ ID NO: 205295 - DNA, 15 bp, Homo sapiens
ggacaatgcattctc

SEQ ID NO: 205296 - DNA, 15 bp, Homo sapiens
aggacaatgcattct

SEQ ID NO: 205297 - DNA, 15 bp, Homo sapiens
caggacaatgcattc

SEQ ID NO: 205298 - DNA, 15 bp, Homo sapiens
tcaggacaatgcatt

SEQ ID NO: 205299 - DNA, 15 bp, Homo sapiens
ctcaggacaatgcat

SEQ ID NO: 205300 - DNA, 15 bp, Homo sapiens
tctcaggacaatgca

SEQ ID NO: 205301 - DNA, 15 bp, Homo sapiens
ttctcaggacaatgc

SEQ ID NO: 205302 - DNA, 15 bp, Homo sapiens
cttctcaggacaatg

SEQ ID NO: 205303 - DNA, 15 bp, Homo sapiens
acttctcaggacaat

SEQ ID NO: 205304 - DNA, 15 bp, Homo sapiens
cacttctcaggacaa

SEQ ID NO: 205305 - DNA, 15 bp, Homo sapiens
ccacttctcaggaca

SEQ ID NO: 205306 - DNA, 15 bp, Homo sapiens
accacttctcaggac

SEQ ID NO: 205307 - DNA, 15 bp, Homo sapiens
taccacttctcagga

SEQ ID NO: 205308 - DNA, 15 bp, Homo sapiens
ttaccacttctcagg

SEQ ID NO: 205309 - DNA, 15 bp, Homo sapiens
tttaccacttctcag

SEQ ID NO: 205310 - DNA, 15 bp, Homo sapiens
ctttaccacttctca

SEQ ID NO: 205311 - DNA, 15 bp, Homo sapiens
cctttaccacttctc

SEQ ID NO: 205312 - DNA, 15 bp, Homo sapiens
tcctttaccacttct

SEQ ID NO: 205313 - DNA, 15 bp, Homo sapiens
ttcctttaccacttc

SEQ ID NO: 205314 - DNA, 15 bp, Homo sapiens
cttcctttaccactt

SEQ ID NO: 205315 - DNA, 15 bp, Homo sapiens
ccttcctttaccact

SEQ ID NO: 205316 - DNA, 15 bp, Homo sapiens
tccttcctttaccac

SEQ ID NO: 205317 - DNA, 15 bp, Homo sapiens
ttccttcctttacca

SEQ ID NO: 205318 - DNA, 15 bp, Homo sapiens
cttccttcctttacc

SEQ ID NO: 205319 - DNA, 15 bp, Homo sapiens
acttccttcctttac

SEQ ID NO: 205320 - DNA, 15 bp, Homo sapiens
cacttccttccttta

SEQ ID NO: 205321 - DNA, 15 bp, Homo sapiens
ccacttccttccttt

SEQ ID NO: 205322 - DNA, 15 bp, Homo sapiens
tccacttccttcctt

SEQ ID NO: 205323 - DNA, 15 bp, Homo sapiens
ttccacttccttcct

SEQ ID NO: 205324 - DNA, 15 bp, Homo sapiens
attccacttccttcc

SEQ ID NO: 205325 - DNA, 15 bp, Homo sapiens
tattccacttccttc

SEQ ID NO: 205326 - DNA, 15 bp, Homo sapiens
ctattccacttcctt

SEQ ID NO: 205327 - DNA, 15 bp, Homo sapiens
tctattccacttcct

SEQ ID NO: 205328 - DNA, 15 bp, Homo sapiens
gtctattccacttcc

SEQ ID NO: 205329 - DNA, 15 bp, Homo sapiens
agtctattccacttc

SEQ ID NO: 205330 - DNA, 15 bp, Homo sapiens
aagtctattccactt

SEQ ID NO: 205331 - DNA, 15 bp, Homo sapiens
gaagtctattccact

SEQ ID NO: 205332 - DNA, 15 bp, Homo sapiens
tgaagtctattccac

SEQ ID NO: 205333 - DNA, 15 bp, Homo sapiens
ttgaagtctattcca

SEQ ID NO: 205334 - DNA, 15 bp, Homo sapiens
gttgaagtctattcc

SEQ ID NO: 205335 - DNA, 15 bp, Homo sapiens
tgttgaagtctattc

SEQ ID NO: 205336 - DNA, 15 bp, Homo sapiens
ttgttgaagtctatt

SEQ ID NO: 205337 - DNA, 15 bp, Homo sapiens
tttgttgaagtctat

SEQ ID NO: 205338 - DNA, 15 bp, Homo sapiens
ttttgttgaagtcta

SEQ ID NO: 205339 - DNA, 15 bp, Homo sapiens
attttgttgaagtct

SEQ ID NO: 205340 - DNA, 15 bp, Homo sapiens
cattttgttgaagtc

SEQ ID NO: 205341 - DNA, 15 bp, Homo sapiens
ccattttgttgaagt

SEQ ID NO: 205342 - DNA, 15 bp, Homo sapiens
gccattttgttgaag

SEQ ID NO: 205343 - DNA, 15 bp, Homo sapiens
tgccattttgttgaa

SEQ ID NO: 205344 - DNA, 15 bp, Homo sapiens
atgccattttgttga

SEQ ID NO: 205345 - DNA, 15 bp, Homo sapiens
tatgccattttgttg

SEQ ID NO: 205346 - DNA, 15 bp, Homo sapiens
ctatgccattttgtt

SEQ ID NO: 205347 - DNA, 15 bp, Homo sapiens
tctatgccattttgt

SEQ ID NO: 205348 - DNA, 15 bp, Homo sapiens
ttctatgccattttg

SEQ ID NO: 205349 - DNA, 15 bp, Homo sapiens
attctatgccatttt

SEQ ID NO: 205350 - DNA, 15 bp, Homo sapiens
aattctatgccattt

SEQ ID NO: 205351 - DNA, 15 bp, Homo sapiens
taattctatgccatt

SEQ ID NO: 205352 - DNA, 15 bp, Homo sapiens
ttaattctatgccat

SEQ ID NO: 205353 - DNA, 15 bp, Homo sapiens
gttaattctatgcca

SEQ ID NO: 205354 - DNA, 15 bp, Homo sapiens
cgttaattctatgcc

SEQ ID NO: 205355 - DNA, 15 bp, Homo sapiens
ccgttaattctatgc

SEQ ID NO: 205356 - DNA, 15 bp, Homo sapiens
gccgttaattctatg

SEQ ID NO: 205357 - DNA, 15 bp, Homo sapiens
tgccgttaattctat

SEQ ID NO: 205358 - DNA, 15 bp, Homo sapiens
ctgccgttaattcta

SEQ ID NO: 205359 - DNA, 15 bp, Homo sapiens
tctgccgttaattct

SEQ ID NO: 205360 - DNA, 15 bp, Homo sapiens
ctctgccgttaattc

SEQ ID NO: 205361 - DNA, 15 bp, Homo sapiens
cctctgccgttaatt

SEQ ID NO: 205362 - DNA, 15 bp, Homo sapiens
ccctctgccgttaat

SEQ ID NO: 205363 - DNA, 15 bp, Homo sapiens
accctctgccgttaa

SEQ ID NO: 205364 - DNA, 15 bp, Homo sapiens
taccctctgccgtta

SEQ ID NO: 205365 - DNA, 15 bp, Homo sapiens
ataccctctgccgtt

SEQ ID NO: 205366 - DNA, 15 bp, Homo sapiens
gataccctctgccgt

SEQ ID NO: 205367 - DNA, 15 bp, Homo sapiens
tgataccctctgccg

SEQ ID NO: 205368 - DNA, 15 bp, Homo sapiens
atgataccctctgcc

SEQ ID NO: 205369 - DNA, 15 bp, Homo sapiens
catgataccctctgc

SEQ ID NO: 205370 - DNA, 15 bp, Homo sapiens
acatgataccctctg

SEQ ID NO: 205371 - DNA, 15 bp, Homo sapiens
tacatgataccctct

SEQ ID NO: 205372 - DNA, 15 bp, Homo sapiens
gtacatgataccctc

SEQ ID NO: 205373 - DNA, 15 bp, Homo sapiens
ggtacatgataccct

SEQ ID NO: 205374 - DNA, 15 bp, Homo sapiens
aggtacatgataccc

SEQ ID NO: 205375 - DNA, 15 bp, Homo sapiens
caggtacatgatacc

SEQ ID NO: 205376 - DNA, 15 bp, Homo sapiens
gcaggtacatgatac

SEQ ID NO: 205377 - DNA, 15 bp, Homo sapiens
tgcaggtacatgata

SEQ ID NO: 205378 - DNA, 15 bp, Homo sapiens
ctgcaggtacatgat

SEQ ID NO: 205379 - DNA, 15 bp, Homo sapiens
cctgcaggtacatga

SEQ ID NO: 205380 - DNA, 15 bp, Homo sapiens
ccctgcaggtacatg

SEQ ID NO: 205381 - DNA, 15 bp, Homo sapiens
accctgcaggtacat

SEQ ID NO: 205382 - DNA, 15 bp, Homo sapiens
taccctgcaggtaca

SEQ ID NO: 205383 - DNA, 15 bp, Homo sapiens
ataccctgcaggtac

SEQ ID NO: 205384 - DNA, 15 bp, Homo sapiens
aataccctgcaggta

SEQ ID NO: 205385 - DNA, 15 bp, Homo sapiens
aaataccctgcaggt

SEQ ID NO: 205386 - DNA, 15 bp, Homo sapiens
caaataccctgcagg

SEQ ID NO: 205387 - DNA, 15 bp, Homo sapiens
tcaaataccctgcag

SEQ ID NO: 205388 - DNA, 15 bp, Homo sapiens
ttcaaataccctgca

SEQ ID NO: 205389 - DNA, 15 bp, Homo sapiens
gttcaaataccctgc

SEQ ID NO: 205390 - DNA, 15 bp, Homo sapiens
ggttcaaataccctg

SEQ ID NO: 205391 - DNA, 15 bp, Homo sapiens
cggttcaaataccct

SEQ ID NO: 205392 - DNA, 15 bp, Homo sapiens
ccggttcaaataccc

SEQ ID NO: 205393 - DNA, 15 bp, Homo sapiens
cccggttcaaatacc

SEQ ID NO: 205394 - DNA, 15 bp, Homo sapiens
acccggttcaaatac

SEQ ID NO: 205395 - DNA, 15 bp, Homo sapiens
cacccggttcaaata

SEQ ID NO: 205396 - DNA, 15 bp, Homo sapiens
tcacccggttcaaat

SEQ ID NO: 205397 - DNA, 15 bp, Homo sapiens
atcacccggttcaaa

SEQ ID NO: 205398 - DNA, 15 bp, Homo sapiens
aatcacccggttcaa

SEQ ID NO: 205399 - DNA, 15 bp, Homo sapiens
aaatcacccggttca

SEQ ID NO: 205400 - DNA, 15 bp, Homo sapiens
aaaatcacccggttc

SEQ ID NO: 205401 - DNA, 15 bp, Homo sapiens
caaaatcacccggtt

SEQ ID NO: 205402 - DNA, 15 bp, Homo sapiens
acaaaatcacccggt

SEQ ID NO: 205403 - DNA, 15 bp, Homo sapiens
cacaaaatcacccgg

SEQ ID NO: 205404 - DNA, 15 bp, Homo sapiens
acacaaaatcacccg

SEQ ID NO: 205405 - DNA, 15 bp, Homo sapiens
cacacaaaatcaccc

SEQ ID NO: 205406 - DNA, 15 bp, Homo sapiens
ccacacaaaatcacc

SEQ ID NO: 205407 - DNA, 15 bp, Homo sapiens
gccacacaaaatcac

SEQ ID NO: 205408 - DNA, 15 bp, Homo sapiens
tgccacacaaaatca

SEQ ID NO: 205409 - DNA, 15 bp, Homo sapiens
ctgccacacaaaatc

SEQ ID NO: 205410 - DNA, 15 bp, Homo sapiens
actgccacacaaaat

SEQ ID NO: 205411 - DNA, 15 bp, Homo sapiens
cactgccacacaaaa

SEQ ID NO: 205412 - DNA, 15 bp, Homo sapiens
gcactgccacacaaa

SEQ ID NO: 205413 - DNA, 15 bp, Homo sapiens
ggcactgccacacaa

SEQ ID NO: 205414 - DNA, 15 bp, Homo sapiens
gggcactgccacaca

SEQ ID NO: 205415 - DNA, 15 bp, Homo sapiens
cgggcactgccacac

SEQ ID NO: 205416 - DNA, 15 bp, Homo sapiens
ccgggcactgccaca

SEQ ID NO: 205417 - DNA, 15 bp, Homo sapiens
cccgggcactgccac

SEQ ID NO: 205418 - DNA, 15 bp, Homo sapiens
tcccgggcactgcca

SEQ ID NO: 205419 - DNA, 15 bp, Homo sapiens
atcccgggcactgcc

SEQ ID NO: 205420 - DNA, 15 bp, Homo sapiens
gatcccgggcactgc

SEQ ID NO: 205421 - DNA, 15 bp, Homo sapiens
ggatcccgggcactg

SEQ ID NO: 205422 - DNA, 15 bp, Homo sapiens
tggatcccgggcact

SEQ ID NO: 205423 - DNA, 15 bp, Homo sapiens
gtggatcccgggcac

SEQ ID NO: 205424 - DNA, 15 bp, Homo sapiens
tgtggatcccgggca

SEQ ID NO: 205425 - DNA, 15 bp, Homo sapiens
ctgtggatcccgggc

SEQ ID NO: 205426 - DNA, 15 bp, Homo sapiens
tctgtggatcccggg

SEQ ID NO: 205427 - DNA, 15 bp, Homo sapiens
gtctgtggatcccgg

SEQ ID NO: 205428 - DNA, 15 bp, Homo sapiens
ggtctgtggatcccg

SEQ ID NO: 205429 - DNA, 15 bp, Homo sapiens
gggtctgtggatccc

SEQ ID NO: 205430 - DNA, 15 bp, Homo sapiens
agggtctgtggatcc

SEQ ID NO: 205431 - DNA, 15 bp, Homo sapiens
tagggtctgtggatc

SEQ ID NO: 205432 - DNA, 15 bp, Homo sapiens
ttagggtctgtggat

SEQ ID NO: 205433 - DNA, 15 bp, Homo sapiens
attagggtctgtgga

SEQ ID NO: 205434 - DNA, 15 bp, Homo sapiens
cattagggtctgtgg

SEQ ID NO: 205435 - DNA, 15 bp, Homo sapiens
tcattagggtctgtg

SEQ ID NO: 205436 - DNA, 15 bp, Homo sapiens
gtcattagggtctgt

SEQ ID NO: 205437 - DNA, 15 bp, Homo sapiens
tgtcattagggtctg

SEQ ID NO: 205438 - DNA, 15 bp, Homo sapiens
gtgtcattagggtct

SEQ ID NO: 205439 - DNA, 15 bp, Homo sapiens
ggtgtcattagggtc

SEQ ID NO: 205440 - DNA, 15 bp, Homo sapiens
gggtgtcattagggt

SEQ ID NO: 205441 - DNA, 15 bp, Homo sapiens
tgggtgtcattaggg

SEQ ID NO: 205442 - DNA, 15 bp, Homo sapiens
ttgggtgtcattagg

SEQ ID NO: 205443 - DNA, 15 bp, Homo sapiens
tttgggtgtcattag

SEQ ID NO: 205444 - DNA, 15 bp, Homo sapiens
atttgggtgtcatta

SEQ ID NO: 205445 - DNA, 15 bp, Homo sapiens
aatttgggtgtcatt

SEQ ID NO: 205446 - DNA, 15 bp, Homo sapiens
aaatttgggtgtcat

SEQ ID NO: 205447 - DNA, 15 bp, Homo sapiens
caaatttgggtgtca

SEQ ID NO: 205448 - DNA, 15 bp, Homo sapiens
acaaatttgggtgtc

SEQ ID NO: 205449 - DNA, 15 bp, Homo sapiens
cacaaatttgggtgt

SEQ ID NO: 205450 - DNA, 15 bp, Homo sapiens
tcacaaatttgggtg

SEQ ID NO: 205451 - DNA, 15 bp, Homo sapiens
ctcacaaatttgggt

SEQ ID NO: 205452 - DNA, 15 bp, Homo sapiens
cctcacaaatttggg

SEQ ID NO: 205453 - DNA, 15 bp, Homo sapiens
gcctcacaaatttgg

SEQ ID NO: 205454 - DNA, 15 bp, Homo sapiens
tgcctcacaaatttg

SEQ ID NO: 205455 - DNA, 15 bp, Homo sapiens
atgcctcacaaattt

SEQ ID NO: 205456 - DNA, 15 bp, Homo sapiens
aatgcctcacaaatt

SEQ ID NO: 205457 - DNA, 15 bp, Homo sapiens
gaatgcctcacaaat

SEQ ID NO: 205458 - DNA, 15 bp, Homo sapiens
agaatgcctcacaaa

SEQ ID NO: 205459 - DNA, 15 bp, Homo sapiens
aagaatgcctcacaa

SEQ ID NO: 205460 - DNA, 15 bp, Homo sapiens
gaagaatgcctcaca

SEQ ID NO: 205461 - DNA, 15 bp, Homo sapiens
agaagaatgcctcac

SEQ ID NO: 205462 - DNA, 15 bp, Homo sapiens
gagaagaatgcctca

SEQ ID NO: 205463 - DNA, 15 bp, Homo sapiens
tgagaagaatgcctc

SEQ ID NO: 205464 - DNA, 15 bp, Homo sapiens
ctgagaagaatgcct

SEQ ID NO: 205465 - DNA, 15 bp, Homo sapiens
actgagaagaatgcc

SEQ ID NO: 205466 - DNA, 15 bp, Homo sapiens
aactgagaagaatgc

SEQ ID NO: 205467 - DNA, 15 bp, Homo sapiens
aaactgagaagaatg

SEQ ID NO: 205468 - DNA, 15 bp, Homo sapiens
taaactgagaagaat

SEQ ID NO: 205469 - DNA, 15 bp, Homo sapiens
tataaactgagaaga

SEQ ID NO: 205470 - DNA, 15 bp, Homo sapiens
ttataaactgagaag

SEQ ID NO: 205471 - DNA, 15 bp, Homo sapiens
tttataaactgagaa

SEQ ID NO: 205472 - DNA, 15 bp, Homo sapiens
ctttataaactgaga

SEQ ID NO: 205473 - DNA, 15 bp, Homo sapiens
tctttataaactgag

SEQ ID NO: 205474 - DNA, 15 bp, Homo sapiens
ttctttataaactga

SEQ ID NO: 205475 - DNA, 15 bp, Homo sapiens
gttctttataaactg

SEQ ID NO: 205476 - DNA, 15 bp, Homo sapiens
tgttctttataaact

SEQ ID NO: 205477 - DNA, 15 bp, Homo sapiens
atgttctttataaac

SEQ ID NO: 205478 - DNA, 15 bp, Homo sapiens
catgttctttataaa

SEQ ID NO: 205479 - DNA, 15 bp, Homo sapiens
tcatgttctttataa

SEQ ID NO: 205480 - DNA, 15 bp, Homo sapiens
gtcatgttctttata

SEQ ID NO: 205481 - DNA, 15 bp, Homo sapiens
agtcatgttctttat

SEQ ID NO: 205482 - DNA, 15 bp, Homo sapiens
cagtcatgttcttta

SEQ ID NO: 205483 - DNA, 15 bp, Homo sapiens
tcagtcatgttcttt

SEQ ID NO: 205484 - DNA, 15 bp, Homo sapiens
ctcagtcatgttctt

SEQ ID NO: 205485 - DNA, 15 bp, Homo sapiens
tctcagtcatgttct

SEQ ID NO: 205486 - DNA, 15 bp, Homo sapiens
gtctcagtcatgttc

SEQ ID NO: 205487 - DNA, 15 bp, Homo sapiens
ggtctcagtcatgtt

SEQ ID NO: 205488 - DNA, 15 bp, Homo sapiens
tggtctcagtcatgt

SEQ ID NO: 205489 - DNA, 15 bp, Homo sapiens
gtggtctcagtcatg

SEQ ID NO: 205490 - DNA, 15 bp, Homo sapiens
ggtggtctcagtcat

SEQ ID NO: 205491 - DNA, 15 bp, Homo sapiens
aggtggtctcagtca

SEQ ID NO: 205492 - DNA, 15 bp, Homo sapiens
taggtggtctcagtc

SEQ ID NO: 205493 - DNA, 15 bp, Homo sapiens
ctaggtggtctcagt

SEQ ID NO: 205494 - DNA, 15 bp, Homo sapiens
gctaggtggtctcag

SEQ ID NO: 205495 - DNA, 15 bp, Homo sapiens
tgctaggtggtctca

SEQ ID NO: 205496 - DNA, 15 bp, Homo sapiens
gtgctaggtggtctc

SEQ ID NO: 205497 - DNA, 15 bp, Homo sapiens
tgtgctaggtggtct

SEQ ID NO: 205498 - DNA, 15 bp, Homo sapiens
atgtgctaggtggtc

SEQ ID NO: 205499 - DNA, 15 bp, Homo sapiens
aatgtgctaggtggt

SEQ ID NO: 205500 - DNA, 15 bp, Homo sapiens
aaatgtgctaggtgg

SEQ ID NO: 205501 - DNA, 15 bp, Homo sapiens
taaatgtgctaggtg

SEQ ID NO: 205502 - DNA, 15 bp, Homo sapiens
ttaaatgtgctaggt

SEQ ID NO: 205503 - DNA, 15 bp, Homo sapiens
gttaaatgtgctagg

SEQ ID NO: 205504 - DNA, 15 bp, Homo sapiens
ggttaaatgtgctag

SEQ ID NO: 205505 - DNA, 15 bp, Homo sapiens
cggttaaatgtgcta

SEQ ID NO: 205506 - DNA, 15 bp, Homo sapiens
ccggttaaatgtgct

SEQ ID NO: 205507 - DNA, 15 bp, Homo sapiens
cccggttaaatgtgc

SEQ ID NO: 205508 - DNA, 15 bp, Homo sapiens
acccggttaaatgtg

SEQ ID NO: 205509 - DNA, 15 bp, Homo sapiens
gacccggttaaatgt

SEQ ID NO: 205510 - DNA, 15 bp, Homo sapiens
agacccggttaaatg

SEQ ID NO: 205511 - DNA, 15 bp, Homo sapiens
cagacccggttaaat

SEQ ID NO: 205512 - DNA, 15 bp, Homo sapiens
tcagacccggttaaa

SEQ ID NO: 205513 - DNA, 15 bp, Homo sapiens
ttcagacccggttaa

SEQ ID NO: 205514 - DNA, 15 bp, Homo sapiens
cttcagacccggtta

SEQ ID NO: 205515 - DNA, 15 bp, Homo sapiens
ccttcagacccggtt

SEQ ID NO: 205516 - DNA, 15 bp, Homo sapiens
tccttcagacccggt

SEQ ID NO: 205517 - DNA, 15 bp, Homo sapiens
gtccttcagacccgg

SEQ ID NO: 205518 - DNA, 15 bp, Homo sapiens
ggtccttcagacccg

SEQ ID NO: 205519 - DNA, 15 bp, Homo sapiens
tggtccttcagaccc

SEQ ID NO: 205520 - DNA, 15 bp, Homo sapiens
ctggtccttcagacc

SEQ ID NO: 205521 - DNA, 15 bp, Homo sapiens
gctggtccttcagac

SEQ ID NO: 205522 - DNA, 15 bp, Homo sapiens
agctggtccttcaga

SEQ ID NO: 205523 - DNA, 15 bp, Homo sapiens
tagctggtccttcag

SEQ ID NO: 205524 - DNA, 15 bp, Homo sapiens
ttagctggtccttca

SEQ ID NO: 205525 - DNA, 15 bp, Homo sapiens
attagctggtccttc

SEQ ID NO: 205526 - DNA, 15 bp, Homo sapiens
aattagctggtcctt

SEQ ID NO: 205527 - DNA, 15 bp, Homo sapiens
aaattagctggtcct

SEQ ID NO: 205528 - DNA, 15 bp, Homo sapiens
gaaattagctggtcc

SEQ ID NO: 205529 - DNA, 15 bp, Homo sapiens
ggaaattagctggtc

SEQ ID NO: 205530 - DNA, 15 bp, Homo sapiens
aggaaattagctggt

SEQ ID NO: 205531 - DNA, 15 bp, Homo sapiens
taggaaattagctgg

SEQ ID NO: 205532 - DNA, 15 bp, Homo sapiens
ttaggaaattagctg

SEQ ID NO: 205533 - DNA, 15 bp, Homo sapiens
tttaggaaattagct

SEQ ID NO: 205534 - DNA, 15 bp, Homo sapiens
ttttaggaaattagc

SEQ ID NO: 205535 - DNA, 15 bp, Homo sapiens
tttttaggaaattag

SEQ ID NO: 205536 - DNA, 15 bp, Homo sapiens
atttttaggaaatta

SEQ ID NO: 205537 - DNA, 15 bp, Homo sapiens
tatttttaggaaatt

SEQ ID NO: 205538 - DNA, 15 bp, Homo sapiens
ctatttttaggaaat

SEQ ID NO: 205539 - DNA, 15 bp, Homo sapiens
gctatttttaggaaa

SEQ ID NO: 205540 - DNA, 15 bp, Homo sapiens
tgctatttttaggaa

SEQ ID NO: 205541 - DNA, 15 bp, Homo sapiens
ctgctatttttagga

SEQ ID NO: 205542 - DNA, 15 bp, Homo sapiens
actgctatttttagg

SEQ ID NO: 205543 - DNA, 15 bp, Homo sapiens
aactgctatttttag

SEQ ID NO: 205544 - DNA, 15 bp, Homo sapiens
aaactgctattttta

SEQ ID NO: 205545 - DNA, 15 bp, Homo sapiens
gaaactgctattttt

SEQ ID NO: 205546 - DNA, 15 bp, Homo sapiens
agaaactgctatttt

SEQ ID NO: 205547 - DNA, 15 bp, Homo sapiens
aagaaactgctattt

SEQ ID NO: 205548 - DNA, 15 bp, Homo sapiens
caagaaactgctatt

SEQ ID NO: 205549 - DNA, 15 bp, Homo sapiens
gcaagaaactgctat

SEQ ID NO: 205550 - DNA, 15 bp, Homo sapiens
agcaagaaactgcta

SEQ ID NO: 205551 - DNA, 15 bp, Homo sapiens
cagcaagaaactgct

SEQ ID NO: 205552 - DNA, 15 bp, Homo sapiens
ccagcaagaaactgc

SEQ ID NO: 205553 - DNA, 15 bp, Homo sapiens
cccagcaagaaactg

SEQ ID NO: 205554 - DNA, 15 bp, Homo sapiens
gcccagcaagaaact

SEQ ID NO: 205555 - DNA, 15 bp, Homo sapiens
tgcccagcaagaaac

SEQ ID NO: 205556 - DNA, 15 bp, Homo sapiens
atgcccagcaagaaa

SEQ ID NO: 205557 - DNA, 15 bp, Homo sapiens
tatgcccagcaagaa

SEQ ID NO: 205558 - DNA, 15 bp, Homo sapiens
atatgcccagcaaga

SEQ ID NO: 205559 - DNA, 15 bp, Homo sapiens
catatgcccagcaag

SEQ ID NO: 205560 - DNA, 15 bp, Homo sapiens
acatatgcccagcaa

SEQ ID NO: 205561 - DNA, 15 bp, Homo sapiens
gacatatgcccagca

SEQ ID NO: 205562 - DNA, 15 bp, Homo sapiens
agacatatgcccagc

SEQ ID NO: 205563 - DNA, 15 bp, Homo sapiens
aagacatatgcccag

SEQ ID NO: 205564 - DNA, 15 bp, Homo sapiens
taagacatatgccca

SEQ ID NO: 205565 - DNA, 15 bp, Homo sapiens
ctaagacatatgccc

SEQ ID NO: 205566 - DNA, 15 bp, Homo sapiens
cctaagacatatgcc

SEQ ID NO: 205567 - DNA, 15 bp, Homo sapiens
gcctaagacatatgc

SEQ ID NO: 205568 - DNA, 15 bp, Homo sapiens
agcctaagacatatg

SEQ ID NO: 205569 - DNA, 15 bp, Homo sapiens
aagcctaagacatat

SEQ ID NO: 205570 - DNA, 15 bp, Homo sapiens
aaagcctaagacata

SEQ ID NO: 205571 - DNA, 15 bp, Homo sapiens
caaagcctaagacat

SEQ ID NO: 205572 - DNA, 15 bp, Homo sapiens
gcaaagcctaagaca

SEQ ID NO: 205573 - DNA, 15 bp, Homo sapiens
agcaaagcctaagac

SEQ ID NO: 205574 - DNA, 15 bp, Homo sapiens
cagcaaagcctaaga

SEQ ID NO: 205575 - DNA, 15 bp, Homo sapiens
ccagcaaagcctaag

SEQ ID NO: 205576 - DNA, 15 bp, Homo sapiens
gccagcaaagcctaa

SEQ ID NO: 205577 - DNA, 15 bp, Homo sapiens
agccagcaaagccta

SEQ ID NO: 205578 - DNA, 15 bp, Homo sapiens
gagccagcaaagcct

SEQ ID NO: 205579 - DNA, 15 bp, Homo sapiens
agagccagcaaagcc

SEQ ID NO: 205580 - DNA, 15 bp, Homo sapiens
tagagccagcaaagc

SEQ ID NO: 205581 - DNA, 15 bp, Homo sapiens
ttagagccagcaaag

SEQ ID NO: 205582 - DNA, 15 bp, Homo sapiens
cttagagccagcaaa

SEQ ID NO: 205583 - DNA, 15 bp, Homo sapiens
tcttagagccagcaa

SEQ ID NO: 205584 - DNA, 15 bp, Homo sapiens
ttcttagagccagca

SEQ ID NO: 205585 - DNA, 15 bp, Homo sapiens
gttcttagagccagc

SEQ ID NO: 205586 - DNA, 15 bp, Homo sapiens
agttcttagagccag

SEQ ID NO: 205587 - DNA, 15 bp, Homo sapiens
aagttcttagagcca

SEQ ID NO: 205588 - DNA, 15 bp, Homo sapiens
taagttcttagagcc

SEQ ID NO: 205589 - DNA, 15 bp, Homo sapiens
ttaagttcttagagc

SEQ ID NO: 205590 - DNA, 15 bp, Homo sapiens
attaagttcttagag

SEQ ID NO: 205591 - DNA, 15 bp, Homo sapiens
tattaagttcttaga

SEQ ID NO: 205592 - DNA, 15 bp, Homo sapiens
atattaagttcttag

SEQ ID NO: 205593 - DNA, 15 bp, Homo sapiens
aatattaagttctta

SEQ ID NO: 205594 - DNA, 15 bp, Homo sapiens
taatattaagttctt

SEQ ID NO: 205595 - DNA, 15 bp, Homo sapiens
ttaatattaagttct

SEQ ID NO: 205596 - DNA, 15 bp, Homo sapiens
gttaatattaagttc

SEQ ID NO: 205597 - DNA, 15 bp, Homo sapiens
tgttaatattaagtt

SEQ ID NO: 205598 - DNA, 15 bp, Homo sapiens
ttgttaatattaagt

SEQ ID NO: 205599 - DNA, 15 bp, Homo sapiens
attgttaatattaag

SEQ ID NO: 205600 - DNA, 15 bp, Homo sapiens
aattgttaatattaa

SEQ ID NO: 205601 - DNA, 15 bp, Homo sapiens
gaattgttaatatta

SEQ ID NO: 205602 - DNA, 15 bp, Homo sapiens
tgaattgttaatatt

SEQ ID NO: 205603 - DNA, 15 bp, Homo sapiens
gtgaattgttaatat

SEQ ID NO: 205604 - DNA, 15 bp, Homo sapiens
tgtgaattgttaata

SEQ ID NO: 205605 - DNA, 15 bp, Homo sapiens
gtgtgaattgttaat

SEQ ID NO: 205606 - DNA, 15 bp, Homo sapiens
tgtgtgaattgttaa

SEQ ID NO: 205607 - DNA, 15 bp, Homo sapiens
ctgtgtgaattgtta

SEQ ID NO: 205608 - DNA, 15 bp, Homo sapiens
tctgtgtgaattgtt

SEQ ID NO: 205609 - DNA, 15 bp, Homo sapiens
ttctgtgtgaattgt

SEQ ID NO: 205610 - DNA, 15 bp, Homo sapiens
cttctgtgtgaattg

SEQ ID NO: 205611 - DNA, 15 bp, Homo sapiens
ccttctgtgtgaatt

SEQ ID NO: 205612 - DNA, 15 bp, Homo sapiens
tccttctgtgtgaat

SEQ ID NO: 205613 - DNA, 15 bp, Homo sapiens
ttccttctgtgtgaa

SEQ ID NO: 205614 - DNA, 15 bp, Homo sapiens
attccttctgtgtga

SEQ ID NO: 205615 - DNA, 15 bp, Homo sapiens
gattccttctgtgtg

SEQ ID NO: 205616 - DNA, 15 bp, Homo sapiens
cgattccttctgtgt

SEQ ID NO: 205617 - DNA, 15 bp, Homo sapiens
acgattccttctgtg

SEQ ID NO: 205618 - DNA, 15 bp, Homo sapiens
cacgattccttctgt

SEQ ID NO: 205619 - DNA, 15 bp, Homo sapiens
acacgattccttctg

SEQ ID NO: 205620 - DNA, 15 bp, Homo sapiens
aacacgattccttct

SEQ ID NO: 205621 - DNA, 15 bp, Homo sapiens
gaacacgattccttc

SEQ ID NO: 205622 - DNA, 15 bp, Homo sapiens
tgaacacgattcctt

SEQ ID NO: 205623 - DNA, 15 bp, Homo sapiens
ctgaacacgattcct

SEQ ID NO: 205624 - DNA, 15 bp, Homo sapiens
cctgaacacgattcc

SEQ ID NO: 205625 - DNA, 15 bp, Homo sapiens
ccctgaacacgattc

SEQ ID NO: 205626 - DNA, 15 bp, Homo sapiens
gccctgaacacgatt

SEQ ID NO: 205627 - DNA, 15 bp, Homo sapiens
tgccctgaacacgat

SEQ ID NO: 205628 - DNA, 15 bp, Homo sapiens
atgccctgaacacga

SEQ ID NO: 205629 - DNA, 15 bp, Homo sapiens
aatgccctgaacacg

SEQ ID NO: 205630 - DNA, 15 bp, Homo sapiens
caatgccctgaacac

SEQ ID NO: 205631 - DNA, 15 bp, Homo sapiens
tcaatgccctgaaca

SEQ ID NO: 205632 - DNA, 15 bp, Homo sapiens
gtcaatgccctgaac

SEQ ID NO: 205633 - DNA, 15 bp, Homo sapiens
ggtcaatgccctgaa

SEQ ID NO: 205634 - DNA, 15 bp, Homo sapiens
tggtcaatgccctga

SEQ ID NO: 205635 - DNA, 15 bp, Homo sapiens
ttggtcaatgccctg

SEQ ID NO: 205636 - DNA, 15 bp, Homo sapiens
attggtcaatgccct

SEQ ID NO: 205637 - DNA, 15 bp, Homo sapiens
tattggtcaatgccc

SEQ ID NO: 205638 - DNA, 15 bp, Homo sapiens
gtattggtcaatgcc

SEQ ID NO: 205639 - DNA, 15 bp, Homo sapiens
agtattggtcaatgc

SEQ ID NO: 205640 - DNA, 15 bp, Homo sapiens
gagtattggtcaatg

SEQ ID NO: 205641 - DNA, 15 bp, Homo sapiens
tgagtattggtcaat

SEQ ID NO: 205642 - DNA, 15 bp, Homo sapiens
ctgagtattggtcaa

SEQ ID NO: 205643 - DNA, 15 bp, Homo sapiens
gctgagtattggtca

SEQ ID NO: 205644 - DNA, 15 bp, Homo sapiens
agctgagtattggtc

SEQ ID NO: 205645 - DNA, 15 bp, Homo sapiens
gagctgagtattggt

SEQ ID NO: 205646 - DNA, 15 bp, Homo sapiens
tgagctgagtattgg

SEQ ID NO: 205647 - DNA, 15 bp, Homo sapiens
gtgagctgagtattg

SEQ ID NO: 205648 - DNA, 15 bp, Homo sapiens
ggtgagctgagtatt

SEQ ID NO: 205649 - DNA, 15 bp, Homo sapiens
aggtgagctgagtat

SEQ ID NO: 205650 - DNA, 15 bp, Homo sapiens
aaggtgagctgagta

SEQ ID NO: 205651 - DNA, 15 bp, Homo sapiens
aaaggtgagctgagt

SEQ ID NO: 205652 - DNA, 15 bp, Homo sapiens
caaaggtgagctgag

SEQ ID NO: 205653 - DNA, 15 bp, Homo sapiens
tcaaaggtgagctga

SEQ ID NO: 205654 - DNA, 15 bp, Homo sapiens
ttcaaaggtgagctg

SEQ ID NO: 205655 - DNA, 15 bp, Homo sapiens
attcaaaggtgagct

SEQ ID NO: 205656 - DNA, 15 bp, Homo sapiens
cattcaaaggtgagc

SEQ ID NO: 205657 - DNA, 15 bp, Homo sapiens
ccattcaaaggtgag

SEQ ID NO: 205658 - DNA, 15 bp, Homo sapiens
gccattcaaaggtga

SEQ ID NO: 205659 - DNA, 15 bp, Homo sapiens
ggccattcaaaggtg

SEQ ID NO: 205660 - DNA, 15 bp, Homo sapiens
tggccattcaaaggt

SEQ ID NO: 205661 - DNA, 15 bp, Homo sapiens
ctggccattcaaagg

SEQ ID NO: 205662 - DNA, 15 bp, Homo sapiens
tctggccattcaaag

SEQ ID NO: 205663 - DNA, 15 bp, Homo sapiens
ctctggccattcaaa

SEQ ID NO: 205664 - DNA, 15 bp, Homo sapiens
cctctggccattcaa

SEQ ID NO: 205665 - DNA, 15 bp, Homo sapiens
tcctctggccattca

SEQ ID NO: 205666 - DNA, 15 bp, Homo sapiens
gtcctctggccattc

SEQ ID NO: 205667 - DNA, 15 bp, Homo sapiens
tgtcctctggccatt

SEQ ID NO: 205668 - DNA, 15 bp, Homo sapiens
gtgtcctctggccat

SEQ ID NO: 205669 - DNA, 15 bp, Homo sapiens
tgtgtcctctggcca

SEQ ID NO: 205670 - DNA, 15 bp, Homo sapiens
ctgtgtcctctggcc

SEQ ID NO: 205671 - DNA, 15 bp, Homo sapiens
gctgtgtcctctggc

SEQ ID NO: 205672 - DNA, 15 bp, Homo sapiens
agctgtgtcctctgg

SEQ ID NO: 205673 - DNA, 15 bp, Homo sapiens
gagctgtgtcctctg

SEQ ID NO: 205674 - DNA, 15 bp, Homo sapiens
agagctgtgtcctct

SEQ ID NO: 205675 - DNA, 15 bp, Homo sapiens
tagagctgtgtcctc

SEQ ID NO: 205676 - DNA, 15 bp, Homo sapiens
ttagagctgtgtcct

SEQ ID NO: 205677 - DNA, 15 bp, Homo sapiens
tttagagctgtgtcc

SEQ ID NO: 205678 - DNA, 15 bp, Homo sapiens
ctttagagctgtgtc

SEQ ID NO: 205679 - DNA, 15 bp, Homo sapiens
tctttagagctgtgt

SEQ ID NO: 205680 - DNA, 15 bp, Homo sapiens
ttctttagagctgtg

SEQ ID NO: 205681 - DNA, 15 bp, Homo sapiens
tttctttagagctgt

SEQ ID NO: 205682 - DNA, 15 bp, Homo sapiens
ctttctttagagctg

SEQ ID NO: 205683 - DNA, 15 bp, Homo sapiens
cctttctttagagct

SEQ ID NO: 205684 - DNA, 15 bp, Homo sapiens
acctttctttagagc

SEQ ID NO: 205685 - DNA, 15 bp, Homo sapiens
cacctttctttagag

SEQ ID NO: 205686 - DNA, 15 bp, Homo sapiens
acacctttctttaga

SEQ ID NO: 205687 - DNA, 15 bp, Homo sapiens
cacacctttctttag

SEQ ID NO: 205688 - DNA, 15 bp, Homo sapiens
gcacacctttcttta

SEQ ID NO: 205689 - DNA, 15 bp, Homo sapiens
tgcacacctttcttt

SEQ ID NO: 205690 - DNA, 15 bp, Homo sapiens
ttgcacacctttctt

SEQ ID NO: 205691 - DNA, 15 bp, Homo sapiens
gttgcacacctttct

SEQ ID NO: 205692 - DNA, 15 bp, Homo sapiens
tgttgcacacctttc

SEQ ID NO: 205693 - DNA, 15 bp, Homo sapiens
ttgttgcacaccttt

SEQ ID NO: 205694 - DNA, 15 bp, Homo sapiens
cttgttgcacacctt

SEQ ID NO: 205695 - DNA, 15 bp, Homo sapiens
ccttgttgcacacct

SEQ ID NO: 205696 - DNA, 15 bp, Homo sapiens
tccttgttgcacacc

SEQ ID NO: 205697 - DNA, 15 bp, Homo sapiens
ctccttgttgcacac

SEQ ID NO: 205698 - DNA, 15 bp, Homo sapiens
actccttgttgcaca

SEQ ID NO: 205699 - DNA, 15 bp, Homo sapiens
cactccttgttgcac

SEQ ID NO: 205700 - DNA, 15 bp, Homo sapiens
acactccttgttgca

SEQ ID NO: 205701 - DNA, 15 bp, Homo sapiens
cacactccttgttgc

SEQ ID NO: 205702 - DNA, 15 bp, Homo sapiens
ccacactccttgttg

SEQ ID NO: 205703 - DNA, 15 bp, Homo sapiens
accacactccttgtt

SEQ ID NO: 205704 - DNA, 15 bp, Homo sapiens
aaccacactccttgt

SEQ ID NO: 205705 - DNA, 15 bp, Homo sapiens
caaccacactccttg

SEQ ID NO: 205706 - DNA, 15 bp, Homo sapiens
tcaaccacactcctt

SEQ ID NO: 205707 - DNA, 15 bp, Homo sapiens
ctcaaccacactcct

SEQ ID NO: 205708 - DNA, 15 bp, Homo sapiens
actcaaccacactcc

SEQ ID NO: 205709 - DNA, 15 bp, Homo sapiens
cactcaaccacactc

SEQ ID NO: 205710 - DNA, 15 bp, Homo sapiens
ccactcaaccacact

SEQ ID NO: 205711 - DNA, 15 bp, Homo sapiens
cccactcaaccacac

SEQ ID NO: 205712 - DNA, 15 bp, Homo sapiens
gcccactcaaccaca

SEQ ID NO: 205713 - DNA, 15 bp, Homo sapiens
tgcccactcaaccac

SEQ ID NO: 205714 - DNA, 15 bp, Homo sapiens
atgcccactcaacca

SEQ ID NO: 205715 - DNA, 15 bp, Homo sapiens
catgcccactcaacc

SEQ ID NO: 205716 - DNA, 15 bp, Homo sapiens
acatgcccactcaac

SEQ ID NO: 205717 - DNA, 15 bp, Homo sapiens
aacatgcccactcaa

SEQ ID NO: 205718 - DNA, 15 bp, Homo sapiens
taacatgcccactca

SEQ ID NO: 205719 - DNA, 15 bp, Homo sapiens
ataacatgcccactc

SEQ ID NO: 205720 - DNA, 15 bp, Homo sapiens
gataacatgcccact

SEQ ID NO: 205721 - DNA, 15 bp, Homo sapiens
agataacatgcccac

SEQ ID NO: 205722 - DNA, 15 bp, Homo sapiens
aagataacatgccca

SEQ ID NO: 205723 - DNA, 15 bp, Homo sapiens
gaagataacatgccc

SEQ ID NO: 205724 - DNA, 15 bp, Homo sapiens
ggaagataacatgcc

SEQ ID NO: 205725 - DNA, 15 bp, Homo sapiens
aggaagataacatgc

SEQ ID NO: 205726 - DNA, 15 bp, Homo sapiens
taggaagataacatg

SEQ ID NO: 205727 - DNA, 15 bp, Homo sapiens
ctaggaagataacat

SEQ ID NO: 205728 - DNA, 15 bp, Homo sapiens
cctaggaagataaca

SEQ ID NO: 205729 - DNA, 15 bp, Homo sapiens
acctaggaagataac

SEQ ID NO: 205730 - DNA, 15 bp, Homo sapiens
gacctaggaagataa

SEQ ID NO: 205731 - DNA, 15 bp, Homo sapiens
tgacctaggaagata

SEQ ID NO: 205732 - DNA, 15 bp, Homo sapiens
gtgacctaggaagat

SEQ ID NO: 205733 - DNA, 15 bp, Homo sapiens
tgtgacctaggaaga

SEQ ID NO: 205734 - DNA, 15 bp, Homo sapiens
ttgtgacctaggaag

SEQ ID NO: 205735 - DNA, 15 bp, Homo sapiens
cttgtgacctaggaa

SEQ ID NO: 205736 - DNA, 15 bp, Homo sapiens
acttgtgacctagga

SEQ ID NO: 205737 - DNA, 15 bp, Homo sapiens
tacttgtgacctagg

SEQ ID NO: 205738 - DNA, 15 bp, Homo sapiens
ttacttgtgacctag

SEQ ID NO: 205739 - DNA, 15 bp, Homo sapiens
gttacttgtgaccta

SEQ ID NO: 205740 - DNA, 15 bp, Homo sapiens
tgttacttgtgacct

SEQ ID NO: 205741 - DNA, 15 bp, Homo sapiens
ttgttacttgtgacc

SEQ ID NO: 205742 - DNA, 15 bp, Homo sapiens
tttgttacttgtgac

SEQ ID NO: 205743 - DNA, 15 bp, Homo sapiens
ctttgttacttgtga

SEQ ID NO: 205744 - DNA, 15 bp, Homo sapiens
actttgttacttgtg

SEQ ID NO: 205745 - DNA, 15 bp, Homo sapiens
cactttgttacttgt

SEQ ID NO: 205746 - DNA, 15 bp, Homo sapiens
gcactttgttacttg

SEQ ID NO: 205747 - DNA, 15 bp, Homo sapiens
ggcactttgttactt

SEQ ID NO: 205748 - DNA, 15 bp, Homo sapiens
tggcactttgttact

SEQ ID NO: 205749 - DNA, 15 bp, Homo sapiens
gtggcactttgttac

SEQ ID NO: 205750 - DNA, 15 bp, Homo sapiens
agtggcactttgtta

SEQ ID NO: 205751 - DNA, 15 bp, Homo sapiens
gagtggcactttgtt

SEQ ID NO: 205752 - DNA, 15 bp, Homo sapiens
ggagtggcactttgt

SEQ ID NO: 205753 - DNA, 15 bp, Homo sapiens
gggagtggcactttg

SEQ ID NO: 205754 - DNA, 15 bp, Homo sapiens
ggggagtggcacttt

SEQ ID NO: 205755 - DNA, 15 bp, Homo sapiens
tggggagtggcactt

SEQ ID NO: 205756 - DNA, 15 bp, Homo sapiens
ttggggagtggcact

SEQ ID NO: 205757 - DNA, 15 bp, Homo sapiens
gttggggagtggcac

SEQ ID NO: 205758 - DNA, 15 bp, Homo sapiens
agttggggagtggca

SEQ ID NO: 205759 - DNA, 15 bp, Homo sapiens
gagttggggagtggc

SEQ ID NO: 205760 - DNA, 15 bp, Homo sapiens
ggagttggggagtgg

SEQ ID NO: 205761 - DNA, 15 bp, Homo sapiens
tggagttggggagtg

SEQ ID NO: 205762 - DNA, 15 bp, Homo sapiens
atggagttggggagt

SEQ ID NO: 205763 - DNA, 15 bp, Homo sapiens
tatggagttggggag

SEQ ID NO: 205764 - DNA, 15 bp, Homo sapiens
atatggagttgggga

SEQ ID NO: 205765 - DNA, 15 bp, Homo sapiens
aatatggagttgggg

SEQ ID NO: 205766 - DNA, 15 bp, Homo sapiens
gaatatggagttggg

SEQ ID NO: 205767 - DNA, 15 bp, Homo sapiens
tgaatatggagttgg

SEQ ID NO: 205768 - DNA, 15 bp, Homo sapiens
atgaatatggagttg

SEQ ID NO: 205769 - DNA, 15 bp, Homo sapiens
tatgaatatggagtt

SEQ ID NO: 205770 - DNA, 15 bp, Homo sapiens
ttatgaatatggagt

SEQ ID NO: 205771 - DNA, 15 bp, Homo sapiens
gttatgaatatggag

SEQ ID NO: 205772 - DNA, 15 bp, Homo sapiens
tgttatgaatatgga

SEQ ID NO: 205773 - DNA, 15 bp, Homo sapiens
ctgttatgaatatgg

SEQ ID NO: 205774 - DNA, 15 bp, Homo sapiens
tctgttatgaatatg

SEQ ID NO: 205775 - DNA, 15 bp, Homo sapiens
gtctgttatgaatat

SEQ ID NO: 205776 - DNA, 15 bp, Homo sapiens
tgtctgttatgaata

SEQ ID NO: 205777 - DNA, 15 bp, Homo sapiens
atgtctgttatgaat

SEQ ID NO: 205778 - DNA, 15 bp, Homo sapiens
gatgtctgttatgaa

SEQ ID NO: 205779 - DNA, 15 bp, Homo sapiens
ggatgtctgttatga

SEQ ID NO: 205780 - DNA, 15 bp, Homo sapiens
tggatgtctgttatg

SEQ ID NO: 205781 - DNA, 15 bp, Homo sapiens
atggatgtctgttat

SEQ ID NO: 205782 - DNA, 15 bp, Homo sapiens
tatggatgtctgtta

SEQ ID NO: 205783 - DNA, 15 bp, Homo sapiens
ttatggatgtctgtt

SEQ ID NO: 205784 - DNA, 15 bp, Homo sapiens
attatggatgtctgt

SEQ ID NO: 205785 - DNA, 15 bp, Homo sapiens
gattatggatgtctg

SEQ ID NO: 205786 - DNA, 15 bp, Homo sapiens
agattatggatgtct

SEQ ID NO: 205787 - DNA, 15 bp, Homo sapiens
tagattatggatgtc

SEQ ID NO: 205788 - DNA, 15 bp, Homo sapiens
atagattatggatgt

SEQ ID NO: 205789 - DNA, 15 bp, Homo sapiens
gatagattatggatg

SEQ ID NO: 205790 - DNA, 15 bp, Homo sapiens
tgatagattatggat

SEQ ID NO: 205791 - DNA, 15 bp, Homo sapiens
ctgatagattatgga

SEQ ID NO: 205792 - DNA, 15 bp, Homo sapiens
cctgatagattatgg

SEQ ID NO: 205793 - DNA, 15 bp, Homo sapiens
tcctgatagattatg

SEQ ID NO: 205794 - DNA, 15 bp, Homo sapiens
atcctgatagattat

SEQ ID NO: 205795 - DNA, 15 bp, Homo sapiens
catcctgatagatta

SEQ ID NO: 205796 - DNA, 15 bp, Homo sapiens
acatcctgatagatt

SEQ ID NO: 205797 - DNA, 15 bp, Homo sapiens
aacatcctgatagat

SEQ ID NO: 205798 - DNA, 15 bp, Homo sapiens
gaacatcctgataga

SEQ ID NO: 205799 - DNA, 15 bp, Homo sapiens
agaacatcctgatag

SEQ ID NO: 205800 - DNA, 15 bp, Homo sapiens
aagaacatcctgata

SEQ ID NO: 205801 - DNA, 15 bp, Homo sapiens
aaagaacatcctgat

SEQ ID NO: 205802 - DNA, 15 bp, Homo sapiens
gaaagaacatcctga

SEQ ID NO: 205803 - DNA, 15 bp, Homo sapiens
agaaagaacatcctg

SEQ ID NO: 205804 - DNA, 15 bp, Homo sapiens
tagaaagaacatcct

SEQ ID NO: 205805 - DNA, 15 bp, Homo sapiens
ctagaaagaacatcc

SEQ ID NO: 205806 - DNA, 15 bp, Homo sapiens
gctagaaagaacatc

SEQ ID NO: 205807 - DNA, 15 bp, Homo sapiens
ggctagaaagaacat

SEQ ID NO: 205808 - DNA, 15 bp, Homo sapiens
tggctagaaagaaca

SEQ ID NO: 205809 - DNA, 15 bp, Homo sapiens
ttggctagaaagaac

SEQ ID NO: 205810 - DNA, 15 bp, Homo sapiens
cttggctagaaagaa

SEQ ID NO: 205811 - DNA, 15 bp, Homo sapiens
gcttggctagaaaga

SEQ ID NO: 205812 - DNA, 15 bp, Homo sapiens
ggcttggctagaaag

SEQ ID NO: 205813 - DNA, 15 bp, Homo sapiens
tggcttggctagaaa

SEQ ID NO: 205814 - DNA, 15 bp, Homo sapiens
ttggcttggctagaa

SEQ ID NO: 205815 - DNA, 15 bp, Homo sapiens
cttggcttggctaga

SEQ ID NO: 205816 - DNA, 15 bp, Homo sapiens
tcttggcttggctag

SEQ ID NO: 205817 - DNA, 15 bp, Homo sapiens
atcttggcttggcta

SEQ ID NO: 205818 - DNA, 15 bp, Homo sapiens
catcttggcttggct

SEQ ID NO: 205819 - DNA, 15 bp, Homo sapiens
gcatcttggcttggc

SEQ ID NO: 205820 - DNA, 15 bp, Homo sapiens
tgcatcttggcttgg

SEQ ID NO: 205821 - DNA, 15 bp, Homo sapiens
ttgcatcttggcttg

SEQ ID NO: 205822 - DNA, 15 bp, Homo sapiens
gttgcatcttggctt

SEQ ID NO: 205823 - DNA, 15 bp, Homo sapiens
agttgcatcttggct

SEQ ID NO: 205824 - DNA, 15 bp, Homo sapiens
aagttgcatcttggc

SEQ ID NO: 205825 - DNA, 15 bp, Homo sapiens
gaagttgcatcttgg

SEQ ID NO: 205826 - DNA, 15 bp, Homo sapiens
tgaagttgcatcttg

SEQ ID NO: 205827 - DNA, 15 bp, Homo sapiens
ctgaagttgcatctt

SEQ ID NO: 205828 - DNA, 15 bp, Homo sapiens
cctgaagttgcatct

SEQ ID NO: 205829 - DNA, 15 bp, Homo sapiens
tcctgaagttgcatc

SEQ ID NO: 205830 - DNA, 15 bp, Homo sapiens
atcctgaagttgcat

SEQ ID NO: 205831 - DNA, 15 bp, Homo sapiens
gatcctgaagttgca

SEQ ID NO: 205832 - DNA, 15 bp, Homo sapiens
agatcctgaagttgc

SEQ ID NO: 205833 - DNA, 15 bp, Homo sapiens
aagatcctgaagttg

SEQ ID NO: 205834 - DNA, 15 bp, Homo sapiens
aaagatcctgaagtt

SEQ ID NO: 205835 - DNA, 15 bp, Homo sapiens
aaaagatcctgaagt

SEQ ID NO: 205836 - DNA, 15 bp, Homo sapiens
aaaaagatcctgaag

SEQ ID NO: 205837 - DNA, 15 bp, Homo sapiens
aaaaaagatcctgaa

SEQ ID NO: 205838 - DNA, 15 bp, Homo sapiens
taaaaaagatcctga

SEQ ID NO: 205839 - DNA, 15 bp, Homo sapiens
ttaaaaaagatcctg

SEQ ID NO: 205840 - DNA, 15 bp, Homo sapiens
gttaaaaaagatcct

SEQ ID NO: 205841 - DNA, 15 bp, Homo sapiens
tgttaaaaaagatcc

SEQ ID NO: 205842 - DNA, 15 bp, Homo sapiens
gtgttaaaaaagatc

SEQ ID NO: 205843 - DNA, 15 bp, Homo sapiens
tgtgttaaaaaagat

SEQ ID NO: 205844 - DNA, 15 bp, Homo sapiens
ctgtgttaaaaaaga

SEQ ID NO: 205845 - DNA, 15 bp, Homo sapiens
actgtgttaaaaaag

SEQ ID NO: 205846 - DNA, 15 bp, Homo sapiens
cactgtgttaaaaaa

SEQ ID NO: 205847 - DNA, 15 bp, Homo sapiens
gcactgtgttaaaaa

SEQ ID NO: 205848 - DNA, 15 bp, Homo sapiens
agcactgtgttaaaa

SEQ ID NO: 205849 - DNA, 15 bp, Homo sapiens
gagcactgtgttaaa

SEQ ID NO: 205850 - DNA, 15 bp, Homo sapiens
ggagcactgtgttaa

SEQ ID NO: 205851 - DNA, 15 bp, Homo sapiens
tggagcactgtgtta

SEQ ID NO: 205852 - DNA, 15 bp, Homo sapiens
ctggagcactgtgtt

SEQ ID NO: 205853 - DNA, 15 bp, Homo sapiens
cctggagcactgtgt

SEQ ID NO: 205854 - DNA, 15 bp, Homo sapiens
gcctggagcactgtg

SEQ ID NO: 205855 - DNA, 15 bp, Homo sapiens
tgcctggagcactgt

SEQ ID NO: 205856 - DNA, 15 bp, Homo sapiens
ctgcctggagcactg

SEQ ID NO: 205857 - DNA, 15 bp, Homo sapiens
gctgcctggagcact

SEQ ID NO: 205858 - DNA, 15 bp, Homo sapiens
ggctgcctggagcac

SEQ ID NO: 205859 - DNA, 15 bp, Homo sapiens
tggctgcctggagca

SEQ ID NO: 205860 - DNA, 15 bp, Homo sapiens
gtggctgcctggagc

SEQ ID NO: 205861 - DNA, 15 bp, Homo sapiens
agtggctgcctggag

SEQ ID NO: 205862 - DNA, 15 bp, Homo sapiens
tagtggctgcctgga

SEQ ID NO: 205863 - DNA, 15 bp, Homo sapiens
gtagtggctgcctgg

SEQ ID NO: 205864 - DNA, 15 bp, Homo sapiens
ggtagtggctgcctg

SEQ ID NO: 205865 - DNA, 15 bp, Homo sapiens
tggtagtggctgcct

SEQ ID NO: 205866 - DNA, 15 bp, Homo sapiens
gtggtagtggctgcc

SEQ ID NO: 205867 - DNA, 15 bp, Homo sapiens
tgtggtagtggctgc

SEQ ID NO: 205868 - DNA, 15 bp, Homo sapiens
gtgtggtagtggctg

SEQ ID NO: 205869 - DNA, 15 bp, Homo sapiens
tgtgtggtagtggct

SEQ ID NO: 205870 - DNA, 15 bp, Homo sapiens
ctgtgtggtagtggc

SEQ ID NO: 205871 - DNA, 15 bp, Homo sapiens
tctgtgtggtagtgg

SEQ ID NO: 205872 - DNA, 15 bp, Homo sapiens
atctgtgtggtagtg

SEQ ID NO: 205873 - DNA, 15 bp, Homo sapiens
catctgtgtggtagt

SEQ ID NO: 205874 - DNA, 15 bp, Homo sapiens
ccatctgtgtggtag

SEQ ID NO: 205875 - DNA, 15 bp, Homo sapiens
cccatctgtgtggta

SEQ ID NO: 205876 - DNA, 15 bp, Homo sapiens
ccccatctgtgtggt

SEQ ID NO: 205877 - DNA, 15 bp, Homo sapiens
accccatctgtgtgg

SEQ ID NO: 205878 - DNA, 15 bp, Homo sapiens
aaccccatctgtgtg

SEQ ID NO: 205879 - DNA, 15 bp, Homo sapiens
gaaccccatctgtgt

SEQ ID NO: 205880 - DNA, 15 bp, Homo sapiens
tgaaccccatctgtg

SEQ ID NO: 205881 - DNA, 15 bp, Homo sapiens
atgaaccccatctgt

SEQ ID NO: 205882 - DNA, 15 bp, Homo sapiens
aatgaaccccatctg

SEQ ID NO: 205883 - DNA, 15 bp, Homo sapiens
aaatgaaccccatct

SEQ ID NO: 205884 - DNA, 15 bp, Homo sapiens
caaatgaaccccatc

SEQ ID NO: 205885 - DNA, 15 bp, Homo sapiens
gcaaatgaaccccat

SEQ ID NO: 205886 - DNA, 15 bp, Homo sapiens
agcaaatgaacccca

SEQ ID NO: 205887 - DNA, 15 bp, Homo sapiens
gagcaaatgaacccc

SEQ ID NO: 205888 - DNA, 15 bp, Homo sapiens
ggagcaaatgaaccc

SEQ ID NO: 205889 - DNA, 15 bp, Homo sapiens
aggagcaaatgaacc

SEQ ID NO: 205890 - DNA, 15 bp, Homo sapiens
caggagcaaatgaac

SEQ ID NO: 205891 - DNA, 15 bp, Homo sapiens
ccaggagcaaatgaa

SEQ ID NO: 205892 - DNA, 15 bp, Homo sapiens
tccaggagcaaatga

SEQ ID NO: 205893 - DNA, 15 bp, Homo sapiens
ttccaggagcaaatg

SEQ ID NO: 205894 - DNA, 15 bp, Homo sapiens
attccaggagcaaat

SEQ ID NO: 205895 - DNA, 15 bp, Homo sapiens
tattccaggagcaaa

SEQ ID NO: 205896 - DNA, 15 bp, Homo sapiens
ttattccaggagcaa

SEQ ID NO: 205897 - DNA, 15 bp, Homo sapiens
tttattccaggagca

SEQ ID NO: 205898 - DNA, 15 bp, Homo sapiens
ttttattccaggagc

SEQ ID NO: 205899 - DNA, 15 bp, Homo sapiens
gttttattccaggag

SEQ ID NO: 205900 - DNA, 15 bp, Homo sapiens
ggttttattccagga

SEQ ID NO: 205901 - DNA, 15 bp, Homo sapiens
aggttttattccagg

SEQ ID NO: 205902 - DNA, 15 bp, Homo sapiens
aaggttttattccag

SEQ ID NO: 205903 - DNA, 15 bp, Homo sapiens
caaggttttattcca

SEQ ID NO: 205904 - DNA, 15 bp, Homo sapiens
acaaggttttattcc

SEQ ID NO: 205905 - DNA, 15 bp, Homo sapiens
gacaaggttttattc

SEQ ID NO: 205906 - DNA, 15 bp, Homo sapiens
tgacaaggttttatt

SEQ ID NO: 205907 - DNA, 15 bp, Homo sapiens
atgacaaggttttat

SEQ ID NO: 205908 - DNA, 15 bp, Homo sapiens
gatgacaaggtttta

SEQ ID NO: 205909 - DNA, 15 bp, Homo sapiens
ggatgacaaggtttt

SEQ ID NO: 205910 - DNA, 15 bp, Homo sapiens
gggatgacaaggttt

SEQ ID NO: 205911 - DNA, 15 bp, Homo sapiens
agggatgacaaggtt

SEQ ID NO: 205912 - DNA, 15 bp, Homo sapiens
tagggatgacaaggt

SEQ ID NO: 205913 - DNA, 15 bp, Homo sapiens
ctagggatgacaagg

SEQ ID NO: 205914 - DNA, 15 bp, Homo sapiens
tctagggatgacaag

SEQ ID NO: 205915 - DNA, 15 bp, Homo sapiens
gtctagggatgacaa

SEQ ID NO: 205916 - DNA, 15 bp, Homo sapiens
tgtctagggatgaca

SEQ ID NO: 205917 - DNA, 15 bp, Homo sapiens
atgtctagggatgac

SEQ ID NO: 205918 - DNA, 15 bp, Homo sapiens
tatgtctagggatga

SEQ ID NO: 205919 - DNA, 15 bp, Homo sapiens
ctatgtctagggatg

SEQ ID NO: 205920 - DNA, 15 bp, Homo sapiens
tctatgtctagggat

SEQ ID NO: 205921 - DNA, 15 bp, Homo sapiens
ctctatgtctaggga

SEQ ID NO: 205922 - DNA, 15 bp, Homo sapiens
cctctatgtctaggg

SEQ ID NO: 205923 - DNA, 15 bp, Homo sapiens
gcctctatgtctagg

SEQ ID NO: 205924 - DNA, 15 bp, Homo sapiens
tgcctctatgtctag

SEQ ID NO: 205925 - DNA, 15 bp, Homo sapiens
ctgcctctatgtcta

SEQ ID NO: 205926 - DNA, 15 bp, Homo sapiens
actgcctctatgtct

SEQ ID NO: 205927 - DNA, 15 bp, Homo sapiens
gactgcctctatgtc

SEQ ID NO: 205928 - DNA, 15 bp, Homo sapiens
agactgcctctatgt

SEQ ID NO: 205929 - DNA, 15 bp, Homo sapiens
aagactgcctctatg

SEQ ID NO: 205930 - DNA, 15 bp, Homo sapiens
aaagactgcctctat

SEQ ID NO: 205931 - DNA, 15 bp, Homo sapiens
gaaagactgcctcta

SEQ ID NO: 205932 - DNA, 15 bp, Homo sapiens
ggaaagactgcctct

SEQ ID NO: 205933 - DNA, 15 bp, Homo sapiens
gggaaagactgcctc

SEQ ID NO: 205934 - DNA, 15 bp, Homo sapiens
ggggaaagactgcct

SEQ ID NO: 205935 - DNA, 15 bp, Homo sapiens
aggggaaagactgcc

SEQ ID NO: 205936 - DNA, 15 bp, Homo sapiens
caggggaaagactgc

SEQ ID NO: 205937 - DNA, 15 bp, Homo sapiens
acaggggaaagactg

SEQ ID NO: 205938 - DNA, 15 bp, Homo sapiens
cacaggggaaagact

SEQ ID NO: 205939 - DNA, 15 bp, Homo sapiens
tcacaggggaaagac

SEQ ID NO: 205940 - DNA, 15 bp, Homo sapiens
ctcacaggggaaaga

SEQ ID NO: 205941 - DNA, 15 bp, Homo sapiens
gctcacaggggaaag

SEQ ID NO: 205942 - DNA, 15 bp, Homo sapiens
ggctcacaggggaaa

SEQ ID NO: 205943 - DNA, 15 bp, Homo sapiens
tggctcacaggggaa

SEQ ID NO: 205944 - DNA, 15 bp, Homo sapiens
gtggctcacagggga

SEQ ID NO: 205945 - DNA, 15 bp, Homo sapiens
tgtggctcacagggg

SEQ ID NO: 205946 - DNA, 15 bp, Homo sapiens
ctgtggctcacaggg

SEQ ID NO: 205947 - DNA, 15 bp, Homo sapiens
gctgtggctcacagg

SEQ ID NO: 205948 - DNA, 15 bp, Homo sapiens
tgctgtggctcacag

SEQ ID NO: 205949 - DNA, 15 bp, Homo sapiens
atgctgtggctcaca

SEQ ID NO: 205950 - DNA, 15 bp, Homo sapiens
tatgctgtggctcac

SEQ ID NO: 205951 - DNA, 15 bp, Homo sapiens
atatgctgtggctca

SEQ ID NO: 205952 - DNA, 15 bp, Homo sapiens
catatgctgtggctc

SEQ ID NO: 205953 - DNA, 15 bp, Homo sapiens
tcatatgctgtggct

SEQ ID NO: 205954 - DNA, 15 bp, Homo sapiens
ctcatatgctgtggc

SEQ ID NO: 205955 - DNA, 15 bp, Homo sapiens
tctcatatgctgtgg

SEQ ID NO: 205956 - DNA, 15 bp, Homo sapiens
ttctcatatgctgtg

SEQ ID NO: 205957 - DNA, 15 bp, Homo sapiens
tttctcatatgctgt

SEQ ID NO: 205958 - DNA, 15 bp, Homo sapiens
ttttctcatatgctg

SEQ ID NO: 205959 - DNA, 15 bp, Homo sapiens
attttctcatatgct

SEQ ID NO: 205960 - DNA, 15 bp, Homo sapiens
cattttctcatatgc

SEQ ID NO: 205961 - DNA, 15 bp, Homo sapiens
acattttctcatatg

SEQ ID NO: 205962 - DNA, 15 bp, Homo sapiens
gacattttctcatat

SEQ ID NO: 205963 - DNA, 15 bp, Homo sapiens
tgacattttctcata

SEQ ID NO: 205964 - DNA, 15 bp, Homo sapiens
gtgacattttctcat

SEQ ID NO: 205965 - DNA, 15 bp, Homo sapiens
ggtgacattttctca

SEQ ID NO: 205966 - DNA, 15 bp, Homo sapiens
tggtgacattttctc

SEQ ID NO: 205967 - DNA, 15 bp, Homo sapiens
atggtgacattttct

SEQ ID NO: 205968 - DNA, 15 bp, Homo sapiens
gatggtgacattttc

SEQ ID NO: 205969 - DNA, 15 bp, Homo sapiens
agatggtgacatttt

SEQ ID NO: 205970 - DNA, 15 bp, Homo sapiens
tagatggtgacattt

SEQ ID NO: 205971 - DNA, 15 bp, Homo sapiens
ctagatggtgacatt

SEQ ID NO: 205972 - DNA, 15 bp, Homo sapiens
tctagatggtgacat

SEQ ID NO: 205973 - DNA, 15 bp, Homo sapiens
ttctagatggtgaca

SEQ ID NO: 205974 - DNA, 15 bp, Homo sapiens
cttctagatggtgac

SEQ ID NO: 205975 - DNA, 15 bp, Homo sapiens
ccttctagatggtga

SEQ ID NO: 205976 - DNA, 15 bp, Homo sapiens
accttctagatggtg

SEQ ID NO: 205977 - DNA, 15 bp, Homo sapiens
aaccttctagatggt

SEQ ID NO: 205978 - DNA, 15 bp, Homo sapiens
gaaccttctagatgg

SEQ ID NO: 205979 - DNA, 15 bp, Homo sapiens
ggaaccttctagatg

SEQ ID NO: 205980 - DNA, 15 bp, Homo sapiens
aggaaccttctagat

SEQ ID NO: 205981 - DNA, 15 bp, Homo sapiens
aaggaaccttctaga

SEQ ID NO: 205982 - DNA, 15 bp, Homo sapiens
caaggaaccttctag

SEQ ID NO: 205983 - DNA, 15 bp, Homo sapiens
ccaaggaaccttcta

SEQ ID NO: 205984 - DNA, 15 bp, Homo sapiens
accaaggaaccttct

SEQ ID NO: 205985 - DNA, 15 bp, Homo sapiens
taccaaggaaccttc

SEQ ID NO: 205986 - DNA, 15 bp, Homo sapiens
ttaccaaggaacctt

SEQ ID NO: 205987 - DNA, 15 bp, Homo sapiens
cttaccaaggaacct

SEQ ID NO: 205988 - DNA, 15 bp, Homo sapiens
gcttaccaaggaacc

SEQ ID NO: 205989 - DNA, 15 bp, Homo sapiens
tgcttaccaaggaac

SEQ ID NO: 205990 - DNA, 15 bp, Homo sapiens
gtgcttaccaaggaa

SEQ ID NO: 205991 - DNA, 15 bp, Homo sapiens
tgtgcttaccaagga

SEQ ID NO: 205992 - DNA, 15 bp, Homo sapiens
ctgtgcttaccaagg

SEQ ID NO: 205993 - DNA, 15 bp, Homo sapiens
tctgtgcttaccaag

SEQ ID NO: 205994 - DNA, 15 bp, Homo sapiens
gtctgtgcttaccaa

SEQ ID NO: 205995 - DNA, 15 bp, Homo sapiens
tgtctgtgcttacca

SEQ ID NO: 205996 - DNA, 15 bp, Homo sapiens
atgtctgtgcttacc

SEQ ID NO: 205997 - DNA, 15 bp, Homo sapiens
tatgtctgtgcttac

SEQ ID NO: 205998 - DNA, 15 bp, Homo sapiens
atatgtctgtgctta

SEQ ID NO: 205999 - DNA, 15 bp, Homo sapiens
catatgtctgtgctt

SEQ ID NO: 206000 - DNA, 15 bp, Homo sapiens
ccatatgtctgtgct

SEQ ID NO: 206001 - DNA, 15 bp, Homo sapiens
accatatgtctgtgc

SEQ ID NO: 206002 - DNA, 15 bp, Homo sapiens
caccatatgtctgtg

SEQ ID NO: 206003 - DNA, 15 bp, Homo sapiens
ccaccatatgtctgt

SEQ ID NO: 206004 - DNA, 15 bp, Homo sapiens
gccaccatatgtctg

SEQ ID NO: 206005 - DNA, 15 bp, Homo sapiens
ggccaccatatgtct

SEQ ID NO: 206006 - DNA, 15 bp, Homo sapiens
aggccaccatatgtc

SEQ ID NO: 206007 - DNA, 15 bp, Homo sapiens
caggccaccatatgt

SEQ ID NO: 206008 - DNA, 15 bp, Homo sapiens
tcaggccaccatatg

SEQ ID NO: 206009 - DNA, 15 bp, Homo sapiens
atcaggccaccatat

SEQ ID NO: 206010 - DNA, 15 bp, Homo sapiens
tatcaggccaccata

SEQ ID NO: 206011 - DNA, 15 bp, Homo sapiens
ttatcaggccaccat

SEQ ID NO: 206012 - DNA, 15 bp, Homo sapiens
tttatcaggccacca

SEQ ID NO: 206013 - DNA, 15 bp, Homo sapiens
atttatcaggccacc

SEQ ID NO: 206014 - DNA, 15 bp, Homo sapiens
aatttatcaggccac

SEQ ID NO: 206015 - DNA, 15 bp, Homo sapiens
caatttatcaggcca

SEQ ID NO: 206016 - DNA, 15 bp, Homo sapiens
gcaatttatcaggcc

SEQ ID NO: 206017 - DNA, 15 bp, Homo sapiens
ggcaatttatcaggc

SEQ ID NO: 206018 - DNA, 15 bp, Homo sapiens
aggcaatttatcagg

SEQ ID NO: 206019 - DNA, 15 bp, Homo sapiens
aaggcaatttatcag

SEQ ID NO: 206020 - DNA, 15 bp, Homo sapiens
aaaggcaatttatca

SEQ ID NO: 206021 - DNA, 15 bp, Homo sapiens
gaaaggcaatttatc

SEQ ID NO: 206022 - DNA, 15 bp, Homo sapiens
agaaaggcaatttat

SEQ ID NO: 206023 - DNA, 15 bp, Homo sapiens
gagaaaggcaattta

SEQ ID NO: 206024 - DNA, 15 bp, Homo sapiens
agagaaaggcaattt

SEQ ID NO: 206025 - DNA, 15 bp, Homo sapiens
tagagaaaggcaatt

SEQ ID NO: 206026 - DNA, 15 bp, Homo sapiens
gtagagaaaggcaat

SEQ ID NO: 206027 - DNA, 15 bp, Homo sapiens
ggtagagaaaggcaa

SEQ ID NO: 206028 - DNA, 15 bp, Homo sapiens
gggtagagaaaggca

SEQ ID NO: 206029 - DNA, 15 bp, Homo sapiens
agggtagagaaaggc

SEQ ID NO: 206030 - DNA, 15 bp, Homo sapiens
aagggtagagaaagg

SEQ ID NO: 206031 - DNA, 15 bp, Homo sapiens
caagggtagagaaag

SEQ ID NO: 206032 - DNA, 15 bp, Homo sapiens
ccaagggtagagaaa

SEQ ID NO: 206033 - DNA, 15 bp, Homo sapiens
cccaagggtagagaa

SEQ ID NO: 206034 - DNA, 15 bp, Homo sapiens
tcccaagggtagaga

SEQ ID NO: 206035 - DNA, 15 bp, Homo sapiens
atcccaagggtagag

SEQ ID NO: 206036 - DNA, 15 bp, Homo sapiens
gatcccaagggtaga

SEQ ID NO: 206037 - DNA, 15 bp, Homo sapiens
agatcccaagggtag

SEQ ID NO: 206038 - DNA, 15 bp, Homo sapiens
aagatcccaagggta

SEQ ID NO: 206039 - DNA, 15 bp, Homo sapiens
aaagatcccaagggt

SEQ ID NO: 206040 - DNA, 15 bp, Homo sapiens
caaagatcccaaggg

SEQ ID NO: 206041 - DNA, 15 bp, Homo sapiens
acaaagatcccaagg

SEQ ID NO: 206042 - DNA, 15 bp, Homo sapiens
gacaaagatcccaag

SEQ ID NO: 206043 - DNA, 15 bp, Homo sapiens
ggacaaagatcccaa

SEQ ID NO: 206044 - DNA, 15 bp, Homo sapiens
tggacaaagatccca

SEQ ID NO: 206045 - DNA, 15 bp, Homo sapiens
ttggacaaagatccc

SEQ ID NO: 206046 - DNA, 15 bp, Homo sapiens
cttggacaaagatcc

SEQ ID NO: 206047 - DNA, 15 bp, Homo sapiens
ccttggacaaagatc

SEQ ID NO: 206048 - DNA, 15 bp, Homo sapiens
tccttggacaaagat

SEQ ID NO: 206049 - DNA, 15 bp, Homo sapiens
ttccttggacaaaga

SEQ ID NO: 206050 - DNA, 15 bp, Homo sapiens
gttccttggacaaag

SEQ ID NO: 206051 - DNA, 15 bp, Homo sapiens
agttccttggacaaa

SEQ ID NO: 206052 - DNA, 15 bp, Homo sapiens
tagttccttggacaa

SEQ ID NO: 206053 - DNA, 15 bp, Homo sapiens
ctagttccttggaca

SEQ ID NO: 206054 - DNA, 15 bp, Homo sapiens
cctagttccttggac

SEQ ID NO: 206055 - DNA, 15 bp, Homo sapiens
acctagttccttgga

SEQ ID NO: 206056 - DNA, 15 bp, Homo sapiens
cacctagttccttgg

SEQ ID NO: 206057 - DNA, 15 bp, Homo sapiens
gcacctagttccttg

SEQ ID NO: 206058 - DNA, 15 bp, Homo sapiens
ggcacctagttcctt

SEQ ID NO: 206059 - DNA, 15 bp, Homo sapiens
tggcacctagttcct

SEQ ID NO: 206060 - DNA, 15 bp, Homo sapiens
atggcacctagttcc

SEQ ID NO: 206061 - DNA, 15 bp, Homo sapiens
gatggcacctagttc

SEQ ID NO: 206062 - DNA, 15 bp, Homo sapiens
agatggcacctagtt

SEQ ID NO: 206063 - DNA, 15 bp, Homo sapiens
aagatggcacctagt

SEQ ID NO: 206064 - DNA, 15 bp, Homo sapiens
caagatggcacctag

SEQ ID NO: 206065 - DNA, 15 bp, Homo sapiens
tcaagatggcaccta

SEQ ID NO: 206066 - DNA, 15 bp, Homo sapiens
ctcaagatggcacct

SEQ ID NO: 206067 - DNA, 15 bp, Homo sapiens
actcaagatggcacc

SEQ ID NO: 206068 - DNA, 15 bp, Homo sapiens
gactcaagatggcac

SEQ ID NO: 206069 - DNA, 15 bp, Homo sapiens
tgactcaagatggca

SEQ ID NO: 206070 - DNA, 15 bp, Homo sapiens
ctgactcaagatggc

SEQ ID NO: 206071 - DNA, 15 bp, Homo sapiens
tctgactcaagatgg

SEQ ID NO: 206072 - DNA, 15 bp, Homo sapiens
gtctgactcaagatg

SEQ ID NO: 206073 - DNA, 15 bp, Homo sapiens
agtctgactcaagat

SEQ ID NO: 206074 - DNA, 15 bp, Homo sapiens
cagtctgactcaaga

SEQ ID NO: 206075 - DNA, 15 bp, Homo sapiens
ccagtctgactcaag

SEQ ID NO: 206076 - DNA, 15 bp, Homo sapiens
gccagtctgactcaa

SEQ ID NO: 206077 - DNA, 15 bp, Homo sapiens
tgccagtctgactca

SEQ ID NO: 206078 - DNA, 15 bp, Homo sapiens
ttgccagtctgactc

SEQ ID NO: 206079 - DNA, 15 bp, Homo sapiens
cttgccagtctgact

SEQ ID NO: 206080 - DNA, 15 bp, Homo sapiens
acttgccagtctgac

SEQ ID NO: 206081 - DNA, 15 bp, Homo sapiens
cacttgccagtctga

SEQ ID NO: 206082 - DNA, 15 bp, Homo sapiens
acacttgccagtctg

SEQ ID NO: 206083 - DNA, 15 bp, Homo sapiens
cacacttgccagtct

SEQ ID NO: 206084 - DNA, 15 bp, Homo sapiens
ccacacttgccagtc

SEQ ID NO: 206085 - DNA, 15 bp, Homo sapiens
cccacacttgccagt

SEQ ID NO: 206086 - DNA, 15 bp, Homo sapiens
tcccacacttgccag

SEQ ID NO: 206087 - DNA, 15 bp, Homo sapiens
ttcccacacttgcca

SEQ ID NO: 206088 - DNA, 15 bp, Homo sapiens
tttcccacacttgcc

SEQ ID NO: 206089 - DNA, 15 bp, Homo sapiens
ttttcccacacttgc

SEQ ID NO: 206090 - DNA, 15 bp, Homo sapiens
attttcccacacttg

SEQ ID NO: 206091 - DNA, 15 bp, Homo sapiens
tattttcccacactt

SEQ ID NO: 206092 - DNA, 15 bp, Homo sapiens
ctattttcccacact

SEQ ID NO: 206093 - DNA, 15 bp, Homo sapiens
tctattttcccacac

SEQ ID NO: 206094 - DNA, 15 bp, Homo sapiens
ttctattttcccaca

SEQ ID NO: 206095 - DNA, 15 bp, Homo sapiens
attctattttcccac

SEQ ID NO: 206096 - DNA, 15 bp, Homo sapiens
aattctattttccca

SEQ ID NO: 206097 - DNA, 15 bp, Homo sapiens
gaattctattttccc

SEQ ID NO: 206098 - DNA, 15 bp, Homo sapiens
agaattctattttcc

SEQ ID NO: 206099 - DNA, 15 bp, Homo sapiens
aagaattctattttc

SEQ ID NO: 206100 - DNA, 15 bp, Homo sapiens
taagaattctatttt

SEQ ID NO: 206101 - DNA, 15 bp, Homo sapiens
ataagaattctattt

SEQ ID NO: 206102 - DNA, 15 bp, Homo sapiens
aataagaattctatt

SEQ ID NO: 206103 - DNA, 15 bp, Homo sapiens
gaataagaattctat

SEQ ID NO: 206104 - DNA, 15 bp, Homo sapiens
ggaataagaattcta

SEQ ID NO: 206105 - DNA, 15 bp, Homo sapiens
aggaataagaattct

SEQ ID NO: 206106 - DNA, 15 bp, Homo sapiens
taggaataagaattc

SEQ ID NO: 206107 - DNA, 15 bp, Homo sapiens
ataggaataagaatt

SEQ ID NO: 206108 - DNA, 15 bp, Homo sapiens
gataggaataagaat

SEQ ID NO: 206109 - DNA, 15 bp, Homo sapiens
tgataggaataagaa

SEQ ID NO: 206110 - DNA, 15 bp, Homo sapiens
ctgataggaataaga

SEQ ID NO: 206111 - DNA, 15 bp, Homo sapiens
gctgataggaataag

SEQ ID NO: 206112 - DNA, 15 bp, Homo sapiens
ggctgataggaataa

SEQ ID NO: 206113 - DNA, 15 bp, Homo sapiens
tggctgataggaata

SEQ ID NO: 206114 - DNA, 15 bp, Homo sapiens
ttggctgataggaat

SEQ ID NO: 206115 - DNA, 15 bp, Homo sapiens
gttggctgataggaa

SEQ ID NO: 206116 - DNA, 15 bp, Homo sapiens
tgttggctgatagga

SEQ ID NO: 206117 - DNA, 15 bp, Homo sapiens
ctgttggctgatagg

SEQ ID NO: 206118 - DNA, 15 bp, Homo sapiens
tctgttggctgatag

SEQ ID NO: 206119 - DNA, 15 bp, Homo sapiens
ttctgttggctgata

SEQ ID NO: 206120 - DNA, 15 bp, Homo sapiens
attctgttggctgat

SEQ ID NO: 206121 - DNA, 15 bp, Homo sapiens
gattctgttggctga

SEQ ID NO: 206122 - DNA, 15 bp, Homo sapiens
agattctgttggctg

SEQ ID NO: 206123 - DNA, 15 bp, Homo sapiens
aagattctgttggct

SEQ ID NO: 206124 - DNA, 15 bp, Homo sapiens
gaagattctgttggc

SEQ ID NO: 206125 - DNA, 15 bp, Homo sapiens
tgaagattctgttgg

SEQ ID NO: 206126 - DNA, 15 bp, Homo sapiens
ctgaagattctgttg

SEQ ID NO: 206127 - DNA, 15 bp, Homo sapiens
actgaagattctgtt

SEQ ID NO: 206128 - DNA, 15 bp, Homo sapiens
cactgaagattctgt

SEQ ID NO: 206129 - DNA, 15 bp, Homo sapiens
acactgaagattctg

SEQ ID NO: 206130 - DNA, 15 bp, Homo sapiens
aacactgaagattct

SEQ ID NO: 206131 - DNA, 15 bp, Homo sapiens
aaacactgaagattc

SEQ ID NO: 206132 - DNA, 15 bp, Homo sapiens
gaaacactgaagatt

SEQ ID NO: 206133 - DNA, 15 bp, Homo sapiens
cgaaacactgaagat

SEQ ID NO: 206134 - DNA, 15 bp, Homo sapiens
acgaaacactgaaga

SEQ ID NO: 206135 - DNA, 15 bp, Homo sapiens
cacgaaacactgaag

SEQ ID NO: 206136 - DNA, 15 bp, Homo sapiens
acacgaaacactgaa

SEQ ID NO: 206137 - DNA, 15 bp, Homo sapiens
aacacgaaacactga

SEQ ID NO: 206138 - DNA, 15 bp, Homo sapiens
taacacgaaacactg

SEQ ID NO: 206139 - DNA, 15 bp, Homo sapiens
ataacacgaaacact

SEQ ID NO: 206140 - DNA, 15 bp, Homo sapiens
cataacacgaaacac

SEQ ID NO: 206141 - DNA, 15 bp, Homo sapiens
tcataacacgaaaca

SEQ ID NO: 206142 - DNA, 15 bp, Homo sapiens
atcataacacgaaac

SEQ ID NO: 206143 - DNA, 15 bp, Homo sapiens
tatcataacacgaaa

SEQ ID NO: 206144 - DNA, 15 bp, Homo sapiens
ttatcataacacgaa

SEQ ID NO: 206145 - DNA, 15 bp, Homo sapiens
cttatcataacacga

SEQ ID NO: 206146 - DNA, 15 bp, Homo sapiens
ccttatcataacacg

SEQ ID NO: 206147 - DNA, 15 bp, Homo sapiens
tccttatcataacac

SEQ ID NO: 206148 - DNA, 15 bp, Homo sapiens
ctccttatcataaca

SEQ ID NO: 206149 - DNA, 15 bp, Homo sapiens
actccttatcataac

SEQ ID NO: 206150 - DNA, 15 bp, Homo sapiens
aactccttatcataa

SEQ ID NO: 206151 - DNA, 15 bp, Homo sapiens
taactccttatcata

SEQ ID NO: 206152 - DNA, 15 bp, Homo sapiens
gtaactccttatcat

SEQ ID NO: 206153 - DNA, 15 bp, Homo sapiens
tgtaactccttatca

SEQ ID NO: 206154 - DNA, 15 bp, Homo sapiens
gtgtaactccttatc

SEQ ID NO: 206155 - DNA, 15 bp, Homo sapiens
agtgtaactccttat

SEQ ID NO: 206156 - DNA, 15 bp, Homo sapiens
cagtgtaactcctta

SEQ ID NO: 206157 - DNA, 15 bp, Homo sapiens
gcagtgtaactcctt

SEQ ID NO: 206158 - DNA, 15 bp, Homo sapiens
tgcagtgtaactcct

SEQ ID NO: 206159 - DNA, 15 bp, Homo sapiens
ctgcagtgtaactcc

SEQ ID NO: 206160 - DNA, 15 bp, Homo sapiens
tctgcagtgtaactc

SEQ ID NO: 206161 - DNA, 15 bp, Homo sapiens
gtctgcagtgtaact

SEQ ID NO: 206162 - DNA, 15 bp, Homo sapiens
tgtctgcagtgtaac

SEQ ID NO: 206163 - DNA, 15 bp, Homo sapiens
atgtctgcagtgtaa

SEQ ID NO: 206164 - DNA, 15 bp, Homo sapiens
aatgtctgcagtgta

SEQ ID NO: 206165 - DNA, 15 bp, Homo sapiens
aaatgtctgcagtgt

SEQ ID NO: 206166 - DNA, 15 bp, Homo sapiens
gaaatgtctgcagtg

SEQ ID NO: 206167 - DNA, 15 bp, Homo sapiens
agaaatgtctgcagt

SEQ ID NO: 206168 - DNA, 15 bp, Homo sapiens
gagaaatgtctgcag

SEQ ID NO: 206169 - DNA, 15 bp, Homo sapiens
tgagaaatgtctgca

SEQ ID NO: 206170 - DNA, 15 bp, Homo sapiens
ctgagaaatgtctgc

SEQ ID NO: 206171 - DNA, 15 bp, Homo sapiens
tctgagaaatgtctg

SEQ ID NO: 206172 - DNA, 15 bp, Homo sapiens
ctctgagaaatgtct

SEQ ID NO: 206173 - DNA, 15 bp, Homo sapiens
cctctgagaaatgtc

SEQ ID NO: 206174 - DNA, 15 bp, Homo sapiens
ccctctgagaaatgt

SEQ ID NO: 206175 - DNA, 15 bp, Homo sapiens
accctctgagaaatg

SEQ ID NO: 206176 - DNA, 15 bp, Homo sapiens
gaccctctgagaaat

SEQ ID NO: 206177 - DNA, 15 bp, Homo sapiens
agaccctctgagaaa

SEQ ID NO: 206178 - DNA, 15 bp, Homo sapiens
cagaccctctgagaa

SEQ ID NO: 206179 - DNA, 15 bp, Homo sapiens
acagaccctctgaga

SEQ ID NO: 206180 - DNA, 15 bp, Homo sapiens
aacagaccctctgag

SEQ ID NO: 206181 - DNA, 15 bp, Homo sapiens
gaacagaccctctga

SEQ ID NO: 206182 - DNA, 15 bp, Homo sapiens
ggaacagaccctctg

SEQ ID NO: 206183 - DNA, 15 bp, Homo sapiens
aggaacagaccctct

SEQ ID NO: 206184 - DNA, 15 bp, Homo sapiens
caggaacagaccctc

SEQ ID NO: 206185 - DNA, 15 bp, Homo sapiens
acaggaacagaccct

SEQ ID NO: 206186 - DNA, 15 bp, Homo sapiens
cacaggaacagaccc

SEQ ID NO: 206187 - DNA, 15 bp, Homo sapiens
acacaggaacagacc

SEQ ID NO: 206188 - DNA, 15 bp, Homo sapiens
aacacaggaacagac

SEQ ID NO: 206189 - DNA, 15 bp, Homo sapiens
aaacacaggaacaga

SEQ ID NO: 206190 - DNA, 15 bp, Homo sapiens
aaaacacaggaacag

SEQ ID NO: 206191 - DNA, 15 bp, Homo sapiens
taaaacacaggaaca

SEQ ID NO: 206192 - DNA, 15 bp, Homo sapiens
ataaaacacaggaac

SEQ ID NO: 206193 - DNA, 15 bp, Homo sapiens
gataaaacacaggaa

SEQ ID NO: 206194 - DNA, 15 bp, Homo sapiens
tgataaaacacagga

SEQ ID NO: 206195 - DNA, 15 bp, Homo sapiens
atgataaaacacagg

SEQ ID NO: 206196 - DNA, 15 bp, Homo sapiens
catgataaaacacag

SEQ ID NO: 206197 - DNA, 15 bp, Homo sapiens
acatgataaaacaca

SEQ ID NO: 206198 - DNA, 15 bp, Homo sapiens
aacatgataaaacac

SEQ ID NO: 206199 - DNA, 15 bp, Homo sapiens
aaacatgataaaaca

SEQ ID NO: 206200 - DNA, 15 bp, Homo sapiens
aaaacatgataaaac

SEQ ID NO: 206201 - DNA, 15 bp, Homo sapiens
gaaaacatgataaaa

SEQ ID NO: 206202 - DNA, 15 bp, Homo sapiens
ggaaaacatgataaa

SEQ ID NO: 206203 - DNA, 15 bp, Homo sapiens
tggaaaacatgataa

SEQ ID NO: 206204 - DNA, 15 bp, Homo sapiens
atggaaaacatgata

SEQ ID NO: 206205 - DNA, 15 bp, Homo sapiens
catggaaaacatgat

SEQ ID NO: 206206 - DNA, 15 bp, Homo sapiens
ccatggaaaacatga

SEQ ID NO: 206207 - DNA, 15 bp, Homo sapiens
gccatggaaaacatg

SEQ ID NO: 206208 - DNA, 15 bp, Homo sapiens
tgccatggaaaacat

SEQ ID NO: 206209 - DNA, 15 bp, Homo sapiens
ttgccatggaaaaca

SEQ ID NO: 206210 - DNA, 15 bp, Homo sapiens
gttgccatggaaaac

SEQ ID NO: 206211 - DNA, 15 bp, Homo sapiens
ggttgccatggaaaa

SEQ ID NO: 206212 - DNA, 15 bp, Homo sapiens
gggttgccatggaaa

SEQ ID NO: 206213 - DNA, 15 bp, Homo sapiens
ggggttgccatggaa

SEQ ID NO: 206214 - DNA, 15 bp, Homo sapiens
aggggttgccatgga

SEQ ID NO: 206215 - DNA, 15 bp, Homo sapiens
caggggttgccatgg

SEQ ID NO: 206216 - DNA, 15 bp, Homo sapiens
acaggggttgccatg

SEQ ID NO: 206217 - DNA, 15 bp, Homo sapiens
cacaggggttgccat

SEQ ID NO: 206218 - DNA, 15 bp, Homo sapiens
ccacaggggttgcca

SEQ ID NO: 206219 - DNA, 15 bp, Homo sapiens
cccacaggggttgcc

SEQ ID NO: 206220 - DNA, 15 bp, Homo sapiens
tcccacaggggttgc

SEQ ID NO: 206221 - DNA, 15 bp, Homo sapiens
atcccacaggggttg

SEQ ID NO: 206222 - DNA, 15 bp, Homo sapiens
gatcccacaggggtt

SEQ ID NO: 206223 - DNA, 15 bp, Homo sapiens
ggatcccacaggggt

SEQ ID NO: 206224 - DNA, 15 bp, Homo sapiens
tggatcccacagggg

SEQ ID NO: 206225 - DNA, 15 bp, Homo sapiens
gtggatcccacaggg

SEQ ID NO: 206226 - DNA, 15 bp, Homo sapiens
cgtggatcccacagg

SEQ ID NO: 206227 - DNA, 15 bp, Homo sapiens
tcgtggatcccacag

SEQ ID NO: 206228 - DNA, 15 bp, Homo sapiens
ttcgtggatcccaca

SEQ ID NO: 206229 - DNA, 15 bp, Homo sapiens
cttcgtggatcccac

SEQ ID NO: 206230 - DNA, 15 bp, Homo sapiens
acttcgtggatccca

SEQ ID NO: 206231 - DNA, 15 bp, Homo sapiens
aacttcgtggatccc

SEQ ID NO: 206232 - DNA, 15 bp, Homo sapiens
caacttcgtggatcc

SEQ ID NO: 206233 - DNA, 15 bp, Homo sapiens
ccaacttcgtggatc

SEQ ID NO: 206234 - DNA, 15 bp, Homo sapiens
accaacttcgtggat

SEQ ID NO: 206235 - DNA, 15 bp, Homo sapiens
taccaacttcgtgga

SEQ ID NO: 206236 - DNA, 15 bp, Homo sapiens
ataccaacttcgtgg

SEQ ID NO: 206237 - DNA, 15 bp, Homo sapiens
aataccaacttcgtg

SEQ ID NO: 206238 - DNA, 15 bp, Homo sapiens
taataccaacttcgt

SEQ ID NO: 206239 - DNA, 15 bp, Homo sapiens
ataataccaacttcg

SEQ ID NO: 206240 - DNA, 15 bp, Homo sapiens
gataataccaacttc

SEQ ID NO: 206241 - DNA, 15 bp, Homo sapiens
agataataccaactt

SEQ ID NO: 206242 - DNA, 15 bp, Homo sapiens
gagataataccaact

SEQ ID NO: 206243 - DNA, 15 bp, Homo sapiens
ggagataataccaac

SEQ ID NO: 206244 - DNA, 15 bp, Homo sapiens
tggagataataccaa

SEQ ID NO: 206245 - DNA, 15 bp, Homo sapiens
atggagataatacca

SEQ ID NO: 206246 - DNA, 15 bp, Homo sapiens
catggagataatacc

SEQ ID NO: 206247 - DNA, 15 bp, Homo sapiens
ccatggagataatac

SEQ ID NO: 206248 - DNA, 15 bp, Homo sapiens
gccatggagataata

SEQ ID NO: 206249 - DNA, 15 bp, Homo sapiens
tgccatggagataat

SEQ ID NO: 206250 - DNA, 15 bp, Homo sapiens
gtgccatggagataa

SEQ ID NO: 206251 - DNA, 15 bp, Homo sapiens
tgtgccatggagata

SEQ ID NO: 206252 - DNA, 15 bp, Homo sapiens
ctgtgccatggagat

SEQ ID NO: 206253 - DNA, 15 bp, Homo sapiens
tctgtgccatggaga

SEQ ID NO: 206254 - DNA, 15 bp, Homo sapiens
atctgtgccatggag

SEQ ID NO: 206255 - DNA, 15 bp, Homo sapiens
catctgtgccatgga

SEQ ID NO: 206256 - DNA, 15 bp, Homo sapiens
tcatctgtgccatgg

SEQ ID NO: 206257 - DNA, 15 bp, Homo sapiens
atcatctgtgccatg

SEQ ID NO: 206258 - DNA, 15 bp, Homo sapiens
catcatctgtgccat

SEQ ID NO: 206259 - DNA, 15 bp, Homo sapiens
ccatcatctgtgcca

SEQ ID NO: 206260 - DNA, 15 bp, Homo sapiens
tccatcatctgtgcc

SEQ ID NO: 206261 - DNA, 15 bp, Homo sapiens
ctccatcatctgtgc

SEQ ID NO: 206262 - DNA, 15 bp, Homo sapiens
cctccatcatctgtg

SEQ ID NO: 206263 - DNA, 15 bp, Homo sapiens
gcctccatcatctgt

SEQ ID NO: 206264 - DNA, 15 bp, Homo sapiens
ggcctccatcatctg

SEQ ID NO: 206265 - DNA, 15 bp, Homo sapiens
gggcctccatcatct

SEQ ID NO: 206266 - DNA, 15 bp, Homo sapiens
tgggcctccatcatc

SEQ ID NO: 206267 - DNA, 15 bp, Homo sapiens
ttgggcctccatcat

SEQ ID NO: 206268 - DNA, 15 bp, Homo sapiens
cttgggcctccatca

SEQ ID NO: 206269 - DNA, 15 bp, Homo sapiens
ccttgggcctccatc

SEQ ID NO: 206270 - DNA, 15 bp, Homo sapiens
tccttgggcctccat

SEQ ID NO: 206271 - DNA, 15 bp, Homo sapiens
ttccttgggcctcca

SEQ ID NO: 206272 - DNA, 15 bp, Homo sapiens
cttccttgggcctcc

SEQ ID NO: 206273 - DNA, 15 bp, Homo sapiens
tcttccttgggcctc

SEQ ID NO: 206274 - DNA, 15 bp, Homo sapiens
gtcttccttgggcct

SEQ ID NO: 206275 - DNA, 15 bp, Homo sapiens
tgtcttccttgggcc

SEQ ID NO: 206276 - DNA, 15 bp, Homo sapiens
ttgtcttccttgggc

SEQ ID NO: 206277 - DNA, 15 bp, Homo sapiens
tttgtcttccttggg

SEQ ID NO: 206278 - DNA, 15 bp, Homo sapiens
atttgtcttccttgg

SEQ ID NO: 206279 - DNA, 15 bp, Homo sapiens
catttgtcttccttg

SEQ ID NO: 206280 - DNA, 15 bp, Homo sapiens
tcatttgtcttcctt

SEQ ID NO: 206281 - DNA, 15 bp, Homo sapiens
gtcatttgtcttcct

SEQ ID NO: 206282 - DNA, 15 bp, Homo sapiens
ggtcatttgtcttcc

SEQ ID NO: 206283 - DNA, 15 bp, Homo sapiens
cggtcatttgtcttc

SEQ ID NO: 206284 - DNA, 15 bp, Homo sapiens
ccggtcatttgtctt

SEQ ID NO: 206285 - DNA, 15 bp, Homo sapiens
gccggtcatttgtct

SEQ ID NO: 206286 - DNA, 15 bp, Homo sapiens
tgccggtcatttgtc

SEQ ID NO: 206287 - DNA, 15 bp, Homo sapiens
ctgccggtcatttgt

SEQ ID NO: 206288 - DNA, 15 bp, Homo sapiens
cctgccggtcatttg

SEQ ID NO: 206289 - DNA, 15 bp, Homo sapiens
tcctgccggtcattt

SEQ ID NO: 206290 - DNA, 15 bp, Homo sapiens
ctcctgccggtcatt

SEQ ID NO: 206291 - DNA, 15 bp, Homo sapiens
cctcctgccggtcat

SEQ ID NO: 206292 - DNA, 15 bp, Homo sapiens
gcctcctgccggtca

SEQ ID NO: 206293 - DNA, 15 bp, Homo sapiens
tgcctcctgccggtc

SEQ ID NO: 206294 - DNA, 15 bp, Homo sapiens
ttgcctcctgccggt

SEQ ID NO: 206295 - DNA, 15 bp, Homo sapiens
cttgcctcctgccgg

SEQ ID NO: 206296 - DNA, 15 bp, Homo sapiens
acttgcctcctgccg

SEQ ID NO: 206297 - DNA, 15 bp, Homo sapiens
gacttgcctcctgcc

SEQ ID NO: 206298 - DNA, 15 bp, Homo sapiens
tgacttgcctcctgc

SEQ ID NO: 206299 - DNA, 15 bp, Homo sapiens
atgacttgcctcctg

SEQ ID NO: 206300 - DNA, 15 bp, Homo sapiens
catgacttgcctcct

SEQ ID NO: 206301 - DNA, 15 bp, Homo sapiens
gcatgacttgcctcc

SEQ ID NO: 206302 - DNA, 15 bp, Homo sapiens
tgcatgacttgcctc

SEQ ID NO: 206303 - DNA, 15 bp, Homo sapiens
ctgcatgacttgcct

SEQ ID NO: 206304 - DNA, 15 bp, Homo sapiens
gctgcatgacttgcc

SEQ ID NO: 206305 - DNA, 15 bp, Homo sapiens
agctgcatgacttgc

SEQ ID NO: 206306 - DNA, 15 bp, Homo sapiens
tagctgcatgacttg

SEQ ID NO: 206307 - DNA, 15 bp, Homo sapiens
ttagctgcatgactt

SEQ ID NO: 206308 - DNA, 15 bp, Homo sapiens
cttagctgcatgact

SEQ ID NO: 206309 - DNA, 15 bp, Homo sapiens
tcttagctgcatgac

SEQ ID NO: 206310 - DNA, 15 bp, Homo sapiens
ctcttagctgcatga

SEQ ID NO: 206311 - DNA, 15 bp, Homo sapiens
gctcttagctgcatg

SEQ ID NO: 206312 - DNA, 15 bp, Homo sapiens
agctcttagctgcat

SEQ ID NO: 206313 - DNA, 15 bp, Homo sapiens
aagctcttagctgca

SEQ ID NO: 206314 - DNA, 15 bp, Homo sapiens
aaagctcttagctgc

SEQ ID NO: 206315 - DNA, 15 bp, Homo sapiens
aaaagctcttagctg

SEQ ID NO: 206316 - DNA, 15 bp, Homo sapiens
gaaaagctcttagct

SEQ ID NO: 206317 - DNA, 15 bp, Homo sapiens
ggaaaagctcttagc

SEQ ID NO: 206318 - DNA, 15 bp, Homo sapiens
aggaaaagctcttag

SEQ ID NO: 206319 - DNA, 15 bp, Homo sapiens
caggaaaagctctta

SEQ ID NO: 206320 - DNA, 15 bp, Homo sapiens
ccaggaaaagctctt

SEQ ID NO: 206321 - DNA, 15 bp, Homo sapiens
tccaggaaaagctct

SEQ ID NO: 206322 - DNA, 15 bp, Homo sapiens
ttccaggaaaagctc

SEQ ID NO: 206323 - DNA, 15 bp, Homo sapiens
attccaggaaaagct

SEQ ID NO: 206324 - DNA, 15 bp, Homo sapiens
gattccaggaaaagc

SEQ ID NO: 206325 - DNA, 15 bp, Homo sapiens
ggattccaggaaaag

SEQ ID NO: 206326 - DNA, 15 bp, Homo sapiens
tggattccaggaaaa

SEQ ID NO: 206327 - DNA, 15 bp, Homo sapiens
ctggattccaggaaa

SEQ ID NO: 206328 - DNA, 15 bp, Homo sapiens
cctggattccaggaa

SEQ ID NO: 206329 - DNA, 15 bp, Homo sapiens
acctggattccagga

SEQ ID NO: 206330 - DNA, 15 bp, Homo sapiens
cacctggattccagg

SEQ ID NO: 206331 - DNA, 15 bp, Homo sapiens
acacctggattccag

SEQ ID NO: 206332 - DNA, 15 bp, Homo sapiens
gacacctggattcca

SEQ ID NO: 206333 - DNA, 15 bp, Homo sapiens
ggacacctggattcc

SEQ ID NO: 206334 - DNA, 15 bp, Homo sapiens
aggacacctggattc

SEQ ID NO: 206335 - DNA, 15 bp, Homo sapiens
caggacacctggatt

SEQ ID NO: 206336 - DNA, 15 bp, Homo sapiens
gcaggacacctggat

SEQ ID NO: 206337 - DNA, 15 bp, Homo sapiens
ggcaggacacctgga

SEQ ID NO: 206338 - DNA, 15 bp, Homo sapiens
aggcaggacacctgg

SEQ ID NO: 206339 - DNA, 15 bp, Homo sapiens
aaggcaggacacctg

SEQ ID NO: 206340 - DNA, 15 bp, Homo sapiens
gaaggcaggacacct

SEQ ID NO: 206341 - DNA, 15 bp, Homo sapiens
tgaaggcaggacacc

SEQ ID NO: 206342 - DNA, 15 bp, Homo sapiens
ctgaaggcaggacac

SEQ ID NO: 206343 - DNA, 15 bp, Homo sapiens
tctgaaggcaggaca

SEQ ID NO: 206344 - DNA, 15 bp, Homo sapiens
atctgaaggcaggac

SEQ ID NO: 206345 - DNA, 15 bp, Homo sapiens
catctgaaggcagga

SEQ ID NO: 206346 - DNA, 15 bp, Homo sapiens
gcatctgaaggcagg

SEQ ID NO: 206347 - DNA, 15 bp, Homo sapiens
ggcatctgaaggcag

SEQ ID NO: 206348 - DNA, 15 bp, Homo sapiens
tggcatctgaaggca

SEQ ID NO: 206349 - DNA, 15 bp, Homo sapiens
ctggcatctgaaggc

SEQ ID NO: 206350 - DNA, 15 bp, Homo sapiens
actggcatctgaagg

SEQ ID NO: 206351 - DNA, 15 bp, Homo sapiens
aactggcatctgaag

SEQ ID NO: 206352 - DNA, 15 bp, Homo sapiens
gaactggcatctgaa

SEQ ID NO: 206353 - DNA, 15 bp, Homo sapiens
agaactggcatctga

SEQ ID NO: 206354 - DNA, 15 bp, Homo sapiens
gagaactggcatctg

SEQ ID NO: 206355 - DNA, 15 bp, Homo sapiens
agagaactggcatct

SEQ ID NO: 206356 - DNA, 15 bp, Homo sapiens
aagagaactggcatc

SEQ ID NO: 206357 - DNA, 15 bp, Homo sapiens
caagagaactggcat

SEQ ID NO: 206358 - DNA, 15 bp, Homo sapiens
gcaagagaactggca

SEQ ID NO: 206359 - DNA, 15 bp, Homo sapiens
agcaagagaactggc

SEQ ID NO: 206360 - DNA, 15 bp, Homo sapiens
cagcaagagaactgg

SEQ ID NO: 206361 - DNA, 15 bp, Homo sapiens
ccagcaagagaactg

SEQ ID NO: 206362 - DNA, 15 bp, Homo sapiens
accagcaagagaact

SEQ ID NO: 206363 - DNA, 15 bp, Homo sapiens
aaccagcaagagaac

SEQ ID NO: 206364 - DNA, 15 bp, Homo sapiens
aaaccagcaagagaa

SEQ ID NO: 206365 - DNA, 15 bp, Homo sapiens
aaaaccagcaagaga

SEQ ID NO: 206366 - DNA, 15 bp, Homo sapiens
gaaaaccagcaagag

SEQ ID NO: 206367 - DNA, 15 bp, Homo sapiens
cgaaaaccagcaaga

SEQ ID NO: 206368 - DNA, 15 bp, Homo sapiens
acgaaaaccagcaag

SEQ ID NO: 206369 - DNA, 15 bp, Homo sapiens
aacgaaaaccagcaa

SEQ ID NO: 206370 - DNA, 15 bp, Homo sapiens
aaacgaaaaccagca

SEQ ID NO: 206371 - DNA, 15 bp, Homo sapiens
aaaacgaaaaccagc

SEQ ID NO: 206372 - DNA, 15 bp, Homo sapiens
aaaaacgaaaaccag

SEQ ID NO: 206373 - DNA, 15 bp, Homo sapiens
caaaaacgaaaacca

SEQ ID NO: 206374 - DNA, 15 bp, Homo sapiens
acaaaaacgaaaacc

SEQ ID NO: 206375 - DNA, 15 bp, Homo sapiens
aacaaaaacgaaaac

SEQ ID NO: 206376 - DNA, 15 bp, Homo sapiens
aaacaaaaacgaaaa

SEQ ID NO: 206377 - DNA, 15 bp, Homo sapiens
aaaacaaaaacgaaa

SEQ ID NO: 206378 - DNA, 15 bp, Homo sapiens
aaaaacaaaaacgaa

SEQ ID NO: 206379 - DNA, 15 bp, Homo sapiens
gaaaaacaaaaacga

SEQ ID NO: 206380 - DNA, 15 bp, Homo sapiens
agaaaaacaaaaacg

SEQ ID NO: 206381 - DNA, 15 bp, Homo sapiens
tagaaaaacaaaaac

SEQ ID NO: 206382 - DNA, 15 bp, Homo sapiens
tttagaaaaacaaaa

SEQ ID NO: 206383 - DNA, 15 bp, Homo sapiens
ttttagaaaaacaaa

SEQ ID NO: 206384 - DNA, 15 bp, Homo sapiens
tttttagaaaaacaa

SEQ ID NO: 206385 - DNA, 15 bp, Homo sapiens
atttttagaaaaaca

SEQ ID NO: 206386 - DNA, 15 bp, Homo sapiens
catttttagaaaaac

SEQ ID NO: 206387 - DNA, 15 bp, Homo sapiens
acatttttagaaaaa

SEQ ID NO: 206388 - DNA, 15 bp, Homo sapiens
aacatttttagaaaa

SEQ ID NO: 206389 - DNA, 15 bp, Homo sapiens
aaacatttttagaaa

SEQ ID NO: 206390 - DNA, 15 bp, Homo sapiens
aaaacatttttagaa

SEQ ID NO: 206391 - DNA, 15 bp, Homo sapiens
gaaaacatttttaga

SEQ ID NO: 206392 - DNA, 15 bp, Homo sapiens
tgaaaacatttttag

SEQ ID NO: 206393 - DNA, 15 bp, Homo sapiens
gtgaaaacattttta

SEQ ID NO: 206394 - DNA, 15 bp, Homo sapiens
ggtgaaaacattttt

SEQ ID NO: 206395 - DNA, 15 bp, Homo sapiens
aggtgaaaacatttt

SEQ ID NO: 206396 - DNA, 15 bp, Homo sapiens
caggtgaaaacattt

SEQ ID NO: 206397 - DNA, 15 bp, Homo sapiens
acaggtgaaaacatt

SEQ ID NO: 206398 - DNA, 15 bp, Homo sapiens
gacaggtgaaaacat

SEQ ID NO: 206399 - DNA, 15 bp, Homo sapiens
tgacaggtgaaaaca

SEQ ID NO: 206400 - DNA, 15 bp, Homo sapiens
ttgacaggtgaaaac

SEQ ID NO: 206401 - DNA, 15 bp, Homo sapiens
cttgacaggtgaaaa

SEQ ID NO: 206402 - DNA, 15 bp, Homo sapiens
acttgacaggtgaaa

SEQ ID NO: 206403 - DNA, 15 bp, Homo sapiens
tacttgacaggtgaa

SEQ ID NO: 206404 - DNA, 15 bp, Homo sapiens
atacttgacaggtga

SEQ ID NO: 206405 - DNA, 15 bp, Homo sapiens
catacttgacaggtg

SEQ ID NO: 206406 - DNA, 15 bp, Homo sapiens
acatacttgacaggt

SEQ ID NO: 206407 - DNA, 15 bp, Homo sapiens
cacatacttgacagg

SEQ ID NO: 206408 - DNA, 15 bp, Homo sapiens
gcacatacttgacag

SEQ ID NO: 206409 - DNA, 15 bp, Homo sapiens
agcacatacttgaca

SEQ ID NO: 206410 - DNA, 15 bp, Homo sapiens
tagcacatacttgac

SEQ ID NO: 206411 - DNA, 15 bp, Homo sapiens
gtagcacatacttga

SEQ ID NO: 206412 - DNA, 15 bp, Homo sapiens
agtagcacatacttg

SEQ ID NO: 206413 - DNA, 15 bp, Homo sapiens
tagtagcacatactt

SEQ ID NO: 206414 - DNA, 15 bp, Homo sapiens
atagtagcacatact

SEQ ID NO: 206415 - DNA, 15 bp, Homo sapiens
catagtagcacatac

SEQ ID NO: 206416 - DNA, 15 bp, Homo sapiens
tcatagtagcacata

SEQ ID NO: 206417 - DNA, 15 bp, Homo sapiens
ttcatagtagcacat

SEQ ID NO: 206418 - DNA, 15 bp, Homo sapiens
attcatagtagcaca

SEQ ID NO: 206419 - DNA, 15 bp, Homo sapiens
aattcatagtagcac

SEQ ID NO: 206420 - DNA, 15 bp, Homo sapiens
gaattcatagtagca

SEQ ID NO: 206421 - DNA, 15 bp, Homo sapiens
agaattcatagtagc

SEQ ID NO: 206422 - DNA, 15 bp, Homo sapiens
cagaattcatagtag

SEQ ID NO: 206423 - DNA, 15 bp, Homo sapiens
ccagaattcatagta

SEQ ID NO: 206424 - DNA, 15 bp, Homo sapiens
cccagaattcatagt

SEQ ID NO: 206425 - DNA, 15 bp, Homo sapiens
tcccagaattcatag

SEQ ID NO: 206426 - DNA, 15 bp, Homo sapiens
ctcccagaattcata

SEQ ID NO: 206427 - DNA, 15 bp, Homo sapiens
cctcccagaattcat

SEQ ID NO: 206428 - DNA, 15 bp, Homo sapiens
ccctcccagaattca

SEQ ID NO: 206429 - DNA, 15 bp, Homo sapiens
accctcccagaattc

SEQ ID NO: 206430 - DNA, 15 bp, Homo sapiens
taccctcccagaatt

SEQ ID NO: 206431 - DNA, 15 bp, Homo sapiens
ctaccctcccagaat

SEQ ID NO: 206432 - DNA, 15 bp, Homo sapiens
cctaccctcccagaa

SEQ ID NO: 206433 - DNA, 15 bp, Homo sapiens
ccctaccctcccaga

SEQ ID NO: 206434 - DNA, 15 bp, Homo sapiens
accctaccctcccag

SEQ ID NO: 206435 - DNA, 15 bp, Homo sapiens
gaccctaccctccca

SEQ ID NO: 206436 - DNA, 15 bp, Homo sapiens
cgaccctaccctccc

SEQ ID NO: 206437 - DNA, 15 bp, Homo sapiens
acgaccctaccctcc

SEQ ID NO: 206438 - DNA, 15 bp, Homo sapiens
cacgaccctaccctc

SEQ ID NO: 206439 - DNA, 15 bp, Homo sapiens
acacgaccctaccct

SEQ ID NO: 206440 - DNA, 15 bp, Homo sapiens
gacacgaccctaccc

SEQ ID NO: 206441 - DNA, 15 bp, Homo sapiens
agacacgaccctacc

SEQ ID NO: 206442 - DNA, 15 bp, Homo sapiens
aagacacgaccctac

SEQ ID NO: 206443 - DNA, 15 bp, Homo sapiens
taagacacgacccta

SEQ ID NO: 206444 - DNA, 15 bp, Homo sapiens
ataagacacgaccct

SEQ ID NO: 206445 - DNA, 15 bp, Homo sapiens
aataagacacgaccc

SEQ ID NO: 206446 - DNA, 15 bp, Homo sapiens
aaataagacacgacc

SEQ ID NO: 206447 - DNA, 15 bp, Homo sapiens
taaataagacacgac

SEQ ID NO: 206448 - DNA, 15 bp, Homo sapiens
ataaataagacacga

SEQ ID NO: 206449 - DNA, 15 bp, Homo sapiens
aataaataagacacg

SEQ ID NO: 206450 - DNA, 15 bp, Homo sapiens
aaataaataagacac

SEQ ID NO: 206451 - DNA, 15 bp, Homo sapiens
gaaataaataagaca

SEQ ID NO: 206452 - DNA, 15 bp, Homo sapiens
agaaataaataagac

SEQ ID NO: 206453 - DNA, 15 bp, Homo sapiens
cagaaataaataaga

SEQ ID NO: 206454 - DNA, 15 bp, Homo sapiens
acagaaataaataag

SEQ ID NO: 206455 - DNA, 15 bp, Homo sapiens
cacagaaataaataa

SEQ ID NO: 206456 - DNA, 15 bp, Homo sapiens
acacagaaataaata

SEQ ID NO: 206457 - DNA, 15 bp, Homo sapiens
aacacagaaataaat

SEQ ID NO: 206458 - DNA, 15 bp, Homo sapiens
aaacacagaaataaa

SEQ ID NO: 206459 - DNA, 15 bp, Homo sapiens
aaaacacagaaataa

SEQ ID NO: 206460 - DNA, 15 bp, Homo sapiens
aaaaacacagaaata

SEQ ID NO: 206461 - DNA, 15 bp, Homo sapiens
caaaaacacagaaat

SEQ ID NO: 206462 - DNA, 15 bp, Homo sapiens
tcaaaaacacagaaa

SEQ ID NO: 206463 - DNA, 15 bp, Homo sapiens
gtcaaaaacacagaa

SEQ ID NO: 206464 - DNA, 15 bp, Homo sapiens
agtcaaaaacacaga

SEQ ID NO: 206465 - DNA, 15 bp, Homo sapiens
cagtcaaaaacacag

SEQ ID NO: 206466 - DNA, 15 bp, Homo sapiens
gcagtcaaaaacaca

SEQ ID NO: 206467 - DNA, 15 bp, Homo sapiens
agcagtcaaaaacac

SEQ ID NO: 206468 - DNA, 15 bp, Homo sapiens
aagcagtcaaaaaca

SEQ ID NO: 206469 - DNA, 15 bp, Homo sapiens
aaagcagtcaaaaac

SEQ ID NO: 206470 - DNA, 15 bp, Homo sapiens
aaaagcagtcaaaaa

SEQ ID NO: 206471 - DNA, 15 bp, Homo sapiens
gaaaagcagtcaaaa

SEQ ID NO: 206472 - DNA, 15 bp, Homo sapiens
ggaaaagcagtcaaa

SEQ ID NO: 206473 - DNA, 15 bp, Homo sapiens
aggaaaagcagtcaa

SEQ ID NO: 206474 - DNA, 15 bp, Homo sapiens
gaggaaaagcagtca

SEQ ID NO: 206475 - DNA, 15 bp, Homo sapiens
agaggaaaagcagtc

SEQ ID NO: 206476 - DNA, 15 bp, Homo sapiens
gagaggaaaagcagt

SEQ ID NO: 206477 - DNA, 15 bp, Homo sapiens
ggagaggaaaagcag

SEQ ID NO: 206478 - DNA, 15 bp, Homo sapiens
tggagaggaaaagca

SEQ ID NO: 206479 - DNA, 15 bp, Homo sapiens
ttggagaggaaaagc

SEQ ID NO: 206480 - DNA, 15 bp, Homo sapiens
attggagaggaaaag

SEQ ID NO: 206481 - DNA, 15 bp, Homo sapiens
gattggagaggaaaa

SEQ ID NO: 206482 - DNA, 15 bp, Homo sapiens
agattggagaggaaa

SEQ ID NO: 206483 - DNA, 15 bp, Homo sapiens
gagattggagaggaa

SEQ ID NO: 206484 - DNA, 15 bp, Homo sapiens
tgagattggagagga

SEQ ID NO: 206485 - DNA, 15 bp, Homo sapiens
ttgagattggagagg

SEQ ID NO: 206486 - DNA, 15 bp, Homo sapiens
cttgagattggagag

SEQ ID NO: 206487 - DNA, 15 bp, Homo sapiens
acttgagattggaga

SEQ ID NO: 206488 - DNA, 15 bp, Homo sapiens
cacttgagattggag

SEQ ID NO: 206489 - DNA, 15 bp, Homo sapiens
gcacttgagattgga

SEQ ID NO: 206490 - DNA, 15 bp, Homo sapiens
agcacttgagattgg

SEQ ID NO: 206491 - DNA, 15 bp, Homo sapiens
cagcacttgagattg

SEQ ID NO: 206492 - DNA, 15 bp, Homo sapiens
acagcacttgagatt

SEQ ID NO: 206493 - DNA, 15 bp, Homo sapiens
cacagcacttgagat

SEQ ID NO: 206494 - DNA, 15 bp, Homo sapiens
tcacagcacttgaga

SEQ ID NO: 206495 - DNA, 15 bp, Homo sapiens
gtcacagcacttgag

SEQ ID NO: 206496 - DNA, 15 bp, Homo sapiens
agtcacagcacttga

SEQ ID NO: 206497 - DNA, 15 bp, Homo sapiens
tagtcacagcacttg

SEQ ID NO: 206498 - DNA, 15 bp, Homo sapiens
ttagtcacagcactt

SEQ ID NO: 206499 - DNA, 15 bp, Homo sapiens
gttagtcacagcact

SEQ ID NO: 206500 - DNA, 15 bp, Homo sapiens
tgttagtcacagcac

SEQ ID NO: 206501 - DNA, 15 bp, Homo sapiens
gtgttagtcacagca

SEQ ID NO: 206502 - DNA, 15 bp, Homo sapiens
tgtgttagtcacagc

SEQ ID NO: 206503 - DNA, 15 bp, Homo sapiens
atgtgttagtcacag

SEQ ID NO: 206504 - DNA, 15 bp, Homo sapiens
tatgtgttagtcaca

SEQ ID NO: 206505 - DNA, 15 bp, Homo sapiens
ctatgtgttagtcac

SEQ ID NO: 206506 - DNA, 15 bp, Homo sapiens
cctatgtgttagtca

SEQ ID NO: 206507 - DNA, 15 bp, Homo sapiens
tcctatgtgttagtc

SEQ ID NO: 206508 - DNA, 15 bp, Homo sapiens
ttcctatgtgttagt

SEQ ID NO: 206509 - DNA, 15 bp, Homo sapiens
cttcctatgtgttag

SEQ ID NO: 206510 - DNA, 15 bp, Homo sapiens
acttcctatgtgtta

SEQ ID NO: 206511 - DNA, 15 bp, Homo sapiens
tacttcctatgtgtt

SEQ ID NO: 206512 - DNA, 15 bp, Homo sapiens
gtacttcctatgtgt

SEQ ID NO: 206513 - DNA, 15 bp, Homo sapiens
agtacttcctatgtg

SEQ ID NO: 206514 - DNA, 15 bp, Homo sapiens
gagtacttcctatgt

SEQ ID NO: 206515 - DNA, 15 bp, Homo sapiens
tgagtacttcctatg

SEQ ID NO: 206516 - DNA, 15 bp, Homo sapiens
ttgagtacttcctat

SEQ ID NO: 206517 - DNA, 15 bp, Homo sapiens
cttgagtacttccta

SEQ ID NO: 206518 - DNA, 15 bp, Homo sapiens
tcttgagtacttcct

SEQ ID NO: 206519 - DNA, 15 bp, Homo sapiens
ttcttgagtacttcc

SEQ ID NO: 206520 - DNA, 15 bp, Homo sapiens
tttcttgagtacttc

SEQ ID NO: 206521 - DNA, 15 bp, Homo sapiens
ttttcttgagtactt

SEQ ID NO: 206522 - DNA, 15 bp, Homo sapiens
attttcttgagtact

SEQ ID NO: 206523 - DNA, 15 bp, Homo sapiens
tattttcttgagtac

SEQ ID NO: 206524 - DNA, 15 bp, Homo sapiens
atattttcttgagta

SEQ ID NO: 206525 - DNA, 15 bp, Homo sapiens
aatattttcttgagt

SEQ ID NO: 206526 - DNA, 15 bp, Homo sapiens
aaatattttcttgag

SEQ ID NO: 206527 - DNA, 15 bp, Homo sapiens
taaatattttcttga

SEQ ID NO: 206528 - DNA, 15 bp, Homo sapiens
ataaatattttcttg

SEQ ID NO: 206529 - DNA, 15 bp, Homo sapiens
cataaatattttctt

SEQ ID NO: 206530 - DNA, 15 bp, Homo sapiens
ccataaatattttct

SEQ ID NO: 206531 - DNA, 15 bp, Homo sapiens
gccataaatattttc

SEQ ID NO: 206532 - DNA, 15 bp, Homo sapiens
tgccataaatatttt

SEQ ID NO: 206533 - DNA, 15 bp, Homo sapiens
atgccataaatattt

SEQ ID NO: 206534 - DNA, 15 bp, Homo sapiens
tatgccataaatatt

SEQ ID NO: 206535 - DNA, 15 bp, Homo sapiens
atatgccataaatat

SEQ ID NO: 206536 - DNA, 15 bp, Homo sapiens
tatatgccataaata

SEQ ID NO: 206537 - DNA, 15 bp, Homo sapiens
ttatatgccataaat

SEQ ID NO: 206538 - DNA, 15 bp, Homo sapiens
cttatatgccataaa

SEQ ID NO: 206539 - DNA, 15 bp, Homo sapiens
acttatatgccataa

SEQ ID NO: 206540 - DNA, 15 bp, Homo sapiens
gacttatatgccata

SEQ ID NO: 206541 - DNA, 15 bp, Homo sapiens
tgacttatatgccat

SEQ ID NO: 206542 - DNA, 15 bp, Homo sapiens
ctgacttatatgcca

SEQ ID NO: 206543 - DNA, 15 bp, Homo sapiens
actgacttatatgcc

SEQ ID NO: 206544 - DNA, 15 bp, Homo sapiens
tactgacttatatgc

SEQ ID NO: 206545 - DNA, 15 bp, Homo sapiens
ctactgacttatatg

SEQ ID NO: 206546 - DNA, 15 bp, Homo sapiens
tctactgacttatat

SEQ ID NO: 206547 - DNA, 15 bp, Homo sapiens
ttctactgacttata

SEQ ID NO: 206548 - DNA, 15 bp, Homo sapiens
tttctactgacttat

SEQ ID NO: 206549 - DNA, 15 bp, Homo sapiens
ttttctactgactta

SEQ ID NO: 206550 - DNA, 15 bp, Homo sapiens
attttctactgactt

SEQ ID NO: 206551 - DNA, 15 bp, Homo sapiens
gattttctactgact

SEQ ID NO: 206552 - DNA, 15 bp, Homo sapiens
ggattttctactgac

SEQ ID NO: 206553 - DNA, 15 bp, Homo sapiens
tggattttctactga

SEQ ID NO: 206554 - DNA, 15 bp, Homo sapiens
atggattttctactg

SEQ ID NO: 206555 - DNA, 15 bp, Homo sapiens
aatggattttctact

SEQ ID NO: 206556 - DNA, 15 bp, Homo sapiens
gaatggattttctac

SEQ ID NO: 206557 - DNA, 15 bp, Homo sapiens
tgaatggattttcta

SEQ ID NO: 206558 - DNA, 15 bp, Homo sapiens
atgaatggattttct

SEQ ID NO: 206559 - DNA, 15 bp, Homo sapiens
aatgaatggattttc

SEQ ID NO: 206560 - DNA, 15 bp, Homo sapiens
gaatgaatggatttt

SEQ ID NO: 206561 - DNA, 15 bp, Homo sapiens
tgaatgaatggattt

SEQ ID NO: 206562 - DNA, 15 bp, Homo sapiens
atgaatgaatggatt

SEQ ID NO: 206563 - DNA, 15 bp, Homo sapiens
aatgaatgaatggat

SEQ ID NO: 206564 - DNA, 15 bp, Homo sapiens
gaatgaatgaatgga

SEQ ID NO: 206565 - DNA, 15 bp, Homo sapiens
tgaatgaatgaatgg

SEQ ID NO: 206566 - DNA, 15 bp, Homo sapiens
atgaatgaatgaatg

SEQ ID NO: 206567 - DNA, 15 bp, Homo sapiens
aatgaatgaatgaat

SEQ ID NO: 206568 - DNA, 15 bp, Homo sapiens
gaatgaatgaatgaa

SEQ ID NO: 206569 - DNA, 15 bp, Homo sapiens
tgaatgaatgaatga

SEQ ID NO: 206570 - DNA, 15 bp, Homo sapiens
catgaatgaatgaat

SEQ ID NO: 206571 - DNA, 15 bp, Homo sapiens
ccatgaatgaatgaa

SEQ ID NO: 206572 - DNA, 15 bp, Homo sapiens
tccatgaatgaatga

SEQ ID NO: 206573 - DNA, 15 bp, Homo sapiens
ttccatgaatgaatg

SEQ ID NO: 206574 - DNA, 15 bp, Homo sapiens
cttccatgaatgaat

SEQ ID NO: 206575 - DNA, 15 bp, Homo sapiens
tcttccatgaatgaa

SEQ ID NO: 206576 - DNA, 15 bp, Homo sapiens
ttcttccatgaatga

SEQ ID NO: 206577 - DNA, 15 bp, Homo sapiens
tttcttccatgaatg

SEQ ID NO: 206578 - DNA, 15 bp, Homo sapiens
gtttcttccatgaat

SEQ ID NO: 206579 - DNA, 15 bp, Homo sapiens
ttgtttcttccatga

SEQ ID NO: 206580 - DNA, 15 bp, Homo sapiens
cttgtttcttccatg

SEQ ID NO: 206581 - DNA, 15 bp, Homo sapiens
ccttgtttcttccat

SEQ ID NO: 206582 - DNA, 15 bp, Homo sapiens
tccttgtttcttcca

SEQ ID NO: 206583 - DNA, 15 bp, Homo sapiens
ctccttgtttcttcc

SEQ ID NO: 206584 - DNA, 15 bp, Homo sapiens
cctccttgtttcttc

SEQ ID NO: 206585 - DNA, 15 bp, Homo sapiens
acctccttgtttctt

SEQ ID NO: 206586 - DNA, 15 bp, Homo sapiens
cacctccttgtttct

SEQ ID NO: 206587 - DNA, 15 bp, Homo sapiens
gcacctccttgtttc

SEQ ID NO: 206588 - DNA, 15 bp, Homo sapiens
ggcacctccttgttt

SEQ ID NO: 206589 - DNA, 15 bp, Homo sapiens
gggcacctccttgtt

SEQ ID NO: 206590 - DNA, 15 bp, Homo sapiens
ggggcacctccttgt

SEQ ID NO: 206591 - DNA, 15 bp, Homo sapiens
cggggcacctccttg

SEQ ID NO: 206592 - DNA, 15 bp, Homo sapiens
tcggggcacctcctt

SEQ ID NO: 206593 - DNA, 15 bp, Homo sapiens
gtcggggcacctcct

SEQ ID NO: 206594 - DNA, 15 bp, Homo sapiens
ggtcggggcacctcc

SEQ ID NO: 206595 - DNA, 15 bp, Homo sapiens
aggtcggggcacctc

SEQ ID NO: 206596 - DNA, 15 bp, Homo sapiens
gaggtcggggcacct

SEQ ID NO: 206597 - DNA, 15 bp, Homo sapiens
agaggtcggggcacc

SEQ ID NO: 206598 - DNA, 15 bp, Homo sapiens
aagaggtcggggcac

SEQ ID NO: 206599 - DNA, 15 bp, Homo sapiens
aaagaggtcggggca

SEQ ID NO: 206600 - DNA, 15 bp, Homo sapiens
aaaagaggtcggggc

SEQ ID NO: 206601 - DNA, 15 bp, Homo sapiens
caaaagaggtcgggg

SEQ ID NO: 206602 - DNA, 15 bp, Homo sapiens
gcaaaagaggtcggg

SEQ ID NO: 206603 - DNA, 15 bp, Homo sapiens
tgcaaaagaggtcgg

SEQ ID NO: 206604 - DNA, 15 bp, Homo sapiens
atgcaaaagaggtcg

SEQ ID NO: 206605 - DNA, 15 bp, Homo sapiens
catgcaaaagaggtc

SEQ ID NO: 206606 - DNA, 15 bp, Homo sapiens
gcatgcaaaagaggt

SEQ ID NO: 206607 - DNA, 15 bp, Homo sapiens
agcatgcaaaagagg

SEQ ID NO: 206608 - DNA, 15 bp, Homo sapiens
cagcatgcaaaagag

SEQ ID NO: 206609 - DNA, 15 bp, Homo sapiens
ccagcatgcaaaaga

SEQ ID NO: 206610 - DNA, 15 bp, Homo sapiens
gccagcatgcaaaag

SEQ ID NO: 206611 - DNA, 15 bp, Homo sapiens
ggccagcatgcaaaa

SEQ ID NO: 206612 - DNA, 15 bp, Homo sapiens
aggccagcatgcaaa

SEQ ID NO: 206613 - DNA, 15 bp, Homo sapiens
aaggccagcatgcaa

SEQ ID NO: 206614 - DNA, 15 bp, Homo sapiens
aaaggccagcatgca

SEQ ID NO: 206615 - DNA, 15 bp, Homo sapiens
gaaaggccagcatgc

SEQ ID NO: 206616 - DNA, 15 bp, Homo sapiens
ggaaaggccagcatg

SEQ ID NO: 206617 - DNA, 15 bp, Homo sapiens
tggaaaggccagcat

SEQ ID NO: 206618 - DNA, 15 bp, Homo sapiens
ttggaaaggccagca

SEQ ID NO: 206619 - DNA, 15 bp, Homo sapiens
cttggaaaggccagc

SEQ ID NO: 206620 - DNA, 15 bp, Homo sapiens
acttggaaaggccag

SEQ ID NO: 206621 - DNA, 15 bp, Homo sapiens
gacttggaaaggcca

SEQ ID NO: 206622 - DNA, 15 bp, Homo sapiens
agacttggaaaggcc

SEQ ID NO: 206623 - DNA, 15 bp, Homo sapiens
cagacttggaaaggc

SEQ ID NO: 206624 - DNA, 15 bp, Homo sapiens
gcagacttggaaagg

SEQ ID NO: 206625 - DNA, 15 bp, Homo sapiens
tgcagacttggaaag

SEQ ID NO: 206626 - DNA, 15 bp, Homo sapiens
gtgcagacttggaaa

SEQ ID NO: 206627 - DNA, 15 bp, Homo sapiens
agtgcagacttggaa

SEQ ID NO: 206628 - DNA, 15 bp, Homo sapiens
cagtgcagacttgga

SEQ ID NO: 206629 - DNA, 15 bp, Homo sapiens
ccagtgcagacttgg

SEQ ID NO: 206630 - DNA, 15 bp, Homo sapiens
cccagtgcagacttg

SEQ ID NO: 206631 - DNA, 15 bp, Homo sapiens
tcccagtgcagactt

SEQ ID NO: 206632 - DNA, 15 bp, Homo sapiens
atcccagtgcagact

SEQ ID NO: 206633 - DNA, 15 bp, Homo sapiens
aatcccagtgcagac

SEQ ID NO: 206634 - DNA, 15 bp, Homo sapiens
caatcccagtgcaga

SEQ ID NO: 206635 - DNA, 15 bp, Homo sapiens
acaatcccagtgcag

SEQ ID NO: 206636 - DNA, 15 bp, Homo sapiens
cacaatcccagtgca

SEQ ID NO: 206637 - DNA, 15 bp, Homo sapiens
gcacaatcccagtgc

SEQ ID NO: 206638 - DNA, 15 bp, Homo sapiens
ggcacaatcccagtg

SEQ ID NO: 206639 - DNA, 15 bp, Homo sapiens
gggcacaatcccagt

SEQ ID NO: 206640 - DNA, 15 bp, Homo sapiens
agggcacaatcccag

SEQ ID NO: 206641 - DNA, 15 bp, Homo sapiens
cagggcacaatccca

SEQ ID NO: 206642 - DNA, 15 bp, Homo sapiens
tcagggcacaatccc

SEQ ID NO: 206643 - DNA, 15 bp, Homo sapiens
ctcagggcacaatcc

SEQ ID NO: 206644 - DNA, 15 bp, Homo sapiens
gctcagggcacaatc

SEQ ID NO: 206645 - DNA, 15 bp, Homo sapiens
agctcagggcacaat

SEQ ID NO: 206646 - DNA, 15 bp, Homo sapiens
aagctcagggcacaa

SEQ ID NO: 206647 - DNA, 15 bp, Homo sapiens
aaagctcagggcaca

SEQ ID NO: 206648 - DNA, 15 bp, Homo sapiens
gaaagctcagggcac

SEQ ID NO: 206649 - DNA, 15 bp, Homo sapiens
tgaaagctcagggca

SEQ ID NO: 206650 - DNA, 15 bp, Homo sapiens
atgaaagctcagggc

SEQ ID NO: 206651 - DNA, 15 bp, Homo sapiens
gatgaaagctcaggg

SEQ ID NO: 206652 - DNA, 15 bp, Homo sapiens
tgatgaaagctcagg

SEQ ID NO: 206653 - DNA, 15 bp, Homo sapiens
atgatgaaagctcag

SEQ ID NO: 206654 - DNA, 15 bp, Homo sapiens
tatgatgaaagctca

SEQ ID NO: 206655 - DNA, 15 bp, Homo sapiens
ttatgatgaaagctc

SEQ ID NO: 206656 - DNA, 15 bp, Homo sapiens
cttatgatgaaagct

SEQ ID NO: 206657 - DNA, 15 bp, Homo sapiens
tcttatgatgaaagc

SEQ ID NO: 206658 - DNA, 15 bp, Homo sapiens
ctcttatgatgaaag

SEQ ID NO: 206659 - DNA, 15 bp, Homo sapiens
gctcttatgatgaaa

SEQ ID NO: 206660 - DNA, 15 bp, Homo sapiens
tgctcttatgatgaa

SEQ ID NO: 206661 - DNA, 15 bp, Homo sapiens
ctgctcttatgatga

SEQ ID NO: 206662 - DNA, 15 bp, Homo sapiens
cctgctcttatgatg

SEQ ID NO: 206663 - DNA, 15 bp, Homo sapiens
ccctgctcttatgat

SEQ ID NO: 206664 - DNA, 15 bp, Homo sapiens
accctgctcttatga

SEQ ID NO: 206665 - DNA, 15 bp, Homo sapiens
aaccctgctcttatg

SEQ ID NO: 206666 - DNA, 15 bp, Homo sapiens
gaaccctgctcttat

SEQ ID NO: 206667 - DNA, 15 bp, Homo sapiens
agaaccctgctctta

SEQ ID NO: 206668 - DNA, 15 bp, Homo sapiens
cagaaccctgctctt

SEQ ID NO: 206669 - DNA, 15 bp, Homo sapiens
ccagaaccctgctct

SEQ ID NO: 206670 - DNA, 15 bp, Homo sapiens
gccagaaccctgctc

SEQ ID NO: 206671 - DNA, 15 bp, Homo sapiens
agccagaaccctgct

SEQ ID NO: 206672 - DNA, 15 bp, Homo sapiens
cagccagaaccctgc

SEQ ID NO: 206673 - DNA, 15 bp, Homo sapiens
acagccagaaccctg

SEQ ID NO: 206674 - DNA, 15 bp, Homo sapiens
cacagccagaaccct

SEQ ID NO: 206675 - DNA, 15 bp, Homo sapiens
tcacagccagaaccc

SEQ ID NO: 206676 - DNA, 15 bp, Homo sapiens
ctcacagccagaacc

SEQ ID NO: 206677 - DNA, 15 bp, Homo sapiens
cctcacagccagaac

SEQ ID NO: 206678 - DNA, 15 bp, Homo sapiens
gcctcacagccagaa

SEQ ID NO: 206679 - DNA, 15 bp, Homo sapiens
agcctcacagccaga

SEQ ID NO: 206680 - DNA, 15 bp, Homo sapiens
aagcctcacagccag

SEQ ID NO: 206681 - DNA, 15 bp, Homo sapiens
taagcctcacagcca

SEQ ID NO: 206682 - DNA, 15 bp, Homo sapiens
gtaagcctcacagcc

SEQ ID NO: 206683 - DNA, 15 bp, Homo sapiens
ggtaagcctcacagc

SEQ ID NO: 206684 - DNA, 15 bp, Homo sapiens
aggtaagcctcacag

SEQ ID NO: 206685 - DNA, 15 bp, Homo sapiens
caggtaagcctcaca

SEQ ID NO: 206686 - DNA, 15 bp, Homo sapiens
ccaggtaagcctcac

SEQ ID NO: 206687 - DNA, 15 bp, Homo sapiens
cccaggtaagcctca

SEQ ID NO: 206688 - DNA, 15 bp, Homo sapiens
gcccaggtaagcctc

SEQ ID NO: 206689 - DNA, 15 bp, Homo sapiens
tgcccaggtaagcct

SEQ ID NO: 206690 - DNA, 15 bp, Homo sapiens
gtgcccaggtaagcc

SEQ ID NO: 206691 - DNA, 15 bp, Homo sapiens
tgtgcccaggtaagc

SEQ ID NO: 206692 - DNA, 15 bp, Homo sapiens
atgtgcccaggtaag

SEQ ID NO: 206693 - DNA, 15 bp, Homo sapiens
catgtgcccaggtaa

SEQ ID NO: 206694 - DNA, 15 bp, Homo sapiens
gcatgtgcccaggta

SEQ ID NO: 206695 - DNA, 15 bp, Homo sapiens
tgcatgtgcccaggt

SEQ ID NO: 206696 - DNA, 15 bp, Homo sapiens
gtgcatgtgcccagg

SEQ ID NO: 206697 - DNA, 15 bp, Homo sapiens
ggtgcatgtgcccag

SEQ ID NO: 206698 - DNA, 15 bp, Homo sapiens
aggtgcatgtgccca

SEQ ID NO: 206699 - DNA, 15 bp, Homo sapiens
caggtgcatgtgccc

SEQ ID NO: 206700 - DNA, 15 bp, Homo sapiens
tcaggtgcatgtgcc

SEQ ID NO: 206701 - DNA, 15 bp, Homo sapiens
ctcaggtgcatgtgc

SEQ ID NO: 206702 - DNA, 15 bp, Homo sapiens
gctcaggtgcatgtg

SEQ ID NO: 206703 - DNA, 15 bp, Homo sapiens
tgctcaggtgcatgt

SEQ ID NO: 206704 - DNA, 15 bp, Homo sapiens
ctgctcaggtgcatg

SEQ ID NO: 206705 - DNA, 15 bp, Homo sapiens
gctgctcaggtgcat

SEQ ID NO: 206706 - DNA, 15 bp, Homo sapiens
tgctgctcaggtgca

SEQ ID NO: 206707 - DNA, 15 bp, Homo sapiens
ctgctgctcaggtgc

SEQ ID NO: 206708 - DNA, 15 bp, Homo sapiens
tctgctgctcaggtg

SEQ ID NO: 206709 - DNA, 15 bp, Homo sapiens
gtctgctgctcaggt

SEQ ID NO: 206710 - DNA, 15 bp, Homo sapiens
cgtctgctgctcagg

SEQ ID NO: 206711 - DNA, 15 bp, Homo sapiens
tcgtctgctgctcag

SEQ ID NO: 206712 - DNA, 15 bp, Homo sapiens
atcgtctgctgctca

SEQ ID NO: 206713 - DNA, 15 bp, Homo sapiens
catcgtctgctgctc

SEQ ID NO: 206714 - DNA, 15 bp, Homo sapiens
tcatcgtctgctgct

SEQ ID NO: 206715 - DNA, 15 bp, Homo sapiens
gtcatcgtctgctgc

SEQ ID NO: 206716 - DNA, 15 bp, Homo sapiens
tgtcatcgtctgctg

SEQ ID NO: 206717 - DNA, 15 bp, Homo sapiens
atgtcatcgtctgct

SEQ ID NO: 206718 - DNA, 15 bp, Homo sapiens
aatgtcatcgtctgc

SEQ ID NO: 206719 - DNA, 15 bp, Homo sapiens
taatgtcatcgtctg

SEQ ID NO: 206720 - DNA, 15 bp, Homo sapiens
ataatgtcatcgtct

SEQ ID NO: 206721 - DNA, 15 bp, Homo sapiens
gataatgtcatcgtc

SEQ ID NO: 206722 - DNA, 15 bp, Homo sapiens
tgataatgtcatcgt

SEQ ID NO: 206723 - DNA, 15 bp, Homo sapiens
ctgataatgtcatcg

SEQ ID NO: 206724 - DNA, 15 bp, Homo sapiens
actgataatgtcatc

SEQ ID NO: 206725 - DNA, 15 bp, Homo sapiens
gactgataatgtcat

SEQ ID NO: 206726 - DNA, 15 bp, Homo sapiens
ggactgataatgtca

SEQ ID NO: 206727 - DNA, 15 bp, Homo sapiens
tggactgataatgtc

SEQ ID NO: 206728 - DNA, 15 bp, Homo sapiens
gtggactgataatgt

SEQ ID NO: 206729 - DNA, 15 bp, Homo sapiens
agtggactgataatg

SEQ ID NO: 206730 - DNA, 15 bp, Homo sapiens
cagtggactgataat

SEQ ID NO: 206731 - DNA, 15 bp, Homo sapiens
ccagtggactgataa

SEQ ID NO: 206732 - DNA, 15 bp, Homo sapiens
tccagtggactgata

SEQ ID NO: 206733 - DNA, 15 bp, Homo sapiens
ctccagtggactgat

SEQ ID NO: 206734 - DNA, 15 bp, Homo sapiens
tctccagtggactga

SEQ ID NO: 206735 - DNA, 15 bp, Homo sapiens
gtctccagtggactg

SEQ ID NO: 206736 - DNA, 15 bp, Homo sapiens
tgtctccagtggact

SEQ ID NO: 206737 - DNA, 15 bp, Homo sapiens
atgtctccagtggac

SEQ ID NO: 206738 - DNA, 15 bp, Homo sapiens
aatgtctccagtgga

SEQ ID NO: 206739 - DNA, 15 bp, Homo sapiens
aaatgtctccagtgg

SEQ ID NO: 206740 - DNA, 15 bp, Homo sapiens
aaaatgtctccagtg

SEQ ID NO: 206741 - DNA, 15 bp, Homo sapiens
gaaaatgtctccagt

SEQ ID NO: 206742 - DNA, 15 bp, Homo sapiens
agaaaatgtctccag

SEQ ID NO: 206743 - DNA, 15 bp, Homo sapiens
aagaaaatgtctcca

SEQ ID NO: 206744 - DNA, 15 bp, Homo sapiens
gaagaaaatgtctcc

SEQ ID NO: 206745 - DNA, 15 bp, Homo sapiens
ggaagaaaatgtctc

SEQ ID NO: 206746 - DNA, 15 bp, Homo sapiens
aggaagaaaatgtct

SEQ ID NO: 206747 - DNA, 15 bp, Homo sapiens
gaggaagaaaatgtc

SEQ ID NO: 206748 - DNA, 15 bp, Homo sapiens
tgaggaagaaaatgt

SEQ ID NO: 206749 - DNA, 15 bp, Homo sapiens
atgaggaagaaaatg

SEQ ID NO: 206750 - DNA, 15 bp, Homo sapiens
tatgaggaagaaaat

SEQ ID NO: 206751 - DNA, 15 bp, Homo sapiens
ttatgaggaagaaaa

SEQ ID NO: 206752 - DNA, 15 bp, Homo sapiens
tttatgaggaagaaa

SEQ ID NO: 206753 - DNA, 15 bp, Homo sapiens
ttttatgaggaagaa

SEQ ID NO: 206754 - DNA, 15 bp, Homo sapiens
tttttatgaggaaga

SEQ ID NO: 206755 - DNA, 15 bp, Homo sapiens
ctttttatgaggaag

SEQ ID NO: 206756 - DNA, 15 bp, Homo sapiens
cctttttatgaggaa

SEQ ID NO: 206757 - DNA, 15 bp, Homo sapiens
gcctttttatgagga

SEQ ID NO: 206758 - DNA, 15 bp, Homo sapiens
agcctttttatgagg

SEQ ID NO: 206759 - DNA, 15 bp, Homo sapiens
tagcctttttatgag

SEQ ID NO: 206760 - DNA, 15 bp, Homo sapiens
ctagcctttttatga

SEQ ID NO: 206761 - DNA, 15 bp, Homo sapiens
actagcctttttatg

SEQ ID NO: 206762 - DNA, 15 bp, Homo sapiens
gactagcctttttat

SEQ ID NO: 206763 - DNA, 15 bp, Homo sapiens
tgactagccttttta

SEQ ID NO: 206764 - DNA, 15 bp, Homo sapiens
atgactagccttttt

SEQ ID NO: 206765 - DNA, 15 bp, Homo sapiens
aatgactagcctttt

SEQ ID NO: 206766 - DNA, 15 bp, Homo sapiens
taatgactagccttt

SEQ ID NO: 206767 - DNA, 15 bp, Homo sapiens
ttaatgactagcctt

SEQ ID NO: 206768 - DNA, 15 bp, Homo sapiens
tttaatgactagcct

SEQ ID NO: 206769 - DNA, 15 bp, Homo sapiens
atttaatgactagcc

SEQ ID NO: 206770 - DNA, 15 bp, Homo sapiens
gatttaatgactagc

SEQ ID NO: 206771 - DNA, 15 bp, Homo sapiens
ggatttaatgactag

SEQ ID NO: 206772 - DNA, 15 bp, Homo sapiens
aggatttaatgacta

SEQ ID NO: 206773 - DNA, 15 bp, Homo sapiens
aaggatttaatgact

SEQ ID NO: 206774 - DNA, 15 bp, Homo sapiens
taaggatttaatgac

SEQ ID NO: 206775 - DNA, 15 bp, Homo sapiens
ataaggatttaatga

SEQ ID NO: 206776 - DNA, 15 bp, Homo sapiens
aataaggatttaatg

SEQ ID NO: 206777 - DNA, 15 bp, Homo sapiens
aaataaggatttaat

SEQ ID NO: 206778 - DNA, 15 bp, Homo sapiens
caaataaggatttaa

SEQ ID NO: 206779 - DNA, 15 bp, Homo sapiens
gcaaataaggattta

SEQ ID NO: 206780 - DNA, 15 bp, Homo sapiens
tgcaaataaggattt

SEQ ID NO: 206781 - DNA, 15 bp, Homo sapiens
ctgcaaataaggatt

SEQ ID NO: 206782 - DNA, 15 bp, Homo sapiens
gctgcaaataaggat

SEQ ID NO: 206783 - DNA, 15 bp, Homo sapiens
ggctgcaaataagga

SEQ ID NO: 206784 - DNA, 15 bp, Homo sapiens
aggctgcaaataagg

SEQ ID NO: 206785 - DNA, 15 bp, Homo sapiens
caggctgcaaataag

SEQ ID NO: 206786 - DNA, 15 bp, Homo sapiens
acaggctgcaaataa

SEQ ID NO: 206787 - DNA, 15 bp, Homo sapiens
cacaggctgcaaata

SEQ ID NO: 206788 - DNA, 15 bp, Homo sapiens
tcacaggctgcaaat

SEQ ID NO: 206789 - DNA, 15 bp, Homo sapiens
gtcacaggctgcaaa

SEQ ID NO: 206790 - DNA, 15 bp, Homo sapiens
tgtcacaggctgcaa

SEQ ID NO: 206791 - DNA, 15 bp, Homo sapiens
ctgtcacaggctgca

SEQ ID NO: 206792 - DNA, 15 bp, Homo sapiens
gctgtcacaggctgc

SEQ ID NO: 206793 - DNA, 15 bp, Homo sapiens
tgctgtcacaggctg

SEQ ID NO: 206794 - DNA, 15 bp, Homo sapiens
ctgctgtcacaggct

SEQ ID NO: 206795 - DNA, 15 bp, Homo sapiens
cctgctgtcacaggc

SEQ ID NO: 206796 - DNA, 15 bp, Homo sapiens
tcctgctgtcacagg

SEQ ID NO: 206797 - DNA, 15 bp, Homo sapiens
ctcctgctgtcacag

SEQ ID NO: 206798 - DNA, 15 bp, Homo sapiens
gctcctgctgtcaca

SEQ ID NO: 206799 - DNA, 15 bp, Homo sapiens
ttggctcctgctgtc

SEQ ID NO: 206800 - DNA, 15 bp, Homo sapiens
tttggctcctgctgt

SEQ ID NO: 206801 - DNA, 15 bp, Homo sapiens
ttttggctcctgctg

SEQ ID NO: 206802 - DNA, 15 bp, Homo sapiens
cttttggctcctgct

SEQ ID NO: 206803 - DNA, 15 bp, Homo sapiens
gcttttggctcctgc

SEQ ID NO: 206804 - DNA, 15 bp, Homo sapiens
ggcttttggctcctg

SEQ ID NO: 206805 - DNA, 15 bp, Homo sapiens
aggcttttggctcct

SEQ ID NO: 206806 - DNA, 15 bp, Homo sapiens
gaggcttttggctcc

SEQ ID NO: 206807 - DNA, 15 bp, Homo sapiens
agaggcttttggctc

SEQ ID NO: 206808 - DNA, 15 bp, Homo sapiens
cagaggcttttggct

SEQ ID NO: 206809 - DNA, 15 bp, Homo sapiens
tcagaggcttttggc

SEQ ID NO: 206810 - DNA, 15 bp, Homo sapiens
gtcagaggcttttgg

SEQ ID NO: 206811 - DNA, 15 bp, Homo sapiens
ggtcagaggcttttg

SEQ ID NO: 206812 - DNA, 15 bp, Homo sapiens
gggtcagaggctttt

SEQ ID NO: 206813 - DNA, 15 bp, Homo sapiens
cgggtcagaggcttt

SEQ ID NO: 206814 - DNA, 15 bp, Homo sapiens
gcgggtcagaggctt

SEQ ID NO: 206815 - DNA, 15 bp, Homo sapiens
agcgggtcagaggct

SEQ ID NO: 206816 - DNA, 15 bp, Homo sapiens
gagcgggtcagaggc

SEQ ID NO: 206817 - DNA, 15 bp, Homo sapiens
tgagcgggtcagagg

SEQ ID NO: 206818 - DNA, 15 bp, Homo sapiens
ctgagcgggtcagag

SEQ ID NO: 206819 - DNA, 15 bp, Homo sapiens
cctgagcgggtcaga

SEQ ID NO: 206820 - DNA, 15 bp, Homo sapiens
tcctgagcgggtcag

SEQ ID NO: 206821 - DNA, 15 bp, Homo sapiens
gtcctgagcgggtca

SEQ ID NO: 206822 - DNA, 15 bp, Homo sapiens
ggtcctgagcgggtc

SEQ ID NO: 206823 - DNA, 15 bp, Homo sapiens
aggtcctgagcgggt

SEQ ID NO: 206824 - DNA, 15 bp, Homo sapiens
caggtcctgagcggg

SEQ ID NO: 206825 - DNA, 15 bp, Homo sapiens
ccaggtcctgagcgg

SEQ ID NO: 206826 - DNA, 15 bp, Homo sapiens
cccaggtcctgagcg

SEQ ID NO: 206827 - DNA, 15 bp, Homo sapiens
ccccaggtcctgagc

SEQ ID NO: 206828 - DNA, 15 bp, Homo sapiens
accccaggtcctgag

SEQ ID NO: 206829 - DNA, 15 bp, Homo sapiens
aaccccaggtcctga

SEQ ID NO: 206830 - DNA, 15 bp, Homo sapiens
taaccccaggtcctg

SEQ ID NO: 206831 - DNA, 15 bp, Homo sapiens
ctaaccccaggtcct

SEQ ID NO: 206832 - DNA, 15 bp, Homo sapiens
tctaaccccaggtcc

SEQ ID NO: 206833 - DNA, 15 bp, Homo sapiens
ctctaaccccaggtc

SEQ ID NO: 206834 - DNA, 15 bp, Homo sapiens
gctctaaccccaggt

SEQ ID NO: 206835 - DNA, 15 bp, Homo sapiens
agctctaaccccagg

SEQ ID NO: 206836 - DNA, 15 bp, Homo sapiens
cagctctaaccccag

SEQ ID NO: 206837 - DNA, 15 bp, Homo sapiens
gcagctctaacccca

SEQ ID NO: 206838 - DNA, 15 bp, Homo sapiens
tgcagctctaacccc

SEQ ID NO: 206839 - DNA, 15 bp, Homo sapiens
atgcagctctaaccc

SEQ ID NO: 206840 - DNA, 15 bp, Homo sapiens
catgcagctctaacc

SEQ ID NO: 206841 - DNA, 15 bp, Homo sapiens
ccatgcagctctaac

SEQ ID NO: 206842 - DNA, 15 bp, Homo sapiens
tccatgcagctctaa

SEQ ID NO: 206843 - DNA, 15 bp, Homo sapiens
gtccatgcagctcta

SEQ ID NO: 206844 - DNA, 15 bp, Homo sapiens
ggtccatgcagctct

SEQ ID NO: 206845 - DNA, 15 bp, Homo sapiens
gggtccatgcagctc

SEQ ID NO: 206846 - DNA, 15 bp, Homo sapiens
agggtccatgcagct

SEQ ID NO: 206847 - DNA, 15 bp, Homo sapiens
cagggtccatgcagc

SEQ ID NO: 206848 - DNA, 15 bp, Homo sapiens
tcagggtccatgcag

SEQ ID NO: 206849 - DNA, 15 bp, Homo sapiens
ttcagggtccatgca

SEQ ID NO: 206850 - DNA, 15 bp, Homo sapiens
cttcagggtccatgc

SEQ ID NO: 206851 - DNA, 15 bp, Homo sapiens
tcttcagggtccatg

SEQ ID NO: 206852 - DNA, 15 bp, Homo sapiens
ctcttcagggtccat

SEQ ID NO: 206853 - DNA, 15 bp, Homo sapiens
tctcttcagggtcca

SEQ ID NO: 206854 - DNA, 15 bp, Homo sapiens
ctctcttcagggtcc

SEQ ID NO: 206855 - DNA, 15 bp, Homo sapiens
cctctcttcagggtc

SEQ ID NO: 206856 - DNA, 15 bp, Homo sapiens
ccctctcttcagggt

SEQ ID NO: 206857 - DNA, 15 bp, Homo sapiens
tccctctcttcaggg

SEQ ID NO: 206858 - DNA, 15 bp, Homo sapiens
atccctctcttcagg

SEQ ID NO: 206859 - DNA, 15 bp, Homo sapiens
gatccctctcttcag

SEQ ID NO: 206860 - DNA, 15 bp, Homo sapiens
ggatccctctcttca

SEQ ID NO: 206861 - DNA, 15 bp, Homo sapiens
gggatccctctcttc

SEQ ID NO: 206862 - DNA, 15 bp, Homo sapiens
agggatccctctctt

SEQ ID NO: 206863 - DNA, 15 bp, Homo sapiens
cagggatccctctct

SEQ ID NO: 206864 - DNA, 15 bp, Homo sapiens
acagggatccctctc

SEQ ID NO: 206865 - DNA, 15 bp, Homo sapiens
cacagggatccctct

SEQ ID NO: 206866 - DNA, 15 bp, Homo sapiens
gcacagggatccctc

SEQ ID NO: 206867 - DNA, 15 bp, Homo sapiens
agcacagggatccct

SEQ ID NO: 206868 - DNA, 15 bp, Homo sapiens
tagcacagggatccc

SEQ ID NO: 206869 - DNA, 15 bp, Homo sapiens
ttagcacagggatcc

SEQ ID NO: 206870 - DNA, 15 bp, Homo sapiens
cttagcacagggatc

SEQ ID NO: 206871 - DNA, 15 bp, Homo sapiens
ccttagcacagggat

SEQ ID NO: 206872 - DNA, 15 bp, Homo sapiens
gccttagcacaggga

SEQ ID NO: 206873 - DNA, 15 bp, Homo sapiens
ggccttagcacaggg

SEQ ID NO: 206874 - DNA, 15 bp, Homo sapiens
aggccttagcacagg

SEQ ID NO: 206875 - DNA, 15 bp, Homo sapiens
aaggccttagcacag

SEQ ID NO: 206876 - DNA, 15 bp, Homo sapiens
gaaggccttagcaca

SEQ ID NO: 206877 - DNA, 15 bp, Homo sapiens
cgaaggccttagcac

SEQ ID NO: 206878 - DNA, 15 bp, Homo sapiens
ccgaaggccttagca

SEQ ID NO: 206879 - DNA, 15 bp, Homo sapiens
tccgaaggccttagc

SEQ ID NO: 206880 - DNA, 15 bp, Homo sapiens
gtccgaaggccttag

SEQ ID NO: 206881 - DNA, 15 bp, Homo sapiens
tgtccgaaggcctta

SEQ ID NO: 206882 - DNA, 15 bp, Homo sapiens
ctgtccgaaggcctt

SEQ ID NO: 206883 - DNA, 15 bp, Homo sapiens
actgtccgaaggcct

SEQ ID NO: 206884 - DNA, 15 bp, Homo sapiens
cactgtccgaaggcc

SEQ ID NO: 206885 - DNA, 15 bp, Homo sapiens
ccactgtccgaaggc

SEQ ID NO: 206886 - DNA, 15 bp, Homo sapiens
gccactgtccgaagg

SEQ ID NO: 206887 - DNA, 15 bp, Homo sapiens
ggccactgtccgaag

SEQ ID NO: 206888 - DNA, 15 bp, Homo sapiens
gggccactgtccgaa

SEQ ID NO: 206889 - DNA, 15 bp, Homo sapiens
agggccactgtccga

SEQ ID NO: 206890 - DNA, 15 bp, Homo sapiens
cagggccactgtccg

SEQ ID NO: 206891 - DNA, 15 bp, Homo sapiens
tcagggccactgtcc

SEQ ID NO: 206892 - DNA, 15 bp, Homo sapiens
gtcagggccactgtc

SEQ ID NO: 206893 - DNA, 15 bp, Homo sapiens
ggtcagggccactgt

SEQ ID NO: 206894 - DNA, 15 bp, Homo sapiens
cggtcagggccactg

SEQ ID NO: 206895 - DNA, 15 bp, Homo sapiens
tcggtcagggccact

SEQ ID NO: 206896 - DNA, 15 bp, Homo sapiens
ctcggtcagggccac

SEQ ID NO: 206897 - DNA, 15 bp, Homo sapiens
gctcggtcagggcca

SEQ ID NO: 206898 - DNA, 15 bp, Homo sapiens
tgctcggtcagggcc

SEQ ID NO: 206899 - DNA, 15 bp, Homo sapiens
ctgctcggtcagggc

SEQ ID NO: 206900 - DNA, 15 bp, Homo sapiens
gctgctcggtcaggg

SEQ ID NO: 206901 - DNA, 15 bp, Homo sapiens
tgctgctcggtcagg

SEQ ID NO: 206902 - DNA, 15 bp, Homo sapiens
ctgctgctcggtcag

SEQ ID NO: 206903 - DNA, 15 bp, Homo sapiens
tctgctgctcggtca

SEQ ID NO: 206904 - DNA, 15 bp, Homo sapiens
ctctgctgctcggtc

SEQ ID NO: 206905 - DNA, 15 bp, Homo sapiens
cctctgctgctcggt

SEQ ID NO: 206906 - DNA, 15 bp, Homo sapiens
ccctctgctgctcgg

SEQ ID NO: 206907 - DNA, 15 bp, Homo sapiens
tccctctgctgctcg

SEQ ID NO: 206908 - DNA, 15 bp, Homo sapiens
ttccctctgctgctc

SEQ ID NO: 206909 - DNA, 15 bp, Homo sapiens
cttccctctgctgct

SEQ ID NO: 206910 - DNA, 15 bp, Homo sapiens
tcttccctctgctgc

SEQ ID NO: 206911 - DNA, 15 bp, Homo sapiens
ctcttccctctgctg

SEQ ID NO: 206912 - DNA, 15 bp, Homo sapiens
cctcttccctctgct

SEQ ID NO: 206913 - DNA, 15 bp, Homo sapiens
ccctcttccctctgc

SEQ ID NO: 206914 - DNA, 15 bp, Homo sapiens
gccctcttccctctg

SEQ ID NO: 206915 - DNA, 15 bp, Homo sapiens
agccctcttccctct

SEQ ID NO: 206916 - DNA, 15 bp, Homo sapiens
aagccctcttccctc

SEQ ID NO: 206917 - DNA, 15 bp, Homo sapiens
taagccctcttccct

SEQ ID NO: 206918 - DNA, 15 bp, Homo sapiens
ctaagccctcttccc

SEQ ID NO: 206919 - DNA, 15 bp, Homo sapiens
cctaagccctcttcc

SEQ ID NO: 206920 - DNA, 15 bp, Homo sapiens
ccctaagccctcttc

SEQ ID NO: 206921 - DNA, 15 bp, Homo sapiens
tccctaagccctctt

SEQ ID NO: 206922 - DNA, 15 bp, Homo sapiens
ctccctaagccctct

SEQ ID NO: 206923 - DNA, 15 bp, Homo sapiens
gctccctaagccctc

SEQ ID NO: 206924 - DNA, 15 bp, Homo sapiens
cgctccctaagccct

SEQ ID NO: 206925 - DNA, 15 bp, Homo sapiens
ccgctccctaagccc

SEQ ID NO: 206926 - DNA, 15 bp, Homo sapiens
cccgctccctaagcc

SEQ ID NO: 206927 - DNA, 15 bp, Homo sapiens
tcccgctccctaagc

SEQ ID NO: 206928 - DNA, 15 bp, Homo sapiens
ttcccgctccctaag

SEQ ID NO: 206929 - DNA, 15 bp, Homo sapiens
cttcccgctccctaa

SEQ ID NO: 206930 - DNA, 15 bp, Homo sapiens
gcttcccgctcccta

SEQ ID NO: 206931 - DNA, 15 bp, Homo sapiens
tgcttcccgctccct

SEQ ID NO: 206932 - DNA, 15 bp, Homo sapiens
gtgcttcccgctccc

SEQ ID NO: 206933 - DNA, 15 bp, Homo sapiens
ggtgcttcccgctcc

SEQ ID NO: 206934 - DNA, 15 bp, Homo sapiens
tggtgcttcccgctc

SEQ ID NO: 206935 - DNA, 15 bp, Homo sapiens
ttggtgcttcccgct

SEQ ID NO: 206936 - DNA, 15 bp, Homo sapiens
attggtgcttcccgc

SEQ ID NO: 206937 - DNA, 15 bp, Homo sapiens
cattggtgcttcccg

SEQ ID NO: 206938 - DNA, 15 bp, Homo sapiens
gcattggtgcttccc

SEQ ID NO: 206939 - DNA, 15 bp, Homo sapiens
agcattggtgcttcc

SEQ ID NO: 206940 - DNA, 15 bp, Homo sapiens
cagcattggtgcttc

SEQ ID NO: 206941 - DNA, 15 bp, Homo sapiens
ccagcattggtgctt

SEQ ID NO: 206942 - DNA, 15 bp, Homo sapiens
cccagcattggtgct

SEQ ID NO: 206943 - DNA, 15 bp, Homo sapiens
gcccagcattggtgc

SEQ ID NO: 206944 - DNA, 15 bp, Homo sapiens
agcccagcattggtg

SEQ ID NO: 206945 - DNA, 15 bp, Homo sapiens
aagcccagcattggt

SEQ ID NO: 206946 - DNA, 15 bp, Homo sapiens
caagcccagcattgg

SEQ ID NO: 206947 - DNA, 15 bp, Homo sapiens
gcaagcccagcattg

SEQ ID NO: 206948 - DNA, 15 bp, Homo sapiens
tgcaagcccagcatt

SEQ ID NO: 206949 - DNA, 15 bp, Homo sapiens
ttgcaagcccagcat

SEQ ID NO: 206950 - DNA, 15 bp, Homo sapiens
tttgcaagcccagca

SEQ ID NO: 206951 - DNA, 15 bp, Homo sapiens
ctttgcaagcccagc

SEQ ID NO: 206952 - DNA, 15 bp, Homo sapiens
cctttgcaagcccag

SEQ ID NO: 206953 - DNA, 15 bp, Homo sapiens
ccctttgcaagccca

SEQ ID NO: 206954 - DNA, 15 bp, Homo sapiens
gccctttgcaagccc

SEQ ID NO: 206955 - DNA, 15 bp, Homo sapiens
tgccctttgcaagcc

SEQ ID NO: 206956 - DNA, 15 bp, Homo sapiens
ctgccctttgcaagc

SEQ ID NO: 206957 - DNA, 15 bp, Homo sapiens
tctgccctttgcaag

SEQ ID NO: 206958 - DNA, 15 bp, Homo sapiens
ctctgccctttgcaa

SEQ ID NO: 206959 - DNA, 15 bp, Homo sapiens
gctctgccctttgca

SEQ ID NO: 206960 - DNA, 15 bp, Homo sapiens
tgctctgccctttgc

SEQ ID NO: 206961 - DNA, 15 bp, Homo sapiens
ctgctctgccctttg

SEQ ID NO: 206962 - DNA, 15 bp, Homo sapiens
gctgctctgcccttt

SEQ ID NO: 206963 - DNA, 15 bp, Homo sapiens
tgctgctctgccctt

SEQ ID NO: 206964 - DNA, 15 bp, Homo sapiens
ctgctgctctgccct

SEQ ID NO: 206965 - DNA, 15 bp, Homo sapiens
cctgctgctctgccc

SEQ ID NO: 206966 - DNA, 15 bp, Homo sapiens
tcctgctgctctgcc

SEQ ID NO: 206967 - DNA, 15 bp, Homo sapiens
ctcctgctgctctgc

SEQ ID NO: 206968 - DNA, 15 bp, Homo sapiens
tctcctgctgctctg

SEQ ID NO: 206969 - DNA, 15 bp, Homo sapiens
ctctcctgctgctct

SEQ ID NO: 206970 - DNA, 15 bp, Homo sapiens
tctctcctgctgctc

SEQ ID NO: 206971 - DNA, 15 bp, Homo sapiens
ctctctcctgctgct

SEQ ID NO: 206972 - DNA, 15 bp, Homo sapiens
cctctctcctgctgc

SEQ ID NO: 206973 - DNA, 15 bp, Homo sapiens
gcctctctcctgctg

SEQ ID NO: 206974 - DNA, 15 bp, Homo sapiens
agcctctctcctgct

SEQ ID NO: 206975 - DNA, 15 bp, Homo sapiens
cagcctctctcctgc

SEQ ID NO: 206976 - DNA, 15 bp, Homo sapiens
ccagcctctctcctg

SEQ ID NO: 206977 - DNA, 15 bp, Homo sapiens
gccagcctctctcct

SEQ ID NO: 206978 - DNA, 15 bp, Homo sapiens
tgccagcctctctcc

SEQ ID NO: 206979 - DNA, 15 bp, Homo sapiens
atgccagcctctctc

SEQ ID NO: 206980 - DNA, 15 bp, Homo sapiens
tatgccagcctctct

SEQ ID NO: 206981 - DNA, 15 bp, Homo sapiens
ctatgccagcctctc

SEQ ID NO: 206982 - DNA, 15 bp, Homo sapiens
cctatgccagcctct

SEQ ID NO: 206983 - DNA, 15 bp, Homo sapiens
tcctatgccagcctc

SEQ ID NO: 206984 - DNA, 15 bp, Homo sapiens
ctcctatgccagcct

SEQ ID NO: 206985 - DNA, 15 bp, Homo sapiens
cctcctatgccagcc

SEQ ID NO: 206986 - DNA, 15 bp, Homo sapiens
ccctcctatgccagc

SEQ ID NO: 206987 - DNA, 15 bp, Homo sapiens
tccctcctatgccag

SEQ ID NO: 206988 - DNA, 15 bp, Homo sapiens
ctccctcctatgcca

SEQ ID NO: 206989 - DNA, 15 bp, Homo sapiens
cctccctcctatgcc

SEQ ID NO: 206990 - DNA, 15 bp, Homo sapiens
tcctccctcctatgc

SEQ ID NO: 206991 - DNA, 15 bp, Homo sapiens
ctcctccctcctatg

SEQ ID NO: 206992 - DNA, 15 bp, Homo sapiens
cctcctccctcctat

SEQ ID NO: 206993 - DNA, 15 bp, Homo sapiens
ccctcctccctccta

SEQ ID NO: 206994 - DNA, 15 bp, Homo sapiens
gccctcctccctcct

SEQ ID NO: 206995 - DNA, 15 bp, Homo sapiens
agccctcctccctcc

SEQ ID NO: 206996 - DNA, 15 bp, Homo sapiens
gagccctcctccctc

SEQ ID NO: 206997 - DNA, 15 bp, Homo sapiens
tgagccctcctccct

SEQ ID NO: 206998 - DNA, 15 bp, Homo sapiens
gtgagccctcctccc

SEQ ID NO: 206999 - DNA, 15 bp, Homo sapiens
tgtgagccctcctcc

SEQ ID NO: 207000 - DNA, 15 bp, Homo sapiens
ctgtgagccctcctc

SEQ ID NO: 207001 - DNA, 15 bp, Homo sapiens
cctgtgagccctcct

SEQ ID NO: 207002 - DNA, 15 bp, Homo sapiens
tcctgtgagccctcc

SEQ ID NO: 207003 - DNA, 15 bp, Homo sapiens
ctcctgtgagccctc

SEQ ID NO: 207004 - DNA, 15 bp, Homo sapiens
actcctgtgagccct

SEQ ID NO: 207005 - DNA, 15 bp, Homo sapiens
cactcctgtgagccc

SEQ ID NO: 207006 - DNA, 15 bp, Homo sapiens
ccactcctgtgagcc

SEQ ID NO: 207007 - DNA, 15 bp, Homo sapiens
cccactcctgtgagc

SEQ ID NO: 207008 - DNA, 15 bp, Homo sapiens
tcccactcctgtgag

SEQ ID NO: 207009 - DNA, 15 bp, Homo sapiens
ctcccactcctgtga

SEQ ID NO: 207010 - DNA, 15 bp, Homo sapiens
cctcccactcctgtg

SEQ ID NO: 207011 - DNA, 15 bp, Homo sapiens
acctcccactcctgt

SEQ ID NO: 207012 - DNA, 15 bp, Homo sapiens
cacctcccactcctg

SEQ ID NO: 207013 - DNA, 15 bp, Homo sapiens
ccacctcccactcct

SEQ ID NO: 207014 - DNA, 15 bp, Homo sapiens
tccacctcccactcc

SEQ ID NO: 207015 - DNA, 15 bp, Homo sapiens
atccacctcccactc

SEQ ID NO: 207016 - DNA, 15 bp, Homo sapiens
aatccacctcccact

SEQ ID NO: 207017 - DNA, 15 bp, Homo sapiens
caatccacctcccac

SEQ ID NO: 207018 - DNA, 15 bp, Homo sapiens
ccaatccacctccca

SEQ ID NO: 207019 - DNA, 15 bp, Homo sapiens
tccaatccacctccc

SEQ ID NO: 207020 - DNA, 15 bp, Homo sapiens
atccaatccacctcc

SEQ ID NO: 207021 - DNA, 15 bp, Homo sapiens
aatccaatccacctc

SEQ ID NO: 207022 - DNA, 15 bp, Homo sapiens
aaatccaatccacct

SEQ ID NO: 207023 - DNA, 15 bp, Homo sapiens
taaatccaatccacc

SEQ ID NO: 207024 - DNA, 15 bp, Homo sapiens
ctaaatccaatccac

SEQ ID NO: 207025 - DNA, 15 bp, Homo sapiens
cctaaatccaatcca

SEQ ID NO: 207026 - DNA, 15 bp, Homo sapiens
ccctaaatccaatcc

SEQ ID NO: 207027 - DNA, 15 bp, Homo sapiens
gccctaaatccaatc

SEQ ID NO: 207028 - DNA, 15 bp, Homo sapiens
ggccctaaatccaat

SEQ ID NO: 207029 - DNA, 15 bp, Homo sapiens
tggccctaaatccaa

SEQ ID NO: 207030 - DNA, 15 bp, Homo sapiens
atggccctaaatcca

SEQ ID NO: 207031 - DNA, 15 bp, Homo sapiens
gatggccctaaatcc

SEQ ID NO: 207032 - DNA, 15 bp, Homo sapiens
tgatggccctaaatc

SEQ ID NO: 207033 - DNA, 15 bp, Homo sapiens
ctgatggccctaaat

SEQ ID NO: 207034 - DNA, 15 bp, Homo sapiens
cctgatggccctaaa

SEQ ID NO: 207035 - DNA, 15 bp, Homo sapiens
tcctgatggccctaa

SEQ ID NO: 207036 - DNA, 15 bp, Homo sapiens
ctcctgatggcccta

SEQ ID NO: 207037 - DNA, 15 bp, Homo sapiens
cctcctgatggccct

SEQ ID NO: 207038 - DNA, 15 bp, Homo sapiens
ccctcctgatggccc

SEQ ID NO: 207039 - DNA, 15 bp, Homo sapiens
cccctcctgatggcc

SEQ ID NO: 207040 - DNA, 15 bp, Homo sapiens
acccctcctgatggc

SEQ ID NO: 207041 - DNA, 15 bp, Homo sapiens
cacccctcctgatgg

SEQ ID NO: 207042 - DNA, 15 bp, Homo sapiens
ccacccctcctgatg

SEQ ID NO: 207043 - DNA, 15 bp, Homo sapiens
cccacccctcctgat

SEQ ID NO: 207044 - DNA, 15 bp, Homo sapiens
tcccacccctcctga

SEQ ID NO: 207045 - DNA, 15 bp, Homo sapiens
ctcccacccctcctg

SEQ ID NO: 207046 - DNA, 15 bp, Homo sapiens
cctcccacccctcct

SEQ ID NO: 207047 - DNA, 15 bp, Homo sapiens
gcctcccacccctcc

SEQ ID NO: 207048 - DNA, 15 bp, Homo sapiens
ggcctcccacccctc

SEQ ID NO: 207049 - DNA, 15 bp, Homo sapiens
tggcctcccacccct

SEQ ID NO: 207050 - DNA, 15 bp, Homo sapiens
ttggcctcccacccc

SEQ ID NO: 207051 - DNA, 15 bp, Homo sapiens
tttggcctcccaccc

SEQ ID NO: 207052 - DNA, 15 bp, Homo sapiens
gtttggcctcccacc

SEQ ID NO: 207053 - DNA, 15 bp, Homo sapiens
tgtttggcctcccac

SEQ ID NO: 207054 - DNA, 15 bp, Homo sapiens
ctgtttggcctccca

SEQ ID NO: 207055 - DNA, 15 bp, Homo sapiens
gctgtttggcctccc

SEQ ID NO: 207056 - DNA, 15 bp, Homo sapiens
agctgtttggcctcc

SEQ ID NO: 207057 - DNA, 15 bp, Homo sapiens
gagctgtttggcctc

SEQ ID NO: 207058 - DNA, 15 bp, Homo sapiens
tgagctgtttggcct

SEQ ID NO: 207059 - DNA, 15 bp, Homo sapiens
ctgagctgtttggcc

SEQ ID NO: 207060 - DNA, 15 bp, Homo sapiens
gctgagctgtttggc

SEQ ID NO: 207061 - DNA, 15 bp, Homo sapiens
agctgagctgtttgg

SEQ ID NO: 207062 - DNA, 15 bp, Homo sapiens
gagctgagctgtttg

SEQ ID NO: 207063 - DNA, 15 bp, Homo sapiens
ggagctgagctgttt

SEQ ID NO: 207064 - DNA, 15 bp, Homo sapiens
gggagctgagctgtt

SEQ ID NO: 207065 - DNA, 15 bp, Homo sapiens
ggggagctgagctgt

SEQ ID NO: 207066 - DNA, 15 bp, Homo sapiens
tggggagctgagctg

SEQ ID NO: 207067 - DNA, 15 bp, Homo sapiens
ctggggagctgagct

SEQ ID NO: 207068 - DNA, 15 bp, Homo sapiens
actggggagctgagc

SEQ ID NO: 207069 - DNA, 15 bp, Homo sapiens
gactggggagctgag

SEQ ID NO: 207070 - DNA, 15 bp, Homo sapiens
ggactggggagctga

SEQ ID NO: 207071 - DNA, 15 bp, Homo sapiens
gggactggggagctg

SEQ ID NO: 207072 - DNA, 15 bp, Homo sapiens
agggactggggagct

SEQ ID NO: 207073 - DNA, 15 bp, Homo sapiens
aagggactggggagc

SEQ ID NO: 207074 - DNA, 15 bp, Homo sapiens
aaagggactggggag

SEQ ID NO: 207075 - DNA, 15 bp, Homo sapiens
gaaagggactgggga

SEQ ID NO: 207076 - DNA, 15 bp, Homo sapiens
agaaagggactgggg

SEQ ID NO: 207077 - DNA, 15 bp, Homo sapiens
cagaaagggactggg

SEQ ID NO: 207078 - DNA, 15 bp, Homo sapiens
ccagaaagggactgg

SEQ ID NO: 207079 - DNA, 15 bp, Homo sapiens
cccagaaagggactg

SEQ ID NO: 207080 - DNA, 15 bp, Homo sapiens
ccccagaaagggact

SEQ ID NO: 207081 - DNA, 15 bp, Homo sapiens
gccccagaaagggac

SEQ ID NO: 207082 - DNA, 15 bp, Homo sapiens
ggccccagaaaggga

SEQ ID NO: 207083 - DNA, 15 bp, Homo sapiens
tggccccagaaaggg

SEQ ID NO: 207084 - DNA, 15 bp, Homo sapiens
atggccccagaaagg

SEQ ID NO: 207085 - DNA, 15 bp, Homo sapiens
gatggccccagaaag

SEQ ID NO: 207086 - DNA, 15 bp, Homo sapiens
agatggccccagaaa

SEQ ID NO: 207087 - DNA, 15 bp, Homo sapiens
aagatggccccagaa

SEQ ID NO: 207088 - DNA, 15 bp, Homo sapiens
aaagatggccccaga

SEQ ID NO: 207089 - DNA, 15 bp, Homo sapiens
caaagatggccccag

SEQ ID NO: 207090 - DNA, 15 bp, Homo sapiens
acaaagatggcccca

SEQ ID NO: 207091 - DNA, 15 bp, Homo sapiens
aacaaagatggcccc

SEQ ID NO: 207092 - DNA, 15 bp, Homo sapiens
aaacaaagatggccc

SEQ ID NO: 207093 - DNA, 15 bp, Homo sapiens
aaaacaaagatggcc

SEQ ID NO: 207094 - DNA, 15 bp, Homo sapiens
gaaaacaaagatggc

SEQ ID NO: 207095 - DNA, 15 bp, Homo sapiens
agaaaacaaagatgg

SEQ ID NO: 207096 - DNA, 15 bp, Homo sapiens
cagaaaacaaagatg

SEQ ID NO: 207097 - DNA, 15 bp, Homo sapiens
tcagaaaacaaagat

SEQ ID NO: 207098 - DNA, 15 bp, Homo sapiens
atcagaaaacaaaga

SEQ ID NO: 207099 - DNA, 15 bp, Homo sapiens
aatcagaaaacaaag

SEQ ID NO: 207100 - DNA, 15 bp, Homo sapiens
aaatcagaaaacaaa

SEQ ID NO: 207101 - DNA, 15 bp, Homo sapiens
taaatcagaaaacaa

SEQ ID NO: 207102 - DNA, 15 bp, Homo sapiens
ataaatcagaaaaca

SEQ ID NO: 207103 - DNA, 15 bp, Homo sapiens
tataaatcagaaaac

SEQ ID NO: 207104 - DNA, 15 bp, Homo sapiens
ttataaatcagaaaa

SEQ ID NO: 207105 - DNA, 15 bp, Homo sapiens
attataaatcagaaa

SEQ ID NO: 207106 - DNA, 15 bp, Homo sapiens
cattataaatcagaa

SEQ ID NO: 207107 - DNA, 15 bp, Homo sapiens
acattataaatcaga

SEQ ID NO: 207108 - DNA, 15 bp, Homo sapiens
cacattataaatcag

SEQ ID NO: 207109 - DNA, 15 bp, Homo sapiens
acacattataaatca

SEQ ID NO: 207110 - DNA, 15 bp, Homo sapiens
gacacattataaatc

SEQ ID NO: 207111 - DNA, 15 bp, Homo sapiens
ggacacattataaat

SEQ ID NO: 207112 - DNA, 15 bp, Homo sapiens
gggacacattataaa

SEQ ID NO: 207113 - DNA, 15 bp, Homo sapiens
ggggacacattataa

SEQ ID NO: 207114 - DNA, 15 bp, Homo sapiens
aggggacacattata

SEQ ID NO: 207115 - DNA, 15 bp, Homo sapiens
aaggggacacattat

SEQ ID NO: 207116 - DNA, 15 bp, Homo sapiens
aaaggggacacatta

SEQ ID NO: 207117 - DNA, 15 bp, Homo sapiens
caaaggggacacatt

SEQ ID NO: 207118 - DNA, 15 bp, Homo sapiens
gcaaaggggacacat

SEQ ID NO: 207119 - DNA, 15 bp, Homo sapiens
cgcaaaggggacaca

SEQ ID NO: 207120 - DNA, 15 bp, Homo sapiens
ccgcaaaggggacac

SEQ ID NO: 207121 - DNA, 15 bp, Homo sapiens
tccgcaaaggggaca

SEQ ID NO: 207122 - DNA, 15 bp, Homo sapiens
atccgcaaaggggac

SEQ ID NO: 207123 - DNA, 15 bp, Homo sapiens
catccgcaaagggga

SEQ ID NO: 207124 - DNA, 15 bp, Homo sapiens
ccatccgcaaagggg

SEQ ID NO: 207125 - DNA, 15 bp, Homo sapiens
gccatccgcaaaggg

SEQ ID NO: 207126 - DNA, 15 bp, Homo sapiens
ggccatccgcaaagg

SEQ ID NO: 207127 - DNA, 15 bp, Homo sapiens
aggccatccgcaaag

SEQ ID NO: 207128 - DNA, 15 bp, Homo sapiens
aaggccatccgcaaa

SEQ ID NO: 207129 - DNA, 15 bp, Homo sapiens
aaaggccatccgcaa

SEQ ID NO: 207130 - DNA, 15 bp, Homo sapiens
aaaaggccatccgca

SEQ ID NO: 207131 - DNA, 15 bp, Homo sapiens
caaaaggccatccgc

SEQ ID NO: 207132 - DNA, 15 bp, Homo sapiens
tcaaaaggccatccg

SEQ ID NO: 207133 - DNA, 15 bp, Homo sapiens
gtcaaaaggccatcc

SEQ ID NO: 207134 - DNA, 15 bp, Homo sapiens
tgtcaaaaggccatc

SEQ ID NO: 207135 - DNA, 15 bp, Homo sapiens
atgtcaaaaggccat

SEQ ID NO: 207136 - DNA, 15 bp, Homo sapiens
catgtcaaaaggcca

SEQ ID NO: 207137 - DNA, 15 bp, Homo sapiens
acatgtcaaaaggcc

SEQ ID NO: 207138 - DNA, 15 bp, Homo sapiens
cacatgtcaaaaggc

SEQ ID NO: 207139 - DNA, 15 bp, Homo sapiens
gcacatgtcaaaagg

SEQ ID NO: 207140 - DNA, 15 bp, Homo sapiens
agcacatgtcaaaag

SEQ ID NO: 207141 - DNA, 15 bp, Homo sapiens
tagcacatgtcaaaa

SEQ ID NO: 207142 - DNA, 15 bp, Homo sapiens
ttagcacatgtcaaa

SEQ ID NO: 207143 - DNA, 15 bp, Homo sapiens
attagcacatgtcaa

SEQ ID NO: 207144 - DNA, 15 bp, Homo sapiens
aattagcacatgtca

SEQ ID NO: 207145 - DNA, 15 bp, Homo sapiens
taattagcacatgtc

SEQ ID NO: 207146 - DNA, 15 bp, Homo sapiens
ataattagcacatgt

SEQ ID NO: 207147 - DNA, 15 bp, Homo sapiens
tataattagcacatg

SEQ ID NO: 207148 - DNA, 15 bp, Homo sapiens
ttataattagcacat

SEQ ID NO: 207149 - DNA, 15 bp, Homo sapiens
tttataattagcaca

SEQ ID NO: 207150 - DNA, 15 bp, Homo sapiens
atttataattagcac

SEQ ID NO: 207151 - DNA, 15 bp, Homo sapiens
aatttataattagca

SEQ ID NO: 207152 - DNA, 15 bp, Homo sapiens
caatttataattagc

SEQ ID NO: 207153 - DNA, 15 bp, Homo sapiens
acaatttataattag

SEQ ID NO: 207154 - DNA, 15 bp, Homo sapiens
gacaatttataatta

SEQ ID NO: 207155 - DNA, 15 bp, Homo sapiens
ggacaatttataatt

SEQ ID NO: 207156 - DNA, 15 bp, Homo sapiens
aggacaatttataat

SEQ ID NO: 207157 - DNA, 15 bp, Homo sapiens
aaggacaatttataa

SEQ ID NO: 207158 - DNA, 15 bp, Homo sapiens
aaaggacaatttata

SEQ ID NO: 207159 - DNA, 15 bp, Homo sapiens
caaaggacaatttat

SEQ ID NO: 207160 - DNA, 15 bp, Homo sapiens
ccaaaggacaattta

SEQ ID NO: 207161 - DNA, 15 bp, Homo sapiens
accaaaggacaattt

SEQ ID NO: 207162 - DNA, 15 bp, Homo sapiens
caccaaaggacaatt

SEQ ID NO: 207163 - DNA, 15 bp, Homo sapiens
gcaccaaaggacaat

SEQ ID NO: 207164 - DNA, 15 bp, Homo sapiens
tgcaccaaaggacaa

SEQ ID NO: 207165 - DNA, 15 bp, Homo sapiens
atgcaccaaaggaca

SEQ ID NO: 207166 - DNA, 15 bp, Homo sapiens
aatgcaccaaaggac

SEQ ID NO: 207167 - DNA, 15 bp, Homo sapiens
gaatgcaccaaagga

SEQ ID NO: 207168 - DNA, 15 bp, Homo sapiens
ggaatgcaccaaagg

SEQ ID NO: 207169 - DNA, 15 bp, Homo sapiens
cggaatgcaccaaag

SEQ ID NO: 207170 - DNA, 15 bp, Homo sapiens
tcggaatgcaccaaa

SEQ ID NO: 207171 - DNA, 15 bp, Homo sapiens
ctcggaatgcaccaa

SEQ ID NO: 207172 - DNA, 15 bp, Homo sapiens
tctcggaatgcacca

SEQ ID NO: 207173 - DNA, 15 bp, Homo sapiens
ctctcggaatgcacc

SEQ ID NO: 207174 - DNA, 15 bp, Homo sapiens
actctcggaatgcac

SEQ ID NO: 207175 - DNA, 15 bp, Homo sapiens
aactctcggaatgca

SEQ ID NO: 207176 - DNA, 15 bp, Homo sapiens
gaactctcggaatgc

SEQ ID NO: 207177 - DNA, 15 bp, Homo sapiens
agaactctcggaatg

SEQ ID NO: 207178 - DNA, 15 bp, Homo sapiens
tagaactctcggaat

SEQ ID NO: 207179 - DNA, 15 bp, Homo sapiens
ttagaactctcggaa

SEQ ID NO: 207180 - DNA, 15 bp, Homo sapiens
attagaactctcgga

SEQ ID NO: 207181 - DNA, 15 bp, Homo sapiens
tattagaactctcgg

SEQ ID NO: 207182 - DNA, 15 bp, Homo sapiens
ttattagaactctcg

SEQ ID NO: 207183 - DNA, 15 bp, Homo sapiens
attattagaactctc

SEQ ID NO: 207184 - DNA, 15 bp, Homo sapiens
aattattagaactct

SEQ ID NO: 207185 - DNA, 15 bp, Homo sapiens
taattattagaactc

SEQ ID NO: 207186 - DNA, 15 bp, Homo sapiens
ctaattattagaact

SEQ ID NO: 207187 - DNA, 15 bp, Homo sapiens
tctaattattagaac

SEQ ID NO: 207188 - DNA, 15 bp, Homo sapiens
ttctaattattagaa

SEQ ID NO: 207189 - DNA, 15 bp, Homo sapiens
attctaattattaga

SEQ ID NO: 207190 - DNA, 15 bp, Homo sapiens
aattctaattattag

SEQ ID NO: 207191 - DNA, 15 bp, Homo sapiens
aaattctaattatta

SEQ ID NO: 207192 - DNA, 15 bp, Homo sapiens
gaaattctaattatt

SEQ ID NO: 207193 - DNA, 15 bp, Homo sapiens
agaaattctaattat

SEQ ID NO: 207194 - DNA, 15 bp, Homo sapiens
tagaaattctaatta

SEQ ID NO: 207195 - DNA, 15 bp, Homo sapiens
ttagaaattctaatt

SEQ ID NO: 207196 - DNA, 15 bp, Homo sapiens
attagaaattctaat

SEQ ID NO: 207197 - DNA, 15 bp, Homo sapiens
aattagaaattctaa

SEQ ID NO: 207198 - DNA, 15 bp, Homo sapiens
gaattagaaattcta

SEQ ID NO: 207199 - DNA, 15 bp, Homo sapiens
ggaattagaaattct

SEQ ID NO: 207200 - DNA, 15 bp, Homo sapiens
tggaattagaaattc

SEQ ID NO: 207201 - DNA, 15 bp, Homo sapiens
ctggaattagaaatt

SEQ ID NO: 207202 - DNA, 15 bp, Homo sapiens
actggaattagaaat

SEQ ID NO: 207203 - DNA, 15 bp, Homo sapiens
gactggaattagaaa

SEQ ID NO: 207204 - DNA, 15 bp, Homo sapiens
ggactggaattagaa

SEQ ID NO: 207205 - DNA, 15 bp, Homo sapiens
aggactggaattaga

SEQ ID NO: 207206 - DNA, 15 bp, Homo sapiens
gaggactggaattag

SEQ ID NO: 207207 - DNA, 15 bp, Homo sapiens
agaggactggaatta

SEQ ID NO: 207208 - DNA, 15 bp, Homo sapiens
cagaggactggaatt

SEQ ID NO: 207209 - DNA, 15 bp, Homo sapiens
tcagaggactggaat

SEQ ID NO: 207210 - DNA, 15 bp, Homo sapiens
ctcagaggactggaa

SEQ ID NO: 207211 - DNA, 15 bp, Homo sapiens
gctcagaggactgga

SEQ ID NO: 207212 - DNA, 15 bp, Homo sapiens
agctcagaggactgg

SEQ ID NO: 207213 - DNA, 15 bp, Homo sapiens
cagctcagaggactg

SEQ ID NO: 207214 - DNA, 15 bp, Homo sapiens
gcagctcagaggact

SEQ ID NO: 207215 - DNA, 15 bp, Homo sapiens
agcagctcagaggac

SEQ ID NO: 207216 - DNA, 15 bp, Homo sapiens
gagcagctcagagga

SEQ ID NO: 207217 - DNA, 15 bp, Homo sapiens
ggagcagctcagagg

SEQ ID NO: 207218 - DNA, 15 bp, Homo sapiens
gggagcagctcagag

SEQ ID NO: 207219 - DNA, 15 bp, Homo sapiens
tgggagcagctcaga

SEQ ID NO: 207220 - DNA, 15 bp, Homo sapiens
ctgggagcagctcag

SEQ ID NO: 207221 - DNA, 15 bp, Homo sapiens
gctgggagcagctca

SEQ ID NO: 207222 - DNA, 15 bp, Homo sapiens
tgctgggagcagctc

SEQ ID NO: 207223 - DNA, 15 bp, Homo sapiens
ctgctgggagcagct

SEQ ID NO: 207224 - DNA, 15 bp, Homo sapiens
gctgctgggagcagc

SEQ ID NO: 207225 - DNA, 15 bp, Homo sapiens
ggctgctgggagcag

SEQ ID NO: 207226 - DNA, 15 bp, Homo sapiens
aggctgctgggagca

SEQ ID NO: 207227 - DNA, 15 bp, Homo sapiens
gaggctgctgggagc

SEQ ID NO: 207228 - DNA, 15 bp, Homo sapiens
tgaggctgctgggag

SEQ ID NO: 207229 - DNA, 15 bp, Homo sapiens
atgaggctgctggga

SEQ ID NO: 207230 - DNA, 15 bp, Homo sapiens
gatgaggctgctggg

SEQ ID NO: 207231 - DNA, 15 bp, Homo sapiens
ggatgaggctgctgg

SEQ ID NO: 207232 - DNA, 15 bp, Homo sapiens
aggatgaggctgctg

SEQ ID NO: 207233 - DNA, 15 bp, Homo sapiens
caggatgaggctgct

SEQ ID NO: 207234 - DNA, 15 bp, Homo sapiens
acaggatgaggctgc

SEQ ID NO: 207235 - DNA, 15 bp, Homo sapiens
cacaggatgaggctg

SEQ ID NO: 207236 - DNA, 15 bp, Homo sapiens
tcacaggatgaggct

SEQ ID NO: 207237 - DNA, 15 bp, Homo sapiens
ctcacaggatgaggc

SEQ ID NO: 207238 - DNA, 15 bp, Homo sapiens
tctcacaggatgagg

SEQ ID NO: 207239 - DNA, 15 bp, Homo sapiens
ctctcacaggatgag

SEQ ID NO: 207240 - DNA, 15 bp, Homo sapiens
cctctcacaggatga

SEQ ID NO: 207241 - DNA, 15 bp, Homo sapiens
tcctctcacaggatg

SEQ ID NO: 207242 - DNA, 15 bp, Homo sapiens
ctcctctcacaggat

SEQ ID NO: 207243 - DNA, 15 bp, Homo sapiens
gctcctctcacagga

SEQ ID NO: 207244 - DNA, 15 bp, Homo sapiens
agctcctctcacagg

SEQ ID NO: 207245 - DNA, 15 bp, Homo sapiens
aagctcctctcacag

SEQ ID NO: 207246 - DNA, 15 bp, Homo sapiens
caagctcctctcaca

SEQ ID NO: 207247 - DNA, 15 bp, Homo sapiens
tcaagctcctctcac

SEQ ID NO: 207248 - DNA, 15 bp, Homo sapiens
gtcaagctcctctca

SEQ ID NO: 207249 - DNA, 15 bp, Homo sapiens
agtcaagctcctctc

SEQ ID NO: 207250 - DNA, 15 bp, Homo sapiens
gagtcaagctcctct

SEQ ID NO: 207251 - DNA, 15 bp, Homo sapiens
tgagtcaagctcctc

SEQ ID NO: 207252 - DNA, 15 bp, Homo sapiens
atgagtcaagctcct

SEQ ID NO: 207253 - DNA, 15 bp, Homo sapiens
aatgagtcaagctcc

SEQ ID NO: 207254 - DNA, 15 bp, Homo sapiens
aaatgagtcaagctc

SEQ ID NO: 207255 - DNA, 15 bp, Homo sapiens
caaatgagtcaagct

SEQ ID NO: 207256 - DNA, 15 bp, Homo sapiens
gcaaatgagtcaagc

SEQ ID NO: 207257 - DNA, 15 bp, Homo sapiens
agcaaatgagtcaag

SEQ ID NO: 207258 - DNA, 15 bp, Homo sapiens
gagcaaatgagtcaa

SEQ ID NO: 207259 - DNA, 15 bp, Homo sapiens
agagcaaatgagtca

SEQ ID NO: 207260 - DNA, 15 bp, Homo sapiens
gagagcaaatgagtc

SEQ ID NO: 207261 - DNA, 15 bp, Homo sapiens
ggagagcaaatgagt

SEQ ID NO: 207262 - DNA, 15 bp, Homo sapiens
aggagagcaaatgag

SEQ ID NO: 207263 - DNA, 15 bp, Homo sapiens
caggagagcaaatga

SEQ ID NO: 207264 - DNA, 15 bp, Homo sapiens
gcaggagagcaaatg

SEQ ID NO: 207265 - DNA, 15 bp, Homo sapiens
agcaggagagcaaat

SEQ ID NO: 207266 - DNA, 15 bp, Homo sapiens
gagcaggagagcaaa

SEQ ID NO: 207267 - DNA, 15 bp, Homo sapiens
tgagcaggagagcaa

SEQ ID NO: 207268 - DNA, 15 bp, Homo sapiens
ttgagcaggagagca

SEQ ID NO: 207269 - DNA, 15 bp, Homo sapiens
tttgagcaggagagc

SEQ ID NO: 207270 - DNA, 15 bp, Homo sapiens
ctttgagcaggagag

SEQ ID NO: 207271 - DNA, 15 bp, Homo sapiens
actttgagcaggaga

SEQ ID NO: 207272 - DNA, 15 bp, Homo sapiens
gactttgagcaggag

SEQ ID NO: 207273 - DNA, 15 bp, Homo sapiens
cgactttgagcagga

SEQ ID NO: 207274 - DNA, 15 bp, Homo sapiens
gcgactttgagcagg

SEQ ID NO: 207275 - DNA, 15 bp, Homo sapiens
agcgactttgagcag

SEQ ID NO: 207276 - DNA, 15 bp, Homo sapiens
cagcgactttgagca

SEQ ID NO: 207277 - DNA, 15 bp, Homo sapiens
ccagcgactttgagc

SEQ ID NO: 207278 - DNA, 15 bp, Homo sapiens
tccagcgactttgag

SEQ ID NO: 207279 - DNA, 15 bp, Homo sapiens
ctccagcgactttga

SEQ ID NO: 207280 - DNA, 15 bp, Homo sapiens
cctccagcgactttg

SEQ ID NO: 207281 - DNA, 15 bp, Homo sapiens
tcctccagcgacttt

SEQ ID NO: 207282 - DNA, 15 bp, Homo sapiens
ctcctccagcgactt

SEQ ID NO: 207283 - DNA, 15 bp, Homo sapiens
cctcctccagcgact

SEQ ID NO: 207284 - DNA, 15 bp, Homo sapiens
gcctcctccagcgac

SEQ ID NO: 207285 - DNA, 15 bp, Homo sapiens
ggcctcctccagcga

SEQ ID NO: 207286 - DNA, 15 bp, Homo sapiens
tggcctcctccagcg

SEQ ID NO: 207287 - DNA, 15 bp, Homo sapiens
ctggcctcctccagc

SEQ ID NO: 207288 - DNA, 15 bp, Homo sapiens
gctggcctcctccag

SEQ ID NO: 207289 - DNA, 15 bp, Homo sapiens
tgctggcctcctcca

SEQ ID NO: 207290 - DNA, 15 bp, Homo sapiens
gtgctggcctcctcc

SEQ ID NO: 207291 - DNA, 15 bp, Homo sapiens
ggtgctggcctcctc

SEQ ID NO: 207292 - DNA, 15 bp, Homo sapiens
cggtgctggcctcct

SEQ ID NO: 207293 - DNA, 15 bp, Homo sapiens
acggtgctggcctcc

SEQ ID NO: 207294 - DNA, 15 bp, Homo sapiens
cacggtgctggcctc

SEQ ID NO: 207295 - DNA, 15 bp, Homo sapiens
gcacggtgctggcct

SEQ ID NO: 207296 - DNA, 15 bp, Homo sapiens
cgcacggtgctggcc

SEQ ID NO: 207297 - DNA, 15 bp, Homo sapiens
ccgcacggtgctggc

SEQ ID NO: 207298 - DNA, 15 bp, Homo sapiens
gccgcacggtgctgg

SEQ ID NO: 207299 - DNA, 15 bp, Homo sapiens
ggccgcacggtgctg

SEQ ID NO: 207300 - DNA, 15 bp, Homo sapiens
aggccgcacggtgct

SEQ ID NO: 207301 - DNA, 15 bp, Homo sapiens
caggccgcacggtgc

SEQ ID NO: 207302 - DNA, 15 bp, Homo sapiens
ccaggccgcacggtg

SEQ ID NO: 207303 - DNA, 15 bp, Homo sapiens
tccaggccgcacggt

SEQ ID NO: 207304 - DNA, 15 bp, Homo sapiens
ctccaggccgcacgg

SEQ ID NO: 207305 - DNA, 15 bp, Homo sapiens
cctccaggccgcacg

SEQ ID NO: 207306 - DNA, 15 bp, Homo sapiens
tcctccaggccgcac

SEQ ID NO: 207307 - DNA, 15 bp, Homo sapiens
ttcctccaggccgca

SEQ ID NO: 207308 - DNA, 15 bp, Homo sapiens
cttcctccaggccgc

SEQ ID NO: 207309 - DNA, 15 bp, Homo sapiens
acttcctccaggccg

SEQ ID NO: 207310 - DNA, 15 bp, Homo sapiens
tacttcctccaggcc

SEQ ID NO: 207311 - DNA, 15 bp, Homo sapiens
atacttcctccaggc

SEQ ID NO: 207312 - DNA, 15 bp, Homo sapiens
gatacttcctccagg

SEQ ID NO: 207313 - DNA, 15 bp, Homo sapiens
ggatacttcctccag

SEQ ID NO: 207314 - DNA, 15 bp, Homo sapiens
tggatacttcctcca

SEQ ID NO: 207315 - DNA, 15 bp, Homo sapiens
ctggatacttcctcc

SEQ ID NO: 207316 - DNA, 15 bp, Homo sapiens
cctggatacttcctc

SEQ ID NO: 207317 - DNA, 15 bp, Homo sapiens
acctggatacttcct

SEQ ID NO: 207318 - DNA, 15 bp, Homo sapiens
aacctggatacttcc

SEQ ID NO: 207319 - DNA, 15 bp, Homo sapiens
aaacctggatacttc

SEQ ID NO: 207320 - DNA, 15 bp, Homo sapiens
caaacctggatactt

SEQ ID NO: 207321 - DNA, 15 bp, Homo sapiens
ccaaacctggatact

SEQ ID NO: 207322 - DNA, 15 bp, Homo sapiens
cccaaacctggatac

SEQ ID NO: 207323 - DNA, 15 bp, Homo sapiens
ccccaaacctggata

SEQ ID NO: 207324 - DNA, 15 bp, Homo sapiens
cccccaaacctggat

SEQ ID NO: 207325 - DNA, 15 bp, Homo sapiens
acccccaaacctgga

SEQ ID NO: 207326 - DNA, 15 bp, Homo sapiens
tacccccaaacctgg

SEQ ID NO: 207327 - DNA, 15 bp, Homo sapiens
gtacccccaaacctg

SEQ ID NO: 207328 - DNA, 15 bp, Homo sapiens
cgtacccccaaacct

SEQ ID NO: 207329 - DNA, 15 bp, Homo sapiens
ccgtacccccaaacc

SEQ ID NO: 207330 - DNA, 15 bp, Homo sapiens
cccgtacccccaaac

SEQ ID NO: 207331 - DNA, 15 bp, Homo sapiens
acccgtacccccaaa

SEQ ID NO: 207332 - DNA, 15 bp, Homo sapiens
cacccgtacccccaa

SEQ ID NO: 207333 - DNA, 15 bp, Homo sapiens
cattggcctggccgg

SEQ ID NO: 207334 - DNA, 15 bp, Homo sapiens
acattggcctggccg

SEQ ID NO: 207335 - DNA, 15 bp, Homo sapiens
gacattggcctggcc

SEQ ID NO: 207336 - DNA, 15 bp, Homo sapiens
ggacattggcctggc

SEQ ID NO: 207337 - DNA, 15 bp, Homo sapiens
aggacattggcctgg

SEQ ID NO: 207338 - DNA, 15 bp, Homo sapiens
aaggacattggcctg

SEQ ID NO: 207339 - DNA, 15 bp, Homo sapiens
aaaggacattggcct

SEQ ID NO: 207340 - DNA, 15 bp, Homo sapiens
gaaaggacattggcc

SEQ ID NO: 207341 - DNA, 15 bp, Homo sapiens
agaaaggacattggc

SEQ ID NO: 207342 - DNA, 15 bp, Homo sapiens
gagaaaggacattgg

SEQ ID NO: 207343 - DNA, 15 bp, Homo sapiens
agagaaaggacattg

SEQ ID NO: 207344 - DNA, 15 bp, Homo sapiens
cagagaaaggacatt

SEQ ID NO: 207345 - DNA, 15 bp, Homo sapiens
tcagagaaaggacat

SEQ ID NO: 207346 - DNA, 15 bp, Homo sapiens
gtcagagaaaggaca

SEQ ID NO: 207347 - DNA, 15 bp, Homo sapiens
tgtcagagaaaggac

SEQ ID NO: 207348 - DNA, 15 bp, Homo sapiens
gtgtcagagaaagga

SEQ ID NO: 207349 - DNA, 15 bp, Homo sapiens
ggtgtcagagaaagg

SEQ ID NO: 207350 - DNA, 15 bp, Homo sapiens
gggtgtcagagaaag

SEQ ID NO: 207351 - DNA, 15 bp, Homo sapiens
agggtgtcagagaaa

SEQ ID NO: 207352 - DNA, 15 bp, Homo sapiens
tagggtgtcagagaa

SEQ ID NO: 207353 - DNA, 15 bp, Homo sapiens
atagggtgtcagaga

SEQ ID NO: 207354 - DNA, 15 bp, Homo sapiens
aatagggtgtcagag

SEQ ID NO: 207355 - DNA, 15 bp, Homo sapiens
caatagggtgtcaga

SEQ ID NO: 207356 - DNA, 15 bp, Homo sapiens
gcaatagggtgtcag

SEQ ID NO: 207357 - DNA, 15 bp, Homo sapiens
agcaatagggtgtca

SEQ ID NO: 207358 - DNA, 15 bp, Homo sapiens
aagcaatagggtgtc

SEQ ID NO: 207359 - DNA, 15 bp, Homo sapiens
aaagcaatagggtgt

SEQ ID NO: 207360 - DNA, 15 bp, Homo sapiens
aaaagcaatagggtg

SEQ ID NO: 207361 - DNA, 15 bp, Homo sapiens
gaaaagcaatagggt

SEQ ID NO: 207362 - DNA, 15 bp, Homo sapiens
agaaaagcaataggg

SEQ ID NO: 207363 - DNA, 15 bp, Homo sapiens
aagaaaagcaatagg

SEQ ID NO: 207364 - DNA, 15 bp, Homo sapiens
aaagaaaagcaatag

SEQ ID NO: 207365 - DNA, 15 bp, Homo sapiens
gaaagaaaagcaata

SEQ ID NO: 207366 - DNA, 15 bp, Homo sapiens
ggaaagaaaagcaat

SEQ ID NO: 207367 - DNA, 15 bp, Homo sapiens
aggaaagaaaagcaa

SEQ ID NO: 207368 - DNA, 15 bp, Homo sapiens
aaggaaagaaaagca

SEQ ID NO: 207369 - DNA, 15 bp, Homo sapiens
taaggaaagaaaagc

SEQ ID NO: 207370 - DNA, 15 bp, Homo sapiens
gtaaggaaagaaaag

SEQ ID NO: 207371 - DNA, 15 bp, Homo sapiens
tgtaaggaaagaaaa

SEQ ID NO: 207372 - DNA, 15 bp, Homo sapiens
atgtaaggaaagaaa

SEQ ID NO: 207373 - DNA, 15 bp, Homo sapiens
aatgtaaggaaagaa

SEQ ID NO: 207374 - DNA, 15 bp, Homo sapiens
gaatgtaaggaaaga

SEQ ID NO: 207375 - DNA, 15 bp, Homo sapiens
agaatgtaaggaaag

SEQ ID NO: 207376 - DNA, 15 bp, Homo sapiens
gagaatgtaaggaaa

SEQ ID NO: 207377 - DNA, 15 bp, Homo sapiens
agagaatgtaaggaa

SEQ ID NO: 207378 - DNA, 15 bp, Homo sapiens
gagagaatgtaagga

SEQ ID NO: 207379 - DNA, 15 bp, Homo sapiens
tgagagaatgtaagg

SEQ ID NO: 207380 - DNA, 15 bp, Homo sapiens
ctgagagaatgtaag

SEQ ID NO: 207381 - DNA, 15 bp, Homo sapiens
cctgagagaatgtaa

SEQ ID NO: 207382 - DNA, 15 bp, Homo sapiens
ccctgagagaatgta

SEQ ID NO: 207383 - DNA, 15 bp, Homo sapiens
tccctgagagaatgt

SEQ ID NO: 207384 - DNA, 15 bp, Homo sapiens
ctccctgagagaatg

SEQ ID NO: 207385 - DNA, 15 bp, Homo sapiens
actccctgagagaat

SEQ ID NO: 207386 - DNA, 15 bp, Homo sapiens
gactccctgagagaa

SEQ ID NO: 207387 - DNA, 15 bp, Homo sapiens
tgactccctgagaga

SEQ ID NO: 207388 - DNA, 15 bp, Homo sapiens
atgactccctgagag

SEQ ID NO: 207389 - DNA, 15 bp, Homo sapiens
tatgactccctgaga

SEQ ID NO: 207390 - DNA, 15 bp, Homo sapiens
atatgactccctgag

SEQ ID NO: 207391 - DNA, 15 bp, Homo sapiens
tatatgactccctga

SEQ ID NO: 207392 - DNA, 15 bp, Homo sapiens
gtatatgactccctg

SEQ ID NO: 207393 - DNA, 15 bp, Homo sapiens
tgtatatgactccct

SEQ ID NO: 207394 - DNA, 15 bp, Homo sapiens
ttgtatatgactccc

SEQ ID NO: 207395 - DNA, 15 bp, Homo sapiens
attgtatatgactcc

SEQ ID NO: 207396 - DNA, 15 bp, Homo sapiens
cattgtatatgactc

SEQ ID NO: 207397 - DNA, 15 bp, Homo sapiens
tcattgtatatgact

SEQ ID NO: 207398 - DNA, 15 bp, Homo sapiens
gtcattgtatatgac

SEQ ID NO: 207399 - DNA, 15 bp, Homo sapiens
tgtcattgtatatga

SEQ ID NO: 207400 - DNA, 15 bp, Homo sapiens
ctgtcattgtatatg

SEQ ID NO: 207401 - DNA, 15 bp, Homo sapiens
tctgtcattgtatat

SEQ ID NO: 207402 - DNA, 15 bp, Homo sapiens
ctctgtcattgtata

SEQ ID NO: 207403 - DNA, 15 bp, Homo sapiens
tctctgtcattgtat

SEQ ID NO: 207404 - DNA, 15 bp, Homo sapiens
ttctctgtcattgta

SEQ ID NO: 207405 - DNA, 15 bp, Homo sapiens
cttctctgtcattgt

SEQ ID NO: 207406 - DNA, 15 bp, Homo sapiens
acttctctgtcattg

SEQ ID NO: 207407 - DNA, 15 bp, Homo sapiens
gacttctctgtcatt

SEQ ID NO: 207408 - DNA, 15 bp, Homo sapiens
ggacttctctgtcat

SEQ ID NO: 207409 - DNA, 15 bp, Homo sapiens
tggacttctctgtca

SEQ ID NO: 207410 - DNA, 15 bp, Homo sapiens
ctggacttctctgtc

SEQ ID NO: 207411 - DNA, 15 bp, Homo sapiens
cctggacttctctgt

SEQ ID NO: 207412 - DNA, 15 bp, Homo sapiens
ccctggacttctctg

SEQ ID NO: 207413 - DNA, 15 bp, Homo sapiens
gccctggacttctct

SEQ ID NO: 207414 - DNA, 15 bp, Homo sapiens
agccctggacttctc

SEQ ID NO: 207415 - DNA, 15 bp, Homo sapiens
gagccctggacttct

SEQ ID NO: 207416 - DNA, 15 bp, Homo sapiens
agagccctggacttc

SEQ ID NO: 207417 - DNA, 15 bp, Homo sapiens
cagagccctggactt

SEQ ID NO: 207418 - DNA, 15 bp, Homo sapiens
acagagccctggact

SEQ ID NO: 207419 - DNA, 15 bp, Homo sapiens
cacagagccctggac

SEQ ID NO: 207420 - DNA, 15 bp, Homo sapiens
acacagagccctgga

SEQ ID NO: 207421 - DNA, 15 bp, Homo sapiens
aacacagagccctgg

SEQ ID NO: 207422 - DNA, 15 bp, Homo sapiens
caacacagagccctg

SEQ ID NO: 207423 - DNA, 15 bp, Homo sapiens
acaacacagagccct

SEQ ID NO: 207424 - DNA, 15 bp, Homo sapiens
aacaacacagagccc

SEQ ID NO: 207425 - DNA, 15 bp, Homo sapiens
aaacaacacagagcc

SEQ ID NO: 207426 - DNA, 15 bp, Homo sapiens
caaacaacacagagc

SEQ ID NO: 207427 - DNA, 15 bp, Homo sapiens
ccaaacaacacagag

SEQ ID NO: 207428 - DNA, 15 bp, Homo sapiens
gccaaacaacacaga

SEQ ID NO: 207429 - DNA, 15 bp, Homo sapiens
agccaaacaacacag

SEQ ID NO: 207430 - DNA, 15 bp, Homo sapiens
cagccaaacaacaca

SEQ ID NO: 207431 - DNA, 15 bp, Homo sapiens
acagccaaacaacac

SEQ ID NO: 207432 - DNA, 15 bp, Homo sapiens
gacagccaaacaaca

SEQ ID NO: 207433 - DNA, 15 bp, Homo sapiens
ggacagccaaacaac

SEQ ID NO: 207434 - DNA, 15 bp, Homo sapiens
tggacagccaaacaa

SEQ ID NO: 207435 - DNA, 15 bp, Homo sapiens
ctggacagccaaaca

SEQ ID NO: 207436 - DNA, 15 bp, Homo sapiens
actggacagccaaac

SEQ ID NO: 207437 - DNA, 15 bp, Homo sapiens
gactggacagccaaa

SEQ ID NO: 207438 - DNA, 15 bp, Homo sapiens
agactggacagccaa

SEQ ID NO: 207439 - DNA, 15 bp, Homo sapiens
aagactggacagcca

SEQ ID NO: 207440 - DNA, 15 bp, Homo sapiens
aaagactggacagcc

SEQ ID NO: 207441 - DNA, 15 bp, Homo sapiens
caaagactggacagc

SEQ ID NO: 207442 - DNA, 15 bp, Homo sapiens
ccaaagactggacag

SEQ ID NO: 207443 - DNA, 15 bp, Homo sapiens
cccaaagactggaca

SEQ ID NO: 207444 - DNA, 15 bp, Homo sapiens
tcccaaagactggac

SEQ ID NO: 207445 - DNA, 15 bp, Homo sapiens
ctcccaaagactgga

SEQ ID NO: 207446 - DNA, 15 bp, Homo sapiens
tctcccaaagactgg

SEQ ID NO: 207447 - DNA, 15 bp, Homo sapiens
ctctcccaaagactg

SEQ ID NO: 207448 - DNA, 15 bp, Homo sapiens
tctctcccaaagact

SEQ ID NO: 207449 - DNA, 15 bp, Homo sapiens
ctctctcccaaagac

SEQ ID NO: 207450 - DNA, 15 bp, Homo sapiens
tctctctcccaaaga

SEQ ID NO: 207451 - DNA, 15 bp, Homo sapiens
ctctctctcccaaag

SEQ ID NO: 207452 - DNA, 15 bp, Homo sapiens
tctctctctcccaaa

SEQ ID NO: 207453 - DNA, 15 bp, Homo sapiens
ttctctctctcccaa

SEQ ID NO: 207454 - DNA, 15 bp, Homo sapiens
tttctctctctccca

SEQ ID NO: 207455 - DNA, 15 bp, Homo sapiens
ttttctctctctccc

SEQ ID NO: 207456 - DNA, 15 bp, Homo sapiens
tttttctctctctcc

SEQ ID NO: 207457 - DNA, 15 bp, Homo sapiens
ttttttctctctctc

SEQ ID NO: 207458 - DNA, 15 bp, Homo sapiens
tttttttctctctct

SEQ ID NO: 207459 - DNA, 15 bp, Homo sapiens
ttttttttctctctc

SEQ ID NO: 207460 - DNA, 15 bp, Homo sapiens
tttttttttctctct

SEQ ID NO: 207461 - DNA, 15 bp, Homo sapiens
ttttttttttctctc

SEQ ID NO: 207462 - DNA, 15 bp, Homo sapiens
cttttttttttctct

SEQ ID NO: 207463 - DNA, 15 bp, Homo sapiens
tcttttttttttctc

SEQ ID NO: 207464 - DNA, 15 bp, Homo sapiens
attcttttttttttc

SEQ ID NO: 207465 - DNA, 15 bp, Homo sapiens
cattctttttttttt

SEQ ID NO: 207466 - DNA, 15 bp, Homo sapiens
acattcttttttttt

SEQ ID NO: 207467 - DNA, 15 bp, Homo sapiens
cacattctttttttt

SEQ ID NO: 207468 - DNA, 15 bp, Homo sapiens
ccacattcttttttt

SEQ ID NO: 207469 - DNA, 15 bp, Homo sapiens
tccacattctttttt

SEQ ID NO: 207470 - DNA, 15 bp, Homo sapiens
ttccacattcttttt

SEQ ID NO: 207471 - DNA, 15 bp, Homo sapiens
gttccacattctttt

SEQ ID NO: 207472 - DNA, 15 bp, Homo sapiens
ggttccacattcttt

SEQ ID NO: 207473 - DNA, 15 bp, Homo sapiens
aggttccacattctt

SEQ ID NO: 207474 - DNA, 15 bp, Homo sapiens
gaggttccacattct

SEQ ID NO: 207475 - DNA, 15 bp, Homo sapiens
ggaggttccacattc

SEQ ID NO: 207476 - DNA, 15 bp, Homo sapiens
tggaggttccacatt

SEQ ID NO: 207477 - DNA, 15 bp, Homo sapiens
ctggaggttccacat

SEQ ID NO: 207478 - DNA, 15 bp, Homo sapiens
tctggaggttccaca

SEQ ID NO: 207479 - DNA, 15 bp, Homo sapiens
gtctggaggttccac

SEQ ID NO: 207480 - DNA, 15 bp, Homo sapiens
tgtctggaggttcca

SEQ ID NO: 207481 - DNA, 15 bp, Homo sapiens
ctgtctggaggttcc

SEQ ID NO: 207482 - DNA, 15 bp, Homo sapiens
cctgtctggaggttc

SEQ ID NO: 207483 - DNA, 15 bp, Homo sapiens
ccctgtctggaggtt

SEQ ID NO: 207484 - DNA, 15 bp, Homo sapiens
gccctgtctggaggt

SEQ ID NO: 207485 - DNA, 15 bp, Homo sapiens
tgccctgtctggagg

SEQ ID NO: 207486 - DNA, 15 bp, Homo sapiens
gtgccctgtctggag

SEQ ID NO: 207487 - DNA, 15 bp, Homo sapiens
tgtgccctgtctgga

SEQ ID NO: 207488 - DNA, 15 bp, Homo sapiens
gtgtgccctgtctgg

SEQ ID NO: 207489 - DNA, 15 bp, Homo sapiens
ggtgtgccctgtctg

SEQ ID NO: 207490 - DNA, 15 bp, Homo sapiens
gggtgtgccctgtct

SEQ ID NO: 207491 - DNA, 15 bp, Homo sapiens
agggtgtgccctgtc

SEQ ID NO: 207492 - DNA, 15 bp, Homo sapiens
tagggtgtgccctgt

SEQ ID NO: 207493 - DNA, 15 bp, Homo sapiens
gtagggtgtgccctg

SEQ ID NO: 207494 - DNA, 15 bp, Homo sapiens
ggtagggtgtgccct

SEQ ID NO: 207495 - DNA, 15 bp, Homo sapiens
cggtagggtgtgccc

SEQ ID NO: 207496 - DNA, 15 bp, Homo sapiens
gcggtagggtgtgcc

SEQ ID NO: 207497 - DNA, 15 bp, Homo sapiens
cgcggtagggtgtgc

SEQ ID NO: 207498 - DNA, 15 bp, Homo sapiens
gcgcggtagggtgtg

SEQ ID NO: 207499 - DNA, 15 bp, Homo sapiens
ggcgcggtagggtgt

SEQ ID NO: 207500 - DNA, 15 bp, Homo sapiens
gggcgcggtagggtg

SEQ ID NO: 207501 - DNA, 15 bp, Homo sapiens
ggggcgcggtagggt

SEQ ID NO: 207502 - DNA, 15 bp, Homo sapiens
tggggcgcggtaggg

SEQ ID NO: 207503 - DNA, 15 bp, Homo sapiens
atggggcgcggtagg

SEQ ID NO: 207504 - DNA, 15 bp, Homo sapiens
catggggcgcggtag

SEQ ID NO: 207505 - DNA, 15 bp, Homo sapiens
acatggggcgcggta

SEQ ID NO: 207506 - DNA, 15 bp, Homo sapiens
cacatggggcgcggt

SEQ ID NO: 207507 - DNA, 15 bp, Homo sapiens
tcacatggggcgcgg

SEQ ID NO: 207508 - DNA, 15 bp, Homo sapiens
ctcacatggggcgcg

SEQ ID NO: 207509 - DNA, 15 bp, Homo sapiens
actcacatggggcgc

SEQ ID NO: 207510 - DNA, 15 bp, Homo sapiens
aactcacatggggcg

SEQ ID NO: 207511 - DNA, 15 bp, Homo sapiens
aaactcacatggggc

SEQ ID NO: 207512 - DNA, 15 bp, Homo sapiens
gaaactcacatgggg

SEQ ID NO: 207513 - DNA, 15 bp, Homo sapiens
ggaaactcacatggg

SEQ ID NO: 207514 - DNA, 15 bp, Homo sapiens
aggaaactcacatgg

SEQ ID NO: 207515 - DNA, 15 bp, Homo sapiens
caggaaactcacatg

SEQ ID NO: 207516 - DNA, 15 bp, Homo sapiens
tcaggaaactcacat

SEQ ID NO: 207517 - DNA, 15 bp, Homo sapiens
ctcaggaaactcaca

SEQ ID NO: 207518 - DNA, 15 bp, Homo sapiens
cctcaggaaactcac

SEQ ID NO: 207519 - DNA, 15 bp, Homo sapiens
acctcaggaaactca

SEQ ID NO: 207520 - DNA, 15 bp, Homo sapiens
cacctcaggaaactc

SEQ ID NO: 207521 - DNA, 15 bp, Homo sapiens
gcacctcaggaaact

SEQ ID NO: 207522 - DNA, 15 bp, Homo sapiens
agcacctcaggaaac

SEQ ID NO: 207523 - DNA, 15 bp, Homo sapiens
cagcacctcaggaaa

SEQ ID NO: 207524 - DNA, 15 bp, Homo sapiens
acagcacctcaggaa

SEQ ID NO: 207525 - DNA, 15 bp, Homo sapiens
tacagcacctcagga

SEQ ID NO: 207526 - DNA, 15 bp, Homo sapiens
ttacagcacctcagg

SEQ ID NO: 207527 - DNA, 15 bp, Homo sapiens
gttacagcacctcag

SEQ ID NO: 207528 - DNA, 15 bp, Homo sapiens
tgttacagcacctca

SEQ ID NO: 207529 - DNA, 15 bp, Homo sapiens
ttgttacagcacctc

SEQ ID NO: 207530 - DNA, 15 bp, Homo sapiens
tttgttacagcacct

SEQ ID NO: 207531 - DNA, 15 bp, Homo sapiens
ctttgttacagcacc

SEQ ID NO: 207532 - DNA, 15 bp, Homo sapiens
cctttgttacagcac

SEQ ID NO: 207533 - DNA, 15 bp, Homo sapiens
tcctttgttacagca

SEQ ID NO: 207534 - DNA, 15 bp, Homo sapiens
gtcctttgttacagc

SEQ ID NO: 207535 - DNA, 15 bp, Homo sapiens
ggtcctttgttacag

SEQ ID NO: 207536 - DNA, 15 bp, Homo sapiens
tggtcctttgttaca

SEQ ID NO: 207537 - DNA, 15 bp, Homo sapiens
atggtcctttgttac

SEQ ID NO: 207538 - DNA, 15 bp, Homo sapiens
gatggtcctttgtta

SEQ ID NO: 207539 - DNA, 15 bp, Homo sapiens
cgatggtcctttgtt

SEQ ID NO: 207540 - DNA, 15 bp, Homo sapiens
gcgatggtcctttgt

SEQ ID NO: 207541 - DNA, 15 bp, Homo sapiens
ggcgatggtcctttg

SEQ ID NO: 207542 - DNA, 15 bp, Homo sapiens
aggcgatggtccttt

SEQ ID NO: 207543 - DNA, 15 bp, Homo sapiens
caggcgatggtcctt

SEQ ID NO: 207544 - DNA, 15 bp, Homo sapiens
ccaggcgatggtcct

SEQ ID NO: 207545 - DNA, 15 bp, Homo sapiens
cccaggcgatggtcc

SEQ ID NO: 207546 - DNA, 15 bp, Homo sapiens
acccaggcgatggtc

SEQ ID NO: 207547 - DNA, 15 bp, Homo sapiens
cacccaggcgatggt

SEQ ID NO: 207548 - DNA, 15 bp, Homo sapiens
ccacccaggcgatgg

SEQ ID NO: 207549 - DNA, 15 bp, Homo sapiens
gccacccaggcgatg

SEQ ID NO: 207550 - DNA, 15 bp, Homo sapiens
agccacccaggcgat

SEQ ID NO: 207551 - DNA, 15 bp, Homo sapiens
gagccacccaggcga

SEQ ID NO: 207552 - DNA, 15 bp, Homo sapiens
tgagccacccaggcg

SEQ ID NO: 207553 - DNA, 15 bp, Homo sapiens
gtgagccacccaggc

SEQ ID NO: 207554 - DNA, 15 bp, Homo sapiens
tgtgagccacccagg

SEQ ID NO: 207555 - DNA, 15 bp, Homo sapiens
gtgtgagccacccag

SEQ ID NO: 207556 - DNA, 15 bp, Homo sapiens
tgtgtgagccaccca

SEQ ID NO: 207557 - DNA, 15 bp, Homo sapiens
ttgtgtgagccaccc

SEQ ID NO: 207558 - DNA, 15 bp, Homo sapiens
gttgtgtgagccacc

SEQ ID NO: 207559 - DNA, 15 bp, Homo sapiens
ggttgtgtgagccac

SEQ ID NO: 207560 - DNA, 15 bp, Homo sapiens
cggttgtgtgagcca

SEQ ID NO: 207561 - DNA, 15 bp, Homo sapiens
tcggttgtgtgagcc

SEQ ID NO: 207562 - DNA, 15 bp, Homo sapiens
gtcggttgtgtgagc

SEQ ID NO: 207563 - DNA, 15 bp, Homo sapiens
tgtcggttgtgtgag

SEQ ID NO: 207564 - DNA, 15 bp, Homo sapiens
ctgtcggttgtgtga

SEQ ID NO: 207565 - DNA, 15 bp, Homo sapiens
actgtcggttgtgtg

SEQ ID NO: 207566 - DNA, 15 bp, Homo sapiens
aactgtcggttgtgt

SEQ ID NO: 207567 - DNA, 15 bp, Homo sapiens
taactgtcggttgtg

SEQ ID NO: 207568 - DNA, 15 bp, Homo sapiens
gtaactgtcggttgt

SEQ ID NO: 207569 - DNA, 15 bp, Homo sapiens
ggtaactgtcggttg

SEQ ID NO: 207570 - DNA, 15 bp, Homo sapiens
aggtaactgtcggtt

SEQ ID NO: 207571 - DNA, 15 bp, Homo sapiens
aaggtaactgtcggt

SEQ ID NO: 207572 - DNA, 15 bp, Homo sapiens
gaaggtaactgtcgg

SEQ ID NO: 207573 - DNA, 15 bp, Homo sapiens
agaaggtaactgtcg

SEQ ID NO: 207574 - DNA, 15 bp, Homo sapiens
gagaaggtaactgtc

SEQ ID NO: 207575 - DNA, 15 bp, Homo sapiens
tgagaaggtaactgt

SEQ ID NO: 207576 - DNA, 15 bp, Homo sapiens
gtgagaaggtaactg

SEQ ID NO: 207577 - DNA, 15 bp, Homo sapiens
ggtgagaaggtaact

SEQ ID NO: 207578 - DNA, 15 bp, Homo sapiens
gggtgagaaggtaac

SEQ ID NO: 207579 - DNA, 15 bp, Homo sapiens
agggtgagaaggtaa

SEQ ID NO: 207580 - DNA, 15 bp, Homo sapiens
cagggtgagaaggta

SEQ ID NO: 207581 - DNA, 15 bp, Homo sapiens
gcagggtgagaaggt

SEQ ID NO: 207582 - DNA, 15 bp, Homo sapiens
agcagggtgagaagg

SEQ ID NO: 207583 - DNA, 15 bp, Homo sapiens
tagcagggtgagaag

SEQ ID NO: 207584 - DNA, 15 bp, Homo sapiens
ctagcagggtgagaa

SEQ ID NO: 207585 - DNA, 15 bp, Homo sapiens
tctagcagggtgaga

SEQ ID NO: 207586 - DNA, 15 bp, Homo sapiens
ctctagcagggtgag

SEQ ID NO: 207587 - DNA, 15 bp, Homo sapiens
cctctagcagggtga

SEQ ID NO: 207588 - DNA, 15 bp, Homo sapiens
gcctctagcagggtg

SEQ ID NO: 207589 - DNA, 15 bp, Homo sapiens
agcctctagcagggt

SEQ ID NO: 207590 - DNA, 15 bp, Homo sapiens
cagcctctagcaggg

SEQ ID NO: 207591 - DNA, 15 bp, Homo sapiens
acagcctctagcagg

SEQ ID NO: 207592 - DNA, 15 bp, Homo sapiens
tacagcctctagcag

SEQ ID NO: 207593 - DNA, 15 bp, Homo sapiens
ttacagcctctagca

SEQ ID NO: 207594 - DNA, 15 bp, Homo sapiens
cttacagcctctagc

SEQ ID NO: 207595 - DNA, 15 bp, Homo sapiens
acttacagcctctag

SEQ ID NO: 207596 - DNA, 15 bp, Homo sapiens
gacttacagcctcta

SEQ ID NO: 207597 - DNA, 15 bp, Homo sapiens
agacttacagcctct

SEQ ID NO: 207598 - DNA, 15 bp, Homo sapiens
cagacttacagcctc

SEQ ID NO: 207599 - DNA, 15 bp, Homo sapiens
tcagacttacagcct

SEQ ID NO: 207600 - DNA, 15 bp, Homo sapiens
ctcagacttacagcc

SEQ ID NO: 207601 - DNA, 15 bp, Homo sapiens
cctcagacttacagc

SEQ ID NO: 207602 - DNA, 15 bp, Homo sapiens
acctcagacttacag

SEQ ID NO: 207603 - DNA, 15 bp, Homo sapiens
gacctcagacttaca

SEQ ID NO: 207604 - DNA, 15 bp, Homo sapiens
tgacctcagacttac

SEQ ID NO: 207605 - DNA, 15 bp, Homo sapiens
ttgacctcagactta

SEQ ID NO: 207606 - DNA, 15 bp, Homo sapiens
cttgacctcagactt

SEQ ID NO: 207607 - DNA, 15 bp, Homo sapiens
ccttgacctcagact

SEQ ID NO: 207608 - DNA, 15 bp, Homo sapiens
accttgacctcagac

SEQ ID NO: 207609 - DNA, 15 bp, Homo sapiens
caccttgacctcaga

SEQ ID NO: 207610 - DNA, 15 bp, Homo sapiens
gcaccttgacctcag

SEQ ID NO: 207611 - DNA, 15 bp, Homo sapiens
ggcaccttgacctca

SEQ ID NO: 207612 - DNA, 15 bp, Homo sapiens
tggcaccttgacctc

SEQ ID NO: 207613 - DNA, 15 bp, Homo sapiens
ctggcaccttgacct

SEQ ID NO: 207614 - DNA, 15 bp, Homo sapiens
gctggcaccttgacc

SEQ ID NO: 207615 - DNA, 15 bp, Homo sapiens
tgctggcaccttgac

SEQ ID NO: 207616 - DNA, 15 bp, Homo sapiens
ctgctggcaccttga

SEQ ID NO: 207617 - DNA, 15 bp, Homo sapiens
cctgctggcaccttg

SEQ ID NO: 207618 - DNA, 15 bp, Homo sapiens
tcctgctggcacctt

SEQ ID NO: 207619 - DNA, 15 bp, Homo sapiens
atcctgctggcacct

SEQ ID NO: 207620 - DNA, 15 bp, Homo sapiens
aatcctgctggcacc

SEQ ID NO: 207621 - DNA, 15 bp, Homo sapiens
caatcctgctggcac

SEQ ID NO: 207622 - DNA, 15 bp, Homo sapiens
ccaatcctgctggca

SEQ ID NO: 207623 - DNA, 15 bp, Homo sapiens
accaatcctgctggc

SEQ ID NO: 207624 - DNA, 15 bp, Homo sapiens
aaccaatcctgctgg

SEQ ID NO: 207625 - DNA, 15 bp, Homo sapiens
aaaccaatcctgctg

SEQ ID NO: 207626 - DNA, 15 bp, Homo sapiens
gaaaccaatcctgct

SEQ ID NO: 207627 - DNA, 15 bp, Homo sapiens
ggaaaccaatcctgc

SEQ ID NO: 207628 - DNA, 15 bp, Homo sapiens
aggaaaccaatcctg

SEQ ID NO: 207629 - DNA, 15 bp, Homo sapiens
gaggaaaccaatcct

SEQ ID NO: 207630 - DNA, 15 bp, Homo sapiens
ggaggaaaccaatcc

SEQ ID NO: 207631 - DNA, 15 bp, Homo sapiens
cggaggaaaccaatc

SEQ ID NO: 207632 - DNA, 15 bp, Homo sapiens
tcggaggaaaccaat

SEQ ID NO: 207633 - DNA, 15 bp, Homo sapiens
ctcggaggaaaccaa

SEQ ID NO: 207634 - DNA, 15 bp, Homo sapiens
cctcggaggaaacca

SEQ ID NO: 207635 - DNA, 15 bp, Homo sapiens
gcctcggaggaaacc

SEQ ID NO: 207636 - DNA, 15 bp, Homo sapiens
ggcctcggaggaaac

SEQ ID NO: 207637 - DNA, 15 bp, Homo sapiens
aggcctcggaggaaa

SEQ ID NO: 207638 - DNA, 15 bp, Homo sapiens
gaggcctcggaggaa

SEQ ID NO: 207639 - DNA, 15 bp, Homo sapiens
agaggcctcggagga

SEQ ID NO: 207640 - DNA, 15 bp, Homo sapiens
gagaggcctcggagg

SEQ ID NO: 207641 - DNA, 15 bp, Homo sapiens
agagaggcctcggag

SEQ ID NO: 207642 - DNA, 15 bp, Homo sapiens
gagagaggcctcgga

SEQ ID NO: 207643 - DNA, 15 bp, Homo sapiens
ggagagaggcctcgg

SEQ ID NO: 207644 - DNA, 15 bp, Homo sapiens
aggagagaggcctcg

SEQ ID NO: 207645 - DNA, 15 bp, Homo sapiens
aaggagagaggcctc

SEQ ID NO: 207646 - DNA, 15 bp, Homo sapiens
caaggagagaggcct

SEQ ID NO: 207647 - DNA, 15 bp, Homo sapiens
ccaaggagagaggcc

SEQ ID NO: 207648 - DNA, 15 bp, Homo sapiens
gccaaggagagaggc

SEQ ID NO: 207649 - DNA, 15 bp, Homo sapiens
agccaaggagagagg

SEQ ID NO: 207650 - DNA, 15 bp, Homo sapiens
gagccaaggagagag

SEQ ID NO: 207651 - DNA, 15 bp, Homo sapiens
agagccaaggagaga

SEQ ID NO: 207652 - DNA, 15 bp, Homo sapiens
aagagccaaggagag

SEQ ID NO: 207653 - DNA, 15 bp, Homo sapiens
caagagccaaggaga

SEQ ID NO: 207654 - DNA, 15 bp, Homo sapiens
acaagagccaaggag

SEQ ID NO: 207655 - DNA, 15 bp, Homo sapiens
tacaagagccaagga

SEQ ID NO: 207656 - DNA, 15 bp, Homo sapiens
ctacaagagccaagg

SEQ ID NO: 207657 - DNA, 15 bp, Homo sapiens
tctacaagagccaag

SEQ ID NO: 207658 - DNA, 15 bp, Homo sapiens
atctacaagagccaa

SEQ ID NO: 207659 - DNA, 15 bp, Homo sapiens
catctacaagagcca

SEQ ID NO: 207660 - DNA, 15 bp, Homo sapiens
ccatctacaagagcc

SEQ ID NO: 207661 - DNA, 15 bp, Homo sapiens
gccatctacaagagc

SEQ ID NO: 207662 - DNA, 15 bp, Homo sapiens
ggccatctacaagag

SEQ ID NO: 207663 - DNA, 15 bp, Homo sapiens
cggccatctacaaga

SEQ ID NO: 207664 - DNA, 15 bp, Homo sapiens
gcggccatctacaag

SEQ ID NO: 207665 - DNA, 15 bp, Homo sapiens
ggcggccatctacaa

SEQ ID NO: 207666 - DNA, 15 bp, Homo sapiens
aggcggccatctaca

SEQ ID NO: 207667 - DNA, 15 bp, Homo sapiens
aaggcggccatctac

SEQ ID NO: 207668 - DNA, 15 bp, Homo sapiens
caaggcggccatcta

SEQ ID NO: 207669 - DNA, 15 bp, Homo sapiens
acaaggcggccatct

SEQ ID NO: 207670 - DNA, 15 bp, Homo sapiens
aacaaggcggccatc

SEQ ID NO: 207671 - DNA, 15 bp, Homo sapiens
aaacaaggcggccat

SEQ ID NO: 207672 - DNA, 15 bp, Homo sapiens
aaaacaaggcggcca

SEQ ID NO: 207673 - DNA, 15 bp, Homo sapiens
gaaaacaaggcggcc

SEQ ID NO: 207674 - DNA, 15 bp, Homo sapiens
ggaaaacaaggcggc

SEQ ID NO: 207675 - DNA, 15 bp, Homo sapiens
gggaaaacaaggcgg

SEQ ID NO: 207676 - DNA, 15 bp, Homo sapiens
agggaaaacaaggcg

SEQ ID NO: 207677 - DNA, 15 bp, Homo sapiens
cagggaaaacaaggc

SEQ ID NO: 207678 - DNA, 15 bp, Homo sapiens
acagggaaaacaagg

SEQ ID NO: 207679 - DNA, 15 bp, Homo sapiens
tacagggaaaacaag

SEQ ID NO: 207680 - DNA, 15 bp, Homo sapiens
atacagggaaaacaa

SEQ ID NO: 207681 - DNA, 15 bp, Homo sapiens
gatacagggaaaaca

SEQ ID NO: 207682 - DNA, 15 bp, Homo sapiens
agatacagggaaaac

SEQ ID NO: 207683 - DNA, 15 bp, Homo sapiens
aagatacagggaaaa

SEQ ID NO: 207684 - DNA, 15 bp, Homo sapiens
gaagatacagggaaa

SEQ ID NO: 207685 - DNA, 15 bp, Homo sapiens
tgaagatacagggaa

SEQ ID NO: 207686 - DNA, 15 bp, Homo sapiens
gtgaagatacaggga

SEQ ID NO: 207687 - DNA, 15 bp, Homo sapiens
tgtgaagatacaggg

SEQ ID NO: 207688 - DNA, 15 bp, Homo sapiens
atgtgaagatacagg

SEQ ID NO: 207689 - DNA, 15 bp, Homo sapiens
catgtgaagatacag

SEQ ID NO: 207690 - DNA, 15 bp, Homo sapiens
ccatgtgaagataca

SEQ ID NO: 207691 - DNA, 15 bp, Homo sapiens
accatgtgaagatac

SEQ ID NO: 207692 - DNA, 15 bp, Homo sapiens
gaccatgtgaagata

SEQ ID NO: 207693 - DNA, 15 bp, Homo sapiens
agaccatgtgaagat

SEQ ID NO: 207694 - DNA, 15 bp, Homo sapiens
aagaccatgtgaaga

SEQ ID NO: 207695 - DNA, 15 bp, Homo sapiens
aaagaccatgtgaag

SEQ ID NO: 207696 - DNA, 15 bp, Homo sapiens
aaaagaccatgtgaa

SEQ ID NO: 207697 - DNA, 15 bp, Homo sapiens
aaaaagaccatgtga

SEQ ID NO: 207698 - DNA, 15 bp, Homo sapiens
aaaaaagaccatgtg

SEQ ID NO: 207699 - DNA, 15 bp, Homo sapiens
gaaaaaagaccatgt

SEQ ID NO: 207700 - DNA, 15 bp, Homo sapiens
agaaaaaagaccatg

SEQ ID NO: 207701 - DNA, 15 bp, Homo sapiens
cagaaaaaagaccat

SEQ ID NO: 207702 - DNA, 15 bp, Homo sapiens
acagaaaaaagacca

SEQ ID NO: 207703 - DNA, 15 bp, Homo sapiens
gacagaaaaaagacc

SEQ ID NO: 207704 - DNA, 15 bp, Homo sapiens
ggacagaaaaaagac

SEQ ID NO: 207705 - DNA, 15 bp, Homo sapiens
tggacagaaaaaaga

SEQ ID NO: 207706 - DNA, 15 bp, Homo sapiens
atggacagaaaaaag

SEQ ID NO: 207707 - DNA, 15 bp, Homo sapiens
catggacagaaaaaa

SEQ ID NO: 207708 - DNA, 15 bp, Homo sapiens
acatggacagaaaaa

SEQ ID NO: 207709 - DNA, 15 bp, Homo sapiens
gacatggacagaaaa

SEQ ID NO: 207710 - DNA, 15 bp, Homo sapiens
ggacatggacagaaa

SEQ ID NO: 207711 - DNA, 15 bp, Homo sapiens
aggacatggacagaa

SEQ ID NO: 207712 - DNA, 15 bp, Homo sapiens
taggacatggacaga

SEQ ID NO: 207713 - DNA, 15 bp, Homo sapiens
ttaggacatggacag

SEQ ID NO: 207714 - DNA, 15 bp, Homo sapiens
attaggacatggaca

SEQ ID NO: 207715 - DNA, 15 bp, Homo sapiens
gattaggacatggac

SEQ ID NO: 207716 - DNA, 15 bp, Homo sapiens
agattaggacatgga

SEQ ID NO: 207717 - DNA, 15 bp, Homo sapiens
gagattaggacatgg

SEQ ID NO: 207718 - DNA, 15 bp, Homo sapiens
ggagattaggacatg

SEQ ID NO: 207719 - DNA, 15 bp, Homo sapiens
aggagattaggacat

SEQ ID NO: 207720 - DNA, 15 bp, Homo sapiens
caggagattaggaca

SEQ ID NO: 207721 - DNA, 15 bp, Homo sapiens
acaggagattaggac

SEQ ID NO: 207722 - DNA, 15 bp, Homo sapiens
aacaggagattagga

SEQ ID NO: 207723 - DNA, 15 bp, Homo sapiens
gaacaggagattagg

SEQ ID NO: 207724 - DNA, 15 bp, Homo sapiens
agaacaggagattag

SEQ ID NO: 207725 - DNA, 15 bp, Homo sapiens
aagaacaggagatta

SEQ ID NO: 207726 - DNA, 15 bp, Homo sapiens
taagaacaggagatt

SEQ ID NO: 207727 - DNA, 15 bp, Homo sapiens
ataagaacaggagat

SEQ ID NO: 207728 - DNA, 15 bp, Homo sapiens
tataagaacaggaga

SEQ ID NO: 207729 - DNA, 15 bp, Homo sapiens
ttataagaacaggag

SEQ ID NO: 207730 - DNA, 15 bp, Homo sapiens
tttataagaacagga

SEQ ID NO: 207731 - DNA, 15 bp, Homo sapiens
ctttataagaacagg

SEQ ID NO: 207732 - DNA, 15 bp, Homo sapiens
tctttataagaacag

SEQ ID NO: 207733 - DNA, 15 bp, Homo sapiens
gtctttataagaaca

SEQ ID NO: 207734 - DNA, 15 bp, Homo sapiens
tgtctttataagaac

SEQ ID NO: 207735 - DNA, 15 bp, Homo sapiens
atgtctttataagaa

SEQ ID NO: 207736 - DNA, 15 bp, Homo sapiens
gatgtctttataaga

SEQ ID NO: 207737 - DNA, 15 bp, Homo sapiens
tgatgtctttataag

SEQ ID NO: 207738 - DNA, 15 bp, Homo sapiens
ctgatgtctttataa

SEQ ID NO: 207739 - DNA, 15 bp, Homo sapiens
actgatgtctttata

SEQ ID NO: 207740 - DNA, 15 bp, Homo sapiens
gactgatgtctttat

SEQ ID NO: 207741 - DNA, 15 bp, Homo sapiens
ggactgatgtcttta

SEQ ID NO: 207742 - DNA, 15 bp, Homo sapiens
aggactgatgtcttt

SEQ ID NO: 207743 - DNA, 15 bp, Homo sapiens
caggactgatgtctt

SEQ ID NO: 207744 - DNA, 15 bp, Homo sapiens
acaggactgatgtct

SEQ ID NO: 207745 - DNA, 15 bp, Homo sapiens
aacaggactgatgtc

SEQ ID NO: 207746 - DNA, 15 bp, Homo sapiens
caacaggactgatgt

SEQ ID NO: 207747 - DNA, 15 bp, Homo sapiens
ccaacaggactgatg

SEQ ID NO: 207748 - DNA, 15 bp, Homo sapiens
tccaacaggactgat

SEQ ID NO: 207749 - DNA, 15 bp, Homo sapiens
atccaacaggactga

SEQ ID NO: 207750 - DNA, 15 bp, Homo sapiens
catccaacaggactg

SEQ ID NO: 207751 - DNA, 15 bp, Homo sapiens
tcatccaacaggact

SEQ ID NO: 207752 - DNA, 15 bp, Homo sapiens
ttcatccaacaggac

SEQ ID NO: 207753 - DNA, 15 bp, Homo sapiens
cttcatccaacagga

SEQ ID NO: 207754 - DNA, 15 bp, Homo sapiens
ccttcatccaacagg

SEQ ID NO: 207755 - DNA, 15 bp, Homo sapiens
gccttcatccaacag

SEQ ID NO: 207756 - DNA, 15 bp, Homo sapiens
ggccttcatccaaca

SEQ ID NO: 207757 - DNA, 15 bp, Homo sapiens
gggccttcatccaac

SEQ ID NO: 207758 - DNA, 15 bp, Homo sapiens
tgggccttcatccaa

SEQ ID NO: 207759 - DNA, 15 bp, Homo sapiens
gtgggccttcatcca

SEQ ID NO: 207760 - DNA, 15 bp, Homo sapiens
ggtgggccttcatcc

SEQ ID NO: 207761 - DNA, 15 bp, Homo sapiens
gggtgggccttcatc

SEQ ID NO: 207762 - DNA, 15 bp, Homo sapiens
agggtgggccttcat

SEQ ID NO: 207763 - DNA, 15 bp, Homo sapiens
tagggtgggccttca

SEQ ID NO: 207764 - DNA, 15 bp, Homo sapiens
ttagggtgggccttc

SEQ ID NO: 207765 - DNA, 15 bp, Homo sapiens
attagggtgggcctt

SEQ ID NO: 207766 - DNA, 15 bp, Homo sapiens
cattagggtgggcct

SEQ ID NO: 207767 - DNA, 15 bp, Homo sapiens
taaatgaggtcatta

SEQ ID NO: 207768 - DNA, 15 bp, Homo sapiens
ttaaatgaggtcatt

SEQ ID NO: 207769 - DNA, 15 bp, Homo sapiens
gttaaatgaggtcat

SEQ ID NO: 207770 - DNA, 15 bp, Homo sapiens
ggttaaatgaggtca

SEQ ID NO: 207771 - DNA, 15 bp, Homo sapiens
tggttaaatgaggtc

SEQ ID NO: 207772 - DNA, 15 bp, Homo sapiens
atggttaaatgaggt

SEQ ID NO: 207773 - DNA, 15 bp, Homo sapiens
tatggttaaatgagg

SEQ ID NO: 207774 - DNA, 15 bp, Homo sapiens
ttatggttaaatgag

SEQ ID NO: 207775 - DNA, 15 bp, Homo sapiens
attatggttaaatga

SEQ ID NO: 207776 - DNA, 15 bp, Homo sapiens
gattatggttaaatg

SEQ ID NO: 207777 - DNA, 15 bp, Homo sapiens
tgattatggttaaat

SEQ ID NO: 207778 - DNA, 15 bp, Homo sapiens
gtgattatggttaaa

SEQ ID NO: 207779 - DNA, 15 bp, Homo sapiens
ggtgattatggttaa

SEQ ID NO: 207780 - DNA, 15 bp, Homo sapiens
aggtgattatggtta

SEQ ID NO: 207781 - DNA, 15 bp, Homo sapiens
caggtgattatggtt

SEQ ID NO: 207782 - DNA, 15 bp, Homo sapiens
acaggtgattatggt

SEQ ID NO: 207783 - DNA, 15 bp, Homo sapiens
aacaggtgattatgg

SEQ ID NO: 207784 - DNA, 15 bp, Homo sapiens
gaacaggtgattatg

SEQ ID NO: 207785 - DNA, 15 bp, Homo sapiens
tgaacaggtgattat

SEQ ID NO: 207786 - DNA, 15 bp, Homo sapiens
ttgaacaggtgatta

SEQ ID NO: 207787 - DNA, 15 bp, Homo sapiens
tttgaacaggtgatt

SEQ ID NO: 207788 - DNA, 15 bp, Homo sapiens
ctttgaacaggtgat

SEQ ID NO: 207789 - DNA, 15 bp, Homo sapiens
tctttgaacaggtga

SEQ ID NO: 207790 - DNA, 15 bp, Homo sapiens
gtctttgaacaggtg

SEQ ID NO: 207791 - DNA, 15 bp, Homo sapiens
ggtctttgaacaggt

SEQ ID NO: 207792 - DNA, 15 bp, Homo sapiens
gggtctttgaacagg

SEQ ID NO: 207793 - DNA, 15 bp, Homo sapiens
agggtctttgaacag

SEQ ID NO: 207794 - DNA, 15 bp, Homo sapiens
cagggtctttgaaca

SEQ ID NO: 207795 - DNA, 15 bp, Homo sapiens
acagggtctttgaac

SEQ ID NO: 207796 - DNA, 15 bp, Homo sapiens
gacagggtctttgaa

SEQ ID NO: 207797 - DNA, 15 bp, Homo sapiens
tgacagggtctttga

SEQ ID NO: 207798 - DNA, 15 bp, Homo sapiens
gtgacagggtctttg

SEQ ID NO: 207799 - DNA, 15 bp, Homo sapiens
ggtgacagggtcttt

SEQ ID NO: 207800 - DNA, 15 bp, Homo sapiens
tggtgacagggtctt

SEQ ID NO: 207801 - DNA, 15 bp, Homo sapiens
ttggtgacagggtct

SEQ ID NO: 207802 - DNA, 15 bp, Homo sapiens
cttggtgacagggtc

SEQ ID NO: 207803 - DNA, 15 bp, Homo sapiens
acttggtgacagggt

SEQ ID NO: 207804 - DNA, 15 bp, Homo sapiens
tacttggtgacaggg

SEQ ID NO: 207805 - DNA, 15 bp, Homo sapiens
gtacttggtgacagg

SEQ ID NO: 207806 - DNA, 15 bp, Homo sapiens
tgtacttggtgacag

SEQ ID NO: 207807 - DNA, 15 bp, Homo sapiens
ctgtacttggtgaca

SEQ ID NO: 207808 - DNA, 15 bp, Homo sapiens
gctgtacttggtgac

SEQ ID NO: 207809 - DNA, 15 bp, Homo sapiens
ggctgtacttggtga

SEQ ID NO: 207810 - DNA, 15 bp, Homo sapiens
tggctgtacttggtg

SEQ ID NO: 207811 - DNA, 15 bp, Homo sapiens
gtggctgtacttggt

SEQ ID NO: 207812 - DNA, 15 bp, Homo sapiens
tgtggctgtacttgg

SEQ ID NO: 207813 - DNA, 15 bp, Homo sapiens
atgtggctgtacttg

SEQ ID NO: 207814 - DNA, 15 bp, Homo sapiens
aatgtggctgtactt

SEQ ID NO: 207815 - DNA, 15 bp, Homo sapiens
gaatgtggctgtact

SEQ ID NO: 207816 - DNA, 15 bp, Homo sapiens
agaatgtggctgtac

SEQ ID NO: 207817 - DNA, 15 bp, Homo sapiens
cagaatgtggctgta

SEQ ID NO: 207818 - DNA, 15 bp, Homo sapiens
tcagaatgtggctgt

SEQ ID NO: 207819 - DNA, 15 bp, Homo sapiens
ctcagaatgtggctg

SEQ ID NO: 207820 - DNA, 15 bp, Homo sapiens
cctcagaatgtggct

SEQ ID NO: 207821 - DNA, 15 bp, Homo sapiens
acctcagaatgtggc

SEQ ID NO: 207822 - DNA, 15 bp, Homo sapiens
gacctcagaatgtgg

SEQ ID NO: 207823 - DNA, 15 bp, Homo sapiens
ggacctcagaatgtg

SEQ ID NO: 207824 - DNA, 15 bp, Homo sapiens
aggacctcagaatgt

SEQ ID NO: 207825 - DNA, 15 bp, Homo sapiens
caggacctcagaatg

SEQ ID NO: 207826 - DNA, 15 bp, Homo sapiens
ccaggacctcagaat

SEQ ID NO: 207827 - DNA, 15 bp, Homo sapiens
cccaggacctcagaa

SEQ ID NO: 207828 - DNA, 15 bp, Homo sapiens
ccccaggacctcaga

SEQ ID NO: 207829 - DNA, 15 bp, Homo sapiens
tccccaggacctcag

SEQ ID NO: 207830 - DNA, 15 bp, Homo sapiens
atccccaggacctca

SEQ ID NO: 207831 - DNA, 15 bp, Homo sapiens
aatccccaggacctc

SEQ ID NO: 207832 - DNA, 15 bp, Homo sapiens
taatccccaggacct

SEQ ID NO: 207833 - DNA, 15 bp, Homo sapiens
ctaatccccaggacc

SEQ ID NO: 207834 - DNA, 15 bp, Homo sapiens
cctaatccccaggac

SEQ ID NO: 207835 - DNA, 15 bp, Homo sapiens
tcctaatccccagga

SEQ ID NO: 207836 - DNA, 15 bp, Homo sapiens
atcctaatccccagg

SEQ ID NO: 207837 - DNA, 15 bp, Homo sapiens
tatcctaatccccag

SEQ ID NO: 207838 - DNA, 15 bp, Homo sapiens
atatcctaatcccca

SEQ ID NO: 207839 - DNA, 15 bp, Homo sapiens
catatcctaatcccc

SEQ ID NO: 207840 - DNA, 15 bp, Homo sapiens
tcatatcctaatccc

SEQ ID NO: 207841 - DNA, 15 bp, Homo sapiens
ttcatatcctaatcc

SEQ ID NO: 207842 - DNA, 15 bp, Homo sapiens
gttcatatcctaatc

SEQ ID NO: 207843 - DNA, 15 bp, Homo sapiens
tgttcatatcctaat

SEQ ID NO: 207844 - DNA, 15 bp, Homo sapiens
atgttcatatcctaa

SEQ ID NO: 207845 - DNA, 15 bp, Homo sapiens
catgttcatatccta

SEQ ID NO: 207846 - DNA, 15 bp, Homo sapiens
acatgttcatatcct

SEQ ID NO: 207847 - DNA, 15 bp, Homo sapiens
cacatgttcatatcc

SEQ ID NO: 207848 - DNA, 15 bp, Homo sapiens
ccacatgttcatatc

SEQ ID NO: 207849 - DNA, 15 bp, Homo sapiens
tccacatgttcatat

SEQ ID NO: 207850 - DNA, 15 bp, Homo sapiens
atccacatgttcata

SEQ ID NO: 207851 - DNA, 15 bp, Homo sapiens
aatccacatgttcat

SEQ ID NO: 207852 - DNA, 15 bp, Homo sapiens
aaatccacatgttca

SEQ ID NO: 207853 - DNA, 15 bp, Homo sapiens
caaatccacatgttc

SEQ ID NO: 207854 - DNA, 15 bp, Homo sapiens
gcaaatccacatgtt

SEQ ID NO: 207855 - DNA, 15 bp, Homo sapiens
tgcaaatccacatgt

SEQ ID NO: 207856 - DNA, 15 bp, Homo sapiens
ctgcaaatccacatg

SEQ ID NO: 207857 - DNA, 15 bp, Homo sapiens
cctgcaaatccacat

SEQ ID NO: 207858 - DNA, 15 bp, Homo sapiens
ccctgcaaatccaca

SEQ ID NO: 207859 - DNA, 15 bp, Homo sapiens
tccctgcaaatccac

SEQ ID NO: 207860 - DNA, 15 bp, Homo sapiens
ttccctgcaaatcca

SEQ ID NO: 207861 - DNA, 15 bp, Homo sapiens
gttccctgcaaatcc

SEQ ID NO: 207862 - DNA, 15 bp, Homo sapiens
ggttccctgcaaatc

SEQ ID NO: 207863 - DNA, 15 bp, Homo sapiens
tggttccctgcaaat

SEQ ID NO: 207864 - DNA, 15 bp, Homo sapiens
ttggttccctgcaaa

SEQ ID NO: 207865 - DNA, 15 bp, Homo sapiens
attggttccctgcaa

SEQ ID NO: 207866 - DNA, 15 bp, Homo sapiens
aattggttccctgca

SEQ ID NO: 207867 - DNA, 15 bp, Homo sapiens
gaattggttccctgc

SEQ ID NO: 207868 - DNA, 15 bp, Homo sapiens
tgaattggttccctg

SEQ ID NO: 207869 - DNA, 15 bp, Homo sapiens
ctgaattggttccct

SEQ ID NO: 207870 - DNA, 15 bp, Homo sapiens
actgaattggttccc

SEQ ID NO: 207871 - DNA, 15 bp, Homo sapiens
gactgaattggttcc

SEQ ID NO: 207872 - DNA, 15 bp, Homo sapiens
ggactgaattggttc

SEQ ID NO: 207873 - DNA, 15 bp, Homo sapiens
cggactgaattggtt

SEQ ID NO: 207874 - DNA, 15 bp, Homo sapiens
acggactgaattggt

SEQ ID NO: 207875 - DNA, 15 bp, Homo sapiens
tacggactgaattgg

SEQ ID NO: 207876 - DNA, 15 bp, Homo sapiens
ttacggactgaattg

SEQ ID NO: 207877 - DNA, 15 bp, Homo sapiens
gttacggactgaatt

SEQ ID NO: 207878 - DNA, 15 bp, Homo sapiens
tgttacggactgaat

SEQ ID NO: 207879 - DNA, 15 bp, Homo sapiens
gtgttacggactgaa

SEQ ID NO: 207880 - DNA, 15 bp, Homo sapiens
agtgttacggactga

SEQ ID NO: 207881 - DNA, 15 bp, Homo sapiens
gagtgttacggactg

SEQ ID NO: 207882 - DNA, 15 bp, Homo sapiens
agagtgttacggact

SEQ ID NO: 207883 - DNA, 15 bp, Homo sapiens
gagagtgttacggac

SEQ ID NO: 207884 - DNA, 15 bp, Homo sapiens
agagagtgttacgga

SEQ ID NO: 207885 - DNA, 15 bp, Homo sapiens
gagagagtgttacgg

SEQ ID NO: 207886 - DNA, 15 bp, Homo sapiens
agagagagtgttacg

SEQ ID NO: 207887 - DNA, 15 bp, Homo sapiens
gagagagagtgttac

SEQ ID NO: 207888 - DNA, 15 bp, Homo sapiens
tgagagagagtgtta

SEQ ID NO: 207889 - DNA, 15 bp, Homo sapiens
gtgagagagagtgtt

SEQ ID NO: 207890 - DNA, 15 bp, Homo sapiens
tgtgagagagagtgt

SEQ ID NO: 207891 - DNA, 15 bp, Homo sapiens
atgtgagagagagtg

SEQ ID NO: 207892 - DNA, 15 bp, Homo sapiens
gatgtgagagagagt

SEQ ID NO: 207893 - DNA, 15 bp, Homo sapiens
tgatgtgagagagag

SEQ ID NO: 207894 - DNA, 15 bp, Homo sapiens
atgatgtgagagaga

SEQ ID NO: 207895 - DNA, 15 bp, Homo sapiens
catgatgtgagagag

SEQ ID NO: 207896 - DNA, 15 bp, Homo sapiens
gcatgatgtgagaga

SEQ ID NO: 207897 - DNA, 15 bp, Homo sapiens
ggcatgatgtgagag

SEQ ID NO: 207898 - DNA, 15 bp, Homo sapiens
cggcatgatgtgaga

SEQ ID NO: 207899 - DNA, 15 bp, Homo sapiens
acggcatgatgtgag

SEQ ID NO: 207900 - DNA, 15 bp, Homo sapiens
cacggcatgatgtga

SEQ ID NO: 207901 - DNA, 15 bp, Homo sapiens
acacggcatgatgtg

SEQ ID NO: 207902 - DNA, 15 bp, Homo sapiens
cacacggcatgatgt

SEQ ID NO: 207903 - DNA, 15 bp, Homo sapiens
acacacggcatgatg

SEQ ID NO: 207904 - DNA, 15 bp, Homo sapiens
cacacacggcatgat

SEQ ID NO: 207905 - DNA, 15 bp, Homo sapiens
tcacacacggcatga

SEQ ID NO: 207906 - DNA, 15 bp, Homo sapiens
atcacacacggcatg

SEQ ID NO: 207907 - DNA, 15 bp, Homo sapiens
aatcacacacggcat

SEQ ID NO: 207908 - DNA, 15 bp, Homo sapiens
aaatcacacacggca

SEQ ID NO: 207909 - DNA, 15 bp, Homo sapiens
taaatcacacacggc

SEQ ID NO: 207910 - DNA, 15 bp, Homo sapiens
gtaaatcacacacgg

SEQ ID NO: 207911 - DNA, 15 bp, Homo sapiens
tgtaaatcacacacg

SEQ ID NO: 207912 - DNA, 15 bp, Homo sapiens
atgtaaatcacacac

SEQ ID NO: 207913 - DNA, 15 bp, Homo sapiens
catgtaaatcacaca

SEQ ID NO: 207914 - DNA, 15 bp, Homo sapiens
acatgtaaatcacac

SEQ ID NO: 207915 - DNA, 15 bp, Homo sapiens
gacatgtaaatcaca

SEQ ID NO: 207916 - DNA, 15 bp, Homo sapiens
agacatgtaaatcac

SEQ ID NO: 207917 - DNA, 15 bp, Homo sapiens
aagacatgtaaatca

SEQ ID NO: 207918 - DNA, 15 bp, Homo sapiens
aaagacatgtaaatc

SEQ ID NO: 207919 - DNA, 15 bp, Homo sapiens
caaagacatgtaaat

SEQ ID NO: 207920 - DNA, 15 bp, Homo sapiens
gcaaagacatgtaaa

SEQ ID NO: 207921 - DNA, 15 bp, Homo sapiens
agcaaagacatgtaa

SEQ ID NO: 207922 - DNA, 15 bp, Homo sapiens
cagcaaagacatgta

SEQ ID NO: 207923 - DNA, 15 bp, Homo sapiens
acagcaaagacatgt

SEQ ID NO: 207924 - DNA, 15 bp, Homo sapiens
cacagcaaagacatg

SEQ ID NO: 207925 - DNA, 15 bp, Homo sapiens
acacagcaaagacat

SEQ ID NO: 207926 - DNA, 15 bp, Homo sapiens
cacacagcaaagaca

SEQ ID NO: 207927 - DNA, 15 bp, Homo sapiens
acacacagcaaagac

SEQ ID NO: 207928 - DNA, 15 bp, Homo sapiens
gacacacagcaaaga

SEQ ID NO: 207929 - DNA, 15 bp, Homo sapiens
agacacacagcaaag

SEQ ID NO: 207930 - DNA, 15 bp, Homo sapiens
cagacacacagcaaa

SEQ ID NO: 207931 - DNA, 15 bp, Homo sapiens
ccagacacacagcaa

SEQ ID NO: 207932 - DNA, 15 bp, Homo sapiens
gccagacacacagca

SEQ ID NO: 207933 - DNA, 15 bp, Homo sapiens
agccagacacacagc

SEQ ID NO: 207934 - DNA, 15 bp, Homo sapiens
gagccagacacacag

SEQ ID NO: 207935 - DNA, 15 bp, Homo sapiens
agagccagacacaca

SEQ ID NO: 207936 - DNA, 15 bp, Homo sapiens
aagagccagacacac

SEQ ID NO: 207937 - DNA, 15 bp, Homo sapiens
caagagccagacaca

SEQ ID NO: 207938 - DNA, 15 bp, Homo sapiens
acaagagccagacac

SEQ ID NO: 207939 - DNA, 15 bp, Homo sapiens
tacaagagccagaca

SEQ ID NO: 207940 - DNA, 15 bp, Homo sapiens
ctacaagagccagac

SEQ ID NO: 207941 - DNA, 15 bp, Homo sapiens
tctacaagagccaga

SEQ ID NO: 207942 - DNA, 15 bp, Homo sapiens
gtctacaagagccag

SEQ ID NO: 207943 - DNA, 15 bp, Homo sapiens
agtctacaagagcca

SEQ ID NO: 207944 - DNA, 15 bp, Homo sapiens
aagtctacaagagcc

SEQ ID NO: 207945 - DNA, 15 bp, Homo sapiens
aaagtctacaagagc

SEQ ID NO: 207946 - DNA, 15 bp, Homo sapiens
caaagtctacaagag

SEQ ID NO: 207947 - DNA, 15 bp, Homo sapiens
gcaaagtctacaaga

SEQ ID NO: 207948 - DNA, 15 bp, Homo sapiens
cgcaaagtctacaag

SEQ ID NO: 207949 - DNA, 15 bp, Homo sapiens
acgcaaagtctacaa

SEQ ID NO: 207950 - DNA, 15 bp, Homo sapiens
aacgcaaagtctaca

SEQ ID NO: 207951 - DNA, 15 bp, Homo sapiens
aaacgcaaagtctac

SEQ ID NO: 207952 - DNA, 15 bp, Homo sapiens
aaaacgcaaagtcta

SEQ ID NO: 207953 - DNA, 15 bp, Homo sapiens
gaaaacgcaaagtct

SEQ ID NO: 207954 - DNA, 15 bp, Homo sapiens
tgaaaacgcaaagtc

SEQ ID NO: 207955 - DNA, 15 bp, Homo sapiens
gtgaaaacgcaaagt

SEQ ID NO: 207956 - DNA, 15 bp, Homo sapiens
ggtgaaaacgcaaag

SEQ ID NO: 207957 - DNA, 15 bp, Homo sapiens
gggtgaaaacgcaaa

SEQ ID NO: 207958 - DNA, 15 bp, Homo sapiens
ggggtgaaaacgcaa

SEQ ID NO: 207959 - DNA, 15 bp, Homo sapiens
aggggtgaaaacgca

SEQ ID NO: 207960 - DNA, 15 bp, Homo sapiens
caggggtgaaaacgc

SEQ ID NO: 207961 - DNA, 15 bp, Homo sapiens
acaggggtgaaaacg

SEQ ID NO: 207962 - DNA, 15 bp, Homo sapiens
gacaggggtgaaaac

SEQ ID NO: 207963 - DNA, 15 bp, Homo sapiens
agacaggggtgaaaa

SEQ ID NO: 207964 - DNA, 15 bp, Homo sapiens
aagacaggggtgaaa

SEQ ID NO: 207965 - DNA, 15 bp, Homo sapiens
gaagacaggggtgaa

SEQ ID NO: 207966 - DNA, 15 bp, Homo sapiens
ggaagacaggggtga

SEQ ID NO: 207967 - DNA, 15 bp, Homo sapiens
aggaagacaggggtg

SEQ ID NO: 207968 - DNA, 15 bp, Homo sapiens
caggaagacaggggt

SEQ ID NO: 207969 - DNA, 15 bp, Homo sapiens
acaggaagacagggg

SEQ ID NO: 207970 - DNA, 15 bp, Homo sapiens
aacaggaagacaggg

SEQ ID NO: 207971 - DNA, 15 bp, Homo sapiens
caacaggaagacagg

SEQ ID NO: 207972 - DNA, 15 bp, Homo sapiens
ccaacaggaagacag

SEQ ID NO: 207973 - DNA, 15 bp, Homo sapiens
tccaacaggaagaca

SEQ ID NO: 207974 - DNA, 15 bp, Homo sapiens
ttccaacaggaagac

SEQ ID NO: 207975 - DNA, 15 bp, Homo sapiens
cttccaacaggaaga

SEQ ID NO: 207976 - DNA, 15 bp, Homo sapiens
acttccaacaggaag

SEQ ID NO: 207977 - DNA, 15 bp, Homo sapiens
gacttccaacaggaa

SEQ ID NO: 207978 - DNA, 15 bp, Homo sapiens
agacttccaacagga

SEQ ID NO: 207979 - DNA, 15 bp, Homo sapiens
aagacttccaacagg

SEQ ID NO: 207980 - DNA, 15 bp, Homo sapiens
caagacttccaacag

SEQ ID NO: 207981 - DNA, 15 bp, Homo sapiens
ccaagacttccaaca

SEQ ID NO: 207982 - DNA, 15 bp, Homo sapiens
accaagacttccaac

SEQ ID NO: 207983 - DNA, 15 bp, Homo sapiens
caccaagacttccaa

SEQ ID NO: 207984 - DNA, 15 bp, Homo sapiens
tcaccaagacttcca

SEQ ID NO: 207985 - DNA, 15 bp, Homo sapiens
ttcaccaagacttcc

SEQ ID NO: 207986 - DNA, 15 bp, Homo sapiens
attcaccaagacttc

SEQ ID NO: 207987 - DNA, 15 bp, Homo sapiens
cattcaccaagactt

SEQ ID NO: 207988 - DNA, 15 bp, Homo sapiens
tcattcaccaagact

SEQ ID NO: 207989 - DNA, 15 bp, Homo sapiens
atcattcaccaagac

SEQ ID NO: 207990 - DNA, 15 bp, Homo sapiens
gatcattcaccaaga

SEQ ID NO: 207991 - DNA, 15 bp, Homo sapiens
tgatcattcaccaag

SEQ ID NO: 207992 - DNA, 15 bp, Homo sapiens
ttgatcattcaccaa

SEQ ID NO: 207993 - DNA, 15 bp, Homo sapiens
cttgatcattcacca

SEQ ID NO: 207994 - DNA, 15 bp, Homo sapiens
ccttgatcattcacc

SEQ ID NO: 207995 - DNA, 15 bp, Homo sapiens
cccttgatcattcac

SEQ ID NO: 207996 - DNA, 15 bp, Homo sapiens
tcccttgatcattca

SEQ ID NO: 207997 - DNA, 15 bp, Homo sapiens
ctcccttgatcattc

SEQ ID NO: 207998 - DNA, 15 bp, Homo sapiens
tctcccttgatcatt

SEQ ID NO: 207999 - DNA, 15 bp, Homo sapiens
ttctcccttgatcat

SEQ ID NO: 208000 - DNA, 15 bp, Homo sapiens
attctcccttgatca

SEQ ID NO: 208001 - DNA, 15 bp, Homo sapiens
cattctcccttgatc

SEQ ID NO: 208002 - DNA, 15 bp, Homo sapiens
acattctcccttgat

SEQ ID NO: 208003 - DNA, 15 bp, Homo sapiens
tacattctcccttga

SEQ ID NO: 208004 - DNA, 15 bp, Homo sapiens
ctacattctcccttg

SEQ ID NO: 208005 - DNA, 15 bp, Homo sapiens
cctacattctccctt

SEQ ID NO: 208006 - DNA, 15 bp, Homo sapiens
gcctacattctccct

SEQ ID NO: 208007 - DNA, 15 bp, Homo sapiens
ggcctacattctccc

SEQ ID NO: 208008 - DNA, 15 bp, Homo sapiens
gggcctacattctcc

SEQ ID NO: 208009 - DNA, 15 bp, Homo sapiens
ggggcctacattctc

SEQ ID NO: 208010 - DNA, 15 bp, Homo sapiens
tggggcctacattct

SEQ ID NO: 208011 - DNA, 15 bp, Homo sapiens
ctggggcctacattc

SEQ ID NO: 208012 - DNA, 15 bp, Homo sapiens
tctggggcctacatt

SEQ ID NO: 208013 - DNA, 15 bp, Homo sapiens
ttctggggcctacat

SEQ ID NO: 208014 - DNA, 15 bp, Homo sapiens
attctggggcctaca

SEQ ID NO: 208015 - DNA, 15 bp, Homo sapiens
cattctggggcctac

SEQ ID NO: 208016 - DNA, 15 bp, Homo sapiens
ccattctggggccta

SEQ ID NO: 208017 - DNA, 15 bp, Homo sapiens
tccattctggggcct

SEQ ID NO: 208018 - DNA, 15 bp, Homo sapiens
ttccattctggggcc

SEQ ID NO: 208019 - DNA, 15 bp, Homo sapiens
cttccattctggggc

SEQ ID NO: 208020 - DNA, 15 bp, Homo sapiens
ccttccattctgggg

SEQ ID NO: 208021 - DNA, 15 bp, Homo sapiens
tccttccattctggg

SEQ ID NO: 208022 - DNA, 15 bp, Homo sapiens
ctccttccattctgg

SEQ ID NO: 208023 - DNA, 15 bp, Homo sapiens
actccttccattctg

SEQ ID NO: 208024 - DNA, 15 bp, Homo sapiens
cactccttccattct

SEQ ID NO: 208025 - DNA, 15 bp, Homo sapiens
acactccttccattc

SEQ ID NO: 208026 - DNA, 15 bp, Homo sapiens
gacactccttccatt

SEQ ID NO: 208027 - DNA, 15 bp, Homo sapiens
agacactccttccat

SEQ ID NO: 208028 - DNA, 15 bp, Homo sapiens
gagacactccttcca

SEQ ID NO: 208029 - DNA, 15 bp, Homo sapiens
tgagacactccttcc

SEQ ID NO: 208030 - DNA, 15 bp, Homo sapiens
ctgagacactccttc

SEQ ID NO: 208031 - DNA, 15 bp, Homo sapiens
cctgagacactcctt

SEQ ID NO: 208032 - DNA, 15 bp, Homo sapiens
ccctgagacactcct

SEQ ID NO: 208033 - DNA, 15 bp, Homo sapiens
tccctgagacactcc

SEQ ID NO: 208034 - DNA, 15 bp, Homo sapiens
gtccctgagacactc

SEQ ID NO: 208035 - DNA, 15 bp, Homo sapiens
tgtccctgagacact

SEQ ID NO: 208036 - DNA, 15 bp, Homo sapiens
atgtccctgagacac

SEQ ID NO: 208037 - DNA, 15 bp, Homo sapiens
aatgtccctgagaca

SEQ ID NO: 208038 - DNA, 15 bp, Homo sapiens
taatgtccctgagac

SEQ ID NO: 208039 - DNA, 15 bp, Homo sapiens
ctaatgtccctgaga

SEQ ID NO: 208040 - DNA, 15 bp, Homo sapiens
tctaatgtccctgag

SEQ ID NO: 208041 - DNA, 15 bp, Homo sapiens
ctctaatgtccctga

SEQ ID NO: 208042 - DNA, 15 bp, Homo sapiens
tctctaatgtccctg

SEQ ID NO: 208043 - DNA, 15 bp, Homo sapiens
ctctctaatgtccct

SEQ ID NO: 208044 - DNA, 15 bp, Homo sapiens
tctctctaatgtccc

SEQ ID NO: 208045 - DNA, 15 bp, Homo sapiens
ctctctctaatgtcc

SEQ ID NO: 208046 - DNA, 15 bp, Homo sapiens
cctctctctaatgtc

SEQ ID NO: 208047 - DNA, 15 bp, Homo sapiens
ccctctctctaatgt

SEQ ID NO: 208048 - DNA, 15 bp, Homo sapiens
tccctctctctaatg

SEQ ID NO: 208049 - DNA, 15 bp, Homo sapiens
ttccctctctctaat

SEQ ID NO: 208050 - DNA, 15 bp, Homo sapiens
cttccctctctctaa

SEQ ID NO: 208051 - DNA, 15 bp, Homo sapiens
gcttccctctctcta

SEQ ID NO: 208052 - DNA, 15 bp, Homo sapiens
tgcttccctctctct

SEQ ID NO: 208053 - DNA, 15 bp, Homo sapiens
ctgcttccctctctc

SEQ ID NO: 208054 - DNA, 15 bp, Homo sapiens
tctgcttccctctct

SEQ ID NO: 208055 - DNA, 15 bp, Homo sapiens
ctctgcttccctctc

SEQ ID NO: 208056 - DNA, 15 bp, Homo sapiens
tctctgcttccctct

SEQ ID NO: 208057 - DNA, 15 bp, Homo sapiens
ctctctgcttccctc

SEQ ID NO: 208058 - DNA, 15 bp, Homo sapiens
tctctctgcttccct

SEQ ID NO: 208059 - DNA, 15 bp, Homo sapiens
gtctctctgcttccc

SEQ ID NO: 208060 - DNA, 15 bp, Homo sapiens
agtctctctgcttcc

SEQ ID NO: 208061 - DNA, 15 bp, Homo sapiens
cagtctctctgcttc

SEQ ID NO: 208062 - DNA, 15 bp, Homo sapiens
gcagtctctctgctt

SEQ ID NO: 208063 - DNA, 15 bp, Homo sapiens
ggcagtctctctgct

SEQ ID NO: 208064 - DNA, 15 bp, Homo sapiens
gggcagtctctctgc

SEQ ID NO: 208065 - DNA, 15 bp, Homo sapiens
tgggcagtctctctg

SEQ ID NO: 208066 - DNA, 15 bp, Homo sapiens
gtgggcagtctctct

SEQ ID NO: 208067 - DNA, 15 bp, Homo sapiens
ggtgggcagtctctc

SEQ ID NO: 208068 - DNA, 15 bp, Homo sapiens
gggtgggcagtctct

SEQ ID NO: 208069 - DNA, 15 bp, Homo sapiens
tgggtgggcagtctc

SEQ ID NO: 208070 - DNA, 15 bp, Homo sapiens
gtgggtgggcagtct

SEQ ID NO: 208071 - DNA, 15 bp, Homo sapiens
ggtgggtgggcagtc

SEQ ID NO: 208072 - DNA, 15 bp, Homo sapiens
gggtgggtgggcagt

SEQ ID NO: 208073 - DNA, 15 bp, Homo sapiens
agggtgggtgggcag

SEQ ID NO: 208074 - DNA, 15 bp, Homo sapiens
aagggtgggtgggca

SEQ ID NO: 208075 - DNA, 15 bp, Homo sapiens
gaagggtgggtgggc

SEQ ID NO: 208076 - DNA, 15 bp, Homo sapiens
tgaagggtgggtggg

SEQ ID NO: 208077 - DNA, 15 bp, Homo sapiens
atgaagggtgggtgg

SEQ ID NO: 208078 - DNA, 15 bp, Homo sapiens
gatgaagggtgggtg

SEQ ID NO: 208079 - DNA, 15 bp, Homo sapiens
tgatgaagggtgggt

SEQ ID NO: 208080 - DNA, 15 bp, Homo sapiens
atgatgaagggtggg

SEQ ID NO: 208081 - DNA, 15 bp, Homo sapiens
aatgatgaagggtgg

SEQ ID NO: 208082 - DNA, 15 bp, Homo sapiens
caatgatgaagggtg

SEQ ID NO: 208083 - DNA, 15 bp, Homo sapiens
acaatgatgaagggt

SEQ ID NO: 208084 - DNA, 15 bp, Homo sapiens
cacaatgatgaaggg

SEQ ID NO: 208085 - DNA, 15 bp, Homo sapiens
tcacaatgatgaagg

SEQ ID NO: 208086 - DNA, 15 bp, Homo sapiens
gtcacaatgatgaag

SEQ ID NO: 208087 - DNA, 15 bp, Homo sapiens
agtcacaatgatgaa

SEQ ID NO: 208088 - DNA, 15 bp, Homo sapiens
cagtcacaatgatga

SEQ ID NO: 208089 - DNA, 15 bp, Homo sapiens
gcagtcacaatgatg

SEQ ID NO: 208090 - DNA, 15 bp, Homo sapiens
agcagtcacaatgat

SEQ ID NO: 208091 - DNA, 15 bp, Homo sapiens
gagcagtcacaatga

SEQ ID NO: 208092 - DNA, 15 bp, Homo sapiens
agagcagtcacaatg

SEQ ID NO: 208093 - DNA, 15 bp, Homo sapiens
tagagcagtcacaat

SEQ ID NO: 208094 - DNA, 15 bp, Homo sapiens
ttagagcagtcacaa

SEQ ID NO: 208095 - DNA, 15 bp, Homo sapiens
cttagagcagtcaca

SEQ ID NO: 208096 - DNA, 15 bp, Homo sapiens
ccttagagcagtcac

SEQ ID NO: 208097 - DNA, 15 bp, Homo sapiens
tccttagagcagtca

SEQ ID NO: 208098 - DNA, 15 bp, Homo sapiens
gtccttagagcagtc

SEQ ID NO: 208099 - DNA, 15 bp, Homo sapiens
ggtccttagagcagt

SEQ ID NO: 208100 - DNA, 15 bp, Homo sapiens
cggtccttagagcag

SEQ ID NO: 208101 - DNA, 15 bp, Homo sapiens
ccggtccttagagca

SEQ ID NO: 208102 - DNA, 15 bp, Homo sapiens
gccggtccttagagc

SEQ ID NO: 208103 - DNA, 15 bp, Homo sapiens
ggccggtccttagag

SEQ ID NO: 208104 - DNA, 15 bp, Homo sapiens
gggccggtccttaga

SEQ ID NO: 208105 - DNA, 15 bp, Homo sapiens
agggccggtccttag

SEQ ID NO: 208106 - DNA, 15 bp, Homo sapiens
cagggccggtcctta

SEQ ID NO: 208107 - DNA, 15 bp, Homo sapiens
ccagggccggtcctt

SEQ ID NO: 208108 - DNA, 15 bp, Homo sapiens
cccagggccggtcct

SEQ ID NO: 208109 - DNA, 15 bp, Homo sapiens
acccagggccggtcc

SEQ ID NO: 208110 - DNA, 15 bp, Homo sapiens
cacccagggccggtc

SEQ ID NO: 208111 - DNA, 15 bp, Homo sapiens
tcacccagggccggt

SEQ ID NO: 208112 - DNA, 15 bp, Homo sapiens
ctcacccagggccgg

SEQ ID NO: 208113 - DNA, 15 bp, Homo sapiens
cctcacccagggccg

SEQ ID NO: 208114 - DNA, 15 bp, Homo sapiens
gcctcacccagggcc

SEQ ID NO: 208115 - DNA, 15 bp, Homo sapiens
cgcctcacccagggc

SEQ ID NO: 208116 - DNA, 15 bp, Homo sapiens
ccgcctcacccaggg

SEQ ID NO: 208117 - DNA, 15 bp, Homo sapiens
tccgcctcacccagg

SEQ ID NO: 208118 - DNA, 15 bp, Homo sapiens
ctccgcctcacccag

SEQ ID NO: 208119 - DNA, 15 bp, Homo sapiens
cctccgcctcaccca

SEQ ID NO: 208120 - DNA, 15 bp, Homo sapiens
tcctccgcctcaccc

SEQ ID NO: 208121 - DNA, 15 bp, Homo sapiens
ctcctccgcctcacc

SEQ ID NO: 208122 - DNA, 15 bp, Homo sapiens
cctcctccgcctcac

SEQ ID NO: 208123 - DNA, 15 bp, Homo sapiens
tcctcctccgcctca

SEQ ID NO: 208124 - DNA, 15 bp, Homo sapiens
ctcctcctccgcctc

SEQ ID NO: 208125 - DNA, 15 bp, Homo sapiens
gctcctcctccgcct

SEQ ID NO: 208126 - DNA, 15 bp, Homo sapiens
cgctcctcctccgcc

SEQ ID NO: 208127 - DNA, 15 bp, Homo sapiens
gcgctcctcctccgc

SEQ ID NO: 208128 - DNA, 15 bp, Homo sapiens
tgcgctcctcctccg

SEQ ID NO: 208129 - DNA, 15 bp, Homo sapiens
gtgcgctcctcctcc

SEQ ID NO: 208130 - DNA, 15 bp, Homo sapiens
ggtgcgctcctcctc

SEQ ID NO: 208131 - DNA, 15 bp, Homo sapiens
aggtgcgctcctcct

SEQ ID NO: 208132 - DNA, 15 bp, Homo sapiens
caggtgcgctcctcc

SEQ ID NO: 208133 - DNA, 15 bp, Homo sapiens
acaggtgcgctcctc

SEQ ID NO: 208134 - DNA, 15 bp, Homo sapiens
aacaggtgcgctcct

SEQ ID NO: 208135 - DNA, 15 bp, Homo sapiens
gaacaggtgcgctcc

SEQ ID NO: 208136 - DNA, 15 bp, Homo sapiens
tgaacaggtgcgctc

SEQ ID NO: 208137 - DNA, 15 bp, Homo sapiens
ctgaacaggtgcgct

SEQ ID NO: 208138 - DNA, 15 bp, Homo sapiens
tctgaacaggtgcgc

SEQ ID NO: 208139 - DNA, 15 bp, Homo sapiens
ttctgaacaggtgcg

SEQ ID NO: 208140 - DNA, 15 bp, Homo sapiens
gttctgaacaggtgc

SEQ ID NO: 208141 - DNA, 15 bp, Homo sapiens
cgttctgaacaggtg

SEQ ID NO: 208142 - DNA, 15 bp, Homo sapiens
gcgttctgaacaggt

SEQ ID NO: 208143 - DNA, 15 bp, Homo sapiens
tgcgttctgaacagg

SEQ ID NO: 208144 - DNA, 15 bp, Homo sapiens
ctgcgttctgaacag

SEQ ID NO: 208145 - DNA, 15 bp, Homo sapiens
gctgcgttctgaaca

SEQ ID NO: 208146 - DNA, 15 bp, Homo sapiens
cgctgcgttctgaac

SEQ ID NO: 208147 - DNA, 15 bp, Homo sapiens
tcgctgcgttctgaa

SEQ ID NO: 208148 - DNA, 15 bp, Homo sapiens
ctcgctgcgttctga

SEQ ID NO: 208149 - DNA, 15 bp, Homo sapiens
cctcgctgcgttctg

SEQ ID NO: 208150 - DNA, 15 bp, Homo sapiens
gcctcgctgcgttct

SEQ ID NO: 208151 - DNA, 15 bp, Homo sapiens
agcctcgctgcgttc

SEQ ID NO: 208152 - DNA, 15 bp, Homo sapiens
cagcctcgctgcgtt

SEQ ID NO: 208153 - DNA, 15 bp, Homo sapiens
tcagcctcgctgcgt

SEQ ID NO: 208154 - DNA, 15 bp, Homo sapiens
ctcagcctcgctgcg

SEQ ID NO: 208155 - DNA, 15 bp, Homo sapiens
gctcagcctcgctgc

SEQ ID NO: 208156 - DNA, 15 bp, Homo sapiens
cgctcagcctcgctg

SEQ ID NO: 208157 - DNA, 15 bp, Homo sapiens
ccgctcagcctcgct

SEQ ID NO: 208158 - DNA, 15 bp, Homo sapiens
cccgctcagcctcgc

SEQ ID NO: 208159 - DNA, 15 bp, Homo sapiens
ccccgctcagcctcg

SEQ ID NO: 208160 - DNA, 15 bp, Homo sapiens
tccccgctcagcctc

SEQ ID NO: 208161 - DNA, 15 bp, Homo sapiens
ctccccgctcagcct

SEQ ID NO: 208162 - DNA, 15 bp, Homo sapiens
gctccccgctcagcc

SEQ ID NO: 208163 - DNA, 15 bp, Homo sapiens
agctccccgctcagc

SEQ ID NO: 208164 - DNA, 15 bp, Homo sapiens
tagctccccgctcag

SEQ ID NO: 208165 - DNA, 15 bp, Homo sapiens
ctagctccccgctca

SEQ ID NO: 208166 - DNA, 15 bp, Homo sapiens
gctagctccccgctc

SEQ ID NO: 208167 - DNA, 15 bp, Homo sapiens
agctagctccccgct

SEQ ID NO: 208168 - DNA, 15 bp, Homo sapiens
cagctagctccccgc

SEQ ID NO: 208169 - DNA, 15 bp, Homo sapiens
ccagctagctccccg

SEQ ID NO: 208170 - DNA, 15 bp, Homo sapiens
gccagctagctcccc

SEQ ID NO: 208171 - DNA, 15 bp, Homo sapiens
tgccagctagctccc

SEQ ID NO: 208172 - DNA, 15 bp, Homo sapiens
ctgccagctagctcc

SEQ ID NO: 208173 - DNA, 15 bp, Homo sapiens
actgccagctagctc

SEQ ID NO: 208174 - DNA, 15 bp, Homo sapiens
gactgccagctagct

SEQ ID NO: 208175 - DNA, 15 bp, Homo sapiens
ggactgccagctagc

SEQ ID NO: 208176 - DNA, 15 bp, Homo sapiens
aggactgccagctag

SEQ ID NO: 208177 - DNA, 15 bp, Homo sapiens
aaggactgccagcta

SEQ ID NO: 208178 - DNA, 15 bp, Homo sapiens
gaaggactgccagct

SEQ ID NO: 208179 - DNA, 15 bp, Homo sapiens
agaaggactgccagc

SEQ ID NO: 208180 - DNA, 15 bp, Homo sapiens
tagaaggactgccag

SEQ ID NO: 208181 - DNA, 15 bp, Homo sapiens
ctagaaggactgcca

SEQ ID NO: 208182 - DNA, 15 bp, Homo sapiens
cctagaaggactgcc

SEQ ID NO: 208183 - DNA, 15 bp, Homo sapiens
ccctagaaggactgc

SEQ ID NO: 208184 - DNA, 15 bp, Homo sapiens
tccctagaaggactg

SEQ ID NO: 208185 - DNA, 15 bp, Homo sapiens
ctccctagaaggact

SEQ ID NO: 208186 - DNA, 15 bp, Homo sapiens
actccctagaaggac

SEQ ID NO: 208187 - DNA, 15 bp, Homo sapiens
cactccctagaagga

SEQ ID NO: 208188 - DNA, 15 bp, Homo sapiens
acactccctagaagg

SEQ ID NO: 208189 - DNA, 15 bp, Homo sapiens
tacactccctagaag

SEQ ID NO: 208190 - DNA, 15 bp, Homo sapiens
ctacactccctagaa

SEQ ID NO: 208191 - DNA, 15 bp, Homo sapiens
gctacactccctaga

SEQ ID NO: 208192 - DNA, 15 bp, Homo sapiens
agctacactccctag

SEQ ID NO: 208193 - DNA, 15 bp, Homo sapiens
cagctacactcccta

SEQ ID NO: 208194 - DNA, 15 bp, Homo sapiens
tcagctacactccct

SEQ ID NO: 208195 - DNA, 15 bp, Homo sapiens
atcagctacactccc

SEQ ID NO: 208196 - DNA, 15 bp, Homo sapiens
aatcagctacactcc

SEQ ID NO: 208197 - DNA, 15 bp, Homo sapiens
taatcagctacactc

SEQ ID NO: 208198 - DNA, 15 bp, Homo sapiens
ttaatcagctacact

SEQ ID NO: 208199 - DNA, 15 bp, Homo sapiens
tttaatcagctacac

SEQ ID NO: 208200 - DNA, 15 bp, Homo sapiens
ttttaatcagctaca

SEQ ID NO: 208201 - DNA, 15 bp, Homo sapiens
attttaatcagctac

SEQ ID NO: 208202 - DNA, 15 bp, Homo sapiens
tattttaatcagcta

SEQ ID NO: 208203 - DNA, 15 bp, Homo sapiens
ttattttaatcagct

SEQ ID NO: 208204 - DNA, 15 bp, Homo sapiens
attattttaatcagc

SEQ ID NO: 208205 - DNA, 15 bp, Homo sapiens
aattattttaatcag

SEQ ID NO: 208206 - DNA, 15 bp, Homo sapiens
taattattttaatca

SEQ ID NO: 208207 - DNA, 15 bp, Homo sapiens
ataattattttaatc

SEQ ID NO: 208208 - DNA, 15 bp, Homo sapiens
tataattattttaat

SEQ ID NO: 208209 - DNA, 15 bp, Homo sapiens
atataattattttaa

SEQ ID NO: 208210 - DNA, 15 bp, Homo sapiens
aatataattatttta

SEQ ID NO: 208211 - DNA, 15 bp, Homo sapiens
taatataattatttt

SEQ ID NO: 208212 - DNA, 15 bp, Homo sapiens
ttaatataattattt

SEQ ID NO: 208213 - DNA, 15 bp, Homo sapiens
gttaatataattatt

SEQ ID NO: 208214 - DNA, 15 bp, Homo sapiens
agttaatataattat

SEQ ID NO: 208215 - DNA, 15 bp, Homo sapiens
cagttaatataatta

SEQ ID NO: 208216 - DNA, 15 bp, Homo sapiens
ccagttaatataatt

SEQ ID NO: 208217 - DNA, 15 bp, Homo sapiens
gccagttaatataat

SEQ ID NO: 208218 - DNA, 15 bp, Homo sapiens
ggccagttaatataa

SEQ ID NO: 208219 - DNA, 15 bp, Homo sapiens
gggccagttaatata

SEQ ID NO: 208220 - DNA, 15 bp, Homo sapiens
agggccagttaatat

SEQ ID NO: 208221 - DNA, 15 bp, Homo sapiens
gagggccagttaata

SEQ ID NO: 208222 - DNA, 15 bp, Homo sapiens
tgagggccagttaat

SEQ ID NO: 208223 - DNA, 15 bp, Homo sapiens
ttgagggccagttaa

SEQ ID NO: 208224 - DNA, 15 bp, Homo sapiens
tttgagggccagtta

SEQ ID NO: 208225 - DNA, 15 bp, Homo sapiens
ctttgagggccagtt

SEQ ID NO: 208226 - DNA, 15 bp, Homo sapiens
tctttgagggccagt

SEQ ID NO: 208227 - DNA, 15 bp, Homo sapiens
ctctttgagggccag

SEQ ID NO: 208228 - DNA, 15 bp, Homo sapiens
tctctttgagggcca

SEQ ID NO: 208229 - DNA, 15 bp, Homo sapiens
gtctctttgagggcc

SEQ ID NO: 208230 - DNA, 15 bp, Homo sapiens
agtctctttgagggc

SEQ ID NO: 208231 - DNA, 15 bp, Homo sapiens
aagtctctttgaggg

SEQ ID NO: 208232 - DNA, 15 bp, Homo sapiens
taagtctctttgagg

SEQ ID NO: 208233 - DNA, 15 bp, Homo sapiens
ataagtctctttgag

SEQ ID NO: 208234 - DNA, 15 bp, Homo sapiens
aataagtctctttga

SEQ ID NO: 208235 - DNA, 15 bp, Homo sapiens
aaataagtctctttg

SEQ ID NO: 208236 - DNA, 15 bp, Homo sapiens
taaataagtctcttt

SEQ ID NO: 208237 - DNA, 15 bp, Homo sapiens
ataaataagtctctt

SEQ ID NO: 208238 - DNA, 15 bp, Homo sapiens
tataaataagtctct

SEQ ID NO: 208239 - DNA, 15 bp, Homo sapiens
ctataaataagtctc

SEQ ID NO: 208240 - DNA, 15 bp, Homo sapiens
gctataaataagtct

SEQ ID NO: 208241 - DNA, 15 bp, Homo sapiens
ggctataaataagtc

SEQ ID NO: 208242 - DNA, 15 bp, Homo sapiens
tggctataaataagt

SEQ ID NO: 208243 - DNA, 15 bp, Homo sapiens
atggctataaataag

SEQ ID NO: 208244 - DNA, 15 bp, Homo sapiens
catggctataaataa

SEQ ID NO: 208245 - DNA, 15 bp, Homo sapiens
ccatggctataaata

SEQ ID NO: 208246 - DNA, 15 bp, Homo sapiens
accatggctataaat

SEQ ID NO: 208247 - DNA, 15 bp, Homo sapiens
caccatggctataaa

SEQ ID NO: 208248 - DNA, 15 bp, Homo sapiens
tcaccatggctataa

SEQ ID NO: 208249 - DNA, 15 bp, Homo sapiens
gtcaccatggctata

SEQ ID NO: 208250 - DNA, 15 bp, Homo sapiens
tgtcaccatggctat

SEQ ID NO: 208251 - DNA, 15 bp, Homo sapiens
gtgtcaccatggcta

SEQ ID NO: 208252 - DNA, 15 bp, Homo sapiens
cgtgtcaccatggct

SEQ ID NO: 208253 - DNA, 15 bp, Homo sapiens
acgtgtcaccatggc

SEQ ID NO: 208254 - DNA, 15 bp, Homo sapiens
aacgtgtcaccatgg

SEQ ID NO: 208255 - DNA, 15 bp, Homo sapiens
taacgtgtcaccatg

SEQ ID NO: 208256 - DNA, 15 bp, Homo sapiens
ataacgtgtcaccat

SEQ ID NO: 208257 - DNA, 15 bp, Homo sapiens
aataacgtgtcacca

SEQ ID NO: 208258 - DNA, 15 bp, Homo sapiens
taataacgtgtcacc

SEQ ID NO: 208259 - DNA, 15 bp, Homo sapiens
ttaataacgtgtcac

SEQ ID NO: 208260 - DNA, 15 bp, Homo sapiens
cttaataacgtgtca

SEQ ID NO: 208261 - DNA, 15 bp, Homo sapiens
ccttaataacgtgtc

SEQ ID NO: 208262 - DNA, 15 bp, Homo sapiens
tccttaataacgtgt

SEQ ID NO: 208263 - DNA, 15 bp, Homo sapiens
atccttaataacgtg

SEQ ID NO: 208264 - DNA, 15 bp, Homo sapiens
gatccttaataacgt

SEQ ID NO: 208265 - DNA, 15 bp, Homo sapiens
agatccttaataacg

SEQ ID NO: 208266 - DNA, 15 bp, Homo sapiens
tagatccttaataac

SEQ ID NO: 208267 - DNA, 15 bp, Homo sapiens
ttagatccttaataa

SEQ ID NO: 208268 - DNA, 15 bp, Homo sapiens
attagatccttaata

SEQ ID NO: 208269 - DNA, 15 bp, Homo sapiens
aattagatccttaat

SEQ ID NO: 208270 - DNA, 15 bp, Homo sapiens
aaattagatccttaa

SEQ ID NO: 208271 - DNA, 15 bp, Homo sapiens
caaattagatcctta

SEQ ID NO: 208272 - DNA, 15 bp, Homo sapiens
ccaaattagatcctt

SEQ ID NO: 208273 - DNA, 15 bp, Homo sapiens
tccaaattagatcct

SEQ ID NO: 208274 - DNA, 15 bp, Homo sapiens
atccaaattagatcc

SEQ ID NO: 208275 - DNA, 15 bp, Homo sapiens
gatccaaattagatc

SEQ ID NO: 208276 - DNA, 15 bp, Homo sapiens
tgatccaaattagat

SEQ ID NO: 208277 - DNA, 15 bp, Homo sapiens
ctgatccaaattaga

SEQ ID NO: 208278 - DNA, 15 bp, Homo sapiens
cctgatccaaattag

SEQ ID NO: 208279 - DNA, 15 bp, Homo sapiens
tcctgatccaaatta

SEQ ID NO: 208280 - DNA, 15 bp, Homo sapiens
gtcctgatccaaatt

SEQ ID NO: 208281 - DNA, 15 bp, Homo sapiens
agtcctgatccaaat

SEQ ID NO: 208282 - DNA, 15 bp, Homo sapiens
gagtcctgatccaaa

SEQ ID NO: 208283 - DNA, 15 bp, Homo sapiens
agagtcctgatccaa

SEQ ID NO: 208284 - DNA, 15 bp, Homo sapiens
cagagtcctgatcca

SEQ ID NO: 208285 - DNA, 15 bp, Homo sapiens
ccagagtcctgatcc

SEQ ID NO: 208286 - DNA, 15 bp, Homo sapiens
cccagagtcctgatc

SEQ ID NO: 208287 - DNA, 15 bp, Homo sapiens
tcccagagtcctgat

SEQ ID NO: 208288 - DNA, 15 bp, Homo sapiens
ttcccagagtcctga

SEQ ID NO: 208289 - DNA, 15 bp, Homo sapiens
attcccagagtcctg

SEQ ID NO: 208290 - DNA, 15 bp, Homo sapiens
gattcccagagtcct

SEQ ID NO: 208291 - DNA, 15 bp, Homo sapiens
agattcccagagtcc

SEQ ID NO: 208292 - DNA, 15 bp, Homo sapiens
aagattcccagagtc

SEQ ID NO: 208293 - DNA, 15 bp, Homo sapiens
taagattcccagagt

SEQ ID NO: 208294 - DNA, 15 bp, Homo sapiens
ataagattcccagag

SEQ ID NO: 208295 - DNA, 15 bp, Homo sapiens
aataagattcccaga

SEQ ID NO: 208296 - DNA, 15 bp, Homo sapiens
aaataagattcccag

SEQ ID NO: 208297 - DNA, 15 bp, Homo sapiens
aaaataagattccca

SEQ ID NO: 208298 - DNA, 15 bp, Homo sapiens
aaaaataagattccc

SEQ ID NO: 208299 - DNA, 15 bp, Homo sapiens
taaaaataagattcc

SEQ ID NO: 208300 - DNA, 15 bp, Homo sapiens
ctaaaaataagattc

SEQ ID NO: 208301 - DNA, 15 bp, Homo sapiens
cctaaaaataagatt

SEQ ID NO: 208302 - DNA, 15 bp, Homo sapiens
gcctaaaaataagat

SEQ ID NO: 208303 - DNA, 15 bp, Homo sapiens
ggcctaaaaataaga

SEQ ID NO: 208304 - DNA, 15 bp, Homo sapiens
gggcctaaaaataag

SEQ ID NO: 208305 - DNA, 15 bp, Homo sapiens
tgggcctaaaaataa

SEQ ID NO: 208306 - DNA, 15 bp, Homo sapiens
ctgggcctaaaaata

SEQ ID NO: 208307 - DNA, 15 bp, Homo sapiens
tctgggcctaaaaat

SEQ ID NO: 208308 - DNA, 15 bp, Homo sapiens
ttctgggcctaaaaa

SEQ ID NO: 208309 - DNA, 15 bp, Homo sapiens
cttctgggcctaaaa

SEQ ID NO: 208310 - DNA, 15 bp, Homo sapiens
tcttctgggcctaaa

SEQ ID NO: 208311 - DNA, 15 bp, Homo sapiens
ctcttctgggcctaa

SEQ ID NO: 208312 - DNA, 15 bp, Homo sapiens
tctcttctgggccta

SEQ ID NO: 208313 - DNA, 15 bp, Homo sapiens
ctctcttctgggcct

SEQ ID NO: 208314 - DNA, 15 bp, Homo sapiens
gctctcttctgggcc

SEQ ID NO: 208315 - DNA, 15 bp, Homo sapiens
ggctctcttctgggc

SEQ ID NO: 208316 - DNA, 15 bp, Homo sapiens
gggctctcttctggg

SEQ ID NO: 208317 - DNA, 15 bp, Homo sapiens
agggctctcttctgg

SEQ ID NO: 208318 - DNA, 15 bp, Homo sapiens
cagggctctcttctg

SEQ ID NO: 208319 - DNA, 15 bp, Homo sapiens
gcagggctctcttct

SEQ ID NO: 208320 - DNA, 15 bp, Homo sapiens
tgcagggctctcttc

SEQ ID NO: 208321 - DNA, 15 bp, Homo sapiens
ctgcagggctctctt

SEQ ID NO: 208322 - DNA, 15 bp, Homo sapiens
cctgcagggctctct

SEQ ID NO: 208323 - DNA, 15 bp, Homo sapiens
gcctgcagggctctc

SEQ ID NO: 208324 - DNA, 15 bp, Homo sapiens
tgcctgcagggctct

SEQ ID NO: 208325 - DNA, 15 bp, Homo sapiens
ctgcctgcagggctc

SEQ ID NO: 208326 - DNA, 15 bp, Homo sapiens
cctgcctgcagggct

SEQ ID NO: 208327 - DNA, 15 bp, Homo sapiens
acctgcctgcagggc

SEQ ID NO: 208328 - DNA, 15 bp, Homo sapiens
cacctgcctgcaggg

SEQ ID NO: 208329 - DNA, 15 bp, Homo sapiens
tcacctgcctgcagg

SEQ ID NO: 208330 - DNA, 15 bp, Homo sapiens
gtcacctgcctgcag

SEQ ID NO: 208331 - DNA, 15 bp, Homo sapiens
ggtcacctgcctgca

SEQ ID NO: 208332 - DNA, 15 bp, Homo sapiens
tggtcacctgcctgc

SEQ ID NO: 208333 - DNA, 15 bp, Homo sapiens
ctggtcacctgcctg

SEQ ID NO: 208334 - DNA, 15 bp, Homo sapiens
cctggtcacctgcct

SEQ ID NO: 208335 - DNA, 15 bp, Homo sapiens
tcctggtcacctgcc

SEQ ID NO: 208336 - DNA, 15 bp, Homo sapiens
ctcctggtcacctgc

SEQ ID NO: 208337 - DNA, 15 bp, Homo sapiens
cctcctggtcacctg

SEQ ID NO: 208338 - DNA, 15 bp, Homo sapiens
acctcctggtcacct

SEQ ID NO: 208339 - DNA, 15 bp, Homo sapiens
gacctcctggtcacc

SEQ ID NO: 208340 - DNA, 15 bp, Homo sapiens
agacctcctggtcac

SEQ ID NO: 208341 - DNA, 15 bp, Homo sapiens
gagacctcctggtca

SEQ ID NO: 208342 - DNA, 15 bp, Homo sapiens
tgagacctcctggtc

SEQ ID NO: 208343 - DNA, 15 bp, Homo sapiens
ctgagacctcctggt

SEQ ID NO: 208344 - DNA, 15 bp, Homo sapiens
tctgagacctcctgg

SEQ ID NO: 208345 - DNA, 15 bp, Homo sapiens
atctgagacctcctg

SEQ ID NO: 208346 - DNA, 15 bp, Homo sapiens
catctgagacctcct

SEQ ID NO: 208347 - DNA, 15 bp, Homo sapiens
ccatctgagacctcc

SEQ ID NO: 208348 - DNA, 15 bp, Homo sapiens
gccatctgagacctc

SEQ ID NO: 208349 - DNA, 15 bp, Homo sapiens
agccatctgagacct

SEQ ID NO: 208350 - DNA, 15 bp, Homo sapiens
cagccatctgagacc

SEQ ID NO: 208351 - DNA, 15 bp, Homo sapiens
acagccatctgagac

SEQ ID NO: 208352 - DNA, 15 bp, Homo sapiens
cacagccatctgaga

SEQ ID NO: 208353 - DNA, 15 bp, Homo sapiens
acacagccatctgag

SEQ ID NO: 208354 - DNA, 15 bp, Homo sapiens
tacacagccatctga

SEQ ID NO: 208355 - DNA, 15 bp, Homo sapiens
atacacagccatctg

SEQ ID NO: 208356 - DNA, 15 bp, Homo sapiens
aatacacagccatct

SEQ ID NO: 208357 - DNA, 15 bp, Homo sapiens
gaatacacagccatc

SEQ ID NO: 208358 - DNA, 15 bp, Homo sapiens
tgaatacacagccat

SEQ ID NO: 208359 - DNA, 15 bp, Homo sapiens
gtgaatacacagcca

SEQ ID NO: 208360 - DNA, 15 bp, Homo sapiens
agtgaatacacagcc

SEQ ID NO: 208361 - DNA, 15 bp, Homo sapiens
gagtgaatacacagc

SEQ ID NO: 208362 - DNA, 15 bp, Homo sapiens
agagtgaatacacag

SEQ ID NO: 208363 - DNA, 15 bp, Homo sapiens
cagagtgaatacaca

SEQ ID NO: 208364 - DNA, 15 bp, Homo sapiens
acagagtgaatacac

SEQ ID NO: 208365 - DNA, 15 bp, Homo sapiens
gacagagtgaataca

SEQ ID NO: 208366 - DNA, 15 bp, Homo sapiens
cgacagagtgaatac

SEQ ID NO: 208367 - DNA, 15 bp, Homo sapiens
tcgacagagtgaata

SEQ ID NO: 208368 - DNA, 15 bp, Homo sapiens
ctcgacagagtgaat

SEQ ID NO: 208369 - DNA, 15 bp, Homo sapiens
actcgacagagtgaa

SEQ ID NO: 208370 - DNA, 15 bp, Homo sapiens
gactcgacagagtga

SEQ ID NO: 208371 - DNA, 15 bp, Homo sapiens
tgactcgacagagtg

SEQ ID NO: 208372 - DNA, 15 bp, Homo sapiens
ctgactcgacagagt

SEQ ID NO: 208373 - DNA, 15 bp, Homo sapiens
cctgactcgacagag

SEQ ID NO: 208374 - DNA, 15 bp, Homo sapiens
ccctgactcgacaga

SEQ ID NO: 208375 - DNA, 15 bp, Homo sapiens
tccctgactcgacag

SEQ ID NO: 208376 - DNA, 15 bp, Homo sapiens
atccctgactcgaca

SEQ ID NO: 208377 - DNA, 15 bp, Homo sapiens
aatccctgactcgac

SEQ ID NO: 208378 - DNA, 15 bp, Homo sapiens
gaatccctgactcga

SEQ ID NO: 208379 - DNA, 15 bp, Homo sapiens
agaatccctgactcg

SEQ ID NO: 208380 - DNA, 15 bp, Homo sapiens
gagaatccctgactc

SEQ ID NO: 208381 - DNA, 15 bp, Homo sapiens
tgagaatccctgact

SEQ ID NO: 208382 - DNA, 15 bp, Homo sapiens
ttgagaatccctgac

SEQ ID NO: 208383 - DNA, 15 bp, Homo sapiens
cttgagaatccctga

SEQ ID NO: 208384 - DNA, 15 bp, Homo sapiens
ccttgagaatccctg

SEQ ID NO: 208385 - DNA, 15 bp, Homo sapiens
accttgagaatccct

SEQ ID NO: 208386 - DNA, 15 bp, Homo sapiens
caccttgagaatccc

SEQ ID NO: 208387 - DNA, 15 bp, Homo sapiens
ccaccttgagaatcc

SEQ ID NO: 208388 - DNA, 15 bp, Homo sapiens
cccaccttgagaatc

SEQ ID NO: 208389 - DNA, 15 bp, Homo sapiens
tcccaccttgagaat

SEQ ID NO: 208390 - DNA, 15 bp, Homo sapiens
ctcccaccttgagaa

SEQ ID NO: 208391 - DNA, 15 bp, Homo sapiens
cctcccaccttgaga

SEQ ID NO: 208392 - DNA, 15 bp, Homo sapiens
gcctcccaccttgag

SEQ ID NO: 208393 - DNA, 15 bp, Homo sapiens
tgcctcccaccttga

SEQ ID NO: 208394 - DNA, 15 bp, Homo sapiens
ttgcctcccaccttg

SEQ ID NO: 208395 - DNA, 15 bp, Homo sapiens
attgcctcccacctt

SEQ ID NO: 208396 - DNA, 15 bp, Homo sapiens
aattgcctcccacct

SEQ ID NO: 208397 - DNA, 15 bp, Homo sapiens
caattgcctcccacc

SEQ ID NO: 208398 - DNA, 15 bp, Homo sapiens
ccaattgcctcccac

SEQ ID NO: 208399 - DNA, 15 bp, Homo sapiens
tccaattgcctccca

SEQ ID NO: 208400 - DNA, 15 bp, Homo sapiens
ttccaattgcctccc

SEQ ID NO: 208401 - DNA, 15 bp, Homo sapiens
tttccaattgcctcc

SEQ ID NO: 208402 - DNA, 15 bp, Homo sapiens
ctttccaattgcctc

SEQ ID NO: 208403 - DNA, 15 bp, Homo sapiens
cctttccaattgcct

SEQ ID NO: 208404 - DNA, 15 bp, Homo sapiens
acctttccaattgcc

SEQ ID NO: 208405 - DNA, 15 bp, Homo sapiens
gacctttccaattgc

SEQ ID NO: 208406 - DNA, 15 bp, Homo sapiens
cgacctttccaattg

SEQ ID NO: 208407 - DNA, 15 bp, Homo sapiens
gcgacctttccaatt

SEQ ID NO: 208408 - DNA, 15 bp, Homo sapiens
tgcgacctttccaat

SEQ ID NO: 208409 - DNA, 15 bp, Homo sapiens
gtgcgacctttccaa

SEQ ID NO: 208410 - DNA, 15 bp, Homo sapiens
agtgcgacctttcca

SEQ ID NO: 208411 - DNA, 15 bp, Homo sapiens
cagtgcgacctttcc

SEQ ID NO: 208412 - DNA, 15 bp, Homo sapiens
ccagtgcgacctttc

SEQ ID NO: 208413 - DNA, 15 bp, Homo sapiens
gccagtgcgaccttt

SEQ ID NO: 208414 - DNA, 15 bp, Homo sapiens
ggccagtgcgacctt

SEQ ID NO: 208415 - DNA, 15 bp, Homo sapiens
gggccagtgcgacct

SEQ ID NO: 208416 - DNA, 15 bp, Homo sapiens
tgggccagtgcgacc

SEQ ID NO: 208417 - DNA, 15 bp, Homo sapiens
gtgggccagtgcgac

SEQ ID NO: 208418 - DNA, 15 bp, Homo sapiens
ggtgggccagtgcga

SEQ ID NO: 208419 - DNA, 15 bp, Homo sapiens
gggtgggccagtgcg

SEQ ID NO: 208420 - DNA, 15 bp, Homo sapiens
agggtgggccagtgc

SEQ ID NO: 208421 - DNA, 15 bp, Homo sapiens
aagggtgggccagtg

SEQ ID NO: 208422 - DNA, 15 bp, Homo sapiens
gaagggtgggccagt

SEQ ID NO: 208423 - DNA, 15 bp, Homo sapiens
ggaagggtgggccag

SEQ ID NO: 208424 - DNA, 15 bp, Homo sapiens
gggaagggtgggcca

SEQ ID NO: 208425 - DNA, 15 bp, Homo sapiens
ggggaagggtgggcc

SEQ ID NO: 208426 - DNA, 15 bp, Homo sapiens
gggggaagggtgggc

SEQ ID NO: 208427 - DNA, 15 bp, Homo sapiens
cgggggaagggtggg

SEQ ID NO: 208428 - DNA, 15 bp, Homo sapiens
tcgggggaagggtgg

SEQ ID NO: 208429 - DNA, 15 bp, Homo sapiens
atcgggggaagggtg

SEQ ID NO: 208430 - DNA, 15 bp, Homo sapiens
catcgggggaagggt

SEQ ID NO: 208431 - DNA, 15 bp, Homo sapiens
acatcgggggaaggg

SEQ ID NO: 208432 - DNA, 15 bp, Homo sapiens
gacatcgggggaagg

SEQ ID NO: 208433 - DNA, 15 bp, Homo sapiens
agacatcgggggaag

SEQ ID NO: 208434 - DNA, 15 bp, Homo sapiens
cagacatcgggggaa

SEQ ID NO: 208435 - DNA, 15 bp, Homo sapiens
acagacatcggggga

SEQ ID NO: 208436 - DNA, 15 bp, Homo sapiens
gacagacatcggggg

SEQ ID NO: 208437 - DNA, 15 bp, Homo sapiens
ggacagacatcgggg

SEQ ID NO: 208438 - DNA, 15 bp, Homo sapiens
gggacagacatcggg

SEQ ID NO: 208439 - DNA, 15 bp, Homo sapiens
ggggacagacatcgg

SEQ ID NO: 208440 - DNA, 15 bp, Homo sapiens
gggggacagacatcg

SEQ ID NO: 208441 - DNA, 15 bp, Homo sapiens
agggggacagacatc

SEQ ID NO: 208442 - DNA, 15 bp, Homo sapiens
cagggggacagacat

SEQ ID NO: 208443 - DNA, 15 bp, Homo sapiens
gcagggggacagaca

SEQ ID NO: 208444 - DNA, 15 bp, Homo sapiens
agcagggggacagac

SEQ ID NO: 208445 - DNA, 15 bp, Homo sapiens
gagcagggggacaga

SEQ ID NO: 208446 - DNA, 15 bp, Homo sapiens
ggagcagggggacag

SEQ ID NO: 208447 - DNA, 15 bp, Homo sapiens
tggagcagggggaca

SEQ ID NO: 208448 - DNA, 15 bp, Homo sapiens
ctggagcagggggac

SEQ ID NO: 208449 - DNA, 15 bp, Homo sapiens
actggagcaggggga

SEQ ID NO: 208450 - DNA, 15 bp, Homo sapiens
cactggagcaggggg

SEQ ID NO: 208451 - DNA, 15 bp, Homo sapiens
acactggagcagggg

SEQ ID NO: 208452 - DNA, 15 bp, Homo sapiens
gacactggagcaggg

SEQ ID NO: 208453 - DNA, 15 bp, Homo sapiens
ggacactggagcagg

SEQ ID NO: 208454 - DNA, 15 bp, Homo sapiens
gggacactggagcag

SEQ ID NO: 208455 - DNA, 15 bp, Homo sapiens
tgggacactggagca

SEQ ID NO: 208456 - DNA, 15 bp, Homo sapiens
gtgggacactggagc

SEQ ID NO: 208457 - DNA, 15 bp, Homo sapiens
agtgggacactggag

SEQ ID NO: 208458 - DNA, 15 bp, Homo sapiens
cagtgggacactgga

SEQ ID NO: 208459 - DNA, 15 bp, Homo sapiens
tcagtgggacactgg

SEQ ID NO: 208460 - DNA, 15 bp, Homo sapiens
ctcagtgggacactg

SEQ ID NO: 208461 - DNA, 15 bp, Homo sapiens
tctcagtgggacact

SEQ ID NO: 208462 - DNA, 15 bp, Homo sapiens
ctctcagtgggacac

SEQ ID NO: 208463 - DNA, 15 bp, Homo sapiens
tctctcagtgggaca

SEQ ID NO: 208464 - DNA, 15 bp, Homo sapiens
gtctctcagtgggac

SEQ ID NO: 208465 - DNA, 15 bp, Homo sapiens
ggtctctcagtggga

SEQ ID NO: 208466 - DNA, 15 bp, Homo sapiens
tggtctctcagtggg

SEQ ID NO: 208467 - DNA, 15 bp, Homo sapiens
atggtctctcagtgg

SEQ ID NO: 208468 - DNA, 15 bp, Homo sapiens
gatggtctctcagtg

SEQ ID NO: 208469 - DNA, 15 bp, Homo sapiens
ggatggtctctcagt

SEQ ID NO: 208470 - DNA, 15 bp, Homo sapiens
tggatggtctctcag

SEQ ID NO: 208471 - DNA, 15 bp, Homo sapiens
gtggatggtctctca

SEQ ID NO: 208472 - DNA, 15 bp, Homo sapiens
ggtggatggtctctc

SEQ ID NO: 208473 - DNA, 15 bp, Homo sapiens
aggtggatggtctct

SEQ ID NO: 208474 - DNA, 15 bp, Homo sapiens
gaggtggatggtctc

SEQ ID NO: 208475 - DNA, 15 bp, Homo sapiens
agaggtggatggtct

SEQ ID NO: 208476 - DNA, 15 bp, Homo sapiens
aagaggtggatggtc

SEQ ID NO: 208477 - DNA, 15 bp, Homo sapiens
gaagaggtggatggt

SEQ ID NO: 208478 - DNA, 15 bp, Homo sapiens
agaagaggtggatgg

SEQ ID NO: 208479 - DNA, 15 bp, Homo sapiens
aagaagaggtggatg

SEQ ID NO: 208480 - DNA, 15 bp, Homo sapiens
taagaagaggtggat

SEQ ID NO: 208481 - DNA, 15 bp, Homo sapiens
ttaagaagaggtgga

SEQ ID NO: 208482 - DNA, 15 bp, Homo sapiens
tttaagaagaggtgg

SEQ ID NO: 208483 - DNA, 15 bp, Homo sapiens
atttaagaagaggtg

SEQ ID NO: 208484 - DNA, 15 bp, Homo sapiens
catttaagaagaggt

SEQ ID NO: 208485 - DNA, 15 bp, Homo sapiens
gcatttaagaagagg

SEQ ID NO: 208486 - DNA, 15 bp, Homo sapiens
ggcatttaagaagag

SEQ ID NO: 208487 - DNA, 15 bp, Homo sapiens
aggcatttaagaaga

SEQ ID NO: 208488 - DNA, 15 bp, Homo sapiens
gaggcatttaagaag

SEQ ID NO: 208489 - DNA, 15 bp, Homo sapiens
ggaggcatttaagaa

SEQ ID NO: 208490 - DNA, 15 bp, Homo sapiens
aggaggcatttaaga

SEQ ID NO: 208491 - DNA, 15 bp, Homo sapiens
caggaggcatttaag

SEQ ID NO: 208492 - DNA, 15 bp, Homo sapiens
acaggaggcatttaa

SEQ ID NO: 208493 - DNA, 15 bp, Homo sapiens
cacaggaggcattta

SEQ ID NO: 208494 - DNA, 15 bp, Homo sapiens
gcacaggaggcattt

SEQ ID NO: 208495 - DNA, 15 bp, Homo sapiens
ggcacaggaggcatt

SEQ ID NO: 208496 - DNA, 15 bp, Homo sapiens
tggcacaggaggcat

SEQ ID NO: 208497 - DNA, 15 bp, Homo sapiens
ctggcacaggaggca

SEQ ID NO: 208498 - DNA, 15 bp, Homo sapiens
cctggcacaggaggc

SEQ ID NO: 208499 - DNA, 15 bp, Homo sapiens
ccctggcacaggagg

SEQ ID NO: 208500 - DNA, 15 bp, Homo sapiens
tccctggcacaggag

SEQ ID NO: 208501 - DNA, 15 bp, Homo sapiens
ctccctggcacagga

SEQ ID NO: 208502 - DNA, 15 bp, Homo sapiens
gctccctggcacagg

SEQ ID NO: 208503 - DNA, 15 bp, Homo sapiens
ggctccctggcacag

SEQ ID NO: 208504 - DNA, 15 bp, Homo sapiens
aggctccctggcaca

SEQ ID NO: 208505 - DNA, 15 bp, Homo sapiens
caggctccctggcac

SEQ ID NO: 208506 - DNA, 15 bp, Homo sapiens
acaggctccctggca

SEQ ID NO: 208507 - DNA, 15 bp, Homo sapiens
aacaggctccctggc

SEQ ID NO: 208508 - DNA, 15 bp, Homo sapiens
aaacaggctccctgg

SEQ ID NO: 208509 - DNA, 15 bp, Homo sapiens
gaaacaggctccctg

SEQ ID NO: 208510 - DNA, 15 bp, Homo sapiens
ggaaacaggctccct

SEQ ID NO: 208511 - DNA, 15 bp, Homo sapiens
tggaaacaggctccc

SEQ ID NO: 208512 - DNA, 15 bp, Homo sapiens
atggaaacaggctcc

SEQ ID NO: 208513 - DNA, 15 bp, Homo sapiens
gatggaaacaggctc

SEQ ID NO: 208514 - DNA, 15 bp, Homo sapiens
ggatggaaacaggct

SEQ ID NO: 208515 - DNA, 15 bp, Homo sapiens
tggatggaaacaggc

SEQ ID NO: 208516 - DNA, 15 bp, Homo sapiens
gtggatggaaacagg

SEQ ID NO: 208517 - DNA, 15 bp, Homo sapiens
cgtggatggaaacag

SEQ ID NO: 208518 - DNA, 15 bp, Homo sapiens
ccgtggatggaaaca

SEQ ID NO: 208519 - DNA, 15 bp, Homo sapiens
tccgtggatggaaac

SEQ ID NO: 208520 - DNA, 15 bp, Homo sapiens
ctccgtggatggaaa

SEQ ID NO: 208521 - DNA, 15 bp, Homo sapiens
cctccgtggatggaa

SEQ ID NO: 208522 - DNA, 15 bp, Homo sapiens
gcctccgtggatgga

SEQ ID NO: 208523 - DNA, 15 bp, Homo sapiens
ggcctccgtggatgg

SEQ ID NO: 208524 - DNA, 15 bp, Homo sapiens
gggcctccgtggatg

SEQ ID NO: 208525 - DNA, 15 bp, Homo sapiens
ggggcctccgtggat

SEQ ID NO: 208526 - DNA, 15 bp, Homo sapiens
aggggcctccgtgga

SEQ ID NO: 208527 - DNA, 15 bp, Homo sapiens
gaggggcctccgtgg

SEQ ID NO: 208528 - DNA, 15 bp, Homo sapiens
ggaggggcctccgtg

SEQ ID NO: 208529 - DNA, 15 bp, Homo sapiens
aggaggggcctccgt

SEQ ID NO: 208530 - DNA, 15 bp, Homo sapiens
taggaggggcctccg

SEQ ID NO: 208531 - DNA, 15 bp, Homo sapiens
ataggaggggcctcc

SEQ ID NO: 208532 - DNA, 15 bp, Homo sapiens
gataggaggggcctc

SEQ ID NO: 208533 - DNA, 15 bp, Homo sapiens
agataggaggggcct

SEQ ID NO: 208534 - DNA, 15 bp, Homo sapiens
aagataggaggggcc

SEQ ID NO: 208535 - DNA, 15 bp, Homo sapiens
caagataggaggggc

SEQ ID NO: 208536 - DNA, 15 bp, Homo sapiens
acaagataggagggg

SEQ ID NO: 208537 - DNA, 15 bp, Homo sapiens
cacaagataggaggg

SEQ ID NO: 208538 - DNA, 15 bp, Homo sapiens
tcacaagataggagg

SEQ ID NO: 208539 - DNA, 15 bp, Homo sapiens
ttcacaagataggag

SEQ ID NO: 208540 - DNA, 15 bp, Homo sapiens
tttcacaagatagga

SEQ ID NO: 208541 - DNA, 15 bp, Homo sapiens
ctttcacaagatagg

SEQ ID NO: 208542 - DNA, 15 bp, Homo sapiens
actttcacaagatag

SEQ ID NO: 208543 - DNA, 15 bp, Homo sapiens
gactttcacaagata

SEQ ID NO: 208544 - DNA, 15 bp, Homo sapiens
tgactttcacaagat

SEQ ID NO: 208545 - DNA, 15 bp, Homo sapiens
ctgactttcacaaga

SEQ ID NO: 208546 - DNA, 15 bp, Homo sapiens
cctgactttcacaag

SEQ ID NO: 208547 - DNA, 15 bp, Homo sapiens
gcctgactttcacaa

SEQ ID NO: 208548 - DNA, 15 bp, Homo sapiens
agcctgactttcaca

SEQ ID NO: 208549 - DNA, 15 bp, Homo sapiens
gagcctgactttcac

SEQ ID NO: 208550 - DNA, 15 bp, Homo sapiens
agagcctgactttca

SEQ ID NO: 208551 - DNA, 15 bp, Homo sapiens
tagagcctgactttc

SEQ ID NO: 208552 - DNA, 15 bp, Homo sapiens
gtagagcctgacttt

SEQ ID NO: 208553 - DNA, 15 bp, Homo sapiens
agtagagcctgactt

SEQ ID NO: 208554 - DNA, 15 bp, Homo sapiens
cagtagagcctgact

SEQ ID NO: 208555 - DNA, 15 bp, Homo sapiens
tcagtagagcctgac

SEQ ID NO: 208556 - DNA, 15 bp, Homo sapiens
ttcagtagagcctga

SEQ ID NO: 208557 - DNA, 15 bp, Homo sapiens
tttcagtagagcctg

SEQ ID NO: 208558 - DNA, 15 bp, Homo sapiens
ttttcagtagagcct

SEQ ID NO: 208559 - DNA, 15 bp, Homo sapiens
cttttcagtagagcc

SEQ ID NO: 208560 - DNA, 15 bp, Homo sapiens
gcttttcagtagagc

SEQ ID NO: 208561 - DNA, 15 bp, Homo sapiens
tgcttttcagtagag

SEQ ID NO: 208562 - DNA, 15 bp, Homo sapiens
ttgcttttcagtaga

SEQ ID NO: 208563 - DNA, 15 bp, Homo sapiens
cttgcttttcagtag

SEQ ID NO: 208564 - DNA, 15 bp, Homo sapiens
tcttgcttttcagta

SEQ ID NO: 208565 - DNA, 15 bp, Homo sapiens
ctcttgcttttcagt

SEQ ID NO: 208566 - DNA, 15 bp, Homo sapiens
tctcttgcttttcag

SEQ ID NO: 208567 - DNA, 15 bp, Homo sapiens
ctctcttgcttttca

SEQ ID NO: 208568 - DNA, 15 bp, Homo sapiens
tctctcttgcttttc

SEQ ID NO: 208569 - DNA, 15 bp, Homo sapiens
ctctctcttgctttt

SEQ ID NO: 208570 - DNA, 15 bp, Homo sapiens
tctctctcttgcttt

SEQ ID NO: 208571 - DNA, 15 bp, Homo sapiens
atctctctcttgctt

SEQ ID NO: 208572 - DNA, 15 bp, Homo sapiens
aatctctctcttgct

SEQ ID NO: 208573 - DNA, 15 bp, Homo sapiens
aaatctctctcttgc

SEQ ID NO: 208574 - DNA, 15 bp, Homo sapiens
gaaatctctctcttg

SEQ ID NO: 208575 - DNA, 15 bp, Homo sapiens
agaaatctctctctt

SEQ ID NO: 208576 - DNA, 15 bp, Homo sapiens
gagaaatctctctct

SEQ ID NO: 208577 - DNA, 15 bp, Homo sapiens
agagaaatctctctc

SEQ ID NO: 208578 - DNA, 15 bp, Homo sapiens
gagagaaatctctct

SEQ ID NO: 208579 - DNA, 15 bp, Homo sapiens
agagagaaatctctc

SEQ ID NO: 208580 - DNA, 15 bp, Homo sapiens
tagagagaaatctct

SEQ ID NO: 208581 - DNA, 15 bp, Homo sapiens
ttagagagaaatctc

SEQ ID NO: 208582 - DNA, 15 bp, Homo sapiens
tttagagagaaatct

SEQ ID NO: 208583 - DNA, 15 bp, Homo sapiens
atttagagagaaatc

SEQ ID NO: 208584 - DNA, 15 bp, Homo sapiens
gatttagagagaaat

SEQ ID NO: 208585 - DNA, 15 bp, Homo sapiens
agatttagagagaaa

SEQ ID NO: 208586 - DNA, 15 bp, Homo sapiens
aagatttagagagaa

SEQ ID NO: 208587 - DNA, 15 bp, Homo sapiens
gaagatttagagaga

SEQ ID NO: 208588 - DNA, 15 bp, Homo sapiens
agaagatttagagag

SEQ ID NO: 208589 - DNA, 15 bp, Homo sapiens
cagaagatttagaga

SEQ ID NO: 208590 - DNA, 15 bp, Homo sapiens
acagaagatttagag

SEQ ID NO: 208591 - DNA, 15 bp, Homo sapiens
gacagaagatttaga

SEQ ID NO: 208592 - DNA, 15 bp, Homo sapiens
agacagaagatttag

SEQ ID NO: 208593 - DNA, 15 bp, Homo sapiens
cagacagaagattta

SEQ ID NO: 208594 - DNA, 15 bp, Homo sapiens
ccagacagaagattt

SEQ ID NO: 208595 - DNA, 15 bp, Homo sapiens
accagacagaagatt

SEQ ID NO: 208596 - DNA, 15 bp, Homo sapiens
caccagacagaagat

SEQ ID NO: 208597 - DNA, 15 bp, Homo sapiens
ccaccagacagaaga

SEQ ID NO: 208598 - DNA, 15 bp, Homo sapiens
accaccagacagaag

SEQ ID NO: 208599 - DNA, 15 bp, Homo sapiens
aaccaccagacagaa

SEQ ID NO: 208600 - DNA, 15 bp, Homo sapiens
gaaccaccagacaga

SEQ ID NO: 208601 - DNA, 15 bp, Homo sapiens
agaaccaccagacag

SEQ ID NO: 208602 - DNA, 15 bp, Homo sapiens
cagaaccaccagaca

SEQ ID NO: 208603 - DNA, 15 bp, Homo sapiens
ccagaaccaccagac

SEQ ID NO: 208604 - DNA, 15 bp, Homo sapiens
accagaaccaccaga

SEQ ID NO: 208605 - DNA, 15 bp, Homo sapiens
gaccagaaccaccag

SEQ ID NO: 208606 - DNA, 15 bp, Homo sapiens
agaccagaaccacca

SEQ ID NO: 208607 - DNA, 15 bp, Homo sapiens
gagaccagaaccacc

SEQ ID NO: 208608 - DNA, 15 bp, Homo sapiens
ggagaccagaaccac

SEQ ID NO: 208609 - DNA, 15 bp, Homo sapiens
gggagaccagaacca

SEQ ID NO: 208610 - DNA, 15 bp, Homo sapiens
ggggagaccagaacc

SEQ ID NO: 208611 - DNA, 15 bp, Homo sapiens
gggggagaccagaac

SEQ ID NO: 208612 - DNA, 15 bp, Homo sapiens
agggggagaccagaa

SEQ ID NO: 208613 - DNA, 15 bp, Homo sapiens
cagggggagaccaga

SEQ ID NO: 208614 - DNA, 15 bp, Homo sapiens
ccagggggagaccag

SEQ ID NO: 208615 - DNA, 15 bp, Homo sapiens
cccagggggagacca

SEQ ID NO: 208616 - DNA, 15 bp, Homo sapiens
ccccagggggagacc

SEQ ID NO: 208617 - DNA, 15 bp, Homo sapiens
tccccagggggagac

SEQ ID NO: 208618 - DNA, 15 bp, Homo sapiens
atccccagggggaga

SEQ ID NO: 208619 - DNA, 15 bp, Homo sapiens
catccccagggggag

SEQ ID NO: 208620 - DNA, 15 bp, Homo sapiens
ccatccccaggggga

SEQ ID NO: 208621 - DNA, 15 bp, Homo sapiens
tccatccccaggggg

SEQ ID NO: 208622 - DNA, 15 bp, Homo sapiens
gtccatccccagggg

SEQ ID NO: 208623 - DNA, 15 bp, Homo sapiens
tgtccatccccaggg

SEQ ID NO: 208624 - DNA, 15 bp, Homo sapiens
ctgtccatccccagg

SEQ ID NO: 208625 - DNA, 15 bp, Homo sapiens
tctgtccatccccag

SEQ ID NO: 208626 - DNA, 15 bp, Homo sapiens
ttctgtccatcccca

SEQ ID NO: 208627 - DNA, 15 bp, Homo sapiens
attctgtccatcccc

SEQ ID NO: 208628 - DNA, 15 bp, Homo sapiens
tattctgtccatccc

SEQ ID NO: 208629 - DNA, 15 bp, Homo sapiens
gtattctgtccatcc

SEQ ID NO: 208630 - DNA, 15 bp, Homo sapiens
tgtattctgtccatc

SEQ ID NO: 208631 - DNA, 15 bp, Homo sapiens
atgtattctgtccat

SEQ ID NO: 208632 - DNA, 15 bp, Homo sapiens
gatgtattctgtcca

SEQ ID NO: 208633 - DNA, 15 bp, Homo sapiens
agatgtattctgtcc

SEQ ID NO: 208634 - DNA, 15 bp, Homo sapiens
cagatgtattctgtc

SEQ ID NO: 208635 - DNA, 15 bp, Homo sapiens
tcagatgtattctgt

SEQ ID NO: 208636 - DNA, 15 bp, Homo sapiens
gtcagatgtattctg

SEQ ID NO: 208637 - DNA, 15 bp, Homo sapiens
ggtcagatgtattct

SEQ ID NO: 208638 - DNA, 15 bp, Homo sapiens
tggtcagatgtattc

SEQ ID NO: 208639 - DNA, 15 bp, Homo sapiens
gtggtcagatgtatt

SEQ ID NO: 208640 - DNA, 15 bp, Homo sapiens
agtggtcagatgtat

SEQ ID NO: 208641 - DNA, 15 bp, Homo sapiens
cagtggtcagatgta

SEQ ID NO: 208642 - DNA, 15 bp, Homo sapiens
ccagtggtcagatgt

SEQ ID NO: 208643 - DNA, 15 bp, Homo sapiens
cccagtggtcagatg

SEQ ID NO: 208644 - DNA, 15 bp, Homo sapiens
gcccagtggtcagat

SEQ ID NO: 208645 - DNA, 15 bp, Homo sapiens
ggcccagtggtcaga

SEQ ID NO: 208646 - DNA, 15 bp, Homo sapiens
tggcccagtggtcag

SEQ ID NO: 208647 - DNA, 15 bp, Homo sapiens
gtggcccagtggtca

SEQ ID NO: 208648 - DNA, 15 bp, Homo sapiens
agtggcccagtggtc

SEQ ID NO: 208649 - DNA, 15 bp, Homo sapiens
gagtggcccagtggt

SEQ ID NO: 208650 - DNA, 15 bp, Homo sapiens
agagtggcccagtgg

SEQ ID NO: 208651 - DNA, 15 bp, Homo sapiens
gagagtggcccagtg

SEQ ID NO: 208652 - DNA, 15 bp, Homo sapiens
agagagtggcccagt

SEQ ID NO: 208653 - DNA, 15 bp, Homo sapiens
aagagagtggcccag

SEQ ID NO: 208654 - DNA, 15 bp, Homo sapiens
gaagagagtggccca

SEQ ID NO: 208655 - DNA, 15 bp, Homo sapiens
tgaagagagtggccc

SEQ ID NO: 208656 - DNA, 15 bp, Homo sapiens
ctgaagagagtggcc

SEQ ID NO: 208657 - DNA, 15 bp, Homo sapiens
cctgaagagagtggc

SEQ ID NO: 208658 - DNA, 15 bp, Homo sapiens
gcctgaagagagtgg

SEQ ID NO: 208659 - DNA, 15 bp, Homo sapiens
ggcctgaagagagtg

SEQ ID NO: 208660 - DNA, 15 bp, Homo sapiens
gggcctgaagagagt

SEQ ID NO: 208661 - DNA, 15 bp, Homo sapiens
agggcctgaagagag

SEQ ID NO: 208662 - DNA, 15 bp, Homo sapiens
aagggcctgaagaga

SEQ ID NO: 208663 - DNA, 15 bp, Homo sapiens
caagggcctgaagag

SEQ ID NO: 208664 - DNA, 15 bp, Homo sapiens
tcaagggcctgaaga

SEQ ID NO: 208665 - DNA, 15 bp, Homo sapiens
ttcaagggcctgaag

SEQ ID NO: 208666 - DNA, 15 bp, Homo sapiens
cttcaagggcctgaa

SEQ ID NO: 208667 - DNA, 15 bp, Homo sapiens
tcttcaagggcctga

SEQ ID NO: 208668 - DNA, 15 bp, Homo sapiens
gtcttcaagggcctg

SEQ ID NO: 208669 - DNA, 15 bp, Homo sapiens
tgtcttcaagggcct

SEQ ID NO: 208670 - DNA, 15 bp, Homo sapiens
ctgtcttcaagggcc

SEQ ID NO: 208671 - DNA, 15 bp, Homo sapiens
cctgtcttcaagggc

SEQ ID NO: 208672 - DNA, 15 bp, Homo sapiens
ccctgtcttcaaggg

SEQ ID NO: 208673 - DNA, 15 bp, Homo sapiens
gccctgtcttcaagg

SEQ ID NO: 208674 - DNA, 15 bp, Homo sapiens
agccctgtcttcaag

SEQ ID NO: 208675 - DNA, 15 bp, Homo sapiens
tagccctgtcttcaa

SEQ ID NO: 208676 - DNA, 15 bp, Homo sapiens
ttagccctgtcttca

SEQ ID NO: 208677 - DNA, 15 bp, Homo sapiens
tttagccctgtcttc

SEQ ID NO: 208678 - DNA, 15 bp, Homo sapiens
ctttagccctgtctt

SEQ ID NO: 208679 - DNA, 15 bp, Homo sapiens
gctttagccctgtct

SEQ ID NO: 208680 - DNA, 15 bp, Homo sapiens
agctttagccctgtc

SEQ ID NO: 208681 - DNA, 15 bp, Homo sapiens
gagctttagccctgt

SEQ ID NO: 208682 - DNA, 15 bp, Homo sapiens
agagctttagccctg

SEQ ID NO: 208683 - DNA, 15 bp, Homo sapiens
aagagctttagccct

SEQ ID NO: 208684 - DNA, 15 bp, Homo sapiens
gaagagctttagccc

SEQ ID NO: 208685 - DNA, 15 bp, Homo sapiens
agaagagctttagcc

SEQ ID NO: 208686 - DNA, 15 bp, Homo sapiens
aagaagagctttagc

SEQ ID NO: 208687 - DNA, 15 bp, Homo sapiens
caagaagagctttag

SEQ ID NO: 208688 - DNA, 15 bp, Homo sapiens
ccaagaagagcttta

SEQ ID NO: 208689 - DNA, 15 bp, Homo sapiens
gccaagaagagcttt

SEQ ID NO: 208690 - DNA, 15 bp, Homo sapiens
ggccaagaagagctt

SEQ ID NO: 208691 - DNA, 15 bp, Homo sapiens
aggccaagaagagct

SEQ ID NO: 208692 - DNA, 15 bp, Homo sapiens
gaggccaagaagagc

SEQ ID NO: 208693 - DNA, 15 bp, Homo sapiens
ggaggccaagaagag

SEQ ID NO: 208694 - DNA, 15 bp, Homo sapiens
tggaggccaagaaga

SEQ ID NO: 208695 - DNA, 15 bp, Homo sapiens
gtggaggccaagaag

SEQ ID NO: 208696 - DNA, 15 bp, Homo sapiens
agtggaggccaagaa

SEQ ID NO: 208697 - DNA, 15 bp, Homo sapiens
cagtggaggccaaga

SEQ ID NO: 208698 - DNA, 15 bp, Homo sapiens
gcagtggaggccaag

SEQ ID NO: 208699 - DNA, 15 bp, Homo sapiens
agcagtggaggccaa

SEQ ID NO: 208700 - DNA, 15 bp, Homo sapiens
gagcagtggaggcca

SEQ ID NO: 208701 - DNA, 15 bp, Homo sapiens
ggagcagtggaggcc

SEQ ID NO: 208702 - DNA, 15 bp, Homo sapiens
tggagcagtggaggc

SEQ ID NO: 208703 - DNA, 15 bp, Homo sapiens
ctggagcagtggagg

SEQ ID NO: 208704 - DNA, 15 bp, Homo sapiens
cctggagcagtggag

SEQ ID NO: 208705 - DNA, 15 bp, Homo sapiens
gcctggagcagtgga

SEQ ID NO: 208706 - DNA, 15 bp, Homo sapiens
agcctggagcagtgg

SEQ ID NO: 208707 - DNA, 15 bp, Homo sapiens
cagcctggagcagtg

SEQ ID NO: 208708 - DNA, 15 bp, Homo sapiens
ccagcctggagcagt

SEQ ID NO: 208709 - DNA, 15 bp, Homo sapiens
cccagcctggagcag

SEQ ID NO: 208710 - DNA, 15 bp, Homo sapiens
ccccagcctggagca

SEQ ID NO: 208711 - DNA, 15 bp, Homo sapiens
gccccagcctggagc

SEQ ID NO: 208712 - DNA, 15 bp, Homo sapiens
ggccccagcctggag

SEQ ID NO: 208713 - DNA, 15 bp, Homo sapiens
gggccccagcctgga

SEQ ID NO: 208714 - DNA, 15 bp, Homo sapiens
ggggccccagcctgg

SEQ ID NO: 208715 - DNA, 15 bp, Homo sapiens
gggggccccagcctg

SEQ ID NO: 208716 - DNA, 15 bp, Homo sapiens
tgggggccccagcct

SEQ ID NO: 208717 - DNA, 15 bp, Homo sapiens
ctgggggccccagcc

SEQ ID NO: 208718 - DNA, 15 bp, Homo sapiens
actgggggccccagc

SEQ ID NO: 208719 - DNA, 15 bp, Homo sapiens
aactgggggccccag

SEQ ID NO: 208720 - DNA, 15 bp, Homo sapiens
gaactgggggcccca

SEQ ID NO: 208721 - DNA, 15 bp, Homo sapiens
tgaactgggggcccc

SEQ ID NO: 208722 - DNA, 15 bp, Homo sapiens
atgaactgggggccc

SEQ ID NO: 208723 - DNA, 15 bp, Homo sapiens
gatgaactgggggcc

SEQ ID NO: 208724 - DNA, 15 bp, Homo sapiens
tgatgaactgggggc

SEQ ID NO: 208725 - DNA, 15 bp, Homo sapiens
ctgatgaactggggg

SEQ ID NO: 208726 - DNA, 15 bp, Homo sapiens
gctgatgaactgggg

SEQ ID NO: 208727 - DNA, 15 bp, Homo sapiens
ggctgatgaactggg

SEQ ID NO: 208728 - DNA, 15 bp, Homo sapiens
gggctgatgaactgg

SEQ ID NO: 208729 - DNA, 15 bp, Homo sapiens
ggggctgatgaactg

SEQ ID NO: 208730 - DNA, 15 bp, Homo sapiens
gggggctgatgaact

SEQ ID NO: 208731 - DNA, 15 bp, Homo sapiens
ggggggctgatgaac

SEQ ID NO: 208732 - DNA, 15 bp, Homo sapiens
aggggggctgatgaa

SEQ ID NO: 208733 - DNA, 15 bp, Homo sapiens
gaggggggctgatga

SEQ ID NO: 208734 - DNA, 15 bp, Homo sapiens
tgaggggggctgatg

SEQ ID NO: 208735 - DNA, 15 bp, Homo sapiens
ctgaggggggctgat

SEQ ID NO: 208736 - DNA, 15 bp, Homo sapiens
cctgaggggggctga

SEQ ID NO: 208737 - DNA, 15 bp, Homo sapiens
tcctgaggggggctg

SEQ ID NO: 208738 - DNA, 15 bp, Homo sapiens
ctcctgaggggggct

SEQ ID NO: 208739 - DNA, 15 bp, Homo sapiens
tctcctgaggggggc

SEQ ID NO: 208740 - DNA, 15 bp, Homo sapiens
atctcctgagggggg

SEQ ID NO: 208741 - DNA, 15 bp, Homo sapiens
tatctcctgaggggg

SEQ ID NO: 208742 - DNA, 15 bp, Homo sapiens
ttatctcctgagggg

SEQ ID NO: 208743 - DNA, 15 bp, Homo sapiens
attatctcctgaggg

SEQ ID NO: 208744 - DNA, 15 bp, Homo sapiens
aattatctcctgagg

SEQ ID NO: 208745 - DNA, 15 bp, Homo sapiens
caattatctcctgag

SEQ ID NO: 208746 - DNA, 15 bp, Homo sapiens
gcaattatctcctga

SEQ ID NO: 208747 - DNA, 15 bp, Homo sapiens
tgcaattatctcctg

SEQ ID NO: 208748 - DNA, 15 bp, Homo sapiens
ttgcaattatctcct

SEQ ID NO: 208749 - DNA, 15 bp, Homo sapiens
cttgcaattatctcc

SEQ ID NO: 208750 - DNA, 15 bp, Homo sapiens
tcttgcaattatctc

SEQ ID NO: 208751 - DNA, 15 bp, Homo sapiens
ctcttgcaattatct

SEQ ID NO: 208752 - DNA, 15 bp, Homo sapiens
gctcttgcaattatc

SEQ ID NO: 208753 - DNA, 15 bp, Homo sapiens
ggctcttgcaattat

SEQ ID NO: 208754 - DNA, 15 bp, Homo sapiens
aggctcttgcaatta

SEQ ID NO: 208755 - DNA, 15 bp, Homo sapiens
aaggctcttgcaatt

SEQ ID NO: 208756 - DNA, 15 bp, Homo sapiens
gaaggctcttgcaat

SEQ ID NO: 208757 - DNA, 15 bp, Homo sapiens
tgaaggctcttgcaa

SEQ ID NO: 208758 - DNA, 15 bp, Homo sapiens
gtgaaggctcttgca

SEQ ID NO: 208759 - DNA, 15 bp, Homo sapiens
agtgaaggctcttgc

SEQ ID NO: 208760 - DNA, 15 bp, Homo sapiens
cagtgaaggctcttg

SEQ ID NO: 208761 - DNA, 15 bp, Homo sapiens
gcagtgaaggctctt

SEQ ID NO: 208762 - DNA, 15 bp, Homo sapiens
agcagtgaaggctct

SEQ ID NO: 208763 - DNA, 15 bp, Homo sapiens
gagcagtgaaggctc

SEQ ID NO: 208764 - DNA, 15 bp, Homo sapiens
ggagcagtgaaggct

SEQ ID NO: 208765 - DNA, 15 bp, Homo sapiens
cggagcagtgaaggc

SEQ ID NO: 208766 - DNA, 15 bp, Homo sapiens
acggagcagtgaagg

SEQ ID NO: 208767 - DNA, 15 bp, Homo sapiens
aacggagcagtgaag

SEQ ID NO: 208768 - DNA, 15 bp, Homo sapiens
aaacggagcagtgaa

SEQ ID NO: 208769 - DNA, 15 bp, Homo sapiens
gaaacggagcagtga

SEQ ID NO: 208770 - DNA, 15 bp, Homo sapiens
agaaacggagcagtg

SEQ ID NO: 208771 - DNA, 15 bp, Homo sapiens
gagaaacggagcagt

SEQ ID NO: 208772 - DNA, 15 bp, Homo sapiens
tgagaaacggagcag

SEQ ID NO: 208773 - DNA, 15 bp, Homo sapiens
ctgagaaacggagca

SEQ ID NO: 208774 - DNA, 15 bp, Homo sapiens
tctgagaaacggagc

SEQ ID NO: 208775 - DNA, 15 bp, Homo sapiens
ctctgagaaacggag

SEQ ID NO: 208776 - DNA, 15 bp, Homo sapiens
cctctgagaaacgga

SEQ ID NO: 208777 - DNA, 15 bp, Homo sapiens
tcctctgagaaacgg

SEQ ID NO: 208778 - DNA, 15 bp, Homo sapiens
atcctctgagaaacg

SEQ ID NO: 208779 - DNA, 15 bp, Homo sapiens
catcctctgagaaac

SEQ ID NO: 208780 - DNA, 15 bp, Homo sapiens
acatcctctgagaaa

SEQ ID NO: 208781 - DNA, 15 bp, Homo sapiens
cacatcctctgagaa

SEQ ID NO: 208782 - DNA, 15 bp, Homo sapiens
tcacatcctctgaga

SEQ ID NO: 208783 - DNA, 15 bp, Homo sapiens
ctcacatcctctgag

SEQ ID NO: 208784 - DNA, 15 bp, Homo sapiens
actcacatcctctga

SEQ ID NO: 208785 - DNA, 15 bp, Homo sapiens
cactcacatcctctg

SEQ ID NO: 208786 - DNA, 15 bp, Homo sapiens
acactcacatcctct

SEQ ID NO: 208787 - DNA, 15 bp, Homo sapiens
aacactcacatcctc

SEQ ID NO: 208788 - DNA, 15 bp, Homo sapiens
gaacactcacatcct

SEQ ID NO: 208789 - DNA, 15 bp, Homo sapiens
tgaacactcacatcc

SEQ ID NO: 208790 - DNA, 15 bp, Homo sapiens
ctgaacactcacatc

SEQ ID NO: 208791 - DNA, 15 bp, Homo sapiens
actgaacactcacat

SEQ ID NO: 208792 - DNA, 15 bp, Homo sapiens
aactgaacactcaca

SEQ ID NO: 208793 - DNA, 15 bp, Homo sapiens
gaactgaacactcac

SEQ ID NO: 208794 - DNA, 15 bp, Homo sapiens
agaactgaacactca

SEQ ID NO: 208795 - DNA, 15 bp, Homo sapiens
cagaactgaacactc

SEQ ID NO: 208796 - DNA, 15 bp, Homo sapiens
gcagaactgaacact

SEQ ID NO: 208797 - DNA, 15 bp, Homo sapiens
cgcagaactgaacac

SEQ ID NO: 208798 - DNA, 15 bp, Homo sapiens
ccgcagaactgaaca

SEQ ID NO: 208799 - DNA, 15 bp, Homo sapiens
accgcagaactgaac

SEQ ID NO: 208800 - DNA, 15 bp, Homo sapiens
gaccgcagaactgaa

SEQ ID NO: 208801 - DNA, 15 bp, Homo sapiens
ggaccgcagaactga

SEQ ID NO: 208802 - DNA, 15 bp, Homo sapiens
tggaccgcagaactg

SEQ ID NO: 208803 - DNA, 15 bp, Homo sapiens
ctggaccgcagaact

SEQ ID NO: 208804 - DNA, 15 bp, Homo sapiens
gctggaccgcagaac

SEQ ID NO: 208805 - DNA, 15 bp, Homo sapiens
tgctggaccgcagaa

SEQ ID NO: 208806 - DNA, 15 bp, Homo sapiens
ttgctggaccgcaga

SEQ ID NO: 208807 - DNA, 15 bp, Homo sapiens
gttgctggaccgcag

SEQ ID NO: 208808 - DNA, 15 bp, Homo sapiens
agttgctggaccgca

SEQ ID NO: 208809 - DNA, 15 bp, Homo sapiens
gagttgctggaccgc

SEQ ID NO: 208810 - DNA, 15 bp, Homo sapiens
ggagttgctggaccg

SEQ ID NO: 208811 - DNA, 15 bp, Homo sapiens
aggagttgctggacc

SEQ ID NO: 208812 - DNA, 15 bp, Homo sapiens
gaggagttgctggac

SEQ ID NO: 208813 - DNA, 15 bp, Homo sapiens
ggaggagttgctgga

SEQ ID NO: 208814 - DNA, 15 bp, Homo sapiens
tggaggagttgctgg

SEQ ID NO: 208815 - DNA, 15 bp, Homo sapiens
ttggaggagttgctg

SEQ ID NO: 208816 - DNA, 15 bp, Homo sapiens
attggaggagttgct

SEQ ID NO: 208817 - DNA, 15 bp, Homo sapiens
cattggaggagttgc

SEQ ID NO: 208818 - DNA, 15 bp, Homo sapiens
gcattggaggagttg

SEQ ID NO: 208819 - DNA, 15 bp, Homo sapiens
ggcattggaggagtt

SEQ ID NO: 208820 - DNA, 15 bp, Homo sapiens
aggcattggaggagt

SEQ ID NO: 208821 - DNA, 15 bp, Homo sapiens
caggcattggaggag

SEQ ID NO: 208822 - DNA, 15 bp, Homo sapiens
gcaggcattggagga

SEQ ID NO: 208823 - DNA, 15 bp, Homo sapiens
ggcaggcattggagg

SEQ ID NO: 208824 - DNA, 15 bp, Homo sapiens
aggcaggcattggag

SEQ ID NO: 208825 - DNA, 15 bp, Homo sapiens
gaggcaggcattgga

SEQ ID NO: 208826 - DNA, 15 bp, Homo sapiens
ggaggcaggcattgg

SEQ ID NO: 208827 - DNA, 15 bp, Homo sapiens
aggaggcaggcattg

SEQ ID NO: 208828 - DNA, 15 bp, Homo sapiens
caggaggcaggcatt

SEQ ID NO: 208829 - DNA, 15 bp, Homo sapiens
ccaggaggcaggcat

SEQ ID NO: 208830 - DNA, 15 bp, Homo sapiens
cccaggaggcaggca

SEQ ID NO: 208831 - DNA, 15 bp, Homo sapiens
ccccaggaggcaggc

SEQ ID NO: 208832 - DNA, 15 bp, Homo sapiens
tccccaggaggcagg

SEQ ID NO: 208833 - DNA, 15 bp, Homo sapiens
atccccaggaggcag

SEQ ID NO: 208834 - DNA, 15 bp, Homo sapiens
tatccccaggaggca

SEQ ID NO: 208835 - DNA, 15 bp, Homo sapiens
ctatccccaggaggc

SEQ ID NO: 208836 - DNA, 15 bp, Homo sapiens
gctatccccaggagg

SEQ ID NO: 208837 - DNA, 15 bp, Homo sapiens
agctatccccaggag

SEQ ID NO: 208838 - DNA, 15 bp, Homo sapiens
cagctatccccagga

SEQ ID NO: 208839 - DNA, 15 bp, Homo sapiens
acagctatccccagg

SEQ ID NO: 208840 - DNA, 15 bp, Homo sapiens
tacagctatccccag

SEQ ID NO: 208841 - DNA, 15 bp, Homo sapiens
ttacagctatcccca

SEQ ID NO: 208842 - DNA, 15 bp, Homo sapiens
attacagctatcccc

SEQ ID NO: 208843 - DNA, 15 bp, Homo sapiens
aattacagctatccc

SEQ ID NO: 208844 - DNA, 15 bp, Homo sapiens
gaattacagctatcc

SEQ ID NO: 208845 - DNA, 15 bp, Homo sapiens
agaattacagctatc

SEQ ID NO: 208846 - DNA, 15 bp, Homo sapiens
cagaattacagctat

SEQ ID NO: 208847 - DNA, 15 bp, Homo sapiens
ccagaattacagcta

SEQ ID NO: 208848 - DNA, 15 bp, Homo sapiens
cccagaattacagct

SEQ ID NO: 208849 - DNA, 15 bp, Homo sapiens
acccagaattacagc

SEQ ID NO: 208850 - DNA, 15 bp, Homo sapiens
aacccagaattacag

SEQ ID NO: 208851 - DNA, 15 bp, Homo sapiens
caacccagaattaca

SEQ ID NO: 208852 - DNA, 15 bp, Homo sapiens
tcaacccagaattac

SEQ ID NO: 208853 - DNA, 15 bp, Homo sapiens
ctcaacccagaatta

SEQ ID NO: 208854 - DNA, 15 bp, Homo sapiens
tctcaacccagaatt

SEQ ID NO: 208855 - DNA, 15 bp, Homo sapiens
atctcaacccagaat

SEQ ID NO: 208856 - DNA, 15 bp, Homo sapiens
catctcaacccagaa

SEQ ID NO: 208857 - DNA, 15 bp, Homo sapiens
tcatctcaacccaga

SEQ ID NO: 208858 - DNA, 15 bp, Homo sapiens
ttcatctcaacccag

SEQ ID NO: 208859 - DNA, 15 bp, Homo sapiens
tttcatctcaaccca

SEQ ID NO: 208860 - DNA, 15 bp, Homo sapiens
ctttcatctcaaccc

SEQ ID NO: 208861 - DNA, 15 bp, Homo sapiens
actttcatctcaacc

SEQ ID NO: 208862 - DNA, 15 bp, Homo sapiens
aactttcatctcaac

SEQ ID NO: 208863 - DNA, 15 bp, Homo sapiens
caactttcatctcaa

SEQ ID NO: 208864 - DNA, 15 bp, Homo sapiens
ccaactttcatctca

SEQ ID NO: 208865 - DNA, 15 bp, Homo sapiens
gccaactttcatctc

SEQ ID NO: 208866 - DNA, 15 bp, Homo sapiens
ggccaactttcatct

SEQ ID NO: 208867 - DNA, 15 bp, Homo sapiens
tggccaactttcatc

SEQ ID NO: 208868 - DNA, 15 bp, Homo sapiens
ctggccaactttcat

SEQ ID NO: 208869 - DNA, 15 bp, Homo sapiens
actggccaactttca

SEQ ID NO: 208870 - DNA, 15 bp, Homo sapiens
aactggccaactttc

SEQ ID NO: 208871 - DNA, 15 bp, Homo sapiens
caactggccaacttt

SEQ ID NO: 208872 - DNA, 15 bp, Homo sapiens
tcaactggccaactt

SEQ ID NO: 208873 - DNA, 15 bp, Homo sapiens
ttcaactggccaact

SEQ ID NO: 208874 - DNA, 15 bp, Homo sapiens
cttcaactggccaac

SEQ ID NO: 208875 - DNA, 15 bp, Homo sapiens
acttcaactggccaa

SEQ ID NO: 208876 - DNA, 15 bp, Homo sapiens
gacttcaactggcca

SEQ ID NO: 208877 - DNA, 15 bp, Homo sapiens
tgacttcaactggcc

SEQ ID NO: 208878 - DNA, 15 bp, Homo sapiens
ttgacttcaactggc

SEQ ID NO: 208879 - DNA, 15 bp, Homo sapiens
gttgacttcaactgg

SEQ ID NO: 208880 - DNA, 15 bp, Homo sapiens
agttgacttcaactg

SEQ ID NO: 208881 - DNA, 15 bp, Homo sapiens
cagttgacttcaact

SEQ ID NO: 208882 - DNA, 15 bp, Homo sapiens
ccagttgacttcaac

SEQ ID NO: 208883 - DNA, 15 bp, Homo sapiens
gccagttgacttcaa

SEQ ID NO: 208884 - DNA, 15 bp, Homo sapiens
ggccagttgacttca

SEQ ID NO: 208885 - DNA, 15 bp, Homo sapiens
aggccagttgacttc

SEQ ID NO: 208886 - DNA, 15 bp, Homo sapiens
aaggccagttgactt

SEQ ID NO: 208887 - DNA, 15 bp, Homo sapiens
aaaggccagttgact

SEQ ID NO: 208888 - DNA, 15 bp, Homo sapiens
caaaggccagttgac

SEQ ID NO: 208889 - DNA, 15 bp, Homo sapiens
ccaaaggccagttga

SEQ ID NO: 208890 - DNA, 15 bp, Homo sapiens
accaaaggccagttg

SEQ ID NO: 208891 - DNA, 15 bp, Homo sapiens
aaccaaaggccagtt

SEQ ID NO: 208892 - DNA, 15 bp, Homo sapiens
caaccaaaggccagt

SEQ ID NO: 208893 - DNA, 15 bp, Homo sapiens
tcaaccaaaggccag

SEQ ID NO: 208894 - DNA, 15 bp, Homo sapiens
ctcaaccaaaggcca

SEQ ID NO: 208895 - DNA, 15 bp, Homo sapiens
cctcaaccaaaggcc

SEQ ID NO: 208896 - DNA, 15 bp, Homo sapiens
ccctcaaccaaaggc

SEQ ID NO: 208897 - DNA, 15 bp, Homo sapiens
gccctcaaccaaagg

SEQ ID NO: 208898 - DNA, 15 bp, Homo sapiens
ggccctcaaccaaag

SEQ ID NO: 208899 - DNA, 15 bp, Homo sapiens
aggccctcaaccaaa

SEQ ID NO: 208900 - DNA, 15 bp, Homo sapiens
taggccctcaaccaa

SEQ ID NO: 208901 - DNA, 15 bp, Homo sapiens
ataggccctcaacca

SEQ ID NO: 208902 - DNA, 15 bp, Homo sapiens
cataggccctcaacc

SEQ ID NO: 208903 - DNA, 15 bp, Homo sapiens
ccataggccctcaac

SEQ ID NO: 208904 - DNA, 15 bp, Homo sapiens
accataggccctcaa

SEQ ID NO: 208905 - DNA, 15 bp, Homo sapiens
caccataggccctca

SEQ ID NO: 208906 - DNA, 15 bp, Homo sapiens
tcaccataggccctc

SEQ ID NO: 208907 - DNA, 15 bp, Homo sapiens
ttcaccataggccct

SEQ ID NO: 208908 - DNA, 15 bp, Homo sapiens
tttcaccataggccc

SEQ ID NO: 208909 - DNA, 15 bp, Homo sapiens
ttttcaccataggcc

SEQ ID NO: 208910 - DNA, 15 bp, Homo sapiens
gttttcaccataggc

SEQ ID NO: 208911 - DNA, 15 bp, Homo sapiens
tgttttcaccatagg

SEQ ID NO: 208912 - DNA, 15 bp, Homo sapiens
ctgttttcaccatag

SEQ ID NO: 208913 - DNA, 15 bp, Homo sapiens
tctgttttcaccata

SEQ ID NO: 208914 - DNA, 15 bp, Homo sapiens
gtctgttttcaccat

SEQ ID NO: 208915 - DNA, 15 bp, Homo sapiens
agtctgttttcacca

SEQ ID NO: 208916 - DNA, 15 bp, Homo sapiens
aagtctgttttcacc

SEQ ID NO: 208917 - DNA, 15 bp, Homo sapiens
gaagtctgttttcac

SEQ ID NO: 208918 - DNA, 15 bp, Homo sapiens
tgaagtctgttttca

SEQ ID NO: 208919 - DNA, 15 bp, Homo sapiens
atgaagtctgttttc

SEQ ID NO: 208920 - DNA, 15 bp, Homo sapiens
gatgaagtctgtttt

SEQ ID NO: 208921 - DNA, 15 bp, Homo sapiens
agatgaagtctgttt

SEQ ID NO: 208922 - DNA, 15 bp, Homo sapiens
tagatgaagtctgtt

SEQ ID NO: 208923 - DNA, 15 bp, Homo sapiens
ttagatgaagtctgt

SEQ ID NO: 208924 - DNA, 15 bp, Homo sapiens
tttagatgaagtctg

SEQ ID NO: 208925 - DNA, 15 bp, Homo sapiens
ttttagatgaagtct

SEQ ID NO: 208926 - DNA, 15 bp, Homo sapiens
tttttagatgaagtc

SEQ ID NO: 208927 - DNA, 15 bp, Homo sapiens
ctttttagatgaagt

SEQ ID NO: 208928 - DNA, 15 bp, Homo sapiens
tctttttagatgaag

SEQ ID NO: 208929 - DNA, 15 bp, Homo sapiens
ttctttttagatgaa

SEQ ID NO: 208930 - DNA, 15 bp, Homo sapiens
gttctttttagatga

SEQ ID NO: 208931 - DNA, 15 bp, Homo sapiens
agttctttttagatg

SEQ ID NO: 208932 - DNA, 15 bp, Homo sapiens
gagttctttttagat

SEQ ID NO: 208933 - DNA, 15 bp, Homo sapiens
tgagttctttttaga

SEQ ID NO: 208934 - DNA, 15 bp, Homo sapiens
ctgagttctttttag

SEQ ID NO: 208935 - DNA, 15 bp, Homo sapiens
actgagttcttttta

SEQ ID NO: 208936 - DNA, 15 bp, Homo sapiens
gactgagttcttttt

SEQ ID NO: 208937 - DNA, 15 bp, Homo sapiens
tgactgagttctttt

SEQ ID NO: 208938 - DNA, 15 bp, Homo sapiens
ctgactgagttcttt

SEQ ID NO: 208939 - DNA, 15 bp, Homo sapiens
gctgactgagttctt

SEQ ID NO: 208940 - DNA, 15 bp, Homo sapiens
tgctgactgagttct

SEQ ID NO: 208941 - DNA, 15 bp, Homo sapiens
ctgctgactgagttc

SEQ ID NO: 208942 - DNA, 15 bp, Homo sapiens
cctgctgactgagtt

SEQ ID NO: 208943 - DNA, 15 bp, Homo sapiens
gcctgctgactgagt

SEQ ID NO: 208944 - DNA, 15 bp, Homo sapiens
tgcctgctgactgag

SEQ ID NO: 208945 - DNA, 15 bp, Homo sapiens
gtgcctgctgactga

SEQ ID NO: 208946 - DNA, 15 bp, Homo sapiens
ggtgcctgctgactg

SEQ ID NO: 208947 - DNA, 15 bp, Homo sapiens
aggtgcctgctgact

SEQ ID NO: 208948 - DNA, 15 bp, Homo sapiens
caggtgcctgctgac

SEQ ID NO: 208949 - DNA, 15 bp, Homo sapiens
gcaggtgcctgctga

SEQ ID NO: 208950 - DNA, 15 bp, Homo sapiens
tgcaggtgcctgctg

SEQ ID NO: 208951 - DNA, 15 bp, Homo sapiens
gtgcaggtgcctgct

SEQ ID NO: 208952 - DNA, 15 bp, Homo sapiens
agtgcaggtgcctgc

SEQ ID NO: 208953 - DNA, 15 bp, Homo sapiens
aagtgcaggtgcctg

SEQ ID NO: 208954 - DNA, 15 bp, Homo sapiens
aaagtgcaggtgcct

SEQ ID NO: 208955 - DNA, 15 bp, Homo sapiens
caaagtgcaggtgcc

SEQ ID NO: 208956 - DNA, 15 bp, Homo sapiens
ccaaagtgcaggtgc

SEQ ID NO: 208957 - DNA, 15 bp, Homo sapiens
tccaaagtgcaggtg

SEQ ID NO: 208958 - DNA, 15 bp, Homo sapiens
ttccaaagtgcaggt

SEQ ID NO: 208959 - DNA, 15 bp, Homo sapiens
attccaaagtgcagg

SEQ ID NO: 208960 - DNA, 15 bp, Homo sapiens
gattccaaagtgcag

SEQ ID NO: 208961 - DNA, 15 bp, Homo sapiens
tgattccaaagtgca

SEQ ID NO: 208962 - DNA, 15 bp, Homo sapiens
ctgattccaaagtgc

SEQ ID NO: 208963 - DNA, 15 bp, Homo sapiens
cctgattccaaagtg

SEQ ID NO: 208964 - DNA, 15 bp, Homo sapiens
ccctgattccaaagt

SEQ ID NO: 208965 - DNA, 15 bp, Homo sapiens
tccctgattccaaag

SEQ ID NO: 208966 - DNA, 15 bp, Homo sapiens
ctccctgattccaaa

SEQ ID NO: 208967 - DNA, 15 bp, Homo sapiens
cctccctgattccaa

SEQ ID NO: 208968 - DNA, 15 bp, Homo sapiens
tcctccctgattcca

SEQ ID NO: 208969 - DNA, 15 bp, Homo sapiens
ctcctccctgattcc

SEQ ID NO: 208970 - DNA, 15 bp, Homo sapiens
tctcctccctgattc

SEQ ID NO: 208971 - DNA, 15 bp, Homo sapiens
ttctcctccctgatt

SEQ ID NO: 208972 - DNA, 15 bp, Homo sapiens
tttctcctccctgat

SEQ ID NO: 208973 - DNA, 15 bp, Homo sapiens
ctttctcctccctga

SEQ ID NO: 208974 - DNA, 15 bp, Homo sapiens
tctttctcctccctg

SEQ ID NO: 208975 - DNA, 15 bp, Homo sapiens
atctttctcctccct

SEQ ID NO: 208976 - DNA, 15 bp, Homo sapiens
catctttctcctccc

SEQ ID NO: 208977 - DNA, 15 bp, Homo sapiens
ccatctttctcctcc

SEQ ID NO: 208978 - DNA, 15 bp, Homo sapiens
tccatctttctcctc

SEQ ID NO: 208979 - DNA, 15 bp, Homo sapiens
ctccatctttctcct

SEQ ID NO: 208980 - DNA, 15 bp, Homo sapiens
tctccatctttctcc

SEQ ID NO: 208981 - DNA, 15 bp, Homo sapiens
gtctccatctttctc

SEQ ID NO: 208982 - DNA, 15 bp, Homo sapiens
agtctccatctttct

SEQ ID NO: 208983 - DNA, 15 bp, Homo sapiens
tagtctccatctttc

SEQ ID NO: 208984 - DNA, 15 bp, Homo sapiens
ctagtctccatcttt

SEQ ID NO: 208985 - DNA, 15 bp, Homo sapiens
cctagtctccatctt

SEQ ID NO: 208986 - DNA, 15 bp, Homo sapiens
tcctagtctccatct

SEQ ID NO: 208987 - DNA, 15 bp, Homo sapiens
ttcctagtctccatc

SEQ ID NO: 208988 - DNA, 15 bp, Homo sapiens
gttcctagtctccat

SEQ ID NO: 208989 - DNA, 15 bp, Homo sapiens
agttcctagtctcca

SEQ ID NO: 208990 - DNA, 15 bp, Homo sapiens
cagttcctagtctcc

SEQ ID NO: 208991 - DNA, 15 bp, Homo sapiens
tcagttcctagtctc

SEQ ID NO: 208992 - DNA, 15 bp, Homo sapiens
gtcagttcctagtct

SEQ ID NO: 208993 - DNA, 15 bp, Homo sapiens
tgtcagttcctagtc

SEQ ID NO: 208994 - DNA, 15 bp, Homo sapiens
ctgtcagttcctagt

SEQ ID NO: 208995 - DNA, 15 bp, Homo sapiens
tctgtcagttcctag

SEQ ID NO: 208996 - DNA, 15 bp, Homo sapiens
ttctgtcagttccta

SEQ ID NO: 208997 - DNA, 15 bp, Homo sapiens
cttctgtcagttcct

SEQ ID NO: 208998 - DNA, 15 bp, Homo sapiens
ccttctgtcagttcc

SEQ ID NO: 208999 - DNA, 15 bp, Homo sapiens
cccttctgtcagttc

SEQ ID NO: 209000 - DNA, 15 bp, Homo sapiens
acccttctgtcagtt

SEQ ID NO: 209001 - DNA, 15 bp, Homo sapiens
aacccttctgtcagt

SEQ ID NO: 209002 - DNA, 15 bp, Homo sapiens
aaacccttctgtcag

SEQ ID NO: 209003 - DNA, 15 bp, Homo sapiens
aaaacccttctgtca

SEQ ID NO: 209004 - DNA, 15 bp, Homo sapiens
gaaaacccttctgtc

SEQ ID NO: 209005 - DNA, 15 bp, Homo sapiens
ggaaaacccttctgt

SEQ ID NO: 209006 - DNA, 15 bp, Homo sapiens
aggaaaacccttctg

SEQ ID NO: 209007 - DNA, 15 bp, Homo sapiens
gaggaaaacccttct

SEQ ID NO: 209008 - DNA, 15 bp, Homo sapiens
cgaggaaaacccttc

SEQ ID NO: 209009 - DNA, 15 bp, Homo sapiens
acgaggaaaaccctt

SEQ ID NO: 209010 - DNA, 15 bp, Homo sapiens
cacgaggaaaaccct

SEQ ID NO: 209011 - DNA, 15 bp, Homo sapiens
acacgaggaaaaccc

SEQ ID NO: 209012 - DNA, 15 bp, Homo sapiens
cacacgaggaaaacc

SEQ ID NO: 209013 - DNA, 15 bp, Homo sapiens
tcacacgaggaaaac

SEQ ID NO: 209014 - DNA, 15 bp, Homo sapiens
ttcacacgaggaaaa

SEQ ID NO: 209015 - DNA, 15 bp, Homo sapiens
cttcacacgaggaaa

SEQ ID NO: 209016 - DNA, 15 bp, Homo sapiens
ccttcacacgaggaa

SEQ ID NO: 209017 - DNA, 15 bp, Homo sapiens
cccttcacacgagga

SEQ ID NO: 209018 - DNA, 15 bp, Homo sapiens
gcccttcacacgagg

SEQ ID NO: 209019 - DNA, 15 bp, Homo sapiens
tgcccttcacacgag

SEQ ID NO: 209020 - DNA, 15 bp, Homo sapiens
ctgcccttcacacga

SEQ ID NO: 209021 - DNA, 15 bp, Homo sapiens
gctgcccttcacacg

SEQ ID NO: 209022 - DNA, 15 bp, Homo sapiens
tgctgcccttcacac

SEQ ID NO: 209023 - DNA, 15 bp, Homo sapiens
gtgctgcccttcaca

SEQ ID NO: 209024 - DNA, 15 bp, Homo sapiens
ggtgctgcccttcac

SEQ ID NO: 209025 - DNA, 15 bp, Homo sapiens
tggtgctgcccttca

SEQ ID NO: 209026 - DNA, 15 bp, Homo sapiens
ctggtgctgcccttc

SEQ ID NO: 209027 - DNA, 15 bp, Homo sapiens
cctggtgctgccctt

SEQ ID NO: 209028 - DNA, 15 bp, Homo sapiens
gcctggtgctgccct

SEQ ID NO: 209029 - DNA, 15 bp, Homo sapiens
ggcctggtgctgccc

SEQ ID NO: 209030 - DNA, 15 bp, Homo sapiens
tggcctggtgctgcc

SEQ ID NO: 209031 - DNA, 15 bp, Homo sapiens
atggcctggtgctgc

SEQ ID NO: 209032 - DNA, 15 bp, Homo sapiens
catggcctggtgctg

SEQ ID NO: 209033 - DNA, 15 bp, Homo sapiens
tcatggcctggtgct

SEQ ID NO: 209034 - DNA, 15 bp, Homo sapiens
ctcatggcctggtgc

SEQ ID NO: 209035 - DNA, 15 bp, Homo sapiens
cctcatggcctggtg

SEQ ID NO: 209036 - DNA, 15 bp, Homo sapiens
acctcatggcctggt

SEQ ID NO: 209037 - DNA, 15 bp, Homo sapiens
cacctcatggcctgg

SEQ ID NO: 209038 - DNA, 15 bp, Homo sapiens
tcacctcatggcctg

SEQ ID NO: 209039 - DNA, 15 bp, Homo sapiens
gtcacctcatggcct

SEQ ID NO: 209040 - DNA, 15 bp, Homo sapiens
ggtcacctcatggcc

SEQ ID NO: 209041 - DNA, 15 bp, Homo sapiens
gggtcacctcatggc

SEQ ID NO: 209042 - DNA, 15 bp, Homo sapiens
tgggtcacctcatgg

SEQ ID NO: 209043 - DNA, 15 bp, Homo sapiens
ctgggtcacctcatg

SEQ ID NO: 209044 - DNA, 15 bp, Homo sapiens
cctgggtcacctcat

SEQ ID NO: 209045 - DNA, 15 bp, Homo sapiens
ccctgggtcacctca

SEQ ID NO: 209046 - DNA, 15 bp, Homo sapiens
gccctgggtcacctc

SEQ ID NO: 209047 - DNA, 15 bp, Homo sapiens
tgccctgggtcacct

SEQ ID NO: 209048 - DNA, 15 bp, Homo sapiens
ctgccctgggtcacc

SEQ ID NO: 209049 - DNA, 15 bp, Homo sapiens
cctgccctgggtcac

SEQ ID NO: 209050 - DNA, 15 bp, Homo sapiens
gcctgccctgggtca

SEQ ID NO: 209051 - DNA, 15 bp, Homo sapiens
ggcctgccctgggtc

SEQ ID NO: 209052 - DNA, 15 bp, Homo sapiens
tggcctgccctgggt

SEQ ID NO: 209053 - DNA, 15 bp, Homo sapiens
gtggcctgccctggg

SEQ ID NO: 209054 - DNA, 15 bp, Homo sapiens
tgtggcctgccctgg

SEQ ID NO: 209055 - DNA, 15 bp, Homo sapiens
ctgtggcctgccctg

SEQ ID NO: 209056 - DNA, 15 bp, Homo sapiens
gctgtggcctgccct

SEQ ID NO: 209057 - DNA, 15 bp, Homo sapiens
ggctgtggcctgccc

SEQ ID NO: 209058 - DNA, 15 bp, Homo sapiens
cggctgtggcctgcc

SEQ ID NO: 209059 - DNA, 15 bp, Homo sapiens
acggctgtggcctgc

SEQ ID NO: 209060 - DNA, 15 bp, Homo sapiens
cacggctgtggcctg

SEQ ID NO: 209061 - DNA, 15 bp, Homo sapiens
ccacggctgtggcct

SEQ ID NO: 209062 - DNA, 15 bp, Homo sapiens
tccacggctgtggcc

SEQ ID NO: 209063 - DNA, 15 bp, Homo sapiens
ctccacggctgtggc

SEQ ID NO: 209064 - DNA, 15 bp, Homo sapiens
cctccacggctgtgg

SEQ ID NO: 209065 - DNA, 15 bp, Homo sapiens
ccctccacggctgtg

SEQ ID NO: 209066 - DNA, 15 bp, Homo sapiens
accctccacggctgt

SEQ ID NO: 209067 - DNA, 15 bp, Homo sapiens
aaccctccacggctg

SEQ ID NO: 209068 - DNA, 15 bp, Homo sapiens
taaccctccacggct

SEQ ID NO: 209069 - DNA, 15 bp, Homo sapiens
ctaaccctccacggc

SEQ ID NO: 209070 - DNA, 15 bp, Homo sapiens
cctaaccctccacgg

SEQ ID NO: 209071 - DNA, 15 bp, Homo sapiens
ccctaaccctccacg

SEQ ID NO: 209072 - DNA, 15 bp, Homo sapiens
accctaaccctccac

SEQ ID NO: 209073 - DNA, 15 bp, Homo sapiens
taccctaaccctcca

SEQ ID NO: 209074 - DNA, 15 bp, Homo sapiens
gtaccctaaccctcc

SEQ ID NO: 209075 - DNA, 15 bp, Homo sapiens
tgtaccctaaccctc

SEQ ID NO: 209076 - DNA, 15 bp, Homo sapiens
ctgtaccctaaccct

SEQ ID NO: 209077 - DNA, 15 bp, Homo sapiens
gctgtaccctaaccc

SEQ ID NO: 209078 - DNA, 15 bp, Homo sapiens
tgctgtaccctaacc

SEQ ID NO: 209079 - DNA, 15 bp, Homo sapiens
gtgctgtaccctaac

SEQ ID NO: 209080 - DNA, 15 bp, Homo sapiens
ggtgctgtaccctaa

SEQ ID NO: 209081 - DNA, 15 bp, Homo sapiens
gggtgctgtacccta

SEQ ID NO: 209082 - DNA, 15 bp, Homo sapiens
agggtgctgtaccct

SEQ ID NO: 209083 - DNA, 15 bp, Homo sapiens
cagggtgctgtaccc

SEQ ID NO: 209084 - DNA, 15 bp, Homo sapiens
ccagggtgctgtacc

SEQ ID NO: 209085 - DNA, 15 bp, Homo sapiens
accagggtgctgtac

SEQ ID NO: 209086 - DNA, 15 bp, Homo sapiens
caccagggtgctgta

SEQ ID NO: 209087 - DNA, 15 bp, Homo sapiens
ccaccagggtgctgt

SEQ ID NO: 209088 - DNA, 15 bp, Homo sapiens
cccaccagggtgctg

SEQ ID NO: 209089 - DNA, 15 bp, Homo sapiens
acccaccagggtgct

SEQ ID NO: 209090 - DNA, 15 bp, Homo sapiens
cacccaccagggtgc

SEQ ID NO: 209091 - DNA, 15 bp, Homo sapiens
ccacccaccagggtg

SEQ ID NO: 209092 - DNA, 15 bp, Homo sapiens
gccacccaccagggt

SEQ ID NO: 209093 - DNA, 15 bp, Homo sapiens
ggccacccaccaggg

SEQ ID NO: 209094 - DNA, 15 bp, Homo sapiens
gggccacccaccagg

SEQ ID NO: 209095 - DNA, 15 bp, Homo sapiens
ggggccacccaccag

SEQ ID NO: 209096 - DNA, 15 bp, Homo sapiens
cggggccacccacca

SEQ ID NO: 209097 - DNA, 15 bp, Homo sapiens
gcggggccacccacc

SEQ ID NO: 209098 - DNA, 15 bp, Homo sapiens
agcggggccacccac

SEQ ID NO: 209099 - DNA, 15 bp, Homo sapiens
cagcggggccaccca

SEQ ID NO: 209100 - DNA, 15 bp, Homo sapiens
ccagcggggccaccc

SEQ ID NO: 209101 - DNA, 15 bp, Homo sapiens
cccagcggggccacc

SEQ ID NO: 209102 - DNA, 15 bp, Homo sapiens
tcccagcggggccac

SEQ ID NO: 209103 - DNA, 15 bp, Homo sapiens
ttcccagcggggcca

SEQ ID NO: 209104 - DNA, 15 bp, Homo sapiens
cttcccagcggggcc

SEQ ID NO: 209105 - DNA, 15 bp, Homo sapiens
acttcccagcggggc

SEQ ID NO: 209106 - DNA, 15 bp, Homo sapiens
cacttcccagcgggg

SEQ ID NO: 209107 - DNA, 15 bp, Homo sapiens
gcacttcccagcggg

SEQ ID NO: 209108 - DNA, 15 bp, Homo sapiens
tgcacttcccagcgg

SEQ ID NO: 209109 - DNA, 15 bp, Homo sapiens
gtgcacttcccagcg

SEQ ID NO: 209110 - DNA, 15 bp, Homo sapiens
tgtgcacttcccagc

SEQ ID NO: 209111 - DNA, 15 bp, Homo sapiens
atgtgcacttcccag

SEQ ID NO: 209112 - DNA, 15 bp, Homo sapiens
aatgtgcacttccca

SEQ ID NO: 209113 - DNA, 15 bp, Homo sapiens
aaatgtgcacttccc

SEQ ID NO: 209114 - DNA, 15 bp, Homo sapiens
caaatgtgcacttcc

SEQ ID NO: 209115 - DNA, 15 bp, Homo sapiens
ccaaatgtgcacttc

SEQ ID NO: 209116 - DNA, 15 bp, Homo sapiens
cccaaatgtgcactt

SEQ ID NO: 209117 - DNA, 15 bp, Homo sapiens
acccaaatgtgcact

SEQ ID NO: 209118 - DNA, 15 bp, Homo sapiens
aacccaaatgtgcac

SEQ ID NO: 209119 - DNA, 15 bp, Homo sapiens
aaacccaaatgtgca

SEQ ID NO: 209120 - DNA, 15 bp, Homo sapiens
aaaacccaaatgtgc

SEQ ID NO: 209121 - DNA, 15 bp, Homo sapiens
caaaacccaaatgtg

SEQ ID NO: 209122 - DNA, 15 bp, Homo sapiens
ccaaaacccaaatgt

SEQ ID NO: 209123 - DNA, 15 bp, Homo sapiens
accaaaacccaaatg

SEQ ID NO: 209124 - DNA, 15 bp, Homo sapiens
aaccaaaacccaaat

SEQ ID NO: 209125 - DNA, 15 bp, Homo sapiens
aaaccaaaacccaaa

SEQ ID NO: 209126 - DNA, 15 bp, Homo sapiens
caaaccaaaacccaa

SEQ ID NO: 209127 - DNA, 15 bp, Homo sapiens
gcaaaccaaaaccca

SEQ ID NO: 209128 - DNA, 15 bp, Homo sapiens
ggcaaaccaaaaccc

SEQ ID NO: 209129 - DNA, 15 bp, Homo sapiens
tggcaaaccaaaacc

SEQ ID NO: 209130 - DNA, 15 bp, Homo sapiens
ttggcaaaccaaaac

SEQ ID NO: 209131 - DNA, 15 bp, Homo sapiens
tttggcaaaccaaaa

SEQ ID NO: 209132 - DNA, 15 bp, Homo sapiens
gtttggcaaaccaaa

SEQ ID NO: 209133 - DNA, 15 bp, Homo sapiens
agtttggcaaaccaa

SEQ ID NO: 209134 - DNA, 15 bp, Homo sapiens
gagtttggcaaacca

SEQ ID NO: 209135 - DNA, 15 bp, Homo sapiens
tgagtttggcaaacc

SEQ ID NO: 209136 - DNA, 15 bp, Homo sapiens
gtgagtttggcaaac

SEQ ID NO: 209137 - DNA, 15 bp, Homo sapiens
ggtgagtttggcaaa

SEQ ID NO: 209138 - DNA, 15 bp, Homo sapiens
gggtgagtttggcaa

SEQ ID NO: 209139 - DNA, 15 bp, Homo sapiens
agggtgagtttggca

SEQ ID NO: 209140 - DNA, 15 bp, Homo sapiens
cagggtgagtttggc

SEQ ID NO: 209141 - DNA, 15 bp, Homo sapiens
gcagggtgagtttgg

SEQ ID NO: 209142 - DNA, 15 bp, Homo sapiens
ggcagggtgagtttg

SEQ ID NO: 209143 - DNA, 15 bp, Homo sapiens
gggcagggtgagttt

SEQ ID NO: 209144 - DNA, 15 bp, Homo sapiens
tgggcagggtgagtt

SEQ ID NO: 209145 - DNA, 15 bp, Homo sapiens
ttgggcagggtgagt

SEQ ID NO: 209146 - DNA, 15 bp, Homo sapiens
attgggcagggtgag

SEQ ID NO: 209147 - DNA, 15 bp, Homo sapiens
gattgggcagggtga

SEQ ID NO: 209148 - DNA, 15 bp, Homo sapiens
ggattgggcagggtg

SEQ ID NO: 209149 - DNA, 15 bp, Homo sapiens
aggattgggcagggt

SEQ ID NO: 209150 - DNA, 15 bp, Homo sapiens
taggattgggcaggg

SEQ ID NO: 209151 - DNA, 15 bp, Homo sapiens
ctaggattgggcagg

SEQ ID NO: 209152 - DNA, 15 bp, Homo sapiens
actaggattgggcag

SEQ ID NO: 209153 - DNA, 15 bp, Homo sapiens
tactaggattgggca

SEQ ID NO: 209154 - DNA, 15 bp, Homo sapiens
gtactaggattgggc

SEQ ID NO: 209155 - DNA, 15 bp, Homo sapiens
cgtactaggattggg

SEQ ID NO: 209156 - DNA, 15 bp, Homo sapiens
tcgtactaggattgg

SEQ ID NO: 209157 - DNA, 15 bp, Homo sapiens
ctcgtactaggattg

SEQ ID NO: 209158 - DNA, 15 bp, Homo sapiens
gctcgtactaggatt

SEQ ID NO: 209159 - DNA, 15 bp, Homo sapiens
ggctcgtactaggat

SEQ ID NO: 209160 - DNA, 15 bp, Homo sapiens
gggctcgtactagga

SEQ ID NO: 209161 - DNA, 15 bp, Homo sapiens
tgggctcgtactagg

SEQ ID NO: 209162 - DNA, 15 bp, Homo sapiens
gtgggctcgtactag

SEQ ID NO: 209163 - DNA, 15 bp, Homo sapiens
ggtgggctcgtacta

SEQ ID NO: 209164 - DNA, 15 bp, Homo sapiens
tggtgggctcgtact

SEQ ID NO: 209165 - DNA, 15 bp, Homo sapiens
atggtgggctcgtac

SEQ ID NO: 209166 - DNA, 15 bp, Homo sapiens
catggtgggctcgta

SEQ ID NO: 209167 - DNA, 15 bp, Homo sapiens
tcatggtgggctcgt

SEQ ID NO: 209168 - DNA, 15 bp, Homo sapiens
ttcatggtgggctcg

SEQ ID NO: 209169 - DNA, 15 bp, Homo sapiens
attcatggtgggctc

SEQ ID NO: 209170 - DNA, 15 bp, Homo sapiens
cattcatggtgggct

SEQ ID NO: 209171 - DNA, 15 bp, Homo sapiens
acattcatggtgggc

SEQ ID NO: 209172 - DNA, 15 bp, Homo sapiens
gacattcatggtggg

SEQ ID NO: 209173 - DNA, 15 bp, Homo sapiens
tgacattcatggtgg

SEQ ID NO: 209174 - DNA, 15 bp, Homo sapiens
ctgacattcatggtg

SEQ ID NO: 209175 - DNA, 15 bp, Homo sapiens
tctgacattcatggt

SEQ ID NO: 209176 - DNA, 15 bp, Homo sapiens
gtctgacattcatgg

SEQ ID NO: 209177 - DNA, 15 bp, Homo sapiens
tgtctgacattcatg

SEQ ID NO: 209178 - DNA, 15 bp, Homo sapiens
ctgtctgacattcat

SEQ ID NO: 209179 - DNA, 15 bp, Homo sapiens
gctgtctgacattca

SEQ ID NO: 209180 - DNA, 15 bp, Homo sapiens
tgctgtctgacattc

SEQ ID NO: 209181 - DNA, 15 bp, Homo sapiens
atgctgtctgacatt

SEQ ID NO: 209182 - DNA, 15 bp, Homo sapiens
tatgctgtctgacat

SEQ ID NO: 209183 - DNA, 15 bp, Homo sapiens
ctatgctgtctgaca

SEQ ID NO: 209184 - DNA, 15 bp, Homo sapiens
tctatgctgtctgac

SEQ ID NO: 209185 - DNA, 15 bp, Homo sapiens
ctctatgctgtctga

SEQ ID NO: 209186 - DNA, 15 bp, Homo sapiens
actctatgctgtctg

SEQ ID NO: 209187 - DNA, 15 bp, Homo sapiens
tactctatgctgtct

SEQ ID NO: 209188 - DNA, 15 bp, Homo sapiens
ttactctatgctgtc

SEQ ID NO: 209189 - DNA, 15 bp, Homo sapiens
cttactctatgctgt

SEQ ID NO: 209190 - DNA, 15 bp, Homo sapiens
acttactctatgctg

SEQ ID NO: 209191 - DNA, 15 bp, Homo sapiens
cacttactctatgct

SEQ ID NO: 209192 - DNA, 15 bp, Homo sapiens
gcacttactctatgc

SEQ ID NO: 209193 - DNA, 15 bp, Homo sapiens
tgcacttactctatg

SEQ ID NO: 209194 - DNA, 15 bp, Homo sapiens
gtgcacttactctat

SEQ ID NO: 209195 - DNA, 15 bp, Homo sapiens
ggtgcacttactcta

SEQ ID NO: 209196 - DNA, 15 bp, Homo sapiens
aggtgcacttactct

SEQ ID NO: 209197 - DNA, 15 bp, Homo sapiens
caggtgcacttactc

SEQ ID NO: 209198 - DNA, 15 bp, Homo sapiens
ccaggtgcacttact

SEQ ID NO: 209199 - DNA, 15 bp, Homo sapiens
tccaggtgcacttac

SEQ ID NO: 209200 - DNA, 15 bp, Homo sapiens
ctccaggtgcactta

SEQ ID NO: 209201 - DNA, 15 bp, Homo sapiens
gctccaggtgcactt

SEQ ID NO: 209202 - DNA, 15 bp, Homo sapiens
ggctccaggtgcact

SEQ ID NO: 209203 - DNA, 15 bp, Homo sapiens
gggctccaggtgcac

SEQ ID NO: 209204 - DNA, 15 bp, Homo sapiens
tgggctccaggtgca

SEQ ID NO: 209205 - DNA, 15 bp, Homo sapiens
atgggctccaggtgc

SEQ ID NO: 209206 - DNA, 15 bp, Homo sapiens
gatgggctccaggtg

SEQ ID NO: 209207 - DNA, 15 bp, Homo sapiens
ggatgggctccaggt

SEQ ID NO: 209208 - DNA, 15 bp, Homo sapiens
aggatgggctccagg

SEQ ID NO: 209209 - DNA, 15 bp, Homo sapiens
caggatgggctccag

SEQ ID NO: 209210 - DNA, 15 bp, Homo sapiens
tcaggatgggctcca

SEQ ID NO: 209211 - DNA, 15 bp, Homo sapiens
ctcaggatgggctcc

SEQ ID NO: 209212 - DNA, 15 bp, Homo sapiens
gctcaggatgggctc

SEQ ID NO: 209213 - DNA, 15 bp, Homo sapiens
ggctcaggatgggct

SEQ ID NO: 209214 - DNA, 15 bp, Homo sapiens
gggctcaggatgggc

SEQ ID NO: 209215 - DNA, 15 bp, Homo sapiens
agggctcaggatggg

SEQ ID NO: 209216 - DNA, 15 bp, Homo sapiens
aagggctcaggatgg

SEQ ID NO: 209217 - DNA, 15 bp, Homo sapiens
caagggctcaggatg

SEQ ID NO: 209218 - DNA, 15 bp, Homo sapiens
tcaagggctcaggat

SEQ ID NO: 209219 - DNA, 15 bp, Homo sapiens
ctcaagggctcagga

SEQ ID NO: 209220 - DNA, 15 bp, Homo sapiens
gctcaagggctcagg

SEQ ID NO: 209221 - DNA, 15 bp, Homo sapiens
agctcaagggctcag

SEQ ID NO: 209222 - DNA, 15 bp, Homo sapiens
tagctcaagggctca

SEQ ID NO: 209223 - DNA, 15 bp, Homo sapiens
ttagctcaagggctc

SEQ ID NO: 209224 - DNA, 15 bp, Homo sapiens
attagctcaagggct

SEQ ID NO: 209225 - DNA, 15 bp, Homo sapiens
cattagctcaagggc

SEQ ID NO: 209226 - DNA, 15 bp, Homo sapiens
acattagctcaaggg

SEQ ID NO: 209227 - DNA, 15 bp, Homo sapiens
gacattagctcaagg

SEQ ID NO: 209228 - DNA, 15 bp, Homo sapiens
agacattagctcaag

SEQ ID NO: 209229 - DNA, 15 bp, Homo sapiens
aagacattagctcaa

SEQ ID NO: 209230 - DNA, 15 bp, Homo sapiens
gaagacattagctca

SEQ ID NO: 209231 - DNA, 15 bp, Homo sapiens
tgaagacattagctc

SEQ ID NO: 209232 - DNA, 15 bp, Homo sapiens
gtgaagacattagct

SEQ ID NO: 209233 - DNA, 15 bp, Homo sapiens
agtgaagacattagc

SEQ ID NO: 209234 - DNA, 15 bp, Homo sapiens
gagtgaagacattag

SEQ ID NO: 209235 - DNA, 15 bp, Homo sapiens
ggagtgaagacatta

SEQ ID NO: 209236 - DNA, 15 bp, Homo sapiens
aggagtgaagacatt

SEQ ID NO: 209237 - DNA, 15 bp, Homo sapiens
gaggagtgaagacat

SEQ ID NO: 209238 - DNA, 15 bp, Homo sapiens
agaggagtgaagaca

SEQ ID NO: 209239 - DNA, 15 bp, Homo sapiens
cagaggagtgaagac

SEQ ID NO: 209240 - DNA, 15 bp, Homo sapiens
tcagaggagtgaaga

SEQ ID NO: 209241 - DNA, 15 bp, Homo sapiens
atcagaggagtgaag

SEQ ID NO: 209242 - DNA, 15 bp, Homo sapiens
gatcagaggagtgaa

SEQ ID NO: 209243 - DNA, 15 bp, Homo sapiens
agatcagaggagtga

SEQ ID NO: 209244 - DNA, 15 bp, Homo sapiens
gagatcagaggagtg

SEQ ID NO: 209245 - DNA, 15 bp, Homo sapiens
agagatcagaggagt

SEQ ID NO: 209246 - DNA, 15 bp, Homo sapiens
cagagatcagaggag

SEQ ID NO: 209247 - DNA, 15 bp, Homo sapiens
ccagagatcagagga

SEQ ID NO: 209248 - DNA, 15 bp, Homo sapiens
cccagagatcagagg

SEQ ID NO: 209249 - DNA, 15 bp, Homo sapiens
acccagagatcagag

SEQ ID NO: 209250 - DNA, 15 bp, Homo sapiens
aacccagagatcaga

SEQ ID NO: 209251 - DNA, 15 bp, Homo sapiens
gaacccagagatcag

SEQ ID NO: 209252 - DNA, 15 bp, Homo sapiens
ggaacccagagatca

SEQ ID NO: 209253 - DNA, 15 bp, Homo sapiens
tggaacccagagatc

SEQ ID NO: 209254 - DNA, 15 bp, Homo sapiens
gtggaacccagagat

SEQ ID NO: 209255 - DNA, 15 bp, Homo sapiens
ggtggaacccagaga

SEQ ID NO: 209256 - DNA, 15 bp, Homo sapiens
aggtggaacccagag

SEQ ID NO: 209257 - DNA, 15 bp, Homo sapiens
caggtggaacccaga

SEQ ID NO: 209258 - DNA, 15 bp, Homo sapiens
gcaggtggaacccag

SEQ ID NO: 209259 - DNA, 15 bp, Homo sapiens
ggcaggtggaaccca

SEQ ID NO: 209260 - DNA, 15 bp, Homo sapiens
aggcaggtggaaccc

SEQ ID NO: 209261 - DNA, 15 bp, Homo sapiens
gaggcaggtggaacc

SEQ ID NO: 209262 - DNA, 15 bp, Homo sapiens
ggaggcaggtggaac

SEQ ID NO: 209263 - DNA, 15 bp, Homo sapiens
aggaggcaggtggaa

SEQ ID NO: 209264 - DNA, 15 bp, Homo sapiens
aaggaggcaggtgga

SEQ ID NO: 209265 - DNA, 15 bp, Homo sapiens
aaaggaggcaggtgg

SEQ ID NO: 209266 - DNA, 15 bp, Homo sapiens
caaaggaggcaggtg

SEQ ID NO: 209267 - DNA, 15 bp, Homo sapiens
acaaaggaggcaggt

SEQ ID NO: 209268 - DNA, 15 bp, Homo sapiens
aacaaaggaggcagg

SEQ ID NO: 209269 - DNA, 15 bp, Homo sapiens
caacaaaggaggcag

SEQ ID NO: 209270 - DNA, 15 bp, Homo sapiens
acaacaaaggaggca

SEQ ID NO: 209271 - DNA, 15 bp, Homo sapiens
aacaacaaaggaggc

SEQ ID NO: 209272 - DNA, 15 bp, Homo sapiens
aaacaacaaaggagg

SEQ ID NO: 209273 - DNA, 15 bp, Homo sapiens
caaacaacaaaggag

SEQ ID NO: 209274 - DNA, 15 bp, Homo sapiens
tcaaacaacaaagga

SEQ ID NO: 209275 - DNA, 15 bp, Homo sapiens
ttcaaacaacaaagg

SEQ ID NO: 209276 - DNA, 15 bp, Homo sapiens
cttcaaacaacaaag

SEQ ID NO: 209277 - DNA, 15 bp, Homo sapiens
ccttcaaacaacaaa

SEQ ID NO: 209278 - DNA, 15 bp, Homo sapiens
cccttcaaacaacaa

SEQ ID NO: 209279 - DNA, 15 bp, Homo sapiens
acccttcaaacaaca

SEQ ID NO: 209280 - DNA, 15 bp, Homo sapiens
cacccttcaaacaac

SEQ ID NO: 209281 - DNA, 15 bp, Homo sapiens
ccacccttcaaacaa

SEQ ID NO: 209282 - DNA, 15 bp, Homo sapiens
tccacccttcaaaca

SEQ ID NO: 209283 - DNA, 15 bp, Homo sapiens
ttccacccttcaaac

SEQ ID NO: 209284 - DNA, 15 bp, Homo sapiens
gttccacccttcaaa

SEQ ID NO: 209285 - DNA, 15 bp, Homo sapiens
cgttccacccttcaa

SEQ ID NO: 209286 - DNA, 15 bp, Homo sapiens
ccgttccacccttca

SEQ ID NO: 209287 - DNA, 15 bp, Homo sapiens
tccgttccacccttc

SEQ ID NO: 209288 - DNA, 15 bp, Homo sapiens
gtccgttccaccctt

SEQ ID NO: 209289 - DNA, 15 bp, Homo sapiens
agtccgttccaccct

SEQ ID NO: 209290 - DNA, 15 bp, Homo sapiens
cagtccgttccaccc

SEQ ID NO: 209291 - DNA, 15 bp, Homo sapiens
tcagtccgttccacc

SEQ ID NO: 209292 - DNA, 15 bp, Homo sapiens
atcagtccgttccac

SEQ ID NO: 209293 - DNA, 15 bp, Homo sapiens
catcagtccgttcca

SEQ ID NO: 209294 - DNA, 15 bp, Homo sapiens
gcatcagtccgttcc

SEQ ID NO: 209295 - DNA, 15 bp, Homo sapiens
ggcatcagtccgttc

SEQ ID NO: 209296 - DNA, 15 bp, Homo sapiens
aggcatcagtccgtt

SEQ ID NO: 209297 - DNA, 15 bp, Homo sapiens
taggcatcagtccgt

SEQ ID NO: 209298 - DNA, 15 bp, Homo sapiens
ataggcatcagtccg

SEQ ID NO: 209299 - DNA, 15 bp, Homo sapiens
cataggcatcagtcc

SEQ ID NO: 209300 - DNA, 15 bp, Homo sapiens
tcataggcatcagtc

SEQ ID NO: 209301 - DNA, 15 bp, Homo sapiens
ttcataggcatcagt

SEQ ID NO: 209302 - DNA, 15 bp, Homo sapiens
attcataggcatcag

SEQ ID NO: 209303 - DNA, 15 bp, Homo sapiens
tattcataggcatca

SEQ ID NO: 209304 - DNA, 15 bp, Homo sapiens
ttattcataggcatc

SEQ ID NO: 209305 - DNA, 15 bp, Homo sapiens
tttattcataggcat

SEQ ID NO: 209306 - DNA, 15 bp, Homo sapiens
gtttattcataggca

SEQ ID NO: 209307 - DNA, 15 bp, Homo sapiens
tgtttattcataggc

SEQ ID NO: 209308 - DNA, 15 bp, Homo sapiens
gtgtttattcatagg

SEQ ID NO: 209309 - DNA, 15 bp, Homo sapiens
tgtgtttattcatag

SEQ ID NO: 209310 - DNA, 15 bp, Homo sapiens
ttgtgtttattcata

SEQ ID NO: 209311 - DNA, 15 bp, Homo sapiens
cttgtgtttattcat

SEQ ID NO: 209312 - DNA, 15 bp, Homo sapiens
gcttgtgtttattca

SEQ ID NO: 209313 - DNA, 15 bp, Homo sapiens
agcttgtgtttattc

SEQ ID NO: 209314 - DNA, 15 bp, Homo sapiens
gagcttgtgtttatt

SEQ ID NO: 209315 - DNA, 15 bp, Homo sapiens
ggagcttgtgtttat

SEQ ID NO: 209316 - DNA, 15 bp, Homo sapiens
tggagcttgtgttta

SEQ ID NO: 209317 - DNA, 15 bp, Homo sapiens
ctggagcttgtgttt

SEQ ID NO: 209318 - DNA, 15 bp, Homo sapiens
gctggagcttgtgtt

SEQ ID NO: 209319 - DNA, 15 bp, Homo sapiens
cgctggagcttgtgt

SEQ ID NO: 209320 - DNA, 15 bp, Homo sapiens
gcgctggagcttgtg

SEQ ID NO: 209321 - DNA, 15 bp, Homo sapiens
agcgctggagcttgt

SEQ ID NO: 209322 - DNA, 15 bp, Homo sapiens
gagcgctggagcttg

SEQ ID NO: 209323 - DNA, 15 bp, Homo sapiens
agagcgctggagctt

SEQ ID NO: 209324 - DNA, 15 bp, Homo sapiens
gagagcgctggagct

SEQ ID NO: 209325 - DNA, 15 bp, Homo sapiens
ggagagcgctggagc

SEQ ID NO: 209326 - DNA, 15 bp, Homo sapiens
tggagagcgctggag

SEQ ID NO: 209327 - DNA, 15 bp, Homo sapiens
gtggagagcgctgga

SEQ ID NO: 209328 - DNA, 15 bp, Homo sapiens
tgtggagagcgctgg

SEQ ID NO: 209329 - DNA, 15 bp, Homo sapiens
ctgtggagagcgctg

SEQ ID NO: 209330 - DNA, 15 bp, Homo sapiens
tctgtggagagcgct

SEQ ID NO: 209331 - DNA, 15 bp, Homo sapiens
atctgtggagagcgc

SEQ ID NO: 209332 - DNA, 15 bp, Homo sapiens
catctgtggagagcg

SEQ ID NO: 209333 - DNA, 15 bp, Homo sapiens
acatctgtggagagc

SEQ ID NO: 209334 - DNA, 15 bp, Homo sapiens
gacatctgtggagag

SEQ ID NO: 209335 - DNA, 15 bp, Homo sapiens
tgacatctgtggaga

SEQ ID NO: 209336 - DNA, 15 bp, Homo sapiens
gtgacatctgtggag

SEQ ID NO: 209337 - DNA, 15 bp, Homo sapiens
tgtgacatctgtgga

SEQ ID NO: 209338 - DNA, 15 bp, Homo sapiens
ctgtgacatctgtgg

SEQ ID NO: 209339 - DNA, 15 bp, Homo sapiens
tctgtgacatctgtg

SEQ ID NO: 209340 - DNA, 15 bp, Homo sapiens
atctgtgacatctgt

SEQ ID NO: 209341 - DNA, 15 bp, Homo sapiens
catctgtgacatctg

SEQ ID NO: 209342 - DNA, 15 bp, Homo sapiens
tcatctgtgacatct

SEQ ID NO: 209343 - DNA, 15 bp, Homo sapiens
ttcatctgtgacatc

SEQ ID NO: 209344 - DNA, 15 bp, Homo sapiens
tttcatctgtgacat

SEQ ID NO: 209345 - DNA, 15 bp, Homo sapiens
ctttcatctgtgaca

SEQ ID NO: 209346 - DNA, 15 bp, Homo sapiens
tctttcatctgtgac

SEQ ID NO: 209347 - DNA, 15 bp, Homo sapiens
gtctttcatctgtga

SEQ ID NO: 209348 - DNA, 15 bp, Homo sapiens
agtctttcatctgtg

SEQ ID NO: 209349 - DNA, 15 bp, Homo sapiens
tagtctttcatctgt

SEQ ID NO: 209350 - DNA, 15 bp, Homo sapiens
ttagtctttcatctg

SEQ ID NO: 209351 - DNA, 15 bp, Homo sapiens
tttagtctttcatct

SEQ ID NO: 209352 - DNA, 15 bp, Homo sapiens
ttttagtctttcatc

SEQ ID NO: 209353 - DNA, 15 bp, Homo sapiens
cttttagtctttcat

SEQ ID NO: 209354 - DNA, 15 bp, Homo sapiens
gcttttagtctttca

SEQ ID NO: 209355 - DNA, 15 bp, Homo sapiens
agcttttagtctttc

SEQ ID NO: 209356 - DNA, 15 bp, Homo sapiens
cagcttttagtcttt

SEQ ID NO: 209357 - DNA, 15 bp, Homo sapiens
gcagcttttagtctt

SEQ ID NO: 209358 - DNA, 15 bp, Homo sapiens
agcagcttttagtct

SEQ ID NO: 209359 - DNA, 15 bp, Homo sapiens
aagcagcttttagtc

SEQ ID NO: 209360 - DNA, 15 bp, Homo sapiens
gaagcagcttttagt

SEQ ID NO: 209361 - DNA, 15 bp, Homo sapiens
agaagcagcttttag

SEQ ID NO: 209362 - DNA, 15 bp, Homo sapiens
cagaagcagctttta

SEQ ID NO: 209363 - DNA, 15 bp, Homo sapiens
gcagaagcagctttt

SEQ ID NO: 209364 - DNA, 15 bp, Homo sapiens
tgcagaagcagcttt

SEQ ID NO: 209365 - DNA, 15 bp, Homo sapiens
gtgcagaagcagctt

SEQ ID NO: 209366 - DNA, 15 bp, Homo sapiens
cgtgcagaagcagct

SEQ ID NO: 209367 - DNA, 15 bp, Homo sapiens
gcgtgcagaagcagc

SEQ ID NO: 209368 - DNA, 15 bp, Homo sapiens
tgcgtgcagaagcag

SEQ ID NO: 209369 - DNA, 15 bp, Homo sapiens
gtgcgtgcagaagca

SEQ ID NO: 209370 - DNA, 15 bp, Homo sapiens
tgtgcgtgcagaagc

SEQ ID NO: 209371 - DNA, 15 bp, Homo sapiens
ctgtgcgtgcagaag

SEQ ID NO: 209372 - DNA, 15 bp, Homo sapiens
tctgtgcgtgcagaa

SEQ ID NO: 209373 - DNA, 15 bp, Homo sapiens
atctgtgcgtgcaga

SEQ ID NO: 209374 - DNA, 15 bp, Homo sapiens
tatctgtgcgtgcag

SEQ ID NO: 209375 - DNA, 15 bp, Homo sapiens
atatctgtgcgtgca

SEQ ID NO: 209376 - DNA, 15 bp, Homo sapiens
aatatctgtgcgtgc

SEQ ID NO: 209377 - DNA, 15 bp, Homo sapiens
aaatatctgtgcgtg

SEQ ID NO: 209378 - DNA, 15 bp, Homo sapiens
taaatatctgtgcgt

SEQ ID NO: 209379 - DNA, 15 bp, Homo sapiens
ataaatatctgtgcg

SEQ ID NO: 209380 - DNA, 15 bp, Homo sapiens
tataaatatctgtgc

SEQ ID NO: 209381 - DNA, 15 bp, Homo sapiens
atataaatatctgtg

SEQ ID NO: 209382 - DNA, 15 bp, Homo sapiens
aatataaatatctgt

SEQ ID NO: 209383 - DNA, 15 bp, Homo sapiens
caatataaatatctg

SEQ ID NO: 209384 - DNA, 15 bp, Homo sapiens
acaatataaatatct

SEQ ID NO: 209385 - DNA, 15 bp, Homo sapiens
tacaatataaatatc

SEQ ID NO: 209386 - DNA, 15 bp, Homo sapiens
ctacaatataaatat

SEQ ID NO: 209387 - DNA, 15 bp, Homo sapiens
actacaatataaata

SEQ ID NO: 209388 - DNA, 15 bp, Homo sapiens
cactacaatataaat

SEQ ID NO: 209389 - DNA, 15 bp, Homo sapiens
gcactacaatataaa

SEQ ID NO: 209390 - DNA, 15 bp, Homo sapiens
ggcactacaatataa

SEQ ID NO: 209391 - DNA, 15 bp, Homo sapiens
tggcactacaatata

SEQ ID NO: 209392 - DNA, 15 bp, Homo sapiens
ttggcactacaatat

SEQ ID NO: 209393 - DNA, 15 bp, Homo sapiens
tttggcactacaata

SEQ ID NO: 209394 - DNA, 15 bp, Homo sapiens
gtttggcactacaat

SEQ ID NO: 209395 - DNA, 15 bp, Homo sapiens
tgtttggcactacaa

SEQ ID NO: 209396 - DNA, 15 bp, Homo sapiens
ttgtttggcactaca

SEQ ID NO: 209397 - DNA, 15 bp, Homo sapiens
gttgtttggcactac

SEQ ID NO: 209398 - DNA, 15 bp, Homo sapiens
tgttgtttggcacta

SEQ ID NO: 209399 - DNA, 15 bp, Homo sapiens
ttgttgtttggcact

SEQ ID NO: 209400 - DNA, 15 bp, Homo sapiens
gttgttgtttggcac

SEQ ID NO: 209401 - DNA, 15 bp, Homo sapiens
tgttgttgtttggca

SEQ ID NO: 209402 - DNA, 15 bp, Homo sapiens
ctgttgttgtttggc

SEQ ID NO: 209403 - DNA, 15 bp, Homo sapiens
tctgttgttgtttgg

SEQ ID NO: 209404 - DNA, 15 bp, Homo sapiens
ttctgttgttgtttg

SEQ ID NO: 209405 - DNA, 15 bp, Homo sapiens
attctgttgttgttt

SEQ ID NO: 209406 - DNA, 15 bp, Homo sapiens
tattctgttgttgtt

SEQ ID NO: 209407 - DNA, 15 bp, Homo sapiens
ttattctgttgttgt

SEQ ID NO: 209408 - DNA, 15 bp, Homo sapiens
tttattctgttgttg

SEQ ID NO: 209409 - DNA, 15 bp, Homo sapiens
ttttattctgttgtt

SEQ ID NO: 209410 - DNA, 15 bp, Homo sapiens
tttttattctgttgt

SEQ ID NO: 209411 - DNA, 15 bp, Homo sapiens
ctttttattctgttg

SEQ ID NO: 209412 - DNA, 15 bp, Homo sapiens
tctttttattctgtt

SEQ ID NO: 209413 - DNA, 15 bp, Homo sapiens
ttctttttattctgt

SEQ ID NO: 209414 - DNA, 15 bp, Homo sapiens
tttctttttattctg

SEQ ID NO: 209415 - DNA, 15 bp, Homo sapiens
atttctttttattct

SEQ ID NO: 209416 - DNA, 15 bp, Homo sapiens
tatttctttttattc

SEQ ID NO: 209417 - DNA, 15 bp, Homo sapiens
ttatttctttttatt

SEQ ID NO: 209418 - DNA, 15 bp, Homo sapiens
attatttctttttat

SEQ ID NO: 209419 - DNA, 15 bp, Homo sapiens
aattatttcttttta

SEQ ID NO: 209420 - DNA, 15 bp, Homo sapiens
aaattatttcttttt

SEQ ID NO: 209421 - DNA, 15 bp, Homo sapiens
aaaattatttctttt

SEQ ID NO: 209422 - DNA, 15 bp, Homo sapiens
aaaaattatttcttt

SEQ ID NO: 209423 - DNA, 15 bp, Homo sapiens
taaaaattatttctt

SEQ ID NO: 209424 - DNA, 15 bp, Homo sapiens
ctaaaaattatttct

SEQ ID NO: 209425 - DNA, 15 bp, Homo sapiens
tctaaaaattatttc

SEQ ID NO: 209426 - DNA, 15 bp, Homo sapiens
atctaaaaattattt

SEQ ID NO: 209427 - DNA, 15 bp, Homo sapiens
catctaaaaattatt

SEQ ID NO: 209428 - DNA, 15 bp, Homo sapiens
acatctaaaaattat

SEQ ID NO: 209429 - DNA, 15 bp, Homo sapiens
cacatctaaaaatta

SEQ ID NO: 209430 - DNA, 15 bp, Homo sapiens
ccacatctaaaaatt

SEQ ID NO: 209431 - DNA, 15 bp, Homo sapiens
cccacatctaaaaat

SEQ ID NO: 209432 - DNA, 15 bp, Homo sapiens
tcccacatctaaaaa

SEQ ID NO: 209433 - DNA, 15 bp, Homo sapiens
ttcccacatctaaaa

SEQ ID NO: 209434 - DNA, 15 bp, Homo sapiens
tttcccacatctaaa

SEQ ID NO: 209435 - DNA, 15 bp, Homo sapiens
ttttcccacatctaa

SEQ ID NO: 209436 - DNA, 15 bp, Homo sapiens
attttcccacatcta

SEQ ID NO: 209437 - DNA, 15 bp, Homo sapiens
gattttcccacatct

SEQ ID NO: 209438 - DNA, 15 bp, Homo sapiens
tgattttcccacatc

SEQ ID NO: 209439 - DNA, 15 bp, Homo sapiens
ctgattttcccacat

SEQ ID NO: 209440 - DNA, 15 bp, Homo sapiens
tctgattttcccaca

SEQ ID NO: 209441 - DNA, 15 bp, Homo sapiens
gtctgattttcccac

SEQ ID NO: 209442 - DNA, 15 bp, Homo sapiens
agtctgattttccca

SEQ ID NO: 209443 - DNA, 15 bp, Homo sapiens
gagtctgattttccc

SEQ ID NO: 209444 - DNA, 15 bp, Homo sapiens
agagtctgattttcc

SEQ ID NO: 209445 - DNA, 15 bp, Homo sapiens
tagagtctgattttc

SEQ ID NO: 209446 - DNA, 15 bp, Homo sapiens
ctagagtctgatttt

SEQ ID NO: 209447 - DNA, 15 bp, Homo sapiens
tctagagtctgattt

SEQ ID NO: 209448 - DNA, 15 bp, Homo sapiens
ttctagagtctgatt

SEQ ID NO: 209449 - DNA, 15 bp, Homo sapiens
cttctagagtctgat

SEQ ID NO: 209450 - DNA, 15 bp, Homo sapiens
tcttctagagtctga

SEQ ID NO: 209451 - DNA, 15 bp, Homo sapiens
atcttctagagtctg

SEQ ID NO: 209452 - DNA, 15 bp, Homo sapiens
catcttctagagtct

SEQ ID NO: 209453 - DNA, 15 bp, Homo sapiens
acatcttctagagtc

SEQ ID NO: 209454 - DNA, 15 bp, Homo sapiens
aacatcttctagagt

SEQ ID NO: 209455 - DNA, 15 bp, Homo sapiens
aaacatcttctagag

SEQ ID NO: 209456 - DNA, 15 bp, Homo sapiens
aaaacatcttctaga

SEQ ID NO: 209457 - DNA, 15 bp, Homo sapiens
taaaacatcttctag

SEQ ID NO: 209458 - DNA, 15 bp, Homo sapiens
ataaaacatcttcta

SEQ ID NO: 209459 - DNA, 15 bp, Homo sapiens
tataaaacatcttct

SEQ ID NO: 209460 - DNA, 15 bp, Homo sapiens
ctataaaacatcttc

SEQ ID NO: 209461 - DNA, 15 bp, Homo sapiens
cctataaaacatctt

SEQ ID NO: 209462 - DNA, 15 bp, Homo sapiens
tcctataaaacatct

SEQ ID NO: 209463 - DNA, 15 bp, Homo sapiens
ctcctataaaacatc

SEQ ID NO: 209464 - DNA, 15 bp, Homo sapiens
gctcctataaaacat

SEQ ID NO: 209465 - DNA, 15 bp, Homo sapiens
agctcctataaaaca

SEQ ID NO: 209466 - DNA, 15 bp, Homo sapiens
tagctcctataaaac

SEQ ID NO: 209467 - DNA, 15 bp, Homo sapiens
atagctcctataaaa

SEQ ID NO: 209468 - DNA, 15 bp, Homo sapiens
gatagctcctataaa

SEQ ID NO: 209469 - DNA, 15 bp, Homo sapiens
tgatagctcctataa

SEQ ID NO: 209470 - DNA, 15 bp, Homo sapiens
atgatagctcctata

SEQ ID NO: 209471 - DNA, 15 bp, Homo sapiens
catgatagctcctat

SEQ ID NO: 209472 - DNA, 15 bp, Homo sapiens
ccatgatagctccta

SEQ ID NO: 209473 - DNA, 15 bp, Homo sapiens
accatgatagctcct

SEQ ID NO: 209474 - DNA, 15 bp, Homo sapiens
taccatgatagctcc

SEQ ID NO: 209475 - DNA, 15 bp, Homo sapiens
ctaccatgatagctc

SEQ ID NO: 209476 - DNA, 15 bp, Homo sapiens
cctaccatgatagct

SEQ ID NO: 209477 - DNA, 15 bp, Homo sapiens
tcctaccatgatagc

SEQ ID NO: 209478 - DNA, 15 bp, Homo sapiens
atcctaccatgatag

SEQ ID NO: 209479 - DNA, 15 bp, Homo sapiens
catcctaccatgata

SEQ ID NO: 209480 - DNA, 15 bp, Homo sapiens
ccatcctaccatgat

SEQ ID NO: 209481 - DNA, 15 bp, Homo sapiens
cccatcctaccatga

SEQ ID NO: 209482 - DNA, 15 bp, Homo sapiens
ccccatcctaccatg

SEQ ID NO: 209483 - DNA, 15 bp, Homo sapiens
gccccatcctaccat

SEQ ID NO: 209484 - DNA, 15 bp, Homo sapiens
agccccatcctacca

SEQ ID NO: 209485 - DNA, 15 bp, Homo sapiens
tagccccatcctacc

SEQ ID NO: 209486 - DNA, 15 bp, Homo sapiens
ttagccccatcctac

SEQ ID NO: 209487 - DNA, 15 bp, Homo sapiens
attagccccatccta

SEQ ID NO: 209488 - DNA, 15 bp, Homo sapiens
aattagccccatcct

SEQ ID NO: 209489 - DNA, 15 bp, Homo sapiens
aaattagccccatcc

SEQ ID NO: 209490 - DNA, 15 bp, Homo sapiens
aaaattagccccatc

SEQ ID NO: 209491 - DNA, 15 bp, Homo sapiens
gaaaattagccccat

SEQ ID NO: 209492 - DNA, 15 bp, Homo sapiens
ggaaaattagcccca

SEQ ID NO: 209493 - DNA, 15 bp, Homo sapiens
tggaaaattagcccc

SEQ ID NO: 209494 - DNA, 15 bp, Homo sapiens
ttggaaaattagccc

SEQ ID NO: 209495 - DNA, 15 bp, Homo sapiens
tttggaaaattagcc

SEQ ID NO: 209496 - DNA, 15 bp, Homo sapiens
atttggaaaattagc

SEQ ID NO: 209497 - DNA, 15 bp, Homo sapiens
catttggaaaattag

SEQ ID NO: 209498 - DNA, 15 bp, Homo sapiens
gcatttggaaaatta

SEQ ID NO: 209499 - DNA, 15 bp, Homo sapiens
ggcatttggaaaatt

SEQ ID NO: 209500 - DNA, 15 bp, Homo sapiens
aggcatttggaaaat

SEQ ID NO: 209501 - DNA, 15 bp, Homo sapiens
taggcatttggaaaa

SEQ ID NO: 209502 - DNA, 15 bp, Homo sapiens
ataggcatttggaaa

SEQ ID NO: 209503 - DNA, 15 bp, Homo sapiens
aataggcatttggaa

SEQ ID NO: 209504 - DNA, 15 bp, Homo sapiens
aaataggcatttgga

SEQ ID NO: 209505 - DNA, 15 bp, Homo sapiens
aaaataggcatttgg

SEQ ID NO: 209506 - DNA, 15 bp, Homo sapiens
gaaaataggcatttg

SEQ ID NO: 209507 - DNA, 15 bp, Homo sapiens
ggaaaataggcattt

SEQ ID NO: 209508 - DNA, 15 bp, Homo sapiens
aggaaaataggcatt

SEQ ID NO: 209509 - DNA, 15 bp, Homo sapiens
gaggaaaataggcat

SEQ ID NO: 209510 - DNA, 15 bp, Homo sapiens
agaggaaaataggca

SEQ ID NO: 209511 - DNA, 15 bp, Homo sapiens
cagaggaaaataggc

SEQ ID NO: 209512 - DNA, 15 bp, Homo sapiens
gcagaggaaaatagg

SEQ ID NO: 209513 - DNA, 15 bp, Homo sapiens
agcagaggaaaatag

SEQ ID NO: 209514 - DNA, 15 bp, Homo sapiens
aagcagaggaaaata

SEQ ID NO: 209515 - DNA, 15 bp, Homo sapiens
gaagcagaggaaaat

SEQ ID NO: 209516 - DNA, 15 bp, Homo sapiens
ggaagcagaggaaaa

SEQ ID NO: 209517 - DNA, 15 bp, Homo sapiens
aggaagcagaggaaa

SEQ ID NO: 209518 - DNA, 15 bp, Homo sapiens
aaggaagcagaggaa

SEQ ID NO: 209519 - DNA, 15 bp, Homo sapiens
aaaggaagcagagga

SEQ ID NO: 209520 - DNA, 15 bp, Homo sapiens
aaaaggaagcagagg

SEQ ID NO: 209521 - DNA, 15 bp, Homo sapiens
taaaaggaagcagag

SEQ ID NO: 209522 - DNA, 15 bp, Homo sapiens
ttaaaaggaagcaga

SEQ ID NO: 209523 - DNA, 15 bp, Homo sapiens
tttaaaaggaagcag

SEQ ID NO: 209524 - DNA, 15 bp, Homo sapiens
ctttaaaaggaagca

SEQ ID NO: 209525 - DNA, 15 bp, Homo sapiens
actttaaaaggaagc

SEQ ID NO: 209526 - DNA, 15 bp, Homo sapiens
aactttaaaaggaag

SEQ ID NO: 209527 - DNA, 15 bp, Homo sapiens
gaactttaaaaggaa

SEQ ID NO: 209528 - DNA, 15 bp, Homo sapiens
agaactttaaaagga

SEQ ID NO: 209529 - DNA, 15 bp, Homo sapiens
gagaactttaaaagg

SEQ ID NO: 209530 - DNA, 15 bp, Homo sapiens
agagaactttaaaag

SEQ ID NO: 209531 - DNA, 15 bp, Homo sapiens
gagagaactttaaaa

SEQ ID NO: 209532 - DNA, 15 bp, Homo sapiens
agagagaactttaaa

SEQ ID NO: 209533 - DNA, 15 bp, Homo sapiens
gagagagaactttaa

SEQ ID NO: 209534 - DNA, 15 bp, Homo sapiens
agagagagaacttta

SEQ ID NO: 209535 - DNA, 15 bp, Homo sapiens
aagagagagaacttt

SEQ ID NO: 209536 - DNA, 15 bp, Homo sapiens
aaagagagagaactt

SEQ ID NO: 209537 - DNA, 15 bp, Homo sapiens
aaaagagagagaact

SEQ ID NO: 209538 - DNA, 15 bp, Homo sapiens
aaaaagagagagaac

SEQ ID NO: 209539 - DNA, 15 bp, Homo sapiens
taaaaagagagagaa

SEQ ID NO: 209540 - DNA, 15 bp, Homo sapiens
ataaaaagagagaga

SEQ ID NO: 209541 - DNA, 15 bp, Homo sapiens
aataaaaagagagag

SEQ ID NO: 209542 - DNA, 15 bp, Homo sapiens
aaataaaaagagaga

SEQ ID NO: 209543 - DNA, 15 bp, Homo sapiens
aaaataaaaagagag

SEQ ID NO: 209544 - DNA, 15 bp, Homo sapiens
aaaaataaaaagaga

SEQ ID NO: 209545 - DNA, 15 bp, Homo sapiens
aaaaaataaaaagag

SEQ ID NO: 209546 - DNA, 15 bp, Homo sapiens
aaaaaaataaaaaga

SEQ ID NO: 209547 - DNA, 15 bp, Homo sapiens
taaaaaaataaaaag

SEQ ID NO: 209548 - DNA, 15 bp, Homo sapiens
ataaaaaaataaaaa

SEQ ID NO: 209549 - DNA, 15 bp, Homo sapiens
aataaaaaaataaaa

SEQ ID NO: 209550 - DNA, 15 bp, Homo sapiens
taataaaaaaataaa

SEQ ID NO: 209551 - DNA, 15 bp, Homo sapiens
ttaataaaaaaataa

SEQ ID NO: 209552 - DNA, 15 bp, Homo sapiens
tttaataaaaaaata

SEQ ID NO: 209553 - DNA, 15 bp, Homo sapiens
ctttaataaaaaaat

SEQ ID NO: 209554 - DNA, 15 bp, Homo sapiens
gctttaataaaaaaa

SEQ ID NO: 209555 - DNA, 15 bp, Homo sapiens
tgctttaataaaaaa

SEQ ID NO: 209556 - DNA, 15 bp, Homo sapiens
ttgctttaataaaaa

SEQ ID NO: 209557 - DNA, 15 bp, Homo sapiens
cttgctttaataaaa

SEQ ID NO: 209558 - DNA, 15 bp, Homo sapiens
ccttgctttaataaa

SEQ ID NO: 209559 - DNA, 15 bp, Homo sapiens
tccttgctttaataa

SEQ ID NO: 209560 - DNA, 15 bp, Homo sapiens
ttccttgctttaata

SEQ ID NO: 209561 - DNA, 15 bp, Homo sapiens
tttccttgctttaat

SEQ ID NO: 209562 - DNA, 15 bp, Homo sapiens
atttccttgctttaa

SEQ ID NO: 209563 - DNA, 15 bp, Homo sapiens
tatttccttgcttta

SEQ ID NO: 209564 - DNA, 15 bp, Homo sapiens
ttatttccttgcttt

SEQ ID NO: 209565 - DNA, 15 bp, Homo sapiens
tttatttccttgctt

SEQ ID NO: 209566 - DNA, 15 bp, Homo sapiens
gtttatttccttgct

SEQ ID NO: 209567 - DNA, 15 bp, Homo sapiens
tgtttatttccttgc

SEQ ID NO: 209568 - DNA, 15 bp, Homo sapiens
ctgtttatttccttg

SEQ ID NO: 209569 - DNA, 15 bp, Homo sapiens
actgtttatttcctt

SEQ ID NO: 209570 - DNA, 15 bp, Homo sapiens
tactgtttatttcct

SEQ ID NO: 209571 - DNA, 15 bp, Homo sapiens
atactgtttatttcc

SEQ ID NO: 209572 - DNA, 15 bp, Homo sapiens
catactgtttatttc

SEQ ID NO: 209573 - DNA, 15 bp, Homo sapiens
acatactgtttattt

SEQ ID NO: 209574 - DNA, 15 bp, Homo sapiens
cacatactgtttatt

SEQ ID NO: 209575 - DNA, 15 bp, Homo sapiens
acacatactgtttat

SEQ ID NO: 209576 - DNA, 15 bp, Homo sapiens
cacacatactgttta

SEQ ID NO: 209577 - DNA, 15 bp, Homo sapiens
acacacatactgttt

SEQ ID NO: 209578 - DNA, 15 bp, Homo sapiens
cacacacatactgtt

SEQ ID NO: 209579 - DNA, 15 bp, Homo sapiens
acacacacatactgt

SEQ ID NO: 209580 - DNA, 15 bp, Homo sapiens
cacacacacatactg

SEQ ID NO: 209581 - DNA, 15 bp, Homo sapiens
ccacacacacatact

SEQ ID NO: 209582 - DNA, 15 bp, Homo sapiens
accacacacacatac

SEQ ID NO: 209583 - DNA, 15 bp, Homo sapiens
caccacacacacata

SEQ ID NO: 209584 - DNA, 15 bp, Homo sapiens
acaccacacacacat

SEQ ID NO: 209585 - DNA, 15 bp, Homo sapiens
cacaccacacacaca

SEQ ID NO: 209586 - DNA, 15 bp, Homo sapiens
acacaccacacacac

SEQ ID NO: 209587 - DNA, 15 bp, Homo sapiens
cacacaccacacaca

SEQ ID NO: 209588 - DNA, 15 bp, Homo sapiens
acacacaccacacac

SEQ ID NO: 209589 - DNA, 15 bp, Homo sapiens
tacacacaccacaca

SEQ ID NO: 209590 - DNA, 15 bp, Homo sapiens
atacacacaccacac

SEQ ID NO: 209591 - DNA, 15 bp, Homo sapiens
catacacacaccaca

SEQ ID NO: 209592 - DNA, 15 bp, Homo sapiens
acatacacacaccac

SEQ ID NO: 209593 - DNA, 15 bp, Homo sapiens
cacatacacacacca

SEQ ID NO: 209594 - DNA, 15 bp, Homo sapiens
acacatacacacacc

SEQ ID NO: 209595 - DNA, 15 bp, Homo sapiens
tacacatacacacac

SEQ ID NO: 209596 - DNA, 15 bp, Homo sapiens
atacacatacacaca

SEQ ID NO: 209597 - DNA, 15 bp, Homo sapiens
catacacatacacac

SEQ ID NO: 209598 - DNA, 15 bp, Homo sapiens
acatacacatacaca

SEQ ID NO: 209599 - DNA, 15 bp, Homo sapiens
cacatacacatacac

SEQ ID NO: 209600 - DNA, 15 bp, Homo sapiens
acacatacacataca

SEQ ID NO: 209601 - DNA, 15 bp, Homo sapiens
cacacatacacatac

SEQ ID NO: 209602 - DNA, 15 bp, Homo sapiens
tcacacatacacata

SEQ ID NO: 209603 - DNA, 15 bp, Homo sapiens
atcacacatacacat

SEQ ID NO: 209604 - DNA, 15 bp, Homo sapiens
catcacacatacaca

SEQ ID NO: 209605 - DNA, 15 bp, Homo sapiens
acatcacacatacac

SEQ ID NO: 209606 - DNA, 15 bp, Homo sapiens
cacatcacacataca

SEQ ID NO: 209607 - DNA, 15 bp, Homo sapiens
acacatcacacatac

SEQ ID NO: 209608 - DNA, 15 bp, Homo sapiens
cacacatcacacata

SEQ ID NO: 209609 - DNA, 15 bp, Homo sapiens
acacacatcacacat

SEQ ID NO: 209610 - DNA, 15 bp, Homo sapiens
aacacacatcacaca

SEQ ID NO: 209611 - DNA, 15 bp, Homo sapiens
aaacacacatcacac

SEQ ID NO: 209612 - DNA, 15 bp, Homo sapiens
taaacacacatcaca

SEQ ID NO: 209613 - DNA, 15 bp, Homo sapiens
ctaaacacacatcac

SEQ ID NO: 209614 - DNA, 15 bp, Homo sapiens
actaaacacacatca

SEQ ID NO: 209615 - DNA, 15 bp, Homo sapiens
tactaaacacacatc

SEQ ID NO: 209616 - DNA, 15 bp, Homo sapiens
atactaaacacacat

SEQ ID NO: 209617 - DNA, 15 bp, Homo sapiens
catactaaacacaca

SEQ ID NO: 209618 - DNA, 15 bp, Homo sapiens
acatactaaacacac

SEQ ID NO: 209619 - DNA, 15 bp, Homo sapiens
tacatactaaacaca

SEQ ID NO: 209620 - DNA, 15 bp, Homo sapiens
atacatactaaacac

SEQ ID NO: 209621 - DNA, 15 bp, Homo sapiens
catacatactaaaca

SEQ ID NO: 209622 - DNA, 15 bp, Homo sapiens
gcatacatactaaac

SEQ ID NO: 209623 - DNA, 15 bp, Homo sapiens
agcatacatactaaa

SEQ ID NO: 209624 - DNA, 15 bp, Homo sapiens
gagcatacatactaa

SEQ ID NO: 209625 - DNA, 15 bp, Homo sapiens
agagcatacatacta

SEQ ID NO: 209626 - DNA, 15 bp, Homo sapiens
gagagcatacatact

SEQ ID NO: 209627 - DNA, 15 bp, Homo sapiens
agagagcatacatac

SEQ ID NO: 209628 - DNA, 15 bp, Homo sapiens
cagagagcatacata

SEQ ID NO: 209629 - DNA, 15 bp, Homo sapiens
acagagagcatacat

SEQ ID NO: 209630 - DNA, 15 bp, Homo sapiens
cacagagagcataca

SEQ ID NO: 209631 - DNA, 15 bp, Homo sapiens
acacagagagcatac

SEQ ID NO: 209632 - DNA, 15 bp, Homo sapiens
cacacagagagcata

SEQ ID NO: 209633 - DNA, 15 bp, Homo sapiens
acacacagagagcat

SEQ ID NO: 209634 - DNA, 15 bp, Homo sapiens
cacacacagagagca

SEQ ID NO: 209635 - DNA, 15 bp, Homo sapiens
acacacacagagagc

SEQ ID NO: 209636 - DNA, 15 bp, Homo sapiens
cacacacacagagag

SEQ ID NO: 209637 - DNA, 15 bp, Homo sapiens
acacacacacagaga

SEQ ID NO: 209638 - DNA, 15 bp, Homo sapiens
cacacacacacagag

SEQ ID NO: 209639 - DNA, 15 bp, Homo sapiens
tcacacacacacaga

SEQ ID NO: 209640 - DNA, 15 bp, Homo sapiens
atcacacacacacag

SEQ ID NO: 209641 - DNA, 15 bp, Homo sapiens
catcacacacacaca

SEQ ID NO: 209642 - DNA, 15 bp, Homo sapiens
acatcacacacacac

SEQ ID NO: 209643 - DNA, 15 bp, Homo sapiens
cacatcacacacaca

SEQ ID NO: 209644 - DNA, 15 bp, Homo sapiens
acacatcacacacac

SEQ ID NO: 209645 - DNA, 15 bp, Homo sapiens
cacacatcacacaca

SEQ ID NO: 209646 - DNA, 15 bp, Homo sapiens
acacacatcacacac

SEQ ID NO: 209647 - DNA, 15 bp, Homo sapiens
cacacacatcacaca

SEQ ID NO: 209648 - DNA, 15 bp, Homo sapiens
acacacacatcacac

SEQ ID NO: 209649 - DNA, 15 bp, Homo sapiens
cacacacacatcaca

SEQ ID NO: 209650 - DNA, 15 bp, Homo sapiens
tcacacacacatcac

SEQ ID NO: 209651 - DNA, 15 bp, Homo sapiens
gtcacacacacatca

SEQ ID NO: 209652 - DNA, 15 bp, Homo sapiens
cgtcacacacacatc

SEQ ID NO: 209653 - DNA, 15 bp, Homo sapiens
acgtcacacacacat

SEQ ID NO: 209654 - DNA, 15 bp, Homo sapiens
cacgtcacacacaca

SEQ ID NO: 209655 - DNA, 15 bp, Homo sapiens
gcacgtcacacacac

SEQ ID NO: 209656 - DNA, 15 bp, Homo sapiens
tgcacgtcacacaca

SEQ ID NO: 209657 - DNA, 15 bp, Homo sapiens
atgcacgtcacacac

SEQ ID NO: 209658 - DNA, 15 bp, Homo sapiens
tatgcacgtcacaca

SEQ ID NO: 209659 - DNA, 15 bp, Homo sapiens
ctatgcacgtcacac

SEQ ID NO: 209660 - DNA, 15 bp, Homo sapiens
actatgcacgtcaca

SEQ ID NO: 209661 - DNA, 15 bp, Homo sapiens
cactatgcacgtcac

SEQ ID NO: 209662 - DNA, 15 bp, Homo sapiens
acactatgcacgtca

SEQ ID NO: 209663 - DNA, 15 bp, Homo sapiens
cacactatgcacgtc

SEQ ID NO: 209664 - DNA, 15 bp, Homo sapiens
gcacactatgcacgt

SEQ ID NO: 209665 - DNA, 15 bp, Homo sapiens
ggcacactatgcacg

SEQ ID NO: 209666 - DNA, 15 bp, Homo sapiens
aggcacactatgcac

SEQ ID NO: 209667 - DNA, 15 bp, Homo sapiens
taggcacactatgca

SEQ ID NO: 209668 - DNA, 15 bp, Homo sapiens
ctaggcacactatgc

SEQ ID NO: 209669 - DNA, 15 bp, Homo sapiens
cctaggcacactatg

SEQ ID NO: 209670 - DNA, 15 bp, Homo sapiens
acctaggcacactat

SEQ ID NO: 209671 - DNA, 15 bp, Homo sapiens
cacctaggcacacta

SEQ ID NO: 209672 - DNA, 15 bp, Homo sapiens
acacctaggcacact

SEQ ID NO: 209673 - DNA, 15 bp, Homo sapiens
cacacctaggcacac

SEQ ID NO: 209674 - DNA, 15 bp, Homo sapiens
gcacacctaggcaca

SEQ ID NO: 209675 - DNA, 15 bp, Homo sapiens
agcacacctaggcac

SEQ ID NO: 209676 - DNA, 15 bp, Homo sapiens
tagcacacctaggca

SEQ ID NO: 209677 - DNA, 15 bp, Homo sapiens
atagcacacctaggc

SEQ ID NO: 209678 - DNA, 15 bp, Homo sapiens
catagcacacctagg

SEQ ID NO: 209679 - DNA, 15 bp, Homo sapiens
acatagcacacctag

SEQ ID NO: 209680 - DNA, 15 bp, Homo sapiens
cacatagcacaccta

SEQ ID NO: 209681 - DNA, 15 bp, Homo sapiens
acacatagcacacct

SEQ ID NO: 209682 - DNA, 15 bp, Homo sapiens
tacacatagcacacc

SEQ ID NO: 209683 - DNA, 15 bp, Homo sapiens
atacacatagcacac

SEQ ID NO: 209684 - DNA, 15 bp, Homo sapiens
catacacatagcaca

SEQ ID NO: 209685 - DNA, 15 bp, Homo sapiens
acatacacatagcac

SEQ ID NO: 209686 - DNA, 15 bp, Homo sapiens
cacatacacatagca

SEQ ID NO: 209687 - DNA, 15 bp, Homo sapiens
acacatacacatagc

SEQ ID NO: 209688 - DNA, 15 bp, Homo sapiens
gacacatacacatag

SEQ ID NO: 209689 - DNA, 15 bp, Homo sapiens
agacacatacacata

SEQ ID NO: 209690 - DNA, 15 bp, Homo sapiens
cagacacatacacat

SEQ ID NO: 209691 - DNA, 15 bp, Homo sapiens
acagacacatacaca

SEQ ID NO: 209692 - DNA, 15 bp, Homo sapiens
cacagacacatacac

SEQ ID NO: 209693 - DNA, 15 bp, Homo sapiens
acacagacacataca

SEQ ID NO: 209694 - DNA, 15 bp, Homo sapiens
gacacagacacatac

SEQ ID NO: 209695 - DNA, 15 bp, Homo sapiens
agacacagacacata

SEQ ID NO: 209696 - DNA, 15 bp, Homo sapiens
cagacacagacacat

SEQ ID NO: 209697 - DNA, 15 bp, Homo sapiens
acagacacagacaca

SEQ ID NO: 209698 - DNA, 15 bp, Homo sapiens
cacagacacagacac

SEQ ID NO: 209699 - DNA, 15 bp, Homo sapiens
tcacagacacagaca

SEQ ID NO: 209700 - DNA, 15 bp, Homo sapiens
atcacagacacagac

SEQ ID NO: 209701 - DNA, 15 bp, Homo sapiens
catcacagacacaga

SEQ ID NO: 209702 - DNA, 15 bp, Homo sapiens
acatcacagacacag

SEQ ID NO: 209703 - DNA, 15 bp, Homo sapiens
aacatcacagacaca

SEQ ID NO: 209704 - DNA, 15 bp, Homo sapiens
aaacatcacagacac

SEQ ID NO: 209705 - DNA, 15 bp, Homo sapiens
caaacatcacagaca

SEQ ID NO: 209706 - DNA, 15 bp, Homo sapiens
acaaacatcacagac

SEQ ID NO: 209707 - DNA, 15 bp, Homo sapiens
tacaaacatcacaga

SEQ ID NO: 209708 - DNA, 15 bp, Homo sapiens
atacaaacatcacag

SEQ ID NO: 209709 - DNA, 15 bp, Homo sapiens
tatacaaacatcaca

SEQ ID NO: 209710 - DNA, 15 bp, Homo sapiens
ctatacaaacatcac

SEQ ID NO: 209711 - DNA, 15 bp, Homo sapiens
actatacaaacatca

SEQ ID NO: 209712 - DNA, 15 bp, Homo sapiens
cactatacaaacatc

SEQ ID NO: 209713 - DNA, 15 bp, Homo sapiens
acactatacaaacat

SEQ ID NO: 209714 - DNA, 15 bp, Homo sapiens
cacactatacaaaca

SEQ ID NO: 209715 - DNA, 15 bp, Homo sapiens
acacactatacaaac

SEQ ID NO: 209716 - DNA, 15 bp, Homo sapiens
cacacactatacaaa

SEQ ID NO: 209717 - DNA, 15 bp, Homo sapiens
acacacactatacaa

SEQ ID NO: 209718 - DNA, 15 bp, Homo sapiens
cacacacactataca

SEQ ID NO: 209719 - DNA, 15 bp, Homo sapiens
acacacacactatac

SEQ ID NO: 209720 - DNA, 15 bp, Homo sapiens
tacacacacactata

SEQ ID NO: 209721 - DNA, 15 bp, Homo sapiens
ctacacacacactat

SEQ ID NO: 209722 - DNA, 15 bp, Homo sapiens
actacacacacacta

SEQ ID NO: 209723 - DNA, 15 bp, Homo sapiens
tactacacacacact

SEQ ID NO: 209724 - DNA, 15 bp, Homo sapiens
atactacacacacac

SEQ ID NO: 209725 - DNA, 15 bp, Homo sapiens
catactacacacaca

SEQ ID NO: 209726 - DNA, 15 bp, Homo sapiens
acatactacacacac

SEQ ID NO: 209727 - DNA, 15 bp, Homo sapiens
cacatactacacaca

SEQ ID NO: 209728 - DNA, 15 bp, Homo sapiens
acacatactacacac

SEQ ID NO: 209729 - DNA, 15 bp, Homo sapiens
cacacatactacaca

SEQ ID NO: 209730 - DNA, 15 bp, Homo sapiens
acacacatactacac

SEQ ID NO: 209731 - DNA, 15 bp, Homo sapiens
cacacacatactaca

SEQ ID NO: 209732 - DNA, 15 bp, Homo sapiens
acacacacatactac

SEQ ID NO: 209733 - DNA, 15 bp, Homo sapiens
cacacacacatacta

SEQ ID NO: 209734 - DNA, 15 bp, Homo sapiens
tatacacatacacac

SEQ ID NO: 209735 - DNA, 15 bp, Homo sapiens
atatacacatacaca

SEQ ID NO: 209736 - DNA, 15 bp, Homo sapiens
catatacacatacac

SEQ ID NO: 209737 - DNA, 15 bp, Homo sapiens
acatatacacataca

SEQ ID NO: 209738 - DNA, 15 bp, Homo sapiens
cacatatacacatac

SEQ ID NO: 209739 - DNA, 15 bp, Homo sapiens
tcacatatacacata

SEQ ID NO: 209740 - DNA, 15 bp, Homo sapiens
atcacatatacacat

SEQ ID NO: 209741 - DNA, 15 bp, Homo sapiens
catcacatatacaca

SEQ ID NO: 209742 - DNA, 15 bp, Homo sapiens
acatcacatatacac

SEQ ID NO: 209743 - DNA, 15 bp, Homo sapiens
cacatcacatataca

SEQ ID NO: 209744 - DNA, 15 bp, Homo sapiens
acacatcacatatac

SEQ ID NO: 209745 - DNA, 15 bp, Homo sapiens
cacacatcacatata

SEQ ID NO: 209746 - DNA, 15 bp, Homo sapiens
acacacatcacatat

SEQ ID NO: 209747 - DNA, 15 bp, Homo sapiens
aacacacatcacata

SEQ ID NO: 209748 - DNA, 15 bp, Homo sapiens
aaacacacatcacat

SEQ ID NO: 209749 - DNA, 15 bp, Homo sapiens
gtacatactaaacac

SEQ ID NO: 209750 - DNA, 15 bp, Homo sapiens
cgtacatactaaaca

SEQ ID NO: 209751 - DNA, 15 bp, Homo sapiens
gcgtacatactaaac

SEQ ID NO: 209752 - DNA, 15 bp, Homo sapiens
agcgtacatactaaa

SEQ ID NO: 209753 - DNA, 15 bp, Homo sapiens
gagcgtacatactaa

SEQ ID NO: 209754 - DNA, 15 bp, Homo sapiens
agagcgtacatacta

SEQ ID NO: 209755 - DNA, 15 bp, Homo sapiens
gagagcgtacatact

SEQ ID NO: 209756 - DNA, 15 bp, Homo sapiens
agagagcgtacatac

SEQ ID NO: 209757 - DNA, 15 bp, Homo sapiens
cagagagcgtacata

SEQ ID NO: 209758 - DNA, 15 bp, Homo sapiens
acagagagcgtacat

SEQ ID NO: 209759 - DNA, 15 bp, Homo sapiens
cacagagagcgtaca

SEQ ID NO: 209760 - DNA, 15 bp, Homo sapiens
acacagagagcgtac

SEQ ID NO: 209761 - DNA, 15 bp, Homo sapiens
cacacagagagcgta

SEQ ID NO: 209762 - DNA, 15 bp, Homo sapiens
acacacagagagcgt

SEQ ID NO: 209763 - DNA, 15 bp, Homo sapiens
cacacacagagagcg

SEQ ID NO: 209764 - DNA, 15 bp, Homo sapiens
tgtcacacacacatc

SEQ ID NO: 209765 - DNA, 15 bp, Homo sapiens
atgtcacacacacat

SEQ ID NO: 209766 - DNA, 15 bp, Homo sapiens
catgtcacacacaca

SEQ ID NO: 209767 - DNA, 15 bp, Homo sapiens
acatgtcacacacac

SEQ ID NO: 209768 - DNA, 15 bp, Homo sapiens
cacatgtcacacaca

SEQ ID NO: 209769 - DNA, 15 bp, Homo sapiens
gcacatgtcacacac

SEQ ID NO: 209770 - DNA, 15 bp, Homo sapiens
tgcacatgtcacaca

SEQ ID NO: 209771 - DNA, 15 bp, Homo sapiens
atgcacatgtcacac

SEQ ID NO: 209772 - DNA, 15 bp, Homo sapiens
tatgcacatgtcaca

SEQ ID NO: 209773 - DNA, 15 bp, Homo sapiens
ctatgcacatgtcac

SEQ ID NO: 209774 - DNA, 15 bp, Homo sapiens
actatgcacatgtca

SEQ ID NO: 209775 - DNA, 15 bp, Homo sapiens
cactatgcacatgtc

SEQ ID NO: 209776 - DNA, 15 bp, Homo sapiens
acactatgcacatgt

SEQ ID NO: 209777 - DNA, 15 bp, Homo sapiens
cacactatgcacatg

SEQ ID NO: 209778 - DNA, 15 bp, Homo sapiens
gcacactatgcacat

SEQ ID NO: 209779 - DNA, 15 bp, Homo sapiens
ggcacactatgcaca

SEQ ID NO: 209780 - DNA, 15 bp, Homo sapiens
tagacacagacacat

SEQ ID NO: 209781 - DNA, 15 bp, Homo sapiens
atagacacagacaca

SEQ ID NO: 209782 - DNA, 15 bp, Homo sapiens
catagacacagacac

SEQ ID NO: 209783 - DNA, 15 bp, Homo sapiens
acatagacacagaca

SEQ ID NO: 209784 - DNA, 15 bp, Homo sapiens
cacatagacacagac

SEQ ID NO: 209785 - DNA, 15 bp, Homo sapiens
tcacatagacacaga

SEQ ID NO: 209786 - DNA, 15 bp, Homo sapiens
atcacatagacacag

SEQ ID NO: 209787 - DNA, 15 bp, Homo sapiens
catcacatagacaca

SEQ ID NO: 209788 - DNA, 15 bp, Homo sapiens
acatcacatagacac

SEQ ID NO: 209789 - DNA, 15 bp, Homo sapiens
tacatcacatagaca

SEQ ID NO: 209790 - DNA, 15 bp, Homo sapiens
atacatcacatagac

SEQ ID NO: 209791 - DNA, 15 bp, Homo sapiens
catacatcacataga

SEQ ID NO: 209792 - DNA, 15 bp, Homo sapiens
acatacatcacatag

SEQ ID NO: 209793 - DNA, 15 bp, Homo sapiens
tacatacatcacata

SEQ ID NO: 209794 - DNA, 15 bp, Homo sapiens
atacatacatcacat

SEQ ID NO: 209795 - DNA, 15 bp, Homo sapiens
tatacatacatcaca

SEQ ID NO: 209796 - DNA, 15 bp, Homo sapiens
ctatacatacatcac

SEQ ID NO: 209797 - DNA, 15 bp, Homo sapiens
actatacatacatca

SEQ ID NO: 209798 - DNA, 15 bp, Homo sapiens
cactatacatacatc

SEQ ID NO: 209799 - DNA, 15 bp, Homo sapiens
acactatacatacat

SEQ ID NO: 209800 - DNA, 15 bp, Homo sapiens
cacactatacataca

SEQ ID NO: 209801 - DNA, 15 bp, Homo sapiens
acacactatacatac

SEQ ID NO: 209802 - DNA, 15 bp, Homo sapiens
cacacactatacata

SEQ ID NO: 209803 - DNA, 15 bp, Homo sapiens
acacacactatacat

SEQ ID NO: 209804 - DNA, 15 bp, Homo sapiens
cactacacacacact

SEQ ID NO: 209805 - DNA, 15 bp, Homo sapiens
acactacacacacac

SEQ ID NO: 209806 - DNA, 15 bp, Homo sapiens
cacactacacacaca

SEQ ID NO: 209807 - DNA, 15 bp, Homo sapiens
acacactacacacac

SEQ ID NO: 209808 - DNA, 15 bp, Homo sapiens
cacacactacacaca

SEQ ID NO: 209809 - DNA, 15 bp, Homo sapiens
acacacactacacac

SEQ ID NO: 209810 - DNA, 15 bp, Homo sapiens
cacacacactacaca

SEQ ID NO: 209811 - DNA, 15 bp, Homo sapiens
acacacacactacac

SEQ ID NO: 209812 - DNA, 15 bp, Homo sapiens
cacacacacactaca

SEQ ID NO: 209813 - DNA, 15 bp, Homo sapiens
acacacacacactac

SEQ ID NO: 209814 - DNA, 15 bp, Homo sapiens
cacacacacacacta

SEQ ID NO: 209815 - DNA, 15 bp, Homo sapiens
acacacacacacact

SEQ ID NO: 209816 - DNA, 15 bp, Homo sapiens
ccacacacacacaca

SEQ ID NO: 209817 - DNA, 15 bp, Homo sapiens
accacacacacacac

SEQ ID NO: 209818 - DNA, 15 bp, Homo sapiens
caccacacacacaca

SEQ ID NO: 209819 - DNA, 15 bp, Homo sapiens
acaccacacacacac

SEQ ID NO: 209820 - DNA, 15 bp, Homo sapiens
tacaccacacacaca

SEQ ID NO: 209821 - DNA, 15 bp, Homo sapiens
atacaccacacacac

SEQ ID NO: 209822 - DNA, 15 bp, Homo sapiens
aatacaccacacaca

SEQ ID NO: 209823 - DNA, 15 bp, Homo sapiens
aaatacaccacacac

SEQ ID NO: 209824 - DNA, 15 bp, Homo sapiens
caaatacaccacaca

SEQ ID NO: 209825 - DNA, 15 bp, Homo sapiens
acaaatacaccacac

SEQ ID NO: 209826 - DNA, 15 bp, Homo sapiens
cacaaatacaccaca

SEQ ID NO: 209827 - DNA, 15 bp, Homo sapiens
acacaaatacaccac

SEQ ID NO: 209828 - DNA, 15 bp, Homo sapiens
cacacaaatacacca

SEQ ID NO: 209829 - DNA, 15 bp, Homo sapiens
ccacacaaatacacc

SEQ ID NO: 209830 - DNA, 15 bp, Homo sapiens
accacacaaatacac

SEQ ID NO: 209831 - DNA, 15 bp, Homo sapiens
caccacacaaataca

SEQ ID NO: 209832 - DNA, 15 bp, Homo sapiens
acaccacacaaatac

SEQ ID NO: 209833 - DNA, 15 bp, Homo sapiens
cacaccacacaaata

SEQ ID NO: 209834 - DNA, 15 bp, Homo sapiens
acacaccacacaaat

SEQ ID NO: 209835 - DNA, 15 bp, Homo sapiens
tacacaccacacaaa

SEQ ID NO: 209836 - DNA, 15 bp, Homo sapiens
atacacaccacacaa

SEQ ID NO: 209837 - DNA, 15 bp, Homo sapiens
catacacaccacaca

SEQ ID NO: 209838 - DNA, 15 bp, Homo sapiens
acatacacaccacac

SEQ ID NO: 209839 - DNA, 15 bp, Homo sapiens
cacatacacaccaca

SEQ ID NO: 209840 - DNA, 15 bp, Homo sapiens
ccacatacacaccac

SEQ ID NO: 209841 - DNA, 15 bp, Homo sapiens
cccacatacacacca

SEQ ID NO: 209842 - DNA, 15 bp, Homo sapiens
gcccacatacacacc

SEQ ID NO: 209843 - DNA, 15 bp, Homo sapiens
tgcccacatacacac

SEQ ID NO: 209844 - DNA, 15 bp, Homo sapiens
ctgcccacatacaca

SEQ ID NO: 209845 - DNA, 15 bp, Homo sapiens
actgcccacatacac

SEQ ID NO: 209846 - DNA, 15 bp, Homo sapiens
cactgcccacataca

SEQ ID NO: 209847 - DNA, 15 bp, Homo sapiens
tcactgcccacatac

SEQ ID NO: 209848 - DNA, 15 bp, Homo sapiens
ttcactgcccacata

SEQ ID NO: 209849 - DNA, 15 bp, Homo sapiens
attcactgcccacat

SEQ ID NO: 209850 - DNA, 15 bp, Homo sapiens
tattcactgcccaca

SEQ ID NO: 209851 - DNA, 15 bp, Homo sapiens
atattcactgcccac

SEQ ID NO: 209852 - DNA, 15 bp, Homo sapiens
tatattcactgccca

SEQ ID NO: 209853 - DNA, 15 bp, Homo sapiens
atatattcactgccc

SEQ ID NO: 209854 - DNA, 15 bp, Homo sapiens
tatatattcactgcc

SEQ ID NO: 209855 - DNA, 15 bp, Homo sapiens
ttatatattcactgc

SEQ ID NO: 209856 - DNA, 15 bp, Homo sapiens
attatatattcactg

SEQ ID NO: 209857 - DNA, 15 bp, Homo sapiens
tattatatattcact

SEQ ID NO: 209858 - DNA, 15 bp, Homo sapiens
atattatatattcac

SEQ ID NO: 209859 - DNA, 15 bp, Homo sapiens
tatattatatattca

SEQ ID NO: 209860 - DNA, 15 bp, Homo sapiens
atatattatatattc

SEQ ID NO: 209861 - DNA, 15 bp, Homo sapiens
catatattatatatt

SEQ ID NO: 209862 - DNA, 15 bp, Homo sapiens
acatatattatatat

SEQ ID NO: 209863 - DNA, 15 bp, Homo sapiens
cacatatattatata

SEQ ID NO: 209864 - DNA, 15 bp, Homo sapiens
acacatatattatat

SEQ ID NO: 209865 - DNA, 15 bp, Homo sapiens
cacacatatattata

SEQ ID NO: 209866 - DNA, 15 bp, Homo sapiens
tcacacatatattat

SEQ ID NO: 209867 - DNA, 15 bp, Homo sapiens
atcacacatatatta

SEQ ID NO: 209868 - DNA, 15 bp, Homo sapiens
tatcacacatatatt

SEQ ID NO: 209869 - DNA, 15 bp, Homo sapiens
atatcacacatatat

SEQ ID NO: 209870 - DNA, 15 bp, Homo sapiens
catatcacacatata

SEQ ID NO: 209871 - DNA, 15 bp, Homo sapiens
acatatcacacatat

SEQ ID NO: 209872 - DNA, 15 bp, Homo sapiens
cacatatcacacata

SEQ ID NO: 209873 - DNA, 15 bp, Homo sapiens
acacatatcacacat

SEQ ID NO: 209874 - DNA, 15 bp, Homo sapiens
cacacatatcacaca

SEQ ID NO: 209875 - DNA, 15 bp, Homo sapiens
ccacacatatcacac

SEQ ID NO: 209876 - DNA, 15 bp, Homo sapiens
accacacatatcaca

SEQ ID NO: 209877 - DNA, 15 bp, Homo sapiens
taccacacatatcac

SEQ ID NO: 209878 - DNA, 15 bp, Homo sapiens
ataccacacatatca

SEQ ID NO: 209879 - DNA, 15 bp, Homo sapiens
cataccacacatatc

SEQ ID NO: 209880 - DNA, 15 bp, Homo sapiens
acataccacacatat

SEQ ID NO: 209881 - DNA, 15 bp, Homo sapiens
tacataccacacata

SEQ ID NO: 209882 - DNA, 15 bp, Homo sapiens
ctacataccacacat

SEQ ID NO: 209883 - DNA, 15 bp, Homo sapiens
actacataccacaca

SEQ ID NO: 209884 - DNA, 15 bp, Homo sapiens
cactacataccacac

SEQ ID NO: 209885 - DNA, 15 bp, Homo sapiens
acactacataccaca

SEQ ID NO: 209886 - DNA, 15 bp, Homo sapiens
cacactacataccac

SEQ ID NO: 209887 - DNA, 15 bp, Homo sapiens
acacactacatacca

SEQ ID NO: 209888 - DNA, 15 bp, Homo sapiens
cacacactacatacc

SEQ ID NO: 209889 - DNA, 15 bp, Homo sapiens
gcacacactacatac

SEQ ID NO: 209890 - DNA, 15 bp, Homo sapiens
tgcacacactacata

SEQ ID NO: 209891 - DNA, 15 bp, Homo sapiens
ctgcacacactacat

SEQ ID NO: 209892 - DNA, 15 bp, Homo sapiens
tctgcacacactaca

SEQ ID NO: 209893 - DNA, 15 bp, Homo sapiens
ttctgcacacactac

SEQ ID NO: 209894 - DNA, 15 bp, Homo sapiens
attctgcacacacta

SEQ ID NO: 209895 - DNA, 15 bp, Homo sapiens
cattctgcacacact

SEQ ID NO: 209896 - DNA, 15 bp, Homo sapiens
gcattctgcacacac

SEQ ID NO: 209897 - DNA, 15 bp, Homo sapiens
cgcattctgcacaca

SEQ ID NO: 209898 - DNA, 15 bp, Homo sapiens
acgcattctgcacac

SEQ ID NO: 209899 - DNA, 15 bp, Homo sapiens
cacgcattctgcaca

SEQ ID NO: 209900 - DNA, 15 bp, Homo sapiens
ccacgcattctgcac

SEQ ID NO: 209901 - DNA, 15 bp, Homo sapiens
accacgcattctgca

SEQ ID NO: 209902 - DNA, 15 bp, Homo sapiens
caccacgcattctgc

SEQ ID NO: 209903 - DNA, 15 bp, Homo sapiens
acaccacgcattctg

SEQ ID NO: 209904 - DNA, 15 bp, Homo sapiens
cacaccacgcattct

SEQ ID NO: 209905 - DNA, 15 bp, Homo sapiens
acacaccacgcattc

SEQ ID NO: 209906 - DNA, 15 bp, Homo sapiens
cacacaccacgcatt

SEQ ID NO: 209907 - DNA, 15 bp, Homo sapiens
ccacacaccacgcat

SEQ ID NO: 209908 - DNA, 15 bp, Homo sapiens
cccacacaccacgca

SEQ ID NO: 209909 - DNA, 15 bp, Homo sapiens
acccacacaccacgc

SEQ ID NO: 209910 - DNA, 15 bp, Homo sapiens
tacccacacaccacg

SEQ ID NO: 209911 - DNA, 15 bp, Homo sapiens
atacccacacaccac

SEQ ID NO: 209912 - DNA, 15 bp, Homo sapiens
aatacccacacacca

SEQ ID NO: 209913 - DNA, 15 bp, Homo sapiens
aaatacccacacacc

SEQ ID NO: 209914 - DNA, 15 bp, Homo sapiens
taaatacccacacac

SEQ ID NO: 209915 - DNA, 15 bp, Homo sapiens
ataaatacccacaca

SEQ ID NO: 209916 - DNA, 15 bp, Homo sapiens
cataaatacccacac

SEQ ID NO: 209917 - DNA, 15 bp, Homo sapiens
acataaatacccaca

SEQ ID NO: 209918 - DNA, 15 bp, Homo sapiens
cacataaatacccac

SEQ ID NO: 209919 - DNA, 15 bp, Homo sapiens
ccacataaataccca

SEQ ID NO: 209920 - DNA, 15 bp, Homo sapiens
accacataaataccc

SEQ ID NO: 209921 - DNA, 15 bp, Homo sapiens
caccacataaatacc

SEQ ID NO: 209922 - DNA, 15 bp, Homo sapiens
acaccacataaatac

SEQ ID NO: 209923 - DNA, 15 bp, Homo sapiens
cacaccacataaata

SEQ ID NO: 209924 - DNA, 15 bp, Homo sapiens
acacaccacataaat

SEQ ID NO: 209925 - DNA, 15 bp, Homo sapiens
cacacaccacataaa

SEQ ID NO: 209926 - DNA, 15 bp, Homo sapiens
acacacaccacataa

SEQ ID NO: 209927 - DNA, 15 bp, Homo sapiens
cacacacaccacata

SEQ ID NO: 209928 - DNA, 15 bp, Homo sapiens
acacacacaccacat

SEQ ID NO: 209929 - DNA, 15 bp, Homo sapiens
cacacacacaccaca

SEQ ID NO: 209930 - DNA, 15 bp, Homo sapiens
acacacacacaccac

SEQ ID NO: 209931 - DNA, 15 bp, Homo sapiens
cacacacacacacca

SEQ ID NO: 209932 - DNA, 15 bp, Homo sapiens
ccacacacacacacc

SEQ ID NO: 209933 - DNA, 15 bp, Homo sapiens
taccacacacacaca

SEQ ID NO: 209934 - DNA, 15 bp, Homo sapiens
ataccacacacacac

SEQ ID NO: 209935 - DNA, 15 bp, Homo sapiens
cataccacacacaca

SEQ ID NO: 209936 - DNA, 15 bp, Homo sapiens
acataccacacacac

SEQ ID NO: 209937 - DNA, 15 bp, Homo sapiens
cacataccacacaca

SEQ ID NO: 209938 - DNA, 15 bp, Homo sapiens
acacataccacacac

SEQ ID NO: 209939 - DNA, 15 bp, Homo sapiens
tacacataccacaca

SEQ ID NO: 209940 - DNA, 15 bp, Homo sapiens
atacacataccacac

SEQ ID NO: 209941 - DNA, 15 bp, Homo sapiens
catacacataccaca

SEQ ID NO: 209942 - DNA, 15 bp, Homo sapiens
ccatacacataccac

SEQ ID NO: 209943 - DNA, 15 bp, Homo sapiens
accatacacatacca

SEQ ID NO: 209944 - DNA, 15 bp, Homo sapiens
caccatacacatacc

SEQ ID NO: 209945 - DNA, 15 bp, Homo sapiens
gcaccatacacatac

SEQ ID NO: 209946 - DNA, 15 bp, Homo sapiens
tgcaccatacacata

SEQ ID NO: 209947 - DNA, 15 bp, Homo sapiens
atgcaccatacacat

SEQ ID NO: 209948 - DNA, 15 bp, Homo sapiens
catgcaccatacaca

SEQ ID NO: 209949 - DNA, 15 bp, Homo sapiens
acatgcaccatacac

SEQ ID NO: 209950 - DNA, 15 bp, Homo sapiens
cacatgcaccataca

SEQ ID NO: 209951 - DNA, 15 bp, Homo sapiens
acacatgcaccatac

SEQ ID NO: 209952 - DNA, 15 bp, Homo sapiens
cacacatgcaccata

SEQ ID NO: 209953 - DNA, 15 bp, Homo sapiens
acacacatgcaccat

SEQ ID NO: 209954 - DNA, 15 bp, Homo sapiens
tacacacatgcacca

SEQ ID NO: 209955 - DNA, 15 bp, Homo sapiens
atacacacatgcacc

SEQ ID NO: 209956 - DNA, 15 bp, Homo sapiens
catacacacatgcac

SEQ ID NO: 209957 - DNA, 15 bp, Homo sapiens
acatacacacatgca

SEQ ID NO: 209958 - DNA, 15 bp, Homo sapiens
cacatacacacatgc

SEQ ID NO: 209959 - DNA, 15 bp, Homo sapiens
ccacatacacacatg

SEQ ID NO: 209960 - DNA, 15 bp, Homo sapiens
accacatacacacat

SEQ ID NO: 209961 - DNA, 15 bp, Homo sapiens
gtaccacatacacac

SEQ ID NO: 209962 - DNA, 15 bp, Homo sapiens
tgtaccacatacaca

SEQ ID NO: 209963 - DNA, 15 bp, Homo sapiens
atgtaccacatacac

SEQ ID NO: 209964 - DNA, 15 bp, Homo sapiens
catgtaccacataca

SEQ ID NO: 209965 - DNA, 15 bp, Homo sapiens
acatgtaccacatac

SEQ ID NO: 209966 - DNA, 15 bp, Homo sapiens
tacatgtaccacata

SEQ ID NO: 209967 - DNA, 15 bp, Homo sapiens
atacatgtaccacat

SEQ ID NO: 209968 - DNA, 15 bp, Homo sapiens
catacatgtaccaca

SEQ ID NO: 209969 - DNA, 15 bp, Homo sapiens
acatacatgtaccac

SEQ ID NO: 209970 - DNA, 15 bp, Homo sapiens
cacatacatgtacca

SEQ ID NO: 209971 - DNA, 15 bp, Homo sapiens
tcacatacatgtacc

SEQ ID NO: 209972 - DNA, 15 bp, Homo sapiens
ttcacatacatgtac

SEQ ID NO: 209973 - DNA, 15 bp, Homo sapiens
attcacatacatgta

SEQ ID NO: 209974 - DNA, 15 bp, Homo sapiens
tattcacatacatgt

SEQ ID NO: 209975 - DNA, 15 bp, Homo sapiens
atattcacatacatg

SEQ ID NO: 209976 - DNA, 15 bp, Homo sapiens
catattcacatacat

SEQ ID NO: 209977 - DNA, 15 bp, Homo sapiens
acatattcacataca

SEQ ID NO: 209978 - DNA, 15 bp, Homo sapiens
cacatattcacatac

SEQ ID NO: 209979 - DNA, 15 bp, Homo sapiens
acacatattcacata

SEQ ID NO: 209980 - DNA, 15 bp, Homo sapiens
gacacatattcacat

SEQ ID NO: 209981 - DNA, 15 bp, Homo sapiens
tgacacatattcaca

SEQ ID NO: 209982 - DNA, 15 bp, Homo sapiens
atgacacatattcac

SEQ ID NO: 209983 - DNA, 15 bp, Homo sapiens
catgacacatattca

SEQ ID NO: 209984 - DNA, 15 bp, Homo sapiens
acatgacacatattc

SEQ ID NO: 209985 - DNA, 15 bp, Homo sapiens
cacatgacacatatt

SEQ ID NO: 209986 - DNA, 15 bp, Homo sapiens
acacatgacacatat

SEQ ID NO: 209987 - DNA, 15 bp, Homo sapiens
cacacatgacacata

SEQ ID NO: 209988 - DNA, 15 bp, Homo sapiens
acacacatgacacat

SEQ ID NO: 209989 - DNA, 15 bp, Homo sapiens
cacacacatgacaca

SEQ ID NO: 209990 - DNA, 15 bp, Homo sapiens
ccacacacatgacac

SEQ ID NO: 209991 - DNA, 15 bp, Homo sapiens
accacacacatgaca

SEQ ID NO: 209992 - DNA, 15 bp, Homo sapiens
caccacacacatgac

SEQ ID NO: 209993 - DNA, 15 bp, Homo sapiens
acaccacacacatga

SEQ ID NO: 209994 - DNA, 15 bp, Homo sapiens
cacaccacacacatg

SEQ ID NO: 209995 - DNA, 15 bp, Homo sapiens
acacaccacacacat

SEQ ID NO: 209996 - DNA, 15 bp, Homo sapiens
ccacacaccacacac

SEQ ID NO: 209997 - DNA, 15 bp, Homo sapiens
accacacaccacaca

SEQ ID NO: 209998 - DNA, 15 bp, Homo sapiens
caccacacaccacac

SEQ ID NO: 209999 - DNA, 15 bp, Homo sapiens
acaccacacaccaca

SEQ ID NO: 210000 - DNA, 15 bp, Homo sapiens
tacaccacacaccac

SEQ ID NO: 210001 - DNA, 15 bp, Homo sapiens
atacaccacacacca

SEQ ID NO: 210002 - DNA, 15 bp, Homo sapiens
catacaccacacacc

SEQ ID NO: 210003 - DNA, 15 bp, Homo sapiens
acatacaccacacac

SEQ ID NO: 210004 - DNA, 15 bp, Homo sapiens
cacatacaccacaca

SEQ ID NO: 210005 - DNA, 15 bp, Homo sapiens
acacatacaccacac

SEQ ID NO: 210006 - DNA, 15 bp, Homo sapiens
cacacatacaccaca

SEQ ID NO: 210007 - DNA, 15 bp, Homo sapiens
acacacatacaccac

SEQ ID NO: 210008 - DNA, 15 bp, Homo sapiens
cacacacatacacca

SEQ ID NO: 210009 - DNA, 15 bp, Homo sapiens
acacacacatacacc

SEQ ID NO: 210010 - DNA, 15 bp, Homo sapiens
ccacacacacataca

SEQ ID NO: 210011 - DNA, 15 bp, Homo sapiens
ccacatacacacacc

SEQ ID NO: 210012 - DNA, 15 bp, Homo sapiens
gccacatacacacac

SEQ ID NO: 210013 - DNA, 15 bp, Homo sapiens
tgccacatacacaca

SEQ ID NO: 210014 - DNA, 15 bp, Homo sapiens
atgccacatacacac

SEQ ID NO: 210015 - DNA, 15 bp, Homo sapiens
aatgccacatacaca

SEQ ID NO: 210016 - DNA, 15 bp, Homo sapiens
taatgccacatacac

SEQ ID NO: 210017 - DNA, 15 bp, Homo sapiens
ataatgccacataca

SEQ ID NO: 210018 - DNA, 15 bp, Homo sapiens
cataatgccacatac

SEQ ID NO: 210019 - DNA, 15 bp, Homo sapiens
acataatgccacata

SEQ ID NO: 210020 - DNA, 15 bp, Homo sapiens
cacataatgccacat

SEQ ID NO: 210021 - DNA, 15 bp, Homo sapiens
acacataatgccaca

SEQ ID NO: 210022 - DNA, 15 bp, Homo sapiens
cacacataatgccac

SEQ ID NO: 210023 - DNA, 15 bp, Homo sapiens
acacacataatgcca

SEQ ID NO: 210024 - DNA, 15 bp, Homo sapiens
cacacacataatgcc

SEQ ID NO: 210025 - DNA, 15 bp, Homo sapiens
acacacacataatgc

SEQ ID NO: 210026 - DNA, 15 bp, Homo sapiens
cacacacacataatg

SEQ ID NO: 210027 - DNA, 15 bp, Homo sapiens
tcacacacacataat

SEQ ID NO: 210028 - DNA, 15 bp, Homo sapiens
atcacacacacataa

SEQ ID NO: 210029 - DNA, 15 bp, Homo sapiens
catcacacacacata

SEQ ID NO: 210030 - DNA, 15 bp, Homo sapiens
acatcacacacacat

SEQ ID NO: 210031 - DNA, 15 bp, Homo sapiens
tacacatcacacaca

SEQ ID NO: 210032 - DNA, 15 bp, Homo sapiens
ctacacatcacacac

SEQ ID NO: 210033 - DNA, 15 bp, Homo sapiens
actacacatcacaca

SEQ ID NO: 210034 - DNA, 15 bp, Homo sapiens
cactacacatcacac

SEQ ID NO: 210035 - DNA, 15 bp, Homo sapiens
acactacacatcaca

SEQ ID NO: 210036 - DNA, 15 bp, Homo sapiens
cacactacacatcac

SEQ ID NO: 210037 - DNA, 15 bp, Homo sapiens
acacactacacatca

SEQ ID NO: 210038 - DNA, 15 bp, Homo sapiens
cacacactacacatc

SEQ ID NO: 210039 - DNA, 15 bp, Homo sapiens
ccacacactacacat

SEQ ID NO: 210040 - DNA, 15 bp, Homo sapiens
accacacactacaca

SEQ ID NO: 210041 - DNA, 15 bp, Homo sapiens
caccacacactacac

SEQ ID NO: 210042 - DNA, 15 bp, Homo sapiens
acaccacacactaca

SEQ ID NO: 210043 - DNA, 15 bp, Homo sapiens
tacaccacacactac

SEQ ID NO: 210044 - DNA, 15 bp, Homo sapiens
atacaccacacacta

SEQ ID NO: 210045 - DNA, 15 bp, Homo sapiens
catacaccacacact

SEQ ID NO: 210046 - DNA, 15 bp, Homo sapiens
tacatacaccacaca

SEQ ID NO: 210047 - DNA, 15 bp, Homo sapiens
atacatacaccacac

SEQ ID NO: 210048 - DNA, 15 bp, Homo sapiens
catacatacaccaca

SEQ ID NO: 210049 - DNA, 15 bp, Homo sapiens
ccatacatacaccac

SEQ ID NO: 210050 - DNA, 15 bp, Homo sapiens
accatacatacacca

SEQ ID NO: 210051 - DNA, 15 bp, Homo sapiens
caccatacatacacc

SEQ ID NO: 210052 - DNA, 15 bp, Homo sapiens
acaccatacatacac

SEQ ID NO: 210053 - DNA, 15 bp, Homo sapiens
tacaccatacataca

SEQ ID NO: 210054 - DNA, 15 bp, Homo sapiens
atacaccatacatac

SEQ ID NO: 210055 - DNA, 15 bp, Homo sapiens
catacaccatacata

SEQ ID NO: 210056 - DNA, 15 bp, Homo sapiens
acatacaccatacat

SEQ ID NO: 210057 - DNA, 15 bp, Homo sapiens
cacatacaccataca

SEQ ID NO: 210058 - DNA, 15 bp, Homo sapiens
ccacatacaccatac

SEQ ID NO: 210059 - DNA, 15 bp, Homo sapiens
accacatacaccata

SEQ ID NO: 210060 - DNA, 15 bp, Homo sapiens
caccacatacaccat

SEQ ID NO: 210061 - DNA, 15 bp, Homo sapiens
acaccacatacacca

SEQ ID NO: 210062 - DNA, 15 bp, Homo sapiens
cacaccacatacacc

SEQ ID NO: 210063 - DNA, 15 bp, Homo sapiens
acacaccacatacac

SEQ ID NO: 210064 - DNA, 15 bp, Homo sapiens
tacacaccacataca

SEQ ID NO: 210065 - DNA, 15 bp, Homo sapiens
atacacaccacatac

SEQ ID NO: 210066 - DNA, 15 bp, Homo sapiens
tatacacaccacata

SEQ ID NO: 210067 - DNA, 15 bp, Homo sapiens
atatacacaccacat

SEQ ID NO: 210068 - DNA, 15 bp, Homo sapiens
tatatacacaccaca

SEQ ID NO: 210069 - DNA, 15 bp, Homo sapiens
atatatacacaccac

SEQ ID NO: 210070 - DNA, 15 bp, Homo sapiens
tatatatacacacca

SEQ ID NO: 210071 - DNA, 15 bp, Homo sapiens
atatatatacacacc

SEQ ID NO: 210072 - DNA, 15 bp, Homo sapiens
ccatatatatataca

SEQ ID NO: 210073 - DNA, 15 bp, Homo sapiens
accatatatatatac

SEQ ID NO: 210074 - DNA, 15 bp, Homo sapiens
caccatatatatata

SEQ ID NO: 210075 - DNA, 15 bp, Homo sapiens
acaccatatatatat

SEQ ID NO: 210076 - DNA, 15 bp, Homo sapiens
cacaccatatatata

SEQ ID NO: 210077 - DNA, 15 bp, Homo sapiens
acacaccatatatat

SEQ ID NO: 210078 - DNA, 15 bp, Homo sapiens
cacacaccatatata

SEQ ID NO: 210079 - DNA, 15 bp, Homo sapiens
acacacaccatatat

SEQ ID NO: 210080 - DNA, 15 bp, Homo sapiens
tacacacaccatata

SEQ ID NO: 210081 - DNA, 15 bp, Homo sapiens
atacacacaccatat

SEQ ID NO: 210082 - DNA, 15 bp, Homo sapiens
tatacacacaccata

SEQ ID NO: 210083 - DNA, 15 bp, Homo sapiens
ctatacacacaccat

SEQ ID NO: 210084 - DNA, 15 bp, Homo sapiens
actatacacacacca

SEQ ID NO: 210085 - DNA, 15 bp, Homo sapiens
cactatacacacacc

SEQ ID NO: 210086 - DNA, 15 bp, Homo sapiens
acactatacacacac

SEQ ID NO: 210087 - DNA, 15 bp, Homo sapiens
cacactatacacaca

SEQ ID NO: 210088 - DNA, 15 bp, Homo sapiens
acacactatacacac

SEQ ID NO: 210089 - DNA, 15 bp, Homo sapiens
cacacactatacaca

SEQ ID NO: 210090 - DNA, 15 bp, Homo sapiens
acacacactatacac

SEQ ID NO: 210091 - DNA, 15 bp, Homo sapiens
tacacacactataca

SEQ ID NO: 210092 - DNA, 15 bp, Homo sapiens
atacacacactatac

SEQ ID NO: 210093 - DNA, 15 bp, Homo sapiens
tatacacacactata

SEQ ID NO: 210094 - DNA, 15 bp, Homo sapiens
gtatacacacactat

SEQ ID NO: 210095 - DNA, 15 bp, Homo sapiens
ggtatacacacacta

SEQ ID NO: 210096 - DNA, 15 bp, Homo sapiens
tggtatacacacact

SEQ ID NO: 210097 - DNA, 15 bp, Homo sapiens
gtggtatacacacac

SEQ ID NO: 210098 - DNA, 15 bp, Homo sapiens
agtggtatacacaca

SEQ ID NO: 210099 - DNA, 15 bp, Homo sapiens
aagtggtatacacac

SEQ ID NO: 210100 - DNA, 15 bp, Homo sapiens
caagtggtatacaca

SEQ ID NO: 210101 - DNA, 15 bp, Homo sapiens
acaagtggtatacac

SEQ ID NO: 210102 - DNA, 15 bp, Homo sapiens
tacaagtggtataca

SEQ ID NO: 210103 - DNA, 15 bp, Homo sapiens
atacaagtggtatac

SEQ ID NO: 210104 - DNA, 15 bp, Homo sapiens
catacaagtggtata

SEQ ID NO: 210105 - DNA, 15 bp, Homo sapiens
acatacaagtggtat

SEQ ID NO: 210106 - DNA, 15 bp, Homo sapiens
aacatacaagtggta

SEQ ID NO: 210107 - DNA, 15 bp, Homo sapiens
aaacatacaagtggt

SEQ ID NO: 210108 - DNA, 15 bp, Homo sapiens
taaacatacaagtgg

SEQ ID NO: 210109 - DNA, 15 bp, Homo sapiens
ataaacatacaagtg

SEQ ID NO: 210110 - DNA, 15 bp, Homo sapiens
cataaacatacaagt

SEQ ID NO: 210111 - DNA, 15 bp, Homo sapiens
acataaacatacaag

SEQ ID NO: 210112 - DNA, 15 bp, Homo sapiens
cacataaacatacaa

SEQ ID NO: 210113 - DNA, 15 bp, Homo sapiens
acacataaacataca

SEQ ID NO: 210114 - DNA, 15 bp, Homo sapiens
cacacataaacatac

SEQ ID NO: 210115 - DNA, 15 bp, Homo sapiens
acacacataaacata

SEQ ID NO: 210116 - DNA, 15 bp, Homo sapiens
cacacacataaacat

SEQ ID NO: 210117 - DNA, 15 bp, Homo sapiens
acacacacataaaca

SEQ ID NO: 210118 - DNA, 15 bp, Homo sapiens
tacacacacataaac

SEQ ID NO: 210119 - DNA, 15 bp, Homo sapiens
atacacacacataaa

SEQ ID NO: 210120 - DNA, 15 bp, Homo sapiens
tatacacacacataa

SEQ ID NO: 210121 - DNA, 15 bp, Homo sapiens
atatacacacacata

SEQ ID NO: 210122 - DNA, 15 bp, Homo sapiens
tatatacacacacat

SEQ ID NO: 210123 - DNA, 15 bp, Homo sapiens
catatatacacacac

SEQ ID NO: 210124 - DNA, 15 bp, Homo sapiens
cacacatatatacac

SEQ ID NO: 210125 - DNA, 15 bp, Homo sapiens
tcacacatatataca

SEQ ID NO: 210126 - DNA, 15 bp, Homo sapiens
atcacacatatatac

SEQ ID NO: 210127 - DNA, 15 bp, Homo sapiens
catcacacatatata

SEQ ID NO: 210128 - DNA, 15 bp, Homo sapiens
acatcacacatatat

SEQ ID NO: 210129 - DNA, 15 bp, Homo sapiens
cacatcacacatata

SEQ ID NO: 210130 - DNA, 15 bp, Homo sapiens
acacatcacacatat

SEQ ID NO: 210131 - DNA, 15 bp, Homo sapiens
tacacacatcacaca

SEQ ID NO: 210132 - DNA, 15 bp, Homo sapiens
atacacacatcacac

SEQ ID NO: 210133 - DNA, 15 bp, Homo sapiens
tatacacacatcaca

SEQ ID NO: 210134 - DNA, 15 bp, Homo sapiens
ctatacacacatcac

SEQ ID NO: 210135 - DNA, 15 bp, Homo sapiens
actatacacacatca

SEQ ID NO: 210136 - DNA, 15 bp, Homo sapiens
cactatacacacatc

SEQ ID NO: 210137 - DNA, 15 bp, Homo sapiens
acactatacacacat

SEQ ID NO: 210138 - DNA, 15 bp, Homo sapiens
tacacactatacaca

SEQ ID NO: 210139 - DNA, 15 bp, Homo sapiens
gtacacactatacac

SEQ ID NO: 210140 - DNA, 15 bp, Homo sapiens
tgtacacactataca

SEQ ID NO: 210141 - DNA, 15 bp, Homo sapiens
atgtacacactatac

SEQ ID NO: 210142 - DNA, 15 bp, Homo sapiens
catgtacacactata

SEQ ID NO: 210143 - DNA, 15 bp, Homo sapiens
gcatgtacacactat

SEQ ID NO: 210144 - DNA, 15 bp, Homo sapiens
cgcatgtacacacta

SEQ ID NO: 210145 - DNA, 15 bp, Homo sapiens
acgcatgtacacact

SEQ ID NO: 210146 - DNA, 15 bp, Homo sapiens
aacgcatgtacacac

SEQ ID NO: 210147 - DNA, 15 bp, Homo sapiens
caacgcatgtacaca

SEQ ID NO: 210148 - DNA, 15 bp, Homo sapiens
acaacgcatgtacac

SEQ ID NO: 210149 - DNA, 15 bp, Homo sapiens
cacaacgcatgtaca

SEQ ID NO: 210150 - DNA, 15 bp, Homo sapiens
acacaacgcatgtac

SEQ ID NO: 210151 - DNA, 15 bp, Homo sapiens
tacacaacgcatgta

SEQ ID NO: 210152 - DNA, 15 bp, Homo sapiens
atacacaacgcatgt

SEQ ID NO: 210153 - DNA, 15 bp, Homo sapiens
tatacacaacgcatg

SEQ ID NO: 210154 - DNA, 15 bp, Homo sapiens
ttatacacaacgcat

SEQ ID NO: 210155 - DNA, 15 bp, Homo sapiens
attatacacaacgca

SEQ ID NO: 210156 - DNA, 15 bp, Homo sapiens
cattatacacaacgc

SEQ ID NO: 210157 - DNA, 15 bp, Homo sapiens
acattatacacaacg

SEQ ID NO: 210158 - DNA, 15 bp, Homo sapiens
cacattatacacaac

SEQ ID NO: 210159 - DNA, 15 bp, Homo sapiens
acacattatacacaa

SEQ ID NO: 210160 - DNA, 15 bp, Homo sapiens
cacacattatacaca

SEQ ID NO: 210161 - DNA, 15 bp, Homo sapiens
acacacattatacac

SEQ ID NO: 210162 - DNA, 15 bp, Homo sapiens
tacacacattataca

SEQ ID NO: 210163 - DNA, 15 bp, Homo sapiens
atacacacattatac

SEQ ID NO: 210164 - DNA, 15 bp, Homo sapiens
tatacacacattata

SEQ ID NO: 210165 - DNA, 15 bp, Homo sapiens
ctatacacacattat

SEQ ID NO: 210166 - DNA, 15 bp, Homo sapiens
actatacacacatta

SEQ ID NO: 210167 - DNA, 15 bp, Homo sapiens
tactatacacacatt

SEQ ID NO: 210168 - DNA, 15 bp, Homo sapiens
atactatacacacat

SEQ ID NO: 210169 - DNA, 15 bp, Homo sapiens
catactatacacaca

SEQ ID NO: 210170 - DNA, 15 bp, Homo sapiens
acatactatacacac

SEQ ID NO: 210171 - DNA, 15 bp, Homo sapiens
cacatactatacaca

SEQ ID NO: 210172 - DNA, 15 bp, Homo sapiens
acacatactatacac

SEQ ID NO: 210173 - DNA, 15 bp, Homo sapiens
cacacatactataca

SEQ ID NO: 210174 - DNA, 15 bp, Homo sapiens
acacacatactatac

SEQ ID NO: 210175 - DNA, 15 bp, Homo sapiens
cacacacatactata

SEQ ID NO: 210176 - DNA, 15 bp, Homo sapiens
gcacacacatactat

SEQ ID NO: 210177 - DNA, 15 bp, Homo sapiens
agcacacacatacta

SEQ ID NO: 210178 - DNA, 15 bp, Homo sapiens
cagcacacacatact

SEQ ID NO: 210179 - DNA, 15 bp, Homo sapiens
gcagcacacacatac

SEQ ID NO: 210180 - DNA, 15 bp, Homo sapiens
cgcagcacacacata

SEQ ID NO: 210181 - DNA, 15 bp, Homo sapiens
acgcagcacacacat

SEQ ID NO: 210182 - DNA, 15 bp, Homo sapiens
cacgcagcacacaca

SEQ ID NO: 210183 - DNA, 15 bp, Homo sapiens
acacgcagcacacac

SEQ ID NO: 210184 - DNA, 15 bp, Homo sapiens
tacacgcagcacaca

SEQ ID NO: 210185 - DNA, 15 bp, Homo sapiens
atacacgcagcacac

SEQ ID NO: 210186 - DNA, 15 bp, Homo sapiens
tatacacgcagcaca

SEQ ID NO: 210187 - DNA, 15 bp, Homo sapiens
atatacacgcagcac

SEQ ID NO: 210188 - DNA, 15 bp, Homo sapiens
aatatacacgcagca

SEQ ID NO: 210189 - DNA, 15 bp, Homo sapiens
aaatatacacgcagc

SEQ ID NO: 210190 - DNA, 15 bp, Homo sapiens
caaatatacacgcag

SEQ ID NO: 210191 - DNA, 15 bp, Homo sapiens
acaaatatacacgca

SEQ ID NO: 210192 - DNA, 15 bp, Homo sapiens
aacaaatatacacgc

SEQ ID NO: 210193 - DNA, 15 bp, Homo sapiens
caacaaatatacacg

SEQ ID NO: 210194 - DNA, 15 bp, Homo sapiens
ccaacaaatatacac

SEQ ID NO: 210195 - DNA, 15 bp, Homo sapiens
cccaacaaatataca

SEQ ID NO: 210196 - DNA, 15 bp, Homo sapiens
acccaacaaatatac

SEQ ID NO: 210197 - DNA, 15 bp, Homo sapiens
cacccaacaaatata

SEQ ID NO: 210198 - DNA, 15 bp, Homo sapiens
acacccaacaaatat

SEQ ID NO: 210199 - DNA, 15 bp, Homo sapiens
cacacccaacaaata

SEQ ID NO: 210200 - DNA, 15 bp, Homo sapiens
acacacccaacaaat

SEQ ID NO: 210201 - DNA, 15 bp, Homo sapiens
cacacacccaacaaa

SEQ ID NO: 210202 - DNA, 15 bp, Homo sapiens
acacacacccaacaa

SEQ ID NO: 210203 - DNA, 15 bp, Homo sapiens
tacacacacccaaca

SEQ ID NO: 210204 - DNA, 15 bp, Homo sapiens
atacacacacccaac

SEQ ID NO: 210205 - DNA, 15 bp, Homo sapiens
tatacacacacccaa

SEQ ID NO: 210206 - DNA, 15 bp, Homo sapiens
atatacacacaccca

SEQ ID NO: 210207 - DNA, 15 bp, Homo sapiens
catatacacacaccc

SEQ ID NO: 210208 - DNA, 15 bp, Homo sapiens
acatatacacacacc

SEQ ID NO: 210209 - DNA, 15 bp, Homo sapiens
cacatatacacacac

SEQ ID NO: 210210 - DNA, 15 bp, Homo sapiens
acacatatacacaca

SEQ ID NO: 210211 - DNA, 15 bp, Homo sapiens
cacacatatacacac

SEQ ID NO: 210212 - DNA, 15 bp, Homo sapiens
ccacacatatacaca

SEQ ID NO: 210213 - DNA, 15 bp, Homo sapiens
accacacatatacac

SEQ ID NO: 210214 - DNA, 15 bp, Homo sapiens
taccacacatataca

SEQ ID NO: 210215 - DNA, 15 bp, Homo sapiens
ataccacacatatac

SEQ ID NO: 210216 - DNA, 15 bp, Homo sapiens
cataccacacatata

SEQ ID NO: 210217 - DNA, 15 bp, Homo sapiens
gtacataccacacat

SEQ ID NO: 210218 - DNA, 15 bp, Homo sapiens
cgtacataccacaca

SEQ ID NO: 210219 - DNA, 15 bp, Homo sapiens
acgtacataccacac

SEQ ID NO: 210220 - DNA, 15 bp, Homo sapiens
cacgtacataccaca

SEQ ID NO: 210221 - DNA, 15 bp, Homo sapiens
ccacgtacataccac

SEQ ID NO: 210222 - DNA, 15 bp, Homo sapiens
tccacgtacatacca

SEQ ID NO: 210223 - DNA, 15 bp, Homo sapiens
atccacgtacatacc

SEQ ID NO: 210224 - DNA, 15 bp, Homo sapiens
catccacgtacatac

SEQ ID NO: 210225 - DNA, 15 bp, Homo sapiens
ccatccacgtacata

SEQ ID NO: 210226 - DNA, 15 bp, Homo sapiens
accatccacgtacat

SEQ ID NO: 210227 - DNA, 15 bp, Homo sapiens
caccatccacgtaca

SEQ ID NO: 210228 - DNA, 15 bp, Homo sapiens
acaccatccacgtac

SEQ ID NO: 210229 - DNA, 15 bp, Homo sapiens
cacaccatccacgta

SEQ ID NO: 210230 - DNA, 15 bp, Homo sapiens
acacaccatccacgt

SEQ ID NO: 210231 - DNA, 15 bp, Homo sapiens
cacacaccatccacg

SEQ ID NO: 210232 - DNA, 15 bp, Homo sapiens
ccacacaccatccac

SEQ ID NO: 210233 - DNA, 15 bp, Homo sapiens
tccacacaccatcca

SEQ ID NO: 210234 - DNA, 15 bp, Homo sapiens
gtccacacaccatcc

SEQ ID NO: 210235 - DNA, 15 bp, Homo sapiens
tgtccacacaccatc

SEQ ID NO: 210236 - DNA, 15 bp, Homo sapiens
ttgtccacacaccat

SEQ ID NO: 210237 - DNA, 15 bp, Homo sapiens
attgtccacacacca

SEQ ID NO: 210238 - DNA, 15 bp, Homo sapiens
cattgtccacacacc

SEQ ID NO: 210239 - DNA, 15 bp, Homo sapiens
gcattgtccacacac

SEQ ID NO: 210240 - DNA, 15 bp, Homo sapiens
cgcattgtccacaca

SEQ ID NO: 210241 - DNA, 15 bp, Homo sapiens
acgcattgtccacac

SEQ ID NO: 210242 - DNA, 15 bp, Homo sapiens
cacgcattgtccaca

SEQ ID NO: 210243 - DNA, 15 bp, Homo sapiens
acacgcattgtccac

SEQ ID NO: 210244 - DNA, 15 bp, Homo sapiens
tacacgcattgtcca

SEQ ID NO: 210245 - DNA, 15 bp, Homo sapiens
atacacgcattgtcc

SEQ ID NO: 210246 - DNA, 15 bp, Homo sapiens
catacacgcattgtc

SEQ ID NO: 210247 - DNA, 15 bp, Homo sapiens
acatacacgcattgt

SEQ ID NO: 210248 - DNA, 15 bp, Homo sapiens
cacatacacgcattg

SEQ ID NO: 210249 - DNA, 15 bp, Homo sapiens
acacatacacgcatt

SEQ ID NO: 210250 - DNA, 15 bp, Homo sapiens
cacacatacacgcat

SEQ ID NO: 210251 - DNA, 15 bp, Homo sapiens
acacacatacacgca

SEQ ID NO: 210252 - DNA, 15 bp, Homo sapiens
aacacacatacacgc

SEQ ID NO: 210253 - DNA, 15 bp, Homo sapiens
taacacacatacacg

SEQ ID NO: 210254 - DNA, 15 bp, Homo sapiens
ataacacacatacac

SEQ ID NO: 210255 - DNA, 15 bp, Homo sapiens
cataacacacataca

SEQ ID NO: 210256 - DNA, 15 bp, Homo sapiens
acataacacacatac

SEQ ID NO: 210257 - DNA, 15 bp, Homo sapiens
cacataacacacata

SEQ ID NO: 210258 - DNA, 15 bp, Homo sapiens
acacataacacacat

SEQ ID NO: 210259 - DNA, 15 bp, Homo sapiens
cacacataacacaca

SEQ ID NO: 210260 - DNA, 15 bp, Homo sapiens
acacacataacacac

SEQ ID NO: 210261 - DNA, 15 bp, Homo sapiens
tacacacataacaca

SEQ ID NO: 210262 - DNA, 15 bp, Homo sapiens
atacacacataacac

SEQ ID NO: 210263 - DNA, 15 bp, Homo sapiens
catacacacataaca

SEQ ID NO: 210264 - DNA, 15 bp, Homo sapiens
acatacacacataac

SEQ ID NO: 210265 - DNA, 15 bp, Homo sapiens
cacatacacacataa

SEQ ID NO: 210266 - DNA, 15 bp, Homo sapiens
acacatacacacata

SEQ ID NO: 210267 - DNA, 15 bp, Homo sapiens
cacacatacacacat

SEQ ID NO: 210268 - DNA, 15 bp, Homo sapiens
tcacacatacacaca

SEQ ID NO: 210269 - DNA, 15 bp, Homo sapiens
atcacacatacacac

SEQ ID NO: 210270 - DNA, 15 bp, Homo sapiens
tatcacacatacaca

SEQ ID NO: 210271 - DNA, 15 bp, Homo sapiens
atatcacacatacac

SEQ ID NO: 210272 - DNA, 15 bp, Homo sapiens
catatcacacataca

SEQ ID NO: 210273 - DNA, 15 bp, Homo sapiens
acatatcacacatac

SEQ ID NO: 210274 - DNA, 15 bp, Homo sapiens
tacacatatcacaca

SEQ ID NO: 210275 - DNA, 15 bp, Homo sapiens
atacacatatcacac

SEQ ID NO: 210276 - DNA, 15 bp, Homo sapiens
tatacacatatcaca

SEQ ID NO: 210277 - DNA, 15 bp, Homo sapiens
atatacacatatcac

SEQ ID NO: 210278 - DNA, 15 bp, Homo sapiens
tatatacacatatca

SEQ ID NO: 210279 - DNA, 15 bp, Homo sapiens
ttatatacacatatc

SEQ ID NO: 210280 - DNA, 15 bp, Homo sapiens
attatatacacatat

SEQ ID NO: 210281 - DNA, 15 bp, Homo sapiens
cattatatacacata

SEQ ID NO: 210282 - DNA, 15 bp, Homo sapiens
acattatatacacat

SEQ ID NO: 210283 - DNA, 15 bp, Homo sapiens
cacattatatacaca

SEQ ID NO: 210284 - DNA, 15 bp, Homo sapiens
acacattatatacac

SEQ ID NO: 210285 - DNA, 15 bp, Homo sapiens
tacacattatataca

SEQ ID NO: 210286 - DNA, 15 bp, Homo sapiens
atacacattatatac

SEQ ID NO: 210287 - DNA, 15 bp, Homo sapiens
catacacattatata

SEQ ID NO: 210288 - DNA, 15 bp, Homo sapiens
acatacacattatat

SEQ ID NO: 210289 - DNA, 15 bp, Homo sapiens
cacatacacattata

SEQ ID NO: 210290 - DNA, 15 bp, Homo sapiens
acacatacacattat

SEQ ID NO: 210291 - DNA, 15 bp, Homo sapiens
cacacatacacatta

SEQ ID NO: 210292 - DNA, 15 bp, Homo sapiens
acacacatacacatt

SEQ ID NO: 210293 - DNA, 15 bp, Homo sapiens
tacacacatacacat

SEQ ID NO: 210294 - DNA, 15 bp, Homo sapiens
atacacacatacaca

SEQ ID NO: 210295 - DNA, 15 bp, Homo sapiens
tatacacacatacac

SEQ ID NO: 210296 - DNA, 15 bp, Homo sapiens
ctatacacacataca

SEQ ID NO: 210297 - DNA, 15 bp, Homo sapiens
actatacacacatac

SEQ ID NO: 210298 - DNA, 15 bp, Homo sapiens
cactatacacacata

SEQ ID NO: 210299 - DNA, 15 bp, Homo sapiens
ccacacacactatac

SEQ ID NO: 210300 - DNA, 15 bp, Homo sapiens
accacacacactata

SEQ ID NO: 210301 - DNA, 15 bp, Homo sapiens
caccacacacactat

SEQ ID NO: 210302 - DNA, 15 bp, Homo sapiens
acaccacacacacta

SEQ ID NO: 210303 - DNA, 15 bp, Homo sapiens
cacaccacacacact

SEQ ID NO: 210304 - DNA, 15 bp, Homo sapiens
cacacacaccacaca

SEQ ID NO: 210305 - DNA, 15 bp, Homo sapiens
acacacacaccacac

SEQ ID NO: 210306 - DNA, 15 bp, Homo sapiens
tacacacacacacca

SEQ ID NO: 210307 - DNA, 15 bp, Homo sapiens
ctacacacacacacc

SEQ ID NO: 210308 - DNA, 15 bp, Homo sapiens
actacacacacacac

SEQ ID NO: 210309 - DNA, 15 bp, Homo sapiens
cactacacacacaca

SEQ ID NO: 210310 - DNA, 15 bp, Homo sapiens
tcacacactacacac

SEQ ID NO: 210311 - DNA, 15 bp, Homo sapiens
atcacacactacaca

SEQ ID NO: 210312 - DNA, 15 bp, Homo sapiens
catcacacactacac

SEQ ID NO: 210313 - DNA, 15 bp, Homo sapiens
acatcacacactaca

SEQ ID NO: 210314 - DNA, 15 bp, Homo sapiens
cacatcacacactac

SEQ ID NO: 210315 - DNA, 15 bp, Homo sapiens
acacatcacacacta

SEQ ID NO: 210316 - DNA, 15 bp, Homo sapiens
gacacatcacacact

SEQ ID NO: 210317 - DNA, 15 bp, Homo sapiens
agacacatcacacac

SEQ ID NO: 210318 - DNA, 15 bp, Homo sapiens
tagacacatcacaca

SEQ ID NO: 210319 - DNA, 15 bp, Homo sapiens
atagacacatcacac

SEQ ID NO: 210320 - DNA, 15 bp, Homo sapiens
tatagacacatcaca

SEQ ID NO: 210321 - DNA, 15 bp, Homo sapiens
atatagacacatcac

SEQ ID NO: 210322 - DNA, 15 bp, Homo sapiens
catatagacacatca

SEQ ID NO: 210323 - DNA, 15 bp, Homo sapiens
acatatagacacatc

SEQ ID NO: 210324 - DNA, 15 bp, Homo sapiens
cacatatagacacat

SEQ ID NO: 210325 - DNA, 15 bp, Homo sapiens
acacatatagacaca

SEQ ID NO: 210326 - DNA, 15 bp, Homo sapiens
aacacatatagacac

SEQ ID NO: 210327 - DNA, 15 bp, Homo sapiens
caacacatatagaca

SEQ ID NO: 210328 - DNA, 15 bp, Homo sapiens
ccaacacatatagac

SEQ ID NO: 210329 - DNA, 15 bp, Homo sapiens
cccaacacatataga

SEQ ID NO: 210330 - DNA, 15 bp, Homo sapiens
acccaacacatatag

SEQ ID NO: 210331 - DNA, 15 bp, Homo sapiens
cacccaacacatata

SEQ ID NO: 210332 - DNA, 15 bp, Homo sapiens
acacccaacacatat

SEQ ID NO: 210333 - DNA, 15 bp, Homo sapiens
cacacccaacacata

SEQ ID NO: 210334 - DNA, 15 bp, Homo sapiens
acacacccaacacat

SEQ ID NO: 210335 - DNA, 15 bp, Homo sapiens
tacacacccaacaca

SEQ ID NO: 210336 - DNA, 15 bp, Homo sapiens
atacacacccaacac

SEQ ID NO: 210337 - DNA, 15 bp, Homo sapiens
aatacacacccaaca

SEQ ID NO: 210338 - DNA, 15 bp, Homo sapiens
taatacacacccaac

SEQ ID NO: 210339 - DNA, 15 bp, Homo sapiens
ataatacacacccaa

SEQ ID NO: 210340 - DNA, 15 bp, Homo sapiens
cataatacacaccca

SEQ ID NO: 210341 - DNA, 15 bp, Homo sapiens
acataatacacaccc

SEQ ID NO: 210342 - DNA, 15 bp, Homo sapiens
tacataatacacacc

SEQ ID NO: 210343 - DNA, 15 bp, Homo sapiens
atacataatacacac

SEQ ID NO: 210344 - DNA, 15 bp, Homo sapiens
catacataatacaca

SEQ ID NO: 210345 - DNA, 15 bp, Homo sapiens
acatacataatacac

SEQ ID NO: 210346 - DNA, 15 bp, Homo sapiens
tacatacataataca

SEQ ID NO: 210347 - DNA, 15 bp, Homo sapiens
atacatacataatac

SEQ ID NO: 210348 - DNA, 15 bp, Homo sapiens
tatacatacataata

SEQ ID NO: 210349 - DNA, 15 bp, Homo sapiens
atatacatacataat

SEQ ID NO: 210350 - DNA, 15 bp, Homo sapiens
catatacatacataa

SEQ ID NO: 210351 - DNA, 15 bp, Homo sapiens
acatatacatacata

SEQ ID NO: 210352 - DNA, 15 bp, Homo sapiens
tacatatacatacat

SEQ ID NO: 210353 - DNA, 15 bp, Homo sapiens
atacatatacataca

SEQ ID NO: 210354 - DNA, 15 bp, Homo sapiens
tatacatatacatac

SEQ ID NO: 210355 - DNA, 15 bp, Homo sapiens
ctatacatatacata

SEQ ID NO: 210356 - DNA, 15 bp, Homo sapiens
actatacatatacat

SEQ ID NO: 210357 - DNA, 15 bp, Homo sapiens
cactatacatataca

SEQ ID NO: 210358 - DNA, 15 bp, Homo sapiens
acactatacatatac

SEQ ID NO: 210359 - DNA, 15 bp, Homo sapiens
cacactatacatata

SEQ ID NO: 210360 - DNA, 15 bp, Homo sapiens
acacactatacatat

SEQ ID NO: 210361 - DNA, 15 bp, Homo sapiens
tcacacacacacacc

SEQ ID NO: 210362 - DNA, 15 bp, Homo sapiens
gtcacacacacacac

SEQ ID NO: 210363 - DNA, 15 bp, Homo sapiens
ggtcacacacacaca

SEQ ID NO: 210364 - DNA, 15 bp, Homo sapiens
aggtcacacacacac

SEQ ID NO: 210365 - DNA, 15 bp, Homo sapiens
caggtcacacacaca

SEQ ID NO: 210366 - DNA, 15 bp, Homo sapiens
acaggtcacacacac

SEQ ID NO: 210367 - DNA, 15 bp, Homo sapiens
cacaggtcacacaca

SEQ ID NO: 210368 - DNA, 15 bp, Homo sapiens
ccacaggtcacacac

SEQ ID NO: 210369 - DNA, 15 bp, Homo sapiens
accacaggtcacaca

SEQ ID NO: 210370 - DNA, 15 bp, Homo sapiens
taccacaggtcacac

SEQ ID NO: 210371 - DNA, 15 bp, Homo sapiens
ataccacaggtcaca

SEQ ID NO: 210372 - DNA, 15 bp, Homo sapiens
aataccacaggtcac

SEQ ID NO: 210373 - DNA, 15 bp, Homo sapiens
aaataccacaggtca

SEQ ID NO: 210374 - DNA, 15 bp, Homo sapiens
caaataccacaggtc

SEQ ID NO: 210375 - DNA, 15 bp, Homo sapiens
ccaaataccacaggt

SEQ ID NO: 210376 - DNA, 15 bp, Homo sapiens
accaaataccacagg

SEQ ID NO: 210377 - DNA, 15 bp, Homo sapiens
taccaaataccacag

SEQ ID NO: 210378 - DNA, 15 bp, Homo sapiens
ataccaaataccaca

SEQ ID NO: 210379 - DNA, 15 bp, Homo sapiens
cataccaaataccac

SEQ ID NO: 210380 - DNA, 15 bp, Homo sapiens
ccataccaaatacca

SEQ ID NO: 210381 - DNA, 15 bp, Homo sapiens
tccataccaaatacc

SEQ ID NO: 210382 - DNA, 15 bp, Homo sapiens
ctccataccaaatac

SEQ ID NO: 210383 - DNA, 15 bp, Homo sapiens
actccataccaaata

SEQ ID NO: 210384 - DNA, 15 bp, Homo sapiens
cactccataccaaat

SEQ ID NO: 210385 - DNA, 15 bp, Homo sapiens
acactccataccaaa

SEQ ID NO: 210386 - DNA, 15 bp, Homo sapiens
cacactccataccaa

SEQ ID NO: 210387 - DNA, 15 bp, Homo sapiens
acacactccatacca

SEQ ID NO: 210388 - DNA, 15 bp, Homo sapiens
cacacactccatacc

SEQ ID NO: 210389 - DNA, 15 bp, Homo sapiens
gcacacactccatac

SEQ ID NO: 210390 - DNA, 15 bp, Homo sapiens
tgcacacactccata

SEQ ID NO: 210391 - DNA, 15 bp, Homo sapiens
ctgcacacactccat

SEQ ID NO: 210392 - DNA, 15 bp, Homo sapiens
actgcacacactcca

SEQ ID NO: 210393 - DNA, 15 bp, Homo sapiens
cactgcacacactcc

SEQ ID NO: 210394 - DNA, 15 bp, Homo sapiens
acactgcacacactc

SEQ ID NO: 210395 - DNA, 15 bp, Homo sapiens
tacactgcacacact

SEQ ID NO: 210396 - DNA, 15 bp, Homo sapiens
atacactgcacacac

SEQ ID NO: 210397 - DNA, 15 bp, Homo sapiens
catacactgcacaca

SEQ ID NO: 210398 - DNA, 15 bp, Homo sapiens
ccatacactgcacac

SEQ ID NO: 210399 - DNA, 15 bp, Homo sapiens
accatacactgcaca

SEQ ID NO: 210400 - DNA, 15 bp, Homo sapiens
caccatacactgcac

SEQ ID NO: 210401 - DNA, 15 bp, Homo sapiens
acaccatacactgca

SEQ ID NO: 210402 - DNA, 15 bp, Homo sapiens
cacaccatacactgc

SEQ ID NO: 210403 - DNA, 15 bp, Homo sapiens
acacaccatacactg

SEQ ID NO: 210404 - DNA, 15 bp, Homo sapiens
cacacaccatacact

SEQ ID NO: 210405 - DNA, 15 bp, Homo sapiens
acacacaccatacac

SEQ ID NO: 210406 - DNA, 15 bp, Homo sapiens
cacacacaccataca

SEQ ID NO: 210407 - DNA, 15 bp, Homo sapiens
acacacacaccatac

SEQ ID NO: 210408 - DNA, 15 bp, Homo sapiens
tacacacacaccata

SEQ ID NO: 210409 - DNA, 15 bp, Homo sapiens
ctacacacacaccat

SEQ ID NO: 210410 - DNA, 15 bp, Homo sapiens
actacacacacacca

SEQ ID NO: 210411 - DNA, 15 bp, Homo sapiens
cactacacacacacc

SEQ ID NO: 210412 - DNA, 15 bp, Homo sapiens
gcacacactacacac

SEQ ID NO: 210413 - DNA, 15 bp, Homo sapiens
agcacacactacaca

SEQ ID NO: 210414 - DNA, 15 bp, Homo sapiens
cagcacacactacac

SEQ ID NO: 210415 - DNA, 15 bp, Homo sapiens
acagcacacactaca

SEQ ID NO: 210416 - DNA, 15 bp, Homo sapiens
cacagcacacactac

SEQ ID NO: 210417 - DNA, 15 bp, Homo sapiens
acacagcacacacta

SEQ ID NO: 210418 - DNA, 15 bp, Homo sapiens
cacacagcacacact

SEQ ID NO: 210419 - DNA, 15 bp, Homo sapiens
acacacagcacacac

SEQ ID NO: 210420 - DNA, 15 bp, Homo sapiens
tacacacagcacaca

SEQ ID NO: 210421 - DNA, 15 bp, Homo sapiens
atacacacagcacac

SEQ ID NO: 210422 - DNA, 15 bp, Homo sapiens
catacacacagcaca

SEQ ID NO: 210423 - DNA, 15 bp, Homo sapiens
acatacacacagcac

SEQ ID NO: 210424 - DNA, 15 bp, Homo sapiens
cacatacacacagca

SEQ ID NO: 210425 - DNA, 15 bp, Homo sapiens
tacacatacacacag

SEQ ID NO: 210426 - DNA, 15 bp, Homo sapiens
ccatacacatacaca

SEQ ID NO: 210427 - DNA, 15 bp, Homo sapiens
accatacacatacac

SEQ ID NO: 210428 - DNA, 15 bp, Homo sapiens
caccatacacataca

SEQ ID NO: 210429 - DNA, 15 bp, Homo sapiens
acaccatacacatac

SEQ ID NO: 210430 - DNA, 15 bp, Homo sapiens
cacaccatacacata

SEQ ID NO: 210431 - DNA, 15 bp, Homo sapiens
acacaccatacacat

SEQ ID NO: 210432 - DNA, 15 bp, Homo sapiens
cacacaccatacaca

SEQ ID NO: 210433 - DNA, 15 bp, Homo sapiens
ccacacaccatacac

SEQ ID NO: 210434 - DNA, 15 bp, Homo sapiens
accacacaccataca

SEQ ID NO: 210435 - DNA, 15 bp, Homo sapiens
caccacacaccatac

SEQ ID NO: 210436 - DNA, 15 bp, Homo sapiens
acaccacacaccata

SEQ ID NO: 210437 - DNA, 15 bp, Homo sapiens
tacaccacacaccat

SEQ ID NO: 210438 - DNA, 15 bp, Homo sapiens
ccatacaccacacac

SEQ ID NO: 210439 - DNA, 15 bp, Homo sapiens
accatacaccacaca

SEQ ID NO: 210440 - DNA, 15 bp, Homo sapiens
caccatacaccacac

SEQ ID NO: 210441 - DNA, 15 bp, Homo sapiens
acaccatacaccaca

SEQ ID NO: 210442 - DNA, 15 bp, Homo sapiens
cacaccatacaccac

SEQ ID NO: 210443 - DNA, 15 bp, Homo sapiens
tcacaccatacacca

SEQ ID NO: 210444 - DNA, 15 bp, Homo sapiens
ttcacaccatacacc

SEQ ID NO: 210445 - DNA, 15 bp, Homo sapiens
cttcacaccatacac

SEQ ID NO: 210446 - DNA, 15 bp, Homo sapiens
acttcacaccataca

SEQ ID NO: 210447 - DNA, 15 bp, Homo sapiens
cacttcacaccatac

SEQ ID NO: 210448 - DNA, 15 bp, Homo sapiens
acacttcacaccata

SEQ ID NO: 210449 - DNA, 15 bp, Homo sapiens
cacacttcacaccat

SEQ ID NO: 210450 - DNA, 15 bp, Homo sapiens
acacacttcacacca

SEQ ID NO: 210451 - DNA, 15 bp, Homo sapiens
cacacacttcacacc

SEQ ID NO: 210452 - DNA, 15 bp, Homo sapiens
acacacacttcacac

SEQ ID NO: 210453 - DNA, 15 bp, Homo sapiens
cacacacacttcaca

SEQ ID NO: 210454 - DNA, 15 bp, Homo sapiens
acacacacacttcac

SEQ ID NO: 210455 - DNA, 15 bp, Homo sapiens
tacacacacacttca

SEQ ID NO: 210456 - DNA, 15 bp, Homo sapiens
ctacacacacacttc

SEQ ID NO: 210457 - DNA, 15 bp, Homo sapiens
gctacacacacactt

SEQ ID NO: 210458 - DNA, 15 bp, Homo sapiens
tgctacacacacact

SEQ ID NO: 210459 - DNA, 15 bp, Homo sapiens
atgctacacacacac

SEQ ID NO: 210460 - DNA, 15 bp, Homo sapiens
catgctacacacaca

SEQ ID NO: 210461 - DNA, 15 bp, Homo sapiens
acatgctacacacac

SEQ ID NO: 210462 - DNA, 15 bp, Homo sapiens
tacatgctacacaca

SEQ ID NO: 210463 - DNA, 15 bp, Homo sapiens
atacatgctacacac

SEQ ID NO: 210464 - DNA, 15 bp, Homo sapiens
aatacatgctacaca

SEQ ID NO: 210465 - DNA, 15 bp, Homo sapiens
caatacatgctacac

SEQ ID NO: 210466 - DNA, 15 bp, Homo sapiens
acaatacatgctaca

SEQ ID NO: 210467 - DNA, 15 bp, Homo sapiens
cacaatacatgctac

SEQ ID NO: 210468 - DNA, 15 bp, Homo sapiens
acacaatacatgcta

SEQ ID NO: 210469 - DNA, 15 bp, Homo sapiens
aacacaatacatgct

SEQ ID NO: 210470 - DNA, 15 bp, Homo sapiens
taacacaatacatgc

SEQ ID NO: 210471 - DNA, 15 bp, Homo sapiens
gtaacacaatacatg

SEQ ID NO: 210472 - DNA, 15 bp, Homo sapiens
cgtaacacaatacat

SEQ ID NO: 210473 - DNA, 15 bp, Homo sapiens
acgtaacacaataca

SEQ ID NO: 210474 - DNA, 15 bp, Homo sapiens
cacgtaacacaatac

SEQ ID NO: 210475 - DNA, 15 bp, Homo sapiens
acacgtaacacaata

SEQ ID NO: 210476 - DNA, 15 bp, Homo sapiens
cacacgtaacacaat

SEQ ID NO: 210477 - DNA, 15 bp, Homo sapiens
acacacgtaacacaa

SEQ ID NO: 210478 - DNA, 15 bp, Homo sapiens
cacacacgtaacaca

SEQ ID NO: 210479 - DNA, 15 bp, Homo sapiens
ccacacacgtaacac

SEQ ID NO: 210480 - DNA, 15 bp, Homo sapiens
accacacacgtaaca

SEQ ID NO: 210481 - DNA, 15 bp, Homo sapiens
caccacacacgtaac

SEQ ID NO: 210482 - DNA, 15 bp, Homo sapiens
gcaccacacacgtaa

SEQ ID NO: 210483 - DNA, 15 bp, Homo sapiens
tgcaccacacacgta

SEQ ID NO: 210484 - DNA, 15 bp, Homo sapiens
atgcaccacacacgt

SEQ ID NO: 210485 - DNA, 15 bp, Homo sapiens
catgcaccacacacg

SEQ ID NO: 210486 - DNA, 15 bp, Homo sapiens
ccatgcaccacacac

SEQ ID NO: 210487 - DNA, 15 bp, Homo sapiens
accatgcaccacaca

SEQ ID NO: 210488 - DNA, 15 bp, Homo sapiens
caccatgcaccacac

SEQ ID NO: 210489 - DNA, 15 bp, Homo sapiens
acaccatgcaccaca

SEQ ID NO: 210490 - DNA, 15 bp, Homo sapiens
cacaccatgcaccac

SEQ ID NO: 210491 - DNA, 15 bp, Homo sapiens
acacaccatgcacca

SEQ ID NO: 210492 - DNA, 15 bp, Homo sapiens
cacacaccatgcacc

SEQ ID NO: 210493 - DNA, 15 bp, Homo sapiens
acacacaccatgcac

SEQ ID NO: 210494 - DNA, 15 bp, Homo sapiens
cacacacaccatgca

SEQ ID NO: 210495 - DNA, 15 bp, Homo sapiens
acacacacaccatgc

SEQ ID NO: 210496 - DNA, 15 bp, Homo sapiens
tacacacacaccatg

SEQ ID NO: 210497 - DNA, 15 bp, Homo sapiens
tcacactacacacac

SEQ ID NO: 210498 - DNA, 15 bp, Homo sapiens
ctcacactacacaca

SEQ ID NO: 210499 - DNA, 15 bp, Homo sapiens
tttaatcagctaata

SEQ ID NO: 210500 - DNA, 15 bp, Homo sapiens
ttttaatcagctaat

SEQ ID NO: 210501 - DNA, 15 bp, Homo sapiens
tttttaatcagctaa

SEQ ID NO: 210502 - DNA, 15 bp, Homo sapiens
ctttttaatcagcta

SEQ ID NO: 210503 - DNA, 15 bp, Homo sapiens
actttttaatcagct

SEQ ID NO: 210504 - DNA, 15 bp, Homo sapiens
aactttttaatcagc

SEQ ID NO: 210505 - DNA, 15 bp, Homo sapiens
taactttttaatcag

SEQ ID NO: 210506 - DNA, 15 bp, Homo sapiens
ttaactttttaatca

SEQ ID NO: 210507 - DNA, 15 bp, Homo sapiens
tttaactttttaatc

SEQ ID NO: 210508 - DNA, 15 bp, Homo sapiens
ttttaactttttaat

SEQ ID NO: 210509 - DNA, 15 bp, Homo sapiens
tttttaactttttaa

SEQ ID NO: 210510 - DNA, 15 bp, Homo sapiens
ttttttaacttttta

SEQ ID NO: 210511 - DNA, 15 bp, Homo sapiens
tttttttaacttttt

SEQ ID NO: 210512 - DNA, 15 bp, Homo sapiens
ttttttttaactttt

SEQ ID NO: 210513 - DNA, 15 bp, Homo sapiens
tttttttttaacttt

SEQ ID NO: 210514 - DNA, 15 bp, Homo sapiens
ttttttttttaactt

SEQ ID NO: 210515 - DNA, 15 bp, Homo sapiens
tttttttttttaact

SEQ ID NO: 210516 - DNA, 15 bp, Homo sapiens
atttttttttttaac

SEQ ID NO: 210517 - DNA, 15 bp, Homo sapiens
gatttttttttttaa

SEQ ID NO: 210518 - DNA, 15 bp, Homo sapiens
agattttttttttta

SEQ ID NO: 210519 - DNA, 15 bp, Homo sapiens
cagattttttttttt

SEQ ID NO: 210520 - DNA, 15 bp, Homo sapiens
acagatttttttttt

SEQ ID NO: 210521 - DNA, 15 bp, Homo sapiens
tacagattttttttt

SEQ ID NO: 210522 - DNA, 15 bp, Homo sapiens
atacagatttttttt

SEQ ID NO: 210523 - DNA, 15 bp, Homo sapiens
gatacagattttttt

SEQ ID NO: 210524 - DNA, 15 bp, Homo sapiens
ggatacagatttttt

SEQ ID NO: 210525 - DNA, 15 bp, Homo sapiens
gggatacagattttt

SEQ ID NO: 210526 - DNA, 15 bp, Homo sapiens
agggatacagatttt

SEQ ID NO: 210527 - DNA, 15 bp, Homo sapiens
cagggatacagattt

SEQ ID NO: 210528 - DNA, 15 bp, Homo sapiens
ccagggatacagatt

SEQ ID NO: 210529 - DNA, 15 bp, Homo sapiens
cccagggatacagat

SEQ ID NO: 210530 - DNA, 15 bp, Homo sapiens
acccagggatacaga

SEQ ID NO: 210531 - DNA, 15 bp, Homo sapiens
tacccagggatacag

SEQ ID NO: 210532 - DNA, 15 bp, Homo sapiens
ctacccagggataca

SEQ ID NO: 210533 - DNA, 15 bp, Homo sapiens
gctacccagggatac

SEQ ID NO: 210534 - DNA, 15 bp, Homo sapiens
ggctacccagggata

SEQ ID NO: 210535 - DNA, 15 bp, Homo sapiens
gggctacccagggat

SEQ ID NO: 210536 - DNA, 15 bp, Homo sapiens
tgggctacccaggga

SEQ ID NO: 210537 - DNA, 15 bp, Homo sapiens
ctgggctacccaggg

SEQ ID NO: 210538 - DNA, 15 bp, Homo sapiens
gctgggctacccagg

SEQ ID NO: 210539 - DNA, 15 bp, Homo sapiens
ggctgggctacccag

SEQ ID NO: 210540 - DNA, 15 bp, Homo sapiens
aggctgggctaccca

SEQ ID NO: 210541 - DNA, 15 bp, Homo sapiens
caggctgggctaccc

SEQ ID NO: 210542 - DNA, 15 bp, Homo sapiens
acaggctgggctacc

SEQ ID NO: 210543 - DNA, 15 bp, Homo sapiens
aacaggctgggctac

SEQ ID NO: 210544 - DNA, 15 bp, Homo sapiens
gaacaggctgggcta

SEQ ID NO: 210545 - DNA, 15 bp, Homo sapiens
ggaacaggctgggct

SEQ ID NO: 210546 - DNA, 15 bp, Homo sapiens
aggaacaggctgggc

SEQ ID NO: 210547 - DNA, 15 bp, Homo sapiens
aaggaacaggctggg

SEQ ID NO: 210548 - DNA, 15 bp, Homo sapiens
caaggaacaggctgg

SEQ ID NO: 210549 - DNA, 15 bp, Homo sapiens
gcaaggaacaggctg

SEQ ID NO: 210550 - DNA, 15 bp, Homo sapiens
agcaaggaacaggct

SEQ ID NO: 210551 - DNA, 15 bp, Homo sapiens
cagcaaggaacaggc

SEQ ID NO: 210552 - DNA, 15 bp, Homo sapiens
gcagcaaggaacagg

SEQ ID NO: 210553 - DNA, 15 bp, Homo sapiens
tgcagcaaggaacag

SEQ ID NO: 210554 - DNA, 15 bp, Homo sapiens
ctgcagcaaggaaca

SEQ ID NO: 210555 - DNA, 15 bp, Homo sapiens
actgcagcaaggaac

SEQ ID NO: 210556 - DNA, 15 bp, Homo sapiens
aactgcagcaaggaa

SEQ ID NO: 210557 - DNA, 15 bp, Homo sapiens
caactgcagcaagga

SEQ ID NO: 210558 - DNA, 15 bp, Homo sapiens
tcaactgcagcaagg

SEQ ID NO: 210559 - DNA, 15 bp, Homo sapiens
ttcaactgcagcaag

SEQ ID NO: 210560 - DNA, 15 bp, Homo sapiens
cttcaactgcagcaa

SEQ ID NO: 210561 - DNA, 15 bp, Homo sapiens
tcttcaactgcagca

SEQ ID NO: 210562 - DNA, 15 bp, Homo sapiens
gtcttcaactgcagc

SEQ ID NO: 210563 - DNA, 15 bp, Homo sapiens
agtcttcaactgcag

SEQ ID NO: 210564 - DNA, 15 bp, Homo sapiens
cagtcttcaactgca

SEQ ID NO: 210565 - DNA, 15 bp, Homo sapiens
tcagtcttcaactgc

SEQ ID NO: 210566 - DNA, 15 bp, Homo sapiens
gtcagtcttcaactg

SEQ ID NO: 210567 - DNA, 15 bp, Homo sapiens
ggtcagtcttcaact

SEQ ID NO: 210568 - DNA, 15 bp, Homo sapiens
cggtcagtcttcaac

SEQ ID NO: 210569 - DNA, 15 bp, Homo sapiens
tcggtcagtcttcaa

SEQ ID NO: 210570 - DNA, 15 bp, Homo sapiens
ctcggtcagtcttca

SEQ ID NO: 210571 - DNA, 15 bp, Homo sapiens
cctcggtcagtcttc

SEQ ID NO: 210572 - DNA, 15 bp, Homo sapiens
tcctcggtcagtctt

SEQ ID NO: 210573 - DNA, 15 bp, Homo sapiens
ctcctcggtcagtct

SEQ ID NO: 210574 - DNA, 15 bp, Homo sapiens
gctcctcggtcagtc

SEQ ID NO: 210575 - DNA, 15 bp, Homo sapiens
agctcctcggtcagt

SEQ ID NO: 210576 - DNA, 15 bp, Homo sapiens
tagctcctcggtcag

SEQ ID NO: 210577 - DNA, 15 bp, Homo sapiens
atagctcctcggtca

SEQ ID NO: 210578 - DNA, 15 bp, Homo sapiens
gatagctcctcggtc

SEQ ID NO: 210579 - DNA, 15 bp, Homo sapiens
tgatagctcctcggt

SEQ ID NO: 210580 - DNA, 15 bp, Homo sapiens
ctgatagctcctcgg

SEQ ID NO: 210581 - DNA, 15 bp, Homo sapiens
gctgatagctcctcg

SEQ ID NO: 210582 - DNA, 15 bp, Homo sapiens
cgctgatagctcctc

SEQ ID NO: 210583 - DNA, 15 bp, Homo sapiens
ccgctgatagctcct

SEQ ID NO: 210584 - DNA, 15 bp, Homo sapiens
gccgctgatagctcc

SEQ ID NO: 210585 - DNA, 15 bp, Homo sapiens
agccgctgatagctc

SEQ ID NO: 210586 - DNA, 15 bp, Homo sapiens
aagccgctgatagct

SEQ ID NO: 210587 - DNA, 15 bp, Homo sapiens
gaagccgctgatagc

SEQ ID NO: 210588 - DNA, 15 bp, Homo sapiens
ggaagccgctgatag

SEQ ID NO: 210589 - DNA, 15 bp, Homo sapiens
gggaagccgctgata

SEQ ID NO: 210590 - DNA, 15 bp, Homo sapiens
cgggaagccgctgat

SEQ ID NO: 210591 - DNA, 15 bp, Homo sapiens
ccgggaagccgctga

SEQ ID NO: 210592 - DNA, 15 bp, Homo sapiens
gccgggaagccgctg

SEQ ID NO: 210593 - DNA, 15 bp, Homo sapiens
ggccgggaagccgct

SEQ ID NO: 210594 - DNA, 15 bp, Homo sapiens
tggccgggaagccgc

SEQ ID NO: 210595 - DNA, 15 bp, Homo sapiens
gtggccgggaagccg

SEQ ID NO: 210596 - DNA, 15 bp, Homo sapiens
agtggccgggaagcc

SEQ ID NO: 210597 - DNA, 15 bp, Homo sapiens
cagtggccgggaagc

SEQ ID NO: 210598 - DNA, 15 bp, Homo sapiens
acagtggccgggaag

SEQ ID NO: 210599 - DNA, 15 bp, Homo sapiens
cacagtggccgggaa

SEQ ID NO: 210600 - DNA, 15 bp, Homo sapiens
ccacagtggccggga

SEQ ID NO: 210601 - DNA, 15 bp, Homo sapiens
accacagtggccggg

SEQ ID NO: 210602 - DNA, 15 bp, Homo sapiens
caccacagtggccgg

SEQ ID NO: 210603 - DNA, 15 bp, Homo sapiens
gcaccacagtggccg

SEQ ID NO: 210604 - DNA, 15 bp, Homo sapiens
ggcaccacagtggcc

SEQ ID NO: 210605 - DNA, 15 bp, Homo sapiens
tggcaccacagtggc

SEQ ID NO: 210606 - DNA, 15 bp, Homo sapiens
atggcaccacagtgg

SEQ ID NO: 210607 - DNA, 15 bp, Homo sapiens
aatggcaccacagtg

SEQ ID NO: 210608 - DNA, 15 bp, Homo sapiens
aaatggcaccacagt

SEQ ID NO: 210609 - DNA, 15 bp, Homo sapiens
aaaatggcaccacag

SEQ ID NO: 210610 - DNA, 15 bp, Homo sapiens
aaaaatggcaccaca

SEQ ID NO: 210611 - DNA, 15 bp, Homo sapiens
caaaaatggcaccac

SEQ ID NO: 210612 - DNA, 15 bp, Homo sapiens
ccaaaaatggcacca

SEQ ID NO: 210613 - DNA, 15 bp, Homo sapiens
gccaaaaatggcacc

SEQ ID NO: 210614 - DNA, 15 bp, Homo sapiens
aggccaaaaatggca

SEQ ID NO: 210615 - DNA, 15 bp, Homo sapiens
gaggccaaaaatggc

SEQ ID NO: 210616 - DNA, 15 bp, Homo sapiens
tgaggccaaaaatgg

SEQ ID NO: 210617 - DNA, 15 bp, Homo sapiens
ttgaggccaaaaatg

SEQ ID NO: 210618 - DNA, 15 bp, Homo sapiens
tttgaggccaaaaat

SEQ ID NO: 210619 - DNA, 15 bp, Homo sapiens
gtttgaggccaaaaa

SEQ ID NO: 210620 - DNA, 15 bp, Homo sapiens
ggtttgaggccaaaa

SEQ ID NO: 210621 - DNA, 15 bp, Homo sapiens
gggtttgaggccaaa

SEQ ID NO: 210622 - DNA, 15 bp, Homo sapiens
tgggtttgaggccaa

SEQ ID NO: 210623 - DNA, 15 bp, Homo sapiens
atgggtttgaggcca

SEQ ID NO: 210624 - DNA, 15 bp, Homo sapiens
aatgggtttgaggcc

SEQ ID NO: 210625 - DNA, 15 bp, Homo sapiens
caatgggtttgaggc

SEQ ID NO: 210626 - DNA, 15 bp, Homo sapiens
acaatgggtttgagg

SEQ ID NO: 210627 - DNA, 15 bp, Homo sapiens
cacaatgggtttgag

SEQ ID NO: 210628 - DNA, 15 bp, Homo sapiens
tcacaatgggtttga

SEQ ID NO: 210629 - DNA, 15 bp, Homo sapiens
ttcacaatgggtttg

SEQ ID NO: 210630 - DNA, 15 bp, Homo sapiens
attcacaatgggttt

SEQ ID NO: 210631 - DNA, 15 bp, Homo sapiens
aattcacaatgggtt

SEQ ID NO: 210632 - DNA, 15 bp, Homo sapiens
caattcacaatgggt

SEQ ID NO: 210633 - DNA, 15 bp, Homo sapiens
gcaattcacaatggg

SEQ ID NO: 210634 - DNA, 15 bp, Homo sapiens
agcaattcacaatgg

SEQ ID NO: 210635 - DNA, 15 bp, Homo sapiens
tagcaattcacaatg

SEQ ID NO: 210636 - DNA, 15 bp, Homo sapiens
atagcaattcacaat

SEQ ID NO: 210637 - DNA, 15 bp, Homo sapiens
gatagcaattcacaa

SEQ ID NO: 210638 - DNA, 15 bp, Homo sapiens
agatagcaattcaca

SEQ ID NO: 210639 - DNA, 15 bp, Homo sapiens
aagatagcaattcac

SEQ ID NO: 210640 - DNA, 15 bp, Homo sapiens
aaagatagcaattca

SEQ ID NO: 210641 - DNA, 15 bp, Homo sapiens
aaaagatagcaattc

SEQ ID NO: 210642 - DNA, 15 bp, Homo sapiens
gaaaagatagcaatt

SEQ ID NO: 210643 - DNA, 15 bp, Homo sapiens
ggaaaagatagcaat

SEQ ID NO: 210644 - DNA, 15 bp, Homo sapiens
gggaaaagatagcaa

SEQ ID NO: 210645 - DNA, 15 bp, Homo sapiens
ggggaaaagatagca

SEQ ID NO: 210646 - DNA, 15 bp, Homo sapiens
gggggaaaagatagc

SEQ ID NO: 210647 - DNA, 15 bp, Homo sapiens
tgggggaaaagatag

SEQ ID NO: 210648 - DNA, 15 bp, Homo sapiens
ctgggggaaaagata

SEQ ID NO: 210649 - DNA, 15 bp, Homo sapiens
gctgggggaaaagat

SEQ ID NO: 210650 - DNA, 15 bp, Homo sapiens
ggctgggggaaaaga

SEQ ID NO: 210651 - DNA, 15 bp, Homo sapiens
tggctgggggaaaag

SEQ ID NO: 210652 - DNA, 15 bp, Homo sapiens
atggctgggggaaaa

SEQ ID NO: 210653 - DNA, 15 bp, Homo sapiens
gatggctgggggaaa

SEQ ID NO: 210654 - DNA, 15 bp, Homo sapiens
tgatggctgggggaa

SEQ ID NO: 210655 - DNA, 15 bp, Homo sapiens
ctgatggctggggga

SEQ ID NO: 210656 - DNA, 15 bp, Homo sapiens
gctgatggctggggg

SEQ ID NO: 210657 - DNA, 15 bp, Homo sapiens
ggctgatggctgggg

SEQ ID NO: 210658 - DNA, 15 bp, Homo sapiens
cggctgatggctggg

SEQ ID NO: 210659 - DNA, 15 bp, Homo sapiens
ccggctgatggctgg

SEQ ID NO: 210660 - DNA, 15 bp, Homo sapiens
tccggctgatggctg

SEQ ID NO: 210661 - DNA, 15 bp, Homo sapiens
ttccggctgatggct

SEQ ID NO: 210662 - DNA, 15 bp, Homo sapiens
cttccggctgatggc

SEQ ID NO: 210663 - DNA, 15 bp, Homo sapiens
tcttccggctgatgg

SEQ ID NO: 210664 - DNA, 15 bp, Homo sapiens
atcttccggctgatg

SEQ ID NO: 210665 - DNA, 15 bp, Homo sapiens
gatcttccggctgat

SEQ ID NO: 210666 - DNA, 15 bp, Homo sapiens
ggatcttccggctga

SEQ ID NO: 210667 - DNA, 15 bp, Homo sapiens
tggatcttccggctg

SEQ ID NO: 210668 - DNA, 15 bp, Homo sapiens
atggatcttccggct

SEQ ID NO: 210669 - DNA, 15 bp, Homo sapiens
aatggatcttccggc

SEQ ID NO: 210670 - DNA, 15 bp, Homo sapiens
taatggatcttccgg

SEQ ID NO: 210671 - DNA, 15 bp, Homo sapiens
ttaatggatcttccg

SEQ ID NO: 210672 - DNA, 15 bp, Homo sapiens
gttaatggatcttcc

SEQ ID NO: 210673 - DNA, 15 bp, Homo sapiens
tgttaatggatcttc

SEQ ID NO: 210674 - DNA, 15 bp, Homo sapiens
ttgttaatggatctt

SEQ ID NO: 210675 - DNA, 15 bp, Homo sapiens
tttgttaatggatct

SEQ ID NO: 210676 - DNA, 15 bp, Homo sapiens
atttgttaatggatc

SEQ ID NO: 210677 - DNA, 15 bp, Homo sapiens
aatttgttaatggat

SEQ ID NO: 210678 - DNA, 15 bp, Homo sapiens
taatttgttaatgga

SEQ ID NO: 210679 - DNA, 15 bp, Homo sapiens
ttaatttgttaatgg

SEQ ID NO: 210680 - DNA, 15 bp, Homo sapiens
tttaatttgttaatg

SEQ ID NO: 210681 - DNA, 15 bp, Homo sapiens
ttttaatttgttaat

SEQ ID NO: 210682 - DNA, 15 bp, Homo sapiens
attttaatttgttaa

SEQ ID NO: 210683 - DNA, 15 bp, Homo sapiens
aattttaatttgtta

SEQ ID NO: 210684 - DNA, 15 bp, Homo sapiens
gaattttaatttgtt

SEQ ID NO: 210685 - DNA, 15 bp, Homo sapiens
ggaattttaatttgt

SEQ ID NO: 210686 - DNA, 15 bp, Homo sapiens
gggaattttaatttg

SEQ ID NO: 210687 - DNA, 15 bp, Homo sapiens
agggaattttaattt

SEQ ID NO: 210688 - DNA, 15 bp, Homo sapiens
gagggaattttaatt

SEQ ID NO: 210689 - DNA, 15 bp, Homo sapiens
agagggaattttaat

SEQ ID NO: 210690 - DNA, 15 bp, Homo sapiens
tagagggaattttaa

SEQ ID NO: 210691 - DNA, 15 bp, Homo sapiens
ctagagggaatttta

SEQ ID NO: 210692 - DNA, 15 bp, Homo sapiens
tctagagggaatttt

SEQ ID NO: 210693 - DNA, 15 bp, Homo sapiens
ctctagagggaattt

SEQ ID NO: 210694 - DNA, 15 bp, Homo sapiens
actctagagggaatt

SEQ ID NO: 210695 - DNA, 15 bp, Homo sapiens
gactctagagggaat

SEQ ID NO: 210696 - DNA, 15 bp, Homo sapiens
tgactctagagggaa

SEQ ID NO: 210697 - DNA, 15 bp, Homo sapiens
ctgactctagaggga

SEQ ID NO: 210698 - DNA, 15 bp, Homo sapiens
tctgactctagaggg

SEQ ID NO: 210699 - DNA, 15 bp, Homo sapiens
ttctgactctagagg

SEQ ID NO: 210700 - DNA, 15 bp, Homo sapiens
attctgactctagag

SEQ ID NO: 210701 - DNA, 15 bp, Homo sapiens
cattctgactctaga

SEQ ID NO: 210702 - DNA, 15 bp, Homo sapiens
ccattctgactctag

SEQ ID NO: 210703 - DNA, 15 bp, Homo sapiens
gccattctgactcta

SEQ ID NO: 210704 - DNA, 15 bp, Homo sapiens
agccattctgactct

SEQ ID NO: 210705 - DNA, 15 bp, Homo sapiens
aagccattctgactc

SEQ ID NO: 210706 - DNA, 15 bp, Homo sapiens
aaagccattctgact

SEQ ID NO: 210707 - DNA, 15 bp, Homo sapiens
caaagccattctgac

SEQ ID NO: 210708 - DNA, 15 bp, Homo sapiens
ccaaagccattctga

SEQ ID NO: 210709 - DNA, 15 bp, Homo sapiens
accaaagccattctg

SEQ ID NO: 210710 - DNA, 15 bp, Homo sapiens
aaccaaagccattct

SEQ ID NO: 210711 - DNA, 15 bp, Homo sapiens
aaaccaaagccattc

SEQ ID NO: 210712 - DNA, 15 bp, Homo sapiens
gaaaccaaagccatt

SEQ ID NO: 210713 - DNA, 15 bp, Homo sapiens
agaaaccaaagccat

SEQ ID NO: 210714 - DNA, 15 bp, Homo sapiens
cagaaaccaaagcca

SEQ ID NO: 210715 - DNA, 15 bp, Homo sapiens
ccagaaaccaaagcc

SEQ ID NO: 210716 - DNA, 15 bp, Homo sapiens
cccagaaaccaaagc

SEQ ID NO: 210717 - DNA, 15 bp, Homo sapiens
acccagaaaccaaag

SEQ ID NO: 210718 - DNA, 15 bp, Homo sapiens
aacccagaaaccaaa

SEQ ID NO: 210719 - DNA, 15 bp, Homo sapiens
gaacccagaaaccaa

SEQ ID NO: 210720 - DNA, 15 bp, Homo sapiens
agaacccagaaacca

SEQ ID NO: 210721 - DNA, 15 bp, Homo sapiens
tagaacccagaaacc

SEQ ID NO: 210722 - DNA, 15 bp, Homo sapiens
ttagaacccagaaac

SEQ ID NO: 210723 - DNA, 15 bp, Homo sapiens
tttagaacccagaaa

SEQ ID NO: 210724 - DNA, 15 bp, Homo sapiens
atttagaacccagaa

SEQ ID NO: 210725 - DNA, 15 bp, Homo sapiens
catttagaacccaga

SEQ ID NO: 210726 - DNA, 15 bp, Homo sapiens
tcatttagaacccag

SEQ ID NO: 210727 - DNA, 15 bp, Homo sapiens
gtcatttagaaccca

SEQ ID NO: 210728 - DNA, 15 bp, Homo sapiens
ggtcatttagaaccc

SEQ ID NO: 210729 - DNA, 15 bp, Homo sapiens
aggtcatttagaacc

SEQ ID NO: 210730 - DNA, 15 bp, Homo sapiens
aaggtcatttagaac

SEQ ID NO: 210731 - DNA, 15 bp, Homo sapiens
caaggtcatttagaa

SEQ ID NO: 210732 - DNA, 15 bp, Homo sapiens
tcaaggtcatttaga

SEQ ID NO: 210733 - DNA, 15 bp, Homo sapiens
atcaaggtcatttag

SEQ ID NO: 210734 - DNA, 15 bp, Homo sapiens
aatcaaggtcattta

SEQ ID NO: 210735 - DNA, 15 bp, Homo sapiens
aaatcaaggtcattt

SEQ ID NO: 210736 - DNA, 15 bp, Homo sapiens
aaaatcaaggtcatt

SEQ ID NO: 210737 - DNA, 15 bp, Homo sapiens
taaaatcaaggtcat

SEQ ID NO: 210738 - DNA, 15 bp, Homo sapiens
ttaaaatcaaggtca

SEQ ID NO: 210739 - DNA, 15 bp, Homo sapiens
attaaaatcaaggtc

SEQ ID NO: 210740 - DNA, 15 bp, Homo sapiens
aattaaaatcaaggt

SEQ ID NO: 210741 - DNA, 15 bp, Homo sapiens
taattaaaatcaagg

SEQ ID NO: 210742 - DNA, 15 bp, Homo sapiens
gtaattaaaatcaag

SEQ ID NO: 210743 - DNA, 15 bp, Homo sapiens
ggtaattaaaatcaa

SEQ ID NO: 210744 - DNA, 15 bp, Homo sapiens
tggtaattaaaatca

SEQ ID NO: 210745 - DNA, 15 bp, Homo sapiens
atggtaattaaaatc

SEQ ID NO: 210746 - DNA, 15 bp, Homo sapiens
catggtaattaaaat

SEQ ID NO: 210747 - DNA, 15 bp, Homo sapiens
gcatggtaattaaaa

SEQ ID NO: 210748 - DNA, 15 bp, Homo sapiens
ggcatggtaattaaa

SEQ ID NO: 210749 - DNA, 15 bp, Homo sapiens
tggcatggtaattaa

SEQ ID NO: 210750 - DNA, 15 bp, Homo sapiens
atggcatggtaatta

SEQ ID NO: 210751 - DNA, 15 bp, Homo sapiens
tatggcatggtaatt

SEQ ID NO: 210752 - DNA, 15 bp, Homo sapiens
gtatggcatggtaat

SEQ ID NO: 210753 - DNA, 15 bp, Homo sapiens
tgtatggcatggtaa

SEQ ID NO: 210754 - DNA, 15 bp, Homo sapiens
ctgtatggcatggta

SEQ ID NO: 210755 - DNA, 15 bp, Homo sapiens
cctgtatggcatggt

SEQ ID NO: 210756 - DNA, 15 bp, Homo sapiens
acctgtatggcatgg

SEQ ID NO: 210757 - DNA, 15 bp, Homo sapiens
aacctgtatggcatg

SEQ ID NO: 210758 - DNA, 15 bp, Homo sapiens
aaacctgtatggcat

SEQ ID NO: 210759 - DNA, 15 bp, Homo sapiens
caaacctgtatggca

SEQ ID NO: 210760 - DNA, 15 bp, Homo sapiens
ccaaacctgtatggc

SEQ ID NO: 210761 - DNA, 15 bp, Homo sapiens
tccaaacctgtatgg

SEQ ID NO: 210762 - DNA, 15 bp, Homo sapiens
ttccaaacctgtatg

SEQ ID NO: 210763 - DNA, 15 bp, Homo sapiens
cttccaaacctgtat

SEQ ID NO: 210764 - DNA, 15 bp, Homo sapiens
tcttccaaacctgta

SEQ ID NO: 210765 - DNA, 15 bp, Homo sapiens
ttcttccaaacctgt

SEQ ID NO: 210766 - DNA, 15 bp, Homo sapiens
cttcttccaaacctg

SEQ ID NO: 210767 - DNA, 15 bp, Homo sapiens
tcttcttccaaacct

SEQ ID NO: 210768 - DNA, 15 bp, Homo sapiens
gtcttcttccaaacc

SEQ ID NO: 210769 - DNA, 15 bp, Homo sapiens
tgtcttcttccaaac

SEQ ID NO: 210770 - DNA, 15 bp, Homo sapiens
gtgtcttcttccaaa

SEQ ID NO: 210771 - DNA, 15 bp, Homo sapiens
ggtgtcttcttccaa

SEQ ID NO: 210772 - DNA, 15 bp, Homo sapiens
tggtgtcttcttcca

SEQ ID NO: 210773 - DNA, 15 bp, Homo sapiens
atggtgtcttcttcc

SEQ ID NO: 210774 - DNA, 15 bp, Homo sapiens
gatggtgtcttcttc

SEQ ID NO: 210775 - DNA, 15 bp, Homo sapiens
tgatggtgtcttctt

SEQ ID NO: 210776 - DNA, 15 bp, Homo sapiens
gtgatggtgtcttct

SEQ ID NO: 210777 - DNA, 15 bp, Homo sapiens
agtgatggtgtcttc

SEQ ID NO: 210778 - DNA, 15 bp, Homo sapiens
cagtgatggtgtctt

SEQ ID NO: 210779 - DNA, 15 bp, Homo sapiens
tcagtgatggtgtct

SEQ ID NO: 210780 - DNA, 15 bp, Homo sapiens
ttcagtgatggtgtc

SEQ ID NO: 210781 - DNA, 15 bp, Homo sapiens
attcagtgatggtgt

SEQ ID NO: 210782 - DNA, 15 bp, Homo sapiens
gattcagtgatggtg

SEQ ID NO: 210783 - DNA, 15 bp, Homo sapiens
ggattcagtgatggt

SEQ ID NO: 210784 - DNA, 15 bp, Homo sapiens
gggattcagtgatgg

SEQ ID NO: 210785 - DNA, 15 bp, Homo sapiens
agggattcagtgatg

SEQ ID NO: 210786 - DNA, 15 bp, Homo sapiens
cagggattcagtgat

SEQ ID NO: 210787 - DNA, 15 bp, Homo sapiens
ccagggattcagtga

SEQ ID NO: 210788 - DNA, 15 bp, Homo sapiens
gccagggattcagtg

SEQ ID NO: 210789 - DNA, 15 bp, Homo sapiens
agccagggattcagt

SEQ ID NO: 210790 - DNA, 15 bp, Homo sapiens
gagccagggattcag

SEQ ID NO: 210791 - DNA, 15 bp, Homo sapiens
ggagccagggattca

SEQ ID NO: 210792 - DNA, 15 bp, Homo sapiens
aggagccagggattc

SEQ ID NO: 210793 - DNA, 15 bp, Homo sapiens
aaggagccagggatt

SEQ ID NO: 210794 - DNA, 15 bp, Homo sapiens
caaggagccagggat

SEQ ID NO: 210795 - DNA, 15 bp, Homo sapiens
gcaaggagccaggga

SEQ ID NO: 210796 - DNA, 15 bp, Homo sapiens
agcaaggagccaggg

SEQ ID NO: 210797 - DNA, 15 bp, Homo sapiens
cagcaaggagccagg

SEQ ID NO: 210798 - DNA, 15 bp, Homo sapiens
tcagcaaggagccag

SEQ ID NO: 210799 - DNA, 15 bp, Homo sapiens
ctcagcaaggagcca

SEQ ID NO: 210800 - DNA, 15 bp, Homo sapiens
cctcagcaaggagcc

SEQ ID NO: 210801 - DNA, 15 bp, Homo sapiens
gcctcagcaaggagc

SEQ ID NO: 210802 - DNA, 15 bp, Homo sapiens
tgcctcagcaaggag

SEQ ID NO: 210803 - DNA, 15 bp, Homo sapiens
ctgcctcagcaagga

SEQ ID NO: 210804 - DNA, 15 bp, Homo sapiens
gctgcctcagcaagg

SEQ ID NO: 210805 - DNA, 15 bp, Homo sapiens
tgctgcctcagcaag

SEQ ID NO: 210806 - DNA, 15 bp, Homo sapiens
ctgctgcctcagcaa

SEQ ID NO: 210807 - DNA, 15 bp, Homo sapiens
tctgctgcctcagca

SEQ ID NO: 210808 - DNA, 15 bp, Homo sapiens
ctctgctgcctcagc

SEQ ID NO: 210809 - DNA, 15 bp, Homo sapiens
tctctgctgcctcag

SEQ ID NO: 210810 - DNA, 15 bp, Homo sapiens
ctctctgctgcctca

SEQ ID NO: 210811 - DNA, 15 bp, Homo sapiens
gctctctgctgcctc

SEQ ID NO: 210812 - DNA, 15 bp, Homo sapiens
agctctctgctgcct

SEQ ID NO: 210813 - DNA, 15 bp, Homo sapiens
cagctctctgctgcc

SEQ ID NO: 210814 - DNA, 15 bp, Homo sapiens
ccagctctctgctgc

SEQ ID NO: 210815 - DNA, 15 bp, Homo sapiens
cccagctctctgctg

SEQ ID NO: 210816 - DNA, 15 bp, Homo sapiens
ccccagctctctgct

SEQ ID NO: 210817 - DNA, 15 bp, Homo sapiens
accccagctctctgc

SEQ ID NO: 210818 - DNA, 15 bp, Homo sapiens
taccccagctctctg

SEQ ID NO: 210819 - DNA, 15 bp, Homo sapiens
ataccccagctctct

SEQ ID NO: 210820 - DNA, 15 bp, Homo sapiens
aataccccagctctc

SEQ ID NO: 210821 - DNA, 15 bp, Homo sapiens
gaataccccagctct

SEQ ID NO: 210822 - DNA, 15 bp, Homo sapiens
tgaataccccagctc

SEQ ID NO: 210823 - DNA, 15 bp, Homo sapiens
ctgaataccccagct

SEQ ID NO: 210824 - DNA, 15 bp, Homo sapiens
actgaataccccagc

SEQ ID NO: 210825 - DNA, 15 bp, Homo sapiens
aactgaataccccag

SEQ ID NO: 210826 - DNA, 15 bp, Homo sapiens
aaactgaatacccca

SEQ ID NO: 210827 - DNA, 15 bp, Homo sapiens
caaactgaatacccc

SEQ ID NO: 210828 - DNA, 15 bp, Homo sapiens
ccaaactgaataccc

SEQ ID NO: 210829 - DNA, 15 bp, Homo sapiens
gccaaactgaatacc

SEQ ID NO: 210830 - DNA, 15 bp, Homo sapiens
ggccaaactgaatac

SEQ ID NO: 210831 - DNA, 15 bp, Homo sapiens
tggccaaactgaata

SEQ ID NO: 210832 - DNA, 15 bp, Homo sapiens
gtggccaaactgaat

SEQ ID NO: 210833 - DNA, 15 bp, Homo sapiens
tgtggccaaactgaa

SEQ ID NO: 210834 - DNA, 15 bp, Homo sapiens
gtgtggccaaactga

SEQ ID NO: 210835 - DNA, 15 bp, Homo sapiens
agtgtggccaaactg

SEQ ID NO: 210836 - DNA, 15 bp, Homo sapiens
aagtgtggccaaact

SEQ ID NO: 210837 - DNA, 15 bp, Homo sapiens
gaagtgtggccaaac

SEQ ID NO: 210838 - DNA, 15 bp, Homo sapiens
agaagtgtggccaaa

SEQ ID NO: 210839 - DNA, 15 bp, Homo sapiens
cagaagtgtggccaa

SEQ ID NO: 210840 - DNA, 15 bp, Homo sapiens
ccagaagtgtggcca

SEQ ID NO: 210841 - DNA, 15 bp, Homo sapiens
cccagaagtgtggcc

SEQ ID NO: 210842 - DNA, 15 bp, Homo sapiens
gcccagaagtgtggc

SEQ ID NO: 210843 - DNA, 15 bp, Homo sapiens
agcccagaagtgtgg

SEQ ID NO: 210844 - DNA, 15 bp, Homo sapiens
aagcccagaagtgtg

SEQ ID NO: 210845 - DNA, 15 bp, Homo sapiens
caagcccagaagtgt

SEQ ID NO: 210846 - DNA, 15 bp, Homo sapiens
acaagcccagaagtg

SEQ ID NO: 210847 - DNA, 15 bp, Homo sapiens
cacaagcccagaagt

SEQ ID NO: 210848 - DNA, 15 bp, Homo sapiens
ccacaagcccagaag

SEQ ID NO: 210849 - DNA, 15 bp, Homo sapiens
cccacaagcccagaa

SEQ ID NO: 210850 - DNA, 15 bp, Homo sapiens
acccacaagcccaga

SEQ ID NO: 210851 - DNA, 15 bp, Homo sapiens
cacccacaagcccag

SEQ ID NO: 210852 - DNA, 15 bp, Homo sapiens
tcacccacaagccca

SEQ ID NO: 210853 - DNA, 15 bp, Homo sapiens
atcacccacaagccc

SEQ ID NO: 210854 - DNA, 15 bp, Homo sapiens
tatcacccacaagcc

SEQ ID NO: 210855 - DNA, 15 bp, Homo sapiens
gtatcacccacaagc

SEQ ID NO: 210856 - DNA, 15 bp, Homo sapiens
ggtatcacccacaag

SEQ ID NO: 210857 - DNA, 15 bp, Homo sapiens
aggtatcacccacaa

SEQ ID NO: 210858 - DNA, 15 bp, Homo sapiens
gaggtatcacccaca

SEQ ID NO: 210859 - DNA, 15 bp, Homo sapiens
agaggtatcacccac

SEQ ID NO: 210860 - DNA, 15 bp, Homo sapiens
cagaggtatcaccca

SEQ ID NO: 210861 - DNA, 15 bp, Homo sapiens
tcagaggtatcaccc

SEQ ID NO: 210862 - DNA, 15 bp, Homo sapiens
ttcagaggtatcacc

SEQ ID NO: 210863 - DNA, 15 bp, Homo sapiens
cttcagaggtatcac

SEQ ID NO: 210864 - DNA, 15 bp, Homo sapiens
acttcagaggtatca

SEQ ID NO: 210865 - DNA, 15 bp, Homo sapiens
gacttcagaggtatc

SEQ ID NO: 210866 - DNA, 15 bp, Homo sapiens
ggacttcagaggtat

SEQ ID NO: 210867 - DNA, 15 bp, Homo sapiens
aggacttcagaggta

SEQ ID NO: 210868 - DNA, 15 bp, Homo sapiens
aaggacttcagaggt

SEQ ID NO: 210869 - DNA, 15 bp, Homo sapiens
taaggacttcagagg

SEQ ID NO: 210870 - DNA, 15 bp, Homo sapiens
ataaggacttcagag

SEQ ID NO: 210871 - DNA, 15 bp, Homo sapiens
aataaggacttcaga

SEQ ID NO: 210872 - DNA, 15 bp, Homo sapiens
caataaggacttcag

SEQ ID NO: 210873 - DNA, 15 bp, Homo sapiens
ccaataaggacttca

SEQ ID NO: 210874 - DNA, 15 bp, Homo sapiens
accaataaggacttc

SEQ ID NO: 210875 - DNA, 15 bp, Homo sapiens
aaccaataaggactt

SEQ ID NO: 210876 - DNA, 15 bp, Homo sapiens
aaaccaataaggact

SEQ ID NO: 210877 - DNA, 15 bp, Homo sapiens
gaaaccaataaggac

SEQ ID NO: 210878 - DNA, 15 bp, Homo sapiens
agaaaccaataagga

SEQ ID NO: 210879 - DNA, 15 bp, Homo sapiens
tagaaaccaataagg

SEQ ID NO: 210880 - DNA, 15 bp, Homo sapiens
ttagaaaccaataag

SEQ ID NO: 210881 - DNA, 15 bp, Homo sapiens
tttagaaaccaataa

SEQ ID NO: 210882 - DNA, 15 bp, Homo sapiens
ctttagaaaccaata

SEQ ID NO: 210883 - DNA, 15 bp, Homo sapiens
cctttagaaaccaat

SEQ ID NO: 210884 - DNA, 15 bp, Homo sapiens
acctttagaaaccaa

SEQ ID NO: 210885 - DNA, 15 bp, Homo sapiens
gacctttagaaacca

SEQ ID NO: 210886 - DNA, 15 bp, Homo sapiens
agacctttagaaacc

SEQ ID NO: 210887 - DNA, 15 bp, Homo sapiens
aagacctttagaaac

SEQ ID NO: 210888 - DNA, 15 bp, Homo sapiens
aaagacctttagaaa

SEQ ID NO: 210889 - DNA, 15 bp, Homo sapiens
caaagacctttagaa

SEQ ID NO: 210890 - DNA, 15 bp, Homo sapiens
acaaagacctttaga

SEQ ID NO: 210891 - DNA, 15 bp, Homo sapiens
cacaaagacctttag

SEQ ID NO: 210892 - DNA, 15 bp, Homo sapiens
gcacaaagaccttta

SEQ ID NO: 210893 - DNA, 15 bp, Homo sapiens
ggcacaaagaccttt

SEQ ID NO: 210894 - DNA, 15 bp, Homo sapiens
tggcacaaagacctt

SEQ ID NO: 210895 - DNA, 15 bp, Homo sapiens
gtggcacaaagacct

SEQ ID NO: 210896 - DNA, 15 bp, Homo sapiens
agtggcacaaagacc

SEQ ID NO: 210897 - DNA, 15 bp, Homo sapiens
gagtggcacaaagac

SEQ ID NO: 210898 - DNA, 15 bp, Homo sapiens
ggagtggcacaaaga

SEQ ID NO: 210899 - DNA, 15 bp, Homo sapiens
gggagtggcacaaag

SEQ ID NO: 210900 - DNA, 15 bp, Homo sapiens
tgggagtggcacaaa

SEQ ID NO: 210901 - DNA, 15 bp, Homo sapiens
ctgggagtggcacaa

SEQ ID NO: 210902 - DNA, 15 bp, Homo sapiens
actgggagtggcaca

SEQ ID NO: 210903 - DNA, 15 bp, Homo sapiens
aactgggagtggcac

SEQ ID NO: 210904 - DNA, 15 bp, Homo sapiens
aaactgggagtggca

SEQ ID NO: 210905 - DNA, 15 bp, Homo sapiens
gaaactgggagtggc

SEQ ID NO: 210906 - DNA, 15 bp, Homo sapiens
agaaactgggagtgg

SEQ ID NO: 210907 - DNA, 15 bp, Homo sapiens
gagaaactgggagtg

SEQ ID NO: 210908 - DNA, 15 bp, Homo sapiens
tgagaaactgggagt

SEQ ID NO: 210909 - DNA, 15 bp, Homo sapiens
ctgagaaactgggag

SEQ ID NO: 210910 - DNA, 15 bp, Homo sapiens
actgagaaactggga

SEQ ID NO: 210911 - DNA, 15 bp, Homo sapiens
gactgagaaactggg

SEQ ID NO: 210912 - DNA, 15 bp, Homo sapiens
tgactgagaaactgg

SEQ ID NO: 210913 - DNA, 15 bp, Homo sapiens
ctgactgagaaactg

SEQ ID NO: 210914 - DNA, 15 bp, Homo sapiens
gctgactgagaaact

SEQ ID NO: 210915 - DNA, 15 bp, Homo sapiens
agctgactgagaaac

SEQ ID NO: 210916 - DNA, 15 bp, Homo sapiens
cagctgactgagaaa

SEQ ID NO: 210917 - DNA, 15 bp, Homo sapiens
gcagctgactgagaa

SEQ ID NO: 210918 - DNA, 15 bp, Homo sapiens
ggcagctgactgaga

SEQ ID NO: 210919 - DNA, 15 bp, Homo sapiens
tggcagctgactgag

SEQ ID NO: 210920 - DNA, 15 bp, Homo sapiens
ctggcagctgactga

SEQ ID NO: 210921 - DNA, 15 bp, Homo sapiens
actggcagctgactg

SEQ ID NO: 210922 - DNA, 15 bp, Homo sapiens
cactggcagctgact

SEQ ID NO: 210923 - DNA, 15 bp, Homo sapiens
tcactggcagctgac

SEQ ID NO: 210924 - DNA, 15 bp, Homo sapiens
ctcactggcagctga

SEQ ID NO: 210925 - DNA, 15 bp, Homo sapiens
actcactggcagctg

SEQ ID NO: 210926 - DNA, 15 bp, Homo sapiens
aactcactggcagct

SEQ ID NO: 210927 - DNA, 15 bp, Homo sapiens
gaactcactggcagc

SEQ ID NO: 210928 - DNA, 15 bp, Homo sapiens
tgaactcactggcag

SEQ ID NO: 210929 - DNA, 15 bp, Homo sapiens
gtgaactcactggca

SEQ ID NO: 210930 - DNA, 15 bp, Homo sapiens
tgtgaactcactggc

SEQ ID NO: 210931 - DNA, 15 bp, Homo sapiens
gtgtgaactcactgg

SEQ ID NO: 210932 - DNA, 15 bp, Homo sapiens
tgtgtgaactcactg

SEQ ID NO: 210933 - DNA, 15 bp, Homo sapiens
gtgtgtgaactcact

SEQ ID NO: 210934 - DNA, 15 bp, Homo sapiens
ggtgtgtgaactcac

SEQ ID NO: 210935 - DNA, 15 bp, Homo sapiens
aggtgtgtgaactca

SEQ ID NO: 210936 - DNA, 15 bp, Homo sapiens
gaggtgtgtgaactc

SEQ ID NO: 210937 - DNA, 15 bp, Homo sapiens
agaggtgtgtgaact

SEQ ID NO: 210938 - DNA, 15 bp, Homo sapiens
cagaggtgtgtgaac

SEQ ID NO: 210939 - DNA, 15 bp, Homo sapiens
tcagaggtgtgtgaa

SEQ ID NO: 210940 - DNA, 15 bp, Homo sapiens
ctcagaggtgtgtga

SEQ ID NO: 210941 - DNA, 15 bp, Homo sapiens
tctcagaggtgtgtg

SEQ ID NO: 210942 - DNA, 15 bp, Homo sapiens
ttctcagaggtgtgt

SEQ ID NO: 210943 - DNA, 15 bp, Homo sapiens
gttctcagaggtgtg

SEQ ID NO: 210944 - DNA, 15 bp, Homo sapiens
agttctcagaggtgt

SEQ ID NO: 210945 - DNA, 15 bp, Homo sapiens
gagttctcagaggtg

SEQ ID NO: 210946 - DNA, 15 bp, Homo sapiens
agagttctcagaggt

SEQ ID NO: 210947 - DNA, 15 bp, Homo sapiens
aagagttctcagagg

SEQ ID NO: 210948 - DNA, 15 bp, Homo sapiens
gaagagttctcagag

SEQ ID NO: 210949 - DNA, 15 bp, Homo sapiens
ggaagagttctcaga

SEQ ID NO: 210950 - DNA, 15 bp, Homo sapiens
tggaagagttctcag

SEQ ID NO: 210951 - DNA, 15 bp, Homo sapiens
ctggaagagttctca

SEQ ID NO: 210952 - DNA, 15 bp, Homo sapiens
cctggaagagttctc

SEQ ID NO: 210953 - DNA, 15 bp, Homo sapiens
tcctggaagagttct

SEQ ID NO: 210954 - DNA, 15 bp, Homo sapiens
gtcctggaagagttc

SEQ ID NO: 210955 - DNA, 15 bp, Homo sapiens
ggtcctggaagagtt

SEQ ID NO: 210956 - DNA, 15 bp, Homo sapiens
gggtcctggaagagt

SEQ ID NO: 210957 - DNA, 15 bp, Homo sapiens
ggggtcctggaagag

SEQ ID NO: 210958 - DNA, 15 bp, Homo sapiens
gggggtcctggaaga

SEQ ID NO: 210959 - DNA, 15 bp, Homo sapiens
tgggggtcctggaag

SEQ ID NO: 210960 - DNA, 15 bp, Homo sapiens
ctgggggtcctggaa

SEQ ID NO: 210961 - DNA, 15 bp, Homo sapiens
actgggggtcctgga

SEQ ID NO: 210962 - DNA, 15 bp, Homo sapiens
tactgggggtcctgg

SEQ ID NO: 210963 - DNA, 15 bp, Homo sapiens
ttactgggggtcctg

SEQ ID NO: 210964 - DNA, 15 bp, Homo sapiens
cttactgggggtcct

SEQ ID NO: 210965 - DNA, 15 bp, Homo sapiens
gcttactgggggtcc

SEQ ID NO: 210966 - DNA, 15 bp, Homo sapiens
agcttactgggggtc

SEQ ID NO: 210967 - DNA, 15 bp, Homo sapiens
aagcttactgggggt

SEQ ID NO: 210968 - DNA, 15 bp, Homo sapiens
caagcttactggggg

SEQ ID NO: 210969 - DNA, 15 bp, Homo sapiens
gcaagcttactgggg

SEQ ID NO: 210970 - DNA, 15 bp, Homo sapiens
agcaagcttactggg

SEQ ID NO: 210971 - DNA, 15 bp, Homo sapiens
gagcaagcttactgg

SEQ ID NO: 210972 - DNA, 15 bp, Homo sapiens
agagcaagcttactg

SEQ ID NO: 210973 - DNA, 15 bp, Homo sapiens
tagagcaagcttact

SEQ ID NO: 210974 - DNA, 15 bp, Homo sapiens
ctagagcaagcttac

SEQ ID NO: 210975 - DNA, 15 bp, Homo sapiens
cctagagcaagctta

SEQ ID NO: 210976 - DNA, 15 bp, Homo sapiens
gcctagagcaagctt

SEQ ID NO: 210977 - DNA, 15 bp, Homo sapiens
ggcctagagcaagct

SEQ ID NO: 210978 - DNA, 15 bp, Homo sapiens
gggcctagagcaagc

SEQ ID NO: 210979 - DNA, 15 bp, Homo sapiens
ggggcctagagcaag

SEQ ID NO: 210980 - DNA, 15 bp, Homo sapiens
tggggcctagagcaa

SEQ ID NO: 210981 - DNA, 15 bp, Homo sapiens
ttggggcctagagca

SEQ ID NO: 210982 - DNA, 15 bp, Homo sapiens
cttggggcctagagc

SEQ ID NO: 210983 - DNA, 15 bp, Homo sapiens
ccttggggcctagag

SEQ ID NO: 210984 - DNA, 15 bp, Homo sapiens
tccttggggcctaga

SEQ ID NO: 210985 - DNA, 15 bp, Homo sapiens
ctccttggggcctag

SEQ ID NO: 210986 - DNA, 15 bp, Homo sapiens
actccttggggccta

SEQ ID NO: 210987 - DNA, 15 bp, Homo sapiens
gactccttggggcct

SEQ ID NO: 210988 - DNA, 15 bp, Homo sapiens
ggactccttggggcc

SEQ ID NO: 210989 - DNA, 15 bp, Homo sapiens
gggactccttggggc

SEQ ID NO: 210990 - DNA, 15 bp, Homo sapiens
ggggactccttgggg

SEQ ID NO: 210991 - DNA, 15 bp, Homo sapiens
aggggactccttggg

SEQ ID NO: 210992 - DNA, 15 bp, Homo sapiens
gaggggactccttgg

SEQ ID NO: 210993 - DNA, 15 bp, Homo sapiens
agaggggactccttg

SEQ ID NO: 210994 - DNA, 15 bp, Homo sapiens
cagaggggactcctt

SEQ ID NO: 210995 - DNA, 15 bp, Homo sapiens
ccagaggggactcct

SEQ ID NO: 210996 - DNA, 15 bp, Homo sapiens
gccagaggggactcc

SEQ ID NO: 210997 - DNA, 15 bp, Homo sapiens
tgccagaggggactc

SEQ ID NO: 210998 - DNA, 15 bp, Homo sapiens
ttgccagaggggact

SEQ ID NO: 210999 - DNA, 15 bp, Homo sapiens
gttgccagaggggac

SEQ ID NO: 211000 - DNA, 15 bp, Homo sapiens
ggttgccagagggga

SEQ ID NO: 211001 - DNA, 15 bp, Homo sapiens
cggttgccagagggg

SEQ ID NO: 211002 - DNA, 15 bp, Homo sapiens
acggttgccagaggg

SEQ ID NO: 211003 - DNA, 15 bp, Homo sapiens
aacggttgccagagg

SEQ ID NO: 211004 - DNA, 15 bp, Homo sapiens
taacggttgccagag

SEQ ID NO: 211005 - DNA, 15 bp, Homo sapiens
ataacggttgccaga

SEQ ID NO: 211006 - DNA, 15 bp, Homo sapiens
tataacggttgccag

SEQ ID NO: 211007 - DNA, 15 bp, Homo sapiens
atataacggttgcca

SEQ ID NO: 211008 - DNA, 15 bp, Homo sapiens
aatataacggttgcc

SEQ ID NO: 211009 - DNA, 15 bp, Homo sapiens
gaatataacggttgc

SEQ ID NO: 211010 - DNA, 15 bp, Homo sapiens
tgaatataacggttg

SEQ ID NO: 211011 - DNA, 15 bp, Homo sapiens
ctgaatataacggtt

SEQ ID NO: 211012 - DNA, 15 bp, Homo sapiens
cctgaatataacggt

SEQ ID NO: 211013 - DNA, 15 bp, Homo sapiens
ccctgaatataacgg

SEQ ID NO: 211014 - DNA, 15 bp, Homo sapiens
tccctgaatataacg

SEQ ID NO: 211015 - DNA, 15 bp, Homo sapiens
gtccctgaatataac

SEQ ID NO: 211016 - DNA, 15 bp, Homo sapiens
ggtccctgaatataa

SEQ ID NO: 211017 - DNA, 15 bp, Homo sapiens
gggtccctgaatata

SEQ ID NO: 211018 - DNA, 15 bp, Homo sapiens
agggtccctgaatat

SEQ ID NO: 211019 - DNA, 15 bp, Homo sapiens
aagggtccctgaata

SEQ ID NO: 211020 - DNA, 15 bp, Homo sapiens
gaagggtccctgaat

SEQ ID NO: 211021 - DNA, 15 bp, Homo sapiens
agaagggtccctgaa

SEQ ID NO: 211022 - DNA, 15 bp, Homo sapiens
gagaagggtccctga

SEQ ID NO: 211023 - DNA, 15 bp, Homo sapiens
tgagaagggtccctg

SEQ ID NO: 211024 - DNA, 15 bp, Homo sapiens
ttgagaagggtccct

SEQ ID NO: 211025 - DNA, 15 bp, Homo sapiens
cttgagaagggtccc

SEQ ID NO: 211026 - DNA, 15 bp, Homo sapiens
tcttgagaagggtcc

SEQ ID NO: 211027 - DNA, 15 bp, Homo sapiens
gtcttgagaagggtc

SEQ ID NO: 211028 - DNA, 15 bp, Homo sapiens
tgtcttgagaagggt

SEQ ID NO: 211029 - DNA, 15 bp, Homo sapiens
ttgtcttgagaaggg

SEQ ID NO: 211030 - DNA, 15 bp, Homo sapiens
tttgtcttgagaagg

SEQ ID NO: 211031 - DNA, 15 bp, Homo sapiens
atttgtcttgagaag

SEQ ID NO: 211032 - DNA, 15 bp, Homo sapiens
aatttgtcttgagaa

SEQ ID NO: 211033 - DNA, 15 bp, Homo sapiens
aaatttgtcttgaga

SEQ ID NO: 211034 - DNA, 15 bp, Homo sapiens
gaaatttgtcttgag

SEQ ID NO: 211035 - DNA, 15 bp, Homo sapiens
agaaatttgtcttga

SEQ ID NO: 211036 - DNA, 15 bp, Homo sapiens
aagaaatttgtcttg

SEQ ID NO: 211037 - DNA, 15 bp, Homo sapiens
caagaaatttgtctt

SEQ ID NO: 211038 - DNA, 15 bp, Homo sapiens
tcaagaaatttgtct

SEQ ID NO: 211039 - DNA, 15 bp, Homo sapiens
ctcaagaaatttgtc

SEQ ID NO: 211040 - DNA, 15 bp, Homo sapiens
cctcaagaaatttgt

SEQ ID NO: 211041 - DNA, 15 bp, Homo sapiens
tcctcaagaaatttg

SEQ ID NO: 211042 - DNA, 15 bp, Homo sapiens
ctcctcaagaaattt

SEQ ID NO: 211043 - DNA, 15 bp, Homo sapiens
tctcctcaagaaatt

SEQ ID NO: 211044 - DNA, 15 bp, Homo sapiens
gtctcctcaagaaat

SEQ ID NO: 211045 - DNA, 15 bp, Homo sapiens
tgtctcctcaagaaa

SEQ ID NO: 211046 - DNA, 15 bp, Homo sapiens
gtgtctcctcaagaa

SEQ ID NO: 211047 - DNA, 15 bp, Homo sapiens
tgtgtctcctcaaga

SEQ ID NO: 211048 - DNA, 15 bp, Homo sapiens
ctgtgtctcctcaag

SEQ ID NO: 211049 - DNA, 15 bp, Homo sapiens
actgtgtctcctcaa

SEQ ID NO: 211050 - DNA, 15 bp, Homo sapiens
aactgtgtctcctca

SEQ ID NO: 211051 - DNA, 15 bp, Homo sapiens
gaactgtgtctcctc

SEQ ID NO: 211052 - DNA, 15 bp, Homo sapiens
agaactgtgtctcct

SEQ ID NO: 211053 - DNA, 15 bp, Homo sapiens
cagaactgtgtctcc

SEQ ID NO: 211054 - DNA, 15 bp, Homo sapiens
ccagaactgtgtctc

SEQ ID NO: 211055 - DNA, 15 bp, Homo sapiens
gccagaactgtgtct

SEQ ID NO: 211056 - DNA, 15 bp, Homo sapiens
cgccagaactgtgtc

SEQ ID NO: 211057 - DNA, 15 bp, Homo sapiens
gcgccagaactgtgt

SEQ ID NO: 211058 - DNA, 15 bp, Homo sapiens
agcgccagaactgtg

SEQ ID NO: 211059 - DNA, 15 bp, Homo sapiens
cagcgccagaactgt

SEQ ID NO: 211060 - DNA, 15 bp, Homo sapiens
gcagcgccagaactg

SEQ ID NO: 211061 - DNA, 15 bp, Homo sapiens
ggcagcgccagaact

SEQ ID NO: 211062 - DNA, 15 bp, Homo sapiens
gggcagcgccagaac

SEQ ID NO: 211063 - DNA, 15 bp, Homo sapiens
agggcagcgccagaa

SEQ ID NO: 211064 - DNA, 15 bp, Homo sapiens
gagggcagcgccaga

SEQ ID NO: 211065 - DNA, 15 bp, Homo sapiens
agagggcagcgccag

SEQ ID NO: 211066 - DNA, 15 bp, Homo sapiens
tagagggcagcgcca

SEQ ID NO: 211067 - DNA, 15 bp, Homo sapiens
ttagagggcagcgcc

SEQ ID NO: 211068 - DNA, 15 bp, Homo sapiens
tttagagggcagcgc

SEQ ID NO: 211069 - DNA, 15 bp, Homo sapiens
gtttagagggcagcg

SEQ ID NO: 211070 - DNA, 15 bp, Homo sapiens
cgtttagagggcagc

SEQ ID NO: 211071 - DNA, 15 bp, Homo sapiens
gcgtttagagggcag

SEQ ID NO: 211072 - DNA, 15 bp, Homo sapiens
agcgtttagagggca

SEQ ID NO: 211073 - DNA, 15 bp, Homo sapiens
cagcgtttagagggc

SEQ ID NO: 211074 - DNA, 15 bp, Homo sapiens
acagcgtttagaggg

SEQ ID NO: 211075 - DNA, 15 bp, Homo sapiens
cacagcgtttagagg

SEQ ID NO: 211076 - DNA, 15 bp, Homo sapiens
acacagcgtttagag

SEQ ID NO: 211077 - DNA, 15 bp, Homo sapiens
aacacagcgtttaga

SEQ ID NO: 211078 - DNA, 15 bp, Homo sapiens
aaacacagcgtttag

SEQ ID NO: 211079 - DNA, 15 bp, Homo sapiens
aaaacacagcgttta

SEQ ID NO: 211080 - DNA, 15 bp, Homo sapiens
gaaaacacagcgttt

SEQ ID NO: 211081 - DNA, 15 bp, Homo sapiens
ggaaaacacagcgtt

SEQ ID NO: 211082 - DNA, 15 bp, Homo sapiens
aggaaaacacagcgt

SEQ ID NO: 211083 - DNA, 15 bp, Homo sapiens
aaggaaaacacagcg

SEQ ID NO: 211084 - DNA, 15 bp, Homo sapiens
taaggaaaacacagc

SEQ ID NO: 211085 - DNA, 15 bp, Homo sapiens
ctaaggaaaacacag

SEQ ID NO: 211086 - DNA, 15 bp, Homo sapiens
cctaaggaaaacaca

SEQ ID NO: 211087 - DNA, 15 bp, Homo sapiens
acctaaggaaaacac

SEQ ID NO: 211088 - DNA, 15 bp, Homo sapiens
cacctaaggaaaaca

SEQ ID NO: 211089 - DNA, 15 bp, Homo sapiens
ccacctaaggaaaac

SEQ ID NO: 211090 - DNA, 15 bp, Homo sapiens
gccacctaaggaaaa

SEQ ID NO: 211091 - DNA, 15 bp, Homo sapiens
ggccacctaaggaaa

SEQ ID NO: 211092 - DNA, 15 bp, Homo sapiens
tggccacctaaggaa

SEQ ID NO: 211093 - DNA, 15 bp, Homo sapiens
ctggccacctaagga

SEQ ID NO: 211094 - DNA, 15 bp, Homo sapiens
cctggccacctaagg

SEQ ID NO: 211095 - DNA, 15 bp, Homo sapiens
gcctggccacctaag

SEQ ID NO: 211096 - DNA, 15 bp, Homo sapiens
tgcctggccacctaa

SEQ ID NO: 211097 - DNA, 15 bp, Homo sapiens
ttgcctggccaccta

SEQ ID NO: 211098 - DNA, 15 bp, Homo sapiens
tttgcctggccacct

SEQ ID NO: 211099 - DNA, 15 bp, Homo sapiens
gtttgcctggccacc

SEQ ID NO: 211100 - DNA, 15 bp, Homo sapiens
agtttgcctggccac

SEQ ID NO: 211101 - DNA, 15 bp, Homo sapiens
cagtttgcctggcca

SEQ ID NO: 211102 - DNA, 15 bp, Homo sapiens
acagtttgcctggcc

SEQ ID NO: 211103 - DNA, 15 bp, Homo sapiens
gacagtttgcctggc

SEQ ID NO: 211104 - DNA, 15 bp, Homo sapiens
ggacagtttgcctgg

SEQ ID NO: 211105 - DNA, 15 bp, Homo sapiens
tggacagtttgcctg

SEQ ID NO: 211106 - DNA, 15 bp, Homo sapiens
ctggacagtttgcct

SEQ ID NO: 211107 - DNA, 15 bp, Homo sapiens
tctggacagtttgcc

SEQ ID NO: 211108 - DNA, 15 bp, Homo sapiens
ctctggacagtttgc

SEQ ID NO: 211109 - DNA, 15 bp, Homo sapiens
actctggacagtttg

SEQ ID NO: 211110 - DNA, 15 bp, Homo sapiens
cactctggacagttt

SEQ ID NO: 211111 - DNA, 15 bp, Homo sapiens
ccactctggacagtt

SEQ ID NO: 211112 - DNA, 15 bp, Homo sapiens
accactctggacagt

SEQ ID NO: 211113 - DNA, 15 bp, Homo sapiens
caccactctggacag

SEQ ID NO: 211114 - DNA, 15 bp, Homo sapiens
acaccactctggaca

SEQ ID NO: 211115 - DNA, 15 bp, Homo sapiens
gacaccactctggac

SEQ ID NO: 211116 - DNA, 15 bp, Homo sapiens
agacaccactctgga

SEQ ID NO: 211117 - DNA, 15 bp, Homo sapiens
cagacaccactctgg

SEQ ID NO: 211118 - DNA, 15 bp, Homo sapiens
gcagacaccactctg

SEQ ID NO: 211119 - DNA, 15 bp, Homo sapiens
agcagacaccactct

SEQ ID NO: 211120 - DNA, 15 bp, Homo sapiens
gagcagacaccactc

SEQ ID NO: 211121 - DNA, 15 bp, Homo sapiens
agagcagacaccact

SEQ ID NO: 211122 - DNA, 15 bp, Homo sapiens
aagagcagacaccac

SEQ ID NO: 211123 - DNA, 15 bp, Homo sapiens
gaagagcagacacca

SEQ ID NO: 211124 - DNA, 15 bp, Homo sapiens
tgaagagcagacacc

SEQ ID NO: 211125 - DNA, 15 bp, Homo sapiens
gtgaagagcagacac

SEQ ID NO: 211126 - DNA, 15 bp, Homo sapiens
ggtgaagagcagaca

SEQ ID NO: 211127 - DNA, 15 bp, Homo sapiens
aggtgaagagcagac

SEQ ID NO: 211128 - DNA, 15 bp, Homo sapiens
gaggtgaagagcaga

SEQ ID NO: 211129 - DNA, 15 bp, Homo sapiens
tgaggtgaagagcag

SEQ ID NO: 211130 - DNA, 15 bp, Homo sapiens
atgaggtgaagagca

SEQ ID NO: 211131 - DNA, 15 bp, Homo sapiens
gatgaggtgaagagc

SEQ ID NO: 211132 - DNA, 15 bp, Homo sapiens
agatgaggtgaagag

SEQ ID NO: 211133 - DNA, 15 bp, Homo sapiens
aagatgaggtgaaga

SEQ ID NO: 211134 - DNA, 15 bp, Homo sapiens
caagatgaggtgaag

SEQ ID NO: 211135 - DNA, 15 bp, Homo sapiens
tcaagatgaggtgaa

SEQ ID NO: 211136 - DNA, 15 bp, Homo sapiens
ttcaagatgaggtga

SEQ ID NO: 211137 - DNA, 15 bp, Homo sapiens
cttcaagatgaggtg

SEQ ID NO: 211138 - DNA, 15 bp, Homo sapiens
ccttcaagatgaggt

SEQ ID NO: 211139 - DNA, 15 bp, Homo sapiens
accttcaagatgagg

SEQ ID NO: 211140 - DNA, 15 bp, Homo sapiens
caccttcaagatgag

SEQ ID NO: 211141 - DNA, 15 bp, Homo sapiens
ccaccttcaagatga

SEQ ID NO: 211142 - DNA, 15 bp, Homo sapiens
tccaccttcaagatg

SEQ ID NO: 211143 - DNA, 15 bp, Homo sapiens
gtccaccttcaagat

SEQ ID NO: 211144 - DNA, 15 bp, Homo sapiens
cgtccaccttcaaga

SEQ ID NO: 211145 - DNA, 15 bp, Homo sapiens
acgtccaccttcaag

SEQ ID NO: 211146 - DNA, 15 bp, Homo sapiens
gacgtccaccttcaa

SEQ ID NO: 211147 - DNA, 15 bp, Homo sapiens
agacgtccaccttca

SEQ ID NO: 211148 - DNA, 15 bp, Homo sapiens
aagacgtccaccttc

SEQ ID NO: 211149 - DNA, 15 bp, Homo sapiens
caagacgtccacctt

SEQ ID NO: 211150 - DNA, 15 bp, Homo sapiens
tcaagacgtccacct

SEQ ID NO: 211151 - DNA, 15 bp, Homo sapiens
gtcaagacgtccacc

SEQ ID NO: 211152 - DNA, 15 bp, Homo sapiens
ggtcaagacgtccac

SEQ ID NO: 211153 - DNA, 15 bp, Homo sapiens
tggtcaagacgtcca

SEQ ID NO: 211154 - DNA, 15 bp, Homo sapiens
ctggtcaagacgtcc

SEQ ID NO: 211155 - DNA, 15 bp, Homo sapiens
tctggtcaagacgtc

SEQ ID NO: 211156 - DNA, 15 bp, Homo sapiens
ttctggtcaagacgt

SEQ ID NO: 211157 - DNA, 15 bp, Homo sapiens
tttctggtcaagacg

SEQ ID NO: 211158 - DNA, 15 bp, Homo sapiens
atttctggtcaagac

SEQ ID NO: 211159 - DNA, 15 bp, Homo sapiens
gatttctggtcaaga

SEQ ID NO: 211160 - DNA, 15 bp, Homo sapiens
ggatttctggtcaag

SEQ ID NO: 211161 - DNA, 15 bp, Homo sapiens
aggatttctggtcaa

SEQ ID NO: 211162 - DNA, 15 bp, Homo sapiens
gaggatttctggtca

SEQ ID NO: 211163 - DNA, 15 bp, Homo sapiens
ggaggatttctggtc

SEQ ID NO: 211164 - DNA, 15 bp, Homo sapiens
aggaggatttctggt

SEQ ID NO: 211165 - DNA, 15 bp, Homo sapiens
aaggaggatttctgg

SEQ ID NO: 211166 - DNA, 15 bp, Homo sapiens
gaaggaggatttctg

SEQ ID NO: 211167 - DNA, 15 bp, Homo sapiens
agaaggaggatttct

SEQ ID NO: 211168 - DNA, 15 bp, Homo sapiens
gagaaggaggatttc

SEQ ID NO: 211169 - DNA, 15 bp, Homo sapiens
ggagaaggaggattt

SEQ ID NO: 211170 - DNA, 15 bp, Homo sapiens
tggagaaggaggatt

SEQ ID NO: 211171 - DNA, 15 bp, Homo sapiens
ttggagaaggaggat

SEQ ID NO: 211172 - DNA, 15 bp, Homo sapiens
attggagaaggagga

SEQ ID NO: 211173 - DNA, 15 bp, Homo sapiens
tattggagaaggagg

SEQ ID NO: 211174 - DNA, 15 bp, Homo sapiens
ttattggagaaggag

SEQ ID NO: 211175 - DNA, 15 bp, Homo sapiens
tttattggagaagga

SEQ ID NO: 211176 - DNA, 15 bp, Homo sapiens
gtttattggagaagg

SEQ ID NO: 211177 - DNA, 15 bp, Homo sapiens
agtttattggagaag

SEQ ID NO: 211178 - DNA, 15 bp, Homo sapiens
cagtttattggagaa

SEQ ID NO: 211179 - DNA, 15 bp, Homo sapiens
ccagtttattggaga

SEQ ID NO: 211180 - DNA, 15 bp, Homo sapiens
tccagtttattggag

SEQ ID NO: 211181 - DNA, 15 bp, Homo sapiens
ttccagtttattgga

SEQ ID NO: 211182 - DNA, 15 bp, Homo sapiens
cttccagtttattgg

SEQ ID NO: 211183 - DNA, 15 bp, Homo sapiens
ccttccagtttattg

SEQ ID NO: 211184 - DNA, 15 bp, Homo sapiens
tccttccagtttatt

SEQ ID NO: 211185 - DNA, 15 bp, Homo sapiens
ctccttccagtttat

SEQ ID NO: 211186 - DNA, 15 bp, Homo sapiens
tctccttccagttta

SEQ ID NO: 211187 - DNA, 15 bp, Homo sapiens
ctctccttccagttt

SEQ ID NO: 211188 - DNA, 15 bp, Homo sapiens
cctctccttccagtt

SEQ ID NO: 211189 - DNA, 15 bp, Homo sapiens
gcctctccttccagt

SEQ ID NO: 211190 - DNA, 15 bp, Homo sapiens
agcctctccttccag

SEQ ID NO: 211191 - DNA, 15 bp, Homo sapiens
aagcctctccttcca

SEQ ID NO: 211192 - DNA, 15 bp, Homo sapiens
gaagcctctccttcc

SEQ ID NO: 211193 - DNA, 15 bp, Homo sapiens
agaagcctctccttc

SEQ ID NO: 211194 - DNA, 15 bp, Homo sapiens
tagaagcctctcctt

SEQ ID NO: 211195 - DNA, 15 bp, Homo sapiens
ttagaagcctctcct

SEQ ID NO: 211196 - DNA, 15 bp, Homo sapiens
attagaagcctctcc

SEQ ID NO: 211197 - DNA, 15 bp, Homo sapiens
aattagaagcctctc

SEQ ID NO: 211198 - DNA, 15 bp, Homo sapiens
aaattagaagcctct

SEQ ID NO: 211199 - DNA, 15 bp, Homo sapiens
gaaattagaagcctc

SEQ ID NO: 211200 - DNA, 15 bp, Homo sapiens
agaaattagaagcct

SEQ ID NO: 211201 - DNA, 15 bp, Homo sapiens
cagaaattagaagcc

SEQ ID NO: 211202 - DNA, 15 bp, Homo sapiens
acagaaattagaagc

SEQ ID NO: 211203 - DNA, 15 bp, Homo sapiens
tacagaaattagaag

SEQ ID NO: 211204 - DNA, 15 bp, Homo sapiens
ttacagaaattagaa

SEQ ID NO: 211205 - DNA, 15 bp, Homo sapiens
attacagaaattaga

SEQ ID NO: 211206 - DNA, 15 bp, Homo sapiens
cattacagaaattag

SEQ ID NO: 211207 - DNA, 15 bp, Homo sapiens
acattacagaaatta

SEQ ID NO: 211208 - DNA, 15 bp, Homo sapiens
cacattacagaaatt

SEQ ID NO: 211209 - DNA, 15 bp, Homo sapiens
ccacattacagaaat

SEQ ID NO: 211210 - DNA, 15 bp, Homo sapiens
cccacattacagaaa

SEQ ID NO: 211211 - DNA, 15 bp, Homo sapiens
ccccacattacagaa

SEQ ID NO: 211212 - DNA, 15 bp, Homo sapiens
tccccacattacaga

SEQ ID NO: 211213 - DNA, 15 bp, Homo sapiens
gtccccacattacag

SEQ ID NO: 211214 - DNA, 15 bp, Homo sapiens
agtccccacattaca

SEQ ID NO: 211215 - DNA, 15 bp, Homo sapiens
aagtccccacattac

SEQ ID NO: 211216 - DNA, 15 bp, Homo sapiens
caagtccccacatta

SEQ ID NO: 211217 - DNA, 15 bp, Homo sapiens
ccaagtccccacatt

SEQ ID NO: 211218 - DNA, 15 bp, Homo sapiens
tccaagtccccacat

SEQ ID NO: 211219 - DNA, 15 bp, Homo sapiens
atccaagtccccaca

SEQ ID NO: 211220 - DNA, 15 bp, Homo sapiens
catccaagtccccac

SEQ ID NO: 211221 - DNA, 15 bp, Homo sapiens
ccatccaagtcccca

SEQ ID NO: 211222 - DNA, 15 bp, Homo sapiens
gccatccaagtcccc

SEQ ID NO: 211223 - DNA, 15 bp, Homo sapiens
cgccatccaagtccc

SEQ ID NO: 211224 - DNA, 15 bp, Homo sapiens
acgccatccaagtcc

SEQ ID NO: 211225 - DNA, 15 bp, Homo sapiens
cacgccatccaagtc

SEQ ID NO: 211226 - DNA, 15 bp, Homo sapiens
acacgccatccaagt

SEQ ID NO: 211227 - DNA, 15 bp, Homo sapiens
cacacgccatccaag

SEQ ID NO: 211228 - DNA, 15 bp, Homo sapiens
ccacacgccatccaa

SEQ ID NO: 211229 - DNA, 15 bp, Homo sapiens
tccacacgccatcca

SEQ ID NO: 211230 - DNA, 15 bp, Homo sapiens
atccacacgccatcc

SEQ ID NO: 211231 - DNA, 15 bp, Homo sapiens
gatccacacgccatc

SEQ ID NO: 211232 - DNA, 15 bp, Homo sapiens
agatccacacgccat

SEQ ID NO: 211233 - DNA, 15 bp, Homo sapiens
gagatccacacgcca

SEQ ID NO: 211234 - DNA, 15 bp, Homo sapiens
agagatccacacgcc

SEQ ID NO: 211235 - DNA, 15 bp, Homo sapiens
tagagatccacacgc

SEQ ID NO: 211236 - DNA, 15 bp, Homo sapiens
ttagagatccacacg

SEQ ID NO: 211237 - DNA, 15 bp, Homo sapiens
gttagagatccacac

SEQ ID NO: 211238 - DNA, 15 bp, Homo sapiens
agttagagatccaca

SEQ ID NO: 211239 - DNA, 15 bp, Homo sapiens
cagttagagatccac

SEQ ID NO: 211240 - DNA, 15 bp, Homo sapiens
gcagttagagatcca

SEQ ID NO: 211241 - DNA, 15 bp, Homo sapiens
tgcagttagagatcc

SEQ ID NO: 211242 - DNA, 15 bp, Homo sapiens
atgcagttagagatc

SEQ ID NO: 211243 - DNA, 15 bp, Homo sapiens
gatgcagttagagat

SEQ ID NO: 211244 - DNA, 15 bp, Homo sapiens
ggatgcagttagaga

SEQ ID NO: 211245 - DNA, 15 bp, Homo sapiens
aggatgcagttagag

SEQ ID NO: 211246 - DNA, 15 bp, Homo sapiens
taggatgcagttaga

SEQ ID NO: 211247 - DNA, 15 bp, Homo sapiens
ttaggatgcagttag

SEQ ID NO: 211248 - DNA, 15 bp, Homo sapiens
cttaggatgcagtta

SEQ ID NO: 211249 - DNA, 15 bp, Homo sapiens
acttaggatgcagtt

SEQ ID NO: 211250 - DNA, 15 bp, Homo sapiens
aacttaggatgcagt

SEQ ID NO: 211251 - DNA, 15 bp, Homo sapiens
caacttaggatgcag

SEQ ID NO: 211252 - DNA, 15 bp, Homo sapiens
acaacttaggatgca

SEQ ID NO: 211253 - DNA, 15 bp, Homo sapiens
gacaacttaggatgc

SEQ ID NO: 211254 - DNA, 15 bp, Homo sapiens
agacaacttaggatg

SEQ ID NO: 211255 - DNA, 15 bp, Homo sapiens
tagacaacttaggat

SEQ ID NO: 211256 - DNA, 15 bp, Homo sapiens
ttagacaacttagga

SEQ ID NO: 211257 - DNA, 15 bp, Homo sapiens
attagacaacttagg

SEQ ID NO: 211258 - DNA, 15 bp, Homo sapiens
tattagacaacttag

SEQ ID NO: 211259 - DNA, 15 bp, Homo sapiens
atattagacaactta

SEQ ID NO: 211260 - DNA, 15 bp, Homo sapiens
aatattagacaactt

SEQ ID NO: 211261 - DNA, 15 bp, Homo sapiens
caatattagacaact

SEQ ID NO: 211262 - DNA, 15 bp, Homo sapiens
tcaatattagacaac

SEQ ID NO: 211263 - DNA, 15 bp, Homo sapiens
atcaatattagacaa

SEQ ID NO: 211264 - DNA, 15 bp, Homo sapiens
tatcaatattagaca

SEQ ID NO: 211265 - DNA, 15 bp, Homo sapiens
ttatcaatattagac

SEQ ID NO: 211266 - DNA, 15 bp, Homo sapiens
tttatcaatattaga

SEQ ID NO: 211267 - DNA, 15 bp, Homo sapiens
gtttatcaatattag

SEQ ID NO: 211268 - DNA, 15 bp, Homo sapiens
ggtttatcaatatta

SEQ ID NO: 211269 - DNA, 15 bp, Homo sapiens
tggtttatcaatatt

SEQ ID NO: 211270 - DNA, 15 bp, Homo sapiens
ttggtttatcaatat

SEQ ID NO: 211271 - DNA, 15 bp, Homo sapiens
cttggtttatcaata

SEQ ID NO: 211272 - DNA, 15 bp, Homo sapiens
ccttggtttatcaat

SEQ ID NO: 211273 - DNA, 15 bp, Homo sapiens
tccttggtttatcaa

SEQ ID NO: 211274 - DNA, 15 bp, Homo sapiens
ctccttggtttatca

SEQ ID NO: 211275 - DNA, 15 bp, Homo sapiens
actccttggtttatc

SEQ ID NO: 211276 - DNA, 15 bp, Homo sapiens
tactccttggtttat

SEQ ID NO: 211277 - DNA, 15 bp, Homo sapiens
ctactccttggttta

SEQ ID NO: 211278 - DNA, 15 bp, Homo sapiens
gctactccttggttt

SEQ ID NO: 211279 - DNA, 15 bp, Homo sapiens
cgctactccttggtt

SEQ ID NO: 211280 - DNA, 15 bp, Homo sapiens
ccgctactccttggt

SEQ ID NO: 211281 - DNA, 15 bp, Homo sapiens
cccgctactccttgg

SEQ ID NO: 211282 - DNA, 15 bp, Homo sapiens
ccccgctactccttg

SEQ ID NO: 211283 - DNA, 15 bp, Homo sapiens
accccgctactcctt

SEQ ID NO: 211284 - DNA, 15 bp, Homo sapiens
aaccccgctactcct

SEQ ID NO: 211285 - DNA, 15 bp, Homo sapiens
gaaccccgctactcc

SEQ ID NO: 211286 - DNA, 15 bp, Homo sapiens
ggaaccccgctactc

SEQ ID NO: 211287 - DNA, 15 bp, Homo sapiens
aggaaccccgctact

SEQ ID NO: 211288 - DNA, 15 bp, Homo sapiens
taggaaccccgctac

SEQ ID NO: 211289 - DNA, 15 bp, Homo sapiens
ataggaaccccgcta

SEQ ID NO: 211290 - DNA, 15 bp, Homo sapiens
aataggaaccccgct

SEQ ID NO: 211291 - DNA, 15 bp, Homo sapiens
caataggaaccccgc

SEQ ID NO: 211292 - DNA, 15 bp, Homo sapiens
acaataggaaccccg

SEQ ID NO: 211293 - DNA, 15 bp, Homo sapiens
cacaataggaacccc

SEQ ID NO: 211294 - DNA, 15 bp, Homo sapiens
ccacaataggaaccc

SEQ ID NO: 211295 - DNA, 15 bp, Homo sapiens
gccacaataggaacc

SEQ ID NO: 211296 - DNA, 15 bp, Homo sapiens
ggccacaataggaac

SEQ ID NO: 211297 - DNA, 15 bp, Homo sapiens
aggccacaataggaa

SEQ ID NO: 211298 - DNA, 15 bp, Homo sapiens
aaggccacaatagga

SEQ ID NO: 211299 - DNA, 15 bp, Homo sapiens
aaaggccacaatagg

SEQ ID NO: 211300 - DNA, 15 bp, Homo sapiens
caaaggccacaatag

SEQ ID NO: 211301 - DNA, 15 bp, Homo sapiens
tcaaaggccacaata

SEQ ID NO: 211302 - DNA, 15 bp, Homo sapiens
ttcaaaggccacaat

SEQ ID NO: 211303 - DNA, 15 bp, Homo sapiens
cttcaaaggccacaa

SEQ ID NO: 211304 - DNA, 15 bp, Homo sapiens
ccttcaaaggccaca

SEQ ID NO: 211305 - DNA, 15 bp, Homo sapiens
accttcaaaggccac

SEQ ID NO: 211306 - DNA, 15 bp, Homo sapiens
taccttcaaaggcca

SEQ ID NO: 211307 - DNA, 15 bp, Homo sapiens
ataccttcaaaggcc

SEQ ID NO: 211308 - DNA, 15 bp, Homo sapiens
aataccttcaaaggc

SEQ ID NO: 211309 - DNA, 15 bp, Homo sapiens
caataccttcaaagg

SEQ ID NO: 211310 - DNA, 15 bp, Homo sapiens
ccaataccttcaaag

SEQ ID NO: 211311 - DNA, 15 bp, Homo sapiens
cccaataccttcaaa

SEQ ID NO: 211312 - DNA, 15 bp, Homo sapiens
acccaataccttcaa

SEQ ID NO: 211313 - DNA, 15 bp, Homo sapiens
cacccaataccttca

SEQ ID NO: 211314 - DNA, 15 bp, Homo sapiens
ccacccaataccttc

SEQ ID NO: 211315 - DNA, 15 bp, Homo sapiens
tccacccaatacctt

SEQ ID NO: 211316 - DNA, 15 bp, Homo sapiens
ctccacccaatacct

SEQ ID NO: 211317 - DNA, 15 bp, Homo sapiens
tctccacccaatacc

SEQ ID NO: 211318 - DNA, 15 bp, Homo sapiens
ctctccacccaatac

SEQ ID NO: 211319 - DNA, 15 bp, Homo sapiens
tctctccacccaata

SEQ ID NO: 211320 - DNA, 15 bp, Homo sapiens
ttctctccacccaat

SEQ ID NO: 211321 - DNA, 15 bp, Homo sapiens
gttctctccacccaa

SEQ ID NO: 211322 - DNA, 15 bp, Homo sapiens
tgttctctccaccca

SEQ ID NO: 211323 - DNA, 15 bp, Homo sapiens
gtgttctctccaccc

SEQ ID NO: 211324 - DNA, 15 bp, Homo sapiens
tgtgttctctccacc

SEQ ID NO: 211325 - DNA, 15 bp, Homo sapiens
ctgtgttctctccac

SEQ ID NO: 211326 - DNA, 15 bp, Homo sapiens
cctgtgttctctcca

SEQ ID NO: 211327 - DNA, 15 bp, Homo sapiens
tcctgtgttctctcc

SEQ ID NO: 211328 - DNA, 15 bp, Homo sapiens
atcctgtgttctctc

SEQ ID NO: 211329 - DNA, 15 bp, Homo sapiens
catcctgtgttctct

SEQ ID NO: 211330 - DNA, 15 bp, Homo sapiens
ccatcctgtgttctc

SEQ ID NO: 211331 - DNA, 15 bp, Homo sapiens
cccatcctgtgttct

SEQ ID NO: 211332 - DNA, 15 bp, Homo sapiens
gcccatcctgtgttc

SEQ ID NO: 211333 - DNA, 15 bp, Homo sapiens
tgcccatcctgtgtt

SEQ ID NO: 211334 - DNA, 15 bp, Homo sapiens
ctgcccatcctgtgt

SEQ ID NO: 211335 - DNA, 15 bp, Homo sapiens
cctgcccatcctgtg

SEQ ID NO: 211336 - DNA, 15 bp, Homo sapiens
gcctgcccatcctgt

SEQ ID NO: 211337 - DNA, 15 bp, Homo sapiens
cgcctgcccatcctg

SEQ ID NO: 211338 - DNA, 15 bp, Homo sapiens
ccgcctgcccatcct

SEQ ID NO: 211339 - DNA, 15 bp, Homo sapiens
cccgcctgcccatcc

SEQ ID NO: 211340 - DNA, 15 bp, Homo sapiens
acccgcctgcccatc

SEQ ID NO: 211341 - DNA, 15 bp, Homo sapiens
gacccgcctgcccat

SEQ ID NO: 211342 - DNA, 15 bp, Homo sapiens
ggacccgcctgccca

SEQ ID NO: 211343 - DNA, 15 bp, Homo sapiens
aggacccgcctgccc

SEQ ID NO: 211344 - DNA, 15 bp, Homo sapiens
taggacccgcctgcc

SEQ ID NO: 211345 - DNA, 15 bp, Homo sapiens
gtaggacccgcctgc

SEQ ID NO: 211346 - DNA, 15 bp, Homo sapiens
tgtaggacccgcctg

SEQ ID NO: 211347 - DNA, 15 bp, Homo sapiens
ttgtaggacccgcct

SEQ ID NO: 211348 - DNA, 15 bp, Homo sapiens
gttgtaggacccgcc

SEQ ID NO: 211349 - DNA, 15 bp, Homo sapiens
tgttgtaggacccgc

SEQ ID NO: 211350 - DNA, 15 bp, Homo sapiens
ctgttgtaggacccg

SEQ ID NO: 211351 - DNA, 15 bp, Homo sapiens
actgttgtaggaccc

SEQ ID NO: 211352 - DNA, 15 bp, Homo sapiens
gactgttgtaggacc

SEQ ID NO: 211353 - DNA, 15 bp, Homo sapiens
tgactgttgtaggac

SEQ ID NO: 211354 - DNA, 15 bp, Homo sapiens
ctgactgttgtagga

SEQ ID NO: 211355 - DNA, 15 bp, Homo sapiens
gctgactgttgtagg

SEQ ID NO: 211356 - DNA, 15 bp, Homo sapiens
tgctgactgttgtag

SEQ ID NO: 211357 - DNA, 15 bp, Homo sapiens
ttgctgactgttgta

SEQ ID NO: 211358 - DNA, 15 bp, Homo sapiens
tttgctgactgttgt

SEQ ID NO: 211359 - DNA, 15 bp, Homo sapiens
ctttgctgactgttg

SEQ ID NO: 211360 - DNA, 15 bp, Homo sapiens
actttgctgactgtt

SEQ ID NO: 211361 - DNA, 15 bp, Homo sapiens
tactttgctgactgt

SEQ ID NO: 211362 - DNA, 15 bp, Homo sapiens
gtactttgctgactg

SEQ ID NO: 211363 - DNA, 15 bp, Homo sapiens
tgtactttgctgact

SEQ ID NO: 211364 - DNA, 15 bp, Homo sapiens
atgtactttgctgac

SEQ ID NO: 211365 - DNA, 15 bp, Homo sapiens
catgtactttgctga

SEQ ID NO: 211366 - DNA, 15 bp, Homo sapiens
ccatgtactttgctg

SEQ ID NO: 211367 - DNA, 15 bp, Homo sapiens
gccatgtactttgct

SEQ ID NO: 211368 - DNA, 15 bp, Homo sapiens
agccatgtactttgc

SEQ ID NO: 211369 - DNA, 15 bp, Homo sapiens
tagccatgtactttg

SEQ ID NO: 211370 - DNA, 15 bp, Homo sapiens
ctagccatgtacttt

SEQ ID NO: 211371 - DNA, 15 bp, Homo sapiens
tctagccatgtactt

SEQ ID NO: 211372 - DNA, 15 bp, Homo sapiens
ctctagccatgtact

SEQ ID NO: 211373 - DNA, 15 bp, Homo sapiens
gctctagccatgtac

SEQ ID NO: 211374 - DNA, 15 bp, Homo sapiens
tgctctagccatgta

SEQ ID NO: 211375 - DNA, 15 bp, Homo sapiens
ttgctctagccatgt

SEQ ID NO: 211376 - DNA, 15 bp, Homo sapiens
tttgctctagccatg

SEQ ID NO: 211377 - DNA, 15 bp, Homo sapiens
ttttgctctagccat

SEQ ID NO: 211378 - DNA, 15 bp, Homo sapiens
cttttgctctagcca

SEQ ID NO: 211379 - DNA, 15 bp, Homo sapiens
tcttttgctctagcc

SEQ ID NO: 211380 - DNA, 15 bp, Homo sapiens
ttcttttgctctagc

SEQ ID NO: 211381 - DNA, 15 bp, Homo sapiens
tttcttttgctctag

SEQ ID NO: 211382 - DNA, 15 bp, Homo sapiens
gtttcttttgctcta

SEQ ID NO: 211383 - DNA, 15 bp, Homo sapiens
ggtttcttttgctct

SEQ ID NO: 211384 - DNA, 15 bp, Homo sapiens
aggtttcttttgctc

SEQ ID NO: 211385 - DNA, 15 bp, Homo sapiens
aaggtttcttttgct

SEQ ID NO: 211386 - DNA, 15 bp, Homo sapiens
taaggtttcttttgc

SEQ ID NO: 211387 - DNA, 15 bp, Homo sapiens
ataaggtttcttttg

SEQ ID NO: 211388 - DNA, 15 bp, Homo sapiens
cataaggtttctttt

SEQ ID NO: 211389 - DNA, 15 bp, Homo sapiens
gcataaggtttcttt

SEQ ID NO: 211390 - DNA, 15 bp, Homo sapiens
tgcataaggtttctt

SEQ ID NO: 211391 - DNA, 15 bp, Homo sapiens
ttgcataaggtttct

SEQ ID NO: 211392 - DNA, 15 bp, Homo sapiens
cttgcataaggtttc

SEQ ID NO: 211393 - DNA, 15 bp, Homo sapiens
acttgcataaggttt

SEQ ID NO: 211394 - DNA, 15 bp, Homo sapiens
cacttgcataaggtt

SEQ ID NO: 211395 - DNA, 15 bp, Homo sapiens
gcacttgcataaggt

SEQ ID NO: 211396 - DNA, 15 bp, Homo sapiens
tgcacttgcataagg

SEQ ID NO: 211397 - DNA, 15 bp, Homo sapiens
ctgcacttgcataag

SEQ ID NO: 211398 - DNA, 15 bp, Homo sapiens
tctgcacttgcataa

SEQ ID NO: 211399 - DNA, 15 bp, Homo sapiens
atctgcacttgcata

SEQ ID NO: 211400 - DNA, 15 bp, Homo sapiens
aatctgcacttgcat

SEQ ID NO: 211401 - DNA, 15 bp, Homo sapiens
aaatctgcacttgca

SEQ ID NO: 211402 - DNA, 15 bp, Homo sapiens
caaatctgcacttgc

SEQ ID NO: 211403 - DNA, 15 bp, Homo sapiens
ccaaatctgcacttg

SEQ ID NO: 211404 - DNA, 15 bp, Homo sapiens
cccaaatctgcactt

SEQ ID NO: 211405 - DNA, 15 bp, Homo sapiens
tcccaaatctgcact

SEQ ID NO: 211406 - DNA, 15 bp, Homo sapiens
gtcccaaatctgcac

SEQ ID NO: 211407 - DNA, 15 bp, Homo sapiens
agtcccaaatctgca

SEQ ID NO: 211408 - DNA, 15 bp, Homo sapiens
gagtcccaaatctgc

SEQ ID NO: 211409 - DNA, 15 bp, Homo sapiens
tgagtcccaaatctg

SEQ ID NO: 211410 - DNA, 15 bp, Homo sapiens
ttgagtcccaaatct

SEQ ID NO: 211411 - DNA, 15 bp, Homo sapiens
tttgagtcccaaatc

SEQ ID NO: 211412 - DNA, 15 bp, Homo sapiens
gtttgagtcccaaat

SEQ ID NO: 211413 - DNA, 15 bp, Homo sapiens
ggtttgagtcccaaa

SEQ ID NO: 211414 - DNA, 15 bp, Homo sapiens
tggtttgagtcccaa

SEQ ID NO: 211415 - DNA, 15 bp, Homo sapiens
atggtttgagtccca

SEQ ID NO: 211416 - DNA, 15 bp, Homo sapiens
aatggtttgagtccc

SEQ ID NO: 211417 - DNA, 15 bp, Homo sapiens
gaatggtttgagtcc

SEQ ID NO: 211418 - DNA, 15 bp, Homo sapiens
tgaatggtttgagtc

SEQ ID NO: 211419 - DNA, 15 bp, Homo sapiens
ttgaatggtttgagt

SEQ ID NO: 211420 - DNA, 15 bp, Homo sapiens
gttgaatggtttgag

SEQ ID NO: 211421 - DNA, 15 bp, Homo sapiens
ggttgaatggtttga

SEQ ID NO: 211422 - DNA, 15 bp, Homo sapiens
aggttgaatggtttg

SEQ ID NO: 211423 - DNA, 15 bp, Homo sapiens
aaggttgaatggttt

SEQ ID NO: 211424 - DNA, 15 bp, Homo sapiens
taaggttgaatggtt

SEQ ID NO: 211425 - DNA, 15 bp, Homo sapiens
ttaaggttgaatggt

SEQ ID NO: 211426 - DNA, 15 bp, Homo sapiens
cttaaggttgaatgg

SEQ ID NO: 211427 - DNA, 15 bp, Homo sapiens
ccttaaggttgaatg

SEQ ID NO: 211428 - DNA, 15 bp, Homo sapiens
accttaaggttgaat

SEQ ID NO: 211429 - DNA, 15 bp, Homo sapiens
caccttaaggttgaa

SEQ ID NO: 211430 - DNA, 15 bp, Homo sapiens
gcaccttaaggttga

SEQ ID NO: 211431 - DNA, 15 bp, Homo sapiens
agcaccttaaggttg

SEQ ID NO: 211432 - DNA, 15 bp, Homo sapiens
aagcaccttaaggtt

SEQ ID NO: 211433 - DNA, 15 bp, Homo sapiens
caagcaccttaaggt

SEQ ID NO: 211434 - DNA, 15 bp, Homo sapiens
ccaagcaccttaagg

SEQ ID NO: 211435 - DNA, 15 bp, Homo sapiens
cccaagcaccttaag

SEQ ID NO: 211436 - DNA, 15 bp, Homo sapiens
ccccaagcaccttaa

SEQ ID NO: 211437 - DNA, 15 bp, Homo sapiens
gccccaagcacctta

SEQ ID NO: 211438 - DNA, 15 bp, Homo sapiens
cgccccaagcacctt

SEQ ID NO: 211439 - DNA, 15 bp, Homo sapiens
tcgccccaagcacct

SEQ ID NO: 211440 - DNA, 15 bp, Homo sapiens
ttcgccccaagcacc

SEQ ID NO: 211441 - DNA, 15 bp, Homo sapiens
cttcgccccaagcac

SEQ ID NO: 211442 - DNA, 15 bp, Homo sapiens
acttcgccccaagca

SEQ ID NO: 211443 - DNA, 15 bp, Homo sapiens
cacttcgccccaagc

SEQ ID NO: 211444 - DNA, 15 bp, Homo sapiens
ccacttcgccccaag

SEQ ID NO: 211445 - DNA, 15 bp, Homo sapiens
accacttcgccccaa

SEQ ID NO: 211446 - DNA, 15 bp, Homo sapiens
gaccacttcgcccca

SEQ ID NO: 211447 - DNA, 15 bp, Homo sapiens
cgaccacttcgcccc

SEQ ID NO: 211448 - DNA, 15 bp, Homo sapiens
ccgaccacttcgccc

SEQ ID NO: 211449 - DNA, 15 bp, Homo sapiens
cccgaccacttcgcc

SEQ ID NO: 211450 - DNA, 15 bp, Homo sapiens
ccccgaccacttcgc

SEQ ID NO: 211451 - DNA, 15 bp, Homo sapiens
tccccgaccacttcg

SEQ ID NO: 211452 - DNA, 15 bp, Homo sapiens
ctccccgaccacttc

SEQ ID NO: 211453 - DNA, 15 bp, Homo sapiens
cctccccgaccactt

SEQ ID NO: 211454 - DNA, 15 bp, Homo sapiens
ccctccccgaccact

SEQ ID NO: 211455 - DNA, 15 bp, Homo sapiens
accctccccgaccac

SEQ ID NO: 211456 - DNA, 15 bp, Homo sapiens
caccctccccgacca

SEQ ID NO: 211457 - DNA, 15 bp, Homo sapiens
ccaccctccccgacc

SEQ ID NO: 211458 - DNA, 15 bp, Homo sapiens
accaccctccccgac

SEQ ID NO: 211459 - DNA, 15 bp, Homo sapiens
caccaccctccccga

SEQ ID NO: 211460 - DNA, 15 bp, Homo sapiens
ccaccaccctccccg

SEQ ID NO: 211461 - DNA, 15 bp, Homo sapiens
cccaccaccctcccc

SEQ ID NO: 211462 - DNA, 15 bp, Homo sapiens
ccccaccaccctccc

SEQ ID NO: 211463 - DNA, 15 bp, Homo sapiens
tccccaccaccctcc

SEQ ID NO: 211464 - DNA, 15 bp, Homo sapiens
atccccaccaccctc

SEQ ID NO: 211465 - DNA, 15 bp, Homo sapiens
aatccccaccaccct

SEQ ID NO: 211466 - DNA, 15 bp, Homo sapiens
caatccccaccaccc

SEQ ID NO: 211467 - DNA, 15 bp, Homo sapiens
acaatccccaccacc

SEQ ID NO: 211468 - DNA, 15 bp, Homo sapiens
cacaatccccaccac

SEQ ID NO: 211469 - DNA, 15 bp, Homo sapiens
tcacaatccccacca

SEQ ID NO: 211470 - DNA, 15 bp, Homo sapiens
ttcacaatccccacc

SEQ ID NO: 211471 - DNA, 15 bp, Homo sapiens
cttcacaatccccac

SEQ ID NO: 211472 - DNA, 15 bp, Homo sapiens
acttcacaatcccca

SEQ ID NO: 211473 - DNA, 15 bp, Homo sapiens
cacttcacaatcccc

SEQ ID NO: 211474 - DNA, 15 bp, Homo sapiens
acacttcacaatccc

SEQ ID NO: 211475 - DNA, 15 bp, Homo sapiens
cacacttcacaatcc

SEQ ID NO: 211476 - DNA, 15 bp, Homo sapiens
acacacttcacaatc

SEQ ID NO: 211477 - DNA, 15 bp, Homo sapiens
cacacacttcacaat

SEQ ID NO: 211478 - DNA, 15 bp, Homo sapiens
tcacacacttcacaa

SEQ ID NO: 211479 - DNA, 15 bp, Homo sapiens
gtcacacacttcaca

SEQ ID NO: 211480 - DNA, 15 bp, Homo sapiens
agtcacacacttcac

SEQ ID NO: 211481 - DNA, 15 bp, Homo sapiens
aagtcacacacttca

SEQ ID NO: 211482 - DNA, 15 bp, Homo sapiens
caagtcacacacttc

SEQ ID NO: 211483 - DNA, 15 bp, Homo sapiens
acaagtcacacactt

SEQ ID NO: 211484 - DNA, 15 bp, Homo sapiens
gacaagtcacacact

SEQ ID NO: 211485 - DNA, 15 bp, Homo sapiens
agacaagtcacacac

SEQ ID NO: 211486 - DNA, 15 bp, Homo sapiens
cagacaagtcacaca

SEQ ID NO: 211487 - DNA, 15 bp, Homo sapiens
gcagacaagtcacac

SEQ ID NO: 211488 - DNA, 15 bp, Homo sapiens
tgcagacaagtcaca

SEQ ID NO: 211489 - DNA, 15 bp, Homo sapiens
ctgcagacaagtcac

SEQ ID NO: 211490 - DNA, 15 bp, Homo sapiens
tctgcagacaagtca

SEQ ID NO: 211491 - DNA, 15 bp, Homo sapiens
ttctgcagacaagtc

SEQ ID NO: 211492 - DNA, 15 bp, Homo sapiens
attctgcagacaagt

SEQ ID NO: 211493 - DNA, 15 bp, Homo sapiens
aattctgcagacaag

SEQ ID NO: 211494 - DNA, 15 bp, Homo sapiens
aaattctgcagacaa

SEQ ID NO: 211495 - DNA, 15 bp, Homo sapiens
taaattctgcagaca

SEQ ID NO: 211496 - DNA, 15 bp, Homo sapiens
gtaaattctgcagac

SEQ ID NO: 211497 - DNA, 15 bp, Homo sapiens
agtaaattctgcaga

SEQ ID NO: 211498 - DNA, 15 bp, Homo sapiens
cagtaaattctgcag

SEQ ID NO: 211499 - DNA, 15 bp, Homo sapiens
acagtaaattctgca

SEQ ID NO: 211500 - DNA, 15 bp, Homo sapiens
aacagtaaattctgc

SEQ ID NO: 211501 - DNA, 15 bp, Homo sapiens
gaacagtaaattctg

SEQ ID NO: 211502 - DNA, 15 bp, Homo sapiens
agaacagtaaattct

SEQ ID NO: 211503 - DNA, 15 bp, Homo sapiens
gagaacagtaaattc

SEQ ID NO: 211504 - DNA, 15 bp, Homo sapiens
agagaacagtaaatt

SEQ ID NO: 211505 - DNA, 15 bp, Homo sapiens
cagagaacagtaaat

SEQ ID NO: 211506 - DNA, 15 bp, Homo sapiens
gcagagaacagtaaa

SEQ ID NO: 211507 - DNA, 15 bp, Homo sapiens
agcagagaacagtaa

SEQ ID NO: 211508 - DNA, 15 bp, Homo sapiens
aagcagagaacagta

SEQ ID NO: 211509 - DNA, 15 bp, Homo sapiens
aaagcagagaacagt

SEQ ID NO: 211510 - DNA, 15 bp, Homo sapiens
gaaagcagagaacag

SEQ ID NO: 211511 - DNA, 15 bp, Homo sapiens
tgaaagcagagaaca

SEQ ID NO: 211512 - DNA, 15 bp, Homo sapiens
atgaaagcagagaac

SEQ ID NO: 211513 - DNA, 15 bp, Homo sapiens
aatgaaagcagagaa

SEQ ID NO: 211514 - DNA, 15 bp, Homo sapiens
taatgaaagcagaga

SEQ ID NO: 211515 - DNA, 15 bp, Homo sapiens
ataatgaaagcagag

SEQ ID NO: 211516 - DNA, 15 bp, Homo sapiens
tataatgaaagcaga

SEQ ID NO: 211517 - DNA, 15 bp, Homo sapiens
ttataatgaaagcag

SEQ ID NO: 211518 - DNA, 15 bp, Homo sapiens
cttataatgaaagca

SEQ ID NO: 211519 - DNA, 15 bp, Homo sapiens
gcttataatgaaagc

SEQ ID NO: 211520 - DNA, 15 bp, Homo sapiens
ggcttataatgaaag

SEQ ID NO: 211521 - DNA, 15 bp, Homo sapiens
aggcttataatgaaa

SEQ ID NO: 211522 - DNA, 15 bp, Homo sapiens
gaggcttataatgaa

SEQ ID NO: 211523 - DNA, 15 bp, Homo sapiens
agaggcttataatga

SEQ ID NO: 211524 - DNA, 15 bp, Homo sapiens
aagaggcttataatg

SEQ ID NO: 211525 - DNA, 15 bp, Homo sapiens
aaagaggcttataat

SEQ ID NO: 211526 - DNA, 15 bp, Homo sapiens
aaaagaggcttataa

SEQ ID NO: 211527 - DNA, 15 bp, Homo sapiens
gaaaagaggcttata

SEQ ID NO: 211528 - DNA, 15 bp, Homo sapiens
agaaaagaggcttat

SEQ ID NO: 211529 - DNA, 15 bp, Homo sapiens
gagaaaagaggctta

SEQ ID NO: 211530 - DNA, 15 bp, Homo sapiens
tgagaaaagaggctt

SEQ ID NO: 211531 - DNA, 15 bp, Homo sapiens
gtgagaaaagaggct

SEQ ID NO: 211532 - DNA, 15 bp, Homo sapiens
tgtgagaaaagaggc

SEQ ID NO: 211533 - DNA, 15 bp, Homo sapiens
gtgtgagaaaagagg

SEQ ID NO: 211534 - DNA, 15 bp, Homo sapiens
tgtgtgagaaaagag

SEQ ID NO: 211535 - DNA, 15 bp, Homo sapiens
ctgtgtgagaaaaga

SEQ ID NO: 211536 - DNA, 15 bp, Homo sapiens
tctgtgtgagaaaag

SEQ ID NO: 211537 - DNA, 15 bp, Homo sapiens
ttctgtgtgagaaaa

SEQ ID NO: 211538 - DNA, 15 bp, Homo sapiens
cttctgtgtgagaaa

SEQ ID NO: 211539 - DNA, 15 bp, Homo sapiens
tcttctgtgtgagaa

SEQ ID NO: 211540 - DNA, 15 bp, Homo sapiens
ctcttctgtgtgaga

SEQ ID NO: 211541 - DNA, 15 bp, Homo sapiens
actcttctgtgtgag

SEQ ID NO: 211542 - DNA, 15 bp, Homo sapiens
tactcttctgtgtga

SEQ ID NO: 211543 - DNA, 15 bp, Homo sapiens
ttactcttctgtgtg

SEQ ID NO: 211544 - DNA, 15 bp, Homo sapiens
cttactcttctgtgt

SEQ ID NO: 211545 - DNA, 15 bp, Homo sapiens
tcttactcttctgtg

SEQ ID NO: 211546 - DNA, 15 bp, Homo sapiens
atcttactcttctgt

SEQ ID NO: 211547 - DNA, 15 bp, Homo sapiens
catcttactcttctg

SEQ ID NO: 211548 - DNA, 15 bp, Homo sapiens
tcatcttactcttct

SEQ ID NO: 211549 - DNA, 15 bp, Homo sapiens
ttcatcttactcttc

SEQ ID NO: 211550 - DNA, 15 bp, Homo sapiens
cttcatcttactctt

SEQ ID NO: 211551 - DNA, 15 bp, Homo sapiens
gcttcatcttactct

SEQ ID NO: 211552 - DNA, 15 bp, Homo sapiens
tgcttcatcttactc

SEQ ID NO: 211553 - DNA, 15 bp, Homo sapiens
atgcttcatcttact

SEQ ID NO: 211554 - DNA, 15 bp, Homo sapiens
catgcttcatcttac

SEQ ID NO: 211555 - DNA, 15 bp, Homo sapiens
gcatgcttcatctta

SEQ ID NO: 211556 - DNA, 15 bp, Homo sapiens
tgcatgcttcatctt

SEQ ID NO: 211557 - DNA, 15 bp, Homo sapiens
ctgcatgcttcatct

SEQ ID NO: 211558 - DNA, 15 bp, Homo sapiens
tctgcatgcttcatc

SEQ ID NO: 211559 - DNA, 15 bp, Homo sapiens
ctctgcatgcttcat

SEQ ID NO: 211560 - DNA, 15 bp, Homo sapiens
tctctgcatgcttca

SEQ ID NO: 211561 - DNA, 15 bp, Homo sapiens
gtctctgcatgcttc

SEQ ID NO: 211562 - DNA, 15 bp, Homo sapiens
ggtctctgcatgctt

SEQ ID NO: 211563 - DNA, 15 bp, Homo sapiens
tggtctctgcatgct

SEQ ID NO: 211564 - DNA, 15 bp, Homo sapiens
ctggtctctgcatgc

SEQ ID NO: 211565 - DNA, 15 bp, Homo sapiens
cctggtctctgcatg

SEQ ID NO: 211566 - DNA, 15 bp, Homo sapiens
acctggtctctgcat

SEQ ID NO: 211567 - DNA, 15 bp, Homo sapiens
aacctggtctctgca

SEQ ID NO: 211568 - DNA, 15 bp, Homo sapiens
caacctggtctctgc

SEQ ID NO: 211569 - DNA, 15 bp, Homo sapiens
ccaacctggtctctg

SEQ ID NO: 211570 - DNA, 15 bp, Homo sapiens
cccaacctggtctct

SEQ ID NO: 211571 - DNA, 15 bp, Homo sapiens
acccaacctggtctc

SEQ ID NO: 211572 - DNA, 15 bp, Homo sapiens
aacccaacctggtct

SEQ ID NO: 211573 - DNA, 15 bp, Homo sapiens
taacccaacctggtc

SEQ ID NO: 211574 - DNA, 15 bp, Homo sapiens
ttaacccaacctggt

SEQ ID NO: 211575 - DNA, 15 bp, Homo sapiens
cttaacccaacctgg

SEQ ID NO: 211576 - DNA, 15 bp, Homo sapiens
tcttaacccaacctg

SEQ ID NO: 211577 - DNA, 15 bp, Homo sapiens
gtcttaacccaacct

SEQ ID NO: 211578 - DNA, 15 bp, Homo sapiens
agtcttaacccaacc

SEQ ID NO: 211579 - DNA, 15 bp, Homo sapiens
gagtcttaacccaac

SEQ ID NO: 211580 - DNA, 15 bp, Homo sapiens
agagtcttaacccaa

SEQ ID NO: 211581 - DNA, 15 bp, Homo sapiens
cagagtcttaaccca

SEQ ID NO: 211582 - DNA, 15 bp, Homo sapiens
acagagtcttaaccc

SEQ ID NO: 211583 - DNA, 15 bp, Homo sapiens
tacagagtcttaacc

SEQ ID NO: 211584 - DNA, 15 bp, Homo sapiens
gtacagagtcttaac

SEQ ID NO: 211585 - DNA, 15 bp, Homo sapiens
agtacagagtcttaa

SEQ ID NO: 211586 - DNA, 15 bp, Homo sapiens
tagtacagagtctta

SEQ ID NO: 211587 - DNA, 15 bp, Homo sapiens
ttagtacagagtctt

SEQ ID NO: 211588 - DNA, 15 bp, Homo sapiens
attagtacagagtct

SEQ ID NO: 211589 - DNA, 15 bp, Homo sapiens
gattagtacagagtc

SEQ ID NO: 211590 - DNA, 15 bp, Homo sapiens
tgattagtacagagt

SEQ ID NO: 211591 - DNA, 15 bp, Homo sapiens
gtgattagtacagag

SEQ ID NO: 211592 - DNA, 15 bp, Homo sapiens
tgtgattagtacaga

SEQ ID NO: 211593 - DNA, 15 bp, Homo sapiens
ttgtgattagtacag

SEQ ID NO: 211594 - DNA, 15 bp, Homo sapiens
cttgtgattagtaca

SEQ ID NO: 211595 - DNA, 15 bp, Homo sapiens
acttgtgattagtac

SEQ ID NO: 211596 - DNA, 15 bp, Homo sapiens
tacttgtgattagta

SEQ ID NO: 211597 - DNA, 15 bp, Homo sapiens
ctacttgtgattagt

SEQ ID NO: 211598 - DNA, 15 bp, Homo sapiens
actacttgtgattag

SEQ ID NO: 211599 - DNA, 15 bp, Homo sapiens
cactacttgtgatta

SEQ ID NO: 211600 - DNA, 15 bp, Homo sapiens
gcactacttgtgatt

SEQ ID NO: 211601 - DNA, 15 bp, Homo sapiens
tgcactacttgtgat

SEQ ID NO: 211602 - DNA, 15 bp, Homo sapiens
ttgcactacttgtga

SEQ ID NO: 211603 - DNA, 15 bp, Homo sapiens
cttgcactacttgtg

SEQ ID NO: 211604 - DNA, 15 bp, Homo sapiens
tcttgcactacttgt

SEQ ID NO: 211605 - DNA, 15 bp, Homo sapiens
ttcttgcactacttg

SEQ ID NO: 211606 - DNA, 15 bp, Homo sapiens
tttcttgcactactt

SEQ ID NO: 211607 - DNA, 15 bp, Homo sapiens
gtttcttgcactact

SEQ ID NO: 211608 - DNA, 15 bp, Homo sapiens
tgtttcttgcactac

SEQ ID NO: 211609 - DNA, 15 bp, Homo sapiens
atgtttcttgcacta

SEQ ID NO: 211610 - DNA, 15 bp, Homo sapiens
aatgtttcttgcact

SEQ ID NO: 211611 - DNA, 15 bp, Homo sapiens
aaatgtttcttgcac

SEQ ID NO: 211612 - DNA, 15 bp, Homo sapiens
caaatgtttcttgca

SEQ ID NO: 211613 - DNA, 15 bp, Homo sapiens
gcaaatgtttcttgc

SEQ ID NO: 211614 - DNA, 15 bp, Homo sapiens
agcaaatgtttcttg

SEQ ID NO: 211615 - DNA, 15 bp, Homo sapiens
cagcaaatgtttctt

SEQ ID NO: 211616 - DNA, 15 bp, Homo sapiens
ccagcaaatgtttct

SEQ ID NO: 211617 - DNA, 15 bp, Homo sapiens
tccagcaaatgtttc

SEQ ID NO: 211618 - DNA, 15 bp, Homo sapiens
gtccagcaaatgttt

SEQ ID NO: 211619 - DNA, 15 bp, Homo sapiens
tgtccagcaaatgtt

SEQ ID NO: 211620 - DNA, 15 bp, Homo sapiens
gtgtccagcaaatgt

SEQ ID NO: 211621 - DNA, 15 bp, Homo sapiens
ggtgtccagcaaatg

SEQ ID NO: 211622 - DNA, 15 bp, Homo sapiens
aggtgtccagcaaat

SEQ ID NO: 211623 - DNA, 15 bp, Homo sapiens
taggtgtccagcaaa

SEQ ID NO: 211624 - DNA, 15 bp, Homo sapiens
gtaggtgtccagcaa

SEQ ID NO: 211625 - DNA, 15 bp, Homo sapiens
agtaggtgtccagca

SEQ ID NO: 211626 - DNA, 15 bp, Homo sapiens
cagtaggtgtccagc

SEQ ID NO: 211627 - DNA, 15 bp, Homo sapiens
tcagtaggtgtccag

SEQ ID NO: 211628 - DNA, 15 bp, Homo sapiens
ctcagtaggtgtcca

SEQ ID NO: 211629 - DNA, 15 bp, Homo sapiens
actcagtaggtgtcc

SEQ ID NO: 211630 - DNA, 15 bp, Homo sapiens
cactcagtaggtgtc

SEQ ID NO: 211631 - DNA, 15 bp, Homo sapiens
gcactcagtaggtgt

SEQ ID NO: 211632 - DNA, 15 bp, Homo sapiens
agcactcagtaggtg

SEQ ID NO: 211633 - DNA, 15 bp, Homo sapiens
cagcactcagtaggt

SEQ ID NO: 211634 - DNA, 15 bp, Homo sapiens
ccagcactcagtagg

SEQ ID NO: 211635 - DNA, 15 bp, Homo sapiens
cccagcactcagtag

SEQ ID NO: 211636 - DNA, 15 bp, Homo sapiens
tcccagcactcagta

SEQ ID NO: 211637 - DNA, 15 bp, Homo sapiens
ttcccagcactcagt

SEQ ID NO: 211638 - DNA, 15 bp, Homo sapiens
gttcccagcactcag

SEQ ID NO: 211639 - DNA, 15 bp, Homo sapiens
agttcccagcactca

SEQ ID NO: 211640 - DNA, 15 bp, Homo sapiens
cagttcccagcactc

SEQ ID NO: 211641 - DNA, 15 bp, Homo sapiens
ccagttcccagcact

SEQ ID NO: 211642 - DNA, 15 bp, Homo sapiens
cccagttcccagcac

SEQ ID NO: 211643 - DNA, 15 bp, Homo sapiens
acccagttcccagca

SEQ ID NO: 211644 - DNA, 15 bp, Homo sapiens
tacccagttcccagc

SEQ ID NO: 211645 - DNA, 15 bp, Homo sapiens
gtacccagttcccag

SEQ ID NO: 211646 - DNA, 15 bp, Homo sapiens
agtacccagttccca

SEQ ID NO: 211647 - DNA, 15 bp, Homo sapiens
gagtacccagttccc

SEQ ID NO: 211648 - DNA, 15 bp, Homo sapiens
tgagtacccagttcc

SEQ ID NO: 211649 - DNA, 15 bp, Homo sapiens
ttgagtacccagttc

SEQ ID NO: 211650 - DNA, 15 bp, Homo sapiens
gttgagtacccagtt

SEQ ID NO: 211651 - DNA, 15 bp, Homo sapiens
tgttgagtacccagt

SEQ ID NO: 211652 - DNA, 15 bp, Homo sapiens
gtgttgagtacccag

SEQ ID NO: 211653 - DNA, 15 bp, Homo sapiens
tgtgttgagtaccca

SEQ ID NO: 211654 - DNA, 15 bp, Homo sapiens
atgtgttgagtaccc

SEQ ID NO: 211655 - DNA, 15 bp, Homo sapiens
gatgtgttgagtacc

SEQ ID NO: 211656 - DNA, 15 bp, Homo sapiens
agatgtgttgagtac

SEQ ID NO: 211657 - DNA, 15 bp, Homo sapiens
gagatgtgttgagta

SEQ ID NO: 211658 - DNA, 15 bp, Homo sapiens
agagatgtgttgagt

SEQ ID NO: 211659 - DNA, 15 bp, Homo sapiens
cagagatgtgttgag

SEQ ID NO: 211660 - DNA, 15 bp, Homo sapiens
acagagatgtgttga

SEQ ID NO: 211661 - DNA, 15 bp, Homo sapiens
cacagagatgtgttg

SEQ ID NO: 211662 - DNA, 15 bp, Homo sapiens
tcacagagatgtgtt

SEQ ID NO: 211663 - DNA, 15 bp, Homo sapiens
ctcacagagatgtgt

SEQ ID NO: 211664 - DNA, 15 bp, Homo sapiens
cctcacagagatgtg

SEQ ID NO: 211665 - DNA, 15 bp, Homo sapiens
tcctcacagagatgt

SEQ ID NO: 211666 - DNA, 15 bp, Homo sapiens
ttcctcacagagatg

SEQ ID NO: 211667 - DNA, 15 bp, Homo sapiens
cttcctcacagagat

SEQ ID NO: 211668 - DNA, 15 bp, Homo sapiens
ccttcctcacagaga

SEQ ID NO: 211669 - DNA, 15 bp, Homo sapiens
cccttcctcacagag

SEQ ID NO: 211670 - DNA, 15 bp, Homo sapiens
tcccttcctcacaga

SEQ ID NO: 211671 - DNA, 15 bp, Homo sapiens
gtcccttcctcacag

SEQ ID NO: 211672 - DNA, 15 bp, Homo sapiens
agtcccttcctcaca

SEQ ID NO: 211673 - DNA, 15 bp, Homo sapiens
tagtcccttcctcac

SEQ ID NO: 211674 - DNA, 15 bp, Homo sapiens
atagtcccttcctca

SEQ ID NO: 211675 - DNA, 15 bp, Homo sapiens
aatagtcccttcctc

SEQ ID NO: 211676 - DNA, 15 bp, Homo sapiens
taatagtcccttcct

SEQ ID NO: 211677 - DNA, 15 bp, Homo sapiens
ataatagtcccttcc

SEQ ID NO: 211678 - DNA, 15 bp, Homo sapiens
gataatagtcccttc

SEQ ID NO: 211679 - DNA, 15 bp, Homo sapiens
tgataatagtccctt

SEQ ID NO: 211680 - DNA, 15 bp, Homo sapiens
atgataatagtccct

SEQ ID NO: 211681 - DNA, 15 bp, Homo sapiens
aatgataatagtccc

SEQ ID NO: 211682 - DNA, 15 bp, Homo sapiens
aaatgataatagtcc

SEQ ID NO: 211683 - DNA, 15 bp, Homo sapiens
gaaatgataatagtc

SEQ ID NO: 211684 - DNA, 15 bp, Homo sapiens
agaaatgataatagt

SEQ ID NO: 211685 - DNA, 15 bp, Homo sapiens
tagaaatgataatag

SEQ ID NO: 211686 - DNA, 15 bp, Homo sapiens
atagaaatgataata

SEQ ID NO: 211687 - DNA, 15 bp, Homo sapiens
aatagaaatgataat

SEQ ID NO: 211688 - DNA, 15 bp, Homo sapiens
aaatagaaatgataa

SEQ ID NO: 211689 - DNA, 15 bp, Homo sapiens
aaaatagaaatgata

SEQ ID NO: 211690 - DNA, 15 bp, Homo sapiens
gaaaatagaaatgat

SEQ ID NO: 211691 - DNA, 15 bp, Homo sapiens
agaaaatagaaatga

SEQ ID NO: 211692 - DNA, 15 bp, Homo sapiens
aagaaaatagaaatg

SEQ ID NO: 211693 - DNA, 15 bp, Homo sapiens
caagaaaatagaaat

SEQ ID NO: 211694 - DNA, 15 bp, Homo sapiens
tcaagaaaatagaaa

SEQ ID NO: 211695 - DNA, 15 bp, Homo sapiens
atcaagaaaatagaa

SEQ ID NO: 211696 - DNA, 15 bp, Homo sapiens
catcaagaaaataga

SEQ ID NO: 211697 - DNA, 15 bp, Homo sapiens
tcatcaagaaaatag

SEQ ID NO: 211698 - DNA, 15 bp, Homo sapiens
ctcatcaagaaaata

SEQ ID NO: 211699 - DNA, 15 bp, Homo sapiens
cctcatcaagaaaat

SEQ ID NO: 211700 - DNA, 15 bp, Homo sapiens
tcctcatcaagaaaa

SEQ ID NO: 211701 - DNA, 15 bp, Homo sapiens
ttcctcatcaagaaa

SEQ ID NO: 211702 - DNA, 15 bp, Homo sapiens
tttcctcatcaagaa

SEQ ID NO: 211703 - DNA, 15 bp, Homo sapiens
ctttcctcatcaaga

SEQ ID NO: 211704 - DNA, 15 bp, Homo sapiens
cctttcctcatcaag

SEQ ID NO: 211705 - DNA, 15 bp, Homo sapiens
ccctttcctcatcaa

SEQ ID NO: 211706 - DNA, 15 bp, Homo sapiens
tccctttcctcatca

SEQ ID NO: 211707 - DNA, 15 bp, Homo sapiens
ctccctttcctcatc

SEQ ID NO: 211708 - DNA, 15 bp, Homo sapiens
cctccctttcctcat

SEQ ID NO: 211709 - DNA, 15 bp, Homo sapiens
gcctccctttcctca

SEQ ID NO: 211710 - DNA, 15 bp, Homo sapiens
tgcctccctttcctc

SEQ ID NO: 211711 - DNA, 15 bp, Homo sapiens
gtgcctccctttcct

SEQ ID NO: 211712 - DNA, 15 bp, Homo sapiens
agtgcctccctttcc

SEQ ID NO: 211713 - DNA, 15 bp, Homo sapiens
cagtgcctccctttc

SEQ ID NO: 211714 - DNA, 15 bp, Homo sapiens
acagtgcctcccttt

SEQ ID NO: 211715 - DNA, 15 bp, Homo sapiens
tacagtgcctccctt

SEQ ID NO: 211716 - DNA, 15 bp, Homo sapiens
atacagtgcctccct

SEQ ID NO: 211717 - DNA, 15 bp, Homo sapiens
aatacagtgcctccc

SEQ ID NO: 211718 - DNA, 15 bp, Homo sapiens
taatacagtgcctcc

SEQ ID NO: 211719 - DNA, 15 bp, Homo sapiens
ctaatacagtgcctc

SEQ ID NO: 211720 - DNA, 15 bp, Homo sapiens
actaatacagtgcct

SEQ ID NO: 211721 - DNA, 15 bp, Homo sapiens
aactaatacagtgcc

SEQ ID NO: 211722 - DNA, 15 bp, Homo sapiens
aaactaatacagtgc

SEQ ID NO: 211723 - DNA, 15 bp, Homo sapiens
caaactaatacagtg

SEQ ID NO: 211724 - DNA, 15 bp, Homo sapiens
gcaaactaatacagt

SEQ ID NO: 211725 - DNA, 15 bp, Homo sapiens
agcaaactaatacag

SEQ ID NO: 211726 - DNA, 15 bp, Homo sapiens
tagcaaactaataca

SEQ ID NO: 211727 - DNA, 15 bp, Homo sapiens
ctagcaaactaatac

SEQ ID NO: 211728 - DNA, 15 bp, Homo sapiens
cctagcaaactaata

SEQ ID NO: 211729 - DNA, 15 bp, Homo sapiens
gcctagcaaactaat

SEQ ID NO: 211730 - DNA, 15 bp, Homo sapiens
ggcctagcaaactaa

SEQ ID NO: 211731 - DNA, 15 bp, Homo sapiens
aggcctagcaaacta

SEQ ID NO: 211732 - DNA, 15 bp, Homo sapiens
caggcctagcaaact

SEQ ID NO: 211733 - DNA, 15 bp, Homo sapiens
gcaggcctagcaaac

SEQ ID NO: 211734 - DNA, 15 bp, Homo sapiens
agcaggcctagcaaa

SEQ ID NO: 211735 - DNA, 15 bp, Homo sapiens
cagcaggcctagcaa

SEQ ID NO: 211736 - DNA, 15 bp, Homo sapiens
acagcaggcctagca

SEQ ID NO: 211737 - DNA, 15 bp, Homo sapiens
cacagcaggcctagc

SEQ ID NO: 211738 - DNA, 15 bp, Homo sapiens
tcacagcaggcctag

SEQ ID NO: 211739 - DNA, 15 bp, Homo sapiens
gtcacagcaggccta

SEQ ID NO: 211740 - DNA, 15 bp, Homo sapiens
tgtcacagcaggcct

SEQ ID NO: 211741 - DNA, 15 bp, Homo sapiens
ttgtcacagcaggcc

SEQ ID NO: 211742 - DNA, 15 bp, Homo sapiens
tttgtcacagcaggc

SEQ ID NO: 211743 - DNA, 15 bp, Homo sapiens
ctttgtcacagcagg

SEQ ID NO: 211744 - DNA, 15 bp, Homo sapiens
actttgtcacagcag

SEQ ID NO: 211745 - DNA, 15 bp, Homo sapiens
tactttgtcacagca

SEQ ID NO: 211746 - DNA, 15 bp, Homo sapiens
gtactttgtcacagc

SEQ ID NO: 211747 - DNA, 15 bp, Homo sapiens
agtactttgtcacag

SEQ ID NO: 211748 - DNA, 15 bp, Homo sapiens
tagtactttgtcaca

SEQ ID NO: 211749 - DNA, 15 bp, Homo sapiens
gtagtactttgtcac

SEQ ID NO: 211750 - DNA, 15 bp, Homo sapiens
tgtagtactttgtca

SEQ ID NO: 211751 - DNA, 15 bp, Homo sapiens
ctgtagtactttgtc

SEQ ID NO: 211752 - DNA, 15 bp, Homo sapiens
cctgtagtactttgt

SEQ ID NO: 211753 - DNA, 15 bp, Homo sapiens
gcctgtagtactttg

SEQ ID NO: 211754 - DNA, 15 bp, Homo sapiens
ggcctgtagtacttt

SEQ ID NO: 211755 - DNA, 15 bp, Homo sapiens
tggcctgtagtactt

SEQ ID NO: 211756 - DNA, 15 bp, Homo sapiens
ctggcctgtagtact

SEQ ID NO: 211757 - DNA, 15 bp, Homo sapiens
cctggcctgtagtac

SEQ ID NO: 211758 - DNA, 15 bp, Homo sapiens
acctggcctgtagta

SEQ ID NO: 211759 - DNA, 15 bp, Homo sapiens
cacctggcctgtagt

SEQ ID NO: 211760 - DNA, 15 bp, Homo sapiens
ccacctggcctgtag

SEQ ID NO: 211761 - DNA, 15 bp, Homo sapiens
gccacctggcctgta

SEQ ID NO: 211762 - DNA, 15 bp, Homo sapiens
agccacctggcctgt

SEQ ID NO: 211763 - DNA, 15 bp, Homo sapiens
aagccacctggcctg

SEQ ID NO: 211764 - DNA, 15 bp, Homo sapiens
taagccacctggcct

SEQ ID NO: 211765 - DNA, 15 bp, Homo sapiens
gtaagccacctggcc

SEQ ID NO: 211766 - DNA, 15 bp, Homo sapiens
tgtaagccacctggc

SEQ ID NO: 211767 - DNA, 15 bp, Homo sapiens
gtgtaagccacctgg

SEQ ID NO: 211768 - DNA, 15 bp, Homo sapiens
tgtgtaagccacctg

SEQ ID NO: 211769 - DNA, 15 bp, Homo sapiens
ttgtgtaagccacct

SEQ ID NO: 211770 - DNA, 15 bp, Homo sapiens
gttgtgtaagccacc

SEQ ID NO: 211771 - DNA, 15 bp, Homo sapiens
tgttgtgtaagccac

SEQ ID NO: 211772 - DNA, 15 bp, Homo sapiens
ctgttgtgtaagcca

SEQ ID NO: 211773 - DNA, 15 bp, Homo sapiens
tctgttgtgtaagcc

SEQ ID NO: 211774 - DNA, 15 bp, Homo sapiens
ttctgttgtgtaagc

SEQ ID NO: 211775 - DNA, 15 bp, Homo sapiens
tttctgttgtgtaag

SEQ ID NO: 211776 - DNA, 15 bp, Homo sapiens
atttctgttgtgtaa

SEQ ID NO: 211777 - DNA, 15 bp, Homo sapiens
aatttctgttgtgta

SEQ ID NO: 211778 - DNA, 15 bp, Homo sapiens
taatttctgttgtgt

SEQ ID NO: 211779 - DNA, 15 bp, Homo sapiens
ttaatttctgttgtg

SEQ ID NO: 211780 - DNA, 15 bp, Homo sapiens
attaatttctgttgt

SEQ ID NO: 211781 - DNA, 15 bp, Homo sapiens
aattaatttctgttg

SEQ ID NO: 211782 - DNA, 15 bp, Homo sapiens
aaattaatttctgtt

SEQ ID NO: 211783 - DNA, 15 bp, Homo sapiens
aaaattaatttctgt

SEQ ID NO: 211784 - DNA, 15 bp, Homo sapiens
gaaaattaatttctg

SEQ ID NO: 211785 - DNA, 15 bp, Homo sapiens
agaaaattaatttct

SEQ ID NO: 211786 - DNA, 15 bp, Homo sapiens
aagaaaattaatttc

SEQ ID NO: 211787 - DNA, 15 bp, Homo sapiens
taagaaaattaattt

SEQ ID NO: 211788 - DNA, 15 bp, Homo sapiens
gtaagaaaattaatt

SEQ ID NO: 211789 - DNA, 15 bp, Homo sapiens
tgtaagaaaattaat

SEQ ID NO: 211790 - DNA, 15 bp, Homo sapiens
ctgtaagaaaattaa

SEQ ID NO: 211791 - DNA, 15 bp, Homo sapiens
actgtaagaaaatta

SEQ ID NO: 211792 - DNA, 15 bp, Homo sapiens
aactgtaagaaaatt

SEQ ID NO: 211793 - DNA, 15 bp, Homo sapiens
gaactgtaagaaaat

SEQ ID NO: 211794 - DNA, 15 bp, Homo sapiens
agaactgtaagaaaa

SEQ ID NO: 211795 - DNA, 15 bp, Homo sapiens
tagaactgtaagaaa

SEQ ID NO: 211796 - DNA, 15 bp, Homo sapiens
ctagaactgtaagaa

SEQ ID NO: 211797 - DNA, 15 bp, Homo sapiens
tctagaactgtaaga

SEQ ID NO: 211798 - DNA, 15 bp, Homo sapiens
ctctagaactgtaag

SEQ ID NO: 211799 - DNA, 15 bp, Homo sapiens
cctctagaactgtaa

SEQ ID NO: 211800 - DNA, 15 bp, Homo sapiens
gcctctagaactgta

SEQ ID NO: 211801 - DNA, 15 bp, Homo sapiens
ggcctctagaactgt

SEQ ID NO: 211802 - DNA, 15 bp, Homo sapiens
tggcctctagaactg

SEQ ID NO: 211803 - DNA, 15 bp, Homo sapiens
ctggcctctagaact

SEQ ID NO: 211804 - DNA, 15 bp, Homo sapiens
tctggcctctagaac

SEQ ID NO: 211805 - DNA, 15 bp, Homo sapiens
ttctggcctctagaa

SEQ ID NO: 211806 - DNA, 15 bp, Homo sapiens
cttctggcctctaga

SEQ ID NO: 211807 - DNA, 15 bp, Homo sapiens
acttctggcctctag

SEQ ID NO: 211808 - DNA, 15 bp, Homo sapiens
gacttctggcctcta

SEQ ID NO: 211809 - DNA, 15 bp, Homo sapiens
agacttctggcctct

SEQ ID NO: 211810 - DNA, 15 bp, Homo sapiens
cagacttctggcctc

SEQ ID NO: 211811 - DNA, 15 bp, Homo sapiens
tcagacttctggcct

SEQ ID NO: 211812 - DNA, 15 bp, Homo sapiens
ctcagacttctggcc

SEQ ID NO: 211813 - DNA, 15 bp, Homo sapiens
tctcagacttctggc

SEQ ID NO: 211814 - DNA, 15 bp, Homo sapiens
atctcagacttctgg

SEQ ID NO: 211815 - DNA, 15 bp, Homo sapiens
gatctcagacttctg

SEQ ID NO: 211816 - DNA, 15 bp, Homo sapiens
tgatctcagacttct

SEQ ID NO: 211817 - DNA, 15 bp, Homo sapiens
ttgatctcagacttc

SEQ ID NO: 211818 - DNA, 15 bp, Homo sapiens
cttgatctcagactt

SEQ ID NO: 211819 - DNA, 15 bp, Homo sapiens
ccttgatctcagact

SEQ ID NO: 211820 - DNA, 15 bp, Homo sapiens
accttgatctcagac

SEQ ID NO: 211821 - DNA, 15 bp, Homo sapiens
caccttgatctcaga

SEQ ID NO: 211822 - DNA, 15 bp, Homo sapiens
acaccttgatctcag

SEQ ID NO: 211823 - DNA, 15 bp, Homo sapiens
aacaccttgatctca

SEQ ID NO: 211824 - DNA, 15 bp, Homo sapiens
caacaccttgatctc

SEQ ID NO: 211825 - DNA, 15 bp, Homo sapiens
ccaacaccttgatct

SEQ ID NO: 211826 - DNA, 15 bp, Homo sapiens
gccaacaccttgatc

SEQ ID NO: 211827 - DNA, 15 bp, Homo sapiens
tgccaacaccttgat

SEQ ID NO: 211828 - DNA, 15 bp, Homo sapiens
ctgccaacaccttga

SEQ ID NO: 211829 - DNA, 15 bp, Homo sapiens
cctgccaacaccttg

SEQ ID NO: 211830 - DNA, 15 bp, Homo sapiens
ccctgccaacacctt

SEQ ID NO: 211831 - DNA, 15 bp, Homo sapiens
gccctgccaacacct

SEQ ID NO: 211832 - DNA, 15 bp, Homo sapiens
agccctgccaacacc

SEQ ID NO: 211833 - DNA, 15 bp, Homo sapiens
cagccctgccaacac

SEQ ID NO: 211834 - DNA, 15 bp, Homo sapiens
ccagccctgccaaca

SEQ ID NO: 211835 - DNA, 15 bp, Homo sapiens
accagccctgccaac

SEQ ID NO: 211836 - DNA, 15 bp, Homo sapiens
aaccagccctgccaa

SEQ ID NO: 211837 - DNA, 15 bp, Homo sapiens
gaaccagccctgcca

SEQ ID NO: 211838 - DNA, 15 bp, Homo sapiens
ggaaccagccctgcc

SEQ ID NO: 211839 - DNA, 15 bp, Homo sapiens
gagaaggaaccagcc

SEQ ID NO: 211840 - DNA, 15 bp, Homo sapiens
agagaaggaaccagc

SEQ ID NO: 211841 - DNA, 15 bp, Homo sapiens
cagagaaggaaccag

SEQ ID NO: 211842 - DNA, 15 bp, Homo sapiens
ccagagaaggaacca

SEQ ID NO: 211843 - DNA, 15 bp, Homo sapiens
cccagagaaggaacc

SEQ ID NO: 211844 - DNA, 15 bp, Homo sapiens
acccagagaaggaac

SEQ ID NO: 211845 - DNA, 15 bp, Homo sapiens
aacccagagaaggaa

SEQ ID NO: 211846 - DNA, 15 bp, Homo sapiens
caacccagagaagga

SEQ ID NO: 211847 - DNA, 15 bp, Homo sapiens
acaacccagagaagg

SEQ ID NO: 211848 - DNA, 15 bp, Homo sapiens
cacaacccagagaag

SEQ ID NO: 211849 - DNA, 15 bp, Homo sapiens
tcacaacccagagaa

SEQ ID NO: 211850 - DNA, 15 bp, Homo sapiens
ttcacaacccagaga

SEQ ID NO: 211851 - DNA, 15 bp, Homo sapiens
cttcacaacccagag

SEQ ID NO: 211852 - DNA, 15 bp, Homo sapiens
ccttcacaacccaga

SEQ ID NO: 211853 - DNA, 15 bp, Homo sapiens
tccttcacaacccag

SEQ ID NO: 211854 - DNA, 15 bp, Homo sapiens
ttccttcacaaccca

SEQ ID NO: 211855 - DNA, 15 bp, Homo sapiens
cttccttcacaaccc

SEQ ID NO: 211856 - DNA, 15 bp, Homo sapiens
ccttccttcacaacc

SEQ ID NO: 211857 - DNA, 15 bp, Homo sapiens
tccttccttcacaac

SEQ ID NO: 211858 - DNA, 15 bp, Homo sapiens
atccttccttcacaa

SEQ ID NO: 211859 - DNA, 15 bp, Homo sapiens
gatccttccttcaca

SEQ ID NO: 211860 - DNA, 15 bp, Homo sapiens
cgatccttccttcac

SEQ ID NO: 211861 - DNA, 15 bp, Homo sapiens
ccgatccttccttca

SEQ ID NO: 211862 - DNA, 15 bp, Homo sapiens
accgatccttccttc

SEQ ID NO: 211863 - DNA, 15 bp, Homo sapiens
aaccgatccttcctt

SEQ ID NO: 211864 - DNA, 15 bp, Homo sapiens
gaaccgatccttcct

SEQ ID NO: 211865 - DNA, 15 bp, Homo sapiens
ggaaccgatccttcc

SEQ ID NO: 211866 - DNA, 15 bp, Homo sapiens
tggaaccgatccttc

SEQ ID NO: 211867 - DNA, 15 bp, Homo sapiens
ctggaaccgatcctt

SEQ ID NO: 211868 - DNA, 15 bp, Homo sapiens
cctggaaccgatcct

SEQ ID NO: 211869 - DNA, 15 bp, Homo sapiens
tcctggaaccgatcc

SEQ ID NO: 211870 - DNA, 15 bp, Homo sapiens
gtcctggaaccgatc

SEQ ID NO: 211871 - DNA, 15 bp, Homo sapiens
agtcctggaaccgat

SEQ ID NO: 211872 - DNA, 15 bp, Homo sapiens
gagtcctggaaccga

SEQ ID NO: 211873 - DNA, 15 bp, Homo sapiens
agagtcctggaaccg

SEQ ID NO: 211874 - DNA, 15 bp, Homo sapiens
gagagtcctggaacc

SEQ ID NO: 211875 - DNA, 15 bp, Homo sapiens
agagagtcctggaac

SEQ ID NO: 211876 - DNA, 15 bp, Homo sapiens
gagagagtcctggaa

SEQ ID NO: 211877 - DNA, 15 bp, Homo sapiens
tgagagagtcctgga

SEQ ID NO: 211878 - DNA, 15 bp, Homo sapiens
atgagagagtcctgg

SEQ ID NO: 211879 - DNA, 15 bp, Homo sapiens
aatgagagagtcctg

SEQ ID NO: 211880 - DNA, 15 bp, Homo sapiens
caatgagagagtcct

SEQ ID NO: 211881 - DNA, 15 bp, Homo sapiens
gcaatgagagagtcc

SEQ ID NO: 211882 - DNA, 15 bp, Homo sapiens
ggcaatgagagagtc

SEQ ID NO: 211883 - DNA, 15 bp, Homo sapiens
aggcaatgagagagt

SEQ ID NO: 211884 - DNA, 15 bp, Homo sapiens
aaggcaatgagagag

SEQ ID NO: 211885 - DNA, 15 bp, Homo sapiens
caaggcaatgagaga

SEQ ID NO: 211886 - DNA, 15 bp, Homo sapiens
acaaggcaatgagag

SEQ ID NO: 211887 - DNA, 15 bp, Homo sapiens
cacaaggcaatgaga

SEQ ID NO: 211888 - DNA, 15 bp, Homo sapiens
ccacaaggcaatgag

SEQ ID NO: 211889 - DNA, 15 bp, Homo sapiens
tccacaaggcaatga

SEQ ID NO: 211890 - DNA, 15 bp, Homo sapiens
ttccacaaggcaatg

SEQ ID NO: 211891 - DNA, 15 bp, Homo sapiens
cttccacaaggcaat

SEQ ID NO: 211892 - DNA, 15 bp, Homo sapiens
tcttccacaaggcaa

SEQ ID NO: 211893 - DNA, 15 bp, Homo sapiens
gtcttccacaaggca

SEQ ID NO: 211894 - DNA, 15 bp, Homo sapiens
agtcttccacaaggc

SEQ ID NO: 211895 - DNA, 15 bp, Homo sapiens
cagtcttccacaagg

SEQ ID NO: 211896 - DNA, 15 bp, Homo sapiens
gcagtcttccacaag

SEQ ID NO: 211897 - DNA, 15 bp, Homo sapiens
ggcagtcttccacaa

SEQ ID NO: 211898 - DNA, 15 bp, Homo sapiens
aggcagtcttccaca

SEQ ID NO: 211899 - DNA, 15 bp, Homo sapiens
aaggcagtcttccac

SEQ ID NO: 211900 - DNA, 15 bp, Homo sapiens
gaaggcagtcttcca

SEQ ID NO: 211901 - DNA, 15 bp, Homo sapiens
agaaggcagtcttcc

SEQ ID NO: 211902 - DNA, 15 bp, Homo sapiens
aagaaggcagtcttc

SEQ ID NO: 211903 - DNA, 15 bp, Homo sapiens
gaagaaggcagtctt

SEQ ID NO: 211904 - DNA, 15 bp, Homo sapiens
agaagaaggcagtct

SEQ ID NO: 211905 - DNA, 15 bp, Homo sapiens
gagaagaaggcagtc

SEQ ID NO: 211906 - DNA, 15 bp, Homo sapiens
ggagaagaaggcagt

SEQ ID NO: 211907 - DNA, 15 bp, Homo sapiens
gggagaagaaggcag

SEQ ID NO: 211908 - DNA, 15 bp, Homo sapiens
agggagaagaaggca

SEQ ID NO: 211909 - DNA, 15 bp, Homo sapiens
cagggagaagaaggc

SEQ ID NO: 211910 - DNA, 15 bp, Homo sapiens
acagggagaagaagg

SEQ ID NO: 211911 - DNA, 15 bp, Homo sapiens
cacagggagaagaag

SEQ ID NO: 211912 - DNA, 15 bp, Homo sapiens
acacagggagaagaa

SEQ ID NO: 211913 - DNA, 15 bp, Homo sapiens
tacacagggagaaga

SEQ ID NO: 211914 - DNA, 15 bp, Homo sapiens
atacacagggagaag

SEQ ID NO: 211915 - DNA, 15 bp, Homo sapiens
catacacagggagaa

SEQ ID NO: 211916 - DNA, 15 bp, Homo sapiens
acatacacagggaga

SEQ ID NO: 211917 - DNA, 15 bp, Homo sapiens
tacatacacagggag

SEQ ID NO: 211918 - DNA, 15 bp, Homo sapiens
atacatacacaggga

SEQ ID NO: 211919 - DNA, 15 bp, Homo sapiens
gatacatacacaggg

SEQ ID NO: 211920 - DNA, 15 bp, Homo sapiens
tgatacatacacagg

SEQ ID NO: 211921 - DNA, 15 bp, Homo sapiens
atgatacatacacag

SEQ ID NO: 211922 - DNA, 15 bp, Homo sapiens
gatgatacatacaca

SEQ ID NO: 211923 - DNA, 15 bp, Homo sapiens
agatgatacatacac

SEQ ID NO: 211924 - DNA, 15 bp, Homo sapiens
gagatgatacataca

SEQ ID NO: 211925 - DNA, 15 bp, Homo sapiens
ggagatgatacatac

SEQ ID NO: 211926 - DNA, 15 bp, Homo sapiens
gggagatgatacata

SEQ ID NO: 211927 - DNA, 15 bp, Homo sapiens
agggagatgatacat

SEQ ID NO: 211928 - DNA, 15 bp, Homo sapiens
gagggagatgataca

SEQ ID NO: 211929 - DNA, 15 bp, Homo sapiens
ggagggagatgatac

SEQ ID NO: 211930 - DNA, 15 bp, Homo sapiens
aggagggagatgata

SEQ ID NO: 211931 - DNA, 15 bp, Homo sapiens
caggagggagatgat

SEQ ID NO: 211932 - DNA, 15 bp, Homo sapiens
acaggagggagatga

SEQ ID NO: 211933 - DNA, 15 bp, Homo sapiens
tacaggagggagatg

SEQ ID NO: 211934 - DNA, 15 bp, Homo sapiens
atacaggagggagat

SEQ ID NO: 211935 - DNA, 15 bp, Homo sapiens
tatacaggagggaga

SEQ ID NO: 211936 - DNA, 15 bp, Homo sapiens
atatacaggagggag

SEQ ID NO: 211937 - DNA, 15 bp, Homo sapiens
catatacaggaggga

SEQ ID NO: 211938 - DNA, 15 bp, Homo sapiens
acatatacaggaggg

SEQ ID NO: 211939 - DNA, 15 bp, Homo sapiens
gacatatacaggagg

SEQ ID NO: 211940 - DNA, 15 bp, Homo sapiens
agacatatacaggag

SEQ ID NO: 211941 - DNA, 15 bp, Homo sapiens
cagacatatacagga

SEQ ID NO: 211942 - DNA, 15 bp, Homo sapiens
acagacatatacagg

SEQ ID NO: 211943 - DNA, 15 bp, Homo sapiens
cacagacatatacag

SEQ ID NO: 211944 - DNA, 15 bp, Homo sapiens
acacagacatataca

SEQ ID NO: 211945 - DNA, 15 bp, Homo sapiens
gacacagacatatac

SEQ ID NO: 211946 - DNA, 15 bp, Homo sapiens
ggacacagacatata

SEQ ID NO: 211947 - DNA, 15 bp, Homo sapiens
aggacacagacatat

SEQ ID NO: 211948 - DNA, 15 bp, Homo sapiens
taggacacagacata

SEQ ID NO: 211949 - DNA, 15 bp, Homo sapiens
ttaggacacagacat

SEQ ID NO: 211950 - DNA, 15 bp, Homo sapiens
attaggacacagaca

SEQ ID NO: 211951 - DNA, 15 bp, Homo sapiens
aattaggacacagac

SEQ ID NO: 211952 - DNA, 15 bp, Homo sapiens
aaattaggacacaga

SEQ ID NO: 211953 - DNA, 15 bp, Homo sapiens
gaaattaggacacag

SEQ ID NO: 211954 - DNA, 15 bp, Homo sapiens
ggaaattaggacaca

SEQ ID NO: 211955 - DNA, 15 bp, Homo sapiens
aggaaattaggacac

SEQ ID NO: 211956 - DNA, 15 bp, Homo sapiens
gaggaaattaggaca

SEQ ID NO: 211957 - DNA, 15 bp, Homo sapiens
agaggaaattaggac

SEQ ID NO: 211958 - DNA, 15 bp, Homo sapiens
aagaggaaattagga

SEQ ID NO: 211959 - DNA, 15 bp, Homo sapiens
gaagaggaaattagg

SEQ ID NO: 211960 - DNA, 15 bp, Homo sapiens
agaagaggaaattag

SEQ ID NO: 211961 - DNA, 15 bp, Homo sapiens
aagaagaggaaatta

SEQ ID NO: 211962 - DNA, 15 bp, Homo sapiens
gaagaagaggaaatt

SEQ ID NO: 211963 - DNA, 15 bp, Homo sapiens
agaagaagaggaaat

SEQ ID NO: 211964 - DNA, 15 bp, Homo sapiens
tagaagaagaggaaa

SEQ ID NO: 211965 - DNA, 15 bp, Homo sapiens
ttagaagaagaggaa

SEQ ID NO: 211966 - DNA, 15 bp, Homo sapiens
cttagaagaagagga

SEQ ID NO: 211967 - DNA, 15 bp, Homo sapiens
ccttagaagaagagg

SEQ ID NO: 211968 - DNA, 15 bp, Homo sapiens
tccttagaagaagag

SEQ ID NO: 211969 - DNA, 15 bp, Homo sapiens
gtccttagaagaaga

SEQ ID NO: 211970 - DNA, 15 bp, Homo sapiens
tgtccttagaagaag

SEQ ID NO: 211971 - DNA, 15 bp, Homo sapiens
gtgtccttagaagaa

SEQ ID NO: 211972 - DNA, 15 bp, Homo sapiens
ggtgtccttagaaga

SEQ ID NO: 211973 - DNA, 15 bp, Homo sapiens
tggtgtccttagaag

SEQ ID NO: 211974 - DNA, 15 bp, Homo sapiens
ctggtgtccttagaa

SEQ ID NO: 211975 - DNA, 15 bp, Homo sapiens
actggtgtccttaga

SEQ ID NO: 211976 - DNA, 15 bp, Homo sapiens
gactggtgtccttag

SEQ ID NO: 211977 - DNA, 15 bp, Homo sapiens
tgactggtgtcctta

SEQ ID NO: 211978 - DNA, 15 bp, Homo sapiens
atgactggtgtcctt

SEQ ID NO: 211979 - DNA, 15 bp, Homo sapiens
tatgactggtgtcct

SEQ ID NO: 211980 - DNA, 15 bp, Homo sapiens
atatgactggtgtcc

SEQ ID NO: 211981 - DNA, 15 bp, Homo sapiens
aatatgactggtgtc

SEQ ID NO: 211982 - DNA, 15 bp, Homo sapiens
caatatgactggtgt

SEQ ID NO: 211983 - DNA, 15 bp, Homo sapiens
gcaatatgactggtg

SEQ ID NO: 211984 - DNA, 15 bp, Homo sapiens
tgcaatatgactggt

SEQ ID NO: 211985 - DNA, 15 bp, Homo sapiens
atgcaatatgactgg

SEQ ID NO: 211986 - DNA, 15 bp, Homo sapiens
aatgcaatatgactg

SEQ ID NO: 211987 - DNA, 15 bp, Homo sapiens
taatgcaatatgact

SEQ ID NO: 211988 - DNA, 15 bp, Homo sapiens
ctaatgcaatatgac

SEQ ID NO: 211989 - DNA, 15 bp, Homo sapiens
cctaatgcaatatga

SEQ ID NO: 211990 - DNA, 15 bp, Homo sapiens
tcctaatgcaatatg

SEQ ID NO: 211991 - DNA, 15 bp, Homo sapiens
gtcctaatgcaatat

SEQ ID NO: 211992 - DNA, 15 bp, Homo sapiens
ggtcctaatgcaata

SEQ ID NO: 211993 - DNA, 15 bp, Homo sapiens
gggtcctaatgcaat

SEQ ID NO: 211994 - DNA, 15 bp, Homo sapiens
tgggtcctaatgcaa

SEQ ID NO: 211995 - DNA, 15 bp, Homo sapiens
gtgggtcctaatgca

SEQ ID NO: 211996 - DNA, 15 bp, Homo sapiens
ggtgggtcctaatgc

SEQ ID NO: 211997 - DNA, 15 bp, Homo sapiens
gggtgggtcctaatg

SEQ ID NO: 211998 - DNA, 15 bp, Homo sapiens
agggtgggtcctaat

SEQ ID NO: 211999 - DNA, 15 bp, Homo sapiens
tagggtgggtcctaa

SEQ ID NO: 212000 - DNA, 15 bp, Homo sapiens
ttagggtgggtccta

SEQ ID NO: 212001 - DNA, 15 bp, Homo sapiens
attagggtgggtcct

SEQ ID NO: 212002 - DNA, 15 bp, Homo sapiens
cattagggtgggtcc

SEQ ID NO: 212003 - DNA, 15 bp, Homo sapiens
tcattagggtgggtc

SEQ ID NO: 212004 - DNA, 15 bp, Homo sapiens
gtcattagggtgggt

SEQ ID NO: 212005 - DNA, 15 bp, Homo sapiens
attaaaatgaggtca

SEQ ID NO: 212006 - DNA, 15 bp, Homo sapiens
aattaaaatgaggtc

SEQ ID NO: 212007 - DNA, 15 bp, Homo sapiens
aaattaaaatgaggt

SEQ ID NO: 212008 - DNA, 15 bp, Homo sapiens
aaaattaaaatgagg

SEQ ID NO: 212009 - DNA, 15 bp, Homo sapiens
taaaattaaaatgag

SEQ ID NO: 212010 - DNA, 15 bp, Homo sapiens
ataaaattaaaatga

SEQ ID NO: 212011 - DNA, 15 bp, Homo sapiens
gataaaattaaaatg

SEQ ID NO: 212012 - DNA, 15 bp, Homo sapiens
tgataaaattaaaat

SEQ ID NO: 212013 - DNA, 15 bp, Homo sapiens
gtgataaaattaaaa

SEQ ID NO: 212014 - DNA, 15 bp, Homo sapiens
tgtgataaaattaaa

SEQ ID NO: 212015 - DNA, 15 bp, Homo sapiens
atgtgataaaattaa

SEQ ID NO: 212016 - DNA, 15 bp, Homo sapiens
gatgtgataaaatta

SEQ ID NO: 212017 - DNA, 15 bp, Homo sapiens
agatgtgataaaatt

SEQ ID NO: 212018 - DNA, 15 bp, Homo sapiens
aagatgtgataaaat

SEQ ID NO: 212019 - DNA, 15 bp, Homo sapiens
aaagatgtgataaaa

SEQ ID NO: 212020 - DNA, 15 bp, Homo sapiens
caaagatgtgataaa

SEQ ID NO: 212021 - DNA, 15 bp, Homo sapiens
tcaaagatgtgataa

SEQ ID NO: 212022 - DNA, 15 bp, Homo sapiens
ttcaaagatgtgata

SEQ ID NO: 212023 - DNA, 15 bp, Homo sapiens
attcaaagatgtgat

SEQ ID NO: 212024 - DNA, 15 bp, Homo sapiens
tattcaaagatgtga

SEQ ID NO: 212025 - DNA, 15 bp, Homo sapiens
gtattcaaagatgtg

SEQ ID NO: 212026 - DNA, 15 bp, Homo sapiens
ggtattcaaagatgt

SEQ ID NO: 212027 - DNA, 15 bp, Homo sapiens
gggtattcaaagatg

SEQ ID NO: 212028 - DNA, 15 bp, Homo sapiens
agggtattcaaagat

SEQ ID NO: 212029 - DNA, 15 bp, Homo sapiens
cagggtattcaaaga

SEQ ID NO: 212030 - DNA, 15 bp, Homo sapiens
acagggtattcaaag

SEQ ID NO: 212031 - DNA, 15 bp, Homo sapiens
gacagggtattcaaa

SEQ ID NO: 212032 - DNA, 15 bp, Homo sapiens
agacagggtattcaa

SEQ ID NO: 212033 - DNA, 15 bp, Homo sapiens
gagacagggtattca

SEQ ID NO: 212034 - DNA, 15 bp, Homo sapiens
agagacagggtattc

SEQ ID NO: 212035 - DNA, 15 bp, Homo sapiens
cagagacagggtatt

SEQ ID NO: 212036 - DNA, 15 bp, Homo sapiens
tcagagacagggtat

SEQ ID NO: 212037 - DNA, 15 bp, Homo sapiens
ttcagagacagggta

SEQ ID NO: 212038 - DNA, 15 bp, Homo sapiens
attcagagacagggt

SEQ ID NO: 212039 - DNA, 15 bp, Homo sapiens
tattcagagacaggg

SEQ ID NO: 212040 - DNA, 15 bp, Homo sapiens
gtattcagagacagg

SEQ ID NO: 212041 - DNA, 15 bp, Homo sapiens
tgtattcagagacag

SEQ ID NO: 212042 - DNA, 15 bp, Homo sapiens
atgtattcagagaca

SEQ ID NO: 212043 - DNA, 15 bp, Homo sapiens
gatgtattcagagac

SEQ ID NO: 212044 - DNA, 15 bp, Homo sapiens
ggatgtattcagaga

SEQ ID NO: 212045 - DNA, 15 bp, Homo sapiens
gggatgtattcagag

SEQ ID NO: 212046 - DNA, 15 bp, Homo sapiens
tgggatgtattcaga

SEQ ID NO: 212047 - DNA, 15 bp, Homo sapiens
atgggatgtattcag

SEQ ID NO: 212048 - DNA, 15 bp, Homo sapiens
aatgggatgtattca

SEQ ID NO: 212049 - DNA, 15 bp, Homo sapiens
gaatgggatgtattc

SEQ ID NO: 212050 - DNA, 15 bp, Homo sapiens
agaatgggatgtatt

SEQ ID NO: 212051 - DNA, 15 bp, Homo sapiens
cagaatgggatgtat

SEQ ID NO: 212052 - DNA, 15 bp, Homo sapiens
tcagaatgggatgta

SEQ ID NO: 212053 - DNA, 15 bp, Homo sapiens
ctcagaatgggatgt

SEQ ID NO: 212054 - DNA, 15 bp, Homo sapiens
cctcagaatgggatg

SEQ ID NO: 212055 - DNA, 15 bp, Homo sapiens
acctcagaatgggat

SEQ ID NO: 212056 - DNA, 15 bp, Homo sapiens
tacctcagaatggga

SEQ ID NO: 212057 - DNA, 15 bp, Homo sapiens
gtacctcagaatggg

SEQ ID NO: 212058 - DNA, 15 bp, Homo sapiens
agtacctcagaatgg

SEQ ID NO: 212059 - DNA, 15 bp, Homo sapiens
cagtacctcagaatg

SEQ ID NO: 212060 - DNA, 15 bp, Homo sapiens
ccagtacctcagaat

SEQ ID NO: 212061 - DNA, 15 bp, Homo sapiens
cccagtacctcagaa

SEQ ID NO: 212062 - DNA, 15 bp, Homo sapiens
gcccagtacctcaga

SEQ ID NO: 212063 - DNA, 15 bp, Homo sapiens
tgcccagtacctcag

SEQ ID NO: 212064 - DNA, 15 bp, Homo sapiens
atgcccagtacctca

SEQ ID NO: 212065 - DNA, 15 bp, Homo sapiens
aatgcccagtacctc

SEQ ID NO: 212066 - DNA, 15 bp, Homo sapiens
taatgcccagtacct

SEQ ID NO: 212067 - DNA, 15 bp, Homo sapiens
ctaatgcccagtacc

SEQ ID NO: 212068 - DNA, 15 bp, Homo sapiens
cctaatgcccagtac

SEQ ID NO: 212069 - DNA, 15 bp, Homo sapiens
tcctaatgcccagta

SEQ ID NO: 212070 - DNA, 15 bp, Homo sapiens
gtcctaatgcccagt

SEQ ID NO: 212071 - DNA, 15 bp, Homo sapiens
agtcctaatgcccag

SEQ ID NO: 212072 - DNA, 15 bp, Homo sapiens
aagtcctaatgccca

SEQ ID NO: 212073 - DNA, 15 bp, Homo sapiens
gaagtcctaatgccc

SEQ ID NO: 212074 - DNA, 15 bp, Homo sapiens
tgaagtcctaatgcc

SEQ ID NO: 212075 - DNA, 15 bp, Homo sapiens
ttgaagtcctaatgc

SEQ ID NO: 212076 - DNA, 15 bp, Homo sapiens
attgaagtcctaatg

SEQ ID NO: 212077 - DNA, 15 bp, Homo sapiens
cattgaagtcctaat

SEQ ID NO: 212078 - DNA, 15 bp, Homo sapiens
acattgaagtcctaa

SEQ ID NO: 212079 - DNA, 15 bp, Homo sapiens
cacattgaagtccta

SEQ ID NO: 212080 - DNA, 15 bp, Homo sapiens
tcacattgaagtcct

SEQ ID NO: 212081 - DNA, 15 bp, Homo sapiens
ttcacattgaagtcc

SEQ ID NO: 212082 - DNA, 15 bp, Homo sapiens
attcacattgaagtc

SEQ ID NO: 212083 - DNA, 15 bp, Homo sapiens
aattcacattgaagt

SEQ ID NO: 212084 - DNA, 15 bp, Homo sapiens
aaattcacattgaag

SEQ ID NO: 212085 - DNA, 15 bp, Homo sapiens
aaaattcacattgaa

SEQ ID NO: 212086 - DNA, 15 bp, Homo sapiens
aaaaattcacattga

SEQ ID NO: 212087 - DNA, 15 bp, Homo sapiens
caaaaattcacattg

SEQ ID NO: 212088 - DNA, 15 bp, Homo sapiens
ccaaaaattcacatt

SEQ ID NO: 212089 - DNA, 15 bp, Homo sapiens
accaaaaattcacat

SEQ ID NO: 212090 - DNA, 15 bp, Homo sapiens
caccaaaaattcaca

SEQ ID NO: 212091 - DNA, 15 bp, Homo sapiens
ccaccaaaaattcac

SEQ ID NO: 212092 - DNA, 15 bp, Homo sapiens
cccaccaaaaattca

SEQ ID NO: 212093 - DNA, 15 bp, Homo sapiens
ccccaccaaaaattc

SEQ ID NO: 212094 - DNA, 15 bp, Homo sapiens
tccccaccaaaaatt

SEQ ID NO: 212095 - DNA, 15 bp, Homo sapiens
ttccccaccaaaaat

SEQ ID NO: 212096 - DNA, 15 bp, Homo sapiens
gttccccaccaaaaa

SEQ ID NO: 212097 - DNA, 15 bp, Homo sapiens
tgttccccaccaaaa

SEQ ID NO: 212098 - DNA, 15 bp, Homo sapiens
atgttccccaccaaa

SEQ ID NO: 212099 - DNA, 15 bp, Homo sapiens
tatgttccccaccaa

SEQ ID NO: 212100 - DNA, 15 bp, Homo sapiens
ttatgttccccacca

SEQ ID NO: 212101 - DNA, 15 bp, Homo sapiens
tttatgttccccacc

SEQ ID NO: 212102 - DNA, 15 bp, Homo sapiens
atttatgttccccac

SEQ ID NO: 212103 - DNA, 15 bp, Homo sapiens
gatttatgttcccca

SEQ ID NO: 212104 - DNA, 15 bp, Homo sapiens
tgatttatgttcccc

SEQ ID NO: 212105 - DNA, 15 bp, Homo sapiens
ctgatttatgttccc

SEQ ID NO: 212106 - DNA, 15 bp, Homo sapiens
gctgatttatgttcc

SEQ ID NO: 212107 - DNA, 15 bp, Homo sapiens
ggctgatttatgttc

SEQ ID NO: 212108 - DNA, 15 bp, Homo sapiens
gggctgatttatgtt

SEQ ID NO: 212109 - DNA, 15 bp, Homo sapiens
agggctgatttatgt

SEQ ID NO: 212110 - DNA, 15 bp, Homo sapiens
aagggctgatttatg

SEQ ID NO: 212111 - DNA, 15 bp, Homo sapiens
taagggctgatttat

SEQ ID NO: 212112 - DNA, 15 bp, Homo sapiens
ttaagggctgattta

SEQ ID NO: 212113 - DNA, 15 bp, Homo sapiens
attaagggctgattt

SEQ ID NO: 212114 - DNA, 15 bp, Homo sapiens
tattaagggctgatt

SEQ ID NO: 212115 - DNA, 15 bp, Homo sapiens
ctattaagggctgat

SEQ ID NO: 212116 - DNA, 15 bp, Homo sapiens
cctattaagggctga

SEQ ID NO: 212117 - DNA, 15 bp, Homo sapiens
gcctattaagggctg

SEQ ID NO: 212118 - DNA, 15 bp, Homo sapiens
tgcctattaagggct

SEQ ID NO: 212119 - DNA, 15 bp, Homo sapiens
gtgcctattaagggc

SEQ ID NO: 212120 - DNA, 15 bp, Homo sapiens
tgtgcctattaaggg

SEQ ID NO: 212121 - DNA, 15 bp, Homo sapiens
ctgtgcctattaagg

SEQ ID NO: 212122 - DNA, 15 bp, Homo sapiens
tctgtgcctattaag

SEQ ID NO: 212123 - DNA, 15 bp, Homo sapiens
ctctgtgcctattaa

SEQ ID NO: 212124 - DNA, 15 bp, Homo sapiens
cctctgtgcctatta

SEQ ID NO: 212125 - DNA, 15 bp, Homo sapiens
ccctctgtgcctatt

SEQ ID NO: 212126 - DNA, 15 bp, Homo sapiens
cccctctgtgcctat

SEQ ID NO: 212127 - DNA, 15 bp, Homo sapiens
gcccctctgtgccta

SEQ ID NO: 212128 - DNA, 15 bp, Homo sapiens
agcccctctgtgcct

SEQ ID NO: 212129 - DNA, 15 bp, Homo sapiens
tagcccctctgtgcc

SEQ ID NO: 212130 - DNA, 15 bp, Homo sapiens
ttagcccctctgtgc

SEQ ID NO: 212131 - DNA, 15 bp, Homo sapiens
cttagcccctctgtg

SEQ ID NO: 212132 - DNA, 15 bp, Homo sapiens
acttagcccctctgt

SEQ ID NO: 212133 - DNA, 15 bp, Homo sapiens
tacttagcccctctg

SEQ ID NO: 212134 - DNA, 15 bp, Homo sapiens
ttacttagcccctct

SEQ ID NO: 212135 - DNA, 15 bp, Homo sapiens
gttacttagcccctc

SEQ ID NO: 212136 - DNA, 15 bp, Homo sapiens
agttacttagcccct

SEQ ID NO: 212137 - DNA, 15 bp, Homo sapiens
aagttacttagcccc

SEQ ID NO: 212138 - DNA, 15 bp, Homo sapiens
caagttacttagccc

SEQ ID NO: 212139 - DNA, 15 bp, Homo sapiens
acaagttacttagcc

SEQ ID NO: 212140 - DNA, 15 bp, Homo sapiens
cacaagttacttagc

SEQ ID NO: 212141 - DNA, 15 bp, Homo sapiens
acacaagttacttag

SEQ ID NO: 212142 - DNA, 15 bp, Homo sapiens
cacacaagttactta

SEQ ID NO: 212143 - DNA, 15 bp, Homo sapiens
acacacaagttactt

SEQ ID NO: 212144 - DNA, 15 bp, Homo sapiens
tacacacaagttact

SEQ ID NO: 212145 - DNA, 15 bp, Homo sapiens
ctacacacaagttac

SEQ ID NO: 212146 - DNA, 15 bp, Homo sapiens
tctacacacaagtta

SEQ ID NO: 212147 - DNA, 15 bp, Homo sapiens
gtctacacacaagtt

SEQ ID NO: 212148 - DNA, 15 bp, Homo sapiens
tgtctacacacaagt

SEQ ID NO: 212149 - DNA, 15 bp, Homo sapiens
gtgtctacacacaag

SEQ ID NO: 212150 - DNA, 15 bp, Homo sapiens
tgtgtctacacacaa

SEQ ID NO: 212151 - DNA, 15 bp, Homo sapiens
ctgtgtctacacaca

SEQ ID NO: 212152 - DNA, 15 bp, Homo sapiens
tctgtgtctacacac

SEQ ID NO: 212153 - DNA, 15 bp, Homo sapiens
ctctgtgtctacaca

SEQ ID NO: 212154 - DNA, 15 bp, Homo sapiens
gctctgtgtctacac

SEQ ID NO: 212155 - DNA, 15 bp, Homo sapiens
agctctgtgtctaca

SEQ ID NO: 212156 - DNA, 15 bp, Homo sapiens
tagctctgtgtctac

SEQ ID NO: 212157 - DNA, 15 bp, Homo sapiens
atagctctgtgtcta

SEQ ID NO: 212158 - DNA, 15 bp, Homo sapiens
tatagctctgtgtct

SEQ ID NO: 212159 - DNA, 15 bp, Homo sapiens
ctatagctctgtgtc

SEQ ID NO: 212160 - DNA, 15 bp, Homo sapiens
cctatagctctgtgt

SEQ ID NO: 212161 - DNA, 15 bp, Homo sapiens
tcctatagctctgtg

SEQ ID NO: 212162 - DNA, 15 bp, Homo sapiens
ctcctatagctctgt

SEQ ID NO: 212163 - DNA, 15 bp, Homo sapiens
tctcctatagctctg

SEQ ID NO: 212164 - DNA, 15 bp, Homo sapiens
ttctcctatagctct

SEQ ID NO: 212165 - DNA, 15 bp, Homo sapiens
cttctcctatagctc

SEQ ID NO: 212166 - DNA, 15 bp, Homo sapiens
tcttctcctatagct

SEQ ID NO: 212167 - DNA, 15 bp, Homo sapiens
atcttctcctatagc

SEQ ID NO: 212168 - DNA, 15 bp, Homo sapiens
catcttctcctatag

SEQ ID NO: 212169 - DNA, 15 bp, Homo sapiens
ccatcttctcctata

SEQ ID NO: 212170 - DNA, 15 bp, Homo sapiens
gccatcttctcctat

SEQ ID NO: 212171 - DNA, 15 bp, Homo sapiens
tgccatcttctccta

SEQ ID NO: 212172 - DNA, 15 bp, Homo sapiens
ctgccatcttctcct

SEQ ID NO: 212173 - DNA, 15 bp, Homo sapiens
cctgccatcttctcc

SEQ ID NO: 212174 - DNA, 15 bp, Homo sapiens
gcctgccatcttctc

SEQ ID NO: 212175 - DNA, 15 bp, Homo sapiens
tgcctgccatcttct

SEQ ID NO: 212176 - DNA, 15 bp, Homo sapiens
atgcctgccatcttc

SEQ ID NO: 212177 - DNA, 15 bp, Homo sapiens
aatgcctgccatctt

SEQ ID NO: 212178 - DNA, 15 bp, Homo sapiens
gaatgcctgccatct

SEQ ID NO: 212179 - DNA, 15 bp, Homo sapiens
agaatgcctgccatc

SEQ ID NO: 212180 - DNA, 15 bp, Homo sapiens
cagaatgcctgccat

SEQ ID NO: 212181 - DNA, 15 bp, Homo sapiens
tcagaatgcctgcca

SEQ ID NO: 212182 - DNA, 15 bp, Homo sapiens
gtcagaatgcctgcc

SEQ ID NO: 212183 - DNA, 15 bp, Homo sapiens
agtcagaatgcctgc

SEQ ID NO: 212184 - DNA, 15 bp, Homo sapiens
gagtcagaatgcctg

SEQ ID NO: 212185 - DNA, 15 bp, Homo sapiens
ggagtcagaatgcct

SEQ ID NO: 212186 - DNA, 15 bp, Homo sapiens
tggagtcagaatgcc

SEQ ID NO: 212187 - DNA, 15 bp, Homo sapiens
ctggagtcagaatgc

SEQ ID NO: 212188 - DNA, 15 bp, Homo sapiens
tctggagtcagaatg

SEQ ID NO: 212189 - DNA, 15 bp, Homo sapiens
ttctggagtcagaat

SEQ ID NO: 212190 - DNA, 15 bp, Homo sapiens
attctggagtcagaa

SEQ ID NO: 212191 - DNA, 15 bp, Homo sapiens
gattctggagtcaga

SEQ ID NO: 212192 - DNA, 15 bp, Homo sapiens
ggattctggagtcag

SEQ ID NO: 212193 - DNA, 15 bp, Homo sapiens
gggattctggagtca

SEQ ID NO: 212194 - DNA, 15 bp, Homo sapiens
ggggattctggagtc

SEQ ID NO: 212195 - DNA, 15 bp, Homo sapiens
aggggattctggagt

SEQ ID NO: 212196 - DNA, 15 bp, Homo sapiens
caggggattctggag

SEQ ID NO: 212197 - DNA, 15 bp, Homo sapiens
ccaggggattctgga

SEQ ID NO: 212198 - DNA, 15 bp, Homo sapiens
accaggggattctgg

SEQ ID NO: 212199 - DNA, 15 bp, Homo sapiens
aaccaggggattctg

SEQ ID NO: 212200 - DNA, 15 bp, Homo sapiens
gaaccaggggattct

SEQ ID NO: 212201 - DNA, 15 bp, Homo sapiens
agaaccaggggattc

SEQ ID NO: 212202 - DNA, 15 bp, Homo sapiens
cagaaccaggggatt

SEQ ID NO: 212203 - DNA, 15 bp, Homo sapiens
tcagaaccaggggat

SEQ ID NO: 212204 - DNA, 15 bp, Homo sapiens
gtcagaaccagggga

SEQ ID NO: 212205 - DNA, 15 bp, Homo sapiens
tgtcagaaccagggg

SEQ ID NO: 212206 - DNA, 15 bp, Homo sapiens
ctgtcagaaccaggg

SEQ ID NO: 212207 - DNA, 15 bp, Homo sapiens
tctgtcagaaccagg

SEQ ID NO: 212208 - DNA, 15 bp, Homo sapiens
ttctgtcagaaccag

SEQ ID NO: 212209 - DNA, 15 bp, Homo sapiens
attctgtcagaacca

SEQ ID NO: 212210 - DNA, 15 bp, Homo sapiens
gattctgtcagaacc

SEQ ID NO: 212211 - DNA, 15 bp, Homo sapiens
ggattctgtcagaac

SEQ ID NO: 212212 - DNA, 15 bp, Homo sapiens
gggattctgtcagaa

SEQ ID NO: 212213 - DNA, 15 bp, Homo sapiens
ggggattctgtcaga

SEQ ID NO: 212214 - DNA, 15 bp, Homo sapiens
aggggattctgtcag

SEQ ID NO: 212215 - DNA, 15 bp, Homo sapiens
caggggattctgtca

SEQ ID NO: 212216 - DNA, 15 bp, Homo sapiens
tcaggggattctgtc

SEQ ID NO: 212217 - DNA, 15 bp, Homo sapiens
gtcaggggattctgt

SEQ ID NO: 212218 - DNA, 15 bp, Homo sapiens
tgtcaggggattctg

SEQ ID NO: 212219 - DNA, 15 bp, Homo sapiens
ctgtcaggggattct

SEQ ID NO: 212220 - DNA, 15 bp, Homo sapiens
actgtcaggggattc

SEQ ID NO: 212221 - DNA, 15 bp, Homo sapiens
aactgtcaggggatt

SEQ ID NO: 212222 - DNA, 15 bp, Homo sapiens
gaactgtcaggggat

SEQ ID NO: 212223 - DNA, 15 bp, Homo sapiens
agaactgtcagggga

SEQ ID NO: 212224 - DNA, 15 bp, Homo sapiens
cagaactgtcagggg

SEQ ID NO: 212225 - DNA, 15 bp, Homo sapiens
tcagaactgtcaggg

SEQ ID NO: 212226 - DNA, 15 bp, Homo sapiens
gtcagaactgtcagg

SEQ ID NO: 212227 - DNA, 15 bp, Homo sapiens
tgtcagaactgtcag

SEQ ID NO: 212228 - DNA, 15 bp, Homo sapiens
ctgtcagaactgtca

SEQ ID NO: 212229 - DNA, 15 bp, Homo sapiens
actgtcagaactgtc

SEQ ID NO: 212230 - DNA, 15 bp, Homo sapiens
aactgtcagaactgt

SEQ ID NO: 212231 - DNA, 15 bp, Homo sapiens
gaactgtcagaactg

SEQ ID NO: 212232 - DNA, 15 bp, Homo sapiens
cgaactgtcagaact

SEQ ID NO: 212233 - DNA, 15 bp, Homo sapiens
tcgaactgtcagaac

SEQ ID NO: 212234 - DNA, 15 bp, Homo sapiens
ctcgaactgtcagaa

SEQ ID NO: 212235 - DNA, 15 bp, Homo sapiens
tctcgaactgtcaga

SEQ ID NO: 212236 - DNA, 15 bp, Homo sapiens
gtctcgaactgtcag

SEQ ID NO: 212237 - DNA, 15 bp, Homo sapiens
ggtctcgaactgtca

SEQ ID NO: 212238 - DNA, 15 bp, Homo sapiens
tggtctcgaactgtc

SEQ ID NO: 212239 - DNA, 15 bp, Homo sapiens
ctggtctcgaactgt

SEQ ID NO: 212240 - DNA, 15 bp, Homo sapiens
gctggtctcgaactg

SEQ ID NO: 212241 - DNA, 15 bp, Homo sapiens
gggctggtctcgaac

SEQ ID NO: 212242 - DNA, 15 bp, Homo sapiens
cgggctggtctcgaa

SEQ ID NO: 212243 - DNA, 15 bp, Homo sapiens
ccgggctggtctcga

SEQ ID NO: 212244 - DNA, 15 bp, Homo sapiens
gccgggctggtctcg

SEQ ID NO: 212245 - DNA, 15 bp, Homo sapiens
ggccgggctggtctc

SEQ ID NO: 212246 - DNA, 15 bp, Homo sapiens
gggccgggctggtct

SEQ ID NO: 212247 - DNA, 15 bp, Homo sapiens
tgggccgggctggtc

SEQ ID NO: 212248 - DNA, 15 bp, Homo sapiens
gtgggccgggctggt

SEQ ID NO: 212249 - DNA, 15 bp, Homo sapiens
tgtgggccgggctgg

SEQ ID NO: 212250 - DNA, 15 bp, Homo sapiens
atgtgggccgggctg

SEQ ID NO: 212251 - DNA, 15 bp, Homo sapiens
catgtgggccgggct

SEQ ID NO: 212252 - DNA, 15 bp, Homo sapiens
ccatgtgggccgggc

SEQ ID NO: 212253 - DNA, 15 bp, Homo sapiens
accatgtgggccggg

SEQ ID NO: 212254 - DNA, 15 bp, Homo sapiens
caccatgtgggccgg

SEQ ID NO: 212255 - DNA, 15 bp, Homo sapiens
tcaccatgtgggccg

SEQ ID NO: 212256 - DNA, 15 bp, Homo sapiens
ttcaccatgtgggcc

SEQ ID NO: 212257 - DNA, 15 bp, Homo sapiens
tttcaccatgtgggc

SEQ ID NO: 212258 - DNA, 15 bp, Homo sapiens
gtttcaccatgtggg

SEQ ID NO: 212259 - DNA, 15 bp, Homo sapiens
ggtttcaccatgtgg

SEQ ID NO: 212260 - DNA, 15 bp, Homo sapiens
gggtttcaccatgtg

SEQ ID NO: 212261 - DNA, 15 bp, Homo sapiens
ggtagagacagggtt

SEQ ID NO: 212262 - DNA, 15 bp, Homo sapiens
tggtagagacagggt

SEQ ID NO: 212263 - DNA, 15 bp, Homo sapiens
ttggtagagacaggg

SEQ ID NO: 212264 - DNA, 15 bp, Homo sapiens
tttggtagagacagg

SEQ ID NO: 212265 - DNA, 15 bp, Homo sapiens
ttttggtagagacag

SEQ ID NO: 212266 - DNA, 15 bp, Homo sapiens
tttttggtagagaca

SEQ ID NO: 212267 - DNA, 15 bp, Homo sapiens
atttttggtagagac

SEQ ID NO: 212268 - DNA, 15 bp, Homo sapiens
tatttttggtagaga

SEQ ID NO: 212269 - DNA, 15 bp, Homo sapiens
gtatttttggtagag

SEQ ID NO: 212270 - DNA, 15 bp, Homo sapiens
tgtatttttggtaga

SEQ ID NO: 212271 - DNA, 15 bp, Homo sapiens
ttgtatttttggtag

SEQ ID NO: 212272 - DNA, 15 bp, Homo sapiens
tttgtatttttggta

SEQ ID NO: 212273 - DNA, 15 bp, Homo sapiens
ttttgtatttttggt

SEQ ID NO: 212274 - DNA, 15 bp, Homo sapiens
tttttgtatttttgg

SEQ ID NO: 212275 - DNA, 15 bp, Homo sapiens
atttttgtatttttg

SEQ ID NO: 212276 - DNA, 15 bp, Homo sapiens
aaccatgcctggcta

SEQ ID NO: 212277 - DNA, 15 bp, Homo sapiens
caaccatgcctggct

SEQ ID NO: 212278 - DNA, 15 bp, Homo sapiens
acaaccatgcctggc

SEQ ID NO: 212279 - DNA, 15 bp, Homo sapiens
cacaaccatgcctgg

SEQ ID NO: 212280 - DNA, 15 bp, Homo sapiens
gcacaaccatgcctg

SEQ ID NO: 212281 - DNA, 15 bp, Homo sapiens
tgcacaaccatgcct

SEQ ID NO: 212282 - DNA, 15 bp, Homo sapiens
gtgcacaaccatgcc

SEQ ID NO: 212283 - DNA, 15 bp, Homo sapiens
tgtgcacaaccatgc

SEQ ID NO: 212284 - DNA, 15 bp, Homo sapiens
atgtgcacaaccatg

SEQ ID NO: 212285 - DNA, 15 bp, Homo sapiens
gatgtgcacaaccat

SEQ ID NO: 212286 - DNA, 15 bp, Homo sapiens
agatgtgcacaacca

SEQ ID NO: 212287 - DNA, 15 bp, Homo sapiens
cagatgtgcacaacc

SEQ ID NO: 212288 - DNA, 15 bp, Homo sapiens
acagatgtgcacaac

SEQ ID NO: 212289 - DNA, 15 bp, Homo sapiens
tacagatgtgcacaa

SEQ ID NO: 212290 - DNA, 15 bp, Homo sapiens
ctacagatgtgcaca

SEQ ID NO: 212291 - DNA, 15 bp, Homo sapiens
actacagatgtgcac

SEQ ID NO: 212292 - DNA, 15 bp, Homo sapiens
gactacagatgtgca

SEQ ID NO: 212293 - DNA, 15 bp, Homo sapiens
ggactacagatgtgc

SEQ ID NO: 212294 - DNA, 15 bp, Homo sapiens
gggactacagatgtg

SEQ ID NO: 212295 - DNA, 15 bp, Homo sapiens
tgggactacagatgt

SEQ ID NO: 212296 - DNA, 15 bp, Homo sapiens
ctgggactacagatg

SEQ ID NO: 212297 - DNA, 15 bp, Homo sapiens
gtgcctcagcctccc

SEQ ID NO: 212298 - DNA, 15 bp, Homo sapiens
tgtgcctcagcctcc

SEQ ID NO: 212299 - DNA, 15 bp, Homo sapiens
ttgtgcctcagcctc

SEQ ID NO: 212300 - DNA, 15 bp, Homo sapiens
cttgtgcctcagcct

SEQ ID NO: 212301 - DNA, 15 bp, Homo sapiens
tcttgtgcctcagcc

SEQ ID NO: 212302 - DNA, 15 bp, Homo sapiens
ttcttgtgcctcagc

SEQ ID NO: 212303 - DNA, 15 bp, Homo sapiens
attcttgtgcctcag

SEQ ID NO: 212304 - DNA, 15 bp, Homo sapiens
gattcttgtgcctca

SEQ ID NO: 212305 - DNA, 15 bp, Homo sapiens
tgattcttgtgcctc

SEQ ID NO: 212306 - DNA, 15 bp, Homo sapiens
gtgattcttgtgcct

SEQ ID NO: 212307 - DNA, 15 bp, Homo sapiens
agtgattcttgtgcc

SEQ ID NO: 212308 - DNA, 15 bp, Homo sapiens
cagtgattcttgtgc

SEQ ID NO: 212309 - DNA, 15 bp, Homo sapiens
ccagtgattcttgtg

SEQ ID NO: 212310 - DNA, 15 bp, Homo sapiens
tccagtgattcttgt

SEQ ID NO: 212311 - DNA, 15 bp, Homo sapiens
ttccagtgattcttg

SEQ ID NO: 212312 - DNA, 15 bp, Homo sapiens
gttccagtgattctt

SEQ ID NO: 212313 - DNA, 15 bp, Homo sapiens
ggttccagtgattct

SEQ ID NO: 212314 - DNA, 15 bp, Homo sapiens
gggttccagtgattc

SEQ ID NO: 212315 - DNA, 15 bp, Homo sapiens
cgggttccagtgatt

SEQ ID NO: 212316 - DNA, 15 bp, Homo sapiens
ccgggttccagtgat

SEQ ID NO: 212317 - DNA, 15 bp, Homo sapiens
cccgggttccagtga

SEQ ID NO: 212318 - DNA, 15 bp, Homo sapiens
tcccgggttccagtg

SEQ ID NO: 212319 - DNA, 15 bp, Homo sapiens
ctcccgggttccagt

SEQ ID NO: 212320 - DNA, 15 bp, Homo sapiens
cctcccgggttccag

SEQ ID NO: 212321 - DNA, 15 bp, Homo sapiens
gcctcccgggttcca

SEQ ID NO: 212322 - DNA, 15 bp, Homo sapiens
cgcctcccgggttcc

SEQ ID NO: 212323 - DNA, 15 bp, Homo sapiens
ccgcctcccgggttc

SEQ ID NO: 212324 - DNA, 15 bp, Homo sapiens
tccgcctcccgggtt

SEQ ID NO: 212325 - DNA, 15 bp, Homo sapiens
ctccgcctcccgggt

SEQ ID NO: 212326 - DNA, 15 bp, Homo sapiens
actccgcctcccggg

SEQ ID NO: 212327 - DNA, 15 bp, Homo sapiens
gactccgcctcccgg

SEQ ID NO: 212328 - DNA, 15 bp, Homo sapiens
agactccgcctcccg

SEQ ID NO: 212329 - DNA, 15 bp, Homo sapiens
cagactccgcctccc

SEQ ID NO: 212330 - DNA, 15 bp, Homo sapiens
gcagactccgcctcc

SEQ ID NO: 212331 - DNA, 15 bp, Homo sapiens
tgcagactccgcctc

SEQ ID NO: 212332 - DNA, 15 bp, Homo sapiens
ttgcagactccgcct

SEQ ID NO: 212333 - DNA, 15 bp, Homo sapiens
attgcagactccgcc

SEQ ID NO: 212334 - DNA, 15 bp, Homo sapiens
tattgcagactccgc

SEQ ID NO: 212335 - DNA, 15 bp, Homo sapiens
ttattgcagactccg

SEQ ID NO: 212336 - DNA, 15 bp, Homo sapiens
cttattgcagactcc

SEQ ID NO: 212337 - DNA, 15 bp, Homo sapiens
gcttattgcagactc

SEQ ID NO: 212338 - DNA, 15 bp, Homo sapiens
ggcttattgcagact

SEQ ID NO: 212339 - DNA, 15 bp, Homo sapiens
tggcttattgcagac

SEQ ID NO: 212340 - DNA, 15 bp, Homo sapiens
ttggcttattgcaga

SEQ ID NO: 212341 - DNA, 15 bp, Homo sapiens
cttggcttattgcag

SEQ ID NO: 212342 - DNA, 15 bp, Homo sapiens
tcttggcttattgca

SEQ ID NO: 212343 - DNA, 15 bp, Homo sapiens
atcttggcttattgc

SEQ ID NO: 212344 - DNA, 15 bp, Homo sapiens
gatcttggcttattg

SEQ ID NO: 212345 - DNA, 15 bp, Homo sapiens
cgatcttggcttatt

SEQ ID NO: 212346 - DNA, 15 bp, Homo sapiens
gcgatcttggcttat

SEQ ID NO: 212347 - DNA, 15 bp, Homo sapiens
tgcgatcttggctta

SEQ ID NO: 212348 - DNA, 15 bp, Homo sapiens
gtgcgatcttggctt

SEQ ID NO: 212349 - DNA, 15 bp, Homo sapiens
ggtgcgatcttggct

SEQ ID NO: 212350 - DNA, 15 bp, Homo sapiens
tggtgcgatcttggc

SEQ ID NO: 212351 - DNA, 15 bp, Homo sapiens
gtggtgcgatcttgg

SEQ ID NO: 212352 - DNA, 15 bp, Homo sapiens
agtggtgcgatcttg

SEQ ID NO: 212353 - DNA, 15 bp, Homo sapiens
cagtggtgcgatctt

SEQ ID NO: 212354 - DNA, 15 bp, Homo sapiens
gcagtggtgcgatct

SEQ ID NO: 212355 - DNA, 15 bp, Homo sapiens
tgcagtggtgcgatc

SEQ ID NO: 212356 - DNA, 15 bp, Homo sapiens
gtgcagtggtgcgat

SEQ ID NO: 212357 - DNA, 15 bp, Homo sapiens
agtgcagtggtgcga

SEQ ID NO: 212358 - DNA, 15 bp, Homo sapiens
gagtgcagtggtgcg

SEQ ID NO: 212359 - DNA, 15 bp, Homo sapiens
ggagtgcagtggtgc

SEQ ID NO: 212360 - DNA, 15 bp, Homo sapiens
tggagtgcagtggtg

SEQ ID NO: 212361 - DNA, 15 bp, Homo sapiens
ctggagtgcagtggt

SEQ ID NO: 212362 - DNA, 15 bp, Homo sapiens
ctgtcgcccaggctg

SEQ ID NO: 212363 - DNA, 15 bp, Homo sapiens
tctgtcgcccaggct

SEQ ID NO: 212364 - DNA, 15 bp, Homo sapiens
ctctgtcgcccaggc

SEQ ID NO: 212365 - DNA, 15 bp, Homo sapiens
actctgtcgcccagg

SEQ ID NO: 212366 - DNA, 15 bp, Homo sapiens
cactctgtcgcccag

SEQ ID NO: 212367 - DNA, 15 bp, Homo sapiens
tcactctgtcgccca

SEQ ID NO: 212368 - DNA, 15 bp, Homo sapiens
ctcactctgtcgccc

SEQ ID NO: 212369 - DNA, 15 bp, Homo sapiens
tctcactctgtcgcc

SEQ ID NO: 212370 - DNA, 15 bp, Homo sapiens
gtctcactctgtcgc

SEQ ID NO: 212371 - DNA, 15 bp, Homo sapiens
agtctcactctgtcg

SEQ ID NO: 212372 - DNA, 15 bp, Homo sapiens
gagtctcactctgtc

SEQ ID NO: 212373 - DNA, 15 bp, Homo sapiens
agagtctcactctgt

SEQ ID NO: 212374 - DNA, 15 bp, Homo sapiens
cagagtctcactctg

SEQ ID NO: 212375 - DNA, 15 bp, Homo sapiens
acagagtctcactct

SEQ ID NO: 212376 - DNA, 15 bp, Homo sapiens
cacagagtctcactc

SEQ ID NO: 212377 - DNA, 15 bp, Homo sapiens
acacagagtctcact

SEQ ID NO: 212378 - DNA, 15 bp, Homo sapiens
gacacagagtctcac

SEQ ID NO: 212379 - DNA, 15 bp, Homo sapiens
tgacacagagtctca

SEQ ID NO: 212380 - DNA, 15 bp, Homo sapiens
ttgacacagagtctc

SEQ ID NO: 212381 - DNA, 15 bp, Homo sapiens
tttgacacagagtct

SEQ ID NO: 212382 - DNA, 15 bp, Homo sapiens
ttttgacacagagtc

SEQ ID NO: 212383 - DNA, 15 bp, Homo sapiens
tttttgacacagagt

SEQ ID NO: 212384 - DNA, 15 bp, Homo sapiens
ttttttgacacagag

SEQ ID NO: 212385 - DNA, 15 bp, Homo sapiens
attttttgacacaga

SEQ ID NO: 212386 - DNA, 15 bp, Homo sapiens
aattttttgacacag

SEQ ID NO: 212387 - DNA, 15 bp, Homo sapiens
aaattttttgacaca

SEQ ID NO: 212388 - DNA, 15 bp, Homo sapiens
taaattttttgacac

SEQ ID NO: 212389 - DNA, 15 bp, Homo sapiens
ttaaattttttgaca

SEQ ID NO: 212390 - DNA, 15 bp, Homo sapiens
tttaaattttttgac

SEQ ID NO: 212391 - DNA, 15 bp, Homo sapiens
ttttaaattttttga

SEQ ID NO: 212392 - DNA, 15 bp, Homo sapiens
tttttaaattttttg

SEQ ID NO: 212393 - DNA, 15 bp, Homo sapiens
atttttaaatttttt

SEQ ID NO: 212394 - DNA, 15 bp, Homo sapiens
tatttttaaattttt

SEQ ID NO: 212395 - DNA, 15 bp, Homo sapiens
ttatttttaaatttt

SEQ ID NO: 212396 - DNA, 15 bp, Homo sapiens
tttatttttaaattt

SEQ ID NO: 212397 - DNA, 15 bp, Homo sapiens
atttatttttaaatt

SEQ ID NO: 212398 - DNA, 15 bp, Homo sapiens
tatttatttttaaat

SEQ ID NO: 212399 - DNA, 15 bp, Homo sapiens
ttatttatttttaaa

SEQ ID NO: 212400 - DNA, 15 bp, Homo sapiens
tttatttatttttaa

SEQ ID NO: 212401 - DNA, 15 bp, Homo sapiens
ttttatttattttta

SEQ ID NO: 212402 - DNA, 15 bp, Homo sapiens
tttttatttattttt

SEQ ID NO: 212403 - DNA, 15 bp, Homo sapiens
atttttatttatttt

SEQ ID NO: 212404 - DNA, 15 bp, Homo sapiens
tatttttatttattt

SEQ ID NO: 212405 - DNA, 15 bp, Homo sapiens
ttatttttatttatt

SEQ ID NO: 212406 - DNA, 15 bp, Homo sapiens
tttatttttatttat

SEQ ID NO: 212407 - DNA, 15 bp, Homo sapiens
ttttatttttattta

SEQ ID NO: 212408 - DNA, 15 bp, Homo sapiens
tttttatttttattt

SEQ ID NO: 212409 - DNA, 15 bp, Homo sapiens
atttttatttttatt

SEQ ID NO: 212410 - DNA, 15 bp, Homo sapiens
tatttttatttttat

SEQ ID NO: 212411 - DNA, 15 bp, Homo sapiens
ttatttttattttta

SEQ ID NO: 212412 - DNA, 15 bp, Homo sapiens
tttatttttattttt

SEQ ID NO: 212413 - DNA, 15 bp, Homo sapiens
ttttatttttatttt

SEQ ID NO: 212414 - DNA, 15 bp, Homo sapiens
gtttttatttttatt

SEQ ID NO: 212415 - DNA, 15 bp, Homo sapiens
tgtttttatttttat

SEQ ID NO: 212416 - DNA, 15 bp, Homo sapiens
ttgtttttattttta

SEQ ID NO: 212417 - DNA, 15 bp, Homo sapiens
cttgtttttattttt

SEQ ID NO: 212418 - DNA, 15 bp, Homo sapiens
ccttgtttttatttt

SEQ ID NO: 212419 - DNA, 15 bp, Homo sapiens
tccttgtttttattt

SEQ ID NO: 212420 - DNA, 15 bp, Homo sapiens
ttccttgtttttatt

SEQ ID NO: 212421 - DNA, 15 bp, Homo sapiens
tttccttgtttttat

SEQ ID NO: 212422 - DNA, 15 bp, Homo sapiens
gtttccttgttttta

SEQ ID NO: 212423 - DNA, 15 bp, Homo sapiens
tgtttccttgttttt

SEQ ID NO: 212424 - DNA, 15 bp, Homo sapiens
ttgtttccttgtttt

SEQ ID NO: 212425 - DNA, 15 bp, Homo sapiens
attgtttccttgttt

SEQ ID NO: 212426 - DNA, 15 bp, Homo sapiens
tattgtttccttgtt

SEQ ID NO: 212427 - DNA, 15 bp, Homo sapiens
atattgtttccttgt

SEQ ID NO: 212428 - DNA, 15 bp, Homo sapiens
catattgtttccttg

SEQ ID NO: 212429 - DNA, 15 bp, Homo sapiens
tcatattgtttcctt

SEQ ID NO: 212430 - DNA, 15 bp, Homo sapiens
atcatattgtttcct

SEQ ID NO: 212431 - DNA, 15 bp, Homo sapiens
aatcatattgtttcc

SEQ ID NO: 212432 - DNA, 15 bp, Homo sapiens
caatcatattgtttc

SEQ ID NO: 212433 - DNA, 15 bp, Homo sapiens
acaatcatattgttt

SEQ ID NO: 212434 - DNA, 15 bp, Homo sapiens
tacaatcatattgtt

SEQ ID NO: 212435 - DNA, 15 bp, Homo sapiens
gtacaatcatattgt

SEQ ID NO: 212436 - DNA, 15 bp, Homo sapiens
agtacaatcatattg

SEQ ID NO: 212437 - DNA, 15 bp, Homo sapiens
tagtacaatcatatt

SEQ ID NO: 212438 - DNA, 15 bp, Homo sapiens
atagtacaatcatat

SEQ ID NO: 212439 - DNA, 15 bp, Homo sapiens
aatagtacaatcata

SEQ ID NO: 212440 - DNA, 15 bp, Homo sapiens
gaatagtacaatcat

SEQ ID NO: 212441 - DNA, 15 bp, Homo sapiens
tgaatagtacaatca

SEQ ID NO: 212442 - DNA, 15 bp, Homo sapiens
ttgaatagtacaatc

SEQ ID NO: 212443 - DNA, 15 bp, Homo sapiens
tttgaatagtacaat

SEQ ID NO: 212444 - DNA, 15 bp, Homo sapiens
ctttgaatagtacaa

SEQ ID NO: 212445 - DNA, 15 bp, Homo sapiens
cctttgaatagtaca

SEQ ID NO: 212446 - DNA, 15 bp, Homo sapiens
tcctttgaatagtac

SEQ ID NO: 212447 - DNA, 15 bp, Homo sapiens
atcctttgaatagta

SEQ ID NO: 212448 - DNA, 15 bp, Homo sapiens
tatcctttgaatagt

SEQ ID NO: 212449 - DNA, 15 bp, Homo sapiens
ttatcctttgaatag

SEQ ID NO: 212450 - DNA, 15 bp, Homo sapiens
attatcctttgaata

SEQ ID NO: 212451 - DNA, 15 bp, Homo sapiens
tattatcctttgaat

SEQ ID NO: 212452 - DNA, 15 bp, Homo sapiens
gtattatcctttgaa

SEQ ID NO: 212453 - DNA, 15 bp, Homo sapiens
agtattatcctttga

SEQ ID NO: 212454 - DNA, 15 bp, Homo sapiens
aagtattatcctttg

SEQ ID NO: 212455 - DNA, 15 bp, Homo sapiens
taagtattatccttt

SEQ ID NO: 212456 - DNA, 15 bp, Homo sapiens
ttaagtattatcctt

SEQ ID NO: 212457 - DNA, 15 bp, Homo sapiens
attaagtattatcct

SEQ ID NO: 212458 - DNA, 15 bp, Homo sapiens
aattaagtattatcc

SEQ ID NO: 212459 - DNA, 15 bp, Homo sapiens
aaattaagtattatc

SEQ ID NO: 212460 - DNA, 15 bp, Homo sapiens
caaattaagtattat

SEQ ID NO: 212461 - DNA, 15 bp, Homo sapiens
gcaaattaagtatta

SEQ ID NO: 212462 - DNA, 15 bp, Homo sapiens
tgcaaattaagtatt

SEQ ID NO: 212463 - DNA, 15 bp, Homo sapiens
ttgcaaattaagtat

SEQ ID NO: 212464 - DNA, 15 bp, Homo sapiens
tttgcaaattaagta

SEQ ID NO: 212465 - DNA, 15 bp, Homo sapiens
gtttgcaaattaagt

SEQ ID NO: 212466 - DNA, 15 bp, Homo sapiens
agtttgcaaattaag

SEQ ID NO: 212467 - DNA, 15 bp, Homo sapiens
aagtttgcaaattaa

SEQ ID NO: 212468 - DNA, 15 bp, Homo sapiens
gaagtttgcaaatta

SEQ ID NO: 212469 - DNA, 15 bp, Homo sapiens
tgaagtttgcaaatt

SEQ ID NO: 212470 - DNA, 15 bp, Homo sapiens
atgaagtttgcaaat

SEQ ID NO: 212471 - DNA, 15 bp, Homo sapiens
tatgaagtttgcaaa

SEQ ID NO: 212472 - DNA, 15 bp, Homo sapiens
atatgaagtttgcaa

SEQ ID NO: 212473 - DNA, 15 bp, Homo sapiens
aatatgaagtttgca

SEQ ID NO: 212474 - DNA, 15 bp, Homo sapiens
taatatgaagtttgc

SEQ ID NO: 212475 - DNA, 15 bp, Homo sapiens
ttaatatgaagtttg

SEQ ID NO: 212476 - DNA, 15 bp, Homo sapiens
attaatatgaagttt

SEQ ID NO: 212477 - DNA, 15 bp, Homo sapiens
aattaatatgaagtt

SEQ ID NO: 212478 - DNA, 15 bp, Homo sapiens
gaattaatatgaagt

SEQ ID NO: 212479 - DNA, 15 bp, Homo sapiens
ggaattaatatgaag

SEQ ID NO: 212480 - DNA, 15 bp, Homo sapiens
aggaattaatatgaa

SEQ ID NO: 212481 - DNA, 15 bp, Homo sapiens
taggaattaatatga

SEQ ID NO: 212482 - DNA, 15 bp, Homo sapiens
ctaggaattaatatg

SEQ ID NO: 212483 - DNA, 15 bp, Homo sapiens
actaggaattaatat

SEQ ID NO: 212484 - DNA, 15 bp, Homo sapiens
cactaggaattaata

SEQ ID NO: 212485 - DNA, 15 bp, Homo sapiens
acactaggaattaat

SEQ ID NO: 212486 - DNA, 15 bp, Homo sapiens
tacactaggaattaa

SEQ ID NO: 212487 - DNA, 15 bp, Homo sapiens
gtacactaggaatta

SEQ ID NO: 212488 - DNA, 15 bp, Homo sapiens
agtacactaggaatt

SEQ ID NO: 212489 - DNA, 15 bp, Homo sapiens
tagtacactaggaat

SEQ ID NO: 212490 - DNA, 15 bp, Homo sapiens
gtagtacactaggaa

SEQ ID NO: 212491 - DNA, 15 bp, Homo sapiens
ggtagtacactagga

SEQ ID NO: 212492 - DNA, 15 bp, Homo sapiens
tggtagtacactagg

SEQ ID NO: 212493 - DNA, 15 bp, Homo sapiens
ctggtagtacactag

SEQ ID NO: 212494 - DNA, 15 bp, Homo sapiens
tctggtagtacacta

SEQ ID NO: 212495 - DNA, 15 bp, Homo sapiens
ttctggtagtacact

SEQ ID NO: 212496 - DNA, 15 bp, Homo sapiens
attctggtagtacac

SEQ ID NO: 212497 - DNA, 15 bp, Homo sapiens
cattctggtagtaca

SEQ ID NO: 212498 - DNA, 15 bp, Homo sapiens
tcattctggtagtac

SEQ ID NO: 212499 - DNA, 15 bp, Homo sapiens
ctcattctggtagta

SEQ ID NO: 212500 - DNA, 15 bp, Homo sapiens
tctcattctggtagt

SEQ ID NO: 212501 - DNA, 15 bp, Homo sapiens
atctcattctggtag

SEQ ID NO: 212502 - DNA, 15 bp, Homo sapiens
gatctcattctggta

SEQ ID NO: 212503 - DNA, 15 bp, Homo sapiens
agatctcattctggt

SEQ ID NO: 212504 - DNA, 15 bp, Homo sapiens
cagatctcattctgg

SEQ ID NO: 212505 - DNA, 15 bp, Homo sapiens
ccagatctcattctg

SEQ ID NO: 212506 - DNA, 15 bp, Homo sapiens
accagatctcattct

SEQ ID NO: 212507 - DNA, 15 bp, Homo sapiens
taccagatctcattc

SEQ ID NO: 212508 - DNA, 15 bp, Homo sapiens
ttaccagatctcatt

SEQ ID NO: 212509 - DNA, 15 bp, Homo sapiens
gttaccagatctcat

SEQ ID NO: 212510 - DNA, 15 bp, Homo sapiens
tgttaccagatctca

SEQ ID NO: 212511 - DNA, 15 bp, Homo sapiens
ctgttaccagatctc

SEQ ID NO: 212512 - DNA, 15 bp, Homo sapiens
cctgttaccagatct

SEQ ID NO: 212513 - DNA, 15 bp, Homo sapiens
tcctgttaccagatc

SEQ ID NO: 212514 - DNA, 15 bp, Homo sapiens
atcctgttaccagat

SEQ ID NO: 212515 - DNA, 15 bp, Homo sapiens
tatcctgttaccaga

SEQ ID NO: 212516 - DNA, 15 bp, Homo sapiens
ttatcctgttaccag

SEQ ID NO: 212517 - DNA, 15 bp, Homo sapiens
tttatcctgttacca

SEQ ID NO: 212518 - DNA, 15 bp, Homo sapiens
ttttatcctgttacc

SEQ ID NO: 212519 - DNA, 15 bp, Homo sapiens
cttttatcctgttac

SEQ ID NO: 212520 - DNA, 15 bp, Homo sapiens
acttttatcctgtta

SEQ ID NO: 212521 - DNA, 15 bp, Homo sapiens
aacttttatcctgtt

SEQ ID NO: 212522 - DNA, 15 bp, Homo sapiens
aaacttttatcctgt

SEQ ID NO: 212523 - DNA, 15 bp, Homo sapiens
taaacttttatcctg

SEQ ID NO: 212524 - DNA, 15 bp, Homo sapiens
ttaaacttttatcct

SEQ ID NO: 212525 - DNA, 15 bp, Homo sapiens
tttaaacttttatcc

SEQ ID NO: 212526 - DNA, 15 bp, Homo sapiens
atttaaacttttatc

SEQ ID NO: 212527 - DNA, 15 bp, Homo sapiens
gatttaaacttttat

SEQ ID NO: 212528 - DNA, 15 bp, Homo sapiens
tgatttaaactttta

SEQ ID NO: 212529 - DNA, 15 bp, Homo sapiens
ctgatttaaactttt

SEQ ID NO: 212530 - DNA, 15 bp, Homo sapiens
tctgatttaaacttt

SEQ ID NO: 212531 - DNA, 15 bp, Homo sapiens
atctgatttaaactt

SEQ ID NO: 212532 - DNA, 15 bp, Homo sapiens
catctgatttaaact

SEQ ID NO: 212533 - DNA, 15 bp, Homo sapiens
tcatctgatttaaac

SEQ ID NO: 212534 - DNA, 15 bp, Homo sapiens
atcatctgatttaaa

SEQ ID NO: 212535 - DNA, 15 bp, Homo sapiens
gatcatctgatttaa

SEQ ID NO: 212536 - DNA, 15 bp, Homo sapiens
tgatcatctgattta

SEQ ID NO: 212537 - DNA, 15 bp, Homo sapiens
ttgatcatctgattt

SEQ ID NO: 212538 - DNA, 15 bp, Homo sapiens
attgatcatctgatt

SEQ ID NO: 212539 - DNA, 15 bp, Homo sapiens
cattgatcatctgat

SEQ ID NO: 212540 - DNA, 15 bp, Homo sapiens
gcattgatcatctga

SEQ ID NO: 212541 - DNA, 15 bp, Homo sapiens
ggcattgatcatctg

SEQ ID NO: 212542 - DNA, 15 bp, Homo sapiens
tggcattgatcatct

SEQ ID NO: 212543 - DNA, 15 bp, Homo sapiens
atggcattgatcatc

SEQ ID NO: 212544 - DNA, 15 bp, Homo sapiens
tatggcattgatcat

SEQ ID NO: 212545 - DNA, 15 bp, Homo sapiens
atatggcattgatca

SEQ ID NO: 212546 - DNA, 15 bp, Homo sapiens
aatatggcattgatc

SEQ ID NO: 212547 - DNA, 15 bp, Homo sapiens
aaatatggcattgat

SEQ ID NO: 212548 - DNA, 15 bp, Homo sapiens
aaaatatggcattga

SEQ ID NO: 212549 - DNA, 15 bp, Homo sapiens
aaaaatatggcattg

SEQ ID NO: 212550 - DNA, 15 bp, Homo sapiens
aaaaaatatggcatt

SEQ ID NO: 212551 - DNA, 15 bp, Homo sapiens
gaaaaaatatggcat

SEQ ID NO: 212552 - DNA, 15 bp, Homo sapiens
ggaaaaaatatggca

SEQ ID NO: 212553 - DNA, 15 bp, Homo sapiens
aggaaaaaatatggc

SEQ ID NO: 212554 - DNA, 15 bp, Homo sapiens
aaggaaaaaatatgg

SEQ ID NO: 212555 - DNA, 15 bp, Homo sapiens
gaaggaaaaaatatg

SEQ ID NO: 212556 - DNA, 15 bp, Homo sapiens
ggaaggaaaaaatat

SEQ ID NO: 212557 - DNA, 15 bp, Homo sapiens
tggaaggaaaaaata

SEQ ID NO: 212558 - DNA, 15 bp, Homo sapiens
atggaaggaaaaaat

SEQ ID NO: 212559 - DNA, 15 bp, Homo sapiens
catggaaggaaaaaa

SEQ ID NO: 212560 - DNA, 15 bp, Homo sapiens
tcatggaaggaaaaa

SEQ ID NO: 212561 - DNA, 15 bp, Homo sapiens
ttcatggaaggaaaa

SEQ ID NO: 212562 - DNA, 15 bp, Homo sapiens
attcatggaaggaaa

SEQ ID NO: 212563 - DNA, 15 bp, Homo sapiens
tattcatggaaggaa

SEQ ID NO: 212564 - DNA, 15 bp, Homo sapiens
gtattcatggaagga

SEQ ID NO: 212565 - DNA, 15 bp, Homo sapiens
tgtattcatggaagg

SEQ ID NO: 212566 - DNA, 15 bp, Homo sapiens
atgtattcatggaag

SEQ ID NO: 212567 - DNA, 15 bp, Homo sapiens
gatgtattcatggaa

SEQ ID NO: 212568 - DNA, 15 bp, Homo sapiens
agatgtattcatgga

SEQ ID NO: 212569 - DNA, 15 bp, Homo sapiens
gagatgtattcatgg

SEQ ID NO: 212570 - DNA, 15 bp, Homo sapiens
ggagatgtattcatg

SEQ ID NO: 212571 - DNA, 15 bp, Homo sapiens
tggagatgtattcat

SEQ ID NO: 212572 - DNA, 15 bp, Homo sapiens
ctggagatgtattca

SEQ ID NO: 212573 - DNA, 15 bp, Homo sapiens
cctggagatgtattc

SEQ ID NO: 212574 - DNA, 15 bp, Homo sapiens
tcctggagatgtatt

SEQ ID NO: 212575 - DNA, 15 bp, Homo sapiens
ttcctggagatgtat

SEQ ID NO: 212576 - DNA, 15 bp, Homo sapiens
attcctggagatgta

SEQ ID NO: 212577 - DNA, 15 bp, Homo sapiens
cattcctggagatgt

SEQ ID NO: 212578 - DNA, 15 bp, Homo sapiens
acattcctggagatg

SEQ ID NO: 212579 - DNA, 15 bp, Homo sapiens
cacattcctggagat

SEQ ID NO: 212580 - DNA, 15 bp, Homo sapiens
acacattcctggaga

SEQ ID NO: 212581 - DNA, 15 bp, Homo sapiens
tacacattcctggag

SEQ ID NO: 212582 - DNA, 15 bp, Homo sapiens
gtacacattcctgga

SEQ ID NO: 212583 - DNA, 15 bp, Homo sapiens
tgtacacattcctgg

SEQ ID NO: 212584 - DNA, 15 bp, Homo sapiens
atgtacacattcctg

SEQ ID NO: 212585 - DNA, 15 bp, Homo sapiens
tatgtacacattcct

SEQ ID NO: 212586 - DNA, 15 bp, Homo sapiens
ttatgtacacattcc

SEQ ID NO: 212587 - DNA, 15 bp, Homo sapiens
gttatgtacacattc

SEQ ID NO: 212588 - DNA, 15 bp, Homo sapiens
ggttatgtacacatt

SEQ ID NO: 212589 - DNA, 15 bp, Homo sapiens
aggttatgtacacat

SEQ ID NO: 212590 - DNA, 15 bp, Homo sapiens
taggttatgtacaca

SEQ ID NO: 212591 - DNA, 15 bp, Homo sapiens
ttaggttatgtacac

SEQ ID NO: 212592 - DNA, 15 bp, Homo sapiens
attaggttatgtaca

SEQ ID NO: 212593 - DNA, 15 bp, Homo sapiens
gattaggttatgtac

SEQ ID NO: 212594 - DNA, 15 bp, Homo sapiens
tgattaggttatgta

SEQ ID NO: 212595 - DNA, 15 bp, Homo sapiens
ctgattaggttatgt

SEQ ID NO: 212596 - DNA, 15 bp, Homo sapiens
cctgattaggttatg

SEQ ID NO: 212597 - DNA, 15 bp, Homo sapiens
tcctgattaggttat

SEQ ID NO: 212598 - DNA, 15 bp, Homo sapiens
ttcctgattaggtta

SEQ ID NO: 212599 - DNA, 15 bp, Homo sapiens
cagccacttggaagc

SEQ ID NO: 212600 - DNA, 15 bp, Homo sapiens
acagccacttggaag

SEQ ID NO: 212601 - DNA, 15 bp, Homo sapiens
cacagccacttggaa

SEQ ID NO: 212602 - DNA, 15 bp, Homo sapiens
acacagccacttgga

SEQ ID NO: 212603 - DNA, 15 bp, Homo sapiens
cacacagccacttgg

SEQ ID NO: 212604 - DNA, 15 bp, Homo sapiens
ccacacagccacttg

SEQ ID NO: 212605 - DNA, 15 bp, Homo sapiens
gccacacagccactt

SEQ ID NO: 212606 - DNA, 15 bp, Homo sapiens
ggccacacagccact

SEQ ID NO: 212607 - DNA, 15 bp, Homo sapiens
aggccacacagccac

SEQ ID NO: 212608 - DNA, 15 bp, Homo sapiens
aaggccacacagcca

SEQ ID NO: 212609 - DNA, 15 bp, Homo sapiens
caaggccacacagcc

SEQ ID NO: 212610 - DNA, 15 bp, Homo sapiens
ccaaggccacacagc

SEQ ID NO: 212611 - DNA, 15 bp, Homo sapiens
tccaaggccacacag

SEQ ID NO: 212612 - DNA, 15 bp, Homo sapiens
ttccaaggccacaca

SEQ ID NO: 212613 - DNA, 15 bp, Homo sapiens
tttccaaggccacac

SEQ ID NO: 212614 - DNA, 15 bp, Homo sapiens
gtttccaaggccaca

SEQ ID NO: 212615 - DNA, 15 bp, Homo sapiens
agtttccaaggccac

SEQ ID NO: 212616 - DNA, 15 bp, Homo sapiens
gagtttccaaggcca

SEQ ID NO: 212617 - DNA, 15 bp, Homo sapiens
agagtttccaaggcc

SEQ ID NO: 212618 - DNA, 15 bp, Homo sapiens
gagagtttccaaggc

SEQ ID NO: 212619 - DNA, 15 bp, Homo sapiens
agagagtttccaagg

SEQ ID NO: 212620 - DNA, 15 bp, Homo sapiens
cagagagtttccaag

SEQ ID NO: 212621 - DNA, 15 bp, Homo sapiens
acagagagtttccaa

SEQ ID NO: 212622 - DNA, 15 bp, Homo sapiens
cacagagagtttcca

SEQ ID NO: 212623 - DNA, 15 bp, Homo sapiens
gcacagagagtttcc

SEQ ID NO: 212624 - DNA, 15 bp, Homo sapiens
ggcacagagagtttc

SEQ ID NO: 212625 - DNA, 15 bp, Homo sapiens
aggcacagagagttt

SEQ ID NO: 212626 - DNA, 15 bp, Homo sapiens
aaggcacagagagtt

SEQ ID NO: 212627 - DNA, 15 bp, Homo sapiens
caaggcacagagagt

SEQ ID NO: 212628 - DNA, 15 bp, Homo sapiens
ccaaggcacagagag

SEQ ID NO: 212629 - DNA, 15 bp, Homo sapiens
accaaggcacagaga

SEQ ID NO: 212630 - DNA, 15 bp, Homo sapiens
gaccaaggcacagag

SEQ ID NO: 212631 - DNA, 15 bp, Homo sapiens
ggaccaaggcacaga

SEQ ID NO: 212632 - DNA, 15 bp, Homo sapiens
aggaccaaggcacag

SEQ ID NO: 212633 - DNA, 15 bp, Homo sapiens
gaggaccaaggcaca

SEQ ID NO: 212634 - DNA, 15 bp, Homo sapiens
tgaggaccaaggcac

SEQ ID NO: 212635 - DNA, 15 bp, Homo sapiens
ctgaggaccaaggca

SEQ ID NO: 212636 - DNA, 15 bp, Homo sapiens
cctgaggaccaaggc

SEQ ID NO: 212637 - DNA, 15 bp, Homo sapiens
ccctgaggaccaagg

SEQ ID NO: 212638 - DNA, 15 bp, Homo sapiens
tccctgaggaccaag

SEQ ID NO: 212639 - DNA, 15 bp, Homo sapiens
ctccctgaggaccaa

SEQ ID NO: 212640 - DNA, 15 bp, Homo sapiens
cctccctgaggacca

SEQ ID NO: 212641 - DNA, 15 bp, Homo sapiens
tcctccctgaggacc

SEQ ID NO: 212642 - DNA, 15 bp, Homo sapiens
ctcctccctgaggac

SEQ ID NO: 212643 - DNA, 15 bp, Homo sapiens
cctcctccctgagga

SEQ ID NO: 212644 - DNA, 15 bp, Homo sapiens
tcctcctccctgagg

SEQ ID NO: 212645 - DNA, 15 bp, Homo sapiens
gtcctcctccctgag

SEQ ID NO: 212646 - DNA, 15 bp, Homo sapiens
ggtcctcctccctga

SEQ ID NO: 212647 - DNA, 15 bp, Homo sapiens
aggtcctcctccctg

SEQ ID NO: 212648 - DNA, 15 bp, Homo sapiens
caggtcctcctccct

SEQ ID NO: 212649 - DNA, 15 bp, Homo sapiens
gcaggtcctcctccc

SEQ ID NO: 212650 - DNA, 15 bp, Homo sapiens
ggcaggtcctcctcc

SEQ ID NO: 212651 - DNA, 15 bp, Homo sapiens
gggcaggtcctcctc

SEQ ID NO: 212652 - DNA, 15 bp, Homo sapiens
tgggcaggtcctcct

SEQ ID NO: 212653 - DNA, 15 bp, Homo sapiens
atgggcaggtcctcc

SEQ ID NO: 212654 - DNA, 15 bp, Homo sapiens
tatgggcaggtcctc

SEQ ID NO: 212655 - DNA, 15 bp, Homo sapiens
gtatgggcaggtcct

SEQ ID NO: 212656 - DNA, 15 bp, Homo sapiens
ggtatgggcaggtcc

SEQ ID NO: 212657 - DNA, 15 bp, Homo sapiens
gggtatgggcaggtc

SEQ ID NO: 212658 - DNA, 15 bp, Homo sapiens
ggggtatgggcaggt

SEQ ID NO: 212659 - DNA, 15 bp, Homo sapiens
aggggtatgggcagg

SEQ ID NO: 212660 - DNA, 15 bp, Homo sapiens
caggggtatgggcag

SEQ ID NO: 212661 - DNA, 15 bp, Homo sapiens
ccaggggtatgggca

SEQ ID NO: 212662 - DNA, 15 bp, Homo sapiens
gccaggggtatgggc

SEQ ID NO: 212663 - DNA, 15 bp, Homo sapiens
ggccaggggtatggg

SEQ ID NO: 212664 - DNA, 15 bp, Homo sapiens
aggccaggggtatgg

SEQ ID NO: 212665 - DNA, 15 bp, Homo sapiens
aaggccaggggtatg

SEQ ID NO: 212666 - DNA, 15 bp, Homo sapiens
caaggccaggggtat

SEQ ID NO: 212667 - DNA, 15 bp, Homo sapiens
ccaaggccaggggta

SEQ ID NO: 212668 - DNA, 15 bp, Homo sapiens
accaaggccaggggt

SEQ ID NO: 212669 - DNA, 15 bp, Homo sapiens
caccaaggccagggg

SEQ ID NO: 212670 - DNA, 15 bp, Homo sapiens
gcaccaaggccaggg

SEQ ID NO: 212671 - DNA, 15 bp, Homo sapiens
ggcaccaaggccagg

SEQ ID NO: 212672 - DNA, 15 bp, Homo sapiens
aggcaccaaggccag

SEQ ID NO: 212673 - DNA, 15 bp, Homo sapiens
caggcaccaaggcca

SEQ ID NO: 212674 - DNA, 15 bp, Homo sapiens
gcaggcaccaaggcc

SEQ ID NO: 212675 - DNA, 15 bp, Homo sapiens
ggcaggcaccaaggc

SEQ ID NO: 212676 - DNA, 15 bp, Homo sapiens
gggcaggcaccaagg

SEQ ID NO: 212677 - DNA, 15 bp, Homo sapiens
agggcaggcaccaag

SEQ ID NO: 212678 - DNA, 15 bp, Homo sapiens
tagggcaggcaccaa

SEQ ID NO: 212679 - DNA, 15 bp, Homo sapiens
atagggcaggcacca

SEQ ID NO: 212680 - DNA, 15 bp, Homo sapiens
gatagggcaggcacc

SEQ ID NO: 212681 - DNA, 15 bp, Homo sapiens
agatagggcaggcac

SEQ ID NO: 212682 - DNA, 15 bp, Homo sapiens
aagatagggcaggca

SEQ ID NO: 212683 - DNA, 15 bp, Homo sapiens
aaagatagggcaggc

SEQ ID NO: 212684 - DNA, 15 bp, Homo sapiens
taaagatagggcagg

SEQ ID NO: 212685 - DNA, 15 bp, Homo sapiens
ctaaagatagggcag

SEQ ID NO: 212686 - DNA, 15 bp, Homo sapiens
tctaaagatagggca

SEQ ID NO: 212687 - DNA, 15 bp, Homo sapiens
ttctaaagatagggc

SEQ ID NO: 212688 - DNA, 15 bp, Homo sapiens
attctaaagataggg

SEQ ID NO: 212689 - DNA, 15 bp, Homo sapiens
cattctaaagatagg

SEQ ID NO: 212690 - DNA, 15 bp, Homo sapiens
ccattctaaagatag

SEQ ID NO: 212691 - DNA, 15 bp, Homo sapiens
accattctaaagata

SEQ ID NO: 212692 - DNA, 15 bp, Homo sapiens
aaccattctaaagat

SEQ ID NO: 212693 - DNA, 15 bp, Homo sapiens
caaccattctaaaga

SEQ ID NO: 212694 - DNA, 15 bp, Homo sapiens
ccaaccattctaaag

SEQ ID NO: 212695 - DNA, 15 bp, Homo sapiens
tccaaccattctaaa

SEQ ID NO: 212696 - DNA, 15 bp, Homo sapiens
ttccaaccattctaa

SEQ ID NO: 212697 - DNA, 15 bp, Homo sapiens
cttccaaccattcta

SEQ ID NO: 212698 - DNA, 15 bp, Homo sapiens
ccttccaaccattct

SEQ ID NO: 212699 - DNA, 15 bp, Homo sapiens
tccttccaaccattc

SEQ ID NO: 212700 - DNA, 15 bp, Homo sapiens
ttccttccaaccatt

SEQ ID NO: 212701 - DNA, 15 bp, Homo sapiens
gttccttccaaccat

SEQ ID NO: 212702 - DNA, 15 bp, Homo sapiens
tgttccttccaacca

SEQ ID NO: 212703 - DNA, 15 bp, Homo sapiens
ttgttccttccaacc

SEQ ID NO: 212704 - DNA, 15 bp, Homo sapiens
cttgttccttccaac

SEQ ID NO: 212705 - DNA, 15 bp, Homo sapiens
ccttgttccttccaa

SEQ ID NO: 212706 - DNA, 15 bp, Homo sapiens
cccttgttccttcca

SEQ ID NO: 212707 - DNA, 15 bp, Homo sapiens
tcccttgttccttcc

SEQ ID NO: 212708 - DNA, 15 bp, Homo sapiens
ctcccttgttccttc

SEQ ID NO: 212709 - DNA, 15 bp, Homo sapiens
gctcccttgttcctt

SEQ ID NO: 212710 - DNA, 15 bp, Homo sapiens
agctcccttgttcct

SEQ ID NO: 212711 - DNA, 15 bp, Homo sapiens
gagctcccttgttcc

SEQ ID NO: 212712 - DNA, 15 bp, Homo sapiens
tgagctcccttgttc

SEQ ID NO: 212713 - DNA, 15 bp, Homo sapiens
atgagctcccttgtt

SEQ ID NO: 212714 - DNA, 15 bp, Homo sapiens
tatgagctcccttgt

SEQ ID NO: 212715 - DNA, 15 bp, Homo sapiens
ctatgagctcccttg

SEQ ID NO: 212716 - DNA, 15 bp, Homo sapiens
tctatgagctccctt

SEQ ID NO: 212717 - DNA, 15 bp, Homo sapiens
atctatgagctccct

SEQ ID NO: 212718 - DNA, 15 bp, Homo sapiens
tatctatgagctccc

SEQ ID NO: 212719 - DNA, 15 bp, Homo sapiens
ctatctatgagctcc

SEQ ID NO: 212720 - DNA, 15 bp, Homo sapiens
cctatctatgagctc

SEQ ID NO: 212721 - DNA, 15 bp, Homo sapiens
ccctatctatgagct

SEQ ID NO: 212722 - DNA, 15 bp, Homo sapiens
gccctatctatgagc

SEQ ID NO: 212723 - DNA, 15 bp, Homo sapiens
agccctatctatgag

SEQ ID NO: 212724 - DNA, 15 bp, Homo sapiens
tagccctatctatga

SEQ ID NO: 212725 - DNA, 15 bp, Homo sapiens
atagccctatctatg

SEQ ID NO: 212726 - DNA, 15 bp, Homo sapiens
aatagccctatctat

SEQ ID NO: 212727 - DNA, 15 bp, Homo sapiens
aaatagccctatcta

SEQ ID NO: 212728 - DNA, 15 bp, Homo sapiens
caaatagccctatct

SEQ ID NO: 212729 - DNA, 15 bp, Homo sapiens
acaaatagccctatc

SEQ ID NO: 212730 - DNA, 15 bp, Homo sapiens
aacaaatagccctat

SEQ ID NO: 212731 - DNA, 15 bp, Homo sapiens
taacaaatagcccta

SEQ ID NO: 212732 - DNA, 15 bp, Homo sapiens
ttaacaaatagccct

SEQ ID NO: 212733 - DNA, 15 bp, Homo sapiens
tttaacaaatagccc

SEQ ID NO: 212734 - DNA, 15 bp, Homo sapiens
ttttaacaaatagcc

SEQ ID NO: 212735 - DNA, 15 bp, Homo sapiens
cttttaacaaatagc

SEQ ID NO: 212736 - DNA, 15 bp, Homo sapiens
tcttttaacaaatag

SEQ ID NO: 212737 - DNA, 15 bp, Homo sapiens
ttcttttaacaaata

SEQ ID NO: 212738 - DNA, 15 bp, Homo sapiens
cttcttttaacaaat

SEQ ID NO: 212739 - DNA, 15 bp, Homo sapiens
gcttcttttaacaaa

SEQ ID NO: 212740 - DNA, 15 bp, Homo sapiens
ggcttcttttaacaa

SEQ ID NO: 212741 - DNA, 15 bp, Homo sapiens
tggcttcttttaaca

SEQ ID NO: 212742 - DNA, 15 bp, Homo sapiens
ctggcttcttttaac

SEQ ID NO: 212743 - DNA, 15 bp, Homo sapiens
gctggcttcttttaa

SEQ ID NO: 212744 - DNA, 15 bp, Homo sapiens
tgctggcttctttta

SEQ ID NO: 212745 - DNA, 15 bp, Homo sapiens
gtgctggcttctttt

SEQ ID NO: 212746 - DNA, 15 bp, Homo sapiens
tgtgctggcttcttt

SEQ ID NO: 212747 - DNA, 15 bp, Homo sapiens
ctgtgctggcttctt

SEQ ID NO: 212748 - DNA, 15 bp, Homo sapiens
actgtgctggcttct

SEQ ID NO: 212749 - DNA, 15 bp, Homo sapiens
cactgtgctggcttc

SEQ ID NO: 212750 - DNA, 15 bp, Homo sapiens
tcactgtgctggctt

SEQ ID NO: 212751 - DNA, 15 bp, Homo sapiens
ctcactgtgctggct

SEQ ID NO: 212752 - DNA, 15 bp, Homo sapiens
cctcactgtgctggc

SEQ ID NO: 212753 - DNA, 15 bp, Homo sapiens
tcctcactgtgctgg

SEQ ID NO: 212754 - DNA, 15 bp, Homo sapiens
ctcctcactgtgctg

SEQ ID NO: 212755 - DNA, 15 bp, Homo sapiens
cctcctcactgtgct

SEQ ID NO: 212756 - DNA, 15 bp, Homo sapiens
ccctcctcactgtgc

SEQ ID NO: 212757 - DNA, 15 bp, Homo sapiens
tccctcctcactgtg

SEQ ID NO: 212758 - DNA, 15 bp, Homo sapiens
ttccctcctcactgt

SEQ ID NO: 212759 - DNA, 15 bp, Homo sapiens
cttccctcctcactg

SEQ ID NO: 212760 - DNA, 15 bp, Homo sapiens
ccttccctcctcact

SEQ ID NO: 212761 - DNA, 15 bp, Homo sapiens
accttccctcctcac

SEQ ID NO: 212762 - DNA, 15 bp, Homo sapiens
caccttccctcctca

SEQ ID NO: 212763 - DNA, 15 bp, Homo sapiens
gcaccttccctcctc

SEQ ID NO: 212764 - DNA, 15 bp, Homo sapiens
ggcaccttccctcct

SEQ ID NO: 212765 - DNA, 15 bp, Homo sapiens
gggcaccttccctcc

SEQ ID NO: 212766 - DNA, 15 bp, Homo sapiens
agggcaccttccctc

SEQ ID NO: 212767 - DNA, 15 bp, Homo sapiens
gagggcaccttccct

SEQ ID NO: 212768 - DNA, 15 bp, Homo sapiens
ggagggcaccttccc

SEQ ID NO: 212769 - DNA, 15 bp, Homo sapiens
aggagggcaccttcc

SEQ ID NO: 212770 - DNA, 15 bp, Homo sapiens
caggagggcaccttc

SEQ ID NO: 212771 - DNA, 15 bp, Homo sapiens
gcaggagggcacctt

SEQ ID NO: 212772 - DNA, 15 bp, Homo sapiens
tgcaggagggcacct

SEQ ID NO: 212773 - DNA, 15 bp, Homo sapiens
atgcaggagggcacc

SEQ ID NO: 212774 - DNA, 15 bp, Homo sapiens
catgcaggagggcac

SEQ ID NO: 212775 - DNA, 15 bp, Homo sapiens
ccatgcaggagggca

SEQ ID NO: 212776 - DNA, 15 bp, Homo sapiens
cccatgcaggagggc

SEQ ID NO: 212777 - DNA, 15 bp, Homo sapiens
acccatgcaggaggg

SEQ ID NO: 212778 - DNA, 15 bp, Homo sapiens
cacccatgcaggagg

SEQ ID NO: 212779 - DNA, 15 bp, Homo sapiens
ccacccatgcaggag

SEQ ID NO: 212780 - DNA, 15 bp, Homo sapiens
cccacccatgcagga

SEQ ID NO: 212781 - DNA, 15 bp, Homo sapiens
ccccacccatgcagg

SEQ ID NO: 212782 - DNA, 15 bp, Homo sapiens
gccccacccatgcag

SEQ ID NO: 212783 - DNA, 15 bp, Homo sapiens
ggccccacccatgca

SEQ ID NO: 212784 - DNA, 15 bp, Homo sapiens
tggccccacccatgc

SEQ ID NO: 212785 - DNA, 15 bp, Homo sapiens
atggccccacccatg

SEQ ID NO: 212786 - DNA, 15 bp, Homo sapiens
aatggccccacccat

SEQ ID NO: 212787 - DNA, 15 bp, Homo sapiens
gaatggccccaccca

SEQ ID NO: 212788 - DNA, 15 bp, Homo sapiens
agaatggccccaccc

SEQ ID NO: 212789 - DNA, 15 bp, Homo sapiens
cagaatggccccacc

SEQ ID NO: 212790 - DNA, 15 bp, Homo sapiens
ccagaatggccccac

SEQ ID NO: 212791 - DNA, 15 bp, Homo sapiens
cccagaatggcccca

SEQ ID NO: 212792 - DNA, 15 bp, Homo sapiens
ccccagaatggcccc

SEQ ID NO: 212793 - DNA, 15 bp, Homo sapiens
gccccagaatggccc

SEQ ID NO: 212794 - DNA, 15 bp, Homo sapiens
tgccccagaatggcc

SEQ ID NO: 212795 - DNA, 15 bp, Homo sapiens
gtgccccagaatggc

SEQ ID NO: 212796 - DNA, 15 bp, Homo sapiens
tgtgccccagaatgg

SEQ ID NO: 212797 - DNA, 15 bp, Homo sapiens
ctgtgccccagaatg

SEQ ID NO: 212798 - DNA, 15 bp, Homo sapiens
actgtgccccagaat

SEQ ID NO: 212799 - DNA, 15 bp, Homo sapiens
cactgtgccccagaa

SEQ ID NO: 212800 - DNA, 15 bp, Homo sapiens
gcactgtgccccaga

SEQ ID NO: 212801 - DNA, 15 bp, Homo sapiens
ggcactgtgccccag

SEQ ID NO: 212802 - DNA, 15 bp, Homo sapiens
gggcactgtgcccca

SEQ ID NO: 212803 - DNA, 15 bp, Homo sapiens
agggcactgtgcccc

SEQ ID NO: 212804 - DNA, 15 bp, Homo sapiens
cagggcactgtgccc

SEQ ID NO: 212805 - DNA, 15 bp, Homo sapiens
ccagggcactgtgcc

SEQ ID NO: 212806 - DNA, 15 bp, Homo sapiens
gccagggcactgtgc

SEQ ID NO: 212807 - DNA, 15 bp, Homo sapiens
agccagggcactgtg

SEQ ID NO: 212808 - DNA, 15 bp, Homo sapiens
cagccagggcactgt

SEQ ID NO: 212809 - DNA, 15 bp, Homo sapiens
gcagccagggcactg

SEQ ID NO: 212810 - DNA, 15 bp, Homo sapiens
tgcagccagggcact

SEQ ID NO: 212811 - DNA, 15 bp, Homo sapiens
atgcagccagggcac

SEQ ID NO: 212812 - DNA, 15 bp, Homo sapiens
aatgcagccagggca

SEQ ID NO: 212813 - DNA, 15 bp, Homo sapiens
taatgcagccagggc

SEQ ID NO: 212814 - DNA, 15 bp, Homo sapiens
ataatgcagccaggg

SEQ ID NO: 212815 - DNA, 15 bp, Homo sapiens
gataatgcagccagg

SEQ ID NO: 212816 - DNA, 15 bp, Homo sapiens
ggataatgcagccag

SEQ ID NO: 212817 - DNA, 15 bp, Homo sapiens
gggataatgcagcca

SEQ ID NO: 212818 - DNA, 15 bp, Homo sapiens
agggataatgcagcc

SEQ ID NO: 212819 - DNA, 15 bp, Homo sapiens
cagggataatgcagc

SEQ ID NO: 212820 - DNA, 15 bp, Homo sapiens
ccagggataatgcag

SEQ ID NO: 212821 - DNA, 15 bp, Homo sapiens
cccagggataatgca

SEQ ID NO: 212822 - DNA, 15 bp, Homo sapiens
acccagggataatgc

SEQ ID NO: 212823 - DNA, 15 bp, Homo sapiens
cacccagggataatg

SEQ ID NO: 212824 - DNA, 15 bp, Homo sapiens
ccacccagggataat

SEQ ID NO: 212825 - DNA, 15 bp, Homo sapiens
tccacccagggataa

SEQ ID NO: 212826 - DNA, 15 bp, Homo sapiens
ctccacccagggata

SEQ ID NO: 212827 - DNA, 15 bp, Homo sapiens
cctccacccagggat

SEQ ID NO: 212828 - DNA, 15 bp, Homo sapiens
tcctccacccaggga

SEQ ID NO: 212829 - DNA, 15 bp, Homo sapiens
atcctccacccaggg

SEQ ID NO: 212830 - DNA, 15 bp, Homo sapiens
catcctccacccagg

SEQ ID NO: 212831 - DNA, 15 bp, Homo sapiens
gcatcctccacccag

SEQ ID NO: 212832 - DNA, 15 bp, Homo sapiens
ggcatcctccaccca

SEQ ID NO: 212833 - DNA, 15 bp, Homo sapiens
aggcatcctccaccc

SEQ ID NO: 212834 - DNA, 15 bp, Homo sapiens
caggcatcctccacc

SEQ ID NO: 212835 - DNA, 15 bp, Homo sapiens
gcaggcatcctccac

SEQ ID NO: 212836 - DNA, 15 bp, Homo sapiens
agcaggcatcctcca

SEQ ID NO: 212837 - DNA, 15 bp, Homo sapiens
aagcaggcatcctcc

SEQ ID NO: 212838 - DNA, 15 bp, Homo sapiens
caagcaggcatcctc

SEQ ID NO: 212839 - DNA, 15 bp, Homo sapiens
acaagcaggcatcct

SEQ ID NO: 212840 - DNA, 15 bp, Homo sapiens
cacaagcaggcatcc

SEQ ID NO: 212841 - DNA, 15 bp, Homo sapiens
ccacaagcaggcatc

SEQ ID NO: 212842 - DNA, 15 bp, Homo sapiens
gccacaagcaggcat

SEQ ID NO: 212843 - DNA, 15 bp, Homo sapiens
agccacaagcaggca

SEQ ID NO: 212844 - DNA, 15 bp, Homo sapiens
cagccacaagcaggc

SEQ ID NO: 212845 - DNA, 15 bp, Homo sapiens
tcagccacaagcagg

SEQ ID NO: 212846 - DNA, 15 bp, Homo sapiens
atcagccacaagcag

SEQ ID NO: 212847 - DNA, 15 bp, Homo sapiens
catcagccacaagca

SEQ ID NO: 212848 - DNA, 15 bp, Homo sapiens
ccatcagccacaagc

SEQ ID NO: 212849 - DNA, 15 bp, Homo sapiens
tccatcagccacaag

SEQ ID NO: 212850 - DNA, 15 bp, Homo sapiens
ttccatcagccacaa

SEQ ID NO: 212851 - DNA, 15 bp, Homo sapiens
attccatcagccaca

SEQ ID NO: 212852 - DNA, 15 bp, Homo sapiens
aattccatcagccac

SEQ ID NO: 212853 - DNA, 15 bp, Homo sapiens
gaattccatcagcca

SEQ ID NO: 212854 - DNA, 15 bp, Homo sapiens
tgaattccatcagcc

SEQ ID NO: 212855 - DNA, 15 bp, Homo sapiens
ctgaattccatcagc

SEQ ID NO: 212856 - DNA, 15 bp, Homo sapiens
tctgaattccatcag

SEQ ID NO: 212857 - DNA, 15 bp, Homo sapiens
gtctgaattccatca

SEQ ID NO: 212858 - DNA, 15 bp, Homo sapiens
tgtctgaattccatc

SEQ ID NO: 212859 - DNA, 15 bp, Homo sapiens
ctgtctgaattccat

SEQ ID NO: 212860 - DNA, 15 bp, Homo sapiens
actgtctgaattcca

SEQ ID NO: 212861 - DNA, 15 bp, Homo sapiens
cactgtctgaattcc

SEQ ID NO: 212862 - DNA, 15 bp, Homo sapiens
acactgtctgaattc

SEQ ID NO: 212863 - DNA, 15 bp, Homo sapiens
cacactgtctgaatt

SEQ ID NO: 212864 - DNA, 15 bp, Homo sapiens
acacactgtctgaat

SEQ ID NO: 212865 - DNA, 15 bp, Homo sapiens
aacacactgtctgaa

SEQ ID NO: 212866 - DNA, 15 bp, Homo sapiens
aaacacactgtctga

SEQ ID NO: 212867 - DNA, 15 bp, Homo sapiens
gaaacacactgtctg

SEQ ID NO: 212868 - DNA, 15 bp, Homo sapiens
agaaacacactgtct

SEQ ID NO: 212869 - DNA, 15 bp, Homo sapiens
aagaaacacactgtc

SEQ ID NO: 212870 - DNA, 15 bp, Homo sapiens
aaagaaacacactgt

SEQ ID NO: 212871 - DNA, 15 bp, Homo sapiens
caaagaaacacactg

SEQ ID NO: 212872 - DNA, 15 bp, Homo sapiens
tcaaagaaacacact

SEQ ID NO: 212873 - DNA, 15 bp, Homo sapiens
atcaaagaaacacac

SEQ ID NO: 212874 - DNA, 15 bp, Homo sapiens
catcaaagaaacaca

SEQ ID NO: 212875 - DNA, 15 bp, Homo sapiens
gcatcaaagaaacac

SEQ ID NO: 212876 - DNA, 15 bp, Homo sapiens
agcatcaaagaaaca

SEQ ID NO: 212877 - DNA, 15 bp, Homo sapiens
tagcatcaaagaaac

SEQ ID NO: 212878 - DNA, 15 bp, Homo sapiens
gtagcatcaaagaaa

SEQ ID NO: 212879 - DNA, 15 bp, Homo sapiens
tgtagcatcaaagaa

SEQ ID NO: 212880 - DNA, 15 bp, Homo sapiens
ttgtagcatcaaaga

SEQ ID NO: 212881 - DNA, 15 bp, Homo sapiens
cttgtagcatcaaag

SEQ ID NO: 212882 - DNA, 15 bp, Homo sapiens
tcttgtagcatcaaa

SEQ ID NO: 212883 - DNA, 15 bp, Homo sapiens
gtcttgtagcatcaa

SEQ ID NO: 212884 - DNA, 15 bp, Homo sapiens
agtcttgtagcatca

SEQ ID NO: 212885 - DNA, 15 bp, Homo sapiens
cagtcttgtagcatc

SEQ ID NO: 212886 - DNA, 15 bp, Homo sapiens
ccagtcttgtagcat

SEQ ID NO: 212887 - DNA, 15 bp, Homo sapiens
gccagtcttgtagca

SEQ ID NO: 212888 - DNA, 15 bp, Homo sapiens
agccagtcttgtagc

SEQ ID NO: 212889 - DNA, 15 bp, Homo sapiens
aagccagtcttgtag

SEQ ID NO: 212890 - DNA, 15 bp, Homo sapiens
aaagccagtcttgta

SEQ ID NO: 212891 - DNA, 15 bp, Homo sapiens
gaaagccagtcttgt

SEQ ID NO: 212892 - DNA, 15 bp, Homo sapiens
ggaaagccagtcttg

SEQ ID NO: 212893 - DNA, 15 bp, Homo sapiens
aggaaagccagtctt

SEQ ID NO: 212894 - DNA, 15 bp, Homo sapiens
caggaaagccagtct

SEQ ID NO: 212895 - DNA, 15 bp, Homo sapiens
gcaggaaagccagtc

SEQ ID NO: 212896 - DNA, 15 bp, Homo sapiens
agcaggaaagccagt

SEQ ID NO: 212897 - DNA, 15 bp, Homo sapiens
cagcaggaaagccag

SEQ ID NO: 212898 - DNA, 15 bp, Homo sapiens
gcagcaggaaagcca

SEQ ID NO: 212899 - DNA, 15 bp, Homo sapiens
ggcagcaggaaagcc

SEQ ID NO: 212900 - DNA, 15 bp, Homo sapiens
gggcagcaggaaagc

SEQ ID NO: 212901 - DNA, 15 bp, Homo sapiens
ggggcagcaggaaag

SEQ ID NO: 212902 - DNA, 15 bp, Homo sapiens
tggggcagcaggaaa

SEQ ID NO: 212903 - DNA, 15 bp, Homo sapiens
gtggggcagcaggaa

SEQ ID NO: 212904 - DNA, 15 bp, Homo sapiens
agtggggcagcagga

SEQ ID NO: 212905 - DNA, 15 bp, Homo sapiens
aagtggggcagcagg

SEQ ID NO: 212906 - DNA, 15 bp, Homo sapiens
aaagtggggcagcag

SEQ ID NO: 212907 - DNA, 15 bp, Homo sapiens
caaagtggggcagca

SEQ ID NO: 212908 - DNA, 15 bp, Homo sapiens
acaaagtggggcagc

SEQ ID NO: 212909 - DNA, 15 bp, Homo sapiens
tacaaagtggggcag

SEQ ID NO: 212910 - DNA, 15 bp, Homo sapiens
atacaaagtggggca

SEQ ID NO: 212911 - DNA, 15 bp, Homo sapiens
tatacaaagtggggc

SEQ ID NO: 212912 - DNA, 15 bp, Homo sapiens
ttatacaaagtgggg

SEQ ID NO: 212913 - DNA, 15 bp, Homo sapiens
attatacaaagtggg

SEQ ID NO: 212914 - DNA, 15 bp, Homo sapiens
gattatacaaagtgg

SEQ ID NO: 212915 - DNA, 15 bp, Homo sapiens
cgattatacaaagtg

SEQ ID NO: 212916 - DNA, 15 bp, Homo sapiens
ccgattatacaaagt

SEQ ID NO: 212917 - DNA, 15 bp, Homo sapiens
cccgattatacaaag

SEQ ID NO: 212918 - DNA, 15 bp, Homo sapiens
acccgattatacaaa

SEQ ID NO: 212919 - DNA, 15 bp, Homo sapiens
gacccgattatacaa

SEQ ID NO: 212920 - DNA, 15 bp, Homo sapiens
agacccgattataca

SEQ ID NO: 212921 - DNA, 15 bp, Homo sapiens
aagacccgattatac

SEQ ID NO: 212922 - DNA, 15 bp, Homo sapiens
aaagacccgattata

SEQ ID NO: 212923 - DNA, 15 bp, Homo sapiens
aaaagacccgattat

SEQ ID NO: 212924 - DNA, 15 bp, Homo sapiens
aaaaagacccgatta

SEQ ID NO: 212925 - DNA, 15 bp, Homo sapiens
caaaaagacccgatt

SEQ ID NO: 212926 - DNA, 15 bp, Homo sapiens
ccaaaaagacccgat

SEQ ID NO: 212927 - DNA, 15 bp, Homo sapiens
gccaaaaagacccga

SEQ ID NO: 212928 - DNA, 15 bp, Homo sapiens
tgccaaaaagacccg

SEQ ID NO: 212929 - DNA, 15 bp, Homo sapiens
ctgccaaaaagaccc

SEQ ID NO: 212930 - DNA, 15 bp, Homo sapiens
cctgccaaaaagacc

SEQ ID NO: 212931 - DNA, 15 bp, Homo sapiens
ccctgccaaaaagac

SEQ ID NO: 212932 - DNA, 15 bp, Homo sapiens
tccctgccaaaaaga

SEQ ID NO: 212933 - DNA, 15 bp, Homo sapiens
ctccctgccaaaaag

SEQ ID NO: 212934 - DNA, 15 bp, Homo sapiens
cctccctgccaaaaa

SEQ ID NO: 212935 - DNA, 15 bp, Homo sapiens
tcctccctgccaaaa

SEQ ID NO: 212936 - DNA, 15 bp, Homo sapiens
gtcctccctgccaaa

SEQ ID NO: 212937 - DNA, 15 bp, Homo sapiens
agtcctccctgccaa

SEQ ID NO: 212938 - DNA, 15 bp, Homo sapiens
aagtcctccctgcca

SEQ ID NO: 212939 - DNA, 15 bp, Homo sapiens
taagtcctccctgcc

SEQ ID NO: 212940 - DNA, 15 bp, Homo sapiens
ctaagtcctccctgc

SEQ ID NO: 212941 - DNA, 15 bp, Homo sapiens
actaagtcctccctg

SEQ ID NO: 212942 - DNA, 15 bp, Homo sapiens
tactaagtcctccct

SEQ ID NO: 212943 - DNA, 15 bp, Homo sapiens
ctactaagtcctccc

SEQ ID NO: 212944 - DNA, 15 bp, Homo sapiens
gctactaagtcctcc

SEQ ID NO: 212945 - DNA, 15 bp, Homo sapiens
agctactaagtcctc

SEQ ID NO: 212946 - DNA, 15 bp, Homo sapiens
tagctactaagtcct

SEQ ID NO: 212947 - DNA, 15 bp, Homo sapiens
ctagctactaagtcc

SEQ ID NO: 212948 - DNA, 15 bp, Homo sapiens
gctagctactaagtc

SEQ ID NO: 212949 - DNA, 15 bp, Homo sapiens
cgctagctactaagt

SEQ ID NO: 212950 - DNA, 15 bp, Homo sapiens
acgctagctactaag

SEQ ID NO: 212951 - DNA, 15 bp, Homo sapiens
cacgctagctactaa

SEQ ID NO: 212952 - DNA, 15 bp, Homo sapiens
tcacgctagctacta

SEQ ID NO: 212953 - DNA, 15 bp, Homo sapiens
ctcacgctagctact

SEQ ID NO: 212954 - DNA, 15 bp, Homo sapiens
gctcacgctagctac

SEQ ID NO: 212955 - DNA, 15 bp, Homo sapiens
agctcacgctagcta

SEQ ID NO: 212956 - DNA, 15 bp, Homo sapiens
gagctcacgctagct

SEQ ID NO: 212957 - DNA, 15 bp, Homo sapiens
ggagctcacgctagc

SEQ ID NO: 212958 - DNA, 15 bp, Homo sapiens
gggagctcacgctag

SEQ ID NO: 212959 - DNA, 15 bp, Homo sapiens
tgggagctcacgcta

SEQ ID NO: 212960 - DNA, 15 bp, Homo sapiens
ttgggagctcacgct

SEQ ID NO: 212961 - DNA, 15 bp, Homo sapiens
cttgggagctcacgc

SEQ ID NO: 212962 - DNA, 15 bp, Homo sapiens
acttgggagctcacg

SEQ ID NO: 212963 - DNA, 15 bp, Homo sapiens
tacttgggagctcac

SEQ ID NO: 212964 - DNA, 15 bp, Homo sapiens
ctacttgggagctca

SEQ ID NO: 212965 - DNA, 15 bp, Homo sapiens
cctacttgggagctc

SEQ ID NO: 212966 - DNA, 15 bp, Homo sapiens
tcctacttgggagct

SEQ ID NO: 212967 - DNA, 15 bp, Homo sapiens
ttcctacttgggagc

SEQ ID NO: 212968 - DNA, 15 bp, Homo sapiens
gttcctacttgggag

SEQ ID NO: 212969 - DNA, 15 bp, Homo sapiens
agttcctacttggga

SEQ ID NO: 212970 - DNA, 15 bp, Homo sapiens
gagttcctacttggg

SEQ ID NO: 212971 - DNA, 15 bp, Homo sapiens
agagttcctacttgg

SEQ ID NO: 212972 - DNA, 15 bp, Homo sapiens
tagagttcctacttg

SEQ ID NO: 212973 - DNA, 15 bp, Homo sapiens
ctagagttcctactt

SEQ ID NO: 212974 - DNA, 15 bp, Homo sapiens
cctagagttcctact

SEQ ID NO: 212975 - DNA, 15 bp, Homo sapiens
tcctagagttcctac

SEQ ID NO: 212976 - DNA, 15 bp, Homo sapiens
ttcctagagttccta

SEQ ID NO: 212977 - DNA, 15 bp, Homo sapiens
attcctagagttcct

SEQ ID NO: 212978 - DNA, 15 bp, Homo sapiens
tattcctagagttcc

SEQ ID NO: 212979 - DNA, 15 bp, Homo sapiens
atattcctagagttc

SEQ ID NO: 212980 - DNA, 15 bp, Homo sapiens
aatattcctagagtt

SEQ ID NO: 212981 - DNA, 15 bp, Homo sapiens
gaatattcctagagt

SEQ ID NO: 212982 - DNA, 15 bp, Homo sapiens
tgaatattcctagag

SEQ ID NO: 212983 - DNA, 15 bp, Homo sapiens
gtgaatattcctaga

SEQ ID NO: 212984 - DNA, 15 bp, Homo sapiens
agtgaatattcctag

SEQ ID NO: 212985 - DNA, 15 bp, Homo sapiens
gagtgaatattccta

SEQ ID NO: 212986 - DNA, 15 bp, Homo sapiens
cgagtgaatattcct

SEQ ID NO: 212987 - DNA, 15 bp, Homo sapiens
ccgagtgaatattcc

SEQ ID NO: 212988 - DNA, 15 bp, Homo sapiens
cccgagtgaatattc

SEQ ID NO: 212989 - DNA, 15 bp, Homo sapiens
gcccgagtgaatatt

SEQ ID NO: 212990 - DNA, 15 bp, Homo sapiens
agcccgagtgaatat

SEQ ID NO: 212991 - DNA, 15 bp, Homo sapiens
cagcccgagtgaata

SEQ ID NO: 212992 - DNA, 15 bp, Homo sapiens
gcagcccgagtgaat

SEQ ID NO: 212993 - DNA, 15 bp, Homo sapiens
ggcagcccgagtgaa

SEQ ID NO: 212994 - DNA, 15 bp, Homo sapiens
cggcagcccgagtga

SEQ ID NO: 212995 - DNA, 15 bp, Homo sapiens
acggcagcccgagtg

SEQ ID NO: 212996 - DNA, 15 bp, Homo sapiens
aacggcagcccgagt

SEQ ID NO: 212997 - DNA, 15 bp, Homo sapiens
aaacggcagcccgag

SEQ ID NO: 212998 - DNA, 15 bp, Homo sapiens
caaacggcagcccga

SEQ ID NO: 212999 - DNA, 15 bp, Homo sapiens
tcaaacggcagcccg

SEQ ID NO: 213000 - DNA, 15 bp, Homo sapiens
atcaaacggcagccc

SEQ ID NO: 213001 - DNA, 15 bp, Homo sapiens
gatcaaacggcagcc

SEQ ID NO: 213002 - DNA, 15 bp, Homo sapiens
agatcaaacggcagc

SEQ ID NO: 213003 - DNA, 15 bp, Homo sapiens
cagatcaaacggcag

SEQ ID NO: 213004 - DNA, 15 bp, Homo sapiens
tcagatcaaacggca

SEQ ID NO: 213005 - DNA, 15 bp, Homo sapiens
ctcagatcaaacggc

SEQ ID NO: 213006 - DNA, 15 bp, Homo sapiens
gctcagatcaaacgg

SEQ ID NO: 213007 - DNA, 15 bp, Homo sapiens
tgctcagatcaaacg

SEQ ID NO: 213008 - DNA, 15 bp, Homo sapiens
ttgctcagatcaaac

SEQ ID NO: 213009 - DNA, 15 bp, Homo sapiens
cttgctcagatcaaa

SEQ ID NO: 213010 - DNA, 15 bp, Homo sapiens
tcttgctcagatcaa

SEQ ID NO: 213011 - DNA, 15 bp, Homo sapiens
ctcttgctcagatca

SEQ ID NO: 213012 - DNA, 15 bp, Homo sapiens
gctcttgctcagatc

SEQ ID NO: 213013 - DNA, 15 bp, Homo sapiens
tgctcttgctcagat

SEQ ID NO: 213014 - DNA, 15 bp, Homo sapiens
atgctcttgctcaga

SEQ ID NO: 213015 - DNA, 15 bp, Homo sapiens
catgctcttgctcag

SEQ ID NO: 213016 - DNA, 15 bp, Homo sapiens
tcatgctcttgctca

SEQ ID NO: 213017 - DNA, 15 bp, Homo sapiens
atcatgctcttgctc

SEQ ID NO: 213018 - DNA, 15 bp, Homo sapiens
aatcatgctcttgct

SEQ ID NO: 213019 - DNA, 15 bp, Homo sapiens
aaatcatgctcttgc

SEQ ID NO: 213020 - DNA, 15 bp, Homo sapiens
caaatcatgctcttg

SEQ ID NO: 213021 - DNA, 15 bp, Homo sapiens
tcaaatcatgctctt

SEQ ID NO: 213022 - DNA, 15 bp, Homo sapiens
atcaaatcatgctct

SEQ ID NO: 213023 - DNA, 15 bp, Homo sapiens
catcaaatcatgctc

SEQ ID NO: 213024 - DNA, 15 bp, Homo sapiens
ccatcaaatcatgct

SEQ ID NO: 213025 - DNA, 15 bp, Homo sapiens
cccatcaaatcatgc

SEQ ID NO: 213026 - DNA, 15 bp, Homo sapiens
tcccatcaaatcatg

SEQ ID NO: 213027 - DNA, 15 bp, Homo sapiens
ctcccatcaaatcat

SEQ ID NO: 213028 - DNA, 15 bp, Homo sapiens
cctcccatcaaatca

SEQ ID NO: 213029 - DNA, 15 bp, Homo sapiens
gcctcccatcaaatc

SEQ ID NO: 213030 - DNA, 15 bp, Homo sapiens
agcctcccatcaaat

SEQ ID NO: 213031 - DNA, 15 bp, Homo sapiens
cagcctcccatcaaa

SEQ ID NO: 213032 - DNA, 15 bp, Homo sapiens
gcagcctcccatcaa

SEQ ID NO: 213033 - DNA, 15 bp, Homo sapiens
agcagcctcccatca

SEQ ID NO: 213034 - DNA, 15 bp, Homo sapiens
gagcagcctcccatc

SEQ ID NO: 213035 - DNA, 15 bp, Homo sapiens
agagcagcctcccat

SEQ ID NO: 213036 - DNA, 15 bp, Homo sapiens
cagagcagcctccca

SEQ ID NO: 213037 - DNA, 15 bp, Homo sapiens
ccagagcagcctccc

SEQ ID NO: 213038 - DNA, 15 bp, Homo sapiens
cccagagcagcctcc

SEQ ID NO: 213039 - DNA, 15 bp, Homo sapiens
gcccagagcagcctc

SEQ ID NO: 213040 - DNA, 15 bp, Homo sapiens
ggcccagagcagcct

SEQ ID NO: 213041 - DNA, 15 bp, Homo sapiens
aggcccagagcagcc

SEQ ID NO: 213042 - DNA, 15 bp, Homo sapiens
aaggcccagagcagc

SEQ ID NO: 213043 - DNA, 15 bp, Homo sapiens
taaggcccagagcag

SEQ ID NO: 213044 - DNA, 15 bp, Homo sapiens
gtaaggcccagagca

SEQ ID NO: 213045 - DNA, 15 bp, Homo sapiens
tgtaaggcccagagc

SEQ ID NO: 213046 - DNA, 15 bp, Homo sapiens
atgtaaggcccagag

SEQ ID NO: 213047 - DNA, 15 bp, Homo sapiens
aatgtaaggcccaga

SEQ ID NO: 213048 - DNA, 15 bp, Homo sapiens
aaatgtaaggcccag

SEQ ID NO: 213049 - DNA, 15 bp, Homo sapiens
caaatgtaaggccca

SEQ ID NO: 213050 - DNA, 15 bp, Homo sapiens
acaaatgtaaggccc

SEQ ID NO: 213051 - DNA, 15 bp, Homo sapiens
aacaaatgtaaggcc

SEQ ID NO: 213052 - DNA, 15 bp, Homo sapiens
aaacaaatgtaaggc

SEQ ID NO: 213053 - DNA, 15 bp, Homo sapiens
gaaacaaatgtaagg

SEQ ID NO: 213054 - DNA, 15 bp, Homo sapiens
ggaaacaaatgtaag

SEQ ID NO: 213055 - DNA, 15 bp, Homo sapiens
gggaaacaaatgtaa

SEQ ID NO: 213056 - DNA, 15 bp, Homo sapiens
agggaaacaaatgta

SEQ ID NO: 213057 - DNA, 15 bp, Homo sapiens
gagggaaacaaatgt

SEQ ID NO: 213058 - DNA, 15 bp, Homo sapiens
tgagggaaacaaatg

SEQ ID NO: 213059 - DNA, 15 bp, Homo sapiens
atgagggaaacaaat

SEQ ID NO: 213060 - DNA, 15 bp, Homo sapiens
aatgagggaaacaaa

SEQ ID NO: 213061 - DNA, 15 bp, Homo sapiens
aaatgagggaaacaa

SEQ ID NO: 213062 - DNA, 15 bp, Homo sapiens
taaatgagggaaaca

SEQ ID NO: 213063 - DNA, 15 bp, Homo sapiens
ctaaatgagggaaac

SEQ ID NO: 213064 - DNA, 15 bp, Homo sapiens
tctaaatgagggaaa

SEQ ID NO: 213065 - DNA, 15 bp, Homo sapiens
ttctaaatgagggaa

SEQ ID NO: 213066 - DNA, 15 bp, Homo sapiens
tttctaaatgaggga

SEQ ID NO: 213067 - DNA, 15 bp, Homo sapiens
ttttctaaatgaggg

SEQ ID NO: 213068 - DNA, 15 bp, Homo sapiens
tttttctaaatgagg

SEQ ID NO: 213069 - DNA, 15 bp, Homo sapiens
ctttttctaaatgag

SEQ ID NO: 213070 - DNA, 15 bp, Homo sapiens
cctttttctaaatga

SEQ ID NO: 213071 - DNA, 15 bp, Homo sapiens
gcctttttctaaatg

SEQ ID NO: 213072 - DNA, 15 bp, Homo sapiens
tgcctttttctaaat

SEQ ID NO: 213073 - DNA, 15 bp, Homo sapiens
ctgcctttttctaaa

SEQ ID NO: 213074 - DNA, 15 bp, Homo sapiens
actgcctttttctaa

SEQ ID NO: 213075 - DNA, 15 bp, Homo sapiens
tactgcctttttcta

SEQ ID NO: 213076 - DNA, 15 bp, Homo sapiens
ttactgcctttttct

SEQ ID NO: 213077 - DNA, 15 bp, Homo sapiens
tttactgcctttttc

SEQ ID NO: 213078 - DNA, 15 bp, Homo sapiens
gtttactgccttttt

SEQ ID NO: 213079 - DNA, 15 bp, Homo sapiens
tgtttactgcctttt

SEQ ID NO: 213080 - DNA, 15 bp, Homo sapiens
ctgtttactgccttt

SEQ ID NO: 213081 - DNA, 15 bp, Homo sapiens
actgtttactgcctt

SEQ ID NO: 213082 - DNA, 15 bp, Homo sapiens
aactgtttactgcct

SEQ ID NO: 213083 - DNA, 15 bp, Homo sapiens
aaactgtttactgcc

SEQ ID NO: 213084 - DNA, 15 bp, Homo sapiens
aaaactgtttactgc

SEQ ID NO: 213085 - DNA, 15 bp, Homo sapiens
aaaaactgtttactg

SEQ ID NO: 213086 - DNA, 15 bp, Homo sapiens
taaaaactgtttact

SEQ ID NO: 213087 - DNA, 15 bp, Homo sapiens
ttaaaaactgtttac

SEQ ID NO: 213088 - DNA, 15 bp, Homo sapiens
gttaaaaactgttta

SEQ ID NO: 213089 - DNA, 15 bp, Homo sapiens
agttaaaaactgttt

SEQ ID NO: 213090 - DNA, 15 bp, Homo sapiens
tagttaaaaactgtt

SEQ ID NO: 213091 - DNA, 15 bp, Homo sapiens
gtagttaaaaactgt

SEQ ID NO: 213092 - DNA, 15 bp, Homo sapiens
tgtagttaaaaactg

SEQ ID NO: 213093 - DNA, 15 bp, Homo sapiens
atgtagttaaaaact

SEQ ID NO: 213094 - DNA, 15 bp, Homo sapiens
aatgtagttaaaaac

SEQ ID NO: 213095 - DNA, 15 bp, Homo sapiens
caatgtagttaaaaa

SEQ ID NO: 213096 - DNA, 15 bp, Homo sapiens
gcaatgtagttaaaa

SEQ ID NO: 213097 - DNA, 15 bp, Homo sapiens
cgcaatgtagttaaa

SEQ ID NO: 213098 - DNA, 15 bp, Homo sapiens
tcgcaatgtagttaa

SEQ ID NO: 213099 - DNA, 15 bp, Homo sapiens
atcgcaatgtagtta

SEQ ID NO: 213100 - DNA, 15 bp, Homo sapiens
aatcgcaatgtagtt

SEQ ID NO: 213101 - DNA, 15 bp, Homo sapiens
caatcgcaatgtagt

SEQ ID NO: 213102 - DNA, 15 bp, Homo sapiens
acaatcgcaatgtag

SEQ ID NO: 213103 - DNA, 15 bp, Homo sapiens
cacaatcgcaatgta

SEQ ID NO: 213104 - DNA, 15 bp, Homo sapiens
tcacaatcgcaatgt

SEQ ID NO: 213105 - DNA, 15 bp, Homo sapiens
ctcacaatcgcaatg

SEQ ID NO: 213106 - DNA, 15 bp, Homo sapiens
cctcacaatcgcaat

SEQ ID NO: 213107 - DNA, 15 bp, Homo sapiens
gcctcacaatcgcaa

SEQ ID NO: 213108 - DNA, 15 bp, Homo sapiens
agcctcacaatcgca

SEQ ID NO: 213109 - DNA, 15 bp, Homo sapiens
aagcctcacaatcgc

SEQ ID NO: 213110 - DNA, 15 bp, Homo sapiens
aaagcctcacaatcg

SEQ ID NO: 213111 - DNA, 15 bp, Homo sapiens
aaaagcctcacaatc

SEQ ID NO: 213112 - DNA, 15 bp, Homo sapiens
gaaaagcctcacaat

SEQ ID NO: 213113 - DNA, 15 bp, Homo sapiens
ggaaaagcctcacaa

SEQ ID NO: 213114 - DNA, 15 bp, Homo sapiens
aggaaaagcctcaca

SEQ ID NO: 213115 - DNA, 15 bp, Homo sapiens
taggaaaagcctcac

SEQ ID NO: 213116 - DNA, 15 bp, Homo sapiens
ataggaaaagcctca

SEQ ID NO: 213117 - DNA, 15 bp, Homo sapiens
tataggaaaagcctc

SEQ ID NO: 213118 - DNA, 15 bp, Homo sapiens
atataggaaaagcct

SEQ ID NO: 213119 - DNA, 15 bp, Homo sapiens
tatataggaaaagcc

SEQ ID NO: 213120 - DNA, 15 bp, Homo sapiens
ttatataggaaaagc

SEQ ID NO: 213121 - DNA, 15 bp, Homo sapiens
gttatataggaaaag

SEQ ID NO: 213122 - DNA, 15 bp, Homo sapiens
agttatataggaaaa

SEQ ID NO: 213123 - DNA, 15 bp, Homo sapiens
aagttatataggaaa

SEQ ID NO: 213124 - DNA, 15 bp, Homo sapiens
aaagttatataggaa

SEQ ID NO: 213125 - DNA, 15 bp, Homo sapiens
aaaagttatatagga

SEQ ID NO: 213126 - DNA, 15 bp, Homo sapiens
aaaaagttatatagg

SEQ ID NO: 213127 - DNA, 15 bp, Homo sapiens
aaaaaagttatatag

SEQ ID NO: 213128 - DNA, 15 bp, Homo sapiens
aaaaaaagttatata

SEQ ID NO: 213129 - DNA, 15 bp, Homo sapiens
gaaaaaaagttatat

SEQ ID NO: 213130 - DNA, 15 bp, Homo sapiens
ggaaaaaaagttata

SEQ ID NO: 213131 - DNA, 15 bp, Homo sapiens
aggaaaaaaagttat

SEQ ID NO: 213132 - DNA, 15 bp, Homo sapiens
caggaaaaaaagtta

SEQ ID NO: 213133 - DNA, 15 bp, Homo sapiens
ccaggaaaaaaagtt

SEQ ID NO: 213134 - DNA, 15 bp, Homo sapiens
tccaggaaaaaaagt

SEQ ID NO: 213135 - DNA, 15 bp, Homo sapiens
ttccaggaaaaaaag

SEQ ID NO: 213136 - DNA, 15 bp, Homo sapiens
attccaggaaaaaaa

SEQ ID NO: 213137 - DNA, 15 bp, Homo sapiens
cattccaggaaaaaa

SEQ ID NO: 213138 - DNA, 15 bp, Homo sapiens
ccattccaggaaaaa

SEQ ID NO: 213139 - DNA, 15 bp, Homo sapiens
tccattccaggaaaa

SEQ ID NO: 213140 - DNA, 15 bp, Homo sapiens
ttccattccaggaaa

SEQ ID NO: 213141 - DNA, 15 bp, Homo sapiens
gttccattccaggaa

SEQ ID NO: 213142 - DNA, 15 bp, Homo sapiens
ggttccattccagga

SEQ ID NO: 213143 - DNA, 15 bp, Homo sapiens
tggttccattccagg

SEQ ID NO: 213144 - DNA, 15 bp, Homo sapiens
ctggttccattccag

SEQ ID NO: 213145 - DNA, 15 bp, Homo sapiens
tctggttccattcca

SEQ ID NO: 213146 - DNA, 15 bp, Homo sapiens
gtctggttccattcc

SEQ ID NO: 213147 - DNA, 15 bp, Homo sapiens
tgtctggttccattc

SEQ ID NO: 213148 - DNA, 15 bp, Homo sapiens
ctgtctggttccatt

SEQ ID NO: 213149 - DNA, 15 bp, Homo sapiens
cctgtctggttccat

SEQ ID NO: 213150 - DNA, 15 bp, Homo sapiens
tcctgtctggttcca

SEQ ID NO: 213151 - DNA, 15 bp, Homo sapiens
atcctgtctggttcc

SEQ ID NO: 213152 - DNA, 15 bp, Homo sapiens
catcctgtctggttc

SEQ ID NO: 213153 - DNA, 15 bp, Homo sapiens
ccatcctgtctggtt

SEQ ID NO: 213154 - DNA, 15 bp, Homo sapiens
tccatcctgtctggt

SEQ ID NO: 213155 - DNA, 15 bp, Homo sapiens
ctccatcctgtctgg

SEQ ID NO: 213156 - DNA, 15 bp, Homo sapiens
cctccatcctgtctg

SEQ ID NO: 213157 - DNA, 15 bp, Homo sapiens
gcctccatcctgtct

SEQ ID NO: 213158 - DNA, 15 bp, Homo sapiens
tgcctccatcctgtc

SEQ ID NO: 213159 - DNA, 15 bp, Homo sapiens
gtgcctccatcctgt

SEQ ID NO: 213160 - DNA, 15 bp, Homo sapiens
agtgcctccatcctg

SEQ ID NO: 213161 - DNA, 15 bp, Homo sapiens
cagtgcctccatcct

SEQ ID NO: 213162 - DNA, 15 bp, Homo sapiens
gcagtgcctccatcc

SEQ ID NO: 213163 - DNA, 15 bp, Homo sapiens
tgcagtgcctccatc

SEQ ID NO: 213164 - DNA, 15 bp, Homo sapiens
gtgcagtgcctccat

SEQ ID NO: 213165 - DNA, 15 bp, Homo sapiens
agtgcagtgcctcca

SEQ ID NO: 213166 - DNA, 15 bp, Homo sapiens
gagtgcagtgcctcc

SEQ ID NO: 213167 - DNA, 15 bp, Homo sapiens
cgagtgcagtgcctc

SEQ ID NO: 213168 - DNA, 15 bp, Homo sapiens
gcgagtgcagtgcct

SEQ ID NO: 213169 - DNA, 15 bp, Homo sapiens
tgcgagtgcagtgcc

SEQ ID NO: 213170 - DNA, 15 bp, Homo sapiens
ctgcgagtgcagtgc

SEQ ID NO: 213171 - DNA, 15 bp, Homo sapiens
cctgcgagtgcagtg

SEQ ID NO: 213172 - DNA, 15 bp, Homo sapiens
gcctgcgagtgcagt

SEQ ID NO: 213173 - DNA, 15 bp, Homo sapiens
tgcctgcgagtgcag

SEQ ID NO: 213174 - DNA, 15 bp, Homo sapiens
ttgcctgcgagtgca

SEQ ID NO: 213175 - DNA, 15 bp, Homo sapiens
gttgcctgcgagtgc

SEQ ID NO: 213176 - DNA, 15 bp, Homo sapiens
tgttgcctgcgagtg

SEQ ID NO: 213177 - DNA, 15 bp, Homo sapiens
atgttgcctgcgagt

SEQ ID NO: 213178 - DNA, 15 bp, Homo sapiens
catgttgcctgcgag

SEQ ID NO: 213179 - DNA, 15 bp, Homo sapiens
ccatgttgcctgcga

SEQ ID NO: 213180 - DNA, 15 bp, Homo sapiens
cccatgttgcctgcg

SEQ ID NO: 213181 - DNA, 15 bp, Homo sapiens
acccatgttgcctgc

SEQ ID NO: 213182 - DNA, 15 bp, Homo sapiens
aacccatgttgcctg

SEQ ID NO: 213183 - DNA, 15 bp, Homo sapiens
aaacccatgttgcct

SEQ ID NO: 213184 - DNA, 15 bp, Homo sapiens
aaaacccatgttgcc

SEQ ID NO: 213185 - DNA, 15 bp, Homo sapiens
gaaaacccatgttgc

SEQ ID NO: 213186 - DNA, 15 bp, Homo sapiens
ggaaaacccatgttg

SEQ ID NO: 213187 - DNA, 15 bp, Homo sapiens
gggaaaacccatgtt

SEQ ID NO: 213188 - DNA, 15 bp, Homo sapiens
tgggaaaacccatgt

SEQ ID NO: 213189 - DNA, 15 bp, Homo sapiens
ctgggaaaacccatg

SEQ ID NO: 213190 - DNA, 15 bp, Homo sapiens
gctgggaaaacccat

SEQ ID NO: 213191 - DNA, 15 bp, Homo sapiens
ggctgggaaaaccca

SEQ ID NO: 213192 - DNA, 15 bp, Homo sapiens
gggctgggaaaaccc

SEQ ID NO: 213193 - DNA, 15 bp, Homo sapiens
ggggctgggaaaacc

SEQ ID NO: 213194 - DNA, 15 bp, Homo sapiens
aggggctgggaaaac

SEQ ID NO: 213195 - DNA, 15 bp, Homo sapiens
gaggggctgggaaaa

SEQ ID NO: 213196 - DNA, 15 bp, Homo sapiens
ggaggggctgggaaa

SEQ ID NO: 213197 - DNA, 15 bp, Homo sapiens
tggaggggctgggaa

SEQ ID NO: 213198 - DNA, 15 bp, Homo sapiens
atggaggggctggga

SEQ ID NO: 213199 - DNA, 15 bp, Homo sapiens
gatggaggggctggg

SEQ ID NO: 213200 - DNA, 15 bp, Homo sapiens
agatggaggggctgg

SEQ ID NO: 213201 - DNA, 15 bp, Homo sapiens
aagatggaggggctg

SEQ ID NO: 213202 - DNA, 15 bp, Homo sapiens
gaagatggaggggct

SEQ ID NO: 213203 - DNA, 15 bp, Homo sapiens
agaagatggaggggc

SEQ ID NO: 213204 - DNA, 15 bp, Homo sapiens
aagaagatggagggg

SEQ ID NO: 213205 - DNA, 15 bp, Homo sapiens
caagaagatggaggg

SEQ ID NO: 213206 - DNA, 15 bp, Homo sapiens
tcaagaagatggagg

SEQ ID NO: 213207 - DNA, 15 bp, Homo sapiens
gtcaagaagatggag

SEQ ID NO: 213208 - DNA, 15 bp, Homo sapiens
ggtcaagaagatgga

SEQ ID NO: 213209 - DNA, 15 bp, Homo sapiens
aggtcaagaagatgg

SEQ ID NO: 213210 - DNA, 15 bp, Homo sapiens
aaggtcaagaagatg

SEQ ID NO: 213211 - DNA, 15 bp, Homo sapiens
gaaggtcaagaagat

SEQ ID NO: 213212 - DNA, 15 bp, Homo sapiens
ggaaggtcaagaaga

SEQ ID NO: 213213 - DNA, 15 bp, Homo sapiens
aggaaggtcaagaag

SEQ ID NO: 213214 - DNA, 15 bp, Homo sapiens
taggaaggtcaagaa

SEQ ID NO: 213215 - DNA, 15 bp, Homo sapiens
ctaggaaggtcaaga

SEQ ID NO: 213216 - DNA, 15 bp, Homo sapiens
cctaggaaggtcaag

SEQ ID NO: 213217 - DNA, 15 bp, Homo sapiens
ccctaggaaggtcaa

SEQ ID NO: 213218 - DNA, 15 bp, Homo sapiens
tccctaggaaggtca

SEQ ID NO: 213219 - DNA, 15 bp, Homo sapiens
atccctaggaaggtc

SEQ ID NO: 213220 - DNA, 15 bp, Homo sapiens
aatccctaggaaggt

SEQ ID NO: 213221 - DNA, 15 bp, Homo sapiens
aaatccctaggaagg

SEQ ID NO: 213222 - DNA, 15 bp, Homo sapiens
caaatccctaggaag

SEQ ID NO: 213223 - DNA, 15 bp, Homo sapiens
acaaatccctaggaa

SEQ ID NO: 213224 - DNA, 15 bp, Homo sapiens
aacaaatccctagga

SEQ ID NO: 213225 - DNA, 15 bp, Homo sapiens
taacaaatccctagg

SEQ ID NO: 213226 - DNA, 15 bp, Homo sapiens
ttaacaaatccctag

SEQ ID NO: 213227 - DNA, 15 bp, Homo sapiens
attaacaaatcccta

SEQ ID NO: 213228 - DNA, 15 bp, Homo sapiens
aattaacaaatccct

SEQ ID NO: 213229 - DNA, 15 bp, Homo sapiens
gaattaacaaatccc

SEQ ID NO: 213230 - DNA, 15 bp, Homo sapiens
tgaattaacaaatcc

SEQ ID NO: 213231 - DNA, 15 bp, Homo sapiens
ctgaattaacaaatc

SEQ ID NO: 213232 - DNA, 15 bp, Homo sapiens
gctgaattaacaaat

SEQ ID NO: 213233 - DNA, 15 bp, Homo sapiens
agctgaattaacaaa

SEQ ID NO: 213234 - DNA, 15 bp, Homo sapiens
gagctgaattaacaa

SEQ ID NO: 213235 - DNA, 15 bp, Homo sapiens
tgagctgaattaaca

SEQ ID NO: 213236 - DNA, 15 bp, Homo sapiens
ctgagctgaattaac

SEQ ID NO: 213237 - DNA, 15 bp, Homo sapiens
tctgagctgaattaa

SEQ ID NO: 213238 - DNA, 15 bp, Homo sapiens
atctgagctgaatta

SEQ ID NO: 213239 - DNA, 15 bp, Homo sapiens
aatctgagctgaatt

SEQ ID NO: 213240 - DNA, 15 bp, Homo sapiens
caatctgagctgaat

SEQ ID NO: 213241 - DNA, 15 bp, Homo sapiens
ccaatctgagctgaa

SEQ ID NO: 213242 - DNA, 15 bp, Homo sapiens
gccaatctgagctga

SEQ ID NO: 213243 - DNA, 15 bp, Homo sapiens
ggccaatctgagctg

SEQ ID NO: 213244 - DNA, 15 bp, Homo sapiens
aggccaatctgagct

SEQ ID NO: 213245 - DNA, 15 bp, Homo sapiens
aaggccaatctgagc

SEQ ID NO: 213246 - DNA, 15 bp, Homo sapiens
aaaggccaatctgag

SEQ ID NO: 213247 - DNA, 15 bp, Homo sapiens
gaaaggccaatctga

SEQ ID NO: 213248 - DNA, 15 bp, Homo sapiens
ggaaaggccaatctg

SEQ ID NO: 213249 - DNA, 15 bp, Homo sapiens
tggaaaggccaatct

SEQ ID NO: 213250 - DNA, 15 bp, Homo sapiens
ctggaaaggccaatc

SEQ ID NO: 213251 - DNA, 15 bp, Homo sapiens
cctggaaaggccaat

SEQ ID NO: 213252 - DNA, 15 bp, Homo sapiens
tcctggaaaggccaa

SEQ ID NO: 213253 - DNA, 15 bp, Homo sapiens
ttcctggaaaggcca

SEQ ID NO: 213254 - DNA, 15 bp, Homo sapiens
cttcctggaaaggcc

SEQ ID NO: 213255 - DNA, 15 bp, Homo sapiens
gcttcctggaaaggc

SEQ ID NO: 213256 - DNA, 15 bp, Homo sapiens
agcttcctggaaagg

SEQ ID NO: 213257 - DNA, 15 bp, Homo sapiens
tagcttcctggaaag

SEQ ID NO: 213258 - DNA, 15 bp, Homo sapiens
gtagcttcctggaaa

SEQ ID NO: 213259 - DNA, 15 bp, Homo sapiens
ggtagcttcctggaa

SEQ ID NO: 213260 - DNA, 15 bp, Homo sapiens
tggtagcttcctgga

SEQ ID NO: 213261 - DNA, 15 bp, Homo sapiens
ctggtagcttcctgg

SEQ ID NO: 213262 - DNA, 15 bp, Homo sapiens
cctggtagcttcctg

SEQ ID NO: 213263 - DNA, 15 bp, Homo sapiens
gcctggtagcttcct

SEQ ID NO: 213264 - DNA, 15 bp, Homo sapiens
agcctggtagcttcc

SEQ ID NO: 213265 - DNA, 15 bp, Homo sapiens
gagcctggtagcttc

SEQ ID NO: 213266 - DNA, 15 bp, Homo sapiens
agagcctggtagctt

SEQ ID NO: 213267 - DNA, 15 bp, Homo sapiens
gagagcctggtagct

SEQ ID NO: 213268 - DNA, 15 bp, Homo sapiens
tgagagcctggtagc

SEQ ID NO: 213269 - DNA, 15 bp, Homo sapiens
ctgagagcctggtag

SEQ ID NO: 213270 - DNA, 15 bp, Homo sapiens
tctgagagcctggta

SEQ ID NO: 213271 - DNA, 15 bp, Homo sapiens
ttctgagagcctggt

SEQ ID NO: 213272 - DNA, 15 bp, Homo sapiens
attctgagagcctgg

SEQ ID NO: 213273 - DNA, 15 bp, Homo sapiens
cattctgagagcctg

SEQ ID NO: 213274 - DNA, 15 bp, Homo sapiens
gcattctgagagcct

SEQ ID NO: 213275 - DNA, 15 bp, Homo sapiens
ggcattctgagagcc

SEQ ID NO: 213276 - DNA, 15 bp, Homo sapiens
gggcattctgagagc

SEQ ID NO: 213277 - DNA, 15 bp, Homo sapiens
cgggcattctgagag

SEQ ID NO: 213278 - DNA, 15 bp, Homo sapiens
acgggcattctgaga

SEQ ID NO: 213279 - DNA, 15 bp, Homo sapiens
cacgggcattctgag

SEQ ID NO: 213280 - DNA, 15 bp, Homo sapiens
gcacgggcattctga

SEQ ID NO: 213281 - DNA, 15 bp, Homo sapiens
agcacgggcattctg

SEQ ID NO: 213282 - DNA, 15 bp, Homo sapiens
cagcacgggcattct

SEQ ID NO: 213283 - DNA, 15 bp, Homo sapiens
ccagcacgggcattc

SEQ ID NO: 213284 - DNA, 15 bp, Homo sapiens
tccagcacgggcatt

SEQ ID NO: 213285 - DNA, 15 bp, Homo sapiens
ctccagcacgggcat

SEQ ID NO: 213286 - DNA, 15 bp, Homo sapiens
cctccagcacgggca

SEQ ID NO: 213287 - DNA, 15 bp, Homo sapiens
ccctccagcacgggc

SEQ ID NO: 213288 - DNA, 15 bp, Homo sapiens
tccctccagcacggg

SEQ ID NO: 213289 - DNA, 15 bp, Homo sapiens
ctccctccagcacgg

SEQ ID NO: 213290 - DNA, 15 bp, Homo sapiens
cctccctccagcacg

SEQ ID NO: 213291 - DNA, 15 bp, Homo sapiens
gcctccctccagcac

SEQ ID NO: 213292 - DNA, 15 bp, Homo sapiens
agcctccctccagca

SEQ ID NO: 213293 - DNA, 15 bp, Homo sapiens
cagcctccctccagc

SEQ ID NO: 213294 - DNA, 15 bp, Homo sapiens
tcagcctccctccag

SEQ ID NO: 213295 - DNA, 15 bp, Homo sapiens
atcagcctccctcca

SEQ ID NO: 213296 - DNA, 15 bp, Homo sapiens
gatcagcctccctcc

SEQ ID NO: 213297 - DNA, 15 bp, Homo sapiens
ggatcagcctccctc

SEQ ID NO: 213298 - DNA, 15 bp, Homo sapiens
gggatcagcctccct

SEQ ID NO: 213299 - DNA, 15 bp, Homo sapiens
tgggatcagcctccc

SEQ ID NO: 213300 - DNA, 15 bp, Homo sapiens
gtgggatcagcctcc

SEQ ID NO: 213301 - DNA, 15 bp, Homo sapiens
ggtgggatcagcctc

SEQ ID NO: 213302 - DNA, 15 bp, Homo sapiens
tggtgggatcagcct

SEQ ID NO: 213303 - DNA, 15 bp, Homo sapiens
ctggtgggatcagcc

SEQ ID NO: 213304 - DNA, 15 bp, Homo sapiens
cctggtgggatcagc

SEQ ID NO: 213305 - DNA, 15 bp, Homo sapiens
ccctggtgggatcag

SEQ ID NO: 213306 - DNA, 15 bp, Homo sapiens
tccctggtgggatca

SEQ ID NO: 213307 - DNA, 15 bp, Homo sapiens
gtccctggtgggatc

SEQ ID NO: 213308 - DNA, 15 bp, Homo sapiens
ggtccctggtgggat

SEQ ID NO: 213309 - DNA, 15 bp, Homo sapiens
gggtccctggtggga

SEQ ID NO: 213310 - DNA, 15 bp, Homo sapiens
ggggtccctggtggg

SEQ ID NO: 213311 - DNA, 15 bp, Homo sapiens
tggggtccctggtgg

SEQ ID NO: 213312 - DNA, 15 bp, Homo sapiens
ctggggtccctggtg

SEQ ID NO: 213313 - DNA, 15 bp, Homo sapiens
tctggggtccctggt

SEQ ID NO: 213314 - DNA, 15 bp, Homo sapiens
ctctggggtccctgg

SEQ ID NO: 213315 - DNA, 15 bp, Homo sapiens
cctctggggtccctg

SEQ ID NO: 213316 - DNA, 15 bp, Homo sapiens
tcctctggggtccct

SEQ ID NO: 213317 - DNA, 15 bp, Homo sapiens
ttcctctggggtccc

SEQ ID NO: 213318 - DNA, 15 bp, Homo sapiens
tttcctctggggtcc

SEQ ID NO: 213319 - DNA, 15 bp, Homo sapiens
gtttcctctggggtc

SEQ ID NO: 213320 - DNA, 15 bp, Homo sapiens
ggtttcctctggggt

SEQ ID NO: 213321 - DNA, 15 bp, Homo sapiens
gggtttcctctgggg

SEQ ID NO: 213322 - DNA, 15 bp, Homo sapiens
tgggtttcctctggg

SEQ ID NO: 213323 - DNA, 15 bp, Homo sapiens
ctgggtttcctctgg

SEQ ID NO: 213324 - DNA, 15 bp, Homo sapiens
tctgggtttcctctg

SEQ ID NO: 213325 - DNA, 15 bp, Homo sapiens
ctctgggtttcctct

SEQ ID NO: 213326 - DNA, 15 bp, Homo sapiens
actctgggtttcctc

SEQ ID NO: 213327 - DNA, 15 bp, Homo sapiens
aactctgggtttcct

SEQ ID NO: 213328 - DNA, 15 bp, Homo sapiens
gaactctgggtttcc

SEQ ID NO: 213329 - DNA, 15 bp, Homo sapiens
tgaactctgggtttc

SEQ ID NO: 213330 - DNA, 15 bp, Homo sapiens
atgaactctgggttt

SEQ ID NO: 213331 - DNA, 15 bp, Homo sapiens
catgaactctgggtt

SEQ ID NO: 213332 - DNA, 15 bp, Homo sapiens
gcatgaactctgggt

SEQ ID NO: 213333 - DNA, 15 bp, Homo sapiens
ggcatgaactctggg

SEQ ID NO: 213334 - DNA, 15 bp, Homo sapiens
tggcatgaactctgg

SEQ ID NO: 213335 - DNA, 15 bp, Homo sapiens
ttggcatgaactctg

SEQ ID NO: 213336 - DNA, 15 bp, Homo sapiens
tttggcatgaactct

SEQ ID NO: 213337 - DNA, 15 bp, Homo sapiens
ttttggcatgaactc

SEQ ID NO: 213338 - DNA, 15 bp, Homo sapiens
attttggcatgaact

SEQ ID NO: 213339 - DNA, 15 bp, Homo sapiens
tattttggcatgaac

SEQ ID NO: 213340 - DNA, 15 bp, Homo sapiens
atattttggcatgaa

SEQ ID NO: 213341 - DNA, 15 bp, Homo sapiens
gatattttggcatga

SEQ ID NO: 213342 - DNA, 15 bp, Homo sapiens
agatattttggcatg

SEQ ID NO: 213343 - DNA, 15 bp, Homo sapiens
tagatattttggcat

SEQ ID NO: 213344 - DNA, 15 bp, Homo sapiens
ctagatattttggca

SEQ ID NO: 213345 - DNA, 15 bp, Homo sapiens
actagatattttggc

SEQ ID NO: 213346 - DNA, 15 bp, Homo sapiens
tactagatattttgg

SEQ ID NO: 213347 - DNA, 15 bp, Homo sapiens
ctactagatattttg

SEQ ID NO: 213348 - DNA, 15 bp, Homo sapiens
tctactagatatttt

SEQ ID NO: 213349 - DNA, 15 bp, Homo sapiens
ttctactagatattt

SEQ ID NO: 213350 - DNA, 15 bp, Homo sapiens
cttctactagatatt

SEQ ID NO: 213351 - DNA, 15 bp, Homo sapiens
ccttctactagatat

SEQ ID NO: 213352 - DNA, 15 bp, Homo sapiens
tccttctactagata

SEQ ID NO: 213353 - DNA, 15 bp, Homo sapiens
ctccttctactagat

SEQ ID NO: 213354 - DNA, 15 bp, Homo sapiens
actccttctactaga

SEQ ID NO: 213355 - DNA, 15 bp, Homo sapiens
aactccttctactag

SEQ ID NO: 213356 - DNA, 15 bp, Homo sapiens
aaactccttctacta

SEQ ID NO: 213357 - DNA, 15 bp, Homo sapiens
taaactccttctact

SEQ ID NO: 213358 - DNA, 15 bp, Homo sapiens
ataaactccttctac

SEQ ID NO: 213359 - DNA, 15 bp, Homo sapiens
tataaactccttcta

SEQ ID NO: 213360 - DNA, 15 bp, Homo sapiens
atataaactccttct

SEQ ID NO: 213361 - DNA, 15 bp, Homo sapiens
catataaactccttc

SEQ ID NO: 213362 - DNA, 15 bp, Homo sapiens
ccatataaactcctt

SEQ ID NO: 213363 - DNA, 15 bp, Homo sapiens
cccatataaactcct

SEQ ID NO: 213364 - DNA, 15 bp, Homo sapiens
ccccatataaactcc

SEQ ID NO: 213365 - DNA, 15 bp, Homo sapiens
tccccatataaactc

SEQ ID NO: 213366 - DNA, 15 bp, Homo sapiens
ttccccatataaact

SEQ ID NO: 213367 - DNA, 15 bp, Homo sapiens
gttccccatataaac

SEQ ID NO: 213368 - DNA, 15 bp, Homo sapiens
agttccccatataaa

SEQ ID NO: 213369 - DNA, 15 bp, Homo sapiens
tagttccccatataa

SEQ ID NO: 213370 - DNA, 15 bp, Homo sapiens
ctagttccccatata

SEQ ID NO: 213371 - DNA, 15 bp, Homo sapiens
actagttccccatat

SEQ ID NO: 213372 - DNA, 15 bp, Homo sapiens
aactagttccccata

SEQ ID NO: 213373 - DNA, 15 bp, Homo sapiens
taactagttccccat

SEQ ID NO: 213374 - DNA, 15 bp, Homo sapiens
ataactagttcccca

SEQ ID NO: 213375 - DNA, 15 bp, Homo sapiens
tataactagttcccc

SEQ ID NO: 213376 - DNA, 15 bp, Homo sapiens
ttataactagttccc

SEQ ID NO: 213377 - DNA, 15 bp, Homo sapiens
tttataactagttcc

SEQ ID NO: 213378 - DNA, 15 bp, Homo sapiens
ctttataactagttc

SEQ ID NO: 213379 - DNA, 15 bp, Homo sapiens
cctttataactagtt

SEQ ID NO: 213380 - DNA, 15 bp, Homo sapiens
acctttataactagt

SEQ ID NO: 213381 - DNA, 15 bp, Homo sapiens
cacctttataactag

SEQ ID NO: 213382 - DNA, 15 bp, Homo sapiens
acacctttataacta

SEQ ID NO: 213383 - DNA, 15 bp, Homo sapiens
gacacctttataact

SEQ ID NO: 213384 - DNA, 15 bp, Homo sapiens
ggacacctttataac

SEQ ID NO: 213385 - DNA, 15 bp, Homo sapiens
tggacacctttataa

SEQ ID NO: 213386 - DNA, 15 bp, Homo sapiens
ttggacacctttata

SEQ ID NO: 213387 - DNA, 15 bp, Homo sapiens
cttggacacctttat

SEQ ID NO: 213388 - DNA, 15 bp, Homo sapiens
ccttggacaccttta

SEQ ID NO: 213389 - DNA, 15 bp, Homo sapiens
tccttggacaccttt

SEQ ID NO: 213390 - DNA, 15 bp, Homo sapiens
ctccttggacacctt

SEQ ID NO: 213391 - DNA, 15 bp, Homo sapiens
tctccttggacacct

SEQ ID NO: 213392 - DNA, 15 bp, Homo sapiens
atctccttggacacc

SEQ ID NO: 213393 - DNA, 15 bp, Homo sapiens
tatctccttggacac

SEQ ID NO: 213394 - DNA, 15 bp, Homo sapiens
ttatctccttggaca

SEQ ID NO: 213395 - DNA, 15 bp, Homo sapiens
tttatctccttggac

SEQ ID NO: 213396 - DNA, 15 bp, Homo sapiens
ttttatctccttgga

SEQ ID NO: 213397 - DNA, 15 bp, Homo sapiens
tttttatctccttgg

SEQ ID NO: 213398 - DNA, 15 bp, Homo sapiens
ctttttatctccttg

SEQ ID NO: 213399 - DNA, 15 bp, Homo sapiens
gctttttatctcctt

SEQ ID NO: 213400 - DNA, 15 bp, Homo sapiens
ggctttttatctcct

SEQ ID NO: 213401 - DNA, 15 bp, Homo sapiens
tggctttttatctcc

SEQ ID NO: 213402 - DNA, 15 bp, Homo sapiens
ttggctttttatctc

SEQ ID NO: 213403 - DNA, 15 bp, Homo sapiens
cttggctttttatct

SEQ ID NO: 213404 - DNA, 15 bp, Homo sapiens
gcttggctttttatc

SEQ ID NO: 213405 - DNA, 15 bp, Homo sapiens
tgcttggctttttat

SEQ ID NO: 213406 - DNA, 15 bp, Homo sapiens
ttgcttggcttttta

SEQ ID NO: 213407 - DNA, 15 bp, Homo sapiens
tttgcttggcttttt

SEQ ID NO: 213408 - DNA, 15 bp, Homo sapiens
ttttgcttggctttt

SEQ ID NO: 213409 - DNA, 15 bp, Homo sapiens
tttttgcttggcttt

SEQ ID NO: 213410 - DNA, 15 bp, Homo sapiens
ttttttgcttggctt

SEQ ID NO: 213411 - DNA, 15 bp, Homo sapiens
attttttgcttggct

SEQ ID NO: 213412 - DNA, 15 bp, Homo sapiens
cattttttgcttggc

SEQ ID NO: 213413 - DNA, 15 bp, Homo sapiens
ccattttttgcttgg

SEQ ID NO: 213414 - DNA, 15 bp, Homo sapiens
tccattttttgcttg

SEQ ID NO: 213415 - DNA, 15 bp, Homo sapiens
ctccattttttgctt

SEQ ID NO: 213416 - DNA, 15 bp, Homo sapiens
tctccattttttgct

SEQ ID NO: 213417 - DNA, 15 bp, Homo sapiens
ctctccattttttgc

SEQ ID NO: 213418 - DNA, 15 bp, Homo sapiens
cctctccattttttg

SEQ ID NO: 213419 - DNA, 15 bp, Homo sapiens
gcctctccatttttt

SEQ ID NO: 213420 - DNA, 15 bp, Homo sapiens
tgcctctccattttt

SEQ ID NO: 213421 - DNA, 15 bp, Homo sapiens
ctgcctctccatttt

SEQ ID NO: 213422 - DNA, 15 bp, Homo sapiens
gctgcctctccattt

SEQ ID NO: 213423 - DNA, 15 bp, Homo sapiens
ggctgcctctccatt

SEQ ID NO: 213424 - DNA, 15 bp, Homo sapiens
gggctgcctctccat

SEQ ID NO: 213425 - DNA, 15 bp, Homo sapiens
tgggctgcctctcca

SEQ ID NO: 213426 - DNA, 15 bp, Homo sapiens
ctgggctgcctctcc

SEQ ID NO: 213427 - DNA, 15 bp, Homo sapiens
tctgggctgcctctc

SEQ ID NO: 213428 - DNA, 15 bp, Homo sapiens
ctctgggctgcctct

SEQ ID NO: 213429 - DNA, 15 bp, Homo sapiens
tctctgggctgcctc

SEQ ID NO: 213430 - DNA, 15 bp, Homo sapiens
ttctctgggctgcct

SEQ ID NO: 213431 - DNA, 15 bp, Homo sapiens
attctctgggctgcc

SEQ ID NO: 213432 - DNA, 15 bp, Homo sapiens
tattctctgggctgc

SEQ ID NO: 213433 - DNA, 15 bp, Homo sapiens
ctattctctgggctg

SEQ ID NO: 213434 - DNA, 15 bp, Homo sapiens
gctattctctgggct

SEQ ID NO: 213435 - DNA, 15 bp, Homo sapiens
tgctattctctgggc

SEQ ID NO: 213436 - DNA, 15 bp, Homo sapiens
ttgctattctctggg

SEQ ID NO: 213437 - DNA, 15 bp, Homo sapiens
attgctattctctgg

SEQ ID NO: 213438 - DNA, 15 bp, Homo sapiens
cattgctattctctg

SEQ ID NO: 213439 - DNA, 15 bp, Homo sapiens
ccattgctattctct

SEQ ID NO: 213440 - DNA, 15 bp, Homo sapiens
gccattgctattctc

SEQ ID NO: 213441 - DNA, 15 bp, Homo sapiens
tgccattgctattct

SEQ ID NO: 213442 - DNA, 15 bp, Homo sapiens
ctgccattgctattc

SEQ ID NO: 213443 - DNA, 15 bp, Homo sapiens
cctgccattgctatt

SEQ ID NO: 213444 - DNA, 15 bp, Homo sapiens
tcctgccattgctat

SEQ ID NO: 213445 - DNA, 15 bp, Homo sapiens
ttcctgccattgcta

SEQ ID NO: 213446 - DNA, 15 bp, Homo sapiens
cttcctgccattgct

SEQ ID NO: 213447 - DNA, 15 bp, Homo sapiens
gcttcctgccattgc

SEQ ID NO: 213448 - DNA, 15 bp, Homo sapiens
agcttcctgccattg

SEQ ID NO: 213449 - DNA, 15 bp, Homo sapiens
cagcttcctgccatt

SEQ ID NO: 213450 - DNA, 15 bp, Homo sapiens
gcagcttcctgccat

SEQ ID NO: 213451 - DNA, 15 bp, Homo sapiens
agcagcttcctgcca

SEQ ID NO: 213452 - DNA, 15 bp, Homo sapiens
tagcagcttcctgcc

SEQ ID NO: 213453 - DNA, 15 bp, Homo sapiens
ctagcagcttcctgc

SEQ ID NO: 213454 - DNA, 15 bp, Homo sapiens
gctagcagcttcctg

SEQ ID NO: 213455 - DNA, 15 bp, Homo sapiens
tgctagcagcttcct

SEQ ID NO: 213456 - DNA, 15 bp, Homo sapiens
atgctagcagcttcc

SEQ ID NO: 213457 - DNA, 15 bp, Homo sapiens
gatgctagcagcttc

SEQ ID NO: 213458 - DNA, 15 bp, Homo sapiens
ggatgctagcagctt

SEQ ID NO: 213459 - DNA, 15 bp, Homo sapiens
aggatgctagcagct

SEQ ID NO: 213460 - DNA, 15 bp, Homo sapiens
taggatgctagcagc

SEQ ID NO: 213461 - DNA, 15 bp, Homo sapiens
ctaggatgctagcag

SEQ ID NO: 213462 - DNA, 15 bp, Homo sapiens
cctaggatgctagca

SEQ ID NO: 213463 - DNA, 15 bp, Homo sapiens
ccctaggatgctagc

SEQ ID NO: 213464 - DNA, 15 bp, Homo sapiens
gccctaggatgctag

SEQ ID NO: 213465 - DNA, 15 bp, Homo sapiens
agccctaggatgcta

SEQ ID NO: 213466 - DNA, 15 bp, Homo sapiens
tagccctaggatgct

SEQ ID NO: 213467 - DNA, 15 bp, Homo sapiens
ctagccctaggatgc

SEQ ID NO: 213468 - DNA, 15 bp, Homo sapiens
tctagccctaggatg

SEQ ID NO: 213469 - DNA, 15 bp, Homo sapiens
ctctagccctaggat

SEQ ID NO: 213470 - DNA, 15 bp, Homo sapiens
cctctagccctagga

SEQ ID NO: 213471 - DNA, 15 bp, Homo sapiens
ccctctagccctagg

SEQ ID NO: 213472 - DNA, 15 bp, Homo sapiens
cccctctagccctag

SEQ ID NO: 213473 - DNA, 15 bp, Homo sapiens
ccccctctagcccta

SEQ ID NO: 213474 - DNA, 15 bp, Homo sapiens
tccccctctagccct

SEQ ID NO: 213475 - DNA, 15 bp, Homo sapiens
ttccccctctagccc

SEQ ID NO: 213476 - DNA, 15 bp, Homo sapiens
cttccccctctagcc

SEQ ID NO: 213477 - DNA, 15 bp, Homo sapiens
ccttccccctctagc

SEQ ID NO: 213478 - DNA, 15 bp, Homo sapiens
cccttccccctctag

SEQ ID NO: 213479 - DNA, 15 bp, Homo sapiens
tcccttccccctcta

SEQ ID NO: 213480 - DNA, 15 bp, Homo sapiens
ctcccttccccctct

SEQ ID NO: 213481 - DNA, 15 bp, Homo sapiens
cctcccttccccctc

SEQ ID NO: 213482 - DNA, 15 bp, Homo sapiens
tcctcccttccccct

SEQ ID NO: 213483 - DNA, 15 bp, Homo sapiens
ctcctcccttccccc

SEQ ID NO: 213484 - DNA, 15 bp, Homo sapiens
gctcctcccttcccc

SEQ ID NO: 213485 - DNA, 15 bp, Homo sapiens
agctcctcccttccc

SEQ ID NO: 213486 - DNA, 15 bp, Homo sapiens
cagctcctcccttcc

SEQ ID NO: 213487 - DNA, 15 bp, Homo sapiens
ccagctcctcccttc

SEQ ID NO: 213488 - DNA, 15 bp, Homo sapiens
accagctcctccctt

SEQ ID NO: 213489 - DNA, 15 bp, Homo sapiens
aaccagctcctccct

SEQ ID NO: 213490 - DNA, 15 bp, Homo sapiens
aaaccagctcctccc

SEQ ID NO: 213491 - DNA, 15 bp, Homo sapiens
aaaaccagctcctcc

SEQ ID NO: 213492 - DNA, 15 bp, Homo sapiens
gaaaaccagctcctc

SEQ ID NO: 213493 - DNA, 15 bp, Homo sapiens
agaaaaccagctcct

SEQ ID NO: 213494 - DNA, 15 bp, Homo sapiens
tagaaaaccagctcc

SEQ ID NO: 213495 - DNA, 15 bp, Homo sapiens
ctagaaaaccagctc

SEQ ID NO: 213496 - DNA, 15 bp, Homo sapiens
tctagaaaaccagct

SEQ ID NO: 213497 - DNA, 15 bp, Homo sapiens
ttctagaaaaccagc

SEQ ID NO: 213498 - DNA, 15 bp, Homo sapiens
gttctagaaaaccag

SEQ ID NO: 213499 - DNA, 15 bp, Homo sapiens
agttctagaaaacca

SEQ ID NO: 213500 - DNA, 15 bp, Homo sapiens
gagttctagaaaacc

SEQ ID NO: 213501 - DNA, 15 bp, Homo sapiens
tgagttctagaaaac

SEQ ID NO: 213502 - DNA, 15 bp, Homo sapiens
ctgagttctagaaaa

SEQ ID NO: 213503 - DNA, 15 bp, Homo sapiens
cctgagttctagaaa

SEQ ID NO: 213504 - DNA, 15 bp, Homo sapiens
tcctgagttctagaa

SEQ ID NO: 213505 - DNA, 15 bp, Homo sapiens
atcctgagttctaga

SEQ ID NO: 213506 - DNA, 15 bp, Homo sapiens
gatcctgagttctag

SEQ ID NO: 213507 - DNA, 15 bp, Homo sapiens
ggatcctgagttcta

SEQ ID NO: 213508 - DNA, 15 bp, Homo sapiens
tggatcctgagttct

SEQ ID NO: 213509 - DNA, 15 bp, Homo sapiens
ctggatcctgagttc

SEQ ID NO: 213510 - DNA, 15 bp, Homo sapiens
gctggatcctgagtt

SEQ ID NO: 213511 - DNA, 15 bp, Homo sapiens
tgctggatcctgagt

SEQ ID NO: 213512 - DNA, 15 bp, Homo sapiens
ctgctggatcctgag

SEQ ID NO: 213513 - DNA, 15 bp, Homo sapiens
gctgctggatcctga

SEQ ID NO: 213514 - DNA, 15 bp, Homo sapiens
tgctgctggatcctg

SEQ ID NO: 213515 - DNA, 15 bp, Homo sapiens
gtgctgctggatcct

SEQ ID NO: 213516 - DNA, 15 bp, Homo sapiens
ggtgctgctggatcc

SEQ ID NO: 213517 - DNA, 15 bp, Homo sapiens
aggtgctgctggatc

SEQ ID NO: 213518 - DNA, 15 bp, Homo sapiens
caggtgctgctggat

SEQ ID NO: 213519 - DNA, 15 bp, Homo sapiens
ccaggtgctgctgga

SEQ ID NO: 213520 - DNA, 15 bp, Homo sapiens
gccaggtgctgctgg

SEQ ID NO: 213521 - DNA, 15 bp, Homo sapiens
cgccaggtgctgctg

SEQ ID NO: 213522 - DNA, 15 bp, Homo sapiens
ccgccaggtgctgct

SEQ ID NO: 213523 - DNA, 15 bp, Homo sapiens
tccgccaggtgctgc

SEQ ID NO: 213524 - DNA, 15 bp, Homo sapiens
atccgccaggtgctg

SEQ ID NO: 213525 - DNA, 15 bp, Homo sapiens
catccgccaggtgct

SEQ ID NO: 213526 - DNA, 15 bp, Homo sapiens
gcatccgccaggtgc

SEQ ID NO: 213527 - DNA, 15 bp, Homo sapiens
agcatccgccaggtg

SEQ ID NO: 213528 - DNA, 15 bp, Homo sapiens
cagcatccgccaggt

SEQ ID NO: 213529 - DNA, 15 bp, Homo sapiens
ccagcatccgccagg

SEQ ID NO: 213530 - DNA, 15 bp, Homo sapiens
tccagcatccgccag

SEQ ID NO: 213531 - DNA, 15 bp, Homo sapiens
ttccagcatccgcca

SEQ ID NO: 213532 - DNA, 15 bp, Homo sapiens
gttccagcatccgcc

SEQ ID NO: 213533 - DNA, 15 bp, Homo sapiens
agttccagcatccgc

SEQ ID NO: 213534 - DNA, 15 bp, Homo sapiens
tagttccagcatccg

SEQ ID NO: 213535 - DNA, 15 bp, Homo sapiens
gtagttccagcatcc

SEQ ID NO: 213536 - DNA, 15 bp, Homo sapiens
tgtagttccagcatc

SEQ ID NO: 213537 - DNA, 15 bp, Homo sapiens
ctgtagttccagcat

SEQ ID NO: 213538 - DNA, 15 bp, Homo sapiens
tctgtagttccagca

SEQ ID NO: 213539 - DNA, 15 bp, Homo sapiens
ttctgtagttccagc

SEQ ID NO: 213540 - DNA, 15 bp, Homo sapiens
cttctgtagttccag

SEQ ID NO: 213541 - DNA, 15 bp, Homo sapiens
ccttctgtagttcca

SEQ ID NO: 213542 - DNA, 15 bp, Homo sapiens
gccttctgtagttcc

SEQ ID NO: 213543 - DNA, 15 bp, Homo sapiens
ggccttctgtagttc

SEQ ID NO: 213544 - DNA, 15 bp, Homo sapiens
aggccttctgtagtt

SEQ ID NO: 213545 - DNA, 15 bp, Homo sapiens
caggccttctgtagt

SEQ ID NO: 213546 - DNA, 15 bp, Homo sapiens
gcaggccttctgtag

SEQ ID NO: 213547 - DNA, 15 bp, Homo sapiens
agcaggccttctgta

SEQ ID NO: 213548 - DNA, 15 bp, Homo sapiens
cagcaggccttctgt

SEQ ID NO: 213549 - DNA, 15 bp, Homo sapiens
ccagcaggccttctg

SEQ ID NO: 213550 - DNA, 15 bp, Homo sapiens
cccagcaggccttct

SEQ ID NO: 213551 - DNA, 15 bp, Homo sapiens
gcccagcaggccttc

SEQ ID NO: 213552 - DNA, 15 bp, Homo sapiens
agcccagcaggcctt

SEQ ID NO: 213553 - DNA, 15 bp, Homo sapiens
cagcccagcaggcct

SEQ ID NO: 213554 - DNA, 15 bp, Homo sapiens
ccagcccagcaggcc

SEQ ID NO: 213555 - DNA, 15 bp, Homo sapiens
cccagcccagcaggc

SEQ ID NO: 213556 - DNA, 15 bp, Homo sapiens
gcccagcccagcagg

SEQ ID NO: 213557 - DNA, 15 bp, Homo sapiens
tgcccagcccagcag

SEQ ID NO: 213558 - DNA, 15 bp, Homo sapiens
ctgcccagcccagca

SEQ ID NO: 213559 - DNA, 15 bp, Homo sapiens
cctgcccagcccagc

SEQ ID NO: 213560 - DNA, 15 bp, Homo sapiens
tcctgcccagcccag

SEQ ID NO: 213561 - DNA, 15 bp, Homo sapiens
atcctgcccagccca

SEQ ID NO: 213562 - DNA, 15 bp, Homo sapiens
gatcctgcccagccc

SEQ ID NO: 213563 - DNA, 15 bp, Homo sapiens
tgatcctgcccagcc

SEQ ID NO: 213564 - DNA, 15 bp, Homo sapiens
gtgatcctgcccagc

SEQ ID NO: 213565 - DNA, 15 bp, Homo sapiens
tgtgatcctgcccag

SEQ ID NO: 213566 - DNA, 15 bp, Homo sapiens
ctgtgatcctgccca

SEQ ID NO: 213567 - DNA, 15 bp, Homo sapiens
tctgtgatcctgccc

SEQ ID NO: 213568 - DNA, 15 bp, Homo sapiens
ctctgtgatcctgcc

SEQ ID NO: 213569 - DNA, 15 bp, Homo sapiens
cctctgtgatcctgc

SEQ ID NO: 213570 - DNA, 15 bp, Homo sapiens
tcctctgtgatcctg

SEQ ID NO: 213571 - DNA, 15 bp, Homo sapiens
ttcctctgtgatcct

SEQ ID NO: 213572 - DNA, 15 bp, Homo sapiens
tttcctctgtgatcc

SEQ ID NO: 213573 - DNA, 15 bp, Homo sapiens
ctttcctctgtgatc

SEQ ID NO: 213574 - DNA, 15 bp, Homo sapiens
cctttcctctgtgat

SEQ ID NO: 213575 - DNA, 15 bp, Homo sapiens
tcctttcctctgtga

SEQ ID NO: 213576 - DNA, 15 bp, Homo sapiens
gtcctttcctctgtg

SEQ ID NO: 213577 - DNA, 15 bp, Homo sapiens
agtcctttcctctgt

SEQ ID NO: 213578 - DNA, 15 bp, Homo sapiens
gagtcctttcctctg

SEQ ID NO: 213579 - DNA, 15 bp, Homo sapiens
agagtcctttcctct

SEQ ID NO: 213580 - DNA, 15 bp, Homo sapiens
cagagtcctttcctc

SEQ ID NO: 213581 - DNA, 15 bp, Homo sapiens
ccagagtcctttcct

SEQ ID NO: 213582 - DNA, 15 bp, Homo sapiens
cccagagtcctttcc

SEQ ID NO: 213583 - DNA, 15 bp, Homo sapiens
ccccagagtcctttc

SEQ ID NO: 213584 - DNA, 15 bp, Homo sapiens
tccccagagtccttt

SEQ ID NO: 213585 - DNA, 15 bp, Homo sapiens
ctccccagagtcctt

SEQ ID NO: 213586 - DNA, 15 bp, Homo sapiens
cctccccagagtcct

SEQ ID NO: 213587 - DNA, 15 bp, Homo sapiens
ccctccccagagtcc

SEQ ID NO: 213588 - DNA, 15 bp, Homo sapiens
gccctccccagagtc

SEQ ID NO: 213589 - DNA, 15 bp, Homo sapiens
tgccctccccagagt

SEQ ID NO: 213590 - DNA, 15 bp, Homo sapiens
ctgccctccccagag

SEQ ID NO: 213591 - DNA, 15 bp, Homo sapiens
cctgccctccccaga

SEQ ID NO: 213592 - DNA, 15 bp, Homo sapiens
tcctgccctccccag

SEQ ID NO: 213593 - DNA, 15 bp, Homo sapiens
atcctgccctcccca

SEQ ID NO: 213594 - DNA, 15 bp, Homo sapiens
tatcctgccctcccc

SEQ ID NO: 213595 - DNA, 15 bp, Homo sapiens
gtatcctgccctccc

SEQ ID NO: 213596 - DNA, 15 bp, Homo sapiens
ggtatcctgccctcc

SEQ ID NO: 213597 - DNA, 15 bp, Homo sapiens
gggtatcctgccctc

SEQ ID NO: 213598 - DNA, 15 bp, Homo sapiens
tgggtatcctgccct

SEQ ID NO: 213599 - DNA, 15 bp, Homo sapiens
ctgggtatcctgccc

SEQ ID NO: 213600 - DNA, 15 bp, Homo sapiens
tctgggtatcctgcc

SEQ ID NO: 213601 - DNA, 15 bp, Homo sapiens
ctctgggtatcctgc

SEQ ID NO: 213602 - DNA, 15 bp, Homo sapiens
cctctgggtatcctg

SEQ ID NO: 213603 - DNA, 15 bp, Homo sapiens
acctctgggtatcct

SEQ ID NO: 213604 - DNA, 15 bp, Homo sapiens
cacctctgggtatcc

SEQ ID NO: 213605 - DNA, 15 bp, Homo sapiens
tcacctctgggtatc

SEQ ID NO: 213606 - DNA, 15 bp, Homo sapiens
atcacctctgggtat

SEQ ID NO: 213607 - DNA, 15 bp, Homo sapiens
tatcacctctgggta

SEQ ID NO: 213608 - DNA, 15 bp, Homo sapiens
ctatcacctctgggt

SEQ ID NO: 213609 - DNA, 15 bp, Homo sapiens
tctatcacctctggg

SEQ ID NO: 213610 - DNA, 15 bp, Homo sapiens
atctatcacctctgg

SEQ ID NO: 213611 - DNA, 15 bp, Homo sapiens
tatctatcacctctg

SEQ ID NO: 213612 - DNA, 15 bp, Homo sapiens
atatctatcacctct

SEQ ID NO: 213613 - DNA, 15 bp, Homo sapiens
tatatctatcacctc

SEQ ID NO: 213614 - DNA, 15 bp, Homo sapiens
ttatatctatcacct

SEQ ID NO: 213615 - DNA, 15 bp, Homo sapiens
attatatctatcacc

SEQ ID NO: 213616 - DNA, 15 bp, Homo sapiens
cattatatctatcac

SEQ ID NO: 213617 - DNA, 15 bp, Homo sapiens
tcattatatctatca

SEQ ID NO: 213618 - DNA, 15 bp, Homo sapiens
atcattatatctatc

SEQ ID NO: 213619 - DNA, 15 bp, Homo sapiens
catcattatatctat

SEQ ID NO: 213620 - DNA, 15 bp, Homo sapiens
ccatcattatatcta

SEQ ID NO: 213621 - DNA, 15 bp, Homo sapiens
tccatcattatatct

SEQ ID NO: 213622 - DNA, 15 bp, Homo sapiens
gtccatcattatatc

SEQ ID NO: 213623 - DNA, 15 bp, Homo sapiens
tgtccatcattatat

SEQ ID NO: 213624 - DNA, 15 bp, Homo sapiens
atgtccatcattata

SEQ ID NO: 213625 - DNA, 15 bp, Homo sapiens
catgtccatcattat

SEQ ID NO: 213626 - DNA, 15 bp, Homo sapiens
acatgtccatcatta

SEQ ID NO: 213627 - DNA, 15 bp, Homo sapiens
aacatgtccatcatt

SEQ ID NO: 213628 - DNA, 15 bp, Homo sapiens
gaacatgtccatcat

SEQ ID NO: 213629 - DNA, 15 bp, Homo sapiens
agaacatgtccatca

SEQ ID NO: 213630 - DNA, 15 bp, Homo sapiens
gagaacatgtccatc

SEQ ID NO: 213631 - DNA, 15 bp, Homo sapiens
agagaacatgtccat

SEQ ID NO: 213632 - DNA, 15 bp, Homo sapiens
tagagaacatgtcca

SEQ ID NO: 213633 - DNA, 15 bp, Homo sapiens
atagagaacatgtcc

SEQ ID NO: 213634 - DNA, 15 bp, Homo sapiens
gatagagaacatgtc

SEQ ID NO: 213635 - DNA, 15 bp, Homo sapiens
agatagagaacatgt

SEQ ID NO: 213636 - DNA, 15 bp, Homo sapiens
cagatagagaacatg

SEQ ID NO: 213637 - DNA, 15 bp, Homo sapiens
ccagatagagaacat

SEQ ID NO: 213638 - DNA, 15 bp, Homo sapiens
tccagatagagaaca

SEQ ID NO: 213639 - DNA, 15 bp, Homo sapiens
ctccagatagagaac

SEQ ID NO: 213640 - DNA, 15 bp, Homo sapiens
tctccagatagagaa

SEQ ID NO: 213641 - DNA, 15 bp, Homo sapiens
atctccagatagaga

SEQ ID NO: 213642 - DNA, 15 bp, Homo sapiens
catctccagatagag

SEQ ID NO: 213643 - DNA, 15 bp, Homo sapiens
gcatctccagataga

SEQ ID NO: 213644 - DNA, 15 bp, Homo sapiens
ggcatctccagatag

SEQ ID NO: 213645 - DNA, 15 bp, Homo sapiens
tggcatctccagata

SEQ ID NO: 213646 - DNA, 15 bp, Homo sapiens
gtggcatctccagat

SEQ ID NO: 213647 - DNA, 15 bp, Homo sapiens
ggtggcatctccaga

SEQ ID NO: 213648 - DNA, 15 bp, Homo sapiens
tggtggcatctccag

SEQ ID NO: 213649 - DNA, 15 bp, Homo sapiens
ttggtggcatctcca

SEQ ID NO: 213650 - DNA, 15 bp, Homo sapiens
tttggtggcatctcc

SEQ ID NO: 213651 - DNA, 15 bp, Homo sapiens
atttggtggcatctc

SEQ ID NO: 213652 - DNA, 15 bp, Homo sapiens
catttggtggcatct

SEQ ID NO: 213653 - DNA, 15 bp, Homo sapiens
gcatttggtggcatc

SEQ ID NO: 213654 - DNA, 15 bp, Homo sapiens
tgcatttggtggcat

SEQ ID NO: 213655 - DNA, 15 bp, Homo sapiens
ctgcatttggtggca

SEQ ID NO: 213656 - DNA, 15 bp, Homo sapiens
tctgcatttggtggc

SEQ ID NO: 213657 - DNA, 15 bp, Homo sapiens
ttctgcatttggtgg

SEQ ID NO: 213658 - DNA, 15 bp, Homo sapiens
cttctgcatttggtg

SEQ ID NO: 213659 - DNA, 15 bp, Homo sapiens
ccttctgcatttggt

SEQ ID NO: 213660 - DNA, 15 bp, Homo sapiens
tccttctgcatttgg

SEQ ID NO: 213661 - DNA, 15 bp, Homo sapiens
ctccttctgcatttg

SEQ ID NO: 213662 - DNA, 15 bp, Homo sapiens
cctccttctgcattt

SEQ ID NO: 213663 - DNA, 15 bp, Homo sapiens
ccctccttctgcatt

SEQ ID NO: 213664 - DNA, 15 bp, Homo sapiens
tccctccttctgcat

SEQ ID NO: 213665 - DNA, 15 bp, Homo sapiens
ctccctccttctgca

SEQ ID NO: 213666 - DNA, 15 bp, Homo sapiens
tctccctccttctgc

SEQ ID NO: 213667 - DNA, 15 bp, Homo sapiens
ttctccctccttctg

SEQ ID NO: 213668 - DNA, 15 bp, Homo sapiens
tttctccctccttct

SEQ ID NO: 213669 - DNA, 15 bp, Homo sapiens
atttctccctccttc

SEQ ID NO: 213670 - DNA, 15 bp, Homo sapiens
catttctccctcctt

SEQ ID NO: 213671 - DNA, 15 bp, Homo sapiens
acatttctccctcct

SEQ ID NO: 213672 - DNA, 15 bp, Homo sapiens
gacatttctccctcc

SEQ ID NO: 213673 - DNA, 15 bp, Homo sapiens
ggacatttctccctc

SEQ ID NO: 213674 - DNA, 15 bp, Homo sapiens
aggacatttctccct

SEQ ID NO: 213675 - DNA, 15 bp, Homo sapiens
caggacatttctccc

SEQ ID NO: 213676 - DNA, 15 bp, Homo sapiens
ccaggacatttctcc

SEQ ID NO: 213677 - DNA, 15 bp, Homo sapiens
accaggacatttctc

SEQ ID NO: 213678 - DNA, 15 bp, Homo sapiens
aaccaggacatttct

SEQ ID NO: 213679 - DNA, 15 bp, Homo sapiens
aaaccaggacatttc

SEQ ID NO: 213680 - DNA, 15 bp, Homo sapiens
gaaaccaggacattt

SEQ ID NO: 213681 - DNA, 15 bp, Homo sapiens
agaaaccaggacatt

SEQ ID NO: 213682 - DNA, 15 bp, Homo sapiens
cagaaaccaggacat

SEQ ID NO: 213683 - DNA, 15 bp, Homo sapiens
gcagaaaccaggaca

SEQ ID NO: 213684 - DNA, 15 bp, Homo sapiens
ggcagaaaccaggac

SEQ ID NO: 213685 - DNA, 15 bp, Homo sapiens
aggcagaaaccagga

SEQ ID NO: 213686 - DNA, 15 bp, Homo sapiens
caggcagaaaccagg

SEQ ID NO: 213687 - DNA, 15 bp, Homo sapiens
gcaggcagaaaccag

SEQ ID NO: 213688 - DNA, 15 bp, Homo sapiens
ggcaggcagaaacca

SEQ ID NO: 213689 - DNA, 15 bp, Homo sapiens
gggcaggcagaaacc

SEQ ID NO: 213690 - DNA, 15 bp, Homo sapiens
ggggcaggcagaaac

SEQ ID NO: 213691 - DNA, 15 bp, Homo sapiens
gggggcaggcagaaa

SEQ ID NO: 213692 - DNA, 15 bp, Homo sapiens
tgggggcaggcagaa

SEQ ID NO: 213693 - DNA, 15 bp, Homo sapiens
gtgggggcaggcaga

SEQ ID NO: 213694 - DNA, 15 bp, Homo sapiens
ggtgggggcaggcag

SEQ ID NO: 213695 - DNA, 15 bp, Homo sapiens
gggtgggggcaggca

SEQ ID NO: 213696 - DNA, 15 bp, Homo sapiens
agggtgggggcaggc

SEQ ID NO: 213697 - DNA, 15 bp, Homo sapiens
cagggtgggggcagg

SEQ ID NO: 213698 - DNA, 15 bp, Homo sapiens
gcagggtgggggcag

SEQ ID NO: 213699 - DNA, 15 bp, Homo sapiens
tgcagggtgggggca

SEQ ID NO: 213700 - DNA, 15 bp, Homo sapiens
ctgcagggtgggggc

SEQ ID NO: 213701 - DNA, 15 bp, Homo sapiens
tctgcagggtggggg

SEQ ID NO: 213702 - DNA, 15 bp, Homo sapiens
gtctgcagggtgggg

SEQ ID NO: 213703 - DNA, 15 bp, Homo sapiens
agtctgcagggtggg

SEQ ID NO: 213704 - DNA, 15 bp, Homo sapiens
aagtctgcagggtgg

SEQ ID NO: 213705 - DNA, 15 bp, Homo sapiens
gaagtctgcagggtg

SEQ ID NO: 213706 - DNA, 15 bp, Homo sapiens
agaagtctgcagggt

SEQ ID NO: 213707 - DNA, 15 bp, Homo sapiens
cagaagtctgcaggg

SEQ ID NO: 213708 - DNA, 15 bp, Homo sapiens
gcagaagtctgcagg

SEQ ID NO: 213709 - DNA, 15 bp, Homo sapiens
ggcagaagtctgcag

SEQ ID NO: 213710 - DNA, 15 bp, Homo sapiens
aggcagaagtctgca

SEQ ID NO: 213711 - DNA, 15 bp, Homo sapiens
caggcagaagtctgc

SEQ ID NO: 213712 - DNA, 15 bp, Homo sapiens
gcaggcagaagtctg

SEQ ID NO: 213713 - DNA, 15 bp, Homo sapiens
tgcaggcagaagtct

SEQ ID NO: 213714 - DNA, 15 bp, Homo sapiens
atgcaggcagaagtc

SEQ ID NO: 213715 - DNA, 15 bp, Homo sapiens
aatgcaggcagaagt

SEQ ID NO: 213716 - DNA, 15 bp, Homo sapiens
gaatgcaggcagaag

SEQ ID NO: 213717 - DNA, 15 bp, Homo sapiens
ggaatgcaggcagaa

SEQ ID NO: 213718 - DNA, 15 bp, Homo sapiens
aggaatgcaggcaga

SEQ ID NO: 213719 - DNA, 15 bp, Homo sapiens
caggaatgcaggcag

SEQ ID NO: 213720 - DNA, 15 bp, Homo sapiens
gcaggaatgcaggca

SEQ ID NO: 213721 - DNA, 15 bp, Homo sapiens
agcaggaatgcaggc

SEQ ID NO: 213722 - DNA, 15 bp, Homo sapiens
cagcaggaatgcagg

SEQ ID NO: 213723 - DNA, 15 bp, Homo sapiens
tcagcaggaatgcag

SEQ ID NO: 213724 - DNA, 15 bp, Homo sapiens
ttcagcaggaatgca

SEQ ID NO: 213725 - DNA, 15 bp, Homo sapiens
attcagcaggaatgc

SEQ ID NO: 213726 - DNA, 15 bp, Homo sapiens
tattcagcaggaatg

SEQ ID NO: 213727 - DNA, 15 bp, Homo sapiens
ctattcagcaggaat

SEQ ID NO: 213728 - DNA, 15 bp, Homo sapiens
tctattcagcaggaa

SEQ ID NO: 213729 - DNA, 15 bp, Homo sapiens
ttctattcagcagga

SEQ ID NO: 213730 - DNA, 15 bp, Homo sapiens
gttctattcagcagg

SEQ ID NO: 213731 - DNA, 15 bp, Homo sapiens
tgttctattcagcag

SEQ ID NO: 213732 - DNA, 15 bp, Homo sapiens
ttgttctattcagca

SEQ ID NO: 213733 - DNA, 15 bp, Homo sapiens
tttgttctattcagc

SEQ ID NO: 213734 - DNA, 15 bp, Homo sapiens
gtttgttctattcag

SEQ ID NO: 213735 - DNA, 15 bp, Homo sapiens
agtttgttctattca

SEQ ID NO: 213736 - DNA, 15 bp, Homo sapiens
aagtttgttctattc

SEQ ID NO: 213737 - DNA, 15 bp, Homo sapiens
gaagtttgttctatt

SEQ ID NO: 213738 - DNA, 15 bp, Homo sapiens
ggaagtttgttctat

SEQ ID NO: 213739 - DNA, 15 bp, Homo sapiens
gggaagtttgttcta

SEQ ID NO: 213740 - DNA, 15 bp, Homo sapiens
agggaagtttgttct

SEQ ID NO: 213741 - DNA, 15 bp, Homo sapiens
tagggaagtttgttc

SEQ ID NO: 213742 - DNA, 15 bp, Homo sapiens
ctagggaagtttgtt

SEQ ID NO: 213743 - DNA, 15 bp, Homo sapiens
tctagggaagtttgt

SEQ ID NO: 213744 - DNA, 15 bp, Homo sapiens
ttctagggaagtttg

SEQ ID NO: 213745 - DNA, 15 bp, Homo sapiens
cttctagggaagttt

SEQ ID NO: 213746 - DNA, 15 bp, Homo sapiens
tcttctagggaagtt

SEQ ID NO: 213747 - DNA, 15 bp, Homo sapiens
ttcttctagggaagt

SEQ ID NO: 213748 - DNA, 15 bp, Homo sapiens
tttcttctagggaag

SEQ ID NO: 213749 - DNA, 15 bp, Homo sapiens
ctttcttctagggaa

SEQ ID NO: 213750 - DNA, 15 bp, Homo sapiens
tctttcttctaggga

SEQ ID NO: 213751 - DNA, 15 bp, Homo sapiens
ctctttcttctaggg

SEQ ID NO: 213752 - DNA, 15 bp, Homo sapiens
gctctttcttctagg

SEQ ID NO: 213753 - DNA, 15 bp, Homo sapiens
cgctctttcttctag

SEQ ID NO: 213754 - DNA, 15 bp, Homo sapiens
tcgctctttcttcta

SEQ ID NO: 213755 - DNA, 15 bp, Homo sapiens
ctcgctctttcttct

SEQ ID NO: 213756 - DNA, 15 bp, Homo sapiens
cctcgctctttcttc

SEQ ID NO: 213757 - DNA, 15 bp, Homo sapiens
ccctcgctctttctt

SEQ ID NO: 213758 - DNA, 15 bp, Homo sapiens
tccctcgctctttct

SEQ ID NO: 213759 - DNA, 15 bp, Homo sapiens
ctccctcgctctttc

SEQ ID NO: 213760 - DNA, 15 bp, Homo sapiens
gctccctcgctcttt

SEQ ID NO: 213761 - DNA, 15 bp, Homo sapiens
ggctccctcgctctt

SEQ ID NO: 213762 - DNA, 15 bp, Homo sapiens
aggctccctcgctct

SEQ ID NO: 213763 - DNA, 15 bp, Homo sapiens
caggctccctcgctc

SEQ ID NO: 213764 - DNA, 15 bp, Homo sapiens
ccaggctccctcgct

SEQ ID NO: 213765 - DNA, 15 bp, Homo sapiens
cccaggctccctcgc

SEQ ID NO: 213766 - DNA, 15 bp, Homo sapiens
ccccaggctccctcg

SEQ ID NO: 213767 - DNA, 15 bp, Homo sapiens
tccccaggctccctc

SEQ ID NO: 213768 - DNA, 15 bp, Homo sapiens
ctccccaggctccct

SEQ ID NO: 213769 - DNA, 15 bp, Homo sapiens
actccccaggctccc

SEQ ID NO: 213770 - DNA, 15 bp, Homo sapiens
cactccccaggctcc

SEQ ID NO: 213771 - DNA, 15 bp, Homo sapiens
acactccccaggctc

SEQ ID NO: 213772 - DNA, 15 bp, Homo sapiens
tacactccccaggct

SEQ ID NO: 213773 - DNA, 15 bp, Homo sapiens
ctacactccccaggc

SEQ ID NO: 213774 - DNA, 15 bp, Homo sapiens
actacactccccagg

SEQ ID NO: 213775 - DNA, 15 bp, Homo sapiens
gactacactccccag

SEQ ID NO: 213776 - DNA, 15 bp, Homo sapiens
ggactacactcccca

SEQ ID NO: 213777 - DNA, 15 bp, Homo sapiens
tggactacactcccc

SEQ ID NO: 213778 - DNA, 15 bp, Homo sapiens
gtggactacactccc

SEQ ID NO: 213779 - DNA, 15 bp, Homo sapiens
tgtggactacactcc

SEQ ID NO: 213780 - DNA, 15 bp, Homo sapiens
ctgtggactacactc

SEQ ID NO: 213781 - DNA, 15 bp, Homo sapiens
actgtggactacact

SEQ ID NO: 213782 - DNA, 15 bp, Homo sapiens
gactgtggactacac

SEQ ID NO: 213783 - DNA, 15 bp, Homo sapiens
agactgtggactaca

SEQ ID NO: 213784 - DNA, 15 bp, Homo sapiens
tagactgtggactac

SEQ ID NO: 213785 - DNA, 15 bp, Homo sapiens
gtagactgtggacta

SEQ ID NO: 213786 - DNA, 15 bp, Homo sapiens
tgtagactgtggact

SEQ ID NO: 213787 - DNA, 15 bp, Homo sapiens
ctgtagactgtggac

SEQ ID NO: 213788 - DNA, 15 bp, Homo sapiens
tctgtagactgtgga

SEQ ID NO: 213789 - DNA, 15 bp, Homo sapiens
gtctgtagactgtgg

SEQ ID NO: 213790 - DNA, 15 bp, Homo sapiens
cgtctgtagactgtg

SEQ ID NO: 213791 - DNA, 15 bp, Homo sapiens
tcgtctgtagactgt

SEQ ID NO: 213792 - DNA, 15 bp, Homo sapiens
ctcgtctgtagactg

SEQ ID NO: 213793 - DNA, 15 bp, Homo sapiens
cctcgtctgtagact

SEQ ID NO: 213794 - DNA, 15 bp, Homo sapiens
ccctcgtctgtagac

SEQ ID NO: 213795 - DNA, 15 bp, Homo sapiens
cccctcgtctgtaga

SEQ ID NO: 213796 - DNA, 15 bp, Homo sapiens
acccctcgtctgtag

SEQ ID NO: 213797 - DNA, 15 bp, Homo sapiens
tacccctcgtctgta

SEQ ID NO: 213798 - DNA, 15 bp, Homo sapiens
ttacccctcgtctgt

SEQ ID NO: 213799 - DNA, 15 bp, Homo sapiens
tttacccctcgtctg

SEQ ID NO: 213800 - DNA, 15 bp, Homo sapiens
ctttacccctcgtct

SEQ ID NO: 213801 - DNA, 15 bp, Homo sapiens
tctttacccctcgtc

SEQ ID NO: 213802 - DNA, 15 bp, Homo sapiens
gtctttacccctcgt

SEQ ID NO: 213803 - DNA, 15 bp, Homo sapiens
agtctttacccctcg

SEQ ID NO: 213804 - DNA, 15 bp, Homo sapiens
cagtctttacccctc

SEQ ID NO: 213805 - DNA, 15 bp, Homo sapiens
ccagtctttacccct

SEQ ID NO: 213806 - DNA, 15 bp, Homo sapiens
cccagtctttacccc

SEQ ID NO: 213807 - DNA, 15 bp, Homo sapiens
acccagtctttaccc

SEQ ID NO: 213808 - DNA, 15 bp, Homo sapiens
gacccagtctttacc

SEQ ID NO: 213809 - DNA, 15 bp, Homo sapiens
agacccagtctttac

SEQ ID NO: 213810 - DNA, 15 bp, Homo sapiens
gagacccagtcttta

SEQ ID NO: 213811 - DNA, 15 bp, Homo sapiens
tgagacccagtcttt

SEQ ID NO: 213812 - DNA, 15 bp, Homo sapiens
ctgagacccagtctt

SEQ ID NO: 213813 - DNA, 15 bp, Homo sapiens
tctgagacccagtct

SEQ ID NO: 213814 - DNA, 15 bp, Homo sapiens
ctctgagacccagtc

SEQ ID NO: 213815 - DNA, 15 bp, Homo sapiens
gctctgagacccagt

SEQ ID NO: 213816 - DNA, 15 bp, Homo sapiens
tgctctgagacccag

SEQ ID NO: 213817 - DNA, 15 bp, Homo sapiens
ttgctctgagaccca

SEQ ID NO: 213818 - DNA, 15 bp, Homo sapiens
cttgctctgagaccc

SEQ ID NO: 213819 - DNA, 15 bp, Homo sapiens
gcttgctctgagacc

SEQ ID NO: 213820 - DNA, 15 bp, Homo sapiens
tgcttgctctgagac

SEQ ID NO: 213821 - DNA, 15 bp, Homo sapiens
ctgcttgctctgaga

SEQ ID NO: 213822 - DNA, 15 bp, Homo sapiens
cctgcttgctctgag

SEQ ID NO: 213823 - DNA, 15 bp, Homo sapiens
gcctgcttgctctga

SEQ ID NO: 213824 - DNA, 15 bp, Homo sapiens
ggcctgcttgctctg

SEQ ID NO: 213825 - DNA, 15 bp, Homo sapiens
tggcctgcttgctct

SEQ ID NO: 213826 - DNA, 15 bp, Homo sapiens
ttggcctgcttgctc

SEQ ID NO: 213827 - DNA, 15 bp, Homo sapiens
attggcctgcttgct

SEQ ID NO: 213828 - DNA, 15 bp, Homo sapiens
cattggcctgcttgc

SEQ ID NO: 213829 - DNA, 15 bp, Homo sapiens
tcattggcctgcttg

SEQ ID NO: 213830 - DNA, 15 bp, Homo sapiens
gtcattggcctgctt

SEQ ID NO: 213831 - DNA, 15 bp, Homo sapiens
agtcattggcctgct

SEQ ID NO: 213832 - DNA, 15 bp, Homo sapiens
tagtcattggcctgc

SEQ ID NO: 213833 - DNA, 15 bp, Homo sapiens
ctagtcattggcctg

SEQ ID NO: 213834 - DNA, 15 bp, Homo sapiens
gctagtcattggcct

SEQ ID NO: 213835 - DNA, 15 bp, Homo sapiens
tgctagtcattggcc

SEQ ID NO: 213836 - DNA, 15 bp, Homo sapiens
ctgctagtcattggc

SEQ ID NO: 213837 - DNA, 15 bp, Homo sapiens
cctgctagtcattgg

SEQ ID NO: 213838 - DNA, 15 bp, Homo sapiens
ccctgctagtcattg

SEQ ID NO: 213839 - DNA, 15 bp, Homo sapiens
gccctgctagtcatt

SEQ ID NO: 213840 - DNA, 15 bp, Homo sapiens
cgccctgctagtcat

SEQ ID NO: 213841 - DNA, 15 bp, Homo sapiens
ccgccctgctagtca

SEQ ID NO: 213842 - DNA, 15 bp, Homo sapiens
gccgccctgctagtc

SEQ ID NO: 213843 - DNA, 15 bp, Homo sapiens
ggccgccctgctagt

SEQ ID NO: 213844 - DNA, 15 bp, Homo sapiens
gggccgccctgctag

SEQ ID NO: 213845 - DNA, 15 bp, Homo sapiens
tgggccgccctgcta

SEQ ID NO: 213846 - DNA, 15 bp, Homo sapiens
ttgggccgccctgct

SEQ ID NO: 213847 - DNA, 15 bp, Homo sapiens
cttgggccgccctgc

SEQ ID NO: 213848 - DNA, 15 bp, Homo sapiens
tcttgggccgccctg

SEQ ID NO: 213849 - DNA, 15 bp, Homo sapiens
ctcttgggccgccct

SEQ ID NO: 213850 - DNA, 15 bp, Homo sapiens
gctcttgggccgccc

SEQ ID NO: 213851 - DNA, 15 bp, Homo sapiens
ggctcttgggccgcc

SEQ ID NO: 213852 - DNA, 15 bp, Homo sapiens
aggctcttgggccgc

SEQ ID NO: 213853 - DNA, 15 bp, Homo sapiens
aaggctcttgggccg

SEQ ID NO: 213854 - DNA, 15 bp, Homo sapiens
aaaggctcttgggcc

SEQ ID NO: 213855 - DNA, 15 bp, Homo sapiens
taaaggctcttgggc

SEQ ID NO: 213856 - DNA, 15 bp, Homo sapiens
ttaaaggctcttggg

SEQ ID NO: 213857 - DNA, 15 bp, Homo sapiens
cttaaaggctcttgg

SEQ ID NO: 213858 - DNA, 15 bp, Homo sapiens
acttaaaggctcttg

SEQ ID NO: 213859 - DNA, 15 bp, Homo sapiens
cacttaaaggctctt

SEQ ID NO: 213860 - DNA, 15 bp, Homo sapiens
tcacttaaaggctct

SEQ ID NO: 213861 - DNA, 15 bp, Homo sapiens
ctcacttaaaggctc

SEQ ID NO: 213862 - DNA, 15 bp, Homo sapiens
tctcacttaaaggct

SEQ ID NO: 213863 - DNA, 15 bp, Homo sapiens
ctctcacttaaaggc

SEQ ID NO: 213864 - DNA, 15 bp, Homo sapiens
cctctcacttaaagg

SEQ ID NO: 213865 - DNA, 15 bp, Homo sapiens
gcctctcacttaaag

SEQ ID NO: 213866 - DNA, 15 bp, Homo sapiens
agcctctcacttaaa

SEQ ID NO: 213867 - DNA, 15 bp, Homo sapiens
cagcctctcacttaa

SEQ ID NO: 213868 - DNA, 15 bp, Homo sapiens
acagcctctcactta

SEQ ID NO: 213869 - DNA, 15 bp, Homo sapiens
gacagcctctcactt

SEQ ID NO: 213870 - DNA, 15 bp, Homo sapiens
tgacagcctctcact

SEQ ID NO: 213871 - DNA, 15 bp, Homo sapiens
atgacagcctctcac

SEQ ID NO: 213872 - DNA, 15 bp, Homo sapiens
gatgacagcctctca

SEQ ID NO: 213873 - DNA, 15 bp, Homo sapiens
ggatgacagcctctc

SEQ ID NO: 213874 - DNA, 15 bp, Homo sapiens
aggatgacagcctct

SEQ ID NO: 213875 - DNA, 15 bp, Homo sapiens
caggatgacagcctc

SEQ ID NO: 213876 - DNA, 15 bp, Homo sapiens
ccaggatgacagcct

SEQ ID NO: 213877 - DNA, 15 bp, Homo sapiens
cccaggatgacagcc

SEQ ID NO: 213878 - DNA, 15 bp, Homo sapiens
ccccaggatgacagc

SEQ ID NO: 213879 - DNA, 15 bp, Homo sapiens
gccccaggatgacag

SEQ ID NO: 213880 - DNA, 15 bp, Homo sapiens
agccccaggatgaca

SEQ ID NO: 213881 - DNA, 15 bp, Homo sapiens
cagccccaggatgac

SEQ ID NO: 213882 - DNA, 15 bp, Homo sapiens
acagccccaggatga

SEQ ID NO: 213883 - DNA, 15 bp, Homo sapiens
cacagccccaggatg

SEQ ID NO: 213884 - DNA, 15 bp, Homo sapiens
tcacagccccaggat

SEQ ID NO: 213885 - DNA, 15 bp, Homo sapiens
ttcacagccccagga

SEQ ID NO: 213886 - DNA, 15 bp, Homo sapiens
attcacagccccagg

SEQ ID NO: 213887 - DNA, 15 bp, Homo sapiens
cattcacagccccag

SEQ ID NO: 213888 - DNA, 15 bp, Homo sapiens
tcattcacagcccca

SEQ ID NO: 213889 - DNA, 15 bp, Homo sapiens
ttcattcacagcccc

SEQ ID NO: 213890 - DNA, 15 bp, Homo sapiens
gttcattcacagccc

SEQ ID NO: 213891 - DNA, 15 bp, Homo sapiens
agttcattcacagcc

SEQ ID NO: 213892 - DNA, 15 bp, Homo sapiens
aagttcattcacagc

SEQ ID NO: 213893 - DNA, 15 bp, Homo sapiens
gaagttcattcacag

SEQ ID NO: 213894 - DNA, 15 bp, Homo sapiens
cgaagttcattcaca

SEQ ID NO: 213895 - DNA, 15 bp, Homo sapiens
ccgaagttcattcac

SEQ ID NO: 213896 - DNA, 15 bp, Homo sapiens
tccgaagttcattca

SEQ ID NO: 213897 - DNA, 15 bp, Homo sapiens
ctccgaagttcattc

SEQ ID NO: 213898 - DNA, 15 bp, Homo sapiens
cctccgaagttcatt

SEQ ID NO: 213899 - DNA, 15 bp, Homo sapiens
ccctccgaagttcat

SEQ ID NO: 213900 - DNA, 15 bp, Homo sapiens
cccctccgaagttca

SEQ ID NO: 213901 - DNA, 15 bp, Homo sapiens
acccctccgaagttc

SEQ ID NO: 213902 - DNA, 15 bp, Homo sapiens
gacccctccgaagtt

SEQ ID NO: 213903 - DNA, 15 bp, Homo sapiens
ggacccctccgaagt

SEQ ID NO: 213904 - DNA, 15 bp, Homo sapiens
aggacccctccgaag

SEQ ID NO: 213905 - DNA, 15 bp, Homo sapiens
aaggacccctccgaa

SEQ ID NO: 213906 - DNA, 15 bp, Homo sapiens
caaggacccctccga

SEQ ID NO: 213907 - DNA, 15 bp, Homo sapiens
gcaaggacccctccg

SEQ ID NO: 213908 - DNA, 15 bp, Homo sapiens
ggcaaggacccctcc

SEQ ID NO: 213909 - DNA, 15 bp, Homo sapiens
gggcaaggacccctc

SEQ ID NO: 213910 - DNA, 15 bp, Homo sapiens
agggcaaggacccct

SEQ ID NO: 213911 - DNA, 15 bp, Homo sapiens
aagggcaaggacccc

SEQ ID NO: 213912 - DNA, 15 bp, Homo sapiens
gaagggcaaggaccc

SEQ ID NO: 213913 - DNA, 15 bp, Homo sapiens
agaagggcaaggacc

SEQ ID NO: 213914 - DNA, 15 bp, Homo sapiens
tagaagggcaaggac

SEQ ID NO: 213915 - DNA, 15 bp, Homo sapiens
ctagaagggcaagga

SEQ ID NO: 213916 - DNA, 15 bp, Homo sapiens
cctagaagggcaagg

SEQ ID NO: 213917 - DNA, 15 bp, Homo sapiens
tcctagaagggcaag

SEQ ID NO: 213918 - DNA, 15 bp, Homo sapiens
ttcctagaagggcaa

SEQ ID NO: 213919 - DNA, 15 bp, Homo sapiens
cttcctagaagggca

SEQ ID NO: 213920 - DNA, 15 bp, Homo sapiens
acttcctagaagggc

SEQ ID NO: 213921 - DNA, 15 bp, Homo sapiens
cacttcctagaaggg

SEQ ID NO: 213922 - DNA, 15 bp, Homo sapiens
gcacttcctagaagg

SEQ ID NO: 213923 - DNA, 15 bp, Homo sapiens
tgcacttcctagaag

SEQ ID NO: 213924 - DNA, 15 bp, Homo sapiens
ctgcacttcctagaa

SEQ ID NO: 213925 - DNA, 15 bp, Homo sapiens
cctgcacttcctaga

SEQ ID NO: 213926 - DNA, 15 bp, Homo sapiens
gcctgcacttcctag

SEQ ID NO: 213927 - DNA, 15 bp, Homo sapiens
tgcctgcacttccta

SEQ ID NO: 213928 - DNA, 15 bp, Homo sapiens
atgcctgcacttcct

SEQ ID NO: 213929 - DNA, 15 bp, Homo sapiens
tatgcctgcacttcc

SEQ ID NO: 213930 - DNA, 15 bp, Homo sapiens
atatgcctgcacttc

SEQ ID NO: 213931 - DNA, 15 bp, Homo sapiens
aatatgcctgcactt

SEQ ID NO: 213932 - DNA, 15 bp, Homo sapiens
aaatatgcctgcact

SEQ ID NO: 213933 - DNA, 15 bp, Homo sapiens
aaaatatgcctgcac

SEQ ID NO: 213934 - DNA, 15 bp, Homo sapiens
caaaatatgcctgca

SEQ ID NO: 213935 - DNA, 15 bp, Homo sapiens
acaaaatatgcctgc

SEQ ID NO: 213936 - DNA, 15 bp, Homo sapiens
gacaaaatatgcctg

SEQ ID NO: 213937 - DNA, 15 bp, Homo sapiens
agacaaaatatgcct

SEQ ID NO: 213938 - DNA, 15 bp, Homo sapiens
gagacaaaatatgcc

SEQ ID NO: 213939 - DNA, 15 bp, Homo sapiens
agagacaaaatatgc

SEQ ID NO: 213940 - DNA, 15 bp, Homo sapiens
tagagacaaaatatg

SEQ ID NO: 213941 - DNA, 15 bp, Homo sapiens
atagagacaaaatat

SEQ ID NO: 213942 - DNA, 15 bp, Homo sapiens
catagagacaaaata

SEQ ID NO: 213943 - DNA, 15 bp, Homo sapiens
acatagagacaaaat

SEQ ID NO: 213944 - DNA, 15 bp, Homo sapiens
tacatagagacaaaa

SEQ ID NO: 213945 - DNA, 15 bp, Homo sapiens
ttacatagagacaaa

SEQ ID NO: 213946 - DNA, 15 bp, Homo sapiens
cttacatagagacaa

SEQ ID NO: 213947 - DNA, 15 bp, Homo sapiens
gcttacatagagaca

SEQ ID NO: 213948 - DNA, 15 bp, Homo sapiens
tgcttacatagagac

SEQ ID NO: 213949 - DNA, 15 bp, Homo sapiens
gtgcttacatagaga

SEQ ID NO: 213950 - DNA, 15 bp, Homo sapiens
tgtgcttacatagag

SEQ ID NO: 213951 - DNA, 15 bp, Homo sapiens
atgtgcttacataga

SEQ ID NO: 213952 - DNA, 15 bp, Homo sapiens
catgtgcttacatag

SEQ ID NO: 213953 - DNA, 15 bp, Homo sapiens
gcatgtgcttacata

SEQ ID NO: 213954 - DNA, 15 bp, Homo sapiens
tgcatgtgcttacat

SEQ ID NO: 213955 - DNA, 15 bp, Homo sapiens
atgcatgtgcttaca

SEQ ID NO: 213956 - DNA, 15 bp, Homo sapiens
aatgcatgtgcttac

SEQ ID NO: 213957 - DNA, 15 bp, Homo sapiens
aaatgcatgtgctta

SEQ ID NO: 213958 - DNA, 15 bp, Homo sapiens
gaaatgcatgtgctt

SEQ ID NO: 213959 - DNA, 15 bp, Homo sapiens
agaaatgcatgtgct

SEQ ID NO: 213960 - DNA, 15 bp, Homo sapiens
gagaaatgcatgtgc

SEQ ID NO: 213961 - DNA, 15 bp, Homo sapiens
ggagaaatgcatgtg

SEQ ID NO: 213962 - DNA, 15 bp, Homo sapiens
tggagaaatgcatgt

SEQ ID NO: 213963 - DNA, 15 bp, Homo sapiens
ctggagaaatgcatg

SEQ ID NO: 213964 - DNA, 15 bp, Homo sapiens
tctggagaaatgcat

SEQ ID NO: 213965 - DNA, 15 bp, Homo sapiens
ttctggagaaatgca

SEQ ID NO: 213966 - DNA, 15 bp, Homo sapiens
tttctggagaaatgc

SEQ ID NO: 213967 - DNA, 15 bp, Homo sapiens
ctttctggagaaatg

SEQ ID NO: 213968 - DNA, 15 bp, Homo sapiens
tctttctggagaaat

SEQ ID NO: 213969 - DNA, 15 bp, Homo sapiens
ttctttctggagaaa

SEQ ID NO: 213970 - DNA, 15 bp, Homo sapiens
tttctttctggagaa

SEQ ID NO: 213971 - DNA, 15 bp, Homo sapiens
ctttctttctggaga

SEQ ID NO: 213972 - DNA, 15 bp, Homo sapiens
actttctttctggag

SEQ ID NO: 213973 - DNA, 15 bp, Homo sapiens
aactttctttctgga

SEQ ID NO: 213974 - DNA, 15 bp, Homo sapiens
caactttctttctgg

SEQ ID NO: 213975 - DNA, 15 bp, Homo sapiens
tcaactttctttctg

SEQ ID NO: 213976 - DNA, 15 bp, Homo sapiens
atcaactttctttct

SEQ ID NO: 213977 - DNA, 15 bp, Homo sapiens
tatcaactttctttc

SEQ ID NO: 213978 - DNA, 15 bp, Homo sapiens
atatcaactttcttt

SEQ ID NO: 213979 - DNA, 15 bp, Homo sapiens
gatatcaactttctt

SEQ ID NO: 213980 - DNA, 15 bp, Homo sapiens
agatatcaactttct

SEQ ID NO: 213981 - DNA, 15 bp, Homo sapiens
aagatatcaactttc

SEQ ID NO: 213982 - DNA, 15 bp, Homo sapiens
gaagatatcaacttt

SEQ ID NO: 213983 - DNA, 15 bp, Homo sapiens
tgaagatatcaactt

SEQ ID NO: 213984 - DNA, 15 bp, Homo sapiens
ctgaagatatcaact

SEQ ID NO: 213985 - DNA, 15 bp, Homo sapiens
tctgaagatatcaac

SEQ ID NO: 213986 - DNA, 15 bp, Homo sapiens
atctgaagatatcaa

SEQ ID NO: 213987 - DNA, 15 bp, Homo sapiens
aatctgaagatatca

SEQ ID NO: 213988 - DNA, 15 bp, Homo sapiens
gaatctgaagatatc

SEQ ID NO: 213989 - DNA, 15 bp, Homo sapiens
agaatctgaagatat

SEQ ID NO: 213990 - DNA, 15 bp, Homo sapiens
gagaatctgaagata

SEQ ID NO: 213991 - DNA, 15 bp, Homo sapiens
tgagaatctgaagat

SEQ ID NO: 213992 - DNA, 15 bp, Homo sapiens
ttgagaatctgaaga

SEQ ID NO: 213993 - DNA, 15 bp, Homo sapiens
cttgagaatctgaag

SEQ ID NO: 213994 - DNA, 15 bp, Homo sapiens
acttgagaatctgaa

SEQ ID NO: 213995 - DNA, 15 bp, Homo sapiens
aacttgagaatctga

SEQ ID NO: 213996 - DNA, 15 bp, Homo sapiens
caacttgagaatctg

SEQ ID NO: 213997 - DNA, 15 bp, Homo sapiens
ccaacttgagaatct

SEQ ID NO: 213998 - DNA, 15 bp, Homo sapiens
accaacttgagaatc

SEQ ID NO: 213999 - DNA, 15 bp, Homo sapiens
gaccaacttgagaat

SEQ ID NO: 214000 - DNA, 15 bp, Homo sapiens
agaccaacttgagaa

SEQ ID NO: 214001 - DNA, 15 bp, Homo sapiens
cagaccaacttgaga

SEQ ID NO: 214002 - DNA, 15 bp, Homo sapiens
acagaccaacttgag

SEQ ID NO: 214003 - DNA, 15 bp, Homo sapiens
cacagaccaacttga

SEQ ID NO: 214004 - DNA, 15 bp, Homo sapiens
gcacagaccaacttg

SEQ ID NO: 214005 - DNA, 15 bp, Homo sapiens
ggcacagaccaactt

SEQ ID NO: 214006 - DNA, 15 bp, Homo sapiens
tggcacagaccaact

SEQ ID NO: 214007 - DNA, 15 bp, Homo sapiens
gtggcacagaccaac

SEQ ID NO: 214008 - DNA, 15 bp, Homo sapiens
ggtggcacagaccaa

SEQ ID NO: 214009 - DNA, 15 bp, Homo sapiens
tggtggcacagacca

SEQ ID NO: 214010 - DNA, 15 bp, Homo sapiens
ttggtggcacagacc

SEQ ID NO: 214011 - DNA, 15 bp, Homo sapiens
tttggtggcacagac

SEQ ID NO: 214012 - DNA, 15 bp, Homo sapiens
ttttggtggcacaga

SEQ ID NO: 214013 - DNA, 15 bp, Homo sapiens
cttttggtggcacag

SEQ ID NO: 214014 - DNA, 15 bp, Homo sapiens
tcttttggtggcaca

SEQ ID NO: 214015 - DNA, 15 bp, Homo sapiens
atcttttggtggcac

SEQ ID NO: 214016 - DNA, 15 bp, Homo sapiens
aatcttttggtggca

SEQ ID NO: 214017 - DNA, 15 bp, Homo sapiens
gaatcttttggtggc

SEQ ID NO: 214018 - DNA, 15 bp, Homo sapiens
tgaatcttttggtgg

SEQ ID NO: 214019 - DNA, 15 bp, Homo sapiens
ttgaatcttttggtg

SEQ ID NO: 214020 - DNA, 15 bp, Homo sapiens
gttgaatcttttggt

SEQ ID NO: 214021 - DNA, 15 bp, Homo sapiens
tgttgaatcttttgg

SEQ ID NO: 214022 - DNA, 15 bp, Homo sapiens
atgttgaatcttttg

SEQ ID NO: 214023 - DNA, 15 bp, Homo sapiens
tatgttgaatctttt

SEQ ID NO: 214024 - DNA, 15 bp, Homo sapiens
ttatgttgaatcttt

SEQ ID NO: 214025 - DNA, 15 bp, Homo sapiens
attatgttgaatctt

SEQ ID NO: 214026 - DNA, 15 bp, Homo sapiens
gattatgttgaatct

SEQ ID NO: 214027 - DNA, 15 bp, Homo sapiens
tgattatgttgaatc

SEQ ID NO: 214028 - DNA, 15 bp, Homo sapiens
ttgattatgttgaat

SEQ ID NO: 214029 - DNA, 15 bp, Homo sapiens
attgattatgttgaa

SEQ ID NO: 214030 - DNA, 15 bp, Homo sapiens
tattgattatgttga

SEQ ID NO: 214031 - DNA, 15 bp, Homo sapiens
ttattgattatgttg

SEQ ID NO: 214032 - DNA, 15 bp, Homo sapiens
gttattgattatgtt

SEQ ID NO: 214033 - DNA, 15 bp, Homo sapiens
ggttattgattatgt

SEQ ID NO: 214034 - DNA, 15 bp, Homo sapiens
tggttattgattatg

SEQ ID NO: 214035 - DNA, 15 bp, Homo sapiens
ctggttattgattat

SEQ ID NO: 214036 - DNA, 15 bp, Homo sapiens
actggttattgatta

SEQ ID NO: 214037 - DNA, 15 bp, Homo sapiens
tactggttattgatt

SEQ ID NO: 214038 - DNA, 15 bp, Homo sapiens
ttactggttattgat

SEQ ID NO: 214039 - DNA, 15 bp, Homo sapiens
attactggttattga

SEQ ID NO: 214040 - DNA, 15 bp, Homo sapiens
gattactggttattg

SEQ ID NO: 214041 - DNA, 15 bp, Homo sapiens
ggattactggttatt

SEQ ID NO: 214042 - DNA, 15 bp, Homo sapiens
tggattactggttat

SEQ ID NO: 214043 - DNA, 15 bp, Homo sapiens
ttggattactggtta

SEQ ID NO: 214044 - DNA, 15 bp, Homo sapiens
gttggattactggtt

SEQ ID NO: 214045 - DNA, 15 bp, Homo sapiens
ggttggattactggt

SEQ ID NO: 214046 - DNA, 15 bp, Homo sapiens
tggttggattactgg

SEQ ID NO: 214047 - DNA, 15 bp, Homo sapiens
ctggttggattactg

SEQ ID NO: 214048 - DNA, 15 bp, Homo sapiens
gctggttggattact

SEQ ID NO: 214049 - DNA, 15 bp, Homo sapiens
agctggttggattac

SEQ ID NO: 214050 - DNA, 15 bp, Homo sapiens
aagctggttggatta

SEQ ID NO: 214051 - DNA, 15 bp, Homo sapiens
taagctggttggatt

SEQ ID NO: 214052 - DNA, 15 bp, Homo sapiens
ataagctggttggat

SEQ ID NO: 214053 - DNA, 15 bp, Homo sapiens
gataagctggttgga

SEQ ID NO: 214054 - DNA, 15 bp, Homo sapiens
agataagctggttgg

SEQ ID NO: 214055 - DNA, 15 bp, Homo sapiens
aagataagctggttg

SEQ ID NO: 214056 - DNA, 15 bp, Homo sapiens
taagataagctggtt

SEQ ID NO: 214057 - DNA, 15 bp, Homo sapiens
ttaagataagctggt

SEQ ID NO: 214058 - DNA, 15 bp, Homo sapiens
tttaagataagctgg

SEQ ID NO: 214059 - DNA, 15 bp, Homo sapiens
gtttaagataagctg

SEQ ID NO: 214060 - DNA, 15 bp, Homo sapiens
tgtttaagataagct

SEQ ID NO: 214061 - DNA, 15 bp, Homo sapiens
atgtttaagataagc

SEQ ID NO: 214062 - DNA, 15 bp, Homo sapiens
catgtttaagataag

SEQ ID NO: 214063 - DNA, 15 bp, Homo sapiens
ccatgtttaagataa

SEQ ID NO: 214064 - DNA, 15 bp, Homo sapiens
cccatgtttaagata

SEQ ID NO: 214065 - DNA, 15 bp, Homo sapiens
tcccatgtttaagat

SEQ ID NO: 214066 - DNA, 15 bp, Homo sapiens
ttcccatgtttaaga

SEQ ID NO: 214067 - DNA, 15 bp, Homo sapiens
cttcccatgtttaag

SEQ ID NO: 214068 - DNA, 15 bp, Homo sapiens
acttcccatgtttaa

SEQ ID NO: 214069 - DNA, 15 bp, Homo sapiens
gacttcccatgttta

SEQ ID NO: 214070 - DNA, 15 bp, Homo sapiens
agacttcccatgttt

SEQ ID NO: 214071 - DNA, 15 bp, Homo sapiens
gagacttcccatgtt

SEQ ID NO: 214072 - DNA, 15 bp, Homo sapiens
tgagacttcccatgt

SEQ ID NO: 214073 - DNA, 15 bp, Homo sapiens
ctgagacttcccatg

SEQ ID NO: 214074 - DNA, 15 bp, Homo sapiens
cctgagacttcccat

SEQ ID NO: 214075 - DNA, 15 bp, Homo sapiens
ccctgagacttccca

SEQ ID NO: 214076 - DNA, 15 bp, Homo sapiens
gccctgagacttccc

SEQ ID NO: 214077 - DNA, 15 bp, Homo sapiens
agccctgagacttcc

SEQ ID NO: 214078 - DNA, 15 bp, Homo sapiens
gagccctgagacttc

SEQ ID NO: 214079 - DNA, 15 bp, Homo sapiens
tgagccctgagactt

SEQ ID NO: 214080 - DNA, 15 bp, Homo sapiens
ctgagccctgagact

SEQ ID NO: 214081 - DNA, 15 bp, Homo sapiens
tctgagccctgagac

SEQ ID NO: 214082 - DNA, 15 bp, Homo sapiens
ctctgagccctgaga

SEQ ID NO: 214083 - DNA, 15 bp, Homo sapiens
tctctgagccctgag

SEQ ID NO: 214084 - DNA, 15 bp, Homo sapiens
ttctctgagccctga

SEQ ID NO: 214085 - DNA, 15 bp, Homo sapiens
tttctctgagccctg

SEQ ID NO: 214086 - DNA, 15 bp, Homo sapiens
gtttctctgagccct

SEQ ID NO: 214087 - DNA, 15 bp, Homo sapiens
tgtttctctgagccc

SEQ ID NO: 214088 - DNA, 15 bp, Homo sapiens
gtgtttctctgagcc

SEQ ID NO: 214089 - DNA, 15 bp, Homo sapiens
ggtgtttctctgagc

SEQ ID NO: 214090 - DNA, 15 bp, Homo sapiens
gggtgtttctctgag

SEQ ID NO: 214091 - DNA, 15 bp, Homo sapiens
tgggtgtttctctga

SEQ ID NO: 214092 - DNA, 15 bp, Homo sapiens
atgggtgtttctctg

SEQ ID NO: 214093 - DNA, 15 bp, Homo sapiens
tatgggtgtttctct

SEQ ID NO: 214094 - DNA, 15 bp, Homo sapiens
ctatgggtgtttctc

SEQ ID NO: 214095 - DNA, 15 bp, Homo sapiens
gctatgggtgtttct

SEQ ID NO: 214096 - DNA, 15 bp, Homo sapiens
cgctatgggtgtttc

SEQ ID NO: 214097 - DNA, 15 bp, Homo sapiens
tcgctatgggtgttt

SEQ ID NO: 214098 - DNA, 15 bp, Homo sapiens
gtcgctatgggtgtt

SEQ ID NO: 214099 - DNA, 15 bp, Homo sapiens
tgtcgctatgggtgt

SEQ ID NO: 214100 - DNA, 15 bp, Homo sapiens
ctgtcgctatgggtg

SEQ ID NO: 214101 - DNA, 15 bp, Homo sapiens
actgtcgctatgggt

SEQ ID NO: 214102 - DNA, 15 bp, Homo sapiens
cactgtcgctatggg

SEQ ID NO: 214103 - DNA, 15 bp, Homo sapiens
acactgtcgctatgg

SEQ ID NO: 214104 - DNA, 15 bp, Homo sapiens
gacactgtcgctatg

SEQ ID NO: 214105 - DNA, 15 bp, Homo sapiens
agacactgtcgctat

SEQ ID NO: 214106 - DNA, 15 bp, Homo sapiens
tagacactgtcgcta

SEQ ID NO: 214107 - DNA, 15 bp, Homo sapiens
atagacactgtcgct

SEQ ID NO: 214108 - DNA, 15 bp, Homo sapiens
tatagacactgtcgc

SEQ ID NO: 214109 - DNA, 15 bp, Homo sapiens
gtatagacactgtcg

SEQ ID NO: 214110 - DNA, 15 bp, Homo sapiens
agtatagacactgtc

SEQ ID NO: 214111 - DNA, 15 bp, Homo sapiens
gagtatagacactgt

SEQ ID NO: 214112 - DNA, 15 bp, Homo sapiens
agagtatagacactg

SEQ ID NO: 214113 - DNA, 15 bp, Homo sapiens
aagagtatagacact

SEQ ID NO: 214114 - DNA, 15 bp, Homo sapiens
caagagtatagacac

SEQ ID NO: 214115 - DNA, 15 bp, Homo sapiens
ccaagagtatagaca

SEQ ID NO: 214116 - DNA, 15 bp, Homo sapiens
accaagagtatagac

SEQ ID NO: 214117 - DNA, 15 bp, Homo sapiens
gaccaagagtataga

SEQ ID NO: 214118 - DNA, 15 bp, Homo sapiens
agaccaagagtatag

SEQ ID NO: 214119 - DNA, 15 bp, Homo sapiens
tagaccaagagtata

SEQ ID NO: 214120 - DNA, 15 bp, Homo sapiens
ctagaccaagagtat

SEQ ID NO: 214121 - DNA, 15 bp, Homo sapiens
cctagaccaagagta

SEQ ID NO: 214122 - DNA, 15 bp, Homo sapiens
ccctagaccaagagt

SEQ ID NO: 214123 - DNA, 15 bp, Homo sapiens
accctagaccaagag

SEQ ID NO: 214124 - DNA, 15 bp, Homo sapiens
gaccctagaccaaga

SEQ ID NO: 214125 - DNA, 15 bp, Homo sapiens
ggaccctagaccaag

SEQ ID NO: 214126 - DNA, 15 bp, Homo sapiens
aggaccctagaccaa

SEQ ID NO: 214127 - DNA, 15 bp, Homo sapiens
taggaccctagacca

SEQ ID NO: 214128 - DNA, 15 bp, Homo sapiens
gtaggaccctagacc

SEQ ID NO: 214129 - DNA, 15 bp, Homo sapiens
agtaggaccctagac

SEQ ID NO: 214130 - DNA, 15 bp, Homo sapiens
cagtaggaccctaga

SEQ ID NO: 214131 - DNA, 15 bp, Homo sapiens
ccagtaggaccctag

SEQ ID NO: 214132 - DNA, 15 bp, Homo sapiens
tccagtaggacccta

SEQ ID NO: 214133 - DNA, 15 bp, Homo sapiens
atccagtaggaccct

SEQ ID NO: 214134 - DNA, 15 bp, Homo sapiens
catccagtaggaccc

SEQ ID NO: 214135 - DNA, 15 bp, Homo sapiens
acatccagtaggacc

SEQ ID NO: 214136 - DNA, 15 bp, Homo sapiens
aacatccagtaggac

SEQ ID NO: 214137 - DNA, 15 bp, Homo sapiens
caacatccagtagga

SEQ ID NO: 214138 - DNA, 15 bp, Homo sapiens
acaacatccagtagg

SEQ ID NO: 214139 - DNA, 15 bp, Homo sapiens
gacaacatccagtag

SEQ ID NO: 214140 - DNA, 15 bp, Homo sapiens
ggacaacatccagta

SEQ ID NO: 214141 - DNA, 15 bp, Homo sapiens
aggacaacatccagt

SEQ ID NO: 214142 - DNA, 15 bp, Homo sapiens
aaggacaacatccag

SEQ ID NO: 214143 - DNA, 15 bp, Homo sapiens
gaaggacaacatcca

SEQ ID NO: 214144 - DNA, 15 bp, Homo sapiens
tgaaggacaacatcc

SEQ ID NO: 214145 - DNA, 15 bp, Homo sapiens
ttgaaggacaacatc

SEQ ID NO: 214146 - DNA, 15 bp, Homo sapiens
gttgaaggacaacat

SEQ ID NO: 214147 - DNA, 15 bp, Homo sapiens
agttgaaggacaaca

SEQ ID NO: 214148 - DNA, 15 bp, Homo sapiens
cagttgaaggacaac

SEQ ID NO: 214149 - DNA, 15 bp, Homo sapiens
acagttgaaggacaa

SEQ ID NO: 214150 - DNA, 15 bp, Homo sapiens
gacagttgaaggaca

SEQ ID NO: 214151 - DNA, 15 bp, Homo sapiens
ggacagttgaaggac

SEQ ID NO: 214152 - DNA, 15 bp, Homo sapiens
aggacagttgaagga

SEQ ID NO: 214153 - DNA, 15 bp, Homo sapiens
caggacagttgaagg

SEQ ID NO: 214154 - DNA, 15 bp, Homo sapiens
ccaggacagttgaag

SEQ ID NO: 214155 - DNA, 15 bp, Homo sapiens
tccaggacagttgaa

SEQ ID NO: 214156 - DNA, 15 bp, Homo sapiens
ttccaggacagttga

SEQ ID NO: 214157 - DNA, 15 bp, Homo sapiens
cttccaggacagttg

SEQ ID NO: 214158 - DNA, 15 bp, Homo sapiens
tcttccaggacagtt

SEQ ID NO: 214159 - DNA, 15 bp, Homo sapiens
atcttccaggacagt

SEQ ID NO: 214160 - DNA, 15 bp, Homo sapiens
gatcttccaggacag

SEQ ID NO: 214161 - DNA, 15 bp, Homo sapiens
ggatcttccaggaca

SEQ ID NO: 214162 - DNA, 15 bp, Homo sapiens
tggatcttccaggac

SEQ ID NO: 214163 - DNA, 15 bp, Homo sapiens
ctggatcttccagga

SEQ ID NO: 214164 - DNA, 15 bp, Homo sapiens
gctggatcttccagg

SEQ ID NO: 214165 - DNA, 15 bp, Homo sapiens
ggctggatcttccag

SEQ ID NO: 214166 - DNA, 15 bp, Homo sapiens
aggctggatcttcca

SEQ ID NO: 214167 - DNA, 15 bp, Homo sapiens
caggctggatcttcc

SEQ ID NO: 214168 - DNA, 15 bp, Homo sapiens
acaggctggatcttc

SEQ ID NO: 214169 - DNA, 15 bp, Homo sapiens
aacaggctggatctt

SEQ ID NO: 214170 - DNA, 15 bp, Homo sapiens
taacaggctggatct

SEQ ID NO: 214171 - DNA, 15 bp, Homo sapiens
ctaacaggctggatc

SEQ ID NO: 214172 - DNA, 15 bp, Homo sapiens
cctaacaggctggat

SEQ ID NO: 214173 - DNA, 15 bp, Homo sapiens
tcctaacaggctgga

SEQ ID NO: 214174 - DNA, 15 bp, Homo sapiens
ctcctaacaggctgg

SEQ ID NO: 214175 - DNA, 15 bp, Homo sapiens
tctcctaacaggctg

SEQ ID NO: 214176 - DNA, 15 bp, Homo sapiens
ctctcctaacaggct

SEQ ID NO: 214177 - DNA, 15 bp, Homo sapiens
actctcctaacaggc

SEQ ID NO: 214178 - DNA, 15 bp, Homo sapiens
gactctcctaacagg

SEQ ID NO: 214179 - DNA, 15 bp, Homo sapiens
ggactctcctaacag

SEQ ID NO: 214180 - DNA, 15 bp, Homo sapiens
gggactctcctaaca

SEQ ID NO: 214181 - DNA, 15 bp, Homo sapiens
ggggactctcctaac

SEQ ID NO: 214182 - DNA, 15 bp, Homo sapiens
aggggactctcctaa

SEQ ID NO: 214183 - DNA, 15 bp, Homo sapiens
caggggactctccta

SEQ ID NO: 214184 - DNA, 15 bp, Homo sapiens
acaggggactctcct

SEQ ID NO: 214185 - DNA, 15 bp, Homo sapiens
gacaggggactctcc

SEQ ID NO: 214186 - DNA, 15 bp, Homo sapiens
agacaggggactctc

SEQ ID NO: 214187 - DNA, 15 bp, Homo sapiens
cagacaggggactct

SEQ ID NO: 214188 - DNA, 15 bp, Homo sapiens
acagacaggggactc

SEQ ID NO: 214189 - DNA, 15 bp, Homo sapiens
aacagacaggggact

SEQ ID NO: 214190 - DNA, 15 bp, Homo sapiens
gaacagacaggggac

SEQ ID NO: 214191 - DNA, 15 bp, Homo sapiens
ggaacagacagggga

SEQ ID NO: 214192 - DNA, 15 bp, Homo sapiens
gggaacagacagggg

SEQ ID NO: 214193 - DNA, 15 bp, Homo sapiens
agggaacagacaggg

SEQ ID NO: 214194 - DNA, 15 bp, Homo sapiens
cagggaacagacagg

SEQ ID NO: 214195 - DNA, 15 bp, Homo sapiens
gcagggaacagacag

SEQ ID NO: 214196 - DNA, 15 bp, Homo sapiens
ggcagggaacagaca

SEQ ID NO: 214197 - DNA, 15 bp, Homo sapiens
aggcagggaacagac

SEQ ID NO: 214198 - DNA, 15 bp, Homo sapiens
gaggcagggaacaga

SEQ ID NO: 214199 - DNA, 15 bp, Homo sapiens
agaggcagggaacag

SEQ ID NO: 214200 - DNA, 15 bp, Homo sapiens
gagaggcagggaaca

SEQ ID NO: 214201 - DNA, 15 bp, Homo sapiens
ggagaggcagggaac

SEQ ID NO: 214202 - DNA, 15 bp, Homo sapiens
tggagaggcagggaa

SEQ ID NO: 214203 - DNA, 15 bp, Homo sapiens
ctggagaggcaggga

SEQ ID NO: 214204 - DNA, 15 bp, Homo sapiens
tctggagaggcaggg

SEQ ID NO: 214205 - DNA, 15 bp, Homo sapiens
ttctggagaggcagg

SEQ ID NO: 214206 - DNA, 15 bp, Homo sapiens
attctggagaggcag

SEQ ID NO: 214207 - DNA, 15 bp, Homo sapiens
gattctggagaggca

SEQ ID NO: 214208 - DNA, 15 bp, Homo sapiens
tgattctggagaggc

SEQ ID NO: 214209 - DNA, 15 bp, Homo sapiens
ttgattctggagagg

SEQ ID NO: 214210 - DNA, 15 bp, Homo sapiens
gttgattctggagag

SEQ ID NO: 214211 - DNA, 15 bp, Homo sapiens
agttgattctggaga

SEQ ID NO: 214212 - DNA, 15 bp, Homo sapiens
cagttgattctggag

SEQ ID NO: 214213 - DNA, 15 bp, Homo sapiens
acagttgattctgga

SEQ ID NO: 214214 - DNA, 15 bp, Homo sapiens
cacagttgattctgg

SEQ ID NO: 214215 - DNA, 15 bp, Homo sapiens
acacagttgattctg

SEQ ID NO: 214216 - DNA, 15 bp, Homo sapiens
gacacagttgattct

SEQ ID NO: 214217 - DNA, 15 bp, Homo sapiens
ggacacagttgattc

SEQ ID NO: 214218 - DNA, 15 bp, Homo sapiens
gggacacagttgatt

SEQ ID NO: 214219 - DNA, 15 bp, Homo sapiens
tgggacacagttgat

SEQ ID NO: 214220 - DNA, 15 bp, Homo sapiens
atgggacacagttga

SEQ ID NO: 214221 - DNA, 15 bp, Homo sapiens
gatgggacacagttg

SEQ ID NO: 214222 - DNA, 15 bp, Homo sapiens
agatgggacacagtt

SEQ ID NO: 214223 - DNA, 15 bp, Homo sapiens
aagatgggacacagt

SEQ ID NO: 214224 - DNA, 15 bp, Homo sapiens
gaagatgggacacag

SEQ ID NO: 214225 - DNA, 15 bp, Homo sapiens
agaagatgggacaca

SEQ ID NO: 214226 - DNA, 15 bp, Homo sapiens
aagaagatgggacac

SEQ ID NO: 214227 - DNA, 15 bp, Homo sapiens
caagaagatgggaca

SEQ ID NO: 214228 - DNA, 15 bp, Homo sapiens
ccaagaagatgggac

SEQ ID NO: 214229 - DNA, 15 bp, Homo sapiens
accaagaagatggga

SEQ ID NO: 214230 - DNA, 15 bp, Homo sapiens
gaccaagaagatggg

SEQ ID NO: 214231 - DNA, 15 bp, Homo sapiens
tgaccaagaagatgg

SEQ ID NO: 214232 - DNA, 15 bp, Homo sapiens
ctgaccaagaagatg

SEQ ID NO: 214233 - DNA, 15 bp, Homo sapiens
gctgaccaagaagat

SEQ ID NO: 214234 - DNA, 15 bp, Homo sapiens
agctgaccaagaaga

SEQ ID NO: 214235 - DNA, 15 bp, Homo sapiens
aagctgaccaagaag

SEQ ID NO: 214236 - DNA, 15 bp, Homo sapiens
aaagctgaccaagaa

SEQ ID NO: 214237 - DNA, 15 bp, Homo sapiens
gaaagctgaccaaga

SEQ ID NO: 214238 - DNA, 15 bp, Homo sapiens
ggaaagctgaccaag

SEQ ID NO: 214239 - DNA, 15 bp, Homo sapiens
gggaaagctgaccaa

SEQ ID NO: 214240 - DNA, 15 bp, Homo sapiens
agggaaagctgacca

SEQ ID NO: 214241 - DNA, 15 bp, Homo sapiens
cagggaaagctgacc

SEQ ID NO: 214242 - DNA, 15 bp, Homo sapiens
tcagggaaagctgac

SEQ ID NO: 214243 - DNA, 15 bp, Homo sapiens
atcagggaaagctga

SEQ ID NO: 214244 - DNA, 15 bp, Homo sapiens
gatcagggaaagctg

SEQ ID NO: 214245 - DNA, 15 bp, Homo sapiens
agatcagggaaagct

SEQ ID NO: 214246 - DNA, 15 bp, Homo sapiens
gagatcagggaaagc

SEQ ID NO: 214247 - DNA, 15 bp, Homo sapiens
tgagatcagggaaag

SEQ ID NO: 214248 - DNA, 15 bp, Homo sapiens
ttgagatcagggaaa

SEQ ID NO: 214249 - DNA, 15 bp, Homo sapiens
cttgagatcagggaa

SEQ ID NO: 214250 - DNA, 15 bp, Homo sapiens
gcttgagatcaggga

SEQ ID NO: 214251 - DNA, 15 bp, Homo sapiens
tgcttgagatcaggg

SEQ ID NO: 214252 - DNA, 15 bp, Homo sapiens
gtgcttgagatcagg

SEQ ID NO: 214253 - DNA, 15 bp, Homo sapiens
tgtgcttgagatcag

SEQ ID NO: 214254 - DNA, 15 bp, Homo sapiens
gtgtgcttgagatca

SEQ ID NO: 214255 - DNA, 15 bp, Homo sapiens
tgtgtgcttgagatc

SEQ ID NO: 214256 - DNA, 15 bp, Homo sapiens
ctgtgtgcttgagat

SEQ ID NO: 214257 - DNA, 15 bp, Homo sapiens
tctgtgtgcttgaga

SEQ ID NO: 214258 - DNA, 15 bp, Homo sapiens
gtctgtgtgcttgag

SEQ ID NO: 214259 - DNA, 15 bp, Homo sapiens
ggtctgtgtgcttga

SEQ ID NO: 214260 - DNA, 15 bp, Homo sapiens
aggtctgtgtgcttg

SEQ ID NO: 214261 - DNA, 15 bp, Homo sapiens
caggtctgtgtgctt

SEQ ID NO: 214262 - DNA, 15 bp, Homo sapiens
gcaggtctgtgtgct

SEQ ID NO: 214263 - DNA, 15 bp, Homo sapiens
agcaggtctgtgtgc

SEQ ID NO: 214264 - DNA, 15 bp, Homo sapiens
aagcaggtctgtgtg

SEQ ID NO: 214265 - DNA, 15 bp, Homo sapiens
gaagcaggtctgtgt

SEQ ID NO: 214266 - DNA, 15 bp, Homo sapiens
ggaagcaggtctgtg

SEQ ID NO: 214267 - DNA, 15 bp, Homo sapiens
tggaagcaggtctgt

SEQ ID NO: 214268 - DNA, 15 bp, Homo sapiens
gtggaagcaggtctg

SEQ ID NO: 214269 - DNA, 15 bp, Homo sapiens
tgtggaagcaggtct

SEQ ID NO: 214270 - DNA, 15 bp, Homo sapiens
ctgtggaagcaggtc

SEQ ID NO: 214271 - DNA, 15 bp, Homo sapiens
actgtggaagcaggt

SEQ ID NO: 214272 - DNA, 15 bp, Homo sapiens
cactgtggaagcagg

SEQ ID NO: 214273 - DNA, 15 bp, Homo sapiens
gcactgtggaagcag

SEQ ID NO: 214274 - DNA, 15 bp, Homo sapiens
tgcactgtggaagca

SEQ ID NO: 214275 - DNA, 15 bp, Homo sapiens
gtgcactgtggaagc

SEQ ID NO: 214276 - DNA, 15 bp, Homo sapiens
agtgcactgtggaag

SEQ ID NO: 214277 - DNA, 15 bp, Homo sapiens
aagtgcactgtggaa

SEQ ID NO: 214278 - DNA, 15 bp, Homo sapiens
gaagtgcactgtgga

SEQ ID NO: 214279 - DNA, 15 bp, Homo sapiens
agaagtgcactgtgg

SEQ ID NO: 214280 - DNA, 15 bp, Homo sapiens
cagaagtgcactgtg

SEQ ID NO: 214281 - DNA, 15 bp, Homo sapiens
gcagaagtgcactgt

SEQ ID NO: 214282 - DNA, 15 bp, Homo sapiens
tgcagaagtgcactg

SEQ ID NO: 214283 - DNA, 15 bp, Homo sapiens
ctgcagaagtgcact

SEQ ID NO: 214284 - DNA, 15 bp, Homo sapiens
gctgcagaagtgcac

SEQ ID NO: 214285 - DNA, 15 bp, Homo sapiens
ggctgcagaagtgca

SEQ ID NO: 214286 - DNA, 15 bp, Homo sapiens
aggctgcagaagtgc

SEQ ID NO: 214287 - DNA, 15 bp, Homo sapiens
caggctgcagaagtg

SEQ ID NO: 214288 - DNA, 15 bp, Homo sapiens
ccaggctgcagaagt

SEQ ID NO: 214289 - DNA, 15 bp, Homo sapiens
cccaggctgcagaag

SEQ ID NO: 214290 - DNA, 15 bp, Homo sapiens
ccccaggctgcagaa

SEQ ID NO: 214291 - DNA, 15 bp, Homo sapiens
tccccaggctgcaga

SEQ ID NO: 214292 - DNA, 15 bp, Homo sapiens
ttccccaggctgcag

SEQ ID NO: 214293 - DNA, 15 bp, Homo sapiens
tttccccaggctgca

SEQ ID NO: 214294 - DNA, 15 bp, Homo sapiens
gtttccccaggctgc

SEQ ID NO: 214295 - DNA, 15 bp, Homo sapiens
ggtttccccaggctg

SEQ ID NO: 214296 - DNA, 15 bp, Homo sapiens
tggtttccccaggct

SEQ ID NO: 214297 - DNA, 15 bp, Homo sapiens
gtggtttccccaggc

SEQ ID NO: 214298 - DNA, 15 bp, Homo sapiens
tgtggtttccccagg

SEQ ID NO: 214299 - DNA, 15 bp, Homo sapiens
gtgtggtttccccag

SEQ ID NO: 214300 - DNA, 15 bp, Homo sapiens
ggtgtggtttcccca

SEQ ID NO: 214301 - DNA, 15 bp, Homo sapiens
tggtgtggtttcccc

SEQ ID NO: 214302 - DNA, 15 bp, Homo sapiens
atggtgtggtttccc

SEQ ID NO: 214303 - DNA, 15 bp, Homo sapiens
catggtgtggtttcc

SEQ ID NO: 214304 - DNA, 15 bp, Homo sapiens
ccatggtgtggtttc

SEQ ID NO: 214305 - DNA, 15 bp, Homo sapiens
tccatggtgtggttt

SEQ ID NO: 214306 - DNA, 15 bp, Homo sapiens
atccatggtgtggtt

SEQ ID NO: 214307 - DNA, 15 bp, Homo sapiens
catccatggtgtggt

SEQ ID NO: 214308 - DNA, 15 bp, Homo sapiens
acatccatggtgtgg

SEQ ID NO: 214309 - DNA, 15 bp, Homo sapiens
cacatccatggtgtg

SEQ ID NO: 214310 - DNA, 15 bp, Homo sapiens
ccacatccatggtgt

SEQ ID NO: 214311 - DNA, 15 bp, Homo sapiens
tccacatccatggtg

SEQ ID NO: 214312 - DNA, 15 bp, Homo sapiens
atccacatccatggt

SEQ ID NO: 214313 - DNA, 15 bp, Homo sapiens
gatccacatccatgg

SEQ ID NO: 214314 - DNA, 15 bp, Homo sapiens
ggatccacatccatg

SEQ ID NO: 214315 - DNA, 15 bp, Homo sapiens
aggatccacatccat

SEQ ID NO: 214316 - DNA, 15 bp, Homo sapiens
caggatccacatcca

SEQ ID NO: 214317 - DNA, 15 bp, Homo sapiens
ccaggatccacatcc

SEQ ID NO: 214318 - DNA, 15 bp, Homo sapiens
accaggatccacatc

SEQ ID NO: 214319 - DNA, 15 bp, Homo sapiens
gaccaggatccacat

SEQ ID NO: 214320 - DNA, 15 bp, Homo sapiens
agaccaggatccaca

SEQ ID NO: 214321 - DNA, 15 bp, Homo sapiens
tagaccaggatccac

SEQ ID NO: 214322 - DNA, 15 bp, Homo sapiens
ctagaccaggatcca

SEQ ID NO: 214323 - DNA, 15 bp, Homo sapiens
tctagaccaggatcc

SEQ ID NO: 214324 - DNA, 15 bp, Homo sapiens
atctagaccaggatc

SEQ ID NO: 214325 - DNA, 15 bp, Homo sapiens
catctagaccaggat

SEQ ID NO: 214326 - DNA, 15 bp, Homo sapiens
gcatctagaccagga

SEQ ID NO: 214327 - DNA, 15 bp, Homo sapiens
cgcatctagaccagg

SEQ ID NO: 214328 - DNA, 15 bp, Homo sapiens
gcgcatctagaccag

SEQ ID NO: 214329 - DNA, 15 bp, Homo sapiens
ggcgcatctagacca

SEQ ID NO: 214330 - DNA, 15 bp, Homo sapiens
tggcgcatctagacc

SEQ ID NO: 214331 - DNA, 15 bp, Homo sapiens
gtggcgcatctagac

SEQ ID NO: 214332 - DNA, 15 bp, Homo sapiens
tgtggcgcatctaga

SEQ ID NO: 214333 - DNA, 15 bp, Homo sapiens
atgtggcgcatctag

SEQ ID NO: 214334 - DNA, 15 bp, Homo sapiens
tatgtggcgcatcta

SEQ ID NO: 214335 - DNA, 15 bp, Homo sapiens
ctatgtggcgcatct

SEQ ID NO: 214336 - DNA, 15 bp, Homo sapiens
actatgtggcgcatc

SEQ ID NO: 214337 - DNA, 15 bp, Homo sapiens
cactatgtggcgcat

SEQ ID NO: 214338 - DNA, 15 bp, Homo sapiens
gcactatgtggcgca

SEQ ID NO: 214339 - DNA, 15 bp, Homo sapiens
agcactatgtggcgc

SEQ ID NO: 214340 - DNA, 15 bp, Homo sapiens
gagcactatgtggcg

SEQ ID NO: 214341 - DNA, 15 bp, Homo sapiens
cgagcactatgtggc

SEQ ID NO: 214342 - DNA, 15 bp, Homo sapiens
tcgagcactatgtgg

SEQ ID NO: 214343 - DNA, 15 bp, Homo sapiens
atcgagcactatgtg

SEQ ID NO: 214344 - DNA, 15 bp, Homo sapiens
catcgagcactatgt

SEQ ID NO: 214345 - DNA, 15 bp, Homo sapiens
gcatcgagcactatg

SEQ ID NO: 214346 - DNA, 15 bp, Homo sapiens
tgcatcgagcactat

SEQ ID NO: 214347 - DNA, 15 bp, Homo sapiens
ctgcatcgagcacta

SEQ ID NO: 214348 - DNA, 15 bp, Homo sapiens
cctgcatcgagcact

SEQ ID NO: 214349 - DNA, 15 bp, Homo sapiens
gcctgcatcgagcac

SEQ ID NO: 214350 - DNA, 15 bp, Homo sapiens
tgcctgcatcgagca

SEQ ID NO: 214351 - DNA, 15 bp, Homo sapiens
ctgcctgcatcgagc

SEQ ID NO: 214352 - DNA, 15 bp, Homo sapiens
tctgcctgcatcgag

SEQ ID NO: 214353 - DNA, 15 bp, Homo sapiens
ctctgcctgcatcga

SEQ ID NO: 214354 - DNA, 15 bp, Homo sapiens
gctctgcctgcatcg

SEQ ID NO: 214355 - DNA, 15 bp, Homo sapiens
agctctgcctgcatc

SEQ ID NO: 214356 - DNA, 15 bp, Homo sapiens
cagctctgcctgcat

SEQ ID NO: 214357 - DNA, 15 bp, Homo sapiens
ccagctctgcctgca

SEQ ID NO: 214358 - DNA, 15 bp, Homo sapiens
gccagctctgcctgc

SEQ ID NO: 214359 - DNA, 15 bp, Homo sapiens
tgccagctctgcctg

SEQ ID NO: 214360 - DNA, 15 bp, Homo sapiens
gtgccagctctgcct

SEQ ID NO: 214361 - DNA, 15 bp, Homo sapiens
agtgccagctctgcc

SEQ ID NO: 214362 - DNA, 15 bp, Homo sapiens
cagtgccagctctgc

SEQ ID NO: 214363 - DNA, 15 bp, Homo sapiens
ccagtgccagctctg

SEQ ID NO: 214364 - DNA, 15 bp, Homo sapiens
tccagtgccagctct

SEQ ID NO: 214365 - DNA, 15 bp, Homo sapiens
ttccagtgccagctc

SEQ ID NO: 214366 - DNA, 15 bp, Homo sapiens
tttccagtgccagct

SEQ ID NO: 214367 - DNA, 15 bp, Homo sapiens
ctttccagtgccagc

SEQ ID NO: 214368 - DNA, 15 bp, Homo sapiens
tctttccagtgccag

SEQ ID NO: 214369 - DNA, 15 bp, Homo sapiens
ctctttccagtgcca

SEQ ID NO: 214370 - DNA, 15 bp, Homo sapiens
cctctttccagtgcc

SEQ ID NO: 214371 - DNA, 15 bp, Homo sapiens
ccctctttccagtgc

SEQ ID NO: 214372 - DNA, 15 bp, Homo sapiens
gccctctttccagtg

SEQ ID NO: 214373 - DNA, 15 bp, Homo sapiens
ggccctctttccagt

SEQ ID NO: 214374 - DNA, 15 bp, Homo sapiens
gggccctctttccag

SEQ ID NO: 214375 - DNA, 15 bp, Homo sapiens
tgggccctctttcca

SEQ ID NO: 214376 - DNA, 15 bp, Homo sapiens
ctgggccctctttcc

SEQ ID NO: 214377 - DNA, 15 bp, Homo sapiens
actgggccctctttc

SEQ ID NO: 214378 - DNA, 15 bp, Homo sapiens
gactgggccctcttt

SEQ ID NO: 214379 - DNA, 15 bp, Homo sapiens
agactgggccctctt

SEQ ID NO: 214380 - DNA, 15 bp, Homo sapiens
gagactgggccctct

SEQ ID NO: 214381 - DNA, 15 bp, Homo sapiens
ggagactgggccctc

SEQ ID NO: 214382 - DNA, 15 bp, Homo sapiens
aggagactgggccct

SEQ ID NO: 214383 - DNA, 15 bp, Homo sapiens
gaggagactgggccc

SEQ ID NO: 214384 - DNA, 15 bp, Homo sapiens
ggaggagactgggcc

SEQ ID NO: 214385 - DNA, 15 bp, Homo sapiens
tggaggagactgggc

SEQ ID NO: 214386 - DNA, 15 bp, Homo sapiens
atggaggagactggg

SEQ ID NO: 214387 - DNA, 15 bp, Homo sapiens
catggaggagactgg

SEQ ID NO: 214388 - DNA, 15 bp, Homo sapiens
gcatggaggagactg

SEQ ID NO: 214389 - DNA, 15 bp, Homo sapiens
tgcatggaggagact

SEQ ID NO: 214390 - DNA, 15 bp, Homo sapiens
ctgcatggaggagac

SEQ ID NO: 214391 - DNA, 15 bp, Homo sapiens
gctgcatggaggaga

SEQ ID NO: 214392 - DNA, 15 bp, Homo sapiens
ggctgcatggaggag

SEQ ID NO: 214393 - DNA, 15 bp, Homo sapiens
aggctgcatggagga

SEQ ID NO: 214394 - DNA, 15 bp, Homo sapiens
gaggctgcatggagg

SEQ ID NO: 214395 - DNA, 15 bp, Homo sapiens
ggaggctgcatggag

SEQ ID NO: 214396 - DNA, 15 bp, Homo sapiens
gggaggctgcatgga

SEQ ID NO: 214397 - DNA, 15 bp, Homo sapiens
agggaggctgcatgg

SEQ ID NO: 214398 - DNA, 15 bp, Homo sapiens
gagggaggctgcatg

SEQ ID NO: 214399 - DNA, 15 bp, Homo sapiens
ggagggaggctgcat

SEQ ID NO: 214400 - DNA, 15 bp, Homo sapiens
aggagggaggctgca

SEQ ID NO: 214401 - DNA, 15 bp, Homo sapiens
aaggagggaggctgc

SEQ ID NO: 214402 - DNA, 15 bp, Homo sapiens
gaaggagggaggctg

SEQ ID NO: 214403 - DNA, 15 bp, Homo sapiens
tgaaggagggaggct

SEQ ID NO: 214404 - DNA, 15 bp, Homo sapiens
ctgaaggagggaggc

SEQ ID NO: 214405 - DNA, 15 bp, Homo sapiens
gctgaaggagggagg

SEQ ID NO: 214406 - DNA, 15 bp, Homo sapiens
tgctgaaggagggag

SEQ ID NO: 214407 - DNA, 15 bp, Homo sapiens
ttgctgaaggaggga

SEQ ID NO: 214408 - DNA, 15 bp, Homo sapiens
tttgctgaaggaggg

SEQ ID NO: 214409 - DNA, 15 bp, Homo sapiens
gtttgctgaaggagg

SEQ ID NO: 214410 - DNA, 15 bp, Homo sapiens
tgtttgctgaaggag

SEQ ID NO: 214411 - DNA, 15 bp, Homo sapiens
atgtttgctgaagga

SEQ ID NO: 214412 - DNA, 15 bp, Homo sapiens
aatgtttgctgaagg

SEQ ID NO: 214413 - DNA, 15 bp, Homo sapiens
aaatgtttgctgaag

SEQ ID NO: 214414 - DNA, 15 bp, Homo sapiens
caaatgtttgctgaa

SEQ ID NO: 214415 - DNA, 15 bp, Homo sapiens
gcaaatgtttgctga

SEQ ID NO: 214416 - DNA, 15 bp, Homo sapiens
ggcaaatgtttgctg

SEQ ID NO: 214417 - DNA, 15 bp, Homo sapiens
aggcaaatgtttgct

SEQ ID NO: 214418 - DNA, 15 bp, Homo sapiens
aaggcaaatgtttgc

SEQ ID NO: 214419 - DNA, 15 bp, Homo sapiens
caaggcaaatgtttg

SEQ ID NO: 214420 - DNA, 15 bp, Homo sapiens
gcaaggcaaatgttt

SEQ ID NO: 214421 - DNA, 15 bp, Homo sapiens
tgcaaggcaaatgtt

SEQ ID NO: 214422 - DNA, 15 bp, Homo sapiens
gtgcaaggcaaatgt

SEQ ID NO: 214423 - DNA, 15 bp, Homo sapiens
ggtgcaaggcaaatg

SEQ ID NO: 214424 - DNA, 15 bp, Homo sapiens
aggtgcaaggcaaat

SEQ ID NO: 214425 - DNA, 15 bp, Homo sapiens
caggtgcaaggcaaa

SEQ ID NO: 214426 - DNA, 15 bp, Homo sapiens
gcaggtgcaaggcaa

SEQ ID NO: 214427 - DNA, 15 bp, Homo sapiens
ggcaggtgcaaggca

SEQ ID NO: 214428 - DNA, 15 bp, Homo sapiens
tggcaggtgcaaggc

SEQ ID NO: 214429 - DNA, 15 bp, Homo sapiens
atggcaggtgcaagg

SEQ ID NO: 214430 - DNA, 15 bp, Homo sapiens
tatggcaggtgcaag

SEQ ID NO: 214431 - DNA, 15 bp, Homo sapiens
atatggcaggtgcaa

SEQ ID NO: 214432 - DNA, 15 bp, Homo sapiens
catatggcaggtgca

SEQ ID NO: 214433 - DNA, 15 bp, Homo sapiens
gcatatggcaggtgc

SEQ ID NO: 214434 - DNA, 15 bp, Homo sapiens
ggcatatggcaggtg

SEQ ID NO: 214435 - DNA, 15 bp, Homo sapiens
tggcatatggcaggt

SEQ ID NO: 214436 - DNA, 15 bp, Homo sapiens
ctggcatatggcagg

SEQ ID NO: 214437 - DNA, 15 bp, Homo sapiens
tctggcatatggcag

SEQ ID NO: 214438 - DNA, 15 bp, Homo sapiens
gtctggcatatggca

SEQ ID NO: 214439 - DNA, 15 bp, Homo sapiens
cgtctggcatatggc

SEQ ID NO: 214440 - DNA, 15 bp, Homo sapiens
acgtctggcatatgg

SEQ ID NO: 214441 - DNA, 15 bp, Homo sapiens
aacgtctggcatatg

SEQ ID NO: 214442 - DNA, 15 bp, Homo sapiens
aaacgtctggcatat

SEQ ID NO: 214443 - DNA, 15 bp, Homo sapiens
aaaacgtctggcata

SEQ ID NO: 214444 - DNA, 15 bp, Homo sapiens
caaaacgtctggcat

SEQ ID NO: 214445 - DNA, 15 bp, Homo sapiens
gcaaaacgtctggca

SEQ ID NO: 214446 - DNA, 15 bp, Homo sapiens
agcaaaacgtctggc

SEQ ID NO: 214447 - DNA, 15 bp, Homo sapiens
tagcaaaacgtctgg

SEQ ID NO: 214448 - DNA, 15 bp, Homo sapiens
ttagcaaaacgtctg

SEQ ID NO: 214449 - DNA, 15 bp, Homo sapiens
gttagcaaaacgtct

SEQ ID NO: 214450 - DNA, 15 bp, Homo sapiens
agttagcaaaacgtc

SEQ ID NO: 214451 - DNA, 15 bp, Homo sapiens
cagttagcaaaacgt

SEQ ID NO: 214452 - DNA, 15 bp, Homo sapiens
gcagttagcaaaacg

SEQ ID NO: 214453 - DNA, 15 bp, Homo sapiens
ggcagttagcaaaac

SEQ ID NO: 214454 - DNA, 15 bp, Homo sapiens
cggcagttagcaaaa

SEQ ID NO: 214455 - DNA, 15 bp, Homo sapiens
ccggcagttagcaaa

SEQ ID NO: 214456 - DNA, 15 bp, Homo sapiens
cccggcagttagcaa

SEQ ID NO: 214457 - DNA, 15 bp, Homo sapiens
ccccggcagttagca

SEQ ID NO: 214458 - DNA, 15 bp, Homo sapiens
tccccggcagttagc

SEQ ID NO: 214459 - DNA, 15 bp, Homo sapiens
atccccggcagttag

SEQ ID NO: 214460 - DNA, 15 bp, Homo sapiens
tatccccggcagtta

SEQ ID NO: 214461 - DNA, 15 bp, Homo sapiens
atatccccggcagtt

SEQ ID NO: 214462 - DNA, 15 bp, Homo sapiens
catatccccggcagt

SEQ ID NO: 214463 - DNA, 15 bp, Homo sapiens
ccatatccccggcag

SEQ ID NO: 214464 - DNA, 15 bp, Homo sapiens
gccatatccccggca

SEQ ID NO: 214465 - DNA, 15 bp, Homo sapiens
tgccatatccccggc

SEQ ID NO: 214466 - DNA, 15 bp, Homo sapiens
gtgccatatccccgg

SEQ ID NO: 214467 - DNA, 15 bp, Homo sapiens
agtgccatatccccg

SEQ ID NO: 214468 - DNA, 15 bp, Homo sapiens
cagtgccatatcccc

SEQ ID NO: 214469 - DNA, 15 bp, Homo sapiens
tcagtgccatatccc

SEQ ID NO: 214470 - DNA, 15 bp, Homo sapiens
atcagtgccatatcc

SEQ ID NO: 214471 - DNA, 15 bp, Homo sapiens
gatcagtgccatatc

SEQ ID NO: 214472 - DNA, 15 bp, Homo sapiens
tgatcagtgccatat

SEQ ID NO: 214473 - DNA, 15 bp, Homo sapiens
ttgatcagtgccata

SEQ ID NO: 214474 - DNA, 15 bp, Homo sapiens
cttgatcagtgccat

SEQ ID NO: 214475 - DNA, 15 bp, Homo sapiens
tcttgatcagtgcca

SEQ ID NO: 214476 - DNA, 15 bp, Homo sapiens
atcttgatcagtgcc

SEQ ID NO: 214477 - DNA, 15 bp, Homo sapiens
tatcttgatcagtgc

SEQ ID NO: 214478 - DNA, 15 bp, Homo sapiens
ctatcttgatcagtg

SEQ ID NO: 214479 - DNA, 15 bp, Homo sapiens
tctatcttgatcagt

SEQ ID NO: 214480 - DNA, 15 bp, Homo sapiens
atctatcttgatcag

SEQ ID NO: 214481 - DNA, 15 bp, Homo sapiens
catctatcttgatca

SEQ ID NO: 214482 - DNA, 15 bp, Homo sapiens
tcatctatcttgatc

SEQ ID NO: 214483 - DNA, 15 bp, Homo sapiens
atcatctatcttgat

SEQ ID NO: 214484 - DNA, 15 bp, Homo sapiens
catcatctatcttga

SEQ ID NO: 214485 - DNA, 15 bp, Homo sapiens
acatcatctatcttg

SEQ ID NO: 214486 - DNA, 15 bp, Homo sapiens
gacatcatctatctt

SEQ ID NO: 214487 - DNA, 15 bp, Homo sapiens
ggacatcatctatct

SEQ ID NO: 214488 - DNA, 15 bp, Homo sapiens
gggacatcatctatc

SEQ ID NO: 214489 - DNA, 15 bp, Homo sapiens
agggacatcatctat

SEQ ID NO: 214490 - DNA, 15 bp, Homo sapiens
cagggacatcatcta

SEQ ID NO: 214491 - DNA, 15 bp, Homo sapiens
gcagggacatcatct

SEQ ID NO: 214492 - DNA, 15 bp, Homo sapiens
agcagggacatcatc

SEQ ID NO: 214493 - DNA, 15 bp, Homo sapiens
cagcagggacatcat

SEQ ID NO: 214494 - DNA, 15 bp, Homo sapiens
acagcagggacatca

SEQ ID NO: 214495 - DNA, 15 bp, Homo sapiens
gacagcagggacatc

SEQ ID NO: 214496 - DNA, 15 bp, Homo sapiens
tgacagcagggacat

SEQ ID NO: 214497 - DNA, 15 bp, Homo sapiens
gtgacagcagggaca

SEQ ID NO: 214498 - DNA, 15 bp, Homo sapiens
cgtgacagcagggac

SEQ ID NO: 214499 - DNA, 15 bp, Homo sapiens
ccgtgacagcaggga

SEQ ID NO: 214500 - DNA, 15 bp, Homo sapiens
tccgtgacagcaggg

SEQ ID NO: 214501 - DNA, 15 bp, Homo sapiens
ctccgtgacagcagg

SEQ ID NO: 214502 - DNA, 15 bp, Homo sapiens
cctccgtgacagcag

SEQ ID NO: 214503 - DNA, 15 bp, Homo sapiens
acctccgtgacagca

SEQ ID NO: 214504 - DNA, 15 bp, Homo sapiens
tacctccgtgacagc

SEQ ID NO: 214505 - DNA, 15 bp, Homo sapiens
ctacctccgtgacag

SEQ ID NO: 214506 - DNA, 15 bp, Homo sapiens
tctacctccgtgaca

SEQ ID NO: 214507 - DNA, 15 bp, Homo sapiens
ttctacctccgtgac

SEQ ID NO: 214508 - DNA, 15 bp, Homo sapiens
cttctacctccgtga

SEQ ID NO: 214509 - DNA, 15 bp, Homo sapiens
acttctacctccgtg

SEQ ID NO: 214510 - DNA, 15 bp, Homo sapiens
cacttctacctccgt

SEQ ID NO: 214511 - DNA, 15 bp, Homo sapiens
ccacttctacctccg

SEQ ID NO: 214512 - DNA, 15 bp, Homo sapiens
tccacttctacctcc

SEQ ID NO: 214513 - DNA, 15 bp, Homo sapiens
ttccacttctacctc

SEQ ID NO: 214514 - DNA, 15 bp, Homo sapiens
tttccacttctacct

SEQ ID NO: 214515 - DNA, 15 bp, Homo sapiens
gtttccacttctacc

SEQ ID NO: 214516 - DNA, 15 bp, Homo sapiens
tgtttccacttctac

SEQ ID NO: 214517 - DNA, 15 bp, Homo sapiens
ctgtttccacttcta

SEQ ID NO: 214518 - DNA, 15 bp, Homo sapiens
tctgtttccacttct

SEQ ID NO: 214519 - DNA, 15 bp, Homo sapiens
ttctgtttccacttc

SEQ ID NO: 214520 - DNA, 15 bp, Homo sapiens
tttctgtttccactt

SEQ ID NO: 214521 - DNA, 15 bp, Homo sapiens
ttttctgtttccact

SEQ ID NO: 214522 - DNA, 15 bp, Homo sapiens
gttttctgtttccac

SEQ ID NO: 214523 - DNA, 15 bp, Homo sapiens
tgttttctgtttcca

SEQ ID NO: 214524 - DNA, 15 bp, Homo sapiens
ttgttttctgtttcc

SEQ ID NO: 214525 - DNA, 15 bp, Homo sapiens
tttgttttctgtttc

SEQ ID NO: 214526 - DNA, 15 bp, Homo sapiens
gtttgttttctgttt

SEQ ID NO: 214527 - DNA, 15 bp, Homo sapiens
tgtttgttttctgtt

SEQ ID NO: 214528 - DNA, 15 bp, Homo sapiens
ttgtttgttttctgt

SEQ ID NO: 214529 - DNA, 15 bp, Homo sapiens
cttgtttgttttctg

SEQ ID NO: 214530 - DNA, 15 bp, Homo sapiens
tcttgtttgttttct

SEQ ID NO: 214531 - DNA, 15 bp, Homo sapiens
ctcttgtttgttttc

SEQ ID NO: 214532 - DNA, 15 bp, Homo sapiens
tctcttgtttgtttt

SEQ ID NO: 214533 - DNA, 15 bp, Homo sapiens
ttctcttgtttgttt

SEQ ID NO: 214534 - DNA, 15 bp, Homo sapiens
gttctcttgtttgtt

SEQ ID NO: 214535 - DNA, 15 bp, Homo sapiens
tgttctcttgtttgt

SEQ ID NO: 214536 - DNA, 15 bp, Homo sapiens
ttgttctcttgtttg

SEQ ID NO: 214537 - DNA, 15 bp, Homo sapiens
tttgttctcttgttt

SEQ ID NO: 214538 - DNA, 15 bp, Homo sapiens
atttgttctcttgtt

SEQ ID NO: 214539 - DNA, 15 bp, Homo sapiens
catttgttctcttgt

SEQ ID NO: 214540 - DNA, 15 bp, Homo sapiens
gcatttgttctcttg

SEQ ID NO: 214541 - DNA, 15 bp, Homo sapiens
tgcatttgttctctt

SEQ ID NO: 214542 - DNA, 15 bp, Homo sapiens
ctgcatttgttctct

SEQ ID NO: 214543 - DNA, 15 bp, Homo sapiens
gctgcatttgttctc

SEQ ID NO: 214544 - DNA, 15 bp, Homo sapiens
tgctgcatttgttct

SEQ ID NO: 214545 - DNA, 15 bp, Homo sapiens
ttgctgcatttgttc

SEQ ID NO: 214546 - DNA, 15 bp, Homo sapiens
gttgctgcatttgtt

SEQ ID NO: 214547 - DNA, 15 bp, Homo sapiens
tgttgctgcatttgt

SEQ ID NO: 214548 - DNA, 15 bp, Homo sapiens
ttgttgctgcatttg

SEQ ID NO: 214549 - DNA, 15 bp, Homo sapiens
cttgttgctgcattt

SEQ ID NO: 214550 - DNA, 15 bp, Homo sapiens
ccttgttgctgcatt

SEQ ID NO: 214551 - DNA, 15 bp, Homo sapiens
accttgttgctgcat

SEQ ID NO: 214552 - DNA, 15 bp, Homo sapiens
gaccttgttgctgca

SEQ ID NO: 214553 - DNA, 15 bp, Homo sapiens
tgaccttgttgctgc

SEQ ID NO: 214554 - DNA, 15 bp, Homo sapiens
atgaccttgttgctg

SEQ ID NO: 214555 - DNA, 15 bp, Homo sapiens
aatgaccttgttgct

SEQ ID NO: 214556 - DNA, 15 bp, Homo sapiens
aaatgaccttgttgc

SEQ ID NO: 214557 - DNA, 15 bp, Homo sapiens
gaaatgaccttgttg

SEQ ID NO: 214558 - DNA, 15 bp, Homo sapiens
agaaatgaccttgtt

SEQ ID NO: 214559 - DNA, 15 bp, Homo sapiens
cagaaatgaccttgt

SEQ ID NO: 214560 - DNA, 15 bp, Homo sapiens
tcagaaatgaccttg

SEQ ID NO: 214561 - DNA, 15 bp, Homo sapiens
atcagaaatgacctt

SEQ ID NO: 214562 - DNA, 15 bp, Homo sapiens
aatcagaaatgacct

SEQ ID NO: 214563 - DNA, 15 bp, Homo sapiens
taatcagaaatgacc

SEQ ID NO: 214564 - DNA, 15 bp, Homo sapiens
ataatcagaaatgac

SEQ ID NO: 214565 - DNA, 15 bp, Homo sapiens
cataatcagaaatga

SEQ ID NO: 214566 - DNA, 15 bp, Homo sapiens
tcataatcagaaatg

SEQ ID NO: 214567 - DNA, 15 bp, Homo sapiens
atcataatcagaaat

SEQ ID NO: 214568 - DNA, 15 bp, Homo sapiens
tatcataatcagaaa

SEQ ID NO: 214569 - DNA, 15 bp, Homo sapiens
ttatcataatcagaa

SEQ ID NO: 214570 - DNA, 15 bp, Homo sapiens
cttatcataatcaga

SEQ ID NO: 214571 - DNA, 15 bp, Homo sapiens
acttatcataatcag

SEQ ID NO: 214572 - DNA, 15 bp, Homo sapiens
cacttatcataatca

SEQ ID NO: 214573 - DNA, 15 bp, Homo sapiens
acacttatcataatc

SEQ ID NO: 214574 - DNA, 15 bp, Homo sapiens
cacacttatcataat

SEQ ID NO: 214575 - DNA, 15 bp, Homo sapiens
ccacacttatcataa

SEQ ID NO: 214576 - DNA, 15 bp, Homo sapiens
tccacacttatcata

SEQ ID NO: 214577 - DNA, 15 bp, Homo sapiens
ctccacacttatcat

SEQ ID NO: 214578 - DNA, 15 bp, Homo sapiens
tctccacacttatca

SEQ ID NO: 214579 - DNA, 15 bp, Homo sapiens
atctccacacttatc

SEQ ID NO: 214580 - DNA, 15 bp, Homo sapiens
tatctccacacttat

SEQ ID NO: 214581 - DNA, 15 bp, Homo sapiens
ttatctccacactta

SEQ ID NO: 214582 - DNA, 15 bp, Homo sapiens
attatctccacactt

SEQ ID NO: 214583 - DNA, 15 bp, Homo sapiens
tattatctccacact

SEQ ID NO: 214584 - DNA, 15 bp, Homo sapiens
ctattatctccacac

SEQ ID NO: 214585 - DNA, 15 bp, Homo sapiens
tctattatctccaca

SEQ ID NO: 214586 - DNA, 15 bp, Homo sapiens
ctctattatctccac

SEQ ID NO: 214587 - DNA, 15 bp, Homo sapiens
actctattatctcca

SEQ ID NO: 214588 - DNA, 15 bp, Homo sapiens
tactctattatctcc

SEQ ID NO: 214589 - DNA, 15 bp, Homo sapiens
ctactctattatctc

SEQ ID NO: 214590 - DNA, 15 bp, Homo sapiens
cctactctattatct

SEQ ID NO: 214591 - DNA, 15 bp, Homo sapiens
ccctactctattatc

SEQ ID NO: 214592 - DNA, 15 bp, Homo sapiens
cccctactctattat

SEQ ID NO: 214593 - DNA, 15 bp, Homo sapiens
ccccctactctatta

SEQ ID NO: 214594 - DNA, 15 bp, Homo sapiens
gccccctactctatt

SEQ ID NO: 214595 - DNA, 15 bp, Homo sapiens
agccccctactctat

SEQ ID NO: 214596 - DNA, 15 bp, Homo sapiens
cagccccctactcta

SEQ ID NO: 214597 - DNA, 15 bp, Homo sapiens
ccagccccctactct

SEQ ID NO: 214598 - DNA, 15 bp, Homo sapiens
gccagccccctactc

SEQ ID NO: 214599 - DNA, 15 bp, Homo sapiens
tgccagccccctact

SEQ ID NO: 214600 - DNA, 15 bp, Homo sapiens
ctgccagccccctac

SEQ ID NO: 214601 - DNA, 15 bp, Homo sapiens
tctgccagcccccta

SEQ ID NO: 214602 - DNA, 15 bp, Homo sapiens
gtctgccagccccct

SEQ ID NO: 214603 - DNA, 15 bp, Homo sapiens
tgtctgccagccccc

SEQ ID NO: 214604 - DNA, 15 bp, Homo sapiens
ctgtctgccagcccc

SEQ ID NO: 214605 - DNA, 15 bp, Homo sapiens
actgtctgccagccc

SEQ ID NO: 214606 - DNA, 15 bp, Homo sapiens
cactgtctgccagcc

SEQ ID NO: 214607 - DNA, 15 bp, Homo sapiens
tcactgtctgccagc

SEQ ID NO: 214608 - DNA, 15 bp, Homo sapiens
atcactgtctgccag

SEQ ID NO: 214609 - DNA, 15 bp, Homo sapiens
catcactgtctgcca

SEQ ID NO: 214610 - DNA, 15 bp, Homo sapiens
gcatcactgtctgcc

SEQ ID NO: 214611 - DNA, 15 bp, Homo sapiens
cgcatcactgtctgc

SEQ ID NO: 214612 - DNA, 15 bp, Homo sapiens
ccgcatcactgtctg

SEQ ID NO: 214613 - DNA, 15 bp, Homo sapiens
cccgcatcactgtct

SEQ ID NO: 214614 - DNA, 15 bp, Homo sapiens
acccgcatcactgtc

SEQ ID NO: 214615 - DNA, 15 bp, Homo sapiens
tacccgcatcactgt

SEQ ID NO: 214616 - DNA, 15 bp, Homo sapiens
ctacccgcatcactg

SEQ ID NO: 214617 - DNA, 15 bp, Homo sapiens
tctacccgcatcact

SEQ ID NO: 214618 - DNA, 15 bp, Homo sapiens
ctctacccgcatcac

SEQ ID NO: 214619 - DNA, 15 bp, Homo sapiens
actctacccgcatca

SEQ ID NO: 214620 - DNA, 15 bp, Homo sapiens
gactctacccgcatc

SEQ ID NO: 214621 - DNA, 15 bp, Homo sapiens
agactctacccgcat

SEQ ID NO: 214622 - DNA, 15 bp, Homo sapiens
cagactctacccgca

SEQ ID NO: 214623 - DNA, 15 bp, Homo sapiens
ccagactctacccgc

SEQ ID NO: 214624 - DNA, 15 bp, Homo sapiens
cccagactctacccg

SEQ ID NO: 214625 - DNA, 15 bp, Homo sapiens
ccccagactctaccc

SEQ ID NO: 214626 - DNA, 15 bp, Homo sapiens
cccccagactctacc

SEQ ID NO: 214627 - DNA, 15 bp, Homo sapiens
gcccccagactctac

SEQ ID NO: 214628 - DNA, 15 bp, Homo sapiens
agcccccagactcta

SEQ ID NO: 214629 - DNA, 15 bp, Homo sapiens
tagcccccagactct

SEQ ID NO: 214630 - DNA, 15 bp, Homo sapiens
gtagcccccagactc

SEQ ID NO: 214631 - DNA, 15 bp, Homo sapiens
agtagcccccagact

SEQ ID NO: 214632 - DNA, 15 bp, Homo sapiens
aagtagcccccagac

SEQ ID NO: 214633 - DNA, 15 bp, Homo sapiens
aaagtagcccccaga

SEQ ID NO: 214634 - DNA, 15 bp, Homo sapiens
aaaagtagcccccag

SEQ ID NO: 214635 - DNA, 15 bp, Homo sapiens
caaaagtagccccca

SEQ ID NO: 214636 - DNA, 15 bp, Homo sapiens
tcaaaagtagccccc

SEQ ID NO: 214637 - DNA, 15 bp, Homo sapiens
atcaaaagtagcccc

SEQ ID NO: 214638 - DNA, 15 bp, Homo sapiens
catcaaaagtagccc

SEQ ID NO: 214639 - DNA, 15 bp, Homo sapiens
ccatcaaaagtagcc

SEQ ID NO: 214640 - DNA, 15 bp, Homo sapiens
cccatcaaaagtagc

SEQ ID NO: 214641 - DNA, 15 bp, Homo sapiens
tcccatcaaaagtag

SEQ ID NO: 214642 - DNA, 15 bp, Homo sapiens
ttcccatcaaaagta

SEQ ID NO: 214643 - DNA, 15 bp, Homo sapiens
tttcccatcaaaagt

SEQ ID NO: 214644 - DNA, 15 bp, Homo sapiens
ctttcccatcaaaag

SEQ ID NO: 214645 - DNA, 15 bp, Homo sapiens
cctttcccatcaaaa

SEQ ID NO: 214646 - DNA, 15 bp, Homo sapiens
acctttcccatcaaa

SEQ ID NO: 214647 - DNA, 15 bp, Homo sapiens
aacctttcccatcaa

SEQ ID NO: 214648 - DNA, 15 bp, Homo sapiens
aaacctttcccatca

SEQ ID NO: 214649 - DNA, 15 bp, Homo sapiens
gaaacctttcccatc

SEQ ID NO: 214650 - DNA, 15 bp, Homo sapiens
agaaacctttcccat

SEQ ID NO: 214651 - DNA, 15 bp, Homo sapiens
gagaaacctttccca

SEQ ID NO: 214652 - DNA, 15 bp, Homo sapiens
agagaaacctttccc

SEQ ID NO: 214653 - DNA, 15 bp, Homo sapiens
gagagaaacctttcc

SEQ ID NO: 214654 - DNA, 15 bp, Homo sapiens
ggagagaaacctttc

SEQ ID NO: 214655 - DNA, 15 bp, Homo sapiens
cggagagaaaccttt

SEQ ID NO: 214656 - DNA, 15 bp, Homo sapiens
ccggagagaaacctt

SEQ ID NO: 214657 - DNA, 15 bp, Homo sapiens
tccggagagaaacct

SEQ ID NO: 214658 - DNA, 15 bp, Homo sapiens
ctccggagagaaacc

SEQ ID NO: 214659 - DNA, 15 bp, Homo sapiens
cctccggagagaaac

SEQ ID NO: 214660 - DNA, 15 bp, Homo sapiens
acctccggagagaaa

SEQ ID NO: 214661 - DNA, 15 bp, Homo sapiens
gacctccggagagaa

SEQ ID NO: 214662 - DNA, 15 bp, Homo sapiens
ggacctccggagaga

SEQ ID NO: 214663 - DNA, 15 bp, Homo sapiens
aggacctccggagag

SEQ ID NO: 214664 - DNA, 15 bp, Homo sapiens
caggacctccggaga

SEQ ID NO: 214665 - DNA, 15 bp, Homo sapiens
acaggacctccggag

SEQ ID NO: 214666 - DNA, 15 bp, Homo sapiens
cacaggacctccgga

SEQ ID NO: 214667 - DNA, 15 bp, Homo sapiens
gcacaggacctccgg

SEQ ID NO: 214668 - DNA, 15 bp, Homo sapiens
tgcacaggacctccg

SEQ ID NO: 214669 - DNA, 15 bp, Homo sapiens
ttgcacaggacctcc

SEQ ID NO: 214670 - DNA, 15 bp, Homo sapiens
cttgcacaggacctc

SEQ ID NO: 214671 - DNA, 15 bp, Homo sapiens
gcttgcacaggacct

SEQ ID NO: 214672 - DNA, 15 bp, Homo sapiens
agcttgcacaggacc

SEQ ID NO: 214673 - DNA, 15 bp, Homo sapiens
cagcttgcacaggac

SEQ ID NO: 214674 - DNA, 15 bp, Homo sapiens
tcagcttgcacagga

SEQ ID NO: 214675 - DNA, 15 bp, Homo sapiens
gtcagcttgcacagg

SEQ ID NO: 214676 - DNA, 15 bp, Homo sapiens
tgtcagcttgcacag

SEQ ID NO: 214677 - DNA, 15 bp, Homo sapiens
atgtcagcttgcaca

SEQ ID NO: 214678 - DNA, 15 bp, Homo sapiens
catgtcagcttgcac

SEQ ID NO: 214679 - DNA, 15 bp, Homo sapiens
tcatgtcagcttgca

SEQ ID NO: 214680 - DNA, 15 bp, Homo sapiens
ctcatgtcagcttgc

SEQ ID NO: 214681 - DNA, 15 bp, Homo sapiens
tctcatgtcagcttg

SEQ ID NO: 214682 - DNA, 15 bp, Homo sapiens
ttctcatgtcagctt

SEQ ID NO: 214683 - DNA, 15 bp, Homo sapiens
cttctcatgtcagct

SEQ ID NO: 214684 - DNA, 15 bp, Homo sapiens
ccttctcatgtcagc

SEQ ID NO: 214685 - DNA, 15 bp, Homo sapiens
tccttctcatgtcag

SEQ ID NO: 214686 - DNA, 15 bp, Homo sapiens
atccttctcatgtca

SEQ ID NO: 214687 - DNA, 15 bp, Homo sapiens
catccttctcatgtc

SEQ ID NO: 214688 - DNA, 15 bp, Homo sapiens
tcatccttctcatgt

SEQ ID NO: 214689 - DNA, 15 bp, Homo sapiens
ctcatccttctcatg

SEQ ID NO: 214690 - DNA, 15 bp, Homo sapiens
tctcatccttctcat

SEQ ID NO: 214691 - DNA, 15 bp, Homo sapiens
ttctcatccttctca

SEQ ID NO: 214692 - DNA, 15 bp, Homo sapiens
cttctcatccttctc

SEQ ID NO: 214693 - DNA, 15 bp, Homo sapiens
ccttctcatccttct

SEQ ID NO: 214694 - DNA, 15 bp, Homo sapiens
tccttctcatccttc

SEQ ID NO: 214695 - DNA, 15 bp, Homo sapiens
ctccttctcatcctt

SEQ ID NO: 214696 - DNA, 15 bp, Homo sapiens
gctccttctcatcct

SEQ ID NO: 214697 - DNA, 15 bp, Homo sapiens
ggctccttctcatcc

SEQ ID NO: 214698 - DNA, 15 bp, Homo sapiens
tggctccttctcatc

SEQ ID NO: 214699 - DNA, 15 bp, Homo sapiens
ctggctccttctcat

SEQ ID NO: 214700 - DNA, 15 bp, Homo sapiens
gctggctccttctca

SEQ ID NO: 214701 - DNA, 15 bp, Homo sapiens
agctggctccttctc

SEQ ID NO: 214702 - DNA, 15 bp, Homo sapiens
aagctggctccttct

SEQ ID NO: 214703 - DNA, 15 bp, Homo sapiens
aaagctggctccttc

SEQ ID NO: 214704 - DNA, 15 bp, Homo sapiens
gaaagctggctcctt

SEQ ID NO: 214705 - DNA, 15 bp, Homo sapiens
ggaaagctggctcct

SEQ ID NO: 214706 - DNA, 15 bp, Homo sapiens
tggaaagctggctcc

SEQ ID NO: 214707 - DNA, 15 bp, Homo sapiens
ttggaaagctggctc

SEQ ID NO: 214708 - DNA, 15 bp, Homo sapiens
cttggaaagctggct

SEQ ID NO: 214709 - DNA, 15 bp, Homo sapiens
ccttggaaagctggc

SEQ ID NO: 214710 - DNA, 15 bp, Homo sapiens
accttggaaagctgg

SEQ ID NO: 214711 - DNA, 15 bp, Homo sapiens
gaccttggaaagctg

SEQ ID NO: 214712 - DNA, 15 bp, Homo sapiens
agaccttggaaagct

SEQ ID NO: 214713 - DNA, 15 bp, Homo sapiens
gagaccttggaaagc

SEQ ID NO: 214714 - DNA, 15 bp, Homo sapiens
ggagaccttggaaag

SEQ ID NO: 214715 - DNA, 15 bp, Homo sapiens
tggagaccttggaaa

SEQ ID NO: 214716 - DNA, 15 bp, Homo sapiens
ctggagaccttggaa

SEQ ID NO: 214717 - DNA, 15 bp, Homo sapiens
tctggagaccttgga

SEQ ID NO: 214718 - DNA, 15 bp, Homo sapiens
ctctggagaccttgg

SEQ ID NO: 214719 - DNA, 15 bp, Homo sapiens
tctctggagaccttg

SEQ ID NO: 214720 - DNA, 15 bp, Homo sapiens
ttctctggagacctt

SEQ ID NO: 214721 - DNA, 15 bp, Homo sapiens
tttctctggagacct

SEQ ID NO: 214722 - DNA, 15 bp, Homo sapiens
ctttctctggagacc

SEQ ID NO: 214723 - DNA, 15 bp, Homo sapiens
actttctctggagac

SEQ ID NO: 214724 - DNA, 15 bp, Homo sapiens
tactttctctggaga

SEQ ID NO: 214725 - DNA, 15 bp, Homo sapiens
atactttctctggag

SEQ ID NO: 214726 - DNA, 15 bp, Homo sapiens
catactttctctgga

SEQ ID NO: 214727 - DNA, 15 bp, Homo sapiens
gcatactttctctgg

SEQ ID NO: 214728 - DNA, 15 bp, Homo sapiens
ggcatactttctctg

SEQ ID NO: 214729 - DNA, 15 bp, Homo sapiens
tggcatactttctct

SEQ ID NO: 214730 - DNA, 15 bp, Homo sapiens
gtggcatactttctc

SEQ ID NO: 214731 - DNA, 15 bp, Homo sapiens
tgtggcatactttct

SEQ ID NO: 214732 - DNA, 15 bp, Homo sapiens
atgtggcatactttc

SEQ ID NO: 214733 - DNA, 15 bp, Homo sapiens
catgtggcatacttt

SEQ ID NO: 214734 - DNA, 15 bp, Homo sapiens
ccatgtggcatactt

SEQ ID NO: 214735 - DNA, 15 bp, Homo sapiens
cccatgtggcatact

SEQ ID NO: 214736 - DNA, 15 bp, Homo sapiens
ccccatgtggcatac

SEQ ID NO: 214737 - DNA, 15 bp, Homo sapiens
tccccatgtggcata

SEQ ID NO: 214738 - DNA, 15 bp, Homo sapiens
gtccccatgtggcat

SEQ ID NO: 214739 - DNA, 15 bp, Homo sapiens
tgtccccatgtggca

SEQ ID NO: 214740 - DNA, 15 bp, Homo sapiens
ttgtccccatgtggc

SEQ ID NO: 214741 - DNA, 15 bp, Homo sapiens
tttgtccccatgtgg

SEQ ID NO: 214742 - DNA, 15 bp, Homo sapiens
ttttgtccccatgtg

SEQ ID NO: 214743 - DNA, 15 bp, Homo sapiens
cttttgtccccatgt

SEQ ID NO: 214744 - DNA, 15 bp, Homo sapiens
gcttttgtccccatg

SEQ ID NO: 214745 - DNA, 15 bp, Homo sapiens
ggcttttgtccccat

SEQ ID NO: 214746 - DNA, 15 bp, Homo sapiens
tggcttttgtcccca

SEQ ID NO: 214747 - DNA, 15 bp, Homo sapiens
ctggcttttgtcccc

SEQ ID NO: 214748 - DNA, 15 bp, Homo sapiens
actggcttttgtccc

SEQ ID NO: 214749 - DNA, 15 bp, Homo sapiens
cactggcttttgtcc

SEQ ID NO: 214750 - DNA, 15 bp, Homo sapiens
gcactggcttttgtc

SEQ ID NO: 214751 - DNA, 15 bp, Homo sapiens
tgcactggcttttgt

SEQ ID NO: 214752 - DNA, 15 bp, Homo sapiens
ttgcactggcttttg

SEQ ID NO: 214753 - DNA, 15 bp, Homo sapiens
tttgcactggctttt

SEQ ID NO: 214754 - DNA, 15 bp, Homo sapiens
ctttgcactggcttt

SEQ ID NO: 214755 - DNA, 15 bp, Homo sapiens
actttgcactggctt

SEQ ID NO: 214756 - DNA, 15 bp, Homo sapiens
gactttgcactggct

SEQ ID NO: 214757 - DNA, 15 bp, Homo sapiens
ggactttgcactggc

SEQ ID NO: 214758 - DNA, 15 bp, Homo sapiens
gggactttgcactgg

SEQ ID NO: 214759 - DNA, 15 bp, Homo sapiens
agggactttgcactg

SEQ ID NO: 214760 - DNA, 15 bp, Homo sapiens
cagggactttgcact

SEQ ID NO: 214761 - DNA, 15 bp, Homo sapiens
ccagggactttgcac

SEQ ID NO: 214762 - DNA, 15 bp, Homo sapiens
cccagggactttgca

SEQ ID NO: 214763 - DNA, 15 bp, Homo sapiens
ccccagggactttgc

SEQ ID NO: 214764 - DNA, 15 bp, Homo sapiens
accccagggactttg

SEQ ID NO: 214765 - DNA, 15 bp, Homo sapiens
caccccagggacttt

SEQ ID NO: 214766 - DNA, 15 bp, Homo sapiens
ccaccccagggactt

SEQ ID NO: 214767 - DNA, 15 bp, Homo sapiens
cccaccccagggact

SEQ ID NO: 214768 - DNA, 15 bp, Homo sapiens
tcccaccccagggac

SEQ ID NO: 214769 - DNA, 15 bp, Homo sapiens
ttcccaccccaggga

SEQ ID NO: 214770 - DNA, 15 bp, Homo sapiens
attcccaccccaggg

SEQ ID NO: 214771 - DNA, 15 bp, Homo sapiens
cattcccaccccagg

SEQ ID NO: 214772 - DNA, 15 bp, Homo sapiens
tcattcccaccccag

SEQ ID NO: 214773 - DNA, 15 bp, Homo sapiens
ctcattcccacccca

SEQ ID NO: 214774 - DNA, 15 bp, Homo sapiens
gctcattcccacccc

SEQ ID NO: 214775 - DNA, 15 bp, Homo sapiens
tgctcattcccaccc

SEQ ID NO: 214776 - DNA, 15 bp, Homo sapiens
ctgctcattcccacc

SEQ ID NO: 214777 - DNA, 15 bp, Homo sapiens
tctgctcattcccac

SEQ ID NO: 214778 - DNA, 15 bp, Homo sapiens
ctctgctcattccca

SEQ ID NO: 214779 - DNA, 15 bp, Homo sapiens
cctctgctcattccc

SEQ ID NO: 214780 - DNA, 15 bp, Homo sapiens
tcctctgctcattcc

SEQ ID NO: 214781 - DNA, 15 bp, Homo sapiens
ttcctctgctcattc

SEQ ID NO: 214782 - DNA, 15 bp, Homo sapiens
cttcctctgctcatt

SEQ ID NO: 214783 - DNA, 15 bp, Homo sapiens
tcttcctctgctcat

SEQ ID NO: 214784 - DNA, 15 bp, Homo sapiens
ttcttcctctgctca

SEQ ID NO: 214785 - DNA, 15 bp, Homo sapiens
cttcttcctctgctc

SEQ ID NO: 214786 - DNA, 15 bp, Homo sapiens
tcttcttcctctgct

SEQ ID NO: 214787 - DNA, 15 bp, Homo sapiens
ttcttcttcctctgc

SEQ ID NO: 214788 - DNA, 15 bp, Homo sapiens
attcttcttcctctg

SEQ ID NO: 214789 - DNA, 15 bp, Homo sapiens
gattcttcttcctct

SEQ ID NO: 214790 - DNA, 15 bp, Homo sapiens
ggattcttcttcctc

SEQ ID NO: 214791 - DNA, 15 bp, Homo sapiens
tggattcttcttcct

SEQ ID NO: 214792 - DNA, 15 bp, Homo sapiens
atggattcttcttcc

SEQ ID NO: 214793 - DNA, 15 bp, Homo sapiens
catggattcttcttc

SEQ ID NO: 214794 - DNA, 15 bp, Homo sapiens
gcatggattcttctt

SEQ ID NO: 214795 - DNA, 15 bp, Homo sapiens
ggcatggattcttct

SEQ ID NO: 214796 - DNA, 15 bp, Homo sapiens
aggcatggattcttc

SEQ ID NO: 214797 - DNA, 15 bp, Homo sapiens
taggcatggattctt

SEQ ID NO: 214798 - DNA, 15 bp, Homo sapiens
ataggcatggattct

SEQ ID NO: 214799 - DNA, 15 bp, Homo sapiens
cataggcatggattc

SEQ ID NO: 214800 - DNA, 15 bp, Homo sapiens
acataggcatggatt

SEQ ID NO: 214801 - DNA, 15 bp, Homo sapiens
cacataggcatggat

SEQ ID NO: 214802 - DNA, 15 bp, Homo sapiens
ccacataggcatgga

SEQ ID NO: 214803 - DNA, 15 bp, Homo sapiens
gccacataggcatgg

SEQ ID NO: 214804 - DNA, 15 bp, Homo sapiens
ggccacataggcatg

SEQ ID NO: 214805 - DNA, 15 bp, Homo sapiens
tggccacataggcat

SEQ ID NO: 214806 - DNA, 15 bp, Homo sapiens
ttggccacataggca

SEQ ID NO: 214807 - DNA, 15 bp, Homo sapiens
tttggccacataggc

SEQ ID NO: 214808 - DNA, 15 bp, Homo sapiens
ctttggccacatagg

SEQ ID NO: 214809 - DNA, 15 bp, Homo sapiens
tctttggccacatag

SEQ ID NO: 214810 - DNA, 15 bp, Homo sapiens
gtctttggccacata

SEQ ID NO: 214811 - DNA, 15 bp, Homo sapiens
cgtctttggccacat

SEQ ID NO: 214812 - DNA, 15 bp, Homo sapiens
tcgtctttggccaca

SEQ ID NO: 214813 - DNA, 15 bp, Homo sapiens
ttcgtctttggccac

SEQ ID NO: 214814 - DNA, 15 bp, Homo sapiens
attcgtctttggcca

SEQ ID NO: 214815 - DNA, 15 bp, Homo sapiens
gattcgtctttggcc

SEQ ID NO: 214816 - DNA, 15 bp, Homo sapiens
ggattcgtctttggc

SEQ ID NO: 214817 - DNA, 15 bp, Homo sapiens
aggattcgtctttgg

SEQ ID NO: 214818 - DNA, 15 bp, Homo sapiens
caggattcgtctttg

SEQ ID NO: 214819 - DNA, 15 bp, Homo sapiens
gcaggattcgtcttt

SEQ ID NO: 214820 - DNA, 15 bp, Homo sapiens
ggcaggattcgtctt

SEQ ID NO: 214821 - DNA, 15 bp, Homo sapiens
aggcaggattcgtct

SEQ ID NO: 214822 - DNA, 15 bp, Homo sapiens
gaggcaggattcgtc

SEQ ID NO: 214823 - DNA, 15 bp, Homo sapiens
tgaggcaggattcgt

SEQ ID NO: 214824 - DNA, 15 bp, Homo sapiens
gtgaggcaggattcg

SEQ ID NO: 214825 - DNA, 15 bp, Homo sapiens
tgtgaggcaggattc

SEQ ID NO: 214826 - DNA, 15 bp, Homo sapiens
ctgtgaggcaggatt

SEQ ID NO: 214827 - DNA, 15 bp, Homo sapiens
actgtgaggcaggat

SEQ ID NO: 214828 - DNA, 15 bp, Homo sapiens
gactgtgaggcagga

SEQ ID NO: 214829 - DNA, 15 bp, Homo sapiens
agactgtgaggcagg

SEQ ID NO: 214830 - DNA, 15 bp, Homo sapiens
aagactgtgaggcag

SEQ ID NO: 214831 - DNA, 15 bp, Homo sapiens
aaagactgtgaggca

SEQ ID NO: 214832 - DNA, 15 bp, Homo sapiens
caaagactgtgaggc

SEQ ID NO: 214833 - DNA, 15 bp, Homo sapiens
tcaaagactgtgagg

SEQ ID NO: 214834 - DNA, 15 bp, Homo sapiens
gtcaaagactgtgag

SEQ ID NO: 214835 - DNA, 15 bp, Homo sapiens
agtcaaagactgtga

SEQ ID NO: 214836 - DNA, 15 bp, Homo sapiens
gagtcaaagactgtg

SEQ ID NO: 214837 - DNA, 15 bp, Homo sapiens
agagtcaaagactgt

SEQ ID NO: 214838 - DNA, 15 bp, Homo sapiens
aagagtcaaagactg

SEQ ID NO: 214839 - DNA, 15 bp, Homo sapiens
aaagagtcaaagact

SEQ ID NO: 214840 - DNA, 15 bp, Homo sapiens
aaaagagtcaaagac

SEQ ID NO: 214841 - DNA, 15 bp, Homo sapiens
caaaagagtcaaaga

SEQ ID NO: 214842 - DNA, 15 bp, Homo sapiens
tcaaaagagtcaaag

SEQ ID NO: 214843 - DNA, 15 bp, Homo sapiens
gtcaaaagagtcaaa

SEQ ID NO: 214844 - DNA, 15 bp, Homo sapiens
agtcaaaagagtcaa

SEQ ID NO: 214845 - DNA, 15 bp, Homo sapiens
aagtcaaaagagtca

SEQ ID NO: 214846 - DNA, 15 bp, Homo sapiens
gaagtcaaaagagtc

SEQ ID NO: 214847 - DNA, 15 bp, Homo sapiens
ggaagtcaaaagagt

SEQ ID NO: 214848 - DNA, 15 bp, Homo sapiens
gggaagtcaaaagag

SEQ ID NO: 214849 - DNA, 15 bp, Homo sapiens
ggggaagtcaaaaga

SEQ ID NO: 214850 - DNA, 15 bp, Homo sapiens
aggggaagtcaaaag

SEQ ID NO: 214851 - DNA, 15 bp, Homo sapiens
caggggaagtcaaaa

SEQ ID NO: 214852 - DNA, 15 bp, Homo sapiens
acaggggaagtcaaa

SEQ ID NO: 214853 - DNA, 15 bp, Homo sapiens
gacaggggaagtcaa

SEQ ID NO: 214854 - DNA, 15 bp, Homo sapiens
cgacaggggaagtca

SEQ ID NO: 214855 - DNA, 15 bp, Homo sapiens
acgacaggggaagtc

SEQ ID NO: 214856 - DNA, 15 bp, Homo sapiens
cacgacaggggaagt

SEQ ID NO: 214857 - DNA, 15 bp, Homo sapiens
gcacgacaggggaag

SEQ ID NO: 214858 - DNA, 15 bp, Homo sapiens
ggcacgacaggggaa

SEQ ID NO: 214859 - DNA, 15 bp, Homo sapiens
aggcacgacagggga

SEQ ID NO: 214860 - DNA, 15 bp, Homo sapiens
gaggcacgacagggg

SEQ ID NO: 214861 - DNA, 15 bp, Homo sapiens
ggaggcacgacaggg

SEQ ID NO: 214862 - DNA, 15 bp, Homo sapiens
aggaggcacgacagg

SEQ ID NO: 214863 - DNA, 15 bp, Homo sapiens
caggaggcacgacag

SEQ ID NO: 214864 - DNA, 15 bp, Homo sapiens
gcaggaggcacgaca

SEQ ID NO: 214865 - DNA, 15 bp, Homo sapiens
tgcaggaggcacgac

SEQ ID NO: 214866 - DNA, 15 bp, Homo sapiens
ctgcaggaggcacga

SEQ ID NO: 214867 - DNA, 15 bp, Homo sapiens
tctgcaggaggcacg

SEQ ID NO: 214868 - DNA, 15 bp, Homo sapiens
gtctgcaggaggcac

SEQ ID NO: 214869 - DNA, 15 bp, Homo sapiens
agtctgcaggaggca

SEQ ID NO: 214870 - DNA, 15 bp, Homo sapiens
gagtctgcaggaggc

SEQ ID NO: 214871 - DNA, 15 bp, Homo sapiens
agagtctgcaggagg

SEQ ID NO: 214872 - DNA, 15 bp, Homo sapiens
aagagtctgcaggag

SEQ ID NO: 214873 - DNA, 15 bp, Homo sapiens
gaagagtctgcagga

SEQ ID NO: 214874 - DNA, 15 bp, Homo sapiens
agaagagtctgcagg

SEQ ID NO: 214875 - DNA, 15 bp, Homo sapiens
aagaagagtctgcag

SEQ ID NO: 214876 - DNA, 15 bp, Homo sapiens
caagaagagtctgca

SEQ ID NO: 214877 - DNA, 15 bp, Homo sapiens
gcaagaagagtctgc

SEQ ID NO: 214878 - DNA, 15 bp, Homo sapiens
agcaagaagagtctg

SEQ ID NO: 214879 - DNA, 15 bp, Homo sapiens
aagcaagaagagtct

SEQ ID NO: 214880 - DNA, 15 bp, Homo sapiens
gaagcaagaagagtc

SEQ ID NO: 214881 - DNA, 15 bp, Homo sapiens
ggaagcaagaagagt

SEQ ID NO: 214882 - DNA, 15 bp, Homo sapiens
gggaagcaagaagag

SEQ ID NO: 214883 - DNA, 15 bp, Homo sapiens
agggaagcaagaaga

SEQ ID NO: 214884 - DNA, 15 bp, Homo sapiens
cagggaagcaagaag

SEQ ID NO: 214885 - DNA, 15 bp, Homo sapiens
ccagggaagcaagaa

SEQ ID NO: 214886 - DNA, 15 bp, Homo sapiens
cccagggaagcaaga

SEQ ID NO: 214887 - DNA, 15 bp, Homo sapiens
tcccagggaagcaag

SEQ ID NO: 214888 - DNA, 15 bp, Homo sapiens
ctcccagggaagcaa

SEQ ID NO: 214889 - DNA, 15 bp, Homo sapiens
tctcccagggaagca

SEQ ID NO: 214890 - DNA, 15 bp, Homo sapiens
ttctcccagggaagc

SEQ ID NO: 214891 - DNA, 15 bp, Homo sapiens
attctcccagggaag

SEQ ID NO: 214892 - DNA, 15 bp, Homo sapiens
cattctcccagggaa

SEQ ID NO: 214893 - DNA, 15 bp, Homo sapiens
ccattctcccaggga

SEQ ID NO: 214894 - DNA, 15 bp, Homo sapiens
cccattctcccaggg

SEQ ID NO: 214895 - DNA, 15 bp, Homo sapiens
acccattctcccagg

SEQ ID NO: 214896 - DNA, 15 bp, Homo sapiens
cacccattctcccag

SEQ ID NO: 214897 - DNA, 15 bp, Homo sapiens
ccacccattctccca

SEQ ID NO: 214898 - DNA, 15 bp, Homo sapiens
gccacccattctccc

SEQ ID NO: 214899 - DNA, 15 bp, Homo sapiens
tgccacccattctcc

SEQ ID NO: 214900 - DNA, 15 bp, Homo sapiens
ttgccacccattctc

SEQ ID NO: 214901 - DNA, 15 bp, Homo sapiens
tttgccacccattct

SEQ ID NO: 214902 - DNA, 15 bp, Homo sapiens
ctttgccacccattc

SEQ ID NO: 214903 - DNA, 15 bp, Homo sapiens
tctttgccacccatt

SEQ ID NO: 214904 - DNA, 15 bp, Homo sapiens
ctctttgccacccat

SEQ ID NO: 214905 - DNA, 15 bp, Homo sapiens
actctttgccaccca

SEQ ID NO: 214906 - DNA, 15 bp, Homo sapiens
cactctttgccaccc

SEQ ID NO: 214907 - DNA, 15 bp, Homo sapiens
gcactctttgccacc

SEQ ID NO: 214908 - DNA, 15 bp, Homo sapiens
ggcactctttgccac

SEQ ID NO: 214909 - DNA, 15 bp, Homo sapiens
aggcactctttgcca

SEQ ID NO: 214910 - DNA, 15 bp, Homo sapiens
aaggcactctttgcc

SEQ ID NO: 214911 - DNA, 15 bp, Homo sapiens
gaaggcactctttgc

SEQ ID NO: 214912 - DNA, 15 bp, Homo sapiens
ggaaggcactctttg

SEQ ID NO: 214913 - DNA, 15 bp, Homo sapiens
aggaaggcactcttt

SEQ ID NO: 214914 - DNA, 15 bp, Homo sapiens
aaggaaggcactctt

SEQ ID NO: 214915 - DNA, 15 bp, Homo sapiens
taaggaaggcactct

SEQ ID NO: 214916 - DNA, 15 bp, Homo sapiens
ctaaggaaggcactc

SEQ ID NO: 214917 - DNA, 15 bp, Homo sapiens
gctaaggaaggcact

SEQ ID NO: 214918 - DNA, 15 bp, Homo sapiens
ggctaaggaaggcac

SEQ ID NO: 214919 - DNA, 15 bp, Homo sapiens
tggctaaggaaggca

SEQ ID NO: 214920 - DNA, 15 bp, Homo sapiens
atggctaaggaaggc

SEQ ID NO: 214921 - DNA, 15 bp, Homo sapiens
catggctaaggaagg

SEQ ID NO: 214922 - DNA, 15 bp, Homo sapiens
gcatggctaaggaag

SEQ ID NO: 214923 - DNA, 15 bp, Homo sapiens
agcatggctaaggaa

SEQ ID NO: 214924 - DNA, 15 bp, Homo sapiens
aagcatggctaagga

SEQ ID NO: 214925 - DNA, 15 bp, Homo sapiens
gaagcatggctaagg

SEQ ID NO: 214926 - DNA, 15 bp, Homo sapiens
ggaagcatggctaag

SEQ ID NO: 214927 - DNA, 15 bp, Homo sapiens
aggaagcatggctaa

SEQ ID NO: 214928 - DNA, 15 bp, Homo sapiens
aaggaagcatggcta

SEQ ID NO: 214929 - DNA, 15 bp, Homo sapiens
caaggaagcatggct

SEQ ID NO: 214930 - DNA, 15 bp, Homo sapiens
acaaggaagcatggc

SEQ ID NO: 214931 - DNA, 15 bp, Homo sapiens
gacaaggaagcatgg

SEQ ID NO: 214932 - DNA, 15 bp, Homo sapiens
tgacaaggaagcatg

SEQ ID NO: 214933 - DNA, 15 bp, Homo sapiens
ctgacaaggaagcat

SEQ ID NO: 214934 - DNA, 15 bp, Homo sapiens
gctgacaaggaagca

SEQ ID NO: 214935 - DNA, 15 bp, Homo sapiens
tgctgacaaggaagc

SEQ ID NO: 214936 - DNA, 15 bp, Homo sapiens
gtgctgacaaggaag

SEQ ID NO: 214937 - DNA, 15 bp, Homo sapiens
tgtgctgacaaggaa

SEQ ID NO: 214938 - DNA, 15 bp, Homo sapiens
ctgtgctgacaagga

SEQ ID NO: 214939 - DNA, 15 bp, Homo sapiens
actgtgctgacaagg

SEQ ID NO: 214940 - DNA, 15 bp, Homo sapiens
cactgtgctgacaag

SEQ ID NO: 214941 - DNA, 15 bp, Homo sapiens
gcactgtgctgacaa

SEQ ID NO: 214942 - DNA, 15 bp, Homo sapiens
ggcactgtgctgaca

SEQ ID NO: 214943 - DNA, 15 bp, Homo sapiens
aggcactgtgctgac

SEQ ID NO: 214944 - DNA, 15 bp, Homo sapiens
caggcactgtgctga

SEQ ID NO: 214945 - DNA, 15 bp, Homo sapiens
ccaggcactgtgctg

SEQ ID NO: 214946 - DNA, 15 bp, Homo sapiens
gccaggcactgtgct

SEQ ID NO: 214947 - DNA, 15 bp, Homo sapiens
tgccaggcactgtgc

SEQ ID NO: 214948 - DNA, 15 bp, Homo sapiens
ctgccaggcactgtg

SEQ ID NO: 214949 - DNA, 15 bp, Homo sapiens
cctgccaggcactgt

SEQ ID NO: 214950 - DNA, 15 bp, Homo sapiens
acctgccaggcactg

SEQ ID NO: 214951 - DNA, 15 bp, Homo sapiens
cacctgccaggcact

SEQ ID NO: 214952 - DNA, 15 bp, Homo sapiens
gccacctgccaggca

SEQ ID NO: 214953 - DNA, 15 bp, Homo sapiens
agccacctgccaggc

SEQ ID NO: 214954 - DNA, 15 bp, Homo sapiens
cagccacctgccagg

SEQ ID NO: 214955 - DNA, 15 bp, Homo sapiens
ccagccacctgccag

SEQ ID NO: 214956 - DNA, 15 bp, Homo sapiens
tccagccacctgcca

SEQ ID NO: 214957 - DNA, 15 bp, Homo sapiens
ttccagccacctgcc

SEQ ID NO: 214958 - DNA, 15 bp, Homo sapiens
cttccagccacctgc

SEQ ID NO: 214959 - DNA, 15 bp, Homo sapiens
gcttccagccacctg

SEQ ID NO: 214960 - DNA, 15 bp, Homo sapiens
agcttccagccacct

SEQ ID NO: 214961 - DNA, 15 bp, Homo sapiens
tagcttccagccacc

SEQ ID NO: 214962 - DNA, 15 bp, Homo sapiens
gtagcttccagccac

SEQ ID NO: 214963 - DNA, 15 bp, Homo sapiens
tgtagcttccagcca

SEQ ID NO: 214964 - DNA, 15 bp, Homo sapiens
ctgtagcttccagcc

SEQ ID NO: 214965 - DNA, 15 bp, Homo sapiens
gctgtagcttccagc

SEQ ID NO: 214966 - DNA, 15 bp, Homo sapiens
agctgtagcttccag

SEQ ID NO: 214967 - DNA, 15 bp, Homo sapiens
cagctgtagcttcca

SEQ ID NO: 214968 - DNA, 15 bp, Homo sapiens
tcagctgtagcttcc

SEQ ID NO: 214969 - DNA, 15 bp, Homo sapiens
ttcagctgtagcttc

SEQ ID NO: 214970 - DNA, 15 bp, Homo sapiens
attcagctgtagctt

SEQ ID NO: 214971 - DNA, 15 bp, Homo sapiens
aattcagctgtagct

SEQ ID NO: 214972 - DNA, 15 bp, Homo sapiens
aaattcagctgtagc

SEQ ID NO: 214973 - DNA, 15 bp, Homo sapiens
aaaattcagctgtag

SEQ ID NO: 214974 - DNA, 15 bp, Homo sapiens
aaaaattcagctgta

SEQ ID NO: 214975 - DNA, 15 bp, Homo sapiens
caaaaattcagctgt

SEQ ID NO: 214976 - DNA, 15 bp, Homo sapiens
gcaaaaattcagctg

SEQ ID NO: 214977 - DNA, 15 bp, Homo sapiens
tgcaaaaattcagct

SEQ ID NO: 214978 - DNA, 15 bp, Homo sapiens
ctgcaaaaattcagc

SEQ ID NO: 214979 - DNA, 15 bp, Homo sapiens
actgcaaaaattcag

SEQ ID NO: 214980 - DNA, 15 bp, Homo sapiens
cactgcaaaaattca

SEQ ID NO: 214981 - DNA, 15 bp, Homo sapiens
acactgcaaaaattc

SEQ ID NO: 214982 - DNA, 15 bp, Homo sapiens
gacactgcaaaaatt

SEQ ID NO: 214983 - DNA, 15 bp, Homo sapiens
agacactgcaaaaat

SEQ ID NO: 214984 - DNA, 15 bp, Homo sapiens
aagacactgcaaaaa

SEQ ID NO: 214985 - DNA, 15 bp, Homo sapiens
aaagacactgcaaaa

SEQ ID NO: 214986 - DNA, 15 bp, Homo sapiens
caaagacactgcaaa

SEQ ID NO: 214987 - DNA, 15 bp, Homo sapiens
tcaaagacactgcaa

SEQ ID NO: 214988 - DNA, 15 bp, Homo sapiens
ctcaaagacactgca

SEQ ID NO: 214989 - DNA, 15 bp, Homo sapiens
tctcaaagacactgc

SEQ ID NO: 214990 - DNA, 15 bp, Homo sapiens
atctcaaagacactg

SEQ ID NO: 214991 - DNA, 15 bp, Homo sapiens
catctcaaagacact

SEQ ID NO: 214992 - DNA, 15 bp, Homo sapiens
gcatctcaaagacac

SEQ ID NO: 214993 - DNA, 15 bp, Homo sapiens
ggcatctcaaagaca

SEQ ID NO: 214994 - DNA, 15 bp, Homo sapiens
tggcatctcaaagac

SEQ ID NO: 214995 - DNA, 15 bp, Homo sapiens
ctggcatctcaaaga

SEQ ID NO: 214996 - DNA, 15 bp, Homo sapiens
cctggcatctcaaag

SEQ ID NO: 214997 - DNA, 15 bp, Homo sapiens
tcctggcatctcaaa

SEQ ID NO: 214998 - DNA, 15 bp, Homo sapiens
ctcctggcatctcaa

SEQ ID NO: 214999 - DNA, 15 bp, Homo sapiens
cctcctggcatctca

SEQ ID NO: 215000 - DNA, 15 bp, Homo sapiens
tcctcctggcatctc

SEQ ID NO: 215001 - DNA, 15 bp, Homo sapiens
atcctcctggcatct

SEQ ID NO: 215002 - DNA, 15 bp, Homo sapiens
catcctcctggcatc

SEQ ID NO: 215003 - DNA, 15 bp, Homo sapiens
ccatcctcctggcat

SEQ ID NO: 215004 - DNA, 15 bp, Homo sapiens
gccatcctcctggca

SEQ ID NO: 215005 - DNA, 15 bp, Homo sapiens
tgccatcctcctggc

SEQ ID NO: 215006 - DNA, 15 bp, Homo sapiens
ctgccatcctcctgg

SEQ ID NO: 215007 - DNA, 15 bp, Homo sapiens
tctgccatcctcctg

SEQ ID NO: 215008 - DNA, 15 bp, Homo sapiens
atctgccatcctcct

SEQ ID NO: 215009 - DNA, 15 bp, Homo sapiens
gatctgccatcctcc

SEQ ID NO: 215010 - DNA, 15 bp, Homo sapiens
tgatctgccatcctc

SEQ ID NO: 215011 - DNA, 15 bp, Homo sapiens
atgatctgccatcct

SEQ ID NO: 215012 - DNA, 15 bp, Homo sapiens
aatgatctgccatcc

SEQ ID NO: 215013 - DNA, 15 bp, Homo sapiens
aaatgatctgccatc

SEQ ID NO: 215014 - DNA, 15 bp, Homo sapiens
gaaatgatctgccat

SEQ ID NO: 215015 - DNA, 15 bp, Homo sapiens
agaaatgatctgcca

SEQ ID NO: 215016 - DNA, 15 bp, Homo sapiens
cagaaatgatctgcc

SEQ ID NO: 215017 - DNA, 15 bp, Homo sapiens
acagaaatgatctgc

SEQ ID NO: 215018 - DNA, 15 bp, Homo sapiens
aacagaaatgatctg

SEQ ID NO: 215019 - DNA, 15 bp, Homo sapiens
gaacagaaatgatct

SEQ ID NO: 215020 - DNA, 15 bp, Homo sapiens
tgaacagaaatgatc

SEQ ID NO: 215021 - DNA, 15 bp, Homo sapiens
ttgaacagaaatgat

SEQ ID NO: 215022 - DNA, 15 bp, Homo sapiens
attgaacagaaatga

SEQ ID NO: 215023 - DNA, 15 bp, Homo sapiens
aattgaacagaaatg

SEQ ID NO: 215024 - DNA, 15 bp, Homo sapiens
gaattgaacagaaat

SEQ ID NO: 215025 - DNA, 15 bp, Homo sapiens
tgaattgaacagaaa

SEQ ID NO: 215026 - DNA, 15 bp, Homo sapiens
atgaattgaacagaa

SEQ ID NO: 215027 - DNA, 15 bp, Homo sapiens
gatgaattgaacaga

SEQ ID NO: 215028 - DNA, 15 bp, Homo sapiens
tgatgaattgaacag

SEQ ID NO: 215029 - DNA, 15 bp, Homo sapiens
ctgatgaattgaaca

SEQ ID NO: 215030 - DNA, 15 bp, Homo sapiens
gctgatgaattgaac

SEQ ID NO: 215031 - DNA, 15 bp, Homo sapiens
ggctgatgaattgaa

SEQ ID NO: 215032 - DNA, 15 bp, Homo sapiens
tggctgatgaattga

SEQ ID NO: 215033 - DNA, 15 bp, Homo sapiens
gtggctgatgaattg

SEQ ID NO: 215034 - DNA, 15 bp, Homo sapiens
tgtggctgatgaatt

SEQ ID NO: 215035 - DNA, 15 bp, Homo sapiens
gtgtggctgatgaat

SEQ ID NO: 215036 - DNA, 15 bp, Homo sapiens
tgtgtggctgatgaa

SEQ ID NO: 215037 - DNA, 15 bp, Homo sapiens
ttgtgtggctgatga

SEQ ID NO: 215038 - DNA, 15 bp, Homo sapiens
tttgtgtggctgatg

SEQ ID NO: 215039 - DNA, 15 bp, Homo sapiens
ttttgtgtggctgat

SEQ ID NO: 215040 - DNA, 15 bp, Homo sapiens
cttttgtgtggctga

SEQ ID NO: 215041 - DNA, 15 bp, Homo sapiens
gcttttgtgtggctg

SEQ ID NO: 215042 - DNA, 15 bp, Homo sapiens
ggcttttgtgtggct

SEQ ID NO: 215043 - DNA, 15 bp, Homo sapiens
gggcttttgtgtggc

SEQ ID NO: 215044 - DNA, 15 bp, Homo sapiens
agggcttttgtgtgg

SEQ ID NO: 215045 - DNA, 15 bp, Homo sapiens
cagggcttttgtgtg

SEQ ID NO: 215046 - DNA, 15 bp, Homo sapiens
tcagggcttttgtgt

SEQ ID NO: 215047 - DNA, 15 bp, Homo sapiens
ctcagggcttttgtg

SEQ ID NO: 215048 - DNA, 15 bp, Homo sapiens
tctcagggcttttgt

SEQ ID NO: 215049 - DNA, 15 bp, Homo sapiens
atctcagggcttttg

SEQ ID NO: 215050 - DNA, 15 bp, Homo sapiens
gatctcagggctttt

SEQ ID NO: 215051 - DNA, 15 bp, Homo sapiens
tgatctcagggcttt

SEQ ID NO: 215052 - DNA, 15 bp, Homo sapiens
ttgatctcagggctt

SEQ ID NO: 215053 - DNA, 15 bp, Homo sapiens
tttgatctcagggct

SEQ ID NO: 215054 - DNA, 15 bp, Homo sapiens
ctttgatctcagggc

SEQ ID NO: 215055 - DNA, 15 bp, Homo sapiens
tctttgatctcaggg

SEQ ID NO: 215056 - DNA, 15 bp, Homo sapiens
ctctttgatctcagg

SEQ ID NO: 215057 - DNA, 15 bp, Homo sapiens
gctctttgatctcag

SEQ ID NO: 215058 - DNA, 15 bp, Homo sapiens
tgctctttgatctca

SEQ ID NO: 215059 - DNA, 15 bp, Homo sapiens
atgctctttgatctc

SEQ ID NO: 215060 - DNA, 15 bp, Homo sapiens
catgctctttgatct

SEQ ID NO: 215061 - DNA, 15 bp, Homo sapiens
ccatgctctttgatc

SEQ ID NO: 215062 - DNA, 15 bp, Homo sapiens
cccatgctctttgat

SEQ ID NO: 215063 - DNA, 15 bp, Homo sapiens
gcccatgctctttga

SEQ ID NO: 215064 - DNA, 15 bp, Homo sapiens
agcccatgctctttg

SEQ ID NO: 215065 - DNA, 15 bp, Homo sapiens
aagcccatgctcttt

SEQ ID NO: 215066 - DNA, 15 bp, Homo sapiens
taagcccatgctctt

SEQ ID NO: 215067 - DNA, 15 bp, Homo sapiens
ttaagcccatgctct

SEQ ID NO: 215068 - DNA, 15 bp, Homo sapiens
attaagcccatgctc

SEQ ID NO: 215069 - DNA, 15 bp, Homo sapiens
aattaagcccatgct

SEQ ID NO: 215070 - DNA, 15 bp, Homo sapiens
aaattaagcccatgc

SEQ ID NO: 215071 - DNA, 15 bp, Homo sapiens
taaattaagcccatg

SEQ ID NO: 215072 - DNA, 15 bp, Homo sapiens
ataaattaagcccat

SEQ ID NO: 215073 - DNA, 15 bp, Homo sapiens
aataaattaagccca

SEQ ID NO: 215074 - DNA, 15 bp, Homo sapiens
aaataaattaagccc

SEQ ID NO: 215075 - DNA, 15 bp, Homo sapiens
aaaataaattaagcc

SEQ ID NO: 215076 - DNA, 15 bp, Homo sapiens
caaaataaattaagc

SEQ ID NO: 215077 - DNA, 15 bp, Homo sapiens
acaaaataaattaag

SEQ ID NO: 215078 - DNA, 15 bp, Homo sapiens
aacaaaataaattaa

SEQ ID NO: 215079 - DNA, 15 bp, Homo sapiens
aaacaaaataaatta

SEQ ID NO: 215080 - DNA, 15 bp, Homo sapiens
taaacaaaataaatt

SEQ ID NO: 215081 - DNA, 15 bp, Homo sapiens
ataaacaaaataaat

SEQ ID NO: 215082 - DNA, 15 bp, Homo sapiens
aataaacaaaataaa

SEQ ID NO: 215083 - DNA, 15 bp, Homo sapiens
aaataaacaaaataa

SEQ ID NO: 215084 - DNA, 15 bp, Homo sapiens
aaaataaacaaaata

SEQ ID NO: 215085 - DNA, 15 bp, Homo sapiens
caaaataaacaaaat

SEQ ID NO: 215086 - DNA, 15 bp, Homo sapiens
gcaaaataaacaaaa

SEQ ID NO: 215087 - DNA, 15 bp, Homo sapiens
tgcaaaataaacaaa

SEQ ID NO: 215088 - DNA, 15 bp, Homo sapiens
ctgcaaaataaacaa

SEQ ID NO: 215089 - DNA, 15 bp, Homo sapiens
tctgcaaaataaaca

SEQ ID NO: 215090 - DNA, 15 bp, Homo sapiens
ctctgcaaaataaac

SEQ ID NO: 215091 - DNA, 15 bp, Homo sapiens
cctctgcaaaataaa

SEQ ID NO: 215092 - DNA, 15 bp, Homo sapiens
tcctctgcaaaataa

SEQ ID NO: 215093 - DNA, 15 bp, Homo sapiens
ttcctctgcaaaata

SEQ ID NO: 215094 - DNA, 15 bp, Homo sapiens
tttcctctgcaaaat

SEQ ID NO: 215095 - DNA, 15 bp, Homo sapiens
atttcctctgcaaaa

SEQ ID NO: 215096 - DNA, 15 bp, Homo sapiens
tatttcctctgcaaa

SEQ ID NO: 215097 - DNA, 15 bp, Homo sapiens
ctatttcctctgcaa

SEQ ID NO: 215098 - DNA, 15 bp, Homo sapiens
actatttcctctgca

SEQ ID NO: 215099 - DNA, 15 bp, Homo sapiens
cactatttcctctgc

SEQ ID NO: 215100 - DNA, 15 bp, Homo sapiens
gcactatttcctctg

SEQ ID NO: 215101 - DNA, 15 bp, Homo sapiens
agcactatttcctct

SEQ ID NO: 215102 - DNA, 15 bp, Homo sapiens
aagcactatttcctc

SEQ ID NO: 215103 - DNA, 15 bp, Homo sapiens
gaagcactatttcct

SEQ ID NO: 215104 - DNA, 15 bp, Homo sapiens
ggaagcactatttcc

SEQ ID NO: 215105 - DNA, 15 bp, Homo sapiens
aggaagcactatttc

SEQ ID NO: 215106 - DNA, 15 bp, Homo sapiens
aaggaagcactattt

SEQ ID NO: 215107 - DNA, 15 bp, Homo sapiens
caaggaagcactatt

SEQ ID NO: 215108 - DNA, 15 bp, Homo sapiens
ccaaggaagcactat

SEQ ID NO: 215109 - DNA, 15 bp, Homo sapiens
tccaaggaagcacta

SEQ ID NO: 215110 - DNA, 15 bp, Homo sapiens
gtccaaggaagcact

SEQ ID NO: 215111 - DNA, 15 bp, Homo sapiens
agtccaaggaagcac

SEQ ID NO: 215112 - DNA, 15 bp, Homo sapiens
cagtccaaggaagca

SEQ ID NO: 215113 - DNA, 15 bp, Homo sapiens
tcagtccaaggaagc

SEQ ID NO: 215114 - DNA, 15 bp, Homo sapiens
ttcagtccaaggaag

SEQ ID NO: 215115 - DNA, 15 bp, Homo sapiens
tttcagtccaaggaa

SEQ ID NO: 215116 - DNA, 15 bp, Homo sapiens
ctttcagtccaagga

SEQ ID NO: 215117 - DNA, 15 bp, Homo sapiens
gctttcagtccaagg

SEQ ID NO: 215118 - DNA, 15 bp, Homo sapiens
agctttcagtccaag

SEQ ID NO: 215119 - DNA, 15 bp, Homo sapiens
gagctttcagtccaa

SEQ ID NO: 215120 - DNA, 15 bp, Homo sapiens
agagctttcagtcca

SEQ ID NO: 215121 - DNA, 15 bp, Homo sapiens
cagagctttcagtcc

SEQ ID NO: 215122 - DNA, 15 bp, Homo sapiens
tcagagctttcagtc

SEQ ID NO: 215123 - DNA, 15 bp, Homo sapiens
ctcagagctttcagt

SEQ ID NO: 215124 - DNA, 15 bp, Homo sapiens
cctcagagctttcag

SEQ ID NO: 215125 - DNA, 15 bp, Homo sapiens
tcctcagagctttca

SEQ ID NO: 215126 - DNA, 15 bp, Homo sapiens
gtcctcagagctttc

SEQ ID NO: 215127 - DNA, 15 bp, Homo sapiens
agtcctcagagcttt

SEQ ID NO: 215128 - DNA, 15 bp, Homo sapiens
tagtcctcagagctt

SEQ ID NO: 215129 - DNA, 15 bp, Homo sapiens
ttagtcctcagagct

SEQ ID NO: 215130 - DNA, 15 bp, Homo sapiens
cttagtcctcagagc

SEQ ID NO: 215131 - DNA, 15 bp, Homo sapiens
tcttagtcctcagag

SEQ ID NO: 215132 - DNA, 15 bp, Homo sapiens
ctcttagtcctcaga

SEQ ID NO: 215133 - DNA, 15 bp, Homo sapiens
gctcttagtcctcag

SEQ ID NO: 215134 - DNA, 15 bp, Homo sapiens
agctcttagtcctca

SEQ ID NO: 215135 - DNA, 15 bp, Homo sapiens
cagctcttagtcctc

SEQ ID NO: 215136 - DNA, 15 bp, Homo sapiens
tcagctcttagtcct

SEQ ID NO: 215137 - DNA, 15 bp, Homo sapiens
ttcagctcttagtcc

SEQ ID NO: 215138 - DNA, 15 bp, Homo sapiens
attcagctcttagtc

SEQ ID NO: 215139 - DNA, 15 bp, Homo sapiens
cattcagctcttagt

SEQ ID NO: 215140 - DNA, 15 bp, Homo sapiens
ccattcagctcttag

SEQ ID NO: 215141 - DNA, 15 bp, Homo sapiens
tccattcagctctta

SEQ ID NO: 215142 - DNA, 15 bp, Homo sapiens
ttccattcagctctt

SEQ ID NO: 215143 - DNA, 15 bp, Homo sapiens
tttccattcagctct

SEQ ID NO: 215144 - DNA, 15 bp, Homo sapiens
ctttccattcagctc

SEQ ID NO: 215145 - DNA, 15 bp, Homo sapiens
cctttccattcagct

SEQ ID NO: 215146 - DNA, 15 bp, Homo sapiens
ccctttccattcagc

SEQ ID NO: 215147 - DNA, 15 bp, Homo sapiens
cccctttccattcag

SEQ ID NO: 215148 - DNA, 15 bp, Homo sapiens
ccccctttccattca

SEQ ID NO: 215149 - DNA, 15 bp, Homo sapiens
gccccctttccattc

SEQ ID NO: 215150 - DNA, 15 bp, Homo sapiens
cgccccctttccatt

SEQ ID NO: 215151 - DNA, 15 bp, Homo sapiens
acgccccctttccat

SEQ ID NO: 215152 - DNA, 15 bp, Homo sapiens
aacgccccctttcca

SEQ ID NO: 215153 - DNA, 15 bp, Homo sapiens
aaacgccccctttcc

SEQ ID NO: 215154 - DNA, 15 bp, Homo sapiens
caaacgccccctttc

SEQ ID NO: 215155 - DNA, 15 bp, Homo sapiens
ccaaacgcccccttt

SEQ ID NO: 215156 - DNA, 15 bp, Homo sapiens
tccaaacgccccctt

SEQ ID NO: 215157 - DNA, 15 bp, Homo sapiens
atccaaacgccccct

SEQ ID NO: 215158 - DNA, 15 bp, Homo sapiens
aatccaaacgccccc

SEQ ID NO: 215159 - DNA, 15 bp, Homo sapiens
taatccaaacgcccc

SEQ ID NO: 215160 - DNA, 15 bp, Homo sapiens
ttaatccaaacgccc

SEQ ID NO: 215161 - DNA, 15 bp, Homo sapiens
tttaatccaaacgcc

SEQ ID NO: 215162 - DNA, 15 bp, Homo sapiens
atttaatccaaacgc

SEQ ID NO: 215163 - DNA, 15 bp, Homo sapiens
catttaatccaaacg

SEQ ID NO: 215164 - DNA, 15 bp, Homo sapiens
tcatttaatccaaac

SEQ ID NO: 215165 - DNA, 15 bp, Homo sapiens
ttcatttaatccaaa

SEQ ID NO: 215166 - DNA, 15 bp, Homo sapiens
attcatttaatccaa

SEQ ID NO: 215167 - DNA, 15 bp, Homo sapiens
cattcatttaatcca

SEQ ID NO: 215168 - DNA, 15 bp, Homo sapiens
ccattcatttaatcc

SEQ ID NO: 215169 - DNA, 15 bp, Homo sapiens
cccattcatttaatc

SEQ ID NO: 215170 - DNA, 15 bp, Homo sapiens
gcccattcatttaat

SEQ ID NO: 215171 - DNA, 15 bp, Homo sapiens
agcccattcatttaa

SEQ ID NO: 215172 - DNA, 15 bp, Homo sapiens
cagcccattcattta

SEQ ID NO: 215173 - DNA, 15 bp, Homo sapiens
ccagcccattcattt

SEQ ID NO: 215174 - DNA, 15 bp, Homo sapiens
gccagcccattcatt

SEQ ID NO: 215175 - DNA, 15 bp, Homo sapiens
ggccagcccattcat

SEQ ID NO: 215176 - DNA, 15 bp, Homo sapiens
tggccagcccattca

SEQ ID NO: 215177 - DNA, 15 bp, Homo sapiens
ctggccagcccattc

SEQ ID NO: 215178 - DNA, 15 bp, Homo sapiens
gctggccagcccatt

SEQ ID NO: 215179 - DNA, 15 bp, Homo sapiens
agctggccagcccat

SEQ ID NO: 215180 - DNA, 15 bp, Homo sapiens
gagctggccagccca

SEQ ID NO: 215181 - DNA, 15 bp, Homo sapiens
agagctggccagccc

SEQ ID NO: 215182 - DNA, 15 bp, Homo sapiens
cagagctggccagcc

SEQ ID NO: 215183 - DNA, 15 bp, Homo sapiens
tcagagctggccagc

SEQ ID NO: 215184 - DNA, 15 bp, Homo sapiens
gtcagagctggccag

SEQ ID NO: 215185 - DNA, 15 bp, Homo sapiens
ggtcagagctggcca

SEQ ID NO: 215186 - DNA, 15 bp, Homo sapiens
gggtcagagctggcc

SEQ ID NO: 215187 - DNA, 15 bp, Homo sapiens
tgggtcagagctggc

SEQ ID NO: 215188 - DNA, 15 bp, Homo sapiens
ttgggtcagagctgg

SEQ ID NO: 215189 - DNA, 15 bp, Homo sapiens
attgggtcagagctg

SEQ ID NO: 215190 - DNA, 15 bp, Homo sapiens
aattgggtcagagct

SEQ ID NO: 215191 - DNA, 15 bp, Homo sapiens
aaattgggtcagagc

SEQ ID NO: 215192 - DNA, 15 bp, Homo sapiens
gaaattgggtcagag

SEQ ID NO: 215193 - DNA, 15 bp, Homo sapiens
ggaaattgggtcaga

SEQ ID NO: 215194 - DNA, 15 bp, Homo sapiens
tggaaattgggtcag

SEQ ID NO: 215195 - DNA, 15 bp, Homo sapiens
gtggaaattgggtca

SEQ ID NO: 215196 - DNA, 15 bp, Homo sapiens
ggtggaaattgggtc

SEQ ID NO: 215197 - DNA, 15 bp, Homo sapiens
gggtggaaattgggt

SEQ ID NO: 215198 - DNA, 15 bp, Homo sapiens
tgggtggaaattggg

SEQ ID NO: 215199 - DNA, 15 bp, Homo sapiens
ctgggtggaaattgg

SEQ ID NO: 215200 - DNA, 15 bp, Homo sapiens
actgggtggaaattg

SEQ ID NO: 215201 - DNA, 15 bp, Homo sapiens
cactgggtggaaatt

SEQ ID NO: 215202 - DNA, 15 bp, Homo sapiens
gcactgggtggaaat

SEQ ID NO: 215203 - DNA, 15 bp, Homo sapiens
tgcactgggtggaaa

SEQ ID NO: 215204 - DNA, 15 bp, Homo sapiens
ctgcactgggtggaa

SEQ ID NO: 215205 - DNA, 15 bp, Homo sapiens
gctgcactgggtgga

SEQ ID NO: 215206 - DNA, 15 bp, Homo sapiens
tgctgcactgggtgg

SEQ ID NO: 215207 - DNA, 15 bp, Homo sapiens
ctgctgcactgggtg

SEQ ID NO: 215208 - DNA, 15 bp, Homo sapiens
actgctgcactgggt

SEQ ID NO: 215209 - DNA, 15 bp, Homo sapiens
cactgctgcactggg

SEQ ID NO: 215210 - DNA, 15 bp, Homo sapiens
tcactgctgcactgg

SEQ ID NO: 215211 - DNA, 15 bp, Homo sapiens
atcactgctgcactg

SEQ ID NO: 215212 - DNA, 15 bp, Homo sapiens
catcactgctgcact

SEQ ID NO: 215213 - DNA, 15 bp, Homo sapiens
ccatcactgctgcac

SEQ ID NO: 215214 - DNA, 15 bp, Homo sapiens
cccatcactgctgca

SEQ ID NO: 215215 - DNA, 15 bp, Homo sapiens
ccccatcactgctgc

SEQ ID NO: 215216 - DNA, 15 bp, Homo sapiens
cccccatcactgctg

SEQ ID NO: 215217 - DNA, 15 bp, Homo sapiens
tcccccatcactgct

SEQ ID NO: 215218 - DNA, 15 bp, Homo sapiens
ctcccccatcactgc

SEQ ID NO: 215219 - DNA, 15 bp, Homo sapiens
cctcccccatcactg

SEQ ID NO: 215220 - DNA, 15 bp, Homo sapiens
ccctcccccatcact

SEQ ID NO: 215221 - DNA, 15 bp, Homo sapiens
tccctcccccatcac

SEQ ID NO: 215222 - DNA, 15 bp, Homo sapiens
ttccctcccccatca

SEQ ID NO: 215223 - DNA, 15 bp, Homo sapiens
attccctcccccatc

SEQ ID NO: 215224 - DNA, 15 bp, Homo sapiens
aattccctcccccat

SEQ ID NO: 215225 - DNA, 15 bp, Homo sapiens
caattccctccccca

SEQ ID NO: 215226 - DNA, 15 bp, Homo sapiens
gcaattccctccccc

SEQ ID NO: 215227 - DNA, 15 bp, Homo sapiens
ggcaattccctcccc

SEQ ID NO: 215228 - DNA, 15 bp, Homo sapiens
aggcaattccctccc

SEQ ID NO: 215229 - DNA, 15 bp, Homo sapiens
aaggcaattccctcc

SEQ ID NO: 215230 - DNA, 15 bp, Homo sapiens
gaaggcaattccctc

SEQ ID NO: 215231 - DNA, 15 bp, Homo sapiens
agaaggcaattccct

SEQ ID NO: 215232 - DNA, 15 bp, Homo sapiens
cagaaggcaattccc

SEQ ID NO: 215233 - DNA, 15 bp, Homo sapiens
ccagaaggcaattcc

SEQ ID NO: 215234 - DNA, 15 bp, Homo sapiens
gccagaaggcaattc

SEQ ID NO: 215235 - DNA, 15 bp, Homo sapiens
agccagaaggcaatt

SEQ ID NO: 215236 - DNA, 15 bp, Homo sapiens
gagccagaaggcaat

SEQ ID NO: 215237 - DNA, 15 bp, Homo sapiens
agagccagaaggcaa

SEQ ID NO: 215238 - DNA, 15 bp, Homo sapiens
gagagccagaaggca

SEQ ID NO: 215239 - DNA, 15 bp, Homo sapiens
agagagccagaaggc

SEQ ID NO: 215240 - DNA, 15 bp, Homo sapiens
cagagagccagaagg

SEQ ID NO: 215241 - DNA, 15 bp, Homo sapiens
gcagagagccagaag

SEQ ID NO: 215242 - DNA, 15 bp, Homo sapiens
agcagagagccagaa

SEQ ID NO: 215243 - DNA, 15 bp, Homo sapiens
gagcagagagccaga

SEQ ID NO: 215244 - DNA, 15 bp, Homo sapiens
agagcagagagccag

SEQ ID NO: 215245 - DNA, 15 bp, Homo sapiens
cagagcagagagcca

SEQ ID NO: 215246 - DNA, 15 bp, Homo sapiens
ccagagcagagagcc

SEQ ID NO: 215247 - DNA, 15 bp, Homo sapiens
gccagagcagagagc

SEQ ID NO: 215248 - DNA, 15 bp, Homo sapiens
ggccagagcagagag

SEQ ID NO: 215249 - DNA, 15 bp, Homo sapiens
gggccagagcagaga

SEQ ID NO: 215250 - DNA, 15 bp, Homo sapiens
tgggccagagcagag

SEQ ID NO: 215251 - DNA, 15 bp, Homo sapiens
ctgggccagagcaga

SEQ ID NO: 215252 - DNA, 15 bp, Homo sapiens
cctgggccagagcag

SEQ ID NO: 215253 - DNA, 15 bp, Homo sapiens
ccctgggccagagca

SEQ ID NO: 215254 - DNA, 15 bp, Homo sapiens
cccctgggccagagc

SEQ ID NO: 215255 - DNA, 15 bp, Homo sapiens
gcccctgggccagag

SEQ ID NO: 215256 - DNA, 15 bp, Homo sapiens
agcccctgggccaga

SEQ ID NO: 215257 - DNA, 15 bp, Homo sapiens
cagcccctgggccag

SEQ ID NO: 215258 - DNA, 15 bp, Homo sapiens
ccagcccctgggcca

SEQ ID NO: 215259 - DNA, 15 bp, Homo sapiens
accagcccctgggcc

SEQ ID NO: 215260 - DNA, 15 bp, Homo sapiens
gaccagcccctgggc

SEQ ID NO: 215261 - DNA, 15 bp, Homo sapiens
tgaccagcccctggg

SEQ ID NO: 215262 - DNA, 15 bp, Homo sapiens
atgaccagcccctgg

SEQ ID NO: 215263 - DNA, 15 bp, Homo sapiens
aatgaccagcccctg

SEQ ID NO: 215264 - DNA, 15 bp, Homo sapiens
aaatgaccagcccct

SEQ ID NO: 215265 - DNA, 15 bp, Homo sapiens
gaaatgaccagcccc

SEQ ID NO: 215266 - DNA, 15 bp, Homo sapiens
agaaatgaccagccc

SEQ ID NO: 215267 - DNA, 15 bp, Homo sapiens
gagaaatgaccagcc

SEQ ID NO: 215268 - DNA, 15 bp, Homo sapiens
tgagaaatgaccagc

SEQ ID NO: 215269 - DNA, 15 bp, Homo sapiens
ctgagaaatgaccag

SEQ ID NO: 215270 - DNA, 15 bp, Homo sapiens
cctgagaaatgacca

SEQ ID NO: 215271 - DNA, 15 bp, Homo sapiens
acctgagaaatgacc

SEQ ID NO: 215272 - DNA, 15 bp, Homo sapiens
gacctgagaaatgac

SEQ ID NO: 215273 - DNA, 15 bp, Homo sapiens
agacctgagaaatga

SEQ ID NO: 215274 - DNA, 15 bp, Homo sapiens
cagacctgagaaatg

SEQ ID NO: 215275 - DNA, 15 bp, Homo sapiens
ccagacctgagaaat

SEQ ID NO: 215276 - DNA, 15 bp, Homo sapiens
cccagacctgagaaa

SEQ ID NO: 215277 - DNA, 15 bp, Homo sapiens
gcccagacctgagaa

SEQ ID NO: 215278 - DNA, 15 bp, Homo sapiens
ggcccagacctgaga

SEQ ID NO: 215279 - DNA, 15 bp, Homo sapiens
aggcccagacctgag

SEQ ID NO: 215280 - DNA, 15 bp, Homo sapiens
aaggcccagacctga

SEQ ID NO: 215281 - DNA, 15 bp, Homo sapiens
gaaggcccagacctg

SEQ ID NO: 215282 - DNA, 15 bp, Homo sapiens
agaaggcccagacct

SEQ ID NO: 215283 - DNA, 15 bp, Homo sapiens
cagaaggcccagacc

SEQ ID NO: 215284 - DNA, 15 bp, Homo sapiens
acagaaggcccagac

SEQ ID NO: 215285 - DNA, 15 bp, Homo sapiens
cacagaaggcccaga

SEQ ID NO: 215286 - DNA, 15 bp, Homo sapiens
acacagaaggcccag

SEQ ID NO: 215287 - DNA, 15 bp, Homo sapiens
cacacagaaggccca

SEQ ID NO: 215288 - DNA, 15 bp, Homo sapiens
tcacacagaaggccc

SEQ ID NO: 215289 - DNA, 15 bp, Homo sapiens
ctcacacagaaggcc

SEQ ID NO: 215290 - DNA, 15 bp, Homo sapiens
actcacacagaaggc

SEQ ID NO: 215291 - DNA, 15 bp, Homo sapiens
gactcacacagaagg

SEQ ID NO: 215292 - DNA, 15 bp, Homo sapiens
tgactcacacagaag

SEQ ID NO: 215293 - DNA, 15 bp, Homo sapiens
ctgactcacacagaa

SEQ ID NO: 215294 - DNA, 15 bp, Homo sapiens
cctgactcacacaga

SEQ ID NO: 215295 - DNA, 15 bp, Homo sapiens
acctgactcacacag

SEQ ID NO: 215296 - DNA, 15 bp, Homo sapiens
aacctgactcacaca

SEQ ID NO: 215297 - DNA, 15 bp, Homo sapiens
aaacctgactcacac

SEQ ID NO: 215298 - DNA, 15 bp, Homo sapiens
caaacctgactcaca

SEQ ID NO: 215299 - DNA, 15 bp, Homo sapiens
tcaaacctgactcac

SEQ ID NO: 215300 - DNA, 15 bp, Homo sapiens
atcaaacctgactca

SEQ ID NO: 215301 - DNA, 15 bp, Homo sapiens
catcaaacctgactc

SEQ ID NO: 215302 - DNA, 15 bp, Homo sapiens
ccatcaaacctgact

SEQ ID NO: 215303 - DNA, 15 bp, Homo sapiens
tccatcaaacctgac

SEQ ID NO: 215304 - DNA, 15 bp, Homo sapiens
ttccatcaaacctga

SEQ ID NO: 215305 - DNA, 15 bp, Homo sapiens
cttccatcaaacctg

SEQ ID NO: 215306 - DNA, 15 bp, Homo sapiens
acttccatcaaacct

SEQ ID NO: 215307 - DNA, 15 bp, Homo sapiens
cacttccatcaaacc

SEQ ID NO: 215308 - DNA, 15 bp, Homo sapiens
acacttccatcaaac

SEQ ID NO: 215309 - DNA, 15 bp, Homo sapiens
gacacttccatcaaa

SEQ ID NO: 215310 - DNA, 15 bp, Homo sapiens
ggacacttccatcaa

SEQ ID NO: 215311 - DNA, 15 bp, Homo sapiens
aggacacttccatca

SEQ ID NO: 215312 - DNA, 15 bp, Homo sapiens
aaggacacttccatc

SEQ ID NO: 215313 - DNA, 15 bp, Homo sapiens
caaggacacttccat

SEQ ID NO: 215314 - DNA, 15 bp, Homo sapiens
tcaaggacacttcca

SEQ ID NO: 215315 - DNA, 15 bp, Homo sapiens
ttcaaggacacttcc

SEQ ID NO: 215316 - DNA, 15 bp, Homo sapiens
cttcaaggacacttc

SEQ ID NO: 215317 - DNA, 15 bp, Homo sapiens
ccttcaaggacactt

SEQ ID NO: 215318 - DNA, 15 bp, Homo sapiens
accttcaaggacact

SEQ ID NO: 215319 - DNA, 15 bp, Homo sapiens
caccttcaaggacac

SEQ ID NO: 215320 - DNA, 15 bp, Homo sapiens
tcaccttcaaggaca

SEQ ID NO: 215321 - DNA, 15 bp, Homo sapiens
atcaccttcaaggac

SEQ ID NO: 215322 - DNA, 15 bp, Homo sapiens
aatcaccttcaagga

SEQ ID NO: 215323 - DNA, 15 bp, Homo sapiens
gaatcaccttcaagg

SEQ ID NO: 215324 - DNA, 15 bp, Homo sapiens
tgaatcaccttcaag

SEQ ID NO: 215325 - DNA, 15 bp, Homo sapiens
atgaatcaccttcaa

SEQ ID NO: 215326 - DNA, 15 bp, Homo sapiens
catgaatcaccttca

SEQ ID NO: 215327 - DNA, 15 bp, Homo sapiens
ccatgaatcaccttc

SEQ ID NO: 215328 - DNA, 15 bp, Homo sapiens
cccatgaatcacctt

SEQ ID NO: 215329 - DNA, 15 bp, Homo sapiens
ccccatgaatcacct

SEQ ID NO: 215330 - DNA, 15 bp, Homo sapiens
tccccatgaatcacc

SEQ ID NO: 215331 - DNA, 15 bp, Homo sapiens
ttccccatgaatcac

SEQ ID NO: 215332 - DNA, 15 bp, Homo sapiens
cttccccatgaatca

SEQ ID NO: 215333 - DNA, 15 bp, Homo sapiens
tcttccccatgaatc

SEQ ID NO: 215334 - DNA, 15 bp, Homo sapiens
ctcttccccatgaat

SEQ ID NO: 215335 - DNA, 15 bp, Homo sapiens
tctcttccccatgaa

SEQ ID NO: 215336 - DNA, 15 bp, Homo sapiens
ctctcttccccatga

SEQ ID NO: 215337 - DNA, 15 bp, Homo sapiens
cctctcttccccatg

SEQ ID NO: 215338 - DNA, 15 bp, Homo sapiens
tcctctcttccccat

SEQ ID NO: 215339 - DNA, 15 bp, Homo sapiens
ctcctctcttcccca

SEQ ID NO: 215340 - DNA, 15 bp, Homo sapiens
cctcctctcttcccc

SEQ ID NO: 215341 - DNA, 15 bp, Homo sapiens
ccctcctctcttccc

SEQ ID NO: 215342 - DNA, 15 bp, Homo sapiens
cccctcctctcttcc

SEQ ID NO: 215343 - DNA, 15 bp, Homo sapiens
tcccctcctctcttc

SEQ ID NO: 215344 - DNA, 15 bp, Homo sapiens
ttcccctcctctctt

SEQ ID NO: 215345 - DNA, 15 bp, Homo sapiens
gttcccctcctctct

SEQ ID NO: 215346 - DNA, 15 bp, Homo sapiens
ggttcccctcctctc

SEQ ID NO: 215347 - DNA, 15 bp, Homo sapiens
cggttcccctcctct

SEQ ID NO: 215348 - DNA, 15 bp, Homo sapiens
ccggttcccctcctc

SEQ ID NO: 215349 - DNA, 15 bp, Homo sapiens
cccggttcccctcct

SEQ ID NO: 215350 - DNA, 15 bp, Homo sapiens
tcccggttcccctcc

SEQ ID NO: 215351 - DNA, 15 bp, Homo sapiens
ctcccggttcccctc

SEQ ID NO: 215352 - DNA, 15 bp, Homo sapiens
actcccggttcccct

SEQ ID NO: 215353 - DNA, 15 bp, Homo sapiens
tactcccggttcccc

SEQ ID NO: 215354 - DNA, 15 bp, Homo sapiens
ctactcccggttccc

SEQ ID NO: 215355 - DNA, 15 bp, Homo sapiens
actactcccggttcc

SEQ ID NO: 215356 - DNA, 15 bp, Homo sapiens
cactactcccggttc

SEQ ID NO: 215357 - DNA, 15 bp, Homo sapiens
ccactactcccggtt

SEQ ID NO: 215358 - DNA, 15 bp, Homo sapiens
gccactactcccggt

SEQ ID NO: 215359 - DNA, 15 bp, Homo sapiens
ggccactactcccgg

SEQ ID NO: 215360 - DNA, 15 bp, Homo sapiens
aggccactactcccg

SEQ ID NO: 215361 - DNA, 15 bp, Homo sapiens
gaggccactactccc

SEQ ID NO: 215362 - DNA, 15 bp, Homo sapiens
tgaggccactactcc

SEQ ID NO: 215363 - DNA, 15 bp, Homo sapiens
ttgaggccactactc

SEQ ID NO: 215364 - DNA, 15 bp, Homo sapiens
cttgaggccactact

SEQ ID NO: 215365 - DNA, 15 bp, Homo sapiens
gcttgaggccactac

SEQ ID NO: 215366 - DNA, 15 bp, Homo sapiens
ggcttgaggccacta

SEQ ID NO: 215367 - DNA, 15 bp, Homo sapiens
gggcttgaggccact

SEQ ID NO: 215368 - DNA, 15 bp, Homo sapiens
agggcttgaggccac

SEQ ID NO: 215369 - DNA, 15 bp, Homo sapiens
cagggcttgaggcca

SEQ ID NO: 215370 - DNA, 15 bp, Homo sapiens
gcagggcttgaggcc

SEQ ID NO: 215371 - DNA, 15 bp, Homo sapiens
ggcagggcttgaggc

SEQ ID NO: 215372 - DNA, 15 bp, Homo sapiens
aggcagggcttgagg

SEQ ID NO: 215373 - DNA, 15 bp, Homo sapiens
caggcagggcttgag

SEQ ID NO: 215374 - DNA, 15 bp, Homo sapiens
tcaggcagggcttga

SEQ ID NO: 215375 - DNA, 15 bp, Homo sapiens
ctcaggcagggcttg

SEQ ID NO: 215376 - DNA, 15 bp, Homo sapiens
actcaggcagggctt

SEQ ID NO: 215377 - DNA, 15 bp, Homo sapiens
aactcaggcagggct

SEQ ID NO: 215378 - DNA, 15 bp, Homo sapiens
gaactcaggcagggc

SEQ ID NO: 215379 - DNA, 15 bp, Homo sapiens
tgaactcaggcaggg

SEQ ID NO: 215380 - DNA, 15 bp, Homo sapiens
atgaactcaggcagg

SEQ ID NO: 215381 - DNA, 15 bp, Homo sapiens
gatgaactcaggcag

SEQ ID NO: 215382 - DNA, 15 bp, Homo sapiens
ggatgaactcaggca

SEQ ID NO: 215383 - DNA, 15 bp, Homo sapiens
aggatgaactcaggc

SEQ ID NO: 215384 - DNA, 15 bp, Homo sapiens
aaggatgaactcagg

SEQ ID NO: 215385 - DNA, 15 bp, Homo sapiens
caaggatgaactcag

SEQ ID NO: 215386 - DNA, 15 bp, Homo sapiens
ccaaggatgaactca

SEQ ID NO: 215387 - DNA, 15 bp, Homo sapiens
tccaaggatgaactc

SEQ ID NO: 215388 - DNA, 15 bp, Homo sapiens
atccaaggatgaact

SEQ ID NO: 215389 - DNA, 15 bp, Homo sapiens
gatccaaggatgaac

SEQ ID NO: 215390 - DNA, 15 bp, Homo sapiens
ggatccaaggatgaa

SEQ ID NO: 215391 - DNA, 15 bp, Homo sapiens
gggatccaaggatga

SEQ ID NO: 215392 - DNA, 15 bp, Homo sapiens
agggatccaaggatg

SEQ ID NO: 215393 - DNA, 15 bp, Homo sapiens
gagggatccaaggat

SEQ ID NO: 215394 - DNA, 15 bp, Homo sapiens
tgagggatccaagga

SEQ ID NO: 215395 - DNA, 15 bp, Homo sapiens
ctgagggatccaagg

SEQ ID NO: 215396 - DNA, 15 bp, Homo sapiens
gctgagggatccaag

SEQ ID NO: 215397 - DNA, 15 bp, Homo sapiens
ggctgagggatccaa

SEQ ID NO: 215398 - DNA, 15 bp, Homo sapiens
aggctgagggatcca

SEQ ID NO: 215399 - DNA, 15 bp, Homo sapiens
aaggctgagggatcc

SEQ ID NO: 215400 - DNA, 15 bp, Homo sapiens
aaaggctgagggatc

SEQ ID NO: 215401 - DNA, 15 bp, Homo sapiens
gaaaggctgagggat

SEQ ID NO: 215402 - DNA, 15 bp, Homo sapiens
agaaaggctgaggga

SEQ ID NO: 215403 - DNA, 15 bp, Homo sapiens
aagaaaggctgaggg

SEQ ID NO: 215404 - DNA, 15 bp, Homo sapiens
caagaaaggctgagg

SEQ ID NO: 215405 - DNA, 15 bp, Homo sapiens
tcaagaaaggctgag

SEQ ID NO: 215406 - DNA, 15 bp, Homo sapiens
gtcaagaaaggctga

SEQ ID NO: 215407 - DNA, 15 bp, Homo sapiens
tgtcaagaaaggctg

SEQ ID NO: 215408 - DNA, 15 bp, Homo sapiens
gtgtcaagaaaggct

SEQ ID NO: 215409 - DNA, 15 bp, Homo sapiens
agtgtcaagaaaggc

SEQ ID NO: 215410 - DNA, 15 bp, Homo sapiens
tagtgtcaagaaagg

SEQ ID NO: 215411 - DNA, 15 bp, Homo sapiens
ctagtgtcaagaaag

SEQ ID NO: 215412 - DNA, 15 bp, Homo sapiens
gctagtgtcaagaaa

SEQ ID NO: 215413 - DNA, 15 bp, Homo sapiens
agctagtgtcaagaa

SEQ ID NO: 215414 - DNA, 15 bp, Homo sapiens
gagctagtgtcaaga

SEQ ID NO: 215415 - DNA, 15 bp, Homo sapiens
tgagctagtgtcaag

SEQ ID NO: 215416 - DNA, 15 bp, Homo sapiens
atgagctagtgtcaa

SEQ ID NO: 215417 - DNA, 15 bp, Homo sapiens
gatgagctagtgtca

SEQ ID NO: 215418 - DNA, 15 bp, Homo sapiens
tgatgagctagtgtc

SEQ ID NO: 215419 - DNA, 15 bp, Homo sapiens
gtgatgagctagtgt

SEQ ID NO: 215420 - DNA, 15 bp, Homo sapiens
ggtgatgagctagtg

SEQ ID NO: 215421 - DNA, 15 bp, Homo sapiens
aggtgatgagctagt

SEQ ID NO: 215422 - DNA, 15 bp, Homo sapiens
aaggtgatgagctag

SEQ ID NO: 215423 - DNA, 15 bp, Homo sapiens
taaggtgatgagcta

SEQ ID NO: 215424 - DNA, 15 bp, Homo sapiens
ctaaggtgatgagct

SEQ ID NO: 215425 - DNA, 15 bp, Homo sapiens
gctaaggtgatgagc

SEQ ID NO: 215426 - DNA, 15 bp, Homo sapiens
tgctaaggtgatgag

SEQ ID NO: 215427 - DNA, 15 bp, Homo sapiens
ttgctaaggtgatga

SEQ ID NO: 215428 - DNA, 15 bp, Homo sapiens
attgctaaggtgatg

SEQ ID NO: 215429 - DNA, 15 bp, Homo sapiens
cattgctaaggtgat

SEQ ID NO: 215430 - DNA, 15 bp, Homo sapiens
tcattgctaaggtga

SEQ ID NO: 215431 - DNA, 15 bp, Homo sapiens
ctcattgctaaggtg

SEQ ID NO: 215432 - DNA, 15 bp, Homo sapiens
cctcattgctaaggt

SEQ ID NO: 215433 - DNA, 15 bp, Homo sapiens
tcctcattgctaagg

SEQ ID NO: 215434 - DNA, 15 bp, Homo sapiens
gtcctcattgctaag

SEQ ID NO: 215435 - DNA, 15 bp, Homo sapiens
tgtcctcattgctaa

SEQ ID NO: 215436 - DNA, 15 bp, Homo sapiens
ctgtcctcattgcta

SEQ ID NO: 215437 - DNA, 15 bp, Homo sapiens
cctgtcctcattgct

SEQ ID NO: 215438 - DNA, 15 bp, Homo sapiens
acctgtcctcattgc

SEQ ID NO: 215439 - DNA, 15 bp, Homo sapiens
cacctgtcctcattg

SEQ ID NO: 215440 - DNA, 15 bp, Homo sapiens
gcacctgtcctcatt

SEQ ID NO: 215441 - DNA, 15 bp, Homo sapiens
tgcacctgtcctcat

SEQ ID NO: 215442 - DNA, 15 bp, Homo sapiens
ctgcacctgtcctca

SEQ ID NO: 215443 - DNA, 15 bp, Homo sapiens
tctgcacctgtcctc

SEQ ID NO: 215444 - DNA, 15 bp, Homo sapiens
atctgcacctgtcct

SEQ ID NO: 215445 - DNA, 15 bp, Homo sapiens
aatctgcacctgtcc

SEQ ID NO: 215446 - DNA, 15 bp, Homo sapiens
gaatctgcacctgtc

SEQ ID NO: 215447 - DNA, 15 bp, Homo sapiens
tgaatctgcacctgt

SEQ ID NO: 215448 - DNA, 15 bp, Homo sapiens
ctgaatctgcacctg

SEQ ID NO: 215449 - DNA, 15 bp, Homo sapiens
cctgaatctgcacct

SEQ ID NO: 215450 - DNA, 15 bp, Homo sapiens
acctgaatctgcacc

SEQ ID NO: 215451 - DNA, 15 bp, Homo sapiens
cacctgaatctgcac

SEQ ID NO: 215452 - DNA, 15 bp, Homo sapiens
tcacctgaatctgca

SEQ ID NO: 215453 - DNA, 15 bp, Homo sapiens
ttcacctgaatctgc

SEQ ID NO: 215454 - DNA, 15 bp, Homo sapiens
cttcacctgaatctg

SEQ ID NO: 215455 - DNA, 15 bp, Homo sapiens
gcttcacctgaatct

SEQ ID NO: 215456 - DNA, 15 bp, Homo sapiens
agcttcacctgaatc

SEQ ID NO: 215457 - DNA, 15 bp, Homo sapiens
gagcttcacctgaat

SEQ ID NO: 215458 - DNA, 15 bp, Homo sapiens
tgagcttcacctgaa

SEQ ID NO: 215459 - DNA, 15 bp, Homo sapiens
gtgagcttcacctga

SEQ ID NO: 215460 - DNA, 15 bp, Homo sapiens
ggtgagcttcacctg

SEQ ID NO: 215461 - DNA, 15 bp, Homo sapiens
aggtgagcttcacct

SEQ ID NO: 215462 - DNA, 15 bp, Homo sapiens
taggtgagcttcacc

SEQ ID NO: 215463 - DNA, 15 bp, Homo sapiens
gtaggtgagcttcac

SEQ ID NO: 215464 - DNA, 15 bp, Homo sapiens
tgtaggtgagcttca

SEQ ID NO: 215465 - DNA, 15 bp, Homo sapiens
atgtaggtgagcttc

SEQ ID NO: 215466 - DNA, 15 bp, Homo sapiens
aatgtaggtgagctt

SEQ ID NO: 215467 - DNA, 15 bp, Homo sapiens
aaatgtaggtgagct

SEQ ID NO: 215468 - DNA, 15 bp, Homo sapiens
gaaatgtaggtgagc

SEQ ID NO: 215469 - DNA, 15 bp, Homo sapiens
tgaaatgtaggtgag

SEQ ID NO: 215470 - DNA, 15 bp, Homo sapiens
atgaaatgtaggtga

SEQ ID NO: 215471 - DNA, 15 bp, Homo sapiens
tatgaaatgtaggtg

SEQ ID NO: 215472 - DNA, 15 bp, Homo sapiens
ctatgaaatgtaggt

SEQ ID NO: 215473 - DNA, 15 bp, Homo sapiens
cctatgaaatgtagg

SEQ ID NO: 215474 - DNA, 15 bp, Homo sapiens
tcctatgaaatgtag

SEQ ID NO: 215475 - DNA, 15 bp, Homo sapiens
ctcctatgaaatgta

SEQ ID NO: 215476 - DNA, 15 bp, Homo sapiens
gctcctatgaaatgt

SEQ ID NO: 215477 - DNA, 15 bp, Homo sapiens
ggctcctatgaaatg

SEQ ID NO: 215478 - DNA, 15 bp, Homo sapiens
aggctcctatgaaat

SEQ ID NO: 215479 - DNA, 15 bp, Homo sapiens
taggctcctatgaaa

SEQ ID NO: 215480 - DNA, 15 bp, Homo sapiens
ataggctcctatgaa

SEQ ID NO: 215481 - DNA, 15 bp, Homo sapiens
gataggctcctatga

SEQ ID NO: 215482 - DNA, 15 bp, Homo sapiens
tgataggctcctatg

SEQ ID NO: 215483 - DNA, 15 bp, Homo sapiens
ttgataggctcctat

SEQ ID NO: 215484 - DNA, 15 bp, Homo sapiens
tttgataggctccta

SEQ ID NO: 215485 - DNA, 15 bp, Homo sapiens
atttgataggctcct

SEQ ID NO: 215486 - DNA, 15 bp, Homo sapiens
catttgataggctcc

SEQ ID NO: 215487 - DNA, 15 bp, Homo sapiens
acatttgataggctc

SEQ ID NO: 215488 - DNA, 15 bp, Homo sapiens
cacatttgataggct

SEQ ID NO: 215489 - DNA, 15 bp, Homo sapiens
tcacatttgataggc

SEQ ID NO: 215490 - DNA, 15 bp, Homo sapiens
ctcacatttgatagg

SEQ ID NO: 215491 - DNA, 15 bp, Homo sapiens
actcacatttgatag

SEQ ID NO: 215492 - DNA, 15 bp, Homo sapiens
cactcacatttgata

SEQ ID NO: 215493 - DNA, 15 bp, Homo sapiens
ccactcacatttgat

SEQ ID NO: 215494 - DNA, 15 bp, Homo sapiens
tccactcacatttga

SEQ ID NO: 215495 - DNA, 15 bp, Homo sapiens
gtccactcacatttg

SEQ ID NO: 215496 - DNA, 15 bp, Homo sapiens
agtccactcacattt

SEQ ID NO: 215497 - DNA, 15 bp, Homo sapiens
gagtccactcacatt

SEQ ID NO: 215498 - DNA, 15 bp, Homo sapiens
cgagtccactcacat

SEQ ID NO: 215499 - DNA, 15 bp, Homo sapiens
ccgagtccactcaca

SEQ ID NO: 215500 - DNA, 15 bp, Homo sapiens
tccgagtccactcac

SEQ ID NO: 215501 - DNA, 15 bp, Homo sapiens
ctccgagtccactca

SEQ ID NO: 215502 - DNA, 15 bp, Homo sapiens
tctccgagtccactc

SEQ ID NO: 215503 - DNA, 15 bp, Homo sapiens
ttctccgagtccact

SEQ ID NO: 215504 - DNA, 15 bp, Homo sapiens
cttctccgagtccac

SEQ ID NO: 215505 - DNA, 15 bp, Homo sapiens
ccttctccgagtcca

SEQ ID NO: 215506 - DNA, 15 bp, Homo sapiens
tccttctccgagtcc

SEQ ID NO: 215507 - DNA, 15 bp, Homo sapiens
ttccttctccgagtc

SEQ ID NO: 215508 - DNA, 15 bp, Homo sapiens
tttccttctccgagt

SEQ ID NO: 215509 - DNA, 15 bp, Homo sapiens
atttccttctccgag

SEQ ID NO: 215510 - DNA, 15 bp, Homo sapiens
gatttccttctccga

SEQ ID NO: 215511 - DNA, 15 bp, Homo sapiens
tgatttccttctccg

SEQ ID NO: 215512 - DNA, 15 bp, Homo sapiens
gtgatttccttctcc

SEQ ID NO: 215513 - DNA, 15 bp, Homo sapiens
agtgatttccttctc

SEQ ID NO: 215514 - DNA, 15 bp, Homo sapiens
cagtgatttccttct

SEQ ID NO: 215515 - DNA, 15 bp, Homo sapiens
tcagtgatttccttc

SEQ ID NO: 215516 - DNA, 15 bp, Homo sapiens
ctcagtgatttcctt

SEQ ID NO: 215517 - DNA, 15 bp, Homo sapiens
gctcagtgatttcct

SEQ ID NO: 215518 - DNA, 15 bp, Homo sapiens
ggctcagtgatttcc

SEQ ID NO: 215519 - DNA, 15 bp, Homo sapiens
aggctcagtgatttc

SEQ ID NO: 215520 - DNA, 15 bp, Homo sapiens
gaggctcagtgattt

SEQ ID NO: 215521 - DNA, 15 bp, Homo sapiens
tgaggctcagtgatt

SEQ ID NO: 215522 - DNA, 15 bp, Homo sapiens
gtgaggctcagtgat

SEQ ID NO: 215523 - DNA, 15 bp, Homo sapiens
tgtgaggctcagtga

SEQ ID NO: 215524 - DNA, 15 bp, Homo sapiens
atgtgaggctcagtg

SEQ ID NO: 215525 - DNA, 15 bp, Homo sapiens
catgtgaggctcagt

SEQ ID NO: 215526 - DNA, 15 bp, Homo sapiens
ccatgtgaggctcag

SEQ ID NO: 215527 - DNA, 15 bp, Homo sapiens
gccatgtgaggctca

SEQ ID NO: 215528 - DNA, 15 bp, Homo sapiens
tgccatgtgaggctc

SEQ ID NO: 215529 - DNA, 15 bp, Homo sapiens
ttgccatgtgaggct

SEQ ID NO: 215530 - DNA, 15 bp, Homo sapiens
tttgccatgtgaggc

SEQ ID NO: 215531 - DNA, 15 bp, Homo sapiens
ctttgccatgtgagg

SEQ ID NO: 215532 - DNA, 15 bp, Homo sapiens
cctttgccatgtgag

SEQ ID NO: 215533 - DNA, 15 bp, Homo sapiens
tcctttgccatgtga

SEQ ID NO: 215534 - DNA, 15 bp, Homo sapiens
ctcctttgccatgtg

SEQ ID NO: 215535 - DNA, 15 bp, Homo sapiens
gctcctttgccatgt

SEQ ID NO: 215536 - DNA, 15 bp, Homo sapiens
tgctcctttgccatg

SEQ ID NO: 215537 - DNA, 15 bp, Homo sapiens
gtgctcctttgccat

SEQ ID NO: 215538 - DNA, 15 bp, Homo sapiens
agtgctcctttgcca

SEQ ID NO: 215539 - DNA, 15 bp, Homo sapiens
gagtgctcctttgcc

SEQ ID NO: 215540 - DNA, 15 bp, Homo sapiens
tgagtgctcctttgc

SEQ ID NO: 215541 - DNA, 15 bp, Homo sapiens
ttgagtgctcctttg

SEQ ID NO: 215542 - DNA, 15 bp, Homo sapiens
tttgagtgctccttt

SEQ ID NO: 215543 - DNA, 15 bp, Homo sapiens
ctttgagtgctcctt

SEQ ID NO: 215544 - DNA, 15 bp, Homo sapiens
actttgagtgctcct

SEQ ID NO: 215545 - DNA, 15 bp, Homo sapiens
tactttgagtgctcc

SEQ ID NO: 215546 - DNA, 15 bp, Homo sapiens
ctactttgagtgctc

SEQ ID NO: 215547 - DNA, 15 bp, Homo sapiens
cctactttgagtgct

SEQ ID NO: 215548 - DNA, 15 bp, Homo sapiens
ccctactttgagtgc

SEQ ID NO: 215549 - DNA, 15 bp, Homo sapiens
tccctactttgagtg

SEQ ID NO: 215550 - DNA, 15 bp, Homo sapiens
ttccctactttgagt

SEQ ID NO: 215551 - DNA, 15 bp, Homo sapiens
attccctactttgag

SEQ ID NO: 215552 - DNA, 15 bp, Homo sapiens
aattccctactttga

SEQ ID NO: 215553 - DNA, 15 bp, Homo sapiens
gaattccctactttg

SEQ ID NO: 215554 - DNA, 15 bp, Homo sapiens
agaattccctacttt

SEQ ID NO: 215555 - DNA, 15 bp, Homo sapiens
cagaattccctactt

SEQ ID NO: 215556 - DNA, 15 bp, Homo sapiens
tcagaattccctact

SEQ ID NO: 215557 - DNA, 15 bp, Homo sapiens
ctcagaattccctac

SEQ ID NO: 215558 - DNA, 15 bp, Homo sapiens
cctcagaattcccta

SEQ ID NO: 215559 - DNA, 15 bp, Homo sapiens
tcctcagaattccct

SEQ ID NO: 215560 - DNA, 15 bp, Homo sapiens
ttcctcagaattccc

SEQ ID NO: 215561 - DNA, 15 bp, Homo sapiens
cttcctcagaattcc

SEQ ID NO: 215562 - DNA, 15 bp, Homo sapiens
gcttcctcagaattc

SEQ ID NO: 215563 - DNA, 15 bp, Homo sapiens
ggcttcctcagaatt

SEQ ID NO: 215564 - DNA, 15 bp, Homo sapiens
aggcttcctcagaat

SEQ ID NO: 215565 - DNA, 15 bp, Homo sapiens
taggcttcctcagaa

SEQ ID NO: 215566 - DNA, 15 bp, Homo sapiens
ctaggcttcctcaga

SEQ ID NO: 215567 - DNA, 15 bp, Homo sapiens
tctaggcttcctcag

SEQ ID NO: 215568 - DNA, 15 bp, Homo sapiens
ttctaggcttcctca

SEQ ID NO: 215569 - DNA, 15 bp, Homo sapiens
attctaggcttcctc

SEQ ID NO: 215570 - DNA, 15 bp, Homo sapiens
cattctaggcttcct

SEQ ID NO: 215571 - DNA, 15 bp, Homo sapiens
ccattctaggcttcc

SEQ ID NO: 215572 - DNA, 15 bp, Homo sapiens
cccattctaggcttc

SEQ ID NO: 215573 - DNA, 15 bp, Homo sapiens
gcccattctaggctt

SEQ ID NO: 215574 - DNA, 15 bp, Homo sapiens
agcccattctaggct

SEQ ID NO: 215575 - DNA, 15 bp, Homo sapiens
cagcccattctaggc

SEQ ID NO: 215576 - DNA, 15 bp, Homo sapiens
ccagcccattctagg

SEQ ID NO: 215577 - DNA, 15 bp, Homo sapiens
cccagcccattctag

SEQ ID NO: 215578 - DNA, 15 bp, Homo sapiens
gcccagcccattcta

SEQ ID NO: 215579 - DNA, 15 bp, Homo sapiens
tgcccagcccattct

SEQ ID NO: 215580 - DNA, 15 bp, Homo sapiens
ctgcccagcccattc

SEQ ID NO: 215581 - DNA, 15 bp, Homo sapiens
cctgcccagcccatt

SEQ ID NO: 215582 - DNA, 15 bp, Homo sapiens
ccctgcccagcccat

SEQ ID NO: 215583 - DNA, 15 bp, Homo sapiens
tccctgcccagccca

SEQ ID NO: 215584 - DNA, 15 bp, Homo sapiens
ctccctgcccagccc

SEQ ID NO: 215585 - DNA, 15 bp, Homo sapiens
cctccctgcccagcc

SEQ ID NO: 215586 - DNA, 15 bp, Homo sapiens
ccctccctgcccagc

SEQ ID NO: 215587 - DNA, 15 bp, Homo sapiens
gccctccctgcccag

SEQ ID NO: 215588 - DNA, 15 bp, Homo sapiens
tgccctccctgccca

SEQ ID NO: 215589 - DNA, 15 bp, Homo sapiens
ctgccctccctgccc

SEQ ID NO: 215590 - DNA, 15 bp, Homo sapiens
cctgccctccctgcc

SEQ ID NO: 215591 - DNA, 15 bp, Homo sapiens
ccctgccctccctgc

SEQ ID NO: 215592 - DNA, 15 bp, Homo sapiens
accctgccctccctg

SEQ ID NO: 215593 - DNA, 15 bp, Homo sapiens
taccctgccctccct

SEQ ID NO: 215594 - DNA, 15 bp, Homo sapiens
gtaccctgccctccc

SEQ ID NO: 215595 - DNA, 15 bp, Homo sapiens
tgtaccctgccctcc

SEQ ID NO: 215596 - DNA, 15 bp, Homo sapiens
ctgtaccctgccctc

SEQ ID NO: 215597 - DNA, 15 bp, Homo sapiens
actgtaccctgccct

SEQ ID NO: 215598 - DNA, 15 bp, Homo sapiens
gactgtaccctgccc

SEQ ID NO: 215599 - DNA, 15 bp, Homo sapiens
ggactgtaccctgcc

SEQ ID NO: 215600 - DNA, 15 bp, Homo sapiens
gggactgtaccctgc

SEQ ID NO: 215601 - DNA, 15 bp, Homo sapiens
tgggactgtaccctg

SEQ ID NO: 215602 - DNA, 15 bp, Homo sapiens
gtgggactgtaccct

SEQ ID NO: 215603 - DNA, 15 bp, Homo sapiens
agtgggactgtaccc

SEQ ID NO: 215604 - DNA, 15 bp, Homo sapiens
gagtgggactgtacc

SEQ ID NO: 215605 - DNA, 15 bp, Homo sapiens
tgagtgggactgtac

SEQ ID NO: 215606 - DNA, 15 bp, Homo sapiens
atgagtgggactgta

SEQ ID NO: 215607 - DNA, 15 bp, Homo sapiens
gatgagtgggactgt

SEQ ID NO: 215608 - DNA, 15 bp, Homo sapiens
tgatgagtgggactg

SEQ ID NO: 215609 - DNA, 15 bp, Homo sapiens
atgatgagtgggact

SEQ ID NO: 215610 - DNA, 15 bp, Homo sapiens
gatgatgagtgggac

SEQ ID NO: 215611 - DNA, 15 bp, Homo sapiens
cgatgatgagtggga

SEQ ID NO: 215612 - DNA, 15 bp, Homo sapiens
acgatgatgagtggg

SEQ ID NO: 215613 - DNA, 15 bp, Homo sapiens
cacgatgatgagtgg

SEQ ID NO: 215614 - DNA, 15 bp, Homo sapiens
tcacgatgatgagtg

SEQ ID NO: 215615 - DNA, 15 bp, Homo sapiens
gtcacgatgatgagt

SEQ ID NO: 215616 - DNA, 15 bp, Homo sapiens
ggtcacgatgatgag

SEQ ID NO: 215617 - DNA, 15 bp, Homo sapiens
tggtcacgatgatga

SEQ ID NO: 215618 - DNA, 15 bp, Homo sapiens
ctggtcacgatgatg

SEQ ID NO: 215619 - DNA, 15 bp, Homo sapiens
cctggtcacgatgat

SEQ ID NO: 215620 - DNA, 15 bp, Homo sapiens
gcctggtcacgatga

SEQ ID NO: 215621 - DNA, 15 bp, Homo sapiens
agcctggtcacgatg

SEQ ID NO: 215622 - DNA, 15 bp, Homo sapiens
cagcctggtcacgat

SEQ ID NO: 215623 - DNA, 15 bp, Homo sapiens
ccagcctggtcacga

SEQ ID NO: 215624 - DNA, 15 bp, Homo sapiens
tccagcctggtcacg

SEQ ID NO: 215625 - DNA, 15 bp, Homo sapiens
gtccagcctggtcac

SEQ ID NO: 215626 - DNA, 15 bp, Homo sapiens
ggtccagcctggtca

SEQ ID NO: 215627 - DNA, 15 bp, Homo sapiens
aggtccagcctggtc

SEQ ID NO: 215628 - DNA, 15 bp, Homo sapiens
caggtccagcctggt

SEQ ID NO: 215629 - DNA, 15 bp, Homo sapiens
acaggtccagcctgg

SEQ ID NO: 215630 - DNA, 15 bp, Homo sapiens
cacaggtccagcctg

SEQ ID NO: 215631 - DNA, 15 bp, Homo sapiens
tcacaggtccagcct

SEQ ID NO: 215632 - DNA, 15 bp, Homo sapiens
atcacaggtccagcc

SEQ ID NO: 215633 - DNA, 15 bp, Homo sapiens
aatcacaggtccagc

SEQ ID NO: 215634 - DNA, 15 bp, Homo sapiens
caatcacaggtccag

SEQ ID NO: 215635 - DNA, 15 bp, Homo sapiens
gcaatcacaggtcca

SEQ ID NO: 215636 - DNA, 15 bp, Homo sapiens
tgcaatcacaggtcc

SEQ ID NO: 215637 - DNA, 15 bp, Homo sapiens
ctgcaatcacaggtc

SEQ ID NO: 215638 - DNA, 15 bp, Homo sapiens
actgcaatcacaggt

SEQ ID NO: 215639 - DNA, 15 bp, Homo sapiens
cactgcaatcacagg

SEQ ID NO: 215640 - DNA, 15 bp, Homo sapiens
tcactgcaatcacag

SEQ ID NO: 215641 - DNA, 15 bp, Homo sapiens
ttcactgcaatcaca

SEQ ID NO: 215642 - DNA, 15 bp, Homo sapiens
attcactgcaatcac

SEQ ID NO: 215643 - DNA, 15 bp, Homo sapiens
cattcactgcaatca

SEQ ID NO: 215644 - DNA, 15 bp, Homo sapiens
tcattcactgcaatc

SEQ ID NO: 215645 - DNA, 15 bp, Homo sapiens
ctcattcactgcaat

SEQ ID NO: 215646 - DNA, 15 bp, Homo sapiens
tctcattcactgcaa

SEQ ID NO: 215647 - DNA, 15 bp, Homo sapiens
gtctcattcactgca

SEQ ID NO: 215648 - DNA, 15 bp, Homo sapiens
agtctcattcactgc

SEQ ID NO: 215649 - DNA, 15 bp, Homo sapiens
aagtctcattcactg

SEQ ID NO: 215650 - DNA, 15 bp, Homo sapiens
caagtctcattcact

SEQ ID NO: 215651 - DNA, 15 bp, Homo sapiens
ccaagtctcattcac

SEQ ID NO: 215652 - DNA, 15 bp, Homo sapiens
gccaagtctcattca

SEQ ID NO: 215653 - DNA, 15 bp, Homo sapiens
ggccaagtctcattc

SEQ ID NO: 215654 - DNA, 15 bp, Homo sapiens
tggccaagtctcatt

SEQ ID NO: 215655 - DNA, 15 bp, Homo sapiens
ctggccaagtctcat

SEQ ID NO: 215656 - DNA, 15 bp, Homo sapiens
cctggccaagtctca

SEQ ID NO: 215657 - DNA, 15 bp, Homo sapiens
tcctggccaagtctc

SEQ ID NO: 215658 - DNA, 15 bp, Homo sapiens
ctcctggccaagtct

SEQ ID NO: 215659 - DNA, 15 bp, Homo sapiens
tctcctggccaagtc

SEQ ID NO: 215660 - DNA, 15 bp, Homo sapiens
ctctcctggccaagt

SEQ ID NO: 215661 - DNA, 15 bp, Homo sapiens
cctctcctggccaag

SEQ ID NO: 215662 - DNA, 15 bp, Homo sapiens
gcctctcctggccaa

SEQ ID NO: 215663 - DNA, 15 bp, Homo sapiens
agcctctcctggcca

SEQ ID NO: 215664 - DNA, 15 bp, Homo sapiens
aagcctctcctggcc

SEQ ID NO: 215665 - DNA, 15 bp, Homo sapiens
caagcctctcctggc

SEQ ID NO: 215666 - DNA, 15 bp, Homo sapiens
ccaagcctctcctgg

SEQ ID NO: 215667 - DNA, 15 bp, Homo sapiens
cccaagcctctcctg

SEQ ID NO: 215668 - DNA, 15 bp, Homo sapiens
acccaagcctctcct

SEQ ID NO: 215669 - DNA, 15 bp, Homo sapiens
gacccaagcctctcc

SEQ ID NO: 215670 - DNA, 15 bp, Homo sapiens
agacccaagcctctc

SEQ ID NO: 215671 - DNA, 15 bp, Homo sapiens
tagacccaagcctct

SEQ ID NO: 215672 - DNA, 15 bp, Homo sapiens
ctagacccaagcctc

SEQ ID NO: 215673 - DNA, 15 bp, Homo sapiens
cctagacccaagcct

SEQ ID NO: 215674 - DNA, 15 bp, Homo sapiens
tcctagacccaagcc

SEQ ID NO: 215675 - DNA, 15 bp, Homo sapiens
ctcctagacccaagc

SEQ ID NO: 215676 - DNA, 15 bp, Homo sapiens
actcctagacccaag

SEQ ID NO: 215677 - DNA, 15 bp, Homo sapiens
gactcctagacccaa

SEQ ID NO: 215678 - DNA, 15 bp, Homo sapiens
ggactcctagaccca

SEQ ID NO: 215679 - DNA, 15 bp, Homo sapiens
aggactcctagaccc

SEQ ID NO: 215680 - DNA, 15 bp, Homo sapiens
caggactcctagacc

SEQ ID NO: 215681 - DNA, 15 bp, Homo sapiens
ccaggactcctagac

SEQ ID NO: 215682 - DNA, 15 bp, Homo sapiens
cccaggactcctaga

SEQ ID NO: 215683 - DNA, 15 bp, Homo sapiens
acccaggactcctag

SEQ ID NO: 215684 - DNA, 15 bp, Homo sapiens
aacccaggactccta

SEQ ID NO: 215685 - DNA, 15 bp, Homo sapiens
gaacccaggactcct

SEQ ID NO: 215686 - DNA, 15 bp, Homo sapiens
cgaacccaggactcc

SEQ ID NO: 215687 - DNA, 15 bp, Homo sapiens
tcgaacccaggactc

SEQ ID NO: 215688 - DNA, 15 bp, Homo sapiens
ctcgaacccaggact

SEQ ID NO: 215689 - DNA, 15 bp, Homo sapiens
actcgaacccaggac

SEQ ID NO: 215690 - DNA, 15 bp, Homo sapiens
aactcgaacccagga

SEQ ID NO: 215691 - DNA, 15 bp, Homo sapiens
gaactcgaacccagg

SEQ ID NO: 215692 - DNA, 15 bp, Homo sapiens
ggaactcgaacccag

SEQ ID NO: 215693 - DNA, 15 bp, Homo sapiens
tggaactcgaaccca

SEQ ID NO: 215694 - DNA, 15 bp, Homo sapiens
atggaactcgaaccc

SEQ ID NO: 215695 - DNA, 15 bp, Homo sapiens
aatggaactcgaacc

SEQ ID NO: 215696 - DNA, 15 bp, Homo sapiens
taatggaactcgaac

SEQ ID NO: 215697 - DNA, 15 bp, Homo sapiens
ttaatggaactcgaa

SEQ ID NO: 215698 - DNA, 15 bp, Homo sapiens
attaatggaactcga

SEQ ID NO: 215699 - DNA, 15 bp, Homo sapiens
aattaatggaactcg

SEQ ID NO: 215700 - DNA, 15 bp, Homo sapiens
taattaatggaactc

SEQ ID NO: 215701 - DNA, 15 bp, Homo sapiens
ataattaatggaact

SEQ ID NO: 215702 - DNA, 15 bp, Homo sapiens
aataattaatggaac

SEQ ID NO: 215703 - DNA, 15 bp, Homo sapiens
aaataattaatggaa

SEQ ID NO: 215704 - DNA, 15 bp, Homo sapiens
caaataattaatgga

SEQ ID NO: 215705 - DNA, 15 bp, Homo sapiens
tcaaataattaatgg

SEQ ID NO: 215706 - DNA, 15 bp, Homo sapiens
gtcaaataattaatg

SEQ ID NO: 215707 - DNA, 15 bp, Homo sapiens
ggtcaaataattaat

SEQ ID NO: 215708 - DNA, 15 bp, Homo sapiens
gggtcaaataattaa

SEQ ID NO: 215709 - DNA, 15 bp, Homo sapiens
agggtcaaataatta

SEQ ID NO: 215710 - DNA, 15 bp, Homo sapiens
cagggtcaaataatt

SEQ ID NO: 215711 - DNA, 15 bp, Homo sapiens
tcagggtcaaataat

SEQ ID NO: 215712 - DNA, 15 bp, Homo sapiens
ctcagggtcaaataa

SEQ ID NO: 215713 - DNA, 15 bp, Homo sapiens
gctcagggtcaaata

SEQ ID NO: 215714 - DNA, 15 bp, Homo sapiens
agctcagggtcaaat

SEQ ID NO: 215715 - DNA, 15 bp, Homo sapiens
cagctcagggtcaaa

SEQ ID NO: 215716 - DNA, 15 bp, Homo sapiens
ccagctcagggtcaa

SEQ ID NO: 215717 - DNA, 15 bp, Homo sapiens
accagctcagggtca

SEQ ID NO: 215718 - DNA, 15 bp, Homo sapiens
caccagctcagggtc

SEQ ID NO: 215719 - DNA, 15 bp, Homo sapiens
tcaccagctcagggt

SEQ ID NO: 215720 - DNA, 15 bp, Homo sapiens
gtcaccagctcaggg

SEQ ID NO: 215721 - DNA, 15 bp, Homo sapiens
agtcaccagctcagg

SEQ ID NO: 215722 - DNA, 15 bp, Homo sapiens
aagtcaccagctcag

SEQ ID NO: 215723 - DNA, 15 bp, Homo sapiens
aaagtcaccagctca

SEQ ID NO: 215724 - DNA, 15 bp, Homo sapiens
aaaagtcaccagctc

SEQ ID NO: 215725 - DNA, 15 bp, Homo sapiens
aaaaagtcaccagct

SEQ ID NO: 215726 - DNA, 15 bp, Homo sapiens
gaaaaagtcaccagc

SEQ ID NO: 215727 - DNA, 15 bp, Homo sapiens
agaaaaagtcaccag

SEQ ID NO: 215728 - DNA, 15 bp, Homo sapiens
tagaaaaagtcacca

SEQ ID NO: 215729 - DNA, 15 bp, Homo sapiens
atagaaaaagtcacc

SEQ ID NO: 215730 - DNA, 15 bp, Homo sapiens
aatagaaaaagtcac

SEQ ID NO: 215731 - DNA, 15 bp, Homo sapiens
aaatagaaaaagtca

SEQ ID NO: 215732 - DNA, 15 bp, Homo sapiens
aaaatagaaaaagtc

SEQ ID NO: 215733 - DNA, 15 bp, Homo sapiens
taaaatagaaaaagt

SEQ ID NO: 215734 - DNA, 15 bp, Homo sapiens
ctaaaatagaaaaag

SEQ ID NO: 215735 - DNA, 15 bp, Homo sapiens
tctaaaatagaaaaa

SEQ ID NO: 215736 - DNA, 15 bp, Homo sapiens
ttctaaaatagaaaa

SEQ ID NO: 215737 - DNA, 15 bp, Homo sapiens
cttctaaaatagaaa

SEQ ID NO: 215738 - DNA, 15 bp, Homo sapiens
gcttctaaaatagaa

SEQ ID NO: 215739 - DNA, 15 bp, Homo sapiens
ggcttctaaaataga

SEQ ID NO: 215740 - DNA, 15 bp, Homo sapiens
aggcttctaaaatag

SEQ ID NO: 215741 - DNA, 15 bp, Homo sapiens
gaggcttctaaaata

SEQ ID NO: 215742 - DNA, 15 bp, Homo sapiens
tgaggcttctaaaat

SEQ ID NO: 215743 - DNA, 15 bp, Homo sapiens
ctgaggcttctaaaa

SEQ ID NO: 215744 - DNA, 15 bp, Homo sapiens
gctgaggcttctaaa

SEQ ID NO: 215745 - DNA, 15 bp, Homo sapiens
ggctgaggcttctaa

SEQ ID NO: 215746 - DNA, 15 bp, Homo sapiens
aggctgaggcttcta

SEQ ID NO: 215747 - DNA, 15 bp, Homo sapiens
gaggctgaggcttct

SEQ ID NO: 215748 - DNA, 15 bp, Homo sapiens
agaggctgaggcttc

SEQ ID NO: 215749 - DNA, 15 bp, Homo sapiens
aagaggctgaggctt

SEQ ID NO: 215750 - DNA, 15 bp, Homo sapiens
gaagaggctgaggct

SEQ ID NO: 215751 - DNA, 15 bp, Homo sapiens
tgaagaggctgaggc

SEQ ID NO: 215752 - DNA, 15 bp, Homo sapiens
gtgaagaggctgagg

SEQ ID NO: 215753 - DNA, 15 bp, Homo sapiens
tgtgaagaggctgag

SEQ ID NO: 215754 - DNA, 15 bp, Homo sapiens
atgtgaagaggctga

SEQ ID NO: 215755 - DNA, 15 bp, Homo sapiens
aatgtgaagaggctg

SEQ ID NO: 215756 - DNA, 15 bp, Homo sapiens
aaatgtgaagaggct

SEQ ID NO: 215757 - DNA, 15 bp, Homo sapiens
aaaatgtgaagaggc

SEQ ID NO: 215758 - DNA, 15 bp, Homo sapiens
aaaaatgtgaagagg

SEQ ID NO: 215759 - DNA, 15 bp, Homo sapiens
caaaaatgtgaagag

SEQ ID NO: 215760 - DNA, 15 bp, Homo sapiens
tcaaaaatgtgaaga

SEQ ID NO: 215761 - DNA, 15 bp, Homo sapiens
ctcaaaaatgtgaag

SEQ ID NO: 215762 - DNA, 15 bp, Homo sapiens
actcaaaaatgtgaa

SEQ ID NO: 215763 - DNA, 15 bp, Homo sapiens
tactcaaaaatgtga

SEQ ID NO: 215764 - DNA, 15 bp, Homo sapiens
ctactcaaaaatgtg

SEQ ID NO: 215765 - DNA, 15 bp, Homo sapiens
cctactcaaaaatgt

SEQ ID NO: 215766 - DNA, 15 bp, Homo sapiens
tcctactcaaaaatg

SEQ ID NO: 215767 - DNA, 15 bp, Homo sapiens
ctcctactcaaaaat

SEQ ID NO: 215768 - DNA, 15 bp, Homo sapiens
actcctactcaaaaa

SEQ ID NO: 215769 - DNA, 15 bp, Homo sapiens
tactcctactcaaaa

SEQ ID NO: 215770 - DNA, 15 bp, Homo sapiens
ttactcctactcaaa

SEQ ID NO: 215771 - DNA, 15 bp, Homo sapiens
cttactcctactcaa

SEQ ID NO: 215772 - DNA, 15 bp, Homo sapiens
ccttactcctactca

SEQ ID NO: 215773 - DNA, 15 bp, Homo sapiens
cccttactcctactc

SEQ ID NO: 215774 - DNA, 15 bp, Homo sapiens
acccttactcctact

SEQ ID NO: 215775 - DNA, 15 bp, Homo sapiens
tacccttactcctac

SEQ ID NO: 215776 - DNA, 15 bp, Homo sapiens
ctacccttactccta

SEQ ID NO: 215777 - DNA, 15 bp, Homo sapiens
gctacccttactcct

SEQ ID NO: 215778 - DNA, 15 bp, Homo sapiens
agctacccttactcc

SEQ ID NO: 215779 - DNA, 15 bp, Homo sapiens
cagctacccttactc

SEQ ID NO: 215780 - DNA, 15 bp, Homo sapiens
gcagctacccttact

SEQ ID NO: 215781 - DNA, 15 bp, Homo sapiens
ggcagctacccttac

SEQ ID NO: 215782 - DNA, 15 bp, Homo sapiens
aggcagctaccctta

SEQ ID NO: 215783 - DNA, 15 bp, Homo sapiens
caggcagctaccctt

SEQ ID NO: 215784 - DNA, 15 bp, Homo sapiens
acaggcagctaccct

SEQ ID NO: 215785 - DNA, 15 bp, Homo sapiens
cacaggcagctaccc

SEQ ID NO: 215786 - DNA, 15 bp, Homo sapiens
gcacaggcagctacc

SEQ ID NO: 215787 - DNA, 15 bp, Homo sapiens
agcacaggcagctac

SEQ ID NO: 215788 - DNA, 15 bp, Homo sapiens
aagcacaggcagcta

SEQ ID NO: 215789 - DNA, 15 bp, Homo sapiens
caagcacaggcagct

SEQ ID NO: 215790 - DNA, 15 bp, Homo sapiens
ccaagcacaggcagc

SEQ ID NO: 215791 - DNA, 15 bp, Homo sapiens
cccaagcacaggcag

SEQ ID NO: 215792 - DNA, 15 bp, Homo sapiens
gcccaagcacaggca

SEQ ID NO: 215793 - DNA, 15 bp, Homo sapiens
agcccaagcacaggc

SEQ ID NO: 215794 - DNA, 15 bp, Homo sapiens
aagcccaagcacagg

SEQ ID NO: 215795 - DNA, 15 bp, Homo sapiens
caagcccaagcacag

SEQ ID NO: 215796 - DNA, 15 bp, Homo sapiens
ccaagcccaagcaca

SEQ ID NO: 215797 - DNA, 15 bp, Homo sapiens
accaagcccaagcac

SEQ ID NO: 215798 - DNA, 15 bp, Homo sapiens
caccaagcccaagca

SEQ ID NO: 215799 - DNA, 15 bp, Homo sapiens
acaccaagcccaagc

SEQ ID NO: 215800 - DNA, 15 bp, Homo sapiens
cacaccaagcccaag

SEQ ID NO: 215801 - DNA, 15 bp, Homo sapiens
tcacaccaagcccaa

SEQ ID NO: 215802 - DNA, 15 bp, Homo sapiens
ctcacaccaagccca

SEQ ID NO: 215803 - DNA, 15 bp, Homo sapiens
tctcacaccaagccc

SEQ ID NO: 215804 - DNA, 15 bp, Homo sapiens
ctctcacaccaagcc

SEQ ID NO: 215805 - DNA, 15 bp, Homo sapiens
gctctcacaccaagc

SEQ ID NO: 215806 - DNA, 15 bp, Homo sapiens
ggctctcacaccaag

SEQ ID NO: 215807 - DNA, 15 bp, Homo sapiens
gggctctcacaccaa

SEQ ID NO: 215808 - DNA, 15 bp, Homo sapiens
cgggctctcacacca

SEQ ID NO: 215809 - DNA, 15 bp, Homo sapiens
ccgggctctcacacc

SEQ ID NO: 215810 - DNA, 15 bp, Homo sapiens
accgggctctcacac

SEQ ID NO: 215811 - DNA, 15 bp, Homo sapiens
aaccgggctctcaca

SEQ ID NO: 215812 - DNA, 15 bp, Homo sapiens
gaaccgggctctcac

SEQ ID NO: 215813 - DNA, 15 bp, Homo sapiens
agaaccgggctctca

SEQ ID NO: 215814 - DNA, 15 bp, Homo sapiens
cagaaccgggctctc

SEQ ID NO: 215815 - DNA, 15 bp, Homo sapiens
tcagaaccgggctct

SEQ ID NO: 215816 - DNA, 15 bp, Homo sapiens
ttcagaaccgggctc

SEQ ID NO: 215817 - DNA, 15 bp, Homo sapiens
cttcagaaccgggct

SEQ ID NO: 215818 - DNA, 15 bp, Homo sapiens
tcttcagaaccgggc

SEQ ID NO: 215819 - DNA, 15 bp, Homo sapiens
atcttcagaaccggg

SEQ ID NO: 215820 - DNA, 15 bp, Homo sapiens
aatcttcagaaccgg

SEQ ID NO: 215821 - DNA, 15 bp, Homo sapiens
caatcttcagaaccg

SEQ ID NO: 215822 - DNA, 15 bp, Homo sapiens
ccaatcttcagaacc

SEQ ID NO: 215823 - DNA, 15 bp, Homo sapiens
tccaatcttcagaac

SEQ ID NO: 215824 - DNA, 15 bp, Homo sapiens
ttccaatcttcagaa

SEQ ID NO: 215825 - DNA, 15 bp, Homo sapiens
tttccaatcttcaga

SEQ ID NO: 215826 - DNA, 15 bp, Homo sapiens
ctttccaatcttcag

SEQ ID NO: 215827 - DNA, 15 bp, Homo sapiens
actttccaatcttca

SEQ ID NO: 215828 - DNA, 15 bp, Homo sapiens
tactttccaatcttc

SEQ ID NO: 215829 - DNA, 15 bp, Homo sapiens
atactttccaatctt

SEQ ID NO: 215830 - DNA, 15 bp, Homo sapiens
aatactttccaatct

SEQ ID NO: 215831 - DNA, 15 bp, Homo sapiens
caatactttccaatc

SEQ ID NO: 215832 - DNA, 15 bp, Homo sapiens
gcaatactttccaat

SEQ ID NO: 215833 - DNA, 15 bp, Homo sapiens
ggcaatactttccaa

SEQ ID NO: 215834 - DNA, 15 bp, Homo sapiens
tggcaatactttcca

SEQ ID NO: 215835 - DNA, 15 bp, Homo sapiens
ttggcaatactttcc

SEQ ID NO: 215836 - DNA, 15 bp, Homo sapiens
cttggcaatactttc

SEQ ID NO: 215837 - DNA, 15 bp, Homo sapiens
gcttggcaatacttt

SEQ ID NO: 215838 - DNA, 15 bp, Homo sapiens
tgcttggcaatactt

SEQ ID NO: 215839 - DNA, 15 bp, Homo sapiens
gtgcttggcaatact

SEQ ID NO: 215840 - DNA, 15 bp, Homo sapiens
tgtgcttggcaatac

SEQ ID NO: 215841 - DNA, 15 bp, Homo sapiens
atgtgcttggcaata

SEQ ID NO: 215842 - DNA, 15 bp, Homo sapiens
catgtgcttggcaat

SEQ ID NO: 215843 - DNA, 15 bp, Homo sapiens
ccatgtgcttggcaa

SEQ ID NO: 215844 - DNA, 15 bp, Homo sapiens
accatgtgcttggca

SEQ ID NO: 215845 - DNA, 15 bp, Homo sapiens
taccatgtgcttggc

SEQ ID NO: 215846 - DNA, 15 bp, Homo sapiens
ctaccatgtgcttgg

SEQ ID NO: 215847 - DNA, 15 bp, Homo sapiens
cctaccatgtgcttg

SEQ ID NO: 215848 - DNA, 15 bp, Homo sapiens
acctaccatgtgctt

SEQ ID NO: 215849 - DNA, 15 bp, Homo sapiens
tacctaccatgtgct

SEQ ID NO: 215850 - DNA, 15 bp, Homo sapiens
gtacctaccatgtgc

SEQ ID NO: 215851 - DNA, 15 bp, Homo sapiens
agtacctaccatgtg

SEQ ID NO: 215852 - DNA, 15 bp, Homo sapiens
gagtacctaccatgt

SEQ ID NO: 215853 - DNA, 15 bp, Homo sapiens
tgagtacctaccatg

SEQ ID NO: 215854 - DNA, 15 bp, Homo sapiens
ctgagtacctaccat

SEQ ID NO: 215855 - DNA, 15 bp, Homo sapiens
actgagtacctacca

SEQ ID NO: 215856 - DNA, 15 bp, Homo sapiens
tactgagtacctacc

SEQ ID NO: 215857 - DNA, 15 bp, Homo sapiens
ttactgagtacctac

SEQ ID NO: 215858 - DNA, 15 bp, Homo sapiens
tttactgagtaccta

SEQ ID NO: 215859 - DNA, 15 bp, Homo sapiens
atttactgagtacct

SEQ ID NO: 215860 - DNA, 15 bp, Homo sapiens
tatttactgagtacc

SEQ ID NO: 215861 - DNA, 15 bp, Homo sapiens
atatttactgagtac

SEQ ID NO: 215862 - DNA, 15 bp, Homo sapiens
gatatttactgagta

SEQ ID NO: 215863 - DNA, 15 bp, Homo sapiens
agatatttactgagt

SEQ ID NO: 215864 - DNA, 15 bp, Homo sapiens
cagatatttactgag

SEQ ID NO: 215865 - DNA, 15 bp, Homo sapiens
acagatatttactga

SEQ ID NO: 215866 - DNA, 15 bp, Homo sapiens
aacagatatttactg

SEQ ID NO: 215867 - DNA, 15 bp, Homo sapiens
aaacagatatttact

SEQ ID NO: 215868 - DNA, 15 bp, Homo sapiens
taaacagatatttac

SEQ ID NO: 215869 - DNA, 15 bp, Homo sapiens
gtaaacagatattta

SEQ ID NO: 215870 - DNA, 15 bp, Homo sapiens
agtaaacagatattt

SEQ ID NO: 215871 - DNA, 15 bp, Homo sapiens
aagtaaacagatatt

SEQ ID NO: 215872 - DNA, 15 bp, Homo sapiens
taagtaaacagatat

SEQ ID NO: 215873 - DNA, 15 bp, Homo sapiens
ttaagtaaacagata

SEQ ID NO: 215874 - DNA, 15 bp, Homo sapiens
tttaagtaaacagat

SEQ ID NO: 215875 - DNA, 15 bp, Homo sapiens
atttaagtaaacaga

SEQ ID NO: 215876 - DNA, 15 bp, Homo sapiens
catttaagtaaacag

SEQ ID NO: 215877 - DNA, 15 bp, Homo sapiens
tcatttaagtaaaca

SEQ ID NO: 215878 - DNA, 15 bp, Homo sapiens
ttcatttaagtaaac

SEQ ID NO: 215879 - DNA, 15 bp, Homo sapiens
tttcatttaagtaaa

SEQ ID NO: 215880 - DNA, 15 bp, Homo sapiens
ctttcatttaagtaa

SEQ ID NO: 215881 - DNA, 15 bp, Homo sapiens
tctttcatttaagta

SEQ ID NO: 215882 - DNA, 15 bp, Homo sapiens
ttctttcatttaagt

SEQ ID NO: 215883 - DNA, 15 bp, Homo sapiens
attctttcatttaag

SEQ ID NO: 215884 - DNA, 15 bp, Homo sapiens
cattctttcatttaa

SEQ ID NO: 215885 - DNA, 15 bp, Homo sapiens
gcattctttcattta

SEQ ID NO: 215886 - DNA, 15 bp, Homo sapiens
tgcattctttcattt

SEQ ID NO: 215887 - DNA, 15 bp, Homo sapiens
atgcattctttcatt

SEQ ID NO: 215888 - DNA, 15 bp, Homo sapiens
catgcattctttcat

SEQ ID NO: 215889 - DNA, 15 bp, Homo sapiens
tcatgcattctttca

SEQ ID NO: 215890 - DNA, 15 bp, Homo sapiens
ttcatgcattctttc

SEQ ID NO: 215891 - DNA, 15 bp, Homo sapiens
attcatgcattcttt

SEQ ID NO: 215892 - DNA, 15 bp, Homo sapiens
tattcatgcattctt

SEQ ID NO: 215893 - DNA, 15 bp, Homo sapiens
ttattcatgcattct

SEQ ID NO: 215894 - DNA, 15 bp, Homo sapiens
gttattcatgcattc

SEQ ID NO: 215895 - DNA, 15 bp, Homo sapiens
agttattcatgcatt

SEQ ID NO: 215896 - DNA, 15 bp, Homo sapiens
cagttattcatgcat

SEQ ID NO: 215897 - DNA, 15 bp, Homo sapiens
tcagttattcatgca

SEQ ID NO: 215898 - DNA, 15 bp, Homo sapiens
ttcagttattcatgc

SEQ ID NO: 215899 - DNA, 15 bp, Homo sapiens
tttcagttattcatg

SEQ ID NO: 215900 - DNA, 15 bp, Homo sapiens
ctttcagttattcat

SEQ ID NO: 215901 - DNA, 15 bp, Homo sapiens
tctttcagttattca

SEQ ID NO: 215902 - DNA, 15 bp, Homo sapiens
ctctttcagttattc

SEQ ID NO: 215903 - DNA, 15 bp, Homo sapiens
tctctttcagttatt

SEQ ID NO: 215904 - DNA, 15 bp, Homo sapiens
atctctttcagttat

SEQ ID NO: 215905 - DNA, 15 bp, Homo sapiens
gatctctttcagtta

SEQ ID NO: 215906 - DNA, 15 bp, Homo sapiens
tgatctctttcagtt

SEQ ID NO: 215907 - DNA, 15 bp, Homo sapiens
ttgatctctttcagt

SEQ ID NO: 215908 - DNA, 15 bp, Homo sapiens
tttgatctctttcag

SEQ ID NO: 215909 - DNA, 15 bp, Homo sapiens
ctttgatctctttca

SEQ ID NO: 215910 - DNA, 15 bp, Homo sapiens
gctttgatctctttc

SEQ ID NO: 215911 - DNA, 15 bp, Homo sapiens
agctttgatctcttt

SEQ ID NO: 215912 - DNA, 15 bp, Homo sapiens
cagctttgatctctt

SEQ ID NO: 215913 - DNA, 15 bp, Homo sapiens
tcagctttgatctct

SEQ ID NO: 215914 - DNA, 15 bp, Homo sapiens
atcagctttgatctc

SEQ ID NO: 215915 - DNA, 15 bp, Homo sapiens
tatcagctttgatct

SEQ ID NO: 215916 - DNA, 15 bp, Homo sapiens
atatcagctttgatc

SEQ ID NO: 215917 - DNA, 15 bp, Homo sapiens
tatatcagctttgat

SEQ ID NO: 215918 - DNA, 15 bp, Homo sapiens
atatatcagctttga

SEQ ID NO: 215919 - DNA, 15 bp, Homo sapiens
aatatatcagctttg

SEQ ID NO: 215920 - DNA, 15 bp, Homo sapiens
gaatatatcagcttt

SEQ ID NO: 215921 - DNA, 15 bp, Homo sapiens
agaatatatcagctt

SEQ ID NO: 215922 - DNA, 15 bp, Homo sapiens
aagaatatatcagct

SEQ ID NO: 215923 - DNA, 15 bp, Homo sapiens
gaagaatatatcagc

SEQ ID NO: 215924 - DNA, 15 bp, Homo sapiens
agaagaatatatcag

SEQ ID NO: 215925 - DNA, 15 bp, Homo sapiens
tagaagaatatatca

SEQ ID NO: 215926 - DNA, 15 bp, Homo sapiens
ctagaagaatatatc

SEQ ID NO: 215927 - DNA, 15 bp, Homo sapiens
tctagaagaatatat

SEQ ID NO: 215928 - DNA, 15 bp, Homo sapiens
ttctagaagaatata

SEQ ID NO: 215929 - DNA, 15 bp, Homo sapiens
gttctagaagaatat

SEQ ID NO: 215930 - DNA, 15 bp, Homo sapiens
agttctagaagaata

SEQ ID NO: 215931 - DNA, 15 bp, Homo sapiens
aagttctagaagaat

SEQ ID NO: 215932 - DNA, 15 bp, Homo sapiens
aaagttctagaagaa

SEQ ID NO: 215933 - DNA, 15 bp, Homo sapiens
taaagttctagaaga

SEQ ID NO: 215934 - DNA, 15 bp, Homo sapiens
ataaagttctagaag

SEQ ID NO: 215935 - DNA, 15 bp, Homo sapiens
cataaagttctagaa

SEQ ID NO: 215936 - DNA, 15 bp, Homo sapiens
tcataaagttctaga

SEQ ID NO: 215937 - DNA, 15 bp, Homo sapiens
gtcataaagttctag

SEQ ID NO: 215938 - DNA, 15 bp, Homo sapiens
agtcataaagttcta

SEQ ID NO: 215939 - DNA, 15 bp, Homo sapiens
tagtcataaagttct

SEQ ID NO: 215940 - DNA, 15 bp, Homo sapiens
gtagtcataaagttc

SEQ ID NO: 215941 - DNA, 15 bp, Homo sapiens
tgtagtcataaagtt

SEQ ID NO: 215942 - DNA, 15 bp, Homo sapiens
ctgtagtcataaagt

SEQ ID NO: 215943 - DNA, 15 bp, Homo sapiens
cctgtagtcataaag

SEQ ID NO: 215944 - DNA, 15 bp, Homo sapiens
ccctgtagtcataaa

SEQ ID NO: 215945 - DNA, 15 bp, Homo sapiens
tccctgtagtcataa

SEQ ID NO: 215946 - DNA, 15 bp, Homo sapiens
ttccctgtagtcata

SEQ ID NO: 215947 - DNA, 15 bp, Homo sapiens
attccctgtagtcat

SEQ ID NO: 215948 - DNA, 15 bp, Homo sapiens
cattccctgtagtca

SEQ ID NO: 215949 - DNA, 15 bp, Homo sapiens
tcattccctgtagtc

SEQ ID NO: 215950 - DNA, 15 bp, Homo sapiens
ttcattccctgtagt

SEQ ID NO: 215951 - DNA, 15 bp, Homo sapiens
cttcattccctgtag

SEQ ID NO: 215952 - DNA, 15 bp, Homo sapiens
tcttcattccctgta

SEQ ID NO: 215953 - DNA, 15 bp, Homo sapiens
atcttcattccctgt

SEQ ID NO: 215954 - DNA, 15 bp, Homo sapiens
aatcttcattccctg

SEQ ID NO: 215955 - DNA, 15 bp, Homo sapiens
taatcttcattccct

SEQ ID NO: 215956 - DNA, 15 bp, Homo sapiens
ttaatcttcattccc

SEQ ID NO: 215957 - DNA, 15 bp, Homo sapiens
attaatcttcattcc

SEQ ID NO: 215958 - DNA, 15 bp, Homo sapiens
tattaatcttcattc

SEQ ID NO: 215959 - DNA, 15 bp, Homo sapiens
atattaatcttcatt

SEQ ID NO: 215960 - DNA, 15 bp, Homo sapiens
catattaatcttcat

SEQ ID NO: 215961 - DNA, 15 bp, Homo sapiens
ccatattaatcttca

SEQ ID NO: 215962 - DNA, 15 bp, Homo sapiens
gccatattaatcttc

SEQ ID NO: 215963 - DNA, 15 bp, Homo sapiens
tgccatattaatctt

SEQ ID NO: 215964 - DNA, 15 bp, Homo sapiens
ttgccatattaatct

SEQ ID NO: 215965 - DNA, 15 bp, Homo sapiens
cttgccatattaatc

SEQ ID NO: 215966 - DNA, 15 bp, Homo sapiens
ccttgccatattaat

SEQ ID NO: 215967 - DNA, 15 bp, Homo sapiens
tccttgccatattaa

SEQ ID NO: 215968 - DNA, 15 bp, Homo sapiens
atccttgccatatta

SEQ ID NO: 215969 - DNA, 15 bp, Homo sapiens
tatccttgccatatt

SEQ ID NO: 215970 - DNA, 15 bp, Homo sapiens
ctatccttgccatat

SEQ ID NO: 215971 - DNA, 15 bp, Homo sapiens
cctatccttgccata

SEQ ID NO: 215972 - DNA, 15 bp, Homo sapiens
ccctatccttgccat

SEQ ID NO: 215973 - DNA, 15 bp, Homo sapiens
tccctatccttgcca

SEQ ID NO: 215974 - DNA, 15 bp, Homo sapiens
ctccctatccttgcc

SEQ ID NO: 215975 - DNA, 15 bp, Homo sapiens
cctccctatccttgc

SEQ ID NO: 215976 - DNA, 15 bp, Homo sapiens
tcctccctatccttg

SEQ ID NO: 215977 - DNA, 15 bp, Homo sapiens
ttcctccctatcctt

SEQ ID NO: 215978 - DNA, 15 bp, Homo sapiens
cttcctccctatcct

SEQ ID NO: 215979 - DNA, 15 bp, Homo sapiens
acttcctccctatcc

SEQ ID NO: 215980 - DNA, 15 bp, Homo sapiens
aacttcctccctatc

SEQ ID NO: 215981 - DNA, 15 bp, Homo sapiens
taacttcctccctat

SEQ ID NO: 215982 - DNA, 15 bp, Homo sapiens
ttaacttcctcccta

SEQ ID NO: 215983 - DNA, 15 bp, Homo sapiens
tttaacttcctccct

SEQ ID NO: 215984 - DNA, 15 bp, Homo sapiens
ctttaacttcctccc

SEQ ID NO: 215985 - DNA, 15 bp, Homo sapiens
gctttaacttcctcc

SEQ ID NO: 215986 - DNA, 15 bp, Homo sapiens
ggctttaacttcctc

SEQ ID NO: 215987 - DNA, 15 bp, Homo sapiens
tggctttaacttcct

SEQ ID NO: 215988 - DNA, 15 bp, Homo sapiens
ttggctttaacttcc

SEQ ID NO: 215989 - DNA, 15 bp, Homo sapiens
gttggctttaacttc

SEQ ID NO: 215990 - DNA, 15 bp, Homo sapiens
agttggctttaactt

SEQ ID NO: 215991 - DNA, 15 bp, Homo sapiens
cagttggctttaact

SEQ ID NO: 215992 - DNA, 15 bp, Homo sapiens
gcagttggctttaac

SEQ ID NO: 215993 - DNA, 15 bp, Homo sapiens
ggcagttggctttaa

SEQ ID NO: 215994 - DNA, 15 bp, Homo sapiens
tggcagttggcttta

SEQ ID NO: 215995 - DNA, 15 bp, Homo sapiens
gtggcagttggcttt

SEQ ID NO: 215996 - DNA, 15 bp, Homo sapiens
tgtggcagttggctt

SEQ ID NO: 215997 - DNA, 15 bp, Homo sapiens
ttgtggcagttggct

SEQ ID NO: 215998 - DNA, 15 bp, Homo sapiens
cttgtggcagttggc

SEQ ID NO: 215999 - DNA, 15 bp, Homo sapiens
ccttgtggcagttgg

SEQ ID NO: 216000 - DNA, 15 bp, Homo sapiens
accttgtggcagttg

SEQ ID NO: 216001 - DNA, 15 bp, Homo sapiens
taccttgtggcagtt

SEQ ID NO: 216002 - DNA, 15 bp, Homo sapiens
gtaccttgtggcagt

SEQ ID NO: 216003 - DNA, 15 bp, Homo sapiens
ggtaccttgtggcag

SEQ ID NO: 216004 - DNA, 15 bp, Homo sapiens
aggtaccttgtggca

SEQ ID NO: 216005 - DNA, 15 bp, Homo sapiens
caggtaccttgtggc

SEQ ID NO: 216006 - DNA, 15 bp, Homo sapiens
acaggtaccttgtgg

SEQ ID NO: 216007 - DNA, 15 bp, Homo sapiens
cacaggtaccttgtg

SEQ ID NO: 216008 - DNA, 15 bp, Homo sapiens
ccacaggtaccttgt

SEQ ID NO: 216009 - DNA, 15 bp, Homo sapiens
accacaggtaccttg

SEQ ID NO: 216010 - DNA, 15 bp, Homo sapiens
caccacaggtacctt

SEQ ID NO: 216011 - DNA, 15 bp, Homo sapiens
ccaccacaggtacct

SEQ ID NO: 216012 - DNA, 15 bp, Homo sapiens
tccaccacaggtacc

SEQ ID NO: 216013 - DNA, 15 bp, Homo sapiens
ctccaccacaggtac

SEQ ID NO: 216014 - DNA, 15 bp, Homo sapiens
cctccaccacaggta

SEQ ID NO: 216015 - DNA, 15 bp, Homo sapiens
ccctccaccacaggt

SEQ ID NO: 216016 - DNA, 15 bp, Homo sapiens
accctccaccacagg

SEQ ID NO: 216017 - DNA, 15 bp, Homo sapiens
gaccctccaccacag

SEQ ID NO: 216018 - DNA, 15 bp, Homo sapiens
ggaccctccaccaca

SEQ ID NO: 216019 - DNA, 15 bp, Homo sapiens
tggaccctccaccac

SEQ ID NO: 216020 - DNA, 15 bp, Homo sapiens
ctggaccctccacca

SEQ ID NO: 216021 - DNA, 15 bp, Homo sapiens
cctggaccctccacc

SEQ ID NO: 216022 - DNA, 15 bp, Homo sapiens
ccctggaccctccac

SEQ ID NO: 216023 - DNA, 15 bp, Homo sapiens
accctggaccctcca

SEQ ID NO: 216024 - DNA, 15 bp, Homo sapiens
aaccctggaccctcc

SEQ ID NO: 216025 - DNA, 15 bp, Homo sapiens
gaaccctggaccctc

SEQ ID NO: 216026 - DNA, 15 bp, Homo sapiens
agaaccctggaccct

SEQ ID NO: 216027 - DNA, 15 bp, Homo sapiens
tagaaccctggaccc

SEQ ID NO: 216028 - DNA, 15 bp, Homo sapiens
ctagaaccctggacc

SEQ ID NO: 216029 - DNA, 15 bp, Homo sapiens
actagaaccctggac

SEQ ID NO: 216030 - DNA, 15 bp, Homo sapiens
ccactagaaccctgg

SEQ ID NO: 216031 - DNA, 15 bp, Homo sapiens
gccactagaaccctg

SEQ ID NO: 216032 - DNA, 15 bp, Homo sapiens
agccactagaaccct

SEQ ID NO: 216033 - DNA, 15 bp, Homo sapiens
aagccactagaaccc

SEQ ID NO: 216034 - DNA, 15 bp, Homo sapiens
caagccactagaacc

SEQ ID NO: 216035 - DNA, 15 bp, Homo sapiens
ccaagccactagaac

SEQ ID NO: 216036 - DNA, 15 bp, Homo sapiens
gccaagccactagaa

SEQ ID NO: 216037 - DNA, 15 bp, Homo sapiens
ggccaagccactaga

SEQ ID NO: 216038 - DNA, 15 bp, Homo sapiens
gggccaagccactag

SEQ ID NO: 216039 - DNA, 15 bp, Homo sapiens
tgggccaagccacta

SEQ ID NO: 216040 - DNA, 15 bp, Homo sapiens
gtgggccaagccact

SEQ ID NO: 216041 - DNA, 15 bp, Homo sapiens
agtgggccaagccac

SEQ ID NO: 216042 - DNA, 15 bp, Homo sapiens
gagtgggccaagcca

SEQ ID NO: 216043 - DNA, 15 bp, Homo sapiens
agagtgggccaagcc

SEQ ID NO: 216044 - DNA, 15 bp, Homo sapiens
aagagtgggccaagc

SEQ ID NO: 216045 - DNA, 15 bp, Homo sapiens
aaagagtgggccaag

SEQ ID NO: 216046 - DNA, 15 bp, Homo sapiens
gaaagagtgggccaa

SEQ ID NO: 216047 - DNA, 15 bp, Homo sapiens
tgaaagagtgggcca

SEQ ID NO: 216048 - DNA, 15 bp, Homo sapiens
ctgaaagagtgggcc

SEQ ID NO: 216049 - DNA, 15 bp, Homo sapiens
cctgaaagagtgggc

SEQ ID NO: 216050 - DNA, 15 bp, Homo sapiens
acctgaaagagtggg

SEQ ID NO: 216051 - DNA, 15 bp, Homo sapiens
cacctgaaagagtgg

SEQ ID NO: 216052 - DNA, 15 bp, Homo sapiens
gcacctgaaagagtg

SEQ ID NO: 216053 - DNA, 15 bp, Homo sapiens
ggcacctgaaagagt

SEQ ID NO: 216054 - DNA, 15 bp, Homo sapiens
gggcacctgaaagag

SEQ ID NO: 216055 - DNA, 15 bp, Homo sapiens
agggcacctgaaaga

SEQ ID NO: 216056 - DNA, 15 bp, Homo sapiens
gagggcacctgaaag

SEQ ID NO: 216057 - DNA, 15 bp, Homo sapiens
tgagggcacctgaaa

SEQ ID NO: 216058 - DNA, 15 bp, Homo sapiens
atgagggcacctgaa

SEQ ID NO: 216059 - DNA, 15 bp, Homo sapiens
gatgagggcacctga

SEQ ID NO: 216060 - DNA, 15 bp, Homo sapiens
agatgagggcacctg

SEQ ID NO: 216061 - DNA, 15 bp, Homo sapiens
gagatgagggcacct

SEQ ID NO: 216062 - DNA, 15 bp, Homo sapiens
tgagatgagggcacc

SEQ ID NO: 216063 - DNA, 15 bp, Homo sapiens
ctgagatgagggcac

SEQ ID NO: 216064 - DNA, 15 bp, Homo sapiens
tctgagatgagggca

SEQ ID NO: 216065 - DNA, 15 bp, Homo sapiens
ttctgagatgagggc

SEQ ID NO: 216066 - DNA, 15 bp, Homo sapiens
tttctgagatgaggg

SEQ ID NO: 216067 - DNA, 15 bp, Homo sapiens
ctttctgagatgagg

SEQ ID NO: 216068 - DNA, 15 bp, Homo sapiens
tctttctgagatgag

SEQ ID NO: 216069 - DNA, 15 bp, Homo sapiens
atctttctgagatga

SEQ ID NO: 216070 - DNA, 15 bp, Homo sapiens
gatctttctgagatg

SEQ ID NO: 216071 - DNA, 15 bp, Homo sapiens
tgatctttctgagat

SEQ ID NO: 216072 - DNA, 15 bp, Homo sapiens
ttgatctttctgaga

SEQ ID NO: 216073 - DNA, 15 bp, Homo sapiens
attgatctttctgag

SEQ ID NO: 216074 - DNA, 15 bp, Homo sapiens
cattgatctttctga

SEQ ID NO: 216075 - DNA, 15 bp, Homo sapiens
ccattgatctttctg

SEQ ID NO: 216076 - DNA, 15 bp, Homo sapiens
accattgatctttct

SEQ ID NO: 216077 - DNA, 15 bp, Homo sapiens
caccattgatctttc

SEQ ID NO: 216078 - DNA, 15 bp, Homo sapiens
gcaccattgatcttt

SEQ ID NO: 216079 - DNA, 15 bp, Homo sapiens
tgcaccattgatctt

SEQ ID NO: 216080 - DNA, 15 bp, Homo sapiens
ctgcaccattgatct

SEQ ID NO: 216081 - DNA, 15 bp, Homo sapiens
tctgcaccattgatc

SEQ ID NO: 216082 - DNA, 15 bp, Homo sapiens
gtctgcaccattgat

SEQ ID NO: 216083 - DNA, 15 bp, Homo sapiens
tgtctgcaccattga

SEQ ID NO: 216084 - DNA, 15 bp, Homo sapiens
ctgtctgcaccattg

SEQ ID NO: 216085 - DNA, 15 bp, Homo sapiens
tctgtctgcaccatt

SEQ ID NO: 216086 - DNA, 15 bp, Homo sapiens
gtctgtctgcaccat

SEQ ID NO: 216087 - DNA, 15 bp, Homo sapiens
agtctgtctgcacca

SEQ ID NO: 216088 - DNA, 15 bp, Homo sapiens
cagtctgtctgcacc

SEQ ID NO: 216089 - DNA, 15 bp, Homo sapiens
gcagtctgtctgcac

SEQ ID NO: 216090 - DNA, 15 bp, Homo sapiens
tgcagtctgtctgca

SEQ ID NO: 216091 - DNA, 15 bp, Homo sapiens
ctgcagtctgtctgc

SEQ ID NO: 216092 - DNA, 15 bp, Homo sapiens
actgcagtctgtctg

SEQ ID NO: 216093 - DNA, 15 bp, Homo sapiens
aactgcagtctgtct

SEQ ID NO: 216094 - DNA, 15 bp, Homo sapiens
aaactgcagtctgtc

SEQ ID NO: 216095 - DNA, 15 bp, Homo sapiens
taaactgcagtctgt

SEQ ID NO: 216096 - DNA, 15 bp, Homo sapiens
ataaactgcagtctg

SEQ ID NO: 216097 - DNA, 15 bp, Homo sapiens
gataaactgcagtct

SEQ ID NO: 216098 - DNA, 15 bp, Homo sapiens
agataaactgcagtc

SEQ ID NO: 216099 - DNA, 15 bp, Homo sapiens
tagataaactgcagt

SEQ ID NO: 216100 - DNA, 15 bp, Homo sapiens
ctagataaactgcag

SEQ ID NO: 216101 - DNA, 15 bp, Homo sapiens
actagataaactgca

SEQ ID NO: 216102 - DNA, 15 bp, Homo sapiens
aactagataaactgc

SEQ ID NO: 216103 - DNA, 15 bp, Homo sapiens
gaactagataaactg

SEQ ID NO: 216104 - DNA, 15 bp, Homo sapiens
tgaactagataaact

SEQ ID NO: 216105 - DNA, 15 bp, Homo sapiens
gtgaactagataaac

SEQ ID NO: 216106 - DNA, 15 bp, Homo sapiens
tgtgaactagataaa

SEQ ID NO: 216107 - DNA, 15 bp, Homo sapiens
atgtgaactagataa

SEQ ID NO: 216108 - DNA, 15 bp, Homo sapiens
aatgtgaactagata

SEQ ID NO: 216109 - DNA, 15 bp, Homo sapiens
caatgtgaactagat

SEQ ID NO: 216110 - DNA, 15 bp, Homo sapiens
ccaatgtgaactaga

SEQ ID NO: 216111 - DNA, 15 bp, Homo sapiens
tccaatgtgaactag

SEQ ID NO: 216112 - DNA, 15 bp, Homo sapiens
atccaatgtgaacta

SEQ ID NO: 216113 - DNA, 15 bp, Homo sapiens
catccaatgtgaact

SEQ ID NO: 216114 - DNA, 15 bp, Homo sapiens
ccatccaatgtgaac

SEQ ID NO: 216115 - DNA, 15 bp, Homo sapiens
tccatccaatgtgaa

SEQ ID NO: 216116 - DNA, 15 bp, Homo sapiens
atccatccaatgtga

SEQ ID NO: 216117 - DNA, 15 bp, Homo sapiens
catccatccaatgtg

SEQ ID NO: 216118 - DNA, 15 bp, Homo sapiens
gcatccatccaatgt

SEQ ID NO: 216119 - DNA, 15 bp, Homo sapiens
ggcatccatccaatg

SEQ ID NO: 216120 - DNA, 15 bp, Homo sapiens
aggcatccatccaat

SEQ ID NO: 216121 - DNA, 15 bp, Homo sapiens
aaggcatccatccaa

SEQ ID NO: 216122 - DNA, 15 bp, Homo sapiens
caaggcatccatcca

SEQ ID NO: 216123 - DNA, 15 bp, Homo sapiens
ccaaggcatccatcc

SEQ ID NO: 216124 - DNA, 15 bp, Homo sapiens
tccaaggcatccatc

SEQ ID NO: 216125 - DNA, 15 bp, Homo sapiens
atccaaggcatccat

SEQ ID NO: 216126 - DNA, 15 bp, Homo sapiens
gatccaaggcatcca

SEQ ID NO: 216127 - DNA, 15 bp, Homo sapiens
ggatccaaggcatcc

SEQ ID NO: 216128 - DNA, 15 bp, Homo sapiens
tggatccaaggcatc

SEQ ID NO: 216129 - DNA, 15 bp, Homo sapiens
gtggatccaaggcat

SEQ ID NO: 216130 - DNA, 15 bp, Homo sapiens
tgtggatccaaggca

SEQ ID NO: 216131 - DNA, 15 bp, Homo sapiens
ctgtggatccaaggc

SEQ ID NO: 216132 - DNA, 15 bp, Homo sapiens
gctgtggatccaagg

SEQ ID NO: 216133 - DNA, 15 bp, Homo sapiens
ggctgtggatccaag

SEQ ID NO: 216134 - DNA, 15 bp, Homo sapiens
gggctgtggatccaa

SEQ ID NO: 216135 - DNA, 15 bp, Homo sapiens
agggctgtggatcca

SEQ ID NO: 216136 - DNA, 15 bp, Homo sapiens
tagggctgtggatcc

SEQ ID NO: 216137 - DNA, 15 bp, Homo sapiens
ctagggctgtggatc

SEQ ID NO: 216138 - DNA, 15 bp, Homo sapiens
cctagggctgtggat

SEQ ID NO: 216139 - DNA, 15 bp, Homo sapiens
tcctagggctgtgga

SEQ ID NO: 216140 - DNA, 15 bp, Homo sapiens
atcctagggctgtgg

SEQ ID NO: 216141 - DNA, 15 bp, Homo sapiens
tatcctagggctgtg

SEQ ID NO: 216142 - DNA, 15 bp, Homo sapiens
gtatcctagggctgt

SEQ ID NO: 216143 - DNA, 15 bp, Homo sapiens
agtatcctagggctg

SEQ ID NO: 216144 - DNA, 15 bp, Homo sapiens
aagtatcctagggct

SEQ ID NO: 216145 - DNA, 15 bp, Homo sapiens
caagtatcctagggc

SEQ ID NO: 216146 - DNA, 15 bp, Homo sapiens
ccaagtatcctaggg

SEQ ID NO: 216147 - DNA, 15 bp, Homo sapiens
cccaagtatcctagg

SEQ ID NO: 216148 - DNA, 15 bp, Homo sapiens
gcccaagtatcctag

SEQ ID NO: 216149 - DNA, 15 bp, Homo sapiens
ggcccaagtatccta

SEQ ID NO: 216150 - DNA, 15 bp, Homo sapiens
gggcccaagtatcct

SEQ ID NO: 216151 - DNA, 15 bp, Homo sapiens
tgggcccaagtatcc

SEQ ID NO: 216152 - DNA, 15 bp, Homo sapiens
atgggcccaagtatc

SEQ ID NO: 216153 - DNA, 15 bp, Homo sapiens
aatgggcccaagtat

SEQ ID NO: 216154 - DNA, 15 bp, Homo sapiens
aaatgggcccaagta

SEQ ID NO: 216155 - DNA, 15 bp, Homo sapiens
aaaatgggcccaagt

SEQ ID NO: 216156 - DNA, 15 bp, Homo sapiens
aaaaatgggcccaag

SEQ ID NO: 216157 - DNA, 15 bp, Homo sapiens
caaaaatgggcccaa

SEQ ID NO: 216158 - DNA, 15 bp, Homo sapiens
ccaaaaatgggccca

SEQ ID NO: 216159 - DNA, 15 bp, Homo sapiens
tccaaaaatgggccc

SEQ ID NO: 216160 - DNA, 15 bp, Homo sapiens
atccaaaaatgggcc

SEQ ID NO: 216161 - DNA, 15 bp, Homo sapiens
aatccaaaaatgggc

SEQ ID NO: 216162 - DNA, 15 bp, Homo sapiens
aaatccaaaaatggg

SEQ ID NO: 216163 - DNA, 15 bp, Homo sapiens
gaaatccaaaaatgg

SEQ ID NO: 216164 - DNA, 15 bp, Homo sapiens
agaaatccaaaaatg

SEQ ID NO: 216165 - DNA, 15 bp, Homo sapiens
aagaaatccaaaaat

SEQ ID NO: 216166 - DNA, 15 bp, Homo sapiens
caagaaatccaaaaa

SEQ ID NO: 216167 - DNA, 15 bp, Homo sapiens
gcaagaaatccaaaa

SEQ ID NO: 216168 - DNA, 15 bp, Homo sapiens
agcaagaaatccaaa

SEQ ID NO: 216169 - DNA, 15 bp, Homo sapiens
gagcaagaaatccaa

SEQ ID NO: 216170 - DNA, 15 bp, Homo sapiens
agagcaagaaatcca

SEQ ID NO: 216171 - DNA, 15 bp, Homo sapiens
aagagcaagaaatcc

SEQ ID NO: 216172 - DNA, 15 bp, Homo sapiens
gaagagcaagaaatc

SEQ ID NO: 216173 - DNA, 15 bp, Homo sapiens
agaagagcaagaaat

SEQ ID NO: 216174 - DNA, 15 bp, Homo sapiens
tagaagagcaagaaa

SEQ ID NO: 216175 - DNA, 15 bp, Homo sapiens
ctagaagagcaagaa

SEQ ID NO: 216176 - DNA, 15 bp, Homo sapiens
tctagaagagcaaga

SEQ ID NO: 216177 - DNA, 15 bp, Homo sapiens
atctagaagagcaag

SEQ ID NO: 216178 - DNA, 15 bp, Homo sapiens
aatctagaagagcaa

SEQ ID NO: 216179 - DNA, 15 bp, Homo sapiens
caatctagaagagca

SEQ ID NO: 216180 - DNA, 15 bp, Homo sapiens
acaatctagaagagc

SEQ ID NO: 216181 - DNA, 15 bp, Homo sapiens
aacaatctagaagag

SEQ ID NO: 216182 - DNA, 15 bp, Homo sapiens
aaacaatctagaaga

SEQ ID NO: 216183 - DNA, 15 bp, Homo sapiens
aaaacaatctagaag

SEQ ID NO: 216184 - DNA, 15 bp, Homo sapiens
taaaacaatctagaa

SEQ ID NO: 216185 - DNA, 15 bp, Homo sapiens
ctaaaacaatctaga

SEQ ID NO: 216186 - DNA, 15 bp, Homo sapiens
tctaaaacaatctag

SEQ ID NO: 216187 - DNA, 15 bp, Homo sapiens
gtctaaaacaatcta

SEQ ID NO: 216188 - DNA, 15 bp, Homo sapiens
tgtctaaaacaatct

SEQ ID NO: 216189 - DNA, 15 bp, Homo sapiens
ctgtctaaaacaatc

SEQ ID NO: 216190 - DNA, 15 bp, Homo sapiens
gctgtctaaaacaat

SEQ ID NO: 216191 - DNA, 15 bp, Homo sapiens
tgctgtctaaaacaa

SEQ ID NO: 216192 - DNA, 15 bp, Homo sapiens
ctgctgtctaaaaca

SEQ ID NO: 216193 - DNA, 15 bp, Homo sapiens
actgctgtctaaaac

SEQ ID NO: 216194 - DNA, 15 bp, Homo sapiens
gactgctgtctaaaa

SEQ ID NO: 216195 - DNA, 15 bp, Homo sapiens
ggactgctgtctaaa

SEQ ID NO: 216196 - DNA, 15 bp, Homo sapiens
tggactgctgtctaa

SEQ ID NO: 216197 - DNA, 15 bp, Homo sapiens
atggactgctgtcta

SEQ ID NO: 216198 - DNA, 15 bp, Homo sapiens
tatggactgctgtct

SEQ ID NO: 216199 - DNA, 15 bp, Homo sapiens
atatggactgctgtc

SEQ ID NO: 216200 - DNA, 15 bp, Homo sapiens
catatggactgctgt

SEQ ID NO: 216201 - DNA, 15 bp, Homo sapiens
tcatatggactgctg

SEQ ID NO: 216202 - DNA, 15 bp, Homo sapiens
ttcatatggactgct

SEQ ID NO: 216203 - DNA, 15 bp, Homo sapiens
cttcatatggactgc

SEQ ID NO: 216204 - DNA, 15 bp, Homo sapiens
tcttcatatggactg

SEQ ID NO: 216205 - DNA, 15 bp, Homo sapiens
gtcttcatatggact

SEQ ID NO: 216206 - DNA, 15 bp, Homo sapiens
ggtcttcatatggac

SEQ ID NO: 216207 - DNA, 15 bp, Homo sapiens
aggtcttcatatgga

SEQ ID NO: 216208 - DNA, 15 bp, Homo sapiens
aaggtcttcatatgg

SEQ ID NO: 216209 - DNA, 15 bp, Homo sapiens
taaggtcttcatatg

SEQ ID NO: 216210 - DNA, 15 bp, Homo sapiens
ttaaggtcttcatat

SEQ ID NO: 216211 - DNA, 15 bp, Homo sapiens
cttaaggtcttcata

SEQ ID NO: 216212 - DNA, 15 bp, Homo sapiens
tcttaaggtcttcat

SEQ ID NO: 216213 - DNA, 15 bp, Homo sapiens
ctcttaaggtcttca

SEQ ID NO: 216214 - DNA, 15 bp, Homo sapiens
tctcttaaggtcttc

SEQ ID NO: 216215 - DNA, 15 bp, Homo sapiens
ctctcttaaggtctt

SEQ ID NO: 216216 - DNA, 15 bp, Homo sapiens
tctctcttaaggtct

SEQ ID NO: 216217 - DNA, 15 bp, Homo sapiens
ttctctcttaaggtc

SEQ ID NO: 216218 - DNA, 15 bp, Homo sapiens
attctctcttaaggt

SEQ ID NO: 216219 - DNA, 15 bp, Homo sapiens
tattctctcttaagg

SEQ ID NO: 216220 - DNA, 15 bp, Homo sapiens
atattctctcttaag

SEQ ID NO: 216221 - DNA, 15 bp, Homo sapiens
tatattctctcttaa

SEQ ID NO: 216222 - DNA, 15 bp, Homo sapiens
ctatattctctctta

SEQ ID NO: 216223 - DNA, 15 bp, Homo sapiens
gctatattctctctt

SEQ ID NO: 216224 - DNA, 15 bp, Homo sapiens
ggctatattctctct

SEQ ID NO: 216225 - DNA, 15 bp, Homo sapiens
gggctatattctctc

SEQ ID NO: 216226 - DNA, 15 bp, Homo sapiens
tgggctatattctct

SEQ ID NO: 216227 - DNA, 15 bp, Homo sapiens
ttgggctatattctc

SEQ ID NO: 216228 - DNA, 15 bp, Homo sapiens
cttgggctatattct

SEQ ID NO: 216229 - DNA, 15 bp, Homo sapiens
tcttgggctatattc

SEQ ID NO: 216230 - DNA, 15 bp, Homo sapiens
ctcttgggctatatt

SEQ ID NO: 216231 - DNA, 15 bp, Homo sapiens
actcttgggctatat

SEQ ID NO: 216232 - DNA, 15 bp, Homo sapiens
cactcttgggctata

SEQ ID NO: 216233 - DNA, 15 bp, Homo sapiens
tcactcttgggctat

SEQ ID NO: 216234 - DNA, 15 bp, Homo sapiens
atcactcttgggcta

SEQ ID NO: 216235 - DNA, 15 bp, Homo sapiens
catcactcttgggct

SEQ ID NO: 216236 - DNA, 15 bp, Homo sapiens
ccatcactcttgggc

SEQ ID NO: 216237 - DNA, 15 bp, Homo sapiens
tccatcactcttggg

SEQ ID NO: 216238 - DNA, 15 bp, Homo sapiens
ttccatcactcttgg

SEQ ID NO: 216239 - DNA, 15 bp, Homo sapiens
cttccatcactcttg

SEQ ID NO: 216240 - DNA, 15 bp, Homo sapiens
ccttccatcactctt

SEQ ID NO: 216241 - DNA, 15 bp, Homo sapiens
gccttccatcactct

SEQ ID NO: 216242 - DNA, 15 bp, Homo sapiens
agccttccatcactc

SEQ ID NO: 216243 - DNA, 15 bp, Homo sapiens
cagccttccatcact

SEQ ID NO: 216244 - DNA, 15 bp, Homo sapiens
gcagccttccatcac

SEQ ID NO: 216245 - DNA, 15 bp, Homo sapiens
tgcagccttccatca

SEQ ID NO: 216246 - DNA, 15 bp, Homo sapiens
ttgcagccttccatc

SEQ ID NO: 216247 - DNA, 15 bp, Homo sapiens
gttgcagccttccat

SEQ ID NO: 216248 - DNA, 15 bp, Homo sapiens
ggttgcagccttcca

SEQ ID NO: 216249 - DNA, 15 bp, Homo sapiens
tggttgcagccttcc

SEQ ID NO: 216250 - DNA, 15 bp, Homo sapiens
atggttgcagccttc

SEQ ID NO: 216251 - DNA, 15 bp, Homo sapiens
catggttgcagcctt

SEQ ID NO: 216252 - DNA, 15 bp, Homo sapiens
tcatggttgcagcct

SEQ ID NO: 216253 - DNA, 15 bp, Homo sapiens
gtcatggttgcagcc

SEQ ID NO: 216254 - DNA, 15 bp, Homo sapiens
tgtcatggttgcagc

SEQ ID NO: 216255 - DNA, 15 bp, Homo sapiens
atgtcatggttgcag

SEQ ID NO: 216256 - DNA, 15 bp, Homo sapiens
aatgtcatggttgca

SEQ ID NO: 216257 - DNA, 15 bp, Homo sapiens
aaatgtcatggttgc

SEQ ID NO: 216258 - DNA, 15 bp, Homo sapiens
aaaatgtcatggttg

SEQ ID NO: 216259 - DNA, 15 bp, Homo sapiens
caaaatgtcatggtt

SEQ ID NO: 216260 - DNA, 15 bp, Homo sapiens
tcaaaatgtcatggt

SEQ ID NO: 216261 - DNA, 15 bp, Homo sapiens
ctcaaaatgtcatgg

SEQ ID NO: 216262 - DNA, 15 bp, Homo sapiens
actcaaaatgtcatg

SEQ ID NO: 216263 - DNA, 15 bp, Homo sapiens
tactcaaaatgtcat

SEQ ID NO: 216264 - DNA, 15 bp, Homo sapiens
atactcaaaatgtca

SEQ ID NO: 216265 - DNA, 15 bp, Homo sapiens
catactcaaaatgtc

SEQ ID NO: 216266 - DNA, 15 bp, Homo sapiens
gcatactcaaaatgt

SEQ ID NO: 216267 - DNA, 15 bp, Homo sapiens
agcatactcaaaatg

SEQ ID NO: 216268 - DNA, 15 bp, Homo sapiens
gagcatactcaaaat

SEQ ID NO: 216269 - DNA, 15 bp, Homo sapiens
ggagcatactcaaaa

SEQ ID NO: 216270 - DNA, 15 bp, Homo sapiens
tggagcatactcaaa

SEQ ID NO: 216271 - DNA, 15 bp, Homo sapiens
gtggagcatactcaa

SEQ ID NO: 216272 - DNA, 15 bp, Homo sapiens
agtggagcatactca

SEQ ID NO: 216273 - DNA, 15 bp, Homo sapiens
tagtggagcatactc

SEQ ID NO: 216274 - DNA, 15 bp, Homo sapiens
ttagtggagcatact

SEQ ID NO: 216275 - DNA, 15 bp, Homo sapiens
attagtggagcatac

SEQ ID NO: 216276 - DNA, 15 bp, Homo sapiens
aattagtggagcata

SEQ ID NO: 216277 - DNA, 15 bp, Homo sapiens
taattagtggagcat

SEQ ID NO: 216278 - DNA, 15 bp, Homo sapiens
ttaattagtggagca

SEQ ID NO: 216279 - DNA, 15 bp, Homo sapiens
tttaattagtggagc

SEQ ID NO: 216280 - DNA, 15 bp, Homo sapiens
ttttaattagtggag

SEQ ID NO: 216281 - DNA, 15 bp, Homo sapiens
tttttaattagtgga

SEQ ID NO: 216282 - DNA, 15 bp, Homo sapiens
atttttaattagtgg

SEQ ID NO: 216283 - DNA, 15 bp, Homo sapiens
aatttttaattagtg

SEQ ID NO: 216284 - DNA, 15 bp, Homo sapiens
taatttttaattagt

SEQ ID NO: 216285 - DNA, 15 bp, Homo sapiens
ttaatttttaattag

SEQ ID NO: 216286 - DNA, 15 bp, Homo sapiens
tttaatttttaatta

SEQ ID NO: 216287 - DNA, 15 bp, Homo sapiens
atttaatttttaatt

SEQ ID NO: 216288 - DNA, 15 bp, Homo sapiens
aatttaatttttaat

SEQ ID NO: 216289 - DNA, 15 bp, Homo sapiens
caatttaatttttaa

SEQ ID NO: 216290 - DNA, 15 bp, Homo sapiens
acaatttaattttta

SEQ ID NO: 216291 - DNA, 15 bp, Homo sapiens
aacaatttaattttt

SEQ ID NO: 216292 - DNA, 15 bp, Homo sapiens
taacaatttaatttt

SEQ ID NO: 216293 - DNA, 15 bp, Homo sapiens
ttaacaatttaattt

SEQ ID NO: 216294 - DNA, 15 bp, Homo sapiens
attaacaatttaatt

SEQ ID NO: 216295 - DNA, 15 bp, Homo sapiens
gattaacaatttaat

SEQ ID NO: 216296 - DNA, 15 bp, Homo sapiens
ggattaacaatttaa

SEQ ID NO: 216297 - DNA, 15 bp, Homo sapiens
gggattaacaattta

SEQ ID NO: 216298 - DNA, 15 bp, Homo sapiens
ggggattaacaattt

SEQ ID NO: 216299 - DNA, 15 bp, Homo sapiens
tggggattaacaatt

SEQ ID NO: 216300 - DNA, 15 bp, Homo sapiens
ttggggattaacaat

SEQ ID NO: 216301 - DNA, 15 bp, Homo sapiens
cttggggattaacaa

SEQ ID NO: 216302 - DNA, 15 bp, Homo sapiens
acttggggattaaca

SEQ ID NO: 216303 - DNA, 15 bp, Homo sapiens
tacttggggattaac

SEQ ID NO: 216304 - DNA, 15 bp, Homo sapiens
ttacttggggattaa

SEQ ID NO: 216305 - DNA, 15 bp, Homo sapiens
tttacttggggatta

SEQ ID NO: 216306 - DNA, 15 bp, Homo sapiens
ctttacttggggatt

SEQ ID NO: 216307 - DNA, 15 bp, Homo sapiens
tctttacttggggat

SEQ ID NO: 216308 - DNA, 15 bp, Homo sapiens
ttctttacttgggga

SEQ ID NO: 216309 - DNA, 15 bp, Homo sapiens
cttctttacttgggg

SEQ ID NO: 216310 - DNA, 15 bp, Homo sapiens
ccttctttacttggg

SEQ ID NO: 216311 - DNA, 15 bp, Homo sapiens
tccttctttacttgg

SEQ ID NO: 216312 - DNA, 15 bp, Homo sapiens
ttccttctttacttg

SEQ ID NO: 216313 - DNA, 15 bp, Homo sapiens
tttccttctttactt

SEQ ID NO: 216314 - DNA, 15 bp, Homo sapiens
ttttccttctttact

SEQ ID NO: 216315 - DNA, 15 bp, Homo sapiens
attttccttctttac

SEQ ID NO: 216316 - DNA, 15 bp, Homo sapiens
cattttccttcttta

SEQ ID NO: 216317 - DNA, 15 bp, Homo sapiens
acattttccttcttt

SEQ ID NO: 216318 - DNA, 15 bp, Homo sapiens
cacattttccttctt

SEQ ID NO: 216319 - DNA, 15 bp, Homo sapiens
tcacattttccttct

SEQ ID NO: 216320 - DNA, 15 bp, Homo sapiens
ctcacattttccttc

SEQ ID NO: 216321 - DNA, 15 bp, Homo sapiens
cctcacattttcctt

SEQ ID NO: 216322 - DNA, 15 bp, Homo sapiens
ccctcacattttcct

SEQ ID NO: 216323 - DNA, 15 bp, Homo sapiens
gccctcacattttcc

SEQ ID NO: 216324 - DNA, 15 bp, Homo sapiens
tgccctcacattttc

SEQ ID NO: 216325 - DNA, 15 bp, Homo sapiens
atgccctcacatttt

SEQ ID NO: 216326 - DNA, 15 bp, Homo sapiens
gatgccctcacattt

SEQ ID NO: 216327 - DNA, 15 bp, Homo sapiens
agatgccctcacatt

SEQ ID NO: 216328 - DNA, 15 bp, Homo sapiens
cagatgccctcacat

SEQ ID NO: 216329 - DNA, 15 bp, Homo sapiens
tcagatgccctcaca

SEQ ID NO: 216330 - DNA, 15 bp, Homo sapiens
ttcagatgccctcac

SEQ ID NO: 216331 - DNA, 15 bp, Homo sapiens
cttcagatgccctca

SEQ ID NO: 216332 - DNA, 15 bp, Homo sapiens
tcttcagatgccctc

SEQ ID NO: 216333 - DNA, 15 bp, Homo sapiens
ttcttcagatgccct

SEQ ID NO: 216334 - DNA, 15 bp, Homo sapiens
cttcttcagatgccc

SEQ ID NO: 216335 - DNA, 15 bp, Homo sapiens
tcttcttcagatgcc

SEQ ID NO: 216336 - DNA, 15 bp, Homo sapiens
ctcttcttcagatgc

SEQ ID NO: 216337 - DNA, 15 bp, Homo sapiens
tctcttcttcagatg

SEQ ID NO: 216338 - DNA, 15 bp, Homo sapiens
ctctcttcttcagat

SEQ ID NO: 216339 - DNA, 15 bp, Homo sapiens
gctctcttcttcaga

SEQ ID NO: 216340 - DNA, 15 bp, Homo sapiens
tgctctcttcttcag

SEQ ID NO: 216341 - DNA, 15 bp, Homo sapiens
atgctctcttcttca

SEQ ID NO: 216342 - DNA, 15 bp, Homo sapiens
catgctctcttcttc

SEQ ID NO: 216343 - DNA, 15 bp, Homo sapiens
acatgctctcttctt

SEQ ID NO: 216344 - DNA, 15 bp, Homo sapiens
aacatgctctcttct

SEQ ID NO: 216345 - DNA, 15 bp, Homo sapiens
gaacatgctctcttc

SEQ ID NO: 216346 - DNA, 15 bp, Homo sapiens
cgaacatgctctctt

SEQ ID NO: 216347 - DNA, 15 bp, Homo sapiens
acgaacatgctctct

SEQ ID NO: 216348 - DNA, 15 bp, Homo sapiens
cacgaacatgctctc

SEQ ID NO: 216349 - DNA, 15 bp, Homo sapiens
acacgaacatgctct

SEQ ID NO: 216350 - DNA, 15 bp, Homo sapiens
tacacgaacatgctc

SEQ ID NO: 216351 - DNA, 15 bp, Homo sapiens
atacacgaacatgct

SEQ ID NO: 216352 - DNA, 15 bp, Homo sapiens
gatacacgaacatgc

SEQ ID NO: 216353 - DNA, 15 bp, Homo sapiens
cgatacacgaacatg

SEQ ID NO: 216354 - DNA, 15 bp, Homo sapiens
acgatacacgaacat

SEQ ID NO: 216355 - DNA, 15 bp, Homo sapiens
cacgatacacgaaca

SEQ ID NO: 216356 - DNA, 15 bp, Homo sapiens
tcacgatacacgaac

SEQ ID NO: 216357 - DNA, 15 bp, Homo sapiens
atcacgatacacgaa

SEQ ID NO: 216358 - DNA, 15 bp, Homo sapiens
gatcacgatacacga

SEQ ID NO: 216359 - DNA, 15 bp, Homo sapiens
cgatcacgatacacg

SEQ ID NO: 216360 - DNA, 15 bp, Homo sapiens
gcgatcacgatacac

SEQ ID NO: 216361 - DNA, 15 bp, Homo sapiens
agcgatcacgataca

SEQ ID NO: 216362 - DNA, 15 bp, Homo sapiens
cagcgatcacgatac

SEQ ID NO: 216363 - DNA, 15 bp, Homo sapiens
tcagcgatcacgata

SEQ ID NO: 216364 - DNA, 15 bp, Homo sapiens
atcagcgatcacgat

SEQ ID NO: 216365 - DNA, 15 bp, Homo sapiens
gatcagcgatcacga

SEQ ID NO: 216366 - DNA, 15 bp, Homo sapiens
tgatcagcgatcacg

SEQ ID NO: 216367 - DNA, 15 bp, Homo sapiens
ttgatcagcgatcac

SEQ ID NO: 216368 - DNA, 15 bp, Homo sapiens
gttgatcagcgatca

SEQ ID NO: 216369 - DNA, 15 bp, Homo sapiens
agttgatcagcgatc

SEQ ID NO: 216370 - DNA, 15 bp, Homo sapiens
gagttgatcagcgat

SEQ ID NO: 216371 - DNA, 15 bp, Homo sapiens
agagttgatcagcga

SEQ ID NO: 216372 - DNA, 15 bp, Homo sapiens
tagagttgatcagcg

SEQ ID NO: 216373 - DNA, 15 bp, Homo sapiens
ctagagttgatcagc

SEQ ID NO: 216374 - DNA, 15 bp, Homo sapiens
cctagagttgatcag

SEQ ID NO: 216375 - DNA, 15 bp, Homo sapiens
acctagagttgatca

SEQ ID NO: 216376 - DNA, 15 bp, Homo sapiens
aacctagagttgatc

SEQ ID NO: 216377 - DNA, 15 bp, Homo sapiens
aaacctagagttgat

SEQ ID NO: 216378 - DNA, 15 bp, Homo sapiens
taaacctagagttga

SEQ ID NO: 216379 - DNA, 15 bp, Homo sapiens
ttaaacctagagttg

SEQ ID NO: 216380 - DNA, 15 bp, Homo sapiens
gttaaacctagagtt

SEQ ID NO: 216381 - DNA, 15 bp, Homo sapiens
tgttaaacctagagt

SEQ ID NO: 216382 - DNA, 15 bp, Homo sapiens
ctgttaaacctagag

SEQ ID NO: 216383 - DNA, 15 bp, Homo sapiens
tctgttaaacctaga

SEQ ID NO: 216384 - DNA, 15 bp, Homo sapiens
gtctgttaaacctag

SEQ ID NO: 216385 - DNA, 15 bp, Homo sapiens
tgtctgttaaaccta

SEQ ID NO: 216386 - DNA, 15 bp, Homo sapiens
ctgtctgttaaacct

SEQ ID NO: 216387 - DNA, 15 bp, Homo sapiens
tctgtctgttaaacc

SEQ ID NO: 216388 - DNA, 15 bp, Homo sapiens
ttctgtctgttaaac

SEQ ID NO: 216389 - DNA, 15 bp, Homo sapiens
gttctgtctgttaaa

SEQ ID NO: 216390 - DNA, 15 bp, Homo sapiens
agttctgtctgttaa

SEQ ID NO: 216391 - DNA, 15 bp, Homo sapiens
aagttctgtctgtta

SEQ ID NO: 216392 - DNA, 15 bp, Homo sapiens
aaagttctgtctgtt

SEQ ID NO: 216393 - DNA, 15 bp, Homo sapiens
taaagttctgtctgt

SEQ ID NO: 216394 - DNA, 15 bp, Homo sapiens
ataaagttctgtctg

SEQ ID NO: 216395 - DNA, 15 bp, Homo sapiens
cataaagttctgtct

SEQ ID NO: 216396 - DNA, 15 bp, Homo sapiens
tcataaagttctgtc

SEQ ID NO: 216397 - DNA, 15 bp, Homo sapiens
ttcataaagttctgt

SEQ ID NO: 216398 - DNA, 15 bp, Homo sapiens
attcataaagttctg

SEQ ID NO: 216399 - DNA, 15 bp, Homo sapiens
cattcataaagttct

SEQ ID NO: 216400 - DNA, 15 bp, Homo sapiens
tcattcataaagttc

SEQ ID NO: 216401 - DNA, 15 bp, Homo sapiens
ctcattcataaagtt

SEQ ID NO: 216402 - DNA, 15 bp, Homo sapiens
cctcattcataaagt

SEQ ID NO: 216403 - DNA, 15 bp, Homo sapiens
tcctcattcataaag

SEQ ID NO: 216404 - DNA, 15 bp, Homo sapiens
ttcctcattcataaa

SEQ ID NO: 216405 - DNA, 15 bp, Homo sapiens
attcctcattcataa

SEQ ID NO: 216406 - DNA, 15 bp, Homo sapiens
cattcctcattcata

SEQ ID NO: 216407 - DNA, 15 bp, Homo sapiens
tcattcctcattcat

SEQ ID NO: 216408 - DNA, 15 bp, Homo sapiens
ctcattcctcattca

SEQ ID NO: 216409 - DNA, 15 bp, Homo sapiens
cctcattcctcattc

SEQ ID NO: 216410 - DNA, 15 bp, Homo sapiens
tcctcattcctcatt

SEQ ID NO: 216411 - DNA, 15 bp, Homo sapiens
ctcctcattcctcat

SEQ ID NO: 216412 - DNA, 15 bp, Homo sapiens
actcctcattcctca

SEQ ID NO: 216413 - DNA, 15 bp, Homo sapiens
gactcctcattcctc

SEQ ID NO: 216414 - DNA, 15 bp, Homo sapiens
tgactcctcattcct

SEQ ID NO: 216415 - DNA, 15 bp, Homo sapiens
atgactcctcattcc

SEQ ID NO: 216416 - DNA, 15 bp, Homo sapiens
gatgactcctcattc

SEQ ID NO: 216417 - DNA, 15 bp, Homo sapiens
agatgactcctcatt

SEQ ID NO: 216418 - DNA, 15 bp, Homo sapiens
tagatgactcctcat

SEQ ID NO: 216419 - DNA, 15 bp, Homo sapiens
ttagatgactcctca

SEQ ID NO: 216420 - DNA, 15 bp, Homo sapiens
gttagatgactcctc

SEQ ID NO: 216421 - DNA, 15 bp, Homo sapiens
agttagatgactcct

SEQ ID NO: 216422 - DNA, 15 bp, Homo sapiens
aagttagatgactcc

SEQ ID NO: 216423 - DNA, 15 bp, Homo sapiens
taagttagatgactc

SEQ ID NO: 216424 - DNA, 15 bp, Homo sapiens
ctaagttagatgact

SEQ ID NO: 216425 - DNA, 15 bp, Homo sapiens
cctaagttagatgac

SEQ ID NO: 216426 - DNA, 15 bp, Homo sapiens
ccctaagttagatga

SEQ ID NO: 216427 - DNA, 15 bp, Homo sapiens
accctaagttagatg

SEQ ID NO: 216428 - DNA, 15 bp, Homo sapiens
taccctaagttagat

SEQ ID NO: 216429 - DNA, 15 bp, Homo sapiens
ctaccctaagttaga

SEQ ID NO: 216430 - DNA, 15 bp, Homo sapiens
tctaccctaagttag

SEQ ID NO: 216431 - DNA, 15 bp, Homo sapiens
ctctaccctaagtta

SEQ ID NO: 216432 - DNA, 15 bp, Homo sapiens
actctaccctaagtt

SEQ ID NO: 216433 - DNA, 15 bp, Homo sapiens
cactctaccctaagt

SEQ ID NO: 216434 - DNA, 15 bp, Homo sapiens
tcactctaccctaag

SEQ ID NO: 216435 - DNA, 15 bp, Homo sapiens
ttcactctaccctaa

SEQ ID NO: 216436 - DNA, 15 bp, Homo sapiens
tttcactctacccta

SEQ ID NO: 216437 - DNA, 15 bp, Homo sapiens
ctttcactctaccct

SEQ ID NO: 216438 - DNA, 15 bp, Homo sapiens
cctttcactctaccc

SEQ ID NO: 216439 - DNA, 15 bp, Homo sapiens
ccctttcactctacc

SEQ ID NO: 216440 - DNA, 15 bp, Homo sapiens
cccctttcactctac

SEQ ID NO: 216441 - DNA, 15 bp, Homo sapiens
ccccctttcactcta

SEQ ID NO: 216442 - DNA, 15 bp, Homo sapiens
accccctttcactct

SEQ ID NO: 216443 - DNA, 15 bp, Homo sapiens
gaccccctttcactc

SEQ ID NO: 216444 - DNA, 15 bp, Homo sapiens
tgaccccctttcact

SEQ ID NO: 216445 - DNA, 15 bp, Homo sapiens
ctgaccccctttcac

SEQ ID NO: 216446 - DNA, 15 bp, Homo sapiens
cctgaccccctttca

SEQ ID NO: 216447 - DNA, 15 bp, Homo sapiens
acctgaccccctttc

SEQ ID NO: 216448 - DNA, 15 bp, Homo sapiens
cacctgacccccttt

SEQ ID NO: 216449 - DNA, 15 bp, Homo sapiens
ccacctgaccccctt

SEQ ID NO: 216450 - DNA, 15 bp, Homo sapiens
gccacctgaccccct

SEQ ID NO: 216451 - DNA, 15 bp, Homo sapiens
agccacctgaccccc

SEQ ID NO: 216452 - DNA, 15 bp, Homo sapiens
tagccacctgacccc

SEQ ID NO: 216453 - DNA, 15 bp, Homo sapiens
ttagccacctgaccc

SEQ ID NO: 216454 - DNA, 15 bp, Homo sapiens
tttagccacctgacc

SEQ ID NO: 216455 - DNA, 15 bp, Homo sapiens
ttttagccacctgac

SEQ ID NO: 216456 - DNA, 15 bp, Homo sapiens
gttttagccacctga

SEQ ID NO: 216457 - DNA, 15 bp, Homo sapiens
tgttttagccacctg

SEQ ID NO: 216458 - DNA, 15 bp, Homo sapiens
gtgttttagccacct

SEQ ID NO: 216459 - DNA, 15 bp, Homo sapiens
tgtgttttagccacc

SEQ ID NO: 216460 - DNA, 15 bp, Homo sapiens
ttgtgttttagccac

SEQ ID NO: 216461 - DNA, 15 bp, Homo sapiens
tttgtgttttagcca

SEQ ID NO: 216462 - DNA, 15 bp, Homo sapiens
ttttgtgttttagcc

SEQ ID NO: 216463 - DNA, 15 bp, Homo sapiens
gttttgtgttttagc

SEQ ID NO: 216464 - DNA, 15 bp, Homo sapiens
agttttgtgttttag

SEQ ID NO: 216465 - DNA, 15 bp, Homo sapiens
cagttttgtgtttta

SEQ ID NO: 216466 - DNA, 15 bp, Homo sapiens
ccagttttgtgtttt

SEQ ID NO: 216467 - DNA, 15 bp, Homo sapiens
accagttttgtgttt

SEQ ID NO: 216468 - DNA, 15 bp, Homo sapiens
caccagttttgtgtt

SEQ ID NO: 216469 - DNA, 15 bp, Homo sapiens
tcaccagttttgtgt

SEQ ID NO: 216470 - DNA, 15 bp, Homo sapiens
ttcaccagttttgtg

SEQ ID NO: 216471 - DNA, 15 bp, Homo sapiens
tttcaccagttttgt

SEQ ID NO: 216472 - DNA, 15 bp, Homo sapiens
ttttcaccagttttg

SEQ ID NO: 216473 - DNA, 15 bp, Homo sapiens
gttttcaccagtttt

SEQ ID NO: 216474 - DNA, 15 bp, Homo sapiens
agttttcaccagttt

SEQ ID NO: 216475 - DNA, 15 bp, Homo sapiens
cagttttcaccagtt

SEQ ID NO: 216476 - DNA, 15 bp, Homo sapiens
gcagttttcaccagt

SEQ ID NO: 216477 - DNA, 15 bp, Homo sapiens
agcagttttcaccag

SEQ ID NO: 216478 - DNA, 15 bp, Homo sapiens
tagcagttttcacca

SEQ ID NO: 216479 - DNA, 15 bp, Homo sapiens
ttagcagttttcacc

SEQ ID NO: 216480 - DNA, 15 bp, Homo sapiens
tttagcagttttcac

SEQ ID NO: 216481 - DNA, 15 bp, Homo sapiens
ctttagcagttttca

SEQ ID NO: 216482 - DNA, 15 bp, Homo sapiens
tctttagcagttttc

SEQ ID NO: 216483 - DNA, 15 bp, Homo sapiens
atctttagcagtttt

SEQ ID NO: 216484 - DNA, 15 bp, Homo sapiens
tatctttagcagttt

SEQ ID NO: 216485 - DNA, 15 bp, Homo sapiens
ctatctttagcagtt

SEQ ID NO: 216486 - DNA, 15 bp, Homo sapiens
gctatctttagcagt

SEQ ID NO: 216487 - DNA, 15 bp, Homo sapiens
ggctatctttagcag

SEQ ID NO: 216488 - DNA, 15 bp, Homo sapiens
tggctatctttagca

SEQ ID NO: 216489 - DNA, 15 bp, Homo sapiens
gtggctatctttagc

SEQ ID NO: 216490 - DNA, 15 bp, Homo sapiens
tgtggctatctttag

SEQ ID NO: 216491 - DNA, 15 bp, Homo sapiens
ctgtggctatcttta

SEQ ID NO: 216492 - DNA, 15 bp, Homo sapiens
tctgtggctatcttt

SEQ ID NO: 216493 - DNA, 15 bp, Homo sapiens
gtctgtggctatctt

SEQ ID NO: 216494 - DNA, 15 bp, Homo sapiens
tgtctgtggctatct

SEQ ID NO: 216495 - DNA, 15 bp, Homo sapiens
atgtctgtggctatc

SEQ ID NO: 216496 - DNA, 15 bp, Homo sapiens
aatgtctgtggctat

SEQ ID NO: 216497 - DNA, 15 bp, Homo sapiens
aaatgtctgtggcta

SEQ ID NO: 216498 - DNA, 15 bp, Homo sapiens
caaatgtctgtggct

SEQ ID NO: 216499 - DNA, 15 bp, Homo sapiens
acaaatgtctgtggc

SEQ ID NO: 216500 - DNA, 15 bp, Homo sapiens
tacaaatgtctgtgg

SEQ ID NO: 216501 - DNA, 15 bp, Homo sapiens
ttacaaatgtctgtg

SEQ ID NO: 216502 - DNA, 15 bp, Homo sapiens
tttacaaatgtctgt

SEQ ID NO: 216503 - DNA, 15 bp, Homo sapiens
ttttacaaatgtctg

SEQ ID NO: 216504 - DNA, 15 bp, Homo sapiens
attttacaaatgtct

SEQ ID NO: 216505 - DNA, 15 bp, Homo sapiens
aattttacaaatgtc

SEQ ID NO: 216506 - DNA, 15 bp, Homo sapiens
taattttacaaatgt

SEQ ID NO: 216507 - DNA, 15 bp, Homo sapiens
ataattttacaaatg

SEQ ID NO: 216508 - DNA, 15 bp, Homo sapiens
tataattttacaaat

SEQ ID NO: 216509 - DNA, 15 bp, Homo sapiens
ctataattttacaaa

SEQ ID NO: 216510 - DNA, 15 bp, Homo sapiens
cctataattttacaa

SEQ ID NO: 216511 - DNA, 15 bp, Homo sapiens
gcctataattttaca

SEQ ID NO: 216512 - DNA, 15 bp, Homo sapiens
tgcctataattttac

SEQ ID NO: 216513 - DNA, 15 bp, Homo sapiens
ctgcctataatttta

SEQ ID NO: 216514 - DNA, 15 bp, Homo sapiens
tctgcctataatttt

SEQ ID NO: 216515 - DNA, 15 bp, Homo sapiens
ctctgcctataattt

SEQ ID NO: 216516 - DNA, 15 bp, Homo sapiens
tctctgcctataatt

SEQ ID NO: 216517 - DNA, 15 bp, Homo sapiens
ttctctgcctataat

SEQ ID NO: 216518 - DNA, 15 bp, Homo sapiens
attctctgcctataa

SEQ ID NO: 216519 - DNA, 15 bp, Homo sapiens
aattctctgcctata

SEQ ID NO: 216520 - DNA, 15 bp, Homo sapiens
taattctctgcctat

SEQ ID NO: 216521 - DNA, 15 bp, Homo sapiens
ctaattctctgccta

SEQ ID NO: 216522 - DNA, 15 bp, Homo sapiens
tctaattctctgcct

SEQ ID NO: 216523 - DNA, 15 bp, Homo sapiens
ttctaattctctgcc

SEQ ID NO: 216524 - DNA, 15 bp, Homo sapiens
cttctaattctctgc

SEQ ID NO: 216525 - DNA, 15 bp, Homo sapiens
tcttctaattctctg

SEQ ID NO: 216526 - DNA, 15 bp, Homo sapiens
atcttctaattctct

SEQ ID NO: 216527 - DNA, 15 bp, Homo sapiens
catcttctaattctc

SEQ ID NO: 216528 - DNA, 15 bp, Homo sapiens
tcatcttctaattct

SEQ ID NO: 216529 - DNA, 15 bp, Homo sapiens
ttcatcttctaattc

SEQ ID NO: 216530 - DNA, 15 bp, Homo sapiens
gttcatcttctaatt

SEQ ID NO: 216531 - DNA, 15 bp, Homo sapiens
cgttcatcttctaat

SEQ ID NO: 216532 - DNA, 15 bp, Homo sapiens
tcgttcatcttctaa

SEQ ID NO: 216533 - DNA, 15 bp, Homo sapiens
ctcgttcatcttcta

SEQ ID NO: 216534 - DNA, 15 bp, Homo sapiens
tctcgttcatcttct

SEQ ID NO: 216535 - DNA, 15 bp, Homo sapiens
atctcgttcatcttc

SEQ ID NO: 216536 - DNA, 15 bp, Homo sapiens
catctcgttcatctt

SEQ ID NO: 216537 - DNA, 15 bp, Homo sapiens
ccatctcgttcatct

SEQ ID NO: 216538 - DNA, 15 bp, Homo sapiens
cccatctcgttcatc

SEQ ID NO: 216539 - DNA, 15 bp, Homo sapiens
tcccatctcgttcat

SEQ ID NO: 216540 - DNA, 15 bp, Homo sapiens
ctcccatctcgttca

SEQ ID NO: 216541 - DNA, 15 bp, Homo sapiens
tctcccatctcgttc

SEQ ID NO: 216542 - DNA, 15 bp, Homo sapiens
ctctcccatctcgtt

SEQ ID NO: 216543 - DNA, 15 bp, Homo sapiens
actctcccatctcgt

SEQ ID NO: 216544 - DNA, 15 bp, Homo sapiens
tactctcccatctcg

SEQ ID NO: 216545 - DNA, 15 bp, Homo sapiens
atactctcccatctc

SEQ ID NO: 216546 - DNA, 15 bp, Homo sapiens
gatactctcccatct

SEQ ID NO: 216547 - DNA, 15 bp, Homo sapiens
tgatactctcccatc

SEQ ID NO: 216548 - DNA, 15 bp, Homo sapiens
gtgatactctcccat

SEQ ID NO: 216549 - DNA, 15 bp, Homo sapiens
agtgatactctccca

SEQ ID NO: 216550 - DNA, 15 bp, Homo sapiens
cagtgatactctccc

SEQ ID NO: 216551 - DNA, 15 bp, Homo sapiens
gcagtgatactctcc

SEQ ID NO: 216552 - DNA, 15 bp, Homo sapiens
agcagtgatactctc

SEQ ID NO: 216553 - DNA, 15 bp, Homo sapiens
aagcagtgatactct

SEQ ID NO: 216554 - DNA, 15 bp, Homo sapiens
caagcagtgatactc

SEQ ID NO: 216555 - DNA, 15 bp, Homo sapiens
ccaagcagtgatact

SEQ ID NO: 216556 - DNA, 15 bp, Homo sapiens
cccaagcagtgatac

SEQ ID NO: 216557 - DNA, 15 bp, Homo sapiens
tcccaagcagtgata

SEQ ID NO: 216558 - DNA, 15 bp, Homo sapiens
ttcccaagcagtgat

SEQ ID NO: 216559 - DNA, 15 bp, Homo sapiens
tttcccaagcagtga

SEQ ID NO: 216560 - DNA, 15 bp, Homo sapiens
atttcccaagcagtg

SEQ ID NO: 216561 - DNA, 15 bp, Homo sapiens
catttcccaagcagt

SEQ ID NO: 216562 - DNA, 15 bp, Homo sapiens
acatttcccaagcag

SEQ ID NO: 216563 - DNA, 15 bp, Homo sapiens
cacatttcccaagca

SEQ ID NO: 216564 - DNA, 15 bp, Homo sapiens
tcacatttcccaagc

SEQ ID NO: 216565 - DNA, 15 bp, Homo sapiens
gtcacatttcccaag

SEQ ID NO: 216566 - DNA, 15 bp, Homo sapiens
tgtcacatttcccaa

SEQ ID NO: 216567 - DNA, 15 bp, Homo sapiens
gtgtcacatttccca

SEQ ID NO: 216568 - DNA, 15 bp, Homo sapiens
agtgtcacatttccc

SEQ ID NO: 216569 - DNA, 15 bp, Homo sapiens
cagtgtcacatttcc

SEQ ID NO: 216570 - DNA, 15 bp, Homo sapiens
acagtgtcacatttc

SEQ ID NO: 216571 - DNA, 15 bp, Homo sapiens
aacagtgtcacattt

SEQ ID NO: 216572 - DNA, 15 bp, Homo sapiens
taacagtgtcacatt

SEQ ID NO: 216573 - DNA, 15 bp, Homo sapiens
ctaacagtgtcacat

SEQ ID NO: 216574 - DNA, 15 bp, Homo sapiens
gctaacagtgtcaca

SEQ ID NO: 216575 - DNA, 15 bp, Homo sapiens
tgctaacagtgtcac

SEQ ID NO: 216576 - DNA, 15 bp, Homo sapiens
ttgctaacagtgtca

SEQ ID NO: 216577 - DNA, 15 bp, Homo sapiens
tttgctaacagtgtc

SEQ ID NO: 216578 - DNA, 15 bp, Homo sapiens
gtttgctaacagtgt

SEQ ID NO: 216579 - DNA, 15 bp, Homo sapiens
tgtttgctaacagtg

SEQ ID NO: 216580 - DNA, 15 bp, Homo sapiens
ctgtttgctaacagt

SEQ ID NO: 216581 - DNA, 15 bp, Homo sapiens
tctgtttgctaacag

SEQ ID NO: 216582 - DNA, 15 bp, Homo sapiens
ctctgtttgctaaca

SEQ ID NO: 216583 - DNA, 15 bp, Homo sapiens
tctctgtttgctaac

SEQ ID NO: 216584 - DNA, 15 bp, Homo sapiens
ttctctgtttgctaa

SEQ ID NO: 216585 - DNA, 15 bp, Homo sapiens
tttctctgtttgcta

SEQ ID NO: 216586 - DNA, 15 bp, Homo sapiens
gtttctctgtttgct

SEQ ID NO: 216587 - DNA, 15 bp, Homo sapiens
tgtttctctgtttgc

SEQ ID NO: 216588 - DNA, 15 bp, Homo sapiens
ttgtttctctgtttg

SEQ ID NO: 216589 - DNA, 15 bp, Homo sapiens
tttgtttctctgttt

SEQ ID NO: 216590 - DNA, 15 bp, Homo sapiens
gtttgtttctctgtt

SEQ ID NO: 216591 - DNA, 15 bp, Homo sapiens
agtttgtttctctgt

SEQ ID NO: 216592 - DNA, 15 bp, Homo sapiens
tagtttgtttctctg

SEQ ID NO: 216593 - DNA, 15 bp, Homo sapiens
ctagtttgtttctct

SEQ ID NO: 216594 - DNA, 15 bp, Homo sapiens
tctagtttgtttctc

SEQ ID NO: 216595 - DNA, 15 bp, Homo sapiens
ttctagtttgtttct

SEQ ID NO: 216596 - DNA, 15 bp, Homo sapiens
tttctagtttgtttc

SEQ ID NO: 216597 - DNA, 15 bp, Homo sapiens
ctttctagtttgttt

SEQ ID NO: 216598 - DNA, 15 bp, Homo sapiens
actttctagtttgtt

SEQ ID NO: 216599 - DNA, 15 bp, Homo sapiens
cactttctagtttgt

SEQ ID NO: 216600 - DNA, 15 bp, Homo sapiens
tcactttctagtttg

SEQ ID NO: 216601 - DNA, 15 bp, Homo sapiens
ctcactttctagttt

SEQ ID NO: 216602 - DNA, 15 bp, Homo sapiens
gctcactttctagtt

SEQ ID NO: 216603 - DNA, 15 bp, Homo sapiens
tgctcactttctagt

SEQ ID NO: 216604 - DNA, 15 bp, Homo sapiens
atgctcactttctag

SEQ ID NO: 216605 - DNA, 15 bp, Homo sapiens
aatgctcactttcta

SEQ ID NO: 216606 - DNA, 15 bp, Homo sapiens
aaatgctcactttct

SEQ ID NO: 216607 - DNA, 15 bp, Homo sapiens
gaaatgctcactttc

SEQ ID NO: 216608 - DNA, 15 bp, Homo sapiens
agaaatgctcacttt

SEQ ID NO: 216609 - DNA, 15 bp, Homo sapiens
cagaaatgctcactt

SEQ ID NO: 216610 - DNA, 15 bp, Homo sapiens
acagaaatgctcact

SEQ ID NO: 216611 - DNA, 15 bp, Homo sapiens
aacagaaatgctcac

SEQ ID NO: 216612 - DNA, 15 bp, Homo sapiens
aaacagaaatgctca

SEQ ID NO: 216613 - DNA, 15 bp, Homo sapiens
aaaacagaaatgctc

SEQ ID NO: 216614 - DNA, 15 bp, Homo sapiens
aaaaacagaaatgct

SEQ ID NO: 216615 - DNA, 15 bp, Homo sapiens
aaaaaacagaaatgc

SEQ ID NO: 216616 - DNA, 15 bp, Homo sapiens
aaaaaaacagaaatg

SEQ ID NO: 216617 - DNA, 15 bp, Homo sapiens
aaaaaaaacagaaat

SEQ ID NO: 216618 - DNA, 15 bp, Homo sapiens
gagaaaaaaaacaga

SEQ ID NO: 216619 - DNA, 15 bp, Homo sapiens
agagaaaaaaaacag

SEQ ID NO: 216620 - DNA, 15 bp, Homo sapiens
gagagaaaaaaaaca

SEQ ID NO: 216621 - DNA, 15 bp, Homo sapiens
agagagaaaaaaaac

SEQ ID NO: 216622 - DNA, 15 bp, Homo sapiens
gagagagaaaaaaaa

SEQ ID NO: 216623 - DNA, 15 bp, Homo sapiens
agagagagaaaaaaa

SEQ ID NO: 216624 - DNA, 15 bp, Homo sapiens
aagagagagaaaaaa

SEQ ID NO: 216625 - DNA, 15 bp, Homo sapiens
caagagagagaaaaa

SEQ ID NO: 216626 - DNA, 15 bp, Homo sapiens
acaagagagagaaaa

SEQ ID NO: 216627 - DNA, 15 bp, Homo sapiens
aacaagagagagaaa

SEQ ID NO: 216628 - DNA, 15 bp, Homo sapiens
aaacaagagagagaa

SEQ ID NO: 216629 - DNA, 15 bp, Homo sapiens
gaaacaagagagaga

SEQ ID NO: 216630 - DNA, 15 bp, Homo sapiens
agaaacaagagagag

SEQ ID NO: 216631 - DNA, 15 bp, Homo sapiens
tagaaacaagagaga

SEQ ID NO: 216632 - DNA, 15 bp, Homo sapiens
gtagaaacaagagag

SEQ ID NO: 216633 - DNA, 15 bp, Homo sapiens
ggtagaaacaagaga

SEQ ID NO: 216634 - DNA, 15 bp, Homo sapiens
aggtagaaacaagag

SEQ ID NO: 216635 - DNA, 15 bp, Homo sapiens
taggtagaaacaaga

SEQ ID NO: 216636 - DNA, 15 bp, Homo sapiens
ctaggtagaaacaag

SEQ ID NO: 216637 - DNA, 15 bp, Homo sapiens
cctaggtagaaacaa

SEQ ID NO: 216638 - DNA, 15 bp, Homo sapiens
tcctaggtagaaaca

SEQ ID NO: 216639 - DNA, 15 bp, Homo sapiens
atcctaggtagaaac

SEQ ID NO: 216640 - DNA, 15 bp, Homo sapiens
aatcctaggtagaaa

SEQ ID NO: 216641 - DNA, 15 bp, Homo sapiens
taatcctaggtagaa

SEQ ID NO: 216642 - DNA, 15 bp, Homo sapiens
gtaatcctaggtaga

SEQ ID NO: 216643 - DNA, 15 bp, Homo sapiens
agtaatcctaggtag

SEQ ID NO: 216644 - DNA, 15 bp, Homo sapiens
cagtaatcctaggta

SEQ ID NO: 216645 - DNA, 15 bp, Homo sapiens
acagtaatcctaggt

SEQ ID NO: 216646 - DNA, 15 bp, Homo sapiens
gacagtaatcctagg

SEQ ID NO: 216647 - DNA, 15 bp, Homo sapiens
agacagtaatcctag

SEQ ID NO: 216648 - DNA, 15 bp, Homo sapiens
aagacagtaatccta

SEQ ID NO: 216649 - DNA, 15 bp, Homo sapiens
aaagacagtaatcct

SEQ ID NO: 216650 - DNA, 15 bp, Homo sapiens
taaagacagtaatcc

SEQ ID NO: 216651 - DNA, 15 bp, Homo sapiens
ctaaagacagtaatc

SEQ ID NO: 216652 - DNA, 15 bp, Homo sapiens
tctaaagacagtaat

SEQ ID NO: 216653 - DNA, 15 bp, Homo sapiens
ttctaaagacagtaa

SEQ ID NO: 216654 - DNA, 15 bp, Homo sapiens
attctaaagacagta

SEQ ID NO: 216655 - DNA, 15 bp, Homo sapiens
cattctaaagacagt

SEQ ID NO: 216656 - DNA, 15 bp, Homo sapiens
tcattctaaagacag

SEQ ID NO: 216657 - DNA, 15 bp, Homo sapiens
ttcattctaaagaca

SEQ ID NO: 216658 - DNA, 15 bp, Homo sapiens
tttcattctaaagac

SEQ ID NO: 216659 - DNA, 15 bp, Homo sapiens
ttttcattctaaaga

SEQ ID NO: 216660 - DNA, 15 bp, Homo sapiens
tttttcattctaaag

SEQ ID NO: 216661 - DNA, 15 bp, Homo sapiens
ctttttcattctaaa

SEQ ID NO: 216662 - DNA, 15 bp, Homo sapiens
tctttttcattctaa

SEQ ID NO: 216663 - DNA, 15 bp, Homo sapiens
ctctttttcattcta

SEQ ID NO: 216664 - DNA, 15 bp, Homo sapiens
tctctttttcattct

SEQ ID NO: 216665 - DNA, 15 bp, Homo sapiens
ttctctttttcattc

SEQ ID NO: 216666 - DNA, 15 bp, Homo sapiens
tttctctttttcatt

SEQ ID NO: 216667 - DNA, 15 bp, Homo sapiens
ttttctctttttcat

SEQ ID NO: 216668 - DNA, 15 bp, Homo sapiens
attttctctttttca

SEQ ID NO: 216669 - DNA, 15 bp, Homo sapiens
gattttctctttttc

SEQ ID NO: 216670 - DNA, 15 bp, Homo sapiens
agattttctcttttt

SEQ ID NO: 216671 - DNA, 15 bp, Homo sapiens
gagattttctctttt

SEQ ID NO: 216672 - DNA, 15 bp, Homo sapiens
agagattttctcttt

SEQ ID NO: 216673 - DNA, 15 bp, Homo sapiens
aagagattttctctt

SEQ ID NO: 216674 - DNA, 15 bp, Homo sapiens
caagagattttctct

SEQ ID NO: 216675 - DNA, 15 bp, Homo sapiens
gcaagagattttctc

SEQ ID NO: 216676 - DNA, 15 bp, Homo sapiens
tgcaagagattttct

SEQ ID NO: 216677 - DNA, 15 bp, Homo sapiens
gtgcaagagattttc

SEQ ID NO: 216678 - DNA, 15 bp, Homo sapiens
tgtgcaagagatttt

SEQ ID NO: 216679 - DNA, 15 bp, Homo sapiens
ctgtgcaagagattt

SEQ ID NO: 216680 - DNA, 15 bp, Homo sapiens
tctgtgcaagagatt

SEQ ID NO: 216681 - DNA, 15 bp, Homo sapiens
ctctgtgcaagagat

SEQ ID NO: 216682 - DNA, 15 bp, Homo sapiens
gctctgtgcaagaga

SEQ ID NO: 216683 - DNA, 15 bp, Homo sapiens
agctctgtgcaagag

SEQ ID NO: 216684 - DNA, 15 bp, Homo sapiens
tagctctgtgcaaga

SEQ ID NO: 216685 - DNA, 15 bp, Homo sapiens
ctagctctgtgcaag

SEQ ID NO: 216686 - DNA, 15 bp, Homo sapiens
tctagctctgtgcaa

SEQ ID NO: 216687 - DNA, 15 bp, Homo sapiens
ctctagctctgtgca

SEQ ID NO: 216688 - DNA, 15 bp, Homo sapiens
tctctagctctgtgc

SEQ ID NO: 216689 - DNA, 15 bp, Homo sapiens
ctctctagctctgtg

SEQ ID NO: 216690 - DNA, 15 bp, Homo sapiens
cctctctagctctgt

SEQ ID NO: 216691 - DNA, 15 bp, Homo sapiens
gcctctctagctctg

SEQ ID NO: 216692 - DNA, 15 bp, Homo sapiens
tgcctctctagctct

SEQ ID NO: 216693 - DNA, 15 bp, Homo sapiens
gtgcctctctagctc

SEQ ID NO: 216694 - DNA, 15 bp, Homo sapiens
agtgcctctctagct

SEQ ID NO: 216695 - DNA, 15 bp, Homo sapiens
aagtgcctctctagc

SEQ ID NO: 216696 - DNA, 15 bp, Homo sapiens
aaagtgcctctctag

SEQ ID NO: 216697 - DNA, 15 bp, Homo sapiens
caaagtgcctctcta

SEQ ID NO: 216698 - DNA, 15 bp, Homo sapiens
tcaaagtgcctctct

SEQ ID NO: 216699 - DNA, 15 bp, Homo sapiens
ttcaaagtgcctctc

SEQ ID NO: 216700 - DNA, 15 bp, Homo sapiens
tttcaaagtgcctct

SEQ ID NO: 216701 - DNA, 15 bp, Homo sapiens
atttcaaagtgcctc

SEQ ID NO: 216702 - DNA, 15 bp, Homo sapiens
catttcaaagtgcct

SEQ ID NO: 216703 - DNA, 15 bp, Homo sapiens
gcatttcaaagtgcc

SEQ ID NO: 216704 - DNA, 15 bp, Homo sapiens
tgcatttcaaagtgc

SEQ ID NO: 216705 - DNA, 15 bp, Homo sapiens
atgcatttcaaagtg

SEQ ID NO: 216706 - DNA, 15 bp, Homo sapiens
aatgcatttcaaagt

SEQ ID NO: 216707 - DNA, 15 bp, Homo sapiens
aaatgcatttcaaag

SEQ ID NO: 216708 - DNA, 15 bp, Homo sapiens
gaaatgcatttcaaa

SEQ ID NO: 216709 - DNA, 15 bp, Homo sapiens
agaaatgcatttcaa

SEQ ID NO: 216710 - DNA, 15 bp, Homo sapiens
tagaaatgcatttca

SEQ ID NO: 216711 - DNA, 15 bp, Homo sapiens
ctagaaatgcatttc

SEQ ID NO: 216712 - DNA, 15 bp, Homo sapiens
cctagaaatgcattt

SEQ ID NO: 216713 - DNA, 15 bp, Homo sapiens
tcctagaaatgcatt

SEQ ID NO: 216714 - DNA, 15 bp, Homo sapiens
gtcctagaaatgcat

SEQ ID NO: 216715 - DNA, 15 bp, Homo sapiens
ggtcctagaaatgca

SEQ ID NO: 216716 - DNA, 15 bp, Homo sapiens
tggtcctagaaatgc

SEQ ID NO: 216717 - DNA, 15 bp, Homo sapiens
ctggtcctagaaatg

SEQ ID NO: 216718 - DNA, 15 bp, Homo sapiens
tctggtcctagaaat

SEQ ID NO: 216719 - DNA, 15 bp, Homo sapiens
ctctggtcctagaaa

SEQ ID NO: 216720 - DNA, 15 bp, Homo sapiens
cctctggtcctagaa

SEQ ID NO: 216721 - DNA, 15 bp, Homo sapiens
ccctctggtcctaga

SEQ ID NO: 216722 - DNA, 15 bp, Homo sapiens
cccctctggtcctag

SEQ ID NO: 216723 - DNA, 15 bp, Homo sapiens
gcccctctggtccta

SEQ ID NO: 216724 - DNA, 15 bp, Homo sapiens
agcccctctggtcct

SEQ ID NO: 216725 - DNA, 15 bp, Homo sapiens
gagcccctctggtcc

SEQ ID NO: 216726 - DNA, 15 bp, Homo sapiens
agagcccctctggtc

SEQ ID NO: 216727 - DNA, 15 bp, Homo sapiens
tagagcccctctggt

SEQ ID NO: 216728 - DNA, 15 bp, Homo sapiens
atagagcccctctgg

SEQ ID NO: 216729 - DNA, 15 bp, Homo sapiens
catagagcccctctg

SEQ ID NO: 216730 - DNA, 15 bp, Homo sapiens
ccatagagcccctct

SEQ ID NO: 216731 - DNA, 15 bp, Homo sapiens
gccatagagcccctc

SEQ ID NO: 216732 - DNA, 15 bp, Homo sapiens
agccatagagcccct

SEQ ID NO: 216733 - DNA, 15 bp, Homo sapiens
cagccatagagcccc

SEQ ID NO: 216734 - DNA, 15 bp, Homo sapiens
ccagccatagagccc

SEQ ID NO: 216735 - DNA, 15 bp, Homo sapiens
cccagccatagagcc

SEQ ID NO: 216736 - DNA, 15 bp, Homo sapiens
acccagccatagagc

SEQ ID NO: 216737 - DNA, 15 bp, Homo sapiens
gacccagccatagag

SEQ ID NO: 216738 - DNA, 15 bp, Homo sapiens
ggacccagccataga

SEQ ID NO: 216739 - DNA, 15 bp, Homo sapiens
aggacccagccatag

SEQ ID NO: 216740 - DNA, 15 bp, Homo sapiens
caggacccagccata

SEQ ID NO: 216741 - DNA, 15 bp, Homo sapiens
tcaggacccagccat

SEQ ID NO: 216742 - DNA, 15 bp, Homo sapiens
ttcaggacccagcca

SEQ ID NO: 216743 - DNA, 15 bp, Homo sapiens
tttcaggacccagcc

SEQ ID NO: 216744 - DNA, 15 bp, Homo sapiens
atttcaggacccagc

SEQ ID NO: 216745 - DNA, 15 bp, Homo sapiens
tatttcaggacccag

SEQ ID NO: 216746 - DNA, 15 bp, Homo sapiens
gtatttcaggaccca

SEQ ID NO: 216747 - DNA, 15 bp, Homo sapiens
tgtatttcaggaccc

SEQ ID NO: 216748 - DNA, 15 bp, Homo sapiens
gtgtatttcaggacc

SEQ ID NO: 216749 - DNA, 15 bp, Homo sapiens
agtgtatttcaggac

SEQ ID NO: 216750 - DNA, 15 bp, Homo sapiens
cagtgtatttcagga

SEQ ID NO: 216751 - DNA, 15 bp, Homo sapiens
acagtgtatttcagg

SEQ ID NO: 216752 - DNA, 15 bp, Homo sapiens
tacagtgtatttcag

SEQ ID NO: 216753 - DNA, 15 bp, Homo sapiens
ctacagtgtatttca

SEQ ID NO: 216754 - DNA, 15 bp, Homo sapiens
tctacagtgtatttc

SEQ ID NO: 216755 - DNA, 15 bp, Homo sapiens
atctacagtgtattt

SEQ ID NO: 216756 - DNA, 15 bp, Homo sapiens
catctacagtgtatt

SEQ ID NO: 216757 - DNA, 15 bp, Homo sapiens
acatctacagtgtat

SEQ ID NO: 216758 - DNA, 15 bp, Homo sapiens
cacatctacagtgta

SEQ ID NO: 216759 - DNA, 15 bp, Homo sapiens
ccacatctacagtgt

SEQ ID NO: 216760 - DNA, 15 bp, Homo sapiens
accacatctacagtg

SEQ ID NO: 216761 - DNA, 15 bp, Homo sapiens
aaccacatctacagt

SEQ ID NO: 216762 - DNA, 15 bp, Homo sapiens
caaccacatctacag

SEQ ID NO: 216763 - DNA, 15 bp, Homo sapiens
gcaaccacatctaca

SEQ ID NO: 216764 - DNA, 15 bp, Homo sapiens
tgcaaccacatctac

SEQ ID NO: 216765 - DNA, 15 bp, Homo sapiens
ctgcaaccacatcta

SEQ ID NO: 216766 - DNA, 15 bp, Homo sapiens
tctgcaaccacatct

SEQ ID NO: 216767 - DNA, 15 bp, Homo sapiens
ttctgcaaccacatc

SEQ ID NO: 216768 - DNA, 15 bp, Homo sapiens
cttctgcaaccacat

SEQ ID NO: 216769 - DNA, 15 bp, Homo sapiens
acttctgcaaccaca

SEQ ID NO: 216770 - DNA, 15 bp, Homo sapiens
cacttctgcaaccac

SEQ ID NO: 216771 - DNA, 15 bp, Homo sapiens
ccacttctgcaacca

SEQ ID NO: 216772 - DNA, 15 bp, Homo sapiens
cccacttctgcaacc

SEQ ID NO: 216773 - DNA, 15 bp, Homo sapiens
ccccacttctgcaac

SEQ ID NO: 216774 - DNA, 15 bp, Homo sapiens
tccccacttctgcaa

SEQ ID NO: 216775 - DNA, 15 bp, Homo sapiens
ctccccacttctgca

SEQ ID NO: 216776 - DNA, 15 bp, Homo sapiens
actccccacttctgc

SEQ ID NO: 216777 - DNA, 15 bp, Homo sapiens
gactccccacttctg

SEQ ID NO: 216778 - DNA, 15 bp, Homo sapiens
agactccccacttct

SEQ ID NO: 216779 - DNA, 15 bp, Homo sapiens
aagactccccacttc

SEQ ID NO: 216780 - DNA, 15 bp, Homo sapiens
aaagactccccactt

SEQ ID NO: 216781 - DNA, 15 bp, Homo sapiens
aaaagactccccact

SEQ ID NO: 216782 - DNA, 15 bp, Homo sapiens
caaaagactccccac

SEQ ID NO: 216783 - DNA, 15 bp, Homo sapiens
tcaaaagactcccca

SEQ ID NO: 216784 - DNA, 15 bp, Homo sapiens
atcaaaagactcccc

SEQ ID NO: 216785 - DNA, 15 bp, Homo sapiens
catcaaaagactccc

SEQ ID NO: 216786 - DNA, 15 bp, Homo sapiens
ccatcaaaagactcc

SEQ ID NO: 216787 - DNA, 15 bp, Homo sapiens
tccatcaaaagactc

SEQ ID NO: 216788 - DNA, 15 bp, Homo sapiens
gtccatcaaaagact

SEQ ID NO: 216789 - DNA, 15 bp, Homo sapiens
agtccatcaaaagac

SEQ ID NO: 216790 - DNA, 15 bp, Homo sapiens
tagtccatcaaaaga

SEQ ID NO: 216791 - DNA, 15 bp, Homo sapiens
atagtccatcaaaag

SEQ ID NO: 216792 - DNA, 15 bp, Homo sapiens
aatagtccatcaaaa

SEQ ID NO: 216793 - DNA, 15 bp, Homo sapiens
aaatagtccatcaaa

SEQ ID NO: 216794 - DNA, 15 bp, Homo sapiens
aaaatagtccatcaa

SEQ ID NO: 216795 - DNA, 15 bp, Homo sapiens
aaaaatagtccatca

SEQ ID NO: 216796 - DNA, 15 bp, Homo sapiens
aaaaaatagtccatc

SEQ ID NO: 216797 - DNA, 15 bp, Homo sapiens
gaaaaaatagtccat

SEQ ID NO: 216798 - DNA, 15 bp, Homo sapiens
tgaaaaaatagtcca

SEQ ID NO: 216799 - DNA, 15 bp, Homo sapiens
atgaaaaaatagtcc

SEQ ID NO: 216800 - DNA, 15 bp, Homo sapiens
aatgaaaaaatagtc

SEQ ID NO: 216801 - DNA, 15 bp, Homo sapiens
taatgaaaaaatagt

SEQ ID NO: 216802 - DNA, 15 bp, Homo sapiens
ataatgaaaaaatag

SEQ ID NO: 216803 - DNA, 15 bp, Homo sapiens
cataatgaaaaaata

SEQ ID NO: 216804 - DNA, 15 bp, Homo sapiens
ccataatgaaaaaat

SEQ ID NO: 216805 - DNA, 15 bp, Homo sapiens
cccataatgaaaaaa

SEQ ID NO: 216806 - DNA, 15 bp, Homo sapiens
acccataatgaaaaa

SEQ ID NO: 216807 - DNA, 15 bp, Homo sapiens
aacccataatgaaaa

SEQ ID NO: 216808 - DNA, 15 bp, Homo sapiens
gaacccataatgaaa

SEQ ID NO: 216809 - DNA, 15 bp, Homo sapiens
tgaacccataatgaa

SEQ ID NO: 216810 - DNA, 15 bp, Homo sapiens
ttgaacccataatga

SEQ ID NO: 216811 - DNA, 15 bp, Homo sapiens
attgaacccataatg

SEQ ID NO: 216812 - DNA, 15 bp, Homo sapiens
aattgaacccataat

SEQ ID NO: 216813 - DNA, 15 bp, Homo sapiens
aaattgaacccataa

SEQ ID NO: 216814 - DNA, 15 bp, Homo sapiens
aaaattgaacccata

SEQ ID NO: 216815 - DNA, 15 bp, Homo sapiens
aaaaattgaacccat

SEQ ID NO: 216816 - DNA, 15 bp, Homo sapiens
aaaaaattgaaccca

SEQ ID NO: 216817 - DNA, 15 bp, Homo sapiens
aaaaaaattgaaccc

SEQ ID NO: 216818 - DNA, 15 bp, Homo sapiens
caaaaaaattgaacc

SEQ ID NO: 216819 - DNA, 15 bp, Homo sapiens
gcaaaaaaattgaac

SEQ ID NO: 216820 - DNA, 15 bp, Homo sapiens
ggcaaaaaaattgaa

SEQ ID NO: 216821 - DNA, 15 bp, Homo sapiens
aggcaaaaaaattga

SEQ ID NO: 216822 - DNA, 15 bp, Homo sapiens
aaggcaaaaaaattg

SEQ ID NO: 216823 - DNA, 15 bp, Homo sapiens
aaaggcaaaaaaatt

SEQ ID NO: 216824 - DNA, 15 bp, Homo sapiens
aaaaggcaaaaaaat

SEQ ID NO: 216825 - DNA, 15 bp, Homo sapiens
aaaaaggcaaaaaaa

SEQ ID NO: 216826 - DNA, 15 bp, Homo sapiens
caaaaaggcaaaaaa

SEQ ID NO: 216827 - DNA, 15 bp, Homo sapiens
tcaaaaaggcaaaaa

SEQ ID NO: 216828 - DNA, 15 bp, Homo sapiens
ttcaaaaaggcaaaa

SEQ ID NO: 216829 - DNA, 15 bp, Homo sapiens
attcaaaaaggcaaa

SEQ ID NO: 216830 - DNA, 15 bp, Homo sapiens
cattcaaaaaggcaa

SEQ ID NO: 216831 - DNA, 15 bp, Homo sapiens
gcattcaaaaaggca

SEQ ID NO: 216832 - DNA, 15 bp, Homo sapiens
ggcattcaaaaaggc

SEQ ID NO: 216833 - DNA, 15 bp, Homo sapiens
aggcattcaaaaagg

SEQ ID NO: 216834 - DNA, 15 bp, Homo sapiens
caggcattcaaaaag

SEQ ID NO: 216835 - DNA, 15 bp, Homo sapiens
ccaggcattcaaaaa

SEQ ID NO: 216836 - DNA, 15 bp, Homo sapiens
accaggcattcaaaa

SEQ ID NO: 216837 - DNA, 15 bp, Homo sapiens
taccaggcattcaaa

SEQ ID NO: 216838 - DNA, 15 bp, Homo sapiens
ctaccaggcattcaa

SEQ ID NO: 216839 - DNA, 15 bp, Homo sapiens
actaccaggcattca

SEQ ID NO: 216840 - DNA, 15 bp, Homo sapiens
aactaccaggcattc

SEQ ID NO: 216841 - DNA, 15 bp, Homo sapiens
aaactaccaggcatt

SEQ ID NO: 216842 - DNA, 15 bp, Homo sapiens
aaaactaccaggcat

SEQ ID NO: 216843 - DNA, 15 bp, Homo sapiens
aaaaactaccaggca

SEQ ID NO: 216844 - DNA, 15 bp, Homo sapiens
caaaaactaccaggc

SEQ ID NO: 216845 - DNA, 15 bp, Homo sapiens
tcaaaaactaccagg

SEQ ID NO: 216846 - DNA, 15 bp, Homo sapiens
atcaaaaactaccag

SEQ ID NO: 216847 - DNA, 15 bp, Homo sapiens
aatcaaaaactacca

SEQ ID NO: 216848 - DNA, 15 bp, Homo sapiens
caatcaaaaactacc

SEQ ID NO: 216849 - DNA, 15 bp, Homo sapiens
ccaatcaaaaactac

SEQ ID NO: 216850 - DNA, 15 bp, Homo sapiens
tccaatcaaaaacta

SEQ ID NO: 216851 - DNA, 15 bp, Homo sapiens
atccaatcaaaaact

SEQ ID NO: 216852 - DNA, 15 bp, Homo sapiens
tatccaatcaaaaac

SEQ ID NO: 216853 - DNA, 15 bp, Homo sapiens
gtatccaatcaaaaa

SEQ ID NO: 216854 - DNA, 15 bp, Homo sapiens
ggtatccaatcaaaa

SEQ ID NO: 216855 - DNA, 15 bp, Homo sapiens
tggtatccaatcaaa

SEQ ID NO: 216856 - DNA, 15 bp, Homo sapiens
ctggtatccaatcaa

SEQ ID NO: 216857 - DNA, 15 bp, Homo sapiens
tctggtatccaatca

SEQ ID NO: 216858 - DNA, 15 bp, Homo sapiens
gtctggtatccaatc

SEQ ID NO: 216859 - DNA, 15 bp, Homo sapiens
tgtctggtatccaat

SEQ ID NO: 216860 - DNA, 15 bp, Homo sapiens
atgtctggtatccaa

SEQ ID NO: 216861 - DNA, 15 bp, Homo sapiens
aatgtctggtatcca

SEQ ID NO: 216862 - DNA, 15 bp, Homo sapiens
caatgtctggtatcc

SEQ ID NO: 216863 - DNA, 15 bp, Homo sapiens
acaatgtctggtatc

SEQ ID NO: 216864 - DNA, 15 bp, Homo sapiens
cacaatgtctggtat

SEQ ID NO: 216865 - DNA, 15 bp, Homo sapiens
tcacaatgtctggta

SEQ ID NO: 216866 - DNA, 15 bp, Homo sapiens
ttcacaatgtctggt

SEQ ID NO: 216867 - DNA, 15 bp, Homo sapiens
attcacaatgtctgg

SEQ ID NO: 216868 - DNA, 15 bp, Homo sapiens
aattcacaatgtctg

SEQ ID NO: 216869 - DNA, 15 bp, Homo sapiens
aaattcacaatgtct

SEQ ID NO: 216870 - DNA, 15 bp, Homo sapiens
aaaattcacaatgtc

SEQ ID NO: 216871 - DNA, 15 bp, Homo sapiens
taaaattcacaatgt

SEQ ID NO: 216872 - DNA, 15 bp, Homo sapiens
gtaaaattcacaatg

SEQ ID NO: 216873 - DNA, 15 bp, Homo sapiens
ggtaaaattcacaat

SEQ ID NO: 216874 - DNA, 15 bp, Homo sapiens
aggtaaaattcacaa

SEQ ID NO: 216875 - DNA, 15 bp, Homo sapiens
aaggtaaaattcaca

SEQ ID NO: 216876 - DNA, 15 bp, Homo sapiens
caaggtaaaattcac

SEQ ID NO: 216877 - DNA, 15 bp, Homo sapiens
acaaggtaaaattca

SEQ ID NO: 216878 - DNA, 15 bp, Homo sapiens
aacaaggtaaaattc

SEQ ID NO: 216879 - DNA, 15 bp, Homo sapiens
caacaaggtaaaatt

SEQ ID NO: 216880 - DNA, 15 bp, Homo sapiens
ccaacaaggtaaaat

SEQ ID NO: 216881 - DNA, 15 bp, Homo sapiens
accaacaaggtaaaa

SEQ ID NO: 216882 - DNA, 15 bp, Homo sapiens
aaccaacaaggtaaa

SEQ ID NO: 216883 - DNA, 15 bp, Homo sapiens
caaccaacaaggtaa

SEQ ID NO: 216884 - DNA, 15 bp, Homo sapiens
gcaaccaacaaggta

SEQ ID NO: 216885 - DNA, 15 bp, Homo sapiens
agcaaccaacaaggt

SEQ ID NO: 216886 - DNA, 15 bp, Homo sapiens
cagcaaccaacaagg

SEQ ID NO: 216887 - DNA, 15 bp, Homo sapiens
ccagcaaccaacaag

SEQ ID NO: 216888 - DNA, 15 bp, Homo sapiens
tccagcaaccaacaa

SEQ ID NO: 216889 - DNA, 15 bp, Homo sapiens
atccagcaaccaaca

SEQ ID NO: 216890 - DNA, 15 bp, Homo sapiens
tatccagcaaccaac

SEQ ID NO: 216891 - DNA, 15 bp, Homo sapiens
atatccagcaaccaa

SEQ ID NO: 216892 - DNA, 15 bp, Homo sapiens
gatatccagcaacca

SEQ ID NO: 216893 - DNA, 15 bp, Homo sapiens
agatatccagcaacc

SEQ ID NO: 216894 - DNA, 15 bp, Homo sapiens
aagatatccagcaac

SEQ ID NO: 216895 - DNA, 15 bp, Homo sapiens
taagatatccagcaa

SEQ ID NO: 216896 - DNA, 15 bp, Homo sapiens
ctaagatatccagca

SEQ ID NO: 216897 - DNA, 15 bp, Homo sapiens
actaagatatccagc

SEQ ID NO: 216898 - DNA, 15 bp, Homo sapiens
tactaagatatccag

SEQ ID NO: 216899 - DNA, 15 bp, Homo sapiens
gtactaagatatcca

SEQ ID NO: 216900 - DNA, 15 bp, Homo sapiens
agtactaagatatcc

SEQ ID NO: 216901 - DNA, 15 bp, Homo sapiens
gagtactaagatatc

SEQ ID NO: 216902 - DNA, 15 bp, Homo sapiens
ggagtactaagatat

SEQ ID NO: 216903 - DNA, 15 bp, Homo sapiens
aggagtactaagata

SEQ ID NO: 216904 - DNA, 15 bp, Homo sapiens
taggagtactaagat

SEQ ID NO: 216905 - DNA, 15 bp, Homo sapiens
ataggagtactaaga

SEQ ID NO: 216906 - DNA, 15 bp, Homo sapiens
tataggagtactaag

SEQ ID NO: 216907 - DNA, 15 bp, Homo sapiens
ttataggagtactaa

SEQ ID NO: 216908 - DNA, 15 bp, Homo sapiens
tttataggagtacta

SEQ ID NO: 216909 - DNA, 15 bp, Homo sapiens
ttttataggagtact

SEQ ID NO: 216910 - DNA, 15 bp, Homo sapiens
gttttataggagtac

SEQ ID NO: 216911 - DNA, 15 bp, Homo sapiens
tgttttataggagta

SEQ ID NO: 216912 - DNA, 15 bp, Homo sapiens
atgttttataggagt

SEQ ID NO: 216913 - DNA, 15 bp, Homo sapiens
aatgttttataggag

SEQ ID NO: 216914 - DNA, 15 bp, Homo sapiens
gaatgttttatagga

SEQ ID NO: 216915 - DNA, 15 bp, Homo sapiens
agaatgttttatagg

SEQ ID NO: 216916 - DNA, 15 bp, Homo sapiens
aagaatgttttatag

SEQ ID NO: 216917 - DNA, 15 bp, Homo sapiens
caagaatgttttata

SEQ ID NO: 216918 - DNA, 15 bp, Homo sapiens
tcaagaatgttttat

SEQ ID NO: 216919 - DNA, 15 bp, Homo sapiens
ctcaagaatgtttta

SEQ ID NO: 216920 - DNA, 15 bp, Homo sapiens
gctcaagaatgtttt

SEQ ID NO: 216921 - DNA, 15 bp, Homo sapiens
agctcaagaatgttt

SEQ ID NO: 216922 - DNA, 15 bp, Homo sapiens
aagctcaagaatgtt

SEQ ID NO: 216923 - DNA, 15 bp, Homo sapiens
taagctcaagaatgt

SEQ ID NO: 216924 - DNA, 15 bp, Homo sapiens
ataagctcaagaatg

SEQ ID NO: 216925 - DNA, 15 bp, Homo sapiens
aataagctcaagaat

SEQ ID NO: 216926 - DNA, 15 bp, Homo sapiens
aaataagctcaagaa

SEQ ID NO: 216927 - DNA, 15 bp, Homo sapiens
aaaataagctcaaga

SEQ ID NO: 216928 - DNA, 15 bp, Homo sapiens
gaaaataagctcaag

SEQ ID NO: 216929 - DNA, 15 bp, Homo sapiens
agaaaataagctcaa

SEQ ID NO: 216930 - DNA, 15 bp, Homo sapiens
cagaaaataagctca

SEQ ID NO: 216931 - DNA, 15 bp, Homo sapiens
ccagaaaataagctc

SEQ ID NO: 216932 - DNA, 15 bp, Homo sapiens
cccagaaaataagct

SEQ ID NO: 216933 - DNA, 15 bp, Homo sapiens
tcccagaaaataagc

SEQ ID NO: 216934 - DNA, 15 bp, Homo sapiens
gtcccagaaaataag

SEQ ID NO: 216935 - DNA, 15 bp, Homo sapiens
tgtcccagaaaataa

SEQ ID NO: 216936 - DNA, 15 bp, Homo sapiens
atgtcccagaaaata

SEQ ID NO: 216937 - DNA, 15 bp, Homo sapiens
catgtcccagaaaat

SEQ ID NO: 216938 - DNA, 15 bp, Homo sapiens
tcatgtcccagaaaa

SEQ ID NO: 216939 - DNA, 15 bp, Homo sapiens
atcatgtcccagaaa

SEQ ID NO: 216940 - DNA, 15 bp, Homo sapiens
gatcatgtcccagaa

SEQ ID NO: 216941 - DNA, 15 bp, Homo sapiens
tgatcatgtcccaga

SEQ ID NO: 216942 - DNA, 15 bp, Homo sapiens
ttgatcatgtcccag

SEQ ID NO: 216943 - DNA, 15 bp, Homo sapiens
cttgatcatgtccca

SEQ ID NO: 216944 - DNA, 15 bp, Homo sapiens
acttgatcatgtccc

SEQ ID NO: 216945 - DNA, 15 bp, Homo sapiens
aacttgatcatgtcc

SEQ ID NO: 216946 - DNA, 15 bp, Homo sapiens
caacttgatcatgtc

SEQ ID NO: 216947 - DNA, 15 bp, Homo sapiens
acaacttgatcatgt

SEQ ID NO: 216948 - DNA, 15 bp, Homo sapiens
tacaacttgatcatg

SEQ ID NO: 216949 - DNA, 15 bp, Homo sapiens
atacaacttgatcat

SEQ ID NO: 216950 - DNA, 15 bp, Homo sapiens
catacaacttgatca

SEQ ID NO: 216951 - DNA, 15 bp, Homo sapiens
ccatacaacttgatc

SEQ ID NO: 216952 - DNA, 15 bp, Homo sapiens
tccatacaacttgat

SEQ ID NO: 216953 - DNA, 15 bp, Homo sapiens
ttccatacaacttga

SEQ ID NO: 216954 - DNA, 15 bp, Homo sapiens
tttccatacaacttg

SEQ ID NO: 216955 - DNA, 15 bp, Homo sapiens
gtttccatacaactt

SEQ ID NO: 216956 - DNA, 15 bp, Homo sapiens
tgtttccatacaact

SEQ ID NO: 216957 - DNA, 15 bp, Homo sapiens
ctgtttccatacaac

SEQ ID NO: 216958 - DNA, 15 bp, Homo sapiens
actgtttccatacaa

SEQ ID NO: 216959 - DNA, 15 bp, Homo sapiens
aactgtttccataca

SEQ ID NO: 216960 - DNA, 15 bp, Homo sapiens
aaactgtttccatac

SEQ ID NO: 216961 - DNA, 15 bp, Homo sapiens
caaactgtttccata

SEQ ID NO: 216962 - DNA, 15 bp, Homo sapiens
tcaaactgtttccat

SEQ ID NO: 216963 - DNA, 15 bp, Homo sapiens
atcaaactgtttcca

SEQ ID NO: 216964 - DNA, 15 bp, Homo sapiens
gatcaaactgtttcc

SEQ ID NO: 216965 - DNA, 15 bp, Homo sapiens
agatcaaactgtttc

SEQ ID NO: 216966 - DNA, 15 bp, Homo sapiens
aagatcaaactgttt

SEQ ID NO: 216967 - DNA, 15 bp, Homo sapiens
aaagatcaaactgtt

SEQ ID NO: 216968 - DNA, 15 bp, Homo sapiens
aaaagatcaaactgt

SEQ ID NO: 216969 - DNA, 15 bp, Homo sapiens
aaaaagatcaaactg

SEQ ID NO: 216970 - DNA, 15 bp, Homo sapiens
aaaaaagatcaaact

SEQ ID NO: 216971 - DNA, 15 bp, Homo sapiens
caaaaaagatcaaac

SEQ ID NO: 216972 - DNA, 15 bp, Homo sapiens
ccaaaaaagatcaaa

SEQ ID NO: 216973 - DNA, 15 bp, Homo sapiens
cccaaaaaagatcaa

SEQ ID NO: 216974 - DNA, 15 bp, Homo sapiens
acccaaaaaagatca

SEQ ID NO: 216975 - DNA, 15 bp, Homo sapiens
gacccaaaaaagatc

SEQ ID NO: 216976 - DNA, 15 bp, Homo sapiens
agacccaaaaaagat

SEQ ID NO: 216977 - DNA, 15 bp, Homo sapiens
aagacccaaaaaaga

SEQ ID NO: 216978 - DNA, 15 bp, Homo sapiens
caagacccaaaaaag

SEQ ID NO: 216979 - DNA, 15 bp, Homo sapiens
gcaagacccaaaaaa

SEQ ID NO: 216980 - DNA, 15 bp, Homo sapiens
ggcaagacccaaaaa

SEQ ID NO: 216981 - DNA, 15 bp, Homo sapiens
aggcaagacccaaaa

SEQ ID NO: 216982 - DNA, 15 bp, Homo sapiens
aaggcaagacccaaa

SEQ ID NO: 216983 - DNA, 15 bp, Homo sapiens
aaaggcaagacccaa

SEQ ID NO: 216984 - DNA, 15 bp, Homo sapiens
caaaggcaagaccca

SEQ ID NO: 216985 - DNA, 15 bp, Homo sapiens
tcaaaggcaagaccc

SEQ ID NO: 216986 - DNA, 15 bp, Homo sapiens
ctcaaaggcaagacc

SEQ ID NO: 216987 - DNA, 15 bp, Homo sapiens
gctcaaaggcaagac

SEQ ID NO: 216988 - DNA, 15 bp, Homo sapiens
agctcaaaggcaaga

SEQ ID NO: 216989 - DNA, 15 bp, Homo sapiens
aagctcaaaggcaag

SEQ ID NO: 216990 - DNA, 15 bp, Homo sapiens
aaagctcaaaggcaa

SEQ ID NO: 216991 - DNA, 15 bp, Homo sapiens
taaagctcaaaggca

SEQ ID NO: 216992 - DNA, 15 bp, Homo sapiens
ataaagctcaaaggc

SEQ ID NO: 216993 - DNA, 15 bp, Homo sapiens
aataaagctcaaagg

SEQ ID NO: 216994 - DNA, 15 bp, Homo sapiens
taataaagctcaaag

SEQ ID NO: 216995 - DNA, 15 bp, Homo sapiens
ctaataaagctcaaa

SEQ ID NO: 216996 - DNA, 15 bp, Homo sapiens
cctaataaagctcaa

SEQ ID NO: 216997 - DNA, 15 bp, Homo sapiens
acctaataaagctca

SEQ ID NO: 216998 - DNA, 15 bp, Homo sapiens
cacctaataaagctc

SEQ ID NO: 216999 - DNA, 15 bp, Homo sapiens
ccacctaataaagct

SEQ ID NO: 217000 - DNA, 15 bp, Homo sapiens
tccacctaataaagc

SEQ ID NO: 217001 - DNA, 15 bp, Homo sapiens
ttccacctaataaag

SEQ ID NO: 217002 - DNA, 15 bp, Homo sapiens
gttccacctaataaa

SEQ ID NO: 217003 - DNA, 15 bp, Homo sapiens
ggttccacctaataa

SEQ ID NO: 217004 - DNA, 15 bp, Homo sapiens
tggttccacctaata

SEQ ID NO: 217005 - DNA, 15 bp, Homo sapiens
ctggttccacctaat

SEQ ID NO: 217006 - DNA, 15 bp, Homo sapiens
tctggttccacctaa

SEQ ID NO: 217007 - DNA, 15 bp, Homo sapiens
ctctggttccaccta

SEQ ID NO: 217008 - DNA, 15 bp, Homo sapiens
gctctggttccacct

SEQ ID NO: 217009 - DNA, 15 bp, Homo sapiens
agctctggttccacc

SEQ ID NO: 217010 - DNA, 15 bp, Homo sapiens
gagctctggttccac

SEQ ID NO: 217011 - DNA, 15 bp, Homo sapiens
agagctctggttcca

SEQ ID NO: 217012 - DNA, 15 bp, Homo sapiens
gagagctctggttcc

SEQ ID NO: 217013 - DNA, 15 bp, Homo sapiens
agagagctctggttc

SEQ ID NO: 217014 - DNA, 15 bp, Homo sapiens
aagagagctctggtt

SEQ ID NO: 217015 - DNA, 15 bp, Homo sapiens
taagagagctctggt

SEQ ID NO: 217016 - DNA, 15 bp, Homo sapiens
ttaagagagctctgg

SEQ ID NO: 217017 - DNA, 15 bp, Homo sapiens
attaagagagctctg

SEQ ID NO: 217018 - DNA, 15 bp, Homo sapiens
gattaagagagctct

SEQ ID NO: 217019 - DNA, 15 bp, Homo sapiens
agattaagagagctc

SEQ ID NO: 217020 - DNA, 15 bp, Homo sapiens
tagattaagagagct

SEQ ID NO: 217021 - DNA, 15 bp, Homo sapiens
ctagattaagagagc

SEQ ID NO: 217022 - DNA, 15 bp, Homo sapiens
cctagattaagagag

SEQ ID NO: 217023 - DNA, 15 bp, Homo sapiens
ccctagattaagaga

SEQ ID NO: 217024 - DNA, 15 bp, Homo sapiens
gccctagattaagag

SEQ ID NO: 217025 - DNA, 15 bp, Homo sapiens
agccctagattaaga

SEQ ID NO: 217026 - DNA, 15 bp, Homo sapiens
tagccctagattaag

SEQ ID NO: 217027 - DNA, 15 bp, Homo sapiens
ttagccctagattaa

SEQ ID NO: 217028 - DNA, 15 bp, Homo sapiens
attagccctagatta

SEQ ID NO: 217029 - DNA, 15 bp, Homo sapiens
aattagccctagatt

SEQ ID NO: 217030 - DNA, 15 bp, Homo sapiens
aaattagccctagat

SEQ ID NO: 217031 - DNA, 15 bp, Homo sapiens
aaaattagccctaga

SEQ ID NO: 217032 - DNA, 15 bp, Homo sapiens
aaaaattagccctag

SEQ ID NO: 217033 - DNA, 15 bp, Homo sapiens
aaaaaattagcccta

SEQ ID NO: 217034 - DNA, 15 bp, Homo sapiens
gaaaaaattagccct

SEQ ID NO: 217035 - DNA, 15 bp, Homo sapiens
ggaaaaaattagccc

SEQ ID NO: 217036 - DNA, 15 bp, Homo sapiens
gggaaaaaattagcc

SEQ ID NO: 217037 - DNA, 15 bp, Homo sapiens
tgggaaaaaattagc

SEQ ID NO: 217038 - DNA, 15 bp, Homo sapiens
gtgggaaaaaattag

SEQ ID NO: 217039 - DNA, 15 bp, Homo sapiens
agtgggaaaaaatta

SEQ ID NO: 217040 - DNA, 15 bp, Homo sapiens
tagtgggaaaaaatt

SEQ ID NO: 217041 - DNA, 15 bp, Homo sapiens
gtagtgggaaaaaat

SEQ ID NO: 217042 - DNA, 15 bp, Homo sapiens
tgtagtgggaaaaaa

SEQ ID NO: 217043 - DNA, 15 bp, Homo sapiens
ctgtagtgggaaaaa

SEQ ID NO: 217044 - DNA, 15 bp, Homo sapiens
tctgtagtgggaaaa

SEQ ID NO: 217045 - DNA, 15 bp, Homo sapiens
ctctgtagtgggaaa

SEQ ID NO: 217046 - DNA, 15 bp, Homo sapiens
tctctgtagtgggaa

SEQ ID NO: 217047 - DNA, 15 bp, Homo sapiens
gtctctgtagtggga

SEQ ID NO: 217048 - DNA, 15 bp, Homo sapiens
cgtctctgtagtggg

SEQ ID NO: 217049 - DNA, 15 bp, Homo sapiens
gcgtctctgtagtgg

SEQ ID NO: 217050 - DNA, 15 bp, Homo sapiens
agcgtctctgtagtg

SEQ ID NO: 217051 - DNA, 15 bp, Homo sapiens
cagcgtctctgtagt

SEQ ID NO: 217052 - DNA, 15 bp, Homo sapiens
gcagcgtctctgtag

SEQ ID NO: 217053 - DNA, 15 bp, Homo sapiens
agcagcgtctctgta

SEQ ID NO: 217054 - DNA, 15 bp, Homo sapiens
tagcagcgtctctgt

SEQ ID NO: 217055 - DNA, 15 bp, Homo sapiens
atagcagcgtctctg

SEQ ID NO: 217056 - DNA, 15 bp, Homo sapiens
aatagcagcgtctct

SEQ ID NO: 217057 - DNA, 15 bp, Homo sapiens
gaatagcagcgtctc

SEQ ID NO: 217058 - DNA, 15 bp, Homo sapiens
agaatagcagcgtct

SEQ ID NO: 217059 - DNA, 15 bp, Homo sapiens
gagaatagcagcgtc

SEQ ID NO: 217060 - DNA, 15 bp, Homo sapiens
tgagaatagcagcgt

SEQ ID NO: 217061 - DNA, 15 bp, Homo sapiens
ctgagaatagcagcg

SEQ ID NO: 217062 - DNA, 15 bp, Homo sapiens
actgagaatagcagc

SEQ ID NO: 217063 - DNA, 15 bp, Homo sapiens
tactgagaatagcag

SEQ ID NO: 217064 - DNA, 15 bp, Homo sapiens
gtactgagaatagca

SEQ ID NO: 217065 - DNA, 15 bp, Homo sapiens
agtactgagaatagc

SEQ ID NO: 217066 - DNA, 15 bp, Homo sapiens
gagtactgagaatag

SEQ ID NO: 217067 - DNA, 15 bp, Homo sapiens
agagtactgagaata

SEQ ID NO: 217068 - DNA, 15 bp, Homo sapiens
tagagtactgagaat

SEQ ID NO: 217069 - DNA, 15 bp, Homo sapiens
gtagagtactgagaa

SEQ ID NO: 217070 - DNA, 15 bp, Homo sapiens
ggtagagtactgaga

SEQ ID NO: 217071 - DNA, 15 bp, Homo sapiens
tggtagagtactgag

SEQ ID NO: 217072 - DNA, 15 bp, Homo sapiens
ctggtagagtactga

SEQ ID NO: 217073 - DNA, 15 bp, Homo sapiens
cctggtagagtactg

SEQ ID NO: 217074 - DNA, 15 bp, Homo sapiens
acctggtagagtact

SEQ ID NO: 217075 - DNA, 15 bp, Homo sapiens
cacctggtagagtac

SEQ ID NO: 217076 - DNA, 15 bp, Homo sapiens
gcacctggtagagta

SEQ ID NO: 217077 - DNA, 15 bp, Homo sapiens
agcacctggtagagt

SEQ ID NO: 217078 - DNA, 15 bp, Homo sapiens
gagcacctggtagag

SEQ ID NO: 217079 - DNA, 15 bp, Homo sapiens
agagcacctggtaga

SEQ ID NO: 217080 - DNA, 15 bp, Homo sapiens
cagagcacctggtag

SEQ ID NO: 217081 - DNA, 15 bp, Homo sapiens
acagagcacctggta

SEQ ID NO: 217082 - DNA, 15 bp, Homo sapiens
cacagagcacctggt

SEQ ID NO: 217083 - DNA, 15 bp, Homo sapiens
tcacagagcacctgg

SEQ ID NO: 217084 - DNA, 15 bp, Homo sapiens
ctcacagagcacctg

SEQ ID NO: 217085 - DNA, 15 bp, Homo sapiens
gctcacagagcacct

SEQ ID NO: 217086 - DNA, 15 bp, Homo sapiens
agctcacagagcacc

SEQ ID NO: 217087 - DNA, 15 bp, Homo sapiens
aagctcacagagcac

SEQ ID NO: 217088 - DNA, 15 bp, Homo sapiens
caagctcacagagca

SEQ ID NO: 217089 - DNA, 15 bp, Homo sapiens
tcaagctcacagagc

SEQ ID NO: 217090 - DNA, 15 bp, Homo sapiens
ctcaagctcacagag

SEQ ID NO: 217091 - DNA, 15 bp, Homo sapiens
cctcaagctcacaga

SEQ ID NO: 217092 - DNA, 15 bp, Homo sapiens
acctcaagctcacag

SEQ ID NO: 217093 - DNA, 15 bp, Homo sapiens
aacctcaagctcaca

SEQ ID NO: 217094 - DNA, 15 bp, Homo sapiens
aaacctcaagctcac

SEQ ID NO: 217095 - DNA, 15 bp, Homo sapiens
gaaacctcaagctca

SEQ ID NO: 217096 - DNA, 15 bp, Homo sapiens
ggaaacctcaagctc

SEQ ID NO: 217097 - DNA, 15 bp, Homo sapiens
tggaaacctcaagct

SEQ ID NO: 217098 - DNA, 15 bp, Homo sapiens
gtggaaacctcaagc

SEQ ID NO: 217099 - DNA, 15 bp, Homo sapiens
agtggaaacctcaag

SEQ ID NO: 217100 - DNA, 15 bp, Homo sapiens
gagtggaaacctcaa

SEQ ID NO: 217101 - DNA, 15 bp, Homo sapiens
agagtggaaacctca

SEQ ID NO: 217102 - DNA, 15 bp, Homo sapiens
cagagtggaaacctc

SEQ ID NO: 217103 - DNA, 15 bp, Homo sapiens
ccagagtggaaacct

SEQ ID NO: 217104 - DNA, 15 bp, Homo sapiens
gccagagtggaaacc

SEQ ID NO: 217105 - DNA, 15 bp, Homo sapiens
agccagagtggaaac

SEQ ID NO: 217106 - DNA, 15 bp, Homo sapiens
cagccagagtggaaa

SEQ ID NO: 217107 - DNA, 15 bp, Homo sapiens
ccagccagagtggaa

SEQ ID NO: 217108 - DNA, 15 bp, Homo sapiens
accagccagagtgga

SEQ ID NO: 217109 - DNA, 15 bp, Homo sapiens
caccagccagagtgg

SEQ ID NO: 217110 - DNA, 15 bp, Homo sapiens
ccaccagccagagtg

SEQ ID NO: 217111 - DNA, 15 bp, Homo sapiens
cccaccagccagagt

SEQ ID NO: 217112 - DNA, 15 bp, Homo sapiens
tcccaccagccagag

SEQ ID NO: 217113 - DNA, 15 bp, Homo sapiens
ttcccaccagccaga

SEQ ID NO: 217114 - DNA, 15 bp, Homo sapiens
cttcccaccagccag

SEQ ID NO: 217115 - DNA, 15 bp, Homo sapiens
ccttcccaccagcca

SEQ ID NO: 217116 - DNA, 15 bp, Homo sapiens
accttcccaccagcc

SEQ ID NO: 217117 - DNA, 15 bp, Homo sapiens
caccttcccaccagc

SEQ ID NO: 217118 - DNA, 15 bp, Homo sapiens
tcaccttcccaccag

SEQ ID NO: 217119 - DNA, 15 bp, Homo sapiens
ttcaccttcccacca

SEQ ID NO: 217120 - DNA, 15 bp, Homo sapiens
gttcaccttcccacc

SEQ ID NO: 217121 - DNA, 15 bp, Homo sapiens
ggttcaccttcccac

SEQ ID NO: 217122 - DNA, 15 bp, Homo sapiens
cggttcaccttccca

SEQ ID NO: 217123 - DNA, 15 bp, Homo sapiens
acggttcaccttccc

SEQ ID NO: 217124 - DNA, 15 bp, Homo sapiens
aacggttcaccttcc

SEQ ID NO: 217125 - DNA, 15 bp, Homo sapiens
gaacggttcaccttc

SEQ ID NO: 217126 - DNA, 15 bp, Homo sapiens
ggaacggttcacctt

SEQ ID NO: 217127 - DNA, 15 bp, Homo sapiens
gggaacggttcacct

SEQ ID NO: 217128 - DNA, 15 bp, Homo sapiens
tgggaacggttcacc

SEQ ID NO: 217129 - DNA, 15 bp, Homo sapiens
ctgggaacggttcac

SEQ ID NO: 217130 - DNA, 15 bp, Homo sapiens
gctgggaacggttca

SEQ ID NO: 217131 - DNA, 15 bp, Homo sapiens
ggctgggaacggttc

SEQ ID NO: 217132 - DNA, 15 bp, Homo sapiens
gggctgggaacggtt

SEQ ID NO: 217133 - DNA, 15 bp, Homo sapiens
agggctgggaacggt

SEQ ID NO: 217134 - DNA, 15 bp, Homo sapiens
cagggctgggaacgg

SEQ ID NO: 217135 - DNA, 15 bp, Homo sapiens
acagggctgggaacg

SEQ ID NO: 217136 - DNA, 15 bp, Homo sapiens
tacagggctgggaac

SEQ ID NO: 217137 - DNA, 15 bp, Homo sapiens
atacagggctgggaa

SEQ ID NO: 217138 - DNA, 15 bp, Homo sapiens
tatacagggctggga

SEQ ID NO: 217139 - DNA, 15 bp, Homo sapiens
ttatacagggctggg

SEQ ID NO: 217140 - DNA, 15 bp, Homo sapiens
tttatacagggctgg

SEQ ID NO: 217141 - DNA, 15 bp, Homo sapiens
gtttatacagggctg

SEQ ID NO: 217142 - DNA, 15 bp, Homo sapiens
agtttatacagggct

SEQ ID NO: 217143 - DNA, 15 bp, Homo sapiens
gagtttatacagggc

SEQ ID NO: 217144 - DNA, 15 bp, Homo sapiens
agagtttatacaggg

SEQ ID NO: 217145 - DNA, 15 bp, Homo sapiens
cagagtttatacagg

SEQ ID NO: 217146 - DNA, 15 bp, Homo sapiens
ccagagtttatacag

SEQ ID NO: 217147 - DNA, 15 bp, Homo sapiens
cccagagtttataca

SEQ ID NO: 217148 - DNA, 15 bp, Homo sapiens
tcccagagtttatac

SEQ ID NO: 217149 - DNA, 15 bp, Homo sapiens
ttcccagagtttata

SEQ ID NO: 217150 - DNA, 15 bp, Homo sapiens
tttcccagagtttat

SEQ ID NO: 217151 - DNA, 15 bp, Homo sapiens
atttcccagagttta

SEQ ID NO: 217152 - DNA, 15 bp, Homo sapiens
catttcccagagttt

SEQ ID NO: 217153 - DNA, 15 bp, Homo sapiens
acatttcccagagtt

SEQ ID NO: 217154 - DNA, 15 bp, Homo sapiens
aacatttcccagagt

SEQ ID NO: 217155 - DNA, 15 bp, Homo sapiens
gaacatttcccagag

SEQ ID NO: 217156 - DNA, 15 bp, Homo sapiens
agaacatttcccaga

SEQ ID NO: 217157 - DNA, 15 bp, Homo sapiens
cagaacatttcccag

SEQ ID NO: 217158 - DNA, 15 bp, Homo sapiens
acagaacatttccca

SEQ ID NO: 217159 - DNA, 15 bp, Homo sapiens
gacagaacatttccc

SEQ ID NO: 217160 - DNA, 15 bp, Homo sapiens
agacagaacatttcc

SEQ ID NO: 217161 - DNA, 15 bp, Homo sapiens
cagacagaacatttc

SEQ ID NO: 217162 - DNA, 15 bp, Homo sapiens
gcagacagaacattt

SEQ ID NO: 217163 - DNA, 15 bp, Homo sapiens
agcagacagaacatt

SEQ ID NO: 217164 - DNA, 15 bp, Homo sapiens
gagcagacagaacat

SEQ ID NO: 217165 - DNA, 15 bp, Homo sapiens
ggagcagacagaaca

SEQ ID NO: 217166 - DNA, 15 bp, Homo sapiens
aggagcagacagaac

SEQ ID NO: 217167 - DNA, 15 bp, Homo sapiens
aaggagcagacagaa

SEQ ID NO: 217168 - DNA, 15 bp, Homo sapiens
aaaggagcagacaga

SEQ ID NO: 217169 - DNA, 15 bp, Homo sapiens
taaaggagcagacag

SEQ ID NO: 217170 - DNA, 15 bp, Homo sapiens
ctaaaggagcagaca

SEQ ID NO: 217171 - DNA, 15 bp, Homo sapiens
cctaaaggagcagac

SEQ ID NO: 217172 - DNA, 15 bp, Homo sapiens
ccctaaaggagcaga

SEQ ID NO: 217173 - DNA, 15 bp, Homo sapiens
accctaaaggagcag

SEQ ID NO: 217174 - DNA, 15 bp, Homo sapiens
caccctaaaggagca

SEQ ID NO: 217175 - DNA, 15 bp, Homo sapiens
acaccctaaaggagc

SEQ ID NO: 217176 - DNA, 15 bp, Homo sapiens
aacaccctaaaggag

SEQ ID NO: 217177 - DNA, 15 bp, Homo sapiens
aaacaccctaaagga

SEQ ID NO: 217178 - DNA, 15 bp, Homo sapiens
gaaacaccctaaagg

SEQ ID NO: 217179 - DNA, 15 bp, Homo sapiens
agaaacaccctaaag

SEQ ID NO: 217180 - DNA, 15 bp, Homo sapiens
gagaaacaccctaaa

SEQ ID NO: 217181 - DNA, 15 bp, Homo sapiens
agagaaacaccctaa

SEQ ID NO: 217182 - DNA, 15 bp, Homo sapiens
gagagaaacacccta

SEQ ID NO: 217183 - DNA, 15 bp, Homo sapiens
ggagagaaacaccct

SEQ ID NO: 217184 - DNA, 15 bp, Homo sapiens
gggagagaaacaccc

SEQ ID NO: 217185 - DNA, 15 bp, Homo sapiens
ggggagagaaacacc

SEQ ID NO: 217186 - DNA, 15 bp, Homo sapiens
gggggagagaaacac

SEQ ID NO: 217187 - DNA, 15 bp, Homo sapiens
tgggggagagaaaca

SEQ ID NO: 217188 - DNA, 15 bp, Homo sapiens
gtgggggagagaaac

SEQ ID NO: 217189 - DNA, 15 bp, Homo sapiens
ggtgggggagagaaa

SEQ ID NO: 217190 - DNA, 15 bp, Homo sapiens
aggtgggggagagaa

SEQ ID NO: 217191 - DNA, 15 bp, Homo sapiens
aaggtgggggagaga

SEQ ID NO: 217192 - DNA, 15 bp, Homo sapiens
caaggtgggggagag

SEQ ID NO: 217193 - DNA, 15 bp, Homo sapiens
ccaaggtgggggaga

SEQ ID NO: 217194 - DNA, 15 bp, Homo sapiens
tccaaggtgggggag

SEQ ID NO: 217195 - DNA, 15 bp, Homo sapiens
atccaaggtggggga

SEQ ID NO: 217196 - DNA, 15 bp, Homo sapiens
tatccaaggtggggg

SEQ ID NO: 217197 - DNA, 15 bp, Homo sapiens
ctatccaaggtgggg

SEQ ID NO: 217198 - DNA, 15 bp, Homo sapiens
gctatccaaggtggg

SEQ ID NO: 217199 - DNA, 15 bp, Homo sapiens
agctatccaaggtgg

SEQ ID NO: 217200 - DNA, 15 bp, Homo sapiens
aagctatccaaggtg

SEQ ID NO: 217201 - DNA, 15 bp, Homo sapiens
aaagctatccaaggt

SEQ ID NO: 217202 - DNA, 15 bp, Homo sapiens
gaaagctatccaagg

SEQ ID NO: 217203 - DNA, 15 bp, Homo sapiens
tgaaagctatccaag

SEQ ID NO: 217204 - DNA, 15 bp, Homo sapiens
gtgaaagctatccaa

SEQ ID NO: 217205 - DNA, 15 bp, Homo sapiens
tgtgaaagctatcca

SEQ ID NO: 217206 - DNA, 15 bp, Homo sapiens
gtgtgaaagctatcc

SEQ ID NO: 217207 - DNA, 15 bp, Homo sapiens
tgtgtgaaagctatc

SEQ ID NO: 217208 - DNA, 15 bp, Homo sapiens
atgtgtgaaagctat

SEQ ID NO: 217209 - DNA, 15 bp, Homo sapiens
catgtgtgaaagcta

SEQ ID NO: 217210 - DNA, 15 bp, Homo sapiens
gcatgtgtgaaagct

SEQ ID NO: 217211 - DNA, 15 bp, Homo sapiens
ggcatgtgtgaaagc

SEQ ID NO: 217212 - DNA, 15 bp, Homo sapiens
aggcatgtgtgaaag

SEQ ID NO: 217213 - DNA, 15 bp, Homo sapiens
caggcatgtgtgaaa

SEQ ID NO: 217214 - DNA, 15 bp, Homo sapiens
acaggcatgtgtgaa

SEQ ID NO: 217215 - DNA, 15 bp, Homo sapiens
cacaggcatgtgtga

SEQ ID NO: 217216 - DNA, 15 bp, Homo sapiens
acacaggcatgtgtg

SEQ ID NO: 217217 - DNA, 15 bp, Homo sapiens
gacacaggcatgtgt

SEQ ID NO: 217218 - DNA, 15 bp, Homo sapiens
ggacacaggcatgtg

SEQ ID NO: 217219 - DNA, 15 bp, Homo sapiens
tggacacaggcatgt

SEQ ID NO: 217220 - DNA, 15 bp, Homo sapiens
gtggacacaggcatg

SEQ ID NO: 217221 - DNA, 15 bp, Homo sapiens
ggtggacacaggcat

SEQ ID NO: 217222 - DNA, 15 bp, Homo sapiens
tggtggacacaggca

SEQ ID NO: 217223 - DNA, 15 bp, Homo sapiens
ttggtggacacaggc

SEQ ID NO: 217224 - DNA, 15 bp, Homo sapiens
attggtggacacagg

SEQ ID NO: 217225 - DNA, 15 bp, Homo sapiens
tattggtggacacag

SEQ ID NO: 217226 - DNA, 15 bp, Homo sapiens
gtattggtggacaca

SEQ ID NO: 217227 - DNA, 15 bp, Homo sapiens
agtattggtggacac

SEQ ID NO: 217228 - DNA, 15 bp, Homo sapiens
aagtattggtggaca

SEQ ID NO: 217229 - DNA, 15 bp, Homo sapiens
taagtattggtggac

SEQ ID NO: 217230 - DNA, 15 bp, Homo sapiens
ctaagtattggtgga

SEQ ID NO: 217231 - DNA, 15 bp, Homo sapiens
gctaagtattggtgg

SEQ ID NO: 217232 - DNA, 15 bp, Homo sapiens
agctaagtattggtg

SEQ ID NO: 217233 - DNA, 15 bp, Homo sapiens
tagctaagtattggt

SEQ ID NO: 217234 - DNA, 15 bp, Homo sapiens
ttagctaagtattgg

SEQ ID NO: 217235 - DNA, 15 bp, Homo sapiens
tttagctaagtattg

SEQ ID NO: 217236 - DNA, 15 bp, Homo sapiens
ctttagctaagtatt

SEQ ID NO: 217237 - DNA, 15 bp, Homo sapiens
tctttagctaagtat

SEQ ID NO: 217238 - DNA, 15 bp, Homo sapiens
gtctttagctaagta

SEQ ID NO: 217239 - DNA, 15 bp, Homo sapiens
agtctttagctaagt

SEQ ID NO: 217240 - DNA, 15 bp, Homo sapiens
gagtctttagctaag

SEQ ID NO: 217241 - DNA, 15 bp, Homo sapiens
tgagtctttagctaa

SEQ ID NO: 217242 - DNA, 15 bp, Homo sapiens
ttgagtctttagcta

SEQ ID NO: 217243 - DNA, 15 bp, Homo sapiens
cttgagtctttagct

SEQ ID NO: 217244 - DNA, 15 bp, Homo sapiens
ccttgagtctttagc

SEQ ID NO: 217245 - DNA, 15 bp, Homo sapiens
cccttgagtctttag

SEQ ID NO: 217246 - DNA, 15 bp, Homo sapiens
ccccttgagtcttta

SEQ ID NO: 217247 - DNA, 15 bp, Homo sapiens
cccccttgagtcttt

SEQ ID NO: 217248 - DNA, 15 bp, Homo sapiens
acccccttgagtctt

SEQ ID NO: 217249 - DNA, 15 bp, Homo sapiens
gacccccttgagtct

SEQ ID NO: 217250 - DNA, 15 bp, Homo sapiens
ggacccccttgagtc

SEQ ID NO: 217251 - DNA, 15 bp, Homo sapiens
gggacccccttgagt

SEQ ID NO: 217252 - DNA, 15 bp, Homo sapiens
agggacccccttgag

SEQ ID NO: 217253 - DNA, 15 bp, Homo sapiens
gagggacccccttga

SEQ ID NO: 217254 - DNA, 15 bp, Homo sapiens
agagggacccccttg

SEQ ID NO: 217255 - DNA, 15 bp, Homo sapiens
cagagggaccccctt

SEQ ID NO: 217256 - DNA, 15 bp, Homo sapiens
gcagagggaccccct

SEQ ID NO: 217257 - DNA, 15 bp, Homo sapiens
agcagagggaccccc

SEQ ID NO: 217258 - DNA, 15 bp, Homo sapiens
cagcagagggacccc

SEQ ID NO: 217259 - DNA, 15 bp, Homo sapiens
tcagcagagggaccc

SEQ ID NO: 217260 - DNA, 15 bp, Homo sapiens
gtcagcagagggacc

SEQ ID NO: 217261 - DNA, 15 bp, Homo sapiens
ggtcagcagagggac

SEQ ID NO: 217262 - DNA, 15 bp, Homo sapiens
aggtcagcagaggga

SEQ ID NO: 217263 - DNA, 15 bp, Homo sapiens
gaggtcagcagaggg

SEQ ID NO: 217264 - DNA, 15 bp, Homo sapiens
tgaggtcagcagagg

SEQ ID NO: 217265 - DNA, 15 bp, Homo sapiens
ttgaggtcagcagag

SEQ ID NO: 217266 - DNA, 15 bp, Homo sapiens
cttgaggtcagcaga

SEQ ID NO: 217267 - DNA, 15 bp, Homo sapiens
acttgaggtcagcag

SEQ ID NO: 217268 - DNA, 15 bp, Homo sapiens
tacttgaggtcagca

SEQ ID NO: 217269 - DNA, 15 bp, Homo sapiens
atacttgaggtcagc

SEQ ID NO: 217270 - DNA, 15 bp, Homo sapiens
aatacttgaggtcag

SEQ ID NO: 217271 - DNA, 15 bp, Homo sapiens
gaatacttgaggtca

SEQ ID NO: 217272 - DNA, 15 bp, Homo sapiens
tgaatacttgaggtc

SEQ ID NO: 217273 - DNA, 15 bp, Homo sapiens
gtgaatacttgaggt

SEQ ID NO: 217274 - DNA, 15 bp, Homo sapiens
agtgaatacttgagg

SEQ ID NO: 217275 - DNA, 15 bp, Homo sapiens
cagtgaatacttgag

SEQ ID NO: 217276 - DNA, 15 bp, Homo sapiens
ccagtgaatacttga

SEQ ID NO: 217277 - DNA, 15 bp, Homo sapiens
cccagtgaatacttg

SEQ ID NO: 217278 - DNA, 15 bp, Homo sapiens
gcccagtgaatactt

SEQ ID NO: 217279 - DNA, 15 bp, Homo sapiens
tgcccagtgaatact

SEQ ID NO: 217280 - DNA, 15 bp, Homo sapiens
ctgcccagtgaatac

SEQ ID NO: 217281 - DNA, 15 bp, Homo sapiens
actgcccagtgaata

SEQ ID NO: 217282 - DNA, 15 bp, Homo sapiens
aactgcccagtgaat

SEQ ID NO: 217283 - DNA, 15 bp, Homo sapiens
gaactgcccagtgaa

SEQ ID NO: 217284 - DNA, 15 bp, Homo sapiens
agaactgcccagtga

SEQ ID NO: 217285 - DNA, 15 bp, Homo sapiens
aagaactgcccagtg

SEQ ID NO: 217286 - DNA, 15 bp, Homo sapiens
aaagaactgcccagt

SEQ ID NO: 217287 - DNA, 15 bp, Homo sapiens
aaaagaactgcccag

SEQ ID NO: 217288 - DNA, 15 bp, Homo sapiens
aaaaagaactgccca

SEQ ID NO: 217289 - DNA, 15 bp, Homo sapiens
caaaaagaactgccc

SEQ ID NO: 217290 - DNA, 15 bp, Homo sapiens
gcaaaaagaactgcc

SEQ ID NO: 217291 - DNA, 15 bp, Homo sapiens
agcaaaaagaactgc

SEQ ID NO: 217292 - DNA, 15 bp, Homo sapiens
cagcaaaaagaactg

SEQ ID NO: 217293 - DNA, 15 bp, Homo sapiens
gcagcaaaaagaact

SEQ ID NO: 217294 - DNA, 15 bp, Homo sapiens
ggcagcaaaaagaac

SEQ ID NO: 217295 - DNA, 15 bp, Homo sapiens
gggcagcaaaaagaa

SEQ ID NO: 217296 - DNA, 15 bp, Homo sapiens
agggcagcaaaaaga

SEQ ID NO: 217297 - DNA, 15 bp, Homo sapiens
cagggcagcaaaaag

SEQ ID NO: 217298 - DNA, 15 bp, Homo sapiens
ccagggcagcaaaaa

SEQ ID NO: 217299 - DNA, 15 bp, Homo sapiens
gccagggcagcaaaa

SEQ ID NO: 217300 - DNA, 15 bp, Homo sapiens
ggccagggcagcaaa

SEQ ID NO: 217301 - DNA, 15 bp, Homo sapiens
aggccagggcagcaa

SEQ ID NO: 217302 - DNA, 15 bp, Homo sapiens
caggccagggcagca

SEQ ID NO: 217303 - DNA, 15 bp, Homo sapiens
acaggccagggcagc

SEQ ID NO: 217304 - DNA, 15 bp, Homo sapiens
cacaggccagggcag

SEQ ID NO: 217305 - DNA, 15 bp, Homo sapiens
tcacaggccagggca

SEQ ID NO: 217306 - DNA, 15 bp, Homo sapiens
ttcacaggccagggc

SEQ ID NO: 217307 - DNA, 15 bp, Homo sapiens
attcacaggccaggg

SEQ ID NO: 217308 - DNA, 15 bp, Homo sapiens
aattcacaggccagg

SEQ ID NO: 217309 - DNA, 15 bp, Homo sapiens
gaattcacaggccag

SEQ ID NO: 217310 - DNA, 15 bp, Homo sapiens
ggaattcacaggcca

SEQ ID NO: 217311 - DNA, 15 bp, Homo sapiens
tggaattcacaggcc

SEQ ID NO: 217312 - DNA, 15 bp, Homo sapiens
ctggaattcacaggc

SEQ ID NO: 217313 - DNA, 15 bp, Homo sapiens
gctggaattcacagg

SEQ ID NO: 217314 - DNA, 15 bp, Homo sapiens
ggctggaattcacag

SEQ ID NO: 217315 - DNA, 15 bp, Homo sapiens
aggctggaattcaca

SEQ ID NO: 217316 - DNA, 15 bp, Homo sapiens
gaggctggaattcac

SEQ ID NO: 217317 - DNA, 15 bp, Homo sapiens
ggaggctggaattca

SEQ ID NO: 217318 - DNA, 15 bp, Homo sapiens
aggaggctggaattc

SEQ ID NO: 217319 - DNA, 15 bp, Homo sapiens
aaggaggctggaatt

SEQ ID NO: 217320 - DNA, 15 bp, Homo sapiens
caaggaggctggaat

SEQ ID NO: 217321 - DNA, 15 bp, Homo sapiens
ccaaggaggctggaa

SEQ ID NO: 217322 - DNA, 15 bp, Homo sapiens
gccaaggaggctgga

SEQ ID NO: 217323 - DNA, 15 bp, Homo sapiens
ggccaaggaggctgg

SEQ ID NO: 217324 - DNA, 15 bp, Homo sapiens
aggccaaggaggctg

SEQ ID NO: 217325 - DNA, 15 bp, Homo sapiens
aaggccaaggaggct

SEQ ID NO: 217326 - DNA, 15 bp, Homo sapiens
caaggccaaggaggc

SEQ ID NO: 217327 - DNA, 15 bp, Homo sapiens
gcaaggccaaggagg

SEQ ID NO: 217328 - DNA, 15 bp, Homo sapiens
agcaaggccaaggag

SEQ ID NO: 217329 - DNA, 15 bp, Homo sapiens
cagcaaggccaagga

SEQ ID NO: 217330 - DNA, 15 bp, Homo sapiens
ccagcaaggccaagg

SEQ ID NO: 217331 - DNA, 15 bp, Homo sapiens
tccagcaaggccaag

SEQ ID NO: 217332 - DNA, 15 bp, Homo sapiens
ttccagcaaggccaa

SEQ ID NO: 217333 - DNA, 15 bp, Homo sapiens
attccagcaaggcca

SEQ ID NO: 217334 - DNA, 15 bp, Homo sapiens
gattccagcaaggcc

SEQ ID NO: 217335 - DNA, 15 bp, Homo sapiens
ggattccagcaaggc

SEQ ID NO: 217336 - DNA, 15 bp, Homo sapiens
tggattccagcaagg

SEQ ID NO: 217337 - DNA, 15 bp, Homo sapiens
ctggattccagcaag

SEQ ID NO: 217338 - DNA, 15 bp, Homo sapiens
gctggattccagcaa

SEQ ID NO: 217339 - DNA, 15 bp, Homo sapiens
ggctggattccagca

SEQ ID NO: 217340 - DNA, 15 bp, Homo sapiens
aggctggattccagc

SEQ ID NO: 217341 - DNA, 15 bp, Homo sapiens
aaggctggattccag

SEQ ID NO: 217342 - DNA, 15 bp, Homo sapiens
gaaggctggattcca

SEQ ID NO: 217343 - DNA, 15 bp, Homo sapiens
tgaaggctggattcc

SEQ ID NO: 217344 - DNA, 15 bp, Homo sapiens
atgaaggctggattc

SEQ ID NO: 217345 - DNA, 15 bp, Homo sapiens
gatgaaggctggatt

SEQ ID NO: 217346 - DNA, 15 bp, Homo sapiens
agatgaaggctggat

SEQ ID NO: 217347 - DNA, 15 bp, Homo sapiens
gagatgaaggctgga

SEQ ID NO: 217348 - DNA, 15 bp, Homo sapiens
ggagatgaaggctgg

SEQ ID NO: 217349 - DNA, 15 bp, Homo sapiens
aggagatgaaggctg

SEQ ID NO: 217350 - DNA, 15 bp, Homo sapiens
gaggagatgaaggct

SEQ ID NO: 217351 - DNA, 15 bp, Homo sapiens
tgaggagatgaaggc

SEQ ID NO: 217352 - DNA, 15 bp, Homo sapiens
ttgaggagatgaagg

SEQ ID NO: 217353 - DNA, 15 bp, Homo sapiens
gttgaggagatgaag

SEQ ID NO: 217354 - DNA, 15 bp, Homo sapiens
agttgaggagatgaa

SEQ ID NO: 217355 - DNA, 15 bp, Homo sapiens
gagttgaggagatga

SEQ ID NO: 217356 - DNA, 15 bp, Homo sapiens
tgagttgaggagatg

SEQ ID NO: 217357 - DNA, 15 bp, Homo sapiens
ctgagttgaggagat

SEQ ID NO: 217358 - DNA, 15 bp, Homo sapiens
cctgagttgaggaga

SEQ ID NO: 217359 - DNA, 15 bp, Homo sapiens
ccctgagttgaggag

SEQ ID NO: 217360 - DNA, 15 bp, Homo sapiens
tccctgagttgagga

SEQ ID NO: 217361 - DNA, 15 bp, Homo sapiens
ctccctgagttgagg

SEQ ID NO: 217362 - DNA, 15 bp, Homo sapiens
tctccctgagttgag

SEQ ID NO: 217363 - DNA, 15 bp, Homo sapiens
gtctccctgagttga

SEQ ID NO: 217364 - DNA, 15 bp, Homo sapiens
tgtctccctgagttg

SEQ ID NO: 217365 - DNA, 15 bp, Homo sapiens
atgtctccctgagtt

SEQ ID NO: 217366 - DNA, 15 bp, Homo sapiens
gatgtctccctgagt

SEQ ID NO: 217367 - DNA, 15 bp, Homo sapiens
agatgtctccctgag

SEQ ID NO: 217368 - DNA, 15 bp, Homo sapiens
cagatgtctccctga

SEQ ID NO: 217369 - DNA, 15 bp, Homo sapiens
ccagatgtctccctg

SEQ ID NO: 217370 - DNA, 15 bp, Homo sapiens
cccagatgtctccct

SEQ ID NO: 217371 - DNA, 15 bp, Homo sapiens
gcccagatgtctccc

SEQ ID NO: 217372 - DNA, 15 bp, Homo sapiens
ggcccagatgtctcc

SEQ ID NO: 217373 - DNA, 15 bp, Homo sapiens
gggcccagatgtctc

SEQ ID NO: 217374 - DNA, 15 bp, Homo sapiens
agggcccagatgtct

SEQ ID NO: 217375 - DNA, 15 bp, Homo sapiens
cagggcccagatgtc

SEQ ID NO: 217376 - DNA, 15 bp, Homo sapiens
gcagggcccagatgt

SEQ ID NO: 217377 - DNA, 15 bp, Homo sapiens
agcagggcccagatg

SEQ ID NO: 217378 - DNA, 15 bp, Homo sapiens
cagcagggcccagat

SEQ ID NO: 217379 - DNA, 15 bp, Homo sapiens
ccagcagggcccaga

SEQ ID NO: 217380 - DNA, 15 bp, Homo sapiens
cccagcagggcccag

SEQ ID NO: 217381 - DNA, 15 bp, Homo sapiens
ccccagcagggccca

SEQ ID NO: 217382 - DNA, 15 bp, Homo sapiens
accccagcagggccc

SEQ ID NO: 217383 - DNA, 15 bp, Homo sapiens
gaccccagcagggcc

SEQ ID NO: 217384 - DNA, 15 bp, Homo sapiens
ggaccccagcagggc

SEQ ID NO: 217385 - DNA, 15 bp, Homo sapiens
aggaccccagcaggg

SEQ ID NO: 217386 - DNA, 15 bp, Homo sapiens
gaggaccccagcagg

SEQ ID NO: 217387 - DNA, 15 bp, Homo sapiens
ggaggaccccagcag

SEQ ID NO: 217388 - DNA, 15 bp, Homo sapiens
aggaggaccccagca

SEQ ID NO: 217389 - DNA, 15 bp, Homo sapiens
aaggaggaccccagc

SEQ ID NO: 217390 - DNA, 15 bp, Homo sapiens
gaaggaggaccccag

SEQ ID NO: 217391 - DNA, 15 bp, Homo sapiens
agaaggaggacccca

SEQ ID NO: 217392 - DNA, 15 bp, Homo sapiens
aagaaggaggacccc

SEQ ID NO: 217393 - DNA, 15 bp, Homo sapiens
aaagaaggaggaccc

SEQ ID NO: 217394 - DNA, 15 bp, Homo sapiens
gaaagaaggaggacc

SEQ ID NO: 217395 - DNA, 15 bp, Homo sapiens
agaaagaaggaggac

SEQ ID NO: 217396 - DNA, 15 bp, Homo sapiens
cagaaagaaggagga

SEQ ID NO: 217397 - DNA, 15 bp, Homo sapiens
gcagaaagaaggagg

SEQ ID NO: 217398 - DNA, 15 bp, Homo sapiens
agcagaaagaaggag

SEQ ID NO: 217399 - DNA, 15 bp, Homo sapiens
cagcagaaagaagga

SEQ ID NO: 217400 - DNA, 15 bp, Homo sapiens
acagcagaaagaagg

SEQ ID NO: 217401 - DNA, 15 bp, Homo sapiens
cacagcagaaagaag

SEQ ID NO: 217402 - DNA, 15 bp, Homo sapiens
tcacagcagaaagaa

SEQ ID NO: 217403 - DNA, 15 bp, Homo sapiens
gtcacagcagaaaga

SEQ ID NO: 217404 - DNA, 15 bp, Homo sapiens
agtcacagcagaaag

SEQ ID NO: 217405 - DNA, 15 bp, Homo sapiens
aagtcacagcagaaa

SEQ ID NO: 217406 - DNA, 15 bp, Homo sapiens
caagtcacagcagaa

SEQ ID NO: 217407 - DNA, 15 bp, Homo sapiens
ccaagtcacagcaga

SEQ ID NO: 217408 - DNA, 15 bp, Homo sapiens
tccaagtcacagcag

SEQ ID NO: 217409 - DNA, 15 bp, Homo sapiens
gtccaagtcacagca

SEQ ID NO: 217410 - DNA, 15 bp, Homo sapiens
cgtccaagtcacagc

SEQ ID NO: 217411 - DNA, 15 bp, Homo sapiens
gcgtccaagtcacag

SEQ ID NO: 217412 - DNA, 15 bp, Homo sapiens
agcgtccaagtcaca

SEQ ID NO: 217413 - DNA, 15 bp, Homo sapiens
gagcgtccaagtcac

SEQ ID NO: 217414 - DNA, 15 bp, Homo sapiens
agagcgtccaagtca

SEQ ID NO: 217415 - DNA, 15 bp, Homo sapiens
gagagcgtccaagtc

SEQ ID NO: 217416 - DNA, 15 bp, Homo sapiens
agagagcgtccaagt

SEQ ID NO: 217417 - DNA, 15 bp, Homo sapiens
gagagagcgtccaag

SEQ ID NO: 217418 - DNA, 15 bp, Homo sapiens
ggagagagcgtccaa

SEQ ID NO: 217419 - DNA, 15 bp, Homo sapiens
tggagagagcgtcca

SEQ ID NO: 217420 - DNA, 15 bp, Homo sapiens
ctggagagagcgtcc

SEQ ID NO: 217421 - DNA, 15 bp, Homo sapiens
tctggagagagcgtc

SEQ ID NO: 217422 - DNA, 15 bp, Homo sapiens
gtctggagagagcgt

SEQ ID NO: 217423 - DNA, 15 bp, Homo sapiens
tgtctggagagagcg

SEQ ID NO: 217424 - DNA, 15 bp, Homo sapiens
ctgtctggagagagc

SEQ ID NO: 217425 - DNA, 15 bp, Homo sapiens
cctgtctggagagag

SEQ ID NO: 217426 - DNA, 15 bp, Homo sapiens
tcctgtctggagaga

SEQ ID NO: 217427 - DNA, 15 bp, Homo sapiens
ttcctgtctggagag

SEQ ID NO: 217428 - DNA, 15 bp, Homo sapiens
cttcctgtctggaga

SEQ ID NO: 217429 - DNA, 15 bp, Homo sapiens
acttcctgtctggag

SEQ ID NO: 217430 - DNA, 15 bp, Homo sapiens
aacttcctgtctgga

SEQ ID NO: 217431 - DNA, 15 bp, Homo sapiens
caacttcctgtctgg

SEQ ID NO: 217432 - DNA, 15 bp, Homo sapiens
tcaacttcctgtctg

SEQ ID NO: 217433 - DNA, 15 bp, Homo sapiens
ctcaacttcctgtct

SEQ ID NO: 217434 - DNA, 15 bp, Homo sapiens
cctcaacttcctgtc

SEQ ID NO: 217435 - DNA, 15 bp, Homo sapiens
gcctcaacttcctgt

SEQ ID NO: 217436 - DNA, 15 bp, Homo sapiens
tgcctcaacttcctg

SEQ ID NO: 217437 - DNA, 15 bp, Homo sapiens
ttgcctcaacttcct

SEQ ID NO: 217438 - DNA, 15 bp, Homo sapiens
gttgcctcaacttcc

SEQ ID NO: 217439 - DNA, 15 bp, Homo sapiens
agttgcctcaacttc

SEQ ID NO: 217440 - DNA, 15 bp, Homo sapiens
cagttgcctcaactt

SEQ ID NO: 217441 - DNA, 15 bp, Homo sapiens
acagttgcctcaact

SEQ ID NO: 217442 - DNA, 15 bp, Homo sapiens
tacagttgcctcaac

SEQ ID NO: 217443 - DNA, 15 bp, Homo sapiens
ctacagttgcctcaa

SEQ ID NO: 217444 - DNA, 15 bp, Homo sapiens
cctacagttgcctca

SEQ ID NO: 217445 - DNA, 15 bp, Homo sapiens
ccctacagttgcctc

SEQ ID NO: 217446 - DNA, 15 bp, Homo sapiens
gccctacagttgcct

SEQ ID NO: 217447 - DNA, 15 bp, Homo sapiens
agccctacagttgcc

SEQ ID NO: 217448 - DNA, 15 bp, Homo sapiens
gagccctacagttgc

SEQ ID NO: 217449 - DNA, 15 bp, Homo sapiens
tgagccctacagttg

SEQ ID NO: 217450 - DNA, 15 bp, Homo sapiens
gtgagccctacagtt

SEQ ID NO: 217451 - DNA, 15 bp, Homo sapiens
agtgagccctacagt

SEQ ID NO: 217452 - DNA, 15 bp, Homo sapiens
aagtgagccctacag

SEQ ID NO: 217453 - DNA, 15 bp, Homo sapiens
gaagtgagccctaca

SEQ ID NO: 217454 - DNA, 15 bp, Homo sapiens
cgaagtgagccctac

SEQ ID NO: 217455 - DNA, 15 bp, Homo sapiens
acgaagtgagcccta

SEQ ID NO: 217456 - DNA, 15 bp, Homo sapiens
aacgaagtgagccct

SEQ ID NO: 217457 - DNA, 15 bp, Homo sapiens
aaacgaagtgagccc

SEQ ID NO: 217458 - DNA, 15 bp, Homo sapiens
gaaacgaagtgagcc

SEQ ID NO: 217459 - DNA, 15 bp, Homo sapiens
agaaacgaagtgagc

SEQ ID NO: 217460 - DNA, 15 bp, Homo sapiens
gagaaacgaagtgag

SEQ ID NO: 217461 - DNA, 15 bp, Homo sapiens
ggagaaacgaagtga

SEQ ID NO: 217462 - DNA, 15 bp, Homo sapiens
aggagaaacgaagtg

SEQ ID NO: 217463 - DNA, 15 bp, Homo sapiens
gaggagaaacgaagt

SEQ ID NO: 217464 - DNA, 15 bp, Homo sapiens
agaggagaaacgaag

SEQ ID NO: 217465 - DNA, 15 bp, Homo sapiens
gagaggagaaacgaa

SEQ ID NO: 217466 - DNA, 15 bp, Homo sapiens
agagaggagaaacga

SEQ ID NO: 217467 - DNA, 15 bp, Homo sapiens
gagagaggagaaacg

SEQ ID NO: 217468 - DNA, 15 bp, Homo sapiens
tgagagaggagaaac

SEQ ID NO: 217469 - DNA, 15 bp, Homo sapiens
ctgagagaggagaaa

SEQ ID NO: 217470 - DNA, 15 bp, Homo sapiens
cctgagagaggagaa

SEQ ID NO: 217471 - DNA, 15 bp, Homo sapiens
ccctgagagaggaga

SEQ ID NO: 217472 - DNA, 15 bp, Homo sapiens
tccctgagagaggag

SEQ ID NO: 217473 - DNA, 15 bp, Homo sapiens
atccctgagagagga

SEQ ID NO: 217474 - DNA, 15 bp, Homo sapiens
aatccctgagagagg

SEQ ID NO: 217475 - DNA, 15 bp, Homo sapiens
caatccctgagagag

SEQ ID NO: 217476 - DNA, 15 bp, Homo sapiens
gcaatccctgagaga

SEQ ID NO: 217477 - DNA, 15 bp, Homo sapiens
agcaatccctgagag

SEQ ID NO: 217478 - DNA, 15 bp, Homo sapiens
cagcaatccctgaga

SEQ ID NO: 217479 - DNA, 15 bp, Homo sapiens
acagcaatccctgag

SEQ ID NO: 217480 - DNA, 15 bp, Homo sapiens
gacagcaatccctga

SEQ ID NO: 217481 - DNA, 15 bp, Homo sapiens
agacagcaatccctg

SEQ ID NO: 217482 - DNA, 15 bp, Homo sapiens
aagacagcaatccct

SEQ ID NO: 217483 - DNA, 15 bp, Homo sapiens
gaagacagcaatccc

SEQ ID NO: 217484 - DNA, 15 bp, Homo sapiens
ggaagacagcaatcc

SEQ ID NO: 217485 - DNA, 15 bp, Homo sapiens
gggaagacagcaatc

SEQ ID NO: 217486 - DNA, 15 bp, Homo sapiens
ggggaagacagcaat

SEQ ID NO: 217487 - DNA, 15 bp, Homo sapiens
aggggaagacagcaa

SEQ ID NO: 217488 - DNA, 15 bp, Homo sapiens
caggggaagacagca

SEQ ID NO: 217489 - DNA, 15 bp, Homo sapiens
tcaggggaagacagc

SEQ ID NO: 217490 - DNA, 15 bp, Homo sapiens
gtcaggggaagacag

SEQ ID NO: 217491 - DNA, 15 bp, Homo sapiens
agtcaggggaagaca

SEQ ID NO: 217492 - DNA, 15 bp, Homo sapiens
cagtcaggggaagac

SEQ ID NO: 217493 - DNA, 15 bp, Homo sapiens
tcagtcaggggaaga

SEQ ID NO: 217494 - DNA, 15 bp, Homo sapiens
ctcagtcaggggaag

SEQ ID NO: 217495 - DNA, 15 bp, Homo sapiens
gctcagtcaggggaa

SEQ ID NO: 217496 - DNA, 15 bp, Homo sapiens
agctcagtcagggga

SEQ ID NO: 217497 - DNA, 15 bp, Homo sapiens
gagctcagtcagggg

SEQ ID NO: 217498 - DNA, 15 bp, Homo sapiens
ggagctcagtcaggg

SEQ ID NO: 217499 - DNA, 15 bp, Homo sapiens
tggagctcagtcagg

SEQ ID NO: 217500 - DNA, 15 bp, Homo sapiens
ctggagctcagtcag

SEQ ID NO: 217501 - DNA, 15 bp, Homo sapiens
actggagctcagtca

SEQ ID NO: 217502 - DNA, 15 bp, Homo sapiens
cactggagctcagtc

SEQ ID NO: 217503 - DNA, 15 bp, Homo sapiens
acactggagctcagt

SEQ ID NO: 217504 - DNA, 15 bp, Homo sapiens
gacactggagctcag

SEQ ID NO: 217505 - DNA, 15 bp, Homo sapiens
agacactggagctca

SEQ ID NO: 217506 - DNA, 15 bp, Homo sapiens
cagacactggagctc

SEQ ID NO: 217507 - DNA, 15 bp, Homo sapiens
tcagacactggagct

SEQ ID NO: 217508 - DNA, 15 bp, Homo sapiens
ttcagacactggagc

SEQ ID NO: 217509 - DNA, 15 bp, Homo sapiens
tttcagacactggag

SEQ ID NO: 217510 - DNA, 15 bp, Homo sapiens
ttttcagacactgga

SEQ ID NO: 217511 - DNA, 15 bp, Homo sapiens
attttcagacactgg

SEQ ID NO: 217512 - DNA, 15 bp, Homo sapiens
gattttcagacactg

SEQ ID NO: 217513 - DNA, 15 bp, Homo sapiens
tgattttcagacact

SEQ ID NO: 217514 - DNA, 15 bp, Homo sapiens
atgattttcagacac

SEQ ID NO: 217515 - DNA, 15 bp, Homo sapiens
aatgattttcagaca

SEQ ID NO: 217516 - DNA, 15 bp, Homo sapiens
caatgattttcagac

SEQ ID NO: 217517 - DNA, 15 bp, Homo sapiens
acaatgattttcaga

SEQ ID NO: 217518 - DNA, 15 bp, Homo sapiens
gacaatgattttcag

SEQ ID NO: 217519 - DNA, 15 bp, Homo sapiens
agacaatgattttca

SEQ ID NO: 217520 - DNA, 15 bp, Homo sapiens
aagacaatgattttc

SEQ ID NO: 217521 - DNA, 15 bp, Homo sapiens
caagacaatgatttt

SEQ ID NO: 217522 - DNA, 15 bp, Homo sapiens
acaagacaatgattt

SEQ ID NO: 217523 - DNA, 15 bp, Homo sapiens
gacaagacaatgatt

SEQ ID NO: 217524 - DNA, 15 bp, Homo sapiens
agacaagacaatgat

SEQ ID NO: 217525 - DNA, 15 bp, Homo sapiens
cagacaagacaatga

SEQ ID NO: 217526 - DNA, 15 bp, Homo sapiens
tcagacaagacaatg

SEQ ID NO: 217527 - DNA, 15 bp, Homo sapiens
ttcagacaagacaat

SEQ ID NO: 217528 - DNA, 15 bp, Homo sapiens
attcagacaagacaa

SEQ ID NO: 217529 - DNA, 15 bp, Homo sapiens
aattcagacaagaca

SEQ ID NO: 217530 - DNA, 15 bp, Homo sapiens
aaattcagacaagac

SEQ ID NO: 217531 - DNA, 15 bp, Homo sapiens
aaaattcagacaaga

SEQ ID NO: 217532 - DNA, 15 bp, Homo sapiens
aaaaattcagacaag

SEQ ID NO: 217533 - DNA, 15 bp, Homo sapiens
taaaaattcagacaa

SEQ ID NO: 217534 - DNA, 15 bp, Homo sapiens
ctaaaaattcagaca

SEQ ID NO: 217535 - DNA, 15 bp, Homo sapiens
actaaaaattcagac

SEQ ID NO: 217536 - DNA, 15 bp, Homo sapiens
aactaaaaattcaga

SEQ ID NO: 217537 - DNA, 15 bp, Homo sapiens
caactaaaaattcag

SEQ ID NO: 217538 - DNA, 15 bp, Homo sapiens
acaactaaaaattca

SEQ ID NO: 217539 - DNA, 15 bp, Homo sapiens
aacaactaaaaattc

SEQ ID NO: 217540 - DNA, 15 bp, Homo sapiens
aaacaactaaaaatt

SEQ ID NO: 217541 - DNA, 15 bp, Homo sapiens
gaaacaactaaaaat

SEQ ID NO: 217542 - DNA, 15 bp, Homo sapiens
tgaaacaactaaaaa

SEQ ID NO: 217543 - DNA, 15 bp, Homo sapiens
ctgaaacaactaaaa

SEQ ID NO: 217544 - DNA, 15 bp, Homo sapiens
cctgaaacaactaaa

SEQ ID NO: 217545 - DNA, 15 bp, Homo sapiens
acctgaaacaactaa

SEQ ID NO: 217546 - DNA, 15 bp, Homo sapiens
cacctgaaacaacta

SEQ ID NO: 217547 - DNA, 15 bp, Homo sapiens
ccacctgaaacaact

SEQ ID NO: 217548 - DNA, 15 bp, Homo sapiens
cccacctgaaacaac

SEQ ID NO: 217549 - DNA, 15 bp, Homo sapiens
tcccacctgaaacaa

SEQ ID NO: 217550 - DNA, 15 bp, Homo sapiens
ctcccacctgaaaca

SEQ ID NO: 217551 - DNA, 15 bp, Homo sapiens
cctcccacctgaaac

SEQ ID NO: 217552 - DNA, 15 bp, Homo sapiens
tcctcccacctgaaa

SEQ ID NO: 217553 - DNA, 15 bp, Homo sapiens
ctcctcccacctgaa

SEQ ID NO: 217554 - DNA, 15 bp, Homo sapiens
tctcctcccacctga

SEQ ID NO: 217555 - DNA, 15 bp, Homo sapiens
ctctcctcccacctg

SEQ ID NO: 217556 - DNA, 15 bp, Homo sapiens
tctctcctcccacct

SEQ ID NO: 217557 - DNA, 15 bp, Homo sapiens
atctctcctcccacc

SEQ ID NO: 217558 - DNA, 15 bp, Homo sapiens
gatctctcctcccac

SEQ ID NO: 217559 - DNA, 15 bp, Homo sapiens
agatctctcctccca

SEQ ID NO: 217560 - DNA, 15 bp, Homo sapiens
tagatctctcctccc

SEQ ID NO: 217561 - DNA, 15 bp, Homo sapiens
ctagatctctcctcc

SEQ ID NO: 217562 - DNA, 15 bp, Homo sapiens
actagatctctcctc

SEQ ID NO: 217563 - DNA, 15 bp, Homo sapiens
gactagatctctcct

SEQ ID NO: 217564 - DNA, 15 bp, Homo sapiens
ggactagatctctcc

SEQ ID NO: 217565 - DNA, 15 bp, Homo sapiens
tggactagatctctc

SEQ ID NO: 217566 - DNA, 15 bp, Homo sapiens
atggactagatctct

SEQ ID NO: 217567 - DNA, 15 bp, Homo sapiens
catggactagatctc

SEQ ID NO: 217568 - DNA, 15 bp, Homo sapiens
gcatggactagatct

SEQ ID NO: 217569 - DNA, 15 bp, Homo sapiens
agcatggactagatc

SEQ ID NO: 217570 - DNA, 15 bp, Homo sapiens
tagcatggactagat

SEQ ID NO: 217571 - DNA, 15 bp, Homo sapiens
gtagcatggactaga

SEQ ID NO: 217572 - DNA, 15 bp, Homo sapiens
agtagcatggactag

SEQ ID NO: 217573 - DNA, 15 bp, Homo sapiens
aagtagcatggacta

SEQ ID NO: 217574 - DNA, 15 bp, Homo sapiens
gaagtagcatggact

SEQ ID NO: 217575 - DNA, 15 bp, Homo sapiens
agaagtagcatggac

SEQ ID NO: 217576 - DNA, 15 bp, Homo sapiens
aagaagtagcatgga

SEQ ID NO: 217577 - DNA, 15 bp, Homo sapiens
aaagaagtagcatgg

SEQ ID NO: 217578 - DNA, 15 bp, Homo sapiens
caaagaagtagcatg

SEQ ID NO: 217579 - DNA, 15 bp, Homo sapiens
ccaaagaagtagcat

SEQ ID NO: 217580 - DNA, 15 bp, Homo sapiens
tccaaagaagtagca

SEQ ID NO: 217581 - DNA, 15 bp, Homo sapiens
ctccaaagaagtagc

SEQ ID NO: 217582 - DNA, 15 bp, Homo sapiens
tctccaaagaagtag

SEQ ID NO: 217583 - DNA, 15 bp, Homo sapiens
ttctccaaagaagta

SEQ ID NO: 217584 - DNA, 15 bp, Homo sapiens
attctccaaagaagt

SEQ ID NO: 217585 - DNA, 15 bp, Homo sapiens
gattctccaaagaag

SEQ ID NO: 217586 - DNA, 15 bp, Homo sapiens
agattctccaaagaa

SEQ ID NO: 217587 - DNA, 15 bp, Homo sapiens
aagattctccaaaga

SEQ ID NO: 217588 - DNA, 15 bp, Homo sapiens
aaagattctccaaag

SEQ ID NO: 217589 - DNA, 15 bp, Homo sapiens
caaagattctccaaa

SEQ ID NO: 217590 - DNA, 15 bp, Homo sapiens
tcaaagattctccaa

SEQ ID NO: 217591 - DNA, 15 bp, Homo sapiens
ttcaaagattctcca

SEQ ID NO: 217592 - DNA, 15 bp, Homo sapiens
attcaaagattctcc

SEQ ID NO: 217593 - DNA, 15 bp, Homo sapiens
cattcaaagattctc

SEQ ID NO: 217594 - DNA, 15 bp, Homo sapiens
ccattcaaagattct

SEQ ID NO: 217595 - DNA, 15 bp, Homo sapiens
accattcaaagattc

SEQ ID NO: 217596 - DNA, 15 bp, Homo sapiens
caccattcaaagatt

SEQ ID NO: 217597 - DNA, 15 bp, Homo sapiens
tcaccattcaaagat

SEQ ID NO: 217598 - DNA, 15 bp, Homo sapiens
ctcaccattcaaaga

SEQ ID NO: 217599 - DNA, 15 bp, Homo sapiens
tctcaccattcaaag

SEQ ID NO: 217600 - DNA, 15 bp, Homo sapiens
atctcaccattcaaa

SEQ ID NO: 217601 - DNA, 15 bp, Homo sapiens
tatctcaccattcaa

SEQ ID NO: 217602 - DNA, 15 bp, Homo sapiens
ttatctcaccattca

SEQ ID NO: 217603 - DNA, 15 bp, Homo sapiens
cttatctcaccattc

SEQ ID NO: 217604 - DNA, 15 bp, Homo sapiens
tcttatctcaccatt

SEQ ID NO: 217605 - DNA, 15 bp, Homo sapiens
atcttatctcaccat

SEQ ID NO: 217606 - DNA, 15 bp, Homo sapiens
aatcttatctcacca

SEQ ID NO: 217607 - DNA, 15 bp, Homo sapiens
taatcttatctcacc

SEQ ID NO: 217608 - DNA, 15 bp, Homo sapiens
ataatcttatctcac

SEQ ID NO: 217609 - DNA, 15 bp, Homo sapiens
aataatcttatctca

SEQ ID NO: 217610 - DNA, 15 bp, Homo sapiens
aaataatcttatctc

SEQ ID NO: 217611 - DNA, 15 bp, Homo sapiens
taaataatcttatct

SEQ ID NO: 217612 - DNA, 15 bp, Homo sapiens
ataaataatcttatc

SEQ ID NO: 217613 - DNA, 15 bp, Homo sapiens
aataaataatcttat

SEQ ID NO: 217614 - DNA, 15 bp, Homo sapiens
aaataaataatctta

SEQ ID NO: 217615 - DNA, 15 bp, Homo sapiens
taaataaataatctt

SEQ ID NO: 217616 - DNA, 15 bp, Homo sapiens
ataaataaataatct

SEQ ID NO: 217617 - DNA, 15 bp, Homo sapiens
aataaataaataatc

SEQ ID NO: 217618 - DNA, 15 bp, Homo sapiens
aaataaataaataat

SEQ ID NO: 217619 - DNA, 15 bp, Homo sapiens
tataaataaataaat

SEQ ID NO: 217620 - DNA, 15 bp, Homo sapiens
atataaataaataaa

SEQ ID NO: 217621 - DNA, 15 bp, Homo sapiens
aatataaataaataa

SEQ ID NO: 217622 - DNA, 15 bp, Homo sapiens
aaatataaataaata

SEQ ID NO: 217623 - DNA, 15 bp, Homo sapiens
taaatataaataaat

SEQ ID NO: 217624 - DNA, 15 bp, Homo sapiens
ataaatataaataaa

SEQ ID NO: 217625 - DNA, 15 bp, Homo sapiens
aataaatataaataa

SEQ ID NO: 217626 - DNA, 15 bp, Homo sapiens
aaataaatataaata

SEQ ID NO: 217627 - DNA, 15 bp, Homo sapiens
taaataaatataaat

SEQ ID NO: 217628 - DNA, 15 bp, Homo sapiens
ataaataaatataaa

SEQ ID NO: 217629 - DNA, 15 bp, Homo sapiens
aataaataaatataa

SEQ ID NO: 217630 - DNA, 15 bp, Homo sapiens
aaataaataaatata

SEQ ID NO: 217631 - DNA, 15 bp, Homo sapiens
aaaataaataaatat

SEQ ID NO: 217632 - DNA, 15 bp, Homo sapiens
aaaaataaataaata

SEQ ID NO: 217633 - DNA, 15 bp, Homo sapiens
aaaaaataaataaat

SEQ ID NO: 217634 - DNA, 15 bp, Homo sapiens
taaaaaataaataaa

SEQ ID NO: 217635 - DNA, 15 bp, Homo sapiens
gtaaaaaataaataa

SEQ ID NO: 217636 - DNA, 15 bp, Homo sapiens
ggtaaaaaataaata

SEQ ID NO: 217637 - DNA, 15 bp, Homo sapiens
aggtaaaaaataaat

SEQ ID NO: 217638 - DNA, 15 bp, Homo sapiens
gaggtaaaaaataaa

SEQ ID NO: 217639 - DNA, 15 bp, Homo sapiens
agaggtaaaaaataa

SEQ ID NO: 217640 - DNA, 15 bp, Homo sapiens
tagaggtaaaaaata

SEQ ID NO: 217641 - DNA, 15 bp, Homo sapiens
ctagaggtaaaaaat

SEQ ID NO: 217642 - DNA, 15 bp, Homo sapiens
gctagaggtaaaaaa

SEQ ID NO: 217643 - DNA, 15 bp, Homo sapiens
tgctagaggtaaaaa

SEQ ID NO: 217644 - DNA, 15 bp, Homo sapiens
atgctagaggtaaaa

SEQ ID NO: 217645 - DNA, 15 bp, Homo sapiens
aatgctagaggtaaa

SEQ ID NO: 217646 - DNA, 15 bp, Homo sapiens
gaatgctagaggtaa

SEQ ID NO: 217647 - DNA, 15 bp, Homo sapiens
agaatgctagaggta

SEQ ID NO: 217648 - DNA, 15 bp, Homo sapiens
cagaatgctagaggt

SEQ ID NO: 217649 - DNA, 15 bp, Homo sapiens
ccagaatgctagagg

SEQ ID NO: 217650 - DNA, 15 bp, Homo sapiens
tccagaatgctagag

SEQ ID NO: 217651 - DNA, 15 bp, Homo sapiens
ttccagaatgctaga

SEQ ID NO: 217652 - DNA, 15 bp, Homo sapiens
gttccagaatgctag

SEQ ID NO: 217653 - DNA, 15 bp, Homo sapiens
agttccagaatgcta

SEQ ID NO: 217654 - DNA, 15 bp, Homo sapiens
aagttccagaatgct

SEQ ID NO: 217655 - DNA, 15 bp, Homo sapiens
gaagttccagaatgc

SEQ ID NO: 217656 - DNA, 15 bp, Homo sapiens
agaagttccagaatg

SEQ ID NO: 217657 - DNA, 15 bp, Homo sapiens
aagaagttccagaat

SEQ ID NO: 217658 - DNA, 15 bp, Homo sapiens
caagaagttccagaa

SEQ ID NO: 217659 - DNA, 15 bp, Homo sapiens
acaagaagttccaga

SEQ ID NO: 217660 - DNA, 15 bp, Homo sapiens
cacaagaagttccag

SEQ ID NO: 217661 - DNA, 15 bp, Homo sapiens
gcacaagaagttcca

SEQ ID NO: 217662 - DNA, 15 bp, Homo sapiens
agcacaagaagttcc

SEQ ID NO: 217663 - DNA, 15 bp, Homo sapiens
aagcacaagaagttc

SEQ ID NO: 217664 - DNA, 15 bp, Homo sapiens
caagcacaagaagtt

SEQ ID NO: 217665 - DNA, 15 bp, Homo sapiens
acaagcacaagaagt

SEQ ID NO: 217666 - DNA, 15 bp, Homo sapiens
aacaagcacaagaag

SEQ ID NO: 217667 - DNA, 15 bp, Homo sapiens
taacaagcacaagaa

SEQ ID NO: 217668 - DNA, 15 bp, Homo sapiens
ctaacaagcacaaga

SEQ ID NO: 217669 - DNA, 15 bp, Homo sapiens
tctaacaagcacaag

SEQ ID NO: 217670 - DNA, 15 bp, Homo sapiens
ttctaacaagcacaa

SEQ ID NO: 217671 - DNA, 15 bp, Homo sapiens
attctaacaagcaca

SEQ ID NO: 217672 - DNA, 15 bp, Homo sapiens
aattctaacaagcac

SEQ ID NO: 217673 - DNA, 15 bp, Homo sapiens
aaattctaacaagca

SEQ ID NO: 217674 - DNA, 15 bp, Homo sapiens
gaaattctaacaagc

SEQ ID NO: 217675 - DNA, 15 bp, Homo sapiens
agaaattctaacaag

SEQ ID NO: 217676 - DNA, 15 bp, Homo sapiens
gagaaattctaacaa

SEQ ID NO: 217677 - DNA, 15 bp, Homo sapiens
tgagaaattctaaca

SEQ ID NO: 217678 - DNA, 15 bp, Homo sapiens
ctgagaaattctaac

SEQ ID NO: 217679 - DNA, 15 bp, Homo sapiens
actgagaaattctaa

SEQ ID NO: 217680 - DNA, 15 bp, Homo sapiens
cactgagaaattcta

SEQ ID NO: 217681 - DNA, 15 bp, Homo sapiens
ccactgagaaattct

SEQ ID NO: 217682 - DNA, 15 bp, Homo sapiens
cccactgagaaattc

SEQ ID NO: 217683 - DNA, 15 bp, Homo sapiens
acccactgagaaatt

SEQ ID NO: 217684 - DNA, 15 bp, Homo sapiens
cacccactgagaaat

SEQ ID NO: 217685 - DNA, 15 bp, Homo sapiens
acacccactgagaaa

SEQ ID NO: 217686 - DNA, 15 bp, Homo sapiens
gacacccactgagaa

SEQ ID NO: 217687 - DNA, 15 bp, Homo sapiens
tgacacccactgaga

SEQ ID NO: 217688 - DNA, 15 bp, Homo sapiens
ctgacacccactgag

SEQ ID NO: 217689 - DNA, 15 bp, Homo sapiens
tctgacacccactga

SEQ ID NO: 217690 - DNA, 15 bp, Homo sapiens
ttctgacacccactg

SEQ ID NO: 217691 - DNA, 15 bp, Homo sapiens
cttctgacacccact

SEQ ID NO: 217692 - DNA, 15 bp, Homo sapiens
tcttctgacacccac

SEQ ID NO: 217693 - DNA, 15 bp, Homo sapiens
atcttctgacaccca

SEQ ID NO: 217694 - DNA, 15 bp, Homo sapiens
catcttctgacaccc

SEQ ID NO: 217695 - DNA, 15 bp, Homo sapiens
ccatcttctgacacc

SEQ ID NO: 217696 - DNA, 15 bp, Homo sapiens
tccatcttctgacac

SEQ ID NO: 217697 - DNA, 15 bp, Homo sapiens
atccatcttctgaca

SEQ ID NO: 217698 - DNA, 15 bp, Homo sapiens
catccatcttctgac

SEQ ID NO: 217699 - DNA, 15 bp, Homo sapiens
gcatccatcttctga

SEQ ID NO: 217700 - DNA, 15 bp, Homo sapiens
agcatccatcttctg

SEQ ID NO: 217701 - DNA, 15 bp, Homo sapiens
cagcatccatcttct

SEQ ID NO: 217702 - DNA, 15 bp, Homo sapiens
acagcatccatcttc

SEQ ID NO: 217703 - DNA, 15 bp, Homo sapiens
tacagcatccatctt

SEQ ID NO: 217704 - DNA, 15 bp, Homo sapiens
ttacagcatccatct

SEQ ID NO: 217705 - DNA, 15 bp, Homo sapiens
attacagcatccatc

SEQ ID NO: 217706 - DNA, 15 bp, Homo sapiens
gattacagcatccat

SEQ ID NO: 217707 - DNA, 15 bp, Homo sapiens
agattacagcatcca

SEQ ID NO: 217708 - DNA, 15 bp, Homo sapiens
cagattacagcatcc

SEQ ID NO: 217709 - DNA, 15 bp, Homo sapiens
acagattacagcatc

SEQ ID NO: 217710 - DNA, 15 bp, Homo sapiens
tacagattacagcat

SEQ ID NO: 217711 - DNA, 15 bp, Homo sapiens
atacagattacagca

SEQ ID NO: 217712 - DNA, 15 bp, Homo sapiens
aatacagattacagc

SEQ ID NO: 217713 - DNA, 15 bp, Homo sapiens
gaatacagattacag

SEQ ID NO: 217714 - DNA, 15 bp, Homo sapiens
agaatacagattaca

SEQ ID NO: 217715 - DNA, 15 bp, Homo sapiens
tagaatacagattac

SEQ ID NO: 217716 - DNA, 15 bp, Homo sapiens
ttagaatacagatta

SEQ ID NO: 217717 - DNA, 15 bp, Homo sapiens
attagaatacagatt

SEQ ID NO: 217718 - DNA, 15 bp, Homo sapiens
cattagaatacagat

SEQ ID NO: 217719 - DNA, 15 bp, Homo sapiens
tcattagaatacaga

SEQ ID NO: 217720 - DNA, 15 bp, Homo sapiens
atcattagaatacag

SEQ ID NO: 217721 - DNA, 15 bp, Homo sapiens
catcattagaataca

SEQ ID NO: 217722 - DNA, 15 bp, Homo sapiens
acatcattagaatac

SEQ ID NO: 217723 - DNA, 15 bp, Homo sapiens
gacatcattagaata

SEQ ID NO: 217724 - DNA, 15 bp, Homo sapiens
cgacatcattagaat

SEQ ID NO: 217725 - DNA, 15 bp, Homo sapiens
acgacatcattagaa

SEQ ID NO: 217726 - DNA, 15 bp, Homo sapiens
cacgacatcattaga

SEQ ID NO: 217727 - DNA, 15 bp, Homo sapiens
ccacgacatcattag

SEQ ID NO: 217728 - DNA, 15 bp, Homo sapiens
gccacgacatcatta

SEQ ID NO: 217729 - DNA, 15 bp, Homo sapiens
agccacgacatcatt

SEQ ID NO: 217730 - DNA, 15 bp, Homo sapiens
aagccacgacatcat

SEQ ID NO: 217731 - DNA, 15 bp, Homo sapiens
taagccacgacatca

SEQ ID NO: 217732 - DNA, 15 bp, Homo sapiens
ataagccacgacatc

SEQ ID NO: 217733 - DNA, 15 bp, Homo sapiens
gataagccacgacat

SEQ ID NO: 217734 - DNA, 15 bp, Homo sapiens
agataagccacgaca

SEQ ID NO: 217735 - DNA, 15 bp, Homo sapiens
gagataagccacgac

SEQ ID NO: 217736 - DNA, 15 bp, Homo sapiens
agagataagccacga

SEQ ID NO: 217737 - DNA, 15 bp, Homo sapiens
cagagataagccacg

SEQ ID NO: 217738 - DNA, 15 bp, Homo sapiens
ccagagataagccac

SEQ ID NO: 217739 - DNA, 15 bp, Homo sapiens
tccagagataagcca

SEQ ID NO: 217740 - DNA, 15 bp, Homo sapiens
ttccagagataagcc

SEQ ID NO: 217741 - DNA, 15 bp, Homo sapiens
tttccagagataagc

SEQ ID NO: 217742 - DNA, 15 bp, Homo sapiens
atttccagagataag

SEQ ID NO: 217743 - DNA, 15 bp, Homo sapiens
tatttccagagataa

SEQ ID NO: 217744 - DNA, 15 bp, Homo sapiens
gtatttccagagata

SEQ ID NO: 217745 - DNA, 15 bp, Homo sapiens
agtatttccagagat

SEQ ID NO: 217746 - DNA, 15 bp, Homo sapiens
gagtatttccagaga

SEQ ID NO: 217747 - DNA, 15 bp, Homo sapiens
agagtatttccagag

SEQ ID NO: 217748 - DNA, 15 bp, Homo sapiens
aagagtatttccaga

SEQ ID NO: 217749 - DNA, 15 bp, Homo sapiens
caagagtatttccag

SEQ ID NO: 217750 - DNA, 15 bp, Homo sapiens
tcaagagtatttcca

SEQ ID NO: 217751 - DNA, 15 bp, Homo sapiens
atcaagagtatttcc

SEQ ID NO: 217752 - DNA, 15 bp, Homo sapiens
aatcaagagtatttc

SEQ ID NO: 217753 - DNA, 15 bp, Homo sapiens
caatcaagagtattt

SEQ ID NO: 217754 - DNA, 15 bp, Homo sapiens
ccaatcaagagtatt

SEQ ID NO: 217755 - DNA, 15 bp, Homo sapiens
tccaatcaagagtat

SEQ ID NO: 217756 - DNA, 15 bp, Homo sapiens
atccaatcaagagta

SEQ ID NO: 217757 - DNA, 15 bp, Homo sapiens
aatccaatcaagagt

SEQ ID NO: 217758 - DNA, 15 bp, Homo sapiens
aaatccaatcaagag

SEQ ID NO: 217759 - DNA, 15 bp, Homo sapiens
aaaatccaatcaaga

SEQ ID NO: 217760 - DNA, 15 bp, Homo sapiens
taaaatccaatcaag

SEQ ID NO: 217761 - DNA, 15 bp, Homo sapiens
ttaaaatccaatcaa

SEQ ID NO: 217762 - DNA, 15 bp, Homo sapiens
tttaaaatccaatca

SEQ ID NO: 217763 - DNA, 15 bp, Homo sapiens
ttttaaaatccaatc

SEQ ID NO: 217764 - DNA, 15 bp, Homo sapiens
gttttaaaatccaat

SEQ ID NO: 217765 - DNA, 15 bp, Homo sapiens
agttttaaaatccaa

SEQ ID NO: 217766 - DNA, 15 bp, Homo sapiens
cagttttaaaatcca

SEQ ID NO: 217767 - DNA, 15 bp, Homo sapiens
tcagttttaaaatcc

SEQ ID NO: 217768 - DNA, 15 bp, Homo sapiens
ctcagttttaaaatc

SEQ ID NO: 217769 - DNA, 15 bp, Homo sapiens
actcagttttaaaat

SEQ ID NO: 217770 - DNA, 15 bp, Homo sapiens
cactcagttttaaaa

SEQ ID NO: 217771 - DNA, 15 bp, Homo sapiens
gcactcagttttaaa

SEQ ID NO: 217772 - DNA, 15 bp, Homo sapiens
agcactcagttttaa

SEQ ID NO: 217773 - DNA, 15 bp, Homo sapiens
aagcactcagtttta

SEQ ID NO: 217774 - DNA, 15 bp, Homo sapiens
taagcactcagtttt

SEQ ID NO: 217775 - DNA, 15 bp, Homo sapiens
ctaagcactcagttt

SEQ ID NO: 217776 - DNA, 15 bp, Homo sapiens
cctaagcactcagtt

SEQ ID NO: 217777 - DNA, 15 bp, Homo sapiens
tcctaagcactcagt

SEQ ID NO: 217778 - DNA, 15 bp, Homo sapiens
ctcctaagcactcag

SEQ ID NO: 217779 - DNA, 15 bp, Homo sapiens
gctcctaagcactca

SEQ ID NO: 217780 - DNA, 15 bp, Homo sapiens
ggctcctaagcactc

SEQ ID NO: 217781 - DNA, 15 bp, Homo sapiens
gggctcctaagcact

SEQ ID NO: 217782 - DNA, 15 bp, Homo sapiens
agggctcctaagcac

SEQ ID NO: 217783 - DNA, 15 bp, Homo sapiens
aagggctcctaagca

SEQ ID NO: 217784 - DNA, 15 bp, Homo sapiens
taagggctcctaagc

SEQ ID NO: 217785 - DNA, 15 bp, Homo sapiens
ctaagggctcctaag

SEQ ID NO: 217786 - DNA, 15 bp, Homo sapiens
tctaagggctcctaa

SEQ ID NO: 217787 - DNA, 15 bp, Homo sapiens
ctctaagggctccta

SEQ ID NO: 217788 - DNA, 15 bp, Homo sapiens
tctctaagggctcct

SEQ ID NO: 217789 - DNA, 15 bp, Homo sapiens
ctctctaagggctcc

SEQ ID NO: 217790 - DNA, 15 bp, Homo sapiens
cctctctaagggctc

SEQ ID NO: 217791 - DNA, 15 bp, Homo sapiens
gcctctctaagggct

SEQ ID NO: 217792 - DNA, 15 bp, Homo sapiens
tgcctctctaagggc

SEQ ID NO: 217793 - DNA, 15 bp, Homo sapiens
ttgcctctctaaggg

SEQ ID NO: 217794 - DNA, 15 bp, Homo sapiens
tttgcctctctaagg

SEQ ID NO: 217795 - DNA, 15 bp, Homo sapiens
atttgcctctctaag

SEQ ID NO: 217796 - DNA, 15 bp, Homo sapiens
catttgcctctctaa

SEQ ID NO: 217797 - DNA, 15 bp, Homo sapiens
gcatttgcctctcta

SEQ ID NO: 217798 - DNA, 15 bp, Homo sapiens
agcatttgcctctct

SEQ ID NO: 217799 - DNA, 15 bp, Homo sapiens
cagcatttgcctctc

SEQ ID NO: 217800 - DNA, 15 bp, Homo sapiens
ccagcatttgcctct

SEQ ID NO: 217801 - DNA, 15 bp, Homo sapiens
accagcatttgcctc

SEQ ID NO: 217802 - DNA, 15 bp, Homo sapiens
gaccagcatttgcct

SEQ ID NO: 217803 - DNA, 15 bp, Homo sapiens
tgaccagcatttgcc

SEQ ID NO: 217804 - DNA, 15 bp, Homo sapiens
gtgaccagcatttgc

SEQ ID NO: 217805 - DNA, 15 bp, Homo sapiens
tgtgaccagcatttg

SEQ ID NO: 217806 - DNA, 15 bp, Homo sapiens
ctgtgaccagcattt

SEQ ID NO: 217807 - DNA, 15 bp, Homo sapiens
cctgtgaccagcatt

SEQ ID NO: 217808 - DNA, 15 bp, Homo sapiens
ccctgtgaccagcat

SEQ ID NO: 217809 - DNA, 15 bp, Homo sapiens
cccctgtgaccagca

SEQ ID NO: 217810 - DNA, 15 bp, Homo sapiens
gcccctgtgaccagc

SEQ ID NO: 217811 - DNA, 15 bp, Homo sapiens
ggcccctgtgaccag

SEQ ID NO: 217812 - DNA, 15 bp, Homo sapiens
tggcccctgtgacca

SEQ ID NO: 217813 - DNA, 15 bp, Homo sapiens
ttggcccctgtgacc

SEQ ID NO: 217814 - DNA, 15 bp, Homo sapiens
cttggcccctgtgac

SEQ ID NO: 217815 - DNA, 15 bp, Homo sapiens
gcttggcccctgtga

SEQ ID NO: 217816 - DNA, 15 bp, Homo sapiens
agcttggcccctgtg

SEQ ID NO: 217817 - DNA, 15 bp, Homo sapiens
tagcttggcccctgt

SEQ ID NO: 217818 - DNA, 15 bp, Homo sapiens
ctagcttggcccctg

SEQ ID NO: 217819 - DNA, 15 bp, Homo sapiens
tctagcttggcccct

SEQ ID NO: 217820 - DNA, 15 bp, Homo sapiens
gtctagcttggcccc

SEQ ID NO: 217821 - DNA, 15 bp, Homo sapiens
agtctagcttggccc

SEQ ID NO: 217822 - DNA, 15 bp, Homo sapiens
gagtctagcttggcc

SEQ ID NO: 217823 - DNA, 15 bp, Homo sapiens
agagtctagcttggc

SEQ ID NO: 217824 - DNA, 15 bp, Homo sapiens
tagagtctagcttgg

SEQ ID NO: 217825 - DNA, 15 bp, Homo sapiens
atagagtctagcttg

SEQ ID NO: 217826 - DNA, 15 bp, Homo sapiens
catagagtctagctt

SEQ ID NO: 217827 - DNA, 15 bp, Homo sapiens
gcatagagtctagct

SEQ ID NO: 217828 - DNA, 15 bp, Homo sapiens
tgcatagagtctagc

SEQ ID NO: 217829 - DNA, 15 bp, Homo sapiens
ttgcatagagtctag

SEQ ID NO: 217830 - DNA, 15 bp, Homo sapiens
tttgcatagagtcta

SEQ ID NO: 217831 - DNA, 15 bp, Homo sapiens
gtttgcatagagtct

SEQ ID NO: 217832 - DNA, 15 bp, Homo sapiens
tgtttgcatagagtc

SEQ ID NO: 217833 - DNA, 15 bp, Homo sapiens
ctgtttgcatagagt

SEQ ID NO: 217834 - DNA, 15 bp, Homo sapiens
cctgtttgcatagag

SEQ ID NO: 217835 - DNA, 15 bp, Homo sapiens
acctgtttgcataga

SEQ ID NO: 217836 - DNA, 15 bp, Homo sapiens
gacctgtttgcatag

SEQ ID NO: 217837 - DNA, 15 bp, Homo sapiens
tgacctgtttgcata

SEQ ID NO: 217838 - DNA, 15 bp, Homo sapiens
ctgacctgtttgcat

SEQ ID NO: 217839 - DNA, 15 bp, Homo sapiens
cctgacctgtttgca

SEQ ID NO: 217840 - DNA, 15 bp, Homo sapiens
gcctgacctgtttgc

SEQ ID NO: 217841 - DNA, 15 bp, Homo sapiens
agcctgacctgtttg

SEQ ID NO: 217842 - DNA, 15 bp, Homo sapiens
cagcctgacctgttt

SEQ ID NO: 217843 - DNA, 15 bp, Homo sapiens
ccagcctgacctgtt

SEQ ID NO: 217844 - DNA, 15 bp, Homo sapiens
tccagcctgacctgt

SEQ ID NO: 217845 - DNA, 15 bp, Homo sapiens
ttccagcctgacctg

SEQ ID NO: 217846 - DNA, 15 bp, Homo sapiens
attccagcctgacct

SEQ ID NO: 217847 - DNA, 15 bp, Homo sapiens
gattccagcctgacc

SEQ ID NO: 217848 - DNA, 15 bp, Homo sapiens
ggattccagcctgac

SEQ ID NO: 217849 - DNA, 15 bp, Homo sapiens
gggattccagcctga

SEQ ID NO: 217850 - DNA, 15 bp, Homo sapiens
ggggattccagcctg

SEQ ID NO: 217851 - DNA, 15 bp, Homo sapiens
tggggattccagcct

SEQ ID NO: 217852 - DNA, 15 bp, Homo sapiens
ctggggattccagcc

SEQ ID NO: 217853 - DNA, 15 bp, Homo sapiens
actggggattccagc

SEQ ID NO: 217854 - DNA, 15 bp, Homo sapiens
aactggggattccag

SEQ ID NO: 217855 - DNA, 15 bp, Homo sapiens
taactggggattcca

SEQ ID NO: 217856 - DNA, 15 bp, Homo sapiens
ataactggggattcc

SEQ ID NO: 217857 - DNA, 15 bp, Homo sapiens
gataactggggattc

SEQ ID NO: 217858 - DNA, 15 bp, Homo sapiens
tgataactggggatt

SEQ ID NO: 217859 - DNA, 15 bp, Homo sapiens
ttgataactggggat

SEQ ID NO: 217860 - DNA, 15 bp, Homo sapiens
cttgataactgggga

SEQ ID NO: 217861 - DNA, 15 bp, Homo sapiens
ccttgataactgggg

SEQ ID NO: 217862 - DNA, 15 bp, Homo sapiens
cccttgataactggg

SEQ ID NO: 217863 - DNA, 15 bp, Homo sapiens
tcccttgataactgg

SEQ ID NO: 217864 - DNA, 15 bp, Homo sapiens
gtcccttgataactg

SEQ ID NO: 217865 - DNA, 15 bp, Homo sapiens
agtcccttgataact

SEQ ID NO: 217866 - DNA, 15 bp, Homo sapiens
cagtcccttgataac

SEQ ID NO: 217867 - DNA, 15 bp, Homo sapiens
tcagtcccttgataa

SEQ ID NO: 217868 - DNA, 15 bp, Homo sapiens
ttcagtcccttgata

SEQ ID NO: 217869 - DNA, 15 bp, Homo sapiens
cttcagtcccttgat

SEQ ID NO: 217870 - DNA, 15 bp, Homo sapiens
acttcagtcccttga

SEQ ID NO: 217871 - DNA, 15 bp, Homo sapiens
aacttcagtcccttg

SEQ ID NO: 217872 - DNA, 15 bp, Homo sapiens
taacttcagtccctt

SEQ ID NO: 217873 - DNA, 15 bp, Homo sapiens
ttaacttcagtccct

SEQ ID NO: 217874 - DNA, 15 bp, Homo sapiens
gttaacttcagtccc

SEQ ID NO: 217875 - DNA, 15 bp, Homo sapiens
ggttaacttcagtcc

SEQ ID NO: 217876 - DNA, 15 bp, Homo sapiens
aggttaacttcagtc

SEQ ID NO: 217877 - DNA, 15 bp, Homo sapiens
caggttaacttcagt

SEQ ID NO: 217878 - DNA, 15 bp, Homo sapiens
tcaggttaacttcag

SEQ ID NO: 217879 - DNA, 15 bp, Homo sapiens
ttcaggttaacttca

SEQ ID NO: 217880 - DNA, 15 bp, Homo sapiens
tttcaggttaacttc

SEQ ID NO: 217881 - DNA, 15 bp, Homo sapiens
gtttcaggttaactt

SEQ ID NO: 217882 - DNA, 15 bp, Homo sapiens
cgtttcaggttaact

SEQ ID NO: 217883 - DNA, 15 bp, Homo sapiens
acgtttcaggttaac

SEQ ID NO: 217884 - DNA, 15 bp, Homo sapiens
aacgtttcaggttaa

SEQ ID NO: 217885 - DNA, 15 bp, Homo sapiens
aaacgtttcaggtta

SEQ ID NO: 217886 - DNA, 15 bp, Homo sapiens
gaaacgtttcaggtt

SEQ ID NO: 217887 - DNA, 15 bp, Homo sapiens
ggaaacgtttcaggt

SEQ ID NO: 217888 - DNA, 15 bp, Homo sapiens
aggaaacgtttcagg

SEQ ID NO: 217889 - DNA, 15 bp, Homo sapiens
aaggaaacgtttcag

SEQ ID NO: 217890 - DNA, 15 bp, Homo sapiens
aaaggaaacgtttca

SEQ ID NO: 217891 - DNA, 15 bp, Homo sapiens
taaaggaaacgtttc

SEQ ID NO: 217892 - DNA, 15 bp, Homo sapiens
gtaaaggaaacgttt

SEQ ID NO: 217893 - DNA, 15 bp, Homo sapiens
ggtaaaggaaacgtt

SEQ ID NO: 217894 - DNA, 15 bp, Homo sapiens
tggtaaaggaaacgt

SEQ ID NO: 217895 - DNA, 15 bp, Homo sapiens
atggtaaaggaaacg

SEQ ID NO: 217896 - DNA, 15 bp, Homo sapiens
catggtaaaggaaac

SEQ ID NO: 217897 - DNA, 15 bp, Homo sapiens
tcatggtaaaggaaa

SEQ ID NO: 217898 - DNA, 15 bp, Homo sapiens
gtcatggtaaaggaa

SEQ ID NO: 217899 - DNA, 15 bp, Homo sapiens
agtcatggtaaagga

SEQ ID NO: 217900 - DNA, 15 bp, Homo sapiens
aagtcatggtaaagg

SEQ ID NO: 217901 - DNA, 15 bp, Homo sapiens
taagtcatggtaaag

SEQ ID NO: 217902 - DNA, 15 bp, Homo sapiens
ttaagtcatggtaaa

SEQ ID NO: 217903 - DNA, 15 bp, Homo sapiens
gttaagtcatggtaa

SEQ ID NO: 217904 - DNA, 15 bp, Homo sapiens
ggttaagtcatggta

SEQ ID NO: 217905 - DNA, 15 bp, Homo sapiens
aggttaagtcatggt

SEQ ID NO: 217906 - DNA, 15 bp, Homo sapiens
taggttaagtcatgg

SEQ ID NO: 217907 - DNA, 15 bp, Homo sapiens
ttaggttaagtcatg

SEQ ID NO: 217908 - DNA, 15 bp, Homo sapiens
cttaggttaagtcat

SEQ ID NO: 217909 - DNA, 15 bp, Homo sapiens
ccttaggttaagtca

SEQ ID NO: 217910 - DNA, 15 bp, Homo sapiens
accttaggttaagtc

SEQ ID NO: 217911 - DNA, 15 bp, Homo sapiens
caccttaggttaagt

SEQ ID NO: 217912 - DNA, 15 bp, Homo sapiens
gcaccttaggttaag

SEQ ID NO: 217913 - DNA, 15 bp, Homo sapiens
tgcaccttaggttaa

SEQ ID NO: 217914 - DNA, 15 bp, Homo sapiens
atgcaccttaggtta

SEQ ID NO: 217915 - DNA, 15 bp, Homo sapiens
catgcaccttaggtt

SEQ ID NO: 217916 - DNA, 15 bp, Homo sapiens
tcatgcaccttaggt

SEQ ID NO: 217917 - DNA, 15 bp, Homo sapiens
atcatgcaccttagg

SEQ ID NO: 217918 - DNA, 15 bp, Homo sapiens
tatcatgcaccttag

SEQ ID NO: 217919 - DNA, 15 bp, Homo sapiens
ttatcatgcacctta

SEQ ID NO: 217920 - DNA, 15 bp, Homo sapiens
attatcatgcacctt

SEQ ID NO: 217921 - DNA, 15 bp, Homo sapiens
cattatcatgcacct

SEQ ID NO: 217922 - DNA, 15 bp, Homo sapiens
tcattatcatgcacc

SEQ ID NO: 217923 - DNA, 15 bp, Homo sapiens
ctcattatcatgcac

SEQ ID NO: 217924 - DNA, 15 bp, Homo sapiens
actcattatcatgca

SEQ ID NO: 217925 - DNA, 15 bp, Homo sapiens
cactcattatcatgc

SEQ ID NO: 217926 - DNA, 15 bp, Homo sapiens
acactcattatcatg

SEQ ID NO: 217927 - DNA, 15 bp, Homo sapiens
aacactcattatcat

SEQ ID NO: 217928 - DNA, 15 bp, Homo sapiens
taacactcattatca

SEQ ID NO: 217929 - DNA, 15 bp, Homo sapiens
ttaacactcattatc

SEQ ID NO: 217930 - DNA, 15 bp, Homo sapiens
gttaacactcattat

SEQ ID NO: 217931 - DNA, 15 bp, Homo sapiens
agttaacactcatta

SEQ ID NO: 217932 - DNA, 15 bp, Homo sapiens
cagttaacactcatt

SEQ ID NO: 217933 - DNA, 15 bp, Homo sapiens
ccagttaacactcat

SEQ ID NO: 217934 - DNA, 15 bp, Homo sapiens
cccagttaacactca

SEQ ID NO: 217935 - DNA, 15 bp, Homo sapiens
acccagttaacactc

SEQ ID NO: 217936 - DNA, 15 bp, Homo sapiens
tacccagttaacact

SEQ ID NO: 217937 - DNA, 15 bp, Homo sapiens
gtacccagttaacac

SEQ ID NO: 217938 - DNA, 15 bp, Homo sapiens
ggtacccagttaaca

SEQ ID NO: 217939 - DNA, 15 bp, Homo sapiens
tggtacccagttaac

SEQ ID NO: 217940 - DNA, 15 bp, Homo sapiens
ctggtacccagttaa

SEQ ID NO: 217941 - DNA, 15 bp, Homo sapiens
cctggtacccagtta

SEQ ID NO: 217942 - DNA, 15 bp, Homo sapiens
gcctggtacccagtt

SEQ ID NO: 217943 - DNA, 15 bp, Homo sapiens
agcctggtacccagt

SEQ ID NO: 217944 - DNA, 15 bp, Homo sapiens
aagcctggtacccag

SEQ ID NO: 217945 - DNA, 15 bp, Homo sapiens
caagcctggtaccca

SEQ ID NO: 217946 - DNA, 15 bp, Homo sapiens
gcaagcctggtaccc

SEQ ID NO: 217947 - DNA, 15 bp, Homo sapiens
ggcaagcctggtacc

SEQ ID NO: 217948 - DNA, 15 bp, Homo sapiens
aggcaagcctggtac

SEQ ID NO: 217949 - DNA, 15 bp, Homo sapiens
aaggcaagcctggta

SEQ ID NO: 217950 - DNA, 15 bp, Homo sapiens
aaaggcaagcctggt

SEQ ID NO: 217951 - DNA, 15 bp, Homo sapiens
taaaggcaagcctgg

SEQ ID NO: 217952 - DNA, 15 bp, Homo sapiens
gtaaaggcaagcctg

SEQ ID NO: 217953 - DNA, 15 bp, Homo sapiens
tgtaaaggcaagcct

SEQ ID NO: 217954 - DNA, 15 bp, Homo sapiens
gtgtaaaggcaagcc

SEQ ID NO: 217955 - DNA, 15 bp, Homo sapiens
ggtgtaaaggcaagc

SEQ ID NO: 217956 - DNA, 15 bp, Homo sapiens
tggtgtaaaggcaag

SEQ ID NO: 217957 - DNA, 15 bp, Homo sapiens
ctggtgtaaaggcaa

SEQ ID NO: 217958 - DNA, 15 bp, Homo sapiens
cctggtgtaaaggca

SEQ ID NO: 217959 - DNA, 15 bp, Homo sapiens
acctggtgtaaaggc

SEQ ID NO: 217960 - DNA, 15 bp, Homo sapiens
aacctggtgtaaagg

SEQ ID NO: 217961 - DNA, 15 bp, Homo sapiens
gaacctggtgtaaag

SEQ ID NO: 217962 - DNA, 15 bp, Homo sapiens
agaacctggtgtaaa

SEQ ID NO: 217963 - DNA, 15 bp, Homo sapiens
cagaacctggtgtaa

SEQ ID NO: 217964 - DNA, 15 bp, Homo sapiens
acagaacctggtgta

SEQ ID NO: 217965 - DNA, 15 bp, Homo sapiens
gacagaacctggtgt

SEQ ID NO: 217966 - DNA, 15 bp, Homo sapiens
ggacagaacctggtg

SEQ ID NO: 217967 - DNA, 15 bp, Homo sapiens
aggacagaacctggt

SEQ ID NO: 217968 - DNA, 15 bp, Homo sapiens
aaggacagaacctgg

SEQ ID NO: 217969 - DNA, 15 bp, Homo sapiens
taaggacagaacctg

SEQ ID NO: 217970 - DNA, 15 bp, Homo sapiens
ataaggacagaacct

SEQ ID NO: 217971 - DNA, 15 bp, Homo sapiens
tataaggacagaacc

SEQ ID NO: 217972 - DNA, 15 bp, Homo sapiens
ctataaggacagaac

SEQ ID NO: 217973 - DNA, 15 bp, Homo sapiens
gctataaggacagaa

SEQ ID NO: 217974 - DNA, 15 bp, Homo sapiens
tgctataaggacaga

SEQ ID NO: 217975 - DNA, 15 bp, Homo sapiens
ttgctataaggacag

SEQ ID NO: 217976 - DNA, 15 bp, Homo sapiens
gttgctataaggaca

SEQ ID NO: 217977 - DNA, 15 bp, Homo sapiens
ggttgctataaggac

SEQ ID NO: 217978 - DNA, 15 bp, Homo sapiens
gggttgctataagga

SEQ ID NO: 217979 - DNA, 15 bp, Homo sapiens
ggggttgctataagg

SEQ ID NO: 217980 - DNA, 15 bp, Homo sapiens
cggggttgctataag

SEQ ID NO: 217981 - DNA, 15 bp, Homo sapiens
acggggttgctataa

SEQ ID NO: 217982 - DNA, 15 bp, Homo sapiens
gacggggttgctata

SEQ ID NO: 217983 - DNA, 15 bp, Homo sapiens
tgacggggttgctat

SEQ ID NO: 217984 - DNA, 15 bp, Homo sapiens
ctgacggggttgcta

SEQ ID NO: 217985 - DNA, 15 bp, Homo sapiens
gctgacggggttgct

SEQ ID NO: 217986 - DNA, 15 bp, Homo sapiens
agctgacggggttgc

SEQ ID NO: 217987 - DNA, 15 bp, Homo sapiens
tagctgacggggttg

SEQ ID NO: 217988 - DNA, 15 bp, Homo sapiens
ctagctgacggggtt

SEQ ID NO: 217989 - DNA, 15 bp, Homo sapiens
cctagctgacggggt

SEQ ID NO: 217990 - DNA, 15 bp, Homo sapiens
acctagctgacgggg

SEQ ID NO: 217991 - DNA, 15 bp, Homo sapiens
tacctagctgacggg

SEQ ID NO: 217992 - DNA, 15 bp, Homo sapiens
gtacctagctgacgg

SEQ ID NO: 217993 - DNA, 15 bp, Homo sapiens
ggtacctagctgacg

SEQ ID NO: 217994 - DNA, 15 bp, Homo sapiens
gggtacctagctgac

SEQ ID NO: 217995 - DNA, 15 bp, Homo sapiens
ggggtacctagctga

SEQ ID NO: 217996 - DNA, 15 bp, Homo sapiens
gggggtacctagctg

SEQ ID NO: 217997 - DNA, 15 bp, Homo sapiens
tgggggtacctagct

SEQ ID NO: 217998 - DNA, 15 bp, Homo sapiens
atgggggtacctagc

SEQ ID NO: 217999 - DNA, 15 bp, Homo sapiens
gatgggggtacctag

SEQ ID NO: 218000 - DNA, 15 bp, Homo sapiens
ggatgggggtaccta

SEQ ID NO: 218001 - DNA, 15 bp, Homo sapiens
gggatgggggtacct

SEQ ID NO: 218002 - DNA, 15 bp, Homo sapiens
agggatgggggtacc

SEQ ID NO: 218003 - DNA, 15 bp, Homo sapiens
cagggatgggggtac

SEQ ID NO: 218004 - DNA, 15 bp, Homo sapiens
acagggatgggggta

SEQ ID NO: 218005 - DNA, 15 bp, Homo sapiens
aacagggatgggggt

SEQ ID NO: 218006 - DNA, 15 bp, Homo sapiens
aaacagggatggggg

SEQ ID NO: 218007 - DNA, 15 bp, Homo sapiens
aaaacagggatgggg

SEQ ID NO: 218008 - DNA, 15 bp, Homo sapiens
gaaaacagggatggg

SEQ ID NO: 218009 - DNA, 15 bp, Homo sapiens
ggaaaacagggatgg

SEQ ID NO: 218010 - DNA, 15 bp, Homo sapiens
tggaaaacagggatg

SEQ ID NO: 218011 - DNA, 15 bp, Homo sapiens
ctggaaaacagggat

SEQ ID NO: 218012 - DNA, 15 bp, Homo sapiens
tctggaaaacaggga

SEQ ID NO: 218013 - DNA, 15 bp, Homo sapiens
atctggaaaacaggg

SEQ ID NO: 218014 - DNA, 15 bp, Homo sapiens
catctggaaaacagg

SEQ ID NO: 218015 - DNA, 15 bp, Homo sapiens
tcatctggaaaacag

SEQ ID NO: 218016 - DNA, 15 bp, Homo sapiens
ctcatctggaaaaca

SEQ ID NO: 218017 - DNA, 15 bp, Homo sapiens
tctcatctggaaaac

SEQ ID NO: 218018 - DNA, 15 bp, Homo sapiens
atctcatctggaaaa

SEQ ID NO: 218019 - DNA, 15 bp, Homo sapiens
aatctcatctggaaa

SEQ ID NO: 218020 - DNA, 15 bp, Homo sapiens
taatctcatctggaa

SEQ ID NO: 218021 - DNA, 15 bp, Homo sapiens
ttaatctcatctgga

SEQ ID NO: 218022 - DNA, 15 bp, Homo sapiens
cttaatctcatctgg

SEQ ID NO: 218023 - DNA, 15 bp, Homo sapiens
ccttaatctcatctg

SEQ ID NO: 218024 - DNA, 15 bp, Homo sapiens
tccttaatctcatct

SEQ ID NO: 218025 - DNA, 15 bp, Homo sapiens
ttccttaatctcatc

SEQ ID NO: 218026 - DNA, 15 bp, Homo sapiens
gttccttaatctcat

SEQ ID NO: 218027 - DNA, 15 bp, Homo sapiens
agttccttaatctca

SEQ ID NO: 218028 - DNA, 15 bp, Homo sapiens
aagttccttaatctc

SEQ ID NO: 218029 - DNA, 15 bp, Homo sapiens
aaagttccttaatct

SEQ ID NO: 218030 - DNA, 15 bp, Homo sapiens
gaaagttccttaatc

SEQ ID NO: 218031 - DNA, 15 bp, Homo sapiens
ggaaagttccttaat

SEQ ID NO: 218032 - DNA, 15 bp, Homo sapiens
gggaaagttccttaa

SEQ ID NO: 218033 - DNA, 15 bp, Homo sapiens
tgggaaagttcctta

SEQ ID NO: 218034 - DNA, 15 bp, Homo sapiens
ttgggaaagttcctt

SEQ ID NO: 218035 - DNA, 15 bp, Homo sapiens
tttgggaaagttcct

SEQ ID NO: 218036 - DNA, 15 bp, Homo sapiens
atttgggaaagttcc

SEQ ID NO: 218037 - DNA, 15 bp, Homo sapiens
aatttgggaaagttc

SEQ ID NO: 218038 - DNA, 15 bp, Homo sapiens
aaatttgggaaagtt

SEQ ID NO: 218039 - DNA, 15 bp, Homo sapiens
taaatttgggaaagt

SEQ ID NO: 218040 - DNA, 15 bp, Homo sapiens
ctaaatttgggaaag

SEQ ID NO: 218041 - DNA, 15 bp, Homo sapiens
cctaaatttgggaaa

SEQ ID NO: 218042 - DNA, 15 bp, Homo sapiens
ccctaaatttgggaa

SEQ ID NO: 218043 - DNA, 15 bp, Homo sapiens
accctaaatttggga

SEQ ID NO: 218044 - DNA, 15 bp, Homo sapiens
gaccctaaatttggg

SEQ ID NO: 218045 - DNA, 15 bp, Homo sapiens
agaccctaaatttgg

SEQ ID NO: 218046 - DNA, 15 bp, Homo sapiens
cagaccctaaatttg

SEQ ID NO: 218047 - DNA, 15 bp, Homo sapiens
tcagaccctaaattt

SEQ ID NO: 218048 - DNA, 15 bp, Homo sapiens
ttcagaccctaaatt

SEQ ID NO: 218049 - DNA, 15 bp, Homo sapiens
attcagaccctaaat

SEQ ID NO: 218050 - DNA, 15 bp, Homo sapiens
aattcagaccctaaa

SEQ ID NO: 218051 - DNA, 15 bp, Homo sapiens
gaattcagaccctaa

SEQ ID NO: 218052 - DNA, 15 bp, Homo sapiens
tgaattcagacccta

SEQ ID NO: 218053 - DNA, 15 bp, Homo sapiens
gtgaattcagaccct

SEQ ID NO: 218054 - DNA, 15 bp, Homo sapiens
tgtgaattcagaccc

SEQ ID NO: 218055 - DNA, 15 bp, Homo sapiens
atgtgaattcagacc

SEQ ID NO: 218056 - DNA, 15 bp, Homo sapiens
gatgtgaattcagac

SEQ ID NO: 218057 - DNA, 15 bp, Homo sapiens
agatgtgaattcaga

SEQ ID NO: 218058 - DNA, 15 bp, Homo sapiens
cagatgtgaattcag

SEQ ID NO: 218059 - DNA, 15 bp, Homo sapiens
gcagatgtgaattca

SEQ ID NO: 218060 - DNA, 15 bp, Homo sapiens
agcagatgtgaattc

SEQ ID NO: 218061 - DNA, 15 bp, Homo sapiens
gagcagatgtgaatt

SEQ ID NO: 218062 - DNA, 15 bp, Homo sapiens
tgagcagatgtgaat

SEQ ID NO: 218063 - DNA, 15 bp, Homo sapiens
gtgagcagatgtgaa

SEQ ID NO: 218064 - DNA, 15 bp, Homo sapiens
ggtgagcagatgtga

SEQ ID NO: 218065 - DNA, 15 bp, Homo sapiens
gggtgagcagatgtg

SEQ ID NO: 218066 - DNA, 15 bp, Homo sapiens
agggtgagcagatgt

SEQ ID NO: 218067 - DNA, 15 bp, Homo sapiens
aagggtgagcagatg

SEQ ID NO: 218068 - DNA, 15 bp, Homo sapiens
taagggtgagcagat

SEQ ID NO: 218069 - DNA, 15 bp, Homo sapiens
ttaagggtgagcaga

SEQ ID NO: 218070 - DNA, 15 bp, Homo sapiens
tttaagggtgagcag

SEQ ID NO: 218071 - DNA, 15 bp, Homo sapiens
atttaagggtgagca

SEQ ID NO: 218072 - DNA, 15 bp, Homo sapiens
catttaagggtgagc

SEQ ID NO: 218073 - DNA, 15 bp, Homo sapiens
tcatttaagggtgag

SEQ ID NO: 218074 - DNA, 15 bp, Homo sapiens
ctcatttaagggtga

SEQ ID NO: 218075 - DNA, 15 bp, Homo sapiens
tctcatttaagggtg

SEQ ID NO: 218076 - DNA, 15 bp, Homo sapiens
atctcatttaagggt

SEQ ID NO: 218077 - DNA, 15 bp, Homo sapiens
catctcatttaaggg

SEQ ID NO: 218078 - DNA, 15 bp, Homo sapiens
gcatctcatttaagg

SEQ ID NO: 218079 - DNA, 15 bp, Homo sapiens
ggcatctcatttaag

SEQ ID NO: 218080 - DNA, 15 bp, Homo sapiens
cggcatctcatttaa

SEQ ID NO: 218081 - DNA, 15 bp, Homo sapiens
gcggcatctcattta

SEQ ID NO: 218082 - DNA, 15 bp, Homo sapiens
tgcggcatctcattt

SEQ ID NO: 218083 - DNA, 15 bp, Homo sapiens
atgcggcatctcatt

SEQ ID NO: 218084 - DNA, 15 bp, Homo sapiens
aatgcggcatctcat

SEQ ID NO: 218085 - DNA, 15 bp, Homo sapiens
caatgcggcatctca

SEQ ID NO: 218086 - DNA, 15 bp, Homo sapiens
ccaatgcggcatctc

SEQ ID NO: 218087 - DNA, 15 bp, Homo sapiens
cccaatgcggcatct

SEQ ID NO: 218088 - DNA, 15 bp, Homo sapiens
gcccaatgcggcatc

SEQ ID NO: 218089 - DNA, 15 bp, Homo sapiens
tgcccaatgcggcat

SEQ ID NO: 218090 - DNA, 15 bp, Homo sapiens
ctgcccaatgcggca

SEQ ID NO: 218091 - DNA, 15 bp, Homo sapiens
gctgcccaatgcggc

SEQ ID NO: 218092 - DNA, 15 bp, Homo sapiens
tgctgcccaatgcgg

SEQ ID NO: 218093 - DNA, 15 bp, Homo sapiens
atgctgcccaatgcg

SEQ ID NO: 218094 - DNA, 15 bp, Homo sapiens
gatgctgcccaatgc

SEQ ID NO: 218095 - DNA, 15 bp, Homo sapiens
agatgctgcccaatg

SEQ ID NO: 218096 - DNA, 15 bp, Homo sapiens
aagatgctgcccaat

SEQ ID NO: 218097 - DNA, 15 bp, Homo sapiens
aaagatgctgcccaa

SEQ ID NO: 218098 - DNA, 15 bp, Homo sapiens
gaaagatgctgccca

SEQ ID NO: 218099 - DNA, 15 bp, Homo sapiens
agaaagatgctgccc

SEQ ID NO: 218100 - DNA, 15 bp, Homo sapiens
aagaaagatgctgcc

SEQ ID NO: 218101 - DNA, 15 bp, Homo sapiens
taagaaagatgctgc

SEQ ID NO: 218102 - DNA, 15 bp, Homo sapiens
ataagaaagatgctg

SEQ ID NO: 218103 - DNA, 15 bp, Homo sapiens
gataagaaagatgct

SEQ ID NO: 218104 - DNA, 15 bp, Homo sapiens
tgataagaaagatgc

SEQ ID NO: 218105 - DNA, 15 bp, Homo sapiens
atgataagaaagatg

SEQ ID NO: 218106 - DNA, 15 bp, Homo sapiens
gatgataagaaagat

SEQ ID NO: 218107 - DNA, 15 bp, Homo sapiens
agatgataagaaaga

SEQ ID NO: 218108 - DNA, 15 bp, Homo sapiens
aagatgataagaaag

SEQ ID NO: 218109 - DNA, 15 bp, Homo sapiens
caagatgataagaaa

SEQ ID NO: 218110 - DNA, 15 bp, Homo sapiens
tcaagatgataagaa

SEQ ID NO: 218111 - DNA, 15 bp, Homo sapiens
atcaagatgataaga

SEQ ID NO: 218112 - DNA, 15 bp, Homo sapiens
aatcaagatgataag

SEQ ID NO: 218113 - DNA, 15 bp, Homo sapiens
taatcaagatgataa

SEQ ID NO: 218114 - DNA, 15 bp, Homo sapiens
ctaatcaagatgata

SEQ ID NO: 218115 - DNA, 15 bp, Homo sapiens
cctaatcaagatgat

SEQ ID NO: 218116 - DNA, 15 bp, Homo sapiens
ccctaatcaagatga

SEQ ID NO: 218117 - DNA, 15 bp, Homo sapiens
tccctaatcaagatg

SEQ ID NO: 218118 - DNA, 15 bp, Homo sapiens
ctccctaatcaagat

SEQ ID NO: 218119 - DNA, 15 bp, Homo sapiens
cctccctaatcaaga

SEQ ID NO: 218120 - DNA, 15 bp, Homo sapiens
tcctccctaatcaag

SEQ ID NO: 218121 - DNA, 15 bp, Homo sapiens
atcctccctaatcaa

SEQ ID NO: 218122 - DNA, 15 bp, Homo sapiens
gatcctccctaatca

SEQ ID NO: 218123 - DNA, 15 bp, Homo sapiens
ggatcctccctaatc

SEQ ID NO: 218124 - DNA, 15 bp, Homo sapiens
tggatcctccctaat

SEQ ID NO: 218125 - DNA, 15 bp, Homo sapiens
ttggatcctccctaa

SEQ ID NO: 218126 - DNA, 15 bp, Homo sapiens
cttggatcctcccta

SEQ ID NO: 218127 - DNA, 15 bp, Homo sapiens
tcttggatcctccct

SEQ ID NO: 218128 - DNA, 15 bp, Homo sapiens
ctcttggatcctccc

SEQ ID NO: 218129 - DNA, 15 bp, Homo sapiens
gctcttggatcctcc

SEQ ID NO: 218130 - DNA, 15 bp, Homo sapiens
agctcttggatcctc

SEQ ID NO: 218131 - DNA, 15 bp, Homo sapiens
cagctcttggatcct

SEQ ID NO: 218132 - DNA, 15 bp, Homo sapiens
ccagctcttggatcc

SEQ ID NO: 218133 - DNA, 15 bp, Homo sapiens
tccagctcttggatc

SEQ ID NO: 218134 - DNA, 15 bp, Homo sapiens
ttccagctcttggat

SEQ ID NO: 218135 - DNA, 15 bp, Homo sapiens
gttccagctcttgga

SEQ ID NO: 218136 - DNA, 15 bp, Homo sapiens
agttccagctcttgg

SEQ ID NO: 218137 - DNA, 15 bp, Homo sapiens
aagttccagctcttg

SEQ ID NO: 218138 - DNA, 15 bp, Homo sapiens
caagttccagctctt

SEQ ID NO: 218139 - DNA, 15 bp, Homo sapiens
tcaagttccagctct

SEQ ID NO: 218140 - DNA, 15 bp, Homo sapiens
ttcaagttccagctc

SEQ ID NO: 218141 - DNA, 15 bp, Homo sapiens
attcaagttccagct

SEQ ID NO: 218142 - DNA, 15 bp, Homo sapiens
tattcaagttccagc

SEQ ID NO: 218143 - DNA, 15 bp, Homo sapiens
atattcaagttccag

SEQ ID NO: 218144 - DNA, 15 bp, Homo sapiens
catattcaagttcca

SEQ ID NO: 218145 - DNA, 15 bp, Homo sapiens
tcatattcaagttcc

SEQ ID NO: 218146 - DNA, 15 bp, Homo sapiens
ttcatattcaagttc

SEQ ID NO: 218147 - DNA, 15 bp, Homo sapiens
attcatattcaagtt

SEQ ID NO: 218148 - DNA, 15 bp, Homo sapiens
gattcatattcaagt

SEQ ID NO: 218149 - DNA, 15 bp, Homo sapiens
tgattcatattcaag

SEQ ID NO: 218150 - DNA, 15 bp, Homo sapiens
ctgattcatattcaa

SEQ ID NO: 218151 - DNA, 15 bp, Homo sapiens
actgattcatattca

SEQ ID NO: 218152 - DNA, 15 bp, Homo sapiens
tactgattcatattc

SEQ ID NO: 218153 - DNA, 15 bp, Homo sapiens
ttactgattcatatt

SEQ ID NO: 218154 - DNA, 15 bp, Homo sapiens
tttactgattcatat

SEQ ID NO: 218155 - DNA, 15 bp, Homo sapiens
ttttactgattcata

SEQ ID NO: 218156 - DNA, 15 bp, Homo sapiens
gttttactgattcat

SEQ ID NO: 218157 - DNA, 15 bp, Homo sapiens
tgttttactgattca

SEQ ID NO: 218158 - DNA, 15 bp, Homo sapiens
ttgttttactgattc

SEQ ID NO: 218159 - DNA, 15 bp, Homo sapiens
tttgttttactgatt

SEQ ID NO: 218160 - DNA, 15 bp, Homo sapiens
ttttgttttactgat

SEQ ID NO: 218161 - DNA, 15 bp, Homo sapiens
tttttgttttactga

SEQ ID NO: 218162 - DNA, 15 bp, Homo sapiens
gtttttgttttactg

SEQ ID NO: 218163 - DNA, 15 bp, Homo sapiens
tgtttttgttttact

SEQ ID NO: 218164 - DNA, 15 bp, Homo sapiens
ttgtttttgttttac

SEQ ID NO: 218165 - DNA, 15 bp, Homo sapiens
tttgtttttgtttta

SEQ ID NO: 218166 - DNA, 15 bp, Homo sapiens
ctttgtttttgtttt

SEQ ID NO: 218167 - DNA, 15 bp, Homo sapiens
tctttgtttttgttt

SEQ ID NO: 218168 - DNA, 15 bp, Homo sapiens
ttctttgtttttgtt

SEQ ID NO: 218169 - DNA, 15 bp, Homo sapiens
attctttgtttttgt

SEQ ID NO: 218170 - DNA, 15 bp, Homo sapiens
gattctttgtttttg

SEQ ID NO: 218171 - DNA, 15 bp, Homo sapiens
tgattctttgttttt

SEQ ID NO: 218172 - DNA, 15 bp, Homo sapiens
ctgattctttgtttt

SEQ ID NO: 218173 - DNA, 15 bp, Homo sapiens
tctgattctttgttt

SEQ ID NO: 218174 - DNA, 15 bp, Homo sapiens
gtctgattctttgtt

SEQ ID NO: 218175 - DNA, 15 bp, Homo sapiens
tgtctgattctttgt

SEQ ID NO: 218176 - DNA, 15 bp, Homo sapiens
gtgtctgattctttg

SEQ ID NO: 218177 - DNA, 15 bp, Homo sapiens
tgtgtctgattcttt

SEQ ID NO: 218178 - DNA, 15 bp, Homo sapiens
ttgtgtctgattctt

SEQ ID NO: 218179 - DNA, 15 bp, Homo sapiens
cttgtgtctgattct

SEQ ID NO: 218180 - DNA, 15 bp, Homo sapiens
tcttgtgtctgattc

SEQ ID NO: 218181 - DNA, 15 bp, Homo sapiens
atcttgtgtctgatt

SEQ ID NO: 218182 - DNA, 15 bp, Homo sapiens
tatcttgtgtctgat

SEQ ID NO: 218183 - DNA, 15 bp, Homo sapiens
ttatcttgtgtctga

SEQ ID NO: 218184 - DNA, 15 bp, Homo sapiens
tttatcttgtgtctg

SEQ ID NO: 218185 - DNA, 15 bp, Homo sapiens
ctttatcttgtgtct

SEQ ID NO: 218186 - DNA, 15 bp, Homo sapiens
cctttatcttgtgtc

SEQ ID NO: 218187 - DNA, 15 bp, Homo sapiens
tcctttatcttgtgt

SEQ ID NO: 218188 - DNA, 15 bp, Homo sapiens
atcctttatcttgtg

SEQ ID NO: 218189 - DNA, 15 bp, Homo sapiens
gatcctttatcttgt

SEQ ID NO: 218190 - DNA, 15 bp, Homo sapiens
ggatcctttatcttg

SEQ ID NO: 218191 - DNA, 15 bp, Homo sapiens
gggatcctttatctt

SEQ ID NO: 218192 - DNA, 15 bp, Homo sapiens
agggatcctttatct

SEQ ID NO: 218193 - DNA, 15 bp, Homo sapiens
gagggatcctttatc

SEQ ID NO: 218194 - DNA, 15 bp, Homo sapiens
agagggatcctttat

SEQ ID NO: 218195 - DNA, 15 bp, Homo sapiens
aagagggatccttta

SEQ ID NO: 218196 - DNA, 15 bp, Homo sapiens
aaagagggatccttt

SEQ ID NO: 218197 - DNA, 15 bp, Homo sapiens
caaagagggatcctt

SEQ ID NO: 218198 - DNA, 15 bp, Homo sapiens
acaaagagggatcct

SEQ ID NO: 218199 - DNA, 15 bp, Homo sapiens
gacaaagagggatcc

SEQ ID NO: 218200 - DNA, 15 bp, Homo sapiens
ggacaaagagggatc

SEQ ID NO: 218201 - DNA, 15 bp, Homo sapiens
gggacaaagagggat

SEQ ID NO: 218202 - DNA, 15 bp, Homo sapiens
agggacaaagaggga

SEQ ID NO: 218203 - DNA, 15 bp, Homo sapiens
cagggacaaagaggg

SEQ ID NO: 218204 - DNA, 15 bp, Homo sapiens
tcagggacaaagagg

SEQ ID NO: 218205 - DNA, 15 bp, Homo sapiens
ttcagggacaaagag

SEQ ID NO: 218206 - DNA, 15 bp, Homo sapiens
attcagggacaaaga

SEQ ID NO: 218207 - DNA, 15 bp, Homo sapiens
aattcagggacaaag

SEQ ID NO: 218208 - DNA, 15 bp, Homo sapiens
caattcagggacaaa

SEQ ID NO: 218209 - DNA, 15 bp, Homo sapiens
tcaattcagggacaa

SEQ ID NO: 218210 - DNA, 15 bp, Homo sapiens
ctcaattcagggaca

SEQ ID NO: 218211 - DNA, 15 bp, Homo sapiens
tctcaattcagggac

SEQ ID NO: 218212 - DNA, 15 bp, Homo sapiens
atctcaattcaggga

SEQ ID NO: 218213 - DNA, 15 bp, Homo sapiens
tatctcaattcaggg

SEQ ID NO: 218214 - DNA, 15 bp, Homo sapiens
ttatctcaattcagg

SEQ ID NO: 218215 - DNA, 15 bp, Homo sapiens
cttatctcaattcag

SEQ ID NO: 218216 - DNA, 15 bp, Homo sapiens
tcttatctcaattca

SEQ ID NO: 218217 - DNA, 15 bp, Homo sapiens
ttcttatctcaattc

SEQ ID NO: 218218 - DNA, 15 bp, Homo sapiens
tttcttatctcaatt

SEQ ID NO: 218219 - DNA, 15 bp, Homo sapiens
ttttcttatctcaat

SEQ ID NO: 218220 - DNA, 15 bp, Homo sapiens
gttttcttatctcaa

SEQ ID NO: 218221 - DNA, 15 bp, Homo sapiens
tgttttcttatctca

SEQ ID NO: 218222 - DNA, 15 bp, Homo sapiens
atgttttcttatctc

SEQ ID NO: 218223 - DNA, 15 bp, Homo sapiens
gatgttttcttatct

SEQ ID NO: 218224 - DNA, 15 bp, Homo sapiens
tgatgttttcttatc

SEQ ID NO: 218225 - DNA, 15 bp, Homo sapiens
atgatgttttcttat

SEQ ID NO: 218226 - DNA, 15 bp, Homo sapiens
gatgatgttttctta

SEQ ID NO: 218227 - DNA, 15 bp, Homo sapiens
tgatgatgttttctt

SEQ ID NO: 218228 - DNA, 15 bp, Homo sapiens
ctgatgatgttttct

SEQ ID NO: 218229 - DNA, 15 bp, Homo sapiens
tctgatgatgttttc

SEQ ID NO: 218230 - DNA, 15 bp, Homo sapiens
ttctgatgatgtttt

SEQ ID NO: 218231 - DNA, 15 bp, Homo sapiens
cttctgatgatgttt

SEQ ID NO: 218232 - DNA, 15 bp, Homo sapiens
gcttctgatgatgtt

SEQ ID NO: 218233 - DNA, 15 bp, Homo sapiens
tgcttctgatgatgt

SEQ ID NO: 218234 - DNA, 15 bp, Homo sapiens
ctgcttctgatgatg

SEQ ID NO: 218235 - DNA, 15 bp, Homo sapiens
tctgcttctgatgat

SEQ ID NO: 218236 - DNA, 15 bp, Homo sapiens
atctgcttctgatga

SEQ ID NO: 218237 - DNA, 15 bp, Homo sapiens
catctgcttctgatg

SEQ ID NO: 218238 - DNA, 15 bp, Homo sapiens
ccatctgcttctgat

SEQ ID NO: 218239 - DNA, 15 bp, Homo sapiens
tccatctgcttctga

SEQ ID NO: 218240 - DNA, 15 bp, Homo sapiens
ctccatctgcttctg

SEQ ID NO: 218241 - DNA, 15 bp, Homo sapiens
cctccatctgcttct

SEQ ID NO: 218242 - DNA, 15 bp, Homo sapiens
gcctccatctgcttc

SEQ ID NO: 218243 - DNA, 15 bp, Homo sapiens
agcctccatctgctt

SEQ ID NO: 218244 - DNA, 15 bp, Homo sapiens
tagcctccatctgct

SEQ ID NO: 218245 - DNA, 15 bp, Homo sapiens
ttagcctccatctgc

SEQ ID NO: 218246 - DNA, 15 bp, Homo sapiens
cttagcctccatctg

SEQ ID NO: 218247 - DNA, 15 bp, Homo sapiens
acttagcctccatct

SEQ ID NO: 218248 - DNA, 15 bp, Homo sapiens
tacttagcctccatc

SEQ ID NO: 218249 - DNA, 15 bp, Homo sapiens
gtacttagcctccat

SEQ ID NO: 218250 - DNA, 15 bp, Homo sapiens
agtacttagcctcca

SEQ ID NO: 218251 - DNA, 15 bp, Homo sapiens
cagtacttagcctcc

SEQ ID NO: 218252 - DNA, 15 bp, Homo sapiens
tcagtacttagcctc

SEQ ID NO: 218253 - DNA, 15 bp, Homo sapiens
atcagtacttagcct

SEQ ID NO: 218254 - DNA, 15 bp, Homo sapiens
aatcagtacttagcc

SEQ ID NO: 218255 - DNA, 15 bp, Homo sapiens
gaatcagtacttagc

SEQ ID NO: 218256 - DNA, 15 bp, Homo sapiens
ggaatcagtacttag

SEQ ID NO: 218257 - DNA, 15 bp, Homo sapiens
gggaatcagtactta

SEQ ID NO: 218258 - DNA, 15 bp, Homo sapiens
tgggaatcagtactt

SEQ ID NO: 218259 - DNA, 15 bp, Homo sapiens
ctgggaatcagtact

SEQ ID NO: 218260 - DNA, 15 bp, Homo sapiens
tctgggaatcagtac

SEQ ID NO: 218261 - DNA, 15 bp, Homo sapiens
ttctgggaatcagta

SEQ ID NO: 218262 - DNA, 15 bp, Homo sapiens
tttctgggaatcagt

SEQ ID NO: 218263 - DNA, 15 bp, Homo sapiens
ttttctgggaatcag

SEQ ID NO: 218264 - DNA, 15 bp, Homo sapiens
cttttctgggaatca

SEQ ID NO: 218265 - DNA, 15 bp, Homo sapiens
ccttttctgggaatc

SEQ ID NO: 218266 - DNA, 15 bp, Homo sapiens
gccttttctgggaat

SEQ ID NO: 218267 - DNA, 15 bp, Homo sapiens
ggccttttctgggaa

SEQ ID NO: 218268 - DNA, 15 bp, Homo sapiens
aggccttttctggga

SEQ ID NO: 218269 - DNA, 15 bp, Homo sapiens
gaggccttttctggg

SEQ ID NO: 218270 - DNA, 15 bp, Homo sapiens
tgaggccttttctgg

SEQ ID NO: 218271 - DNA, 15 bp, Homo sapiens
atgaggccttttctg

SEQ ID NO: 218272 - DNA, 15 bp, Homo sapiens
aatgaggccttttct

SEQ ID NO: 218273 - DNA, 15 bp, Homo sapiens
aaatgaggccttttc

SEQ ID NO: 218274 - DNA, 15 bp, Homo sapiens
aaaatgaggcctttt

SEQ ID NO: 218275 - DNA, 15 bp, Homo sapiens
aaaaatgaggccttt

SEQ ID NO: 218276 - DNA, 15 bp, Homo sapiens
taaaaatgaggcctt

SEQ ID NO: 218277 - DNA, 15 bp, Homo sapiens
ctaaaaatgaggcct

SEQ ID NO: 218278 - DNA, 15 bp, Homo sapiens
tctaaaaatgaggcc

SEQ ID NO: 218279 - DNA, 15 bp, Homo sapiens
ttctaaaaatgaggc

SEQ ID NO: 218280 - DNA, 15 bp, Homo sapiens
cttctaaaaatgagg

SEQ ID NO: 218281 - DNA, 15 bp, Homo sapiens
ccttctaaaaatgag

SEQ ID NO: 218282 - DNA, 15 bp, Homo sapiens
cccttctaaaaatga

SEQ ID NO: 218283 - DNA, 15 bp, Homo sapiens
acccttctaaaaatg

SEQ ID NO: 218284 - DNA, 15 bp, Homo sapiens
tacccttctaaaaat

SEQ ID NO: 218285 - DNA, 15 bp, Homo sapiens
atacccttctaaaaa

SEQ ID NO: 218286 - DNA, 15 bp, Homo sapiens
aatacccttctaaaa

SEQ ID NO: 218287 - DNA, 15 bp, Homo sapiens
aaatacccttctaaa

SEQ ID NO: 218288 - DNA, 15 bp, Homo sapiens
taaatacccttctaa

SEQ ID NO: 218289 - DNA, 15 bp, Homo sapiens
ctaaatacccttcta

SEQ ID NO: 218290 - DNA, 15 bp, Homo sapiens
tctaaatacccttct

SEQ ID NO: 218291 - DNA, 15 bp, Homo sapiens
ctctaaatacccttc

SEQ ID NO: 218292 - DNA, 15 bp, Homo sapiens
tctctaaataccctt

SEQ ID NO: 218293 - DNA, 15 bp, Homo sapiens
atctctaaataccct

SEQ ID NO: 218294 - DNA, 15 bp, Homo sapiens
aatctctaaataccc

SEQ ID NO: 218295 - DNA, 15 bp, Homo sapiens
taatctctaaatacc

SEQ ID NO: 218296 - DNA, 15 bp, Homo sapiens
ataatctctaaatac

SEQ ID NO: 218297 - DNA, 15 bp, Homo sapiens
aataatctctaaata

SEQ ID NO: 218298 - DNA, 15 bp, Homo sapiens
gaataatctctaaat

SEQ ID NO: 218299 - DNA, 15 bp, Homo sapiens
tgaataatctctaaa

SEQ ID NO: 218300 - DNA, 15 bp, Homo sapiens
ctgaataatctctaa

SEQ ID NO: 218301 - DNA, 15 bp, Homo sapiens
actgaataatctcta

SEQ ID NO: 218302 - DNA, 15 bp, Homo sapiens
gactgaataatctct

SEQ ID NO: 218303 - DNA, 15 bp, Homo sapiens
ggactgaataatctc

SEQ ID NO: 218304 - DNA, 15 bp, Homo sapiens
gggactgaataatct

SEQ ID NO: 218305 - DNA, 15 bp, Homo sapiens
ggggactgaataatc

SEQ ID NO: 218306 - DNA, 15 bp, Homo sapiens
tggggactgaataat

SEQ ID NO: 218307 - DNA, 15 bp, Homo sapiens
ttggggactgaataa

SEQ ID NO: 218308 - DNA, 15 bp, Homo sapiens
gttggggactgaata

SEQ ID NO: 218309 - DNA, 15 bp, Homo sapiens
agttggggactgaat

SEQ ID NO: 218310 - DNA, 15 bp, Homo sapiens
aagttggggactgaa

SEQ ID NO: 218311 - DNA, 15 bp, Homo sapiens
taagttggggactga

SEQ ID NO: 218312 - DNA, 15 bp, Homo sapiens
gtaagttggggactg

SEQ ID NO: 218313 - DNA, 15 bp, Homo sapiens
tgtaagttggggact

SEQ ID NO: 218314 - DNA, 15 bp, Homo sapiens
ctgtaagttggggac

SEQ ID NO: 218315 - DNA, 15 bp, Homo sapiens
gctgtaagttgggga

SEQ ID NO: 218316 - DNA, 15 bp, Homo sapiens
agctgtaagttgggg

SEQ ID NO: 218317 - DNA, 15 bp, Homo sapiens
cagctgtaagttggg

SEQ ID NO: 218318 - DNA, 15 bp, Homo sapiens
acagctgtaagttgg

SEQ ID NO: 218319 - DNA, 15 bp, Homo sapiens
cacagctgtaagttg

SEQ ID NO: 218320 - DNA, 15 bp, Homo sapiens
ccacagctgtaagtt

SEQ ID NO: 218321 - DNA, 15 bp, Homo sapiens
accacagctgtaagt

SEQ ID NO: 218322 - DNA, 15 bp, Homo sapiens
aaccacagctgtaag

SEQ ID NO: 218323 - DNA, 15 bp, Homo sapiens
caaccacagctgtaa

SEQ ID NO: 218324 - DNA, 15 bp, Homo sapiens
ccaaccacagctgta

SEQ ID NO: 218325 - DNA, 15 bp, Homo sapiens
gccaaccacagctgt

SEQ ID NO: 218326 - DNA, 15 bp, Homo sapiens
tgccaaccacagctg

SEQ ID NO: 218327 - DNA, 15 bp, Homo sapiens
ctgccaaccacagct

SEQ ID NO: 218328 - DNA, 15 bp, Homo sapiens
tctgccaaccacagc

SEQ ID NO: 218329 - DNA, 15 bp, Homo sapiens
ttctgccaaccacag

SEQ ID NO: 218330 - DNA, 15 bp, Homo sapiens
cttctgccaaccaca

SEQ ID NO: 218331 - DNA, 15 bp, Homo sapiens
gcttctgccaaccac

SEQ ID NO: 218332 - DNA, 15 bp, Homo sapiens
ggcttctgccaacca

SEQ ID NO: 218333 - DNA, 15 bp, Homo sapiens
tggcttctgccaacc

SEQ ID NO: 218334 - DNA, 15 bp, Homo sapiens
ttggcttctgccaac

SEQ ID NO: 218335 - DNA, 15 bp, Homo sapiens
cttggcttctgccaa

SEQ ID NO: 218336 - DNA, 15 bp, Homo sapiens
acttggcttctgcca

SEQ ID NO: 218337 - DNA, 15 bp, Homo sapiens
cacttggcttctgcc

SEQ ID NO: 218338 - DNA, 15 bp, Homo sapiens
ccacttggcttctgc

SEQ ID NO: 218339 - DNA, 15 bp, Homo sapiens
gccacttggcttctg

SEQ ID NO: 218340 - DNA, 15 bp, Homo sapiens
ggccacttggcttct

SEQ ID NO: 218341 - DNA, 15 bp, Homo sapiens
tggccacttggcttc

SEQ ID NO: 218342 - DNA, 15 bp, Homo sapiens
ttggccacttggctt

SEQ ID NO: 218343 - DNA, 15 bp, Homo sapiens
gttggccacttggct

SEQ ID NO: 218344 - DNA, 15 bp, Homo sapiens
tgttggccacttggc

SEQ ID NO: 218345 - DNA, 15 bp, Homo sapiens
ctgttggccacttgg

SEQ ID NO: 218346 - DNA, 15 bp, Homo sapiens
gctgttggccacttg

SEQ ID NO: 218347 - DNA, 15 bp, Homo sapiens
agctgttggccactt

SEQ ID NO: 218348 - DNA, 15 bp, Homo sapiens
gagctgttggccact

SEQ ID NO: 218349 - DNA, 15 bp, Homo sapiens
agagctgttggccac

SEQ ID NO: 218350 - DNA, 15 bp, Homo sapiens
aagagctgttggcca

SEQ ID NO: 218351 - DNA, 15 bp, Homo sapiens
caagagctgttggcc

SEQ ID NO: 218352 - DNA, 15 bp, Homo sapiens
tcaagagctgttggc

SEQ ID NO: 218353 - DNA, 15 bp, Homo sapiens
ctcaagagctgttgg

SEQ ID NO: 218354 - DNA, 15 bp, Homo sapiens
cctcaagagctgttg

SEQ ID NO: 218355 - DNA, 15 bp, Homo sapiens
acctcaagagctgtt

SEQ ID NO: 218356 - DNA, 15 bp, Homo sapiens
cacctcaagagctgt

SEQ ID NO: 218357 - DNA, 15 bp, Homo sapiens
ccacctcaagagctg

SEQ ID NO: 218358 - DNA, 15 bp, Homo sapiens
accacctcaagagct

SEQ ID NO: 218359 - DNA, 15 bp, Homo sapiens
caccacctcaagagc

SEQ ID NO: 218360 - DNA, 15 bp, Homo sapiens
acaccacctcaagag

SEQ ID NO: 218361 - DNA, 15 bp, Homo sapiens
gacaccacctcaaga

SEQ ID NO: 218362 - DNA, 15 bp, Homo sapiens
tgacaccacctcaag

SEQ ID NO: 218363 - DNA, 15 bp, Homo sapiens
atgacaccacctcaa

SEQ ID NO: 218364 - DNA, 15 bp, Homo sapiens
tatgacaccacctca

SEQ ID NO: 218365 - DNA, 15 bp, Homo sapiens
gtatgacaccacctc

SEQ ID NO: 218366 - DNA, 15 bp, Homo sapiens
agtatgacaccacct

SEQ ID NO: 218367 - DNA, 15 bp, Homo sapiens
gagtatgacaccacc

SEQ ID NO: 218368 - DNA, 15 bp, Homo sapiens
tgagtatgacaccac

SEQ ID NO: 218369 - DNA, 15 bp, Homo sapiens
atgagtatgacacca

SEQ ID NO: 218370 - DNA, 15 bp, Homo sapiens
catgagtatgacacc

SEQ ID NO: 218371 - DNA, 15 bp, Homo sapiens
ccatgagtatgacac

SEQ ID NO: 218372 - DNA, 15 bp, Homo sapiens
cccatgagtatgaca

SEQ ID NO: 218373 - DNA, 15 bp, Homo sapiens
gcccatgagtatgac

SEQ ID NO: 218374 - DNA, 15 bp, Homo sapiens
tgcccatgagtatga

SEQ ID NO: 218375 - DNA, 15 bp, Homo sapiens
ctgcccatgagtatg

SEQ ID NO: 218376 - DNA, 15 bp, Homo sapiens
tctgcccatgagtat

SEQ ID NO: 218377 - DNA, 15 bp, Homo sapiens
gtctgcccatgagta

SEQ ID NO: 218378 - DNA, 15 bp, Homo sapiens
tgtctgcccatgagt

SEQ ID NO: 218379 - DNA, 15 bp, Homo sapiens
ctgtctgcccatgag

SEQ ID NO: 218380 - DNA, 15 bp, Homo sapiens
tctgtctgcccatga

SEQ ID NO: 218381 - DNA, 15 bp, Homo sapiens
ttctgtctgcccatg

SEQ ID NO: 218382 - DNA, 15 bp, Homo sapiens
tttctgtctgcccat

SEQ ID NO: 218383 - DNA, 15 bp, Homo sapiens
gtttctgtctgccca

SEQ ID NO: 218384 - DNA, 15 bp, Homo sapiens
agtttctgtctgccc

SEQ ID NO: 218385 - DNA, 15 bp, Homo sapiens
aagtttctgtctgcc

SEQ ID NO: 218386 - DNA, 15 bp, Homo sapiens
gaagtttctgtctgc

SEQ ID NO: 218387 - DNA, 15 bp, Homo sapiens
ggaagtttctgtctg

SEQ ID NO: 218388 - DNA, 15 bp, Homo sapiens
gggaagtttctgtct

SEQ ID NO: 218389 - DNA, 15 bp, Homo sapiens
agggaagtttctgtc

SEQ ID NO: 218390 - DNA, 15 bp, Homo sapiens
cagggaagtttctgt

SEQ ID NO: 218391 - DNA, 15 bp, Homo sapiens
tcagggaagtttctg

SEQ ID NO: 218392 - DNA, 15 bp, Homo sapiens
gtcagggaagtttct

SEQ ID NO: 218393 - DNA, 15 bp, Homo sapiens
tgtcagggaagtttc

SEQ ID NO: 218394 - DNA, 15 bp, Homo sapiens
ctgtcagggaagttt

SEQ ID NO: 218395 - DNA, 15 bp, Homo sapiens
cctgtcagggaagtt

SEQ ID NO: 218396 - DNA, 15 bp, Homo sapiens
tcctgtcagggaagt

SEQ ID NO: 218397 - DNA, 15 bp, Homo sapiens
atcctgtcagggaag

SEQ ID NO: 218398 - DNA, 15 bp, Homo sapiens
aatcctgtcagggaa

SEQ ID NO: 218399 - DNA, 15 bp, Homo sapiens
aaatcctgtcaggga

SEQ ID NO: 218400 - DNA, 15 bp, Homo sapiens
aaaatcctgtcaggg

SEQ ID NO: 218401 - DNA, 15 bp, Homo sapiens
gaaaatcctgtcagg

SEQ ID NO: 218402 - DNA, 15 bp, Homo sapiens
ggaaaatcctgtcag

SEQ ID NO: 218403 - DNA, 15 bp, Homo sapiens
gggaaaatcctgtca

SEQ ID NO: 218404 - DNA, 15 bp, Homo sapiens
agggaaaatcctgtc

SEQ ID NO: 218405 - DNA, 15 bp, Homo sapiens
aagggaaaatcctgt

SEQ ID NO: 218406 - DNA, 15 bp, Homo sapiens
taagggaaaatcctg

SEQ ID NO: 218407 - DNA, 15 bp, Homo sapiens
ttaagggaaaatcct

SEQ ID NO: 218408 - DNA, 15 bp, Homo sapiens
tttaagggaaaatcc

SEQ ID NO: 218409 - DNA, 15 bp, Homo sapiens
gtttaagggaaaatc

SEQ ID NO: 218410 - DNA, 15 bp, Homo sapiens
ggtttaagggaaaat

SEQ ID NO: 218411 - DNA, 15 bp, Homo sapiens
aggtttaagggaaaa

SEQ ID NO: 218412 - DNA, 15 bp, Homo sapiens
gaggtttaagggaaa

SEQ ID NO: 218413 - DNA, 15 bp, Homo sapiens
ggaggtttaagggaa

SEQ ID NO: 218414 - DNA, 15 bp, Homo sapiens
tggaggtttaaggga

SEQ ID NO: 218415 - DNA, 15 bp, Homo sapiens
atggaggtttaaggg

SEQ ID NO: 218416 - DNA, 15 bp, Homo sapiens
gatggaggtttaagg

SEQ ID NO: 218417 - DNA, 15 bp, Homo sapiens
cgatggaggtttaag

SEQ ID NO: 218418 - DNA, 15 bp, Homo sapiens
gcgatggaggtttaa

SEQ ID NO: 218419 - DNA, 15 bp, Homo sapiens
tgcgatggaggttta

SEQ ID NO: 218420 - DNA, 15 bp, Homo sapiens
atgcgatggaggttt

SEQ ID NO: 218421 - DNA, 15 bp, Homo sapiens
catgcgatggaggtt

SEQ ID NO: 218422 - DNA, 15 bp, Homo sapiens
tcatgcgatggaggt

SEQ ID NO: 218423 - DNA, 15 bp, Homo sapiens
ttcatgcgatggagg

SEQ ID NO: 218424 - DNA, 15 bp, Homo sapiens
tttcatgcgatggag

SEQ ID NO: 218425 - DNA, 15 bp, Homo sapiens
ctttcatgcgatgga

SEQ ID NO: 218426 - DNA, 15 bp, Homo sapiens
cctttcatgcgatgg

SEQ ID NO: 218427 - DNA, 15 bp, Homo sapiens
tcctttcatgcgatg

SEQ ID NO: 218428 - DNA, 15 bp, Homo sapiens
gtcctttcatgcgat

SEQ ID NO: 218429 - DNA, 15 bp, Homo sapiens
agtcctttcatgcga

SEQ ID NO: 218430 - DNA, 15 bp, Homo sapiens
aagtcctttcatgcg

SEQ ID NO: 218431 - DNA, 15 bp, Homo sapiens
aaagtcctttcatgc

SEQ ID NO: 218432 - DNA, 15 bp, Homo sapiens
aaaagtcctttcatg

SEQ ID NO: 218433 - DNA, 15 bp, Homo sapiens
aaaaagtcctttcat

SEQ ID NO: 218434 - DNA, 15 bp, Homo sapiens
aaaaaagtcctttca

SEQ ID NO: 218435 - DNA, 15 bp, Homo sapiens
aaaaaaagtcctttc

SEQ ID NO: 218436 - DNA, 15 bp, Homo sapiens
caaaaaaagtccttt

SEQ ID NO: 218437 - DNA, 15 bp, Homo sapiens
gcaaaaaaagtcctt

SEQ ID NO: 218438 - DNA, 15 bp, Homo sapiens
cgcaaaaaaagtcct

SEQ ID NO: 218439 - DNA, 15 bp, Homo sapiens
gcgcaaaaaaagtcc

SEQ ID NO: 218440 - DNA, 15 bp, Homo sapiens
tgcgcaaaaaaagtc

SEQ ID NO: 218441 - DNA, 15 bp, Homo sapiens
atgcgcaaaaaaagt

SEQ ID NO: 218442 - DNA, 15 bp, Homo sapiens
aatgcgcaaaaaaag

SEQ ID NO: 218443 - DNA, 15 bp, Homo sapiens
aaatgcgcaaaaaaa

SEQ ID NO: 218444 - DNA, 15 bp, Homo sapiens
taaatgcgcaaaaaa

SEQ ID NO: 218445 - DNA, 15 bp, Homo sapiens
ataaatgcgcaaaaa

SEQ ID NO: 218446 - DNA, 15 bp, Homo sapiens
tataaatgcgcaaaa

SEQ ID NO: 218447 - DNA, 15 bp, Homo sapiens
ttataaatgcgcaaa

SEQ ID NO: 218448 - DNA, 15 bp, Homo sapiens
tttataaatgcgcaa

SEQ ID NO: 218449 - DNA, 15 bp, Homo sapiens
ctttataaatgcgca

SEQ ID NO: 218450 - DNA, 15 bp, Homo sapiens
actttataaatgcgc

SEQ ID NO: 218451 - DNA, 15 bp, Homo sapiens
cactttataaatgcg

SEQ ID NO: 218452 - DNA, 15 bp, Homo sapiens
acactttataaatgc

SEQ ID NO: 218453 - DNA, 15 bp, Homo sapiens
tacactttataaatg

SEQ ID NO: 218454 - DNA, 15 bp, Homo sapiens
atacactttataaat

SEQ ID NO: 218455 - DNA, 15 bp, Homo sapiens
tatacactttataaa

SEQ ID NO: 218456 - DNA, 15 bp, Homo sapiens
ttatacactttataa

SEQ ID NO: 218457 - DNA, 15 bp, Homo sapiens
attatacactttata

SEQ ID NO: 218458 - DNA, 15 bp, Homo sapiens
aattatacactttat

SEQ ID NO: 218459 - DNA, 15 bp, Homo sapiens
taattatacacttta

SEQ ID NO: 218460 - DNA, 15 bp, Homo sapiens
gtaattatacacttt

SEQ ID NO: 218461 - DNA, 15 bp, Homo sapiens
agtaattatacactt

SEQ ID NO: 218462 - DNA, 15 bp, Homo sapiens
tagtaattatacact

SEQ ID NO: 218463 - DNA, 15 bp, Homo sapiens
atagtaattatacac

SEQ ID NO: 218464 - DNA, 15 bp, Homo sapiens
gatagtaattataca

SEQ ID NO: 218465 - DNA, 15 bp, Homo sapiens
ggatagtaattatac

SEQ ID NO: 218466 - DNA, 15 bp, Homo sapiens
gggatagtaattata

SEQ ID NO: 218467 - DNA, 15 bp, Homo sapiens
tgggatagtaattat

SEQ ID NO: 218468 - DNA, 15 bp, Homo sapiens
ctgggatagtaatta

SEQ ID NO: 218469 - DNA, 15 bp, Homo sapiens
actgggatagtaatt

SEQ ID NO: 218470 - DNA, 15 bp, Homo sapiens
tactgggatagtaat

SEQ ID NO: 218471 - DNA, 15 bp, Homo sapiens
ctactgggatagtaa

SEQ ID NO: 218472 - DNA, 15 bp, Homo sapiens
gctactgggatagta

SEQ ID NO: 218473 - DNA, 15 bp, Homo sapiens
agctactgggatagt

SEQ ID NO: 218474 - DNA, 15 bp, Homo sapiens
tagctactgggatag

SEQ ID NO: 218475 - DNA, 15 bp, Homo sapiens
ctagctactgggata

SEQ ID NO: 218476 - DNA, 15 bp, Homo sapiens
tctagctactgggat

SEQ ID NO: 218477 - DNA, 15 bp, Homo sapiens
atctagctactggga

SEQ ID NO: 218478 - DNA, 15 bp, Homo sapiens
catctagctactggg

SEQ ID NO: 218479 - DNA, 15 bp, Homo sapiens
gcatctagctactgg

SEQ ID NO: 218480 - DNA, 15 bp, Homo sapiens
tgcatctagctactg

SEQ ID NO: 218481 - DNA, 15 bp, Homo sapiens
ttgcatctagctact

SEQ ID NO: 218482 - DNA, 15 bp, Homo sapiens
gttgcatctagctac

SEQ ID NO: 218483 - DNA, 15 bp, Homo sapiens
ggttgcatctagcta

SEQ ID NO: 218484 - DNA, 15 bp, Homo sapiens
aggttgcatctagct

SEQ ID NO: 218485 - DNA, 15 bp, Homo sapiens
aaggttgcatctagc

SEQ ID NO: 218486 - DNA, 15 bp, Homo sapiens
caaggttgcatctag

SEQ ID NO: 218487 - DNA, 15 bp, Homo sapiens
acaaggttgcatcta

SEQ ID NO: 218488 - DNA, 15 bp, Homo sapiens
gacaaggttgcatct

SEQ ID NO: 218489 - DNA, 15 bp, Homo sapiens
tgacaaggttgcatc

SEQ ID NO: 218490 - DNA, 15 bp, Homo sapiens
ttgacaaggttgcat

SEQ ID NO: 218491 - DNA, 15 bp, Homo sapiens
attgacaaggttgca

SEQ ID NO: 218492 - DNA, 15 bp, Homo sapiens
aattgacaaggttgc

SEQ ID NO: 218493 - DNA, 15 bp, Homo sapiens
taattgacaaggttg

SEQ ID NO: 218494 - DNA, 15 bp, Homo sapiens
ataattgacaaggtt

SEQ ID NO: 218495 - DNA, 15 bp, Homo sapiens
tataattgacaaggt

SEQ ID NO: 218496 - DNA, 15 bp, Homo sapiens
ttataattgacaagg

SEQ ID NO: 218497 - DNA, 15 bp, Homo sapiens
tttataattgacaag

SEQ ID NO: 218498 - DNA, 15 bp, Homo sapiens
atttataattgacaa

SEQ ID NO: 218499 - DNA, 15 bp, Homo sapiens
tatttataattgaca

SEQ ID NO: 218500 - DNA, 15 bp, Homo sapiens
ttatttataattgac

SEQ ID NO: 218501 - DNA, 15 bp, Homo sapiens
tttatttataattga

SEQ ID NO: 218502 - DNA, 15 bp, Homo sapiens
atttatttataattg

SEQ ID NO: 218503 - DNA, 15 bp, Homo sapiens
gatttatttataatt

SEQ ID NO: 218504 - DNA, 15 bp, Homo sapiens
tgatttatttataat

SEQ ID NO: 218505 - DNA, 15 bp, Homo sapiens
atgatttatttataa

SEQ ID NO: 218506 - DNA, 15 bp, Homo sapiens
gatgatttatttata

SEQ ID NO: 218507 - DNA, 15 bp, Homo sapiens
tgatgatttatttat

SEQ ID NO: 218508 - DNA, 15 bp, Homo sapiens
gtgatgatttattta

SEQ ID NO: 218509 - DNA, 15 bp, Homo sapiens
ggtgatgatttattt

SEQ ID NO: 218510 - DNA, 15 bp, Homo sapiens
aggtgatgatttatt

SEQ ID NO: 218511 - DNA, 15 bp, Homo sapiens
gaggtgatgatttat

SEQ ID NO: 218512 - DNA, 15 bp, Homo sapiens
cgaggtgatgattta

SEQ ID NO: 218513 - DNA, 15 bp, Homo sapiens
gcgaggtgatgattt

SEQ ID NO: 218514 - DNA, 15 bp, Homo sapiens
ggcgaggtgatgatt

SEQ ID NO: 218515 - DNA, 15 bp, Homo sapiens
aggcgaggtgatgat

SEQ ID NO: 218516 - DNA, 15 bp, Homo sapiens
gaggcgaggtgatga

SEQ ID NO: 218517 - DNA, 15 bp, Homo sapiens
ggaggcgaggtgatg

SEQ ID NO: 218518 - DNA, 15 bp, Homo sapiens
aggaggcgaggtgat

SEQ ID NO: 218519 - DNA, 15 bp, Homo sapiens
gaggaggcgaggtga

SEQ ID NO: 218520 - DNA, 15 bp, Homo sapiens
tgaggaggcgaggtg

SEQ ID NO: 218521 - DNA, 15 bp, Homo sapiens
atgaggaggcgaggt

SEQ ID NO: 218522 - DNA, 15 bp, Homo sapiens
gatgaggaggcgagg

SEQ ID NO: 218523 - DNA, 15 bp, Homo sapiens
tgatgaggaggcgag

SEQ ID NO: 218524 - DNA, 15 bp, Homo sapiens
gtgatgaggaggcga

SEQ ID NO: 218525 - DNA, 15 bp, Homo sapiens
ggtgatgaggaggcg

SEQ ID NO: 218526 - DNA, 15 bp, Homo sapiens
tggtgatgaggaggc

SEQ ID NO: 218527 - DNA, 15 bp, Homo sapiens
gtggtgatgaggagg

SEQ ID NO: 218528 - DNA, 15 bp, Homo sapiens
ggtggtgatgaggag

SEQ ID NO: 218529 - DNA, 15 bp, Homo sapiens
gggtggtgatgagga

SEQ ID NO: 218530 - DNA, 15 bp, Homo sapiens
tgggtggtgatgagg

SEQ ID NO: 218531 - DNA, 15 bp, Homo sapiens
ttgggtggtgatgag

SEQ ID NO: 218532 - DNA, 15 bp, Homo sapiens
tttgggtggtgatga

SEQ ID NO: 218533 - DNA, 15 bp, Homo sapiens
atttgggtggtgatg

SEQ ID NO: 218534 - DNA, 15 bp, Homo sapiens
catttgggtggtgat

SEQ ID NO: 218535 - DNA, 15 bp, Homo sapiens
acatttgggtggtga

SEQ ID NO: 218536 - DNA, 15 bp, Homo sapiens
gacatttgggtggtg

SEQ ID NO: 218537 - DNA, 15 bp, Homo sapiens
agacatttgggtggt

SEQ ID NO: 218538 - DNA, 15 bp, Homo sapiens
aagacatttgggtgg

SEQ ID NO: 218539 - DNA, 15 bp, Homo sapiens
aaagacatttgggtg

SEQ ID NO: 218540 - DNA, 15 bp, Homo sapiens
gaaagacatttgggt

SEQ ID NO: 218541 - DNA, 15 bp, Homo sapiens
tgaaagacatttggg

SEQ ID NO: 218542 - DNA, 15 bp, Homo sapiens
gtgaaagacatttgg

SEQ ID NO: 218543 - DNA, 15 bp, Homo sapiens
tgtgaaagacatttg

SEQ ID NO: 218544 - DNA, 15 bp, Homo sapiens
gtgtgaaagacattt

SEQ ID NO: 218545 - DNA, 15 bp, Homo sapiens
agtgtgaaagacatt

SEQ ID NO: 218546 - DNA, 15 bp, Homo sapiens
gagtgtgaaagacat

SEQ ID NO: 218547 - DNA, 15 bp, Homo sapiens
ggagtgtgaaagaca

SEQ ID NO: 218548 - DNA, 15 bp, Homo sapiens
tggagtgtgaaagac

SEQ ID NO: 218549 - DNA, 15 bp, Homo sapiens
ttggagtgtgaaaga

SEQ ID NO: 218550 - DNA, 15 bp, Homo sapiens
attggagtgtgaaag

SEQ ID NO: 218551 - DNA, 15 bp, Homo sapiens
aattggagtgtgaaa

SEQ ID NO: 218552 - DNA, 15 bp, Homo sapiens
aaattggagtgtgaa

SEQ ID NO: 218553 - DNA, 15 bp, Homo sapiens
taaattggagtgtga

SEQ ID NO: 218554 - DNA, 15 bp, Homo sapiens
ttaaattggagtgtg

SEQ ID NO: 218555 - DNA, 15 bp, Homo sapiens
attaaattggagtgt

SEQ ID NO: 218556 - DNA, 15 bp, Homo sapiens
aattaaattggagtg

SEQ ID NO: 218557 - DNA, 15 bp, Homo sapiens
taattaaattggagt

SEQ ID NO: 218558 - DNA, 15 bp, Homo sapiens
ttaattaaattggag

SEQ ID NO: 218559 - DNA, 15 bp, Homo sapiens
gttaattaaattgga

SEQ ID NO: 218560 - DNA, 15 bp, Homo sapiens
agttaattaaattgg

SEQ ID NO: 218561 - DNA, 15 bp, Homo sapiens
gagttaattaaattg

SEQ ID NO: 218562 - DNA, 15 bp, Homo sapiens
tgagttaattaaatt

SEQ ID NO: 218563 - DNA, 15 bp, Homo sapiens
gtgagttaattaaat

SEQ ID NO: 218564 - DNA, 15 bp, Homo sapiens
agtgagttaattaaa

SEQ ID NO: 218565 - DNA, 15 bp, Homo sapiens
aagtgagttaattaa

SEQ ID NO: 218566 - DNA, 15 bp, Homo sapiens
taagtgagttaatta

SEQ ID NO: 218567 - DNA, 15 bp, Homo sapiens
gtaagtgagttaatt

SEQ ID NO: 218568 - DNA, 15 bp, Homo sapiens
agtaagtgagttaat

SEQ ID NO: 218569 - DNA, 15 bp, Homo sapiens
aagtaagtgagttaa

SEQ ID NO: 218570 - DNA, 15 bp, Homo sapiens
aaagtaagtgagtta

SEQ ID NO: 218571 - DNA, 15 bp, Homo sapiens
taaagtaagtgagtt

SEQ ID NO: 218572 - DNA, 15 bp, Homo sapiens
ataaagtaagtgagt

SEQ ID NO: 218573 - DNA, 15 bp, Homo sapiens
aataaagtaagtgag

SEQ ID NO: 218574 - DNA, 15 bp, Homo sapiens
gaataaagtaagtga

SEQ ID NO: 218575 - DNA, 15 bp, Homo sapiens
agaataaagtaagtg

SEQ ID NO: 218576 - DNA, 15 bp, Homo sapiens
gagaataaagtaagt

SEQ ID NO: 218577 - DNA, 15 bp, Homo sapiens
agagaataaagtaag

SEQ ID NO: 218578 - DNA, 15 bp, Homo sapiens
tagagaataaagtaa

SEQ ID NO: 218579 - DNA, 15 bp, Homo sapiens
ttagagaataaagta

SEQ ID NO: 218580 - DNA, 15 bp, Homo sapiens
attagagaataaagt

SEQ ID NO: 218581 - DNA, 15 bp, Homo sapiens
tattagagaataaag

SEQ ID NO: 218582 - DNA, 15 bp, Homo sapiens
ttattagagaataaa

SEQ ID NO: 218583 - DNA, 15 bp, Homo sapiens
tttattagagaataa

SEQ ID NO: 218584 - DNA, 15 bp, Homo sapiens
gtttattagagaata

SEQ ID NO: 218585 - DNA, 15 bp, Homo sapiens
agtttattagagaat

SEQ ID NO: 218586 - DNA, 15 bp, Homo sapiens
aagtttattagagaa

SEQ ID NO: 218587 - DNA, 15 bp, Homo sapiens
aaagtttattagaga

SEQ ID NO: 218588 - DNA, 15 bp, Homo sapiens
gaaagtttattagag

SEQ ID NO: 218589 - DNA, 15 bp, Homo sapiens
tgaaagtttattaga

SEQ ID NO: 218590 - DNA, 15 bp, Homo sapiens
gtgaaagtttattag

SEQ ID NO: 218591 - DNA, 15 bp, Homo sapiens
tgtgaaagtttatta

SEQ ID NO: 218592 - DNA, 15 bp, Homo sapiens
ttgtgaaagtttatt

SEQ ID NO: 218593 - DNA, 15 bp, Homo sapiens
tttgtgaaagtttat

SEQ ID NO: 218594 - DNA, 15 bp, Homo sapiens
ttttgtgaaagttta

SEQ ID NO: 218595 - DNA, 15 bp, Homo sapiens
cttttgtgaaagttt

SEQ ID NO: 218596 - DNA, 15 bp, Homo sapiens
acttttgtgaaagtt

SEQ ID NO: 218597 - DNA, 15 bp, Homo sapiens
aacttttgtgaaagt

SEQ ID NO: 218598 - DNA, 15 bp, Homo sapiens
taacttttgtgaaag

SEQ ID NO: 218599 - DNA, 15 bp, Homo sapiens
ttaacttttgtgaaa

SEQ ID NO: 218600 - DNA, 15 bp, Homo sapiens
gttaacttttgtgaa

SEQ ID NO: 218601 - DNA, 15 bp, Homo sapiens
ggttaacttttgtga

SEQ ID NO: 218602 - DNA, 15 bp, Homo sapiens
gggttaacttttgtg

SEQ ID NO: 218603 - DNA, 15 bp, Homo sapiens
ggggttaacttttgt

SEQ ID NO: 218604 - DNA, 15 bp, Homo sapiens
gggggttaacttttg

SEQ ID NO: 218605 - DNA, 15 bp, Homo sapiens
ggggggttaactttt

SEQ ID NO: 218606 - DNA, 15 bp, Homo sapiens
tggggggttaacttt

SEQ ID NO: 218607 - DNA, 15 bp, Homo sapiens
atggggggttaactt

SEQ ID NO: 218608 - DNA, 15 bp, Homo sapiens
aatggggggttaact

SEQ ID NO: 218609 - DNA, 15 bp, Homo sapiens
gaatggggggttaac

SEQ ID NO: 218610 - DNA, 15 bp, Homo sapiens
ggaatggggggttaa

SEQ ID NO: 218611 - DNA, 15 bp, Homo sapiens
gggaatggggggtta

SEQ ID NO: 218612 - DNA, 15 bp, Homo sapiens
tgggaatggggggtt

SEQ ID NO: 218613 - DNA, 15 bp, Homo sapiens
ctgggaatggggggt

SEQ ID NO: 218614 - DNA, 15 bp, Homo sapiens
gctgggaatgggggg

SEQ ID NO: 218615 - DNA, 15 bp, Homo sapiens
agctgggaatggggg

SEQ ID NO: 218616 - DNA, 15 bp, Homo sapiens
gagctgggaatgggg

SEQ ID NO: 218617 - DNA, 15 bp, Homo sapiens
ggagctgggaatggg

SEQ ID NO: 218618 - DNA, 15 bp, Homo sapiens
tggagctgggaatgg

SEQ ID NO: 218619 - DNA, 15 bp, Homo sapiens
atggagctgggaatg

SEQ ID NO: 218620 - DNA, 15 bp, Homo sapiens
gatggagctgggaat

SEQ ID NO: 218621 - DNA, 15 bp, Homo sapiens
agatggagctgggaa

SEQ ID NO: 218622 - DNA, 15 bp, Homo sapiens
tagatggagctggga

SEQ ID NO: 218623 - DNA, 15 bp, Homo sapiens
ctagatggagctggg

SEQ ID NO: 218624 - DNA, 15 bp, Homo sapiens
gctagatggagctgg

SEQ ID NO: 218625 - DNA, 15 bp, Homo sapiens
tgctagatggagctg

SEQ ID NO: 218626 - DNA, 15 bp, Homo sapiens
ttgctagatggagct

SEQ ID NO: 218627 - DNA, 15 bp, Homo sapiens
tttgctagatggagc

SEQ ID NO: 218628 - DNA, 15 bp, Homo sapiens
ctttgctagatggag

SEQ ID NO: 218629 - DNA, 15 bp, Homo sapiens
tctttgctagatgga

SEQ ID NO: 218630 - DNA, 15 bp, Homo sapiens
ttctttgctagatgg

SEQ ID NO: 218631 - DNA, 15 bp, Homo sapiens
attctttgctagatg

SEQ ID NO: 218632 - DNA, 15 bp, Homo sapiens
cattctttgctagat

SEQ ID NO: 218633 - DNA, 15 bp, Homo sapiens
gcattctttgctaga

SEQ ID NO: 218634 - DNA, 15 bp, Homo sapiens
agcattctttgctag

SEQ ID NO: 218635 - DNA, 15 bp, Homo sapiens
cagcattctttgcta

SEQ ID NO: 218636 - DNA, 15 bp, Homo sapiens
ccagcattctttgct

SEQ ID NO: 218637 - DNA, 15 bp, Homo sapiens
gccagcattctttgc

SEQ ID NO: 218638 - DNA, 15 bp, Homo sapiens
agccagcattctttg

SEQ ID NO: 218639 - DNA, 15 bp, Homo sapiens
cagccagcattcttt

SEQ ID NO: 218640 - DNA, 15 bp, Homo sapiens
ccagccagcattctt

SEQ ID NO: 218641 - DNA, 15 bp, Homo sapiens
tccagccagcattct

SEQ ID NO: 218642 - DNA, 15 bp, Homo sapiens
atccagccagcattc

SEQ ID NO: 218643 - DNA, 15 bp, Homo sapiens
catccagccagcatt

SEQ ID NO: 218644 - DNA, 15 bp, Homo sapiens
acatccagccagcat

SEQ ID NO: 218645 - DNA, 15 bp, Homo sapiens
gacatccagccagca

SEQ ID NO: 218646 - DNA, 15 bp, Homo sapiens
tgacatccagccagc

SEQ ID NO: 218647 - DNA, 15 bp, Homo sapiens
ctgacatccagccag

SEQ ID NO: 218648 - DNA, 15 bp, Homo sapiens
gctgacatccagcca

SEQ ID NO: 218649 - DNA, 15 bp, Homo sapiens
ggctgacatccagcc

SEQ ID NO: 218650 - DNA, 15 bp, Homo sapiens
tggctgacatccagc

SEQ ID NO: 218651 - DNA, 15 bp, Homo sapiens
atggctgacatccag

SEQ ID NO: 218652 - DNA, 15 bp, Homo sapiens
catggctgacatcca

SEQ ID NO: 218653 - DNA, 15 bp, Homo sapiens
acatggctgacatcc

SEQ ID NO: 218654 - DNA, 15 bp, Homo sapiens
aacatggctgacatc

SEQ ID NO: 218655 - DNA, 15 bp, Homo sapiens
aaacatggctgacat

SEQ ID NO: 218656 - DNA, 15 bp, Homo sapiens
aaaacatggctgaca

SEQ ID NO: 218657 - DNA, 15 bp, Homo sapiens
caaaacatggctgac

SEQ ID NO: 218658 - DNA, 15 bp, Homo sapiens
ccaaaacatggctga

SEQ ID NO: 218659 - DNA, 15 bp, Homo sapiens
cccaaaacatggctg

SEQ ID NO: 218660 - DNA, 15 bp, Homo sapiens
gcccaaaacatggct

SEQ ID NO: 218661 - DNA, 15 bp, Homo sapiens
ggcccaaaacatggc

SEQ ID NO: 218662 - DNA, 15 bp, Homo sapiens
gggcccaaaacatgg

SEQ ID NO: 218663 - DNA, 15 bp, Homo sapiens
ggggcccaaaacatg

SEQ ID NO: 218664 - DNA, 15 bp, Homo sapiens
gggggcccaaaacat

SEQ ID NO: 218665 - DNA, 15 bp, Homo sapiens
tgggggcccaaaaca

SEQ ID NO: 218666 - DNA, 15 bp, Homo sapiens
gtgggggcccaaaac

SEQ ID NO: 218667 - DNA, 15 bp, Homo sapiens
ggtgggggcccaaaa

SEQ ID NO: 218668 - DNA, 15 bp, Homo sapiens
aggtgggggcccaaa

SEQ ID NO: 218669 - DNA, 15 bp, Homo sapiens
caggtgggggcccaa

SEQ ID NO: 218670 - DNA, 15 bp, Homo sapiens
tcaggtgggggccca

SEQ ID NO: 218671 - DNA, 15 bp, Homo sapiens
ttcaggtgggggccc

SEQ ID NO: 218672 - DNA, 15 bp, Homo sapiens
attcaggtgggggcc

SEQ ID NO: 218673 - DNA, 15 bp, Homo sapiens
gattcaggtgggggc

SEQ ID NO: 218674 - DNA, 15 bp, Homo sapiens
agattcaggtggggg

SEQ ID NO: 218675 - DNA, 15 bp, Homo sapiens
gagattcaggtgggg

SEQ ID NO: 218676 - DNA, 15 bp, Homo sapiens
ggagattcaggtggg

SEQ ID NO: 218677 - DNA, 15 bp, Homo sapiens
cggagattcaggtgg

SEQ ID NO: 218678 - DNA, 15 bp, Homo sapiens
gcggagattcaggtg

SEQ ID NO: 218679 - DNA, 15 bp, Homo sapiens
ggcggagattcaggt

SEQ ID NO: 218680 - DNA, 15 bp, Homo sapiens
aggcggagattcagg

SEQ ID NO: 218681 - DNA, 15 bp, Homo sapiens
gaggcggagattcag

SEQ ID NO: 218682 - DNA, 15 bp, Homo sapiens
tgaggcggagattca

SEQ ID NO: 218683 - DNA, 15 bp, Homo sapiens
ttgaggcggagattc

SEQ ID NO: 218684 - DNA, 15 bp, Homo sapiens
tttgaggcggagatt

SEQ ID NO: 218685 - DNA, 15 bp, Homo sapiens
atttgaggcggagat

SEQ ID NO: 218686 - DNA, 15 bp, Homo sapiens
catttgaggcggaga

SEQ ID NO: 218687 - DNA, 15 bp, Homo sapiens
acatttgaggcggag

SEQ ID NO: 218688 - DNA, 15 bp, Homo sapiens
tacatttgaggcgga

SEQ ID NO: 218689 - DNA, 15 bp, Homo sapiens
ttacatttgaggcgg

SEQ ID NO: 218690 - DNA, 15 bp, Homo sapiens
gttacatttgaggcg

SEQ ID NO: 218691 - DNA, 15 bp, Homo sapiens
agttacatttgaggc

SEQ ID NO: 218692 - DNA, 15 bp, Homo sapiens
gagttacatttgagg

SEQ ID NO: 218693 - DNA, 15 bp, Homo sapiens
tgagttacatttgag

SEQ ID NO: 218694 - DNA, 15 bp, Homo sapiens
ttgagttacatttga

SEQ ID NO: 218695 - DNA, 15 bp, Homo sapiens
tttgagttacatttg

SEQ ID NO: 218696 - DNA, 15 bp, Homo sapiens
atttgagttacattt

SEQ ID NO: 218697 - DNA, 15 bp, Homo sapiens
catttgagttacatt

SEQ ID NO: 218698 - DNA, 15 bp, Homo sapiens
acatttgagttacat

SEQ ID NO: 218699 - DNA, 15 bp, Homo sapiens
cacatttgagttaca

SEQ ID NO: 218700 - DNA, 15 bp, Homo sapiens
tcacatttgagttac

SEQ ID NO: 218701 - DNA, 15 bp, Homo sapiens
atcacatttgagtta

SEQ ID NO: 218702 - DNA, 15 bp, Homo sapiens
gatcacatttgagtt

SEQ ID NO: 218703 - DNA, 15 bp, Homo sapiens
tgatcacatttgagt

SEQ ID NO: 218704 - DNA, 15 bp, Homo sapiens
atgatcacatttgag

SEQ ID NO: 218705 - DNA, 15 bp, Homo sapiens
gatgatcacatttga

SEQ ID NO: 218706 - DNA, 15 bp, Homo sapiens
agatgatcacatttg

SEQ ID NO: 218707 - DNA, 15 bp, Homo sapiens
gagatgatcacattt

SEQ ID NO: 218708 - DNA, 15 bp, Homo sapiens
ggagatgatcacatt

SEQ ID NO: 218709 - DNA, 15 bp, Homo sapiens
gggagatgatcacat

SEQ ID NO: 218710 - DNA, 15 bp, Homo sapiens
ggggagatgatcaca

SEQ ID NO: 218711 - DNA, 15 bp, Homo sapiens
gggggagatgatcac

SEQ ID NO: 218712 - DNA, 15 bp, Homo sapiens
tgggggagatgatca

SEQ ID NO: 218713 - DNA, 15 bp, Homo sapiens
atgggggagatgatc

SEQ ID NO: 218714 - DNA, 15 bp, Homo sapiens
gatgggggagatgat

SEQ ID NO: 218715 - DNA, 15 bp, Homo sapiens
agatgggggagatga

SEQ ID NO: 218716 - DNA, 15 bp, Homo sapiens
cagatgggggagatg

SEQ ID NO: 218717 - DNA, 15 bp, Homo sapiens
ccagatgggggagat

SEQ ID NO: 218718 - DNA, 15 bp, Homo sapiens
cccagatgggggaga

SEQ ID NO: 218719 - DNA, 15 bp, Homo sapiens
ccccagatgggggag

SEQ ID NO: 218720 - DNA, 15 bp, Homo sapiens
accccagatggggga

SEQ ID NO: 218721 - DNA, 15 bp, Homo sapiens
gaccccagatggggg

SEQ ID NO: 218722 - DNA, 15 bp, Homo sapiens
agaccccagatgggg

SEQ ID NO: 218723 - DNA, 15 bp, Homo sapiens
gagaccccagatggg

SEQ ID NO: 218724 - DNA, 15 bp, Homo sapiens
tgagaccccagatgg

SEQ ID NO: 218725 - DNA, 15 bp, Homo sapiens
gtgagaccccagatg

SEQ ID NO: 218726 - DNA, 15 bp, Homo sapiens
tgtgagaccccagat

SEQ ID NO: 218727 - DNA, 15 bp, Homo sapiens
atgtgagaccccaga

SEQ ID NO: 218728 - DNA, 15 bp, Homo sapiens
catgtgagaccccag

SEQ ID NO: 218729 - DNA, 15 bp, Homo sapiens
tcatgtgagacccca

SEQ ID NO: 218730 - DNA, 15 bp, Homo sapiens
ctcatgtgagacccc

SEQ ID NO: 218731 - DNA, 15 bp, Homo sapiens
cctcatgtgagaccc

SEQ ID NO: 218732 - DNA, 15 bp, Homo sapiens
tcctcatgtgagacc

SEQ ID NO: 218733 - DNA, 15 bp, Homo sapiens
gtcctcatgtgagac

SEQ ID NO: 218734 - DNA, 15 bp, Homo sapiens
tgtcctcatgtgaga

SEQ ID NO: 218735 - DNA, 15 bp, Homo sapiens
atgtcctcatgtgag

SEQ ID NO: 218736 - DNA, 15 bp, Homo sapiens
catgtcctcatgtga

SEQ ID NO: 218737 - DNA, 15 bp, Homo sapiens
tcatgtcctcatgtg

SEQ ID NO: 218738 - DNA, 15 bp, Homo sapiens
ctcatgtcctcatgt

SEQ ID NO: 218739 - DNA, 15 bp, Homo sapiens
cctcatgtcctcatg

SEQ ID NO: 218740 - DNA, 15 bp, Homo sapiens
acctcatgtcctcat

SEQ ID NO: 218741 - DNA, 15 bp, Homo sapiens
tacctcatgtcctca

SEQ ID NO: 218742 - DNA, 15 bp, Homo sapiens
atacctcatgtcctc

SEQ ID NO: 218743 - DNA, 15 bp, Homo sapiens
catacctcatgtcct

SEQ ID NO: 218744 - DNA, 15 bp, Homo sapiens
ccatacctcatgtcc

SEQ ID NO: 218745 - DNA, 15 bp, Homo sapiens
cccatacctcatgtc

SEQ ID NO: 218746 - DNA, 15 bp, Homo sapiens
tcccatacctcatgt

SEQ ID NO: 218747 - DNA, 15 bp, Homo sapiens
gtcccatacctcatg

SEQ ID NO: 218748 - DNA, 15 bp, Homo sapiens
tgtcccatacctcat

SEQ ID NO: 218749 - DNA, 15 bp, Homo sapiens
atgtcccatacctca

SEQ ID NO: 218750 - DNA, 15 bp, Homo sapiens
catgtcccatacctc

SEQ ID NO: 218751 - DNA, 15 bp, Homo sapiens
tcatgtcccatacct

SEQ ID NO: 218752 - DNA, 15 bp, Homo sapiens
gtcatgtcccatacc

SEQ ID NO: 218753 - DNA, 15 bp, Homo sapiens
ggtcatgtcccatac

SEQ ID NO: 218754 - DNA, 15 bp, Homo sapiens
tggtcatgtcccata

SEQ ID NO: 218755 - DNA, 15 bp, Homo sapiens
ctggtcatgtcccat

SEQ ID NO: 218756 - DNA, 15 bp, Homo sapiens
cctggtcatgtccca

SEQ ID NO: 218757 - DNA, 15 bp, Homo sapiens
tcctggtcatgtccc

SEQ ID NO: 218758 - DNA, 15 bp, Homo sapiens
ctcctggtcatgtcc

SEQ ID NO: 218759 - DNA, 15 bp, Homo sapiens
cctcctggtcatgtc

SEQ ID NO: 218760 - DNA, 15 bp, Homo sapiens
gcctcctggtcatgt

SEQ ID NO: 218761 - DNA, 15 bp, Homo sapiens
tgcctcctggtcatg

SEQ ID NO: 218762 - DNA, 15 bp, Homo sapiens
atgcctcctggtcat

SEQ ID NO: 218763 - DNA, 15 bp, Homo sapiens
catgcctcctggtca

SEQ ID NO: 218764 - DNA, 15 bp, Homo sapiens
ccatgcctcctggtc

SEQ ID NO: 218765 - DNA, 15 bp, Homo sapiens
gccatgcctcctggt

SEQ ID NO: 218766 - DNA, 15 bp, Homo sapiens
ggccatgcctcctgg

SEQ ID NO: 218767 - DNA, 15 bp, Homo sapiens
tggccatgcctcctg

SEQ ID NO: 218768 - DNA, 15 bp, Homo sapiens
ctggccatgcctcct

SEQ ID NO: 218769 - DNA, 15 bp, Homo sapiens
actggccatgcctcc

SEQ ID NO: 218770 - DNA, 15 bp, Homo sapiens
gactggccatgcctc

SEQ ID NO: 218771 - DNA, 15 bp, Homo sapiens
agactggccatgcct

SEQ ID NO: 218772 - DNA, 15 bp, Homo sapiens
aagactggccatgcc

SEQ ID NO: 218773 - DNA, 15 bp, Homo sapiens
taagactggccatgc

SEQ ID NO: 218774 - DNA, 15 bp, Homo sapiens
gtaagactggccatg

SEQ ID NO: 218775 - DNA, 15 bp, Homo sapiens
agtaagactggccat

SEQ ID NO: 218776 - DNA, 15 bp, Homo sapiens
cagtaagactggcca

SEQ ID NO: 218777 - DNA, 15 bp, Homo sapiens
acagtaagactggcc

SEQ ID NO: 218778 - DNA, 15 bp, Homo sapiens
gacagtaagactggc

SEQ ID NO: 218779 - DNA, 15 bp, Homo sapiens
agacagtaagactgg

SEQ ID NO: 218780 - DNA, 15 bp, Homo sapiens
cagacagtaagactg

SEQ ID NO: 218781 - DNA, 15 bp, Homo sapiens
ccagacagtaagact

SEQ ID NO: 218782 - DNA, 15 bp, Homo sapiens
tccagacagtaagac

SEQ ID NO: 218783 - DNA, 15 bp, Homo sapiens
atccagacagtaaga

SEQ ID NO: 218784 - DNA, 15 bp, Homo sapiens
aatccagacagtaag

SEQ ID NO: 218785 - DNA, 15 bp, Homo sapiens
caatccagacagtaa

SEQ ID NO: 218786 - DNA, 15 bp, Homo sapiens
gcaatccagacagta

SEQ ID NO: 218787 - DNA, 15 bp, Homo sapiens
ggcaatccagacagt

SEQ ID NO: 218788 - DNA, 15 bp, Homo sapiens
gggcaatccagacag

SEQ ID NO: 218789 - DNA, 15 bp, Homo sapiens
agggcaatccagaca

SEQ ID NO: 218790 - DNA, 15 bp, Homo sapiens
cagggcaatccagac

SEQ ID NO: 218791 - DNA, 15 bp, Homo sapiens
ccagggcaatccaga

SEQ ID NO: 218792 - DNA, 15 bp, Homo sapiens
cccagggcaatccag

SEQ ID NO: 218793 - DNA, 15 bp, Homo sapiens
ccccagggcaatcca

SEQ ID NO: 218794 - DNA, 15 bp, Homo sapiens
cccccagggcaatcc

SEQ ID NO: 218795 - DNA, 15 bp, Homo sapiens
acccccagggcaatc

SEQ ID NO: 218796 - DNA, 15 bp, Homo sapiens
gacccccagggcaat

SEQ ID NO: 218797 - DNA, 15 bp, Homo sapiens
tgacccccagggcaa

SEQ ID NO: 218798 - DNA, 15 bp, Homo sapiens
atgacccccagggca

SEQ ID NO: 218799 - DNA, 15 bp, Homo sapiens
catgacccccagggc

SEQ ID NO: 218800 - DNA, 15 bp, Homo sapiens
ccatgacccccaggg

SEQ ID NO: 218801 - DNA, 15 bp, Homo sapiens
gccatgacccccagg

SEQ ID NO: 218802 - DNA, 15 bp, Homo sapiens
tgccatgacccccag

SEQ ID NO: 218803 - DNA, 15 bp, Homo sapiens
ctgccatgaccccca

SEQ ID NO: 218804 - DNA, 15 bp, Homo sapiens
cctgccatgaccccc

SEQ ID NO: 218805 - DNA, 15 bp, Homo sapiens
gcctgccatgacccc

SEQ ID NO: 218806 - DNA, 15 bp, Homo sapiens
cgcctgccatgaccc

SEQ ID NO: 218807 - DNA, 15 bp, Homo sapiens
tcgcctgccatgacc

SEQ ID NO: 218808 - DNA, 15 bp, Homo sapiens
ttcgcctgccatgac

SEQ ID NO: 218809 - DNA, 15 bp, Homo sapiens
tttcgcctgccatga

SEQ ID NO: 218810 - DNA, 15 bp, Homo sapiens
ttttcgcctgccatg

SEQ ID NO: 218811 - DNA, 15 bp, Homo sapiens
cttttcgcctgccat

SEQ ID NO: 218812 - DNA, 15 bp, Homo sapiens
tcttttcgcctgcca

SEQ ID NO: 218813 - DNA, 15 bp, Homo sapiens
atcttttcgcctgcc

SEQ ID NO: 218814 - DNA, 15 bp, Homo sapiens
gatcttttcgcctgc

SEQ ID NO: 218815 - DNA, 15 bp, Homo sapiens
tgatcttttcgcctg

SEQ ID NO: 218816 - DNA, 15 bp, Homo sapiens
ctgatcttttcgcct

SEQ ID NO: 218817 - DNA, 15 bp, Homo sapiens
tctgatcttttcgcc

SEQ ID NO: 218818 - DNA, 15 bp, Homo sapiens
ctctgatcttttcgc

SEQ ID NO: 218819 - DNA, 15 bp, Homo sapiens
tctctgatcttttcg

SEQ ID NO: 218820 - DNA, 15 bp, Homo sapiens
ttctctgatcttttc

SEQ ID NO: 218821 - DNA, 15 bp, Homo sapiens
attctctgatctttt

SEQ ID NO: 218822 - DNA, 15 bp, Homo sapiens
cattctctgatcttt

SEQ ID NO: 218823 - DNA, 15 bp, Homo sapiens
tcattctctgatctt

SEQ ID NO: 218824 - DNA, 15 bp, Homo sapiens
ctcattctctgatct

SEQ ID NO: 218825 - DNA, 15 bp, Homo sapiens
tctcattctctgatc

SEQ ID NO: 218826 - DNA, 15 bp, Homo sapiens
ttctcattctctgat

SEQ ID NO: 218827 - DNA, 15 bp, Homo sapiens
tttctcattctctga

SEQ ID NO: 218828 - DNA, 15 bp, Homo sapiens
atttctcattctctg

SEQ ID NO: 218829 - DNA, 15 bp, Homo sapiens
aatttctcattctct

SEQ ID NO: 218830 - DNA, 15 bp, Homo sapiens
gaatttctcattctc

SEQ ID NO: 218831 - DNA, 15 bp, Homo sapiens
ggaatttctcattct

SEQ ID NO: 218832 - DNA, 15 bp, Homo sapiens
aggaatttctcattc

SEQ ID NO: 218833 - DNA, 15 bp, Homo sapiens
aaggaatttctcatt

SEQ ID NO: 218834 - DNA, 15 bp, Homo sapiens
gaaggaatttctcat

SEQ ID NO: 218835 - DNA, 15 bp, Homo sapiens
ggaaggaatttctca

SEQ ID NO: 218836 - DNA, 15 bp, Homo sapiens
aggaaggaatttctc

SEQ ID NO: 218837 - DNA, 15 bp, Homo sapiens
gaggaaggaatttct

SEQ ID NO: 218838 - DNA, 15 bp, Homo sapiens
ggaggaaggaatttc

SEQ ID NO: 218839 - DNA, 15 bp, Homo sapiens
aggaggaaggaattt

SEQ ID NO: 218840 - DNA, 15 bp, Homo sapiens
aaggaggaaggaatt

SEQ ID NO: 218841 - DNA, 15 bp, Homo sapiens
gaaggaggaaggaat

SEQ ID NO: 218842 - DNA, 15 bp, Homo sapiens
ggaaggaggaaggaa

SEQ ID NO: 218843 - DNA, 15 bp, Homo sapiens
tggaaggaggaagga

SEQ ID NO: 218844 - DNA, 15 bp, Homo sapiens
ctggaaggaggaagg

SEQ ID NO: 218845 - DNA, 15 bp, Homo sapiens
tctggaaggaggaag

SEQ ID NO: 218846 - DNA, 15 bp, Homo sapiens
ctctggaaggaggaa

SEQ ID NO: 218847 - DNA, 15 bp, Homo sapiens
cctctggaaggagga

SEQ ID NO: 218848 - DNA, 15 bp, Homo sapiens
gcctctggaaggagg

SEQ ID NO: 218849 - DNA, 15 bp, Homo sapiens
ggcctctggaaggag

SEQ ID NO: 218850 - DNA, 15 bp, Homo sapiens
tggcctctggaagga

SEQ ID NO: 218851 - DNA, 15 bp, Homo sapiens
ctggcctctggaagg

SEQ ID NO: 218852 - DNA, 15 bp, Homo sapiens
cctggcctctggaag

SEQ ID NO: 218853 - DNA, 15 bp, Homo sapiens
acctggcctctggaa

SEQ ID NO: 218854 - DNA, 15 bp, Homo sapiens
cacctggcctctgga

SEQ ID NO: 218855 - DNA, 15 bp, Homo sapiens
ccacctggcctctgg

SEQ ID NO: 218856 - DNA, 15 bp, Homo sapiens
cccacctggcctctg

SEQ ID NO: 218857 - DNA, 15 bp, Homo sapiens
tcccacctggcctct

SEQ ID NO: 218858 - DNA, 15 bp, Homo sapiens
ctcccacctggcctc

SEQ ID NO: 218859 - DNA, 15 bp, Homo sapiens
cctcccacctggcct

SEQ ID NO: 218860 - DNA, 15 bp, Homo sapiens
ccctcccacctggcc

SEQ ID NO: 218861 - DNA, 15 bp, Homo sapiens
gccctcccacctggc

SEQ ID NO: 218862 - DNA, 15 bp, Homo sapiens
cgccctcccacctgg

SEQ ID NO: 218863 - DNA, 15 bp, Homo sapiens
ccgccctcccacctg

SEQ ID NO: 218864 - DNA, 15 bp, Homo sapiens
cccgccctcccacct

SEQ ID NO: 218865 - DNA, 15 bp, Homo sapiens
ccccgccctcccacc

SEQ ID NO: 218866 - DNA, 15 bp, Homo sapiens
cccccgccctcccac

SEQ ID NO: 218867 - DNA, 15 bp, Homo sapiens
tcccccgccctccca

SEQ ID NO: 218868 - DNA, 15 bp, Homo sapiens
ttcccccgccctccc

SEQ ID NO: 218869 - DNA, 15 bp, Homo sapiens
tttcccccgccctcc

SEQ ID NO: 218870 - DNA, 15 bp, Homo sapiens
ctttcccccgccctc

SEQ ID NO: 218871 - DNA, 15 bp, Homo sapiens
cctttcccccgccct

SEQ ID NO: 218872 - DNA, 15 bp, Homo sapiens
ccctttcccccgccc

SEQ ID NO: 218873 - DNA, 15 bp, Homo sapiens
gccctttcccccgcc

SEQ ID NO: 218874 - DNA, 15 bp, Homo sapiens
tgccctttcccccgc

SEQ ID NO: 218875 - DNA, 15 bp, Homo sapiens
ctgccctttcccccg

SEQ ID NO: 218876 - DNA, 15 bp, Homo sapiens
cctgccctttccccc

SEQ ID NO: 218877 - DNA, 15 bp, Homo sapiens
ccctgccctttcccc

SEQ ID NO: 218878 - DNA, 15 bp, Homo sapiens
accctgccctttccc

SEQ ID NO: 218879 - DNA, 15 bp, Homo sapiens
gaccctgccctttcc

SEQ ID NO: 218880 - DNA, 15 bp, Homo sapiens
agaccctgccctttc

SEQ ID NO: 218881 - DNA, 15 bp, Homo sapiens
aagaccctgcccttt

SEQ ID NO: 218882 - DNA, 15 bp, Homo sapiens
caagaccctgccctt

SEQ ID NO: 218883 - DNA, 15 bp, Homo sapiens
acaagaccctgccct

SEQ ID NO: 218884 - DNA, 15 bp, Homo sapiens
aacaagaccctgccc

SEQ ID NO: 218885 - DNA, 15 bp, Homo sapiens
caacaagaccctgcc

SEQ ID NO: 218886 - DNA, 15 bp, Homo sapiens
tcaacaagaccctgc

SEQ ID NO: 218887 - DNA, 15 bp, Homo sapiens
ttcaacaagaccctg

SEQ ID NO: 218888 - DNA, 15 bp, Homo sapiens
attcaacaagaccct

SEQ ID NO: 218889 - DNA, 15 bp, Homo sapiens
aattcaacaagaccc

SEQ ID NO: 218890 - DNA, 15 bp, Homo sapiens
aaattcaacaagacc

SEQ ID NO: 218891 - DNA, 15 bp, Homo sapiens
aaaattcaacaagac

SEQ ID NO: 218892 - DNA, 15 bp, Homo sapiens
caaaattcaacaaga

SEQ ID NO: 218893 - DNA, 15 bp, Homo sapiens
acaaaattcaacaag

SEQ ID NO: 218894 - DNA, 15 bp, Homo sapiens
aacaaaattcaacaa

SEQ ID NO: 218895 - DNA, 15 bp, Homo sapiens
taacaaaattcaaca

SEQ ID NO: 218896 - DNA, 15 bp, Homo sapiens
ttaacaaaattcaac

SEQ ID NO: 218897 - DNA, 15 bp, Homo sapiens
tttaacaaaattcaa

SEQ ID NO: 218898 - DNA, 15 bp, Homo sapiens
ttttaacaaaattca

SEQ ID NO: 218899 - DNA, 15 bp, Homo sapiens
tttttaacaaaattc

SEQ ID NO: 218900 - DNA, 15 bp, Homo sapiens
ctttttaacaaaatt

SEQ ID NO: 218901 - DNA, 15 bp, Homo sapiens
gctttttaacaaaat

SEQ ID NO: 218902 - DNA, 15 bp, Homo sapiens
tgctttttaacaaaa

SEQ ID NO: 218903 - DNA, 15 bp, Homo sapiens
gtgctttttaacaaa

SEQ ID NO: 218904 - DNA, 15 bp, Homo sapiens
agtgctttttaacaa

SEQ ID NO: 218905 - DNA, 15 bp, Homo sapiens
aagtgctttttaaca

SEQ ID NO: 218906 - DNA, 15 bp, Homo sapiens
aaagtgctttttaac

SEQ ID NO: 218907 - DNA, 15 bp, Homo sapiens
caaagtgctttttaa

SEQ ID NO: 218908 - DNA, 15 bp, Homo sapiens
gcaaagtgcttttta

SEQ ID NO: 218909 - DNA, 15 bp, Homo sapiens
agcaaagtgcttttt

SEQ ID NO: 218910 - DNA, 15 bp, Homo sapiens
gagcaaagtgctttt

SEQ ID NO: 218911 - DNA, 15 bp, Homo sapiens
agagcaaagtgcttt

SEQ ID NO: 218912 - DNA, 15 bp, Homo sapiens
gagagcaaagtgctt

SEQ ID NO: 218913 - DNA, 15 bp, Homo sapiens
agagagcaaagtgct

SEQ ID NO: 218914 - DNA, 15 bp, Homo sapiens
aagagagcaaagtgc

SEQ ID NO: 218915 - DNA, 15 bp, Homo sapiens
caagagagcaaagtg

SEQ ID NO: 218916 - DNA, 15 bp, Homo sapiens
ccaagagagcaaagt

SEQ ID NO: 218917 - DNA, 15 bp, Homo sapiens
tccaagagagcaaag

SEQ ID NO: 218918 - DNA, 15 bp, Homo sapiens
ttccaagagagcaaa

SEQ ID NO: 218919 - DNA, 15 bp, Homo sapiens
attccaagagagcaa

SEQ ID NO: 218920 - DNA, 15 bp, Homo sapiens
cattccaagagagca

SEQ ID NO: 218921 - DNA, 15 bp, Homo sapiens
gcattccaagagagc

SEQ ID NO: 218922 - DNA, 15 bp, Homo sapiens
agcattccaagagag

SEQ ID NO: 218923 - DNA, 15 bp, Homo sapiens
tagcattccaagaga

SEQ ID NO: 218924 - DNA, 15 bp, Homo sapiens
atagcattccaagag

SEQ ID NO: 218925 - DNA, 15 bp, Homo sapiens
gatagcattccaaga

SEQ ID NO: 218926 - DNA, 15 bp, Homo sapiens
agatagcattccaag

SEQ ID NO: 218927 - DNA, 15 bp, Homo sapiens
gagatagcattccaa

SEQ ID NO: 218928 - DNA, 15 bp, Homo sapiens
tgagatagcattcca

SEQ ID NO: 218929 - DNA, 15 bp, Homo sapiens
atgagatagcattcc

SEQ ID NO: 218930 - DNA, 15 bp, Homo sapiens
catgagatagcattc

SEQ ID NO: 218931 - DNA, 15 bp, Homo sapiens
acatgagatagcatt

SEQ ID NO: 218932 - DNA, 15 bp, Homo sapiens
gacatgagatagcat

SEQ ID NO: 218933 - DNA, 15 bp, Homo sapiens
agacatgagatagca

SEQ ID NO: 218934 - DNA, 15 bp, Homo sapiens
tagacatgagatagc

SEQ ID NO: 218935 - DNA, 15 bp, Homo sapiens
ttagacatgagatag

SEQ ID NO: 218936 - DNA, 15 bp, Homo sapiens
tttagacatgagata

SEQ ID NO: 218937 - DNA, 15 bp, Homo sapiens
ctttagacatgagat

SEQ ID NO: 218938 - DNA, 15 bp, Homo sapiens
gctttagacatgaga

SEQ ID NO: 218939 - DNA, 15 bp, Homo sapiens
tgctttagacatgag

SEQ ID NO: 218940 - DNA, 15 bp, Homo sapiens
ctgctttagacatga

SEQ ID NO: 218941 - DNA, 15 bp, Homo sapiens
gctgctttagacatg

SEQ ID NO: 218942 - DNA, 15 bp, Homo sapiens
ggctgctttagacat

SEQ ID NO: 218943 - DNA, 15 bp, Homo sapiens
tggctgctttagaca

SEQ ID NO: 218944 - DNA, 15 bp, Homo sapiens
ttggctgctttagac

SEQ ID NO: 218945 - DNA, 15 bp, Homo sapiens
cttggctgctttaga

SEQ ID NO: 218946 - DNA, 15 bp, Homo sapiens
tcttggctgctttag

SEQ ID NO: 218947 - DNA, 15 bp, Homo sapiens
atcttggctgcttta

SEQ ID NO: 218948 - DNA, 15 bp, Homo sapiens
gatcttggctgcttt

SEQ ID NO: 218949 - DNA, 15 bp, Homo sapiens
tgatcttggctgctt

SEQ ID NO: 218950 - DNA, 15 bp, Homo sapiens
atgatcttggctgct

SEQ ID NO: 218951 - DNA, 15 bp, Homo sapiens
aatgatcttggctgc

SEQ ID NO: 218952 - DNA, 15 bp, Homo sapiens
taatgatcttggctg

SEQ ID NO: 218953 - DNA, 15 bp, Homo sapiens
ttaatgatcttggct

SEQ ID NO: 218954 - DNA, 15 bp, Homo sapiens
cttaatgatcttggc

SEQ ID NO: 218955 - DNA, 15 bp, Homo sapiens
acttaatgatcttgg

SEQ ID NO: 218956 - DNA, 15 bp, Homo sapiens
tacttaatgatcttg

SEQ ID NO: 218957 - DNA, 15 bp, Homo sapiens
ttacttaatgatctt

SEQ ID NO: 218958 - DNA, 15 bp, Homo sapiens
tttacttaatgatct

SEQ ID NO: 218959 - DNA, 15 bp, Homo sapiens
atttacttaatgatc

SEQ ID NO: 218960 - DNA, 15 bp, Homo sapiens
tatttacttaatgat

SEQ ID NO: 218961 - DNA, 15 bp, Homo sapiens
atatttacttaatga

SEQ ID NO: 218962 - DNA, 15 bp, Homo sapiens
tatatttacttaatg

SEQ ID NO: 218963 - DNA, 15 bp, Homo sapiens
ctatatttacttaat

SEQ ID NO: 218964 - DNA, 15 bp, Homo sapiens
cctatatttacttaa

SEQ ID NO: 218965 - DNA, 15 bp, Homo sapiens
tcctatatttactta

SEQ ID NO: 218966 - DNA, 15 bp, Homo sapiens
atcctatatttactt

SEQ ID NO: 218967 - DNA, 15 bp, Homo sapiens
gatcctatatttact

SEQ ID NO: 218968 - DNA, 15 bp, Homo sapiens
agatcctatatttac

SEQ ID NO: 218969 - DNA, 15 bp, Homo sapiens
cagatcctatattta

SEQ ID NO: 218970 - DNA, 15 bp, Homo sapiens
acagatcctatattt

SEQ ID NO: 218971 - DNA, 15 bp, Homo sapiens
cacagatcctatatt

SEQ ID NO: 218972 - DNA, 15 bp, Homo sapiens
gcacagatcctatat

SEQ ID NO: 218973 - DNA, 15 bp, Homo sapiens
agcacagatcctata

SEQ ID NO: 218974 - DNA, 15 bp, Homo sapiens
aagcacagatcctat

SEQ ID NO: 218975 - DNA, 15 bp, Homo sapiens
aaagcacagatccta

SEQ ID NO: 218976 - DNA, 15 bp, Homo sapiens
aaaagcacagatcct

SEQ ID NO: 218977 - DNA, 15 bp, Homo sapiens
taaaagcacagatcc

SEQ ID NO: 218978 - DNA, 15 bp, Homo sapiens
ataaaagcacagatc

SEQ ID NO: 218979 - DNA, 15 bp, Homo sapiens
aataaaagcacagat

SEQ ID NO: 218980 - DNA, 15 bp, Homo sapiens
aaataaaagcacaga

SEQ ID NO: 218981 - DNA, 15 bp, Homo sapiens
aaaataaaagcacag

SEQ ID NO: 218982 - DNA, 15 bp, Homo sapiens
gaaaataaaagcaca

SEQ ID NO: 218983 - DNA, 15 bp, Homo sapiens
tgaaaataaaagcac

SEQ ID NO: 218984 - DNA, 15 bp, Homo sapiens
gtgaaaataaaagca

SEQ ID NO: 218985 - DNA, 15 bp, Homo sapiens
agtgaaaataaaagc

SEQ ID NO: 218986 - DNA, 15 bp, Homo sapiens
cagtgaaaataaaag

SEQ ID NO: 218987 - DNA, 15 bp, Homo sapiens
gcagtgaaaataaaa

SEQ ID NO: 218988 - DNA, 15 bp, Homo sapiens
agcagtgaaaataaa

SEQ ID NO: 218989 - DNA, 15 bp, Homo sapiens
tagcagtgaaaataa

SEQ ID NO: 218990 - DNA, 15 bp, Homo sapiens
atagcagtgaaaata

SEQ ID NO: 218991 - DNA, 15 bp, Homo sapiens
aatagcagtgaaaat

SEQ ID NO: 218992 - DNA, 15 bp, Homo sapiens
taatagcagtgaaaa

SEQ ID NO: 218993 - DNA, 15 bp, Homo sapiens
ctaatagcagtgaaa

SEQ ID NO: 218994 - DNA, 15 bp, Homo sapiens
gctaatagcagtgaa

SEQ ID NO: 218995 - DNA, 15 bp, Homo sapiens
tgctaatagcagtga

SEQ ID NO: 218996 - DNA, 15 bp, Homo sapiens
ttgctaatagcagtg

SEQ ID NO: 218997 - DNA, 15 bp, Homo sapiens
tttgctaatagcagt

SEQ ID NO: 218998 - DNA, 15 bp, Homo sapiens
ctttgctaatagcag

SEQ ID NO: 218999 - DNA, 15 bp, Homo sapiens
actttgctaatagca

SEQ ID NO: 219000 - DNA, 15 bp, Homo sapiens
aactttgctaatagc

SEQ ID NO: 219001 - DNA, 15 bp, Homo sapiens
aaactttgctaatag

SEQ ID NO: 219002 - DNA, 15 bp, Homo sapiens
caaactttgctaata

SEQ ID NO: 219003 - DNA, 15 bp, Homo sapiens
gcaaactttgctaat

SEQ ID NO: 219004 - DNA, 15 bp, Homo sapiens
tgcaaactttgctaa

SEQ ID NO: 219005 - DNA, 15 bp, Homo sapiens
ctgcaaactttgcta

SEQ ID NO: 219006 - DNA, 15 bp, Homo sapiens
cctgcaaactttgct

SEQ ID NO: 219007 - DNA, 15 bp, Homo sapiens
tcctgcaaactttgc

SEQ ID NO: 219008 - DNA, 15 bp, Homo sapiens
ctcctgcaaactttg

SEQ ID NO: 219009 - DNA, 15 bp, Homo sapiens
cctcctgcaaacttt

SEQ ID NO: 219010 - DNA, 15 bp, Homo sapiens
tcctcctgcaaactt

SEQ ID NO: 219011 - DNA, 15 bp, Homo sapiens
ttcctcctgcaaact

SEQ ID NO: 219012 - DNA, 15 bp, Homo sapiens
tttcctcctgcaaac

SEQ ID NO: 219013 - DNA, 15 bp, Homo sapiens
ctttcctcctgcaaa

SEQ ID NO: 219014 - DNA, 15 bp, Homo sapiens
tctttcctcctgcaa

SEQ ID NO: 219015 - DNA, 15 bp, Homo sapiens
ctctttcctcctgca

SEQ ID NO: 219016 - DNA, 15 bp, Homo sapiens
tctctttcctcctgc

SEQ ID NO: 219017 - DNA, 15 bp, Homo sapiens
gtctctttcctcctg

SEQ ID NO: 219018 - DNA, 15 bp, Homo sapiens
tgtctctttcctcct

SEQ ID NO: 219019 - DNA, 15 bp, Homo sapiens
atgtctctttcctcc

SEQ ID NO: 219020 - DNA, 15 bp, Homo sapiens
aatgtctctttcctc

SEQ ID NO: 219021 - DNA, 15 bp, Homo sapiens
caatgtctctttcct

SEQ ID NO: 219022 - DNA, 15 bp, Homo sapiens
tcaatgtctctttcc

SEQ ID NO: 219023 - DNA, 15 bp, Homo sapiens
ttcaatgtctctttc

SEQ ID NO: 219024 - DNA, 15 bp, Homo sapiens
attcaatgtctcttt

SEQ ID NO: 219025 - DNA, 15 bp, Homo sapiens
cattcaatgtctctt

SEQ ID NO: 219026 - DNA, 15 bp, Homo sapiens
ccattcaatgtctct

SEQ ID NO: 219027 - DNA, 15 bp, Homo sapiens
cccattcaatgtctc

SEQ ID NO: 219028 - DNA, 15 bp, Homo sapiens
ccccattcaatgtct

SEQ ID NO: 219029 - DNA, 15 bp, Homo sapiens
tccccattcaatgtc

SEQ ID NO: 219030 - DNA, 15 bp, Homo sapiens
ctccccattcaatgt

SEQ ID NO: 219031 - DNA, 15 bp, Homo sapiens
actccccattcaatg

SEQ ID NO: 219032 - DNA, 15 bp, Homo sapiens
aactccccattcaat

SEQ ID NO: 219033 - DNA, 15 bp, Homo sapiens
aaactccccattcaa

SEQ ID NO: 219034 - DNA, 15 bp, Homo sapiens
gaaactccccattca

SEQ ID NO: 219035 - DNA, 15 bp, Homo sapiens
tgaaactccccattc

SEQ ID NO: 219036 - DNA, 15 bp, Homo sapiens
atgaaactccccatt

SEQ ID NO: 219037 - DNA, 15 bp, Homo sapiens
gatgaaactccccat

SEQ ID NO: 219038 - DNA, 15 bp, Homo sapiens
tgatgaaactcccca

SEQ ID NO: 219039 - DNA, 15 bp, Homo sapiens
ttgatgaaactcccc

SEQ ID NO: 219040 - DNA, 15 bp, Homo sapiens
tttgatgaaactccc

SEQ ID NO: 219041 - DNA, 15 bp, Homo sapiens
ctttgatgaaactcc

SEQ ID NO: 219042 - DNA, 15 bp, Homo sapiens
gctttgatgaaactc

SEQ ID NO: 219043 - DNA, 15 bp, Homo sapiens
ggctttgatgaaact

SEQ ID NO: 219044 - DNA, 15 bp, Homo sapiens
tggctttgatgaaac

SEQ ID NO: 219045 - DNA, 15 bp, Homo sapiens
ctggctttgatgaaa

SEQ ID NO: 219046 - DNA, 15 bp, Homo sapiens
cctggctttgatgaa

SEQ ID NO: 219047 - DNA, 15 bp, Homo sapiens
ccctggctttgatga

SEQ ID NO: 219048 - DNA, 15 bp, Homo sapiens
cccctggctttgatg

SEQ ID NO: 219049 - DNA, 15 bp, Homo sapiens
acccctggctttgat

SEQ ID NO: 219050 - DNA, 15 bp, Homo sapiens
cacccctggctttga

SEQ ID NO: 219051 - DNA, 15 bp, Homo sapiens
acacccctggctttg

SEQ ID NO: 219052 - DNA, 15 bp, Homo sapiens
aacacccctggcttt

SEQ ID NO: 219053 - DNA, 15 bp, Homo sapiens
gaacacccctggctt

SEQ ID NO: 219054 - DNA, 15 bp, Homo sapiens
ggaacacccctggct

SEQ ID NO: 219055 - DNA, 15 bp, Homo sapiens
tggaacacccctggc

SEQ ID NO: 219056 - DNA, 15 bp, Homo sapiens
gtggaacacccctgg

SEQ ID NO: 219057 - DNA, 15 bp, Homo sapiens
tgtggaacacccctg

SEQ ID NO: 219058 - DNA, 15 bp, Homo sapiens
ctgtggaacacccct

SEQ ID NO: 219059 - DNA, 15 bp, Homo sapiens
cctgtggaacacccc

SEQ ID NO: 219060 - DNA, 15 bp, Homo sapiens
tcctgtggaacaccc

SEQ ID NO: 219061 - DNA, 15 bp, Homo sapiens
ttcctgtggaacacc

SEQ ID NO: 219062 - DNA, 15 bp, Homo sapiens
tttcctgtggaacac

SEQ ID NO: 219063 - DNA, 15 bp, Homo sapiens
ttttcctgtggaaca

SEQ ID NO: 219064 - DNA, 15 bp, Homo sapiens
attttcctgtggaac

SEQ ID NO: 219065 - DNA, 15 bp, Homo sapiens
tattttcctgtggaa

SEQ ID NO: 219066 - DNA, 15 bp, Homo sapiens
gtattttcctgtgga

SEQ ID NO: 219067 - DNA, 15 bp, Homo sapiens
agtattttcctgtgg

SEQ ID NO: 219068 - DNA, 15 bp, Homo sapiens
aagtattttcctgtg

SEQ ID NO: 219069 - DNA, 15 bp, Homo sapiens
caagtattttcctgt

SEQ ID NO: 219070 - DNA, 15 bp, Homo sapiens
acaagtattttcctg

SEQ ID NO: 219071 - DNA, 15 bp, Homo sapiens
aacaagtattttcct

SEQ ID NO: 219072 - DNA, 15 bp, Homo sapiens
taacaagtattttcc

SEQ ID NO: 219073 - DNA, 15 bp, Homo sapiens
ctaacaagtattttc

SEQ ID NO: 219074 - DNA, 15 bp, Homo sapiens
cctaacaagtatttt

SEQ ID NO: 219075 - DNA, 15 bp, Homo sapiens
gcctaacaagtattt

SEQ ID NO: 219076 - DNA, 15 bp, Homo sapiens
ggcctaacaagtatt

SEQ ID NO: 219077 - DNA, 15 bp, Homo sapiens
aggcctaacaagtat

SEQ ID NO: 219078 - DNA, 15 bp, Homo sapiens
taggcctaacaagta

SEQ ID NO: 219079 - DNA, 15 bp, Homo sapiens
ctaggcctaacaagt

SEQ ID NO: 219080 - DNA, 15 bp, Homo sapiens
actaggcctaacaag

SEQ ID NO: 219081 - DNA, 15 bp, Homo sapiens
aactaggcctaacaa

SEQ ID NO: 219082 - DNA, 15 bp, Homo sapiens
aaactaggcctaaca

SEQ ID NO: 219083 - DNA, 15 bp, Homo sapiens
gaaactaggcctaac

SEQ ID NO: 219084 - DNA, 15 bp, Homo sapiens
ggaaactaggcctaa

SEQ ID NO: 219085 - DNA, 15 bp, Homo sapiens
aggaaactaggccta

SEQ ID NO: 219086 - DNA, 15 bp, Homo sapiens
caggaaactaggcct

SEQ ID NO: 219087 - DNA, 15 bp, Homo sapiens
acaggaaactaggcc

SEQ ID NO: 219088 - DNA, 15 bp, Homo sapiens
cacaggaaactaggc

SEQ ID NO: 219089 - DNA, 15 bp, Homo sapiens
ccacaggaaactagg

SEQ ID NO: 219090 - DNA, 15 bp, Homo sapiens
accacaggaaactag

SEQ ID NO: 219091 - DNA, 15 bp, Homo sapiens
caccacaggaaacta

SEQ ID NO: 219092 - DNA, 15 bp, Homo sapiens
tcaccacaggaaact

SEQ ID NO: 219093 - DNA, 15 bp, Homo sapiens
ttcaccacaggaaac

SEQ ID NO: 219094 - DNA, 15 bp, Homo sapiens
tttcaccacaggaaa

SEQ ID NO: 219095 - DNA, 15 bp, Homo sapiens
ctttcaccacaggaa

SEQ ID NO: 219096 - DNA, 15 bp, Homo sapiens
actttcaccacagga

SEQ ID NO: 219097 - DNA, 15 bp, Homo sapiens
gactttcaccacagg

SEQ ID NO: 219098 - DNA, 15 bp, Homo sapiens
agactttcaccacag

SEQ ID NO: 219099 - DNA, 15 bp, Homo sapiens
aagactttcaccaca

SEQ ID NO: 219100 - DNA, 15 bp, Homo sapiens
taagactttcaccac

SEQ ID NO: 219101 - DNA, 15 bp, Homo sapiens
ataagactttcacca

SEQ ID NO: 219102 - DNA, 15 bp, Homo sapiens
tataagactttcacc

SEQ ID NO: 219103 - DNA, 15 bp, Homo sapiens
gtataagactttcac

SEQ ID NO: 219104 - DNA, 15 bp, Homo sapiens
tgtataagactttca

SEQ ID NO: 219105 - DNA, 15 bp, Homo sapiens
atgtataagactttc

SEQ ID NO: 219106 - DNA, 15 bp, Homo sapiens
aatgtataagacttt

SEQ ID NO: 219107 - DNA, 15 bp, Homo sapiens
aaatgtataagactt

SEQ ID NO: 219108 - DNA, 15 bp, Homo sapiens
gaaatgtataagact

SEQ ID NO: 219109 - DNA, 15 bp, Homo sapiens
tgaaatgtataagac

SEQ ID NO: 219110 - DNA, 15 bp, Homo sapiens
ttgaaatgtataaga

SEQ ID NO: 219111 - DNA, 15 bp, Homo sapiens
tttgaaatgtataag

SEQ ID NO: 219112 - DNA, 15 bp, Homo sapiens
atttgaaatgtataa

SEQ ID NO: 219113 - DNA, 15 bp, Homo sapiens
tatttgaaatgtata

SEQ ID NO: 219114 - DNA, 15 bp, Homo sapiens
atatttgaaatgtat

SEQ ID NO: 219115 - DNA, 15 bp, Homo sapiens
catatttgaaatgta

SEQ ID NO: 219116 - DNA, 15 bp, Homo sapiens
acatatttgaaatgt

SEQ ID NO: 219117 - DNA, 15 bp, Homo sapiens
aacatatttgaaatg

SEQ ID NO: 219118 - DNA, 15 bp, Homo sapiens
aaacatatttgaaat

SEQ ID NO: 219119 - DNA, 15 bp, Homo sapiens
aaaacatatttgaaa

SEQ ID NO: 219120 - DNA, 15 bp, Homo sapiens
caaaacatatttgaa

SEQ ID NO: 219121 - DNA, 15 bp, Homo sapiens
acaaaacatatttga

SEQ ID NO: 219122 - DNA, 15 bp, Homo sapiens
cacaaaacatatttg

SEQ ID NO: 219123 - DNA, 15 bp, Homo sapiens
tcacaaaacatattt

SEQ ID NO: 219124 - DNA, 15 bp, Homo sapiens
gtcacaaaacatatt

SEQ ID NO: 219125 - DNA, 15 bp, Homo sapiens
agtcacaaaacatat

SEQ ID NO: 219126 - DNA, 15 bp, Homo sapiens
gagtcacaaaacata

SEQ ID NO: 219127 - DNA, 15 bp, Homo sapiens
agagtcacaaaacat

SEQ ID NO: 219128 - DNA, 15 bp, Homo sapiens
gagagtcacaaaaca

SEQ ID NO: 219129 - DNA, 15 bp, Homo sapiens
ggagagtcacaaaac

SEQ ID NO: 219130 - DNA, 15 bp, Homo sapiens
tggagagtcacaaaa

SEQ ID NO: 219131 - DNA, 15 bp, Homo sapiens
gtggagagtcacaaa

SEQ ID NO: 219132 - DNA, 15 bp, Homo sapiens
tgtggagagtcacaa

SEQ ID NO: 219133 - DNA, 15 bp, Homo sapiens
ttgtggagagtcaca

SEQ ID NO: 219134 - DNA, 15 bp, Homo sapiens
tttgtggagagtcac

SEQ ID NO: 219135 - DNA, 15 bp, Homo sapiens
gtttgtggagagtca

SEQ ID NO: 219136 - DNA, 15 bp, Homo sapiens
agtttgtggagagtc

SEQ ID NO: 219137 - DNA, 15 bp, Homo sapiens
aagtttgtggagagt

SEQ ID NO: 219138 - DNA, 15 bp, Homo sapiens
aaagtttgtggagag

SEQ ID NO: 219139 - DNA, 15 bp, Homo sapiens
aaaagtttgtggaga

SEQ ID NO: 219140 - DNA, 15 bp, Homo sapiens
aaaaagtttgtggag

SEQ ID NO: 219141 - DNA, 15 bp, Homo sapiens
caaaaagtttgtgga

SEQ ID NO: 219142 - DNA, 15 bp, Homo sapiens
acaaaaagtttgtgg

SEQ ID NO: 219143 - DNA, 15 bp, Homo sapiens
aacaaaaagtttgtg

SEQ ID NO: 219144 - DNA, 15 bp, Homo sapiens
aaacaaaaagtttgt

SEQ ID NO: 219145 - DNA, 15 bp, Homo sapiens
gaaacaaaaagtttg

SEQ ID NO: 219146 - DNA, 15 bp, Homo sapiens
ggaaacaaaaagttt

SEQ ID NO: 219147 - DNA, 15 bp, Homo sapiens
aggaaacaaaaagtt

SEQ ID NO: 219148 - DNA, 15 bp, Homo sapiens
caggaaacaaaaagt

SEQ ID NO: 219149 - DNA, 15 bp, Homo sapiens
gcaggaaacaaaaag

SEQ ID NO: 219150 - DNA, 15 bp, Homo sapiens
tgcaggaaacaaaaa

SEQ ID NO: 219151 - DNA, 15 bp, Homo sapiens
ctgcaggaaacaaaa

SEQ ID NO: 219152 - DNA, 15 bp, Homo sapiens
cctgcaggaaacaaa

SEQ ID NO: 219153 - DNA, 15 bp, Homo sapiens
acctgcaggaaacaa

SEQ ID NO: 219154 - DNA, 15 bp, Homo sapiens
aacctgcaggaaaca

SEQ ID NO: 219155 - DNA, 15 bp, Homo sapiens
aaacctgcaggaaac

SEQ ID NO: 219156 - DNA, 15 bp, Homo sapiens
caaacctgcaggaaa

SEQ ID NO: 219157 - DNA, 15 bp, Homo sapiens
acaaacctgcaggaa

SEQ ID NO: 219158 - DNA, 15 bp, Homo sapiens
tacaaacctgcagga

SEQ ID NO: 219159 - DNA, 15 bp, Homo sapiens
ttacaaacctgcagg

SEQ ID NO: 219160 - DNA, 15 bp, Homo sapiens
attacaaacctgcag

SEQ ID NO: 219161 - DNA, 15 bp, Homo sapiens
aattacaaacctgca

SEQ ID NO: 219162 - DNA, 15 bp, Homo sapiens
caattacaaacctgc

SEQ ID NO: 219163 - DNA, 15 bp, Homo sapiens
tcaattacaaacctg

SEQ ID NO: 219164 - DNA, 15 bp, Homo sapiens
ctcaattacaaacct

SEQ ID NO: 219165 - DNA, 15 bp, Homo sapiens
tctcaattacaaacc

SEQ ID NO: 219166 - DNA, 15 bp, Homo sapiens
atctcaattacaaac

SEQ ID NO: 219167 - DNA, 15 bp, Homo sapiens
tatctcaattacaaa

SEQ ID NO: 219168 - DNA, 15 bp, Homo sapiens
atatctcaattacaa

SEQ ID NO: 219169 - DNA, 15 bp, Homo sapiens
tatatctcaattaca

SEQ ID NO: 219170 - DNA, 15 bp, Homo sapiens
atatatctcaattac

SEQ ID NO: 219171 - DNA, 15 bp, Homo sapiens
catatatctcaatta

SEQ ID NO: 219172 - DNA, 15 bp, Homo sapiens
gcatatatctcaatt

SEQ ID NO: 219173 - DNA, 15 bp, Homo sapiens
ggcatatatctcaat

SEQ ID NO: 219174 - DNA, 15 bp, Homo sapiens
gggcatatatctcaa

SEQ ID NO: 219175 - DNA, 15 bp, Homo sapiens
agggcatatatctca

SEQ ID NO: 219176 - DNA, 15 bp, Homo sapiens
cagggcatatatctc

SEQ ID NO: 219177 - DNA, 15 bp, Homo sapiens
ccagggcatatatct

SEQ ID NO: 219178 - DNA, 15 bp, Homo sapiens
cccagggcatatatc

SEQ ID NO: 219179 - DNA, 15 bp, Homo sapiens
ccccagggcatatat

SEQ ID NO: 219180 - DNA, 15 bp, Homo sapiens
tccccagggcatata

SEQ ID NO: 219181 - DNA, 15 bp, Homo sapiens
ctccccagggcatat

SEQ ID NO: 219182 - DNA, 15 bp, Homo sapiens
tctccccagggcata

SEQ ID NO: 219183 - DNA, 15 bp, Homo sapiens
ttctccccagggcat

SEQ ID NO: 219184 - DNA, 15 bp, Homo sapiens
tttctccccagggca

SEQ ID NO: 219185 - DNA, 15 bp, Homo sapiens
ttttctccccagggc

SEQ ID NO: 219186 - DNA, 15 bp, Homo sapiens
tttttctccccaggg

SEQ ID NO: 219187 - DNA, 15 bp, Homo sapiens
ttttttctccccagg

SEQ ID NO: 219188 - DNA, 15 bp, Homo sapiens
gttttttctccccag

SEQ ID NO: 219189 - DNA, 15 bp, Homo sapiens
tgttttttctcccca

SEQ ID NO: 219190 - DNA, 15 bp, Homo sapiens
atgttttttctcccc

SEQ ID NO: 219191 - DNA, 15 bp, Homo sapiens
gatgttttttctccc

SEQ ID NO: 219192 - DNA, 15 bp, Homo sapiens
ggatgttttttctcc

SEQ ID NO: 219193 - DNA, 15 bp, Homo sapiens
tggatgttttttctc

SEQ ID NO: 219194 - DNA, 15 bp, Homo sapiens
ctggatgttttttct

SEQ ID NO: 219195 - DNA, 15 bp, Homo sapiens
cctggatgttttttc

SEQ ID NO: 219196 - DNA, 15 bp, Homo sapiens
gcctggatgtttttt

SEQ ID NO: 219197 - DNA, 15 bp, Homo sapiens
tgcctggatgttttt

SEQ ID NO: 219198 - DNA, 15 bp, Homo sapiens
atgcctggatgtttt

SEQ ID NO: 219199 - DNA, 15 bp, Homo sapiens
gatgcctggatgttt

SEQ ID NO: 219200 - DNA, 15 bp, Homo sapiens
ggatgcctggatgtt

SEQ ID NO: 219201 - DNA, 15 bp, Homo sapiens
tggatgcctggatgt

SEQ ID NO: 219202 - DNA, 15 bp, Homo sapiens
ctggatgcctggatg

SEQ ID NO: 219203 - DNA, 15 bp, Homo sapiens
cctggatgcctggat

SEQ ID NO: 219204 - DNA, 15 bp, Homo sapiens
acctggatgcctgga

SEQ ID NO: 219205 - DNA, 15 bp, Homo sapiens
gacctggatgcctgg

SEQ ID NO: 219206 - DNA, 15 bp, Homo sapiens
ggacctggatgcctg

SEQ ID NO: 219207 - DNA, 15 bp, Homo sapiens
aggacctggatgcct

SEQ ID NO: 219208 - DNA, 15 bp, Homo sapiens
aaggacctggatgcc

SEQ ID NO: 219209 - DNA, 15 bp, Homo sapiens
taaggacctggatgc

SEQ ID NO: 219210 - DNA, 15 bp, Homo sapiens
ctaaggacctggatg

SEQ ID NO: 219211 - DNA, 15 bp, Homo sapiens
tctaaggacctggat

SEQ ID NO: 219212 - DNA, 15 bp, Homo sapiens
ttctaaggacctgga

SEQ ID NO: 219213 - DNA, 15 bp, Homo sapiens
tttctaaggacctgg

SEQ ID NO: 219214 - DNA, 15 bp, Homo sapiens
atttctaaggacctg

SEQ ID NO: 219215 - DNA, 15 bp, Homo sapiens
tatttctaaggacct

SEQ ID NO: 219216 - DNA, 15 bp, Homo sapiens
atatttctaaggacc

SEQ ID NO: 219217 - DNA, 15 bp, Homo sapiens
tatatttctaaggac

SEQ ID NO: 219218 - DNA, 15 bp, Homo sapiens
ctatatttctaagga

SEQ ID NO: 219219 - DNA, 15 bp, Homo sapiens
cctatatttctaagg

SEQ ID NO: 219220 - DNA, 15 bp, Homo sapiens
acctatatttctaag

SEQ ID NO: 219221 - DNA, 15 bp, Homo sapiens
cacctatatttctaa

SEQ ID NO: 219222 - DNA, 15 bp, Homo sapiens
gcacctatatttcta

SEQ ID NO: 219223 - DNA, 15 bp, Homo sapiens
ggcacctatatttct

SEQ ID NO: 219224 - DNA, 15 bp, Homo sapiens
gggcacctatatttc

SEQ ID NO: 219225 - DNA, 15 bp, Homo sapiens
agggcacctatattt

SEQ ID NO: 219226 - DNA, 15 bp, Homo sapiens
cagggcacctatatt

SEQ ID NO: 219227 - DNA, 15 bp, Homo sapiens
tcagggcacctatat

SEQ ID NO: 219228 - DNA, 15 bp, Homo sapiens
atcagggcacctata

SEQ ID NO: 219229 - DNA, 15 bp, Homo sapiens
tatcagggcacctat

SEQ ID NO: 219230 - DNA, 15 bp, Homo sapiens
ctatcagggcaccta

SEQ ID NO: 219231 - DNA, 15 bp, Homo sapiens
cctatcagggcacct

SEQ ID NO: 219232 - DNA, 15 bp, Homo sapiens
tcctatcagggcacc

SEQ ID NO: 219233 - DNA, 15 bp, Homo sapiens
gtcctatcagggcac

SEQ ID NO: 219234 - DNA, 15 bp, Homo sapiens
agtcctatcagggca

SEQ ID NO: 219235 - DNA, 15 bp, Homo sapiens
cagtcctatcagggc

SEQ ID NO: 219236 - DNA, 15 bp, Homo sapiens
acagtcctatcaggg

SEQ ID NO: 219237 - DNA, 15 bp, Homo sapiens
tacagtcctatcagg

SEQ ID NO: 219238 - DNA, 15 bp, Homo sapiens
ctacagtcctatcag

SEQ ID NO: 219239 - DNA, 15 bp, Homo sapiens
gctacagtcctatca

SEQ ID NO: 219240 - DNA, 15 bp, Homo sapiens
agctacagtcctatc

SEQ ID NO: 219241 - DNA, 15 bp, Homo sapiens
cagctacagtcctat

SEQ ID NO: 219242 - DNA, 15 bp, Homo sapiens
ccagctacagtccta

SEQ ID NO: 219243 - DNA, 15 bp, Homo sapiens
gccagctacagtcct

SEQ ID NO: 219244 - DNA, 15 bp, Homo sapiens
tgccagctacagtcc

SEQ ID NO: 219245 - DNA, 15 bp, Homo sapiens
ctgccagctacagtc

SEQ ID NO: 219246 - DNA, 15 bp, Homo sapiens
tctgccagctacagt

SEQ ID NO: 219247 - DNA, 15 bp, Homo sapiens
gtctgccagctacag

SEQ ID NO: 219248 - DNA, 15 bp, Homo sapiens
agtctgccagctaca

SEQ ID NO: 219249 - DNA, 15 bp, Homo sapiens
aagtctgccagctac

SEQ ID NO: 219250 - DNA, 15 bp, Homo sapiens
caagtctgccagcta

SEQ ID NO: 219251 - DNA, 15 bp, Homo sapiens
gcaagtctgccagct

SEQ ID NO: 219252 - DNA, 15 bp, Homo sapiens
ggcaagtctgccagc

SEQ ID NO: 219253 - DNA, 15 bp, Homo sapiens
gggcaagtctgccag

SEQ ID NO: 219254 - DNA, 15 bp, Homo sapiens
tgggcaagtctgcca

SEQ ID NO: 219255 - DNA, 15 bp, Homo sapiens
atgggcaagtctgcc

SEQ ID NO: 219256 - DNA, 15 bp, Homo sapiens
tatgggcaagtctgc

SEQ ID NO: 219257 - DNA, 15 bp, Homo sapiens
ttatgggcaagtctg

SEQ ID NO: 219258 - DNA, 15 bp, Homo sapiens
tttatgggcaagtct

SEQ ID NO: 219259 - DNA, 15 bp, Homo sapiens
ttttatgggcaagtc

SEQ ID NO: 219260 - DNA, 15 bp, Homo sapiens
gttttatgggcaagt

SEQ ID NO: 219261 - DNA, 15 bp, Homo sapiens
tgttttatgggcaag

SEQ ID NO: 219262 - DNA, 15 bp, Homo sapiens
ctgttttatgggcaa

SEQ ID NO: 219263 - DNA, 15 bp, Homo sapiens
cctgttttatgggca

SEQ ID NO: 219264 - DNA, 15 bp, Homo sapiens
acctgttttatgggc

SEQ ID NO: 219265 - DNA, 15 bp, Homo sapiens
cacctgttttatggg

SEQ ID NO: 219266 - DNA, 15 bp, Homo sapiens
tcacctgttttatgg

SEQ ID NO: 219267 - DNA, 15 bp, Homo sapiens
ctcacctgttttatg

SEQ ID NO: 219268 - DNA, 15 bp, Homo sapiens
cctcacctgttttat

SEQ ID NO: 219269 - DNA, 15 bp, Homo sapiens
gcctcacctgtttta

SEQ ID NO: 219270 - DNA, 15 bp, Homo sapiens
tgcctcacctgtttt

SEQ ID NO: 219271 - DNA, 15 bp, Homo sapiens
ctgcctcacctgttt

SEQ ID NO: 219272 - DNA, 15 bp, Homo sapiens
cctgcctcacctgtt

SEQ ID NO: 219273 - DNA, 15 bp, Homo sapiens
acctgcctcacctgt

SEQ ID NO: 219274 - DNA, 15 bp, Homo sapiens
cacctgcctcacctg

SEQ ID NO: 219275 - DNA, 15 bp, Homo sapiens
gcacctgcctcacct

SEQ ID NO: 219276 - DNA, 15 bp, Homo sapiens
agcacctgcctcacc

SEQ ID NO: 219277 - DNA, 15 bp, Homo sapiens
aagcacctgcctcac

SEQ ID NO: 219278 - DNA, 15 bp, Homo sapiens
caagcacctgcctca

SEQ ID NO: 219279 - DNA, 15 bp, Homo sapiens
tcaagcacctgcctc

SEQ ID NO: 219280 - DNA, 15 bp, Homo sapiens
ttcaagcacctgcct

SEQ ID NO: 219281 - DNA, 15 bp, Homo sapiens
gttcaagcacctgcc

SEQ ID NO: 219282 - DNA, 15 bp, Homo sapiens
tgttcaagcacctgc

SEQ ID NO: 219283 - DNA, 15 bp, Homo sapiens
atgttcaagcacctg

SEQ ID NO: 219284 - DNA, 15 bp, Homo sapiens
catgttcaagcacct

SEQ ID NO: 219285 - DNA, 15 bp, Homo sapiens
acatgttcaagcacc

SEQ ID NO: 219286 - DNA, 15 bp, Homo sapiens
cacatgttcaagcac

SEQ ID NO: 219287 - DNA, 15 bp, Homo sapiens
tcacatgttcaagca

SEQ ID NO: 219288 - DNA, 15 bp, Homo sapiens
atcacatgttcaagc

SEQ ID NO: 219289 - DNA, 15 bp, Homo sapiens
aatcacatgttcaag

SEQ ID NO: 219290 - DNA, 15 bp, Homo sapiens
gaatcacatgttcaa

SEQ ID NO: 219291 - DNA, 15 bp, Homo sapiens
tgaatcacatgttca

SEQ ID NO: 219292 - DNA, 15 bp, Homo sapiens
gtgaatcacatgttc

SEQ ID NO: 219293 - DNA, 15 bp, Homo sapiens
tgtgaatcacatgtt

SEQ ID NO: 219294 - DNA, 15 bp, Homo sapiens
atgtgaatcacatgt

SEQ ID NO: 219295 - DNA, 15 bp, Homo sapiens
catgtgaatcacatg

SEQ ID NO: 219296 - DNA, 15 bp, Homo sapiens
acatgtgaatcacat

SEQ ID NO: 219297 - DNA, 15 bp, Homo sapiens
aacatgtgaatcaca

SEQ ID NO: 219298 - DNA, 15 bp, Homo sapiens
caacatgtgaatcac

SEQ ID NO: 219299 - DNA, 15 bp, Homo sapiens
gcaacatgtgaatca

SEQ ID NO: 219300 - DNA, 15 bp, Homo sapiens
tgcaacatgtgaatc

SEQ ID NO: 219301 - DNA, 15 bp, Homo sapiens
atgcaacatgtgaat

SEQ ID NO: 219302 - DNA, 15 bp, Homo sapiens
tatgcaacatgtgaa

SEQ ID NO: 219303 - DNA, 15 bp, Homo sapiens
ctatgcaacatgtga

SEQ ID NO: 219304 - DNA, 15 bp, Homo sapiens
tctatgcaacatgtg

SEQ ID NO: 219305 - DNA, 15 bp, Homo sapiens
gtctatgcaacatgt

SEQ ID NO: 219306 - DNA, 15 bp, Homo sapiens
agtctatgcaacatg

SEQ ID NO: 219307 - DNA, 15 bp, Homo sapiens
cagtctatgcaacat

SEQ ID NO: 219308 - DNA, 15 bp, Homo sapiens
gcagtctatgcaaca

SEQ ID NO: 219309 - DNA, 15 bp, Homo sapiens
ggcagtctatgcaac

SEQ ID NO: 219310 - DNA, 15 bp, Homo sapiens
aggcagtctatgcaa

SEQ ID NO: 219311 - DNA, 15 bp, Homo sapiens
taggcagtctatgca

SEQ ID NO: 219312 - DNA, 15 bp, Homo sapiens
gtaggcagtctatgc

SEQ ID NO: 219313 - DNA, 15 bp, Homo sapiens
agtaggcagtctatg

SEQ ID NO: 219314 - DNA, 15 bp, Homo sapiens
gagtaggcagtctat

SEQ ID NO: 219315 - DNA, 15 bp, Homo sapiens
ggagtaggcagtcta

SEQ ID NO: 219316 - DNA, 15 bp, Homo sapiens
aggagtaggcagtct

SEQ ID NO: 219317 - DNA, 15 bp, Homo sapiens
caggagtaggcagtc

SEQ ID NO: 219318 - DNA, 15 bp, Homo sapiens
ccaggagtaggcagt

SEQ ID NO: 219319 - DNA, 15 bp, Homo sapiens
cccaggagtaggcag

SEQ ID NO: 219320 - DNA, 15 bp, Homo sapiens
gcccaggagtaggca

SEQ ID NO: 219321 - DNA, 15 bp, Homo sapiens
tgcccaggagtaggc

SEQ ID NO: 219322 - DNA, 15 bp, Homo sapiens
ctgcccaggagtagg

SEQ ID NO: 219323 - DNA, 15 bp, Homo sapiens
cctgcccaggagtag

SEQ ID NO: 219324 - DNA, 15 bp, Homo sapiens
ccctgcccaggagta

SEQ ID NO: 219325 - DNA, 15 bp, Homo sapiens
cccctgcccaggagt

SEQ ID NO: 219326 - DNA, 15 bp, Homo sapiens
gcccctgcccaggag

SEQ ID NO: 219327 - DNA, 15 bp, Homo sapiens
tgcccctgcccagga

SEQ ID NO: 219328 - DNA, 15 bp, Homo sapiens
gtgcccctgcccagg

SEQ ID NO: 219329 - DNA, 15 bp, Homo sapiens
tgtgcccctgcccag

SEQ ID NO: 219330 - DNA, 15 bp, Homo sapiens
gtgtgcccctgccca

SEQ ID NO: 219331 - DNA, 15 bp, Homo sapiens
agtgtgcccctgccc

SEQ ID NO: 219332 - DNA, 15 bp, Homo sapiens
aagtgtgcccctgcc

SEQ ID NO: 219333 - DNA, 15 bp, Homo sapiens
caagtgtgcccctgc

SEQ ID NO: 219334 - DNA, 15 bp, Homo sapiens
ccaagtgtgcccctg

SEQ ID NO: 219335 - DNA, 15 bp, Homo sapiens
gccaagtgtgcccct

SEQ ID NO: 219336 - DNA, 15 bp, Homo sapiens
ggccaagtgtgcccc

SEQ ID NO: 219337 - DNA, 15 bp, Homo sapiens
aggccaagtgtgccc

SEQ ID NO: 219338 - DNA, 15 bp, Homo sapiens
caggccaagtgtgcc

SEQ ID NO: 219339 - DNA, 15 bp, Homo sapiens
acaggccaagtgtgc

SEQ ID NO: 219340 - DNA, 15 bp, Homo sapiens
tacaggccaagtgtg

SEQ ID NO: 219341 - DNA, 15 bp, Homo sapiens
atacaggccaagtgt

SEQ ID NO: 219342 - DNA, 15 bp, Homo sapiens
aatacaggccaagtg

SEQ ID NO: 219343 - DNA, 15 bp, Homo sapiens
aaatacaggccaagt

SEQ ID NO: 219344 - DNA, 15 bp, Homo sapiens
caaatacaggccaag

SEQ ID NO: 219345 - DNA, 15 bp, Homo sapiens
tcaaatacaggccaa

SEQ ID NO: 219346 - DNA, 15 bp, Homo sapiens
ttcaaatacaggcca

SEQ ID NO: 219347 - DNA, 15 bp, Homo sapiens
attcaaatacaggcc

SEQ ID NO: 219348 - DNA, 15 bp, Homo sapiens
tattcaaatacaggc

SEQ ID NO: 219349 - DNA, 15 bp, Homo sapiens
gtattcaaatacagg

SEQ ID NO: 219350 - DNA, 15 bp, Homo sapiens
tgtattcaaatacag

SEQ ID NO: 219351 - DNA, 15 bp, Homo sapiens
ggtgtattcaaatac

SEQ ID NO: 219352 - DNA, 15 bp, Homo sapiens
aggtgtattcaaata

SEQ ID NO: 219353 - DNA, 15 bp, Homo sapiens
taggtgtattcaaat

SEQ ID NO: 219354 - DNA, 15 bp, Homo sapiens
ctaggtgtattcaaa

SEQ ID NO: 219355 - DNA, 15 bp, Homo sapiens
tctaggtgtattcaa

SEQ ID NO: 219356 - DNA, 15 bp, Homo sapiens
gtctaggtgtattca

SEQ ID NO: 219357 - DNA, 15 bp, Homo sapiens
agtctaggtgtattc

SEQ ID NO: 219358 - DNA, 15 bp, Homo sapiens
aagtctaggtgtatt

SEQ ID NO: 219359 - DNA, 15 bp, Homo sapiens
gaagtctaggtgtat

SEQ ID NO: 219360 - DNA, 15 bp, Homo sapiens
tgaagtctaggtgta

SEQ ID NO: 219361 - DNA, 15 bp, Homo sapiens
ttgaagtctaggtgt

SEQ ID NO: 219362 - DNA, 15 bp, Homo sapiens
tttgaagtctaggtg

SEQ ID NO: 219363 - DNA, 15 bp, Homo sapiens
gtttgaagtctaggt

SEQ ID NO: 219364 - DNA, 15 bp, Homo sapiens
agtttgaagtctagg

SEQ ID NO: 219365 - DNA, 15 bp, Homo sapiens
gagtttgaagtctag

SEQ ID NO: 219366 - DNA, 15 bp, Homo sapiens
tgagtttgaagtcta

SEQ ID NO: 219367 - DNA, 15 bp, Homo sapiens
ctgagtttgaagtct

SEQ ID NO: 219368 - DNA, 15 bp, Homo sapiens
actgagtttgaagtc

SEQ ID NO: 219369 - DNA, 15 bp, Homo sapiens
aactgagtttgaagt

SEQ ID NO: 219370 - DNA, 15 bp, Homo sapiens
aaactgagtttgaag

SEQ ID NO: 219371 - DNA, 15 bp, Homo sapiens
caaactgagtttgaa

SEQ ID NO: 219372 - DNA, 15 bp, Homo sapiens
acaaactgagtttga

SEQ ID NO: 219373 - DNA, 15 bp, Homo sapiens
cacaaactgagtttg

SEQ ID NO: 219374 - DNA, 15 bp, Homo sapiens
tcacaaactgagttt

SEQ ID NO: 219375 - DNA, 15 bp, Homo sapiens
ttcacaaactgagtt

SEQ ID NO: 219376 - DNA, 15 bp, Homo sapiens
attcacaaactgagt

SEQ ID NO: 219377 - DNA, 15 bp, Homo sapiens
gattcacaaactgag

SEQ ID NO: 219378 - DNA, 15 bp, Homo sapiens
tgattcacaaactga

SEQ ID NO: 219379 - DNA, 15 bp, Homo sapiens
gtgattcacaaactg

SEQ ID NO: 219380 - DNA, 15 bp, Homo sapiens
ggtgattcacaaact

SEQ ID NO: 219381 - DNA, 15 bp, Homo sapiens
aggtgattcacaaac

SEQ ID NO: 219382 - DNA, 15 bp, Homo sapiens
gaggtgattcacaaa

SEQ ID NO: 219383 - DNA, 15 bp, Homo sapiens
ggaggtgattcacaa

SEQ ID NO: 219384 - DNA, 15 bp, Homo sapiens
aggaggtgattcaca

SEQ ID NO: 219385 - DNA, 15 bp, Homo sapiens
aaggaggtgattcac

SEQ ID NO: 219386 - DNA, 15 bp, Homo sapiens
aaaggaggtgattca

SEQ ID NO: 219387 - DNA, 15 bp, Homo sapiens
caaaggaggtgattc

SEQ ID NO: 219388 - DNA, 15 bp, Homo sapiens
ccaaaggaggtgatt

SEQ ID NO: 219389 - DNA, 15 bp, Homo sapiens
tccaaaggaggtgat

SEQ ID NO: 219390 - DNA, 15 bp, Homo sapiens
ttccaaaggaggtga

SEQ ID NO: 219391 - DNA, 15 bp, Homo sapiens
cttccaaaggaggtg

SEQ ID NO: 219392 - DNA, 15 bp, Homo sapiens
gcttccaaaggaggt

SEQ ID NO: 219393 - DNA, 15 bp, Homo sapiens
agcttccaaaggagg

SEQ ID NO: 219394 - DNA, 15 bp, Homo sapiens
cagcttccaaaggag

SEQ ID NO: 219395 - DNA, 15 bp, Homo sapiens
acagcttccaaagga

SEQ ID NO: 219396 - DNA, 15 bp, Homo sapiens
gacagcttccaaagg

SEQ ID NO: 219397 - DNA, 15 bp, Homo sapiens
ggacagcttccaaag

SEQ ID NO: 219398 - DNA, 15 bp, Homo sapiens
aggacagcttccaaa

SEQ ID NO: 219399 - DNA, 15 bp, Homo sapiens
aaggacagcttccaa

SEQ ID NO: 219400 - DNA, 15 bp, Homo sapiens
caaggacagcttcca

SEQ ID NO: 219401 - DNA, 15 bp, Homo sapiens
gcaaggacagcttcc

SEQ ID NO: 219402 - DNA, 15 bp, Homo sapiens
tgcaaggacagcttc

SEQ ID NO: 219403 - DNA, 15 bp, Homo sapiens
gtgcaaggacagctt

SEQ ID NO: 219404 - DNA, 15 bp, Homo sapiens
ggtgcaaggacagct

SEQ ID NO: 219405 - DNA, 15 bp, Homo sapiens
gggtgcaaggacagc

SEQ ID NO: 219406 - DNA, 15 bp, Homo sapiens
agggtgcaaggacag

SEQ ID NO: 219407 - DNA, 15 bp, Homo sapiens
tagggtgcaaggaca

SEQ ID NO: 219408 - DNA, 15 bp, Homo sapiens
ctagggtgcaaggac

SEQ ID NO: 219409 - DNA, 15 bp, Homo sapiens
cctagggtgcaagga

SEQ ID NO: 219410 - DNA, 15 bp, Homo sapiens
gcctagggtgcaagg

SEQ ID NO: 219411 - DNA, 15 bp, Homo sapiens
agcctagggtgcaag

SEQ ID NO: 219412 - DNA, 15 bp, Homo sapiens
cagcctagggtgcaa

SEQ ID NO: 219413 - DNA, 15 bp, Homo sapiens
ccagcctagggtgca

SEQ ID NO: 219414 - DNA, 15 bp, Homo sapiens
tccagcctagggtgc

SEQ ID NO: 219415 - DNA, 15 bp, Homo sapiens
ttccagcctagggtg

SEQ ID NO: 219416 - DNA, 15 bp, Homo sapiens
cttccagcctagggt

SEQ ID NO: 219417 - DNA, 15 bp, Homo sapiens
gcttccagcctaggg

SEQ ID NO: 219418 - DNA, 15 bp, Homo sapiens
cgcttccagcctagg

SEQ ID NO: 219419 - DNA, 15 bp, Homo sapiens
tcgcttccagcctag

SEQ ID NO: 219420 - DNA, 15 bp, Homo sapiens
ctcgcttccagccta

SEQ ID NO: 219421 - DNA, 15 bp, Homo sapiens
gctcgcttccagcct

SEQ ID NO: 219422 - DNA, 15 bp, Homo sapiens
agctcgcttccagcc

SEQ ID NO: 219423 - DNA, 15 bp, Homo sapiens
aagctcgcttccagc

SEQ ID NO: 219424 - DNA, 15 bp, Homo sapiens
aaagctcgcttccag

SEQ ID NO: 219425 - DNA, 15 bp, Homo sapiens
gaaagctcgcttcca

SEQ ID NO: 219426 - DNA, 15 bp, Homo sapiens
cgaaagctcgcttcc

SEQ ID NO: 219427 - DNA, 15 bp, Homo sapiens
acgaaagctcgcttc

SEQ ID NO: 219428 - DNA, 15 bp, Homo sapiens
gacgaaagctcgctt

SEQ ID NO: 219429 - DNA, 15 bp, Homo sapiens
ggacgaaagctcgct

SEQ ID NO: 219430 - DNA, 15 bp, Homo sapiens
aggacgaaagctcgc

SEQ ID NO: 219431 - DNA, 15 bp, Homo sapiens
gaggacgaaagctcg

SEQ ID NO: 219432 - DNA, 15 bp, Homo sapiens
agaggacgaaagctc

SEQ ID NO: 219433 - DNA, 15 bp, Homo sapiens
cagaggacgaaagct

SEQ ID NO: 219434 - DNA, 15 bp, Homo sapiens
tcagaggacgaaagc

SEQ ID NO: 219435 - DNA, 15 bp, Homo sapiens
ttcagaggacgaaag

SEQ ID NO: 219436 - DNA, 15 bp, Homo sapiens
gttcagaggacgaaa

SEQ ID NO: 219437 - DNA, 15 bp, Homo sapiens
agttcagaggacgaa

SEQ ID NO: 219438 - DNA, 15 bp, Homo sapiens
aagttcagaggacga

SEQ ID NO: 219439 - DNA, 15 bp, Homo sapiens
gaagttcagaggacg

SEQ ID NO: 219440 - DNA, 15 bp, Homo sapiens
tgaagttcagaggac

SEQ ID NO: 219441 - DNA, 15 bp, Homo sapiens
ttgaagttcagagga

SEQ ID NO: 219442 - DNA, 15 bp, Homo sapiens
attgaagttcagagg

SEQ ID NO: 219443 - DNA, 15 bp, Homo sapiens
aattgaagttcagag

SEQ ID NO: 219444 - DNA, 15 bp, Homo sapiens
caattgaagttcaga

SEQ ID NO: 219445 - DNA, 15 bp, Homo sapiens
gcaattgaagttcag

SEQ ID NO: 219446 - DNA, 15 bp, Homo sapiens
ggcaattgaagttca

SEQ ID NO: 219447 - DNA, 15 bp, Homo sapiens
gggcaattgaagttc

SEQ ID NO: 219448 - DNA, 15 bp, Homo sapiens
agggcaattgaagtt

SEQ ID NO: 219449 - DNA, 15 bp, Homo sapiens
cagggcaattgaagt

SEQ ID NO: 219450 - DNA, 15 bp, Homo sapiens
acagggcaattgaag

SEQ ID NO: 219451 - DNA, 15 bp, Homo sapiens
tacagggcaattgaa

SEQ ID NO: 219452 - DNA, 15 bp, Homo sapiens
atacagggcaattga

SEQ ID NO: 219453 - DNA, 15 bp, Homo sapiens
aatacagggcaattg

SEQ ID NO: 219454 - DNA, 15 bp, Homo sapiens
gaatacagggcaatt

SEQ ID NO: 219455 - DNA, 15 bp, Homo sapiens
tgaatacagggcaat

SEQ ID NO: 219456 - DNA, 15 bp, Homo sapiens
atgaatacagggcaa

SEQ ID NO: 219457 - DNA, 15 bp, Homo sapiens
tatgaatacagggca

SEQ ID NO: 219458 - DNA, 15 bp, Homo sapiens
gtatgaatacagggc

SEQ ID NO: 219459 - DNA, 15 bp, Homo sapiens
ggtatgaatacaggg

SEQ ID NO: 219460 - DNA, 15 bp, Homo sapiens
aggtatgaatacagg

SEQ ID NO: 219461 - DNA, 15 bp, Homo sapiens
gaggtatgaatacag

SEQ ID NO: 219462 - DNA, 15 bp, Homo sapiens
agaggtatgaataca

SEQ ID NO: 219463 - DNA, 15 bp, Homo sapiens
cagaggtatgaatac

SEQ ID NO: 219464 - DNA, 15 bp, Homo sapiens
acagaggtatgaata

SEQ ID NO: 219465 - DNA, 15 bp, Homo sapiens
tacagaggtatgaat

SEQ ID NO: 219466 - DNA, 15 bp, Homo sapiens
ctacagaggtatgaa

SEQ ID NO: 219467 - DNA, 15 bp, Homo sapiens
actacagaggtatga

SEQ ID NO: 219468 - DNA, 15 bp, Homo sapiens
aactacagaggtatg

SEQ ID NO: 219469 - DNA, 15 bp, Homo sapiens
gaactacagaggtat

SEQ ID NO: 219470 - DNA, 15 bp, Homo sapiens
cgaactacagaggta

SEQ ID NO: 219471 - DNA, 15 bp, Homo sapiens
ccgaactacagaggt

SEQ ID NO: 219472 - DNA, 15 bp, Homo sapiens
cccgaactacagagg

SEQ ID NO: 219473 - DNA, 15 bp, Homo sapiens
gcccgaactacagag

SEQ ID NO: 219474 - DNA, 15 bp, Homo sapiens
agcccgaactacaga

SEQ ID NO: 219475 - DNA, 15 bp, Homo sapiens
gagcccgaactacag

SEQ ID NO: 219476 - DNA, 15 bp, Homo sapiens
agagcccgaactaca

SEQ ID NO: 219477 - DNA, 15 bp, Homo sapiens
cagagcccgaactac

SEQ ID NO: 219478 - DNA, 15 bp, Homo sapiens
gcagagcccgaacta

SEQ ID NO: 219479 - DNA, 15 bp, Homo sapiens
agcagagcccgaact

SEQ ID NO: 219480 - DNA, 15 bp, Homo sapiens
gagcagagcccgaac

SEQ ID NO: 219481 - DNA, 15 bp, Homo sapiens
tgagcagagcccgaa

SEQ ID NO: 219482 - DNA, 15 bp, Homo sapiens
gtgagcagagcccga

SEQ ID NO: 219483 - DNA, 15 bp, Homo sapiens
agtgagcagagcccg

SEQ ID NO: 219484 - DNA, 15 bp, Homo sapiens
aagtgagcagagccc

SEQ ID NO: 219485 - DNA, 15 bp, Homo sapiens
aaagtgagcagagcc

SEQ ID NO: 219486 - DNA, 15 bp, Homo sapiens
gaaagtgagcagagc

SEQ ID NO: 219487 - DNA, 15 bp, Homo sapiens
agaaagtgagcagag

SEQ ID NO: 219488 - DNA, 15 bp, Homo sapiens
tagaaagtgagcaga

SEQ ID NO: 219489 - DNA, 15 bp, Homo sapiens
gtagaaagtgagcag

SEQ ID NO: 219490 - DNA, 15 bp, Homo sapiens
ggtagaaagtgagca

SEQ ID NO: 219491 - DNA, 15 bp, Homo sapiens
aggtagaaagtgagc

SEQ ID NO: 219492 - DNA, 15 bp, Homo sapiens
caggtagaaagtgag

SEQ ID NO: 219493 - DNA, 15 bp, Homo sapiens
ccaggtagaaagtga

SEQ ID NO: 219494 - DNA, 15 bp, Homo sapiens
cccaggtagaaagtg

SEQ ID NO: 219495 - DNA, 15 bp, Homo sapiens
tcccaggtagaaagt

SEQ ID NO: 219496 - DNA, 15 bp, Homo sapiens
atcccaggtagaaag

SEQ ID NO: 219497 - DNA, 15 bp, Homo sapiens
aatcccaggtagaaa

SEQ ID NO: 219498 - DNA, 15 bp, Homo sapiens
aaatcccaggtagaa

SEQ ID NO: 219499 - DNA, 15 bp, Homo sapiens
caaatcccaggtaga

SEQ ID NO: 219500 - DNA, 15 bp, Homo sapiens
tcaaatcccaggtag

SEQ ID NO: 219501 - DNA, 15 bp, Homo sapiens
ctcaaatcccaggta

SEQ ID NO: 219502 - DNA, 15 bp, Homo sapiens
actcaaatcccaggt

SEQ ID NO: 219503 - DNA, 15 bp, Homo sapiens
aactcaaatcccagg

SEQ ID NO: 219504 - DNA, 15 bp, Homo sapiens
caactcaaatcccag

SEQ ID NO: 219505 - DNA, 15 bp, Homo sapiens
ccaactcaaatccca

SEQ ID NO: 219506 - DNA, 15 bp, Homo sapiens
accaactcaaatccc

SEQ ID NO: 219507 - DNA, 15 bp, Homo sapiens
taccaactcaaatcc

SEQ ID NO: 219508 - DNA, 15 bp, Homo sapiens
gtaccaactcaaatc

SEQ ID NO: 219509 - DNA, 15 bp, Homo sapiens
tgtaccaactcaaat

SEQ ID NO: 219510 - DNA, 15 bp, Homo sapiens
atgtaccaactcaaa

SEQ ID NO: 219511 - DNA, 15 bp, Homo sapiens
catgtaccaactcaa

SEQ ID NO: 219512 - DNA, 15 bp, Homo sapiens
gcatgtaccaactca

SEQ ID NO: 219513 - DNA, 15 bp, Homo sapiens
ggcatgtaccaactc

SEQ ID NO: 219514 - DNA, 15 bp, Homo sapiens
aggcatgtaccaact

SEQ ID NO: 219515 - DNA, 15 bp, Homo sapiens
aaggcatgtaccaac

SEQ ID NO: 219516 - DNA, 15 bp, Homo sapiens
gaaggcatgtaccaa

SEQ ID NO: 219517 - DNA, 15 bp, Homo sapiens
agaaggcatgtacca

SEQ ID NO: 219518 - DNA, 15 bp, Homo sapiens
gagaaggcatgtacc

SEQ ID NO: 219519 - DNA, 15 bp, Homo sapiens
tgagaaggcatgtac

SEQ ID NO: 219520 - DNA, 15 bp, Homo sapiens
gtgagaaggcatgta

SEQ ID NO: 219521 - DNA, 15 bp, Homo sapiens
ggtgagaaggcatgt

SEQ ID NO: 219522 - DNA, 15 bp, Homo sapiens
aggtgagaaggcatg

SEQ ID NO: 219523 - DNA, 15 bp, Homo sapiens
taggtgagaaggcat

SEQ ID NO: 219524 - DNA, 15 bp, Homo sapiens
gtaggtgagaaggca

SEQ ID NO: 219525 - DNA, 15 bp, Homo sapiens
agtaggtgagaaggc

SEQ ID NO: 219526 - DNA, 15 bp, Homo sapiens
gagtaggtgagaagg

SEQ ID NO: 219527 - DNA, 15 bp, Homo sapiens
cgagtaggtgagaag

SEQ ID NO: 219528 - DNA, 15 bp, Homo sapiens
gcgagtaggtgagaa

SEQ ID NO: 219529 - DNA, 15 bp, Homo sapiens
ggcgagtaggtgaga

SEQ ID NO: 219530 - DNA, 15 bp, Homo sapiens
aggcgagtaggtgag

SEQ ID NO: 219531 - DNA, 15 bp, Homo sapiens
caggcgagtaggtga

SEQ ID NO: 219532 - DNA, 15 bp, Homo sapiens
ccaggcgagtaggtg

SEQ ID NO: 219533 - DNA, 15 bp, Homo sapiens
tccaggcgagtaggt

SEQ ID NO: 219534 - DNA, 15 bp, Homo sapiens
gtccaggcgagtagg

SEQ ID NO: 219535 - DNA, 15 bp, Homo sapiens
agtccaggcgagtag

SEQ ID NO: 219536 - DNA, 15 bp, Homo sapiens
cagtccaggcgagta

SEQ ID NO: 219537 - DNA, 15 bp, Homo sapiens
ccagtccaggcgagt

SEQ ID NO: 219538 - DNA, 15 bp, Homo sapiens
tccagtccaggcgag

SEQ ID NO: 219539 - DNA, 15 bp, Homo sapiens
gtccagtccaggcga

SEQ ID NO: 219540 - DNA, 15 bp, Homo sapiens
agtccagtccaggcg

SEQ ID NO: 219541 - DNA, 15 bp, Homo sapiens
gagtccagtccaggc

SEQ ID NO: 219542 - DNA, 15 bp, Homo sapiens
agagtccagtccagg

SEQ ID NO: 219543 - DNA, 15 bp, Homo sapiens
gagagtccagtccag

SEQ ID NO: 219544 - DNA, 15 bp, Homo sapiens
ggagagtccagtcca

SEQ ID NO: 219545 - DNA, 15 bp, Homo sapiens
aggagagtccagtcc

SEQ ID NO: 219546 - DNA, 15 bp, Homo sapiens
aaggagagtccagtc

SEQ ID NO: 219547 - DNA, 15 bp, Homo sapiens
aaaggagagtccagt

SEQ ID NO: 219548 - DNA, 15 bp, Homo sapiens
caaaggagagtccag

SEQ ID NO: 219549 - DNA, 15 bp, Homo sapiens
tcaaaggagagtcca

SEQ ID NO: 219550 - DNA, 15 bp, Homo sapiens
ttcaaaggagagtcc

SEQ ID NO: 219551 - DNA, 15 bp, Homo sapiens
cttcaaaggagagtc

SEQ ID NO: 219552 - DNA, 15 bp, Homo sapiens
tcttcaaaggagagt

SEQ ID NO: 219553 - DNA, 15 bp, Homo sapiens
gtcttcaaaggagag

SEQ ID NO: 219554 - DNA, 15 bp, Homo sapiens
tgtcttcaaaggaga

SEQ ID NO: 219555 - DNA, 15 bp, Homo sapiens
ctgtcttcaaaggag

SEQ ID NO: 219556 - DNA, 15 bp, Homo sapiens
cctgtcttcaaagga

SEQ ID NO: 219557 - DNA, 15 bp, Homo sapiens
ccctgtcttcaaagg

SEQ ID NO: 219558 - DNA, 15 bp, Homo sapiens
accctgtcttcaaag

SEQ ID NO: 219559 - DNA, 15 bp, Homo sapiens
gaccctgtcttcaaa

SEQ ID NO: 219560 - DNA, 15 bp, Homo sapiens
cgaccctgtcttcaa

SEQ ID NO: 219561 - DNA, 15 bp, Homo sapiens
tcgaccctgtcttca

SEQ ID NO: 219562 - DNA, 15 bp, Homo sapiens
ctcgaccctgtcttc

SEQ ID NO: 219563 - DNA, 15 bp, Homo sapiens
cctcgaccctgtctt

SEQ ID NO: 219564 - DNA, 15 bp, Homo sapiens
acctcgaccctgtct

SEQ ID NO: 219565 - DNA, 15 bp, Homo sapiens
aacctcgaccctgtc

SEQ ID NO: 219566 - DNA, 15 bp, Homo sapiens
caacctcgaccctgt

SEQ ID NO: 219567 - DNA, 15 bp, Homo sapiens
tcaacctcgaccctg

SEQ ID NO: 219568 - DNA, 15 bp, Homo sapiens
ttcaacctcgaccct

SEQ ID NO: 219569 - DNA, 15 bp, Homo sapiens
cttcaacctcgaccc

SEQ ID NO: 219570 - DNA, 15 bp, Homo sapiens
acttcaacctcgacc

SEQ ID NO: 219571 - DNA, 15 bp, Homo sapiens
gacttcaacctcgac

SEQ ID NO: 219572 - DNA, 15 bp, Homo sapiens
tgacttcaacctcga

SEQ ID NO: 219573 - DNA, 15 bp, Homo sapiens
atgacttcaacctcg

SEQ ID NO: 219574 - DNA, 15 bp, Homo sapiens
gatgacttcaacctc

SEQ ID NO: 219575 - DNA, 15 bp, Homo sapiens
agatgacttcaacct

SEQ ID NO: 219576 - DNA, 15 bp, Homo sapiens
aagatgacttcaacc

SEQ ID NO: 219577 - DNA, 15 bp, Homo sapiens
aaagatgacttcaac

SEQ ID NO: 219578 - DNA, 15 bp, Homo sapiens
caaagatgacttcaa

SEQ ID NO: 219579 - DNA, 15 bp, Homo sapiens
acaaagatgacttca

SEQ ID NO: 219580 - DNA, 15 bp, Homo sapiens
cacaaagatgacttc

SEQ ID NO: 219581 - DNA, 15 bp, Homo sapiens
tcacaaagatgactt

SEQ ID NO: 219582 - DNA, 15 bp, Homo sapiens
gtcacaaagatgact

SEQ ID NO: 219583 - DNA, 15 bp, Homo sapiens
ggtcacaaagatgac

SEQ ID NO: 219584 - DNA, 15 bp, Homo sapiens
gggtcacaaagatga

SEQ ID NO: 219585 - DNA, 15 bp, Homo sapiens
ggggtcacaaagatg

SEQ ID NO: 219586 - DNA, 15 bp, Homo sapiens
aggggtcacaaagat

SEQ ID NO: 219587 - DNA, 15 bp, Homo sapiens
caggggtcacaaaga

SEQ ID NO: 219588 - DNA, 15 bp, Homo sapiens
gcaggggtcacaaag

SEQ ID NO: 219589 - DNA, 15 bp, Homo sapiens
tgcaggggtcacaaa

SEQ ID NO: 219590 - DNA, 15 bp, Homo sapiens
ctgcaggggtcacaa

SEQ ID NO: 219591 - DNA, 15 bp, Homo sapiens
cctgcaggggtcaca

SEQ ID NO: 219592 - DNA, 15 bp, Homo sapiens
ccctgcaggggtcac

SEQ ID NO: 219593 - DNA, 15 bp, Homo sapiens
gccctgcaggggtca

SEQ ID NO: 219594 - DNA, 15 bp, Homo sapiens
tgccctgcaggggtc

SEQ ID NO: 219595 - DNA, 15 bp, Homo sapiens
atgccctgcaggggt

SEQ ID NO: 219596 - DNA, 15 bp, Homo sapiens
aatgccctgcagggg

SEQ ID NO: 219597 - DNA, 15 bp, Homo sapiens
caatgccctgcaggg

SEQ ID NO: 219598 - DNA, 15 bp, Homo sapiens
gcaatgccctgcagg

SEQ ID NO: 219599 - DNA, 15 bp, Homo sapiens
tgcaatgccctgcag

SEQ ID NO: 219600 - DNA, 15 bp, Homo sapiens
gtgcaatgccctgca

SEQ ID NO: 219601 - DNA, 15 bp, Homo sapiens
tgtgcaatgccctgc

SEQ ID NO: 219602 - DNA, 15 bp, Homo sapiens
atgtgcaatgccctg

SEQ ID NO: 219603 - DNA, 15 bp, Homo sapiens
tatgtgcaatgccct

SEQ ID NO: 219604 - DNA, 15 bp, Homo sapiens
ctatgtgcaatgccc

SEQ ID NO: 219605 - DNA, 15 bp, Homo sapiens
gctatgtgcaatgcc

SEQ ID NO: 219606 - DNA, 15 bp, Homo sapiens
tgctatgtgcaatgc

SEQ ID NO: 219607 - DNA, 15 bp, Homo sapiens
ctgctatgtgcaatg

SEQ ID NO: 219608 - DNA, 15 bp, Homo sapiens
tctgctatgtgcaat

SEQ ID NO: 219609 - DNA, 15 bp, Homo sapiens
atctgctatgtgcaa

SEQ ID NO: 219610 - DNA, 15 bp, Homo sapiens
catctgctatgtgca

SEQ ID NO: 219611 - DNA, 15 bp, Homo sapiens
acatctgctatgtgc

SEQ ID NO: 219612 - DNA, 15 bp, Homo sapiens
cacatctgctatgtg

SEQ ID NO: 219613 - DNA, 15 bp, Homo sapiens
tcacatctgctatgt

SEQ ID NO: 219614 - DNA, 15 bp, Homo sapiens
gtcacatctgctatg

SEQ ID NO: 219615 - DNA, 15 bp, Homo sapiens
ggtcacatctgctat

SEQ ID NO: 219616 - DNA, 15 bp, Homo sapiens
aggtcacatctgcta

SEQ ID NO: 219617 - DNA, 15 bp, Homo sapiens
gaggtcacatctgct

SEQ ID NO: 219618 - DNA, 15 bp, Homo sapiens
agaggtcacatctgc

SEQ ID NO: 219619 - DNA, 15 bp, Homo sapiens
gagaggtcacatctg

SEQ ID NO: 219620 - DNA, 15 bp, Homo sapiens
cgagaggtcacatct

SEQ ID NO: 219621 - DNA, 15 bp, Homo sapiens
gcgagaggtcacatc

SEQ ID NO: 219622 - DNA, 15 bp, Homo sapiens
agcgagaggtcacat

SEQ ID NO: 219623 - DNA, 15 bp, Homo sapiens
cagcgagaggtcaca

SEQ ID NO: 219624 - DNA, 15 bp, Homo sapiens
ccagcgagaggtcac

SEQ ID NO: 219625 - DNA, 15 bp, Homo sapiens
accagcgagaggtca

SEQ ID NO: 219626 - DNA, 15 bp, Homo sapiens
caccagcgagaggtc

SEQ ID NO: 219627 - DNA, 15 bp, Homo sapiens
ccaccagcgagaggt

SEQ ID NO: 219628 - DNA, 15 bp, Homo sapiens
accaccagcgagagg

SEQ ID NO: 219629 - DNA, 15 bp, Homo sapiens
gaccaccagcgagag

SEQ ID NO: 219630 - DNA, 15 bp, Homo sapiens
tgaccaccagcgaga

SEQ ID NO: 219631 - DNA, 15 bp, Homo sapiens
ctgaccaccagcgag

SEQ ID NO: 219632 - DNA, 15 bp, Homo sapiens
tctgaccaccagcga

SEQ ID NO: 219633 - DNA, 15 bp, Homo sapiens
atctgaccaccagcg

SEQ ID NO: 219634 - DNA, 15 bp, Homo sapiens
gatctgaccaccagc

SEQ ID NO: 219635 - DNA, 15 bp, Homo sapiens
tgatctgaccaccag

SEQ ID NO: 219636 - DNA, 15 bp, Homo sapiens
ttgatctgaccacca

SEQ ID NO: 219637 - DNA, 15 bp, Homo sapiens
gttgatctgaccacc

SEQ ID NO: 219638 - DNA, 15 bp, Homo sapiens
agttgatctgaccac

SEQ ID NO: 219639 - DNA, 15 bp, Homo sapiens
aagttgatctgacca

SEQ ID NO: 219640 - DNA, 15 bp, Homo sapiens
gaagttgatctgacc

SEQ ID NO: 219641 - DNA, 15 bp, Homo sapiens
tgaagttgatctgac

SEQ ID NO: 219642 - DNA, 15 bp, Homo sapiens
ctgaagttgatctga

SEQ ID NO: 219643 - DNA, 15 bp, Homo sapiens
cctgaagttgatctg

SEQ ID NO: 219644 - DNA, 15 bp, Homo sapiens
ccctgaagttgatct

SEQ ID NO: 219645 - DNA, 15 bp, Homo sapiens
cccctgaagttgatc

SEQ ID NO: 219646 - DNA, 15 bp, Homo sapiens
gcccctgaagttgat

SEQ ID NO: 219647 - DNA, 15 bp, Homo sapiens
tgcccctgaagttga

SEQ ID NO: 219648 - DNA, 15 bp, Homo sapiens
gtgcccctgaagttg

SEQ ID NO: 219649 - DNA, 15 bp, Homo sapiens
tgtgcccctgaagtt

SEQ ID NO: 219650 - DNA, 15 bp, Homo sapiens
ctgtgcccctgaagt

SEQ ID NO: 219651 - DNA, 15 bp, Homo sapiens
cctgtgcccctgaag

SEQ ID NO: 219652 - DNA, 15 bp, Homo sapiens
ccctgtgcccctgaa

SEQ ID NO: 219653 - DNA, 15 bp, Homo sapiens
accctgtgcccctga

SEQ ID NO: 219654 - DNA, 15 bp, Homo sapiens
aaccctgtgcccctg

SEQ ID NO: 219655 - DNA, 15 bp, Homo sapiens
gaaccctgtgcccct

SEQ ID NO: 219656 - DNA, 15 bp, Homo sapiens
ggaaccctgtgcccc

SEQ ID NO: 219657 - DNA, 15 bp, Homo sapiens
aggaaccctgtgccc

SEQ ID NO: 219658 - DNA, 15 bp, Homo sapiens
gaggaaccctgtgcc

SEQ ID NO: 219659 - DNA, 15 bp, Homo sapiens
agaggaaccctgtgc

SEQ ID NO: 219660 - DNA, 15 bp, Homo sapiens
aagaggaaccctgtg

SEQ ID NO: 219661 - DNA, 15 bp, Homo sapiens
aaagaggaaccctgt

SEQ ID NO: 219662 - DNA, 15 bp, Homo sapiens
aaaagaggaaccctg

SEQ ID NO: 219663 - DNA, 15 bp, Homo sapiens
aaaaagaggaaccct

SEQ ID NO: 219664 - DNA, 15 bp, Homo sapiens
taaaaagaggaaccc

SEQ ID NO: 219665 - DNA, 15 bp, Homo sapiens
ataaaaagaggaacc

SEQ ID NO: 219666 - DNA, 15 bp, Homo sapiens
gataaaaagaggaac

SEQ ID NO: 219667 - DNA, 15 bp, Homo sapiens
agataaaaagaggaa

SEQ ID NO: 219668 - DNA, 15 bp, Homo sapiens
cagataaaaagagga

SEQ ID NO: 219669 - DNA, 15 bp, Homo sapiens
gcagataaaaagagg

SEQ ID NO: 219670 - DNA, 15 bp, Homo sapiens
ggcagataaaaagag

SEQ ID NO: 219671 - DNA, 15 bp, Homo sapiens
gggcagataaaaaga

SEQ ID NO: 219672 - DNA, 15 bp, Homo sapiens
cgggcagataaaaag

SEQ ID NO: 219673 - DNA, 15 bp, Homo sapiens
tcgggcagataaaaa

SEQ ID NO: 219674 - DNA, 15 bp, Homo sapiens
atcgggcagataaaa

SEQ ID NO: 219675 - DNA, 15 bp, Homo sapiens
catcgggcagataaa

SEQ ID NO: 219676 - DNA, 15 bp, Homo sapiens
ccatcgggcagataa

SEQ ID NO: 219677 - DNA, 15 bp, Homo sapiens
gccatcgggcagata

SEQ ID NO: 219678 - DNA, 15 bp, Homo sapiens
ggccatcgggcagat

SEQ ID NO: 219679 - DNA, 15 bp, Homo sapiens
aggccatcgggcaga

SEQ ID NO: 219680 - DNA, 15 bp, Homo sapiens
aaggccatcgggcag

SEQ ID NO: 219681 - DNA, 15 bp, Homo sapiens
aaaggccatcgggca

SEQ ID NO: 219682 - DNA, 15 bp, Homo sapiens
caaaggccatcgggc

SEQ ID NO: 219683 - DNA, 15 bp, Homo sapiens
acaaaggccatcggg

SEQ ID NO: 219684 - DNA, 15 bp, Homo sapiens
gacaaaggccatcgg

SEQ ID NO: 219685 - DNA, 15 bp, Homo sapiens
agacaaaggccatcg

SEQ ID NO: 219686 - DNA, 15 bp, Homo sapiens
tagacaaaggccatc

SEQ ID NO: 219687 - DNA, 15 bp, Homo sapiens
ctagacaaaggccat

SEQ ID NO: 219688 - DNA, 15 bp, Homo sapiens
actagacaaaggcca

SEQ ID NO: 219689 - DNA, 15 bp, Homo sapiens
cactagacaaaggcc

SEQ ID NO: 219690 - DNA, 15 bp, Homo sapiens
acactagacaaaggc

SEQ ID NO: 219691 - DNA, 15 bp, Homo sapiens
tacactagacaaagg

SEQ ID NO: 219692 - DNA, 15 bp, Homo sapiens
atacactagacaaag

SEQ ID NO: 219693 - DNA, 15 bp, Homo sapiens
aatacactagacaaa

SEQ ID NO: 219694 - DNA, 15 bp, Homo sapiens
caatacactagacaa

SEQ ID NO: 219695 - DNA, 15 bp, Homo sapiens
gcaatacactagaca

SEQ ID NO: 219696 - DNA, 15 bp, Homo sapiens
agcaatacactagac

SEQ ID NO: 219697 - DNA, 15 bp, Homo sapiens
gagcaatacactaga

SEQ ID NO: 219698 - DNA, 15 bp, Homo sapiens
tgagcaatacactag

SEQ ID NO: 219699 - DNA, 15 bp, Homo sapiens
ctgagcaatacacta

SEQ ID NO: 219700 - DNA, 15 bp, Homo sapiens
cctgagcaatacact

SEQ ID NO: 219701 - DNA, 15 bp, Homo sapiens
tcctgagcaatacac

SEQ ID NO: 219702 - DNA, 15 bp, Homo sapiens
atcctgagcaataca

SEQ ID NO: 219703 - DNA, 15 bp, Homo sapiens
catcctgagcaatac

SEQ ID NO: 219704 - DNA, 15 bp, Homo sapiens
tcatcctgagcaata

SEQ ID NO: 219705 - DNA, 15 bp, Homo sapiens
gtcatcctgagcaat

SEQ ID NO: 219706 - DNA, 15 bp, Homo sapiens
tgtcatcctgagcaa

SEQ ID NO: 219707 - DNA, 15 bp, Homo sapiens
ttgtcatcctgagca

SEQ ID NO: 219708 - DNA, 15 bp, Homo sapiens
attgtcatcctgagc

SEQ ID NO: 219709 - DNA, 15 bp, Homo sapiens
tattgtcatcctgag

SEQ ID NO: 219710 - DNA, 15 bp, Homo sapiens
ttattgtcatcctga

SEQ ID NO: 219711 - DNA, 15 bp, Homo sapiens
cttattgtcatcctg

SEQ ID NO: 219712 - DNA, 15 bp, Homo sapiens
tcttattgtcatcct

SEQ ID NO: 219713 - DNA, 15 bp, Homo sapiens
ctcttattgtcatcc

SEQ ID NO: 219714 - DNA, 15 bp, Homo sapiens
cctcttattgtcatc

SEQ ID NO: 219715 - DNA, 15 bp, Homo sapiens
tcctcttattgtcat

SEQ ID NO: 219716 - DNA, 15 bp, Homo sapiens
ttcctcttattgtca

SEQ ID NO: 219717 - DNA, 15 bp, Homo sapiens
cttcctcttattgtc

SEQ ID NO: 219718 - DNA, 15 bp, Homo sapiens
tcttcctcttattgt

SEQ ID NO: 219719 - DNA, 15 bp, Homo sapiens
atcttcctcttattg

SEQ ID NO: 219720 - DNA, 15 bp, Homo sapiens
aatcttcctcttatt

SEQ ID NO: 219721 - DNA, 15 bp, Homo sapiens
gaatcttcctcttat

SEQ ID NO: 219722 - DNA, 15 bp, Homo sapiens
agaatcttcctctta

SEQ ID NO: 219723 - DNA, 15 bp, Homo sapiens
gagaatcttcctctt

SEQ ID NO: 219724 - DNA, 15 bp, Homo sapiens
ggagaatcttcctct

SEQ ID NO: 219725 - DNA, 15 bp, Homo sapiens
gggagaatcttcctc

SEQ ID NO: 219726 - DNA, 15 bp, Homo sapiens
ggggagaatcttcct

SEQ ID NO: 219727 - DNA, 15 bp, Homo sapiens
gggggagaatcttcc

SEQ ID NO: 219728 - DNA, 15 bp, Homo sapiens
agggggagaatcttc

SEQ ID NO: 219729 - DNA, 15 bp, Homo sapiens
cagggggagaatctt

SEQ ID NO: 219730 - DNA, 15 bp, Homo sapiens
acagggggagaatct

SEQ ID NO: 219731 - DNA, 15 bp, Homo sapiens
aacagggggagaatc

SEQ ID NO: 219732 - DNA, 15 bp, Homo sapiens
aaacagggggagaat

SEQ ID NO: 219733 - DNA, 15 bp, Homo sapiens
taaacagggggagaa

SEQ ID NO: 219734 - DNA, 15 bp, Homo sapiens
ttaaacagggggaga

SEQ ID NO: 219735 - DNA, 15 bp, Homo sapiens
attaaacagggggag

SEQ ID NO: 219736 - DNA, 15 bp, Homo sapiens
aattaaacaggggga

SEQ ID NO: 219737 - DNA, 15 bp, Homo sapiens
gaattaaacaggggg

SEQ ID NO: 219738 - DNA, 15 bp, Homo sapiens
ggaattaaacagggg

SEQ ID NO: 219739 - DNA, 15 bp, Homo sapiens
cggaattaaacaggg

SEQ ID NO: 219740 - DNA, 15 bp, Homo sapiens
ccggaattaaacagg

SEQ ID NO: 219741 - DNA, 15 bp, Homo sapiens
cccggaattaaacag

SEQ ID NO: 219742 - DNA, 15 bp, Homo sapiens
tcccggaattaaaca

SEQ ID NO: 219743 - DNA, 15 bp, Homo sapiens
atcccggaattaaac

SEQ ID NO: 219744 - DNA, 15 bp, Homo sapiens
catcccggaattaaa

SEQ ID NO: 219745 - DNA, 15 bp, Homo sapiens
acatcccggaattaa

SEQ ID NO: 219746 - DNA, 15 bp, Homo sapiens
gacatcccggaatta

SEQ ID NO: 219747 - DNA, 15 bp, Homo sapiens
tgacatcccggaatt

SEQ ID NO: 219748 - DNA, 15 bp, Homo sapiens
gtgacatcccggaat

SEQ ID NO: 219749 - DNA, 15 bp, Homo sapiens
agtgacatcccggaa

SEQ ID NO: 219750 - DNA, 15 bp, Homo sapiens
cagtgacatcccgga

SEQ ID NO: 219751 - DNA, 15 bp, Homo sapiens
ccagtgacatcccgg

SEQ ID NO: 219752 - DNA, 15 bp, Homo sapiens
accagtgacatcccg

SEQ ID NO: 219753 - DNA, 15 bp, Homo sapiens
gaccagtgacatccc

SEQ ID NO: 219754 - DNA, 15 bp, Homo sapiens
tgaccagtgacatcc

SEQ ID NO: 219755 - DNA, 15 bp, Homo sapiens
ctgaccagtgacatc

SEQ ID NO: 219756 - DNA, 15 bp, Homo sapiens
cctgaccagtgacat

SEQ ID NO: 219757 - DNA, 15 bp, Homo sapiens
gcctgaccagtgaca

SEQ ID NO: 219758 - DNA, 15 bp, Homo sapiens
agcctgaccagtgac

SEQ ID NO: 219759 - DNA, 15 bp, Homo sapiens
gagcctgaccagtga

SEQ ID NO: 219760 - DNA, 15 bp, Homo sapiens
ggagcctgaccagtg

SEQ ID NO: 219761 - DNA, 15 bp, Homo sapiens
aggagcctgaccagt

SEQ ID NO: 219762 - DNA, 15 bp, Homo sapiens
gaggagcctgaccag

SEQ ID NO: 219763 - DNA, 15 bp, Homo sapiens
agaggagcctgacca

SEQ ID NO: 219764 - DNA, 15 bp, Homo sapiens
aagaggagcctgacc

SEQ ID NO: 219765 - DNA, 15 bp, Homo sapiens
caagaggagcctgac

SEQ ID NO: 219766 - DNA, 15 bp, Homo sapiens
acaagaggagcctga

SEQ ID NO: 219767 - DNA, 15 bp, Homo sapiens
tacaagaggagcctg

SEQ ID NO: 219768 - DNA, 15 bp, Homo sapiens
atacaagaggagcct

SEQ ID NO: 219769 - DNA, 15 bp, Homo sapiens
gatacaagaggagcc

SEQ ID NO: 219770 - DNA, 15 bp, Homo sapiens
agatacaagaggagc

SEQ ID NO: 219771 - DNA, 15 bp, Homo sapiens
gagatacaagaggag

SEQ ID NO: 219772 - DNA, 15 bp, Homo sapiens
tgagatacaagagga

SEQ ID NO: 219773 - DNA, 15 bp, Homo sapiens
ctgagatacaagagg

SEQ ID NO: 219774 - DNA, 15 bp, Homo sapiens
cctgagatacaagag

SEQ ID NO: 219775 - DNA, 15 bp, Homo sapiens
ccctgagatacaaga

SEQ ID NO: 219776 - DNA, 15 bp, Homo sapiens
cccctgagatacaag

SEQ ID NO: 219777 - DNA, 15 bp, Homo sapiens
acccctgagatacaa

SEQ ID NO: 219778 - DNA, 15 bp, Homo sapiens
gacccctgagataca

SEQ ID NO: 219779 - DNA, 15 bp, Homo sapiens
ggacccctgagatac

SEQ ID NO: 219780 - DNA, 15 bp, Homo sapiens
tggacccctgagata

SEQ ID NO: 219781 - DNA, 15 bp, Homo sapiens
ctggacccctgagat

SEQ ID NO: 219782 - DNA, 15 bp, Homo sapiens
cctggacccctgaga

SEQ ID NO: 219783 - DNA, 15 bp, Homo sapiens
ccctggacccctgag

SEQ ID NO: 219784 - DNA, 15 bp, Homo sapiens
gccctggacccctga

SEQ ID NO: 219785 - DNA, 15 bp, Homo sapiens
agccctggacccctg

SEQ ID NO: 219786 - DNA, 15 bp, Homo sapiens
cagccctggacccct

SEQ ID NO: 219787 - DNA, 15 bp, Homo sapiens
tcagccctggacccc

SEQ ID NO: 219788 - DNA, 15 bp, Homo sapiens
ctcagccctggaccc

SEQ ID NO: 219789 - DNA, 15 bp, Homo sapiens
cctcagccctggacc

SEQ ID NO: 219790 - DNA, 15 bp, Homo sapiens
ccctcagccctggac

SEQ ID NO: 219791 - DNA, 15 bp, Homo sapiens
gccctcagccctgga

SEQ ID NO: 219792 - DNA, 15 bp, Homo sapiens
agccctcagccctgg

SEQ ID NO: 219793 - DNA, 15 bp, Homo sapiens
cagccctcagccctg

SEQ ID NO: 219794 - DNA, 15 bp, Homo sapiens
acagccctcagccct

SEQ ID NO: 219795 - DNA, 15 bp, Homo sapiens
cacagccctcagccc

SEQ ID NO: 219796 - DNA, 15 bp, Homo sapiens
ccacagccctcagcc

SEQ ID NO: 219797 - DNA, 15 bp, Homo sapiens
gccacagccctcagc

SEQ ID NO: 219798 - DNA, 15 bp, Homo sapiens
agccacagccctcag

SEQ ID NO: 219799 - DNA, 15 bp, Homo sapiens
aagccacagccctca

SEQ ID NO: 219800 - DNA, 15 bp, Homo sapiens
gaagccacagccctc

SEQ ID NO: 219801 - DNA, 15 bp, Homo sapiens
tgaagccacagccct

SEQ ID NO: 219802 - DNA, 15 bp, Homo sapiens
ctgaagccacagccc

SEQ ID NO: 219803 - DNA, 15 bp, Homo sapiens
gctgaagccacagcc

SEQ ID NO: 219804 - DNA, 15 bp, Homo sapiens
agctgaagccacagc

SEQ ID NO: 219805 - DNA, 15 bp, Homo sapiens
cagctgaagccacag

SEQ ID NO: 219806 - DNA, 15 bp, Homo sapiens
tcagctgaagccaca

SEQ ID NO: 219807 - DNA, 15 bp, Homo sapiens
ctcagctgaagccac

SEQ ID NO: 219808 - DNA, 15 bp, Homo sapiens
cctcagctgaagcca

SEQ ID NO: 219809 - DNA, 15 bp, Homo sapiens
gcctcagctgaagcc

SEQ ID NO: 219810 - DNA, 15 bp, Homo sapiens
agcctcagctgaagc

SEQ ID NO: 219811 - DNA, 15 bp, Homo sapiens
gagcctcagctgaag

SEQ ID NO: 219812 - DNA, 15 bp, Homo sapiens
agagcctcagctgaa

SEQ ID NO: 219813 - DNA, 15 bp, Homo sapiens
tagagcctcagctga

SEQ ID NO: 219814 - DNA, 15 bp, Homo sapiens
ctagagcctcagctg

SEQ ID NO: 219815 - DNA, 15 bp, Homo sapiens
cctagagcctcagct

SEQ ID NO: 219816 - DNA, 15 bp, Homo sapiens
gcctagagcctcagc

SEQ ID NO: 219817 - DNA, 15 bp, Homo sapiens
agcctagagcctcag

SEQ ID NO: 219818 - DNA, 15 bp, Homo sapiens
tagcctagagcctca

SEQ ID NO: 219819 - DNA, 15 bp, Homo sapiens
ttagcctagagcctc

SEQ ID NO: 219820 - DNA, 15 bp, Homo sapiens
cttagcctagagcct

SEQ ID NO: 219821 - DNA, 15 bp, Homo sapiens
gcttagcctagagcc

SEQ ID NO: 219822 - DNA, 15 bp, Homo sapiens
ggcttagcctagagc

SEQ ID NO: 219823 - DNA, 15 bp, Homo sapiens
tggcttagcctagag

SEQ ID NO: 219824 - DNA, 15 bp, Homo sapiens
ctggcttagcctaga

SEQ ID NO: 219825 - DNA, 15 bp, Homo sapiens
actggcttagcctag

SEQ ID NO: 219826 - DNA, 15 bp, Homo sapiens
tactggcttagccta

SEQ ID NO: 219827 - DNA, 15 bp, Homo sapiens
ctactggcttagcct

SEQ ID NO: 219828 - DNA, 15 bp, Homo sapiens
cctactggcttagcc

SEQ ID NO: 219829 - DNA, 15 bp, Homo sapiens
ccctactggcttagc

SEQ ID NO: 219830 - DNA, 15 bp, Homo sapiens
gccctactggcttag

SEQ ID NO: 219831 - DNA, 15 bp, Homo sapiens
agccctactggctta

SEQ ID NO: 219832 - DNA, 15 bp, Homo sapiens
aagccctactggctt

SEQ ID NO: 219833 - DNA, 15 bp, Homo sapiens
caagccctactggct

SEQ ID NO: 219834 - DNA, 15 bp, Homo sapiens
acaagccctactggc

SEQ ID NO: 219835 - DNA, 15 bp, Homo sapiens
cacaagccctactgg

SEQ ID NO: 219836 - DNA, 15 bp, Homo sapiens
acacaagccctactg

SEQ ID NO: 219837 - DNA, 15 bp, Homo sapiens
gacacaagccctact

SEQ ID NO: 219838 - DNA, 15 bp, Homo sapiens
agacacaagccctac

SEQ ID NO: 219839 - DNA, 15 bp, Homo sapiens
aagacacaagcccta

SEQ ID NO: 219840 - DNA, 15 bp, Homo sapiens
caagacacaagccct

SEQ ID NO: 219841 - DNA, 15 bp, Homo sapiens
acaagacacaagccc

SEQ ID NO: 219842 - DNA, 15 bp, Homo sapiens
tacaagacacaagcc

SEQ ID NO: 219843 - DNA, 15 bp, Homo sapiens
atacaagacacaagc

SEQ ID NO: 219844 - DNA, 15 bp, Homo sapiens
aatacaagacacaag

SEQ ID NO: 219845 - DNA, 15 bp, Homo sapiens
taatacaagacacaa

SEQ ID NO: 219846 - DNA, 15 bp, Homo sapiens
ataatacaagacaca

SEQ ID NO: 219847 - DNA, 15 bp, Homo sapiens
aataatacaagacac

SEQ ID NO: 219848 - DNA, 15 bp, Homo sapiens
gaataatacaagaca

SEQ ID NO: 219849 - DNA, 15 bp, Homo sapiens
agaataatacaagac

SEQ ID NO: 219850 - DNA, 15 bp, Homo sapiens
cagaataatacaaga

SEQ ID NO: 219851 - DNA, 15 bp, Homo sapiens
acagaataatacaag

SEQ ID NO: 219852 - DNA, 15 bp, Homo sapiens
aacagaataatacaa

SEQ ID NO: 219853 - DNA, 15 bp, Homo sapiens
gaacagaataataca

SEQ ID NO: 219854 - DNA, 15 bp, Homo sapiens
agaacagaataatac

SEQ ID NO: 219855 - DNA, 15 bp, Homo sapiens
gagaacagaataata

SEQ ID NO: 219856 - DNA, 15 bp, Homo sapiens
tgagaacagaataat

SEQ ID NO: 219857 - DNA, 15 bp, Homo sapiens
atgagaacagaataa

SEQ ID NO: 219858 - DNA, 15 bp, Homo sapiens
catgagaacagaata

SEQ ID NO: 219859 - DNA, 15 bp, Homo sapiens
gcatgagaacagaat

SEQ ID NO: 219860 - DNA, 15 bp, Homo sapiens
agcatgagaacagaa

SEQ ID NO: 219861 - DNA, 15 bp, Homo sapiens
cagcatgagaacaga

SEQ ID NO: 219862 - DNA, 15 bp, Homo sapiens
gcagcatgagaacag

SEQ ID NO: 219863 - DNA, 15 bp, Homo sapiens
agcagcatgagaaca

SEQ ID NO: 219864 - DNA, 15 bp, Homo sapiens
tagcagcatgagaac

SEQ ID NO: 219865 - DNA, 15 bp, Homo sapiens
ctagcagcatgagaa

SEQ ID NO: 219866 - DNA, 15 bp, Homo sapiens
actagcagcatgaga

SEQ ID NO: 219867 - DNA, 15 bp, Homo sapiens
tactagcagcatgag

SEQ ID NO: 219868 - DNA, 15 bp, Homo sapiens
ttactagcagcatga

SEQ ID NO: 219869 - DNA, 15 bp, Homo sapiens
tttactagcagcatg

SEQ ID NO: 219870 - DNA, 15 bp, Homo sapiens
ctttactagcagcat

SEQ ID NO: 219871 - DNA, 15 bp, Homo sapiens
tctttactagcagca

SEQ ID NO: 219872 - DNA, 15 bp, Homo sapiens
gtctttactagcagc

SEQ ID NO: 219873 - DNA, 15 bp, Homo sapiens
tgtctttactagcag

SEQ ID NO: 219874 - DNA, 15 bp, Homo sapiens
atgtctttactagca

SEQ ID NO: 219875 - DNA, 15 bp, Homo sapiens
tatgtctttactagc

SEQ ID NO: 219876 - DNA, 15 bp, Homo sapiens
gtatgtctttactag

SEQ ID NO: 219877 - DNA, 15 bp, Homo sapiens
ggtatgtctttacta

SEQ ID NO: 219878 - DNA, 15 bp, Homo sapiens
aggtatgtctttact

SEQ ID NO: 219879 - DNA, 15 bp, Homo sapiens
caggtatgtctttac

SEQ ID NO: 219880 - DNA, 15 bp, Homo sapiens
ctacccagtctcagg

SEQ ID NO: 219881 - DNA, 15 bp, Homo sapiens
actacccagtctcag

SEQ ID NO: 219882 - DNA, 15 bp, Homo sapiens
aactacccagtctca

SEQ ID NO: 219883 - DNA, 15 bp, Homo sapiens
aaactacccagtctc

SEQ ID NO: 219884 - DNA, 15 bp, Homo sapiens
gaaactacccagtct

SEQ ID NO: 219885 - DNA, 15 bp, Homo sapiens
ggaaactacccagtc

SEQ ID NO: 219886 - DNA, 15 bp, Homo sapiens
tggaaactacccagt

SEQ ID NO: 219887 - DNA, 15 bp, Homo sapiens
ttggaaactacccag

SEQ ID NO: 219888 - DNA, 15 bp, Homo sapiens
tttggaaactaccca

SEQ ID NO: 219889 - DNA, 15 bp, Homo sapiens
ctttggaaactaccc

SEQ ID NO: 219890 - DNA, 15 bp, Homo sapiens
cctttggaaactacc

SEQ ID NO: 219891 - DNA, 15 bp, Homo sapiens
tcctttggaaactac

SEQ ID NO: 219892 - DNA, 15 bp, Homo sapiens
ttcctttggaaacta

SEQ ID NO: 219893 - DNA, 15 bp, Homo sapiens
tttcctttggaaact

SEQ ID NO: 219894 - DNA, 15 bp, Homo sapiens
ctttcctttggaaac

SEQ ID NO: 219895 - DNA, 15 bp, Homo sapiens
tctttcctttggaaa

SEQ ID NO: 219896 - DNA, 15 bp, Homo sapiens
ctctttcctttggaa

SEQ ID NO: 219897 - DNA, 15 bp, Homo sapiens
cctctttcctttgga

SEQ ID NO: 219898 - DNA, 15 bp, Homo sapiens
acctctttcctttgg

SEQ ID NO: 219899 - DNA, 15 bp, Homo sapiens
aacctctttcctttg

SEQ ID NO: 219900 - DNA, 15 bp, Homo sapiens
ccattaaacctcttt

SEQ ID NO: 219901 - DNA, 15 bp, Homo sapiens
tccattaaacctctt

SEQ ID NO: 219902 - DNA, 15 bp, Homo sapiens
gtccattaaacctct

SEQ ID NO: 219903 - DNA, 15 bp, Homo sapiens
agtccattaaacctc

SEQ ID NO: 219904 - DNA, 15 bp, Homo sapiens
gagtccattaaacct

SEQ ID NO: 219905 - DNA, 15 bp, Homo sapiens
tgagtccattaaacc

SEQ ID NO: 219906 - DNA, 15 bp, Homo sapiens
gtgagtccattaaac

SEQ ID NO: 219907 - DNA, 15 bp, Homo sapiens
tgtgagtccattaaa

SEQ ID NO: 219908 - DNA, 15 bp, Homo sapiens
ctgtgagtccattaa

SEQ ID NO: 219909 - DNA, 15 bp, Homo sapiens
actgtgagtccatta

SEQ ID NO: 219910 - DNA, 15 bp, Homo sapiens
aactgtgagtccatt

SEQ ID NO: 219911 - DNA, 15 bp, Homo sapiens
gaactgtgagtccat

SEQ ID NO: 219912 - DNA, 15 bp, Homo sapiens
ggaactgtgagtcca

SEQ ID NO: 219913 - DNA, 15 bp, Homo sapiens
tggaactgtgagtcc

SEQ ID NO: 219914 - DNA, 15 bp, Homo sapiens
gtggaactgtgagtc

SEQ ID NO: 219915 - DNA, 15 bp, Homo sapiens
tgtggaactgtgagt

SEQ ID NO: 219916 - DNA, 15 bp, Homo sapiens
atgtggaactgtgag

SEQ ID NO: 219917 - DNA, 15 bp, Homo sapiens
catgtggaactgtga

SEQ ID NO: 219918 - DNA, 15 bp, Homo sapiens
ccatgtggaactgtg

SEQ ID NO: 219919 - DNA, 15 bp, Homo sapiens
gccatgtggaactgt

SEQ ID NO: 219920 - DNA, 15 bp, Homo sapiens
agccatgtggaactg

SEQ ID NO: 219921 - DNA, 15 bp, Homo sapiens
cagccatgtggaact

SEQ ID NO: 219922 - DNA, 15 bp, Homo sapiens
ccagccatgtggaac

SEQ ID NO: 219923 - DNA, 15 bp, Homo sapiens
cccagccatgtggaa

SEQ ID NO: 219924 - DNA, 15 bp, Homo sapiens
ccccagccatgtgga

SEQ ID NO: 219925 - DNA, 15 bp, Homo sapiens
tccccagccatgtgg

SEQ ID NO: 219926 - DNA, 15 bp, Homo sapiens
ttccccagccatgtg

SEQ ID NO: 219927 - DNA, 15 bp, Homo sapiens
cttccccagccatgt

SEQ ID NO: 219928 - DNA, 15 bp, Homo sapiens
gcttccccagccatg

SEQ ID NO: 219929 - DNA, 15 bp, Homo sapiens
ggcttccccagccat

SEQ ID NO: 219930 - DNA, 15 bp, Homo sapiens
aggcttccccagcca

SEQ ID NO: 219931 - DNA, 15 bp, Homo sapiens
gaggcttccccagcc

SEQ ID NO: 219932 - DNA, 15 bp, Homo sapiens
tgaggcttccccagc

SEQ ID NO: 219933 - DNA, 15 bp, Homo sapiens
gtgaggcttccccag

SEQ ID NO: 219934 - DNA, 15 bp, Homo sapiens
tgtgaggcttcccca

SEQ ID NO: 219935 - DNA, 15 bp, Homo sapiens
ttgtgaggcttcccc

SEQ ID NO: 219936 - DNA, 15 bp, Homo sapiens
attgtgaggcttccc

SEQ ID NO: 219937 - DNA, 15 bp, Homo sapiens
gattgtgaggcttcc

SEQ ID NO: 219938 - DNA, 15 bp, Homo sapiens
tgattgtgaggcttc

SEQ ID NO: 219939 - DNA, 15 bp, Homo sapiens
atgattgtgaggctt

SEQ ID NO: 219940 - DNA, 15 bp, Homo sapiens
catgattgtgaggct

SEQ ID NO: 219941 - DNA, 15 bp, Homo sapiens
tgccatgattgtgag

SEQ ID NO: 219942 - DNA, 15 bp, Homo sapiens
ctgccatgattgtga

SEQ ID NO: 219943 - DNA, 15 bp, Homo sapiens
tctgccatgattgtg

SEQ ID NO: 219944 - DNA, 15 bp, Homo sapiens
ttctgccatgattgt

SEQ ID NO: 219945 - DNA, 15 bp, Homo sapiens
cttctgccatgattg

SEQ ID NO: 219946 - DNA, 15 bp, Homo sapiens
ccttctgccatgatt

SEQ ID NO: 219947 - DNA, 15 bp, Homo sapiens
accttctgccatgat

SEQ ID NO: 219948 - DNA, 15 bp, Homo sapiens
taccttctgccatga

SEQ ID NO: 219949 - DNA, 15 bp, Homo sapiens
ttaccttctgccatg

SEQ ID NO: 219950 - DNA, 15 bp, Homo sapiens
tttaccttctgccat

SEQ ID NO: 219951 - DNA, 15 bp, Homo sapiens
atttaccttctgcca

SEQ ID NO: 219952 - DNA, 15 bp, Homo sapiens
catttaccttctgcc

SEQ ID NO: 219953 - DNA, 15 bp, Homo sapiens
tcatttaccttctgc

SEQ ID NO: 219954 - DNA, 15 bp, Homo sapiens
ctcatttaccttctg

SEQ ID NO: 219955 - DNA, 15 bp, Homo sapiens
cctcatttaccttct

SEQ ID NO: 219956 - DNA, 15 bp, Homo sapiens
tcctcatttaccttc

SEQ ID NO: 219957 - DNA, 15 bp, Homo sapiens
ctcctcatttacctt

SEQ ID NO: 219958 - DNA, 15 bp, Homo sapiens
gctcctcatttacct

SEQ ID NO: 219959 - DNA, 15 bp, Homo sapiens
tgctcctcatttacc

SEQ ID NO: 219960 - DNA, 15 bp, Homo sapiens
ttgctcctcatttac

SEQ ID NO: 219961 - DNA, 15 bp, Homo sapiens
tttgctcctcattta

SEQ ID NO: 219962 - DNA, 15 bp, Homo sapiens
ctttgctcctcattt

SEQ ID NO: 219963 - DNA, 15 bp, Homo sapiens
actttgctcctcatt

SEQ ID NO: 219964 - DNA, 15 bp, Homo sapiens
gactttgctcctcat

SEQ ID NO: 219965 - DNA, 15 bp, Homo sapiens
tgactttgctcctca

SEQ ID NO: 219966 - DNA, 15 bp, Homo sapiens
gtgactttgctcctc

SEQ ID NO: 219967 - DNA, 15 bp, Homo sapiens
tgtgactttgctcct

SEQ ID NO: 219968 - DNA, 15 bp, Homo sapiens
atgtgactttgctcc

SEQ ID NO: 219969 - DNA, 15 bp, Homo sapiens
gatgtgactttgctc

SEQ ID NO: 219970 - DNA, 15 bp, Homo sapiens
agatgtgactttgct

SEQ ID NO: 219971 - DNA, 15 bp, Homo sapiens
aagatgtgactttgc

SEQ ID NO: 219972 - DNA, 15 bp, Homo sapiens
taagatgtgactttg

SEQ ID NO: 219973 - DNA, 15 bp, Homo sapiens
gtaagatgtgacttt

SEQ ID NO: 219974 - DNA, 15 bp, Homo sapiens
tgtaagatgtgactt

SEQ ID NO: 219975 - DNA, 15 bp, Homo sapiens
atgtaagatgtgact

SEQ ID NO: 219976 - DNA, 15 bp, Homo sapiens
catgtaagatgtgac

SEQ ID NO: 219977 - DNA, 15 bp, Homo sapiens
ccatgtaagatgtga

SEQ ID NO: 219978 - DNA, 15 bp, Homo sapiens
gccatgtaagatgtg

SEQ ID NO: 219979 - DNA, 15 bp, Homo sapiens
tgccatgtaagatgt

SEQ ID NO: 219980 - DNA, 15 bp, Homo sapiens
ctgccatgtaagatg

SEQ ID NO: 219981 - DNA, 15 bp, Homo sapiens
gctgccatgtaagat

SEQ ID NO: 219982 - DNA, 15 bp, Homo sapiens
tgctgccatgtaaga

SEQ ID NO: 219983 - DNA, 15 bp, Homo sapiens
ctgctgccatgtaag

SEQ ID NO: 219984 - DNA, 15 bp, Homo sapiens
cctgctgccatgtaa

SEQ ID NO: 219985 - DNA, 15 bp, Homo sapiens
acctgctgccatgta

SEQ ID NO: 219986 - DNA, 15 bp, Homo sapiens
tacctgctgccatgt

SEQ ID NO: 219987 - DNA, 15 bp, Homo sapiens
ttacctgctgccatg

SEQ ID NO: 219988 - DNA, 15 bp, Homo sapiens
cttacctgctgccat

SEQ ID NO: 219989 - DNA, 15 bp, Homo sapiens
tcttacctgctgcca

SEQ ID NO: 219990 - DNA, 15 bp, Homo sapiens
ttcttacctgctgcc

SEQ ID NO: 219991 - DNA, 15 bp, Homo sapiens
cttcttacctgctgc

SEQ ID NO: 219992 - DNA, 15 bp, Homo sapiens
ccttcttacctgctg

SEQ ID NO: 219993 - DNA, 15 bp, Homo sapiens
gccttcttacctgct

SEQ ID NO: 219994 - DNA, 15 bp, Homo sapiens
tgccttcttacctgc

SEQ ID NO: 219995 - DNA, 15 bp, Homo sapiens
atgccttcttacctg

SEQ ID NO: 219996 - DNA, 15 bp, Homo sapiens
catgccttcttacct

SEQ ID NO: 219997 - DNA, 15 bp, Homo sapiens
acatgccttcttacc

SEQ ID NO: 219998 - DNA, 15 bp, Homo sapiens
cacatgccttcttac

SEQ ID NO: 219999 - DNA, 15 bp, Homo sapiens
gcacatgccttctta

SEQ ID NO: 220000 - DNA, 15 bp, Homo sapiens
tgcacatgccttctt

SEQ ID NO: 220001 - DNA, 15 bp, Homo sapiens
ctgcacatgccttct

SEQ ID NO: 220002 - DNA, 15 bp, Homo sapiens
cctgcacatgccttc

SEQ ID NO: 220003 - DNA, 15 bp, Homo sapiens
ccctgcacatgcctt

SEQ ID NO: 220004 - DNA, 15 bp, Homo sapiens
cccctgcacatgcct

SEQ ID NO: 220005 - DNA, 15 bp, Homo sapiens
tcccctgcacatgcc

SEQ ID NO: 220006 - DNA, 15 bp, Homo sapiens
ttcccctgcacatgc

SEQ ID NO: 220007 - DNA, 15 bp, Homo sapiens
gttcccctgcacatg

SEQ ID NO: 220008 - DNA, 15 bp, Homo sapiens
agttcccctgcacat

SEQ ID NO: 220009 - DNA, 15 bp, Homo sapiens
gagttcccctgcaca

SEQ ID NO: 220010 - DNA, 15 bp, Homo sapiens
ggagttcccctgcac

SEQ ID NO: 220011 - DNA, 15 bp, Homo sapiens
gggagttcccctgca

SEQ ID NO: 220012 - DNA, 15 bp, Homo sapiens
ggggagttcccctgc

SEQ ID NO: 220013 - DNA, 15 bp, Homo sapiens
aggggagttcccctg

SEQ ID NO: 220014 - DNA, 15 bp, Homo sapiens
aaggggagttcccct

SEQ ID NO: 220015 - DNA, 15 bp, Homo sapiens
taaggggagttcccc

SEQ ID NO: 220016 - DNA, 15 bp, Homo sapiens
ttaaggggagttccc

SEQ ID NO: 220017 - DNA, 15 bp, Homo sapiens
attaaggggagttcc

SEQ ID NO: 220018 - DNA, 15 bp, Homo sapiens
tattaaggggagttc

SEQ ID NO: 220019 - DNA, 15 bp, Homo sapiens
ttattaaggggagtt

SEQ ID NO: 220020 - DNA, 15 bp, Homo sapiens
tttattaaggggagt

SEQ ID NO: 220021 - DNA, 15 bp, Homo sapiens
ttttattaaggggag

SEQ ID NO: 220022 - DNA, 15 bp, Homo sapiens
gttttattaagggga

SEQ ID NO: 220023 - DNA, 15 bp, Homo sapiens
ggttttattaagggg

SEQ ID NO: 220024 - DNA, 15 bp, Homo sapiens
tggttttattaaggg

SEQ ID NO: 220025 - DNA, 15 bp, Homo sapiens
atggttttattaagg

SEQ ID NO: 220026 - DNA, 15 bp, Homo sapiens
gatggttttattaag

SEQ ID NO: 220027 - DNA, 15 bp, Homo sapiens
tgatggttttattaa

SEQ ID NO: 220028 - DNA, 15 bp, Homo sapiens
ctgatggttttatta

SEQ ID NO: 220029 - DNA, 15 bp, Homo sapiens
tctgatggttttatt

SEQ ID NO: 220030 - DNA, 15 bp, Homo sapiens
catgagatctgatgg

SEQ ID NO: 220031 - DNA, 15 bp, Homo sapiens
tcatgagatctgatg

SEQ ID NO: 220032 - DNA, 15 bp, Homo sapiens
ctcatgagatctgat

SEQ ID NO: 220033 - DNA, 15 bp, Homo sapiens
tctcatgagatctga

SEQ ID NO: 220034 - DNA, 15 bp, Homo sapiens
gtctcatgagatctg

SEQ ID NO: 220035 - DNA, 15 bp, Homo sapiens
ggtctcatgagatct

SEQ ID NO: 220036 - DNA, 15 bp, Homo sapiens
aggtctcatgagatc

SEQ ID NO: 220037 - DNA, 15 bp, Homo sapiens
taggtctcatgagat

SEQ ID NO: 220038 - DNA, 15 bp, Homo sapiens
ataggtctcatgaga

SEQ ID NO: 220039 - DNA, 15 bp, Homo sapiens
aataggtctcatgag

SEQ ID NO: 220040 - DNA, 15 bp, Homo sapiens
gaataggtctcatga

SEQ ID NO: 220041 - DNA, 15 bp, Homo sapiens
tgaataggtctcatg

SEQ ID NO: 220042 - DNA, 15 bp, Homo sapiens
gtgaataggtctcat

SEQ ID NO: 220043 - DNA, 15 bp, Homo sapiens
agtgaataggtctca

SEQ ID NO: 220044 - DNA, 15 bp, Homo sapiens
tagtgaataggtctc

SEQ ID NO: 220045 - DNA, 15 bp, Homo sapiens
atagtgaataggtct

SEQ ID NO: 220046 - DNA, 15 bp, Homo sapiens
tatagtgaataggtc

SEQ ID NO: 220047 - DNA, 15 bp, Homo sapiens
ttatagtgaataggt

SEQ ID NO: 220048 - DNA, 15 bp, Homo sapiens
attatagtgaatagg

SEQ ID NO: 220049 - DNA, 15 bp, Homo sapiens
cattatagtgaatag

SEQ ID NO: 220050 - DNA, 15 bp, Homo sapiens
tcattatagtgaata

SEQ ID NO: 220051 - DNA, 15 bp, Homo sapiens
ctcattatagtgaat

SEQ ID NO: 220052 - DNA, 15 bp, Homo sapiens
tctcattatagtgaa

SEQ ID NO: 220053 - DNA, 15 bp, Homo sapiens
ttctcattatagtga

SEQ ID NO: 220054 - DNA, 15 bp, Homo sapiens
gttctcattatagtg

SEQ ID NO: 220055 - DNA, 15 bp, Homo sapiens
tgttctcattatagt

SEQ ID NO: 220056 - DNA, 15 bp, Homo sapiens
ctgttctcattatag

SEQ ID NO: 220057 - DNA, 15 bp, Homo sapiens
actgttctcattata

SEQ ID NO: 220058 - DNA, 15 bp, Homo sapiens
tactgttctcattat

SEQ ID NO: 220059 - DNA, 15 bp, Homo sapiens
atactgttctcatta

SEQ ID NO: 220060 - DNA, 15 bp, Homo sapiens
catactgttctcatt

SEQ ID NO: 220061 - DNA, 15 bp, Homo sapiens
ccatactgttctcat

SEQ ID NO: 220062 - DNA, 15 bp, Homo sapiens
cccatactgttctca

SEQ ID NO: 220063 - DNA, 15 bp, Homo sapiens
tcccatactgttctc

SEQ ID NO: 220064 - DNA, 15 bp, Homo sapiens
ttcccatactgttct

SEQ ID NO: 220065 - DNA, 15 bp, Homo sapiens
tttcccatactgttc

SEQ ID NO: 220066 - DNA, 15 bp, Homo sapiens
ttttcccatactgtt

SEQ ID NO: 220067 - DNA, 15 bp, Homo sapiens
tttttcccatactgt

SEQ ID NO: 220068 - DNA, 15 bp, Homo sapiens
gtttttcccatactg

SEQ ID NO: 220069 - DNA, 15 bp, Homo sapiens
tgtttttcccatact

SEQ ID NO: 220070 - DNA, 15 bp, Homo sapiens
atgtttttcccatac

SEQ ID NO: 220071 - DNA, 15 bp, Homo sapiens
catgtttttcccata

SEQ ID NO: 220072 - DNA, 15 bp, Homo sapiens
gcatgtttttcccat

SEQ ID NO: 220073 - DNA, 15 bp, Homo sapiens
ggcatgtttttccca

SEQ ID NO: 220074 - DNA, 15 bp, Homo sapiens
gggcatgtttttccc

SEQ ID NO: 220075 - DNA, 15 bp, Homo sapiens
ggggcatgtttttcc

SEQ ID NO: 220076 - DNA, 15 bp, Homo sapiens
gggggcatgtttttc

SEQ ID NO: 220077 - DNA, 15 bp, Homo sapiens
tgggggcatgttttt

SEQ ID NO: 220078 - DNA, 15 bp, Homo sapiens
atgggggcatgtttt

SEQ ID NO: 220079 - DNA, 15 bp, Homo sapiens
gatgggggcatgttt

SEQ ID NO: 220080 - DNA, 15 bp, Homo sapiens
tgatgggggcatgtt

SEQ ID NO: 220081 - DNA, 15 bp, Homo sapiens
atgatgggggcatgt

SEQ ID NO: 220082 - DNA, 15 bp, Homo sapiens
aatgatgggggcatg

SEQ ID NO: 220083 - DNA, 15 bp, Homo sapiens
gaatgatgggggcat

SEQ ID NO: 220084 - DNA, 15 bp, Homo sapiens
agaatgatgggggca

SEQ ID NO: 220085 - DNA, 15 bp, Homo sapiens
cagaatgatgggggc

SEQ ID NO: 220086 - DNA, 15 bp, Homo sapiens
acagaatgatggggg

SEQ ID NO: 220087 - DNA, 15 bp, Homo sapiens
aacagaatgatgggg

SEQ ID NO: 220088 - DNA, 15 bp, Homo sapiens
taacagaatgatggg

SEQ ID NO: 220089 - DNA, 15 bp, Homo sapiens
gtaacagaatgatgg

SEQ ID NO: 220090 - DNA, 15 bp, Homo sapiens
ggtaacagaatgatg

SEQ ID NO: 220091 - DNA, 15 bp, Homo sapiens
gggtaacagaatgat

SEQ ID NO: 220092 - DNA, 15 bp, Homo sapiens
ggggtaacagaatga

SEQ ID NO: 220093 - DNA, 15 bp, Homo sapiens
aggggtaacagaatg

SEQ ID NO: 220094 - DNA, 15 bp, Homo sapiens
caggggtaacagaat

SEQ ID NO: 220095 - DNA, 15 bp, Homo sapiens
tcaggggtaacagaa

SEQ ID NO: 220096 - DNA, 15 bp, Homo sapiens
gtcaggggtaacaga

SEQ ID NO: 220097 - DNA, 15 bp, Homo sapiens
agtcaggggtaacag

SEQ ID NO: 220098 - DNA, 15 bp, Homo sapiens
cagtcaggggtaaca

SEQ ID NO: 220099 - DNA, 15 bp, Homo sapiens
ccagtcaggggtaac

SEQ ID NO: 220100 - DNA, 15 bp, Homo sapiens
cccagtcaggggtaa

SEQ ID NO: 220101 - DNA, 15 bp, Homo sapiens
acccagtcaggggta

SEQ ID NO: 220102 - DNA, 15 bp, Homo sapiens
gacccagtcaggggt

SEQ ID NO: 220103 - DNA, 15 bp, Homo sapiens
ggacccagtcagggg

SEQ ID NO: 220104 - DNA, 15 bp, Homo sapiens
gggacccagtcaggg

SEQ ID NO: 220105 - DNA, 15 bp, Homo sapiens
agggacccagtcagg

SEQ ID NO: 220106 - DNA, 15 bp, Homo sapiens
gagggacccagtcag

SEQ ID NO: 220107 - DNA, 15 bp, Homo sapiens
ggagggacccagtca

SEQ ID NO: 220108 - DNA, 15 bp, Homo sapiens
aggagggacccagtc

SEQ ID NO: 220109 - DNA, 15 bp, Homo sapiens
taggagggacccagt

SEQ ID NO: 220110 - DNA, 15 bp, Homo sapiens
gtaggagggacccag

SEQ ID NO: 220111 - DNA, 15 bp, Homo sapiens
tgtaggagggaccca

SEQ ID NO: 220112 - DNA, 15 bp, Homo sapiens
ttgtaggagggaccc

SEQ ID NO: 220113 - DNA, 15 bp, Homo sapiens
gttgtaggagggacc

SEQ ID NO: 220114 - DNA, 15 bp, Homo sapiens
tgttgtaggagggac

SEQ ID NO: 220115 - DNA, 15 bp, Homo sapiens
gtgttgtaggaggga

SEQ ID NO: 220116 - DNA, 15 bp, Homo sapiens
tgtgttgtaggaggg

SEQ ID NO: 220117 - DNA, 15 bp, Homo sapiens
atgtgttgtaggagg

SEQ ID NO: 220118 - DNA, 15 bp, Homo sapiens
catgtgttgtaggag

SEQ ID NO: 220119 - DNA, 15 bp, Homo sapiens
ccatgtgttgtagga

SEQ ID NO: 220120 - DNA, 15 bp, Homo sapiens
cccatgtgttgtagg

SEQ ID NO: 220121 - DNA, 15 bp, Homo sapiens
tcccatgtgttgtag

SEQ ID NO: 220122 - DNA, 15 bp, Homo sapiens
ttcccatgtgttgta

SEQ ID NO: 220123 - DNA, 15 bp, Homo sapiens
attcccatgtgttgt

SEQ ID NO: 220124 - DNA, 15 bp, Homo sapiens
aattcccatgtgttg

SEQ ID NO: 220125 - DNA, 15 bp, Homo sapiens
taattcccatgtgtt

SEQ ID NO: 220126 - DNA, 15 bp, Homo sapiens
ataattcccatgtgt

SEQ ID NO: 220127 - DNA, 15 bp, Homo sapiens
aataattcccatgtg

SEQ ID NO: 220128 - DNA, 15 bp, Homo sapiens
taataattcccatgt

SEQ ID NO: 220129 - DNA, 15 bp, Homo sapiens
gtaataattcccatg

SEQ ID NO: 220130 - DNA, 15 bp, Homo sapiens
tgtaataattcccat

SEQ ID NO: 220131 - DNA, 15 bp, Homo sapiens
ttgtaataattccca

SEQ ID NO: 220132 - DNA, 15 bp, Homo sapiens
attgtaataattccc

SEQ ID NO: 220133 - DNA, 15 bp, Homo sapiens
aattgtaataattcc

SEQ ID NO: 220134 - DNA, 15 bp, Homo sapiens
gaattgtaataattc

SEQ ID NO: 220135 - DNA, 15 bp, Homo sapiens
tgaattgtaataatt

SEQ ID NO: 220136 - DNA, 15 bp, Homo sapiens
ttgaattgtaataat

SEQ ID NO: 220137 - DNA, 15 bp, Homo sapiens
cttgaattgtaataa

SEQ ID NO: 220138 - DNA, 15 bp, Homo sapiens
tcttgaattgtaata

SEQ ID NO: 220139 - DNA, 15 bp, Homo sapiens
ctcttgaattgtaat

SEQ ID NO: 220140 - DNA, 15 bp, Homo sapiens
cctcttgaattgtaa

SEQ ID NO: 220141 - DNA, 15 bp, Homo sapiens
tcaaatctcctcttg

SEQ ID NO: 220142 - DNA, 15 bp, Homo sapiens
ctcaaatctcctctt

SEQ ID NO: 220143 - DNA, 15 bp, Homo sapiens
actcaaatctcctct

SEQ ID NO: 220144 - DNA, 15 bp, Homo sapiens
cactcaaatctcctc

SEQ ID NO: 220145 - DNA, 15 bp, Homo sapiens
ccactcaaatctcct

SEQ ID NO: 220146 - DNA, 15 bp, Homo sapiens
cccactcaaatctcc

SEQ ID NO: 220147 - DNA, 15 bp, Homo sapiens
ccccactcaaatctc

SEQ ID NO: 220148 - DNA, 15 bp, Homo sapiens
tccccactcaaatct

SEQ ID NO: 220149 - DNA, 15 bp, Homo sapiens
gtccccactcaaatc

SEQ ID NO: 220150 - DNA, 15 bp, Homo sapiens
tgtccccactcaaat

SEQ ID NO: 220151 - DNA, 15 bp, Homo sapiens
gtgtccccactcaaa

SEQ ID NO: 220152 - DNA, 15 bp, Homo sapiens
tgtgtccccactcaa

SEQ ID NO: 220153 - DNA, 15 bp, Homo sapiens
ctgtgtccccactca

SEQ ID NO: 220154 - DNA, 15 bp, Homo sapiens
tctgtgtccccactc

SEQ ID NO: 220155 - DNA, 15 bp, Homo sapiens
ctctgtgtccccact

SEQ ID NO: 220156 - DNA, 15 bp, Homo sapiens
gctctgtgtccccac

SEQ ID NO: 220157 - DNA, 15 bp, Homo sapiens
ggctctgtgtcccca

SEQ ID NO: 220158 - DNA, 15 bp, Homo sapiens
tggctctgtgtcccc

SEQ ID NO: 220159 - DNA, 15 bp, Homo sapiens
ttggctctgtgtccc

SEQ ID NO: 220160 - DNA, 15 bp, Homo sapiens
tttggctctgtgtcc

SEQ ID NO: 220161 - DNA, 15 bp, Homo sapiens
gtttggctctgtgtc

SEQ ID NO: 220162 - DNA, 15 bp, Homo sapiens
ggtttggctctgtgt

SEQ ID NO: 220163 - DNA, 15 bp, Homo sapiens
tggtttggctctgtg

SEQ ID NO: 220164 - DNA, 15 bp, Homo sapiens
atggtttggctctgt

SEQ ID NO: 220165 - DNA, 15 bp, Homo sapiens
aatggtttggctctg

SEQ ID NO: 220166 - DNA, 15 bp, Homo sapiens
aaatggtttggctct

SEQ ID NO: 220167 - DNA, 15 bp, Homo sapiens
gaaatggtttggctc

SEQ ID NO: 220168 - DNA, 15 bp, Homo sapiens
tgaaatggtttggct

SEQ ID NO: 220169 - DNA, 15 bp, Homo sapiens
ctgaaatggtttggc

SEQ ID NO: 220170 - DNA, 15 bp, Homo sapiens
cctgaaatggtttgg

SEQ ID NO: 220171 - DNA, 15 bp, Homo sapiens
acctgaaatggtttg

SEQ ID NO: 220172 - DNA, 15 bp, Homo sapiens
gacctgaaatggttt

SEQ ID NO: 220173 - DNA, 15 bp, Homo sapiens
agacctgaaatggtt

SEQ ID NO: 220174 - DNA, 15 bp, Homo sapiens
tagacctgaaatggt

SEQ ID NO: 220175 - DNA, 15 bp, Homo sapiens
gtagacctgaaatgg

SEQ ID NO: 220176 - DNA, 15 bp, Homo sapiens
agtagacctgaaatg

SEQ ID NO: 220177 - DNA, 15 bp, Homo sapiens
tagtagacctgaaat

SEQ ID NO: 220178 - DNA, 15 bp, Homo sapiens
gtagtagacctgaaa

SEQ ID NO: 220179 - DNA, 15 bp, Homo sapiens
agtagtagacctgaa

SEQ ID NO: 220180 - DNA, 15 bp, Homo sapiens
aagtagtagacctga

SEQ ID NO: 220181 - DNA, 15 bp, Homo sapiens
aaagtagtagacctg

SEQ ID NO: 220182 - DNA, 15 bp, Homo sapiens
caaagtagtagacct

SEQ ID NO: 220183 - DNA, 15 bp, Homo sapiens
ccaaagtagtagacc

SEQ ID NO: 220184 - DNA, 15 bp, Homo sapiens
accaaagtagtagac

SEQ ID NO: 220185 - DNA, 15 bp, Homo sapiens
taccaaagtagtaga

SEQ ID NO: 220186 - DNA, 15 bp, Homo sapiens
ttaccaaagtagtag

SEQ ID NO: 220187 - DNA, 15 bp, Homo sapiens
gttaccaaagtagta

SEQ ID NO: 220188 - DNA, 15 bp, Homo sapiens
ggttaccaaagtagt

SEQ ID NO: 220189 - DNA, 15 bp, Homo sapiens
aggttaccaaagtag

SEQ ID NO: 220190 - DNA, 15 bp, Homo sapiens
gaggttaccaaagta

SEQ ID NO: 220191 - DNA, 15 bp, Homo sapiens
ggaggttaccaaagt

SEQ ID NO: 220192 - DNA, 15 bp, Homo sapiens
aggaggttaccaaag

SEQ ID NO: 220193 - DNA, 15 bp, Homo sapiens
caggaggttaccaaa

SEQ ID NO: 220194 - DNA, 15 bp, Homo sapiens
ccaggaggttaccaa

SEQ ID NO: 220195 - DNA, 15 bp, Homo sapiens
tccaggaggttacca

SEQ ID NO: 220196 - DNA, 15 bp, Homo sapiens
ttccaggaggttacc

SEQ ID NO: 220197 - DNA, 15 bp, Homo sapiens
attccaggaggttac

SEQ ID NO: 220198 - DNA, 15 bp, Homo sapiens
cattccaggaggtta

SEQ ID NO: 220199 - DNA, 15 bp, Homo sapiens
tcattccaggaggtt

SEQ ID NO: 220200 - DNA, 15 bp, Homo sapiens
ctcattccaggaggt

SEQ ID NO: 220201 - DNA, 15 bp, Homo sapiens
actcattccaggagg

SEQ ID NO: 220202 - DNA, 15 bp, Homo sapiens
gactcattccaggag

SEQ ID NO: 220203 - DNA, 15 bp, Homo sapiens
agactcattccagga

SEQ ID NO: 220204 - DNA, 15 bp, Homo sapiens
gagactcattccagg

SEQ ID NO: 220205 - DNA, 15 bp, Homo sapiens
tgagactcattccag

SEQ ID NO: 220206 - DNA, 15 bp, Homo sapiens
atgagactcattcca

SEQ ID NO: 220207 - DNA, 15 bp, Homo sapiens
catgagactcattcc

SEQ ID NO: 220208 - DNA, 15 bp, Homo sapiens
ccatgagactcattc

SEQ ID NO: 220209 - DNA, 15 bp, Homo sapiens
cccatgagactcatt

SEQ ID NO: 220210 - DNA, 15 bp, Homo sapiens
ccccatgagactcat

SEQ ID NO: 220211 - DNA, 15 bp, Homo sapiens
gccccatgagactca

SEQ ID NO: 220212 - DNA, 15 bp, Homo sapiens
ggccccatgagactc

SEQ ID NO: 220213 - DNA, 15 bp, Homo sapiens
gggccccatgagact

SEQ ID NO: 220214 - DNA, 15 bp, Homo sapiens
agggccccatgagac

SEQ ID NO: 220215 - DNA, 15 bp, Homo sapiens
aagggccccatgaga

SEQ ID NO: 220216 - DNA, 15 bp, Homo sapiens
gaagggccccatgag

SEQ ID NO: 220217 - DNA, 15 bp, Homo sapiens
agaagggccccatga

SEQ ID NO: 220218 - DNA, 15 bp, Homo sapiens
tagaagggccccatg

SEQ ID NO: 220219 - DNA, 15 bp, Homo sapiens
atagaagggccccat

SEQ ID NO: 220220 - DNA, 15 bp, Homo sapiens
gatagaagggcccca

SEQ ID NO: 220221 - DNA, 15 bp, Homo sapiens
ggatagaagggcccc

SEQ ID NO: 220222 - DNA, 15 bp, Homo sapiens
gggatagaagggccc

SEQ ID NO: 220223 - DNA, 15 bp, Homo sapiens
ggggatagaagggcc

SEQ ID NO: 220224 - DNA, 15 bp, Homo sapiens
aggggatagaagggc

SEQ ID NO: 220225 - DNA, 15 bp, Homo sapiens
caggggatagaaggg

SEQ ID NO: 220226 - DNA, 15 bp, Homo sapiens
acaggggatagaagg

SEQ ID NO: 220227 - DNA, 15 bp, Homo sapiens
tacaggggatagaag

SEQ ID NO: 220228 - DNA, 15 bp, Homo sapiens
gtacaggggatagaa

SEQ ID NO: 220229 - DNA, 15 bp, Homo sapiens
agtacaggggataga

SEQ ID NO: 220230 - DNA, 15 bp, Homo sapiens
gagtacaggggatag

SEQ ID NO: 220231 - DNA, 15 bp, Homo sapiens
tgagtacaggggata

SEQ ID NO: 220232 - DNA, 15 bp, Homo sapiens
atgagtacaggggat

SEQ ID NO: 220233 - DNA, 15 bp, Homo sapiens
catgagtacagggga

SEQ ID NO: 220234 - DNA, 15 bp, Homo sapiens
tcatgagtacagggg

SEQ ID NO: 220235 - DNA, 15 bp, Homo sapiens
atcatgagtacaggg

SEQ ID NO: 220236 - DNA, 15 bp, Homo sapiens
tatcatgagtacagg

SEQ ID NO: 220237 - DNA, 15 bp, Homo sapiens
ctatcatgagtacag

SEQ ID NO: 220238 - DNA, 15 bp, Homo sapiens
actatcatgagtaca

SEQ ID NO: 220239 - DNA, 15 bp, Homo sapiens
tactatcatgagtac

SEQ ID NO: 220240 - DNA, 15 bp, Homo sapiens
atactatcatgagta

SEQ ID NO: 220241 - DNA, 15 bp, Homo sapiens
catactatcatgagt

SEQ ID NO: 220242 - DNA, 15 bp, Homo sapiens
tcatactatcatgag

SEQ ID NO: 220243 - DNA, 15 bp, Homo sapiens
gtcatactatcatga

SEQ ID NO: 220244 - DNA, 15 bp, Homo sapiens
agtcatactatcatg

SEQ ID NO: 220245 - DNA, 15 bp, Homo sapiens
gagtcatactatcat

SEQ ID NO: 220246 - DNA, 15 bp, Homo sapiens
agagtcatactatca

SEQ ID NO: 220247 - DNA, 15 bp, Homo sapiens
aagagtcatactatc

SEQ ID NO: 220248 - DNA, 15 bp, Homo sapiens
aaagagtcatactat

SEQ ID NO: 220249 - DNA, 15 bp, Homo sapiens
caaagagtcatacta

SEQ ID NO: 220250 - DNA, 15 bp, Homo sapiens
ccaaagagtcatact

SEQ ID NO: 220251 - DNA, 15 bp, Homo sapiens
cccaaagagtcatac

SEQ ID NO: 220252 - DNA, 15 bp, Homo sapiens
acccaaagagtcata

SEQ ID NO: 220253 - DNA, 15 bp, Homo sapiens
cacccaaagagtcat

SEQ ID NO: 220254 - DNA, 15 bp, Homo sapiens
ccacccaaagagtca

SEQ ID NO: 220255 - DNA, 15 bp, Homo sapiens
acccacccaaagagt

SEQ ID NO: 220256 - DNA, 15 bp, Homo sapiens
gacccacccaaagag

SEQ ID NO: 220257 - DNA, 15 bp, Homo sapiens
agacccacccaaaga

SEQ ID NO: 220258 - DNA, 15 bp, Homo sapiens
cagacccacccaaag

SEQ ID NO: 220259 - DNA, 15 bp, Homo sapiens
tcagacccacccaaa

SEQ ID NO: 220260 - DNA, 15 bp, Homo sapiens
ctcagacccacccaa

SEQ ID NO: 220261 - DNA, 15 bp, Homo sapiens
cctcagacccaccca

SEQ ID NO: 220262 - DNA, 15 bp, Homo sapiens
gcctcagacccaccc

SEQ ID NO: 220263 - DNA, 15 bp, Homo sapiens
cagcctcagacccac

SEQ ID NO: 220264 - DNA, 15 bp, Homo sapiens
ccagcctcagaccca

SEQ ID NO: 220265 - DNA, 15 bp, Homo sapiens
tccagcctcagaccc

SEQ ID NO: 220266 - DNA, 15 bp, Homo sapiens
gtccagcctcagacc

SEQ ID NO: 220267 - DNA, 15 bp, Homo sapiens
tgtccagcctcagac

SEQ ID NO: 220268 - DNA, 15 bp, Homo sapiens
atgtccagcctcaga

SEQ ID NO: 220269 - DNA, 15 bp, Homo sapiens
catgtccagcctcag

SEQ ID NO: 220270 - DNA, 15 bp, Homo sapiens
tcatgtccagcctca

SEQ ID NO: 220271 - DNA, 15 bp, Homo sapiens
gtcatgtccagcctc

SEQ ID NO: 220272 - DNA, 15 bp, Homo sapiens
agtcatgtccagcct

SEQ ID NO: 220273 - DNA, 15 bp, Homo sapiens
cagtcatgtccagcc

SEQ ID NO: 220274 - DNA, 15 bp, Homo sapiens
ccagtcatgtccagc

SEQ ID NO: 220275 - DNA, 15 bp, Homo sapiens
accagtcatgtccag

SEQ ID NO: 220276 - DNA, 15 bp, Homo sapiens
caccagtcatgtcca

SEQ ID NO: 220277 - DNA, 15 bp, Homo sapiens
ccaccagtcatgtcc

SEQ ID NO: 220278 - DNA, 15 bp, Homo sapiens
accaccagtcatgtc

SEQ ID NO: 220279 - DNA, 15 bp, Homo sapiens
caccaccagtcatgt

SEQ ID NO: 220280 - DNA, 15 bp, Homo sapiens
tcaccaccagtcatg

SEQ ID NO: 220281 - DNA, 15 bp, Homo sapiens
ttcaccaccagtcat

SEQ ID NO: 220282 - DNA, 15 bp, Homo sapiens
tttcaccaccagtca

SEQ ID NO: 220283 - DNA, 15 bp, Homo sapiens
gtttcaccaccagtc

SEQ ID NO: 220284 - DNA, 15 bp, Homo sapiens
ggtttcaccaccagt

SEQ ID NO: 220285 - DNA, 15 bp, Homo sapiens
gggtttcaccaccag

SEQ ID NO: 220286 - DNA, 15 bp, Homo sapiens
tgggtttcaccacca

SEQ ID NO: 220287 - DNA, 15 bp, Homo sapiens
ttgggtttcaccacc

SEQ ID NO: 220288 - DNA, 15 bp, Homo sapiens
tttgggtttcaccac

SEQ ID NO: 220289 - DNA, 15 bp, Homo sapiens
gtttgggtttcacca

SEQ ID NO: 220290 - DNA, 15 bp, Homo sapiens
agtttgggtttcacc

SEQ ID NO: 220291 - DNA, 15 bp, Homo sapiens
gagtttgggtttcac

SEQ ID NO: 220292 - DNA, 15 bp, Homo sapiens
agagtttgggtttca

SEQ ID NO: 220293 - DNA, 15 bp, Homo sapiens
aagagtttgggtttc

SEQ ID NO: 220294 - DNA, 15 bp, Homo sapiens
taagagtttgggttt

SEQ ID NO: 220295 - DNA, 15 bp, Homo sapiens
ataagagtttgggtt

SEQ ID NO: 220296 - DNA, 15 bp, Homo sapiens
aataagagtttgggt

SEQ ID NO: 220297 - DNA, 15 bp, Homo sapiens
taataagagtttggg

SEQ ID NO: 220298 - DNA, 15 bp, Homo sapiens
ctaataagagtttgg

SEQ ID NO: 220299 - DNA, 15 bp, Homo sapiens
tctaataagagtttg

SEQ ID NO: 220300 - DNA, 15 bp, Homo sapiens
ctctaataagagttt

SEQ ID NO: 220301 - DNA, 15 bp, Homo sapiens
tctctaataagagtt

SEQ ID NO: 220302 - DNA, 15 bp, Homo sapiens
ttctctaataagagt

SEQ ID NO: 220303 - DNA, 15 bp, Homo sapiens
tttctctaataagag

SEQ ID NO: 220304 - DNA, 15 bp, Homo sapiens
ctttctctaataaga

SEQ ID NO: 220305 - DNA, 15 bp, Homo sapiens
actttctctaataag

SEQ ID NO: 220306 - DNA, 15 bp, Homo sapiens
tactttctctaataa

SEQ ID NO: 220307 - DNA, 15 bp, Homo sapiens
atactttctctaata

SEQ ID NO: 220308 - DNA, 15 bp, Homo sapiens
tatactttctctaat

SEQ ID NO: 220309 - DNA, 15 bp, Homo sapiens
atatactttctctaa

SEQ ID NO: 220310 - DNA, 15 bp, Homo sapiens
gatatactttctcta

SEQ ID NO: 220311 - DNA, 15 bp, Homo sapiens
ggatatactttctct

SEQ ID NO: 220312 - DNA, 15 bp, Homo sapiens
aggatatactttctc

SEQ ID NO: 220313 - DNA, 15 bp, Homo sapiens
gaggatatactttct

SEQ ID NO: 220314 - DNA, 15 bp, Homo sapiens
agaggatatactttc

SEQ ID NO: 220315 - DNA, 15 bp, Homo sapiens
aagaggatatacttt

SEQ ID NO: 220316 - DNA, 15 bp, Homo sapiens
taagaggatatactt

SEQ ID NO: 220317 - DNA, 15 bp, Homo sapiens
gtaagaggatatact

SEQ ID NO: 220318 - DNA, 15 bp, Homo sapiens
agtaagaggatatac

SEQ ID NO: 220319 - DNA, 15 bp, Homo sapiens
tagtaagaggatata

SEQ ID NO: 220320 - DNA, 15 bp, Homo sapiens
ctagtaagaggatat

SEQ ID NO: 220321 - DNA, 15 bp, Homo sapiens
actagtaagaggata

SEQ ID NO: 220322 - DNA, 15 bp, Homo sapiens
cactagtaagaggat

SEQ ID NO: 220323 - DNA, 15 bp, Homo sapiens
tcactagtaagagga

SEQ ID NO: 220324 - DNA, 15 bp, Homo sapiens
ctcactagtaagagg

SEQ ID NO: 220325 - DNA, 15 bp, Homo sapiens
tctcactagtaagag

SEQ ID NO: 220326 - DNA, 15 bp, Homo sapiens
atctcactagtaaga

SEQ ID NO: 220327 - DNA, 15 bp, Homo sapiens
tatctcactagtaag

SEQ ID NO: 220328 - DNA, 15 bp, Homo sapiens
gtatctcactagtaa

SEQ ID NO: 220329 - DNA, 15 bp, Homo sapiens
ggtatctcactagta

SEQ ID NO: 220330 - DNA, 15 bp, Homo sapiens
aggtatctcactagt

SEQ ID NO: 220331 - DNA, 15 bp, Homo sapiens
aaggtatctcactag

SEQ ID NO: 220332 - DNA, 15 bp, Homo sapiens
taaggtatctcacta

SEQ ID NO: 220333 - DNA, 15 bp, Homo sapiens
ttaaggtatctcact

SEQ ID NO: 220334 - DNA, 15 bp, Homo sapiens
tttaaggtatctcac

SEQ ID NO: 220335 - DNA, 15 bp, Homo sapiens
ctttaaggtatctca

SEQ ID NO: 220336 - DNA, 15 bp, Homo sapiens
actttaaggtatctc

SEQ ID NO: 220337 - DNA, 15 bp, Homo sapiens
aactttaaggtatct

SEQ ID NO: 220338 - DNA, 15 bp, Homo sapiens
aaactttaaggtatc

SEQ ID NO: 220339 - DNA, 15 bp, Homo sapiens
aaaactttaaggtat

SEQ ID NO: 220340 - DNA, 15 bp, Homo sapiens
caaaactttaaggta

SEQ ID NO: 220341 - DNA, 15 bp, Homo sapiens
tcaaaactttaaggt

SEQ ID NO: 220342 - DNA, 15 bp, Homo sapiens
ttcaaaactttaagg

SEQ ID NO: 220343 - DNA, 15 bp, Homo sapiens
tttcaaaactttaag

SEQ ID NO: 220344 - DNA, 15 bp, Homo sapiens
ttttcaaaactttaa

SEQ ID NO: 220345 - DNA, 15 bp, Homo sapiens
cttttcaaaacttta

SEQ ID NO: 220346 - DNA, 15 bp, Homo sapiens
ccttttcaaaacttt

SEQ ID NO: 220347 - DNA, 15 bp, Homo sapiens
tccttttcaaaactt

SEQ ID NO: 220348 - DNA, 15 bp, Homo sapiens
ctccttttcaaaact

SEQ ID NO: 220349 - DNA, 15 bp, Homo sapiens
cctccttttcaaaac

SEQ ID NO: 220350 - DNA, 15 bp, Homo sapiens
gcctccttttcaaaa

SEQ ID NO: 220351 - DNA, 15 bp, Homo sapiens
agcctccttttcaaa

SEQ ID NO: 220352 - DNA, 15 bp, Homo sapiens
aagcctccttttcaa

SEQ ID NO: 220353 - DNA, 15 bp, Homo sapiens
aaagcctccttttca

SEQ ID NO: 220354 - DNA, 15 bp, Homo sapiens
aaaagcctccttttc

SEQ ID NO: 220355 - DNA, 15 bp, Homo sapiens
aaaaagcctcctttt

SEQ ID NO: 220356 - DNA, 15 bp, Homo sapiens
taaaaagcctccttt

SEQ ID NO: 220357 - DNA, 15 bp, Homo sapiens
ataaaaagcctcctt

SEQ ID NO: 220358 - DNA, 15 bp, Homo sapiens
cataaaaagcctcct

SEQ ID NO: 220359 - DNA, 15 bp, Homo sapiens
tcataaaaagcctcc

SEQ ID NO: 220360 - DNA, 15 bp, Homo sapiens
atcataaaaagcctc

SEQ ID NO: 220361 - DNA, 15 bp, Homo sapiens
tatcataaaaagcct

SEQ ID NO: 220362 - DNA, 15 bp, Homo sapiens
ttatcataaaaagcc

SEQ ID NO: 220363 - DNA, 15 bp, Homo sapiens
attatcataaaaagc

SEQ ID NO: 220364 - DNA, 15 bp, Homo sapiens
tattatcataaaaag

SEQ ID NO: 220365 - DNA, 15 bp, Homo sapiens
ttattatcataaaaa

SEQ ID NO: 220366 - DNA, 15 bp, Homo sapiens
tttattatcataaaa

SEQ ID NO: 220367 - DNA, 15 bp, Homo sapiens
ttttattatcataaa

SEQ ID NO: 220368 - DNA, 15 bp, Homo sapiens
attttattatcataa

SEQ ID NO: 220369 - DNA, 15 bp, Homo sapiens
aattttattatcata

SEQ ID NO: 220370 - DNA, 15 bp, Homo sapiens
taattttattatcat

SEQ ID NO: 220371 - DNA, 15 bp, Homo sapiens
ataattttattatca

SEQ ID NO: 220372 - DNA, 15 bp, Homo sapiens
cataattttattatc

SEQ ID NO: 220373 - DNA, 15 bp, Homo sapiens
gcataattttattat

SEQ ID NO: 220374 - DNA, 15 bp, Homo sapiens
agcataattttatta

SEQ ID NO: 220375 - DNA, 15 bp, Homo sapiens
aagcataattttatt

SEQ ID NO: 220376 - DNA, 15 bp, Homo sapiens
aaagcataattttat

SEQ ID NO: 220377 - DNA, 15 bp, Homo sapiens
aaaagcataatttta

SEQ ID NO: 220378 - DNA, 15 bp, Homo sapiens
taaaagcataatttt

SEQ ID NO: 220379 - DNA, 15 bp, Homo sapiens
ataaaagcataattt

SEQ ID NO: 220380 - DNA, 15 bp, Homo sapiens
cataaaagcataatt

SEQ ID NO: 220381 - DNA, 15 bp, Homo sapiens
ccataaaagcataat

SEQ ID NO: 220382 - DNA, 15 bp, Homo sapiens
cccataaaagcataa

SEQ ID NO: 220383 - DNA, 15 bp, Homo sapiens
tcccataaaagcata

SEQ ID NO: 220384 - DNA, 15 bp, Homo sapiens
ctcccataaaagcat

SEQ ID NO: 220385 - DNA, 15 bp, Homo sapiens
tctcccataaaagca

SEQ ID NO: 220386 - DNA, 15 bp, Homo sapiens
ttctcccataaaagc

SEQ ID NO: 220387 - DNA, 15 bp, Homo sapiens
tttctcccataaaag

SEQ ID NO: 220388 - DNA, 15 bp, Homo sapiens
ttttctcccataaaa

SEQ ID NO: 220389 - DNA, 15 bp, Homo sapiens
gttttctcccataaa

SEQ ID NO: 220390 - DNA, 15 bp, Homo sapiens
agttttctcccataa

SEQ ID NO: 220391 - DNA, 15 bp, Homo sapiens
aagttttctcccata

SEQ ID NO: 220392 - DNA, 15 bp, Homo sapiens
caagttttctcccat

SEQ ID NO: 220393 - DNA, 15 bp, Homo sapiens
ccaagttttctccca

SEQ ID NO: 220394 - DNA, 15 bp, Homo sapiens
gccaagttttctccc

SEQ ID NO: 220395 - DNA, 15 bp, Homo sapiens
tgccaagttttctcc

SEQ ID NO: 220396 - DNA, 15 bp, Homo sapiens
ttgccaagttttctc

SEQ ID NO: 220397 - DNA, 15 bp, Homo sapiens
tttgccaagttttct

SEQ ID NO: 220398 - DNA, 15 bp, Homo sapiens
atttgccaagttttc

SEQ ID NO: 220399 - DNA, 15 bp, Homo sapiens
tatttgccaagtttt

SEQ ID NO: 220400 - DNA, 15 bp, Homo sapiens
gtatttgccaagttt

SEQ ID NO: 220401 - DNA, 15 bp, Homo sapiens
tgtatttgccaagtt

SEQ ID NO: 220402 - DNA, 15 bp, Homo sapiens
ctgtatttgccaagt

SEQ ID NO: 220403 - DNA, 15 bp, Homo sapiens
tctgtatttgccaag

SEQ ID NO: 220404 - DNA, 15 bp, Homo sapiens
ttctgtatttgccaa

SEQ ID NO: 220405 - DNA, 15 bp, Homo sapiens
tttctgtatttgcca

SEQ ID NO: 220406 - DNA, 15 bp, Homo sapiens
ttttctgtatttgcc

SEQ ID NO: 220407 - DNA, 15 bp, Homo sapiens
tttttctgtatttgc

SEQ ID NO: 220408 - DNA, 15 bp, Homo sapiens
atttttctgtatttg

SEQ ID NO: 220409 - DNA, 15 bp, Homo sapiens
aatttttctgtattt

SEQ ID NO: 220410 - DNA, 15 bp, Homo sapiens
taatttttctgtatt

SEQ ID NO: 220411 - DNA, 15 bp, Homo sapiens
ataatttttctgtat

SEQ ID NO: 220412 - DNA, 15 bp, Homo sapiens
tataatttttctgta

SEQ ID NO: 220413 - DNA, 15 bp, Homo sapiens
ttataatttttctgt

SEQ ID NO: 220414 - DNA, 15 bp, Homo sapiens
tttataatttttctg

SEQ ID NO: 220415 - DNA, 15 bp, Homo sapiens
ctttataatttttct

SEQ ID NO: 220416 - DNA, 15 bp, Homo sapiens
tctttataatttttc

SEQ ID NO: 220417 - DNA, 15 bp, Homo sapiens
ctctttataattttt

SEQ ID NO: 220418 - DNA, 15 bp, Homo sapiens
tctctttataatttt

SEQ ID NO: 220419 - DNA, 15 bp, Homo sapiens
ttctctttataattt

SEQ ID NO: 220420 - DNA, 15 bp, Homo sapiens
tttctctttataatt

SEQ ID NO: 220421 - DNA, 15 bp, Homo sapiens
ctttctctttataat

SEQ ID NO: 220422 - DNA, 15 bp, Homo sapiens
gctttctctttataa

SEQ ID NO: 220423 - DNA, 15 bp, Homo sapiens
tgctttctctttata

SEQ ID NO: 220424 - DNA, 15 bp, Homo sapiens
ttgctttctctttat

SEQ ID NO: 220425 - DNA, 15 bp, Homo sapiens
attgctttctcttta

SEQ ID NO: 220426 - DNA, 15 bp, Homo sapiens
cattgctttctcttt

SEQ ID NO: 220427 - DNA, 15 bp, Homo sapiens
acattgctttctctt

SEQ ID NO: 220428 - DNA, 15 bp, Homo sapiens
gacattgctttctct

SEQ ID NO: 220429 - DNA, 15 bp, Homo sapiens
agacattgctttctc

SEQ ID NO: 220430 - DNA, 15 bp, Homo sapiens
cagacattgctttct

SEQ ID NO: 220431 - DNA, 15 bp, Homo sapiens
acagacattgctttc

SEQ ID NO: 220432 - DNA, 15 bp, Homo sapiens
tacagacattgcttt

SEQ ID NO: 220433 - DNA, 15 bp, Homo sapiens
ttacagacattgctt

SEQ ID NO: 220434 - DNA, 15 bp, Homo sapiens
attacagacattgct

SEQ ID NO: 220435 - DNA, 15 bp, Homo sapiens
aattacagacattgc

SEQ ID NO: 220436 - DNA, 15 bp, Homo sapiens
gaattacagacattg

SEQ ID NO: 220437 - DNA, 15 bp, Homo sapiens
agaattacagacatt

SEQ ID NO: 220438 - DNA, 15 bp, Homo sapiens
cagaattacagacat

SEQ ID NO: 220439 - DNA, 15 bp, Homo sapiens
gcagaattacagaca

SEQ ID NO: 220440 - DNA, 15 bp, Homo sapiens
tgcagaattacagac

SEQ ID NO: 220441 - DNA, 15 bp, Homo sapiens
ttgcagaattacaga

SEQ ID NO: 220442 - DNA, 15 bp, Homo sapiens
attgcagaattacag

SEQ ID NO: 220443 - DNA, 15 bp, Homo sapiens
cattgcagaattaca

SEQ ID NO: 220444 - DNA, 15 bp, Homo sapiens
gcattgcagaattac

SEQ ID NO: 220445 - DNA, 15 bp, Homo sapiens
tgcattgcagaatta

SEQ ID NO: 220446 - DNA, 15 bp, Homo sapiens
ctgcattgcagaatt

SEQ ID NO: 220447 - DNA, 15 bp, Homo sapiens
tctgcattgcagaat

SEQ ID NO: 220448 - DNA, 15 bp, Homo sapiens
ttctgcattgcagaa

SEQ ID NO: 220449 - DNA, 15 bp, Homo sapiens
tttctgcattgcaga

SEQ ID NO: 220450 - DNA, 15 bp, Homo sapiens
atttctgcattgcag

SEQ ID NO: 220451 - DNA, 15 bp, Homo sapiens
gatttctgcattgca

SEQ ID NO: 220452 - DNA, 15 bp, Homo sapiens
tgatttctgcattgc

SEQ ID NO: 220453 - DNA, 15 bp, Homo sapiens
gtgatttctgcattg

SEQ ID NO: 220454 - DNA, 15 bp, Homo sapiens
tgtgatttctgcatt

SEQ ID NO: 220455 - DNA, 15 bp, Homo sapiens
atgtgatttctgcat

SEQ ID NO: 220456 - DNA, 15 bp, Homo sapiens
aatgtgatttctgca

SEQ ID NO: 220457 - DNA, 15 bp, Homo sapiens
aaatgtgatttctgc

SEQ ID NO: 220458 - DNA, 15 bp, Homo sapiens
caaatgtgatttctg

SEQ ID NO: 220459 - DNA, 15 bp, Homo sapiens
ccaaatgtgatttct

SEQ ID NO: 220460 - DNA, 15 bp, Homo sapiens
cccaaatgtgatttc

SEQ ID NO: 220461 - DNA, 15 bp, Homo sapiens
acccaaatgtgattt

SEQ ID NO: 220462 - DNA, 15 bp, Homo sapiens
cacccaaatgtgatt

SEQ ID NO: 220463 - DNA, 15 bp, Homo sapiens
acacccaaatgtgat

SEQ ID NO: 220464 - DNA, 15 bp, Homo sapiens
tacacccaaatgtga

SEQ ID NO: 220465 - DNA, 15 bp, Homo sapiens
atacacccaaatgtg

SEQ ID NO: 220466 - DNA, 15 bp, Homo sapiens
aatacacccaaatgt

SEQ ID NO: 220467 - DNA, 15 bp, Homo sapiens
aaatacacccaaatg

SEQ ID NO: 220468 - DNA, 15 bp, Homo sapiens
aaaatacacccaaat

SEQ ID NO: 220469 - DNA, 15 bp, Homo sapiens
taaaatacacccaaa

SEQ ID NO: 220470 - DNA, 15 bp, Homo sapiens
ataaaatacacccaa

SEQ ID NO: 220471 - DNA, 15 bp, Homo sapiens
aataaaatacaccca

SEQ ID NO: 220472 - DNA, 15 bp, Homo sapiens
taataaaatacaccc

SEQ ID NO: 220473 - DNA, 15 bp, Homo sapiens
ataataaaatacacc

SEQ ID NO: 220474 - DNA, 15 bp, Homo sapiens
aataataaaatacac

SEQ ID NO: 220475 - DNA, 15 bp, Homo sapiens
taataataaaataca

SEQ ID NO: 220476 - DNA, 15 bp, Homo sapiens
ataataataaaatac

SEQ ID NO: 220477 - DNA, 15 bp, Homo sapiens
tataataataaaata

SEQ ID NO: 220478 - DNA, 15 bp, Homo sapiens
atataataataaaat

SEQ ID NO: 220479 - DNA, 15 bp, Homo sapiens
tatataataataaaa

SEQ ID NO: 220480 - DNA, 15 bp, Homo sapiens
ttatataataataaa

SEQ ID NO: 220481 - DNA, 15 bp, Homo sapiens
attatataataataa

SEQ ID NO: 220482 - DNA, 15 bp, Homo sapiens
cattatataataata

SEQ ID NO: 220483 - DNA, 15 bp, Homo sapiens
tcattatataataat

SEQ ID NO: 220484 - DNA, 15 bp, Homo sapiens
ttcattatataataa

SEQ ID NO: 220485 - DNA, 15 bp, Homo sapiens
tttcattatataata

SEQ ID NO: 220486 - DNA, 15 bp, Homo sapiens
atttcattatataat

SEQ ID NO: 220487 - DNA, 15 bp, Homo sapiens
catttcattatataa

SEQ ID NO: 220488 - DNA, 15 bp, Homo sapiens
acatttcattatata

SEQ ID NO: 220489 - DNA, 15 bp, Homo sapiens
aacatttcattatat

SEQ ID NO: 220490 - DNA, 15 bp, Homo sapiens
taacatttcattata

SEQ ID NO: 220491 - DNA, 15 bp, Homo sapiens
ataacatttcattat

SEQ ID NO: 220492 - DNA, 15 bp, Homo sapiens
aataacatttcatta

SEQ ID NO: 220493 - DNA, 15 bp, Homo sapiens
gaataacatttcatt

SEQ ID NO: 220494 - DNA, 15 bp, Homo sapiens
agaataacatttcat

SEQ ID NO: 220495 - DNA, 15 bp, Homo sapiens
cagaataacatttca

SEQ ID NO: 220496 - DNA, 15 bp, Homo sapiens
tcagaataacatttc

SEQ ID NO: 220497 - DNA, 15 bp, Homo sapiens
ttcagaataacattt

SEQ ID NO: 220498 - DNA, 15 bp, Homo sapiens
tttcagaataacatt

SEQ ID NO: 220499 - DNA, 15 bp, Homo sapiens
ttttcagaataacat

SEQ ID NO: 220500 - DNA, 15 bp, Homo sapiens
gttttcagaataaca

SEQ ID NO: 220501 - DNA, 15 bp, Homo sapiens
agttttcagaataac

SEQ ID NO: 220502 - DNA, 15 bp, Homo sapiens
aagttttcagaataa

SEQ ID NO: 220503 - DNA, 15 bp, Homo sapiens
taagttttcagaata

SEQ ID NO: 220504 - DNA, 15 bp, Homo sapiens
ctaagttttcagaat

SEQ ID NO: 220505 - DNA, 15 bp, Homo sapiens
tctaagttttcagaa

SEQ ID NO: 220506 - DNA, 15 bp, Homo sapiens
atctaagttttcaga

SEQ ID NO: 220507 - DNA, 15 bp, Homo sapiens
aatctaagttttcag

SEQ ID NO: 220508 - DNA, 15 bp, Homo sapiens
caatctaagttttca

SEQ ID NO: 220509 - DNA, 15 bp, Homo sapiens
ccaatctaagttttc

SEQ ID NO: 220510 - DNA, 15 bp, Homo sapiens
accaatctaagtttt

SEQ ID NO: 220511 - DNA, 15 bp, Homo sapiens
aaccaatctaagttt

SEQ ID NO: 220512 - DNA, 15 bp, Homo sapiens
taaccaatctaagtt

SEQ ID NO: 220513 - DNA, 15 bp, Homo sapiens
ttaaccaatctaagt

SEQ ID NO: 220514 - DNA, 15 bp, Homo sapiens
attaaccaatctaag

SEQ ID NO: 220515 - DNA, 15 bp, Homo sapiens
tattaaccaatctaa

SEQ ID NO: 220516 - DNA, 15 bp, Homo sapiens
atattaaccaatcta

SEQ ID NO: 220517 - DNA, 15 bp, Homo sapiens
tatattaaccaatct

SEQ ID NO: 220518 - DNA, 15 bp, Homo sapiens
atatattaaccaatc

SEQ ID NO: 220519 - DNA, 15 bp, Homo sapiens
tatatattaaccaat

SEQ ID NO: 220520 - DNA, 15 bp, Homo sapiens
atatatattaaccaa

SEQ ID NO: 220521 - DNA, 15 bp, Homo sapiens
tatatatattaacca

SEQ ID NO: 220522 - DNA, 15 bp, Homo sapiens
ttatatatattaacc

SEQ ID NO: 220523 - DNA, 15 bp, Homo sapiens
tttatatatattaac

SEQ ID NO: 220524 - DNA, 15 bp, Homo sapiens
atttatatatattaa

SEQ ID NO: 220525 - DNA, 15 bp, Homo sapiens
catttatatatatta

SEQ ID NO: 220526 - DNA, 15 bp, Homo sapiens
acatttatatatatt

SEQ ID NO: 220527 - DNA, 15 bp, Homo sapiens
aacatttatatatat

SEQ ID NO: 220528 - DNA, 15 bp, Homo sapiens
taacatttatatata

SEQ ID NO: 220529 - DNA, 15 bp, Homo sapiens
ttaacatttatatat

SEQ ID NO: 220530 - DNA, 15 bp, Homo sapiens
attaacatttatata

SEQ ID NO: 220531 - DNA, 15 bp, Homo sapiens
tattaacatttatat

SEQ ID NO: 220532 - DNA, 15 bp, Homo sapiens
atattaacatttata

SEQ ID NO: 220533 - DNA, 15 bp, Homo sapiens
catattaacatttat

SEQ ID NO: 220534 - DNA, 15 bp, Homo sapiens
acatattaacattta

SEQ ID NO: 220535 - DNA, 15 bp, Homo sapiens
tacatattaacattt

SEQ ID NO: 220536 - DNA, 15 bp, Homo sapiens
atacatattaacatt

SEQ ID NO: 220537 - DNA, 15 bp, Homo sapiens
tatacatattaacat

SEQ ID NO: 220538 - DNA, 15 bp, Homo sapiens
atatacatattaaca

SEQ ID NO: 220539 - DNA, 15 bp, Homo sapiens
aatatacatattaac

SEQ ID NO: 220540 - DNA, 15 bp, Homo sapiens
caatatacatattaa

SEQ ID NO: 220541 - DNA, 15 bp, Homo sapiens
ccaatatacatatta

SEQ ID NO: 220542 - DNA, 15 bp, Homo sapiens
accaatatacatatt

SEQ ID NO: 220543 - DNA, 15 bp, Homo sapiens
aaccaatatacatat

SEQ ID NO: 220544 - DNA, 15 bp, Homo sapiens
taaccaatatacata

SEQ ID NO: 220545 - DNA, 15 bp, Homo sapiens
ttaaccaatatacat

SEQ ID NO: 220546 - DNA, 15 bp, Homo sapiens
attaaccaatataca

SEQ ID NO: 220547 - DNA, 15 bp, Homo sapiens
tattaaccaatatac

SEQ ID NO: 220548 - DNA, 15 bp, Homo sapiens
atattaaccaatata

SEQ ID NO: 220549 - DNA, 15 bp, Homo sapiens
tatattaaccaatat

SEQ ID NO: 220550 - DNA, 15 bp, Homo sapiens
gtatattaaccaata

SEQ ID NO: 220551 - DNA, 15 bp, Homo sapiens
tgtatattaaccaat

SEQ ID NO: 220552 - DNA, 15 bp, Homo sapiens
atgtatattaaccaa

SEQ ID NO: 220553 - DNA, 15 bp, Homo sapiens
tatgtatattaacca

SEQ ID NO: 220554 - DNA, 15 bp, Homo sapiens
ttatgtatattaacc

SEQ ID NO: 220555 - DNA, 15 bp, Homo sapiens
attatgtatattaac

SEQ ID NO: 220556 - DNA, 15 bp, Homo sapiens
tattatgtatattaa

SEQ ID NO: 220557 - DNA, 15 bp, Homo sapiens
atattatgtatatta

SEQ ID NO: 220558 - DNA, 15 bp, Homo sapiens
tatattatgtatatt

SEQ ID NO: 220559 - DNA, 15 bp, Homo sapiens
atatattatgtatat

SEQ ID NO: 220560 - DNA, 15 bp, Homo sapiens
catatattatgtata

SEQ ID NO: 220561 - DNA, 15 bp, Homo sapiens
acatatattatgtat

SEQ ID NO: 220562 - DNA, 15 bp, Homo sapiens
tacatatattatgta

SEQ ID NO: 220563 - DNA, 15 bp, Homo sapiens
ttacatatattatgt

SEQ ID NO: 220564 - DNA, 15 bp, Homo sapiens
tttacatatattatg

SEQ ID NO: 220565 - DNA, 15 bp, Homo sapiens
ctttacatatattat

SEQ ID NO: 220566 - DNA, 15 bp, Homo sapiens
gctttacatatatta

SEQ ID NO: 220567 - DNA, 15 bp, Homo sapiens
agctttacatatatt

SEQ ID NO: 220568 - DNA, 15 bp, Homo sapiens
aagctttacatatat

SEQ ID NO: 220569 - DNA, 15 bp, Homo sapiens
aaagctttacatata

SEQ ID NO: 220570 - DNA, 15 bp, Homo sapiens
taaagctttacatat

SEQ ID NO: 220571 - DNA, 15 bp, Homo sapiens
ttaaagctttacata

SEQ ID NO: 220572 - DNA, 15 bp, Homo sapiens
tttaaagctttacat

SEQ ID NO: 220573 - DNA, 15 bp, Homo sapiens
ttttaaagctttaca

SEQ ID NO: 220574 - DNA, 15 bp, Homo sapiens
attttaaagctttac

SEQ ID NO: 220575 - DNA, 15 bp, Homo sapiens
tattttaaagcttta

SEQ ID NO: 220576 - DNA, 15 bp, Homo sapiens
atattttaaagcttt

SEQ ID NO: 220577 - DNA, 15 bp, Homo sapiens
tatattttaaagctt

SEQ ID NO: 220578 - DNA, 15 bp, Homo sapiens
gtatattttaaagct

SEQ ID NO: 220579 - DNA, 15 bp, Homo sapiens
agtatattttaaagc

SEQ ID NO: 220580 - DNA, 15 bp, Homo sapiens
aagtatattttaaag

SEQ ID NO: 220581 - DNA, 15 bp, Homo sapiens
taagtatattttaaa

SEQ ID NO: 220582 - DNA, 15 bp, Homo sapiens
ctaagtatattttaa

SEQ ID NO: 220583 - DNA, 15 bp, Homo sapiens
actaagtatatttta

SEQ ID NO: 220584 - DNA, 15 bp, Homo sapiens
aactaagtatatttt

SEQ ID NO: 220585 - DNA, 15 bp, Homo sapiens
aaactaagtatattt

SEQ ID NO: 220586 - DNA, 15 bp, Homo sapiens
taaactaagtatatt

SEQ ID NO: 220587 - DNA, 15 bp, Homo sapiens
ttaaactaagtatat

SEQ ID NO: 220588 - DNA, 15 bp, Homo sapiens
tttaaactaagtata

SEQ ID NO: 220589 - DNA, 15 bp, Homo sapiens
ttttaaactaagtat

SEQ ID NO: 220590 - DNA, 15 bp, Homo sapiens
tttttaaactaagta

SEQ ID NO: 220591 - DNA, 15 bp, Homo sapiens
ttttttaaactaagt

SEQ ID NO: 220592 - DNA, 15 bp, Homo sapiens
attttttaaactaag

SEQ ID NO: 220593 - DNA, 15 bp, Homo sapiens
tattttttaaactaa

SEQ ID NO: 220594 - DNA, 15 bp, Homo sapiens
ttattttttaaacta

SEQ ID NO: 220595 - DNA, 15 bp, Homo sapiens
tttattttttaaact

SEQ ID NO: 220596 - DNA, 15 bp, Homo sapiens
atttattttttaaac

SEQ ID NO: 220597 - DNA, 15 bp, Homo sapiens
gatttattttttaaa

SEQ ID NO: 220598 - DNA, 15 bp, Homo sapiens
agatttattttttaa

SEQ ID NO: 220599 - DNA, 15 bp, Homo sapiens
cagatttatttttta

SEQ ID NO: 220600 - DNA, 15 bp, Homo sapiens
ccagatttatttttt

SEQ ID NO: 220601 - DNA, 15 bp, Homo sapiens
cccagatttattttt

SEQ ID NO: 220602 - DNA, 15 bp, Homo sapiens
acccagatttatttt

SEQ ID NO: 220603 - DNA, 15 bp, Homo sapiens
tacccagatttattt

SEQ ID NO: 220604 - DNA, 15 bp, Homo sapiens
gtacccagatttatt

SEQ ID NO: 220605 - DNA, 15 bp, Homo sapiens
tgtacccagatttat

SEQ ID NO: 220606 - DNA, 15 bp, Homo sapiens
ctgtacccagattta

SEQ ID NO: 220607 - DNA, 15 bp, Homo sapiens
gctgtacccagattt

SEQ ID NO: 220608 - DNA, 15 bp, Homo sapiens
cgctgtacccagatt

SEQ ID NO: 220609 - DNA, 15 bp, Homo sapiens
ccgctgtacccagat

SEQ ID NO: 220610 - DNA, 15 bp, Homo sapiens
gccgctgtacccaga

SEQ ID NO: 220611 - DNA, 15 bp, Homo sapiens
agccgctgtacccag

SEQ ID NO: 220612 - DNA, 15 bp, Homo sapiens
gagccgctgtaccca

SEQ ID NO: 220613 - DNA, 15 bp, Homo sapiens
tgagccgctgtaccc

SEQ ID NO: 220614 - DNA, 15 bp, Homo sapiens
gtgagccgctgtacc

SEQ ID NO: 220615 - DNA, 15 bp, Homo sapiens
cgtgagccgctgtac

SEQ ID NO: 220616 - DNA, 15 bp, Homo sapiens
gcgtgagccgctgta

SEQ ID NO: 220617 - DNA, 15 bp, Homo sapiens
ggcgtgagccgctgt

SEQ ID NO: 220618 - DNA, 15 bp, Homo sapiens
aggcgtgagccgctg

SEQ ID NO: 220619 - DNA, 15 bp, Homo sapiens
caggcgtgagccgct

SEQ ID NO: 220620 - DNA, 15 bp, Homo sapiens
acaggcgtgagccgc

SEQ ID NO: 220621 - DNA, 15 bp, Homo sapiens
tacaggcgtgagccg

SEQ ID NO: 220622 - DNA, 15 bp, Homo sapiens
gtacaggcgtgagcc

SEQ ID NO: 220623 - DNA, 15 bp, Homo sapiens
agtacaggcgtgagc

SEQ ID NO: 220624 - DNA, 15 bp, Homo sapiens
gagtacaggcgtgag

SEQ ID NO: 220625 - DNA, 15 bp, Homo sapiens
ggagtacaggcgtga

SEQ ID NO: 220626 - DNA, 15 bp, Homo sapiens
gggagtacaggcgtg

SEQ ID NO: 220627 - DNA, 15 bp, Homo sapiens
tgggagtacaggcgt

SEQ ID NO: 220628 - DNA, 15 bp, Homo sapiens
ctgggagtacaggcg

SEQ ID NO: 220629 - DNA, 15 bp, Homo sapiens
gctgggagtacaggc

SEQ ID NO: 220630 - DNA, 15 bp, Homo sapiens
tgctgggagtacagg

SEQ ID NO: 220631 - DNA, 15 bp, Homo sapiens
gtgctgggagtacag

SEQ ID NO: 220632 - DNA, 15 bp, Homo sapiens
agtgctgggagtaca

SEQ ID NO: 220633 - DNA, 15 bp, Homo sapiens
aagtgctgggagtac

SEQ ID NO: 220634 - DNA, 15 bp, Homo sapiens
aaagtgctgggagta

SEQ ID NO: 220635 - DNA, 15 bp, Homo sapiens
caaagtgctgggagt

SEQ ID NO: 220636 - DNA, 15 bp, Homo sapiens
ccaaagtgctgggag

SEQ ID NO: 220637 - DNA, 15 bp, Homo sapiens
acctgcctcggcctc

SEQ ID NO: 220638 - DNA, 15 bp, Homo sapiens
cacctgcctcggcct

SEQ ID NO: 220639 - DNA, 15 bp, Homo sapiens
ccacctgcctcggcc

SEQ ID NO: 220640 - DNA, 15 bp, Homo sapiens
tccacctgcctcggc

SEQ ID NO: 220641 - DNA, 15 bp, Homo sapiens
atccacctgcctcgg

SEQ ID NO: 220642 - DNA, 15 bp, Homo sapiens
gatccacctgcctcg

SEQ ID NO: 220643 - DNA, 15 bp, Homo sapiens
tgatccacctgcctc

SEQ ID NO: 220644 - DNA, 15 bp, Homo sapiens
gtgatccacctgcct

SEQ ID NO: 220645 - DNA, 15 bp, Homo sapiens
ggtgatccacctgcc

SEQ ID NO: 220646 - DNA, 15 bp, Homo sapiens
aggtgatccacctgc

SEQ ID NO: 220647 - DNA, 15 bp, Homo sapiens
gaggtgatccacctg

SEQ ID NO: 220648 - DNA, 15 bp, Homo sapiens
tgaggtgatccacct

SEQ ID NO: 220649 - DNA, 15 bp, Homo sapiens
ctgaggtgatccacc

SEQ ID NO: 220650 - DNA, 15 bp, Homo sapiens
cctgaggtgatccac

SEQ ID NO: 220651 - DNA, 15 bp, Homo sapiens
ccctgaggtgatcca

SEQ ID NO: 220652 - DNA, 15 bp, Homo sapiens
gccctgaggtgatcc

SEQ ID NO: 220653 - DNA, 15 bp, Homo sapiens
tgccctgaggtgatc

SEQ ID NO: 220654 - DNA, 15 bp, Homo sapiens
ctgccctgaggtgat

SEQ ID NO: 220655 - DNA, 15 bp, Homo sapiens
cctgccctgaggtga

SEQ ID NO: 220656 - DNA, 15 bp, Homo sapiens
tcctgccctgaggtg

SEQ ID NO: 220657 - DNA, 15 bp, Homo sapiens
ctcctgccctgaggt

SEQ ID NO: 220658 - DNA, 15 bp, Homo sapiens
actcctgccctgagg

SEQ ID NO: 220659 - DNA, 15 bp, Homo sapiens
aactcctgccctgag

SEQ ID NO: 220660 - DNA, 15 bp, Homo sapiens
gaactcctgccctga

SEQ ID NO: 220661 - DNA, 15 bp, Homo sapiens
cgaactcctgccctg

SEQ ID NO: 220662 - DNA, 15 bp, Homo sapiens
tcgaactcctgccct

SEQ ID NO: 220663 - DNA, 15 bp, Homo sapiens
ctcgaactcctgccc

SEQ ID NO: 220664 - DNA, 15 bp, Homo sapiens
tctcgaactcctgcc

SEQ ID NO: 220665 - DNA, 15 bp, Homo sapiens
gtctcgaactcctgc

SEQ ID NO: 220666 - DNA, 15 bp, Homo sapiens
ttggtctcgaactcc

SEQ ID NO: 220667 - DNA, 15 bp, Homo sapiens
gttggtctcgaactc

SEQ ID NO: 220668 - DNA, 15 bp, Homo sapiens
ggttggtctcgaact

SEQ ID NO: 220669 - DNA, 15 bp, Homo sapiens
aggttggtctcgaac

SEQ ID NO: 220670 - DNA, 15 bp, Homo sapiens
caggttggtctcgaa

SEQ ID NO: 220671 - DNA, 15 bp, Homo sapiens
ccaggttggtctcga

SEQ ID NO: 220672 - DNA, 15 bp, Homo sapiens
gccaggttggtctcg

SEQ ID NO: 220673 - DNA, 15 bp, Homo sapiens
ggccaggttggtctc

SEQ ID NO: 220674 - DNA, 15 bp, Homo sapiens
tggccaggttggtct

SEQ ID NO: 220675 - DNA, 15 bp, Homo sapiens
ttggccaggttggtc

SEQ ID NO: 220676 - DNA, 15 bp, Homo sapiens
gttggccaggttggt

SEQ ID NO: 220677 - DNA, 15 bp, Homo sapiens
tgttggccaggttgg

SEQ ID NO: 220678 - DNA, 15 bp, Homo sapiens
atgttggccaggttg

SEQ ID NO: 220679 - DNA, 15 bp, Homo sapiens
ccatgttggccaggt

SEQ ID NO: 220680 - DNA, 15 bp, Homo sapiens
gccatgttggccagg

SEQ ID NO: 220681 - DNA, 15 bp, Homo sapiens
tgccatgttggccag

SEQ ID NO: 220682 - DNA, 15 bp, Homo sapiens
ttgccatgttggcca

SEQ ID NO: 220683 - DNA, 15 bp, Homo sapiens
tttgccatgttggcc

SEQ ID NO: 220684 - DNA, 15 bp, Homo sapiens
ttttgccatgttggc

SEQ ID NO: 220685 - DNA, 15 bp, Homo sapiens
gttttgccatgttgg

SEQ ID NO: 220686 - DNA, 15 bp, Homo sapiens
ggttttgccatgttg

SEQ ID NO: 220687 - DNA, 15 bp, Homo sapiens
gggttttgccatgtt

SEQ ID NO: 220688 - DNA, 15 bp, Homo sapiens
ggggttttgccatgt

SEQ ID NO: 220689 - DNA, 15 bp, Homo sapiens
tggggttttgccatg

SEQ ID NO: 220690 - DNA, 15 bp, Homo sapiens
atggggttttgccat

SEQ ID NO: 220691 - DNA, 15 bp, Homo sapiens
gatggggttttgcca

SEQ ID NO: 220692 - DNA, 15 bp, Homo sapiens
agatggggttttgcc

SEQ ID NO: 220693 - DNA, 15 bp, Homo sapiens
gagatggggttttgc

SEQ ID NO: 220694 - DNA, 15 bp, Homo sapiens
agagatggggttttg

SEQ ID NO: 220695 - DNA, 15 bp, Homo sapiens
tagagatggggtttt

SEQ ID NO: 220696 - DNA, 15 bp, Homo sapiens
catttttagtagaga

SEQ ID NO: 220697 - DNA, 15 bp, Homo sapiens
gcatttttagtagag

SEQ ID NO: 220698 - DNA, 15 bp, Homo sapiens
tgcatttttagtaga

SEQ ID NO: 220699 - DNA, 15 bp, Homo sapiens
ttgcatttttagtag

SEQ ID NO: 220700 - DNA, 15 bp, Homo sapiens
tttgcatttttagta

SEQ ID NO: 220701 - DNA, 15 bp, Homo sapiens
ttttgcatttttagt

SEQ ID NO: 220702 - DNA, 15 bp, Homo sapiens
cttttgcatttttag

SEQ ID NO: 220703 - DNA, 15 bp, Homo sapiens
acttttgcattttta

SEQ ID NO: 220704 - DNA, 15 bp, Homo sapiens
aacttttgcattttt

SEQ ID NO: 220705 - DNA, 15 bp, Homo sapiens
taacttttgcatttt

SEQ ID NO: 220706 - DNA, 15 bp, Homo sapiens
ctaacttttgcattt

SEQ ID NO: 220707 - DNA, 15 bp, Homo sapiens
gctaacttttgcatt

SEQ ID NO: 220708 - DNA, 15 bp, Homo sapiens
ggctaacttttgcat

SEQ ID NO: 220709 - DNA, 15 bp, Homo sapiens
tggctaacttttgca

SEQ ID NO: 220710 - DNA, 15 bp, Homo sapiens
ctggctaacttttgc

SEQ ID NO: 220711 - DNA, 15 bp, Homo sapiens
cctggctaacttttg

SEQ ID NO: 220712 - DNA, 15 bp, Homo sapiens
gcctggctaactttt

SEQ ID NO: 220713 - DNA, 15 bp, Homo sapiens
tgcctggctaacttt

SEQ ID NO: 220714 - DNA, 15 bp, Homo sapiens
atgcctggctaactt

SEQ ID NO: 220715 - DNA, 15 bp, Homo sapiens
catgcctggctaact

SEQ ID NO: 220716 - DNA, 15 bp, Homo sapiens
ccatgcctggctaac

SEQ ID NO: 220717 - DNA, 15 bp, Homo sapiens
taccatgcctggcta

SEQ ID NO: 220718 - DNA, 15 bp, Homo sapiens
ctaccatgcctggct

SEQ ID NO: 220719 - DNA, 15 bp, Homo sapiens
gctaccatgcctggc

SEQ ID NO: 220720 - DNA, 15 bp, Homo sapiens
cgctaccatgcctgg

SEQ ID NO: 220721 - DNA, 15 bp, Homo sapiens
ccgctaccatgcctg

SEQ ID NO: 220722 - DNA, 15 bp, Homo sapiens
cccgctaccatgcct

SEQ ID NO: 220723 - DNA, 15 bp, Homo sapiens
gcccgctaccatgcc

SEQ ID NO: 220724 - DNA, 15 bp, Homo sapiens
tgcccgctaccatgc

SEQ ID NO: 220725 - DNA, 15 bp, Homo sapiens
gtgcccgctaccatg

SEQ ID NO: 220726 - DNA, 15 bp, Homo sapiens
ggtgcccgctaccat

SEQ ID NO: 220727 - DNA, 15 bp, Homo sapiens
aggtgcccgctacca

SEQ ID NO: 220728 - DNA, 15 bp, Homo sapiens
caggtgcccgctacc

SEQ ID NO: 220729 - DNA, 15 bp, Homo sapiens
acaggtgcccgctac

SEQ ID NO: 220730 - DNA, 15 bp, Homo sapiens
tacaggtgcccgcta

SEQ ID NO: 220731 - DNA, 15 bp, Homo sapiens
ttacaggtgcccgct

SEQ ID NO: 220732 - DNA, 15 bp, Homo sapiens
gggattacaggtgcc

SEQ ID NO: 220733 - DNA, 15 bp, Homo sapiens
gagtagctgggatta

SEQ ID NO: 220734 - DNA, 15 bp, Homo sapiens
cgagtagctgggatt

SEQ ID NO: 220735 - DNA, 15 bp, Homo sapiens
ccgagtagctgggat

SEQ ID NO: 220736 - DNA, 15 bp, Homo sapiens
cccgagtagctggga

SEQ ID NO: 220737 - DNA, 15 bp, Homo sapiens
tcccgagtagctggg

SEQ ID NO: 220738 - DNA, 15 bp, Homo sapiens
tctcccgagtagctg

SEQ ID NO: 220739 - DNA, 15 bp, Homo sapiens
gtctcccgagtagct

SEQ ID NO: 220740 - DNA, 15 bp, Homo sapiens
agtctcccgagtagc

SEQ ID NO: 220741 - DNA, 15 bp, Homo sapiens
cagtctcccgagtag

SEQ ID NO: 220742 - DNA, 15 bp, Homo sapiens
tcagtctcccgagta

SEQ ID NO: 220743 - DNA, 15 bp, Homo sapiens
ttcagtctcccgagt

SEQ ID NO: 220744 - DNA, 15 bp, Homo sapiens
attcagtctcccgag

SEQ ID NO: 220745 - DNA, 15 bp, Homo sapiens
aattcagtctcccga

SEQ ID NO: 220746 - DNA, 15 bp, Homo sapiens
taattcagtctcccg

SEQ ID NO: 220747 - DNA, 15 bp, Homo sapiens
ctaattcagtctccc

SEQ ID NO: 220748 - DNA, 15 bp, Homo sapiens
cctaattcagtctcc

SEQ ID NO: 220749 - DNA, 15 bp, Homo sapiens
tcctaattcagtctc

SEQ ID NO: 220750 - DNA, 15 bp, Homo sapiens
ctcctaattcagtct

SEQ ID NO: 220751 - DNA, 15 bp, Homo sapiens
tctcctaattcagtc

SEQ ID NO: 220752 - DNA, 15 bp, Homo sapiens
ttctcctaattcagt

SEQ ID NO: 220753 - DNA, 15 bp, Homo sapiens
attctcctaattcag

SEQ ID NO: 220754 - DNA, 15 bp, Homo sapiens
gattctcctaattca

SEQ ID NO: 220755 - DNA, 15 bp, Homo sapiens
tgattctcctaattc

SEQ ID NO: 220756 - DNA, 15 bp, Homo sapiens
gtgattctcctaatt

SEQ ID NO: 220757 - DNA, 15 bp, Homo sapiens
agtgattctcctaat

SEQ ID NO: 220758 - DNA, 15 bp, Homo sapiens
aagtgattctcctaa

SEQ ID NO: 220759 - DNA, 15 bp, Homo sapiens
caagtgattctccta

SEQ ID NO: 220760 - DNA, 15 bp, Homo sapiens
tctcccaggttcaag

SEQ ID NO: 220761 - DNA, 15 bp, Homo sapiens
gtctcccaggttcaa

SEQ ID NO: 220762 - DNA, 15 bp, Homo sapiens
tgtctcccaggttca

SEQ ID NO: 220763 - DNA, 15 bp, Homo sapiens
ttgtctcccaggttc

SEQ ID NO: 220764 - DNA, 15 bp, Homo sapiens
tttgtctcccaggtt

SEQ ID NO: 220765 - DNA, 15 bp, Homo sapiens
ctttgtctcccaggt

SEQ ID NO: 220766 - DNA, 15 bp, Homo sapiens
cctttgtctcccagg

SEQ ID NO: 220767 - DNA, 15 bp, Homo sapiens
acctttgtctcccag

SEQ ID NO: 220768 - DNA, 15 bp, Homo sapiens
aacctttgtctccca

SEQ ID NO: 220769 - DNA, 15 bp, Homo sapiens
caacctttgtctccc

SEQ ID NO: 220770 - DNA, 15 bp, Homo sapiens
tcaacctttgtctcc

SEQ ID NO: 220771 - DNA, 15 bp, Homo sapiens
ttcaacctttgtctc

SEQ ID NO: 220772 - DNA, 15 bp, Homo sapiens
cttcaacctttgtct

SEQ ID NO: 220773 - DNA, 15 bp, Homo sapiens
acttcaacctttgtc

SEQ ID NO: 220774 - DNA, 15 bp, Homo sapiens
cacttcaacctttgt

SEQ ID NO: 220775 - DNA, 15 bp, Homo sapiens
tcacttcaacctttg

SEQ ID NO: 220776 - DNA, 15 bp, Homo sapiens
ctcacttcaaccttt

SEQ ID NO: 220777 - DNA, 15 bp, Homo sapiens
gctcacttcaacctt

SEQ ID NO: 220778 - DNA, 15 bp, Homo sapiens
ggctcacttcaacct

SEQ ID NO: 220779 - DNA, 15 bp, Homo sapiens
tggctcacttcaacc

SEQ ID NO: 220780 - DNA, 15 bp, Homo sapiens
ttggctcacttcaac

SEQ ID NO: 220781 - DNA, 15 bp, Homo sapiens
cttggctcacttcaa

SEQ ID NO: 220782 - DNA, 15 bp, Homo sapiens
tcttggctcacttca

SEQ ID NO: 220783 - DNA, 15 bp, Homo sapiens
atcttggctcacttc

SEQ ID NO: 220784 - DNA, 15 bp, Homo sapiens
gatcttggctcactt

SEQ ID NO: 220785 - DNA, 15 bp, Homo sapiens
cgatcttggctcact

SEQ ID NO: 220786 - DNA, 15 bp, Homo sapiens
acgatcttggctcac

SEQ ID NO: 220787 - DNA, 15 bp, Homo sapiens
cacgatcttggctca

SEQ ID NO: 220788 - DNA, 15 bp, Homo sapiens
gcacgatcttggctc

SEQ ID NO: 220789 - DNA, 15 bp, Homo sapiens
cagtggcacgatctt

SEQ ID NO: 220790 - DNA, 15 bp, Homo sapiens
gtgcagtggcacgat

SEQ ID NO: 220791 - DNA, 15 bp, Homo sapiens
agtgcagtggcacga

SEQ ID NO: 220792 - DNA, 15 bp, Homo sapiens
cagtgcagtggcacg

SEQ ID NO: 220793 - DNA, 15 bp, Homo sapiens
acagtgcagtggcac

SEQ ID NO: 220794 - DNA, 15 bp, Homo sapiens
cacagtgcagtggca

SEQ ID NO: 220795 - DNA, 15 bp, Homo sapiens
acacagtgcagtggc

SEQ ID NO: 220796 - DNA, 15 bp, Homo sapiens
gacacagtgcagtgg

SEQ ID NO: 220797 - DNA, 15 bp, Homo sapiens
agacacagtgcagtg

SEQ ID NO: 220798 - DNA, 15 bp, Homo sapiens
gagacacagtgcagt

SEQ ID NO: 220799 - DNA, 15 bp, Homo sapiens
tgagacacagtgcag

SEQ ID NO: 220800 - DNA, 15 bp, Homo sapiens
ttgagacacagtgca

SEQ ID NO: 220801 - DNA, 15 bp, Homo sapiens
tttgagacacagtgc

SEQ ID NO: 220802 - DNA, 15 bp, Homo sapiens
atttgagacacagtg

SEQ ID NO: 220803 - DNA, 15 bp, Homo sapiens
tatttgagacacagt

SEQ ID NO: 220804 - DNA, 15 bp, Homo sapiens
ttatttgagacacag

SEQ ID NO: 220805 - DNA, 15 bp, Homo sapiens
tttatttgagacaca

SEQ ID NO: 220806 - DNA, 15 bp, Homo sapiens
atttatttgagacac

SEQ ID NO: 220807 - DNA, 15 bp, Homo sapiens
tatttatttgagaca

SEQ ID NO: 220808 - DNA, 15 bp, Homo sapiens
ttatttatttgagac

SEQ ID NO: 220809 - DNA, 15 bp, Homo sapiens
tttatttatttgaga

SEQ ID NO: 220810 - DNA, 15 bp, Homo sapiens
atttatttatttgag

SEQ ID NO: 220811 - DNA, 15 bp, Homo sapiens
tatttatttatttga

SEQ ID NO: 220812 - DNA, 15 bp, Homo sapiens
ttatttatttatttg

SEQ ID NO: 220813 - DNA, 15 bp, Homo sapiens
atttatttatttatt

SEQ ID NO: 220814 - DNA, 15 bp, Homo sapiens
catttatttatttat

SEQ ID NO: 220815 - DNA, 15 bp, Homo sapiens
tcatttatttattta

SEQ ID NO: 220816 - DNA, 15 bp, Homo sapiens
ttcatttatttattt

SEQ ID NO: 220817 - DNA, 15 bp, Homo sapiens
attcatttatttatt

SEQ ID NO: 220818 - DNA, 15 bp, Homo sapiens
tattcatttatttat

SEQ ID NO: 220819 - DNA, 15 bp, Homo sapiens
ttattcatttattta

SEQ ID NO: 220820 - DNA, 15 bp, Homo sapiens
attattcatttattt

SEQ ID NO: 220821 - DNA, 15 bp, Homo sapiens
tattattcatttatt

SEQ ID NO: 220822 - DNA, 15 bp, Homo sapiens
ttattattcatttat

SEQ ID NO: 220823 - DNA, 15 bp, Homo sapiens
tttattattcattta

SEQ ID NO: 220824 - DNA, 15 bp, Homo sapiens
ctttattattcattt

SEQ ID NO: 220825 - DNA, 15 bp, Homo sapiens
gctttattattcatt

SEQ ID NO: 220826 - DNA, 15 bp, Homo sapiens
ggctttattattcat

SEQ ID NO: 220827 - DNA, 15 bp, Homo sapiens
tggctttattattca

SEQ ID NO: 220828 - DNA, 15 bp, Homo sapiens
ctggctttattattc

SEQ ID NO: 220829 - DNA, 15 bp, Homo sapiens
cctggctttattatt

SEQ ID NO: 220830 - DNA, 15 bp, Homo sapiens
gcctggctttattat

SEQ ID NO: 220831 - DNA, 15 bp, Homo sapiens
tgcctggctttatta

SEQ ID NO: 220832 - DNA, 15 bp, Homo sapiens
atgcctggctttatt

SEQ ID NO: 220833 - DNA, 15 bp, Homo sapiens
catgcctggctttat

SEQ ID NO: 220834 - DNA, 15 bp, Homo sapiens
ccatgcctggcttta

SEQ ID NO: 220835 - DNA, 15 bp, Homo sapiens
accatgcctggcttt

SEQ ID NO: 220836 - DNA, 15 bp, Homo sapiens
caccatgcctggctt

SEQ ID NO: 220837 - DNA, 15 bp, Homo sapiens
tccaccatgcctggc

SEQ ID NO: 220838 - DNA, 15 bp, Homo sapiens
ctccaccatgcctgg

SEQ ID NO: 220839 - DNA, 15 bp, Homo sapiens
cctccaccatgcctg

SEQ ID NO: 220840 - DNA, 15 bp, Homo sapiens
tcctccaccatgcct

SEQ ID NO: 220841 - DNA, 15 bp, Homo sapiens
gtcctccaccatgcc

SEQ ID NO: 220842 - DNA, 15 bp, Homo sapiens
ggtcctccaccatgc

SEQ ID NO: 220843 - DNA, 15 bp, Homo sapiens
tggtcctccaccatg

SEQ ID NO: 220844 - DNA, 15 bp, Homo sapiens
gtggtcctccaccat

SEQ ID NO: 220845 - DNA, 15 bp, Homo sapiens
agtggtcctccacca

SEQ ID NO: 220846 - DNA, 15 bp, Homo sapiens
aagtggtcctccacc

SEQ ID NO: 220847 - DNA, 15 bp, Homo sapiens
caagtggtcctccac

SEQ ID NO: 220848 - DNA, 15 bp, Homo sapiens
tcaagtggtcctcca

SEQ ID NO: 220849 - DNA, 15 bp, Homo sapiens
ctcaagtggtcctcc

SEQ ID NO: 220850 - DNA, 15 bp, Homo sapiens
gctcaagtggtcctc

SEQ ID NO: 220851 - DNA, 15 bp, Homo sapiens
ggctcaagtggtcct

SEQ ID NO: 220852 - DNA, 15 bp, Homo sapiens
gggctcaagtggtcc

SEQ ID NO: 220853 - DNA, 15 bp, Homo sapiens
tgggctcaagtggtc

SEQ ID NO: 220854 - DNA, 15 bp, Homo sapiens
ctgggctcaagtggt

SEQ ID NO: 220855 - DNA, 15 bp, Homo sapiens
cctgggctcaagtgg

SEQ ID NO: 220856 - DNA, 15 bp, Homo sapiens
tcctgggctcaagtg

SEQ ID NO: 220857 - DNA, 15 bp, Homo sapiens
ctcctgggctcaagt

SEQ ID NO: 220858 - DNA, 15 bp, Homo sapiens
caactcctgggctca

SEQ ID NO: 220859 - DNA, 15 bp, Homo sapiens
ccaactcctgggctc

SEQ ID NO: 220860 - DNA, 15 bp, Homo sapiens
tccaactcctgggct

SEQ ID NO: 220861 - DNA, 15 bp, Homo sapiens
ctccaactcctgggc

SEQ ID NO: 220862 - DNA, 15 bp, Homo sapiens
cctccaactcctggg

SEQ ID NO: 220863 - DNA, 15 bp, Homo sapiens
gcctccaactcctgg

SEQ ID NO: 220864 - DNA, 15 bp, Homo sapiens
agcctccaactcctg

SEQ ID NO: 220865 - DNA, 15 bp, Homo sapiens
cagcctccaactcct

SEQ ID NO: 220866 - DNA, 15 bp, Homo sapiens
gcagcctccaactcc

SEQ ID NO: 220867 - DNA, 15 bp, Homo sapiens
tgcagcctccaactc

SEQ ID NO: 220868 - DNA, 15 bp, Homo sapiens
ctgcagcctccaact

SEQ ID NO: 220869 - DNA, 15 bp, Homo sapiens
actgcagcctccaac

SEQ ID NO: 220870 - DNA, 15 bp, Homo sapiens
cactgcagcctccaa

SEQ ID NO: 220871 - DNA, 15 bp, Homo sapiens
ccactgcagcctcca

SEQ ID NO: 220872 - DNA, 15 bp, Homo sapiens
cccactgcagcctcc

SEQ ID NO: 220873 - DNA, 15 bp, Homo sapiens
gcccactgcagcctc

SEQ ID NO: 220874 - DNA, 15 bp, Homo sapiens
agcccactgcagcct

SEQ ID NO: 220875 - DNA, 15 bp, Homo sapiens
cagcccactgcagcc

SEQ ID NO: 220876 - DNA, 15 bp, Homo sapiens
acagcccactgcagc

SEQ ID NO: 220877 - DNA, 15 bp, Homo sapiens
cacagcccactgcag

SEQ ID NO: 220878 - DNA, 15 bp, Homo sapiens
tcacagcccactgca

SEQ ID NO: 220879 - DNA, 15 bp, Homo sapiens
atcacagcccactgc

SEQ ID NO: 220880 - DNA, 15 bp, Homo sapiens
aatcacagcccactg

SEQ ID NO: 220881 - DNA, 15 bp, Homo sapiens
caatcacagcccact

SEQ ID NO: 220882 - DNA, 15 bp, Homo sapiens
gcaatcacagcccac

SEQ ID NO: 220883 - DNA, 15 bp, Homo sapiens
tgcaatcacagccca

SEQ ID NO: 220884 - DNA, 15 bp, Homo sapiens
gtgcaatcacagccc

SEQ ID NO: 220885 - DNA, 15 bp, Homo sapiens
ggtgcaatcacagcc

SEQ ID NO: 220886 - DNA, 15 bp, Homo sapiens
tggtgcaatcacagc

SEQ ID NO: 220887 - DNA, 15 bp, Homo sapiens
gtggtgcaatcacag

SEQ ID NO: 220888 - DNA, 15 bp, Homo sapiens
agtggtgcaatcaca

SEQ ID NO: 220889 - DNA, 15 bp, Homo sapiens
cagtggtgcaatcac

SEQ ID NO: 220890 - DNA, 15 bp, Homo sapiens
gcagtggtgcaatca

SEQ ID NO: 220891 - DNA, 15 bp, Homo sapiens
tgcagtggtgcaatc

SEQ ID NO: 220892 - DNA, 15 bp, Homo sapiens
gtgcagtggtgcaat

SEQ ID NO: 220893 - DNA, 15 bp, Homo sapiens
agtgcagtggtgcaa

SEQ ID NO: 220894 - DNA, 15 bp, Homo sapiens
gagtgcagtggtgca

SEQ ID NO: 220895 - DNA, 15 bp, Homo sapiens
agagtgcagtggtgc

SEQ ID NO: 220896 - DNA, 15 bp, Homo sapiens
tagagtgcagtggtg

SEQ ID NO: 220897 - DNA, 15 bp, Homo sapiens
ctagagtgcagtggt

SEQ ID NO: 220898 - DNA, 15 bp, Homo sapiens
gctagagtgcagtgg

SEQ ID NO: 220899 - DNA, 15 bp, Homo sapiens
ggctagagtgcagtg

SEQ ID NO: 220900 - DNA, 15 bp, Homo sapiens
aggctagagtgcagt

SEQ ID NO: 220901 - DNA, 15 bp, Homo sapiens
caggctagagtgcag

SEQ ID NO: 220902 - DNA, 15 bp, Homo sapiens
ccaggctagagtgca

SEQ ID NO: 220903 - DNA, 15 bp, Homo sapiens
cccaggctagagtgc

SEQ ID NO: 220904 - DNA, 15 bp, Homo sapiens
ctgtcacccaggcta

SEQ ID NO: 220905 - DNA, 15 bp, Homo sapiens
tgtctcactctgtca

SEQ ID NO: 220906 - DNA, 15 bp, Homo sapiens
gtgtctcactctgtc

SEQ ID NO: 220907 - DNA, 15 bp, Homo sapiens
tgtgtctcactctgt

SEQ ID NO: 220908 - DNA, 15 bp, Homo sapiens
atgtgtctcactctg

SEQ ID NO: 220909 - DNA, 15 bp, Homo sapiens
aatgtgtctcactct

SEQ ID NO: 220910 - DNA, 15 bp, Homo sapiens
gaatgtgtctcactc

SEQ ID NO: 220911 - DNA, 15 bp, Homo sapiens
agaatgtgtctcact

SEQ ID NO: 220912 - DNA, 15 bp, Homo sapiens
gagaatgtgtctcac

SEQ ID NO: 220913 - DNA, 15 bp, Homo sapiens
agagaatgtgtctca

SEQ ID NO: 220914 - DNA, 15 bp, Homo sapiens
tagagaatgtgtctc

SEQ ID NO: 220915 - DNA, 15 bp, Homo sapiens
atagagaatgtgtct

SEQ ID NO: 220916 - DNA, 15 bp, Homo sapiens
aatagagaatgtgtc

SEQ ID NO: 220917 - DNA, 15 bp, Homo sapiens
aaaaaaaaaaaaatt

SEQ ID NO: 220918 - DNA, 15 bp, Homo sapiens
gaaaaaaaaaaaaaa

SEQ ID NO: 220919 - DNA, 15 bp, Homo sapiens
cgaaaaaaaaaaaaa

SEQ ID NO: 220920 - DNA, 15 bp, Homo sapiens
ccgaaaaaaaaaaaa

SEQ ID NO: 220921 - DNA, 15 bp, Homo sapiens
tccgaaaaaaaaaaa

SEQ ID NO: 220922 - DNA, 15 bp, Homo sapiens
ctccgaaaaaaaaaa

SEQ ID NO: 220923 - DNA, 15 bp, Homo sapiens
actccgaaaaaaaaa

SEQ ID NO: 220924 - DNA, 15 bp, Homo sapiens
gactccgaaaaaaaa

SEQ ID NO: 220925 - DNA, 15 bp, Homo sapiens
agactccgaaaaaaa

SEQ ID NO: 220926 - DNA, 15 bp, Homo sapiens
aagactccgaaaaaa

SEQ ID NO: 220927 - DNA, 15 bp, Homo sapiens
caagactccgaaaaa

SEQ ID NO: 220928 - DNA, 15 bp, Homo sapiens
gcaagactccgaaaa

SEQ ID NO: 220929 - DNA, 15 bp, Homo sapiens
agcaagactccgaaa

SEQ ID NO: 220930 - DNA, 15 bp, Homo sapiens
gagcaagactccgaa

SEQ ID NO: 220931 - DNA, 15 bp, Homo sapiens
agagcaagactccga

SEQ ID NO: 220932 - DNA, 15 bp, Homo sapiens
cagagcaagactccg

SEQ ID NO: 220933 - DNA, 15 bp, Homo sapiens
atcactgcactccag

SEQ ID NO: 220934 - DNA, 15 bp, Homo sapiens
catcactgcactcca

SEQ ID NO: 220935 - DNA, 15 bp, Homo sapiens
gcatcactgcactcc

SEQ ID NO: 220936 - DNA, 15 bp, Homo sapiens
cgcatcactgcactc

SEQ ID NO: 220937 - DNA, 15 bp, Homo sapiens
tcgcatcactgcact

SEQ ID NO: 220938 - DNA, 15 bp, Homo sapiens
atcgcatcactgcac

SEQ ID NO: 220939 - DNA, 15 bp, Homo sapiens
gatcgcatcactgca

SEQ ID NO: 220940 - DNA, 15 bp, Homo sapiens
agatcgcatcactgc

SEQ ID NO: 220941 - DNA, 15 bp, Homo sapiens
gagatcgcatcactg

SEQ ID NO: 220942 - DNA, 15 bp, Homo sapiens
cgagatcgcatcact

SEQ ID NO: 220943 - DNA, 15 bp, Homo sapiens
ccgagatcgcatcac

SEQ ID NO: 220944 - DNA, 15 bp, Homo sapiens
gccgagatcgcatca

SEQ ID NO: 220945 - DNA, 15 bp, Homo sapiens
agccgagatcgcatc

SEQ ID NO: 220946 - DNA, 15 bp, Homo sapiens
gagccgagatcgcat

SEQ ID NO: 220947 - DNA, 15 bp, Homo sapiens
tccaggaggtggagg

SEQ ID NO: 220948 - DNA, 15 bp, Homo sapiens
atccaggaggtggag

SEQ ID NO: 220949 - DNA, 15 bp, Homo sapiens
aatccaggaggtgga

SEQ ID NO: 220950 - DNA, 15 bp, Homo sapiens
gaatccaggaggtgg

SEQ ID NO: 220951 - DNA, 15 bp, Homo sapiens
tgaatccaggaggtg

SEQ ID NO: 220952 - DNA, 15 bp, Homo sapiens
ttgaatccaggaggt

SEQ ID NO: 220953 - DNA, 15 bp, Homo sapiens
cttgaatccaggagg

SEQ ID NO: 220954 - DNA, 15 bp, Homo sapiens
gcttgaatccaggag

SEQ ID NO: 220955 - DNA, 15 bp, Homo sapiens
cgcttgaatccagga

SEQ ID NO: 220956 - DNA, 15 bp, Homo sapiens
tcgcttgaatccagg

SEQ ID NO: 220957 - DNA, 15 bp, Homo sapiens
atcgcttgaatccag

SEQ ID NO: 220958 - DNA, 15 bp, Homo sapiens
aatcgcttgaatcca

SEQ ID NO: 220959 - DNA, 15 bp, Homo sapiens
gaatcgcttgaatcc

SEQ ID NO: 220960 - DNA, 15 bp, Homo sapiens
agaatcgcttgaatc

SEQ ID NO: 220961 - DNA, 15 bp, Homo sapiens
gagaatcgcttgaat

SEQ ID NO: 220962 - DNA, 15 bp, Homo sapiens
tgcaggagaatcgct

SEQ ID NO: 220963 - DNA, 15 bp, Homo sapiens
atgcaggagaatcgc

SEQ ID NO: 220964 - DNA, 15 bp, Homo sapiens
gatgcaggagaatcg

SEQ ID NO: 220965 - DNA, 15 bp, Homo sapiens
tgatgcaggagaatc

SEQ ID NO: 220966 - DNA, 15 bp, Homo sapiens
ctgatgcaggagaat

SEQ ID NO: 220967 - DNA, 15 bp, Homo sapiens
gctgatgcaggagaa

SEQ ID NO: 220968 - DNA, 15 bp, Homo sapiens
ggctgatgcaggaga

SEQ ID NO: 220969 - DNA, 15 bp, Homo sapiens
aggctgatgcaggag

SEQ ID NO: 220970 - DNA, 15 bp, Homo sapiens
gaggctgatgcagga

SEQ ID NO: 220971 - DNA, 15 bp, Homo sapiens
tgaggctgatgcagg

SEQ ID NO: 220972 - DNA, 15 bp, Homo sapiens
atgaggctgatgcag

SEQ ID NO: 220973 - DNA, 15 bp, Homo sapiens
catgaggctgatgca

SEQ ID NO: 220974 - DNA, 15 bp, Homo sapiens
tcatgaggctgatgc

SEQ ID NO: 220975 - DNA, 15 bp, Homo sapiens
ctcatgaggctgatg

SEQ ID NO: 220976 - DNA, 15 bp, Homo sapiens
actcatgaggctgat

SEQ ID NO: 220977 - DNA, 15 bp, Homo sapiens
tactcatgaggctga

SEQ ID NO: 220978 - DNA, 15 bp, Homo sapiens
ctactcatgaggctg

SEQ ID NO: 220979 - DNA, 15 bp, Homo sapiens
gctactcatgaggct

SEQ ID NO: 220980 - DNA, 15 bp, Homo sapiens
agctactcatgaggc

SEQ ID NO: 220981 - DNA, 15 bp, Homo sapiens
cagctactcatgagg

SEQ ID NO: 220982 - DNA, 15 bp, Homo sapiens
ccagctactcatgag

SEQ ID NO: 220983 - DNA, 15 bp, Homo sapiens
cccagctactcatga

SEQ ID NO: 220984 - DNA, 15 bp, Homo sapiens
tcccagctactcatg

SEQ ID NO: 220985 - DNA, 15 bp, Homo sapiens
atcccagctactcat

SEQ ID NO: 220986 - DNA, 15 bp, Homo sapiens
gcatgcctgtaatcc

SEQ ID NO: 220987 - DNA, 15 bp, Homo sapiens
tgcatgcctgtaatc

SEQ ID NO: 220988 - DNA, 15 bp, Homo sapiens
gtgcatgcctgtaat

SEQ ID NO: 220989 - DNA, 15 bp, Homo sapiens
ggtgcatgcctgtaa

SEQ ID NO: 220990 - DNA, 15 bp, Homo sapiens
gtggtgcatgcctgt

SEQ ID NO: 220991 - DNA, 15 bp, Homo sapiens
agtggtgcatgcctg

SEQ ID NO: 220992 - DNA, 15 bp, Homo sapiens
tagtggtgcatgcct

SEQ ID NO: 220993 - DNA, 15 bp, Homo sapiens
gtagtggtgcatgcc

SEQ ID NO: 220994 - DNA, 15 bp, Homo sapiens
cgtagtggtgcatgc

SEQ ID NO: 220995 - DNA, 15 bp, Homo sapiens
gcgtagtggtgcatg

SEQ ID NO: 220996 - DNA, 15 bp, Homo sapiens
ggcgtagtggtgcat

SEQ ID NO: 220997 - DNA, 15 bp, Homo sapiens
aggcgtagtggtgca

SEQ ID NO: 220998 - DNA, 15 bp, Homo sapiens
caggcgtagtggtgc

SEQ ID NO: 220999 - DNA, 15 bp, Homo sapiens
ccaggcgtagtggtg

SEQ ID NO: 221000 - DNA, 15 bp, Homo sapiens
gccaggcgtagtggt

SEQ ID NO: 221001 - DNA, 15 bp, Homo sapiens
agccaggcgtagtgg

SEQ ID NO: 221002 - DNA, 15 bp, Homo sapiens
tagccaggcgtagtg

SEQ ID NO: 221003 - DNA, 15 bp, Homo sapiens
ttagccaggcgtagt

SEQ ID NO: 221004 - DNA, 15 bp, Homo sapiens
attagccaggcgtag

SEQ ID NO: 221005 - DNA, 15 bp, Homo sapiens
aattagccaggcgta

SEQ ID NO: 221006 - DNA, 15 bp, Homo sapiens
actaacatggtgaaa

SEQ ID NO: 221007 - DNA, 15 bp, Homo sapiens
gactaacatggtgaa

SEQ ID NO: 221008 - DNA, 15 bp, Homo sapiens
agactaacatggtga

SEQ ID NO: 221009 - DNA, 15 bp, Homo sapiens
cagactaacatggtg

SEQ ID NO: 221010 - DNA, 15 bp, Homo sapiens
ccagactaacatggt

SEQ ID NO: 221011 - DNA, 15 bp, Homo sapiens
gccagactaacatgg

SEQ ID NO: 221012 - DNA, 15 bp, Homo sapiens
agccagactaacatg

SEQ ID NO: 221013 - DNA, 15 bp, Homo sapiens
cagccagactaacat

SEQ ID NO: 221014 - DNA, 15 bp, Homo sapiens
ccagccagactaaca

SEQ ID NO: 221015 - DNA, 15 bp, Homo sapiens
accagccagactaac

SEQ ID NO: 221016 - DNA, 15 bp, Homo sapiens
gaccagccagactaa

SEQ ID NO: 221017 - DNA, 15 bp, Homo sapiens
agaccagccagacta

SEQ ID NO: 221018 - DNA, 15 bp, Homo sapiens
gagaccagccagact

SEQ ID NO: 221019 - DNA, 15 bp, Homo sapiens
cgagaccagccagac

SEQ ID NO: 221020 - DNA, 15 bp, Homo sapiens
tcgagaccagccaga

SEQ ID NO: 221021 - DNA, 15 bp, Homo sapiens
atcgagaccagccag

SEQ ID NO: 221022 - DNA, 15 bp, Homo sapiens
gatcgagaccagcca

SEQ ID NO: 221023 - DNA, 15 bp, Homo sapiens
agatcgagaccagcc

SEQ ID NO: 221024 - DNA, 15 bp, Homo sapiens
gagatcgagaccagc

SEQ ID NO: 221025 - DNA, 15 bp, Homo sapiens
ggagatcgagaccag

SEQ ID NO: 221026 - DNA, 15 bp, Homo sapiens
gaggtcaggagatcg

SEQ ID NO: 221027 - DNA, 15 bp, Homo sapiens
tacgaggtcaggaga

SEQ ID NO: 221028 - DNA, 15 bp, Homo sapiens
ttacgaggtcaggag

SEQ ID NO: 221029 - DNA, 15 bp, Homo sapiens
attacgaggtcagga

SEQ ID NO: 221030 - DNA, 15 bp, Homo sapiens
gattacgaggtcagg

SEQ ID NO: 221031 - DNA, 15 bp, Homo sapiens
agattacgaggtcag

SEQ ID NO: 221032 - DNA, 15 bp, Homo sapiens
cagattacgaggtca

SEQ ID NO: 221033 - DNA, 15 bp, Homo sapiens
gcagattacgaggtc

SEQ ID NO: 221034 - DNA, 15 bp, Homo sapiens
ggcagattacgaggt

SEQ ID NO: 221035 - DNA, 15 bp, Homo sapiens
gggcagattacgagg

SEQ ID NO: 221036 - DNA, 15 bp, Homo sapiens
cgggcagattacgag

SEQ ID NO: 221037 - DNA, 15 bp, Homo sapiens
gcgggcagattacga

SEQ ID NO: 221038 - DNA, 15 bp, Homo sapiens
ggcgggcagattacg

SEQ ID NO: 221039 - DNA, 15 bp, Homo sapiens
aggcgggcagattac

SEQ ID NO: 221040 - DNA, 15 bp, Homo sapiens
aaggcgggcagatta

SEQ ID NO: 221041 - DNA, 15 bp, Homo sapiens
caaggcgggcagatt

SEQ ID NO: 221042 - DNA, 15 bp, Homo sapiens
tgctcatgcctgtaa

SEQ ID NO: 221043 - DNA, 15 bp, Homo sapiens
gtgctcatgcctgta

SEQ ID NO: 221044 - DNA, 15 bp, Homo sapiens
agtgctcatgcctgt

SEQ ID NO: 221045 - DNA, 15 bp, Homo sapiens
cagtgctcatgcctg

SEQ ID NO: 221046 - DNA, 15 bp, Homo sapiens
gcagtgctcatgcct

SEQ ID NO: 221047 - DNA, 15 bp, Homo sapiens
tgcagtgctcatgcc

SEQ ID NO: 221048 - DNA, 15 bp, Homo sapiens
gtgcagtgctcatgc

SEQ ID NO: 221049 - DNA, 15 bp, Homo sapiens
ggtgcagtgctcatg

SEQ ID NO: 221050 - DNA, 15 bp, Homo sapiens
gggtgcagtgctcat

SEQ ID NO: 221051 - DNA, 15 bp, Homo sapiens
cgggtgcagtgctca

SEQ ID NO: 221052 - DNA, 15 bp, Homo sapiens
ccgggtgcagtgctc

SEQ ID NO: 221053 - DNA, 15 bp, Homo sapiens
gccgggtgcagtgct

SEQ ID NO: 221054 - DNA, 15 bp, Homo sapiens
ggccgggtgcagtgc

SEQ ID NO: 221055 - DNA, 15 bp, Homo sapiens
aggccgggtgcagtg

SEQ ID NO: 221056 - DNA, 15 bp, Homo sapiens
caggccgggtgcagt

SEQ ID NO: 221057 - DNA, 15 bp, Homo sapiens
acaggccgggtgcag

SEQ ID NO: 221058 - DNA, 15 bp, Homo sapiens
aacaggccgggtgca

SEQ ID NO: 221059 - DNA, 15 bp, Homo sapiens
taacaggccgggtgc

SEQ ID NO: 221060 - DNA, 15 bp, Homo sapiens
ctaacaggccgggtg

SEQ ID NO: 221061 - DNA, 15 bp, Homo sapiens
actaacaggccgggt

SEQ ID NO: 221062 - DNA, 15 bp, Homo sapiens
tactaacaggccggg

SEQ ID NO: 221063 - DNA, 15 bp, Homo sapiens
ctactaacaggccgg

SEQ ID NO: 221064 - DNA, 15 bp, Homo sapiens
actactaacaggccg

SEQ ID NO: 221065 - DNA, 15 bp, Homo sapiens
tactactaacaggcc

SEQ ID NO: 221066 - DNA, 15 bp, Homo sapiens
atactactaacaggc

SEQ ID NO: 221067 - DNA, 15 bp, Homo sapiens
aatactactaacagg

SEQ ID NO: 221068 - DNA, 15 bp, Homo sapiens
aaatactactaacag

SEQ ID NO: 221069 - DNA, 15 bp, Homo sapiens
aaaatactactaaca

SEQ ID NO: 221070 - DNA, 15 bp, Homo sapiens
caaaatactactaac

SEQ ID NO: 221071 - DNA, 15 bp, Homo sapiens
acaaaatactactaa

SEQ ID NO: 221072 - DNA, 15 bp, Homo sapiens
aacaaaatactacta

SEQ ID NO: 221073 - DNA, 15 bp, Homo sapiens
taacaaaatactact

SEQ ID NO: 221074 - DNA, 15 bp, Homo sapiens
gtaacaaaatactac

SEQ ID NO: 221075 - DNA, 15 bp, Homo sapiens
tgtaacaaaatacta

SEQ ID NO: 221076 - DNA, 15 bp, Homo sapiens
atgtaacaaaatact

SEQ ID NO: 221077 - DNA, 15 bp, Homo sapiens
gatgtaacaaaatac

SEQ ID NO: 221078 - DNA, 15 bp, Homo sapiens
tgatgtaacaaaata

SEQ ID NO: 221079 - DNA, 15 bp, Homo sapiens
ttgatgtaacaaaat

SEQ ID NO: 221080 - DNA, 15 bp, Homo sapiens
tttgatgtaacaaaa

SEQ ID NO: 221081 - DNA, 15 bp, Homo sapiens
atttgatgtaacaaa

SEQ ID NO: 221082 - DNA, 15 bp, Homo sapiens
aatttgatgtaacaa

SEQ ID NO: 221083 - DNA, 15 bp, Homo sapiens
taatttgatgtaaca

SEQ ID NO: 221084 - DNA, 15 bp, Homo sapiens
ttaatttgatgtaac

SEQ ID NO: 221085 - DNA, 15 bp, Homo sapiens
cttaatttgatgtaa

SEQ ID NO: 221086 - DNA, 15 bp, Homo sapiens
tcttaatttgatgta

SEQ ID NO: 221087 - DNA, 15 bp, Homo sapiens
atcttaatttgatgt

SEQ ID NO: 221088 - DNA, 15 bp, Homo sapiens
tatcttaatttgatg

SEQ ID NO: 221089 - DNA, 15 bp, Homo sapiens
gtatcttaatttgat

SEQ ID NO: 221090 - DNA, 15 bp, Homo sapiens
tgtatcttaatttga

SEQ ID NO: 221091 - DNA, 15 bp, Homo sapiens
atgtatcttaatttg

SEQ ID NO: 221092 - DNA, 15 bp, Homo sapiens
aatgtatcttaattt

SEQ ID NO: 221093 - DNA, 15 bp, Homo sapiens
aaatgtatcttaatt

SEQ ID NO: 221094 - DNA, 15 bp, Homo sapiens
aaaatgtatcttaat

SEQ ID NO: 221095 - DNA, 15 bp, Homo sapiens
gaaaatgtatcttaa

SEQ ID NO: 221096 - DNA, 15 bp, Homo sapiens
tgaaaatgtatctta

SEQ ID NO: 221097 - DNA, 15 bp, Homo sapiens
ttgaaaatgtatctt

SEQ ID NO: 221098 - DNA, 15 bp, Homo sapiens
gttgaaaatgtatct

SEQ ID NO: 221099 - DNA, 15 bp, Homo sapiens
tgttgaaaatgtatc

SEQ ID NO: 221100 - DNA, 15 bp, Homo sapiens
ctgttgaaaatgtat

SEQ ID NO: 221101 - DNA, 15 bp, Homo sapiens
tctgttgaaaatgta

SEQ ID NO: 221102 - DNA, 15 bp, Homo sapiens
ttctgttgaaaatgt

SEQ ID NO: 221103 - DNA, 15 bp, Homo sapiens
tttctgttgaaaatg

SEQ ID NO: 221104 - DNA, 15 bp, Homo sapiens
atttctgttgaaaat

SEQ ID NO: 221105 - DNA, 15 bp, Homo sapiens
tatttctgttgaaaa

SEQ ID NO: 221106 - DNA, 15 bp, Homo sapiens
ctatttctgttgaaa

SEQ ID NO: 221107 - DNA, 15 bp, Homo sapiens
cctatttctgttgaa

SEQ ID NO: 221108 - DNA, 15 bp, Homo sapiens
tcctatttctgttga

SEQ ID NO: 221109 - DNA, 15 bp, Homo sapiens
gtcctatttctgttg

SEQ ID NO: 221110 - DNA, 15 bp, Homo sapiens
ggtcctatttctgtt

SEQ ID NO: 221111 - DNA, 15 bp, Homo sapiens
tggtcctatttctgt

SEQ ID NO: 221112 - DNA, 15 bp, Homo sapiens
atggtcctatttctg

SEQ ID NO: 221113 - DNA, 15 bp, Homo sapiens
aatggtcctatttct

SEQ ID NO: 221114 - DNA, 15 bp, Homo sapiens
aaatggtcctatttc

SEQ ID NO: 221115 - DNA, 15 bp, Homo sapiens
gaaatggtcctattt

SEQ ID NO: 221116 - DNA, 15 bp, Homo sapiens
agaaatggtcctatt

SEQ ID NO: 221117 - DNA, 15 bp, Homo sapiens
gagaaatggtcctat

SEQ ID NO: 221118 - DNA, 15 bp, Homo sapiens
agagaaatggtccta

SEQ ID NO: 221119 - DNA, 15 bp, Homo sapiens
aagagaaatggtcct

SEQ ID NO: 221120 - DNA, 15 bp, Homo sapiens
caagagaaatggtcc

SEQ ID NO: 221121 - DNA, 15 bp, Homo sapiens
gcaagagaaatggtc

SEQ ID NO: 221122 - DNA, 15 bp, Homo sapiens
ggcaagagaaatggt

SEQ ID NO: 221123 - DNA, 15 bp, Homo sapiens
gggcaagagaaatgg

SEQ ID NO: 221124 - DNA, 15 bp, Homo sapiens
tgggcaagagaaatg

SEQ ID NO: 221125 - DNA, 15 bp, Homo sapiens
atgggcaagagaaat

SEQ ID NO: 221126 - DNA, 15 bp, Homo sapiens
tatgggcaagagaaa

SEQ ID NO: 221127 - DNA, 15 bp, Homo sapiens
ttatgggcaagagaa

SEQ ID NO: 221128 - DNA, 15 bp, Homo sapiens
tttatgggcaagaga

SEQ ID NO: 221129 - DNA, 15 bp, Homo sapiens
atttatgggcaagag

SEQ ID NO: 221130 - DNA, 15 bp, Homo sapiens
aatttatgggcaaga

SEQ ID NO: 221131 - DNA, 15 bp, Homo sapiens
gaatttatgggcaag

SEQ ID NO: 221132 - DNA, 15 bp, Homo sapiens
agaatttatgggcaa

SEQ ID NO: 221133 - DNA, 15 bp, Homo sapiens
aagaatttatgggca

SEQ ID NO: 221134 - DNA, 15 bp, Homo sapiens
aaagaatttatgggc

SEQ ID NO: 221135 - DNA, 15 bp, Homo sapiens
aaaagaatttatggg

SEQ ID NO: 221136 - DNA, 15 bp, Homo sapiens
aaaaagaatttatgg

SEQ ID NO: 221137 - DNA, 15 bp, Homo sapiens
caaaaagaatttatg

SEQ ID NO: 221138 - DNA, 15 bp, Homo sapiens
tcaaaaagaatttat

SEQ ID NO: 221139 - DNA, 15 bp, Homo sapiens
atcaaaaagaattta

SEQ ID NO: 221140 - DNA, 15 bp, Homo sapiens
catcaaaaagaattt

SEQ ID NO: 221141 - DNA, 15 bp, Homo sapiens
tcatcaaaaagaatt

SEQ ID NO: 221142 - DNA, 15 bp, Homo sapiens
atcatcaaaaagaat

SEQ ID NO: 221143 - DNA, 15 bp, Homo sapiens
aatcatcaaaaagaa

SEQ ID NO: 221144 - DNA, 15 bp, Homo sapiens
aaatcatcaaaaaga

SEQ ID NO: 221145 - DNA, 15 bp, Homo sapiens
caaatcatcaaaaag

SEQ ID NO: 221146 - DNA, 15 bp, Homo sapiens
tcaaatcatcaaaaa

SEQ ID NO: 221147 - DNA, 15 bp, Homo sapiens
ttcaaatcatcaaaa

SEQ ID NO: 221148 - DNA, 15 bp, Homo sapiens
cttcaaatcatcaaa

SEQ ID NO: 221149 - DNA, 15 bp, Homo sapiens
tcttcaaatcatcaa

SEQ ID NO: 221150 - DNA, 15 bp, Homo sapiens
atcttcaaatcatca

SEQ ID NO: 221151 - DNA, 15 bp, Homo sapiens
aatcttcaaatcatc

SEQ ID NO: 221152 - DNA, 15 bp, Homo sapiens
aaatcttcaaatcat

SEQ ID NO: 221153 - DNA, 15 bp, Homo sapiens
taaatcttcaaatca

SEQ ID NO: 221154 - DNA, 15 bp, Homo sapiens
ttaaatcttcaaatc

SEQ ID NO: 221155 - DNA, 15 bp, Homo sapiens
tttaaatcttcaaat

SEQ ID NO: 221156 - DNA, 15 bp, Homo sapiens
ttttaaatcttcaaa

SEQ ID NO: 221157 - DNA, 15 bp, Homo sapiens
tttttaaatcttcaa

SEQ ID NO: 221158 - DNA, 15 bp, Homo sapiens
ctttttaaatcttca

SEQ ID NO: 221159 - DNA, 15 bp, Homo sapiens
actttttaaatcttc

SEQ ID NO: 221160 - DNA, 15 bp, Homo sapiens
tactttttaaatctt

SEQ ID NO: 221161 - DNA, 15 bp, Homo sapiens
ttactttttaaatct

SEQ ID NO: 221162 - DNA, 15 bp, Homo sapiens
attactttttaaatc

SEQ ID NO: 221163 - DNA, 15 bp, Homo sapiens
tattactttttaaat

SEQ ID NO: 221164 - DNA, 15 bp, Homo sapiens
gtattactttttaaa

SEQ ID NO: 221165 - DNA, 15 bp, Homo sapiens
tgtattactttttaa

SEQ ID NO: 221166 - DNA, 15 bp, Homo sapiens
ttgtattacttttta

SEQ ID NO: 221167 - DNA, 15 bp, Homo sapiens
cttgtattacttttt

SEQ ID NO: 221168 - DNA, 15 bp, Homo sapiens
tcttgtattactttt

SEQ ID NO: 221169 - DNA, 15 bp, Homo sapiens
ttcttgtattacttt

SEQ ID NO: 221170 - DNA, 15 bp, Homo sapiens
tttcttgtattactt

SEQ ID NO: 221171 - DNA, 15 bp, Homo sapiens
ttttcttgtattact

SEQ ID NO: 221172 - DNA, 15 bp, Homo sapiens
attttcttgtattac

SEQ ID NO: 221173 - DNA, 15 bp, Homo sapiens
tattttcttgtatta

SEQ ID NO: 221174 - DNA, 15 bp, Homo sapiens
atattttcttgtatt

SEQ ID NO: 221175 - DNA, 15 bp, Homo sapiens
tatattttcttgtat

SEQ ID NO: 221176 - DNA, 15 bp, Homo sapiens
gtatattttcttgta

SEQ ID NO: 221177 - DNA, 15 bp, Homo sapiens
agtatattttcttgt

SEQ ID NO: 221178 - DNA, 15 bp, Homo sapiens
tagtatattttcttg

SEQ ID NO: 221179 - DNA, 15 bp, Homo sapiens
atagtatattttctt

SEQ ID NO: 221180 - DNA, 15 bp, Homo sapiens
aatagtatattttct

SEQ ID NO: 221181 - DNA, 15 bp, Homo sapiens
caatagtatattttc

SEQ ID NO: 221182 - DNA, 15 bp, Homo sapiens
tcaatagtatatttt

SEQ ID NO: 221183 - DNA, 15 bp, Homo sapiens
atcaatagtatattt

SEQ ID NO: 221184 - DNA, 15 bp, Homo sapiens
tatcaatagtatatt

SEQ ID NO: 221185 - DNA, 15 bp, Homo sapiens
ttatcaatagtatat

SEQ ID NO: 221186 - DNA, 15 bp, Homo sapiens
tttatcaatagtata

SEQ ID NO: 221187 - DNA, 15 bp, Homo sapiens
ttttatcaatagtat

SEQ ID NO: 221188 - DNA, 15 bp, Homo sapiens
tttttatcaatagta

SEQ ID NO: 221189 - DNA, 15 bp, Homo sapiens
atttttatcaatagt

SEQ ID NO: 221190 - DNA, 15 bp, Homo sapiens
aatttttatcaatag

SEQ ID NO: 221191 - DNA, 15 bp, Homo sapiens
aaatttttatcaata

SEQ ID NO: 221192 - DNA, 15 bp, Homo sapiens
gaaatttttatcaat

SEQ ID NO: 221193 - DNA, 15 bp, Homo sapiens
tgaaatttttatcaa

SEQ ID NO: 221194 - DNA, 15 bp, Homo sapiens
ttgaaatttttatca

SEQ ID NO: 221195 - DNA, 15 bp, Homo sapiens
tttgaaatttttatc

SEQ ID NO: 221196 - DNA, 15 bp, Homo sapiens
atttgaaatttttat

SEQ ID NO: 221197 - DNA, 15 bp, Homo sapiens
tatttgaaattttta

SEQ ID NO: 221198 - DNA, 15 bp, Homo sapiens
ttatttgaaattttt

SEQ ID NO: 221199 - DNA, 15 bp, Homo sapiens
attatttgaaatttt

SEQ ID NO: 221200 - DNA, 15 bp, Homo sapiens
tattatttgaaattt

SEQ ID NO: 221201 - DNA, 15 bp, Homo sapiens
gtattatttgaaatt

SEQ ID NO: 221202 - DNA, 15 bp, Homo sapiens
tgtattatttgaaat

SEQ ID NO: 221203 - DNA, 15 bp, Homo sapiens
ctgtattatttgaaa

SEQ ID NO: 221204 - DNA, 15 bp, Homo sapiens
tctgtattatttgaa

SEQ ID NO: 221205 - DNA, 15 bp, Homo sapiens
ttctgtattatttga

SEQ ID NO: 221206 - DNA, 15 bp, Homo sapiens
cttctgtattatttg

SEQ ID NO: 221207 - DNA, 15 bp, Homo sapiens
acttctgtattattt

SEQ ID NO: 221208 - DNA, 15 bp, Homo sapiens
tacttctgtattatt

SEQ ID NO: 221209 - DNA, 15 bp, Homo sapiens
gtacttctgtattat

SEQ ID NO: 221210 - DNA, 15 bp, Homo sapiens
tgtacttctgtatta

SEQ ID NO: 221211 - DNA, 15 bp, Homo sapiens
gtgtacttctgtatt

SEQ ID NO: 221212 - DNA, 15 bp, Homo sapiens
cgtgtacttctgtat

SEQ ID NO: 221213 - DNA, 15 bp, Homo sapiens
ccgtgtacttctgta

SEQ ID NO: 221214 - DNA, 15 bp, Homo sapiens
tccgtgtacttctgt

SEQ ID NO: 221215 - DNA, 15 bp, Homo sapiens
ctccgtgtacttctg

SEQ ID NO: 221216 - DNA, 15 bp, Homo sapiens
cctccgtgtacttct

SEQ ID NO: 221217 - DNA, 15 bp, Homo sapiens
ccctccgtgtacttc

SEQ ID NO: 221218 - DNA, 15 bp, Homo sapiens
tccctccgtgtactt

SEQ ID NO: 221219 - DNA, 15 bp, Homo sapiens
ctccctccgtgtact

SEQ ID NO: 221220 - DNA, 15 bp, Homo sapiens
tctccctccgtgtac

SEQ ID NO: 221221 - DNA, 15 bp, Homo sapiens
ttctccctccgtgta

SEQ ID NO: 221222 - DNA, 15 bp, Homo sapiens
cttctccctccgtgt

SEQ ID NO: 221223 - DNA, 15 bp, Homo sapiens
tcttctccctccgtg

SEQ ID NO: 221224 - DNA, 15 bp, Homo sapiens
ttcttctccctccgt

SEQ ID NO: 221225 - DNA, 15 bp, Homo sapiens
tttcttctccctccg

SEQ ID NO: 221226 - DNA, 15 bp, Homo sapiens
ttttcttctccctcc

SEQ ID NO: 221227 - DNA, 15 bp, Homo sapiens
tttttcttctccctc

SEQ ID NO: 221228 - DNA, 15 bp, Homo sapiens
ctttttcttctccct

SEQ ID NO: 221229 - DNA, 15 bp, Homo sapiens
cctttttcttctccc

SEQ ID NO: 221230 - DNA, 15 bp, Homo sapiens
ccctttttcttctcc

SEQ ID NO: 221231 - DNA, 15 bp, Homo sapiens
cccctttttcttctc

SEQ ID NO: 221232 - DNA, 15 bp, Homo sapiens
gcccctttttcttct

SEQ ID NO: 221233 - DNA, 15 bp, Homo sapiens
ggcccctttttcttc

SEQ ID NO: 221234 - DNA, 15 bp, Homo sapiens
gggcccctttttctt

SEQ ID NO: 221235 - DNA, 15 bp, Homo sapiens
agggcccctttttct

SEQ ID NO: 221236 - DNA, 15 bp, Homo sapiens
aagggcccctttttc

SEQ ID NO: 221237 - DNA, 15 bp, Homo sapiens
aaagggccccttttt

SEQ ID NO: 221238 - DNA, 15 bp, Homo sapiens
gaaagggcccctttt

SEQ ID NO: 221239 - DNA, 15 bp, Homo sapiens
agaaagggccccttt

SEQ ID NO: 221240 - DNA, 15 bp, Homo sapiens
cagaaagggcccctt

SEQ ID NO: 221241 - DNA, 15 bp, Homo sapiens
tcagaaagggcccct

SEQ ID NO: 221242 - DNA, 15 bp, Homo sapiens
ttcagaaagggcccc

SEQ ID NO: 221243 - DNA, 15 bp, Homo sapiens
gttcagaaagggccc

SEQ ID NO: 221244 - DNA, 15 bp, Homo sapiens
ggttcagaaagggcc

SEQ ID NO: 221245 - DNA, 15 bp, Homo sapiens
aggttcagaaagggc

SEQ ID NO: 221246 - DNA, 15 bp, Homo sapiens
gaggttcagaaaggg

SEQ ID NO: 221247 - DNA, 15 bp, Homo sapiens
ggaggttcagaaagg

SEQ ID NO: 221248 - DNA, 15 bp, Homo sapiens
gggaggttcagaaag

SEQ ID NO: 221249 - DNA, 15 bp, Homo sapiens
agggaggttcagaaa

SEQ ID NO: 221250 - DNA, 15 bp, Homo sapiens
aagggaggttcagaa

SEQ ID NO: 221251 - DNA, 15 bp, Homo sapiens
gaagggaggttcaga

SEQ ID NO: 221252 - DNA, 15 bp, Homo sapiens
agaagggaggttcag

SEQ ID NO: 221253 - DNA, 15 bp, Homo sapiens
gagaagggaggttca

SEQ ID NO: 221254 - DNA, 15 bp, Homo sapiens
tgagaagggaggttc

SEQ ID NO: 221255 - DNA, 15 bp, Homo sapiens
gtgagaagggaggtt

SEQ ID NO: 221256 - DNA, 15 bp, Homo sapiens
tgtgagaagggaggt

SEQ ID NO: 221257 - DNA, 15 bp, Homo sapiens
atgtgagaagggagg

SEQ ID NO: 221258 - DNA, 15 bp, Homo sapiens
gatgtgagaagggag

SEQ ID NO: 221259 - DNA, 15 bp, Homo sapiens
agatgtgagaaggga

SEQ ID NO: 221260 - DNA, 15 bp, Homo sapiens
cagatgtgagaaggg

SEQ ID NO: 221261 - DNA, 15 bp, Homo sapiens
tcagatgtgagaagg

SEQ ID NO: 221262 - DNA, 15 bp, Homo sapiens
ttcagatgtgagaag

SEQ ID NO: 221263 - DNA, 15 bp, Homo sapiens
tttcagatgtgagaa

SEQ ID NO: 221264 - DNA, 15 bp, Homo sapiens
ctttcagatgtgaga

SEQ ID NO: 221265 - DNA, 15 bp, Homo sapiens
tctttcagatgtgag

SEQ ID NO: 221266 - DNA, 15 bp, Homo sapiens
ttctttcagatgtga

SEQ ID NO: 221267 - DNA, 15 bp, Homo sapiens
gttctttcagatgtg

SEQ ID NO: 221268 - DNA, 15 bp, Homo sapiens
ggttctttcagatgt

SEQ ID NO: 221269 - DNA, 15 bp, Homo sapiens
gggttctttcagatg

SEQ ID NO: 221270 - DNA, 15 bp, Homo sapiens
agggttctttcagat

SEQ ID NO: 221271 - DNA, 15 bp, Homo sapiens
cagggttctttcaga

SEQ ID NO: 221272 - DNA, 15 bp, Homo sapiens
ccagggttctttcag

SEQ ID NO: 221273 - DNA, 15 bp, Homo sapiens
tccagggttctttca

SEQ ID NO: 221274 - DNA, 15 bp, Homo sapiens
ttccagggttctttc

SEQ ID NO: 221275 - DNA, 15 bp, Homo sapiens
attccagggttcttt

SEQ ID NO: 221276 - DNA, 15 bp, Homo sapiens
aattccagggttctt

SEQ ID NO: 221277 - DNA, 15 bp, Homo sapiens
caattccagggttct

SEQ ID NO: 221278 - DNA, 15 bp, Homo sapiens
ccaattccagggttc

SEQ ID NO: 221279 - DNA, 15 bp, Homo sapiens
tccaattccagggtt

SEQ ID NO: 221280 - DNA, 15 bp, Homo sapiens
gtccaattccagggt

SEQ ID NO: 221281 - DNA, 15 bp, Homo sapiens
tgtccaattccaggg

SEQ ID NO: 221282 - DNA, 15 bp, Homo sapiens
ctgtccaattccagg

SEQ ID NO: 221283 - DNA, 15 bp, Homo sapiens
tctgtccaattccag

SEQ ID NO: 221284 - DNA, 15 bp, Homo sapiens
gtctgtccaattcca

SEQ ID NO: 221285 - DNA, 15 bp, Homo sapiens
ggtctgtccaattcc

SEQ ID NO: 221286 - DNA, 15 bp, Homo sapiens
aggtctgtccaattc

SEQ ID NO: 221287 - DNA, 15 bp, Homo sapiens
caggtctgtccaatt

SEQ ID NO: 221288 - DNA, 15 bp, Homo sapiens
tcaggtctgtccaat

SEQ ID NO: 221289 - DNA, 15 bp, Homo sapiens
ttcaggtctgtccaa

SEQ ID NO: 221290 - DNA, 15 bp, Homo sapiens
attcaggtctgtcca

SEQ ID NO: 221291 - DNA, 15 bp, Homo sapiens
aattcaggtctgtcc

SEQ ID NO: 221292 - DNA, 15 bp, Homo sapiens
gaattcaggtctgtc

SEQ ID NO: 221293 - DNA, 15 bp, Homo sapiens
tgaattcaggtctgt

SEQ ID NO: 221294 - DNA, 15 bp, Homo sapiens
ttgaattcaggtctg

SEQ ID NO: 221295 - DNA, 15 bp, Homo sapiens
tttgaattcaggtct

SEQ ID NO: 221296 - DNA, 15 bp, Homo sapiens
atttgaattcaggtc

SEQ ID NO: 221297 - DNA, 15 bp, Homo sapiens
aatttgaattcaggt

SEQ ID NO: 221298 - DNA, 15 bp, Homo sapiens
aaatttgaattcagg

SEQ ID NO: 221299 - DNA, 15 bp, Homo sapiens
taaatttgaattcag

SEQ ID NO: 221300 - DNA, 15 bp, Homo sapiens
ctaaatttgaattca

SEQ ID NO: 221301 - DNA, 15 bp, Homo sapiens
tctaaatttgaattc

SEQ ID NO: 221302 - DNA, 15 bp, Homo sapiens
atctaaatttgaatt

SEQ ID NO: 221303 - DNA, 15 bp, Homo sapiens
catctaaatttgaat

SEQ ID NO: 221304 - DNA, 15 bp, Homo sapiens
acatctaaatttgaa

SEQ ID NO: 221305 - DNA, 15 bp, Homo sapiens
gacatctaaatttga

SEQ ID NO: 221306 - DNA, 15 bp, Homo sapiens
cgacatctaaatttg

SEQ ID NO: 221307 - DNA, 15 bp, Homo sapiens
gcgacatctaaattt

SEQ ID NO: 221308 - DNA, 15 bp, Homo sapiens
agcgacatctaaatt

SEQ ID NO: 221309 - DNA, 15 bp, Homo sapiens
cagcgacatctaaat

SEQ ID NO: 221310 - DNA, 15 bp, Homo sapiens
gcagcgacatctaaa

SEQ ID NO: 221311 - DNA, 15 bp, Homo sapiens
agcagcgacatctaa

SEQ ID NO: 221312 - DNA, 15 bp, Homo sapiens
cagcagcgacatcta

SEQ ID NO: 221313 - DNA, 15 bp, Homo sapiens
tcagcagcgacatct

SEQ ID NO: 221314 - DNA, 15 bp, Homo sapiens
atcagcagcgacatc

SEQ ID NO: 221315 - DNA, 15 bp, Homo sapiens
gatcagcagcgacat

SEQ ID NO: 221316 - DNA, 15 bp, Homo sapiens
tgatcagcagcgaca

SEQ ID NO: 221317 - DNA, 15 bp, Homo sapiens
ctgatcagcagcgac

SEQ ID NO: 221318 - DNA, 15 bp, Homo sapiens
actgatcagcagcga

SEQ ID NO: 221319 - DNA, 15 bp, Homo sapiens
aactgatcagcagcg

SEQ ID NO: 221320 - DNA, 15 bp, Homo sapiens
aaactgatcagcagc

SEQ ID NO: 221321 - DNA, 15 bp, Homo sapiens
aaaactgatcagcag

SEQ ID NO: 221322 - DNA, 15 bp, Homo sapiens
taaaactgatcagca

SEQ ID NO: 221323 - DNA, 15 bp, Homo sapiens
ataaaactgatcagc

SEQ ID NO: 221324 - DNA, 15 bp, Homo sapiens
cataaaactgatcag

SEQ ID NO: 221325 - DNA, 15 bp, Homo sapiens
tcataaaactgatca

SEQ ID NO: 221326 - DNA, 15 bp, Homo sapiens
atcataaaactgatc

SEQ ID NO: 221327 - DNA, 15 bp, Homo sapiens
catcataaaactgat

SEQ ID NO: 221328 - DNA, 15 bp, Homo sapiens
acatcataaaactga

SEQ ID NO: 221329 - DNA, 15 bp, Homo sapiens
aacatcataaaactg

SEQ ID NO: 221330 - DNA, 15 bp, Homo sapiens
caacatcataaaact

SEQ ID NO: 221331 - DNA, 15 bp, Homo sapiens
gcaacatcataaaac

SEQ ID NO: 221332 - DNA, 15 bp, Homo sapiens
cgcaacatcataaaa

SEQ ID NO: 221333 - DNA, 15 bp, Homo sapiens
tcgcaacatcataaa

SEQ ID NO: 221334 - DNA, 15 bp, Homo sapiens
ctcgcaacatcataa

SEQ ID NO: 221335 - DNA, 15 bp, Homo sapiens
actcgcaacatcata

SEQ ID NO: 221336 - DNA, 15 bp, Homo sapiens
gactcgcaacatcat

SEQ ID NO: 221337 - DNA, 15 bp, Homo sapiens
agactcgcaacatca

SEQ ID NO: 221338 - DNA, 15 bp, Homo sapiens
aagactcgcaacatc

SEQ ID NO: 221339 - DNA, 15 bp, Homo sapiens
caagactcgcaacat

SEQ ID NO: 221340 - DNA, 15 bp, Homo sapiens
tcaagactcgcaaca

SEQ ID NO: 221341 - DNA, 15 bp, Homo sapiens
atcaagactcgcaac

SEQ ID NO: 221342 - DNA, 15 bp, Homo sapiens
aatcaagactcgcaa

SEQ ID NO: 221343 - DNA, 15 bp, Homo sapiens
caatcaagactcgca

SEQ ID NO: 221344 - DNA, 15 bp, Homo sapiens
acaatcaagactcgc

SEQ ID NO: 221345 - DNA, 15 bp, Homo sapiens
gacaatcaagactcg

SEQ ID NO: 221346 - DNA, 15 bp, Homo sapiens
agacaatcaagactc

SEQ ID NO: 221347 - DNA, 15 bp, Homo sapiens
gagacaatcaagact

SEQ ID NO: 221348 - DNA, 15 bp, Homo sapiens
tgagacaatcaagac

SEQ ID NO: 221349 - DNA, 15 bp, Homo sapiens
atgagacaatcaaga

SEQ ID NO: 221350 - DNA, 15 bp, Homo sapiens
tatgagacaatcaag

SEQ ID NO: 221351 - DNA, 15 bp, Homo sapiens
atatgagacaatcaa

SEQ ID NO: 221352 - DNA, 15 bp, Homo sapiens
catatgagacaatca

SEQ ID NO: 221353 - DNA, 15 bp, Homo sapiens
acatatgagacaatc

SEQ ID NO: 221354 - DNA, 15 bp, Homo sapiens
tacatatgagacaat

SEQ ID NO: 221355 - DNA, 15 bp, Homo sapiens
ttacatatgagacaa

SEQ ID NO: 221356 - DNA, 15 bp, Homo sapiens
tttacatatgagaca

SEQ ID NO: 221357 - DNA, 15 bp, Homo sapiens
ctttacatatgagac

SEQ ID NO: 221358 - DNA, 15 bp, Homo sapiens
actttacatatgaga

SEQ ID NO: 221359 - DNA, 15 bp, Homo sapiens
cactttacatatgag

SEQ ID NO: 221360 - DNA, 15 bp, Homo sapiens
tcactttacatatga

SEQ ID NO: 221361 - DNA, 15 bp, Homo sapiens
gtcactttacatatg

SEQ ID NO: 221362 - DNA, 15 bp, Homo sapiens
agtcactttacatat

SEQ ID NO: 221363 - DNA, 15 bp, Homo sapiens
tagtcactttacata

SEQ ID NO: 221364 - DNA, 15 bp, Homo sapiens
atagtcactttacat

SEQ ID NO: 221365 - DNA, 15 bp, Homo sapiens
catagtcactttaca

SEQ ID NO: 221366 - DNA, 15 bp, Homo sapiens
acatagtcactttac

SEQ ID NO: 221367 - DNA, 15 bp, Homo sapiens
gacatagtcacttta

SEQ ID NO: 221368 - DNA, 15 bp, Homo sapiens
tgacatagtcacttt

SEQ ID NO: 221369 - DNA, 15 bp, Homo sapiens
ttgacatagtcactt

SEQ ID NO: 221370 - DNA, 15 bp, Homo sapiens
gttgacatagtcact

SEQ ID NO: 221371 - DNA, 15 bp, Homo sapiens
tgttgacatagtcac

SEQ ID NO: 221372 - DNA, 15 bp, Homo sapiens
ttgttgacatagtca

SEQ ID NO: 221373 - DNA, 15 bp, Homo sapiens
attgttgacatagtc

SEQ ID NO: 221374 - DNA, 15 bp, Homo sapiens
tattgttgacatagt

SEQ ID NO: 221375 - DNA, 15 bp, Homo sapiens
ctattgttgacatag

SEQ ID NO: 221376 - DNA, 15 bp, Homo sapiens
gctattgttgacata

SEQ ID NO: 221377 - DNA, 15 bp, Homo sapiens
ggctattgttgacat

SEQ ID NO: 221378 - DNA, 15 bp, Homo sapiens
aggctattgttgaca

SEQ ID NO: 221379 - DNA, 15 bp, Homo sapiens
aaggctattgttgac

SEQ ID NO: 221380 - DNA, 15 bp, Homo sapiens
caaggctattgttga

SEQ ID NO: 221381 - DNA, 15 bp, Homo sapiens
acaaggctattgttg

SEQ ID NO: 221382 - DNA, 15 bp, Homo sapiens
tacaaggctattgtt

SEQ ID NO: 221383 - DNA, 15 bp, Homo sapiens
ttacaaggctattgt

SEQ ID NO: 221384 - DNA, 15 bp, Homo sapiens
cttacaaggctattg

SEQ ID NO: 221385 - DNA, 15 bp, Homo sapiens
tcttacaaggctatt

SEQ ID NO: 221386 - DNA, 15 bp, Homo sapiens
atcttacaaggctat

SEQ ID NO: 221387 - DNA, 15 bp, Homo sapiens
aatcttacaaggcta

SEQ ID NO: 221388 - DNA, 15 bp, Homo sapiens
caatcttacaaggct

SEQ ID NO: 221389 - DNA, 15 bp, Homo sapiens
acaatcttacaaggc

SEQ ID NO: 221390 - DNA, 15 bp, Homo sapiens
cacaatcttacaagg

SEQ ID NO: 221391 - DNA, 15 bp, Homo sapiens
ccacaatcttacaag

SEQ ID NO: 221392 - DNA, 15 bp, Homo sapiens
accacaatcttacaa

SEQ ID NO: 221393 - DNA, 15 bp, Homo sapiens
caccacaatcttaca

SEQ ID NO: 221394 - DNA, 15 bp, Homo sapiens
tcaccacaatcttac

SEQ ID NO: 221395 - DNA, 15 bp, Homo sapiens
ctcaccacaatctta

SEQ ID NO: 221396 - DNA, 15 bp, Homo sapiens
cctcaccacaatctt

SEQ ID NO: 221397 - DNA, 15 bp, Homo sapiens
tcctcaccacaatct

SEQ ID NO: 221398 - DNA, 15 bp, Homo sapiens
ttcctcaccacaatc

SEQ ID NO: 221399 - DNA, 15 bp, Homo sapiens
tttcctcaccacaat

SEQ ID NO: 221400 - DNA, 15 bp, Homo sapiens
ttttcctcaccacaa

SEQ ID NO: 221401 - DNA, 15 bp, Homo sapiens
tttttcctcaccaca

SEQ ID NO: 221402 - DNA, 15 bp, Homo sapiens
ctttttcctcaccac

SEQ ID NO: 221403 - DNA, 15 bp, Homo sapiens
actttttcctcacca

SEQ ID NO: 221404 - DNA, 15 bp, Homo sapiens
cactttttcctcacc

SEQ ID NO: 221405 - DNA, 15 bp, Homo sapiens
tcactttttcctcac

SEQ ID NO: 221406 - DNA, 15 bp, Homo sapiens
ttcactttttcctca

SEQ ID NO: 221407 - DNA, 15 bp, Homo sapiens
attcactttttcctc

SEQ ID NO: 221408 - DNA, 15 bp, Homo sapiens
cattcactttttcct

SEQ ID NO: 221409 - DNA, 15 bp, Homo sapiens
acattcactttttcc

SEQ ID NO: 221410 - DNA, 15 bp, Homo sapiens
cacattcactttttc

SEQ ID NO: 221411 - DNA, 15 bp, Homo sapiens
acacattcacttttt

SEQ ID NO: 221412 - DNA, 15 bp, Homo sapiens
cacacattcactttt

SEQ ID NO: 221413 - DNA, 15 bp, Homo sapiens
gcacacattcacttt

SEQ ID NO: 221414 - DNA, 15 bp, Homo sapiens
tgcacacattcactt

SEQ ID NO: 221415 - DNA, 15 bp, Homo sapiens
ctgcacacattcact

SEQ ID NO: 221416 - DNA, 15 bp, Homo sapiens
tctgcacacattcac

SEQ ID NO: 221417 - DNA, 15 bp, Homo sapiens
ctctgcacacattca

SEQ ID NO: 221418 - DNA, 15 bp, Homo sapiens
cctctgcacacattc

SEQ ID NO: 221419 - DNA, 15 bp, Homo sapiens
gcctctgcacacatt

SEQ ID NO: 221420 - DNA, 15 bp, Homo sapiens
ggcctctgcacacat

SEQ ID NO: 221421 - DNA, 15 bp, Homo sapiens
aggcctctgcacaca

SEQ ID NO: 221422 - DNA, 15 bp, Homo sapiens
caggcctctgcacac

SEQ ID NO: 221423 - DNA, 15 bp, Homo sapiens
ccaggcctctgcaca

SEQ ID NO: 221424 - DNA, 15 bp, Homo sapiens
gccaggcctctgcac

SEQ ID NO: 221425 - DNA, 15 bp, Homo sapiens
ggccaggcctctgca

SEQ ID NO: 221426 - DNA, 15 bp, Homo sapiens
cggccaggcctctgc

SEQ ID NO: 221427 - DNA, 15 bp, Homo sapiens
ccggccaggcctctg

SEQ ID NO: 221428 - DNA, 15 bp, Homo sapiens
accggccaggcctct

SEQ ID NO: 221429 - DNA, 15 bp, Homo sapiens
caccggccaggcctc

SEQ ID NO: 221430 - DNA, 15 bp, Homo sapiens
ccaccggccaggcct

SEQ ID NO: 221431 - DNA, 15 bp, Homo sapiens
gccaccggccaggcc

SEQ ID NO: 221432 - DNA, 15 bp, Homo sapiens
tgccaccggccaggc

SEQ ID NO: 221433 - DNA, 15 bp, Homo sapiens
ctgccaccggccagg

SEQ ID NO: 221434 - DNA, 15 bp, Homo sapiens
cctgccaccggccag

SEQ ID NO: 221435 - DNA, 15 bp, Homo sapiens
gcctgccaccggcca

SEQ ID NO: 221436 - DNA, 15 bp, Homo sapiens
tgcctgccaccggcc

SEQ ID NO: 221437 - DNA, 15 bp, Homo sapiens
gtgcctgccaccggc

SEQ ID NO: 221438 - DNA, 15 bp, Homo sapiens
agtgcctgccaccgg

SEQ ID NO: 221439 - DNA, 15 bp, Homo sapiens
cagtgcctgccaccg

SEQ ID NO: 221440 - DNA, 15 bp, Homo sapiens
acagtgcctgccacc

SEQ ID NO: 221441 - DNA, 15 bp, Homo sapiens
cacagtgcctgccac

SEQ ID NO: 221442 - DNA, 15 bp, Homo sapiens
tcacagtgcctgcca

SEQ ID NO: 221443 - DNA, 15 bp, Homo sapiens
gtcacagtgcctgcc

SEQ ID NO: 221444 - DNA, 15 bp, Homo sapiens
tgtcacagtgcctgc

SEQ ID NO: 221445 - DNA, 15 bp, Homo sapiens
ttgtcacagtgcctg

SEQ ID NO: 221446 - DNA, 15 bp, Homo sapiens
attgtcacagtgcct

SEQ ID NO: 221447 - DNA, 15 bp, Homo sapiens
aattgtcacagtgcc

SEQ ID NO: 221448 - DNA, 15 bp, Homo sapiens
taattgtcacagtgc

SEQ ID NO: 221449 - DNA, 15 bp, Homo sapiens
ataattgtcacagtg

SEQ ID NO: 221450 - DNA, 15 bp, Homo sapiens
gataattgtcacagt

SEQ ID NO: 221451 - DNA, 15 bp, Homo sapiens
cgataattgtcacag

SEQ ID NO: 221452 - DNA, 15 bp, Homo sapiens
acgataattgtcaca

SEQ ID NO: 221453 - DNA, 15 bp, Homo sapiens
gacgataattgtcac

SEQ ID NO: 221454 - DNA, 15 bp, Homo sapiens
agacgataattgtca

SEQ ID NO: 221455 - DNA, 15 bp, Homo sapiens
aagacgataattgtc

SEQ ID NO: 221456 - DNA, 15 bp, Homo sapiens
aaagacgataattgt

SEQ ID NO: 221457 - DNA, 15 bp, Homo sapiens
caaagacgataattg

SEQ ID NO: 221458 - DNA, 15 bp, Homo sapiens
acaaagacgataatt

SEQ ID NO: 221459 - DNA, 15 bp, Homo sapiens
aacaaagacgataat

SEQ ID NO: 221460 - DNA, 15 bp, Homo sapiens
caacaaagacgataa

SEQ ID NO: 221461 - DNA, 15 bp, Homo sapiens
ccaacaaagacgata

SEQ ID NO: 221462 - DNA, 15 bp, Homo sapiens
accaacaaagacgat

SEQ ID NO: 221463 - DNA, 15 bp, Homo sapiens
taccaacaaagacga

SEQ ID NO: 221464 - DNA, 15 bp, Homo sapiens
ctaccaacaaagacg

SEQ ID NO: 221465 - DNA, 15 bp, Homo sapiens
cctaccaacaaagac

SEQ ID NO: 221466 - DNA, 15 bp, Homo sapiens
acctaccaacaaaga

SEQ ID NO: 221467 - DNA, 15 bp, Homo sapiens
aacctaccaacaaag

SEQ ID NO: 221468 - DNA, 15 bp, Homo sapiens
caacctaccaacaaa

SEQ ID NO: 221469 - DNA, 15 bp, Homo sapiens
tcaacctaccaacaa

SEQ ID NO: 221470 - DNA, 15 bp, Homo sapiens
atcaacctaccaaca

SEQ ID NO: 221471 - DNA, 15 bp, Homo sapiens
aatcaacctaccaac

SEQ ID NO: 221472 - DNA, 15 bp, Homo sapiens
caatcaacctaccaa

SEQ ID NO: 221473 - DNA, 15 bp, Homo sapiens
gcaatcaacctacca

SEQ ID NO: 221474 - DNA, 15 bp, Homo sapiens
ggcaatcaacctacc

SEQ ID NO: 221475 - DNA, 15 bp, Homo sapiens
aggcaatcaacctac

SEQ ID NO: 221476 - DNA, 15 bp, Homo sapiens
caggcaatcaaccta

SEQ ID NO: 221477 - DNA, 15 bp, Homo sapiens
acaggcaatcaacct

SEQ ID NO: 221478 - DNA, 15 bp, Homo sapiens
aacaggcaatcaacc

SEQ ID NO: 221479 - DNA, 15 bp, Homo sapiens
gaacaggcaatcaac

SEQ ID NO: 221480 - DNA, 15 bp, Homo sapiens
agaacaggcaatcaa

SEQ ID NO: 221481 - DNA, 15 bp, Homo sapiens
gagaacaggcaatca

SEQ ID NO: 221482 - DNA, 15 bp, Homo sapiens
agagaacaggcaatc

SEQ ID NO: 221483 - DNA, 15 bp, Homo sapiens
cagagaacaggcaat

SEQ ID NO: 221484 - DNA, 15 bp, Homo sapiens
acagagaacaggcaa

SEQ ID NO: 221485 - DNA, 15 bp, Homo sapiens
cacagagaacaggca

SEQ ID NO: 221486 - DNA, 15 bp, Homo sapiens
acacagagaacaggc

SEQ ID NO: 221487 - DNA, 15 bp, Homo sapiens
gacacagagaacagg

SEQ ID NO: 221488 - DNA, 15 bp, Homo sapiens
tgacacagagaacag

SEQ ID NO: 221489 - DNA, 15 bp, Homo sapiens
atgacacagagaaca

SEQ ID NO: 221490 - DNA, 15 bp, Homo sapiens
catgacacagagaac

SEQ ID NO: 221491 - DNA, 15 bp, Homo sapiens
acatgacacagagaa

SEQ ID NO: 221492 - DNA, 15 bp, Homo sapiens
cacatgacacagaga

SEQ ID NO: 221493 - DNA, 15 bp, Homo sapiens
acacatgacacagag

SEQ ID NO: 221494 - DNA, 15 bp, Homo sapiens
tacacatgacacaga

SEQ ID NO: 221495 - DNA, 15 bp, Homo sapiens
gtacacatgacacag

SEQ ID NO: 221496 - DNA, 15 bp, Homo sapiens
ggtacacatgacaca

SEQ ID NO: 221497 - DNA, 15 bp, Homo sapiens
gggtacacatgacac

SEQ ID NO: 221498 - DNA, 15 bp, Homo sapiens
tgggtacacatgaca

SEQ ID NO: 221499 - DNA, 15 bp, Homo sapiens
ctgggtacacatgac

SEQ ID NO: 221500 - DNA, 15 bp, Homo sapiens
gctgggtacacatga

SEQ ID NO: 221501 - DNA, 15 bp, Homo sapiens
tgctgggtacacatg

SEQ ID NO: 221502 - DNA, 15 bp, Homo sapiens
ctgctgggtacacat

SEQ ID NO: 221503 - DNA, 15 bp, Homo sapiens
tctgctgggtacaca

SEQ ID NO: 221504 - DNA, 15 bp, Homo sapiens
gtctgctgggtacac

SEQ ID NO: 221505 - DNA, 15 bp, Homo sapiens
agtctgctgggtaca

SEQ ID NO: 221506 - DNA, 15 bp, Homo sapiens
gagtctgctgggtac

SEQ ID NO: 221507 - DNA, 15 bp, Homo sapiens
ggagtctgctgggta

SEQ ID NO: 221508 - DNA, 15 bp, Homo sapiens
tggagtctgctgggt

SEQ ID NO: 221509 - DNA, 15 bp, Homo sapiens
ctggagtctgctggg

SEQ ID NO: 221510 - DNA, 15 bp, Homo sapiens
actggagtctgctgg

SEQ ID NO: 221511 - DNA, 15 bp, Homo sapiens
aactggagtctgctg

SEQ ID NO: 221512 - DNA, 15 bp, Homo sapiens
caactggagtctgct

SEQ ID NO: 221513 - DNA, 15 bp, Homo sapiens
tcaactggagtctgc

SEQ ID NO: 221514 - DNA, 15 bp, Homo sapiens
atcaactggagtctg

SEQ ID NO: 221515 - DNA, 15 bp, Homo sapiens
tatcaactggagtct

SEQ ID NO: 221516 - DNA, 15 bp, Homo sapiens
atatcaactggagtc

SEQ ID NO: 221517 - DNA, 15 bp, Homo sapiens
gatatcaactggagt

SEQ ID NO: 221518 - DNA, 15 bp, Homo sapiens
tgatatcaactggag

SEQ ID NO: 221519 - DNA, 15 bp, Homo sapiens
gtgatatcaactgga

SEQ ID NO: 221520 - DNA, 15 bp, Homo sapiens
ggtgatatcaactgg

SEQ ID NO: 221521 - DNA, 15 bp, Homo sapiens
gggtgatatcaactg

SEQ ID NO: 221522 - DNA, 15 bp, Homo sapiens
agggtgatatcaact

SEQ ID NO: 221523 - DNA, 15 bp, Homo sapiens
tagggtgatatcaac

SEQ ID NO: 221524 - DNA, 15 bp, Homo sapiens
ctagggtgatatcaa

SEQ ID NO: 221525 - DNA, 15 bp, Homo sapiens
tctagggtgatatca

SEQ ID NO: 221526 - DNA, 15 bp, Homo sapiens
ttctagggtgatatc

SEQ ID NO: 221527 - DNA, 15 bp, Homo sapiens
tttctagggtgatat

SEQ ID NO: 221528 - DNA, 15 bp, Homo sapiens
ttttctagggtgata

SEQ ID NO: 221529 - DNA, 15 bp, Homo sapiens
gttttctagggtgat

SEQ ID NO: 221530 - DNA, 15 bp, Homo sapiens
tgttttctagggtga

SEQ ID NO: 221531 - DNA, 15 bp, Homo sapiens
ttgttttctagggtg

SEQ ID NO: 221532 - DNA, 15 bp, Homo sapiens
attgttttctagggt

SEQ ID NO: 221533 - DNA, 15 bp, Homo sapiens
aattgttttctaggg

SEQ ID NO: 221534 - DNA, 15 bp, Homo sapiens
aaattgttttctagg

SEQ ID NO: 221535 - DNA, 15 bp, Homo sapiens
gaaattgttttctag

SEQ ID NO: 221536 - DNA, 15 bp, Homo sapiens
ggaaattgttttcta

SEQ ID NO: 221537 - DNA, 15 bp, Homo sapiens
aggaaattgttttct

SEQ ID NO: 221538 - DNA, 15 bp, Homo sapiens
gaggaaattgttttc

SEQ ID NO: 221539 - DNA, 15 bp, Homo sapiens
tgaggaaattgtttt

SEQ ID NO: 221540 - DNA, 15 bp, Homo sapiens
atgaggaaattgttt

SEQ ID NO: 221541 - DNA, 15 bp, Homo sapiens
aatgaggaaattgtt

SEQ ID NO: 221542 - DNA, 15 bp, Homo sapiens
gaatgaggaaattgt

SEQ ID NO: 221543 - DNA, 15 bp, Homo sapiens
agaatgaggaaattg

SEQ ID NO: 221544 - DNA, 15 bp, Homo sapiens
cagaatgaggaaatt

SEQ ID NO: 221545 - DNA, 15 bp, Homo sapiens
tcagaatgaggaaat

SEQ ID NO: 221546 - DNA, 15 bp, Homo sapiens
atcagaatgaggaaa

SEQ ID NO: 221547 - DNA, 15 bp, Homo sapiens
tatcagaatgaggaa

SEQ ID NO: 221548 - DNA, 15 bp, Homo sapiens
ttatcagaatgagga

SEQ ID NO: 221549 - DNA, 15 bp, Homo sapiens
tttatcagaatgagg

SEQ ID NO: 221550 - DNA, 15 bp, Homo sapiens
atttatcagaatgag

SEQ ID NO: 221551 - DNA, 15 bp, Homo sapiens
catttatcagaatga

SEQ ID NO: 221552 - DNA, 15 bp, Homo sapiens
acatttatcagaatg

SEQ ID NO: 221553 - DNA, 15 bp, Homo sapiens
aacatttatcagaat

SEQ ID NO: 221554 - DNA, 15 bp, Homo sapiens
caacatttatcagaa

SEQ ID NO: 221555 - DNA, 15 bp, Homo sapiens
ccaacatttatcaga

SEQ ID NO: 221556 - DNA, 15 bp, Homo sapiens
gccaacatttatcag

SEQ ID NO: 221557 - DNA, 15 bp, Homo sapiens
ggccaacatttatca

SEQ ID NO: 221558 - DNA, 15 bp, Homo sapiens
gggccaacatttatc

SEQ ID NO: 221559 - DNA, 15 bp, Homo sapiens
agggccaacatttat

SEQ ID NO: 221560 - DNA, 15 bp, Homo sapiens
aagggccaacattta

SEQ ID NO: 221561 - DNA, 15 bp, Homo sapiens
aaagggccaacattt

SEQ ID NO: 221562 - DNA, 15 bp, Homo sapiens
aaaagggccaacatt

SEQ ID NO: 221563 - DNA, 15 bp, Homo sapiens
gaaaagggccaacat

SEQ ID NO: 221564 - DNA, 15 bp, Homo sapiens
agaaaagggccaaca

SEQ ID NO: 221565 - DNA, 15 bp, Homo sapiens
cagaaaagggccaac

SEQ ID NO: 221566 - DNA, 15 bp, Homo sapiens
gcagaaaagggccaa

SEQ ID NO: 221567 - DNA, 15 bp, Homo sapiens
tgcagaaaagggcca

SEQ ID NO: 221568 - DNA, 15 bp, Homo sapiens
ttgcagaaaagggcc

SEQ ID NO: 221569 - DNA, 15 bp, Homo sapiens
cttgcagaaaagggc

SEQ ID NO: 221570 - DNA, 15 bp, Homo sapiens
tcttgcagaaaaggg

SEQ ID NO: 221571 - DNA, 15 bp, Homo sapiens
atcttgcagaaaagg

SEQ ID NO: 221572 - DNA, 15 bp, Homo sapiens
aatcttgcagaaaag

SEQ ID NO: 221573 - DNA, 15 bp, Homo sapiens
caatcttgcagaaaa

SEQ ID NO: 221574 - DNA, 15 bp, Homo sapiens
gcaatcttgcagaaa

SEQ ID NO: 221575 - DNA, 15 bp, Homo sapiens
agcaatcttgcagaa

SEQ ID NO: 221576 - DNA, 15 bp, Homo sapiens
aagcaatcttgcaga

SEQ ID NO: 221577 - DNA, 15 bp, Homo sapiens
aaagcaatcttgcag

SEQ ID NO: 221578 - DNA, 15 bp, Homo sapiens
taaagcaatcttgca

SEQ ID NO: 221579 - DNA, 15 bp, Homo sapiens
ttaaagcaatcttgc

SEQ ID NO: 221580 - DNA, 15 bp, Homo sapiens
tttaaagcaatcttg

SEQ ID NO: 221581 - DNA, 15 bp, Homo sapiens
atttaaagcaatctt

SEQ ID NO: 221582 - DNA, 15 bp, Homo sapiens
aatttaaagcaatct

SEQ ID NO: 221583 - DNA, 15 bp, Homo sapiens
aaatttaaagcaatc

SEQ ID NO: 221584 - DNA, 15 bp, Homo sapiens
caaatttaaagcaat

SEQ ID NO: 221585 - DNA, 15 bp, Homo sapiens
ccaaatttaaagcaa

SEQ ID NO: 221586 - DNA, 15 bp, Homo sapiens
tccaaatttaaagca

SEQ ID NO: 221587 - DNA, 15 bp, Homo sapiens
ctccaaatttaaagc

SEQ ID NO: 221588 - DNA, 15 bp, Homo sapiens
gctccaaatttaaag

SEQ ID NO: 221589 - DNA, 15 bp, Homo sapiens
ggctccaaatttaaa

SEQ ID NO: 221590 - DNA, 15 bp, Homo sapiens
cggctccaaatttaa

SEQ ID NO: 221591 - DNA, 15 bp, Homo sapiens
tcggctccaaattta

SEQ ID NO: 221592 - DNA, 15 bp, Homo sapiens
atcggctccaaattt

SEQ ID NO: 221593 - DNA, 15 bp, Homo sapiens
catcggctccaaatt

SEQ ID NO: 221594 - DNA, 15 bp, Homo sapiens
ccatcggctccaaat

SEQ ID NO: 221595 - DNA, 15 bp, Homo sapiens
tccatcggctccaaa

SEQ ID NO: 221596 - DNA, 15 bp, Homo sapiens
ttccatcggctccaa

SEQ ID NO: 221597 - DNA, 15 bp, Homo sapiens
attccatcggctcca

SEQ ID NO: 221598 - DNA, 15 bp, Homo sapiens
gattccatcggctcc

SEQ ID NO: 221599 - DNA, 15 bp, Homo sapiens
tgattccatcggctc

SEQ ID NO: 221600 - DNA, 15 bp, Homo sapiens
gtgattccatcggct

SEQ ID NO: 221601 - DNA, 15 bp, Homo sapiens
tgtgattccatcggc

SEQ ID NO: 221602 - DNA, 15 bp, Homo sapiens
ttgtgattccatcgg

SEQ ID NO: 221603 - DNA, 15 bp, Homo sapiens
cttgtgattccatcg

SEQ ID NO: 221604 - DNA, 15 bp, Homo sapiens
ccttgtgattccatc

SEQ ID NO: 221605 - DNA, 15 bp, Homo sapiens
gccttgtgattccat

SEQ ID NO: 221606 - DNA, 15 bp, Homo sapiens
agccttgtgattcca

SEQ ID NO: 221607 - DNA, 15 bp, Homo sapiens
cagccttgtgattcc

SEQ ID NO: 221608 - DNA, 15 bp, Homo sapiens
acagccttgtgattc

SEQ ID NO: 221609 - DNA, 15 bp, Homo sapiens
cacagccttgtgatt

SEQ ID NO: 221610 - DNA, 15 bp, Homo sapiens
tcacagccttgtgat

SEQ ID NO: 221611 - DNA, 15 bp, Homo sapiens
gtcacagccttgtga

SEQ ID NO: 221612 - DNA, 15 bp, Homo sapiens
ggtcacagccttgtg

SEQ ID NO: 221613 - DNA, 15 bp, Homo sapiens
aggtcacagccttgt

SEQ ID NO: 221614 - DNA, 15 bp, Homo sapiens
gaggtcacagccttg

SEQ ID NO: 221615 - DNA, 15 bp, Homo sapiens
agaggtcacagcctt

SEQ ID NO: 221616 - DNA, 15 bp, Homo sapiens
gagaggtcacagcct

SEQ ID NO: 221617 - DNA, 15 bp, Homo sapiens
ggagaggtcacagcc

SEQ ID NO: 221618 - DNA, 15 bp, Homo sapiens
tggagaggtcacagc

SEQ ID NO: 221619 - DNA, 15 bp, Homo sapiens
atggagaggtcacag

SEQ ID NO: 221620 - DNA, 15 bp, Homo sapiens
catggagaggtcaca

SEQ ID NO: 221621 - DNA, 15 bp, Homo sapiens
gcatggagaggtcac

SEQ ID NO: 221622 - DNA, 15 bp, Homo sapiens
tgcatggagaggtca

SEQ ID NO: 221623 - DNA, 15 bp, Homo sapiens
ctgcatggagaggtc

SEQ ID NO: 221624 - DNA, 15 bp, Homo sapiens
cctgcatggagaggt

SEQ ID NO: 221625 - DNA, 15 bp, Homo sapiens
tcctgcatggagagg

SEQ ID NO: 221626 - DNA, 15 bp, Homo sapiens
ctcctgcatggagag

SEQ ID NO: 221627 - DNA, 15 bp, Homo sapiens
tctcctgcatggaga

SEQ ID NO: 221628 - DNA, 15 bp, Homo sapiens
gtctcctgcatggag

SEQ ID NO: 221629 - DNA, 15 bp, Homo sapiens
tgtctcctgcatgga

SEQ ID NO: 221630 - DNA, 15 bp, Homo sapiens
ctgtctcctgcatgg

SEQ ID NO: 221631 - DNA, 15 bp, Homo sapiens
actgtctcctgcatg

SEQ ID NO: 221632 - DNA, 15 bp, Homo sapiens
cactgtctcctgcat

SEQ ID NO: 221633 - DNA, 15 bp, Homo sapiens
acactgtctcctgca

SEQ ID NO: 221634 - DNA, 15 bp, Homo sapiens
aacactgtctcctgc

SEQ ID NO: 221635 - DNA, 15 bp, Homo sapiens
aaacactgtctcctg

SEQ ID NO: 221636 - DNA, 15 bp, Homo sapiens
gaaacactgtctcct

SEQ ID NO: 221637 - DNA, 15 bp, Homo sapiens
agaaacactgtctcc

SEQ ID NO: 221638 - DNA, 15 bp, Homo sapiens
tagaaacactgtctc

SEQ ID NO: 221639 - DNA, 15 bp, Homo sapiens
ctagaaacactgtct

SEQ ID NO: 221640 - DNA, 15 bp, Homo sapiens
gctagaaacactgtc

SEQ ID NO: 221641 - DNA, 15 bp, Homo sapiens
tgctagaaacactgt

SEQ ID NO: 221642 - DNA, 15 bp, Homo sapiens
ctgctagaaacactg

SEQ ID NO: 221643 - DNA, 15 bp, Homo sapiens
gctgctagaaacact

SEQ ID NO: 221644 - DNA, 15 bp, Homo sapiens
agctgctagaaacac

SEQ ID NO: 221645 - DNA, 15 bp, Homo sapiens
aagctgctagaaaca

SEQ ID NO: 221646 - DNA, 15 bp, Homo sapiens
caagctgctagaaac

SEQ ID NO: 221647 - DNA, 15 bp, Homo sapiens
tcaagctgctagaaa

SEQ ID NO: 221648 - DNA, 15 bp, Homo sapiens
ctcaagctgctagaa

SEQ ID NO: 221649 - DNA, 15 bp, Homo sapiens
cctcaagctgctaga

SEQ ID NO: 221650 - DNA, 15 bp, Homo sapiens
ccctcaagctgctag

SEQ ID NO: 221651 - DNA, 15 bp, Homo sapiens
cccctcaagctgcta

SEQ ID NO: 221652 - DNA, 15 bp, Homo sapiens
gcccctcaagctgct

SEQ ID NO: 221653 - DNA, 15 bp, Homo sapiens
agcccctcaagctgc

SEQ ID NO: 221654 - DNA, 15 bp, Homo sapiens
cagcccctcaagctg

SEQ ID NO: 221655 - DNA, 15 bp, Homo sapiens
gcagcccctcaagct

SEQ ID NO: 221656 - DNA, 15 bp, Homo sapiens
tgcagcccctcaagc

SEQ ID NO: 221657 - DNA, 15 bp, Homo sapiens
ctgcagcccctcaag

SEQ ID NO: 221658 - DNA, 15 bp, Homo sapiens
gctgcagcccctcaa

SEQ ID NO: 221659 - DNA, 15 bp, Homo sapiens
agctgcagcccctca

SEQ ID NO: 221660 - DNA, 15 bp, Homo sapiens
cagctgcagcccctc

SEQ ID NO: 221661 - DNA, 15 bp, Homo sapiens
gcagctgcagcccct

SEQ ID NO: 221662 - DNA, 15 bp, Homo sapiens
ggcagctgcagcccc

SEQ ID NO: 221663 - DNA, 15 bp, Homo sapiens
gggcagctgcagccc

SEQ ID NO: 221664 - DNA, 15 bp, Homo sapiens
ggggcagctgcagcc

SEQ ID NO: 221665 - DNA, 15 bp, Homo sapiens
tggggcagctgcagc

SEQ ID NO: 221666 - DNA, 15 bp, Homo sapiens
gtggggcagctgcag

SEQ ID NO: 221667 - DNA, 15 bp, Homo sapiens
ggtggggcagctgca

SEQ ID NO: 221668 - DNA, 15 bp, Homo sapiens
cggtggggcagctgc

SEQ ID NO: 221669 - DNA, 15 bp, Homo sapiens
tcggtggggcagctg

SEQ ID NO: 221670 - DNA, 15 bp, Homo sapiens
ctcggtggggcagct

SEQ ID NO: 221671 - DNA, 15 bp, Homo sapiens
gctcggtggggcagc

SEQ ID NO: 221672 - DNA, 15 bp, Homo sapiens
agctcggtggggcag

SEQ ID NO: 221673 - DNA, 15 bp, Homo sapiens
aagctcggtggggca

SEQ ID NO: 221674 - DNA, 15 bp, Homo sapiens
gaagctcggtggggc

SEQ ID NO: 221675 - DNA, 15 bp, Homo sapiens
tgaagctcggtgggg

SEQ ID NO: 221676 - DNA, 15 bp, Homo sapiens
ttgaagctcggtggg

SEQ ID NO: 221677 - DNA, 15 bp, Homo sapiens
gttgaagctcggtgg

SEQ ID NO: 221678 - DNA, 15 bp, Homo sapiens
cgttgaagctcggtg

SEQ ID NO: 221679 - DNA, 15 bp, Homo sapiens
ccgttgaagctcggt

SEQ ID NO: 221680 - DNA, 15 bp, Homo sapiens
cccgttgaagctcgg

SEQ ID NO: 221681 - DNA, 15 bp, Homo sapiens
acccgttgaagctcg

SEQ ID NO: 221682 - DNA, 15 bp, Homo sapiens
cacccgttgaagctc

SEQ ID NO: 221683 - DNA, 15 bp, Homo sapiens
acacccgttgaagct

SEQ ID NO: 221684 - DNA, 15 bp, Homo sapiens
gacacccgttgaagc

SEQ ID NO: 221685 - DNA, 15 bp, Homo sapiens
ggacacccgttgaag

SEQ ID NO: 221686 - DNA, 15 bp, Homo sapiens
aggacacccgttgaa

SEQ ID NO: 221687 - DNA, 15 bp, Homo sapiens
caggacacccgttga

SEQ ID NO: 221688 - DNA, 15 bp, Homo sapiens
ccaggacacccgttg

SEQ ID NO: 221689 - DNA, 15 bp, Homo sapiens
accaggacacccgtt

SEQ ID NO: 221690 - DNA, 15 bp, Homo sapiens
caccaggacacccgt

SEQ ID NO: 221691 - DNA, 15 bp, Homo sapiens
gcaccaggacacccg

SEQ ID NO: 221692 - DNA, 15 bp, Homo sapiens
tgcaccaggacaccc

SEQ ID NO: 221693 - DNA, 15 bp, Homo sapiens
ttgcaccaggacacc

SEQ ID NO: 221694 - DNA, 15 bp, Homo sapiens
cttgcaccaggacac

SEQ ID NO: 221695 - DNA, 15 bp, Homo sapiens
ccttgcaccaggaca

SEQ ID NO: 221696 - DNA, 15 bp, Homo sapiens
accttgcaccaggac

SEQ ID NO: 221697 - DNA, 15 bp, Homo sapiens
aaccttgcaccagga

SEQ ID NO: 221698 - DNA, 15 bp, Homo sapiens
caaccttgcaccagg

SEQ ID NO: 221699 - DNA, 15 bp, Homo sapiens
acaaccttgcaccag

SEQ ID NO: 221700 - DNA, 15 bp, Homo sapiens
gacaaccttgcacca

SEQ ID NO: 221701 - DNA, 15 bp, Homo sapiens
ggacaaccttgcacc

SEQ ID NO: 221702 - DNA, 15 bp, Homo sapiens
aggacaaccttgcac

SEQ ID NO: 221703 - DNA, 15 bp, Homo sapiens
taggacaaccttgca

SEQ ID NO: 221704 - DNA, 15 bp, Homo sapiens
gtaggacaaccttgc

SEQ ID NO: 221705 - DNA, 15 bp, Homo sapiens
agtaggacaaccttg

SEQ ID NO: 221706 - DNA, 15 bp, Homo sapiens
aagtaggacaacctt

SEQ ID NO: 221707 - DNA, 15 bp, Homo sapiens
aaagtaggacaacct

SEQ ID NO: 221708 - DNA, 15 bp, Homo sapiens
aaaagtaggacaacc

SEQ ID NO: 221709 - DNA, 15 bp, Homo sapiens
aaaaagtaggacaac

SEQ ID NO: 221710 - DNA, 15 bp, Homo sapiens
caaaaagtaggacaa

SEQ ID NO: 221711 - DNA, 15 bp, Homo sapiens
tcaaaaagtaggaca

SEQ ID NO: 221712 - DNA, 15 bp, Homo sapiens
ctcaaaaagtaggac

SEQ ID NO: 221713 - DNA, 15 bp, Homo sapiens
actcaaaaagtagga

SEQ ID NO: 221714 - DNA, 15 bp, Homo sapiens
tactcaaaaagtagg

SEQ ID NO: 221715 - DNA, 15 bp, Homo sapiens
ctactcaaaaagtag

SEQ ID NO: 221716 - DNA, 15 bp, Homo sapiens
gctactcaaaaagta

SEQ ID NO: 221717 - DNA, 15 bp, Homo sapiens
tgctactcaaaaagt

SEQ ID NO: 221718 - DNA, 15 bp, Homo sapiens
ttgctactcaaaaag

SEQ ID NO: 221719 - DNA, 15 bp, Homo sapiens
cttgctactcaaaaa

SEQ ID NO: 221720 - DNA, 15 bp, Homo sapiens
ccttgctactcaaaa

SEQ ID NO: 221721 - DNA, 15 bp, Homo sapiens
accttgctactcaaa

SEQ ID NO: 221722 - DNA, 15 bp, Homo sapiens
gaccttgctactcaa

SEQ ID NO: 221723 - DNA, 15 bp, Homo sapiens
agaccttgctactca

SEQ ID NO: 221724 - DNA, 15 bp, Homo sapiens
aagaccttgctactc

SEQ ID NO: 221725 - DNA, 15 bp, Homo sapiens
aaagaccttgctact

SEQ ID NO: 221726 - DNA, 15 bp, Homo sapiens
aaaagaccttgctac

SEQ ID NO: 221727 - DNA, 15 bp, Homo sapiens
gaaaagaccttgcta

SEQ ID NO: 221728 - DNA, 15 bp, Homo sapiens
tgaaaagaccttgct

SEQ ID NO: 221729 - DNA, 15 bp, Homo sapiens
gtgaaaagaccttgc

SEQ ID NO: 221730 - DNA, 15 bp, Homo sapiens
ggtgaaaagaccttg

SEQ ID NO: 221731 - DNA, 15 bp, Homo sapiens
gggtgaaaagacctt

SEQ ID NO: 221732 - DNA, 15 bp, Homo sapiens
ggggtgaaaagacct

SEQ ID NO: 221733 - DNA, 15 bp, Homo sapiens
aggggtgaaaagacc

SEQ ID NO: 221734 - DNA, 15 bp, Homo sapiens
aaggggtgaaaagac

SEQ ID NO: 221735 - DNA, 15 bp, Homo sapiens
aaaggggtgaaaaga

SEQ ID NO: 221736 - DNA, 15 bp, Homo sapiens
taaaggggtgaaaag

SEQ ID NO: 221737 - DNA, 15 bp, Homo sapiens
ataaaggggtgaaaa

SEQ ID NO: 221738 - DNA, 15 bp, Homo sapiens
cataaaggggtgaaa

SEQ ID NO: 221739 - DNA, 15 bp, Homo sapiens
tcataaaggggtgaa

SEQ ID NO: 221740 - DNA, 15 bp, Homo sapiens
ctcataaaggggtga

SEQ ID NO: 221741 - DNA, 15 bp, Homo sapiens
tctcataaaggggtg

SEQ ID NO: 221742 - DNA, 15 bp, Homo sapiens
ttctcataaaggggt

SEQ ID NO: 221743 - DNA, 15 bp, Homo sapiens
attctcataaagggg

SEQ ID NO: 221744 - DNA, 15 bp, Homo sapiens
cattctcataaaggg

SEQ ID NO: 221745 - DNA, 15 bp, Homo sapiens
ccattctcataaagg

SEQ ID NO: 221746 - DNA, 15 bp, Homo sapiens
cccattctcataaag

SEQ ID NO: 221747 - DNA, 15 bp, Homo sapiens
gcccattctcataaa

SEQ ID NO: 221748 - DNA, 15 bp, Homo sapiens
tgcccattctcataa

SEQ ID NO: 221749 - DNA, 15 bp, Homo sapiens
gtgcccattctcata

SEQ ID NO: 221750 - DNA, 15 bp, Homo sapiens
tgtgcccattctcat

SEQ ID NO: 221751 - DNA, 15 bp, Homo sapiens
gtgtgcccattctca

SEQ ID NO: 221752 - DNA, 15 bp, Homo sapiens
agtgtgcccattctc

SEQ ID NO: 221753 - DNA, 15 bp, Homo sapiens
gagtgtgcccattct

SEQ ID NO: 221754 - DNA, 15 bp, Homo sapiens
agagtgtgcccattc

SEQ ID NO: 221755 - DNA, 15 bp, Homo sapiens
cagagtgtgcccatt

SEQ ID NO: 221756 - DNA, 15 bp, Homo sapiens
ccagagtgtgcccat

SEQ ID NO: 221757 - DNA, 15 bp, Homo sapiens
tccagagtgtgccca

SEQ ID NO: 221758 - DNA, 15 bp, Homo sapiens
atccagagtgtgccc

SEQ ID NO: 221759 - DNA, 15 bp, Homo sapiens
tatccagagtgtgcc

SEQ ID NO: 221760 - DNA, 15 bp, Homo sapiens
atatccagagtgtgc

SEQ ID NO: 221761 - DNA, 15 bp, Homo sapiens
gatatccagagtgtg

SEQ ID NO: 221762 - DNA, 15 bp, Homo sapiens
agatatccagagtgt

SEQ ID NO: 221763 - DNA, 15 bp, Homo sapiens
tagatatccagagtg

SEQ ID NO: 221764 - DNA, 15 bp, Homo sapiens
atagatatccagagt

SEQ ID NO: 221765 - DNA, 15 bp, Homo sapiens
aatagatatccagag

SEQ ID NO: 221766 - DNA, 15 bp, Homo sapiens
aaatagatatccaga

SEQ ID NO: 221767 - DNA, 15 bp, Homo sapiens
gaaatagatatccag

SEQ ID NO: 221768 - DNA, 15 bp, Homo sapiens
agaaatagatatcca

SEQ ID NO: 221769 - DNA, 15 bp, Homo sapiens
cagaaatagatatcc

SEQ ID NO: 221770 - DNA, 15 bp, Homo sapiens
tcagaaatagatatc

SEQ ID NO: 221771 - DNA, 15 bp, Homo sapiens
ctcagaaatagatat

SEQ ID NO: 221772 - DNA, 15 bp, Homo sapiens
tctcagaaatagata

SEQ ID NO: 221773 - DNA, 15 bp, Homo sapiens
ttctcagaaatagat

SEQ ID NO: 221774 - DNA, 15 bp, Homo sapiens
gttctcagaaataga

SEQ ID NO: 221775 - DNA, 15 bp, Homo sapiens
agttctcagaaatag

SEQ ID NO: 221776 - DNA, 15 bp, Homo sapiens
gagttctcagaaata

SEQ ID NO: 221777 - DNA, 15 bp, Homo sapiens
agagttctcagaaat

SEQ ID NO: 221778 - DNA, 15 bp, Homo sapiens
cagagttctcagaaa

SEQ ID NO: 221779 - DNA, 15 bp, Homo sapiens
tcagagttctcagaa

SEQ ID NO: 221780 - DNA, 15 bp, Homo sapiens
gtcagagttctcaga

SEQ ID NO: 221781 - DNA, 15 bp, Homo sapiens
tgtcagagttctcag

SEQ ID NO: 221782 - DNA, 15 bp, Homo sapiens
gtgtcagagttctca

SEQ ID NO: 221783 - DNA, 15 bp, Homo sapiens
agtgtcagagttctc

SEQ ID NO: 221784 - DNA, 15 bp, Homo sapiens
cagtgtcagagttct

SEQ ID NO: 221785 - DNA, 15 bp, Homo sapiens
ccagtgtcagagttc

SEQ ID NO: 221786 - DNA, 15 bp, Homo sapiens
tccagtgtcagagtt

SEQ ID NO: 221787 - DNA, 15 bp, Homo sapiens
ctccagtgtcagagt

SEQ ID NO: 221788 - DNA, 15 bp, Homo sapiens
tctccagtgtcagag

SEQ ID NO: 221789 - DNA, 15 bp, Homo sapiens
ctctccagtgtcaga

SEQ ID NO: 221790 - DNA, 15 bp, Homo sapiens
tctctccagtgtcag

SEQ ID NO: 221791 - DNA, 15 bp, Homo sapiens
ttctctccagtgtca

SEQ ID NO: 221792 - DNA, 15 bp, Homo sapiens
tttctctccagtgtc

SEQ ID NO: 221793 - DNA, 15 bp, Homo sapiens
ttttctctccagtgt

SEQ ID NO: 221794 - DNA, 15 bp, Homo sapiens
gttttctctccagtg

SEQ ID NO: 221795 - DNA, 15 bp, Homo sapiens
tgttttctctccagt

SEQ ID NO: 221796 - DNA, 15 bp, Homo sapiens
ttgttttctctccag

SEQ ID NO: 221797 - DNA, 15 bp, Homo sapiens
attgttttctctcca

SEQ ID NO: 221798 - DNA, 15 bp, Homo sapiens
gattgttttctctcc

SEQ ID NO: 221799 - DNA, 15 bp, Homo sapiens
tgattgttttctctc

SEQ ID NO: 221800 - DNA, 15 bp, Homo sapiens
ctgattgttttctct

SEQ ID NO: 221801 - DNA, 15 bp, Homo sapiens
actgattgttttctc

SEQ ID NO: 221802 - DNA, 15 bp, Homo sapiens
aactgattgttttct

SEQ ID NO: 221803 - DNA, 15 bp, Homo sapiens
caactgattgttttc

SEQ ID NO: 221804 - DNA, 15 bp, Homo sapiens
tcaactgattgtttt

SEQ ID NO: 221805 - DNA, 15 bp, Homo sapiens
ctcaactgattgttt

SEQ ID NO: 221806 - DNA, 15 bp, Homo sapiens
tctcaactgattgtt

SEQ ID NO: 221807 - DNA, 15 bp, Homo sapiens
ctctcaactgattgt

SEQ ID NO: 221808 - DNA, 15 bp, Homo sapiens
tctctcaactgattg

SEQ ID NO: 221809 - DNA, 15 bp, Homo sapiens
ttctctcaactgatt

SEQ ID NO: 221810 - DNA, 15 bp, Homo sapiens
tttctctcaactgat

SEQ ID NO: 221811 - DNA, 15 bp, Homo sapiens
atttctctcaactga

SEQ ID NO: 221812 - DNA, 15 bp, Homo sapiens
gatttctctcaactg

SEQ ID NO: 221813 - DNA, 15 bp, Homo sapiens
ggatttctctcaact

SEQ ID NO: 221814 - DNA, 15 bp, Homo sapiens
gggatttctctcaac

SEQ ID NO: 221815 - DNA, 15 bp, Homo sapiens
tgggatttctctcaa

SEQ ID NO: 221816 - DNA, 15 bp, Homo sapiens
ctgggatttctctca

SEQ ID NO: 221817 - DNA, 15 bp, Homo sapiens
gctgggatttctctc

SEQ ID NO: 221818 - DNA, 15 bp, Homo sapiens
agctgggatttctct

SEQ ID NO: 221819 - DNA, 15 bp, Homo sapiens
aagctgggatttctc

SEQ ID NO: 221820 - DNA, 15 bp, Homo sapiens
caagctgggatttct

SEQ ID NO: 221821 - DNA, 15 bp, Homo sapiens
ccaagctgggatttc

SEQ ID NO: 221822 - DNA, 15 bp, Homo sapiens
tccaagctgggattt

SEQ ID NO: 221823 - DNA, 15 bp, Homo sapiens
atccaagctgggatt

SEQ ID NO: 221824 - DNA, 15 bp, Homo sapiens
catccaagctgggat

SEQ ID NO: 221825 - DNA, 15 bp, Homo sapiens
ccatccaagctggga

SEQ ID NO: 221826 - DNA, 15 bp, Homo sapiens
cccatccaagctggg

SEQ ID NO: 221827 - DNA, 15 bp, Homo sapiens
gcccatccaagctgg

SEQ ID NO: 221828 - DNA, 15 bp, Homo sapiens
tgcccatccaagctg

SEQ ID NO: 221829 - DNA, 15 bp, Homo sapiens
atgcccatccaagct

SEQ ID NO: 221830 - DNA, 15 bp, Homo sapiens
aatgcccatccaagc

SEQ ID NO: 221831 - DNA, 15 bp, Homo sapiens
gaatgcccatccaag

SEQ ID NO: 221832 - DNA, 15 bp, Homo sapiens
tgaatgcccatccaa

SEQ ID NO: 221833 - DNA, 15 bp, Homo sapiens
gtgaatgcccatcca

SEQ ID NO: 221834 - DNA, 15 bp, Homo sapiens
agtgaatgcccatcc

SEQ ID NO: 221835 - DNA, 15 bp, Homo sapiens
cagtgaatgcccatc

SEQ ID NO: 221836 - DNA, 15 bp, Homo sapiens
tcagtgaatgcccat

SEQ ID NO: 221837 - DNA, 15 bp, Homo sapiens
ttcagtgaatgccca

SEQ ID NO: 221838 - DNA, 15 bp, Homo sapiens
gttcagtgaatgccc

SEQ ID NO: 221839 - DNA, 15 bp, Homo sapiens
tgttcagtgaatgcc

SEQ ID NO: 221840 - DNA, 15 bp, Homo sapiens
atgttcagtgaatgc

SEQ ID NO: 221841 - DNA, 15 bp, Homo sapiens
gatgttcagtgaatg

SEQ ID NO: 221842 - DNA, 15 bp, Homo sapiens
ggatgttcagtgaat

SEQ ID NO: 221843 - DNA, 15 bp, Homo sapiens
gggatgttcagtgaa

SEQ ID NO: 221844 - DNA, 15 bp, Homo sapiens
ggggatgttcagtga

SEQ ID NO: 221845 - DNA, 15 bp, Homo sapiens
aggggatgttcagtg

SEQ ID NO: 221846 - DNA, 15 bp, Homo sapiens
aaggggatgttcagt

SEQ ID NO: 221847 - DNA, 15 bp, Homo sapiens
caaggggatgttcag

SEQ ID NO: 221848 - DNA, 15 bp, Homo sapiens
ccaaggggatgttca

SEQ ID NO: 221849 - DNA, 15 bp, Homo sapiens
tccaaggggatgttc

SEQ ID NO: 221850 - DNA, 15 bp, Homo sapiens
ttccaaggggatgtt

SEQ ID NO: 221851 - DNA, 15 bp, Homo sapiens
gttccaaggggatgt

SEQ ID NO: 221852 - DNA, 15 bp, Homo sapiens
tgttccaaggggatg

SEQ ID NO: 221853 - DNA, 15 bp, Homo sapiens
atgttccaaggggat

SEQ ID NO: 221854 - DNA, 15 bp, Homo sapiens
gatgttccaagggga

SEQ ID NO: 221855 - DNA, 15 bp, Homo sapiens
tgatgttccaagggg

SEQ ID NO: 221856 - DNA, 15 bp, Homo sapiens
ctgatgttccaaggg

SEQ ID NO: 221857 - DNA, 15 bp, Homo sapiens
gctgatgttccaagg

SEQ ID NO: 221858 - DNA, 15 bp, Homo sapiens
ggctgatgttccaag

SEQ ID NO: 221859 - DNA, 15 bp, Homo sapiens
aggctgatgttccaa

SEQ ID NO: 221860 - DNA, 15 bp, Homo sapiens
caggctgatgttcca

SEQ ID NO: 221861 - DNA, 15 bp, Homo sapiens
gcaggctgatgttcc

SEQ ID NO: 221862 - DNA, 15 bp, Homo sapiens
agcaggctgatgttc

SEQ ID NO: 221863 - DNA, 15 bp, Homo sapiens
gagcaggctgatgtt

SEQ ID NO: 221864 - DNA, 15 bp, Homo sapiens
tgagcaggctgatgt

SEQ ID NO: 221865 - DNA, 15 bp, Homo sapiens
ttgagcaggctgatg

SEQ ID NO: 221866 - DNA, 15 bp, Homo sapiens
tttgagcaggctgat

SEQ ID NO: 221867 - DNA, 15 bp, Homo sapiens
ttttgagcaggctga

SEQ ID NO: 221868 - DNA, 15 bp, Homo sapiens
attttgagcaggctg

SEQ ID NO: 221869 - DNA, 15 bp, Homo sapiens
aattttgagcaggct

SEQ ID NO: 221870 - DNA, 15 bp, Homo sapiens
aaattttgagcaggc

SEQ ID NO: 221871 - DNA, 15 bp, Homo sapiens
aaaattttgagcagg

SEQ ID NO: 221872 - DNA, 15 bp, Homo sapiens
taaaattttgagcag

SEQ ID NO: 221873 - DNA, 15 bp, Homo sapiens
ctaaaattttgagca

SEQ ID NO: 221874 - DNA, 15 bp, Homo sapiens
cctaaaattttgagc

SEQ ID NO: 221875 - DNA, 15 bp, Homo sapiens
gcctaaaattttgag

SEQ ID NO: 221876 - DNA, 15 bp, Homo sapiens
tgcctaaaattttga

SEQ ID NO: 221877 - DNA, 15 bp, Homo sapiens
atgcctaaaattttg

SEQ ID NO: 221878 - DNA, 15 bp, Homo sapiens
catgcctaaaatttt

SEQ ID NO: 221879 - DNA, 15 bp, Homo sapiens
tcatgcctaaaattt

SEQ ID NO: 221880 - DNA, 15 bp, Homo sapiens
gtcatgcctaaaatt

SEQ ID NO: 221881 - DNA, 15 bp, Homo sapiens
tgtcatgcctaaaat

SEQ ID NO: 221882 - DNA, 15 bp, Homo sapiens
gtgtcatgcctaaaa

SEQ ID NO: 221883 - DNA, 15 bp, Homo sapiens
ggtgtcatgcctaaa

SEQ ID NO: 221884 - DNA, 15 bp, Homo sapiens
cggtgtcatgcctaa

SEQ ID NO: 221885 - DNA, 15 bp, Homo sapiens
acggtgtcatgccta

SEQ ID NO: 221886 - DNA, 15 bp, Homo sapiens
tacggtgtcatgcct

SEQ ID NO: 221887 - DNA, 15 bp, Homo sapiens
ttacggtgtcatgcc

SEQ ID NO: 221888 - DNA, 15 bp, Homo sapiens
tttacggtgtcatgc

SEQ ID NO: 221889 - DNA, 15 bp, Homo sapiens
gtttacggtgtcatg

SEQ ID NO: 221890 - DNA, 15 bp, Homo sapiens
ggtttacggtgtcat

SEQ ID NO: 221891 - DNA, 15 bp, Homo sapiens
gggtttacggtgtca

SEQ ID NO: 221892 - DNA, 15 bp, Homo sapiens
agggtttacggtgtc

SEQ ID NO: 221893 - DNA, 15 bp, Homo sapiens
cagggtttacggtgt

SEQ ID NO: 221894 - DNA, 15 bp, Homo sapiens
gcagggtttacggtg

SEQ ID NO: 221895 - DNA, 15 bp, Homo sapiens
agcagggtttacggt

SEQ ID NO: 221896 - DNA, 15 bp, Homo sapiens
tagcagggtttacgg

SEQ ID NO: 221897 - DNA, 15 bp, Homo sapiens
atagcagggtttacg

SEQ ID NO: 221898 - DNA, 15 bp, Homo sapiens
aatagcagggtttac

SEQ ID NO: 221899 - DNA, 15 bp, Homo sapiens
aaatagcagggttta

SEQ ID NO: 221900 - DNA, 15 bp, Homo sapiens
taaatagcagggttt

SEQ ID NO: 221901 - DNA, 15 bp, Homo sapiens
ataaatagcagggtt

SEQ ID NO: 221902 - DNA, 15 bp, Homo sapiens
tataaatagcagggt

SEQ ID NO: 221903 - DNA, 15 bp, Homo sapiens
atataaatagcaggg

SEQ ID NO: 221904 - DNA, 15 bp, Homo sapiens
aatataaatagcagg

SEQ ID NO: 221905 - DNA, 15 bp, Homo sapiens
caatataaatagcag

SEQ ID NO: 221906 - DNA, 15 bp, Homo sapiens
gcaatataaatagca

SEQ ID NO: 221907 - DNA, 15 bp, Homo sapiens
tgcaatataaatagc

SEQ ID NO: 221908 - DNA, 15 bp, Homo sapiens
gtgcaatataaatag

SEQ ID NO: 221909 - DNA, 15 bp, Homo sapiens
ggtgcaatataaata

SEQ ID NO: 221910 - DNA, 15 bp, Homo sapiens
tggtgcaatataaat

SEQ ID NO: 221911 - DNA, 15 bp, Homo sapiens
ctggtgcaatataaa

SEQ ID NO: 221912 - DNA, 15 bp, Homo sapiens
tctggtgcaatataa

SEQ ID NO: 221913 - DNA, 15 bp, Homo sapiens
atctggtgcaatata

SEQ ID NO: 221914 - DNA, 15 bp, Homo sapiens
aatctggtgcaatat

SEQ ID NO: 221915 - DNA, 15 bp, Homo sapiens
gaatctggtgcaata

SEQ ID NO: 221916 - DNA, 15 bp, Homo sapiens
agaatctggtgcaat

SEQ ID NO: 221917 - DNA, 15 bp, Homo sapiens
cagaatctggtgcaa

SEQ ID NO: 221918 - DNA, 15 bp, Homo sapiens
gcagaatctggtgca

SEQ ID NO: 221919 - DNA, 15 bp, Homo sapiens
tgcagaatctggtgc

SEQ ID NO: 221920 - DNA, 15 bp, Homo sapiens
ttgcagaatctggtg

SEQ ID NO: 221921 - DNA, 15 bp, Homo sapiens
tttgcagaatctggt

SEQ ID NO: 221922 - DNA, 15 bp, Homo sapiens
atttgcagaatctgg

SEQ ID NO: 221923 - DNA, 15 bp, Homo sapiens
tatttgcagaatctg

SEQ ID NO: 221924 - DNA, 15 bp, Homo sapiens
atatttgcagaatct

SEQ ID NO: 221925 - DNA, 15 bp, Homo sapiens
gatatttgcagaatc

SEQ ID NO: 221926 - DNA, 15 bp, Homo sapiens
agatatttgcagaat

SEQ ID NO: 221927 - DNA, 15 bp, Homo sapiens
aagatatttgcagaa

SEQ ID NO: 221928 - DNA, 15 bp, Homo sapiens
aaagatatttgcaga

SEQ ID NO: 221929 - DNA, 15 bp, Homo sapiens
taaagatatttgcag

SEQ ID NO: 221930 - DNA, 15 bp, Homo sapiens
ctaaagatatttgca

SEQ ID NO: 221931 - DNA, 15 bp, Homo sapiens
actaaagatatttgc

SEQ ID NO: 221932 - DNA, 15 bp, Homo sapiens
tactaaagatatttg

SEQ ID NO: 221933 - DNA, 15 bp, Homo sapiens
ttactaaagatattt

SEQ ID NO: 221934 - DNA, 15 bp, Homo sapiens
gttactaaagatatt

SEQ ID NO: 221935 - DNA, 15 bp, Homo sapiens
tgttactaaagatat

SEQ ID NO: 221936 - DNA, 15 bp, Homo sapiens
gtgttactaaagata

SEQ ID NO: 221937 - DNA, 15 bp, Homo sapiens
agtgttactaaagat

SEQ ID NO: 221938 - DNA, 15 bp, Homo sapiens
tagtgttactaaaga

SEQ ID NO: 221939 - DNA, 15 bp, Homo sapiens
ttagtgttactaaag

SEQ ID NO: 221940 - DNA, 15 bp, Homo sapiens
cttagtgttactaaa

SEQ ID NO: 221941 - DNA, 15 bp, Homo sapiens
gcttagtgttactaa

SEQ ID NO: 221942 - DNA, 15 bp, Homo sapiens
ggcttagtgttacta

SEQ ID NO: 221943 - DNA, 15 bp, Homo sapiens
gggcttagtgttact

SEQ ID NO: 221944 - DNA, 15 bp, Homo sapiens
agggcttagtgttac

SEQ ID NO: 221945 - DNA, 15 bp, Homo sapiens
gagggcttagtgtta

SEQ ID NO: 221946 - DNA, 15 bp, Homo sapiens
cgagggcttagtgtt

SEQ ID NO: 221947 - DNA, 15 bp, Homo sapiens
ccgagggcttagtgt

SEQ ID NO: 221948 - DNA, 15 bp, Homo sapiens
accgagggcttagtg

SEQ ID NO: 221949 - DNA, 15 bp, Homo sapiens
aaccgagggcttagt

SEQ ID NO: 221950 - DNA, 15 bp, Homo sapiens
caaccgagggcttag

SEQ ID NO: 221951 - DNA, 15 bp, Homo sapiens
acaaccgagggctta

SEQ ID NO: 221952 - DNA, 15 bp, Homo sapiens
aacaaccgagggctt

SEQ ID NO: 221953 - DNA, 15 bp, Homo sapiens
aaacaaccgagggct

SEQ ID NO: 221954 - DNA, 15 bp, Homo sapiens
aaaacaaccgagggc

SEQ ID NO: 221955 - DNA, 15 bp, Homo sapiens
taaaacaaccgaggg

SEQ ID NO: 221956 - DNA, 15 bp, Homo sapiens
ttaaaacaaccgagg

SEQ ID NO: 221957 - DNA, 15 bp, Homo sapiens
gttaaaacaaccgag

SEQ ID NO: 221958 - DNA, 15 bp, Homo sapiens
agttaaaacaaccga

SEQ ID NO: 221959 - DNA, 15 bp, Homo sapiens
cagttaaaacaaccg

SEQ ID NO: 221960 - DNA, 15 bp, Homo sapiens
gcagttaaaacaacc

SEQ ID NO: 221961 - DNA, 15 bp, Homo sapiens
cgcagttaaaacaac

SEQ ID NO: 221962 - DNA, 15 bp, Homo sapiens
acgcagttaaaacaa

SEQ ID NO: 221963 - DNA, 15 bp, Homo sapiens
gacgcagttaaaaca

SEQ ID NO: 221964 - DNA, 15 bp, Homo sapiens
agacgcagttaaaac

SEQ ID NO: 221965 - DNA, 15 bp, Homo sapiens
gagacgcagttaaaa

SEQ ID NO: 221966 - DNA, 15 bp, Homo sapiens
agagacgcagttaaa

SEQ ID NO: 221967 - DNA, 15 bp, Homo sapiens
tagagacgcagttaa

SEQ ID NO: 221968 - DNA, 15 bp, Homo sapiens
ttagagacgcagtta

SEQ ID NO: 221969 - DNA, 15 bp, Homo sapiens
attagagacgcagtt

SEQ ID NO: 221970 - DNA, 15 bp, Homo sapiens
aattagagacgcagt

SEQ ID NO: 221971 - DNA, 15 bp, Homo sapiens
taattagagacgcag

SEQ ID NO: 221972 - DNA, 15 bp, Homo sapiens
ataattagagacgca

SEQ ID NO: 221973 - DNA, 15 bp, Homo sapiens
tataattagagacgc

SEQ ID NO: 221974 - DNA, 15 bp, Homo sapiens
ttataattagagacg

SEQ ID NO: 221975 - DNA, 15 bp, Homo sapiens
gttataattagagac

SEQ ID NO: 221976 - DNA, 15 bp, Homo sapiens
ggttataattagaga

SEQ ID NO: 221977 - DNA, 15 bp, Homo sapiens
aggttataattagag

SEQ ID NO: 221978 - DNA, 15 bp, Homo sapiens
aaggttataattaga

SEQ ID NO: 221979 - DNA, 15 bp, Homo sapiens
aaaggttataattag

SEQ ID NO: 221980 - DNA, 15 bp, Homo sapiens
aaaaggttataatta

SEQ ID NO: 221981 - DNA, 15 bp, Homo sapiens
aaaaaggttataatt

SEQ ID NO: 221982 - DNA, 15 bp, Homo sapiens
taaaaaggttataat

SEQ ID NO: 221983 - DNA, 15 bp, Homo sapiens
ttaaaaaggttataa

SEQ ID NO: 221984 - DNA, 15 bp, Homo sapiens
attaaaaaggttata

SEQ ID NO: 221985 - DNA, 15 bp, Homo sapiens
tattaaaaaggttat

SEQ ID NO: 221986 - DNA, 15 bp, Homo sapiens
atattaaaaaggtta

SEQ ID NO: 221987 - DNA, 15 bp, Homo sapiens
aatattaaaaaggtt

SEQ ID NO: 221988 - DNA, 15 bp, Homo sapiens
aaatattaaaaaggt

SEQ ID NO: 221989 - DNA, 15 bp, Homo sapiens
taaatattaaaaagg

SEQ ID NO: 221990 - DNA, 15 bp, Homo sapiens
gtaaatattaaaaag

SEQ ID NO: 221991 - DNA, 15 bp, Homo sapiens
tgtaaatattaaaaa

SEQ ID NO: 221992 - DNA, 15 bp, Homo sapiens
ctgtaaatattaaaa

SEQ ID NO: 221993 - DNA, 15 bp, Homo sapiens
actgtaaatattaaa

SEQ ID NO: 221994 - DNA, 15 bp, Homo sapiens
cactgtaaatattaa

SEQ ID NO: 221995 - DNA, 15 bp, Homo sapiens
ccactgtaaatatta

SEQ ID NO: 221996 - DNA, 15 bp, Homo sapiens
accactgtaaatatt

SEQ ID NO: 221997 - DNA, 15 bp, Homo sapiens
caccactgtaaatat

SEQ ID NO: 221998 - DNA, 15 bp, Homo sapiens
acaccactgtaaata

SEQ ID NO: 221999 - DNA, 15 bp, Homo sapiens
gacaccactgtaaat

SEQ ID NO: 222000 - DNA, 15 bp, Homo sapiens
tgacaccactgtaaa

SEQ ID NO: 222001 - DNA, 15 bp, Homo sapiens
atgacaccactgtaa

SEQ ID NO: 222002 - DNA, 15 bp, Homo sapiens
catgacaccactgta

SEQ ID NO: 222003 - DNA, 15 bp, Homo sapiens
gcatgacaccactgt

SEQ ID NO: 222004 - DNA, 15 bp, Homo sapiens
ggcatgacaccactg

SEQ ID NO: 222005 - DNA, 15 bp, Homo sapiens
tggcatgacaccact

SEQ ID NO: 222006 - DNA, 15 bp, Homo sapiens
atggcatgacaccac

SEQ ID NO: 222007 - DNA, 15 bp, Homo sapiens
gatggcatgacacca

SEQ ID NO: 222008 - DNA, 15 bp, Homo sapiens
ggatggcatgacacc

SEQ ID NO: 222009 - DNA, 15 bp, Homo sapiens
aggatggcatgacac

SEQ ID NO: 222010 - DNA, 15 bp, Homo sapiens
caggatggcatgaca

SEQ ID NO: 222011 - DNA, 15 bp, Homo sapiens
tcaggatggcatgac

SEQ ID NO: 222012 - DNA, 15 bp, Homo sapiens
atcaggatggcatga

SEQ ID NO: 222013 - DNA, 15 bp, Homo sapiens
aatcaggatggcatg

SEQ ID NO: 222014 - DNA, 15 bp, Homo sapiens
taatcaggatggcat

SEQ ID NO: 222015 - DNA, 15 bp, Homo sapiens
ttaatcaggatggca

SEQ ID NO: 222016 - DNA, 15 bp, Homo sapiens
tttaatcaggatggc

SEQ ID NO: 222017 - DNA, 15 bp, Homo sapiens
ctttaatcaggatgg

SEQ ID NO: 222018 - DNA, 15 bp, Homo sapiens
actttaatcaggatg

SEQ ID NO: 222019 - DNA, 15 bp, Homo sapiens
cactttaatcaggat

SEQ ID NO: 222020 - DNA, 15 bp, Homo sapiens
gcactttaatcagga

SEQ ID NO: 222021 - DNA, 15 bp, Homo sapiens
ggcactttaatcagg

SEQ ID NO: 222022 - DNA, 15 bp, Homo sapiens
cggcactttaatcag

SEQ ID NO: 222023 - DNA, 15 bp, Homo sapiens
acggcactttaatca

SEQ ID NO: 222024 - DNA, 15 bp, Homo sapiens
cacggcactttaatc

SEQ ID NO: 222025 - DNA, 15 bp, Homo sapiens
ccacggcactttaat

SEQ ID NO: 222026 - DNA, 15 bp, Homo sapiens
accacggcactttaa

SEQ ID NO: 222027 - DNA, 15 bp, Homo sapiens
caccacggcacttta

SEQ ID NO: 222028 - DNA, 15 bp, Homo sapiens
tcaccacggcacttt

SEQ ID NO: 222029 - DNA, 15 bp, Homo sapiens
ctcaccacggcactt

SEQ ID NO: 222030 - DNA, 15 bp, Homo sapiens
tctcaccacggcact

SEQ ID NO: 222031 - DNA, 15 bp, Homo sapiens
ctctcaccacggcac

SEQ ID NO: 222032 - DNA, 15 bp, Homo sapiens
tctctcaccacggca

SEQ ID NO: 222033 - DNA, 15 bp, Homo sapiens
atctctcaccacggc

SEQ ID NO: 222034 - DNA, 15 bp, Homo sapiens
catctctcaccacgg

SEQ ID NO: 222035 - DNA, 15 bp, Homo sapiens
gcatctctcaccacg

SEQ ID NO: 222036 - DNA, 15 bp, Homo sapiens
agcatctctcaccac

SEQ ID NO: 222037 - DNA, 15 bp, Homo sapiens
cagcatctctcacca

SEQ ID NO: 222038 - DNA, 15 bp, Homo sapiens
acagcatctctcacc

SEQ ID NO: 222039 - DNA, 15 bp, Homo sapiens
aacagcatctctcac

SEQ ID NO: 222040 - DNA, 15 bp, Homo sapiens
caacagcatctctca

SEQ ID NO: 222041 - DNA, 15 bp, Homo sapiens
ccaacagcatctctc

SEQ ID NO: 222042 - DNA, 15 bp, Homo sapiens
gccaacagcatctct

SEQ ID NO: 222043 - DNA, 15 bp, Homo sapiens
tgccaacagcatctc

SEQ ID NO: 222044 - DNA, 15 bp, Homo sapiens
gtgccaacagcatct

SEQ ID NO: 222045 - DNA, 15 bp, Homo sapiens
ggtgccaacagcatc

SEQ ID NO: 222046 - DNA, 15 bp, Homo sapiens
aggtgccaacagcat

SEQ ID NO: 222047 - DNA, 15 bp, Homo sapiens
taggtgccaacagca

SEQ ID NO: 222048 - DNA, 15 bp, Homo sapiens
ctaggtgccaacagc

SEQ ID NO: 222049 - DNA, 15 bp, Homo sapiens
actaggtgccaacag

SEQ ID NO: 222050 - DNA, 15 bp, Homo sapiens
tactaggtgccaaca

SEQ ID NO: 222051 - DNA, 15 bp, Homo sapiens
ctactaggtgccaac

SEQ ID NO: 222052 - DNA, 15 bp, Homo sapiens
gctactaggtgccaa

SEQ ID NO: 222053 - DNA, 15 bp, Homo sapiens
tgctactaggtgcca

SEQ ID NO: 222054 - DNA, 15 bp, Homo sapiens
ctgctactaggtgcc

SEQ ID NO: 222055 - DNA, 15 bp, Homo sapiens
gctgctactaggtgc

SEQ ID NO: 222056 - DNA, 15 bp, Homo sapiens
tgctgctactaggtg

SEQ ID NO: 222057 - DNA, 15 bp, Homo sapiens
atgctgctactaggt

SEQ ID NO: 222058 - DNA, 15 bp, Homo sapiens
aatgctgctactagg

SEQ ID NO: 222059 - DNA, 15 bp, Homo sapiens
caatgctgctactag

SEQ ID NO: 222060 - DNA, 15 bp, Homo sapiens
gcaatgctgctacta

SEQ ID NO: 222061 - DNA, 15 bp, Homo sapiens
agcaatgctgctact

SEQ ID NO: 222062 - DNA, 15 bp, Homo sapiens
cagcaatgctgctac

SEQ ID NO: 222063 - DNA, 15 bp, Homo sapiens
tcagcaatgctgcta

SEQ ID NO: 222064 - DNA, 15 bp, Homo sapiens
atcagcaatgctgct

SEQ ID NO: 222065 - DNA, 15 bp, Homo sapiens
catcagcaatgctgc

SEQ ID NO: 222066 - DNA, 15 bp, Homo sapiens
tcatcagcaatgctg

SEQ ID NO: 222067 - DNA, 15 bp, Homo sapiens
ctcatcagcaatgct

SEQ ID NO: 222068 - DNA, 15 bp, Homo sapiens
tctcatcagcaatgc

SEQ ID NO: 222069 - DNA, 15 bp, Homo sapiens
ttctcatcagcaatg

SEQ ID NO: 222070 - DNA, 15 bp, Homo sapiens
cttctcatcagcaat

SEQ ID NO: 222071 - DNA, 15 bp, Homo sapiens
ccttctcatcagcaa

SEQ ID NO: 222072 - DNA, 15 bp, Homo sapiens
accttctcatcagca

SEQ ID NO: 222073 - DNA, 15 bp, Homo sapiens
caccttctcatcagc

SEQ ID NO: 222074 - DNA, 15 bp, Homo sapiens
acaccttctcatcag

SEQ ID NO: 222075 - DNA, 15 bp, Homo sapiens
gacaccttctcatca

SEQ ID NO: 222076 - DNA, 15 bp, Homo sapiens
tgacaccttctcatc

SEQ ID NO: 222077 - DNA, 15 bp, Homo sapiens
gtgacaccttctcat

SEQ ID NO: 222078 - DNA, 15 bp, Homo sapiens
agtgacaccttctca

SEQ ID NO: 222079 - DNA, 15 bp, Homo sapiens
tagtgacaccttctc

SEQ ID NO: 222080 - DNA, 15 bp, Homo sapiens
ttagtgacaccttct

SEQ ID NO: 222081 - DNA, 15 bp, Homo sapiens
tttagtgacaccttc

SEQ ID NO: 222082 - DNA, 15 bp, Homo sapiens
ctttagtgacacctt

SEQ ID NO: 222083 - DNA, 15 bp, Homo sapiens
gctttagtgacacct

SEQ ID NO: 222084 - DNA, 15 bp, Homo sapiens
agctttagtgacacc

SEQ ID NO: 222085 - DNA, 15 bp, Homo sapiens
cagctttagtgacac

SEQ ID NO: 222086 - DNA, 15 bp, Homo sapiens
tcagctttagtgaca

SEQ ID NO: 222087 - DNA, 15 bp, Homo sapiens
gtcagctttagtgac

SEQ ID NO: 222088 - DNA, 15 bp, Homo sapiens
ggtcagctttagtga

SEQ ID NO: 222089 - DNA, 15 bp, Homo sapiens
aggtcagctttagtg

SEQ ID NO: 222090 - DNA, 15 bp, Homo sapiens
aaggtcagctttagt

SEQ ID NO: 222091 - DNA, 15 bp, Homo sapiens
gaaggtcagctttag

SEQ ID NO: 222092 - DNA, 15 bp, Homo sapiens
ggaaggtcagcttta

SEQ ID NO: 222093 - DNA, 15 bp, Homo sapiens
tggaaggtcagcttt

SEQ ID NO: 222094 - DNA, 15 bp, Homo sapiens
atggaaggtcagctt

SEQ ID NO: 222095 - DNA, 15 bp, Homo sapiens
gatggaaggtcagct

SEQ ID NO: 222096 - DNA, 15 bp, Homo sapiens
tgatggaaggtcagc

SEQ ID NO: 222097 - DNA, 15 bp, Homo sapiens
gtgatggaaggtcag

SEQ ID NO: 222098 - DNA, 15 bp, Homo sapiens
agtgatggaaggtca

SEQ ID NO: 222099 - DNA, 15 bp, Homo sapiens
aagtgatggaaggtc

SEQ ID NO: 222100 - DNA, 15 bp, Homo sapiens
gaagtgatggaaggt

SEQ ID NO: 222101 - DNA, 15 bp, Homo sapiens
agaagtgatggaagg

SEQ ID NO: 222102 - DNA, 15 bp, Homo sapiens
aagaagtgatggaag

SEQ ID NO: 222103 - DNA, 15 bp, Homo sapiens
taagaagtgatggaa

SEQ ID NO: 222104 - DNA, 15 bp, Homo sapiens
ttaagaagtgatgga

SEQ ID NO: 222105 - DNA, 15 bp, Homo sapiens
cttaagaagtgatgg

SEQ ID NO: 222106 - DNA, 15 bp, Homo sapiens
acttaagaagtgatg

SEQ ID NO: 222107 - DNA, 15 bp, Homo sapiens
cacttaagaagtgat

SEQ ID NO: 222108 - DNA, 15 bp, Homo sapiens
tcacttaagaagtga

SEQ ID NO: 222109 - DNA, 15 bp, Homo sapiens
ctcacttaagaagtg

SEQ ID NO: 222110 - DNA, 15 bp, Homo sapiens
gctcacttaagaagt

SEQ ID NO: 222111 - DNA, 15 bp, Homo sapiens
ggctcacttaagaag

SEQ ID NO: 222112 - DNA, 15 bp, Homo sapiens
tggctcacttaagaa

SEQ ID NO: 222113 - DNA, 15 bp, Homo sapiens
atggctcacttaaga

SEQ ID NO: 222114 - DNA, 15 bp, Homo sapiens
gatggctcacttaag

SEQ ID NO: 222115 - DNA, 15 bp, Homo sapiens
tgatggctcacttaa

SEQ ID NO: 222116 - DNA, 15 bp, Homo sapiens
atgatggctcactta

SEQ ID NO: 222117 - DNA, 15 bp, Homo sapiens
aatgatggctcactt

SEQ ID NO: 222118 - DNA, 15 bp, Homo sapiens
aaatgatggctcact

SEQ ID NO: 222119 - DNA, 15 bp, Homo sapiens
taaatgatggctcac

SEQ ID NO: 222120 - DNA, 15 bp, Homo sapiens
ctaaatgatggctca

SEQ ID NO: 222121 - DNA, 15 bp, Homo sapiens
cctaaatgatggctc

SEQ ID NO: 222122 - DNA, 15 bp, Homo sapiens
tcctaaatgatggct

SEQ ID NO: 222123 - DNA, 15 bp, Homo sapiens
atcctaaatgatggc

SEQ ID NO: 222124 - DNA, 15 bp, Homo sapiens
catcctaaatgatgg

SEQ ID NO: 222125 - DNA, 15 bp, Homo sapiens
ccatcctaaatgatg

SEQ ID NO: 222126 - DNA, 15 bp, Homo sapiens
tccatcctaaatgat

SEQ ID NO: 222127 - DNA, 15 bp, Homo sapiens
gtccatcctaaatga

SEQ ID NO: 222128 - DNA, 15 bp, Homo sapiens
tgtccatcctaaatg

SEQ ID NO: 222129 - DNA, 15 bp, Homo sapiens
gtgtccatcctaaat

SEQ ID NO: 222130 - DNA, 15 bp, Homo sapiens
tgtgtccatcctaaa

SEQ ID NO: 222131 - DNA, 15 bp, Homo sapiens
ctgtgtccatcctaa

SEQ ID NO: 222132 - DNA, 15 bp, Homo sapiens
tctgtgtccatccta

SEQ ID NO: 222133 - DNA, 15 bp, Homo sapiens
ctctgtgtccatcct

SEQ ID NO: 222134 - DNA, 15 bp, Homo sapiens
cctctgtgtccatcc

SEQ ID NO: 222135 - DNA, 15 bp, Homo sapiens
acctctgtgtccatc

SEQ ID NO: 222136 - DNA, 15 bp, Homo sapiens
tacctctgtgtccat

SEQ ID NO: 222137 - DNA, 15 bp, Homo sapiens
gtacctctgtgtcca

SEQ ID NO: 222138 - DNA, 15 bp, Homo sapiens
ggtacctctgtgtcc

SEQ ID NO: 222139 - DNA, 15 bp, Homo sapiens
tggtacctctgtgtc

SEQ ID NO: 222140 - DNA, 15 bp, Homo sapiens
ttggtacctctgtgt

SEQ ID NO: 222141 - DNA, 15 bp, Homo sapiens
attggtacctctgtg

SEQ ID NO: 222142 - DNA, 15 bp, Homo sapiens
cattggtacctctgt

SEQ ID NO: 222143 - DNA, 15 bp, Homo sapiens
tcattggtacctctg

SEQ ID NO: 222144 - DNA, 15 bp, Homo sapiens
ctcattggtacctct

SEQ ID NO: 222145 - DNA, 15 bp, Homo sapiens
gctcattggtacctc

SEQ ID NO: 222146 - DNA, 15 bp, Homo sapiens
ggctcattggtacct

SEQ ID NO: 222147 - DNA, 15 bp, Homo sapiens
gggctcattggtacc

SEQ ID NO: 222148 - DNA, 15 bp, Homo sapiens
ggggctcattggtac

SEQ ID NO: 222149 - DNA, 15 bp, Homo sapiens
aggggctcattggta

SEQ ID NO: 222150 - DNA, 15 bp, Homo sapiens
caggggctcattggt

SEQ ID NO: 222151 - DNA, 15 bp, Homo sapiens
acaggggctcattgg

SEQ ID NO: 222152 - DNA, 15 bp, Homo sapiens
aacaggggctcattg

SEQ ID NO: 222153 - DNA, 15 bp, Homo sapiens
gaacaggggctcatt

SEQ ID NO: 222154 - DNA, 15 bp, Homo sapiens
agaacaggggctcat

SEQ ID NO: 222155 - DNA, 15 bp, Homo sapiens
aagaacaggggctca

SEQ ID NO: 222156 - DNA, 15 bp, Homo sapiens
caagaacaggggctc

SEQ ID NO: 222157 - DNA, 15 bp, Homo sapiens
tcaagaacaggggct

SEQ ID NO: 222158 - DNA, 15 bp, Homo sapiens
atcaagaacaggggc

SEQ ID NO: 222159 - DNA, 15 bp, Homo sapiens
gatcaagaacagggg

SEQ ID NO: 222160 - DNA, 15 bp, Homo sapiens
ggatcaagaacaggg

SEQ ID NO: 222161 - DNA, 15 bp, Homo sapiens
gggatcaagaacagg

SEQ ID NO: 222162 - DNA, 15 bp, Homo sapiens
tgggatcaagaacag

SEQ ID NO: 222163 - DNA, 15 bp, Homo sapiens
ctgggatcaagaaca

SEQ ID NO: 222164 - DNA, 15 bp, Homo sapiens
cctgggatcaagaac

SEQ ID NO: 222165 - DNA, 15 bp, Homo sapiens
tcctgggatcaagaa

SEQ ID NO: 222166 - DNA, 15 bp, Homo sapiens
atcctgggatcaaga

SEQ ID NO: 222167 - DNA, 15 bp, Homo sapiens
gatcctgggatcaag

SEQ ID NO: 222168 - DNA, 15 bp, Homo sapiens
ggatcctgggatcaa

SEQ ID NO: 222169 - DNA, 15 bp, Homo sapiens
tggatcctgggatca

SEQ ID NO: 222170 - DNA, 15 bp, Homo sapiens
ttggatcctgggatc

SEQ ID NO: 222171 - DNA, 15 bp, Homo sapiens
tttggatcctgggat

SEQ ID NO: 222172 - DNA, 15 bp, Homo sapiens
ttttggatcctggga

SEQ ID NO: 222173 - DNA, 15 bp, Homo sapiens
gttttggatcctggg

SEQ ID NO: 222174 - DNA, 15 bp, Homo sapiens
ggttttggatcctgg

SEQ ID NO: 222175 - DNA, 15 bp, Homo sapiens
aggttttggatcctg

SEQ ID NO: 222176 - DNA, 15 bp, Homo sapiens
gaggttttggatcct

SEQ ID NO: 222177 - DNA, 15 bp, Homo sapiens
agaggttttggatcc

SEQ ID NO: 222178 - DNA, 15 bp, Homo sapiens
gagaggttttggatc

SEQ ID NO: 222179 - DNA, 15 bp, Homo sapiens
tgagaggttttggat

SEQ ID NO: 222180 - DNA, 15 bp, Homo sapiens
ctgagaggttttgga

SEQ ID NO: 222181 - DNA, 15 bp, Homo sapiens
cctgagaggttttgg

SEQ ID NO: 222182 - DNA, 15 bp, Homo sapiens
acctgagaggttttg

SEQ ID NO: 222183 - DNA, 15 bp, Homo sapiens
cacctgagaggtttt

SEQ ID NO: 222184 - DNA, 15 bp, Homo sapiens
tcacctgagaggttt

SEQ ID NO: 222185 - DNA, 15 bp, Homo sapiens
ctcacctgagaggtt

SEQ ID NO: 222186 - DNA, 15 bp, Homo sapiens
cctcacctgagaggt

SEQ ID NO: 222187 - DNA, 15 bp, Homo sapiens
gcctcacctgagagg

SEQ ID NO: 222188 - DNA, 15 bp, Homo sapiens
tgcctcacctgagag

SEQ ID NO: 222189 - DNA, 15 bp, Homo sapiens
atgcctcacctgaga

SEQ ID NO: 222190 - DNA, 15 bp, Homo sapiens
gatgcctcacctgag

SEQ ID NO: 222191 - DNA, 15 bp, Homo sapiens
agatgcctcacctga

SEQ ID NO: 222192 - DNA, 15 bp, Homo sapiens
gagatgcctcacctg

SEQ ID NO: 222193 - DNA, 15 bp, Homo sapiens
ggagatgcctcacct

SEQ ID NO: 222194 - DNA, 15 bp, Homo sapiens
aggagatgcctcacc

SEQ ID NO: 222195 - DNA, 15 bp, Homo sapiens
aaggagatgcctcac

SEQ ID NO: 222196 - DNA, 15 bp, Homo sapiens
caaggagatgcctca

SEQ ID NO: 222197 - DNA, 15 bp, Homo sapiens
acaaggagatgcctc

SEQ ID NO: 222198 - DNA, 15 bp, Homo sapiens
cacaaggagatgcct

SEQ ID NO: 222199 - DNA, 15 bp, Homo sapiens
acacaaggagatgcc

SEQ ID NO: 222200 - DNA, 15 bp, Homo sapiens
cacacaaggagatgc

SEQ ID NO: 222201 - DNA, 15 bp, Homo sapiens
acacacaaggagatg

SEQ ID NO: 222202 - DNA, 15 bp, Homo sapiens
aacacacaaggagat

SEQ ID NO: 222203 - DNA, 15 bp, Homo sapiens
gaacacacaaggaga

SEQ ID NO: 222204 - DNA, 15 bp, Homo sapiens
agaacacacaaggag

SEQ ID NO: 222205 - DNA, 15 bp, Homo sapiens
aagaacacacaagga

SEQ ID NO: 222206 - DNA, 15 bp, Homo sapiens
gaagaacacacaagg

SEQ ID NO: 222207 - DNA, 15 bp, Homo sapiens
tgaagaacacacaag

SEQ ID NO: 222208 - DNA, 15 bp, Homo sapiens
ctgaagaacacacaa

SEQ ID NO: 222209 - DNA, 15 bp, Homo sapiens
cctgaagaacacaca

SEQ ID NO: 222210 - DNA, 15 bp, Homo sapiens
tcctgaagaacacac

SEQ ID NO: 222211 - DNA, 15 bp, Homo sapiens
ctcctgaagaacaca

SEQ ID NO: 222212 - DNA, 15 bp, Homo sapiens
gctcctgaagaacac

SEQ ID NO: 222213 - DNA, 15 bp, Homo sapiens
ggctcctgaagaaca

SEQ ID NO: 222214 - DNA, 15 bp, Homo sapiens
tggctcctgaagaac

SEQ ID NO: 222215 - DNA, 15 bp, Homo sapiens
ctggctcctgaagaa

SEQ ID NO: 222216 - DNA, 15 bp, Homo sapiens
gctggctcctgaaga

SEQ ID NO: 222217 - DNA, 15 bp, Homo sapiens
tgctggctcctgaag

SEQ ID NO: 222218 - DNA, 15 bp, Homo sapiens
atgctggctcctgaa

SEQ ID NO: 222219 - DNA, 15 bp, Homo sapiens
catgctggctcctga

SEQ ID NO: 222220 - DNA, 15 bp, Homo sapiens
gcatgctggctcctg

SEQ ID NO: 222221 - DNA, 15 bp, Homo sapiens
agcatgctggctcct

SEQ ID NO: 222222 - DNA, 15 bp, Homo sapiens
cagcatgctggctcc

SEQ ID NO: 222223 - DNA, 15 bp, Homo sapiens
acagcatgctggctc

SEQ ID NO: 222224 - DNA, 15 bp, Homo sapiens
cacagcatgctggct

SEQ ID NO: 222225 - DNA, 15 bp, Homo sapiens
acacagcatgctggc

SEQ ID NO: 222226 - DNA, 15 bp, Homo sapiens
cacacagcatgctgg

SEQ ID NO: 222227 - DNA, 15 bp, Homo sapiens
tcacacagcatgctg

SEQ ID NO: 222228 - DNA, 15 bp, Homo sapiens
atcacacagcatgct

SEQ ID NO: 222229 - DNA, 15 bp, Homo sapiens
aatcacacagcatgc

SEQ ID NO: 222230 - DNA, 15 bp, Homo sapiens
gaatcacacagcatg

SEQ ID NO: 222231 - DNA, 15 bp, Homo sapiens
ggaatcacacagcat

SEQ ID NO: 222232 - DNA, 15 bp, Homo sapiens
aggaatcacacagca

SEQ ID NO: 222233 - DNA, 15 bp, Homo sapiens
taggaatcacacagc

SEQ ID NO: 222234 - DNA, 15 bp, Homo sapiens
ctaggaatcacacag

SEQ ID NO: 222235 - DNA, 15 bp, Homo sapiens
cctaggaatcacaca

SEQ ID NO: 222236 - DNA, 15 bp, Homo sapiens
ccctaggaatcacac

SEQ ID NO: 222237 - DNA, 15 bp, Homo sapiens
tccctaggaatcaca

SEQ ID NO: 222238 - DNA, 15 bp, Homo sapiens
ctccctaggaatcac

SEQ ID NO: 222239 - DNA, 15 bp, Homo sapiens
gctccctaggaatca

SEQ ID NO: 222240 - DNA, 15 bp, Homo sapiens
ggctccctaggaatc

SEQ ID NO: 222241 - DNA, 15 bp, Homo sapiens
tggctccctaggaat

SEQ ID NO: 222242 - DNA, 15 bp, Homo sapiens
ctggctccctaggaa

SEQ ID NO: 222243 - DNA, 15 bp, Homo sapiens
tctggctccctagga

SEQ ID NO: 222244 - DNA, 15 bp, Homo sapiens
ctctggctccctagg

SEQ ID NO: 222245 - DNA, 15 bp, Homo sapiens
cctctggctccctag

SEQ ID NO: 222246 - DNA, 15 bp, Homo sapiens
tcctctggctcccta

SEQ ID NO: 222247 - DNA, 15 bp, Homo sapiens
ttcctctggctccct

SEQ ID NO: 222248 - DNA, 15 bp, Homo sapiens
cttcctctggctccc

SEQ ID NO: 222249 - DNA, 15 bp, Homo sapiens
gcttcctctggctcc

SEQ ID NO: 222250 - DNA, 15 bp, Homo sapiens
ggcttcctctggctc

SEQ ID NO: 222251 - DNA, 15 bp, Homo sapiens
tggcttcctctggct

SEQ ID NO: 222252 - DNA, 15 bp, Homo sapiens
atggcttcctctggc

SEQ ID NO: 222253 - DNA, 15 bp, Homo sapiens
catggcttcctctgg

SEQ ID NO: 222254 - DNA, 15 bp, Homo sapiens
gcatggcttcctctg

SEQ ID NO: 222255 - DNA, 15 bp, Homo sapiens
agcatggcttcctct

SEQ ID NO: 222256 - DNA, 15 bp, Homo sapiens
gagcatggcttcctc

SEQ ID NO: 222257 - DNA, 15 bp, Homo sapiens
agagcatggcttcct

SEQ ID NO: 222258 - DNA, 15 bp, Homo sapiens
aagagcatggcttcc

SEQ ID NO: 222259 - DNA, 15 bp, Homo sapiens
caagagcatggcttc

SEQ ID NO: 222260 - DNA, 15 bp, Homo sapiens
acaagagcatggctt

SEQ ID NO: 222261 - DNA, 15 bp, Homo sapiens
cacaagagcatggct

SEQ ID NO: 222262 - DNA, 15 bp, Homo sapiens
tcacaagagcatggc

SEQ ID NO: 222263 - DNA, 15 bp, Homo sapiens
atcacaagagcatgg

SEQ ID NO: 222264 - DNA, 15 bp, Homo sapiens
catcacaagagcatg

SEQ ID NO: 222265 - DNA, 15 bp, Homo sapiens
ccatcacaagagcat

SEQ ID NO: 222266 - DNA, 15 bp, Homo sapiens
gccatcacaagagca

SEQ ID NO: 222267 - DNA, 15 bp, Homo sapiens
tgccatcacaagagc

SEQ ID NO: 222268 - DNA, 15 bp, Homo sapiens
atgccatcacaagag

SEQ ID NO: 222269 - DNA, 15 bp, Homo sapiens
tatgccatcacaaga

SEQ ID NO: 222270 - DNA, 15 bp, Homo sapiens
atatgccatcacaag

SEQ ID NO: 222271 - DNA, 15 bp, Homo sapiens
aatatgccatcacaa

SEQ ID NO: 222272 - DNA, 15 bp, Homo sapiens
aaatatgccatcaca

SEQ ID NO: 222273 - DNA, 15 bp, Homo sapiens
taaatatgccatcac

SEQ ID NO: 222274 - DNA, 15 bp, Homo sapiens
ataaatatgccatca

SEQ ID NO: 222275 - DNA, 15 bp, Homo sapiens
aataaatatgccatc

SEQ ID NO: 222276 - DNA, 15 bp, Homo sapiens
aaataaatatgccat

SEQ ID NO: 222277 - DNA, 15 bp, Homo sapiens
gaaataaatatgcca

SEQ ID NO: 222278 - DNA, 15 bp, Homo sapiens
tgaaataaatatgcc

SEQ ID NO: 222279 - DNA, 15 bp, Homo sapiens
atgaaataaatatgc

SEQ ID NO: 222280 - DNA, 15 bp, Homo sapiens
aatgaaataaatatg

SEQ ID NO: 222281 - DNA, 15 bp, Homo sapiens
caatgaaataaatat

SEQ ID NO: 222282 - DNA, 15 bp, Homo sapiens
ccaatgaaataaata

SEQ ID NO: 222283 - DNA, 15 bp, Homo sapiens
gccaatgaaataaat

SEQ ID NO: 222284 - DNA, 15 bp, Homo sapiens
ggccaatgaaataaa

SEQ ID NO: 222285 - DNA, 15 bp, Homo sapiens
aggccaatgaaataa

SEQ ID NO: 222286 - DNA, 15 bp, Homo sapiens
gaggccaatgaaata

SEQ ID NO: 222287 - DNA, 15 bp, Homo sapiens
tgaggccaatgaaat

SEQ ID NO: 222288 - DNA, 15 bp, Homo sapiens
atgaggccaatgaaa

SEQ ID NO: 222289 - DNA, 15 bp, Homo sapiens
catgaggccaatgaa

SEQ ID NO: 222290 - DNA, 15 bp, Homo sapiens
acatgaggccaatga

SEQ ID NO: 222291 - DNA, 15 bp, Homo sapiens
gacatgaggccaatg

SEQ ID NO: 222292 - DNA, 15 bp, Homo sapiens
tgacatgaggccaat

SEQ ID NO: 222293 - DNA, 15 bp, Homo sapiens
aaatgacatgaggcc

SEQ ID NO: 222294 - DNA, 15 bp, Homo sapiens
caaatgacatgaggc

SEQ ID NO: 222295 - DNA, 15 bp, Homo sapiens
ccaaatgacatgagg

SEQ ID NO: 222296 - DNA, 15 bp, Homo sapiens
accaaatgacatgag

SEQ ID NO: 222297 - DNA, 15 bp, Homo sapiens
gaccaaatgacatga

SEQ ID NO: 222298 - DNA, 15 bp, Homo sapiens
agaccaaatgacatg

SEQ ID NO: 222299 - DNA, 15 bp, Homo sapiens
tagaccaaatgacat

SEQ ID NO: 222300 - DNA, 15 bp, Homo sapiens
gtagaccaaatgaca

SEQ ID NO: 222301 - DNA, 15 bp, Homo sapiens
ggtagaccaaatgac

SEQ ID NO: 222302 - DNA, 15 bp, Homo sapiens
aggtagaccaaatga

SEQ ID NO: 222303 - DNA, 15 bp, Homo sapiens
caggtagaccaaatg

SEQ ID NO: 222304 - DNA, 15 bp, Homo sapiens
tcaggtagaccaaat

SEQ ID NO: 222305 - DNA, 15 bp, Homo sapiens
atcaggtagaccaaa

SEQ ID NO: 222306 - DNA, 15 bp, Homo sapiens
gatcaggtagaccaa

SEQ ID NO: 222307 - DNA, 15 bp, Homo sapiens
tgatcaggtagacca

SEQ ID NO: 222308 - DNA, 15 bp, Homo sapiens
ctgatcaggtagacc

SEQ ID NO: 222309 - DNA, 15 bp, Homo sapiens
gctgatcaggtagac

SEQ ID NO: 222310 - DNA, 15 bp, Homo sapiens
tgctgatcaggtaga

SEQ ID NO: 222311 - DNA, 15 bp, Homo sapiens
ctgctgatcaggtag

SEQ ID NO: 222312 - DNA, 15 bp, Homo sapiens
gctgctgatcaggta

SEQ ID NO: 222313 - DNA, 15 bp, Homo sapiens
agctgctgatcaggt

SEQ ID NO: 222314 - DNA, 15 bp, Homo sapiens
cagctgctgatcagg

SEQ ID NO: 222315 - DNA, 15 bp, Homo sapiens
gcagctgctgatcag

SEQ ID NO: 222316 - DNA, 15 bp, Homo sapiens
agcagctgctgatca

SEQ ID NO: 222317 - DNA, 15 bp, Homo sapiens
cagcagctgctgatc

SEQ ID NO: 222318 - DNA, 15 bp, Homo sapiens
acagcagctgctgat

SEQ ID NO: 222319 - DNA, 15 bp, Homo sapiens
cacagcagctgctga

SEQ ID NO: 222320 - DNA, 15 bp, Homo sapiens
tcacagcagctgctg

SEQ ID NO: 222321 - DNA, 15 bp, Homo sapiens
ctcacagcagctgct

SEQ ID NO: 222322 - DNA, 15 bp, Homo sapiens
actcacagcagctgc

SEQ ID NO: 222323 - DNA, 15 bp, Homo sapiens
cactcacagcagctg

SEQ ID NO: 222324 - DNA, 15 bp, Homo sapiens
acactcacagcagct

SEQ ID NO: 222325 - DNA, 15 bp, Homo sapiens
cacactcacagcagc

SEQ ID NO: 222326 - DNA, 15 bp, Homo sapiens
gcacactcacagcag

SEQ ID NO: 222327 - DNA, 15 bp, Homo sapiens
ggcacactcacagca

SEQ ID NO: 222328 - DNA, 15 bp, Homo sapiens
aggcacactcacagc

SEQ ID NO: 222329 - DNA, 15 bp, Homo sapiens
caggcacactcacag

SEQ ID NO: 222330 - DNA, 15 bp, Homo sapiens
tcaggcacactcaca

SEQ ID NO: 222331 - DNA, 15 bp, Homo sapiens
ttcaggcacactcac

SEQ ID NO: 222332 - DNA, 15 bp, Homo sapiens
tttcaggcacactca

SEQ ID NO: 222333 - DNA, 15 bp, Homo sapiens
ctttcaggcacactc

SEQ ID NO: 222334 - DNA, 15 bp, Homo sapiens
tctttcaggcacact

SEQ ID NO: 222335 - DNA, 15 bp, Homo sapiens
ctctttcaggcacac

SEQ ID NO: 222336 - DNA, 15 bp, Homo sapiens
actctttcaggcaca

SEQ ID NO: 222337 - DNA, 15 bp, Homo sapiens
cactctttcaggcac

SEQ ID NO: 222338 - DNA, 15 bp, Homo sapiens
ccactctttcaggca

SEQ ID NO: 222339 - DNA, 15 bp, Homo sapiens
gccactctttcaggc

SEQ ID NO: 222340 - DNA, 15 bp, Homo sapiens
tgccactctttcagg

SEQ ID NO: 222341 - DNA, 15 bp, Homo sapiens
ctgccactctttcag

SEQ ID NO: 222342 - DNA, 15 bp, Homo sapiens
cctgccactctttca

SEQ ID NO: 222343 - DNA, 15 bp, Homo sapiens
gcctgccactctttc

SEQ ID NO: 222344 - DNA, 15 bp, Homo sapiens
agcctgccactcttt

SEQ ID NO: 222345 - DNA, 15 bp, Homo sapiens
gagcctgccactctt

SEQ ID NO: 222346 - DNA, 15 bp, Homo sapiens
agagcctgccactct

SEQ ID NO: 222347 - DNA, 15 bp, Homo sapiens
cagagcctgccactc

SEQ ID NO: 222348 - DNA, 15 bp, Homo sapiens
gcagagcctgccact

SEQ ID NO: 222349 - DNA, 15 bp, Homo sapiens
tgcagagcctgccac

SEQ ID NO: 222350 - DNA, 15 bp, Homo sapiens
ttgcagagcctgcca

SEQ ID NO: 222351 - DNA, 15 bp, Homo sapiens
cttgcagagcctgcc

SEQ ID NO: 222352 - DNA, 15 bp, Homo sapiens
tcttgcagagcctgc

SEQ ID NO: 222353 - DNA, 15 bp, Homo sapiens
ctcttgcagagcctg

SEQ ID NO: 222354 - DNA, 15 bp, Homo sapiens
gctcttgcagagcct

SEQ ID NO: 222355 - DNA, 15 bp, Homo sapiens
agctcttgcagagcc

SEQ ID NO: 222356 - DNA, 15 bp, Homo sapiens
gagctcttgcagagc

SEQ ID NO: 222357 - DNA, 15 bp, Homo sapiens
ggagctcttgcagag

SEQ ID NO: 222358 - DNA, 15 bp, Homo sapiens
cggagctcttgcaga

SEQ ID NO: 222359 - DNA, 15 bp, Homo sapiens
acggagctcttgcag

SEQ ID NO: 222360 - DNA, 15 bp, Homo sapiens
gacggagctcttgca

SEQ ID NO: 222361 - DNA, 15 bp, Homo sapiens
tgacggagctcttgc

SEQ ID NO: 222362 - DNA, 15 bp, Homo sapiens
ctgacggagctcttg

SEQ ID NO: 222363 - DNA, 15 bp, Homo sapiens
gctgacggagctctt

SEQ ID NO: 222364 - DNA, 15 bp, Homo sapiens
tgctgacggagctct

SEQ ID NO: 222365 - DNA, 15 bp, Homo sapiens
ttgctgacggagctc

SEQ ID NO: 222366 - DNA, 15 bp, Homo sapiens
cttgctgacggagct

SEQ ID NO: 222367 - DNA, 15 bp, Homo sapiens
acttgctgacggagc

SEQ ID NO: 222368 - DNA, 15 bp, Homo sapiens
tacttgctgacggag

SEQ ID NO: 222369 - DNA, 15 bp, Homo sapiens
ctacttgctgacgga

SEQ ID NO: 222370 - DNA, 15 bp, Homo sapiens
tctacttgctgacgg

SEQ ID NO: 222371 - DNA, 15 bp, Homo sapiens
ttctacttgctgacg

SEQ ID NO: 222372 - DNA, 15 bp, Homo sapiens
tttctacttgctgac

SEQ ID NO: 222373 - DNA, 15 bp, Homo sapiens
atttctacttgctga

SEQ ID NO: 222374 - DNA, 15 bp, Homo sapiens
catttctacttgctg

SEQ ID NO: 222375 - DNA, 15 bp, Homo sapiens
gcatttctacttgct

SEQ ID NO: 222376 - DNA, 15 bp, Homo sapiens
agcatttctacttgc

SEQ ID NO: 222377 - DNA, 15 bp, Homo sapiens
tagcatttctacttg

SEQ ID NO: 222378 - DNA, 15 bp, Homo sapiens
ttagcatttctactt

SEQ ID NO: 222379 - DNA, 15 bp, Homo sapiens
tttagcatttctact

SEQ ID NO: 222380 - DNA, 15 bp, Homo sapiens
atttagcatttctac

SEQ ID NO: 222381 - DNA, 15 bp, Homo sapiens
aatttagcatttcta

SEQ ID NO: 222382 - DNA, 15 bp, Homo sapiens
taatttagcatttct

SEQ ID NO: 222383 - DNA, 15 bp, Homo sapiens
ataatttagcatttc

SEQ ID NO: 222384 - DNA, 15 bp, Homo sapiens
gataatttagcattt

SEQ ID NO: 222385 - DNA, 15 bp, Homo sapiens
agataatttagcatt

SEQ ID NO: 222386 - DNA, 15 bp, Homo sapiens
gagataatttagcat

SEQ ID NO: 222387 - DNA, 15 bp, Homo sapiens
tgagataatttagca

SEQ ID NO: 222388 - DNA, 15 bp, Homo sapiens
atgagataatttagc

SEQ ID NO: 222389 - DNA, 15 bp, Homo sapiens
catgagataatttag

SEQ ID NO: 222390 - DNA, 15 bp, Homo sapiens
acatgagataattta

SEQ ID NO: 222391 - DNA, 15 bp, Homo sapiens
cacatgagataattt

SEQ ID NO: 222392 - DNA, 15 bp, Homo sapiens
acacatgagataatt

SEQ ID NO: 222393 - DNA, 15 bp, Homo sapiens
aacacatgagataat

SEQ ID NO: 222394 - DNA, 15 bp, Homo sapiens
aaacacatgagataa

SEQ ID NO: 222395 - DNA, 15 bp, Homo sapiens
taaacacatgagata

SEQ ID NO: 222396 - DNA, 15 bp, Homo sapiens
ataaacacatgagat

SEQ ID NO: 222397 - DNA, 15 bp, Homo sapiens
gataaacacatgaga

SEQ ID NO: 222398 - DNA, 15 bp, Homo sapiens
tgataaacacatgag

SEQ ID NO: 222399 - DNA, 15 bp, Homo sapiens
ttgataaacacatga

SEQ ID NO: 222400 - DNA, 15 bp, Homo sapiens
tttgataaacacatg

SEQ ID NO: 222401 - DNA, 15 bp, Homo sapiens
ctttgataaacacat

SEQ ID NO: 222402 - DNA, 15 bp, Homo sapiens
cctttgataaacaca

SEQ ID NO: 222403 - DNA, 15 bp, Homo sapiens
acctttgataaacac

SEQ ID NO: 222404 - DNA, 15 bp, Homo sapiens
aacctttgataaaca

SEQ ID NO: 222405 - DNA, 15 bp, Homo sapiens
aaacctttgataaac

SEQ ID NO: 222406 - DNA, 15 bp, Homo sapiens
taaacctttgataaa

SEQ ID NO: 222407 - DNA, 15 bp, Homo sapiens
ataaacctttgataa

SEQ ID NO: 222408 - DNA, 15 bp, Homo sapiens
aataaacctttgata

SEQ ID NO: 222409 - DNA, 15 bp, Homo sapiens
caataaacctttgat

SEQ ID NO: 222410 - DNA, 15 bp, Homo sapiens
tcaataaacctttga

SEQ ID NO: 222411 - DNA, 15 bp, Homo sapiens
ctcaataaacctttg

SEQ ID NO: 222412 - DNA, 15 bp, Homo sapiens
gctcaataaaccttt

SEQ ID NO: 222413 - DNA, 15 bp, Homo sapiens
tgctcaataaacctt

SEQ ID NO: 222414 - DNA, 15 bp, Homo sapiens
gtgctcaataaacct

SEQ ID NO: 222415 - DNA, 15 bp, Homo sapiens
ggtgctcaataaacc

SEQ ID NO: 222416 - DNA, 15 bp, Homo sapiens
aggtgctcaataaac

SEQ ID NO: 222417 - DNA, 15 bp, Homo sapiens
aaggtgctcaataaa

SEQ ID NO: 222418 - DNA, 15 bp, Homo sapiens
aaaggtgctcaataa

SEQ ID NO: 222419 - DNA, 15 bp, Homo sapiens
aaaaggtgctcaata

SEQ ID NO: 222420 - DNA, 15 bp, Homo sapiens
caaaaggtgctcaat

SEQ ID NO: 222421 - DNA, 15 bp, Homo sapiens
acaaaaggtgctcaa

SEQ ID NO: 222422 - DNA, 15 bp, Homo sapiens
cacaaaaggtgctca

SEQ ID NO: 222423 - DNA, 15 bp, Homo sapiens
ccacaaaaggtgctc

SEQ ID NO: 222424 - DNA, 15 bp, Homo sapiens
gccacaaaaggtgct

SEQ ID NO: 222425 - DNA, 15 bp, Homo sapiens
tgccacaaaaggtgc

SEQ ID NO: 222426 - DNA, 15 bp, Homo sapiens
ctgccacaaaaggtg

SEQ ID NO: 222427 - DNA, 15 bp, Homo sapiens
tctgccacaaaaggt

SEQ ID NO: 222428 - DNA, 15 bp, Homo sapiens
ttctgccacaaaagg

SEQ ID NO: 222429 - DNA, 15 bp, Homo sapiens
tttctgccacaaaag

SEQ ID NO: 222430 - DNA, 15 bp, Homo sapiens
gtttctgccacaaaa

SEQ ID NO: 222431 - DNA, 15 bp, Homo sapiens
tgtttctgccacaaa

SEQ ID NO: 222432 - DNA, 15 bp, Homo sapiens
atgtttctgccacaa

SEQ ID NO: 222433 - DNA, 15 bp, Homo sapiens
catgtttctgccaca

SEQ ID NO: 222434 - DNA, 15 bp, Homo sapiens
ccatgtttctgccac

SEQ ID NO: 222435 - DNA, 15 bp, Homo sapiens
cccatgtttctgcca

SEQ ID NO: 222436 - DNA, 15 bp, Homo sapiens
gcccatgtttctgcc

SEQ ID NO: 222437 - DNA, 15 bp, Homo sapiens
agcccatgtttctgc

SEQ ID NO: 222438 - DNA, 15 bp, Homo sapiens
tagcccatgtttctg

SEQ ID NO: 222439 - DNA, 15 bp, Homo sapiens
atagcccatgtttct

SEQ ID NO: 222440 - DNA, 15 bp, Homo sapiens
tatagcccatgtttc

SEQ ID NO: 222441 - DNA, 15 bp, Homo sapiens
ttatagcccatgttt

SEQ ID NO: 222442 - DNA, 15 bp, Homo sapiens
attatagcccatgtt

SEQ ID NO: 222443 - DNA, 15 bp, Homo sapiens
tattatagcccatgt

SEQ ID NO: 222444 - DNA, 15 bp, Homo sapiens
ttattatagcccatg

SEQ ID NO: 222445 - DNA, 15 bp, Homo sapiens
attattatagcccat

SEQ ID NO: 222446 - DNA, 15 bp, Homo sapiens
tattattatagccca

SEQ ID NO: 222447 - DNA, 15 bp, Homo sapiens
ttattattatagccc

SEQ ID NO: 222448 - DNA, 15 bp, Homo sapiens
attattattatagcc

SEQ ID NO: 222449 - DNA, 15 bp, Homo sapiens
cattattattatagc

SEQ ID NO: 222450 - DNA, 15 bp, Homo sapiens
tcattattattatag

SEQ ID NO: 222451 - DNA, 15 bp, Homo sapiens
gtcattattattata

SEQ ID NO: 222452 - DNA, 15 bp, Homo sapiens
ggtcattattattat

SEQ ID NO: 222453 - DNA, 15 bp, Homo sapiens
tggtcattattatta

SEQ ID NO: 222454 - DNA, 15 bp, Homo sapiens
atggtcattattatt

SEQ ID NO: 222455 - DNA, 15 bp, Homo sapiens
aatggtcattattat

SEQ ID NO: 222456 - DNA, 15 bp, Homo sapiens
caatggtcattatta

SEQ ID NO: 222457 - DNA, 15 bp, Homo sapiens
tcaatggtcattatt

SEQ ID NO: 222458 - DNA, 15 bp, Homo sapiens
atcaatggtcattat

SEQ ID NO: 222459 - DNA, 15 bp, Homo sapiens
aatcaatggtcatta

SEQ ID NO: 222460 - DNA, 15 bp, Homo sapiens
caatcaatggtcatt

SEQ ID NO: 222461 - DNA, 15 bp, Homo sapiens
tcaatcaatggtcat

SEQ ID NO: 222462 - DNA, 15 bp, Homo sapiens
ttcaatcaatggtca

SEQ ID NO: 222463 - DNA, 15 bp, Homo sapiens
attcaatcaatggtc

SEQ ID NO: 222464 - DNA, 15 bp, Homo sapiens
aattcaatcaatggt

SEQ ID NO: 222465 - DNA, 15 bp, Homo sapiens
aaattcaatcaatgg

SEQ ID NO: 222466 - DNA, 15 bp, Homo sapiens
gaaattcaatcaatg

SEQ ID NO: 222467 - DNA, 15 bp, Homo sapiens
agaaattcaatcaat

SEQ ID NO: 222468 - DNA, 15 bp, Homo sapiens
cagaaattcaatcaa

SEQ ID NO: 222469 - DNA, 15 bp, Homo sapiens
ccagaaattcaatca

SEQ ID NO: 222470 - DNA, 15 bp, Homo sapiens
accagaaattcaatc

SEQ ID NO: 222471 - DNA, 15 bp, Homo sapiens
caccagaaattcaat

SEQ ID NO: 222472 - DNA, 15 bp, Homo sapiens
ccaccagaaattcaa

SEQ ID NO: 222473 - DNA, 15 bp, Homo sapiens
cccaccagaaattca

SEQ ID NO: 222474 - DNA, 15 bp, Homo sapiens
tcccaccagaaattc

SEQ ID NO: 222475 - DNA, 15 bp, Homo sapiens
ctcccaccagaaatt

SEQ ID NO: 222476 - DNA, 15 bp, Homo sapiens
tctcccaccagaaat

SEQ ID NO: 222477 - DNA, 15 bp, Homo sapiens
atctcccaccagaaa

SEQ ID NO: 222478 - DNA, 15 bp, Homo sapiens
catctcccaccagaa

SEQ ID NO: 222479 - DNA, 15 bp, Homo sapiens
ccatctcccaccaga

SEQ ID NO: 222480 - DNA, 15 bp, Homo sapiens
cccatctcccaccag

SEQ ID NO: 222481 - DNA, 15 bp, Homo sapiens
acccatctcccacca

SEQ ID NO: 222482 - DNA, 15 bp, Homo sapiens
tacccatctcccacc

SEQ ID NO: 222483 - DNA, 15 bp, Homo sapiens
gtacccatctcccac

SEQ ID NO: 222484 - DNA, 15 bp, Homo sapiens
agtacccatctccca

SEQ ID NO: 222485 - DNA, 15 bp, Homo sapiens
cagtacccatctccc

SEQ ID NO: 222486 - DNA, 15 bp, Homo sapiens
ccagtacccatctcc

SEQ ID NO: 222487 - DNA, 15 bp, Homo sapiens
accagtacccatctc

SEQ ID NO: 222488 - DNA, 15 bp, Homo sapiens
caccagtacccatct

SEQ ID NO: 222489 - DNA, 15 bp, Homo sapiens
ccaccagtacccatc

SEQ ID NO: 222490 - DNA, 15 bp, Homo sapiens
tccaccagtacccat

SEQ ID NO: 222491 - DNA, 15 bp, Homo sapiens
ctccaccagtaccca

SEQ ID NO: 222492 - DNA, 15 bp, Homo sapiens
tctccaccagtaccc

SEQ ID NO: 222493 - DNA, 15 bp, Homo sapiens
gtctccaccagtacc

SEQ ID NO: 222494 - DNA, 15 bp, Homo sapiens
ggtctccaccagtac

SEQ ID NO: 222495 - DNA, 15 bp, Homo sapiens
tggtctccaccagta

SEQ ID NO: 222496 - DNA, 15 bp, Homo sapiens
ctggtctccaccagt

SEQ ID NO: 222497 - DNA, 15 bp, Homo sapiens
actggtctccaccag

SEQ ID NO: 222498 - DNA, 15 bp, Homo sapiens
aactggtctccacca

SEQ ID NO: 222499 - DNA, 15 bp, Homo sapiens
aaactggtctccacc

SEQ ID NO: 222500 - DNA, 15 bp, Homo sapiens
caaactggtctccac

SEQ ID NO: 222501 - DNA, 15 bp, Homo sapiens
tcaaactggtctcca

SEQ ID NO: 222502 - DNA, 15 bp, Homo sapiens
ctcaaactggtctcc

SEQ ID NO: 222503 - DNA, 15 bp, Homo sapiens
gctcaaactggtctc

SEQ ID NO: 222504 - DNA, 15 bp, Homo sapiens
agctcaaactggtct

SEQ ID NO: 222505 - DNA, 15 bp, Homo sapiens
gagctcaaactggtc

SEQ ID NO: 222506 - DNA, 15 bp, Homo sapiens
tgagctcaaactggt

SEQ ID NO: 222507 - DNA, 15 bp, Homo sapiens
atgagctcaaactgg

SEQ ID NO: 222508 - DNA, 15 bp, Homo sapiens
catgagctcaaactg

SEQ ID NO: 222509 - DNA, 15 bp, Homo sapiens
tcatgagctcaaact

SEQ ID NO: 222510 - DNA, 15 bp, Homo sapiens
atcatgagctcaaac

SEQ ID NO: 222511 - DNA, 15 bp, Homo sapiens
catcatgagctcaaa

SEQ ID NO: 222512 - DNA, 15 bp, Homo sapiens
acatcatgagctcaa

SEQ ID NO: 222513 - DNA, 15 bp, Homo sapiens
aacatcatgagctca

SEQ ID NO: 222514 - DNA, 15 bp, Homo sapiens
aaacatcatgagctc

SEQ ID NO: 222515 - DNA, 15 bp, Homo sapiens
taaacatcatgagct

SEQ ID NO: 222516 - DNA, 15 bp, Homo sapiens
ataaacatcatgagc

SEQ ID NO: 222517 - DNA, 15 bp, Homo sapiens
aataaacatcatgag

SEQ ID NO: 222518 - DNA, 15 bp, Homo sapiens
taataaacatcatga

SEQ ID NO: 222519 - DNA, 15 bp, Homo sapiens
ctaataaacatcatg

SEQ ID NO: 222520 - DNA, 15 bp, Homo sapiens
cctaataaacatcat

SEQ ID NO: 222521 - DNA, 15 bp, Homo sapiens
tcctaataaacatca

SEQ ID NO: 222522 - DNA, 15 bp, Homo sapiens
ttcctaataaacatc

SEQ ID NO: 222523 - DNA, 15 bp, Homo sapiens
attcctaataaacat

SEQ ID NO: 222524 - DNA, 15 bp, Homo sapiens
gattcctaataaaca

SEQ ID NO: 222525 - DNA, 15 bp, Homo sapiens
ggattcctaataaac

SEQ ID NO: 222526 - DNA, 15 bp, Homo sapiens
tggattcctaataaa

SEQ ID NO: 222527 - DNA, 15 bp, Homo sapiens
gtggattcctaataa

SEQ ID NO: 222528 - DNA, 15 bp, Homo sapiens
ggtggattcctaata

SEQ ID NO: 222529 - DNA, 15 bp, Homo sapiens
aggtggattcctaat

SEQ ID NO: 222530 - DNA, 15 bp, Homo sapiens
gaggtggattcctaa

SEQ ID NO: 222531 - DNA, 15 bp, Homo sapiens
agaggtggattccta

SEQ ID NO: 222532 - DNA, 15 bp, Homo sapiens
cagaggtggattcct

SEQ ID NO: 222533 - DNA, 15 bp, Homo sapiens
tcagaggtggattcc

SEQ ID NO: 222534 - DNA, 15 bp, Homo sapiens
ctcagaggtggattc

SEQ ID NO: 222535 - DNA, 15 bp, Homo sapiens
tctcagaggtggatt

SEQ ID NO: 222536 - DNA, 15 bp, Homo sapiens
ttctcagaggtggat

SEQ ID NO: 222537 - DNA, 15 bp, Homo sapiens
cttctcagaggtgga

SEQ ID NO: 222538 - DNA, 15 bp, Homo sapiens
ccttctcagaggtgg

SEQ ID NO: 222539 - DNA, 15 bp, Homo sapiens
cccttctcagaggtg

SEQ ID NO: 222540 - DNA, 15 bp, Homo sapiens
tcccttctcagaggt

SEQ ID NO: 222541 - DNA, 15 bp, Homo sapiens
ctcccttctcagagg

SEQ ID NO: 222542 - DNA, 15 bp, Homo sapiens
tctcccttctcagag

SEQ ID NO: 222543 - DNA, 15 bp, Homo sapiens
ctctcccttctcaga

SEQ ID NO: 222544 - DNA, 15 bp, Homo sapiens
cctctcccttctcag

SEQ ID NO: 222545 - DNA, 15 bp, Homo sapiens
gcctctcccttctca

SEQ ID NO: 222546 - DNA, 15 bp, Homo sapiens
tgcctctcccttctc

SEQ ID NO: 222547 - DNA, 15 bp, Homo sapiens
ctgcctctcccttct

SEQ ID NO: 222548 - DNA, 15 bp, Homo sapiens
tctgcctctcccttc

SEQ ID NO: 222549 - DNA, 15 bp, Homo sapiens
ctctgcctctccctt

SEQ ID NO: 222550 - DNA, 15 bp, Homo sapiens
cctctgcctctccct

SEQ ID NO: 222551 - DNA, 15 bp, Homo sapiens
gcctctgcctctccc

SEQ ID NO: 222552 - DNA, 15 bp, Homo sapiens
ggcctctgcctctcc

SEQ ID NO: 222553 - DNA, 15 bp, Homo sapiens
tggcctctgcctctc

SEQ ID NO: 222554 - DNA, 15 bp, Homo sapiens
ctggcctctgcctct

SEQ ID NO: 222555 - DNA, 15 bp, Homo sapiens
tctggcctctgcctc

SEQ ID NO: 222556 - DNA, 15 bp, Homo sapiens
ctctggcctctgcct

SEQ ID NO: 222557 - DNA, 15 bp, Homo sapiens
actctggcctctgcc

SEQ ID NO: 222558 - DNA, 15 bp, Homo sapiens
cactctggcctctgc

SEQ ID NO: 222559 - DNA, 15 bp, Homo sapiens
tcactctggcctctg

SEQ ID NO: 222560 - DNA, 15 bp, Homo sapiens
gtcactctggcctct

SEQ ID NO: 222561 - DNA, 15 bp, Homo sapiens
tgtcactctggcctc

SEQ ID NO: 222562 - DNA, 15 bp, Homo sapiens
ttgtcactctggcct

SEQ ID NO: 222563 - DNA, 15 bp, Homo sapiens
cttgtcactctggcc

SEQ ID NO: 222564 - DNA, 15 bp, Homo sapiens
tcttgtcactctggc

SEQ ID NO: 222565 - DNA, 15 bp, Homo sapiens
ctcttgtcactctgg

SEQ ID NO: 222566 - DNA, 15 bp, Homo sapiens
cctcttgtcactctg

SEQ ID NO: 222567 - DNA, 15 bp, Homo sapiens
ccctcttgtcactct

SEQ ID NO: 222568 - DNA, 15 bp, Homo sapiens
tccctcttgtcactc

SEQ ID NO: 222569 - DNA, 15 bp, Homo sapiens
gtccctcttgtcact

SEQ ID NO: 222570 - DNA, 15 bp, Homo sapiens
tgtccctcttgtcac

SEQ ID NO: 222571 - DNA, 15 bp, Homo sapiens
ttgtccctcttgtca

SEQ ID NO: 222572 - DNA, 15 bp, Homo sapiens
cttgtccctcttgtc

SEQ ID NO: 222573 - DNA, 15 bp, Homo sapiens
acttgtccctcttgt

SEQ ID NO: 222574 - DNA, 15 bp, Homo sapiens
gacttgtccctcttg

SEQ ID NO: 222575 - DNA, 15 bp, Homo sapiens
cgacttgtccctctt

SEQ ID NO: 222576 - DNA, 15 bp, Homo sapiens
tcgacttgtccctct

SEQ ID NO: 222577 - DNA, 15 bp, Homo sapiens
ctcgacttgtccctc

SEQ ID NO: 222578 - DNA, 15 bp, Homo sapiens
tctcgacttgtccct

SEQ ID NO: 222579 - DNA, 15 bp, Homo sapiens
ctctcgacttgtccc

SEQ ID NO: 222580 - DNA, 15 bp, Homo sapiens
gctctcgacttgtcc

SEQ ID NO: 222581 - DNA, 15 bp, Homo sapiens
agctctcgacttgtc

SEQ ID NO: 222582 - DNA, 15 bp, Homo sapiens
cagctctcgacttgt

SEQ ID NO: 222583 - DNA, 15 bp, Homo sapiens
tcagctctcgacttg

SEQ ID NO: 222584 - DNA, 15 bp, Homo sapiens
atcagctctcgactt

SEQ ID NO: 222585 - DNA, 15 bp, Homo sapiens
catcagctctcgact

SEQ ID NO: 222586 - DNA, 15 bp, Homo sapiens
gcatcagctctcgac

SEQ ID NO: 222587 - DNA, 15 bp, Homo sapiens
tgcatcagctctcga

SEQ ID NO: 222588 - DNA, 15 bp, Homo sapiens
ctgcatcagctctcg

SEQ ID NO: 222589 - DNA, 15 bp, Homo sapiens
gctgcatcagctctc

SEQ ID NO: 222590 - DNA, 15 bp, Homo sapiens
agctgcatcagctct

SEQ ID NO: 222591 - DNA, 15 bp, Homo sapiens
aagctgcatcagctc

SEQ ID NO: 222592 - DNA, 15 bp, Homo sapiens
gaagctgcatcagct

SEQ ID NO: 222593 - DNA, 15 bp, Homo sapiens
ggaagctgcatcagc

SEQ ID NO: 222594 - DNA, 15 bp, Homo sapiens
tggaagctgcatcag

SEQ ID NO: 222595 - DNA, 15 bp, Homo sapiens
gtggaagctgcatca

SEQ ID NO: 222596 - DNA, 15 bp, Homo sapiens
tgtggaagctgcatc

SEQ ID NO: 222597 - DNA, 15 bp, Homo sapiens
ttgtggaagctgcat

SEQ ID NO: 222598 - DNA, 15 bp, Homo sapiens
tttgtggaagctgca

SEQ ID NO: 222599 - DNA, 15 bp, Homo sapiens
ttttgtggaagctgc

SEQ ID NO: 222600 - DNA, 15 bp, Homo sapiens
gttttgtggaagctg

SEQ ID NO: 222601 - DNA, 15 bp, Homo sapiens
ggttttgtggaagct

SEQ ID NO: 222602 - DNA, 15 bp, Homo sapiens
aggttttgtggaagc

SEQ ID NO: 222603 - DNA, 15 bp, Homo sapiens
gaggttttgtggaag

SEQ ID NO: 222604 - DNA, 15 bp, Homo sapiens
cgaggttttgtggaa

SEQ ID NO: 222605 - DNA, 15 bp, Homo sapiens
ccgaggttttgtgga

SEQ ID NO: 222606 - DNA, 15 bp, Homo sapiens
gccgaggttttgtgg

SEQ ID NO: 222607 - DNA, 15 bp, Homo sapiens
ggccgaggttttgtg

SEQ ID NO: 222608 - DNA, 15 bp, Homo sapiens
tggccgaggttttgt

SEQ ID NO: 222609 - DNA, 15 bp, Homo sapiens
ttggccgaggttttg

SEQ ID NO: 222610 - DNA, 15 bp, Homo sapiens
gttggccgaggtttt

SEQ ID NO: 222611 - DNA, 15 bp, Homo sapiens
ggttggccgaggttt

SEQ ID NO: 222612 - DNA, 15 bp, Homo sapiens
gggttggccgaggtt

SEQ ID NO: 222613 - DNA, 15 bp, Homo sapiens
tgggttggccgaggt

SEQ ID NO: 222614 - DNA, 15 bp, Homo sapiens
ctgggttggccgagg

SEQ ID NO: 222615 - DNA, 15 bp, Homo sapiens
gctgggttggccgag

SEQ ID NO: 222616 - DNA, 15 bp, Homo sapiens
tgctgggttggccga

SEQ ID NO: 222617 - DNA, 15 bp, Homo sapiens
ctgctgggttggccg

SEQ ID NO: 222618 - DNA, 15 bp, Homo sapiens
tctgctgggttggcc

SEQ ID NO: 222619 - DNA, 15 bp, Homo sapiens
gtctgctgggttggc

SEQ ID NO: 222620 - DNA, 15 bp, Homo sapiens
tgtctgctgggttgg

SEQ ID NO: 222621 - DNA, 15 bp, Homo sapiens
ttgtctgctgggttg

SEQ ID NO: 222622 - DNA, 15 bp, Homo sapiens
gttgtctgctgggtt

SEQ ID NO: 222623 - DNA, 15 bp, Homo sapiens
agttgtctgctgggt

SEQ ID NO: 222624 - DNA, 15 bp, Homo sapiens
gagttgtctgctggg

SEQ ID NO: 222625 - DNA, 15 bp, Homo sapiens
agagttgtctgctgg

SEQ ID NO: 222626 - DNA, 15 bp, Homo sapiens
cagagttgtctgctg

SEQ ID NO: 222627 - DNA, 15 bp, Homo sapiens
ccagagttgtctgct

SEQ ID NO: 222628 - DNA, 15 bp, Homo sapiens
tccagagttgtctgc

SEQ ID NO: 222629 - DNA, 15 bp, Homo sapiens
ctccagagttgtctg

SEQ ID NO: 222630 - DNA, 15 bp, Homo sapiens
actccagagttgtct

SEQ ID NO: 222631 - DNA, 15 bp, Homo sapiens
cactccagagttgtc

SEQ ID NO: 222632 - DNA, 15 bp, Homo sapiens
ccactccagagttgt

SEQ ID NO: 222633 - DNA, 15 bp, Homo sapiens
tccactccagagttg

SEQ ID NO: 222634 - DNA, 15 bp, Homo sapiens
atccactccagagtt

SEQ ID NO: 222635 - DNA, 15 bp, Homo sapiens
aatccactccagagt

SEQ ID NO: 222636 - DNA, 15 bp, Homo sapiens
aaatccactccagag

SEQ ID NO: 222637 - DNA, 15 bp, Homo sapiens
taaatccactccaga

SEQ ID NO: 222638 - DNA, 15 bp, Homo sapiens
ataaatccactccag

SEQ ID NO: 222639 - DNA, 15 bp, Homo sapiens
gataaatccactcca

SEQ ID NO: 222640 - DNA, 15 bp, Homo sapiens
ggataaatccactcc

SEQ ID NO: 222641 - DNA, 15 bp, Homo sapiens
tggataaatccactc

SEQ ID NO: 222642 - DNA, 15 bp, Homo sapiens
ttggataaatccact

SEQ ID NO: 222643 - DNA, 15 bp, Homo sapiens
gttggataaatccac

SEQ ID NO: 222644 - DNA, 15 bp, Homo sapiens
tgttggataaatcca

SEQ ID NO: 222645 - DNA, 15 bp, Homo sapiens
ctgttggataaatcc

SEQ ID NO: 222646 - DNA, 15 bp, Homo sapiens
tctgttggataaatc

SEQ ID NO: 222647 - DNA, 15 bp, Homo sapiens
ctctgttggataaat

SEQ ID NO: 222648 - DNA, 15 bp, Homo sapiens
tctctgttggataaa

SEQ ID NO: 222649 - DNA, 15 bp, Homo sapiens
atctctgttggataa

SEQ ID NO: 222650 - DNA, 15 bp, Homo sapiens
catctctgttggata

SEQ ID NO: 222651 - DNA, 15 bp, Homo sapiens
tcatctctgttggat

SEQ ID NO: 222652 - DNA, 15 bp, Homo sapiens
atcatctctgttgga

SEQ ID NO: 222653 - DNA, 15 bp, Homo sapiens
gatcatctctgttgg

SEQ ID NO: 222654 - DNA, 15 bp, Homo sapiens
ggatcatctctgttg

SEQ ID NO: 222655 - DNA, 15 bp, Homo sapiens
gggatcatctctgtt

SEQ ID NO: 222656 - DNA, 15 bp, Homo sapiens
agggatcatctctgt

SEQ ID NO: 222657 - DNA, 15 bp, Homo sapiens
aagggatcatctctg

SEQ ID NO: 222658 - DNA, 15 bp, Homo sapiens
aaagggatcatctct

SEQ ID NO: 222659 - DNA, 15 bp, Homo sapiens
caaagggatcatctc

SEQ ID NO: 222660 - DNA, 15 bp, Homo sapiens
ccaaagggatcatct

SEQ ID NO: 222661 - DNA, 15 bp, Homo sapiens
cccaaagggatcatc

SEQ ID NO: 222662 - DNA, 15 bp, Homo sapiens
gcccaaagggatcat

SEQ ID NO: 222663 - DNA, 15 bp, Homo sapiens
ggcccaaagggatca

SEQ ID NO: 222664 - DNA, 15 bp, Homo sapiens
gggcccaaagggatc

SEQ ID NO: 222665 - DNA, 15 bp, Homo sapiens
tgggcccaaagggat

SEQ ID NO: 222666 - DNA, 15 bp, Homo sapiens
ttgggcccaaaggga

SEQ ID NO: 222667 - DNA, 15 bp, Homo sapiens
tttgggcccaaaggg

SEQ ID NO: 222668 - DNA, 15 bp, Homo sapiens
atttgggcccaaagg

SEQ ID NO: 222669 - DNA, 15 bp, Homo sapiens
aatttgggcccaaag

SEQ ID NO: 222670 - DNA, 15 bp, Homo sapiens
caatttgggcccaaa

SEQ ID NO: 222671 - DNA, 15 bp, Homo sapiens
gcaatttgggcccaa

SEQ ID NO: 222672 - DNA, 15 bp, Homo sapiens
agcaatttgggccca

SEQ ID NO: 222673 - DNA, 15 bp, Homo sapiens
cagcaatttgggccc

SEQ ID NO: 222674 - DNA, 15 bp, Homo sapiens
acagcaatttgggcc

SEQ ID NO: 222675 - DNA, 15 bp, Homo sapiens
cacagcaatttgggc

SEQ ID NO: 222676 - DNA, 15 bp, Homo sapiens
gcacagcaatttggg

SEQ ID NO: 222677 - DNA, 15 bp, Homo sapiens
agcacagcaatttgg

SEQ ID NO: 222678 - DNA, 15 bp, Homo sapiens
aagcacagcaatttg

SEQ ID NO: 222679 - DNA, 15 bp, Homo sapiens
gaagcacagcaattt

SEQ ID NO: 222680 - DNA, 15 bp, Homo sapiens
agaagcacagcaatt

SEQ ID NO: 222681 - DNA, 15 bp, Homo sapiens
cagaagcacagcaat

SEQ ID NO: 222682 - DNA, 15 bp, Homo sapiens
acagaagcacagcaa

SEQ ID NO: 222683 - DNA, 15 bp, Homo sapiens
tacagaagcacagca

SEQ ID NO: 222684 - DNA, 15 bp, Homo sapiens
gtacagaagcacagc

SEQ ID NO: 222685 - DNA, 15 bp, Homo sapiens
ggtacagaagcacag

SEQ ID NO: 222686 - DNA, 15 bp, Homo sapiens
gggtacagaagcaca

SEQ ID NO: 222687 - DNA, 15 bp, Homo sapiens
ggggtacagaagcac

SEQ ID NO: 222688 - DNA, 15 bp, Homo sapiens
tggggtacagaagca

SEQ ID NO: 222689 - DNA, 15 bp, Homo sapiens
gtggggtacagaagc

SEQ ID NO: 222690 - DNA, 15 bp, Homo sapiens
ggtggggtacagaag

SEQ ID NO: 222691 - DNA, 15 bp, Homo sapiens
aggtggggtacagaa

SEQ ID NO: 222692 - DNA, 15 bp, Homo sapiens
gaggtggggtacaga

SEQ ID NO: 222693 - DNA, 15 bp, Homo sapiens
tgaggtggggtacag

SEQ ID NO: 222694 - DNA, 15 bp, Homo sapiens
gtgaggtggggtaca

SEQ ID NO: 222695 - DNA, 15 bp, Homo sapiens
agtgaggtggggtac

SEQ ID NO: 222696 - DNA, 15 bp, Homo sapiens
gagtgaggtggggta

SEQ ID NO: 222697 - DNA, 15 bp, Homo sapiens
agagtgaggtggggt

SEQ ID NO: 222698 - DNA, 15 bp, Homo sapiens
cagagtgaggtgggg

SEQ ID NO: 222699 - DNA, 15 bp, Homo sapiens
acagagtgaggtggg

SEQ ID NO: 222700 - DNA, 15 bp, Homo sapiens
gacagagtgaggtgg

SEQ ID NO: 222701 - DNA, 15 bp, Homo sapiens
tgacagagtgaggtg

SEQ ID NO: 222702 - DNA, 15 bp, Homo sapiens
gtgacagagtgaggt

SEQ ID NO: 222703 - DNA, 15 bp, Homo sapiens
ggtgacagagtgagg

SEQ ID NO: 222704 - DNA, 15 bp, Homo sapiens
tggtgacagagtgag

SEQ ID NO: 222705 - DNA, 15 bp, Homo sapiens
ctggtgacagagtga

SEQ ID NO: 222706 - DNA, 15 bp, Homo sapiens
tctggtgacagagtg

SEQ ID NO: 222707 - DNA, 15 bp, Homo sapiens
atctggtgacagagt

SEQ ID NO: 222708 - DNA, 15 bp, Homo sapiens
catctggtgacagag

SEQ ID NO: 222709 - DNA, 15 bp, Homo sapiens
gcatctggtgacaga

SEQ ID NO: 222710 - DNA, 15 bp, Homo sapiens
tgcatctggtgacag

SEQ ID NO: 222711 - DNA, 15 bp, Homo sapiens
ctgcatctggtgaca

SEQ ID NO: 222712 - DNA, 15 bp, Homo sapiens
cctgcatctggtgac

SEQ ID NO: 222713 - DNA, 15 bp, Homo sapiens
gcctgcatctggtga

SEQ ID NO: 222714 - DNA, 15 bp, Homo sapiens
agcctgcatctggtg

SEQ ID NO: 222715 - DNA, 15 bp, Homo sapiens
cagcctgcatctggt

SEQ ID NO: 222716 - DNA, 15 bp, Homo sapiens
acagcctgcatctgg

SEQ ID NO: 222717 - DNA, 15 bp, Homo sapiens
gacagcctgcatctg

SEQ ID NO: 222718 - DNA, 15 bp, Homo sapiens
ggacagcctgcatct

SEQ ID NO: 222719 - DNA, 15 bp, Homo sapiens
gggacagcctgcatc

SEQ ID NO: 222720 - DNA, 15 bp, Homo sapiens
tgggacagcctgcat

SEQ ID NO: 222721 - DNA, 15 bp, Homo sapiens
ctgggacagcctgca

SEQ ID NO: 222722 - DNA, 15 bp, Homo sapiens
cctgggacagcctgc

SEQ ID NO: 222723 - DNA, 15 bp, Homo sapiens
tcctgggacagcctg

SEQ ID NO: 222724 - DNA, 15 bp, Homo sapiens
ttcctgggacagcct

SEQ ID NO: 222725 - DNA, 15 bp, Homo sapiens
cttcctgggacagcc

SEQ ID NO: 222726 - DNA, 15 bp, Homo sapiens
ccttcctgggacagc

SEQ ID NO: 222727 - DNA, 15 bp, Homo sapiens
cccttcctgggacag

SEQ ID NO: 222728 - DNA, 15 bp, Homo sapiens
acccttcctgggaca

SEQ ID NO: 222729 - DNA, 15 bp, Homo sapiens
cacccttcctgggac

SEQ ID NO: 222730 - DNA, 15 bp, Homo sapiens
tcacccttcctggga

SEQ ID NO: 222731 - DNA, 15 bp, Homo sapiens
gtcacccttcctggg

SEQ ID NO: 222732 - DNA, 15 bp, Homo sapiens
ggtcacccttcctgg

SEQ ID NO: 222733 - DNA, 15 bp, Homo sapiens
aggtcacccttcctg

SEQ ID NO: 222734 - DNA, 15 bp, Homo sapiens
aaggtcacccttcct

SEQ ID NO: 222735 - DNA, 15 bp, Homo sapiens
caaggtcacccttcc

SEQ ID NO: 222736 - DNA, 15 bp, Homo sapiens
ccaaggtcacccttc

SEQ ID NO: 222737 - DNA, 15 bp, Homo sapiens
gccaaggtcaccctt

SEQ ID NO: 222738 - DNA, 15 bp, Homo sapiens
agccaaggtcaccct

SEQ ID NO: 222739 - DNA, 15 bp, Homo sapiens
cagccaaggtcaccc

SEQ ID NO: 222740 - DNA, 15 bp, Homo sapiens
tcagccaaggtcacc

SEQ ID NO: 222741 - DNA, 15 bp, Homo sapiens
ttcagccaaggtcac

SEQ ID NO: 222742 - DNA, 15 bp, Homo sapiens
cttcagccaaggtca

SEQ ID NO: 222743 - DNA, 15 bp, Homo sapiens
gcttcagccaaggtc

SEQ ID NO: 222744 - DNA, 15 bp, Homo sapiens
agcttcagccaaggt

SEQ ID NO: 222745 - DNA, 15 bp, Homo sapiens
cagcttcagccaagg

SEQ ID NO: 222746 - DNA, 15 bp, Homo sapiens
acagcttcagccaag

SEQ ID NO: 222747 - DNA, 15 bp, Homo sapiens
tacagcttcagccaa

SEQ ID NO: 222748 - DNA, 15 bp, Homo sapiens
ctacagcttcagcca

SEQ ID NO: 222749 - DNA, 15 bp, Homo sapiens
gctacagcttcagcc

SEQ ID NO: 222750 - DNA, 15 bp, Homo sapiens
agctacagcttcagc

SEQ ID NO: 222751 - DNA, 15 bp, Homo sapiens
cagctacagcttcag

SEQ ID NO: 222752 - DNA, 15 bp, Homo sapiens
tcagctacagcttca

SEQ ID NO: 222753 - DNA, 15 bp, Homo sapiens
ctcagctacagcttc

SEQ ID NO: 222754 - DNA, 15 bp, Homo sapiens
cctcagctacagctt

SEQ ID NO: 222755 - DNA, 15 bp, Homo sapiens
gcctcagctacagct

SEQ ID NO: 222756 - DNA, 15 bp, Homo sapiens
agcctcagctacagc

SEQ ID NO: 222757 - DNA, 15 bp, Homo sapiens
cagcctcagctacag

SEQ ID NO: 222758 - DNA, 15 bp, Homo sapiens
tcagcctcagctaca

SEQ ID NO: 222759 - DNA, 15 bp, Homo sapiens
ctcagcctcagctac

SEQ ID NO: 222760 - DNA, 15 bp, Homo sapiens
gctcagcctcagcta

SEQ ID NO: 222761 - DNA, 15 bp, Homo sapiens
ggctcagcctcagct

SEQ ID NO: 222762 - DNA, 15 bp, Homo sapiens
aggctcagcctcagc

SEQ ID NO: 222763 - DNA, 15 bp, Homo sapiens
caggctcagcctcag

SEQ ID NO: 222764 - DNA, 15 bp, Homo sapiens
tcaggctcagcctca

SEQ ID NO: 222765 - DNA, 15 bp, Homo sapiens
ttcaggctcagcctc

SEQ ID NO: 222766 - DNA, 15 bp, Homo sapiens
cttcaggctcagcct

SEQ ID NO: 222767 - DNA, 15 bp, Homo sapiens
ccttcaggctcagcc

SEQ ID NO: 222768 - DNA, 15 bp, Homo sapiens
tccttcaggctcagc

SEQ ID NO: 222769 - DNA, 15 bp, Homo sapiens
ttccttcaggctcag

SEQ ID NO: 222770 - DNA, 15 bp, Homo sapiens
gttccttcaggctca

SEQ ID NO: 222771 - DNA, 15 bp, Homo sapiens
ggttccttcaggctc

SEQ ID NO: 222772 - DNA, 15 bp, Homo sapiens
cggttccttcaggct

SEQ ID NO: 222773 - DNA, 15 bp, Homo sapiens
tcggttccttcaggc

SEQ ID NO: 222774 - DNA, 15 bp, Homo sapiens
gtcggttccttcagg

SEQ ID NO: 222775 - DNA, 15 bp, Homo sapiens
tgtcggttccttcag

SEQ ID NO: 222776 - DNA, 15 bp, Homo sapiens
ctgtcggttccttca

SEQ ID NO: 222777 - DNA, 15 bp, Homo sapiens
gctgtcggttccttc

SEQ ID NO: 222778 - DNA, 15 bp, Homo sapiens
agctgtcggttcctt

SEQ ID NO: 222779 - DNA, 15 bp, Homo sapiens
cagctgtcggttcct

SEQ ID NO: 222780 - DNA, 15 bp, Homo sapiens
ccagctgtcggttcc

SEQ ID NO: 222781 - DNA, 15 bp, Homo sapiens
cccagctgtcggttc

SEQ ID NO: 222782 - DNA, 15 bp, Homo sapiens
ccccagctgtcggtt

SEQ ID NO: 222783 - DNA, 15 bp, Homo sapiens
cccccagctgtcggt

SEQ ID NO: 222784 - DNA, 15 bp, Homo sapiens
gcccccagctgtcgg

SEQ ID NO: 222785 - DNA, 15 bp, Homo sapiens
agcccccagctgtcg

SEQ ID NO: 222786 - DNA, 15 bp, Homo sapiens
cagcccccagctgtc

SEQ ID NO: 222787 - DNA, 15 bp, Homo sapiens
acagcccccagctgt

SEQ ID NO: 222788 - DNA, 15 bp, Homo sapiens
aacagcccccagctg

SEQ ID NO: 222789 - DNA, 15 bp, Homo sapiens
aaacagcccccagct

SEQ ID NO: 222790 - DNA, 15 bp, Homo sapiens
caaacagcccccagc

SEQ ID NO: 222791 - DNA, 15 bp, Homo sapiens
gcaaacagcccccag

SEQ ID NO: 222792 - DNA, 15 bp, Homo sapiens
tgcaaacagccccca

SEQ ID NO: 222793 - DNA, 15 bp, Homo sapiens
ttgcaaacagccccc

SEQ ID NO: 222794 - DNA, 15 bp, Homo sapiens
tttgcaaacagcccc

SEQ ID NO: 222795 - DNA, 15 bp, Homo sapiens
ctttgcaaacagccc

SEQ ID NO: 222796 - DNA, 15 bp, Homo sapiens
gctttgcaaacagcc

SEQ ID NO: 222797 - DNA, 15 bp, Homo sapiens
ggctttgcaaacagc

SEQ ID NO: 222798 - DNA, 15 bp, Homo sapiens
cggctttgcaaacag

SEQ ID NO: 222799 - DNA, 15 bp, Homo sapiens
acggctttgcaaaca

SEQ ID NO: 222800 - DNA, 15 bp, Homo sapiens
gacggctttgcaaac

SEQ ID NO: 222801 - DNA, 15 bp, Homo sapiens
agacggctttgcaaa

SEQ ID NO: 222802 - DNA, 15 bp, Homo sapiens
gagacggctttgcaa

SEQ ID NO: 222803 - DNA, 15 bp, Homo sapiens
ggagacggctttgca

SEQ ID NO: 222804 - DNA, 15 bp, Homo sapiens
gggagacggctttgc

SEQ ID NO: 222805 - DNA, 15 bp, Homo sapiens
agggagacggctttg

SEQ ID NO: 222806 - DNA, 15 bp, Homo sapiens
cagggagacggcttt

SEQ ID NO: 222807 - DNA, 15 bp, Homo sapiens
tcagggagacggctt

SEQ ID NO: 222808 - DNA, 15 bp, Homo sapiens
ttcagggagacggct

SEQ ID NO: 222809 - DNA, 15 bp, Homo sapiens
cttcagggagacggc

SEQ ID NO: 222810 - DNA, 15 bp, Homo sapiens
gcttcagggagacgg

SEQ ID NO: 222811 - DNA, 15 bp, Homo sapiens
agcttcagggagacg

SEQ ID NO: 222812 - DNA, 15 bp, Homo sapiens
cagcttcagggagac

SEQ ID NO: 222813 - DNA, 15 bp, Homo sapiens
ccagcttcagggaga

SEQ ID NO: 222814 - DNA, 15 bp, Homo sapiens
cccagcttcagggag

SEQ ID NO: 222815 - DNA, 15 bp, Homo sapiens
gcccagcttcaggga

SEQ ID NO: 222816 - DNA, 15 bp, Homo sapiens
ggcccagcttcaggg

SEQ ID NO: 222817 - DNA, 15 bp, Homo sapiens
aggcccagcttcagg

SEQ ID NO: 222818 - DNA, 15 bp, Homo sapiens
gaggcccagcttcag

SEQ ID NO: 222819 - DNA, 15 bp, Homo sapiens
tgaggcccagcttca

SEQ ID NO: 222820 - DNA, 15 bp, Homo sapiens
ttgaggcccagcttc

SEQ ID NO: 222821 - DNA, 15 bp, Homo sapiens
cttgaggcccagctt

SEQ ID NO: 222822 - DNA, 15 bp, Homo sapiens
acttgaggcccagct

SEQ ID NO: 222823 - DNA, 15 bp, Homo sapiens
gacttgaggcccagc

SEQ ID NO: 222824 - DNA, 15 bp, Homo sapiens
ggacttgaggcccag

SEQ ID NO: 222825 - DNA, 15 bp, Homo sapiens
aggacttgaggccca

SEQ ID NO: 222826 - DNA, 15 bp, Homo sapiens
aaggacttgaggccc

SEQ ID NO: 222827 - DNA, 15 bp, Homo sapiens
gaaggacttgaggcc

SEQ ID NO: 222828 - DNA, 15 bp, Homo sapiens
agaaggacttgaggc

SEQ ID NO: 222829 - DNA, 15 bp, Homo sapiens
aagaaggacttgagg

SEQ ID NO: 222830 - DNA, 15 bp, Homo sapiens
gaagaaggacttgag

SEQ ID NO: 222831 - DNA, 15 bp, Homo sapiens
cgaagaaggacttga

SEQ ID NO: 222832 - DNA, 15 bp, Homo sapiens
tcgaagaaggacttg

SEQ ID NO: 222833 - DNA, 15 bp, Homo sapiens
ctcgaagaaggactt

SEQ ID NO: 222834 - DNA, 15 bp, Homo sapiens
cctcgaagaaggact

SEQ ID NO: 222835 - DNA, 15 bp, Homo sapiens
acctcgaagaaggac

SEQ ID NO: 222836 - DNA, 15 bp, Homo sapiens
cacctcgaagaagga

SEQ ID NO: 222837 - DNA, 15 bp, Homo sapiens
tcacctcgaagaagg

SEQ ID NO: 222838 - DNA, 15 bp, Homo sapiens
ctcacctcgaagaag

SEQ ID NO: 222839 - DNA, 15 bp, Homo sapiens
cctcacctcgaagaa

SEQ ID NO: 222840 - DNA, 15 bp, Homo sapiens
acctcacctcgaaga

SEQ ID NO: 222841 - DNA, 15 bp, Homo sapiens
aacctcacctcgaag

SEQ ID NO: 222842 - DNA, 15 bp, Homo sapiens
caacctcacctcgaa

SEQ ID NO: 222843 - DNA, 15 bp, Homo sapiens
ccaacctcacctcga

SEQ ID NO: 222844 - DNA, 15 bp, Homo sapiens
cccaacctcacctcg

SEQ ID NO: 222845 - DNA, 15 bp, Homo sapiens
ccccaacctcacctc

SEQ ID NO: 222846 - DNA, 15 bp, Homo sapiens
cccccaacctcacct

SEQ ID NO: 222847 - DNA, 15 bp, Homo sapiens
gcccccaacctcacc

SEQ ID NO: 222848 - DNA, 15 bp, Homo sapiens
tgcccccaacctcac

SEQ ID NO: 222849 - DNA, 15 bp, Homo sapiens
ctgcccccaacctca

SEQ ID NO: 222850 - DNA, 15 bp, Homo sapiens
gctgcccccaacctc

SEQ ID NO: 222851 - DNA, 15 bp, Homo sapiens
tgctgcccccaacct

SEQ ID NO: 222852 - DNA, 15 bp, Homo sapiens
gtgctgcccccaacc

SEQ ID NO: 222853 - DNA, 15 bp, Homo sapiens
tgtgctgcccccaac

SEQ ID NO: 222854 - DNA, 15 bp, Homo sapiens
atgtgctgcccccaa

SEQ ID NO: 222855 - DNA, 15 bp, Homo sapiens
gatgtgctgccccca

SEQ ID NO: 222856 - DNA, 15 bp, Homo sapiens
agatgtgctgccccc

SEQ ID NO: 222857 - DNA, 15 bp, Homo sapiens
gagatgtgctgcccc

SEQ ID NO: 222858 - DNA, 15 bp, Homo sapiens
ggagatgtgctgccc

SEQ ID NO: 222859 - DNA, 15 bp, Homo sapiens
tggagatgtgctgcc

SEQ ID NO: 222860 - DNA, 15 bp, Homo sapiens
atggagatgtgctgc

SEQ ID NO: 222861 - DNA, 15 bp, Homo sapiens
catggagatgtgctg

SEQ ID NO: 222862 - DNA, 15 bp, Homo sapiens
ccatggagatgtgct

SEQ ID NO: 222863 - DNA, 15 bp, Homo sapiens
gccatggagatgtgc

SEQ ID NO: 222864 - DNA, 15 bp, Homo sapiens
tgccatggagatgtg

SEQ ID NO: 222865 - DNA, 15 bp, Homo sapiens
atgccatggagatgt

SEQ ID NO: 222866 - DNA, 15 bp, Homo sapiens
catgccatggagatg

SEQ ID NO: 222867 - DNA, 15 bp, Homo sapiens
gcatgccatggagat

SEQ ID NO: 222868 - DNA, 15 bp, Homo sapiens
tgcatgccatggaga

SEQ ID NO: 222869 - DNA, 15 bp, Homo sapiens
ctgcatgccatggag

SEQ ID NO: 222870 - DNA, 15 bp, Homo sapiens
tctgcatgccatgga

SEQ ID NO: 222871 - DNA, 15 bp, Homo sapiens
ctctgcatgccatgg

SEQ ID NO: 222872 - DNA, 15 bp, Homo sapiens
gctctgcatgccatg

SEQ ID NO: 222873 - DNA, 15 bp, Homo sapiens
agctctgcatgccat

SEQ ID NO: 222874 - DNA, 15 bp, Homo sapiens
aagctctgcatgcca

SEQ ID NO: 222875 - DNA, 15 bp, Homo sapiens
caagctctgcatgcc

SEQ ID NO: 222876 - DNA, 15 bp, Homo sapiens
tcaagctctgcatgc

SEQ ID NO: 222877 - DNA, 15 bp, Homo sapiens
atcaagctctgcatg

SEQ ID NO: 222878 - DNA, 15 bp, Homo sapiens
catcaagctctgcat

SEQ ID NO: 222879 - DNA, 15 bp, Homo sapiens
tcatcaagctctgca

SEQ ID NO: 222880 - DNA, 15 bp, Homo sapiens
ctcatcaagctctgc

SEQ ID NO: 222881 - DNA, 15 bp, Homo sapiens
cctcatcaagctctg

SEQ ID NO: 222882 - DNA, 15 bp, Homo sapiens
tcctcatcaagctct

SEQ ID NO: 222883 - DNA, 15 bp, Homo sapiens
ctcctcatcaagctc

SEQ ID NO: 222884 - DNA, 15 bp, Homo sapiens
gctcctcatcaagct

SEQ ID NO: 222885 - DNA, 15 bp, Homo sapiens
agctcctcatcaagc

SEQ ID NO: 222886 - DNA, 15 bp, Homo sapiens
aagctcctcatcaag

SEQ ID NO: 222887 - DNA, 15 bp, Homo sapiens
caagctcctcatcaa

SEQ ID NO: 222888 - DNA, 15 bp, Homo sapiens
tcaagctcctcatca

SEQ ID NO: 222889 - DNA, 15 bp, Homo sapiens
ctcaagctcctcatc

SEQ ID NO: 222890 - DNA, 15 bp, Homo sapiens
actcaagctcctcat

SEQ ID NO: 222891 - DNA, 15 bp, Homo sapiens
aactcaagctcctca

SEQ ID NO: 222892 - DNA, 15 bp, Homo sapiens
aaactcaagctcctc

SEQ ID NO: 222893 - DNA, 15 bp, Homo sapiens
caaactcaagctcct

SEQ ID NO: 222894 - DNA, 15 bp, Homo sapiens
tcaaactcaagctcc

SEQ ID NO: 222895 - DNA, 15 bp, Homo sapiens
gtcaaactcaagctc

SEQ ID NO: 222896 - DNA, 15 bp, Homo sapiens
ggtcaaactcaagct

SEQ ID NO: 222897 - DNA, 15 bp, Homo sapiens
aggtcaaactcaagc

SEQ ID NO: 222898 - DNA, 15 bp, Homo sapiens
caggtcaaactcaag

SEQ ID NO: 222899 - DNA, 15 bp, Homo sapiens
tcaggtcaaactcaa

SEQ ID NO: 222900 - DNA, 15 bp, Homo sapiens
gtcaggtcaaactca

SEQ ID NO: 222901 - DNA, 15 bp, Homo sapiens
ggtcaggtcaaactc

SEQ ID NO: 222902 - DNA, 15 bp, Homo sapiens
gggtcaggtcaaact

SEQ ID NO: 222903 - DNA, 15 bp, Homo sapiens
agggtcaggtcaaac

SEQ ID NO: 222904 - DNA, 15 bp, Homo sapiens
cagggtcaggtcaaa

SEQ ID NO: 222905 - DNA, 15 bp, Homo sapiens
tcagggtcaggtcaa

SEQ ID NO: 222906 - DNA, 15 bp, Homo sapiens
ttcagggtcaggtca

SEQ ID NO: 222907 - DNA, 15 bp, Homo sapiens
cttcagggtcaggtc

SEQ ID NO: 222908 - DNA, 15 bp, Homo sapiens
ccttcagggtcaggt

SEQ ID NO: 222909 - DNA, 15 bp, Homo sapiens
cccttcagggtcagg

SEQ ID NO: 222910 - DNA, 15 bp, Homo sapiens
gcccttcagggtcag

SEQ ID NO: 222911 - DNA, 15 bp, Homo sapiens
tgcccttcagggtca

SEQ ID NO: 222912 - DNA, 15 bp, Homo sapiens
ttgcccttcagggtc

SEQ ID NO: 222913 - DNA, 15 bp, Homo sapiens
cttgcccttcagggt

SEQ ID NO: 222914 - DNA, 15 bp, Homo sapiens
acttgcccttcaggg

SEQ ID NO: 222915 - DNA, 15 bp, Homo sapiens
cacttgcccttcagg

SEQ ID NO: 222916 - DNA, 15 bp, Homo sapiens
ccacttgcccttcag

SEQ ID NO: 222917 - DNA, 15 bp, Homo sapiens
cccacttgcccttca

SEQ ID NO: 222918 - DNA, 15 bp, Homo sapiens
ccccacttgcccttc

SEQ ID NO: 222919 - DNA, 15 bp, Homo sapiens
gccccacttgccctt

SEQ ID NO: 222920 - DNA, 15 bp, Homo sapiens
agccccacttgccct

SEQ ID NO: 222921 - DNA, 15 bp, Homo sapiens
aagccccacttgccc

SEQ ID NO: 222922 - DNA, 15 bp, Homo sapiens
aaagccccacttgcc

SEQ ID NO: 222923 - DNA, 15 bp, Homo sapiens
caaagccccacttgc

SEQ ID NO: 222924 - DNA, 15 bp, Homo sapiens
ccaaagccccacttg

SEQ ID NO: 222925 - DNA, 15 bp, Homo sapiens
accaaagccccactt

SEQ ID NO: 222926 - DNA, 15 bp, Homo sapiens
taccaaagccccact

SEQ ID NO: 222927 - DNA, 15 bp, Homo sapiens
ctaccaaagccccac

SEQ ID NO: 222928 - DNA, 15 bp, Homo sapiens
cctaccaaagcccca

SEQ ID NO: 222929 - DNA, 15 bp, Homo sapiens
gcctaccaaagcccc

SEQ ID NO: 222930 - DNA, 15 bp, Homo sapiens
tgcctaccaaagccc

SEQ ID NO: 222931 - DNA, 15 bp, Homo sapiens
ctgcctaccaaagcc

SEQ ID NO: 222932 - DNA, 15 bp, Homo sapiens
tctgcctaccaaagc

SEQ ID NO: 222933 - DNA, 15 bp, Homo sapiens
ctctgcctaccaaag

SEQ ID NO: 222934 - DNA, 15 bp, Homo sapiens
tctctgcctaccaaa

SEQ ID NO: 222935 - DNA, 15 bp, Homo sapiens
ctctctgcctaccaa

SEQ ID NO: 222936 - DNA, 15 bp, Homo sapiens
cctctctgcctacca

SEQ ID NO: 222937 - DNA, 15 bp, Homo sapiens
tcctctctgcctacc

SEQ ID NO: 222938 - DNA, 15 bp, Homo sapiens
ctcctctctgcctac

SEQ ID NO: 222939 - DNA, 15 bp, Homo sapiens
gctcctctctgccta

SEQ ID NO: 222940 - DNA, 15 bp, Homo sapiens
tgctcctctctgcct

SEQ ID NO: 222941 - DNA, 15 bp, Homo sapiens
ctgctcctctctgcc

SEQ ID NO: 222942 - DNA, 15 bp, Homo sapiens
cctgctcctctctgc

SEQ ID NO: 222943 - DNA, 15 bp, Homo sapiens
tcctgctcctctctg

SEQ ID NO: 222944 - DNA, 15 bp, Homo sapiens
ttcctgctcctctct

SEQ ID NO: 222945 - DNA, 15 bp, Homo sapiens
cttcctgctcctctc

SEQ ID NO: 222946 - DNA, 15 bp, Homo sapiens
tcttcctgctcctct

SEQ ID NO: 222947 - DNA, 15 bp, Homo sapiens
ttcttcctgctcctc

SEQ ID NO: 222948 - DNA, 15 bp, Homo sapiens
gttcttcctgctcct

SEQ ID NO: 222949 - DNA, 15 bp, Homo sapiens
agttcttcctgctcc

SEQ ID NO: 222950 - DNA, 15 bp, Homo sapiens
aagttcttcctgctc

SEQ ID NO: 222951 - DNA, 15 bp, Homo sapiens
caagttcttcctgct

SEQ ID NO: 222952 - DNA, 15 bp, Homo sapiens
gcaagttcttcctgc

SEQ ID NO: 222953 - DNA, 15 bp, Homo sapiens
ggcaagttcttcctg

SEQ ID NO: 222954 - DNA, 15 bp, Homo sapiens
tggcaagttcttcct

SEQ ID NO: 222955 - DNA, 15 bp, Homo sapiens
ctggcaagttcttcc

SEQ ID NO: 222956 - DNA, 15 bp, Homo sapiens
gctggcaagttcttc

SEQ ID NO: 222957 - DNA, 15 bp, Homo sapiens
agctggcaagttctt

SEQ ID NO: 222958 - DNA, 15 bp, Homo sapiens
tagctggcaagttct

SEQ ID NO: 222959 - DNA, 15 bp, Homo sapiens
ttagctggcaagttc

SEQ ID NO: 222960 - DNA, 15 bp, Homo sapiens
cttagctggcaagtt

SEQ ID NO: 222961 - DNA, 15 bp, Homo sapiens
gcttagctggcaagt

SEQ ID NO: 222962 - DNA, 15 bp, Homo sapiens
tgcttagctggcaag

SEQ ID NO: 222963 - DNA, 15 bp, Homo sapiens
ttgcttagctggcaa

SEQ ID NO: 222964 - DNA, 15 bp, Homo sapiens
tttgcttagctggca

SEQ ID NO: 222965 - DNA, 15 bp, Homo sapiens
ttttgcttagctggc

SEQ ID NO: 222966 - DNA, 15 bp, Homo sapiens
gttttgcttagctgg

SEQ ID NO: 222967 - DNA, 15 bp, Homo sapiens
tgttttgcttagctg

SEQ ID NO: 222968 - DNA, 15 bp, Homo sapiens
ctgttttgcttagct

SEQ ID NO: 222969 - DNA, 15 bp, Homo sapiens
actgttttgcttagc

SEQ ID NO: 222970 - DNA, 15 bp, Homo sapiens
cactgttttgcttag

SEQ ID NO: 222971 - DNA, 15 bp, Homo sapiens
acactgttttgctta

SEQ ID NO: 222972 - DNA, 15 bp, Homo sapiens
cacactgttttgctt

SEQ ID NO: 222973 - DNA, 15 bp, Homo sapiens
tcacactgttttgct

SEQ ID NO: 222974 - DNA, 15 bp, Homo sapiens
ttcacactgttttgc

SEQ ID NO: 222975 - DNA, 15 bp, Homo sapiens
gttcacactgttttg

SEQ ID NO: 222976 - DNA, 15 bp, Homo sapiens
tgttcacactgtttt

SEQ ID NO: 222977 - DNA, 15 bp, Homo sapiens
ttgttcacactgttt

SEQ ID NO: 222978 - DNA, 15 bp, Homo sapiens
tttgttcacactgtt

SEQ ID NO: 222979 - DNA, 15 bp, Homo sapiens
ctttgttcacactgt

SEQ ID NO: 222980 - DNA, 15 bp, Homo sapiens
cctttgttcacactg

SEQ ID NO: 222981 - DNA, 15 bp, Homo sapiens
acctttgttcacact

SEQ ID NO: 222982 - DNA, 15 bp, Homo sapiens
tacctttgttcacac

SEQ ID NO: 222983 - DNA, 15 bp, Homo sapiens
atacctttgttcaca

SEQ ID NO: 222984 - DNA, 15 bp, Homo sapiens
catacctttgttcac

SEQ ID NO: 222985 - DNA, 15 bp, Homo sapiens
ccatacctttgttca

SEQ ID NO: 222986 - DNA, 15 bp, Homo sapiens
tccatacctttgttc

SEQ ID NO: 222987 - DNA, 15 bp, Homo sapiens
ctccatacctttgtt

SEQ ID NO: 222988 - DNA, 15 bp, Homo sapiens
cctccatacctttgt

SEQ ID NO: 222989 - DNA, 15 bp, Homo sapiens
acctccatacctttg

SEQ ID NO: 222990 - DNA, 15 bp, Homo sapiens
tacctccataccttt

SEQ ID NO: 222991 - DNA, 15 bp, Homo sapiens
ctacctccatacctt

SEQ ID NO: 222992 - DNA, 15 bp, Homo sapiens
tctacctccatacct

SEQ ID NO: 222993 - DNA, 15 bp, Homo sapiens
ttctacctccatacc

SEQ ID NO: 222994 - DNA, 15 bp, Homo sapiens
tttctacctccatac

SEQ ID NO: 222995 - DNA, 15 bp, Homo sapiens
ctttctacctccata

SEQ ID NO: 222996 - DNA, 15 bp, Homo sapiens
tctttctacctccat

SEQ ID NO: 222997 - DNA, 15 bp, Homo sapiens
ctctttctacctcca

SEQ ID NO: 222998 - DNA, 15 bp, Homo sapiens
tctctttctacctcc

SEQ ID NO: 222999 - DNA, 15 bp, Homo sapiens
ctctctttctacctc

SEQ ID NO: 223000 - DNA, 15 bp, Homo sapiens
cctctctttctacct

SEQ ID NO: 223001 - DNA, 15 bp, Homo sapiens
tcctctctttctacc

SEQ ID NO: 223002 - DNA, 15 bp, Homo sapiens
gtcctctctttctac

SEQ ID NO: 223003 - DNA, 15 bp, Homo sapiens
agtcctctctttcta

SEQ ID NO: 223004 - DNA, 15 bp, Homo sapiens
aagtcctctctttct

SEQ ID NO: 223005 - DNA, 15 bp, Homo sapiens
aaagtcctctctttc

SEQ ID NO: 223006 - DNA, 15 bp, Homo sapiens
caaagtcctctcttt

SEQ ID NO: 223007 - DNA, 15 bp, Homo sapiens
acaaagtcctctctt

SEQ ID NO: 223008 - DNA, 15 bp, Homo sapiens
tacaaagtcctctct

SEQ ID NO: 223009 - DNA, 15 bp, Homo sapiens
ttacaaagtcctctc

SEQ ID NO: 223010 - DNA, 15 bp, Homo sapiens
cttacaaagtcctct

SEQ ID NO: 223011 - DNA, 15 bp, Homo sapiens
ccttacaaagtcctc

SEQ ID NO: 223012 - DNA, 15 bp, Homo sapiens
tccttacaaagtcct

SEQ ID NO: 223013 - DNA, 15 bp, Homo sapiens
ttccttacaaagtcc

SEQ ID NO: 223014 - DNA, 15 bp, Homo sapiens
cttccttacaaagtc

SEQ ID NO: 223015 - DNA, 15 bp, Homo sapiens
acttccttacaaagt

SEQ ID NO: 223016 - DNA, 15 bp, Homo sapiens
cacttccttacaaag

SEQ ID NO: 223017 - DNA, 15 bp, Homo sapiens
gcacttccttacaaa

SEQ ID NO: 223018 - DNA, 15 bp, Homo sapiens
ggcacttccttacaa

SEQ ID NO: 223019 - DNA, 15 bp, Homo sapiens
tggcacttccttaca

SEQ ID NO: 223020 - DNA, 15 bp, Homo sapiens
ttggcacttccttac

SEQ ID NO: 223021 - DNA, 15 bp, Homo sapiens
attggcacttcctta

SEQ ID NO: 223022 - DNA, 15 bp, Homo sapiens
tattggcacttcctt

SEQ ID NO: 223023 - DNA, 15 bp, Homo sapiens
atattggcacttcct

SEQ ID NO: 223024 - DNA, 15 bp, Homo sapiens
catattggcacttcc

SEQ ID NO: 223025 - DNA, 15 bp, Homo sapiens
ccatattggcacttc

SEQ ID NO: 223026 - DNA, 15 bp, Homo sapiens
tccatattggcactt

SEQ ID NO: 223027 - DNA, 15 bp, Homo sapiens
ttccatattggcact

SEQ ID NO: 223028 - DNA, 15 bp, Homo sapiens
tttccatattggcac

SEQ ID NO: 223029 - DNA, 15 bp, Homo sapiens
ttttccatattggca

SEQ ID NO: 223030 - DNA, 15 bp, Homo sapiens
gttttccatattggc

SEQ ID NO: 223031 - DNA, 15 bp, Homo sapiens
tgttttccatattgg

SEQ ID NO: 223032 - DNA, 15 bp, Homo sapiens
atgttttccatattg

SEQ ID NO: 223033 - DNA, 15 bp, Homo sapiens
aatgttttccatatt

SEQ ID NO: 223034 - DNA, 15 bp, Homo sapiens
caatgttttccatat

SEQ ID NO: 223035 - DNA, 15 bp, Homo sapiens
gcaatgttttccata

SEQ ID NO: 223036 - DNA, 15 bp, Homo sapiens
tgcaatgttttccat

SEQ ID NO: 223037 - DNA, 15 bp, Homo sapiens
ctgcaatgttttcca

SEQ ID NO: 223038 - DNA, 15 bp, Homo sapiens
actgcaatgttttcc

SEQ ID NO: 223039 - DNA, 15 bp, Homo sapiens
cactgcaatgttttc

SEQ ID NO: 223040 - DNA, 15 bp, Homo sapiens
acactgcaatgtttt

SEQ ID NO: 223041 - DNA, 15 bp, Homo sapiens
cacactgcaatgttt

SEQ ID NO: 223042 - DNA, 15 bp, Homo sapiens
ccacactgcaatgtt

SEQ ID NO: 223043 - DNA, 15 bp, Homo sapiens
tccacactgcaatgt

SEQ ID NO: 223044 - DNA, 15 bp, Homo sapiens
gtccacactgcaatg

SEQ ID NO: 223045 - DNA, 15 bp, Homo sapiens
cgtccacactgcaat

SEQ ID NO: 223046 - DNA, 15 bp, Homo sapiens
gcgtccacactgcaa

SEQ ID NO: 223047 - DNA, 15 bp, Homo sapiens
ggcgtccacactgca

SEQ ID NO: 223048 - DNA, 15 bp, Homo sapiens
aggcgtccacactgc

SEQ ID NO: 223049 - DNA, 15 bp, Homo sapiens
caggcgtccacactg

SEQ ID NO: 223050 - DNA, 15 bp, Homo sapiens
ccaggcgtccacact

SEQ ID NO: 223051 - DNA, 15 bp, Homo sapiens
cccaggcgtccacac

SEQ ID NO: 223052 - DNA, 15 bp, Homo sapiens
gcccaggcgtccaca

SEQ ID NO: 223053 - DNA, 15 bp, Homo sapiens
tgcccaggcgtccac

SEQ ID NO: 223054 - DNA, 15 bp, Homo sapiens
ctgcccaggcgtcca

SEQ ID NO: 223055 - DNA, 15 bp, Homo sapiens
tctgcccaggcgtcc

SEQ ID NO: 223056 - DNA, 15 bp, Homo sapiens
ctctgcccaggcgtc

SEQ ID NO: 223057 - DNA, 15 bp, Homo sapiens
tctctgcccaggcgt

SEQ ID NO: 223058 - DNA, 15 bp, Homo sapiens
ctctctgcccaggcg

SEQ ID NO: 223059 - DNA, 15 bp, Homo sapiens
cctctctgcccaggc

SEQ ID NO: 223060 - DNA, 15 bp, Homo sapiens
gcctctctgcccagg

SEQ ID NO: 223061 - DNA, 15 bp, Homo sapiens
agcctctctgcccag

SEQ ID NO: 223062 - DNA, 15 bp, Homo sapiens
cagcctctctgccca

SEQ ID NO: 223063 - DNA, 15 bp, Homo sapiens
acagcctctctgccc

SEQ ID NO: 223064 - DNA, 15 bp, Homo sapiens
gacagcctctctgcc

SEQ ID NO: 223065 - DNA, 15 bp, Homo sapiens
tgacagcctctctgc

SEQ ID NO: 223066 - DNA, 15 bp, Homo sapiens
gtgacagcctctctg

SEQ ID NO: 223067 - DNA, 15 bp, Homo sapiens
ggtgacagcctctct

SEQ ID NO: 223068 - DNA, 15 bp, Homo sapiens
aggtgacagcctctc

SEQ ID NO: 223069 - DNA, 15 bp, Homo sapiens
aaggtgacagcctct

SEQ ID NO: 223070 - DNA, 15 bp, Homo sapiens
caaggtgacagcctc

SEQ ID NO: 223071 - DNA, 15 bp, Homo sapiens
tcaaggtgacagcct

SEQ ID NO: 223072 - DNA, 15 bp, Homo sapiens
ctcaaggtgacagcc

SEQ ID NO: 223073 - DNA, 15 bp, Homo sapiens
tctcaaggtgacagc

SEQ ID NO: 223074 - DNA, 15 bp, Homo sapiens
ttctcaaggtgacag

SEQ ID NO: 223075 - DNA, 15 bp, Homo sapiens
tttctcaaggtgaca

SEQ ID NO: 223076 - DNA, 15 bp, Homo sapiens
atttctcaaggtgac

SEQ ID NO: 223077 - DNA, 15 bp, Homo sapiens
catttctcaaggtga

SEQ ID NO: 223078 - DNA, 15 bp, Homo sapiens
ccatttctcaaggtg

SEQ ID NO: 223079 - DNA, 15 bp, Homo sapiens
gccatttctcaaggt

SEQ ID NO: 223080 - DNA, 15 bp, Homo sapiens
ggccatttctcaagg

SEQ ID NO: 223081 - DNA, 15 bp, Homo sapiens
tggccatttctcaag

SEQ ID NO: 223082 - DNA, 15 bp, Homo sapiens
ctggccatttctcaa

SEQ ID NO: 223083 - DNA, 15 bp, Homo sapiens
cctggccatttctca

SEQ ID NO: 223084 - DNA, 15 bp, Homo sapiens
ccctggccatttctc

SEQ ID NO: 223085 - DNA, 15 bp, Homo sapiens
cccctggccatttct

SEQ ID NO: 223086 - DNA, 15 bp, Homo sapiens
gcccctggccatttc

SEQ ID NO: 223087 - DNA, 15 bp, Homo sapiens
ggcccctggccattt

SEQ ID NO: 223088 - DNA, 15 bp, Homo sapiens
tggcccctggccatt

SEQ ID NO: 223089 - DNA, 15 bp, Homo sapiens
gtggcccctggccat

SEQ ID NO: 223090 - DNA, 15 bp, Homo sapiens
ggtggcccctggcca

SEQ ID NO: 223091 - DNA, 15 bp, Homo sapiens
aggtggcccctggcc

SEQ ID NO: 223092 - DNA, 15 bp, Homo sapiens
gaggtggcccctggc

SEQ ID NO: 223093 - DNA, 15 bp, Homo sapiens
agaggtggcccctgg

SEQ ID NO: 223094 - DNA, 15 bp, Homo sapiens
tagaggtggcccctg

SEQ ID NO: 223095 - DNA, 15 bp, Homo sapiens
ctagaggtggcccct

SEQ ID NO: 223096 - DNA, 15 bp, Homo sapiens
cctagaggtggcccc

SEQ ID NO: 223097 - DNA, 15 bp, Homo sapiens
ccctagaggtggccc

SEQ ID NO: 223098 - DNA, 15 bp, Homo sapiens
accctagaggtggcc

SEQ ID NO: 223099 - DNA, 15 bp, Homo sapiens
caccctagaggtggc

SEQ ID NO: 223100 - DNA, 15 bp, Homo sapiens
tcaccctagaggtgg

SEQ ID NO: 223101 - DNA, 15 bp, Homo sapiens
gtcaccctagaggtg

SEQ ID NO: 223102 - DNA, 15 bp, Homo sapiens
ggtcaccctagaggt

SEQ ID NO: 223103 - DNA, 15 bp, Homo sapiens
aggtcaccctagagg

SEQ ID NO: 223104 - DNA, 15 bp, Homo sapiens
aaggtcaccctagag

SEQ ID NO: 223105 - DNA, 15 bp, Homo sapiens
gaaggtcaccctaga

SEQ ID NO: 223106 - DNA, 15 bp, Homo sapiens
agaaggtcaccctag

SEQ ID NO: 223107 - DNA, 15 bp, Homo sapiens
gagaaggtcacccta

SEQ ID NO: 223108 - DNA, 15 bp, Homo sapiens
agagaaggtcaccct

SEQ ID NO: 223109 - DNA, 15 bp, Homo sapiens
cagagaaggtcaccc

SEQ ID NO: 223110 - DNA, 15 bp, Homo sapiens
ccagagaaggtcacc

SEQ ID NO: 223111 - DNA, 15 bp, Homo sapiens
accagagaaggtcac

SEQ ID NO: 223112 - DNA, 15 bp, Homo sapiens
caccagagaaggtca

SEQ ID NO: 223113 - DNA, 15 bp, Homo sapiens
acaccagagaaggtc

SEQ ID NO: 223114 - DNA, 15 bp, Homo sapiens
aacaccagagaaggt

SEQ ID NO: 223115 - DNA, 15 bp, Homo sapiens
taacaccagagaagg

SEQ ID NO: 223116 - DNA, 15 bp, Homo sapiens
gtaacaccagagaag

SEQ ID NO: 223117 - DNA, 15 bp, Homo sapiens
agtaacaccagagaa

SEQ ID NO: 223118 - DNA, 15 bp, Homo sapiens
aagtaacaccagaga

SEQ ID NO: 223119 - DNA, 15 bp, Homo sapiens
aaagtaacaccagag

SEQ ID NO: 223120 - DNA, 15 bp, Homo sapiens
gaaagtaacaccaga

SEQ ID NO: 223121 - DNA, 15 bp, Homo sapiens
agaaagtaacaccag

SEQ ID NO: 223122 - DNA, 15 bp, Homo sapiens
tagaaagtaacacca

SEQ ID NO: 223123 - DNA, 15 bp, Homo sapiens
ctagaaagtaacacc

SEQ ID NO: 223124 - DNA, 15 bp, Homo sapiens
gctagaaagtaacac

SEQ ID NO: 223125 - DNA, 15 bp, Homo sapiens
agctagaaagtaaca

SEQ ID NO: 223126 - DNA, 15 bp, Homo sapiens
tagctagaaagtaac

SEQ ID NO: 223127 - DNA, 15 bp, Homo sapiens
atagctagaaagtaa

SEQ ID NO: 223128 - DNA, 15 bp, Homo sapiens
gatagctagaaagta

SEQ ID NO: 223129 - DNA, 15 bp, Homo sapiens
agatagctagaaagt

SEQ ID NO: 223130 - DNA, 15 bp, Homo sapiens
aagatagctagaaag

SEQ ID NO: 223131 - DNA, 15 bp, Homo sapiens
gaagatagctagaaa

SEQ ID NO: 223132 - DNA, 15 bp, Homo sapiens
agaagatagctagaa

SEQ ID NO: 223133 - DNA, 15 bp, Homo sapiens
cagaagatagctaga

SEQ ID NO: 223134 - DNA, 15 bp, Homo sapiens
tcagaagatagctag

SEQ ID NO: 223135 - DNA, 15 bp, Homo sapiens
ttcagaagatagcta

SEQ ID NO: 223136 - DNA, 15 bp, Homo sapiens
cttcagaagatagct

SEQ ID NO: 223137 - DNA, 15 bp, Homo sapiens
gcttcagaagatagc

SEQ ID NO: 223138 - DNA, 15 bp, Homo sapiens
ggcttcagaagatag

SEQ ID NO: 223139 - DNA, 15 bp, Homo sapiens
aggcttcagaagata

SEQ ID NO: 223140 - DNA, 15 bp, Homo sapiens
caggcttcagaagat

SEQ ID NO: 223141 - DNA, 15 bp, Homo sapiens
acaggcttcagaaga

SEQ ID NO: 223142 - DNA, 15 bp, Homo sapiens
gacaggcttcagaag

SEQ ID NO: 223143 - DNA, 15 bp, Homo sapiens
agacaggcttcagaa

SEQ ID NO: 223144 - DNA, 15 bp, Homo sapiens
aagacaggcttcaga

SEQ ID NO: 223145 - DNA, 15 bp, Homo sapiens
aaagacaggcttcag

SEQ ID NO: 223146 - DNA, 15 bp, Homo sapiens
gaaagacaggcttca

SEQ ID NO: 223147 - DNA, 15 bp, Homo sapiens
ggaaagacaggcttc

SEQ ID NO: 223148 - DNA, 15 bp, Homo sapiens
aggaaagacaggctt

SEQ ID NO: 223149 - DNA, 15 bp, Homo sapiens
caggaaagacaggct

SEQ ID NO: 223150 - DNA, 15 bp, Homo sapiens
gcaggaaagacaggc

SEQ ID NO: 223151 - DNA, 15 bp, Homo sapiens
ggcaggaaagacagg

SEQ ID NO: 223152 - DNA, 15 bp, Homo sapiens
gggcaggaaagacag

SEQ ID NO: 223153 - DNA, 15 bp, Homo sapiens
tgggcaggaaagaca

SEQ ID NO: 223154 - DNA, 15 bp, Homo sapiens
gtgggcaggaaagac

SEQ ID NO: 223155 - DNA, 15 bp, Homo sapiens
agtgggcaggaaaga

SEQ ID NO: 223156 - DNA, 15 bp, Homo sapiens
gagtgggcaggaaag

SEQ ID NO: 223157 - DNA, 15 bp, Homo sapiens
agagtgggcaggaaa

SEQ ID NO: 223158 - DNA, 15 bp, Homo sapiens
tagagtgggcaggaa

SEQ ID NO: 223159 - DNA, 15 bp, Homo sapiens
ttagagtgggcagga

SEQ ID NO: 223160 - DNA, 15 bp, Homo sapiens
cttagagtgggcagg

SEQ ID NO: 223161 - DNA, 15 bp, Homo sapiens
ccttagagtgggcag

SEQ ID NO: 223162 - DNA, 15 bp, Homo sapiens
tccttagagtgggca

SEQ ID NO: 223163 - DNA, 15 bp, Homo sapiens
ttccttagagtgggc

SEQ ID NO: 223164 - DNA, 15 bp, Homo sapiens
cttccttagagtggg

SEQ ID NO: 223165 - DNA, 15 bp, Homo sapiens
acttccttagagtgg

SEQ ID NO: 223166 - DNA, 15 bp, Homo sapiens
gacttccttagagtg

SEQ ID NO: 223167 - DNA, 15 bp, Homo sapiens
tgacttccttagagt

SEQ ID NO: 223168 - DNA, 15 bp, Homo sapiens
ctgacttccttagag

SEQ ID NO: 223169 - DNA, 15 bp, Homo sapiens
cctgacttccttaga

SEQ ID NO: 223170 - DNA, 15 bp, Homo sapiens
acctgacttccttag

SEQ ID NO: 223171 - DNA, 15 bp, Homo sapiens
gacctgacttcctta

SEQ ID NO: 223172 - DNA, 15 bp, Homo sapiens
tgacctgacttcctt

SEQ ID NO: 223173 - DNA, 15 bp, Homo sapiens
ttgacctgacttcct

SEQ ID NO: 223174 - DNA, 15 bp, Homo sapiens
gttgacctgacttcc

SEQ ID NO: 223175 - DNA, 15 bp, Homo sapiens
agttgacctgacttc

SEQ ID NO: 223176 - DNA, 15 bp, Homo sapiens
aagttgacctgactt

SEQ ID NO: 223177 - DNA, 15 bp, Homo sapiens
taagttgacctgact

SEQ ID NO: 223178 - DNA, 15 bp, Homo sapiens
ctaagttgacctgac

SEQ ID NO: 223179 - DNA, 15 bp, Homo sapiens
cctaagttgacctga

SEQ ID NO: 223180 - DNA, 15 bp, Homo sapiens
ccctaagttgacctg

SEQ ID NO: 223181 - DNA, 15 bp, Homo sapiens
tccctaagttgacct

SEQ ID NO: 223182 - DNA, 15 bp, Homo sapiens
atccctaagttgacc

SEQ ID NO: 223183 - DNA, 15 bp, Homo sapiens
catccctaagttgac

SEQ ID NO: 223184 - DNA, 15 bp, Homo sapiens
acatccctaagttga

SEQ ID NO: 223185 - DNA, 15 bp, Homo sapiens
cacatccctaagttg

SEQ ID NO: 223186 - DNA, 15 bp, Homo sapiens
acacatccctaagtt

SEQ ID NO: 223187 - DNA, 15 bp, Homo sapiens
gacacatccctaagt

SEQ ID NO: 223188 - DNA, 15 bp, Homo sapiens
agacacatccctaag

SEQ ID NO: 223189 - DNA, 15 bp, Homo sapiens
aagacacatccctaa

SEQ ID NO: 223190 - DNA, 15 bp, Homo sapiens
gaagacacatcccta

SEQ ID NO: 223191 - DNA, 15 bp, Homo sapiens
ggaagacacatccct

SEQ ID NO: 223192 - DNA, 15 bp, Homo sapiens
gggaagacacatccc

SEQ ID NO: 223193 - DNA, 15 bp, Homo sapiens
tgggaagacacatcc

SEQ ID NO: 223194 - DNA, 15 bp, Homo sapiens
ttgggaagacacatc

SEQ ID NO: 223195 - DNA, 15 bp, Homo sapiens
cttgggaagacacat

SEQ ID NO: 223196 - DNA, 15 bp, Homo sapiens
acttgggaagacaca

SEQ ID NO: 223197 - DNA, 15 bp, Homo sapiens
cacttgggaagacac

SEQ ID NO: 223198 - DNA, 15 bp, Homo sapiens
tcacttgggaagaca

SEQ ID NO: 223199 - DNA, 15 bp, Homo sapiens
gtcacttgggaagac

SEQ ID NO: 223200 - DNA, 15 bp, Homo sapiens
ggtcacttgggaaga

SEQ ID NO: 223201 - DNA, 15 bp, Homo sapiens
gggtcacttgggaag

SEQ ID NO: 223202 - DNA, 15 bp, Homo sapiens
ggggtcacttgggaa

SEQ ID NO: 223203 - DNA, 15 bp, Homo sapiens
gggggtcacttggga

SEQ ID NO: 223204 - DNA, 15 bp, Homo sapiens
tgggggtcacttggg

SEQ ID NO: 223205 - DNA, 15 bp, Homo sapiens
atgggggtcacttgg

SEQ ID NO: 223206 - DNA, 15 bp, Homo sapiens
aatgggggtcacttg

SEQ ID NO: 223207 - DNA, 15 bp, Homo sapiens
caatgggggtcactt

SEQ ID NO: 223208 - DNA, 15 bp, Homo sapiens
ccaatgggggtcact

SEQ ID NO: 223209 - DNA, 15 bp, Homo sapiens
gccaatgggggtcac

SEQ ID NO: 223210 - DNA, 15 bp, Homo sapiens
ggccaatgggggtca

SEQ ID NO: 223211 - DNA, 15 bp, Homo sapiens
aggccaatgggggtc

SEQ ID NO: 223212 - DNA, 15 bp, Homo sapiens
aaggccaatgggggt

SEQ ID NO: 223213 - DNA, 15 bp, Homo sapiens
aaaggccaatggggg

SEQ ID NO: 223214 - DNA, 15 bp, Homo sapiens
caaaggccaatgggg

SEQ ID NO: 223215 - DNA, 15 bp, Homo sapiens
acaaaggccaatggg

SEQ ID NO: 223216 - DNA, 15 bp, Homo sapiens
aacaaaggccaatgg

SEQ ID NO: 223217 - DNA, 15 bp, Homo sapiens
caacaaaggccaatg

SEQ ID NO: 223218 - DNA, 15 bp, Homo sapiens
ccaacaaaggccaat

SEQ ID NO: 223219 - DNA, 15 bp, Homo sapiens
accaacaaaggccaa

SEQ ID NO: 223220 - DNA, 15 bp, Homo sapiens
aaccaacaaaggcca

SEQ ID NO: 223221 - DNA, 15 bp, Homo sapiens
caaccaacaaaggcc

SEQ ID NO: 223222 - DNA, 15 bp, Homo sapiens
acaaccaacaaaggc

SEQ ID NO: 223223 - DNA, 15 bp, Homo sapiens
gacaaccaacaaagg

SEQ ID NO: 223224 - DNA, 15 bp, Homo sapiens
ggacaaccaacaaag

SEQ ID NO: 223225 - DNA, 15 bp, Homo sapiens
aggacaaccaacaaa

SEQ ID NO: 223226 - DNA, 15 bp, Homo sapiens
gaggacaaccaacaa

SEQ ID NO: 223227 - DNA, 15 bp, Homo sapiens
ggaggacaaccaaca

SEQ ID NO: 223228 - DNA, 15 bp, Homo sapiens
tggaggacaaccaac

SEQ ID NO: 223229 - DNA, 15 bp, Homo sapiens
ttggaggacaaccaa

SEQ ID NO: 223230 - DNA, 15 bp, Homo sapiens
cttggaggacaacca

SEQ ID NO: 223231 - DNA, 15 bp, Homo sapiens
acttggaggacaacc

SEQ ID NO: 223232 - DNA, 15 bp, Homo sapiens
aacttggaggacaac

SEQ ID NO: 223233 - DNA, 15 bp, Homo sapiens
taacttggaggacaa

SEQ ID NO: 223234 - DNA, 15 bp, Homo sapiens
ataacttggaggaca

SEQ ID NO: 223235 - DNA, 15 bp, Homo sapiens
aataacttggaggac

SEQ ID NO: 223236 - DNA, 15 bp, Homo sapiens
caataacttggagga

SEQ ID NO: 223237 - DNA, 15 bp, Homo sapiens
gcaataacttggagg

SEQ ID NO: 223238 - DNA, 15 bp, Homo sapiens
ggcaataacttggag

SEQ ID NO: 223239 - DNA, 15 bp, Homo sapiens
aggcaataacttgga

SEQ ID NO: 223240 - DNA, 15 bp, Homo sapiens
aaggcaataacttgg

SEQ ID NO: 223241 - DNA, 15 bp, Homo sapiens
caaggcaataacttg

SEQ ID NO: 223242 - DNA, 15 bp, Homo sapiens
ccaaggcaataactt

SEQ ID NO: 223243 - DNA, 15 bp, Homo sapiens
cccaaggcaataact

SEQ ID NO: 223244 - DNA, 15 bp, Homo sapiens
gcccaaggcaataac

SEQ ID NO: 223245 - DNA, 15 bp, Homo sapiens
tgcccaaggcaataa

SEQ ID NO: 223246 - DNA, 15 bp, Homo sapiens
ttgcccaaggcaata

SEQ ID NO: 223247 - DNA, 15 bp, Homo sapiens
gttgcccaaggcaat

SEQ ID NO: 223248 - DNA, 15 bp, Homo sapiens
agttgcccaaggcaa

SEQ ID NO: 223249 - DNA, 15 bp, Homo sapiens
cagttgcccaaggca

SEQ ID NO: 223250 - DNA, 15 bp, Homo sapiens
ccagttgcccaaggc

SEQ ID NO: 223251 - DNA, 15 bp, Homo sapiens
cccagttgcccaagg

SEQ ID NO: 223252 - DNA, 15 bp, Homo sapiens
gcccagttgcccaag

SEQ ID NO: 223253 - DNA, 15 bp, Homo sapiens
tgcccagttgcccaa

SEQ ID NO: 223254 - DNA, 15 bp, Homo sapiens
ctgcccagttgccca

SEQ ID NO: 223255 - DNA, 15 bp, Homo sapiens
tctgcccagttgccc

SEQ ID NO: 223256 - DNA, 15 bp, Homo sapiens
atctgcccagttgcc

SEQ ID NO: 223257 - DNA, 15 bp, Homo sapiens
aatctgcccagttgc

SEQ ID NO: 223258 - DNA, 15 bp, Homo sapiens
taatctgcccagttg

SEQ ID NO: 223259 - DNA, 15 bp, Homo sapiens
ataatctgcccagtt

SEQ ID NO: 223260 - DNA, 15 bp, Homo sapiens
gataatctgcccagt

SEQ ID NO: 223261 - DNA, 15 bp, Homo sapiens
agataatctgcccag

SEQ ID NO: 223262 - DNA, 15 bp, Homo sapiens
cagataatctgccca

SEQ ID NO: 223263 - DNA, 15 bp, Homo sapiens
gcagataatctgccc

SEQ ID NO: 223264 - DNA, 15 bp, Homo sapiens
tgcagataatctgcc

SEQ ID NO: 223265 - DNA, 15 bp, Homo sapiens
atgcagataatctgc

SEQ ID NO: 223266 - DNA, 15 bp, Homo sapiens
gatgcagataatctg

SEQ ID NO: 223267 - DNA, 15 bp, Homo sapiens
agatgcagataatct

SEQ ID NO: 223268 - DNA, 15 bp, Homo sapiens
aagatgcagataatc

SEQ ID NO: 223269 - DNA, 15 bp, Homo sapiens
gaagatgcagataat

SEQ ID NO: 223270 - DNA, 15 bp, Homo sapiens
agaagatgcagataa

SEQ ID NO: 223271 - DNA, 15 bp, Homo sapiens
aagaagatgcagata

SEQ ID NO: 223272 - DNA, 15 bp, Homo sapiens
caagaagatgcagat

SEQ ID NO: 223273 - DNA, 15 bp, Homo sapiens
gcaagaagatgcaga

SEQ ID NO: 223274 - DNA, 15 bp, Homo sapiens
tgcaagaagatgcag

SEQ ID NO: 223275 - DNA, 15 bp, Homo sapiens
gtgcaagaagatgca

SEQ ID NO: 223276 - DNA, 15 bp, Homo sapiens
tgtgcaagaagatgc

SEQ ID NO: 223277 - DNA, 15 bp, Homo sapiens
ctgtgcaagaagatg

SEQ ID NO: 223278 - DNA, 15 bp, Homo sapiens
tctgtgcaagaagat

SEQ ID NO: 223279 - DNA, 15 bp, Homo sapiens
ctctgtgcaagaaga

SEQ ID NO: 223280 - DNA, 15 bp, Homo sapiens
actctgtgcaagaag

SEQ ID NO: 223281 - DNA, 15 bp, Homo sapiens
tactctgtgcaagaa

SEQ ID NO: 223282 - DNA, 15 bp, Homo sapiens
atactctgtgcaaga

SEQ ID NO: 223283 - DNA, 15 bp, Homo sapiens
catactctgtgcaag

SEQ ID NO: 223284 - DNA, 15 bp, Homo sapiens
ccatactctgtgcaa

SEQ ID NO: 223285 - DNA, 15 bp, Homo sapiens
tccatactctgtgca

SEQ ID NO: 223286 - DNA, 15 bp, Homo sapiens
atccatactctgtgc

SEQ ID NO: 223287 - DNA, 15 bp, Homo sapiens
aatccatactctgtg

SEQ ID NO: 223288 - DNA, 15 bp, Homo sapiens
aaatccatactctgt

SEQ ID NO: 223289 - DNA, 15 bp, Homo sapiens
aaaatccatactctg

SEQ ID NO: 223290 - DNA, 15 bp, Homo sapiens
gaaaatccatactct

SEQ ID NO: 223291 - DNA, 15 bp, Homo sapiens
tgaaaatccatactc

SEQ ID NO: 223292 - DNA, 15 bp, Homo sapiens
ttgaaaatccatact

SEQ ID NO: 223293 - DNA, 15 bp, Homo sapiens
cttgaaaatccatac

SEQ ID NO: 223294 - DNA, 15 bp, Homo sapiens
ccttgaaaatccata

SEQ ID NO: 223295 - DNA, 15 bp, Homo sapiens
gccttgaaaatccat

SEQ ID NO: 223296 - DNA, 15 bp, Homo sapiens
agccttgaaaatcca

SEQ ID NO: 223297 - DNA, 15 bp, Homo sapiens
gagccttgaaaatcc

SEQ ID NO: 223298 - DNA, 15 bp, Homo sapiens
tgagccttgaaaatc

SEQ ID NO: 223299 - DNA, 15 bp, Homo sapiens
ctgagccttgaaaat

SEQ ID NO: 223300 - DNA, 15 bp, Homo sapiens
gctgagccttgaaaa

SEQ ID NO: 223301 - DNA, 15 bp, Homo sapiens
agctgagccttgaaa

SEQ ID NO: 223302 - DNA, 15 bp, Homo sapiens
gagctgagccttgaa

SEQ ID NO: 223303 - DNA, 15 bp, Homo sapiens
tgagctgagccttga

SEQ ID NO: 223304 - DNA, 15 bp, Homo sapiens
atgagctgagccttg

SEQ ID NO: 223305 - DNA, 15 bp, Homo sapiens
gatgagctgagcctt

SEQ ID NO: 223306 - DNA, 15 bp, Homo sapiens
ggatgagctgagcct

SEQ ID NO: 223307 - DNA, 15 bp, Homo sapiens
aggatgagctgagcc

SEQ ID NO: 223308 - DNA, 15 bp, Homo sapiens
aaggatgagctgagc

SEQ ID NO: 223309 - DNA, 15 bp, Homo sapiens
caaggatgagctgag

SEQ ID NO: 223310 - DNA, 15 bp, Homo sapiens
tcaaggatgagctga

SEQ ID NO: 223311 - DNA, 15 bp, Homo sapiens
gtcaaggatgagctg

SEQ ID NO: 223312 - DNA, 15 bp, Homo sapiens
agtcaaggatgagct

SEQ ID NO: 223313 - DNA, 15 bp, Homo sapiens
tagtcaaggatgagc

SEQ ID NO: 223314 - DNA, 15 bp, Homo sapiens
ttagtcaaggatgag

SEQ ID NO: 223315 - DNA, 15 bp, Homo sapiens
cttagtcaaggatga

SEQ ID NO: 223316 - DNA, 15 bp, Homo sapiens
tcttagtcaaggatg

SEQ ID NO: 223317 - DNA, 15 bp, Homo sapiens
atcttagtcaaggat

SEQ ID NO: 223318 - DNA, 15 bp, Homo sapiens
aatcttagtcaagga

SEQ ID NO: 223319 - DNA, 15 bp, Homo sapiens
caatcttagtcaagg

SEQ ID NO: 223320 - DNA, 15 bp, Homo sapiens
tcaatcttagtcaag

SEQ ID NO: 223321 - DNA, 15 bp, Homo sapiens
ctcaatcttagtcaa

SEQ ID NO: 223322 - DNA, 15 bp, Homo sapiens
cctcaatcttagtca

SEQ ID NO: 223323 - DNA, 15 bp, Homo sapiens
acctcaatcttagtc

SEQ ID NO: 223324 - DNA, 15 bp, Homo sapiens
cacctcaatcttagt

SEQ ID NO: 223325 - DNA, 15 bp, Homo sapiens
tcacctcaatcttag

SEQ ID NO: 223326 - DNA, 15 bp, Homo sapiens
gtcacctcaatctta

SEQ ID NO: 223327 - DNA, 15 bp, Homo sapiens
agtcacctcaatctt

SEQ ID NO: 223328 - DNA, 15 bp, Homo sapiens
aagtcacctcaatct

SEQ ID NO: 223329 - DNA, 15 bp, Homo sapiens
gaagtcacctcaatc

SEQ ID NO: 223330 - DNA, 15 bp, Homo sapiens
agaagtcacctcaat

SEQ ID NO: 223331 - DNA, 15 bp, Homo sapiens
tagaagtcacctcaa

SEQ ID NO: 223332 - DNA, 15 bp, Homo sapiens
ctagaagtcacctca

SEQ ID NO: 223333 - DNA, 15 bp, Homo sapiens
cctagaagtcacctc

SEQ ID NO: 223334 - DNA, 15 bp, Homo sapiens
ccctagaagtcacct

SEQ ID NO: 223335 - DNA, 15 bp, Homo sapiens
gccctagaagtcacc

SEQ ID NO: 223336 - DNA, 15 bp, Homo sapiens
cgccctagaagtcac

SEQ ID NO: 223337 - DNA, 15 bp, Homo sapiens
ccgccctagaagtca

SEQ ID NO: 223338 - DNA, 15 bp, Homo sapiens
gccgccctagaagtc

SEQ ID NO: 223339 - DNA, 15 bp, Homo sapiens
agccgccctagaagt

SEQ ID NO: 223340 - DNA, 15 bp, Homo sapiens
cagccgccctagaag

SEQ ID NO: 223341 - DNA, 15 bp, Homo sapiens
tcagccgccctagaa

SEQ ID NO: 223342 - DNA, 15 bp, Homo sapiens
gtcagccgccctaga

SEQ ID NO: 223343 - DNA, 15 bp, Homo sapiens
ggtcagccgccctag

SEQ ID NO: 223344 - DNA, 15 bp, Homo sapiens
cggtcagccgcccta

SEQ ID NO: 223345 - DNA, 15 bp, Homo sapiens
ccggtcagccgccct

SEQ ID NO: 223346 - DNA, 15 bp, Homo sapiens
cccggtcagccgccc

SEQ ID NO: 223347 - DNA, 15 bp, Homo sapiens
ccccggtcagccgcc

SEQ ID NO: 223348 - DNA, 15 bp, Homo sapiens
gccccggtcagccgc

SEQ ID NO: 223349 - DNA, 15 bp, Homo sapiens
ggccccggtcagccg

SEQ ID NO: 223350 - DNA, 15 bp, Homo sapiens
aggccccggtcagcc

SEQ ID NO: 223351 - DNA, 15 bp, Homo sapiens
aaggccccggtcagc

SEQ ID NO: 223352 - DNA, 15 bp, Homo sapiens
caaggccccggtcag

SEQ ID NO: 223353 - DNA, 15 bp, Homo sapiens
tcaaggccccggtca

SEQ ID NO: 223354 - DNA, 15 bp, Homo sapiens
ctcaaggccccggtc

SEQ ID NO: 223355 - DNA, 15 bp, Homo sapiens
tctcaaggccccggt

SEQ ID NO: 223356 - DNA, 15 bp, Homo sapiens
ttctcaaggccccgg

SEQ ID NO: 223357 - DNA, 15 bp, Homo sapiens
attctcaaggccccg

SEQ ID NO: 223358 - DNA, 15 bp, Homo sapiens
gattctcaaggcccc

SEQ ID NO: 223359 - DNA, 15 bp, Homo sapiens
agattctcaaggccc

SEQ ID NO: 223360 - DNA, 15 bp, Homo sapiens
gagattctcaaggcc

SEQ ID NO: 223361 - DNA, 15 bp, Homo sapiens
ggagattctcaaggc

SEQ ID NO: 223362 - DNA, 15 bp, Homo sapiens
gggagattctcaagg

SEQ ID NO: 223363 - DNA, 15 bp, Homo sapiens
agggagattctcaag

SEQ ID NO: 223364 - DNA, 15 bp, Homo sapiens
cagggagattctcaa

SEQ ID NO: 223365 - DNA, 15 bp, Homo sapiens
ccagggagattctca

SEQ ID NO: 223366 - DNA, 15 bp, Homo sapiens
cccagggagattctc

SEQ ID NO: 223367 - DNA, 15 bp, Homo sapiens
gcccagggagattct

SEQ ID NO: 223368 - DNA, 15 bp, Homo sapiens
ggcccagggagattc

SEQ ID NO: 223369 - DNA, 15 bp, Homo sapiens
gggcccagggagatt

SEQ ID NO: 223370 - DNA, 15 bp, Homo sapiens
agggcccagggagat

SEQ ID NO: 223371 - DNA, 15 bp, Homo sapiens
aagggcccagggaga

SEQ ID NO: 223372 - DNA, 15 bp, Homo sapiens
aaagggcccagggag

SEQ ID NO: 223373 - DNA, 15 bp, Homo sapiens
gaaagggcccaggga

SEQ ID NO: 223374 - DNA, 15 bp, Homo sapiens
tgaaagggcccaggg

SEQ ID NO: 223375 - DNA, 15 bp, Homo sapiens
atgaaagggcccagg

SEQ ID NO: 223376 - DNA, 15 bp, Homo sapiens
aatgaaagggcccag

SEQ ID NO: 223377 - DNA, 15 bp, Homo sapiens
gaatgaaagggccca

SEQ ID NO: 223378 - DNA, 15 bp, Homo sapiens
tgaatgaaagggccc

SEQ ID NO: 223379 - DNA, 15 bp, Homo sapiens
atgaatgaaagggcc

SEQ ID NO: 223380 - DNA, 15 bp, Homo sapiens
aatgaatgaaagggc

SEQ ID NO: 223381 - DNA, 15 bp, Homo sapiens
aaatgaatgaaaggg

SEQ ID NO: 223382 - DNA, 15 bp, Homo sapiens
gaaatgaatgaaagg

SEQ ID NO: 223383 - DNA, 15 bp, Homo sapiens
agaaatgaatgaaag

SEQ ID NO: 223384 - DNA, 15 bp, Homo sapiens
gagaaatgaatgaaa

SEQ ID NO: 223385 - DNA, 15 bp, Homo sapiens
agagaaatgaatgaa

SEQ ID NO: 223386 - DNA, 15 bp, Homo sapiens
aagagaaatgaatga

SEQ ID NO: 223387 - DNA, 15 bp, Homo sapiens
gaagagaaatgaatg

SEQ ID NO: 223388 - DNA, 15 bp, Homo sapiens
tgaagagaaatgaat

SEQ ID NO: 223389 - DNA, 15 bp, Homo sapiens
atgaagagaaatgaa

SEQ ID NO: 223390 - DNA, 15 bp, Homo sapiens
catgaagagaaatga

SEQ ID NO: 223391 - DNA, 15 bp, Homo sapiens
ccatgaagagaaatg

SEQ ID NO: 223392 - DNA, 15 bp, Homo sapiens
cccatgaagagaaat

SEQ ID NO: 223393 - DNA, 15 bp, Homo sapiens
gcccatgaagagaaa

SEQ ID NO: 223394 - DNA, 15 bp, Homo sapiens
agcccatgaagagaa

SEQ ID NO: 223395 - DNA, 15 bp, Homo sapiens
gagcccatgaagaga

SEQ ID NO: 223396 - DNA, 15 bp, Homo sapiens
agagcccatgaagag

SEQ ID NO: 223397 - DNA, 15 bp, Homo sapiens
aagagcccatgaaga

SEQ ID NO: 223398 - DNA, 15 bp, Homo sapiens
aaagagcccatgaag

SEQ ID NO: 223399 - DNA, 15 bp, Homo sapiens
aaaagagcccatgaa

SEQ ID NO: 223400 - DNA, 15 bp, Homo sapiens
caaaagagcccatga

SEQ ID NO: 223401 - DNA, 15 bp, Homo sapiens
ccaaaagagcccatg

SEQ ID NO: 223402 - DNA, 15 bp, Homo sapiens
cccaaaagagcccat

SEQ ID NO: 223403 - DNA, 15 bp, Homo sapiens
ccccaaaagagccca

SEQ ID NO: 223404 - DNA, 15 bp, Homo sapiens
accccaaaagagccc

SEQ ID NO: 223405 - DNA, 15 bp, Homo sapiens
caccccaaaagagcc

SEQ ID NO: 223406 - DNA, 15 bp, Homo sapiens
ccaccccaaaagagc

SEQ ID NO: 223407 - DNA, 15 bp, Homo sapiens
cccaccccaaaagag

SEQ ID NO: 223408 - DNA, 15 bp, Homo sapiens
acccaccccaaaaga

SEQ ID NO: 223409 - DNA, 15 bp, Homo sapiens
cacccaccccaaaag

SEQ ID NO: 223410 - DNA, 15 bp, Homo sapiens
gcacccaccccaaaa

SEQ ID NO: 223411 - DNA, 15 bp, Homo sapiens
ggcacccaccccaaa

SEQ ID NO: 223412 - DNA, 15 bp, Homo sapiens
tggcacccaccccaa

SEQ ID NO: 223413 - DNA, 15 bp, Homo sapiens
ttggcacccacccca

SEQ ID NO: 223414 - DNA, 15 bp, Homo sapiens
cttggcacccacccc

SEQ ID NO: 223415 - DNA, 15 bp, Homo sapiens
ccttggcacccaccc

SEQ ID NO: 223416 - DNA, 15 bp, Homo sapiens
tccttggcacccacc

SEQ ID NO: 223417 - DNA, 15 bp, Homo sapiens
atccttggcacccac

SEQ ID NO: 223418 - DNA, 15 bp, Homo sapiens
gatccttggcaccca

SEQ ID NO: 223419 - DNA, 15 bp, Homo sapiens
agatccttggcaccc

SEQ ID NO: 223420 - DNA, 15 bp, Homo sapiens
cagatccttggcacc

SEQ ID NO: 223421 - DNA, 15 bp, Homo sapiens
ccagatccttggcac

SEQ ID NO: 223422 - DNA, 15 bp, Homo sapiens
cccagatccttggca

SEQ ID NO: 223423 - DNA, 15 bp, Homo sapiens
acccagatccttggc

SEQ ID NO: 223424 - DNA, 15 bp, Homo sapiens
tacccagatccttgg

SEQ ID NO: 223425 - DNA, 15 bp, Homo sapiens
gtacccagatccttg

SEQ ID NO: 223426 - DNA, 15 bp, Homo sapiens
tgtacccagatcctt

SEQ ID NO: 223427 - DNA, 15 bp, Homo sapiens
ctgtacccagatcct

SEQ ID NO: 223428 - DNA, 15 bp, Homo sapiens
gctgtacccagatcc

SEQ ID NO: 223429 - DNA, 15 bp, Homo sapiens
agctgtacccagatc

SEQ ID NO: 223430 - DNA, 15 bp, Homo sapiens
aagctgtacccagat

SEQ ID NO: 223431 - DNA, 15 bp, Homo sapiens
gaagctgtacccaga

SEQ ID NO: 223432 - DNA, 15 bp, Homo sapiens
ggaagctgtacccag

SEQ ID NO: 223433 - DNA, 15 bp, Homo sapiens
gggaagctgtaccca

SEQ ID NO: 223434 - DNA, 15 bp, Homo sapiens
agggaagctgtaccc

SEQ ID NO: 223435 - DNA, 15 bp, Homo sapiens
tagggaagctgtacc

SEQ ID NO: 223436 - DNA, 15 bp, Homo sapiens
ttagggaagctgtac

SEQ ID NO: 223437 - DNA, 15 bp, Homo sapiens
gttagggaagctgta

SEQ ID NO: 223438 - DNA, 15 bp, Homo sapiens
agttagggaagctgt

SEQ ID NO: 223439 - DNA, 15 bp, Homo sapiens
gagttagggaagctg

SEQ ID NO: 223440 - DNA, 15 bp, Homo sapiens
ggagttagggaagct

SEQ ID NO: 223441 - DNA, 15 bp, Homo sapiens
gggagttagggaagc

SEQ ID NO: 223442 - DNA, 15 bp, Homo sapiens
tgggagttagggaag

SEQ ID NO: 223443 - DNA, 15 bp, Homo sapiens
ttgggagttagggaa

SEQ ID NO: 223444 - DNA, 15 bp, Homo sapiens
cttgggagttaggga

SEQ ID NO: 223445 - DNA, 15 bp, Homo sapiens
gcttgggagttaggg

SEQ ID NO: 223446 - DNA, 15 bp, Homo sapiens
agcttgggagttagg

SEQ ID NO: 223447 - DNA, 15 bp, Homo sapiens
aagcttgggagttag

SEQ ID NO: 223448 - DNA, 15 bp, Homo sapiens
caagcttgggagtta

SEQ ID NO: 223449 - DNA, 15 bp, Homo sapiens
ccaagcttgggagtt

SEQ ID NO: 223450 - DNA, 15 bp, Homo sapiens
tccaagcttgggagt

SEQ ID NO: 223451 - DNA, 15 bp, Homo sapiens
ctccaagcttgggag

SEQ ID NO: 223452 - DNA, 15 bp, Homo sapiens
tctccaagcttggga

SEQ ID NO: 223453 - DNA, 15 bp, Homo sapiens
ctctccaagcttggg

SEQ ID NO: 223454 - DNA, 15 bp, Homo sapiens
cctctccaagcttgg

SEQ ID NO: 223455 - DNA, 15 bp, Homo sapiens
gcctctccaagcttg

SEQ ID NO: 223456 - DNA, 15 bp, Homo sapiens
ggcctctccaagctt

SEQ ID NO: 223457 - DNA, 15 bp, Homo sapiens
tggcctctccaagct

SEQ ID NO: 223458 - DNA, 15 bp, Homo sapiens
gtggcctctccaagc

SEQ ID NO: 223459 - DNA, 15 bp, Homo sapiens
agtggcctctccaag

SEQ ID NO: 223460 - DNA, 15 bp, Homo sapiens
gagtggcctctccaa

SEQ ID NO: 223461 - DNA, 15 bp, Homo sapiens
agagtggcctctcca

SEQ ID NO: 223462 - DNA, 15 bp, Homo sapiens
tagagtggcctctcc

SEQ ID NO: 223463 - DNA, 15 bp, Homo sapiens
ctagagtggcctctc

SEQ ID NO: 223464 - DNA, 15 bp, Homo sapiens
gctagagtggcctct

SEQ ID NO: 223465 - DNA, 15 bp, Homo sapiens
agctagagtggcctc

SEQ ID NO: 223466 - DNA, 15 bp, Homo sapiens
gagctagagtggcct

SEQ ID NO: 223467 - DNA, 15 bp, Homo sapiens
agagctagagtggcc

SEQ ID NO: 223468 - DNA, 15 bp, Homo sapiens
aagagctagagtggc

SEQ ID NO: 223469 - DNA, 15 bp, Homo sapiens
caagagctagagtgg

SEQ ID NO: 223470 - DNA, 15 bp, Homo sapiens
ccaagagctagagtg

SEQ ID NO: 223471 - DNA, 15 bp, Homo sapiens
tccaagagctagagt

SEQ ID NO: 223472 - DNA, 15 bp, Homo sapiens
gtccaagagctagag

SEQ ID NO: 223473 - DNA, 15 bp, Homo sapiens
agtccaagagctaga

SEQ ID NO: 223474 - DNA, 15 bp, Homo sapiens
cagtccaagagctag

SEQ ID NO: 223475 - DNA, 15 bp, Homo sapiens
ccagtccaagagcta

SEQ ID NO: 223476 - DNA, 15 bp, Homo sapiens
gccagtccaagagct

SEQ ID NO: 223477 - DNA, 15 bp, Homo sapiens
tgccagtccaagagc

SEQ ID NO: 223478 - DNA, 15 bp, Homo sapiens
atgccagtccaagag

SEQ ID NO: 223479 - DNA, 15 bp, Homo sapiens
gatgccagtccaaga

SEQ ID NO: 223480 - DNA, 15 bp, Homo sapiens
agatgccagtccaag

SEQ ID NO: 223481 - DNA, 15 bp, Homo sapiens
cagatgccagtccaa

SEQ ID NO: 223482 - DNA, 15 bp, Homo sapiens
ccagatgccagtcca

SEQ ID NO: 223483 - DNA, 15 bp, Homo sapiens
cccagatgccagtcc

SEQ ID NO: 223484 - DNA, 15 bp, Homo sapiens
gcccagatgccagtc

SEQ ID NO: 223485 - DNA, 15 bp, Homo sapiens
ggcccagatgccagt

SEQ ID NO: 223486 - DNA, 15 bp, Homo sapiens
tggcccagatgccag

SEQ ID NO: 223487 - DNA, 15 bp, Homo sapiens
ctggcccagatgcca

SEQ ID NO: 223488 - DNA, 15 bp, Homo sapiens
tctggcccagatgcc

SEQ ID NO: 223489 - DNA, 15 bp, Homo sapiens
ttctggcccagatgc

SEQ ID NO: 223490 - DNA, 15 bp, Homo sapiens
cttctggcccagatg

SEQ ID NO: 223491 - DNA, 15 bp, Homo sapiens
gcttctggcccagat

SEQ ID NO: 223492 - DNA, 15 bp, Homo sapiens
agcttctggcccaga

SEQ ID NO: 223493 - DNA, 15 bp, Homo sapiens
tagcttctggcccag

SEQ ID NO: 223494 - DNA, 15 bp, Homo sapiens
gtagcttctggccca

SEQ ID NO: 223495 - DNA, 15 bp, Homo sapiens
ggtagcttctggccc

SEQ ID NO: 223496 - DNA, 15 bp, Homo sapiens
tggtagcttctggcc

SEQ ID NO: 223497 - DNA, 15 bp, Homo sapiens
ctggtagcttctggc

SEQ ID NO: 223498 - DNA, 15 bp, Homo sapiens
gctggtagcttctgg

SEQ ID NO: 223499 - DNA, 15 bp, Homo sapiens
agctggtagcttctg

SEQ ID NO: 223500 - DNA, 15 bp, Homo sapiens
tagctggtagcttct

SEQ ID NO: 223501 - DNA, 15 bp, Homo sapiens
ctagctggtagcttc

SEQ ID NO: 223502 - DNA, 15 bp, Homo sapiens
cctagctggtagctt

SEQ ID NO: 223503 - DNA, 15 bp, Homo sapiens
gcctagctggtagct

SEQ ID NO: 223504 - DNA, 15 bp, Homo sapiens
tgcctagctggtagc

SEQ ID NO: 223505 - DNA, 15 bp, Homo sapiens
ttgcctagctggtag

SEQ ID NO: 223506 - DNA, 15 bp, Homo sapiens
gttgcctagctggta

SEQ ID NO: 223507 - DNA, 15 bp, Homo sapiens
ggttgcctagctggt

SEQ ID NO: 223508 - DNA, 15 bp, Homo sapiens
gggttgcctagctgg

SEQ ID NO: 223509 - DNA, 15 bp, Homo sapiens
tgggttgcctagctg

SEQ ID NO: 223510 - DNA, 15 bp, Homo sapiens
atgggttgcctagct

SEQ ID NO: 223511 - DNA, 15 bp, Homo sapiens
tatgggttgcctagc

SEQ ID NO: 223512 - DNA, 15 bp, Homo sapiens
atatgggttgcctag

SEQ ID NO: 223513 - DNA, 15 bp, Homo sapiens
aatatgggttgccta

SEQ ID NO: 223514 - DNA, 15 bp, Homo sapiens
aaatatgggttgcct

SEQ ID NO: 223515 - DNA, 15 bp, Homo sapiens
caaatatgggttgcc

SEQ ID NO: 223516 - DNA, 15 bp, Homo sapiens
gcaaatatgggttgc

SEQ ID NO: 223517 - DNA, 15 bp, Homo sapiens
agcaaatatgggttg

SEQ ID NO: 223518 - DNA, 15 bp, Homo sapiens
cagcaaatatgggtt

SEQ ID NO: 223519 - DNA, 15 bp, Homo sapiens
ccagcaaatatgggt

SEQ ID NO: 223520 - DNA, 15 bp, Homo sapiens
cccagcaaatatggg

SEQ ID NO: 223521 - DNA, 15 bp, Homo sapiens
gcccagcaaatatgg

SEQ ID NO: 223522 - DNA, 15 bp, Homo sapiens
tgcccagcaaatatg

SEQ ID NO: 223523 - DNA, 15 bp, Homo sapiens
atgcccagcaaatat

SEQ ID NO: 223524 - DNA, 15 bp, Homo sapiens
gatgcccagcaaata

SEQ ID NO: 223525 - DNA, 15 bp, Homo sapiens
agatgcccagcaaat

SEQ ID NO: 223526 - DNA, 15 bp, Homo sapiens
tagatgcccagcaaa

SEQ ID NO: 223527 - DNA, 15 bp, Homo sapiens
ttagatgcccagcaa

SEQ ID NO: 223528 - DNA, 15 bp, Homo sapiens
attagatgcccagca

SEQ ID NO: 223529 - DNA, 15 bp, Homo sapiens
tattagatgcccagc

SEQ ID NO: 223530 - DNA, 15 bp, Homo sapiens
ctattagatgcccag

SEQ ID NO: 223531 - DNA, 15 bp, Homo sapiens
gctattagatgccca

SEQ ID NO: 223532 - DNA, 15 bp, Homo sapiens
ggctattagatgccc

SEQ ID NO: 223533 - DNA, 15 bp, Homo sapiens
gggctattagatgcc

SEQ ID NO: 223534 - DNA, 15 bp, Homo sapiens
ggggctattagatgc

SEQ ID NO: 223535 - DNA, 15 bp, Homo sapiens
aggggctattagatg

SEQ ID NO: 223536 - DNA, 15 bp, Homo sapiens
gaggggctattagat

SEQ ID NO: 223537 - DNA, 15 bp, Homo sapiens
tgaggggctattaga

SEQ ID NO: 223538 - DNA, 15 bp, Homo sapiens
ctgaggggctattag

SEQ ID NO: 223539 - DNA, 15 bp, Homo sapiens
tctgaggggctatta

SEQ ID NO: 223540 - DNA, 15 bp, Homo sapiens
atctgaggggctatt

SEQ ID NO: 223541 - DNA, 15 bp, Homo sapiens
catctgaggggctat

SEQ ID NO: 223542 - DNA, 15 bp, Homo sapiens
ccatctgaggggcta

SEQ ID NO: 223543 - DNA, 15 bp, Homo sapiens
accatctgaggggct

SEQ ID NO: 223544 - DNA, 15 bp, Homo sapiens
caccatctgaggggc

SEQ ID NO: 223545 - DNA, 15 bp, Homo sapiens
tcaccatctgagggg

SEQ ID NO: 223546 - DNA, 15 bp, Homo sapiens
ttcaccatctgaggg

SEQ ID NO: 223547 - DNA, 15 bp, Homo sapiens
tttcaccatctgagg

SEQ ID NO: 223548 - DNA, 15 bp, Homo sapiens
ctttcaccatctgag

SEQ ID NO: 223549 - DNA, 15 bp, Homo sapiens
cctttcaccatctga

SEQ ID NO: 223550 - DNA, 15 bp, Homo sapiens
gcctttcaccatctg

SEQ ID NO: 223551 - DNA, 15 bp, Homo sapiens
agcctttcaccatct

SEQ ID NO: 223552 - DNA, 15 bp, Homo sapiens
cagcctttcaccatc

SEQ ID NO: 223553 - DNA, 15 bp, Homo sapiens
ccagcctttcaccat

SEQ ID NO: 223554 - DNA, 15 bp, Homo sapiens
accagcctttcacca

SEQ ID NO: 223555 - DNA, 15 bp, Homo sapiens
gaccagcctttcacc

SEQ ID NO: 223556 - DNA, 15 bp, Homo sapiens
agaccagcctttcac

SEQ ID NO: 223557 - DNA, 15 bp, Homo sapiens
aagaccagcctttca

SEQ ID NO: 223558 - DNA, 15 bp, Homo sapiens
aaagaccagcctttc

SEQ ID NO: 223559 - DNA, 15 bp, Homo sapiens
caaagaccagccttt

SEQ ID NO: 223560 - DNA, 15 bp, Homo sapiens
ccaaagaccagcctt

SEQ ID NO: 223561 - DNA, 15 bp, Homo sapiens
gccaaagaccagcct

SEQ ID NO: 223562 - DNA, 15 bp, Homo sapiens
ggccaaagaccagcc

SEQ ID NO: 223563 - DNA, 15 bp, Homo sapiens
aggccaaagaccagc

SEQ ID NO: 223564 - DNA, 15 bp, Homo sapiens
caggccaaagaccag

SEQ ID NO: 223565 - DNA, 15 bp, Homo sapiens
ccaggccaaagacca

SEQ ID NO: 223566 - DNA, 15 bp, Homo sapiens
tccaggccaaagacc

SEQ ID NO: 223567 - DNA, 15 bp, Homo sapiens
atccaggccaaagac

SEQ ID NO: 223568 - DNA, 15 bp, Homo sapiens
catccaggccaaaga

SEQ ID NO: 223569 - DNA, 15 bp, Homo sapiens
ccatccaggccaaag

SEQ ID NO: 223570 - DNA, 15 bp, Homo sapiens
gccatccaggccaaa

SEQ ID NO: 223571 - DNA, 15 bp, Homo sapiens
agccatccaggccaa

SEQ ID NO: 223572 - DNA, 15 bp, Homo sapiens
aagccatccaggcca

SEQ ID NO: 223573 - DNA, 15 bp, Homo sapiens
taagccatccaggcc

SEQ ID NO: 223574 - DNA, 15 bp, Homo sapiens
ataagccatccaggc

SEQ ID NO: 223575 - DNA, 15 bp, Homo sapiens
gataagccatccagg

SEQ ID NO: 223576 - DNA, 15 bp, Homo sapiens
agataagccatccag

SEQ ID NO: 223577 - DNA, 15 bp, Homo sapiens
cagataagccatcca

SEQ ID NO: 223578 - DNA, 15 bp, Homo sapiens
acagataagccatcc

SEQ ID NO: 223579 - DNA, 15 bp, Homo sapiens
aacagataagccatc

SEQ ID NO: 223580 - DNA, 15 bp, Homo sapiens
aaacagataagccat

SEQ ID NO: 223581 - DNA, 15 bp, Homo sapiens
gaaacagataagcca

SEQ ID NO: 223582 - DNA, 15 bp, Homo sapiens
ggaaacagataagcc

SEQ ID NO: 223583 - DNA, 15 bp, Homo sapiens
aggaaacagataagc

SEQ ID NO: 223584 - DNA, 15 bp, Homo sapiens
gaggaaacagataag

SEQ ID NO: 223585 - DNA, 15 bp, Homo sapiens
tgaggaaacagataa

SEQ ID NO: 223586 - DNA, 15 bp, Homo sapiens
ctgaggaaacagata

SEQ ID NO: 223587 - DNA, 15 bp, Homo sapiens
tctgaggaaacagat

SEQ ID NO: 223588 - DNA, 15 bp, Homo sapiens
gtctgaggaaacaga

SEQ ID NO: 223589 - DNA, 15 bp, Homo sapiens
tgtctgaggaaacag

SEQ ID NO: 223590 - DNA, 15 bp, Homo sapiens
ctgtctgaggaaaca

SEQ ID NO: 223591 - DNA, 15 bp, Homo sapiens
gctgtctgaggaaac

SEQ ID NO: 223592 - DNA, 15 bp, Homo sapiens
agctgtctgaggaaa

SEQ ID NO: 223593 - DNA, 15 bp, Homo sapiens
gagctgtctgaggaa

SEQ ID NO: 223594 - DNA, 15 bp, Homo sapiens
ggagctgtctgagga

SEQ ID NO: 223595 - DNA, 15 bp, Homo sapiens
tggagctgtctgagg

SEQ ID NO: 223596 - DNA, 15 bp, Homo sapiens
ctggagctgtctgag

SEQ ID NO: 223597 - DNA, 15 bp, Homo sapiens
tctggagctgtctga

SEQ ID NO: 223598 - DNA, 15 bp, Homo sapiens
gtctggagctgtctg

SEQ ID NO: 223599 - DNA, 15 bp, Homo sapiens
agtctggagctgtct

SEQ ID NO: 223600 - DNA, 15 bp, Homo sapiens
cagtctggagctgtc

SEQ ID NO: 223601 - DNA, 15 bp, Homo sapiens
tcagtctggagctgt

SEQ ID NO: 223602 - DNA, 15 bp, Homo sapiens
ttcagtctggagctg

SEQ ID NO: 223603 - DNA, 15 bp, Homo sapiens
cttcagtctggagct

SEQ ID NO: 223604 - DNA, 15 bp, Homo sapiens
ccttcagtctggagc

SEQ ID NO: 223605 - DNA, 15 bp, Homo sapiens
cccttcagtctggag

SEQ ID NO: 223606 - DNA, 15 bp, Homo sapiens
tcccttcagtctgga

SEQ ID NO: 223607 - DNA, 15 bp, Homo sapiens
gtcccttcagtctgg

SEQ ID NO: 223608 - DNA, 15 bp, Homo sapiens
agtcccttcagtctg

SEQ ID NO: 223609 - DNA, 15 bp, Homo sapiens
aagtcccttcagtct

SEQ ID NO: 223610 - DNA, 15 bp, Homo sapiens
gaagtcccttcagtc

SEQ ID NO: 223611 - DNA, 15 bp, Homo sapiens
tgaagtcccttcagt

SEQ ID NO: 223612 - DNA, 15 bp, Homo sapiens
atgaagtcccttcag

SEQ ID NO: 223613 - DNA, 15 bp, Homo sapiens
tatgaagtcccttca

SEQ ID NO: 223614 - DNA, 15 bp, Homo sapiens
ctatgaagtcccttc

SEQ ID NO: 223615 - DNA, 15 bp, Homo sapiens
cctatgaagtccctt

SEQ ID NO: 223616 - DNA, 15 bp, Homo sapiens
gcctatgaagtccct

SEQ ID NO: 223617 - DNA, 15 bp, Homo sapiens
tgcctatgaagtccc

SEQ ID NO: 223618 - DNA, 15 bp, Homo sapiens
ctgcctatgaagtcc

SEQ ID NO: 223619 - DNA, 15 bp, Homo sapiens
actgcctatgaagtc

SEQ ID NO: 223620 - DNA, 15 bp, Homo sapiens
cactgcctatgaagt

SEQ ID NO: 223621 - DNA, 15 bp, Homo sapiens
tcactgcctatgaag

SEQ ID NO: 223622 - DNA, 15 bp, Homo sapiens
gtcactgcctatgaa

SEQ ID NO: 223623 - DNA, 15 bp, Homo sapiens
agtcactgcctatga

SEQ ID NO: 223624 - DNA, 15 bp, Homo sapiens
gagtcactgcctatg

SEQ ID NO: 223625 - DNA, 15 bp, Homo sapiens
agagtcactgcctat

SEQ ID NO: 223626 - DNA, 15 bp, Homo sapiens
cagagtcactgccta

SEQ ID NO: 223627 - DNA, 15 bp, Homo sapiens
acagagtcactgcct

SEQ ID NO: 223628 - DNA, 15 bp, Homo sapiens
aacagagtcactgcc

SEQ ID NO: 223629 - DNA, 15 bp, Homo sapiens
aaacagagtcactgc

SEQ ID NO: 223630 - DNA, 15 bp, Homo sapiens
taaacagagtcactg

SEQ ID NO: 223631 - DNA, 15 bp, Homo sapiens
ctaaacagagtcact

SEQ ID NO: 223632 - DNA, 15 bp, Homo sapiens
actaaacagagtcac

SEQ ID NO: 223633 - DNA, 15 bp, Homo sapiens
aactaaacagagtca

SEQ ID NO: 223634 - DNA, 15 bp, Homo sapiens
aaactaaacagagtc

SEQ ID NO: 223635 - DNA, 15 bp, Homo sapiens
gaaactaaacagagt

SEQ ID NO: 223636 - DNA, 15 bp, Homo sapiens
tgaaactaaacagag

SEQ ID NO: 223637 - DNA, 15 bp, Homo sapiens
gtgaaactaaacaga

SEQ ID NO: 223638 - DNA, 15 bp, Homo sapiens
agtgaaactaaacag

SEQ ID NO: 223639 - DNA, 15 bp, Homo sapiens
cagtgaaactaaaca

SEQ ID NO: 223640 - DNA, 15 bp, Homo sapiens
ccagtgaaactaaac

SEQ ID NO: 223641 - DNA, 15 bp, Homo sapiens
accagtgaaactaaa

SEQ ID NO: 223642 - DNA, 15 bp, Homo sapiens
caccagtgaaactaa

SEQ ID NO: 223643 - DNA, 15 bp, Homo sapiens
ccaccagtgaaacta

SEQ ID NO: 223644 - DNA, 15 bp, Homo sapiens
accaccagtgaaact

SEQ ID NO: 223645 - DNA, 15 bp, Homo sapiens
gaccaccagtgaaac

SEQ ID NO: 223646 - DNA, 15 bp, Homo sapiens
ggaccaccagtgaaa

SEQ ID NO: 223647 - DNA, 15 bp, Homo sapiens
tggaccaccagtgaa

SEQ ID NO: 223648 - DNA, 15 bp, Homo sapiens
ttggaccaccagtga

SEQ ID NO: 223649 - DNA, 15 bp, Homo sapiens
cttggaccaccagtg

SEQ ID NO: 223650 - DNA, 15 bp, Homo sapiens
ccttggaccaccagt

SEQ ID NO: 223651 - DNA, 15 bp, Homo sapiens
cccttggaccaccag

SEQ ID NO: 223652 - DNA, 15 bp, Homo sapiens
gcccttggaccacca

SEQ ID NO: 223653 - DNA, 15 bp, Homo sapiens
ggcccttggaccacc

SEQ ID NO: 223654 - DNA, 15 bp, Homo sapiens
aggcccttggaccac

SEQ ID NO: 223655 - DNA, 15 bp, Homo sapiens
gaggcccttggacca

SEQ ID NO: 223656 - DNA, 15 bp, Homo sapiens
ggaggcccttggacc

SEQ ID NO: 223657 - DNA, 15 bp, Homo sapiens
aggaggcccttggac

SEQ ID NO: 223658 - DNA, 15 bp, Homo sapiens
aaggaggcccttgga

SEQ ID NO: 223659 - DNA, 15 bp, Homo sapiens
taaggaggcccttgg

SEQ ID NO: 223660 - DNA, 15 bp, Homo sapiens
ctaaggaggcccttg

SEQ ID NO: 223661 - DNA, 15 bp, Homo sapiens
gctaaggaggccctt

SEQ ID NO: 223662 - DNA, 15 bp, Homo sapiens
agctaaggaggccct

SEQ ID NO: 223663 - DNA, 15 bp, Homo sapiens
tagctaaggaggccc

SEQ ID NO: 223664 - DNA, 15 bp, Homo sapiens
ctagctaaggaggcc

SEQ ID NO: 223665 - DNA, 15 bp, Homo sapiens
cctagctaaggaggc

SEQ ID NO: 223666 - DNA, 15 bp, Homo sapiens
gcctagctaaggagg

SEQ ID NO: 223667 - DNA, 15 bp, Homo sapiens
ggcctagctaaggag

SEQ ID NO: 223668 - DNA, 15 bp, Homo sapiens
gggcctagctaagga

SEQ ID NO: 223669 - DNA, 15 bp, Homo sapiens
agggcctagctaagg

SEQ ID NO: 223670 - DNA, 15 bp, Homo sapiens
cagggcctagctaag

SEQ ID NO: 223671 - DNA, 15 bp, Homo sapiens
ccagggcctagctaa

SEQ ID NO: 223672 - DNA, 15 bp, Homo sapiens
cccagggcctagcta

SEQ ID NO: 223673 - DNA, 15 bp, Homo sapiens
ccccagggcctagct

SEQ ID NO: 223674 - DNA, 15 bp, Homo sapiens
cccccagggcctagc

SEQ ID NO: 223675 - DNA, 15 bp, Homo sapiens
tcccccagggcctag

SEQ ID NO: 223676 - DNA, 15 bp, Homo sapiens
ttcccccagggccta

SEQ ID NO: 223677 - DNA, 15 bp, Homo sapiens
attcccccagggcct

SEQ ID NO: 223678 - DNA, 15 bp, Homo sapiens
gattcccccagggcc

SEQ ID NO: 223679 - DNA, 15 bp, Homo sapiens
tgattcccccagggc

SEQ ID NO: 223680 - DNA, 15 bp, Homo sapiens
ctgattcccccaggg

SEQ ID NO: 223681 - DNA, 15 bp, Homo sapiens
cctgattcccccagg

SEQ ID NO: 223682 - DNA, 15 bp, Homo sapiens
ccctgattcccccag

SEQ ID NO: 223683 - DNA, 15 bp, Homo sapiens
cccctgattccccca

SEQ ID NO: 223684 - DNA, 15 bp, Homo sapiens
gcccctgattccccc

SEQ ID NO: 223685 - DNA, 15 bp, Homo sapiens
agcccctgattcccc

SEQ ID NO: 223686 - DNA, 15 bp, Homo sapiens
cagcccctgattccc

SEQ ID NO: 223687 - DNA, 15 bp, Homo sapiens
acagcccctgattcc

SEQ ID NO: 223688 - DNA, 15 bp, Homo sapiens
tacagcccctgattc

SEQ ID NO: 223689 - DNA, 15 bp, Homo sapiens
ttacagcccctgatt

SEQ ID NO: 223690 - DNA, 15 bp, Homo sapiens
cttacagcccctgat

SEQ ID NO: 223691 - DNA, 15 bp, Homo sapiens
tcttacagcccctga

SEQ ID NO: 223692 - DNA, 15 bp, Homo sapiens
ctcttacagcccctg

SEQ ID NO: 223693 - DNA, 15 bp, Homo sapiens
actcttacagcccct

SEQ ID NO: 223694 - DNA, 15 bp, Homo sapiens
cactcttacagcccc

SEQ ID NO: 223695 - DNA, 15 bp, Homo sapiens
ccactcttacagccc

SEQ ID NO: 223696 - DNA, 15 bp, Homo sapiens
cccactcttacagcc

SEQ ID NO: 223697 - DNA, 15 bp, Homo sapiens
tcccactcttacagc

SEQ ID NO: 223698 - DNA, 15 bp, Homo sapiens
gtcccactcttacag

SEQ ID NO: 223699 - DNA, 15 bp, Homo sapiens
tgtcccactcttaca

SEQ ID NO: 223700 - DNA, 15 bp, Homo sapiens
gtgtcccactcttac

SEQ ID NO: 223701 - DNA, 15 bp, Homo sapiens
ggtgtcccactctta

SEQ ID NO: 223702 - DNA, 15 bp, Homo sapiens
cggtgtcccactctt

SEQ ID NO: 223703 - DNA, 15 bp, Homo sapiens
tcggtgtcccactct

SEQ ID NO: 223704 - DNA, 15 bp, Homo sapiens
ttcggtgtcccactc

SEQ ID NO: 223705 - DNA, 15 bp, Homo sapiens
gttcggtgtcccact

SEQ ID NO: 223706 - DNA, 15 bp, Homo sapiens
tgttcggtgtcccac

SEQ ID NO: 223707 - DNA, 15 bp, Homo sapiens
ctgttcggtgtccca

SEQ ID NO: 223708 - DNA, 15 bp, Homo sapiens
tctgttcggtgtccc

SEQ ID NO: 223709 - DNA, 15 bp, Homo sapiens
ttctgttcggtgtcc

SEQ ID NO: 223710 - DNA, 15 bp, Homo sapiens
cttctgttcggtgtc

SEQ ID NO: 223711 - DNA, 15 bp, Homo sapiens
acttctgttcggtgt

SEQ ID NO: 223712 - DNA, 15 bp, Homo sapiens
aacttctgttcggtg

SEQ ID NO: 223713 - DNA, 15 bp, Homo sapiens
aaacttctgttcggt

SEQ ID NO: 223714 - DNA, 15 bp, Homo sapiens
gaaacttctgttcgg

SEQ ID NO: 223715 - DNA, 15 bp, Homo sapiens
tgaaacttctgttcg

SEQ ID NO: 223716 - DNA, 15 bp, Homo sapiens
atgaaacttctgttc

SEQ ID NO: 223717 - DNA, 15 bp, Homo sapiens
gatgaaacttctgtt

SEQ ID NO: 223718 - DNA, 15 bp, Homo sapiens
agatgaaacttctgt

SEQ ID NO: 223719 - DNA, 15 bp, Homo sapiens
gagatgaaacttctg

SEQ ID NO: 223720 - DNA, 15 bp, Homo sapiens
tgagatgaaacttct

SEQ ID NO: 223721 - DNA, 15 bp, Homo sapiens
atgagatgaaacttc

SEQ ID NO: 223722 - DNA, 15 bp, Homo sapiens
catgagatgaaactt

SEQ ID NO: 223723 - DNA, 15 bp, Homo sapiens
ccatgagatgaaact

SEQ ID NO: 223724 - DNA, 15 bp, Homo sapiens
tccatgagatgaaac

SEQ ID NO: 223725 - DNA, 15 bp, Homo sapiens
ctccatgagatgaaa

SEQ ID NO: 223726 - DNA, 15 bp, Homo sapiens
cctccatgagatgaa

SEQ ID NO: 223727 - DNA, 15 bp, Homo sapiens
gcctccatgagatga

SEQ ID NO: 223728 - DNA, 15 bp, Homo sapiens
tgcctccatgagatg

SEQ ID NO: 223729 - DNA, 15 bp, Homo sapiens
ctgcctccatgagat

SEQ ID NO: 223730 - DNA, 15 bp, Homo sapiens
cctgcctccatgaga

SEQ ID NO: 223731 - DNA, 15 bp, Homo sapiens
tcctgcctccatgag

SEQ ID NO: 223732 - DNA, 15 bp, Homo sapiens
atcctgcctccatga

SEQ ID NO: 223733 - DNA, 15 bp, Homo sapiens
aatcctgcctccatg

SEQ ID NO: 223734 - DNA, 15 bp, Homo sapiens
aaatcctgcctccat

SEQ ID NO: 223735 - DNA, 15 bp, Homo sapiens
taaatcctgcctcca

SEQ ID NO: 223736 - DNA, 15 bp, Homo sapiens
ctaaatcctgcctcc

SEQ ID NO: 223737 - DNA, 15 bp, Homo sapiens
tctaaatcctgcctc

SEQ ID NO: 223738 - DNA, 15 bp, Homo sapiens
ttctaaatcctgcct

SEQ ID NO: 223739 - DNA, 15 bp, Homo sapiens
tttctaaatcctgcc

SEQ ID NO: 223740 - DNA, 15 bp, Homo sapiens
ctttctaaatcctgc

SEQ ID NO: 223741 - DNA, 15 bp, Homo sapiens
actttctaaatcctg

SEQ ID NO: 223742 - DNA, 15 bp, Homo sapiens
cactttctaaatcct

SEQ ID NO: 223743 - DNA, 15 bp, Homo sapiens
acactttctaaatcc

SEQ ID NO: 223744 - DNA, 15 bp, Homo sapiens
tacactttctaaatc

SEQ ID NO: 223745 - DNA, 15 bp, Homo sapiens
ctacactttctaaat

SEQ ID NO: 223746 - DNA, 15 bp, Homo sapiens
tctacactttctaaa

SEQ ID NO: 223747 - DNA, 15 bp, Homo sapiens
atctacactttctaa

SEQ ID NO: 223748 - DNA, 15 bp, Homo sapiens
gatctacactttcta

SEQ ID NO: 223749 - DNA, 15 bp, Homo sapiens
agatctacactttct

SEQ ID NO: 223750 - DNA, 15 bp, Homo sapiens
gagatctacactttc

SEQ ID NO: 223751 - DNA, 15 bp, Homo sapiens
agagatctacacttt

SEQ ID NO: 223752 - DNA, 15 bp, Homo sapiens
aagagatctacactt

SEQ ID NO: 223753 - DNA, 15 bp, Homo sapiens
aaagagatctacact

SEQ ID NO: 223754 - DNA, 15 bp, Homo sapiens
caaagagatctacac

SEQ ID NO: 223755 - DNA, 15 bp, Homo sapiens
tcaaagagatctaca

SEQ ID NO: 223756 - DNA, 15 bp, Homo sapiens
ttcaaagagatctac

SEQ ID NO: 223757 - DNA, 15 bp, Homo sapiens
cttcaaagagatcta

SEQ ID NO: 223758 - DNA, 15 bp, Homo sapiens
tcttcaaagagatct

SEQ ID NO: 223759 - DNA, 15 bp, Homo sapiens
ctcttcaaagagatc

SEQ ID NO: 223760 - DNA, 15 bp, Homo sapiens
tctcttcaaagagat

SEQ ID NO: 223761 - DNA, 15 bp, Homo sapiens
ctctcttcaaagaga

SEQ ID NO: 223762 - DNA, 15 bp, Homo sapiens
cctctcttcaaagag

SEQ ID NO: 223763 - DNA, 15 bp, Homo sapiens
acctctcttcaaaga

SEQ ID NO: 223764 - DNA, 15 bp, Homo sapiens
aacctctcttcaaag

SEQ ID NO: 223765 - DNA, 15 bp, Homo sapiens
aaacctctcttcaaa

SEQ ID NO: 223766 - DNA, 15 bp, Homo sapiens
gaaacctctcttcaa

SEQ ID NO: 223767 - DNA, 15 bp, Homo sapiens
tgaaacctctcttca

SEQ ID NO: 223768 - DNA, 15 bp, Homo sapiens
ctgaaacctctcttc

SEQ ID NO: 223769 - DNA, 15 bp, Homo sapiens
cctgaaacctctctt

SEQ ID NO: 223770 - DNA, 15 bp, Homo sapiens
ccctgaaacctctct

SEQ ID NO: 223771 - DNA, 15 bp, Homo sapiens
tccctgaaacctctc

SEQ ID NO: 223772 - DNA, 15 bp, Homo sapiens
ctccctgaaacctct

SEQ ID NO: 223773 - DNA, 15 bp, Homo sapiens
tctccctgaaacctc

SEQ ID NO: 223774 - DNA, 15 bp, Homo sapiens
ctctccctgaaacct

SEQ ID NO: 223775 - DNA, 15 bp, Homo sapiens
tctctccctgaaacc

SEQ ID NO: 223776 - DNA, 15 bp, Homo sapiens
ctctctccctgaaac

SEQ ID NO: 223777 - DNA, 15 bp, Homo sapiens
cctctctccctgaaa

SEQ ID NO: 223778 - DNA, 15 bp, Homo sapiens
acctctctccctgaa

SEQ ID NO: 223779 - DNA, 15 bp, Homo sapiens
aacctctctccctga

SEQ ID NO: 223780 - DNA, 15 bp, Homo sapiens
aaacctctctccctg

SEQ ID NO: 223781 - DNA, 15 bp, Homo sapiens
gaaacctctctccct

SEQ ID NO: 223782 - DNA, 15 bp, Homo sapiens
tgaaacctctctccc

SEQ ID NO: 223783 - DNA, 15 bp, Homo sapiens
ctgaaacctctctcc

SEQ ID NO: 223784 - DNA, 15 bp, Homo sapiens
cctgaaacctctctc

SEQ ID NO: 223785 - DNA, 15 bp, Homo sapiens
atccctgaaacctct

SEQ ID NO: 223786 - DNA, 15 bp, Homo sapiens
aatccctgaaacctc

SEQ ID NO: 223787 - DNA, 15 bp, Homo sapiens
taatccctgaaacct

SEQ ID NO: 223788 - DNA, 15 bp, Homo sapiens
ctaatccctgaaacc

SEQ ID NO: 223789 - DNA, 15 bp, Homo sapiens
cctaatccctgaaac

SEQ ID NO: 223790 - DNA, 15 bp, Homo sapiens
ccctaatccctgaaa

SEQ ID NO: 223791 - DNA, 15 bp, Homo sapiens
accctaatccctgaa

SEQ ID NO: 223792 - DNA, 15 bp, Homo sapiens
gaccctaatccctga

SEQ ID NO: 223793 - DNA, 15 bp, Homo sapiens
ggaccctaatccctg

SEQ ID NO: 223794 - DNA, 15 bp, Homo sapiens
tggaccctaatccct

SEQ ID NO: 223795 - DNA, 15 bp, Homo sapiens
ctggaccctaatccc

SEQ ID NO: 223796 - DNA, 15 bp, Homo sapiens
gctggaccctaatcc

SEQ ID NO: 223797 - DNA, 15 bp, Homo sapiens
ggctggaccctaatc

SEQ ID NO: 223798 - DNA, 15 bp, Homo sapiens
tggctggaccctaat

SEQ ID NO: 223799 - DNA, 15 bp, Homo sapiens
ctggctggaccctaa

SEQ ID NO: 223800 - DNA, 15 bp, Homo sapiens
gctggctggacccta

SEQ ID NO: 223801 - DNA, 15 bp, Homo sapiens
agctggctggaccct

SEQ ID NO: 223802 - DNA, 15 bp, Homo sapiens
gagctggctggaccc

SEQ ID NO: 223803 - DNA, 15 bp, Homo sapiens
ggagctggctggacc

SEQ ID NO: 223804 - DNA, 15 bp, Homo sapiens
gggagctggctggac

SEQ ID NO: 223805 - DNA, 15 bp, Homo sapiens
agggagctggctgga

SEQ ID NO: 223806 - DNA, 15 bp, Homo sapiens
gagggagctggctgg

SEQ ID NO: 223807 - DNA, 15 bp, Homo sapiens
ggagggagctggctg

SEQ ID NO: 223808 - DNA, 15 bp, Homo sapiens
gggagggagctggct

SEQ ID NO: 223809 - DNA, 15 bp, Homo sapiens
cgggagggagctggc

SEQ ID NO: 223810 - DNA, 15 bp, Homo sapiens
tcgggagggagctgg

SEQ ID NO: 223811 - DNA, 15 bp, Homo sapiens
atcgggagggagctg

SEQ ID NO: 223812 - DNA, 15 bp, Homo sapiens
catcgggagggagct

SEQ ID NO: 223813 - DNA, 15 bp, Homo sapiens
gcatcgggagggagc

SEQ ID NO: 223814 - DNA, 15 bp, Homo sapiens
ggcatcgggagggag

SEQ ID NO: 223815 - DNA, 15 bp, Homo sapiens
tggcatcgggaggga

SEQ ID NO: 223816 - DNA, 15 bp, Homo sapiens
ctggcatcgggaggg

SEQ ID NO: 223817 - DNA, 15 bp, Homo sapiens
gctggcatcgggagg

SEQ ID NO: 223818 - DNA, 15 bp, Homo sapiens
ggctggcatcgggag

SEQ ID NO: 223819 - DNA, 15 bp, Homo sapiens
aggctggcatcggga

SEQ ID NO: 223820 - DNA, 15 bp, Homo sapiens
aaggctggcatcggg

SEQ ID NO: 223821 - DNA, 15 bp, Homo sapiens
taaggctggcatcgg

SEQ ID NO: 223822 - DNA, 15 bp, Homo sapiens
gtaaggctggcatcg

SEQ ID NO: 223823 - DNA, 15 bp, Homo sapiens
ggtaaggctggcatc

SEQ ID NO: 223824 - DNA, 15 bp, Homo sapiens
aggtaaggctggcat

SEQ ID NO: 223825 - DNA, 15 bp, Homo sapiens
caggtaaggctggca

SEQ ID NO: 223826 - DNA, 15 bp, Homo sapiens
gcaggtaaggctggc

SEQ ID NO: 223827 - DNA, 15 bp, Homo sapiens
agcaggtaaggctgg

SEQ ID NO: 223828 - DNA, 15 bp, Homo sapiens
tagcaggtaaggctg

SEQ ID NO: 223829 - DNA, 15 bp, Homo sapiens
ttagcaggtaaggct

SEQ ID NO: 223830 - DNA, 15 bp, Homo sapiens
cttagcaggtaaggc

SEQ ID NO: 223831 - DNA, 15 bp, Homo sapiens
acttagcaggtaagg

SEQ ID NO: 223832 - DNA, 15 bp, Homo sapiens
cacttagcaggtaag

SEQ ID NO: 223833 - DNA, 15 bp, Homo sapiens
gcacttagcaggtaa

SEQ ID NO: 223834 - DNA, 15 bp, Homo sapiens
ggcacttagcaggta

SEQ ID NO: 223835 - DNA, 15 bp, Homo sapiens
aggcacttagcaggt

SEQ ID NO: 223836 - DNA, 15 bp, Homo sapiens
aaggcacttagcagg

SEQ ID NO: 223837 - DNA, 15 bp, Homo sapiens
gaaggcacttagcag

SEQ ID NO: 223838 - DNA, 15 bp, Homo sapiens
agaaggcacttagca

SEQ ID NO: 223839 - DNA, 15 bp, Homo sapiens
tagaaggcacttagc

SEQ ID NO: 223840 - DNA, 15 bp, Homo sapiens
ttagaaggcacttag

SEQ ID NO: 223841 - DNA, 15 bp, Homo sapiens
cttagaaggcactta

SEQ ID NO: 223842 - DNA, 15 bp, Homo sapiens
gcttagaaggcactt

SEQ ID NO: 223843 - DNA, 15 bp, Homo sapiens
agcttagaaggcact

SEQ ID NO: 223844 - DNA, 15 bp, Homo sapiens
aagcttagaaggcac

SEQ ID NO: 223845 - DNA, 15 bp, Homo sapiens
aaagcttagaaggca

SEQ ID NO: 223846 - DNA, 15 bp, Homo sapiens
gaaagcttagaaggc

SEQ ID NO: 223847 - DNA, 15 bp, Homo sapiens
ggaaagcttagaagg

SEQ ID NO: 223848 - DNA, 15 bp, Homo sapiens
gggaaagcttagaag

SEQ ID NO: 223849 - DNA, 15 bp, Homo sapiens
tgggaaagcttagaa

SEQ ID NO: 223850 - DNA, 15 bp, Homo sapiens
gtgggaaagcttaga

SEQ ID NO: 223851 - DNA, 15 bp, Homo sapiens
agtgggaaagcttag

SEQ ID NO: 223852 - DNA, 15 bp, Homo sapiens
gagtgggaaagctta

SEQ ID NO: 223853 - DNA, 15 bp, Homo sapiens
tgagtgggaaagctt

SEQ ID NO: 223854 - DNA, 15 bp, Homo sapiens
gtgagtgggaaagct

SEQ ID NO: 223855 - DNA, 15 bp, Homo sapiens
ggtgagtgggaaagc

SEQ ID NO: 223856 - DNA, 15 bp, Homo sapiens
gggtgagtgggaaag

SEQ ID NO: 223857 - DNA, 15 bp, Homo sapiens
agggtgagtgggaaa

SEQ ID NO: 223858 - DNA, 15 bp, Homo sapiens
cagggtgagtgggaa

SEQ ID NO: 223859 - DNA, 15 bp, Homo sapiens
acagggtgagtggga

SEQ ID NO: 223860 - DNA, 15 bp, Homo sapiens
gacagggtgagtggg

SEQ ID NO: 223861 - DNA, 15 bp, Homo sapiens
agacagggtgagtgg

SEQ ID NO: 223862 - DNA, 15 bp, Homo sapiens
cagacagggtgagtg

SEQ ID NO: 223863 - DNA, 15 bp, Homo sapiens
acagacagggtgagt

SEQ ID NO: 223864 - DNA, 15 bp, Homo sapiens
cacagacagggtgag

SEQ ID NO: 223865 - DNA, 15 bp, Homo sapiens
acacagacagggtga

SEQ ID NO: 223866 - DNA, 15 bp, Homo sapiens
aacacagacagggtg

SEQ ID NO: 223867 - DNA, 15 bp, Homo sapiens
aaacacagacagggt

SEQ ID NO: 223868 - DNA, 15 bp, Homo sapiens
gaaacacagacaggg

SEQ ID NO: 223869 - DNA, 15 bp, Homo sapiens
ggaaacacagacagg

SEQ ID NO: 223870 - DNA, 15 bp, Homo sapiens
tggaaacacagacag

SEQ ID NO: 223871 - DNA, 15 bp, Homo sapiens
ctggaaacacagaca

SEQ ID NO: 223872 - DNA, 15 bp, Homo sapiens
gctggaaacacagac

SEQ ID NO: 223873 - DNA, 15 bp, Homo sapiens
ggctggaaacacaga

SEQ ID NO: 223874 - DNA, 15 bp, Homo sapiens
aggctggaaacacag

SEQ ID NO: 223875 - DNA, 15 bp, Homo sapiens
gaggctggaaacaca

SEQ ID NO: 223876 - DNA, 15 bp, Homo sapiens
agaggctggaaacac

SEQ ID NO: 223877 - DNA, 15 bp, Homo sapiens
aagaggctggaaaca

SEQ ID NO: 223878 - DNA, 15 bp, Homo sapiens
caagaggctggaaac

SEQ ID NO: 223879 - DNA, 15 bp, Homo sapiens
acaagaggctggaaa

SEQ ID NO: 223880 - DNA, 15 bp, Homo sapiens
cacaagaggctggaa

SEQ ID NO: 223881 - DNA, 15 bp, Homo sapiens
acacaagaggctgga

SEQ ID NO: 223882 - DNA, 15 bp, Homo sapiens
aacacaagaggctgg

SEQ ID NO: 223883 - DNA, 15 bp, Homo sapiens
aaacacaagaggctg

SEQ ID NO: 223884 - DNA, 15 bp, Homo sapiens
taaacacaagaggct

SEQ ID NO: 223885 - DNA, 15 bp, Homo sapiens
ataaacacaagaggc

SEQ ID NO: 223886 - DNA, 15 bp, Homo sapiens
gataaacacaagagg

SEQ ID NO: 223887 - DNA, 15 bp, Homo sapiens
agataaacacaagag

SEQ ID NO: 223888 - DNA, 15 bp, Homo sapiens
gagataaacacaaga

SEQ ID NO: 223889 - DNA, 15 bp, Homo sapiens
agagataaacacaag

SEQ ID NO: 223890 - DNA, 15 bp, Homo sapiens
gagagataaacacaa

SEQ ID NO: 223891 - DNA, 15 bp, Homo sapiens
agagagataaacaca

SEQ ID NO: 223892 - DNA, 15 bp, Homo sapiens
gagagagataaacac

SEQ ID NO: 223893 - DNA, 15 bp, Homo sapiens
agagagagataaaca

SEQ ID NO: 223894 - DNA, 15 bp, Homo sapiens
gagagagagataaac

SEQ ID NO: 223895 - DNA, 15 bp, Homo sapiens
ggagagagagataaa

SEQ ID NO: 223896 - DNA, 15 bp, Homo sapiens
tggagagagagataa

SEQ ID NO: 223897 - DNA, 15 bp, Homo sapiens
ctggagagagagata

SEQ ID NO: 223898 - DNA, 15 bp, Homo sapiens
gctggagagagagat

SEQ ID NO: 223899 - DNA, 15 bp, Homo sapiens
ggctggagagagaga

SEQ ID NO: 223900 - DNA, 15 bp, Homo sapiens
gggctggagagagag

SEQ ID NO: 223901 - DNA, 15 bp, Homo sapiens
tgggctggagagaga

SEQ ID NO: 223902 - DNA, 15 bp, Homo sapiens
gtgggctggagagag

SEQ ID NO: 223903 - DNA, 15 bp, Homo sapiens
tgtgggctggagaga

SEQ ID NO: 223904 - DNA, 15 bp, Homo sapiens
gtgtgggctggagag

SEQ ID NO: 223905 - DNA, 15 bp, Homo sapiens
agtgtgggctggaga

SEQ ID NO: 223906 - DNA, 15 bp, Homo sapiens
cagtgtgggctggag

SEQ ID NO: 223907 - DNA, 15 bp, Homo sapiens
gcagtgtgggctgga

SEQ ID NO: 223908 - DNA, 15 bp, Homo sapiens
ggcagtgtgggctgg

SEQ ID NO: 223909 - DNA, 15 bp, Homo sapiens
aggcagtgtgggctg

SEQ ID NO: 223910 - DNA, 15 bp, Homo sapiens
aaggcagtgtgggct

SEQ ID NO: 223911 - DNA, 15 bp, Homo sapiens
aaaggcagtgtgggc

SEQ ID NO: 223912 - DNA, 15 bp, Homo sapiens
aaaaggcagtgtggg

SEQ ID NO: 223913 - DNA, 15 bp, Homo sapiens
caaaaggcagtgtgg

SEQ ID NO: 223914 - DNA, 15 bp, Homo sapiens
ccaaaaggcagtgtg

SEQ ID NO: 223915 - DNA, 15 bp, Homo sapiens
gccaaaaggcagtgt

SEQ ID NO: 223916 - DNA, 15 bp, Homo sapiens
ggccaaaaggcagtg

SEQ ID NO: 223917 - DNA, 15 bp, Homo sapiens
cggccaaaaggcagt

SEQ ID NO: 223918 - DNA, 15 bp, Homo sapiens
tcggccaaaaggcag

SEQ ID NO: 223919 - DNA, 15 bp, Homo sapiens
ttcggccaaaaggca

SEQ ID NO: 223920 - DNA, 15 bp, Homo sapiens
tttcggccaaaaggc

SEQ ID NO: 223921 - DNA, 15 bp, Homo sapiens
ttttcggccaaaagg

SEQ ID NO: 223922 - DNA, 15 bp, Homo sapiens
cttttcggccaaaag

SEQ ID NO: 223923 - DNA, 15 bp, Homo sapiens
ccttttcggccaaaa

SEQ ID NO: 223924 - DNA, 15 bp, Homo sapiens
cccttttcggccaaa

SEQ ID NO: 223925 - DNA, 15 bp, Homo sapiens
gcccttttcggccaa

SEQ ID NO: 223926 - DNA, 15 bp, Homo sapiens
ggcccttttcggcca

SEQ ID NO: 223927 - DNA, 15 bp, Homo sapiens
tggcccttttcggcc

SEQ ID NO: 223928 - DNA, 15 bp, Homo sapiens
atggcccttttcggc

SEQ ID NO: 223929 - DNA, 15 bp, Homo sapiens
tatggcccttttcgg

SEQ ID NO: 223930 - DNA, 15 bp, Homo sapiens
gtatggcccttttcg

SEQ ID NO: 223931 - DNA, 15 bp, Homo sapiens
ggtatggcccttttc

SEQ ID NO: 223932 - DNA, 15 bp, Homo sapiens
aggtatggccctttt

SEQ ID NO: 223933 - DNA, 15 bp, Homo sapiens
aaggtatggcccttt

SEQ ID NO: 223934 - DNA, 15 bp, Homo sapiens
caaggtatggccctt

SEQ ID NO: 223935 - DNA, 15 bp, Homo sapiens
tcaaggtatggccct

SEQ ID NO: 223936 - DNA, 15 bp, Homo sapiens
ctcaaggtatggccc

SEQ ID NO: 223937 - DNA, 15 bp, Homo sapiens
actcaaggtatggcc

SEQ ID NO: 223938 - DNA, 15 bp, Homo sapiens
gactcaaggtatggc

SEQ ID NO: 223939 - DNA, 15 bp, Homo sapiens
ggactcaaggtatgg

SEQ ID NO: 223940 - DNA, 15 bp, Homo sapiens
gggactcaaggtatg

SEQ ID NO: 223941 - DNA, 15 bp, Homo sapiens
agggactcaaggtat

SEQ ID NO: 223942 - DNA, 15 bp, Homo sapiens
cagggactcaaggta

SEQ ID NO: 223943 - DNA, 15 bp, Homo sapiens
acagggactcaaggt

SEQ ID NO: 223944 - DNA, 15 bp, Homo sapiens
aacagggactcaagg

SEQ ID NO: 223945 - DNA, 15 bp, Homo sapiens
caacagggactcaag

SEQ ID NO: 223946 - DNA, 15 bp, Homo sapiens
gcaacagggactcaa

SEQ ID NO: 223947 - DNA, 15 bp, Homo sapiens
tgcaacagggactca

SEQ ID NO: 223948 - DNA, 15 bp, Homo sapiens
atgcaacagggactc

SEQ ID NO: 223949 - DNA, 15 bp, Homo sapiens
catgcaacagggact

SEQ ID NO: 223950 - DNA, 15 bp, Homo sapiens
tcatgcaacagggac

SEQ ID NO: 223951 - DNA, 15 bp, Homo sapiens
ttcatgcaacaggga

SEQ ID NO: 223952 - DNA, 15 bp, Homo sapiens
cttcatgcaacaggg

SEQ ID NO: 223953 - DNA, 15 bp, Homo sapiens
acttcatgcaacagg

SEQ ID NO: 223954 - DNA, 15 bp, Homo sapiens
aacttcatgcaacag

SEQ ID NO: 223955 - DNA, 15 bp, Homo sapiens
caacttcatgcaaca

SEQ ID NO: 223956 - DNA, 15 bp, Homo sapiens
ccaacttcatgcaac

SEQ ID NO: 223957 - DNA, 15 bp, Homo sapiens
tccaacttcatgcaa

SEQ ID NO: 223958 - DNA, 15 bp, Homo sapiens
atccaacttcatgca

SEQ ID NO: 223959 - DNA, 15 bp, Homo sapiens
aatccaacttcatgc

SEQ ID NO: 223960 - DNA, 15 bp, Homo sapiens
aaatccaacttcatg

SEQ ID NO: 223961 - DNA, 15 bp, Homo sapiens
gaaatccaacttcat

SEQ ID NO: 223962 - DNA, 15 bp, Homo sapiens
ggaaatccaacttca

SEQ ID NO: 223963 - DNA, 15 bp, Homo sapiens
aggaaatccaacttc

SEQ ID NO: 223964 - DNA, 15 bp, Homo sapiens
aaggaaatccaactt

SEQ ID NO: 223965 - DNA, 15 bp, Homo sapiens
aaaggaaatccaact

SEQ ID NO: 223966 - DNA, 15 bp, Homo sapiens
gaaaggaaatccaac

SEQ ID NO: 223967 - DNA, 15 bp, Homo sapiens
tgaaaggaaatccaa

SEQ ID NO: 223968 - DNA, 15 bp, Homo sapiens
atgaaaggaaatcca

SEQ ID NO: 223969 - DNA, 15 bp, Homo sapiens
catgaaaggaaatcc

SEQ ID NO: 223970 - DNA, 15 bp, Homo sapiens
acatgaaaggaaatc

SEQ ID NO: 223971 - DNA, 15 bp, Homo sapiens
cacatgaaaggaaat

SEQ ID NO: 223972 - DNA, 15 bp, Homo sapiens
acacatgaaaggaaa

SEQ ID NO: 223973 - DNA, 15 bp, Homo sapiens
gacacatgaaaggaa

SEQ ID NO: 223974 - DNA, 15 bp, Homo sapiens
ggacacatgaaagga

SEQ ID NO: 223975 - DNA, 15 bp, Homo sapiens
aggacacatgaaagg

SEQ ID NO: 223976 - DNA, 15 bp, Homo sapiens
gaggacacatgaaag

SEQ ID NO: 223977 - DNA, 15 bp, Homo sapiens
tgaggacacatgaaa

SEQ ID NO: 223978 - DNA, 15 bp, Homo sapiens
ctgaggacacatgaa

SEQ ID NO: 223979 - DNA, 15 bp, Homo sapiens
tctgaggacacatga

SEQ ID NO: 223980 - DNA, 15 bp, Homo sapiens
ctctgaggacacatg

SEQ ID NO: 223981 - DNA, 15 bp, Homo sapiens
cctctgaggacacat

SEQ ID NO: 223982 - DNA, 15 bp, Homo sapiens
gcctctgaggacaca

SEQ ID NO: 223983 - DNA, 15 bp, Homo sapiens
ggcctctgaggacac

SEQ ID NO: 223984 - DNA, 15 bp, Homo sapiens
gggcctctgaggaca

SEQ ID NO: 223985 - DNA, 15 bp, Homo sapiens
agggcctctgaggac

SEQ ID NO: 223986 - DNA, 15 bp, Homo sapiens
cagggcctctgagga

SEQ ID NO: 223987 - DNA, 15 bp, Homo sapiens
ccagggcctctgagg

SEQ ID NO: 223988 - DNA, 15 bp, Homo sapiens
gccagggcctctgag

SEQ ID NO: 223989 - DNA, 15 bp, Homo sapiens
agccagggcctctga

SEQ ID NO: 223990 - DNA, 15 bp, Homo sapiens
aagccagggcctctg

SEQ ID NO: 223991 - DNA, 15 bp, Homo sapiens
caagccagggcctct

SEQ ID NO: 223992 - DNA, 15 bp, Homo sapiens
ccaagccagggcctc

SEQ ID NO: 223993 - DNA, 15 bp, Homo sapiens
cccaagccagggcct

SEQ ID NO: 223994 - DNA, 15 bp, Homo sapiens
acccaagccagggcc

SEQ ID NO: 223995 - DNA, 15 bp, Homo sapiens
cacccaagccagggc

SEQ ID NO: 223996 - DNA, 15 bp, Homo sapiens
acacccaagccaggg

SEQ ID NO: 223997 - DNA, 15 bp, Homo sapiens
aacacccaagccagg

SEQ ID NO: 223998 - DNA, 15 bp, Homo sapiens
caacacccaagccag

SEQ ID NO: 223999 - DNA, 15 bp, Homo sapiens
acaacacccaagcca

SEQ ID NO: 224000 - DNA, 15 bp, Homo sapiens
gacaacacccaagcc

SEQ ID NO: 224001 - DNA, 15 bp, Homo sapiens
tgacaacacccaagc

SEQ ID NO: 224002 - DNA, 15 bp, Homo sapiens
atgacaacacccaag

SEQ ID NO: 224003 - DNA, 15 bp, Homo sapiens
catgacaacacccaa

SEQ ID NO: 224004 - DNA, 15 bp, Homo sapiens
ccatgacaacaccca

SEQ ID NO: 224005 - DNA, 15 bp, Homo sapiens
gccatgacaacaccc

SEQ ID NO: 224006 - DNA, 15 bp, Homo sapiens
tgccatgacaacacc

SEQ ID NO: 224007 - DNA, 15 bp, Homo sapiens
atgccatgacaacac

SEQ ID NO: 224008 - DNA, 15 bp, Homo sapiens
aatgccatgacaaca

SEQ ID NO: 224009 - DNA, 15 bp, Homo sapiens
aaatgccatgacaac

SEQ ID NO: 224010 - DNA, 15 bp, Homo sapiens
aaaatgccatgacaa

SEQ ID NO: 224011 - DNA, 15 bp, Homo sapiens
caaaatgccatgaca

SEQ ID NO: 224012 - DNA, 15 bp, Homo sapiens
acaaaatgccatgac

SEQ ID NO: 224013 - DNA, 15 bp, Homo sapiens
cacaaaatgccatga

SEQ ID NO: 224014 - DNA, 15 bp, Homo sapiens
tcacaaaatgccatg

SEQ ID NO: 224015 - DNA, 15 bp, Homo sapiens
atcacaaaatgccat

SEQ ID NO: 224016 - DNA, 15 bp, Homo sapiens
aatcacaaaatgcca

SEQ ID NO: 224017 - DNA, 15 bp, Homo sapiens
aaatcacaaaatgcc

SEQ ID NO: 224018 - DNA, 15 bp, Homo sapiens
caaatcacaaaatgc

SEQ ID NO: 224019 - DNA, 15 bp, Homo sapiens
tcaaatcacaaaatg

SEQ ID NO: 224020 - DNA, 15 bp, Homo sapiens
atcaaatcacaaaat

SEQ ID NO: 224021 - DNA, 15 bp, Homo sapiens
catcaaatcacaaaa

SEQ ID NO: 224022 - DNA, 15 bp, Homo sapiens
ccatcaaatcacaaa

SEQ ID NO: 224023 - DNA, 15 bp, Homo sapiens
tccatcaaatcacaa

SEQ ID NO: 224024 - DNA, 15 bp, Homo sapiens
ctccatcaaatcaca

SEQ ID NO: 224025 - DNA, 15 bp, Homo sapiens
cctccatcaaatcac

SEQ ID NO: 224026 - DNA, 15 bp, Homo sapiens
tcctccatcaaatca

SEQ ID NO: 224027 - DNA, 15 bp, Homo sapiens
ctcctccatcaaatc

SEQ ID NO: 224028 - DNA, 15 bp, Homo sapiens
cctcctccatcaaat

SEQ ID NO: 224029 - DNA, 15 bp, Homo sapiens
tcctcctccatcaaa

SEQ ID NO: 224030 - DNA, 15 bp, Homo sapiens
ctcctcctccatcaa

SEQ ID NO: 224031 - DNA, 15 bp, Homo sapiens
tctcctcctccatca

SEQ ID NO: 224032 - DNA, 15 bp, Homo sapiens
ctctcctcctccatc

SEQ ID NO: 224033 - DNA, 15 bp, Homo sapiens
tctctcctcctccat

SEQ ID NO: 224034 - DNA, 15 bp, Homo sapiens
atctctcctcctcca

SEQ ID NO: 224035 - DNA, 15 bp, Homo sapiens
tatctctcctcctcc

SEQ ID NO: 224036 - DNA, 15 bp, Homo sapiens
ctatctctcctcctc

SEQ ID NO: 224037 - DNA, 15 bp, Homo sapiens
tctatctctcctcct

SEQ ID NO: 224038 - DNA, 15 bp, Homo sapiens
ctctatctctcctcc

SEQ ID NO: 224039 - DNA, 15 bp, Homo sapiens
gctctatctctcctc

SEQ ID NO: 224040 - DNA, 15 bp, Homo sapiens
cgctctatctctcct

SEQ ID NO: 224041 - DNA, 15 bp, Homo sapiens
ccgctctatctctcc

SEQ ID NO: 224042 - DNA, 15 bp, Homo sapiens
gccgctctatctctc

SEQ ID NO: 224043 - DNA, 15 bp, Homo sapiens
ggccgctctatctct

SEQ ID NO: 224044 - DNA, 15 bp, Homo sapiens
gggccgctctatctc

SEQ ID NO: 224045 - DNA, 15 bp, Homo sapiens
ggggccgctctatct

SEQ ID NO: 224046 - DNA, 15 bp, Homo sapiens
tggggccgctctatc

SEQ ID NO: 224047 - DNA, 15 bp, Homo sapiens
atggggccgctctat

SEQ ID NO: 224048 - DNA, 15 bp, Homo sapiens
gatggggccgctcta

SEQ ID NO: 224049 - DNA, 15 bp, Homo sapiens
cgatggggccgctct

SEQ ID NO: 224050 - DNA, 15 bp, Homo sapiens
gcgatggggccgctc

SEQ ID NO: 224051 - DNA, 15 bp, Homo sapiens
ggcgatggggccgct

SEQ ID NO: 224052 - DNA, 15 bp, Homo sapiens
aggcgatggggccgc

SEQ ID NO: 224053 - DNA, 15 bp, Homo sapiens
caggcgatggggccg

SEQ ID NO: 224054 - DNA, 15 bp, Homo sapiens
acaggcgatggggcc

SEQ ID NO: 224055 - DNA, 15 bp, Homo sapiens
aacaggcgatggggc

SEQ ID NO: 224056 - DNA, 15 bp, Homo sapiens
aaacaggcgatgggg

SEQ ID NO: 224057 - DNA, 15 bp, Homo sapiens
caaacaggcgatggg

SEQ ID NO: 224058 - DNA, 15 bp, Homo sapiens
gcaaacaggcgatgg

SEQ ID NO: 224059 - DNA, 15 bp, Homo sapiens
cgcaaacaggcgatg

SEQ ID NO: 224060 - DNA, 15 bp, Homo sapiens
gcgcaaacaggcgat

SEQ ID NO: 224061 - DNA, 15 bp, Homo sapiens
agcgcaaacaggcga

SEQ ID NO: 224062 - DNA, 15 bp, Homo sapiens
tagcgcaaacaggcg

SEQ ID NO: 224063 - DNA, 15 bp, Homo sapiens
ctagcgcaaacaggc

SEQ ID NO: 224064 - DNA, 15 bp, Homo sapiens
gctagcgcaaacagg

SEQ ID NO: 224065 - DNA, 15 bp, Homo sapiens
ggctagcgcaaacag

SEQ ID NO: 224066 - DNA, 15 bp, Homo sapiens
aggctagcgcaaaca

SEQ ID NO: 224067 - DNA, 15 bp, Homo sapiens
gaggctagcgcaaac

SEQ ID NO: 224068 - DNA, 15 bp, Homo sapiens
agaggctagcgcaaa

SEQ ID NO: 224069 - DNA, 15 bp, Homo sapiens
gagaggctagcgcaa

SEQ ID NO: 224070 - DNA, 15 bp, Homo sapiens
agagaggctagcgca

SEQ ID NO: 224071 - DNA, 15 bp, Homo sapiens
gagagaggctagcgc

SEQ ID NO: 224072 - DNA, 15 bp, Homo sapiens
tgagagaggctagcg

SEQ ID NO: 224073 - DNA, 15 bp, Homo sapiens
ctgagagaggctagc

SEQ ID NO: 224074 - DNA, 15 bp, Homo sapiens
gctgagagaggctag

SEQ ID NO: 224075 - DNA, 15 bp, Homo sapiens
agctgagagaggcta

SEQ ID NO: 224076 - DNA, 15 bp, Homo sapiens
aagctgagagaggct

SEQ ID NO: 224077 - DNA, 15 bp, Homo sapiens
caagctgagagaggc

SEQ ID NO: 224078 - DNA, 15 bp, Homo sapiens
tcaagctgagagagg

SEQ ID NO: 224079 - DNA, 15 bp, Homo sapiens
gtcaagctgagagag

SEQ ID NO: 224080 - DNA, 15 bp, Homo sapiens
ggtcaagctgagaga

SEQ ID NO: 224081 - DNA, 15 bp, Homo sapiens
cggtcaagctgagag

SEQ ID NO: 224082 - DNA, 15 bp, Homo sapiens
tcggtcaagctgaga

SEQ ID NO: 224083 - DNA, 15 bp, Homo sapiens
atcggtcaagctgag

SEQ ID NO: 224084 - DNA, 15 bp, Homo sapiens
catcggtcaagctga

SEQ ID NO: 224085 - DNA, 15 bp, Homo sapiens
tcatcggtcaagctg

SEQ ID NO: 224086 - DNA, 15 bp, Homo sapiens
gtcatcggtcaagct

SEQ ID NO: 224087 - DNA, 15 bp, Homo sapiens
agtcatcggtcaagc

SEQ ID NO: 224088 - DNA, 15 bp, Homo sapiens
cagtcatcggtcaag

SEQ ID NO: 224089 - DNA, 15 bp, Homo sapiens
acagtcatcggtcaa

SEQ ID NO: 224090 - DNA, 15 bp, Homo sapiens
cacagtcatcggtca

SEQ ID NO: 224091 - DNA, 15 bp, Homo sapiens
tcacagtcatcggtc

SEQ ID NO: 224092 - DNA, 15 bp, Homo sapiens
atcacagtcatcggt

SEQ ID NO: 224093 - DNA, 15 bp, Homo sapiens
catcacagtcatcgg

SEQ ID NO: 224094 - DNA, 15 bp, Homo sapiens
tcatcacagtcatcg

SEQ ID NO: 224095 - DNA, 15 bp, Homo sapiens
gtcatcacagtcatc

SEQ ID NO: 224096 - DNA, 15 bp, Homo sapiens
tgtcatcacagtcat

SEQ ID NO: 224097 - DNA, 15 bp, Homo sapiens
atgtcatcacagtca

SEQ ID NO: 224098 - DNA, 15 bp, Homo sapiens
gatgtcatcacagtc

SEQ ID NO: 224099 - DNA, 15 bp, Homo sapiens
agatgtcatcacagt

SEQ ID NO: 224100 - DNA, 15 bp, Homo sapiens
cagatgtcatcacag

SEQ ID NO: 224101 - DNA, 15 bp, Homo sapiens
acagatgtcatcaca

SEQ ID NO: 224102 - DNA, 15 bp, Homo sapiens
cacagatgtcatcac

SEQ ID NO: 224103 - DNA, 15 bp, Homo sapiens
ccacagatgtcatca

SEQ ID NO: 224104 - DNA, 15 bp, Homo sapiens
tccacagatgtcatc

SEQ ID NO: 224105 - DNA, 15 bp, Homo sapiens
gtccacagatgtcat

SEQ ID NO: 224106 - DNA, 15 bp, Homo sapiens
tgtccacagatgtca

SEQ ID NO: 224107 - DNA, 15 bp, Homo sapiens
ctgtccacagatgtc

SEQ ID NO: 224108 - DNA, 15 bp, Homo sapiens
actgtccacagatgt

SEQ ID NO: 224109 - DNA, 15 bp, Homo sapiens
tactgtccacagatg

SEQ ID NO: 224110 - DNA, 15 bp, Homo sapiens
ttactgtccacagat

SEQ ID NO: 224111 - DNA, 15 bp, Homo sapiens
cttactgtccacaga

SEQ ID NO: 224112 - DNA, 15 bp, Homo sapiens
gcttactgtccacag

SEQ ID NO: 224113 - DNA, 15 bp, Homo sapiens
tgcttactgtccaca

SEQ ID NO: 224114 - DNA, 15 bp, Homo sapiens
ctgcttactgtccac

SEQ ID NO: 224115 - DNA, 15 bp, Homo sapiens
cctgcttactgtcca

SEQ ID NO: 224116 - DNA, 15 bp, Homo sapiens
acctgcttactgtcc

SEQ ID NO: 224117 - DNA, 15 bp, Homo sapiens
gacctgcttactgtc

SEQ ID NO: 224118 - DNA, 15 bp, Homo sapiens
ggacctgcttactgt

SEQ ID NO: 224119 - DNA, 15 bp, Homo sapiens
gggacctgcttactg

SEQ ID NO: 224120 - DNA, 15 bp, Homo sapiens
agggacctgcttact

SEQ ID NO: 224121 - DNA, 15 bp, Homo sapiens
cagggacctgcttac

SEQ ID NO: 224122 - DNA, 15 bp, Homo sapiens
ccagggacctgctta

SEQ ID NO: 224123 - DNA, 15 bp, Homo sapiens
accagggacctgctt

SEQ ID NO: 224124 - DNA, 15 bp, Homo sapiens
caccagggacctgct

SEQ ID NO: 224125 - DNA, 15 bp, Homo sapiens
ccaccagggacctgc

SEQ ID NO: 224126 - DNA, 15 bp, Homo sapiens
cccaccagggacctg

SEQ ID NO: 224127 - DNA, 15 bp, Homo sapiens
tcccaccagggacct

SEQ ID NO: 224128 - DNA, 15 bp, Homo sapiens
atcccaccagggacc

SEQ ID NO: 224129 - DNA, 15 bp, Homo sapiens
aatcccaccagggac

SEQ ID NO: 224130 - DNA, 15 bp, Homo sapiens
caatcccaccaggga

SEQ ID NO: 224131 - DNA, 15 bp, Homo sapiens
tcaatcccaccaggg

SEQ ID NO: 224132 - DNA, 15 bp, Homo sapiens
ctcaatcccaccagg

SEQ ID NO: 224133 - DNA, 15 bp, Homo sapiens
actcaatcccaccag

SEQ ID NO: 224134 - DNA, 15 bp, Homo sapiens
aactcaatcccacca

SEQ ID NO: 224135 - DNA, 15 bp, Homo sapiens
aaactcaatcccacc

SEQ ID NO: 224136 - DNA, 15 bp, Homo sapiens
gaaactcaatcccac

SEQ ID NO: 224137 - DNA, 15 bp, Homo sapiens
ggaaactcaatccca

SEQ ID NO: 224138 - DNA, 15 bp, Homo sapiens
aggaaactcaatccc

SEQ ID NO: 224139 - DNA, 15 bp, Homo sapiens
caggaaactcaatcc

SEQ ID NO: 224140 - DNA, 15 bp, Homo sapiens
tcaggaaactcaatc

SEQ ID NO: 224141 - DNA, 15 bp, Homo sapiens
ctcaggaaactcaat

SEQ ID NO: 224142 - DNA, 15 bp, Homo sapiens
gctcaggaaactcaa

SEQ ID NO: 224143 - DNA, 15 bp, Homo sapiens
agctcaggaaactca

SEQ ID NO: 224144 - DNA, 15 bp, Homo sapiens
tagctcaggaaactc

SEQ ID NO: 224145 - DNA, 15 bp, Homo sapiens
atagctcaggaaact

SEQ ID NO: 224146 - DNA, 15 bp, Homo sapiens
aatagctcaggaaac

SEQ ID NO: 224147 - DNA, 15 bp, Homo sapiens
gaatagctcaggaaa

SEQ ID NO: 224148 - DNA, 15 bp, Homo sapiens
ggaatagctcaggaa

SEQ ID NO: 224149 - DNA, 15 bp, Homo sapiens
tggaatagctcagga

SEQ ID NO: 224150 - DNA, 15 bp, Homo sapiens
atggaatagctcagg

SEQ ID NO: 224151 - DNA, 15 bp, Homo sapiens
tatggaatagctcag

SEQ ID NO: 224152 - DNA, 15 bp, Homo sapiens
atatggaatagctca

SEQ ID NO: 224153 - DNA, 15 bp, Homo sapiens
gatatggaatagctc

SEQ ID NO: 224154 - DNA, 15 bp, Homo sapiens
tgatatggaatagct

SEQ ID NO: 224155 - DNA, 15 bp, Homo sapiens
ctgatatggaatagc

SEQ ID NO: 224156 - DNA, 15 bp, Homo sapiens
gctgatatggaatag

SEQ ID NO: 224157 - DNA, 15 bp, Homo sapiens
tgctgatatggaata

SEQ ID NO: 224158 - DNA, 15 bp, Homo sapiens
atgctgatatggaat

SEQ ID NO: 224159 - DNA, 15 bp, Homo sapiens
aatgctgatatggaa

SEQ ID NO: 224160 - DNA, 15 bp, Homo sapiens
gaatgctgatatgga

SEQ ID NO: 224161 - DNA, 15 bp, Homo sapiens
cgaatgctgatatgg

SEQ ID NO: 224162 - DNA, 15 bp, Homo sapiens
tcgaatgctgatatg

SEQ ID NO: 224163 - DNA, 15 bp, Homo sapiens
ctcgaatgctgatat

SEQ ID NO: 224164 - DNA, 15 bp, Homo sapiens
tctcgaatgctgata

SEQ ID NO: 224165 - DNA, 15 bp, Homo sapiens
ttctcgaatgctgat

SEQ ID NO: 224166 - DNA, 15 bp, Homo sapiens
cttctcgaatgctga

SEQ ID NO: 224167 - DNA, 15 bp, Homo sapiens
gcttctcgaatgctg

SEQ ID NO: 224168 - DNA, 15 bp, Homo sapiens
ggcttctcgaatgct

SEQ ID NO: 224169 - DNA, 15 bp, Homo sapiens
gggagagttcctttt

SEQ ID NO: 224170 - DNA, 15 bp, Homo sapiens
ggggagagttccttt

SEQ ID NO: 224171 - DNA, 15 bp, Homo sapiens
aggggagagttcctt

SEQ ID NO: 224172 - DNA, 15 bp, Homo sapiens
gaggggagagttcct

SEQ ID NO: 224173 - DNA, 15 bp, Homo sapiens
tgaggggagagttcc

SEQ ID NO: 224174 - DNA, 15 bp, Homo sapiens
atgaggggagagttc

SEQ ID NO: 224175 - DNA, 15 bp, Homo sapiens
catgaggggagagtt

SEQ ID NO: 224176 - DNA, 15 bp, Homo sapiens
acatgaggggagagt

SEQ ID NO: 224177 - DNA, 15 bp, Homo sapiens
cacatgaggggagag

SEQ ID NO: 224178 - DNA, 15 bp, Homo sapiens
tcacatgaggggaga

SEQ ID NO: 224179 - DNA, 15 bp, Homo sapiens
gtcacatgaggggag

SEQ ID NO: 224180 - DNA, 15 bp, Homo sapiens
ggtcacatgagggga

SEQ ID NO: 224181 - DNA, 15 bp, Homo sapiens
aggtcacatgagggg

SEQ ID NO: 224182 - DNA, 15 bp, Homo sapiens
aaggtcacatgaggg

SEQ ID NO: 224183 - DNA, 15 bp, Homo sapiens
gaaggtcacatgagg

SEQ ID NO: 224184 - DNA, 15 bp, Homo sapiens
tgaaggtcacatgag

SEQ ID NO: 224185 - DNA, 15 bp, Homo sapiens
atgaaggtcacatga

SEQ ID NO: 224186 - DNA, 15 bp, Homo sapiens
catgaaggtcacatg

SEQ ID NO: 224187 - DNA, 15 bp, Homo sapiens
gcatgaaggtcacat

SEQ ID NO: 224188 - DNA, 15 bp, Homo sapiens
ggcatgaaggtcaca

SEQ ID NO: 224189 - DNA, 15 bp, Homo sapiens
tggcatgaaggtcac

SEQ ID NO: 224190 - DNA, 15 bp, Homo sapiens
ctggcatgaaggtca

SEQ ID NO: 224191 - DNA, 15 bp, Homo sapiens
actggcatgaaggtc

SEQ ID NO: 224192 - DNA, 15 bp, Homo sapiens
gactggcatgaaggt

SEQ ID NO: 224193 - DNA, 15 bp, Homo sapiens
ggactggcatgaagg

SEQ ID NO: 224194 - DNA, 15 bp, Homo sapiens
gggactggcatgaag

SEQ ID NO: 224195 - DNA, 15 bp, Homo sapiens
ggggactggcatgaa

SEQ ID NO: 224196 - DNA, 15 bp, Homo sapiens
gggggactggcatga

SEQ ID NO: 224197 - DNA, 15 bp, Homo sapiens
agggggactggcatg

SEQ ID NO: 224198 - DNA, 15 bp, Homo sapiens
cagggggactggcat

SEQ ID NO: 224199 - DNA, 15 bp, Homo sapiens
ccagggggactggca

SEQ ID NO: 224200 - DNA, 15 bp, Homo sapiens
accagggggactggc

SEQ ID NO: 224201 - DNA, 15 bp, Homo sapiens
caccagggggactgg

SEQ ID NO: 224202 - DNA, 15 bp, Homo sapiens
gcaccagggggactg

SEQ ID NO: 224203 - DNA, 15 bp, Homo sapiens
ggcaccagggggact

SEQ ID NO: 224204 - DNA, 15 bp, Homo sapiens
tggcaccagggggac

SEQ ID NO: 224205 - DNA, 15 bp, Homo sapiens
gtggcaccaggggga

SEQ ID NO: 224206 - DNA, 15 bp, Homo sapiens
ggtggcaccaggggg

SEQ ID NO: 224207 - DNA, 15 bp, Homo sapiens
gggtggcaccagggg

SEQ ID NO: 224208 - DNA, 15 bp, Homo sapiens
ggggtggcaccaggg

SEQ ID NO: 224209 - DNA, 15 bp, Homo sapiens
tggggtggcaccagg

SEQ ID NO: 224210 - DNA, 15 bp, Homo sapiens
gtggggtggcaccag

SEQ ID NO: 224211 - DNA, 15 bp, Homo sapiens
ggtggggtggcacca

SEQ ID NO: 224212 - DNA, 15 bp, Homo sapiens
aggtggggtggcacc

SEQ ID NO: 224213 - DNA, 15 bp, Homo sapiens
gaggtggggtggcac

SEQ ID NO: 224214 - DNA, 15 bp, Homo sapiens
tgaggtggggtggca

SEQ ID NO: 224215 - DNA, 15 bp, Homo sapiens
ctgaggtggggtggc

SEQ ID NO: 224216 - DNA, 15 bp, Homo sapiens
actgaggtggggtgg

SEQ ID NO: 224217 - DNA, 15 bp, Homo sapiens
cactgaggtggggtg

SEQ ID NO: 224218 - DNA, 15 bp, Homo sapiens
gcactgaggtggggt

SEQ ID NO: 224219 - DNA, 15 bp, Homo sapiens
tgcactgaggtgggg

SEQ ID NO: 224220 - DNA, 15 bp, Homo sapiens
ctgcactgaggtggg

SEQ ID NO: 224221 - DNA, 15 bp, Homo sapiens
actgcactgaggtgg

SEQ ID NO: 224222 - DNA, 15 bp, Homo sapiens
tactgcactgaggtg

SEQ ID NO: 224223 - DNA, 15 bp, Homo sapiens
ctactgcactgaggt

SEQ ID NO: 224224 - DNA, 15 bp, Homo sapiens
gctactgcactgagg

SEQ ID NO: 224225 - DNA, 15 bp, Homo sapiens
agctactgcactgag

SEQ ID NO: 224226 - DNA, 15 bp, Homo sapiens
cagctactgcactga

SEQ ID NO: 224227 - DNA, 15 bp, Homo sapiens
tcagctactgcactg

SEQ ID NO: 224228 - DNA, 15 bp, Homo sapiens
ctcagctactgcact

SEQ ID NO: 224229 - DNA, 15 bp, Homo sapiens
gctcagctactgcac

SEQ ID NO: 224230 - DNA, 15 bp, Homo sapiens
tgctcagctactgca

SEQ ID NO: 224231 - DNA, 15 bp, Homo sapiens
ctgctcagctactgc

SEQ ID NO: 224232 - DNA, 15 bp, Homo sapiens
actgctcagctactg

SEQ ID NO: 224233 - DNA, 15 bp, Homo sapiens
tactgctcagctact

SEQ ID NO: 224234 - DNA, 15 bp, Homo sapiens
ttactgctcagctac

SEQ ID NO: 224235 - DNA, 15 bp, Homo sapiens
gttactgctcagcta

SEQ ID NO: 224236 - DNA, 15 bp, Homo sapiens
tgttactgctcagct

SEQ ID NO: 224237 - DNA, 15 bp, Homo sapiens
ctgttactgctcagc

SEQ ID NO: 224238 - DNA, 15 bp, Homo sapiens
tctgttactgctcag

SEQ ID NO: 224239 - DNA, 15 bp, Homo sapiens
ctctgttactgctca

SEQ ID NO: 224240 - DNA, 15 bp, Homo sapiens
cctctgttactgctc

SEQ ID NO: 224241 - DNA, 15 bp, Homo sapiens
ccctctgttactgct

SEQ ID NO: 224242 - DNA, 15 bp, Homo sapiens
tccctctgttactgc

SEQ ID NO: 224243 - DNA, 15 bp, Homo sapiens
gtccctctgttactg

SEQ ID NO: 224244 - DNA, 15 bp, Homo sapiens
tgtccctctgttact

SEQ ID NO: 224245 - DNA, 15 bp, Homo sapiens
ctgtccctctgttac

SEQ ID NO: 224246 - DNA, 15 bp, Homo sapiens
gctgtccctctgtta

SEQ ID NO: 224247 - DNA, 15 bp, Homo sapiens
ggctgtccctctgtt

SEQ ID NO: 224248 - DNA, 15 bp, Homo sapiens
tggctgtccctctgt

SEQ ID NO: 224249 - DNA, 15 bp, Homo sapiens
ctggctgtccctctg

SEQ ID NO: 224250 - DNA, 15 bp, Homo sapiens
actggctgtccctct

SEQ ID NO: 224251 - DNA, 15 bp, Homo sapiens
aactggctgtccctc

SEQ ID NO: 224252 - DNA, 15 bp, Homo sapiens
aaactggctgtccct

SEQ ID NO: 224253 - DNA, 15 bp, Homo sapiens
gaaactggctgtccc

SEQ ID NO: 224254 - DNA, 15 bp, Homo sapiens
ggaaactggctgtcc

SEQ ID NO: 224255 - DNA, 15 bp, Homo sapiens
gggaaactggctgtc

SEQ ID NO: 224256 - DNA, 15 bp, Homo sapiens
agggaaactggctgt

SEQ ID NO: 224257 - DNA, 15 bp, Homo sapiens
gagggaaactggctg

SEQ ID NO: 224258 - DNA, 15 bp, Homo sapiens
agagggaaactggct

SEQ ID NO: 224259 - DNA, 15 bp, Homo sapiens
cagagggaaactggc

SEQ ID NO: 224260 - DNA, 15 bp, Homo sapiens
acagagggaaactgg

SEQ ID NO: 224261 - DNA, 15 bp, Homo sapiens
gacagagggaaactg

SEQ ID NO: 224262 - DNA, 15 bp, Homo sapiens
ggacagagggaaact

SEQ ID NO: 224263 - DNA, 15 bp, Homo sapiens
tggacagagggaaac

SEQ ID NO: 224264 - DNA, 15 bp, Homo sapiens
ctggacagagggaaa

SEQ ID NO: 224265 - DNA, 15 bp, Homo sapiens
cctggacagagggaa

SEQ ID NO: 224266 - DNA, 15 bp, Homo sapiens
ccctggacagaggga

SEQ ID NO: 224267 - DNA, 15 bp, Homo sapiens
cccctggacagaggg

SEQ ID NO: 224268 - DNA, 15 bp, Homo sapiens
tcccctggacagagg

SEQ ID NO: 224269 - DNA, 15 bp, Homo sapiens
ctcccctggacagag

SEQ ID NO: 224270 - DNA, 15 bp, Homo sapiens
tctcccctggacaga

SEQ ID NO: 224271 - DNA, 15 bp, Homo sapiens
atctcccctggacag

SEQ ID NO: 224272 - DNA, 15 bp, Homo sapiens
aatctcccctggaca

SEQ ID NO: 224273 - DNA, 15 bp, Homo sapiens
caatctcccctggac

SEQ ID NO: 224274 - DNA, 15 bp, Homo sapiens
acaatctcccctgga

SEQ ID NO: 224275 - DNA, 15 bp, Homo sapiens
cacaatctcccctgg

SEQ ID NO: 224276 - DNA, 15 bp, Homo sapiens
ccacaatctcccctg

SEQ ID NO: 224277 - DNA, 15 bp, Homo sapiens
cccacaatctcccct

SEQ ID NO: 224278 - DNA, 15 bp, Homo sapiens
acccacaatctcccc

SEQ ID NO: 224279 - DNA, 15 bp, Homo sapiens
gacccacaatctccc

SEQ ID NO: 224280 - DNA, 15 bp, Homo sapiens
agacccacaatctcc

SEQ ID NO: 224281 - DNA, 15 bp, Homo sapiens
aagacccacaatctc

SEQ ID NO: 224282 - DNA, 15 bp, Homo sapiens
gaagacccacaatct

SEQ ID NO: 224283 - DNA, 15 bp, Homo sapiens
tgaagacccacaatc

SEQ ID NO: 224284 - DNA, 15 bp, Homo sapiens
ctgaagacccacaat

SEQ ID NO: 224285 - DNA, 15 bp, Homo sapiens
cctgaagacccacaa

SEQ ID NO: 224286 - DNA, 15 bp, Homo sapiens
acctgaagacccaca

SEQ ID NO: 224287 - DNA, 15 bp, Homo sapiens
cacctgaagacccac

SEQ ID NO: 224288 - DNA, 15 bp, Homo sapiens
tcacctgaagaccca

SEQ ID NO: 224289 - DNA, 15 bp, Homo sapiens
ctcacctgaagaccc

SEQ ID NO: 224290 - DNA, 15 bp, Homo sapiens
tctcacctgaagacc

SEQ ID NO: 224291 - DNA, 15 bp, Homo sapiens
ctctcacctgaagac

SEQ ID NO: 224292 - DNA, 15 bp, Homo sapiens
actctcacctgaaga

SEQ ID NO: 224293 - DNA, 15 bp, Homo sapiens
cactctcacctgaag

SEQ ID NO: 224294 - DNA, 15 bp, Homo sapiens
acactctcacctgaa

SEQ ID NO: 224295 - DNA, 15 bp, Homo sapiens
cacactctcacctga

SEQ ID NO: 224296 - DNA, 15 bp, Homo sapiens
ccacactctcacctg

SEQ ID NO: 224297 - DNA, 15 bp, Homo sapiens
gccacactctcacct

SEQ ID NO: 224298 - DNA, 15 bp, Homo sapiens
cgccacactctcacc

SEQ ID NO: 224299 - DNA, 15 bp, Homo sapiens
ccgccacactctcac

SEQ ID NO: 224300 - DNA, 15 bp, Homo sapiens
gccgccacactctca

SEQ ID NO: 224301 - DNA, 15 bp, Homo sapiens
tgccgccacactctc

SEQ ID NO: 224302 - DNA, 15 bp, Homo sapiens
gtgccgccacactct

SEQ ID NO: 224303 - DNA, 15 bp, Homo sapiens
agtgccgccacactc

SEQ ID NO: 224304 - DNA, 15 bp, Homo sapiens
tagtgccgccacact

SEQ ID NO: 224305 - DNA, 15 bp, Homo sapiens
ttagtgccgccacac

SEQ ID NO: 224306 - DNA, 15 bp, Homo sapiens
gttagtgccgccaca

SEQ ID NO: 224307 - DNA, 15 bp, Homo sapiens
tgttagtgccgccac

SEQ ID NO: 224308 - DNA, 15 bp, Homo sapiens
ttgttagtgccgcca

SEQ ID NO: 224309 - DNA, 15 bp, Homo sapiens
gttgttagtgccgcc

SEQ ID NO: 224310 - DNA, 15 bp, Homo sapiens
tgttgttagtgccgc

SEQ ID NO: 224311 - DNA, 15 bp, Homo sapiens
ctgttgttagtgccg

SEQ ID NO: 224312 - DNA, 15 bp, Homo sapiens
gctgttgttagtgcc

SEQ ID NO: 224313 - DNA, 15 bp, Homo sapiens
ggctgttgttagtgc

SEQ ID NO: 224314 - DNA, 15 bp, Homo sapiens
aggctgttgttagtg

SEQ ID NO: 224315 - DNA, 15 bp, Homo sapiens
taggctgttgttagt

SEQ ID NO: 224316 - DNA, 15 bp, Homo sapiens
ctaggctgttgttag

SEQ ID NO: 224317 - DNA, 15 bp, Homo sapiens
actaggctgttgtta

SEQ ID NO: 224318 - DNA, 15 bp, Homo sapiens
gactaggctgttgtt

SEQ ID NO: 224319 - DNA, 15 bp, Homo sapiens
tgactaggctgttgt

SEQ ID NO: 224320 - DNA, 15 bp, Homo sapiens
gtgactaggctgttg

SEQ ID NO: 224321 - DNA, 15 bp, Homo sapiens
tgtgactaggctgtt

SEQ ID NO: 224322 - DNA, 15 bp, Homo sapiens
ttgtgactaggctgt

SEQ ID NO: 224323 - DNA, 15 bp, Homo sapiens
attgtgactaggctg

SEQ ID NO: 224324 - DNA, 15 bp, Homo sapiens
aattgtgactaggct

SEQ ID NO: 224325 - DNA, 15 bp, Homo sapiens
gaattgtgactaggc

SEQ ID NO: 224326 - DNA, 15 bp, Homo sapiens
tgaattgtgactagg

SEQ ID NO: 224327 - DNA, 15 bp, Homo sapiens
atgaattgtgactag

SEQ ID NO: 224328 - DNA, 15 bp, Homo sapiens
aatgaattgtgacta

SEQ ID NO: 224329 - DNA, 15 bp, Homo sapiens
taatgaattgtgact

SEQ ID NO: 224330 - DNA, 15 bp, Homo sapiens
ctaatgaattgtgac

SEQ ID NO: 224331 - DNA, 15 bp, Homo sapiens
actaatgaattgtga

SEQ ID NO: 224332 - DNA, 15 bp, Homo sapiens
tactaatgaattgtg

SEQ ID NO: 224333 - DNA, 15 bp, Homo sapiens
ttactaatgaattgt

SEQ ID NO: 224334 - DNA, 15 bp, Homo sapiens
tttactaatgaattg

SEQ ID NO: 224335 - DNA, 15 bp, Homo sapiens
gtttactaatgaatt

SEQ ID NO: 224336 - DNA, 15 bp, Homo sapiens
agtttactaatgaat

SEQ ID NO: 224337 - DNA, 15 bp, Homo sapiens
aagtttactaatgaa

SEQ ID NO: 224338 - DNA, 15 bp, Homo sapiens
caagtttactaatga

SEQ ID NO: 224339 - DNA, 15 bp, Homo sapiens
ccaagtttactaatg

SEQ ID NO: 224340 - DNA, 15 bp, Homo sapiens
gccaagtttactaat

SEQ ID NO: 224341 - DNA, 15 bp, Homo sapiens
tgccaagtttactaa

SEQ ID NO: 224342 - DNA, 15 bp, Homo sapiens
atgccaagtttacta

SEQ ID NO: 224343 - DNA, 15 bp, Homo sapiens
aatgccaagtttact

SEQ ID NO: 224344 - DNA, 15 bp, Homo sapiens
gaatgccaagtttac

SEQ ID NO: 224345 - DNA, 15 bp, Homo sapiens
tgaatgccaagttta

SEQ ID NO: 224346 - DNA, 15 bp, Homo sapiens
ctgaatgccaagttt

SEQ ID NO: 224347 - DNA, 15 bp, Homo sapiens
cctgaatgccaagtt

SEQ ID NO: 224348 - DNA, 15 bp, Homo sapiens
acctgaatgccaagt

SEQ ID NO: 224349 - DNA, 15 bp, Homo sapiens
aacctgaatgccaag

SEQ ID NO: 224350 - DNA, 15 bp, Homo sapiens
taacctgaatgccaa

SEQ ID NO: 224351 - DNA, 15 bp, Homo sapiens
gtaacctgaatgcca

SEQ ID NO: 224352 - DNA, 15 bp, Homo sapiens
agtaacctgaatgcc

SEQ ID NO: 224353 - DNA, 15 bp, Homo sapiens
cagtaacctgaatgc

SEQ ID NO: 224354 - DNA, 15 bp, Homo sapiens
tcagtaacctgaatg

SEQ ID NO: 224355 - DNA, 15 bp, Homo sapiens
gtcagtaacctgaat

SEQ ID NO: 224356 - DNA, 15 bp, Homo sapiens
tgtcagtaacctgaa

SEQ ID NO: 224357 - DNA, 15 bp, Homo sapiens
atgtcagtaacctga

SEQ ID NO: 224358 - DNA, 15 bp, Homo sapiens
aatgtcagtaacctg

SEQ ID NO: 224359 - DNA, 15 bp, Homo sapiens
aaatgtcagtaacct

SEQ ID NO: 224360 - DNA, 15 bp, Homo sapiens
aaaatgtcagtaacc

SEQ ID NO: 224361 - DNA, 15 bp, Homo sapiens
aaaaatgtcagtaac

SEQ ID NO: 224362 - DNA, 15 bp, Homo sapiens
caaaaatgtcagtaa

SEQ ID NO: 224363 - DNA, 15 bp, Homo sapiens
gcaaaaatgtcagta

SEQ ID NO: 224364 - DNA, 15 bp, Homo sapiens
tgcaaaaatgtcagt

SEQ ID NO: 224365 - DNA, 15 bp, Homo sapiens
ttgcaaaaatgtcag

SEQ ID NO: 224366 - DNA, 15 bp, Homo sapiens
tttgcaaaaatgtca

SEQ ID NO: 224367 - DNA, 15 bp, Homo sapiens
gtttgcaaaaatgtc

SEQ ID NO: 224368 - DNA, 15 bp, Homo sapiens
agtttgcaaaaatgt

SEQ ID NO: 224369 - DNA, 15 bp, Homo sapiens
cagtttgcaaaaatg

SEQ ID NO: 224370 - DNA, 15 bp, Homo sapiens
gcagtttgcaaaaat

SEQ ID NO: 224371 - DNA, 15 bp, Homo sapiens
tgcagtttgcaaaaa

SEQ ID NO: 224372 - DNA, 15 bp, Homo sapiens
gtgcagtttgcaaaa

SEQ ID NO: 224373 - DNA, 15 bp, Homo sapiens
agtgcagtttgcaaa

SEQ ID NO: 224374 - DNA, 15 bp, Homo sapiens
aagtgcagtttgcaa

SEQ ID NO: 224375 - DNA, 15 bp, Homo sapiens
aaagtgcagtttgca

SEQ ID NO: 224376 - DNA, 15 bp, Homo sapiens
gaaagtgcagtttgc

SEQ ID NO: 224377 - DNA, 15 bp, Homo sapiens
agaaagtgcagtttg

SEQ ID NO: 224378 - DNA, 15 bp, Homo sapiens
tagaaagtgcagttt

SEQ ID NO: 224379 - DNA, 15 bp, Homo sapiens
ttagaaagtgcagtt

SEQ ID NO: 224380 - DNA, 15 bp, Homo sapiens
gttagaaagtgcagt

SEQ ID NO: 224381 - DNA, 15 bp, Homo sapiens
tgttagaaagtgcag

SEQ ID NO: 224382 - DNA, 15 bp, Homo sapiens
ttgttagaaagtgca

SEQ ID NO: 224383 - DNA, 15 bp, Homo sapiens
attgttagaaagtgc

SEQ ID NO: 224384 - DNA, 15 bp, Homo sapiens
aattgttagaaagtg

SEQ ID NO: 224385 - DNA, 15 bp, Homo sapiens
taattgttagaaagt

SEQ ID NO: 224386 - DNA, 15 bp, Homo sapiens
gtaattgttagaaag

SEQ ID NO: 224387 - DNA, 15 bp, Homo sapiens
ggtaattgttagaaa

SEQ ID NO: 224388 - DNA, 15 bp, Homo sapiens
gggtaattgttagaa

SEQ ID NO: 224389 - DNA, 15 bp, Homo sapiens
agggtaattgttaga

SEQ ID NO: 224390 - DNA, 15 bp, Homo sapiens
gagggtaattgttag

SEQ ID NO: 224391 - DNA, 15 bp, Homo sapiens
agagggtaattgtta

SEQ ID NO: 224392 - DNA, 15 bp, Homo sapiens
cagagggtaattgtt

SEQ ID NO: 224393 - DNA, 15 bp, Homo sapiens
ccagagggtaattgt

SEQ ID NO: 224394 - DNA, 15 bp, Homo sapiens
accagagggtaattg

SEQ ID NO: 224395 - DNA, 15 bp, Homo sapiens
aaccagagggtaatt

SEQ ID NO: 224396 - DNA, 15 bp, Homo sapiens
taaccagagggtaat

SEQ ID NO: 224397 - DNA, 15 bp, Homo sapiens
ttaaccagagggtaa

SEQ ID NO: 224398 - DNA, 15 bp, Homo sapiens
tttaaccagagggta

SEQ ID NO: 224399 - DNA, 15 bp, Homo sapiens
ttttaaccagagggt

SEQ ID NO: 224400 - DNA, 15 bp, Homo sapiens
attttaaccagaggg

SEQ ID NO: 224401 - DNA, 15 bp, Homo sapiens
gattttaaccagagg

SEQ ID NO: 224402 - DNA, 15 bp, Homo sapiens
agattttaaccagag

SEQ ID NO: 224403 - DNA, 15 bp, Homo sapiens
cagattttaaccaga

SEQ ID NO: 224404 - DNA, 15 bp, Homo sapiens
acagattttaaccag

SEQ ID NO: 224405 - DNA, 15 bp, Homo sapiens
tacagattttaacca

SEQ ID NO: 224406 - DNA, 15 bp, Homo sapiens
atacagattttaacc

SEQ ID NO: 224407 - DNA, 15 bp, Homo sapiens
aatacagattttaac

SEQ ID NO: 224408 - DNA, 15 bp, Homo sapiens
aaatacagattttaa

SEQ ID NO: 224409 - DNA, 15 bp, Homo sapiens
caaatacagatttta

SEQ ID NO: 224410 - DNA, 15 bp, Homo sapiens
acaaatacagatttt

SEQ ID NO: 224411 - DNA, 15 bp, Homo sapiens
tacaaatacagattt

SEQ ID NO: 224412 - DNA, 15 bp, Homo sapiens
ctacaaatacagatt

SEQ ID NO: 224413 - DNA, 15 bp, Homo sapiens
tctacaaatacagat

SEQ ID NO: 224414 - DNA, 15 bp, Homo sapiens
ttctacaaatacaga

SEQ ID NO: 224415 - DNA, 15 bp, Homo sapiens
cttctacaaatacag

SEQ ID NO: 224416 - DNA, 15 bp, Homo sapiens
ccttctacaaataca

SEQ ID NO: 224417 - DNA, 15 bp, Homo sapiens
tccttctacaaatac

SEQ ID NO: 224418 - DNA, 15 bp, Homo sapiens
ctccttctacaaata

SEQ ID NO: 224419 - DNA, 15 bp, Homo sapiens
cctccttctacaaat

SEQ ID NO: 224420 - DNA, 15 bp, Homo sapiens
gcctccttctacaaa

SEQ ID NO: 224421 - DNA, 15 bp, Homo sapiens
ggcctccttctacaa

SEQ ID NO: 224422 - DNA, 15 bp, Homo sapiens
tggcctccttctaca

SEQ ID NO: 224423 - DNA, 15 bp, Homo sapiens
ctggcctccttctac

SEQ ID NO: 224424 - DNA, 15 bp, Homo sapiens
actggcctccttcta

SEQ ID NO: 224425 - DNA, 15 bp, Homo sapiens
gactggcctccttct

SEQ ID NO: 224426 - DNA, 15 bp, Homo sapiens
agactggcctccttc

SEQ ID NO: 224427 - DNA, 15 bp, Homo sapiens
cagactggcctcctt

SEQ ID NO: 224428 - DNA, 15 bp, Homo sapiens
tcagactggcctcct

SEQ ID NO: 224429 - DNA, 15 bp, Homo sapiens
ttcagactggcctcc

SEQ ID NO: 224430 - DNA, 15 bp, Homo sapiens
tttcagactggcctc

SEQ ID NO: 224431 - DNA, 15 bp, Homo sapiens
ttttcagactggcct

SEQ ID NO: 224432 - DNA, 15 bp, Homo sapiens
cttttcagactggcc

SEQ ID NO: 224433 - DNA, 15 bp, Homo sapiens
ccttttcagactggc

SEQ ID NO: 224434 - DNA, 15 bp, Homo sapiens
tccttttcagactgg

SEQ ID NO: 224435 - DNA, 15 bp, Homo sapiens
ttccttttcagactg

SEQ ID NO: 224436 - DNA, 15 bp, Homo sapiens
attccttttcagact

SEQ ID NO: 224437 - DNA, 15 bp, Homo sapiens
cattccttttcagac

SEQ ID NO: 224438 - DNA, 15 bp, Homo sapiens
tcattccttttcaga

SEQ ID NO: 224439 - DNA, 15 bp, Homo sapiens
ctcattccttttcag

SEQ ID NO: 224440 - DNA, 15 bp, Homo sapiens
cctcattccttttca

SEQ ID NO: 224441 - DNA, 15 bp, Homo sapiens
ccctcattccttttc

SEQ ID NO: 224442 - DNA, 15 bp, Homo sapiens
cccctcattcctttt

SEQ ID NO: 224443 - DNA, 15 bp, Homo sapiens
tcccctcattccttt

SEQ ID NO: 224444 - DNA, 15 bp, Homo sapiens
ttcccctcattcctt

SEQ ID NO: 224445 - DNA, 15 bp, Homo sapiens
cttcccctcattcct

SEQ ID NO: 224446 - DNA, 15 bp, Homo sapiens
tcttcccctcattcc

SEQ ID NO: 224447 - DNA, 15 bp, Homo sapiens
ttcttcccctcattc

SEQ ID NO: 224448 - DNA, 15 bp, Homo sapiens
gttcttcccctcatt

SEQ ID NO: 224449 - DNA, 15 bp, Homo sapiens
cgttcttcccctcat

SEQ ID NO: 224450 - DNA, 15 bp, Homo sapiens
tcgttcttcccctca

SEQ ID NO: 224451 - DNA, 15 bp, Homo sapiens
gtcgttcttcccctc

SEQ ID NO: 224452 - DNA, 15 bp, Homo sapiens
agtcgttcttcccct

SEQ ID NO: 224453 - DNA, 15 bp, Homo sapiens
aagtcgttcttcccc

SEQ ID NO: 224454 - DNA, 15 bp, Homo sapiens
gaagtcgttcttccc

SEQ ID NO: 224455 - DNA, 15 bp, Homo sapiens
ggaagtcgttcttcc

SEQ ID NO: 224456 - DNA, 15 bp, Homo sapiens
gggaagtcgttcttc

SEQ ID NO: 224457 - DNA, 15 bp, Homo sapiens
ggggaagtcgttctt

SEQ ID NO: 224458 - DNA, 15 bp, Homo sapiens
aggggaagtcgttct

SEQ ID NO: 224459 - DNA, 15 bp, Homo sapiens
caggggaagtcgttc

SEQ ID NO: 224460 - DNA, 15 bp, Homo sapiens
ccaggggaagtcgtt

SEQ ID NO: 224461 - DNA, 15 bp, Homo sapiens
tccaggggaagtcgt

SEQ ID NO: 224462 - DNA, 15 bp, Homo sapiens
ctccaggggaagtcg

SEQ ID NO: 224463 - DNA, 15 bp, Homo sapiens
tctccaggggaagtc

SEQ ID NO: 224464 - DNA, 15 bp, Homo sapiens
ttctccaggggaagt

SEQ ID NO: 224465 - DNA, 15 bp, Homo sapiens
cttctccaggggaag

SEQ ID NO: 224466 - DNA, 15 bp, Homo sapiens
acttctccaggggaa

SEQ ID NO: 224467 - DNA, 15 bp, Homo sapiens
gacttctccagggga

SEQ ID NO: 224468 - DNA, 15 bp, Homo sapiens
agacttctccagggg

SEQ ID NO: 224469 - DNA, 15 bp, Homo sapiens
cagacttctccaggg

SEQ ID NO: 224470 - DNA, 15 bp, Homo sapiens
tcagacttctccagg

SEQ ID NO: 224471 - DNA, 15 bp, Homo sapiens
ttcagacttctccag

SEQ ID NO: 224472 - DNA, 15 bp, Homo sapiens
attcagacttctcca

SEQ ID NO: 224473 - DNA, 15 bp, Homo sapiens
cattcagacttctcc

SEQ ID NO: 224474 - DNA, 15 bp, Homo sapiens
tcattcagacttctc

SEQ ID NO: 224475 - DNA, 15 bp, Homo sapiens
ctcattcagacttct

SEQ ID NO: 224476 - DNA, 15 bp, Homo sapiens
cctcattcagacttc

SEQ ID NO: 224477 - DNA, 15 bp, Homo sapiens
acctcattcagactt

SEQ ID NO: 224478 - DNA, 15 bp, Homo sapiens
cacctcattcagact

SEQ ID NO: 224479 - DNA, 15 bp, Homo sapiens
ccacctcattcagac

SEQ ID NO: 224480 - DNA, 15 bp, Homo sapiens
gccacctcattcaga

SEQ ID NO: 224481 - DNA, 15 bp, Homo sapiens
ggccacctcattcag

SEQ ID NO: 224482 - DNA, 15 bp, Homo sapiens
gggccacctcattca

SEQ ID NO: 224483 - DNA, 15 bp, Homo sapiens
agggccacctcattc

SEQ ID NO: 224484 - DNA, 15 bp, Homo sapiens
gagggccacctcatt

SEQ ID NO: 224485 - DNA, 15 bp, Homo sapiens
agagggccacctcat

SEQ ID NO: 224486 - DNA, 15 bp, Homo sapiens
gagagggccacctca

SEQ ID NO: 224487 - DNA, 15 bp, Homo sapiens
agagagggccacctc

SEQ ID NO: 224488 - DNA, 15 bp, Homo sapiens
aagagagggccacct

SEQ ID NO: 224489 - DNA, 15 bp, Homo sapiens
gaagagagggccacc

SEQ ID NO: 224490 - DNA, 15 bp, Homo sapiens
agaagagagggccac

SEQ ID NO: 224491 - DNA, 15 bp, Homo sapiens
tagaagagagggcca

SEQ ID NO: 224492 - DNA, 15 bp, Homo sapiens
ttagaagagagggcc

SEQ ID NO: 224493 - DNA, 15 bp, Homo sapiens
tttagaagagagggc

SEQ ID NO: 224494 - DNA, 15 bp, Homo sapiens
ttttagaagagaggg

SEQ ID NO: 224495 - DNA, 15 bp, Homo sapiens
cttttagaagagagg

SEQ ID NO: 224496 - DNA, 15 bp, Homo sapiens
tcttttagaagagag

SEQ ID NO: 224497 - DNA, 15 bp, Homo sapiens
ttcttttagaagaga

SEQ ID NO: 224498 - DNA, 15 bp, Homo sapiens
tttcttttagaagag

SEQ ID NO: 224499 - DNA, 15 bp, Homo sapiens
ctttcttttagaaga

SEQ ID NO: 224500 - DNA, 15 bp, Homo sapiens
cctttcttttagaag

SEQ ID NO: 224501 - DNA, 15 bp, Homo sapiens
acctttcttttagaa

SEQ ID NO: 224502 - DNA, 15 bp, Homo sapiens
cacctttcttttaga

SEQ ID NO: 224503 - DNA, 15 bp, Homo sapiens
acacctttcttttag

SEQ ID NO: 224504 - DNA, 15 bp, Homo sapiens
cacacctttctttta

SEQ ID NO: 224505 - DNA, 15 bp, Homo sapiens
acacacctttctttt

SEQ ID NO: 224506 - DNA, 15 bp, Homo sapiens
cacacacctttcttt

SEQ ID NO: 224507 - DNA, 15 bp, Homo sapiens
gcacacacctttctt

SEQ ID NO: 224508 - DNA, 15 bp, Homo sapiens
ggcacacacctttct

SEQ ID NO: 224509 - DNA, 15 bp, Homo sapiens
aggcacacacctttc

SEQ ID NO: 224510 - DNA, 15 bp, Homo sapiens
aaggcacacaccttt

SEQ ID NO: 224511 - DNA, 15 bp, Homo sapiens
aaaggcacacacctt

SEQ ID NO: 224512 - DNA, 15 bp, Homo sapiens
aaaaggcacacacct

SEQ ID NO: 224513 - DNA, 15 bp, Homo sapiens
caaaaggcacacacc

SEQ ID NO: 224514 - DNA, 15 bp, Homo sapiens
tcaaaaggcacacac

SEQ ID NO: 224515 - DNA, 15 bp, Homo sapiens
ctcaaaaggcacaca

SEQ ID NO: 224516 - DNA, 15 bp, Homo sapiens
tctcaaaaggcacac

SEQ ID NO: 224517 - DNA, 15 bp, Homo sapiens
atctcaaaaggcaca

SEQ ID NO: 224518 - DNA, 15 bp, Homo sapiens
aatctcaaaaggcac

SEQ ID NO: 224519 - DNA, 15 bp, Homo sapiens
aaatctcaaaaggca

SEQ ID NO: 224520 - DNA, 15 bp, Homo sapiens
gaaatctcaaaaggc

SEQ ID NO: 224521 - DNA, 15 bp, Homo sapiens
tgaaatctcaaaagg

SEQ ID NO: 224522 - DNA, 15 bp, Homo sapiens
ttgaaatctcaaaag

SEQ ID NO: 224523 - DNA, 15 bp, Homo sapiens
attgaaatctcaaaa

SEQ ID NO: 224524 - DNA, 15 bp, Homo sapiens
aattgaaatctcaaa

SEQ ID NO: 224525 - DNA, 15 bp, Homo sapiens
taattgaaatctcaa

SEQ ID NO: 224526 - DNA, 15 bp, Homo sapiens
ataattgaaatctca

SEQ ID NO: 224527 - DNA, 15 bp, Homo sapiens
aataattgaaatctc

SEQ ID NO: 224528 - DNA, 15 bp, Homo sapiens
caataattgaaatct

SEQ ID NO: 224529 - DNA, 15 bp, Homo sapiens
tcaataattgaaatc

SEQ ID NO: 224530 - DNA, 15 bp, Homo sapiens
ctcaataattgaaat

SEQ ID NO: 224531 - DNA, 15 bp, Homo sapiens
gctcaataattgaaa

SEQ ID NO: 224532 - DNA, 15 bp, Homo sapiens
ggctcaataattgaa

SEQ ID NO: 224533 - DNA, 15 bp, Homo sapiens
tggctcaataattga

SEQ ID NO: 224534 - DNA, 15 bp, Homo sapiens
gtggctcaataattg

SEQ ID NO: 224535 - DNA, 15 bp, Homo sapiens
agtggctcaataatt

SEQ ID NO: 224536 - DNA, 15 bp, Homo sapiens
aagtggctcaataat

SEQ ID NO: 224537 - DNA, 15 bp, Homo sapiens
gaagtggctcaataa

SEQ ID NO: 224538 - DNA, 15 bp, Homo sapiens
ggaagtggctcaata

SEQ ID NO: 224539 - DNA, 15 bp, Homo sapiens
tggaagtggctcaat

SEQ ID NO: 224540 - DNA, 15 bp, Homo sapiens
atggaagtggctcaa

SEQ ID NO: 224541 - DNA, 15 bp, Homo sapiens
gatggaagtggctca

SEQ ID NO: 224542 - DNA, 15 bp, Homo sapiens
cgatggaagtggctc

SEQ ID NO: 224543 - DNA, 15 bp, Homo sapiens
ccgatggaagtggct

SEQ ID NO: 224544 - DNA, 15 bp, Homo sapiens
cccgatggaagtggc

SEQ ID NO: 224545 - DNA, 15 bp, Homo sapiens
tcccgatggaagtgg

SEQ ID NO: 224546 - DNA, 15 bp, Homo sapiens
ctcccgatggaagtg

SEQ ID NO: 224547 - DNA, 15 bp, Homo sapiens
gctcccgatggaagt

SEQ ID NO: 224548 - DNA, 15 bp, Homo sapiens
agctcccgatggaag

SEQ ID NO: 224549 - DNA, 15 bp, Homo sapiens
gagctcccgatggaa

SEQ ID NO: 224550 - DNA, 15 bp, Homo sapiens
agagctcccgatgga

SEQ ID NO: 224551 - DNA, 15 bp, Homo sapiens
aagagctcccgatgg

SEQ ID NO: 224552 - DNA, 15 bp, Homo sapiens
gaagagctcccgatg

SEQ ID NO: 224553 - DNA, 15 bp, Homo sapiens
tgaagagctcccgat

SEQ ID NO: 224554 - DNA, 15 bp, Homo sapiens
ttgaagagctcccga

SEQ ID NO: 224555 - DNA, 15 bp, Homo sapiens
attgaagagctcccg

SEQ ID NO: 224556 - DNA, 15 bp, Homo sapiens
aattgaagagctccc

SEQ ID NO: 224557 - DNA, 15 bp, Homo sapiens
taattgaagagctcc

SEQ ID NO: 224558 - DNA, 15 bp, Homo sapiens
ataattgaagagctc

SEQ ID NO: 224559 - DNA, 15 bp, Homo sapiens
aataattgaagagct

SEQ ID NO: 224560 - DNA, 15 bp, Homo sapiens
aaataattgaagagc

SEQ ID NO: 224561 - DNA, 15 bp, Homo sapiens
taaataattgaagag

SEQ ID NO: 224562 - DNA, 15 bp, Homo sapiens
ataaataattgaaga

SEQ ID NO: 224563 - DNA, 15 bp, Homo sapiens
tataaataattgaag

SEQ ID NO: 224564 - DNA, 15 bp, Homo sapiens
gtataaataattgaa

SEQ ID NO: 224565 - DNA, 15 bp, Homo sapiens
agtataaataattga

SEQ ID NO: 224566 - DNA, 15 bp, Homo sapiens
cagtataaataattg

SEQ ID NO: 224567 - DNA, 15 bp, Homo sapiens
ccagtataaataatt

SEQ ID NO: 224568 - DNA, 15 bp, Homo sapiens
cccagtataaataat

SEQ ID NO: 224569 - DNA, 15 bp, Homo sapiens
acccagtataaataa

SEQ ID NO: 224570 - DNA, 15 bp, Homo sapiens
cacccagtataaata

SEQ ID NO: 224571 - DNA, 15 bp, Homo sapiens
acacccagtataaat

SEQ ID NO: 224572 - DNA, 15 bp, Homo sapiens
cacacccagtataaa

SEQ ID NO: 224573 - DNA, 15 bp, Homo sapiens
acacacccagtataa

SEQ ID NO: 224574 - DNA, 15 bp, Homo sapiens
aacacacccagtata

SEQ ID NO: 224575 - DNA, 15 bp, Homo sapiens
caacacacccagtat

SEQ ID NO: 224576 - DNA, 15 bp, Homo sapiens
gcaacacacccagta

SEQ ID NO: 224577 - DNA, 15 bp, Homo sapiens
tgcaacacacccagt

SEQ ID NO: 224578 - DNA, 15 bp, Homo sapiens
ttgcaacacacccag

SEQ ID NO: 224579 - DNA, 15 bp, Homo sapiens
cttgcaacacaccca

SEQ ID NO: 224580 - DNA, 15 bp, Homo sapiens
acttgcaacacaccc

SEQ ID NO: 224581 - DNA, 15 bp, Homo sapiens
tacttgcaacacacc

SEQ ID NO: 224582 - DNA, 15 bp, Homo sapiens
ctacttgcaacacac

SEQ ID NO: 224583 - DNA, 15 bp, Homo sapiens
tctacttgcaacaca

SEQ ID NO: 224584 - DNA, 15 bp, Homo sapiens
atctacttgcaacac

SEQ ID NO: 224585 - DNA, 15 bp, Homo sapiens
aatctacttgcaaca

SEQ ID NO: 224586 - DNA, 15 bp, Homo sapiens
gaatctacttgcaac

SEQ ID NO: 224587 - DNA, 15 bp, Homo sapiens
tgaatctacttgcaa

SEQ ID NO: 224588 - DNA, 15 bp, Homo sapiens
gtgaatctacttgca

SEQ ID NO: 224589 - DNA, 15 bp, Homo sapiens
ggtgaatctacttgc

SEQ ID NO: 224590 - DNA, 15 bp, Homo sapiens
tggtgaatctacttg

SEQ ID NO: 224591 - DNA, 15 bp, Homo sapiens
ttggtgaatctactt

SEQ ID NO: 224592 - DNA, 15 bp, Homo sapiens
attggtgaatctact

SEQ ID NO: 224593 - DNA, 15 bp, Homo sapiens
aattggtgaatctac

SEQ ID NO: 224594 - DNA, 15 bp, Homo sapiens
aaattggtgaatcta

SEQ ID NO: 224595 - DNA, 15 bp, Homo sapiens
taaattggtgaatct

SEQ ID NO: 224596 - DNA, 15 bp, Homo sapiens
ctaaattggtgaatc

SEQ ID NO: 224597 - DNA, 15 bp, Homo sapiens
tctaaattggtgaat

SEQ ID NO: 224598 - DNA, 15 bp, Homo sapiens
ttctaaattggtgaa

SEQ ID NO: 224599 - DNA, 15 bp, Homo sapiens
tttctaaattggtga

SEQ ID NO: 224600 - DNA, 15 bp, Homo sapiens
ctttctaaattggtg

SEQ ID NO: 224601 - DNA, 15 bp, Homo sapiens
actttctaaattggt

SEQ ID NO: 224602 - DNA, 15 bp, Homo sapiens
aactttctaaattgg

SEQ ID NO: 224603 - DNA, 15 bp, Homo sapiens
caactttctaaattg

SEQ ID NO: 224604 - DNA, 15 bp, Homo sapiens
ccaactttctaaatt

SEQ ID NO: 224605 - DNA, 15 bp, Homo sapiens
cccaactttctaaat

SEQ ID NO: 224606 - DNA, 15 bp, Homo sapiens
ccccaactttctaaa

SEQ ID NO: 224607 - DNA, 15 bp, Homo sapiens
cccccaactttctaa

SEQ ID NO: 224608 - DNA, 15 bp, Homo sapiens
tcccccaactttcta

SEQ ID NO: 224609 - DNA, 15 bp, Homo sapiens
ttcccccaactttct

SEQ ID NO: 224610 - DNA, 15 bp, Homo sapiens
tttcccccaactttc

SEQ ID NO: 224611 - DNA, 15 bp, Homo sapiens
ctttcccccaacttt

SEQ ID NO: 224612 - DNA, 15 bp, Homo sapiens
tctttcccccaactt

SEQ ID NO: 224613 - DNA, 15 bp, Homo sapiens
ctctttcccccaact

SEQ ID NO: 224614 - DNA, 15 bp, Homo sapiens
cctctttcccccaac

SEQ ID NO: 224615 - DNA, 15 bp, Homo sapiens
ccctctttcccccaa

SEQ ID NO: 224616 - DNA, 15 bp, Homo sapiens
cccctctttccccca

SEQ ID NO: 224617 - DNA, 15 bp, Homo sapiens
tcccctctttccccc

SEQ ID NO: 224618 - DNA, 15 bp, Homo sapiens
gtcccctctttcccc

SEQ ID NO: 224619 - DNA, 15 bp, Homo sapiens
tgtcccctctttccc

SEQ ID NO: 224620 - DNA, 15 bp, Homo sapiens
atgtcccctctttcc

SEQ ID NO: 224621 - DNA, 15 bp, Homo sapiens
catgtcccctctttc

SEQ ID NO: 224622 - DNA, 15 bp, Homo sapiens
ccatgtcccctcttt

SEQ ID NO: 224623 - DNA, 15 bp, Homo sapiens
accatgtcccctctt

SEQ ID NO: 224624 - DNA, 15 bp, Homo sapiens
taccatgtcccctct

SEQ ID NO: 224625 - DNA, 15 bp, Homo sapiens
ctaccatgtcccctc

SEQ ID NO: 224626 - DNA, 15 bp, Homo sapiens
cctaccatgtcccct

SEQ ID NO: 224627 - DNA, 15 bp, Homo sapiens
tcctaccatgtcccc

SEQ ID NO: 224628 - DNA, 15 bp, Homo sapiens
ctcctaccatgtccc

SEQ ID NO: 224629 - DNA, 15 bp, Homo sapiens
cctcctaccatgtcc

SEQ ID NO: 224630 - DNA, 15 bp, Homo sapiens
ccctcctaccatgtc

SEQ ID NO: 224631 - DNA, 15 bp, Homo sapiens
tccctcctaccatgt

SEQ ID NO: 224632 - DNA, 15 bp, Homo sapiens
ctccctcctaccatg

SEQ ID NO: 224633 - DNA, 15 bp, Homo sapiens
cctccctcctaccat

SEQ ID NO: 224634 - DNA, 15 bp, Homo sapiens
gcctccctcctacca

SEQ ID NO: 224635 - DNA, 15 bp, Homo sapiens
ggcctccctcctacc

SEQ ID NO: 224636 - DNA, 15 bp, Homo sapiens
gggcctccctcctac

SEQ ID NO: 224637 - DNA, 15 bp, Homo sapiens
ggggcctccctccta

SEQ ID NO: 224638 - DNA, 15 bp, Homo sapiens
gggggcctccctcct

SEQ ID NO: 224639 - DNA, 15 bp, Homo sapiens
cgggggcctccctcc

SEQ ID NO: 224640 - DNA, 15 bp, Homo sapiens
acgggggcctccctc

SEQ ID NO: 224641 - DNA, 15 bp, Homo sapiens
cacgggggcctccct

SEQ ID NO: 224642 - DNA, 15 bp, Homo sapiens
ccacgggggcctccc

SEQ ID NO: 224643 - DNA, 15 bp, Homo sapiens
tccacgggggcctcc

SEQ ID NO: 224644 - DNA, 15 bp, Homo sapiens
atccacgggggcctc

SEQ ID NO: 224645 - DNA, 15 bp, Homo sapiens
catccacgggggcct

SEQ ID NO: 224646 - DNA, 15 bp, Homo sapiens
gcatccacgggggcc

SEQ ID NO: 224647 - DNA, 15 bp, Homo sapiens
tgcatccacgggggc

SEQ ID NO: 224648 - DNA, 15 bp, Homo sapiens
ttgcatccacggggg

SEQ ID NO: 224649 - DNA, 15 bp, Homo sapiens
cttgcatccacgggg

SEQ ID NO: 224650 - DNA, 15 bp, Homo sapiens
acttgcatccacggg

SEQ ID NO: 224651 - DNA, 15 bp, Homo sapiens
cacttgcatccacgg

SEQ ID NO: 224652 - DNA, 15 bp, Homo sapiens
acacttgcatccacg

SEQ ID NO: 224653 - DNA, 15 bp, Homo sapiens
cacacttgcatccac

SEQ ID NO: 224654 - DNA, 15 bp, Homo sapiens
acacacttgcatcca

SEQ ID NO: 224655 - DNA, 15 bp, Homo sapiens
cacacacttgcatcc

SEQ ID NO: 224656 - DNA, 15 bp, Homo sapiens
ccacacacttgcatc

SEQ ID NO: 224657 - DNA, 15 bp, Homo sapiens
cccacacacttgcat

SEQ ID NO: 224658 - DNA, 15 bp, Homo sapiens
gcccacacacttgca

SEQ ID NO: 224659 - DNA, 15 bp, Homo sapiens
tgcccacacacttgc

SEQ ID NO: 224660 - DNA, 15 bp, Homo sapiens
ttgcccacacacttg

SEQ ID NO: 224661 - DNA, 15 bp, Homo sapiens
cttgcccacacactt

SEQ ID NO: 224662 - DNA, 15 bp, Homo sapiens
acttgcccacacact

SEQ ID NO: 224663 - DNA, 15 bp, Homo sapiens
gacttgcccacacac

SEQ ID NO: 224664 - DNA, 15 bp, Homo sapiens
ggacttgcccacaca

SEQ ID NO: 224665 - DNA, 15 bp, Homo sapiens
aggacttgcccacac

SEQ ID NO: 224666 - DNA, 15 bp, Homo sapiens
aaggacttgcccaca

SEQ ID NO: 224667 - DNA, 15 bp, Homo sapiens
aaaggacttgcccac

SEQ ID NO: 224668 - DNA, 15 bp, Homo sapiens
aaaaggacttgccca

SEQ ID NO: 224669 - DNA, 15 bp, Homo sapiens
caaaaggacttgccc

SEQ ID NO: 224670 - DNA, 15 bp, Homo sapiens
ccaaaaggacttgcc

SEQ ID NO: 224671 - DNA, 15 bp, Homo sapiens
gccaaaaggacttgc

SEQ ID NO: 224672 - DNA, 15 bp, Homo sapiens
agccaaaaggacttg

SEQ ID NO: 224673 - DNA, 15 bp, Homo sapiens
aagccaaaaggactt

SEQ ID NO: 224674 - DNA, 15 bp, Homo sapiens
gaagccaaaaggact

SEQ ID NO: 224675 - DNA, 15 bp, Homo sapiens
ggaagccaaaaggac

SEQ ID NO: 224676 - DNA, 15 bp, Homo sapiens
aggaagccaaaagga

SEQ ID NO: 224677 - DNA, 15 bp, Homo sapiens
gaggaagccaaaagg

SEQ ID NO: 224678 - DNA, 15 bp, Homo sapiens
agaggaagccaaaag

SEQ ID NO: 224679 - DNA, 15 bp, Homo sapiens
aagaggaagccaaaa

SEQ ID NO: 224680 - DNA, 15 bp, Homo sapiens
caagaggaagccaaa

SEQ ID NO: 224681 - DNA, 15 bp, Homo sapiens
ccaagaggaagccaa

SEQ ID NO: 224682 - DNA, 15 bp, Homo sapiens
gccaagaggaagcca

SEQ ID NO: 224683 - DNA, 15 bp, Homo sapiens
agccaagaggaagcc

SEQ ID NO: 224684 - DNA, 15 bp, Homo sapiens
gagccaagaggaagc

SEQ ID NO: 224685 - DNA, 15 bp, Homo sapiens
agagccaagaggaag

SEQ ID NO: 224686 - DNA, 15 bp, Homo sapiens
aagagccaagaggaa

SEQ ID NO: 224687 - DNA, 15 bp, Homo sapiens
aaagagccaagagga

SEQ ID NO: 224688 - DNA, 15 bp, Homo sapiens
aaaagagccaagagg

SEQ ID NO: 224689 - DNA, 15 bp, Homo sapiens
aaaaagagccaagag

SEQ ID NO: 224690 - DNA, 15 bp, Homo sapiens
gaaaaagagccaaga

SEQ ID NO: 224691 - DNA, 15 bp, Homo sapiens
agaaaaagagccaag

SEQ ID NO: 224692 - DNA, 15 bp, Homo sapiens
cagaaaaagagccaa

SEQ ID NO: 224693 - DNA, 15 bp, Homo sapiens
ccagaaaaagagcca

SEQ ID NO: 224694 - DNA, 15 bp, Homo sapiens
tccagaaaaagagcc

SEQ ID NO: 224695 - DNA, 15 bp, Homo sapiens
atccagaaaaagagc

SEQ ID NO: 224696 - DNA, 15 bp, Homo sapiens
gatccagaaaaagag

SEQ ID NO: 224697 - DNA, 15 bp, Homo sapiens
ggatccagaaaaaga

SEQ ID NO: 224698 - DNA, 15 bp, Homo sapiens
tggatccagaaaaag

SEQ ID NO: 224699 - DNA, 15 bp, Homo sapiens
ttggatccagaaaaa

SEQ ID NO: 224700 - DNA, 15 bp, Homo sapiens
gttggatccagaaaa

SEQ ID NO: 224701 - DNA, 15 bp, Homo sapiens
agttggatccagaaa

SEQ ID NO: 224702 - DNA, 15 bp, Homo sapiens
aagttggatccagaa

SEQ ID NO: 224703 - DNA, 15 bp, Homo sapiens
gaagttggatccaga

SEQ ID NO: 224704 - DNA, 15 bp, Homo sapiens
tgaagttggatccag

SEQ ID NO: 224705 - DNA, 15 bp, Homo sapiens
atgaagttggatcca

SEQ ID NO: 224706 - DNA, 15 bp, Homo sapiens
gatgaagttggatcc

SEQ ID NO: 224707 - DNA, 15 bp, Homo sapiens
cgatgaagttggatc

SEQ ID NO: 224708 - DNA, 15 bp, Homo sapiens
acgatgaagttggat

SEQ ID NO: 224709 - DNA, 15 bp, Homo sapiens
tacgatgaagttgga

SEQ ID NO: 224710 - DNA, 15 bp, Homo sapiens
ctacgatgaagttgg

SEQ ID NO: 224711 - DNA, 15 bp, Homo sapiens
cctacgatgaagttg

SEQ ID NO: 224712 - DNA, 15 bp, Homo sapiens
ccctacgatgaagtt

SEQ ID NO: 224713 - DNA, 15 bp, Homo sapiens
gccctacgatgaagt

SEQ ID NO: 224714 - DNA, 15 bp, Homo sapiens
agccctacgatgaag

SEQ ID NO: 224715 - DNA, 15 bp, Homo sapiens
cagccctacgatgaa

SEQ ID NO: 224716 - DNA, 15 bp, Homo sapiens
ccagccctacgatga

SEQ ID NO: 224717 - DNA, 15 bp, Homo sapiens
tccagccctacgatg

SEQ ID NO: 224718 - DNA, 15 bp, Homo sapiens
gtccagccctacgat

SEQ ID NO: 224719 - DNA, 15 bp, Homo sapiens
ggtccagccctacga

SEQ ID NO: 224720 - DNA, 15 bp, Homo sapiens
tggtccagccctacg

SEQ ID NO: 224721 - DNA, 15 bp, Homo sapiens
ctggtccagccctac

SEQ ID NO: 224722 - DNA, 15 bp, Homo sapiens
gctggtccagcccta

SEQ ID NO: 224723 - DNA, 15 bp, Homo sapiens
ggctggtccagccct

SEQ ID NO: 224724 - DNA, 15 bp, Homo sapiens
tggctggtccagccc

SEQ ID NO: 224725 - DNA, 15 bp, Homo sapiens
gtggctggtccagcc

SEQ ID NO: 224726 - DNA, 15 bp, Homo sapiens
agtggctggtccagc

SEQ ID NO: 224727 - DNA, 15 bp, Homo sapiens
aagtggctggtccag

SEQ ID NO: 224728 - DNA, 15 bp, Homo sapiens
aaagtggctggtcca

SEQ ID NO: 224729 - DNA, 15 bp, Homo sapiens
caaagtggctggtcc

SEQ ID NO: 224730 - DNA, 15 bp, Homo sapiens
acaaagtggctggtc

SEQ ID NO: 224731 - DNA, 15 bp, Homo sapiens
gacaaagtggctggt

SEQ ID NO: 224732 - DNA, 15 bp, Homo sapiens
tgacaaagtggctgg

SEQ ID NO: 224733 - DNA, 15 bp, Homo sapiens
ttgacaaagtggctg

SEQ ID NO: 224734 - DNA, 15 bp, Homo sapiens
cttgacaaagtggct

SEQ ID NO: 224735 - DNA, 15 bp, Homo sapiens
ccttgacaaagtggc

SEQ ID NO: 224736 - DNA, 15 bp, Homo sapiens
cccttgacaaagtgg

SEQ ID NO: 224737 - DNA, 15 bp, Homo sapiens
acccttgacaaagtg

SEQ ID NO: 224738 - DNA, 15 bp, Homo sapiens
tacccttgacaaagt

SEQ ID NO: 224739 - DNA, 15 bp, Homo sapiens
atacccttgacaaag

SEQ ID NO: 224740 - DNA, 15 bp, Homo sapiens
gatacccttgacaaa

SEQ ID NO: 224741 - DNA, 15 bp, Homo sapiens
ggatacccttgacaa

SEQ ID NO: 224742 - DNA, 15 bp, Homo sapiens
aggatacccttgaca

SEQ ID NO: 224743 - DNA, 15 bp, Homo sapiens
gaggatacccttgac

SEQ ID NO: 224744 - DNA, 15 bp, Homo sapiens
ggaggatacccttga

SEQ ID NO: 224745 - DNA, 15 bp, Homo sapiens
aggaggatacccttg

SEQ ID NO: 224746 - DNA, 15 bp, Homo sapiens
gaggaggataccctt

SEQ ID NO: 224747 - DNA, 15 bp, Homo sapiens
tgaggaggataccct

SEQ ID NO: 224748 - DNA, 15 bp, Homo sapiens
gtgaggaggataccc

SEQ ID NO: 224749 - DNA, 15 bp, Homo sapiens
agtgaggaggatacc

SEQ ID NO: 224750 - DNA, 15 bp, Homo sapiens
cagtgaggaggatac

SEQ ID NO: 224751 - DNA, 15 bp, Homo sapiens
tcagtgaggaggata

SEQ ID NO: 224752 - DNA, 15 bp, Homo sapiens
ctcagtgaggaggat

SEQ ID NO: 224753 - DNA, 15 bp, Homo sapiens
cctcagtgaggagga

SEQ ID NO: 224754 - DNA, 15 bp, Homo sapiens
acctcagtgaggagg

SEQ ID NO: 224755 - DNA, 15 bp, Homo sapiens
gacctcagtgaggag

SEQ ID NO: 224756 - DNA, 15 bp, Homo sapiens
agacctcagtgagga

SEQ ID NO: 224757 - DNA, 15 bp, Homo sapiens
cagacctcagtgagg

SEQ ID NO: 224758 - DNA, 15 bp, Homo sapiens
ccagacctcagtgag

SEQ ID NO: 224759 - DNA, 15 bp, Homo sapiens
tccagacctcagtga

SEQ ID NO: 224760 - DNA, 15 bp, Homo sapiens
ctccagacctcagtg

SEQ ID NO: 224761 - DNA, 15 bp, Homo sapiens
tctccagacctcagt

SEQ ID NO: 224762 - DNA, 15 bp, Homo sapiens
atctccagacctcag

SEQ ID NO: 224763 - DNA, 15 bp, Homo sapiens
catctccagacctca

SEQ ID NO: 224764 - DNA, 15 bp, Homo sapiens
ccatctccagacctc

SEQ ID NO: 224765 - DNA, 15 bp, Homo sapiens
cccatctccagacct

SEQ ID NO: 224766 - DNA, 15 bp, Homo sapiens
ccccatctccagacc

SEQ ID NO: 224767 - DNA, 15 bp, Homo sapiens
tccccatctccagac

SEQ ID NO: 224768 - DNA, 15 bp, Homo sapiens
gtccccatctccaga

SEQ ID NO: 224769 - DNA, 15 bp, Homo sapiens
tgtccccatctccag

SEQ ID NO: 224770 - DNA, 15 bp, Homo sapiens
ctgtccccatctcca

SEQ ID NO: 224771 - DNA, 15 bp, Homo sapiens
cctgtccccatctcc

SEQ ID NO: 224772 - DNA, 15 bp, Homo sapiens
ccctgtccccatctc

SEQ ID NO: 224773 - DNA, 15 bp, Homo sapiens
accctgtccccatct

SEQ ID NO: 224774 - DNA, 15 bp, Homo sapiens
caccctgtccccatc

SEQ ID NO: 224775 - DNA, 15 bp, Homo sapiens
acaccctgtccccat

SEQ ID NO: 224776 - DNA, 15 bp, Homo sapiens
cacaccctgtcccca

SEQ ID NO: 224777 - DNA, 15 bp, Homo sapiens
ccacaccctgtcccc

SEQ ID NO: 224778 - DNA, 15 bp, Homo sapiens
tccacaccctgtccc

SEQ ID NO: 224779 - DNA, 15 bp, Homo sapiens
atccacaccctgtcc

SEQ ID NO: 224780 - DNA, 15 bp, Homo sapiens
catccacaccctgtc

SEQ ID NO: 224781 - DNA, 15 bp, Homo sapiens
gcatccacaccctgt

SEQ ID NO: 224782 - DNA, 15 bp, Homo sapiens
ggcatccacaccctg

SEQ ID NO: 224783 - DNA, 15 bp, Homo sapiens
gggcatccacaccct

SEQ ID NO: 224784 - DNA, 15 bp, Homo sapiens
ggggcatccacaccc

SEQ ID NO: 224785 - DNA, 15 bp, Homo sapiens
aggggcatccacacc

SEQ ID NO: 224786 - DNA, 15 bp, Homo sapiens
caggggcatccacac

SEQ ID NO: 224787 - DNA, 15 bp, Homo sapiens
ccaggggcatccaca

SEQ ID NO: 224788 - DNA, 15 bp, Homo sapiens
cccaggggcatccac

SEQ ID NO: 224789 - DNA, 15 bp, Homo sapiens
acccaggggcatcca

SEQ ID NO: 224790 - DNA, 15 bp, Homo sapiens
cacccaggggcatcc

SEQ ID NO: 224791 - DNA, 15 bp, Homo sapiens
acacccaggggcatc

SEQ ID NO: 224792 - DNA, 15 bp, Homo sapiens
tacacccaggggcat

SEQ ID NO: 224793 - DNA, 15 bp, Homo sapiens
ctacacccaggggca

SEQ ID NO: 224794 - DNA, 15 bp, Homo sapiens
cctacacccaggggc

SEQ ID NO: 224795 - DNA, 15 bp, Homo sapiens
ccctacacccagggg

SEQ ID NO: 224796 - DNA, 15 bp, Homo sapiens
tccctacacccaggg

SEQ ID NO: 224797 - DNA, 15 bp, Homo sapiens
ttccctacacccagg

SEQ ID NO: 224798 - DNA, 15 bp, Homo sapiens
gttccctacacccag

SEQ ID NO: 224799 - DNA, 15 bp, Homo sapiens
ggttccctacaccca

SEQ ID NO: 224800 - DNA, 15 bp, Homo sapiens
cggttccctacaccc

SEQ ID NO: 224801 - DNA, 15 bp, Homo sapiens
tcggttccctacacc

SEQ ID NO: 224802 - DNA, 15 bp, Homo sapiens
gtcggttccctacac

SEQ ID NO: 224803 - DNA, 15 bp, Homo sapiens
tgtcggttccctaca

SEQ ID NO: 224804 - DNA, 15 bp, Homo sapiens
gtgtcggttccctac

SEQ ID NO: 224805 - DNA, 15 bp, Homo sapiens
agtgtcggttcccta

SEQ ID NO: 224806 - DNA, 15 bp, Homo sapiens
aagtgtcggttccct

SEQ ID NO: 224807 - DNA, 15 bp, Homo sapiens
gaagtgtcggttccc

SEQ ID NO: 224808 - DNA, 15 bp, Homo sapiens
ggaagtgtcggttcc

SEQ ID NO: 224809 - DNA, 15 bp, Homo sapiens
tggaagtgtcggttc

SEQ ID NO: 224810 - DNA, 15 bp, Homo sapiens
ctggaagtgtcggtt

SEQ ID NO: 224811 - DNA, 15 bp, Homo sapiens
tctggaagtgtcggt

SEQ ID NO: 224812 - DNA, 15 bp, Homo sapiens
gtctggaagtgtcgg

SEQ ID NO: 224813 - DNA, 15 bp, Homo sapiens
tgtctggaagtgtcg

SEQ ID NO: 224814 - DNA, 15 bp, Homo sapiens
gtgtctggaagtgtc

SEQ ID NO: 224815 - DNA, 15 bp, Homo sapiens
agtgtctggaagtgt

SEQ ID NO: 224816 - DNA, 15 bp, Homo sapiens
gagtgtctggaagtg

SEQ ID NO: 224817 - DNA, 15 bp, Homo sapiens
cgagtgtctggaagt

SEQ ID NO: 224818 - DNA, 15 bp, Homo sapiens
ccgagtgtctggaag

SEQ ID NO: 224819 - DNA, 15 bp, Homo sapiens
accgagtgtctggaa

SEQ ID NO: 224820 - DNA, 15 bp, Homo sapiens
caccgagtgtctgga

SEQ ID NO: 224821 - DNA, 15 bp, Homo sapiens
tcaccgagtgtctgg

SEQ ID NO: 224822 - DNA, 15 bp, Homo sapiens
ctcaccgagtgtctg

SEQ ID NO: 224823 - DNA, 15 bp, Homo sapiens
gctcaccgagtgtct

SEQ ID NO: 224824 - DNA, 15 bp, Homo sapiens
agctcaccgagtgtc

SEQ ID NO: 224825 - DNA, 15 bp, Homo sapiens
gagctcaccgagtgt

SEQ ID NO: 224826 - DNA, 15 bp, Homo sapiens
agagctcaccgagtg

SEQ ID NO: 224827 - DNA, 15 bp, Homo sapiens
cagagctcaccgagt

SEQ ID NO: 224828 - DNA, 15 bp, Homo sapiens
acagagctcaccgag

SEQ ID NO: 224829 - DNA, 15 bp, Homo sapiens
gacagagctcaccga

SEQ ID NO: 224830 - DNA, 15 bp, Homo sapiens
agacagagctcaccg

SEQ ID NO: 224831 - DNA, 15 bp, Homo sapiens
cagacagagctcacc

SEQ ID NO: 224832 - DNA, 15 bp, Homo sapiens
ccagacagagctcac

SEQ ID NO: 224833 - DNA, 15 bp, Homo sapiens
cccagacagagctca

SEQ ID NO: 224834 - DNA, 15 bp, Homo sapiens
acccagacagagctc

SEQ ID NO: 224835 - DNA, 15 bp, Homo sapiens
cacccagacagagct

SEQ ID NO: 224836 - DNA, 15 bp, Homo sapiens
ccacccagacagagc

SEQ ID NO: 224837 - DNA, 15 bp, Homo sapiens
tccacccagacagag

SEQ ID NO: 224838 - DNA, 15 bp, Homo sapiens
ttccacccagacaga

SEQ ID NO: 224839 - DNA, 15 bp, Homo sapiens
tttccacccagacag

SEQ ID NO: 224840 - DNA, 15 bp, Homo sapiens
ttttccacccagaca

SEQ ID NO: 224841 - DNA, 15 bp, Homo sapiens
gttttccacccagac

SEQ ID NO: 224842 - DNA, 15 bp, Homo sapiens
ggttttccacccaga

SEQ ID NO: 224843 - DNA, 15 bp, Homo sapiens
aggttttccacccag

SEQ ID NO: 224844 - DNA, 15 bp, Homo sapiens
gaggttttccaccca

SEQ ID NO: 224845 - DNA, 15 bp, Homo sapiens
tgaggttttccaccc

SEQ ID NO: 224846 - DNA, 15 bp, Homo sapiens
atgaggttttccacc

SEQ ID NO: 224847 - DNA, 15 bp, Homo sapiens
gatgaggttttccac

SEQ ID NO: 224848 - DNA, 15 bp, Homo sapiens
tgatgaggttttcca

SEQ ID NO: 224849 - DNA, 15 bp, Homo sapiens
ctgatgaggttttcc

SEQ ID NO: 224850 - DNA, 15 bp, Homo sapiens
tctgatgaggttttc

SEQ ID NO: 224851 - DNA, 15 bp, Homo sapiens
ttctgatgaggtttt

SEQ ID NO: 224852 - DNA, 15 bp, Homo sapiens
cttctgatgaggttt

SEQ ID NO: 224853 - DNA, 15 bp, Homo sapiens
gcttctgatgaggtt

SEQ ID NO: 224854 - DNA, 15 bp, Homo sapiens
ggcttctgatgaggt

SEQ ID NO: 224855 - DNA, 15 bp, Homo sapiens
tggcttctgatgagg

SEQ ID NO: 224856 - DNA, 15 bp, Homo sapiens
ctggcttctgatgag

SEQ ID NO: 224857 - DNA, 15 bp, Homo sapiens
tctggcttctgatga

SEQ ID NO: 224858 - DNA, 15 bp, Homo sapiens
atctggcttctgatg

SEQ ID NO: 224859 - DNA, 15 bp, Homo sapiens
aatctggcttctgat

SEQ ID NO: 224860 - DNA, 15 bp, Homo sapiens
caatctggcttctga

SEQ ID NO: 224861 - DNA, 15 bp, Homo sapiens
tcaatctggcttctg

SEQ ID NO: 224862 - DNA, 15 bp, Homo sapiens
ttcaatctggcttct

SEQ ID NO: 224863 - DNA, 15 bp, Homo sapiens
attcaatctggcttc

SEQ ID NO: 224864 - DNA, 15 bp, Homo sapiens
gattcaatctggctt

SEQ ID NO: 224865 - DNA, 15 bp, Homo sapiens
tgattcaatctggct

SEQ ID NO: 224866 - DNA, 15 bp, Homo sapiens
gtgattcaatctggc

SEQ ID NO: 224867 - DNA, 15 bp, Homo sapiens
tgtgattcaatctgg

SEQ ID NO: 224868 - DNA, 15 bp, Homo sapiens
gtgtgattcaatctg

SEQ ID NO: 224869 - DNA, 15 bp, Homo sapiens
ggtgtgattcaatct

SEQ ID NO: 224870 - DNA, 15 bp, Homo sapiens
tggtgtgattcaatc

SEQ ID NO: 224871 - DNA, 15 bp, Homo sapiens
ctggtgtgattcaat

SEQ ID NO: 224872 - DNA, 15 bp, Homo sapiens
actggtgtgattcaa

SEQ ID NO: 224873 - DNA, 15 bp, Homo sapiens
aactggtgtgattca

SEQ ID NO: 224874 - DNA, 15 bp, Homo sapiens
aaactggtgtgattc

SEQ ID NO: 224875 - DNA, 15 bp, Homo sapiens
gaaactggtgtgatt

SEQ ID NO: 224876 - DNA, 15 bp, Homo sapiens
agaaactggtgtgat

SEQ ID NO: 224877 - DNA, 15 bp, Homo sapiens
tagaaactggtgtga

SEQ ID NO: 224878 - DNA, 15 bp, Homo sapiens
ttagaaactggtgtg

SEQ ID NO: 224879 - DNA, 15 bp, Homo sapiens
cttagaaactggtgt

SEQ ID NO: 224880 - DNA, 15 bp, Homo sapiens
tcttagaaactggtg

SEQ ID NO: 224881 - DNA, 15 bp, Homo sapiens
gtcttagaaactggt

SEQ ID NO: 224882 - DNA, 15 bp, Homo sapiens
tgtcttagaaactgg

SEQ ID NO: 224883 - DNA, 15 bp, Homo sapiens
atgtcttagaaactg

SEQ ID NO: 224884 - DNA, 15 bp, Homo sapiens
aatgtcttagaaact

SEQ ID NO: 224885 - DNA, 15 bp, Homo sapiens
gaatgtcttagaaac

SEQ ID NO: 224886 - DNA, 15 bp, Homo sapiens
ggaatgtcttagaaa

SEQ ID NO: 224887 - DNA, 15 bp, Homo sapiens
aggaatgtcttagaa

SEQ ID NO: 224888 - DNA, 15 bp, Homo sapiens
gaggaatgtcttaga

SEQ ID NO: 224889 - DNA, 15 bp, Homo sapiens
tgaggaatgtcttag

SEQ ID NO: 224890 - DNA, 15 bp, Homo sapiens
ttgaggaatgtctta

SEQ ID NO: 224891 - DNA, 15 bp, Homo sapiens
gttgaggaatgtctt

SEQ ID NO: 224892 - DNA, 15 bp, Homo sapiens
ggttgaggaatgtct

SEQ ID NO: 224893 - DNA, 15 bp, Homo sapiens
tggttgaggaatgtc

SEQ ID NO: 224894 - DNA, 15 bp, Homo sapiens
atggttgaggaatgt

SEQ ID NO: 224895 - DNA, 15 bp, Homo sapiens
catggttgaggaatg

SEQ ID NO: 224896 - DNA, 15 bp, Homo sapiens
acatggttgaggaat

SEQ ID NO: 224897 - DNA, 15 bp, Homo sapiens
aacatggttgaggaa

SEQ ID NO: 224898 - DNA, 15 bp, Homo sapiens
taacatggttgagga

SEQ ID NO: 224899 - DNA, 15 bp, Homo sapiens
ctaacatggttgagg

SEQ ID NO: 224900 - DNA, 15 bp, Homo sapiens
cctaacatggttgag

SEQ ID NO: 224901 - DNA, 15 bp, Homo sapiens
gcctaacatggttga

SEQ ID NO: 224902 - DNA, 15 bp, Homo sapiens
tgcctaacatggttg

SEQ ID NO: 224903 - DNA, 15 bp, Homo sapiens
ttgcctaacatggtt

SEQ ID NO: 224904 - DNA, 15 bp, Homo sapiens
tttgcctaacatggt

SEQ ID NO: 224905 - DNA, 15 bp, Homo sapiens
ttttgcctaacatgg

SEQ ID NO: 224906 - DNA, 15 bp, Homo sapiens
cttttgcctaacatg

SEQ ID NO: 224907 - DNA, 15 bp, Homo sapiens
tcttttgcctaacat

SEQ ID NO: 224908 - DNA, 15 bp, Homo sapiens
ctcttttgcctaaca

SEQ ID NO: 224909 - DNA, 15 bp, Homo sapiens
actcttttgcctaac

SEQ ID NO: 224910 - DNA, 15 bp, Homo sapiens
gactcttttgcctaa

SEQ ID NO: 224911 - DNA, 15 bp, Homo sapiens
ggactcttttgccta

SEQ ID NO: 224912 - DNA, 15 bp, Homo sapiens
gggactcttttgcct

SEQ ID NO: 224913 - DNA, 15 bp, Homo sapiens
ggggactcttttgcc

SEQ ID NO: 224914 - DNA, 15 bp, Homo sapiens
gggggactcttttgc

SEQ ID NO: 224915 - DNA, 15 bp, Homo sapiens
tgggggactcttttg

SEQ ID NO: 224916 - DNA, 15 bp, Homo sapiens
gtgggggactctttt

SEQ ID NO: 224917 - DNA, 15 bp, Homo sapiens
agtgggggactcttt

SEQ ID NO: 224918 - DNA, 15 bp, Homo sapiens
cagtgggggactctt

SEQ ID NO: 224919 - DNA, 15 bp, Homo sapiens
tcagtgggggactct

SEQ ID NO: 224920 - DNA, 15 bp, Homo sapiens
gtcagtgggggactc

SEQ ID NO: 224921 - DNA, 15 bp, Homo sapiens
tgtcagtgggggact

SEQ ID NO: 224922 - DNA, 15 bp, Homo sapiens
ttgtcagtgggggac

SEQ ID NO: 224923 - DNA, 15 bp, Homo sapiens
cttgtcagtggggga

SEQ ID NO: 224924 - DNA, 15 bp, Homo sapiens
gcttgtcagtggggg

SEQ ID NO: 224925 - DNA, 15 bp, Homo sapiens
agcttgtcagtgggg

SEQ ID NO: 224926 - DNA, 15 bp, Homo sapiens
cagcttgtcagtggg

SEQ ID NO: 224927 - DNA, 15 bp, Homo sapiens
ccagcttgtcagtgg

SEQ ID NO: 224928 - DNA, 15 bp, Homo sapiens
cccagcttgtcagtg

SEQ ID NO: 224929 - DNA, 15 bp, Homo sapiens
ccccagcttgtcagt

SEQ ID NO: 224930 - DNA, 15 bp, Homo sapiens
accccagcttgtcag

SEQ ID NO: 224931 - DNA, 15 bp, Homo sapiens
taccccagcttgtca

SEQ ID NO: 224932 - DNA, 15 bp, Homo sapiens
ctaccccagcttgtc

SEQ ID NO: 224933 - DNA, 15 bp, Homo sapiens
tctaccccagcttgt

SEQ ID NO: 224934 - DNA, 15 bp, Homo sapiens
ttctaccccagcttg

SEQ ID NO: 224935 - DNA, 15 bp, Homo sapiens
cttctaccccagctt

SEQ ID NO: 224936 - DNA, 15 bp, Homo sapiens
ccttctaccccagct

SEQ ID NO: 224937 - DNA, 15 bp, Homo sapiens
tccttctaccccagc

SEQ ID NO: 224938 - DNA, 15 bp, Homo sapiens
ttccttctaccccag

SEQ ID NO: 224939 - DNA, 15 bp, Homo sapiens
tttccttctacccca

SEQ ID NO: 224940 - DNA, 15 bp, Homo sapiens
gtttccttctacccc

SEQ ID NO: 224941 - DNA, 15 bp, Homo sapiens
ggtttccttctaccc

SEQ ID NO: 224942 - DNA, 15 bp, Homo sapiens
aggtttccttctacc

SEQ ID NO: 224943 - DNA, 15 bp, Homo sapiens
caggtttccttctac

SEQ ID NO: 224944 - DNA, 15 bp, Homo sapiens
tcaggtttccttcta

SEQ ID NO: 224945 - DNA, 15 bp, Homo sapiens
atcaggtttccttct

SEQ ID NO: 224946 - DNA, 15 bp, Homo sapiens
tatcaggtttccttc

SEQ ID NO: 224947 - DNA, 15 bp, Homo sapiens
atatcaggtttcctt

SEQ ID NO: 224948 - DNA, 15 bp, Homo sapiens
tatatcaggtttcct

SEQ ID NO: 224949 - DNA, 15 bp, Homo sapiens
ttatatcaggtttcc

SEQ ID NO: 224950 - DNA, 15 bp, Homo sapiens
attatatcaggtttc

SEQ ID NO: 224951 - DNA, 15 bp, Homo sapiens
aattatatcaggttt

SEQ ID NO: 224952 - DNA, 15 bp, Homo sapiens
aaattatatcaggtt

SEQ ID NO: 224953 - DNA, 15 bp, Homo sapiens
aaaattatatcaggt

SEQ ID NO: 224954 - DNA, 15 bp, Homo sapiens
caaaattatatcagg

SEQ ID NO: 224955 - DNA, 15 bp, Homo sapiens
ccaaaattatatcag

SEQ ID NO: 224956 - DNA, 15 bp, Homo sapiens
tccaaaattatatca

SEQ ID NO: 224957 - DNA, 15 bp, Homo sapiens
ttccaaaattatatc

SEQ ID NO: 224958 - DNA, 15 bp, Homo sapiens
tttccaaaattatat

SEQ ID NO: 224959 - DNA, 15 bp, Homo sapiens
ttttccaaaattata

SEQ ID NO: 224960 - DNA, 15 bp, Homo sapiens
tttttccaaaattat

SEQ ID NO: 224961 - DNA, 15 bp, Homo sapiens
ttttttccaaaatta

SEQ ID NO: 224962 - DNA, 15 bp, Homo sapiens
tttttttccaaaatt

SEQ ID NO: 224963 - DNA, 15 bp, Homo sapiens
gtttttttccaaaat

SEQ ID NO: 224964 - DNA, 15 bp, Homo sapiens
ggtttttttccaaaa

SEQ ID NO: 224965 - DNA, 15 bp, Homo sapiens
aggtttttttccaaa

SEQ ID NO: 224966 - DNA, 15 bp, Homo sapiens
aaggtttttttccaa

SEQ ID NO: 224967 - DNA, 15 bp, Homo sapiens
taaggtttttttcca

SEQ ID NO: 224968 - DNA, 15 bp, Homo sapiens
gtaaggtttttttcc

SEQ ID NO: 224969 - DNA, 15 bp, Homo sapiens
agtaaggtttttttc

SEQ ID NO: 224970 - DNA, 15 bp, Homo sapiens
aagtaaggttttttt

SEQ ID NO: 224971 - DNA, 15 bp, Homo sapiens
caagtaaggtttttt

SEQ ID NO: 224972 - DNA, 15 bp, Homo sapiens
tcaagtaaggttttt

SEQ ID NO: 224973 - DNA, 15 bp, Homo sapiens
ctcaagtaaggtttt

SEQ ID NO: 224974 - DNA, 15 bp, Homo sapiens
tctcaagtaaggttt

SEQ ID NO: 224975 - DNA, 15 bp, Homo sapiens
ttctcaagtaaggtt

SEQ ID NO: 224976 - DNA, 15 bp, Homo sapiens
tttctcaagtaaggt

SEQ ID NO: 224977 - DNA, 15 bp, Homo sapiens
ctttctcaagtaagg

SEQ ID NO: 224978 - DNA, 15 bp, Homo sapiens
tctttctcaagtaag

SEQ ID NO: 224979 - DNA, 15 bp, Homo sapiens
ttctttctcaagtaa

SEQ ID NO: 224980 - DNA, 15 bp, Homo sapiens
cttctttctcaagta

SEQ ID NO: 224981 - DNA, 15 bp, Homo sapiens
ccttctttctcaagt

SEQ ID NO: 224982 - DNA, 15 bp, Homo sapiens
accttctttctcaag

SEQ ID NO: 224983 - DNA, 15 bp, Homo sapiens
aaccttctttctcaa

SEQ ID NO: 224984 - DNA, 15 bp, Homo sapiens
gaaccttctttctca

SEQ ID NO: 224985 - DNA, 15 bp, Homo sapiens
agaaccttctttctc

SEQ ID NO: 224986 - DNA, 15 bp, Homo sapiens
gagaaccttctttct

SEQ ID NO: 224987 - DNA, 15 bp, Homo sapiens
tgagaaccttctttc

SEQ ID NO: 224988 - DNA, 15 bp, Homo sapiens
gtgagaaccttcttt

SEQ ID NO: 224989 - DNA, 15 bp, Homo sapiens
tgtgagaaccttctt

SEQ ID NO: 224990 - DNA, 15 bp, Homo sapiens
ctgtgagaaccttct

SEQ ID NO: 224991 - DNA, 15 bp, Homo sapiens
gctgtgagaaccttc

SEQ ID NO: 224992 - DNA, 15 bp, Homo sapiens
agctgtgagaacctt

SEQ ID NO: 224993 - DNA, 15 bp, Homo sapiens
cagctgtgagaacct

SEQ ID NO: 224994 - DNA, 15 bp, Homo sapiens
gcagctgtgagaacc

SEQ ID NO: 224995 - DNA, 15 bp, Homo sapiens
ggcagctgtgagaac

SEQ ID NO: 224996 - DNA, 15 bp, Homo sapiens
cggcagctgtgagaa

SEQ ID NO: 224997 - DNA, 15 bp, Homo sapiens
tcggcagctgtgaga

SEQ ID NO: 224998 - DNA, 15 bp, Homo sapiens
ctcggcagctgtgag

SEQ ID NO: 224999 - DNA, 15 bp, Homo sapiens
actcggcagctgtga

SEQ ID NO: 225000 - DNA, 15 bp, Homo sapiens
gactcggcagctgtg

SEQ ID NO: 225001 - DNA, 15 bp, Homo sapiens
agactcggcagctgt

SEQ ID NO: 225002 - DNA, 15 bp, Homo sapiens
gagactcggcagctg

SEQ ID NO: 225003 - DNA, 15 bp, Homo sapiens
agagactcggcagct

SEQ ID NO: 225004 - DNA, 15 bp, Homo sapiens
gagagactcggcagc

SEQ ID NO: 225005 - DNA, 15 bp, Homo sapiens
agagagactcggcag

SEQ ID NO: 225006 - DNA, 15 bp, Homo sapiens
gagagagactcggca

SEQ ID NO: 225007 - DNA, 15 bp, Homo sapiens
cgagagagactcggc

SEQ ID NO: 225008 - DNA, 15 bp, Homo sapiens
tcgagagagactcgg

SEQ ID NO: 225009 - DNA, 15 bp, Homo sapiens
gtcgagagagactcg

SEQ ID NO: 225010 - DNA, 15 bp, Homo sapiens
cgtcgagagagactc

SEQ ID NO: 225011 - DNA, 15 bp, Homo sapiens
acgtcgagagagact

SEQ ID NO: 225012 - DNA, 15 bp, Homo sapiens
gacgtcgagagagac

SEQ ID NO: 225013 - DNA, 15 bp, Homo sapiens
ggacgtcgagagaga

SEQ ID NO: 225014 - DNA, 15 bp, Homo sapiens
tggacgtcgagagag

SEQ ID NO: 225015 - DNA, 15 bp, Homo sapiens
ctggacgtcgagaga

SEQ ID NO: 225016 - DNA, 15 bp, Homo sapiens
cctggacgtcgagag

SEQ ID NO: 225017 - DNA, 15 bp, Homo sapiens
ccctggacgtcgaga

SEQ ID NO: 225018 - DNA, 15 bp, Homo sapiens
accctggacgtcgag

SEQ ID NO: 225019 - DNA, 15 bp, Homo sapiens
aaccctggacgtcga

SEQ ID NO: 225020 - DNA, 15 bp, Homo sapiens
caaccctggacgtcg

SEQ ID NO: 225021 - DNA, 15 bp, Homo sapiens
ccaaccctggacgtc

SEQ ID NO: 225022 - DNA, 15 bp, Homo sapiens
tccaaccctggacgt

SEQ ID NO: 225023 - DNA, 15 bp, Homo sapiens
ctccaaccctggacg

SEQ ID NO: 225024 - DNA, 15 bp, Homo sapiens
cctccaaccctggac

SEQ ID NO: 225025 - DNA, 15 bp, Homo sapiens
ccctccaaccctgga

SEQ ID NO: 225026 - DNA, 15 bp, Homo sapiens
cccctccaaccctgg

SEQ ID NO: 225027 - DNA, 15 bp, Homo sapiens
acccctccaaccctg

SEQ ID NO: 225028 - DNA, 15 bp, Homo sapiens
gacccctccaaccct

SEQ ID NO: 225029 - DNA, 15 bp, Homo sapiens
ggacccctccaaccc

SEQ ID NO: 225030 - DNA, 15 bp, Homo sapiens
gggacccctccaacc

SEQ ID NO: 225031 - DNA, 15 bp, Homo sapiens
tgggacccctccaac

SEQ ID NO: 225032 - DNA, 15 bp, Homo sapiens
ctgggacccctccaa

SEQ ID NO: 225033 - DNA, 15 bp, Homo sapiens
cctgggacccctcca

SEQ ID NO: 225034 - DNA, 15 bp, Homo sapiens
gcctgggacccctcc

SEQ ID NO: 225035 - DNA, 15 bp, Homo sapiens
ggcctgggacccctc

SEQ ID NO: 225036 - DNA, 15 bp, Homo sapiens
tggcctgggacccct

SEQ ID NO: 225037 - DNA, 15 bp, Homo sapiens
atggcctgggacccc

SEQ ID NO: 225038 - DNA, 15 bp, Homo sapiens
catggcctgggaccc

SEQ ID NO: 225039 - DNA, 15 bp, Homo sapiens
ccatggcctgggacc

SEQ ID NO: 225040 - DNA, 15 bp, Homo sapiens
tccatggcctgggac

SEQ ID NO: 225041 - DNA, 15 bp, Homo sapiens
ctccatggcctggga

SEQ ID NO: 225042 - DNA, 15 bp, Homo sapiens
tctccatggcctggg

SEQ ID NO: 225043 - DNA, 15 bp, Homo sapiens
ctctccatggcctgg

SEQ ID NO: 225044 - DNA, 15 bp, Homo sapiens
tctctccatggcctg

SEQ ID NO: 225045 - DNA, 15 bp, Homo sapiens
ttctctccatggcct

SEQ ID NO: 225046 - DNA, 15 bp, Homo sapiens
cttctctccatggcc

SEQ ID NO: 225047 - DNA, 15 bp, Homo sapiens
tcttctctccatggc

SEQ ID NO: 225048 - DNA, 15 bp, Homo sapiens
atcttctctccatgg

SEQ ID NO: 225049 - DNA, 15 bp, Homo sapiens
aatcttctctccatg

SEQ ID NO: 225050 - DNA, 15 bp, Homo sapiens
caatcttctctccat

SEQ ID NO: 225051 - DNA, 15 bp, Homo sapiens
tcaatcttctctcca

SEQ ID NO: 225052 - DNA, 15 bp, Homo sapiens
atcaatcttctctcc

SEQ ID NO: 225053 - DNA, 15 bp, Homo sapiens
catcaatcttctctc

SEQ ID NO: 225054 - DNA, 15 bp, Homo sapiens
ccatcaatcttctct

SEQ ID NO: 225055 - DNA, 15 bp, Homo sapiens
cccatcaatcttctc

SEQ ID NO: 225056 - DNA, 15 bp, Homo sapiens
acccatcaatcttct

SEQ ID NO: 225057 - DNA, 15 bp, Homo sapiens
gacccatcaatcttc

SEQ ID NO: 225058 - DNA, 15 bp, Homo sapiens
agacccatcaatctt

SEQ ID NO: 225059 - DNA, 15 bp, Homo sapiens
tagacccatcaatct

SEQ ID NO: 225060 - DNA, 15 bp, Homo sapiens
ctagacccatcaatc

SEQ ID NO: 225061 - DNA, 15 bp, Homo sapiens
gctagacccatcaat

SEQ ID NO: 225062 - DNA, 15 bp, Homo sapiens
cgctagacccatcaa

SEQ ID NO: 225063 - DNA, 15 bp, Homo sapiens
ccgctagacccatca

SEQ ID NO: 225064 - DNA, 15 bp, Homo sapiens
tccgctagacccatc

SEQ ID NO: 225065 - DNA, 15 bp, Homo sapiens
ctccgctagacccat

SEQ ID NO: 225066 - DNA, 15 bp, Homo sapiens
gctccgctagaccca

SEQ ID NO: 225067 - DNA, 15 bp, Homo sapiens
ggctccgctagaccc

SEQ ID NO: 225068 - DNA, 15 bp, Homo sapiens
tggctccgctagacc

SEQ ID NO: 225069 - DNA, 15 bp, Homo sapiens
ttggctccgctagac

SEQ ID NO: 225070 - DNA, 15 bp, Homo sapiens
cttggctccgctaga

SEQ ID NO: 225071 - DNA, 15 bp, Homo sapiens
acttggctccgctag

SEQ ID NO: 225072 - DNA, 15 bp, Homo sapiens
tacttggctccgcta

SEQ ID NO: 225073 - DNA, 15 bp, Homo sapiens
ctacttggctccgct

SEQ ID NO: 225074 - DNA, 15 bp, Homo sapiens
tctacttggctccgc

SEQ ID NO: 225075 - DNA, 15 bp, Homo sapiens
ctctacttggctccg

SEQ ID NO: 225076 - DNA, 15 bp, Homo sapiens
tctctacttggctcc

SEQ ID NO: 225077 - DNA, 15 bp, Homo sapiens
ctctctacttggctc

SEQ ID NO: 225078 - DNA, 15 bp, Homo sapiens
actctctacttggct

SEQ ID NO: 225079 - DNA, 15 bp, Homo sapiens
aactctctacttggc

SEQ ID NO: 225080 - DNA, 15 bp, Homo sapiens
caactctctacttgg

SEQ ID NO: 225081 - DNA, 15 bp, Homo sapiens
tcaactctctacttg

SEQ ID NO: 225082 - DNA, 15 bp, Homo sapiens
ctcaactctctactt

SEQ ID NO: 225083 - DNA, 15 bp, Homo sapiens
cctcaactctctact

SEQ ID NO: 225084 - DNA, 15 bp, Homo sapiens
gcctcaactctctac

SEQ ID NO: 225085 - DNA, 15 bp, Homo sapiens
agcctcaactctcta

SEQ ID NO: 225086 - DNA, 15 bp, Homo sapiens
aagcctcaactctct

SEQ ID NO: 225087 - DNA, 15 bp, Homo sapiens
aaagcctcaactctc

SEQ ID NO: 225088 - DNA, 15 bp, Homo sapiens
caaagcctcaactct

SEQ ID NO: 225089 - DNA, 15 bp, Homo sapiens
gcaaagcctcaactc

SEQ ID NO: 225090 - DNA, 15 bp, Homo sapiens
tgcaaagcctcaact

SEQ ID NO: 225091 - DNA, 15 bp, Homo sapiens
ctgcaaagcctcaac

SEQ ID NO: 225092 - DNA, 15 bp, Homo sapiens
cctgcaaagcctcaa

SEQ ID NO: 225093 - DNA, 15 bp, Homo sapiens
ccctgcaaagcctca

SEQ ID NO: 225094 - DNA, 15 bp, Homo sapiens
gccctgcaaagcctc

SEQ ID NO: 225095 - DNA, 15 bp, Homo sapiens
ggccctgcaaagcct

SEQ ID NO: 225096 - DNA, 15 bp, Homo sapiens
tggccctgcaaagcc

SEQ ID NO: 225097 - DNA, 15 bp, Homo sapiens
ctggccctgcaaagc

SEQ ID NO: 225098 - DNA, 15 bp, Homo sapiens
cctggccctgcaaag

SEQ ID NO: 225099 - DNA, 15 bp, Homo sapiens
gcctggccctgcaaa

SEQ ID NO: 225100 - DNA, 15 bp, Homo sapiens
cgcctggccctgcaa

SEQ ID NO: 225101 - DNA, 15 bp, Homo sapiens
gcgcctggccctgca

SEQ ID NO: 225102 - DNA, 15 bp, Homo sapiens
agcgcctggccctgc

SEQ ID NO: 225103 - DNA, 15 bp, Homo sapiens
aagcgcctggccctg

SEQ ID NO: 225104 - DNA, 15 bp, Homo sapiens
caagcgcctggccct

SEQ ID NO: 225105 - DNA, 15 bp, Homo sapiens
gcaagcgcctggccc

SEQ ID NO: 225106 - DNA, 15 bp, Homo sapiens
ggcaagcgcctggcc

SEQ ID NO: 225107 - DNA, 15 bp, Homo sapiens
tggcaagcgcctggc

SEQ ID NO: 225108 - DNA, 15 bp, Homo sapiens
atggcaagcgcctgg

SEQ ID NO: 225109 - DNA, 15 bp, Homo sapiens
gatggcaagcgcctg

SEQ ID NO: 225110 - DNA, 15 bp, Homo sapiens
ggatggcaagcgcct

SEQ ID NO: 225111 - DNA, 15 bp, Homo sapiens
aggatggcaagcgcc

SEQ ID NO: 225112 - DNA, 15 bp, Homo sapiens
aaggatggcaagcgc

SEQ ID NO: 225113 - DNA, 15 bp, Homo sapiens
taaggatggcaagcg

SEQ ID NO: 225114 - DNA, 15 bp, Homo sapiens
ttaaggatggcaagc

SEQ ID NO: 225115 - DNA, 15 bp, Homo sapiens
gttaaggatggcaag

SEQ ID NO: 225116 - DNA, 15 bp, Homo sapiens
agttaaggatggcaa

SEQ ID NO: 225117 - DNA, 15 bp, Homo sapiens
gagttaaggatggca

SEQ ID NO: 225118 - DNA, 15 bp, Homo sapiens
ggagttaaggatggc

SEQ ID NO: 225119 - DNA, 15 bp, Homo sapiens
gggagttaaggatgg

SEQ ID NO: 225120 - DNA, 15 bp, Homo sapiens
tgggagttaaggatg

SEQ ID NO: 225121 - DNA, 15 bp, Homo sapiens
atgggagttaaggat

SEQ ID NO: 225122 - DNA, 15 bp, Homo sapiens
aatgggagttaagga

SEQ ID NO: 225123 - DNA, 15 bp, Homo sapiens
taatgggagttaagg

SEQ ID NO: 225124 - DNA, 15 bp, Homo sapiens
ctaatgggagttaag

SEQ ID NO: 225125 - DNA, 15 bp, Homo sapiens
cctaatgggagttaa

SEQ ID NO: 225126 - DNA, 15 bp, Homo sapiens
ccctaatgggagtta

SEQ ID NO: 225127 - DNA, 15 bp, Homo sapiens
tccctaatgggagtt

SEQ ID NO: 225128 - DNA, 15 bp, Homo sapiens
atccctaatgggagt

SEQ ID NO: 225129 - DNA, 15 bp, Homo sapiens
gatccctaatgggag

SEQ ID NO: 225130 - DNA, 15 bp, Homo sapiens
cgatccctaatggga

SEQ ID NO: 225131 - DNA, 15 bp, Homo sapiens
tcgatccctaatggg

SEQ ID NO: 225132 - DNA, 15 bp, Homo sapiens
ctcgatccctaatgg

SEQ ID NO: 225133 - DNA, 15 bp, Homo sapiens
tctcgatccctaatg

SEQ ID NO: 225134 - DNA, 15 bp, Homo sapiens
ttctcgatccctaat

SEQ ID NO: 225135 - DNA, 15 bp, Homo sapiens
cttctcgatccctaa

SEQ ID NO: 225136 - DNA, 15 bp, Homo sapiens
ccttctcgatcccta

SEQ ID NO: 225137 - DNA, 15 bp, Homo sapiens
tccttctcgatccct

SEQ ID NO: 225138 - DNA, 15 bp, Homo sapiens
ttccttctcgatccc

SEQ ID NO: 225139 - DNA, 15 bp, Homo sapiens
tttccttctcgatcc

SEQ ID NO: 225140 - DNA, 15 bp, Homo sapiens
ttttccttctcgatc

SEQ ID NO: 225141 - DNA, 15 bp, Homo sapiens
cttttccttctcgat

SEQ ID NO: 225142 - DNA, 15 bp, Homo sapiens
ccttttccttctcga

SEQ ID NO: 225143 - DNA, 15 bp, Homo sapiens
tccttttccttctcg

SEQ ID NO: 225144 - DNA, 15 bp, Homo sapiens
ctccttttccttctc

SEQ ID NO: 225145 - DNA, 15 bp, Homo sapiens
tctccttttccttct

SEQ ID NO: 225146 - DNA, 15 bp, Homo sapiens
ttctccttttccttc

SEQ ID NO: 225147 - DNA, 15 bp, Homo sapiens
cttctccttttcctt

SEQ ID NO: 225148 - DNA, 15 bp, Homo sapiens
ccttctccttttcct

SEQ ID NO: 225149 - DNA, 15 bp, Homo sapiens
tccttctccttttcc

SEQ ID NO: 225150 - DNA, 15 bp, Homo sapiens
ctccttctccttttc

SEQ ID NO: 225151 - DNA, 15 bp, Homo sapiens
actccttctcctttt

SEQ ID NO: 225152 - DNA, 15 bp, Homo sapiens
aactccttctccttt

SEQ ID NO: 225153 - DNA, 15 bp, Homo sapiens
gaactccttctcctt

SEQ ID NO: 225154 - DNA, 15 bp, Homo sapiens
agaactccttctcct

SEQ ID NO: 225155 - DNA, 15 bp, Homo sapiens
gagaactccttctcc

SEQ ID NO: 225156 - DNA, 15 bp, Homo sapiens
agagaactccttctc

SEQ ID NO: 225157 - DNA, 15 bp, Homo sapiens
cagagaactccttct

SEQ ID NO: 225158 - DNA, 15 bp, Homo sapiens
tcagagaactccttc

SEQ ID NO: 225159 - DNA, 15 bp, Homo sapiens
ttcagagaactcctt

SEQ ID NO: 225160 - DNA, 15 bp, Homo sapiens
attcagagaactcct

SEQ ID NO: 225161 - DNA, 15 bp, Homo sapiens
gattcagagaactcc

SEQ ID NO: 225162 - DNA, 15 bp, Homo sapiens
ggattcagagaactc

SEQ ID NO: 225163 - DNA, 15 bp, Homo sapiens
tggattcagagaact

SEQ ID NO: 225164 - DNA, 15 bp, Homo sapiens
ttggattcagagaac

SEQ ID NO: 225165 - DNA, 15 bp, Homo sapiens
attggattcagagaa

SEQ ID NO: 225166 - DNA, 15 bp, Homo sapiens
cattggattcagaga

SEQ ID NO: 225167 - DNA, 15 bp, Homo sapiens
ccattggattcagag

SEQ ID NO: 225168 - DNA, 15 bp, Homo sapiens
tccattggattcaga

SEQ ID NO: 225169 - DNA, 15 bp, Homo sapiens
ttccattggattcag

SEQ ID NO: 225170 - DNA, 15 bp, Homo sapiens
tttccattggattca

SEQ ID NO: 225171 - DNA, 15 bp, Homo sapiens
ttttccattggattc

SEQ ID NO: 225172 - DNA, 15 bp, Homo sapiens
tttttccattggatt

SEQ ID NO: 225173 - DNA, 15 bp, Homo sapiens
ctttttccattggat

SEQ ID NO: 225174 - DNA, 15 bp, Homo sapiens
tctttttccattgga

SEQ ID NO: 225175 - DNA, 15 bp, Homo sapiens
ttctttttccattgg

SEQ ID NO: 225176 - DNA, 15 bp, Homo sapiens
cttctttttccattg

SEQ ID NO: 225177 - DNA, 15 bp, Homo sapiens
acttctttttccatt

SEQ ID NO: 225178 - DNA, 15 bp, Homo sapiens
gacttctttttccat

SEQ ID NO: 225179 - DNA, 15 bp, Homo sapiens
ggacttctttttcca

SEQ ID NO: 225180 - DNA, 15 bp, Homo sapiens
aggacttctttttcc

SEQ ID NO: 225181 - DNA, 15 bp, Homo sapiens
caggacttctttttc

SEQ ID NO: 225182 - DNA, 15 bp, Homo sapiens
acaggacttcttttt

SEQ ID NO: 225183 - DNA, 15 bp, Homo sapiens
gacaggacttctttt

SEQ ID NO: 225184 - DNA, 15 bp, Homo sapiens
agacaggacttcttt

SEQ ID NO: 225185 - DNA, 15 bp, Homo sapiens
gagacaggacttctt

SEQ ID NO: 225186 - DNA, 15 bp, Homo sapiens
ggagacaggacttct

SEQ ID NO: 225187 - DNA, 15 bp, Homo sapiens
aggagacaggacttc

SEQ ID NO: 225188 - DNA, 15 bp, Homo sapiens
aaggagacaggactt

SEQ ID NO: 225189 - DNA, 15 bp, Homo sapiens
aaaggagacaggact

SEQ ID NO: 225190 - DNA, 15 bp, Homo sapiens
gaaaggagacaggac

SEQ ID NO: 225191 - DNA, 15 bp, Homo sapiens
ggaaaggagacagga

SEQ ID NO: 225192 - DNA, 15 bp, Homo sapiens
gggaaaggagacagg

SEQ ID NO: 225193 - DNA, 15 bp, Homo sapiens
agggaaaggagacag

SEQ ID NO: 225194 - DNA, 15 bp, Homo sapiens
cagggaaaggagaca

SEQ ID NO: 225195 - DNA, 15 bp, Homo sapiens
ccagggaaaggagac

SEQ ID NO: 225196 - DNA, 15 bp, Homo sapiens
cccagggaaaggaga

SEQ ID NO: 225197 - DNA, 15 bp, Homo sapiens
gcccagggaaaggag

SEQ ID NO: 225198 - DNA, 15 bp, Homo sapiens
agcccagggaaagga

SEQ ID NO: 225199 - DNA, 15 bp, Homo sapiens
cagcccagggaaagg

SEQ ID NO: 225200 - DNA, 15 bp, Homo sapiens
acagcccagggaaag

SEQ ID NO: 225201 - DNA, 15 bp, Homo sapiens
aacagcccagggaaa

SEQ ID NO: 225202 - DNA, 15 bp, Homo sapiens
caacagcccagggaa

SEQ ID NO: 225203 - DNA, 15 bp, Homo sapiens
tcaacagcccaggga

SEQ ID NO: 225204 - DNA, 15 bp, Homo sapiens
ttcaacagcccaggg

SEQ ID NO: 225205 - DNA, 15 bp, Homo sapiens
attcaacagcccagg

SEQ ID NO: 225206 - DNA, 15 bp, Homo sapiens
aattcaacagcccag

SEQ ID NO: 225207 - DNA, 15 bp, Homo sapiens
caattcaacagccca

SEQ ID NO: 225208 - DNA, 15 bp, Homo sapiens
acaattcaacagccc

SEQ ID NO: 225209 - DNA, 15 bp, Homo sapiens
aacaattcaacagcc

SEQ ID NO: 225210 - DNA, 15 bp, Homo sapiens
aaacaattcaacagc

SEQ ID NO: 225211 - DNA, 15 bp, Homo sapiens
aaaacaattcaacag

SEQ ID NO: 225212 - DNA, 15 bp, Homo sapiens
aaaaacaattcaaca

SEQ ID NO: 225213 - DNA, 15 bp, Homo sapiens
taaaaacaattcaac

SEQ ID NO: 225214 - DNA, 15 bp, Homo sapiens
ataaaaacaattcaa

SEQ ID NO: 225215 - DNA, 15 bp, Homo sapiens
aataaaaacaattca

SEQ ID NO: 225216 - DNA, 15 bp, Homo sapiens
aaataaaaacaattc

SEQ ID NO: 225217 - DNA, 15 bp, Homo sapiens
gaaataaaaacaatt

SEQ ID NO: 225218 - DNA, 15 bp, Homo sapiens
tgaaataaaaacaat

SEQ ID NO: 225219 - DNA, 15 bp, Homo sapiens
gtgaaataaaaacaa

SEQ ID NO: 225220 - DNA, 15 bp, Homo sapiens
tgtgaaataaaaaca

SEQ ID NO: 225221 - DNA, 15 bp, Homo sapiens
atgtgaaataaaaac

SEQ ID NO: 225222 - DNA, 15 bp, Homo sapiens
aatgtgaaataaaaa

SEQ ID NO: 225223 - DNA, 15 bp, Homo sapiens
taatgtgaaataaaa

SEQ ID NO: 225224 - DNA, 15 bp, Homo sapiens
ctaatgtgaaataaa

SEQ ID NO: 225225 - DNA, 15 bp, Homo sapiens
gctaatgtgaaataa

SEQ ID NO: 225226 - DNA, 15 bp, Homo sapiens
tgctaatgtgaaata

SEQ ID NO: 225227 - DNA, 15 bp, Homo sapiens
ttgctaatgtgaaat

SEQ ID NO: 225228 - DNA, 15 bp, Homo sapiens
gttgctaatgtgaaa

SEQ ID NO: 225229 - DNA, 15 bp, Homo sapiens
agttgctaatgtgaa

SEQ ID NO: 225230 - DNA, 15 bp, Homo sapiens
cagttgctaatgtga

SEQ ID NO: 225231 - DNA, 15 bp, Homo sapiens
gcagttgctaatgtg

SEQ ID NO: 225232 - DNA, 15 bp, Homo sapiens
agcagttgctaatgt

SEQ ID NO: 225233 - DNA, 15 bp, Homo sapiens
gagcagttgctaatg

SEQ ID NO: 225234 - DNA, 15 bp, Homo sapiens
agagcagttgctaat

SEQ ID NO: 225235 - DNA, 15 bp, Homo sapiens
cagagcagttgctaa

SEQ ID NO: 225236 - DNA, 15 bp, Homo sapiens
ccagagcagttgcta

SEQ ID NO: 225237 - DNA, 15 bp, Homo sapiens
tccagagcagttgct

SEQ ID NO: 225238 - DNA, 15 bp, Homo sapiens
gtccagagcagttgc

SEQ ID NO: 225239 - DNA, 15 bp, Homo sapiens
agtccagagcagttg

SEQ ID NO: 225240 - DNA, 15 bp, Homo sapiens
gagtccagagcagtt

SEQ ID NO: 225241 - DNA, 15 bp, Homo sapiens
agagtccagagcagt

SEQ ID NO: 225242 - DNA, 15 bp, Homo sapiens
gagagtccagagcag

SEQ ID NO: 225243 - DNA, 15 bp, Homo sapiens
agagagtccagagca

SEQ ID NO: 225244 - DNA, 15 bp, Homo sapiens
aagagagtccagagc

SEQ ID NO: 225245 - DNA, 15 bp, Homo sapiens
caagagagtccagag

SEQ ID NO: 225246 - DNA, 15 bp, Homo sapiens
acaagagagtccaga

SEQ ID NO: 225247 - DNA, 15 bp, Homo sapiens
cacaagagagtccag

SEQ ID NO: 225248 - DNA, 15 bp, Homo sapiens
acacaagagagtcca

SEQ ID NO: 225249 - DNA, 15 bp, Homo sapiens
aacacaagagagtcc

SEQ ID NO: 225250 - DNA, 15 bp, Homo sapiens
aaacacaagagagtc

SEQ ID NO: 225251 - DNA, 15 bp, Homo sapiens
caaacacaagagagt

SEQ ID NO: 225252 - DNA, 15 bp, Homo sapiens
ccaaacacaagagag

SEQ ID NO: 225253 - DNA, 15 bp, Homo sapiens
gccaaacacaagaga

SEQ ID NO: 225254 - DNA, 15 bp, Homo sapiens
agccaaacacaagag

SEQ ID NO: 225255 - DNA, 15 bp, Homo sapiens
cagccaaacacaaga

SEQ ID NO: 225256 - DNA, 15 bp, Homo sapiens
gcagccaaacacaag

SEQ ID NO: 225257 - DNA, 15 bp, Homo sapiens
agcagccaaacacaa

SEQ ID NO: 225258 - DNA, 15 bp, Homo sapiens
cagcagccaaacaca

SEQ ID NO: 225259 - DNA, 15 bp, Homo sapiens
acagcagccaaacac

SEQ ID NO: 225260 - DNA, 15 bp, Homo sapiens
cacagcagccaaaca

SEQ ID NO: 225261 - DNA, 15 bp, Homo sapiens
acacagcagccaaac

SEQ ID NO: 225262 - DNA, 15 bp, Homo sapiens
aacacagcagccaaa

SEQ ID NO: 225263 - DNA, 15 bp, Homo sapiens
caacacagcagccaa

SEQ ID NO: 225264 - DNA, 15 bp, Homo sapiens
ccaacacagcagcca

SEQ ID NO: 225265 - DNA, 15 bp, Homo sapiens
tccaacacagcagcc

SEQ ID NO: 225266 - DNA, 15 bp, Homo sapiens
ctccaacacagcagc

SEQ ID NO: 225267 - DNA, 15 bp, Homo sapiens
tctccaacacagcag

SEQ ID NO: 225268 - DNA, 15 bp, Homo sapiens
gtctccaacacagca

SEQ ID NO: 225269 - DNA, 15 bp, Homo sapiens
ggtctccaacacagc

SEQ ID NO: 225270 - DNA, 15 bp, Homo sapiens
aggtctccaacacag

SEQ ID NO: 225271 - DNA, 15 bp, Homo sapiens
taggtctccaacaca

SEQ ID NO: 225272 - DNA, 15 bp, Homo sapiens
ctaggtctccaacac

SEQ ID NO: 225273 - DNA, 15 bp, Homo sapiens
tctaggtctccaaca

SEQ ID NO: 225274 - DNA, 15 bp, Homo sapiens
atctaggtctccaac

SEQ ID NO: 225275 - DNA, 15 bp, Homo sapiens
gatctaggtctccaa

SEQ ID NO: 225276 - DNA, 15 bp, Homo sapiens
ggatctaggtctcca

SEQ ID NO: 225277 - DNA, 15 bp, Homo sapiens
tggatctaggtctcc

SEQ ID NO: 225278 - DNA, 15 bp, Homo sapiens
ttggatctaggtctc

SEQ ID NO: 225279 - DNA, 15 bp, Homo sapiens
tttggatctaggtct

SEQ ID NO: 225280 - DNA, 15 bp, Homo sapiens
gtttggatctaggtc

SEQ ID NO: 225281 - DNA, 15 bp, Homo sapiens
agtttggatctaggt

SEQ ID NO: 225282 - DNA, 15 bp, Homo sapiens
tagtttggatctagg

SEQ ID NO: 225283 - DNA, 15 bp, Homo sapiens
ctagtttggatctag

SEQ ID NO: 225284 - DNA, 15 bp, Homo sapiens
cctagtttggatcta

SEQ ID NO: 225285 - DNA, 15 bp, Homo sapiens
ccctagtttggatct

SEQ ID NO: 225286 - DNA, 15 bp, Homo sapiens
accctagtttggatc

SEQ ID NO: 225287 - DNA, 15 bp, Homo sapiens
caccctagtttggat

SEQ ID NO: 225288 - DNA, 15 bp, Homo sapiens
acaccctagtttgga

SEQ ID NO: 225289 - DNA, 15 bp, Homo sapiens
cacaccctagtttgg

SEQ ID NO: 225290 - DNA, 15 bp, Homo sapiens
acacaccctagtttg

SEQ ID NO: 225291 - DNA, 15 bp, Homo sapiens
cacacaccctagttt

SEQ ID NO: 225292 - DNA, 15 bp, Homo sapiens
ccacacaccctagtt

SEQ ID NO: 225293 - DNA, 15 bp, Homo sapiens
cccacacaccctagt

SEQ ID NO: 225294 - DNA, 15 bp, Homo sapiens
tcccacacaccctag

SEQ ID NO: 225295 - DNA, 15 bp, Homo sapiens
ttcccacacacccta

SEQ ID NO: 225296 - DNA, 15 bp, Homo sapiens
gttcccacacaccct

SEQ ID NO: 225297 - DNA, 15 bp, Homo sapiens
ggttcccacacaccc

SEQ ID NO: 225298 - DNA, 15 bp, Homo sapiens
gggttcccacacacc

SEQ ID NO: 225299 - DNA, 15 bp, Homo sapiens
tgggttcccacacac

SEQ ID NO: 225300 - DNA, 15 bp, Homo sapiens
ctgggttcccacaca

SEQ ID NO: 225301 - DNA, 15 bp, Homo sapiens
cctgggttcccacac

SEQ ID NO: 225302 - DNA, 15 bp, Homo sapiens
ccctgggttcccaca

SEQ ID NO: 225303 - DNA, 15 bp, Homo sapiens
tccctgggttcccac

SEQ ID NO: 225304 - DNA, 15 bp, Homo sapiens
gtccctgggttccca

SEQ ID NO: 225305 - DNA, 15 bp, Homo sapiens
tgtccctgggttccc

SEQ ID NO: 225306 - DNA, 15 bp, Homo sapiens
atgtccctgggttcc

SEQ ID NO: 225307 - DNA, 15 bp, Homo sapiens
tatgtccctgggttc

SEQ ID NO: 225308 - DNA, 15 bp, Homo sapiens
ctatgtccctgggtt

SEQ ID NO: 225309 - DNA, 15 bp, Homo sapiens
tctatgtccctgggt

SEQ ID NO: 225310 - DNA, 15 bp, Homo sapiens
ctctatgtccctggg

SEQ ID NO: 225311 - DNA, 15 bp, Homo sapiens
cctctatgtccctgg

SEQ ID NO: 225312 - DNA, 15 bp, Homo sapiens
gcctctatgtccctg

SEQ ID NO: 225313 - DNA, 15 bp, Homo sapiens
agcctctatgtccct

SEQ ID NO: 225314 - DNA, 15 bp, Homo sapiens
cagcctctatgtccc

SEQ ID NO: 225315 - DNA, 15 bp, Homo sapiens
tcagcctctatgtcc

SEQ ID NO: 225316 - DNA, 15 bp, Homo sapiens
ttcagcctctatgtc

SEQ ID NO: 225317 - DNA, 15 bp, Homo sapiens
cttcagcctctatgt

SEQ ID NO: 225318 - DNA, 15 bp, Homo sapiens
acttcagcctctatg

SEQ ID NO: 225319 - DNA, 15 bp, Homo sapiens
aacttcagcctctat

SEQ ID NO: 225320 - DNA, 15 bp, Homo sapiens
aaacttcagcctcta

SEQ ID NO: 225321 - DNA, 15 bp, Homo sapiens
aaaacttcagcctct

SEQ ID NO: 225322 - DNA, 15 bp, Homo sapiens
caaaacttcagcctc

SEQ ID NO: 225323 - DNA, 15 bp, Homo sapiens
ccaaaacttcagcct

SEQ ID NO: 225324 - DNA, 15 bp, Homo sapiens
tccaaaacttcagcc

SEQ ID NO: 225325 - DNA, 15 bp, Homo sapiens
ttccaaaacttcagc

SEQ ID NO: 225326 - DNA, 15 bp, Homo sapiens
gttccaaaacttcag

SEQ ID NO: 225327 - DNA, 15 bp, Homo sapiens
ggttccaaaacttca

SEQ ID NO: 225328 - DNA, 15 bp, Homo sapiens
gggttccaaaacttc

SEQ ID NO: 225329 - DNA, 15 bp, Homo sapiens
tgggttccaaaactt

SEQ ID NO: 225330 - DNA, 15 bp, Homo sapiens
ctgggttccaaaact

SEQ ID NO: 225331 - DNA, 15 bp, Homo sapiens
gctgggttccaaaac

SEQ ID NO: 225332 - DNA, 15 bp, Homo sapiens
ggctgggttccaaaa

SEQ ID NO: 225333 - DNA, 15 bp, Homo sapiens
tggctgggttccaaa

SEQ ID NO: 225334 - DNA, 15 bp, Homo sapiens
ctggctgggttccaa

SEQ ID NO: 225335 - DNA, 15 bp, Homo sapiens
actggctgggttcca

SEQ ID NO: 225336 - DNA, 15 bp, Homo sapiens
aactggctgggttcc

SEQ ID NO: 225337 - DNA, 15 bp, Homo sapiens
gaactggctgggttc

SEQ ID NO: 225338 - DNA, 15 bp, Homo sapiens
agaactggctgggtt

SEQ ID NO: 225339 - DNA, 15 bp, Homo sapiens
aagaactggctgggt

SEQ ID NO: 225340 - DNA, 15 bp, Homo sapiens
gaagaactggctggg

SEQ ID NO: 225341 - DNA, 15 bp, Homo sapiens
ggaagaactggctgg

SEQ ID NO: 225342 - DNA, 15 bp, Homo sapiens
tggaagaactggctg

SEQ ID NO: 225343 - DNA, 15 bp, Homo sapiens
ttggaagaactggct

SEQ ID NO: 225344 - DNA, 15 bp, Homo sapiens
cttggaagaactggc

SEQ ID NO: 225345 - DNA, 15 bp, Homo sapiens
ccttggaagaactgg

SEQ ID NO: 225346 - DNA, 15 bp, Homo sapiens
cccttggaagaactg

SEQ ID NO: 225347 - DNA, 15 bp, Homo sapiens
ccccttggaagaact

SEQ ID NO: 225348 - DNA, 15 bp, Homo sapiens
accccttggaagaac

SEQ ID NO: 225349 - DNA, 15 bp, Homo sapiens
caccccttggaagaa

SEQ ID NO: 225350 - DNA, 15 bp, Homo sapiens
tcaccccttggaaga

SEQ ID NO: 225351 - DNA, 15 bp, Homo sapiens
ctcaccccttggaag

SEQ ID NO: 225352 - DNA, 15 bp, Homo sapiens
cctcaccccttggaa

SEQ ID NO: 225353 - DNA, 15 bp, Homo sapiens
acctcaccccttgga

SEQ ID NO: 225354 - DNA, 15 bp, Homo sapiens
gacctcaccccttgg

SEQ ID NO: 225355 - DNA, 15 bp, Homo sapiens
tgacctcaccccttg

SEQ ID NO: 225356 - DNA, 15 bp, Homo sapiens
ctgacctcacccctt

SEQ ID NO: 225357 - DNA, 15 bp, Homo sapiens
tctgacctcacccct

SEQ ID NO: 225358 - DNA, 15 bp, Homo sapiens
ctctgacctcacccc

SEQ ID NO: 225359 - DNA, 15 bp, Homo sapiens
cctctgacctcaccc

SEQ ID NO: 225360 - DNA, 15 bp, Homo sapiens
gcctctgacctcacc

SEQ ID NO: 225361 - DNA, 15 bp, Homo sapiens
tgcctctgacctcac

SEQ ID NO: 225362 - DNA, 15 bp, Homo sapiens
ctgcctctgacctca

SEQ ID NO: 225363 - DNA, 15 bp, Homo sapiens
tctgcctctgacctc

SEQ ID NO: 225364 - DNA, 15 bp, Homo sapiens
ctctgcctctgacct

SEQ ID NO: 225365 - DNA, 15 bp, Homo sapiens
actctgcctctgacc

SEQ ID NO: 225366 - DNA, 15 bp, Homo sapiens
gactctgcctctgac

SEQ ID NO: 225367 - DNA, 15 bp, Homo sapiens
ggactctgcctctga

SEQ ID NO: 225368 - DNA, 15 bp, Homo sapiens
tggactctgcctctg

SEQ ID NO: 225369 - DNA, 15 bp, Homo sapiens
ctggactctgcctct

SEQ ID NO: 225370 - DNA, 15 bp, Homo sapiens
cctggactctgcctc

SEQ ID NO: 225371 - DNA, 15 bp, Homo sapiens
ccctggactctgcct

SEQ ID NO: 225372 - DNA, 15 bp, Homo sapiens
tccctggactctgcc

SEQ ID NO: 225373 - DNA, 15 bp, Homo sapiens
ctccctggactctgc

SEQ ID NO: 225374 - DNA, 15 bp, Homo sapiens
gctccctggactctg

SEQ ID NO: 225375 - DNA, 15 bp, Homo sapiens
tgctccctggactct

SEQ ID NO: 225376 - DNA, 15 bp, Homo sapiens
ctgctccctggactc

SEQ ID NO: 225377 - DNA, 15 bp, Homo sapiens
cctgctccctggact

SEQ ID NO: 225378 - DNA, 15 bp, Homo sapiens
ccctgctccctggac

SEQ ID NO: 225379 - DNA, 15 bp, Homo sapiens
gccctgctccctgga

SEQ ID NO: 225380 - DNA, 15 bp, Homo sapiens
tgccctgctccctgg

SEQ ID NO: 225381 - DNA, 15 bp, Homo sapiens
ctgccctgctccctg

SEQ ID NO: 225382 - DNA, 15 bp, Homo sapiens
gctgccctgctccct

SEQ ID NO: 225383 - DNA, 15 bp, Homo sapiens
agctgccctgctccc

SEQ ID NO: 225384 - DNA, 15 bp, Homo sapiens
gagctgccctgctcc

SEQ ID NO: 225385 - DNA, 15 bp, Homo sapiens
agagctgccctgctc

SEQ ID NO: 225386 - DNA, 15 bp, Homo sapiens
cagagctgccctgct

SEQ ID NO: 225387 - DNA, 15 bp, Homo sapiens
ccagagctgccctgc

SEQ ID NO: 225388 - DNA, 15 bp, Homo sapiens
cccagagctgccctg

SEQ ID NO: 225389 - DNA, 15 bp, Homo sapiens
tcccagagctgccct

SEQ ID NO: 225390 - DNA, 15 bp, Homo sapiens
ctcccagagctgccc

SEQ ID NO: 225391 - DNA, 15 bp, Homo sapiens
gctcccagagctgcc

SEQ ID NO: 225392 - DNA, 15 bp, Homo sapiens
ggctcccagagctgc

SEQ ID NO: 225393 - DNA, 15 bp, Homo sapiens
aggctcccagagctg

SEQ ID NO: 225394 - DNA, 15 bp, Homo sapiens
caggctcccagagct

SEQ ID NO: 225395 - DNA, 15 bp, Homo sapiens
accaggctcccagag

SEQ ID NO: 225396 - DNA, 15 bp, Homo sapiens
aaccaggctcccaga

SEQ ID NO: 225397 - DNA, 15 bp, Homo sapiens
gaaccaggctcccag

SEQ ID NO: 225398 - DNA, 15 bp, Homo sapiens
ggaaccaggctccca

SEQ ID NO: 225399 - DNA, 15 bp, Homo sapiens
aggaaccaggctccc

SEQ ID NO: 225400 - DNA, 15 bp, Homo sapiens
gaggaaccaggctcc

SEQ ID NO: 225401 - DNA, 15 bp, Homo sapiens
tgaggaaccaggctc

SEQ ID NO: 225402 - DNA, 15 bp, Homo sapiens
ctgaggaaccaggct

SEQ ID NO: 225403 - DNA, 15 bp, Homo sapiens
cctgaggaaccaggc

SEQ ID NO: 225404 - DNA, 15 bp, Homo sapiens
gcctgaggaaccagg

SEQ ID NO: 225405 - DNA, 15 bp, Homo sapiens
agcctgaggaaccag

SEQ ID NO: 225406 - DNA, 15 bp, Homo sapiens
cagcctgaggaacca

SEQ ID NO: 225407 - DNA, 15 bp, Homo sapiens
ccagcctgaggaacc

SEQ ID NO: 225408 - DNA, 15 bp, Homo sapiens
cccagcctgaggaac

SEQ ID NO: 225409 - DNA, 15 bp, Homo sapiens
gcccagcctgaggaa

SEQ ID NO: 225410 - DNA, 15 bp, Homo sapiens
agcccagcctgagga

SEQ ID NO: 225411 - DNA, 15 bp, Homo sapiens
cagcccagcctgagg

SEQ ID NO: 225412 - DNA, 15 bp, Homo sapiens
acagcccagcctgag

SEQ ID NO: 225413 - DNA, 15 bp, Homo sapiens
cacagcccagcctga

SEQ ID NO: 225414 - DNA, 15 bp, Homo sapiens
gcacagcccagcctg

SEQ ID NO: 225415 - DNA, 15 bp, Homo sapiens
agcacagcccagcct

SEQ ID NO: 225416 - DNA, 15 bp, Homo sapiens
gagcacagcccagcc

SEQ ID NO: 225417 - DNA, 15 bp, Homo sapiens
cgagcacagcccagc

SEQ ID NO: 225418 - DNA, 15 bp, Homo sapiens
ccgagcacagcccag

SEQ ID NO: 225419 - DNA, 15 bp, Homo sapiens
tccgagcacagccca

SEQ ID NO: 225420 - DNA, 15 bp, Homo sapiens
ctccgagcacagccc

SEQ ID NO: 225421 - DNA, 15 bp, Homo sapiens
gctccgagcacagcc

SEQ ID NO: 225422 - DNA, 15 bp, Homo sapiens
cgctccgagcacagc

SEQ ID NO: 225423 - DNA, 15 bp, Homo sapiens
ccgctccgagcacag

SEQ ID NO: 225424 - DNA, 15 bp, Homo sapiens
accgctccgagcaca

SEQ ID NO: 225425 - DNA, 15 bp, Homo sapiens
taccgctccgagcac

SEQ ID NO: 225426 - DNA, 15 bp, Homo sapiens
ctaccgctccgagca

SEQ ID NO: 225427 - DNA, 15 bp, Homo sapiens
tctaccgctccgagc

SEQ ID NO: 225428 - DNA, 15 bp, Homo sapiens
atctaccgctccgag

SEQ ID NO: 225429 - DNA, 15 bp, Homo sapiens
gatctaccgctccga

SEQ ID NO: 225430 - DNA, 15 bp, Homo sapiens
ggatctaccgctccg

SEQ ID NO: 225431 - DNA, 15 bp, Homo sapiens
aggatctaccgctcc

SEQ ID NO: 225432 - DNA, 15 bp, Homo sapiens
caggatctaccgctc

SEQ ID NO: 225433 - DNA, 15 bp, Homo sapiens
tcaggatctaccgct

SEQ ID NO: 225434 - DNA, 15 bp, Homo sapiens
gtcaggatctaccgc

SEQ ID NO: 225435 - DNA, 15 bp, Homo sapiens
agtcaggatctaccg

SEQ ID NO: 225436 - DNA, 15 bp, Homo sapiens
cagtcaggatctacc

SEQ ID NO: 225437 - DNA, 15 bp, Homo sapiens
gcagtcaggatctac

SEQ ID NO: 225438 - DNA, 15 bp, Homo sapiens
ggcagtcaggatcta

SEQ ID NO: 225439 - DNA, 15 bp, Homo sapiens
cggcagtcaggatct

SEQ ID NO: 225440 - DNA, 15 bp, Homo sapiens
gcggcagtcaggatc

SEQ ID NO: 225441 - DNA, 15 bp, Homo sapiens
agcggcagtcaggat

SEQ ID NO: 225442 - DNA, 15 bp, Homo sapiens
cagcggcagtcagga

SEQ ID NO: 225443 - DNA, 15 bp, Homo sapiens
acagcggcagtcagg

SEQ ID NO: 225444 - DNA, 15 bp, Homo sapiens
tacagcggcagtcag

SEQ ID NO: 225445 - DNA, 15 bp, Homo sapiens
atacagcggcagtca

SEQ ID NO: 225446 - DNA, 15 bp, Homo sapiens
catacagcggcagtc

SEQ ID NO: 225447 - DNA, 15 bp, Homo sapiens
gcatacagcggcagt

SEQ ID NO: 225448 - DNA, 15 bp, Homo sapiens
ggcatacagcggcag

SEQ ID NO: 225449 - DNA, 15 bp, Homo sapiens
aggcatacagcggca

SEQ ID NO: 225450 - DNA, 15 bp, Homo sapiens
caggcatacagcggc

SEQ ID NO: 225451 - DNA, 15 bp, Homo sapiens
ccaggcatacagcgg

SEQ ID NO: 225452 - DNA, 15 bp, Homo sapiens
accaggcatacagcg

SEQ ID NO: 225453 - DNA, 15 bp, Homo sapiens
taccaggcatacagc

SEQ ID NO: 225454 - DNA, 15 bp, Homo sapiens
ttaccaggcatacag

SEQ ID NO: 225455 - DNA, 15 bp, Homo sapiens
gttaccaggcataca

SEQ ID NO: 225456 - DNA, 15 bp, Homo sapiens
ggttaccaggcatac

SEQ ID NO: 225457 - DNA, 15 bp, Homo sapiens
aggttaccaggcata

SEQ ID NO: 225458 - DNA, 15 bp, Homo sapiens
caggttaccaggcat

SEQ ID NO: 225459 - DNA, 15 bp, Homo sapiens
ccaggttaccaggca

SEQ ID NO: 225460 - DNA, 15 bp, Homo sapiens
gccaggttaccaggc

SEQ ID NO: 225461 - DNA, 15 bp, Homo sapiens
ggccaggttaccagg

SEQ ID NO: 225462 - DNA, 15 bp, Homo sapiens
tggccaggttaccag

SEQ ID NO: 225463 - DNA, 15 bp, Homo sapiens
atggccaggttacca

SEQ ID NO: 225464 - DNA, 15 bp, Homo sapiens
gatggccaggttacc

SEQ ID NO: 225465 - DNA, 15 bp, Homo sapiens
agatggccaggttac

SEQ ID NO: 225466 - DNA, 15 bp, Homo sapiens
aagatggccaggtta

SEQ ID NO: 225467 - DNA, 15 bp, Homo sapiens
aaagatggccaggtt

SEQ ID NO: 225468 - DNA, 15 bp, Homo sapiens
gaaagatggccaggt

SEQ ID NO: 225469 - DNA, 15 bp, Homo sapiens
agaaagatggccagg

SEQ ID NO: 225470 - DNA, 15 bp, Homo sapiens
cagaaagatggccag

SEQ ID NO: 225471 - DNA, 15 bp, Homo sapiens
gcagaaagatggcca

SEQ ID NO: 225472 - DNA, 15 bp, Homo sapiens
ggcagaaagatggcc

SEQ ID NO: 225473 - DNA, 15 bp, Homo sapiens
aggcagaaagatggc

SEQ ID NO: 225474 - DNA, 15 bp, Homo sapiens
gaggcagaaagatgg

SEQ ID NO: 225475 - DNA, 15 bp, Homo sapiens
ggaggcagaaagatg

SEQ ID NO: 225476 - DNA, 15 bp, Homo sapiens
gggaggcagaaagat

SEQ ID NO: 225477 - DNA, 15 bp, Homo sapiens
tgggaggcagaaaga

SEQ ID NO: 225478 - DNA, 15 bp, Homo sapiens
ttgggaggcagaaag

SEQ ID NO: 225479 - DNA, 15 bp, Homo sapiens
tttgggaggcagaaa

SEQ ID NO: 225480 - DNA, 15 bp, Homo sapiens
ctttgggaggcagaa

SEQ ID NO: 225481 - DNA, 15 bp, Homo sapiens
actttgggaggcaga

SEQ ID NO: 225482 - DNA, 15 bp, Homo sapiens
gactttgggaggcag

SEQ ID NO: 225483 - DNA, 15 bp, Homo sapiens
agactttgggaggca

SEQ ID NO: 225484 - DNA, 15 bp, Homo sapiens
cagactttgggaggc

SEQ ID NO: 225485 - DNA, 15 bp, Homo sapiens
acagactttgggagg

SEQ ID NO: 225486 - DNA, 15 bp, Homo sapiens
gacagactttgggag

SEQ ID NO: 225487 - DNA, 15 bp, Homo sapiens
agacagactttggga

SEQ ID NO: 225488 - DNA, 15 bp, Homo sapiens
cagacagactttggg

SEQ ID NO: 225489 - DNA, 15 bp, Homo sapiens
acagacagactttgg

SEQ ID NO: 225490 - DNA, 15 bp, Homo sapiens
gacagacagactttg

SEQ ID NO: 225491 - DNA, 15 bp, Homo sapiens
agacagacagacttt

SEQ ID NO: 225492 - DNA, 15 bp, Homo sapiens
aagacagacagactt

SEQ ID NO: 225493 - DNA, 15 bp, Homo sapiens
caagacagacagact

SEQ ID NO: 225494 - DNA, 15 bp, Homo sapiens
gcaagacagacagac

SEQ ID NO: 225495 - DNA, 15 bp, Homo sapiens
agcaagacagacaga

SEQ ID NO: 225496 - DNA, 15 bp, Homo sapiens
tagcaagacagacag

SEQ ID NO: 225497 - DNA, 15 bp, Homo sapiens
ctagcaagacagaca

SEQ ID NO: 225498 - DNA, 15 bp, Homo sapiens
gctagcaagacagac

SEQ ID NO: 225499 - DNA, 15 bp, Homo sapiens
ggctagcaagacaga

SEQ ID NO: 225500 - DNA, 15 bp, Homo sapiens
gggctagcaagacag

SEQ ID NO: 225501 - DNA, 15 bp, Homo sapiens
agggctagcaagaca

SEQ ID NO: 225502 - DNA, 15 bp, Homo sapiens
aagggctagcaagac

SEQ ID NO: 225503 - DNA, 15 bp, Homo sapiens
caagggctagcaaga

SEQ ID NO: 225504 - DNA, 15 bp, Homo sapiens
ccaagggctagcaag

SEQ ID NO: 225505 - DNA, 15 bp, Homo sapiens
accaagggctagcaa

SEQ ID NO: 225506 - DNA, 15 bp, Homo sapiens
aaccaagggctagca

SEQ ID NO: 225507 - DNA, 15 bp, Homo sapiens
aaaccaagggctagc

SEQ ID NO: 225508 - DNA, 15 bp, Homo sapiens
gaaaccaagggctag

SEQ ID NO: 225509 - DNA, 15 bp, Homo sapiens
ggaaaccaagggcta

SEQ ID NO: 225510 - DNA, 15 bp, Homo sapiens
aggaaaccaagggct

SEQ ID NO: 225511 - DNA, 15 bp, Homo sapiens
caggaaaccaagggc

SEQ ID NO: 225512 - DNA, 15 bp, Homo sapiens
tcaggaaaccaaggg

SEQ ID NO: 225513 - DNA, 15 bp, Homo sapiens
ttcaggaaaccaagg

SEQ ID NO: 225514 - DNA, 15 bp, Homo sapiens
attcaggaaaccaag

SEQ ID NO: 225515 - DNA, 15 bp, Homo sapiens
cattcaggaaaccaa

SEQ ID NO: 225516 - DNA, 15 bp, Homo sapiens
ccattcaggaaacca

SEQ ID NO: 225517 - DNA, 15 bp, Homo sapiens
cccattcaggaaacc

SEQ ID NO: 225518 - DNA, 15 bp, Homo sapiens
ccccattcaggaaac

SEQ ID NO: 225519 - DNA, 15 bp, Homo sapiens
tccccattcaggaaa

SEQ ID NO: 225520 - DNA, 15 bp, Homo sapiens
atccccattcaggaa

SEQ ID NO: 225521 - DNA, 15 bp, Homo sapiens
gatccccattcagga

SEQ ID NO: 225522 - DNA, 15 bp, Homo sapiens
tgatccccattcagg

SEQ ID NO: 225523 - DNA, 15 bp, Homo sapiens
atgatccccattcag

SEQ ID NO: 225524 - DNA, 15 bp, Homo sapiens
gatgatccccattca

SEQ ID NO: 225525 - DNA, 15 bp, Homo sapiens
agatgatccccattc

SEQ ID NO: 225526 - DNA, 15 bp, Homo sapiens
aagatgatccccatt

SEQ ID NO: 225527 - DNA, 15 bp, Homo sapiens
taagatgatccccat

SEQ ID NO: 225528 - DNA, 15 bp, Homo sapiens
ttaagatgatcccca

SEQ ID NO: 225529 - DNA, 15 bp, Homo sapiens
cttaagatgatcccc

SEQ ID NO: 225530 - DNA, 15 bp, Homo sapiens
acttaagatgatccc

SEQ ID NO: 225531 - DNA, 15 bp, Homo sapiens
cacttaagatgatcc

SEQ ID NO: 225532 - DNA, 15 bp, Homo sapiens
acacttaagatgatc

SEQ ID NO: 225533 - DNA, 15 bp, Homo sapiens
cacacttaagatgat

SEQ ID NO: 225534 - DNA, 15 bp, Homo sapiens
ccacacttaagatga

SEQ ID NO: 225535 - DNA, 15 bp, Homo sapiens
cccacacttaagatg

SEQ ID NO: 225536 - DNA, 15 bp, Homo sapiens
ccccacacttaagat

SEQ ID NO: 225537 - DNA, 15 bp, Homo sapiens
tccccacacttaaga

SEQ ID NO: 225538 - DNA, 15 bp, Homo sapiens
ttccccacacttaag

SEQ ID NO: 225539 - DNA, 15 bp, Homo sapiens
tttccccacacttaa

SEQ ID NO: 225540 - DNA, 15 bp, Homo sapiens
ctttccccacactta

SEQ ID NO: 225541 - DNA, 15 bp, Homo sapiens
cctttccccacactt

SEQ ID NO: 225542 - DNA, 15 bp, Homo sapiens
gcctttccccacact

SEQ ID NO: 225543 - DNA, 15 bp, Homo sapiens
agcctttccccacac

SEQ ID NO: 225544 - DNA, 15 bp, Homo sapiens
cagcctttccccaca

SEQ ID NO: 225545 - DNA, 15 bp, Homo sapiens
acagcctttccccac

SEQ ID NO: 225546 - DNA, 15 bp, Homo sapiens
gacagcctttcccca

SEQ ID NO: 225547 - DNA, 15 bp, Homo sapiens
agacagcctttcccc

SEQ ID NO: 225548 - DNA, 15 bp, Homo sapiens
cagacagcctttccc

SEQ ID NO: 225549 - DNA, 15 bp, Homo sapiens
tcagacagcctttcc

SEQ ID NO: 225550 - DNA, 15 bp, Homo sapiens
gtcagacagcctttc

SEQ ID NO: 225551 - DNA, 15 bp, Homo sapiens
cgtcagacagccttt

SEQ ID NO: 225552 - DNA, 15 bp, Homo sapiens
tcgtcagacagcctt

SEQ ID NO: 225553 - DNA, 15 bp, Homo sapiens
gtcgtcagacagcct

SEQ ID NO: 225554 - DNA, 15 bp, Homo sapiens
ggtcgtcagacagcc

SEQ ID NO: 225555 - DNA, 15 bp, Homo sapiens
aggtcgtcagacagc

SEQ ID NO: 225556 - DNA, 15 bp, Homo sapiens
taggtcgtcagacag

SEQ ID NO: 225557 - DNA, 15 bp, Homo sapiens
ttaggtcgtcagaca

SEQ ID NO: 225558 - DNA, 15 bp, Homo sapiens
attaggtcgtcagac

SEQ ID NO: 225559 - DNA, 15 bp, Homo sapiens
aattaggtcgtcaga

SEQ ID NO: 225560 - DNA, 15 bp, Homo sapiens
caattaggtcgtcag

SEQ ID NO: 225561 - DNA, 15 bp, Homo sapiens
ccaattaggtcgtca

SEQ ID NO: 225562 - DNA, 15 bp, Homo sapiens
cccaattaggtcgtc

SEQ ID NO: 225563 - DNA, 15 bp, Homo sapiens
tcccaattaggtcgt

SEQ ID NO: 225564 - DNA, 15 bp, Homo sapiens
gtcccaattaggtcg

SEQ ID NO: 225565 - DNA, 15 bp, Homo sapiens
tgtcccaattaggtc

SEQ ID NO: 225566 - DNA, 15 bp, Homo sapiens
ctgtcccaattaggt

SEQ ID NO: 225567 - DNA, 15 bp, Homo sapiens
gctgtcccaattagg

SEQ ID NO: 225568 - DNA, 15 bp, Homo sapiens
agctgtcccaattag

SEQ ID NO: 225569 - DNA, 15 bp, Homo sapiens
gagctgtcccaatta

SEQ ID NO: 225570 - DNA, 15 bp, Homo sapiens
agagctgtcccaatt

SEQ ID NO: 225571 - DNA, 15 bp, Homo sapiens
aagagctgtcccaat

SEQ ID NO: 225572 - DNA, 15 bp, Homo sapiens
aaagagctgtcccaa

SEQ ID NO: 225573 - DNA, 15 bp, Homo sapiens
aaaagagctgtccca

SEQ ID NO: 225574 - DNA, 15 bp, Homo sapiens
caaaagagctgtccc

SEQ ID NO: 225575 - DNA, 15 bp, Homo sapiens
tcaaaagagctgtcc

SEQ ID NO: 225576 - DNA, 15 bp, Homo sapiens
gtcaaaagagctgtc

SEQ ID NO: 225577 - DNA, 15 bp, Homo sapiens
ggtcaaaagagctgt

SEQ ID NO: 225578 - DNA, 15 bp, Homo sapiens
gggtcaaaagagctg

SEQ ID NO: 225579 - DNA, 15 bp, Homo sapiens
cgggtcaaaagagct

SEQ ID NO: 225580 - DNA, 15 bp, Homo sapiens
tcgggtcaaaagagc

SEQ ID NO: 225581 - DNA, 15 bp, Homo sapiens
ttcgggtcaaaagag

SEQ ID NO: 225582 - DNA, 15 bp, Homo sapiens
cttcgggtcaaaaga

SEQ ID NO: 225583 - DNA, 15 bp, Homo sapiens
gcttcgggtcaaaag

SEQ ID NO: 225584 - DNA, 15 bp, Homo sapiens
ggcttcgggtcaaaa

SEQ ID NO: 225585 - DNA, 15 bp, Homo sapiens
tggcttcgggtcaaa

SEQ ID NO: 225586 - DNA, 15 bp, Homo sapiens
ttggcttcgggtcaa

SEQ ID NO: 225587 - DNA, 15 bp, Homo sapiens
cttggcttcgggtca

SEQ ID NO: 225588 - DNA, 15 bp, Homo sapiens
gcttggcttcgggtc

SEQ ID NO: 225589 - DNA, 15 bp, Homo sapiens
ggcttggcttcgggt

SEQ ID NO: 225590 - DNA, 15 bp, Homo sapiens
gggcttggcttcggg

SEQ ID NO: 225591 - DNA, 15 bp, Homo sapiens
ggggcttggcttcgg

SEQ ID NO: 225592 - DNA, 15 bp, Homo sapiens
tggggcttggcttcg

SEQ ID NO: 225593 - DNA, 15 bp, Homo sapiens
atggggcttggcttc

SEQ ID NO: 225594 - DNA, 15 bp, Homo sapiens
gatggggcttggctt

SEQ ID NO: 225595 - DNA, 15 bp, Homo sapiens
ggatggggcttggct

SEQ ID NO: 225596 - DNA, 15 bp, Homo sapiens
tggatggggcttggc

SEQ ID NO: 225597 - DNA, 15 bp, Homo sapiens
ttggatggggcttgg

SEQ ID NO: 225598 - DNA, 15 bp, Homo sapiens
cttggatggggcttg

SEQ ID NO: 225599 - DNA, 15 bp, Homo sapiens
acttggatggggctt

SEQ ID NO: 225600 - DNA, 15 bp, Homo sapiens
aacttggatggggct

SEQ ID NO: 225601 - DNA, 15 bp, Homo sapiens
gaacttggatggggc

SEQ ID NO: 225602 - DNA, 15 bp, Homo sapiens
tgaacttggatgggg

SEQ ID NO: 225603 - DNA, 15 bp, Homo sapiens
ctgaacttggatggg

SEQ ID NO: 225604 - DNA, 15 bp, Homo sapiens
gctgaacttggatgg

SEQ ID NO: 225605 - DNA, 15 bp, Homo sapiens
tgctgaacttggatg

SEQ ID NO: 225606 - DNA, 15 bp, Homo sapiens
ttgctgaacttggat

SEQ ID NO: 225607 - DNA, 15 bp, Homo sapiens
tttgctgaacttgga

SEQ ID NO: 225608 - DNA, 15 bp, Homo sapiens
atttgctgaacttgg

SEQ ID NO: 225609 - DNA, 15 bp, Homo sapiens
catttgctgaacttg

SEQ ID NO: 225610 - DNA, 15 bp, Homo sapiens
ccatttgctgaactt

SEQ ID NO: 225611 - DNA, 15 bp, Homo sapiens
tccatttgctgaact

SEQ ID NO: 225612 - DNA, 15 bp, Homo sapiens
ttccatttgctgaac

SEQ ID NO: 225613 - DNA, 15 bp, Homo sapiens
cttccatttgctgaa

SEQ ID NO: 225614 - DNA, 15 bp, Homo sapiens
tcttccatttgctga

SEQ ID NO: 225615 - DNA, 15 bp, Homo sapiens
ttcttccatttgctg

SEQ ID NO: 225616 - DNA, 15 bp, Homo sapiens
cttcttccatttgct

SEQ ID NO: 225617 - DNA, 15 bp, Homo sapiens
gcttcttccatttgc

SEQ ID NO: 225618 - DNA, 15 bp, Homo sapiens
cgcttcttccatttg

SEQ ID NO: 225619 - DNA, 15 bp, Homo sapiens
ccgcttcttccattt

SEQ ID NO: 225620 - DNA, 15 bp, Homo sapiens
cccgcttcttccatt

SEQ ID NO: 225621 - DNA, 15 bp, Homo sapiens
tcccgcttcttccat

SEQ ID NO: 225622 - DNA, 15 bp, Homo sapiens
ttcccgcttcttcca

SEQ ID NO: 225623 - DNA, 15 bp, Homo sapiens
gttcccgcttcttcc

SEQ ID NO: 225624 - DNA, 15 bp, Homo sapiens
tgttcccgcttcttc

SEQ ID NO: 225625 - DNA, 15 bp, Homo sapiens
atgttcccgcttctt

SEQ ID NO: 225626 - DNA, 15 bp, Homo sapiens
catgttcccgcttct

SEQ ID NO: 225627 - DNA, 15 bp, Homo sapiens
acatgttcccgcttc

SEQ ID NO: 225628 - DNA, 15 bp, Homo sapiens
aacatgttcccgctt

SEQ ID NO: 225629 - DNA, 15 bp, Homo sapiens
gaacatgttcccgct

SEQ ID NO: 225630 - DNA, 15 bp, Homo sapiens
tgaacatgttcccgc

SEQ ID NO: 225631 - DNA, 15 bp, Homo sapiens
ctgaacatgttcccg

SEQ ID NO: 225632 - DNA, 15 bp, Homo sapiens
actgaacatgttccc

SEQ ID NO: 225633 - DNA, 15 bp, Homo sapiens
aactgaacatgttcc

SEQ ID NO: 225634 - DNA, 15 bp, Homo sapiens
caactgaacatgttc

SEQ ID NO: 225635 - DNA, 15 bp, Homo sapiens
ccaactgaacatgtt

SEQ ID NO: 225636 - DNA, 15 bp, Homo sapiens
accaactgaacatgt

SEQ ID NO: 225637 - DNA, 15 bp, Homo sapiens
caccaactgaacatg

SEQ ID NO: 225638 - DNA, 15 bp, Homo sapiens
tcaccaactgaacat

SEQ ID NO: 225639 - DNA, 15 bp, Homo sapiens
ctcaccaactgaaca

SEQ ID NO: 225640 - DNA, 15 bp, Homo sapiens
cctcaccaactgaac

SEQ ID NO: 225641 - DNA, 15 bp, Homo sapiens
acctcaccaactgaa

SEQ ID NO: 225642 - DNA, 15 bp, Homo sapiens
gacctcaccaactga

SEQ ID NO: 225643 - DNA, 15 bp, Homo sapiens
agacctcaccaactg

SEQ ID NO: 225644 - DNA, 15 bp, Homo sapiens
tagacctcaccaact

SEQ ID NO: 225645 - DNA, 15 bp, Homo sapiens
atagacctcaccaac

SEQ ID NO: 225646 - DNA, 15 bp, Homo sapiens
tatagacctcaccaa

SEQ ID NO: 225647 - DNA, 15 bp, Homo sapiens
ctatagacctcacca

SEQ ID NO: 225648 - DNA, 15 bp, Homo sapiens
cctatagacctcacc

SEQ ID NO: 225649 - DNA, 15 bp, Homo sapiens
gcctatagacctcac

SEQ ID NO: 225650 - DNA, 15 bp, Homo sapiens
tgcctatagacctca

SEQ ID NO: 225651 - DNA, 15 bp, Homo sapiens
gtgcctatagacctc

SEQ ID NO: 225652 - DNA, 15 bp, Homo sapiens
tgtgcctatagacct

SEQ ID NO: 225653 - DNA, 15 bp, Homo sapiens
ctgtgcctatagacc

SEQ ID NO: 225654 - DNA, 15 bp, Homo sapiens
tctgtgcctatagac

SEQ ID NO: 225655 - DNA, 15 bp, Homo sapiens
gtctgtgcctataga

SEQ ID NO: 225656 - DNA, 15 bp, Homo sapiens
agtctgtgcctatag

SEQ ID NO: 225657 - DNA, 15 bp, Homo sapiens
cagtctgtgcctata

SEQ ID NO: 225658 - DNA, 15 bp, Homo sapiens
ccagtctgtgcctat

SEQ ID NO: 225659 - DNA, 15 bp, Homo sapiens
tccagtctgtgccta

SEQ ID NO: 225660 - DNA, 15 bp, Homo sapiens
atccagtctgtgcct

SEQ ID NO: 225661 - DNA, 15 bp, Homo sapiens
aatccagtctgtgcc

SEQ ID NO: 225662 - DNA, 15 bp, Homo sapiens
taatccagtctgtgc

SEQ ID NO: 225663 - DNA, 15 bp, Homo sapiens
ctaatccagtctgtg

SEQ ID NO: 225664 - DNA, 15 bp, Homo sapiens
cctaatccagtctgt

SEQ ID NO: 225665 - DNA, 15 bp, Homo sapiens
acctaatccagtctg

SEQ ID NO: 225666 - DNA, 15 bp, Homo sapiens
gacctaatccagtct

SEQ ID NO: 225667 - DNA, 15 bp, Homo sapiens
ggacctaatccagtc

SEQ ID NO: 225668 - DNA, 15 bp, Homo sapiens
aggacctaatccagt

SEQ ID NO: 225669 - DNA, 15 bp, Homo sapiens
taggacctaatccag

SEQ ID NO: 225670 - DNA, 15 bp, Homo sapiens
ttaggacctaatcca

SEQ ID NO: 225671 - DNA, 15 bp, Homo sapiens
tttaggacctaatcc

SEQ ID NO: 225672 - DNA, 15 bp, Homo sapiens
atttaggacctaatc

SEQ ID NO: 225673 - DNA, 15 bp, Homo sapiens
gatttaggacctaat

SEQ ID NO: 225674 - DNA, 15 bp, Homo sapiens
tgatttaggacctaa

SEQ ID NO: 225675 - DNA, 15 bp, Homo sapiens
atgatttaggaccta

SEQ ID NO: 225676 - DNA, 15 bp, Homo sapiens
catgatttaggacct

SEQ ID NO: 225677 - DNA, 15 bp, Homo sapiens
ccatgatttaggacc

SEQ ID NO: 225678 - DNA, 15 bp, Homo sapiens
accatgatttaggac

SEQ ID NO: 225679 - DNA, 15 bp, Homo sapiens
caccatgatttagga

SEQ ID NO: 225680 - DNA, 15 bp, Homo sapiens
ccaccatgatttagg

SEQ ID NO: 225681 - DNA, 15 bp, Homo sapiens
tccaccatgatttag

SEQ ID NO: 225682 - DNA, 15 bp, Homo sapiens
ttccaccatgattta

SEQ ID NO: 225683 - DNA, 15 bp, Homo sapiens
tttccaccatgattt

SEQ ID NO: 225684 - DNA, 15 bp, Homo sapiens
atttccaccatgatt

SEQ ID NO: 225685 - DNA, 15 bp, Homo sapiens
aatttccaccatgat

SEQ ID NO: 225686 - DNA, 15 bp, Homo sapiens
aaatttccaccatga

SEQ ID NO: 225687 - DNA, 15 bp, Homo sapiens
aaaatttccaccatg

SEQ ID NO: 225688 - DNA, 15 bp, Homo sapiens
gaaaatttccaccat

SEQ ID NO: 225689 - DNA, 15 bp, Homo sapiens
ggaaaatttccacca

SEQ ID NO: 225690 - DNA, 15 bp, Homo sapiens
aggaaaatttccacc

SEQ ID NO: 225691 - DNA, 15 bp, Homo sapiens
caggaaaatttccac

SEQ ID NO: 225692 - DNA, 15 bp, Homo sapiens
ccaggaaaatttcca

SEQ ID NO: 225693 - DNA, 15 bp, Homo sapiens
gccaggaaaatttcc

SEQ ID NO: 225694 - DNA, 15 bp, Homo sapiens
tgccaggaaaatttc

SEQ ID NO: 225695 - DNA, 15 bp, Homo sapiens
gtgccaggaaaattt

SEQ ID NO: 225696 - DNA, 15 bp, Homo sapiens
cgtgccaggaaaatt

SEQ ID NO: 225697 - DNA, 15 bp, Homo sapiens
ccgtgccaggaaaat

SEQ ID NO: 225698 - DNA, 15 bp, Homo sapiens
cccgtgccaggaaaa

SEQ ID NO: 225699 - DNA, 15 bp, Homo sapiens
tcccgtgccaggaaa

SEQ ID NO: 225700 - DNA, 15 bp, Homo sapiens
gtcccgtgccaggaa

SEQ ID NO: 225701 - DNA, 15 bp, Homo sapiens
tgtcccgtgccagga

SEQ ID NO: 225702 - DNA, 15 bp, Homo sapiens
ttgtcccgtgccagg

SEQ ID NO: 225703 - DNA, 15 bp, Homo sapiens
tttgtcccgtgccag

SEQ ID NO: 225704 - DNA, 15 bp, Homo sapiens
atttgtcccgtgcca

SEQ ID NO: 225705 - DNA, 15 bp, Homo sapiens
gatttgtcccgtgcc

SEQ ID NO: 225706 - DNA, 15 bp, Homo sapiens
ggatttgtcccgtgc

SEQ ID NO: 225707 - DNA, 15 bp, Homo sapiens
aggatttgtcccgtg

SEQ ID NO: 225708 - DNA, 15 bp, Homo sapiens
aaggatttgtcccgt

SEQ ID NO: 225709 - DNA, 15 bp, Homo sapiens
aaaggatttgtcccg

SEQ ID NO: 225710 - DNA, 15 bp, Homo sapiens
aaaaggatttgtccc

SEQ ID NO: 225711 - DNA, 15 bp, Homo sapiens
caaaaggatttgtcc

SEQ ID NO: 225712 - DNA, 15 bp, Homo sapiens
acaaaaggatttgtc

SEQ ID NO: 225713 - DNA, 15 bp, Homo sapiens
tacaaaaggatttgt

SEQ ID NO: 225714 - DNA, 15 bp, Homo sapiens
ttacaaaaggatttg

SEQ ID NO: 225715 - DNA, 15 bp, Homo sapiens
tttacaaaaggattt

SEQ ID NO: 225716 - DNA, 15 bp, Homo sapiens
gtttacaaaaggatt

SEQ ID NO: 225717 - DNA, 15 bp, Homo sapiens
tgtttacaaaaggat

SEQ ID NO: 225718 - DNA, 15 bp, Homo sapiens
ttgtttacaaaagga

SEQ ID NO: 225719 - DNA, 15 bp, Homo sapiens
cttgtttacaaaagg

SEQ ID NO: 225720 - DNA, 15 bp, Homo sapiens
tcttgtttacaaaag

SEQ ID NO: 225721 - DNA, 15 bp, Homo sapiens
ttcttgtttacaaaa

SEQ ID NO: 225722 - DNA, 15 bp, Homo sapiens
gttcttgtttacaaa

SEQ ID NO: 225723 - DNA, 15 bp, Homo sapiens
tgttcttgtttacaa

SEQ ID NO: 225724 - DNA, 15 bp, Homo sapiens
atgttcttgtttaca

SEQ ID NO: 225725 - DNA, 15 bp, Homo sapiens
aatgttcttgtttac

SEQ ID NO: 225726 - DNA, 15 bp, Homo sapiens
gaatgttcttgttta

SEQ ID NO: 225727 - DNA, 15 bp, Homo sapiens
tgaatgttcttgttt

SEQ ID NO: 225728 - DNA, 15 bp, Homo sapiens
atgaatgttcttgtt

SEQ ID NO: 225729 - DNA, 15 bp, Homo sapiens
gatgaatgttcttgt

SEQ ID NO: 225730 - DNA, 15 bp, Homo sapiens
agatgaatgttcttg

SEQ ID NO: 225731 - DNA, 15 bp, Homo sapiens
aagatgaatgttctt

SEQ ID NO: 225732 - DNA, 15 bp, Homo sapiens
aaagatgaatgttct

SEQ ID NO: 225733 - DNA, 15 bp, Homo sapiens
gaaagatgaatgttc

SEQ ID NO: 225734 - DNA, 15 bp, Homo sapiens
agaaagatgaatgtt

SEQ ID NO: 225735 - DNA, 15 bp, Homo sapiens
aagaaagatgaatgt

SEQ ID NO: 225736 - DNA, 15 bp, Homo sapiens
aaagaaagatgaatg

SEQ ID NO: 225737 - DNA, 15 bp, Homo sapiens
aaaagaaagatgaat

SEQ ID NO: 225738 - DNA, 15 bp, Homo sapiens
caaaagaaagatgaa

SEQ ID NO: 225739 - DNA, 15 bp, Homo sapiens
tcaaaagaaagatga

SEQ ID NO: 225740 - DNA, 15 bp, Homo sapiens
gtcaaaagaaagatg

SEQ ID NO: 225741 - DNA, 15 bp, Homo sapiens
agtcaaaagaaagat

SEQ ID NO: 225742 - DNA, 15 bp, Homo sapiens
cagtcaaaagaaaga

SEQ ID NO: 225743 - DNA, 15 bp, Homo sapiens
tcagtcaaaagaaag

SEQ ID NO: 225744 - DNA, 15 bp, Homo sapiens
gtcagtcaaaagaaa

SEQ ID NO: 225745 - DNA, 15 bp, Homo sapiens
tgtcagtcaaaagaa

SEQ ID NO: 225746 - DNA, 15 bp, Homo sapiens
atgtcagtcaaaaga

SEQ ID NO: 225747 - DNA, 15 bp, Homo sapiens
catgtcagtcaaaag

SEQ ID NO: 225748 - DNA, 15 bp, Homo sapiens
gcatgtcagtcaaaa

SEQ ID NO: 225749 - DNA, 15 bp, Homo sapiens
ggcatgtcagtcaaa

SEQ ID NO: 225750 - DNA, 15 bp, Homo sapiens
aggcatgtcagtcaa

SEQ ID NO: 225751 - DNA, 15 bp, Homo sapiens
caggcatgtcagtca

SEQ ID NO: 225752 - DNA, 15 bp, Homo sapiens
ccaggcatgtcagtc

SEQ ID NO: 225753 - DNA, 15 bp, Homo sapiens
accaggcatgtcagt

SEQ ID NO: 225754 - DNA, 15 bp, Homo sapiens
taccaggcatgtcag

SEQ ID NO: 225755 - DNA, 15 bp, Homo sapiens
ctaccaggcatgtca

SEQ ID NO: 225756 - DNA, 15 bp, Homo sapiens
cctaccaggcatgtc

SEQ ID NO: 225757 - DNA, 15 bp, Homo sapiens
ccctaccaggcatgt

SEQ ID NO: 225758 - DNA, 15 bp, Homo sapiens
gccctaccaggcatg

SEQ ID NO: 225759 - DNA, 15 bp, Homo sapiens
tgccctaccaggcat

SEQ ID NO: 225760 - DNA, 15 bp, Homo sapiens
atgccctaccaggca

SEQ ID NO: 225761 - DNA, 15 bp, Homo sapiens
catgccctaccaggc

SEQ ID NO: 225762 - DNA, 15 bp, Homo sapiens
acatgccctaccagg

SEQ ID NO: 225763 - DNA, 15 bp, Homo sapiens
cacatgccctaccag

SEQ ID NO: 225764 - DNA, 15 bp, Homo sapiens
gcacatgccctacca

SEQ ID NO: 225765 - DNA, 15 bp, Homo sapiens
ggcacatgccctacc

SEQ ID NO: 225766 - DNA, 15 bp, Homo sapiens
aggcacatgccctac

SEQ ID NO: 225767 - DNA, 15 bp, Homo sapiens
gaggcacatgcccta

SEQ ID NO: 225768 - DNA, 15 bp, Homo sapiens
agaggcacatgccct

SEQ ID NO: 225769 - DNA, 15 bp, Homo sapiens
gagaggcacatgccc

SEQ ID NO: 225770 - DNA, 15 bp, Homo sapiens
tgagaggcacatgcc

SEQ ID NO: 225771 - DNA, 15 bp, Homo sapiens
ctgagaggcacatgc

SEQ ID NO: 225772 - DNA, 15 bp, Homo sapiens
tctgagaggcacatg

SEQ ID NO: 225773 - DNA, 15 bp, Homo sapiens
ttctgagaggcacat

SEQ ID NO: 225774 - DNA, 15 bp, Homo sapiens
cttctgagaggcaca

SEQ ID NO: 225775 - DNA, 15 bp, Homo sapiens
gcttctgagaggcac

SEQ ID NO: 225776 - DNA, 15 bp, Homo sapiens
agcttctgagaggca

SEQ ID NO: 225777 - DNA, 15 bp, Homo sapiens
gagcttctgagaggc

SEQ ID NO: 225778 - DNA, 15 bp, Homo sapiens
ggagcttctgagagg

SEQ ID NO: 225779 - DNA, 15 bp, Homo sapiens
tggagcttctgagag

SEQ ID NO: 225780 - DNA, 15 bp, Homo sapiens
atggagcttctgaga

SEQ ID NO: 225781 - DNA, 15 bp, Homo sapiens
catggagcttctgag

SEQ ID NO: 225782 - DNA, 15 bp, Homo sapiens
acatggagcttctga

SEQ ID NO: 225783 - DNA, 15 bp, Homo sapiens
gacatggagcttctg

SEQ ID NO: 225784 - DNA, 15 bp, Homo sapiens
tgacatggagcttct

SEQ ID NO: 225785 - DNA, 15 bp, Homo sapiens
atgacatggagcttc

SEQ ID NO: 225786 - DNA, 15 bp, Homo sapiens
gatgacatggagctt

SEQ ID NO: 225787 - DNA, 15 bp, Homo sapiens
agatgacatggagct

SEQ ID NO: 225788 - DNA, 15 bp, Homo sapiens
cagatgacatggagc

SEQ ID NO: 225789 - DNA, 15 bp, Homo sapiens
tcagatgacatggag

SEQ ID NO: 225790 - DNA, 15 bp, Homo sapiens
atcagatgacatgga

SEQ ID NO: 225791 - DNA, 15 bp, Homo sapiens
gatcagatgacatgg

SEQ ID NO: 225792 - DNA, 15 bp, Homo sapiens
agatcagatgacatg

SEQ ID NO: 225793 - DNA, 15 bp, Homo sapiens
gagatcagatgacat

SEQ ID NO: 225794 - DNA, 15 bp, Homo sapiens
tgagatcagatgaca

SEQ ID NO: 225795 - DNA, 15 bp, Homo sapiens
atgagatcagatgac

SEQ ID NO: 225796 - DNA, 15 bp, Homo sapiens
aatgagatcagatga

SEQ ID NO: 225797 - DNA, 15 bp, Homo sapiens
aaatgagatcagatg

SEQ ID NO: 225798 - DNA, 15 bp, Homo sapiens
caaatgagatcagat

SEQ ID NO: 225799 - DNA, 15 bp, Homo sapiens
ccaaatgagatcaga

SEQ ID NO: 225800 - DNA, 15 bp, Homo sapiens
cccaaatgagatcag

SEQ ID NO: 225801 - DNA, 15 bp, Homo sapiens
tcccaaatgagatca

SEQ ID NO: 225802 - DNA, 15 bp, Homo sapiens
atcccaaatgagatc

SEQ ID NO: 225803 - DNA, 15 bp, Homo sapiens
aatcccaaatgagat

SEQ ID NO: 225804 - DNA, 15 bp, Homo sapiens
aaatcccaaatgaga

SEQ ID NO: 225805 - DNA, 15 bp, Homo sapiens
taaatcccaaatgag

SEQ ID NO: 225806 - DNA, 15 bp, Homo sapiens
ctaaatcccaaatga

SEQ ID NO: 225807 - DNA, 15 bp, Homo sapiens
actaaatcccaaatg

SEQ ID NO: 225808 - DNA, 15 bp, Homo sapiens
cactaaatcccaaat

SEQ ID NO: 225809 - DNA, 15 bp, Homo sapiens
acactaaatcccaaa

SEQ ID NO: 225810 - DNA, 15 bp, Homo sapiens
aacactaaatcccaa

SEQ ID NO: 225811 - DNA, 15 bp, Homo sapiens
aaacactaaatccca

SEQ ID NO: 225812 - DNA, 15 bp, Homo sapiens
aaaacactaaatccc

SEQ ID NO: 225813 - DNA, 15 bp, Homo sapiens
aaaaacactaaatcc

SEQ ID NO: 225814 - DNA, 15 bp, Homo sapiens
taaaaacactaaatc

SEQ ID NO: 225815 - DNA, 15 bp, Homo sapiens
ataaaaacactaaat

SEQ ID NO: 225816 - DNA, 15 bp, Homo sapiens
aataaaaacactaaa

SEQ ID NO: 225817 - DNA, 15 bp, Homo sapiens
aaataaaaacactaa

SEQ ID NO: 225818 - DNA, 15 bp, Homo sapiens
caaataaaaacacta

SEQ ID NO: 225819 - DNA, 15 bp, Homo sapiens
tcaaataaaaacact

SEQ ID NO: 225820 - DNA, 15 bp, Homo sapiens
ttcaaataaaaacac

SEQ ID NO: 225821 - DNA, 15 bp, Homo sapiens
tttcaaataaaaaca

SEQ ID NO: 225822 - DNA, 15 bp, Homo sapiens
ttttcaaataaaaac

SEQ ID NO: 225823 - DNA, 15 bp, Homo sapiens
attttcaaataaaaa

SEQ ID NO: 225824 - DNA, 15 bp, Homo sapiens
cattttcaaataaaa

SEQ ID NO: 225825 - DNA, 15 bp, Homo sapiens
acattttcaaataaa

SEQ ID NO: 225826 - DNA, 15 bp, Homo sapiens
tacattttcaaataa

SEQ ID NO: 225827 - DNA, 15 bp, Homo sapiens
ctacattttcaaata

SEQ ID NO: 225828 - DNA, 15 bp, Homo sapiens
gctacattttcaaat

SEQ ID NO: 225829 - DNA, 15 bp, Homo sapiens
agctacattttcaaa

SEQ ID NO: 225830 - DNA, 15 bp, Homo sapiens
cagctacattttcaa

SEQ ID NO: 225831 - DNA, 15 bp, Homo sapiens
gcagctacattttca

SEQ ID NO: 225832 - DNA, 15 bp, Homo sapiens
ggcagctacattttc

SEQ ID NO: 225833 - DNA, 15 bp, Homo sapiens
gggcagctacatttt

SEQ ID NO: 225834 - DNA, 15 bp, Homo sapiens
agggcagctacattt

SEQ ID NO: 225835 - DNA, 15 bp, Homo sapiens
cagggcagctacatt

SEQ ID NO: 225836 - DNA, 15 bp, Homo sapiens
tcagggcagctacat

SEQ ID NO: 225837 - DNA, 15 bp, Homo sapiens
ctcagggcagctaca

SEQ ID NO: 225838 - DNA, 15 bp, Homo sapiens
cctcagggcagctac

SEQ ID NO: 225839 - DNA, 15 bp, Homo sapiens
tcctcagggcagcta

SEQ ID NO: 225840 - DNA, 15 bp, Homo sapiens
ttcctcagggcagct

SEQ ID NO: 225841 - DNA, 15 bp, Homo sapiens
gttcctcagggcagc

SEQ ID NO: 225842 - DNA, 15 bp, Homo sapiens
tgttcctcagggcag

SEQ ID NO: 225843 - DNA, 15 bp, Homo sapiens
ctgttcctcagggca

SEQ ID NO: 225844 - DNA, 15 bp, Homo sapiens
gctgttcctcagggc

SEQ ID NO: 225845 - DNA, 15 bp, Homo sapiens
tgctgttcctcaggg

SEQ ID NO: 225846 - DNA, 15 bp, Homo sapiens
ctgctgttcctcagg

SEQ ID NO: 225847 - DNA, 15 bp, Homo sapiens
actgctgttcctcag

SEQ ID NO: 225848 - DNA, 15 bp, Homo sapiens
aactgctgttcctca

SEQ ID NO: 225849 - DNA, 15 bp, Homo sapiens
taactgctgttcctc

SEQ ID NO: 225850 - DNA, 15 bp, Homo sapiens
ctaactgctgttcct

SEQ ID NO: 225851 - DNA, 15 bp, Homo sapiens
cctaactgctgttcc

SEQ ID NO: 225852 - DNA, 15 bp, Homo sapiens
tcctaactgctgttc

SEQ ID NO: 225853 - DNA, 15 bp, Homo sapiens
ctcctaactgctgtt

SEQ ID NO: 225854 - DNA, 15 bp, Homo sapiens
gctcctaactgctgt

SEQ ID NO: 225855 - DNA, 15 bp, Homo sapiens
ggctcctaactgctg

SEQ ID NO: 225856 - DNA, 15 bp, Homo sapiens
tggctcctaactgct

SEQ ID NO: 225857 - DNA, 15 bp, Homo sapiens
ttggctcctaactgc

SEQ ID NO: 225858 - DNA, 15 bp, Homo sapiens
gttggctcctaactg

SEQ ID NO: 225859 - DNA, 15 bp, Homo sapiens
ggttggctcctaact

SEQ ID NO: 225860 - DNA, 15 bp, Homo sapiens
gggttggctcctaac

SEQ ID NO: 225861 - DNA, 15 bp, Homo sapiens
ggggttggctcctaa

SEQ ID NO: 225862 - DNA, 15 bp, Homo sapiens
gggggttggctccta

SEQ ID NO: 225863 - DNA, 15 bp, Homo sapiens
tgggggttggctcct

SEQ ID NO: 225864 - DNA, 15 bp, Homo sapiens
ctgggggttggctcc

SEQ ID NO: 225865 - DNA, 15 bp, Homo sapiens
actgggggttggctc

SEQ ID NO: 225866 - DNA, 15 bp, Homo sapiens
aactgggggttggct

SEQ ID NO: 225867 - DNA, 15 bp, Homo sapiens
aaactgggggttggc

SEQ ID NO: 225868 - DNA, 15 bp, Homo sapiens
taaactgggggttgg

SEQ ID NO: 225869 - DNA, 15 bp, Homo sapiens
ttaaactgggggttg

SEQ ID NO: 225870 - DNA, 15 bp, Homo sapiens
cttaaactgggggtt

SEQ ID NO: 225871 - DNA, 15 bp, Homo sapiens
gcttaaactgggggt

SEQ ID NO: 225872 - DNA, 15 bp, Homo sapiens
agcttaaactggggg

SEQ ID NO: 225873 - DNA, 15 bp, Homo sapiens
aagcttaaactgggg

SEQ ID NO: 225874 - DNA, 15 bp, Homo sapiens
gaagcttaaactggg

SEQ ID NO: 225875 - DNA, 15 bp, Homo sapiens
tgaagcttaaactgg

SEQ ID NO: 225876 - DNA, 15 bp, Homo sapiens
ttgaagcttaaactg

SEQ ID NO: 225877 - DNA, 15 bp, Homo sapiens
cttgaagcttaaact

SEQ ID NO: 225878 - DNA, 15 bp, Homo sapiens
acttgaagcttaaac

SEQ ID NO: 225879 - DNA, 15 bp, Homo sapiens
gacttgaagcttaaa

SEQ ID NO: 225880 - DNA, 15 bp, Homo sapiens
tgacttgaagcttaa

SEQ ID NO: 225881 - DNA, 15 bp, Homo sapiens
atgacttgaagctta

SEQ ID NO: 225882 - DNA, 15 bp, Homo sapiens
catgacttgaagctt

SEQ ID NO: 225883 - DNA, 15 bp, Homo sapiens
ccatgacttgaagct

SEQ ID NO: 225884 - DNA, 15 bp, Homo sapiens
tccatgacttgaagc

SEQ ID NO: 225885 - DNA, 15 bp, Homo sapiens
ttccatgacttgaag

SEQ ID NO: 225886 - DNA, 15 bp, Homo sapiens
tttccatgacttgaa

SEQ ID NO: 225887 - DNA, 15 bp, Homo sapiens
gtttccatgacttga

SEQ ID NO: 225888 - DNA, 15 bp, Homo sapiens
agtttccatgacttg

SEQ ID NO: 225889 - DNA, 15 bp, Homo sapiens
cagtttccatgactt

SEQ ID NO: 225890 - DNA, 15 bp, Homo sapiens
ccagtttccatgact

SEQ ID NO: 225891 - DNA, 15 bp, Homo sapiens
gccagtttccatgac

SEQ ID NO: 225892 - DNA, 15 bp, Homo sapiens
ggccagtttccatga

SEQ ID NO: 225893 - DNA, 15 bp, Homo sapiens
aggccagtttccatg

SEQ ID NO: 225894 - DNA, 15 bp, Homo sapiens
caggccagtttccat

SEQ ID NO: 225895 - DNA, 15 bp, Homo sapiens
ccaggccagtttcca

SEQ ID NO: 225896 - DNA, 15 bp, Homo sapiens
accaggccagtttcc

SEQ ID NO: 225897 - DNA, 15 bp, Homo sapiens
aaccaggccagtttc

SEQ ID NO: 225898 - DNA, 15 bp, Homo sapiens
aaaccaggccagttt

SEQ ID NO: 225899 - DNA, 15 bp, Homo sapiens
taaaccaggccagtt

SEQ ID NO: 225900 - DNA, 15 bp, Homo sapiens
gtaaaccaggccagt

SEQ ID NO: 225901 - DNA, 15 bp, Homo sapiens
ggtaaaccaggccag

SEQ ID NO: 225902 - DNA, 15 bp, Homo sapiens
gggtaaaccaggcca

SEQ ID NO: 225903 - DNA, 15 bp, Homo sapiens
tgggtaaaccaggcc

SEQ ID NO: 225904 - DNA, 15 bp, Homo sapiens
ctgggtaaaccaggc

SEQ ID NO: 225905 - DNA, 15 bp, Homo sapiens
tctgggtaaaccagg

SEQ ID NO: 225906 - DNA, 15 bp, Homo sapiens
gtctgggtaaaccag

SEQ ID NO: 225907 - DNA, 15 bp, Homo sapiens
cgtctgggtaaacca

SEQ ID NO: 225908 - DNA, 15 bp, Homo sapiens
acgtctgggtaaacc

SEQ ID NO: 225909 - DNA, 15 bp, Homo sapiens
gacgtctgggtaaac

SEQ ID NO: 225910 - DNA, 15 bp, Homo sapiens
tgacgtctgggtaaa

SEQ ID NO: 225911 - DNA, 15 bp, Homo sapiens
ctgacgtctgggtaa

SEQ ID NO: 225912 - DNA, 15 bp, Homo sapiens
actgacgtctgggta

SEQ ID NO: 225913 - DNA, 15 bp, Homo sapiens
cactgacgtctgggt

SEQ ID NO: 225914 - DNA, 15 bp, Homo sapiens
tcactgacgtctggg

SEQ ID NO: 225915 - DNA, 15 bp, Homo sapiens
atcactgacgtctgg

SEQ ID NO: 225916 - DNA, 15 bp, Homo sapiens
catcactgacgtctg

SEQ ID NO: 225917 - DNA, 15 bp, Homo sapiens
gcatcactgacgtct

SEQ ID NO: 225918 - DNA, 15 bp, Homo sapiens
ggcatcactgacgtc

SEQ ID NO: 225919 - DNA, 15 bp, Homo sapiens
aggcatcactgacgt

SEQ ID NO: 225920 - DNA, 15 bp, Homo sapiens
caggcatcactgacg

SEQ ID NO: 225921 - DNA, 15 bp, Homo sapiens
ccaggcatcactgac

SEQ ID NO: 225922 - DNA, 15 bp, Homo sapiens
cccaggcatcactga

SEQ ID NO: 225923 - DNA, 15 bp, Homo sapiens
tcccaggcatcactg

SEQ ID NO: 225924 - DNA, 15 bp, Homo sapiens
ttcccaggcatcact

SEQ ID NO: 225925 - DNA, 15 bp, Homo sapiens
tttcccaggcatcac

SEQ ID NO: 225926 - DNA, 15 bp, Homo sapiens
ctttcccaggcatca

SEQ ID NO: 225927 - DNA, 15 bp, Homo sapiens
gctttcccaggcatc

SEQ ID NO: 225928 - DNA, 15 bp, Homo sapiens
agctttcccaggcat

SEQ ID NO: 225929 - DNA, 15 bp, Homo sapiens
gagctttcccaggca

SEQ ID NO: 225930 - DNA, 15 bp, Homo sapiens
agagctttcccaggc

SEQ ID NO: 225931 - DNA, 15 bp, Homo sapiens
aagagctttcccagg

SEQ ID NO: 225932 - DNA, 15 bp, Homo sapiens
caagagctttcccag

SEQ ID NO: 225933 - DNA, 15 bp, Homo sapiens
gcaagagctttccca

SEQ ID NO: 225934 - DNA, 15 bp, Homo sapiens
agcaagagctttccc

SEQ ID NO: 225935 - DNA, 15 bp, Homo sapiens
aagcaagagctttcc

SEQ ID NO: 225936 - DNA, 15 bp, Homo sapiens
aaagcaagagctttc

SEQ ID NO: 225937 - DNA, 15 bp, Homo sapiens
aaaagcaagagcttt

SEQ ID NO: 225938 - DNA, 15 bp, Homo sapiens
gaaaagcaagagctt

SEQ ID NO: 225939 - DNA, 15 bp, Homo sapiens
ggaaaagcaagagct

SEQ ID NO: 225940 - DNA, 15 bp, Homo sapiens
tggaaaagcaagagc

SEQ ID NO: 225941 - DNA, 15 bp, Homo sapiens
ctggaaaagcaagag

SEQ ID NO: 225942 - DNA, 15 bp, Homo sapiens
actggaaaagcaaga

SEQ ID NO: 225943 - DNA, 15 bp, Homo sapiens
cactggaaaagcaag

SEQ ID NO: 225944 - DNA, 15 bp, Homo sapiens
gcactggaaaagcaa

SEQ ID NO: 225945 - DNA, 15 bp, Homo sapiens
ggcactggaaaagca

SEQ ID NO: 225946 - DNA, 15 bp, Homo sapiens
gggcactggaaaagc

SEQ ID NO: 225947 - DNA, 15 bp, Homo sapiens
tgggcactggaaaag

SEQ ID NO: 225948 - DNA, 15 bp, Homo sapiens
gtgggcactggaaaa

SEQ ID NO: 225949 - DNA, 15 bp, Homo sapiens
agtgggcactggaaa

SEQ ID NO: 225950 - DNA, 15 bp, Homo sapiens
cagtgggcactggaa

SEQ ID NO: 225951 - DNA, 15 bp, Homo sapiens
tcagtgggcactgga

SEQ ID NO: 225952 - DNA, 15 bp, Homo sapiens
ctcagtgggcactgg

SEQ ID NO: 225953 - DNA, 15 bp, Homo sapiens
gctcagtgggcactg

SEQ ID NO: 225954 - DNA, 15 bp, Homo sapiens
tgctcagtgggcact

SEQ ID NO: 225955 - DNA, 15 bp, Homo sapiens
ctgctcagtgggcac

SEQ ID NO: 225956 - DNA, 15 bp, Homo sapiens
tctgctcagtgggca

SEQ ID NO: 225957 - DNA, 15 bp, Homo sapiens
ctctgctcagtgggc

SEQ ID NO: 225958 - DNA, 15 bp, Homo sapiens
tctctgctcagtggg

SEQ ID NO: 225959 - DNA, 15 bp, Homo sapiens
atctctgctcagtgg

SEQ ID NO: 225960 - DNA, 15 bp, Homo sapiens
aatctctgctcagtg

SEQ ID NO: 225961 - DNA, 15 bp, Homo sapiens
aaatctctgctcagt

SEQ ID NO: 225962 - DNA, 15 bp, Homo sapiens
taaatctctgctcag

SEQ ID NO: 225963 - DNA, 15 bp, Homo sapiens
ttaaatctctgctca

SEQ ID NO: 225964 - DNA, 15 bp, Homo sapiens
attaaatctctgctc

SEQ ID NO: 225965 - DNA, 15 bp, Homo sapiens
aattaaatctctgct

SEQ ID NO: 225966 - DNA, 15 bp, Homo sapiens
aaattaaatctctgc

SEQ ID NO: 225967 - DNA, 15 bp, Homo sapiens
taaattaaatctctg

SEQ ID NO: 225968 - DNA, 15 bp, Homo sapiens
gtaaattaaatctct

SEQ ID NO: 225969 - DNA, 15 bp, Homo sapiens
agtaaattaaatctc

SEQ ID NO: 225970 - DNA, 15 bp, Homo sapiens
gagtaaattaaatct

SEQ ID NO: 225971 - DNA, 15 bp, Homo sapiens
tgagtaaattaaatc

SEQ ID NO: 225972 - DNA, 15 bp, Homo sapiens
ttgagtaaattaaat

SEQ ID NO: 225973 - DNA, 15 bp, Homo sapiens
attgagtaaattaaa

SEQ ID NO: 225974 - DNA, 15 bp, Homo sapiens
gattgagtaaattaa

SEQ ID NO: 225975 - DNA, 15 bp, Homo sapiens
cgattgagtaaatta

SEQ ID NO: 225976 - DNA, 15 bp, Homo sapiens
ccgattgagtaaatt

SEQ ID NO: 225977 - DNA, 15 bp, Homo sapiens
accgattgagtaaat

SEQ ID NO: 225978 - DNA, 15 bp, Homo sapiens
taccgattgagtaaa

SEQ ID NO: 225979 - DNA, 15 bp, Homo sapiens
gtaccgattgagtaa

SEQ ID NO: 225980 - DNA, 15 bp, Homo sapiens
cgtaccgattgagta

SEQ ID NO: 225981 - DNA, 15 bp, Homo sapiens
acgtaccgattgagt

SEQ ID NO: 225982 - DNA, 15 bp, Homo sapiens
cacgtaccgattgag

SEQ ID NO: 225983 - DNA, 15 bp, Homo sapiens
acacgtaccgattga

SEQ ID NO: 225984 - DNA, 15 bp, Homo sapiens
gacacgtaccgattg

SEQ ID NO: 225985 - DNA, 15 bp, Homo sapiens
agacacgtaccgatt

SEQ ID NO: 225986 - DNA, 15 bp, Homo sapiens
cagacacgtaccgat

SEQ ID NO: 225987 - DNA, 15 bp, Homo sapiens
acagacacgtaccga

SEQ ID NO: 225988 - DNA, 15 bp, Homo sapiens
aacagacacgtaccg

SEQ ID NO: 225989 - DNA, 15 bp, Homo sapiens
taacagacacgtacc

SEQ ID NO: 225990 - DNA, 15 bp, Homo sapiens
ttaacagacacgtac

SEQ ID NO: 225991 - DNA, 15 bp, Homo sapiens
cttaacagacacgta

SEQ ID NO: 225992 - DNA, 15 bp, Homo sapiens
gcttaacagacacgt

SEQ ID NO: 225993 - DNA, 15 bp, Homo sapiens
tgcttaacagacacg

SEQ ID NO: 225994 - DNA, 15 bp, Homo sapiens
gtgcttaacagacac

SEQ ID NO: 225995 - DNA, 15 bp, Homo sapiens
tgtgcttaacagaca

SEQ ID NO: 225996 - DNA, 15 bp, Homo sapiens
atgtgcttaacagac

SEQ ID NO: 225997 - DNA, 15 bp, Homo sapiens
aatgtgcttaacaga

SEQ ID NO: 225998 - DNA, 15 bp, Homo sapiens
caatgtgcttaacag

SEQ ID NO: 225999 - DNA, 15 bp, Homo sapiens
gcaatgtgcttaaca

SEQ ID NO: 226000 - DNA, 15 bp, Homo sapiens
agcaatgtgcttaac

SEQ ID NO: 226001 - DNA, 15 bp, Homo sapiens
cagcaatgtgcttaa

SEQ ID NO: 226002 - DNA, 15 bp, Homo sapiens
acagcaatgtgctta

SEQ ID NO: 226003 - DNA, 15 bp, Homo sapiens
tacagcaatgtgctt

SEQ ID NO: 226004 - DNA, 15 bp, Homo sapiens
atacagcaatgtgct

SEQ ID NO: 226005 - DNA, 15 bp, Homo sapiens
catacagcaatgtgc

SEQ ID NO: 226006 - DNA, 15 bp, Homo sapiens
gcatacagcaatgtg

SEQ ID NO: 226007 - DNA, 15 bp, Homo sapiens
ggcatacagcaatgt

SEQ ID NO: 226008 - DNA, 15 bp, Homo sapiens
tggcatacagcaatg

SEQ ID NO: 226009 - DNA, 15 bp, Homo sapiens
ttggcatacagcaat

SEQ ID NO: 226010 - DNA, 15 bp, Homo sapiens
tttggcatacagcaa

SEQ ID NO: 226011 - DNA, 15 bp, Homo sapiens
gtttggcatacagca

SEQ ID NO: 226012 - DNA, 15 bp, Homo sapiens
tgtttggcatacagc

SEQ ID NO: 226013 - DNA, 15 bp, Homo sapiens
gtgtttggcatacag

SEQ ID NO: 226014 - DNA, 15 bp, Homo sapiens
agtgtttggcataca

SEQ ID NO: 226015 - DNA, 15 bp, Homo sapiens
aagtgtttggcatac

SEQ ID NO: 226016 - DNA, 15 bp, Homo sapiens
aaagtgtttggcata

SEQ ID NO: 226017 - DNA, 15 bp, Homo sapiens
caaagtgtttggcat

SEQ ID NO: 226018 - DNA, 15 bp, Homo sapiens
ccaaagtgtttggca

SEQ ID NO: 226019 - DNA, 15 bp, Homo sapiens
cccaaagtgtttggc

SEQ ID NO: 226020 - DNA, 15 bp, Homo sapiens
gcccaaagtgtttgg

SEQ ID NO: 226021 - DNA, 15 bp, Homo sapiens
tgcccaaagtgtttg

SEQ ID NO: 226022 - DNA, 15 bp, Homo sapiens
atgcccaaagtgttt

SEQ ID NO: 226023 - DNA, 15 bp, Homo sapiens
tatgcccaaagtgtt

SEQ ID NO: 226024 - DNA, 15 bp, Homo sapiens
ttatgcccaaagtgt

SEQ ID NO: 226025 - DNA, 15 bp, Homo sapiens
tttatgcccaaagtg

SEQ ID NO: 226026 - DNA, 15 bp, Homo sapiens
ttttatgcccaaagt

SEQ ID NO: 226027 - DNA, 15 bp, Homo sapiens
cttttatgcccaaag

SEQ ID NO: 226028 - DNA, 15 bp, Homo sapiens
ccttttatgcccaaa

SEQ ID NO: 226029 - DNA, 15 bp, Homo sapiens
accttttatgcccaa

SEQ ID NO: 226030 - DNA, 15 bp, Homo sapiens
taccttttatgccca

SEQ ID NO: 226031 - DNA, 15 bp, Homo sapiens
ataccttttatgccc

SEQ ID NO: 226032 - DNA, 15 bp, Homo sapiens
tataccttttatgcc

SEQ ID NO: 226033 - DNA, 15 bp, Homo sapiens
atataccttttatgc

SEQ ID NO: 226034 - DNA, 15 bp, Homo sapiens
tatataccttttatg

SEQ ID NO: 226035 - DNA, 15 bp, Homo sapiens
ctatataccttttat

SEQ ID NO: 226036 - DNA, 15 bp, Homo sapiens
cctatatacctttta

SEQ ID NO: 226037 - DNA, 15 bp, Homo sapiens
gcctatatacctttt

SEQ ID NO: 226038 - DNA, 15 bp, Homo sapiens
ggcctatataccttt

SEQ ID NO: 226039 - DNA, 15 bp, Homo sapiens
aggcctatatacctt

SEQ ID NO: 226040 - DNA, 15 bp, Homo sapiens
aaggcctatatacct

SEQ ID NO: 226041 - DNA, 15 bp, Homo sapiens
caaggcctatatacc

SEQ ID NO: 226042 - DNA, 15 bp, Homo sapiens
gcaaggcctatatac

SEQ ID NO: 226043 - DNA, 15 bp, Homo sapiens
ggcaaggcctatata

SEQ ID NO: 226044 - DNA, 15 bp, Homo sapiens
aggcaaggcctatat

SEQ ID NO: 226045 - DNA, 15 bp, Homo sapiens
aaggcaaggcctata

SEQ ID NO: 226046 - DNA, 15 bp, Homo sapiens
gaaggcaaggcctat

SEQ ID NO: 226047 - DNA, 15 bp, Homo sapiens
tgaaggcaaggccta

SEQ ID NO: 226048 - DNA, 15 bp, Homo sapiens
ttgaaggcaaggcct

SEQ ID NO: 226049 - DNA, 15 bp, Homo sapiens
cttgaaggcaaggcc

SEQ ID NO: 226050 - DNA, 15 bp, Homo sapiens
ccttgaaggcaaggc

SEQ ID NO: 226051 - DNA, 15 bp, Homo sapiens
tccttgaaggcaagg

SEQ ID NO: 226052 - DNA, 15 bp, Homo sapiens
atccttgaaggcaag

SEQ ID NO: 226053 - DNA, 15 bp, Homo sapiens
aatccttgaaggcaa

SEQ ID NO: 226054 - DNA, 15 bp, Homo sapiens
caatccttgaaggca

SEQ ID NO: 226055 - DNA, 15 bp, Homo sapiens
acaatccttgaaggc

SEQ ID NO: 226056 - DNA, 15 bp, Homo sapiens
gacaatccttgaagg

SEQ ID NO: 226057 - DNA, 15 bp, Homo sapiens
ggacaatccttgaag

SEQ ID NO: 226058 - DNA, 15 bp, Homo sapiens
tggacaatccttgaa

SEQ ID NO: 226059 - DNA, 15 bp, Homo sapiens
ctggacaatccttga

SEQ ID NO: 226060 - DNA, 15 bp, Homo sapiens
cctggacaatccttg

SEQ ID NO: 226061 - DNA, 15 bp, Homo sapiens
gcctggacaatcctt

SEQ ID NO: 226062 - DNA, 15 bp, Homo sapiens
agcctggacaatcct

SEQ ID NO: 226063 - DNA, 15 bp, Homo sapiens
tagcctggacaatcc

SEQ ID NO: 226064 - DNA, 15 bp, Homo sapiens
ttagcctggacaatc

SEQ ID NO: 226065 - DNA, 15 bp, Homo sapiens
gttagcctggacaat

SEQ ID NO: 226066 - DNA, 15 bp, Homo sapiens
agttagcctggacaa

SEQ ID NO: 226067 - DNA, 15 bp, Homo sapiens
cagttagcctggaca

SEQ ID NO: 226068 - DNA, 15 bp, Homo sapiens
ccagttagcctggac

SEQ ID NO: 226069 - DNA, 15 bp, Homo sapiens
cccagttagcctgga

SEQ ID NO: 226070 - DNA, 15 bp, Homo sapiens
ccccagttagcctgg

SEQ ID NO: 226071 - DNA, 15 bp, Homo sapiens
gccccagttagcctg

SEQ ID NO: 226072 - DNA, 15 bp, Homo sapiens
tgccccagttagcct

SEQ ID NO: 226073 - DNA, 15 bp, Homo sapiens
ttgccccagttagcc

SEQ ID NO: 226074 - DNA, 15 bp, Homo sapiens
attgccccagttagc

SEQ ID NO: 226075 - DNA, 15 bp, Homo sapiens
cattgccccagttag

SEQ ID NO: 226076 - DNA, 15 bp, Homo sapiens
gcattgccccagtta

SEQ ID NO: 226077 - DNA, 15 bp, Homo sapiens
tgcattgccccagtt

SEQ ID NO: 226078 - DNA, 15 bp, Homo sapiens
ttgcattgccccagt

SEQ ID NO: 226079 - DNA, 15 bp, Homo sapiens
gttgcattgccccag

SEQ ID NO: 226080 - DNA, 15 bp, Homo sapiens
tgttgcattgcccca

SEQ ID NO: 226081 - DNA, 15 bp, Homo sapiens
atgttgcattgcccc

SEQ ID NO: 226082 - DNA, 15 bp, Homo sapiens
catgttgcattgccc

SEQ ID NO: 226083 - DNA, 15 bp, Homo sapiens
gcatgttgcattgcc

SEQ ID NO: 226084 - DNA, 15 bp, Homo sapiens
tgcatgttgcattgc

SEQ ID NO: 226085 - DNA, 15 bp, Homo sapiens
atgcatgttgcattg

SEQ ID NO: 226086 - DNA, 15 bp, Homo sapiens
catgcatgttgcatt

SEQ ID NO: 226087 - DNA, 15 bp, Homo sapiens
ccatgcatgttgcat

SEQ ID NO: 226088 - DNA, 15 bp, Homo sapiens
tccatgcatgttgca

SEQ ID NO: 226089 - DNA, 15 bp, Homo sapiens
gtccatgcatgttgc

SEQ ID NO: 226090 - DNA, 15 bp, Homo sapiens
ggtccatgcatgttg

SEQ ID NO: 226091 - DNA, 15 bp, Homo sapiens
tggtccatgcatgtt

SEQ ID NO: 226092 - DNA, 15 bp, Homo sapiens
ttggtccatgcatgt

SEQ ID NO: 226093 - DNA, 15 bp, Homo sapiens
tttggtccatgcatg

SEQ ID NO: 226094 - DNA, 15 bp, Homo sapiens
ttttggtccatgcat

SEQ ID NO: 226095 - DNA, 15 bp, Homo sapiens
cttttggtccatgca

SEQ ID NO: 226096 - DNA, 15 bp, Homo sapiens
tcttttggtccatgc

SEQ ID NO: 226097 - DNA, 15 bp, Homo sapiens
gtcttttggtccatg

SEQ ID NO: 226098 - DNA, 15 bp, Homo sapiens
tgtcttttggtccat

SEQ ID NO: 226099 - DNA, 15 bp, Homo sapiens
ctgtcttttggtcca

SEQ ID NO: 226100 - DNA, 15 bp, Homo sapiens
gctgtcttttggtcc

SEQ ID NO: 226101 - DNA, 15 bp, Homo sapiens
agctgtcttttggtc

SEQ ID NO: 226102 - DNA, 15 bp, Homo sapiens
tagctgtcttttggt

SEQ ID NO: 226103 - DNA, 15 bp, Homo sapiens
ttagctgtcttttgg

SEQ ID NO: 226104 - DNA, 15 bp, Homo sapiens
cttagctgtcttttg

SEQ ID NO: 226105 - DNA, 15 bp, Homo sapiens
acttagctgtctttt

SEQ ID NO: 226106 - DNA, 15 bp, Homo sapiens
tacttagctgtcttt

SEQ ID NO: 226107 - DNA, 15 bp, Homo sapiens
gtacttagctgtctt

SEQ ID NO: 226108 - DNA, 15 bp, Homo sapiens
ggtacttagctgtct

SEQ ID NO: 226109 - DNA, 15 bp, Homo sapiens
aggtacttagctgtc

SEQ ID NO: 226110 - DNA, 15 bp, Homo sapiens
caggtacttagctgt

SEQ ID NO: 226111 - DNA, 15 bp, Homo sapiens
acaggtacttagctg

SEQ ID NO: 226112 - DNA, 15 bp, Homo sapiens
gacaggtacttagct

SEQ ID NO: 226113 - DNA, 15 bp, Homo sapiens
ggacaggtacttagc

SEQ ID NO: 226114 - DNA, 15 bp, Homo sapiens
gggacaggtacttag

SEQ ID NO: 226115 - DNA, 15 bp, Homo sapiens
tgggacaggtactta

SEQ ID NO: 226116 - DNA, 15 bp, Homo sapiens
atgggacaggtactt

SEQ ID NO: 226117 - DNA, 15 bp, Homo sapiens
catgggacaggtact

SEQ ID NO: 226118 - DNA, 15 bp, Homo sapiens
acatgggacaggtac

SEQ ID NO: 226119 - DNA, 15 bp, Homo sapiens
cacatgggacaggta

SEQ ID NO: 226120 - DNA, 15 bp, Homo sapiens
ccacatgggacaggt

SEQ ID NO: 226121 - DNA, 15 bp, Homo sapiens
tccacatgggacagg

SEQ ID NO: 226122 - DNA, 15 bp, Homo sapiens
ttccacatgggacag

SEQ ID NO: 226123 - DNA, 15 bp, Homo sapiens
attccacatgggaca

SEQ ID NO: 226124 - DNA, 15 bp, Homo sapiens
aattccacatgggac

SEQ ID NO: 226125 - DNA, 15 bp, Homo sapiens
caattccacatggga

SEQ ID NO: 226126 - DNA, 15 bp, Homo sapiens
ccaattccacatggg

SEQ ID NO: 226127 - DNA, 15 bp, Homo sapiens
cccaattccacatgg

SEQ ID NO: 226128 - DNA, 15 bp, Homo sapiens
ccccaattccacatg

SEQ ID NO: 226129 - DNA, 15 bp, Homo sapiens
cccccaattccacat

SEQ ID NO: 226130 - DNA, 15 bp, Homo sapiens
tcccccaattccaca

SEQ ID NO: 226131 - DNA, 15 bp, Homo sapiens
ctcccccaattccac

SEQ ID NO: 226132 - DNA, 15 bp, Homo sapiens
gctcccccaattcca

SEQ ID NO: 226133 - DNA, 15 bp, Homo sapiens
tgctcccccaattcc

SEQ ID NO: 226134 - DNA, 15 bp, Homo sapiens
ctgctcccccaattc

SEQ ID NO: 226135 - DNA, 15 bp, Homo sapiens
tctgctcccccaatt

SEQ ID NO: 226136 - DNA, 15 bp, Homo sapiens
atctgctcccccaat

SEQ ID NO: 226137 - DNA, 15 bp, Homo sapiens
catctgctcccccaa

SEQ ID NO: 226138 - DNA, 15 bp, Homo sapiens
acatctgctccccca

SEQ ID NO: 226139 - DNA, 15 bp, Homo sapiens
cacatctgctccccc

SEQ ID NO: 226140 - DNA, 15 bp, Homo sapiens
ccacatctgctcccc

SEQ ID NO: 226141 - DNA, 15 bp, Homo sapiens
cccacatctgctccc

SEQ ID NO: 226142 - DNA, 15 bp, Homo sapiens
gcccacatctgctcc

SEQ ID NO: 226143 - DNA, 15 bp, Homo sapiens
ggcccacatctgctc

SEQ ID NO: 226144 - DNA, 15 bp, Homo sapiens
gggcccacatctgct

SEQ ID NO: 226145 - DNA, 15 bp, Homo sapiens
agggcccacatctgc

SEQ ID NO: 226146 - DNA, 15 bp, Homo sapiens
cagggcccacatctg

SEQ ID NO: 226147 - DNA, 15 bp, Homo sapiens
ccagggcccacatct

SEQ ID NO: 226148 - DNA, 15 bp, Homo sapiens
tccagggcccacatc

SEQ ID NO: 226149 - DNA, 15 bp, Homo sapiens
ctccagggcccacat

SEQ ID NO: 226150 - DNA, 15 bp, Homo sapiens
tctccagggcccaca

SEQ ID NO: 226151 - DNA, 15 bp, Homo sapiens
gtctccagggcccac

SEQ ID NO: 226152 - DNA, 15 bp, Homo sapiens
tgtctccagggccca

SEQ ID NO: 226153 - DNA, 15 bp, Homo sapiens
ctgtctccagggccc

SEQ ID NO: 226154 - DNA, 15 bp, Homo sapiens
cctgtctccagggcc

SEQ ID NO: 226155 - DNA, 15 bp, Homo sapiens
tcctgtctccagggc

SEQ ID NO: 226156 - DNA, 15 bp, Homo sapiens
gtcctgtctccaggg

SEQ ID NO: 226157 - DNA, 15 bp, Homo sapiens
tgtcctgtctccagg

SEQ ID NO: 226158 - DNA, 15 bp, Homo sapiens
ctgtcctgtctccag

SEQ ID NO: 226159 - DNA, 15 bp, Homo sapiens
cctgtcctgtctcca

SEQ ID NO: 226160 - DNA, 15 bp, Homo sapiens
ccctgtcctgtctcc

SEQ ID NO: 226161 - DNA, 15 bp, Homo sapiens
tccctgtcctgtctc

SEQ ID NO: 226162 - DNA, 15 bp, Homo sapiens
ctccctgtcctgtct

SEQ ID NO: 226163 - DNA, 15 bp, Homo sapiens
tctccctgtcctgtc

SEQ ID NO: 226164 - DNA, 15 bp, Homo sapiens
ctctccctgtcctgt

SEQ ID NO: 226165 - DNA, 15 bp, Homo sapiens
gctctccctgtcctg

SEQ ID NO: 226166 - DNA, 15 bp, Homo sapiens
agctctccctgtcct

SEQ ID NO: 226167 - DNA, 15 bp, Homo sapiens
aagctctccctgtcc

SEQ ID NO: 226168 - DNA, 15 bp, Homo sapiens
aaagctctccctgtc

SEQ ID NO: 226169 - DNA, 15 bp, Homo sapiens
caaagctctccctgt

SEQ ID NO: 226170 - DNA, 15 bp, Homo sapiens
ccaaagctctccctg

SEQ ID NO: 226171 - DNA, 15 bp, Homo sapiens
cccaaagctctccct

SEQ ID NO: 226172 - DNA, 15 bp, Homo sapiens
ccccaaagctctccc

SEQ ID NO: 226173 - DNA, 15 bp, Homo sapiens
tccccaaagctctcc

SEQ ID NO: 226174 - DNA, 15 bp, Homo sapiens
ctccccaaagctctc

SEQ ID NO: 226175 - DNA, 15 bp, Homo sapiens
tctccccaaagctct

SEQ ID NO: 226176 - DNA, 15 bp, Homo sapiens
atctccccaaagctc

SEQ ID NO: 226177 - DNA, 15 bp, Homo sapiens
gatctccccaaagct

SEQ ID NO: 226178 - DNA, 15 bp, Homo sapiens
agatctccccaaagc

SEQ ID NO: 226179 - DNA, 15 bp, Homo sapiens
tagatctccccaaag

SEQ ID NO: 226180 - DNA, 15 bp, Homo sapiens
ctagatctccccaaa

SEQ ID NO: 226181 - DNA, 15 bp, Homo sapiens
gctagatctccccaa

SEQ ID NO: 226182 - DNA, 15 bp, Homo sapiens
ggctagatctcccca

SEQ ID NO: 226183 - DNA, 15 bp, Homo sapiens
tggctagatctcccc

SEQ ID NO: 226184 - DNA, 15 bp, Homo sapiens
ctggctagatctccc

SEQ ID NO: 226185 - DNA, 15 bp, Homo sapiens
cctggctagatctcc

SEQ ID NO: 226186 - DNA, 15 bp, Homo sapiens
tcctggctagatctc

SEQ ID NO: 226187 - DNA, 15 bp, Homo sapiens
ttcctggctagatct

SEQ ID NO: 226188 - DNA, 15 bp, Homo sapiens
cttcctggctagatc

SEQ ID NO: 226189 - DNA, 15 bp, Homo sapiens
ccttcctggctagat

SEQ ID NO: 226190 - DNA, 15 bp, Homo sapiens
tccttcctggctaga

SEQ ID NO: 226191 - DNA, 15 bp, Homo sapiens
ctccttcctggctag

SEQ ID NO: 226192 - DNA, 15 bp, Homo sapiens
tctccttcctggcta

SEQ ID NO: 226193 - DNA, 15 bp, Homo sapiens
ttctccttcctggct

SEQ ID NO: 226194 - DNA, 15 bp, Homo sapiens
gttctccttcctggc

SEQ ID NO: 226195 - DNA, 15 bp, Homo sapiens
agttctccttcctgg

SEQ ID NO: 226196 - DNA, 15 bp, Homo sapiens
aagttctccttcctg

SEQ ID NO: 226197 - DNA, 15 bp, Homo sapiens
gaagttctccttcct

SEQ ID NO: 226198 - DNA, 15 bp, Homo sapiens
tgaagttctccttcc

SEQ ID NO: 226199 - DNA, 15 bp, Homo sapiens
gtgaagttctccttc

SEQ ID NO: 226200 - DNA, 15 bp, Homo sapiens
agtgaagttctcctt

SEQ ID NO: 226201 - DNA, 15 bp, Homo sapiens
cagtgaagttctcct

SEQ ID NO: 226202 - DNA, 15 bp, Homo sapiens
gcagtgaagttctcc

SEQ ID NO: 226203 - DNA, 15 bp, Homo sapiens
tgcagtgaagttctc

SEQ ID NO: 226204 - DNA, 15 bp, Homo sapiens
gtgcagtgaagttct

SEQ ID NO: 226205 - DNA, 15 bp, Homo sapiens
ggtgcagtgaagttc

SEQ ID NO: 226206 - DNA, 15 bp, Homo sapiens
aggtgcagtgaagtt

SEQ ID NO: 226207 - DNA, 15 bp, Homo sapiens
gaggtgcagtgaagt

SEQ ID NO: 226208 - DNA, 15 bp, Homo sapiens
agaggtgcagtgaag

SEQ ID NO: 226209 - DNA, 15 bp, Homo sapiens
cagaggtgcagtgaa

SEQ ID NO: 226210 - DNA, 15 bp, Homo sapiens
ccagaggtgcagtga

SEQ ID NO: 226211 - DNA, 15 bp, Homo sapiens
cccagaggtgcagtg

SEQ ID NO: 226212 - DNA, 15 bp, Homo sapiens
tcccagaggtgcagt

SEQ ID NO: 226213 - DNA, 15 bp, Homo sapiens
atcccagaggtgcag

SEQ ID NO: 226214 - DNA, 15 bp, Homo sapiens
aatcccagaggtgca

SEQ ID NO: 226215 - DNA, 15 bp, Homo sapiens
aaatcccagaggtgc

SEQ ID NO: 226216 - DNA, 15 bp, Homo sapiens
caaatcccagaggtg

SEQ ID NO: 226217 - DNA, 15 bp, Homo sapiens
tcaaatcccagaggt

SEQ ID NO: 226218 - DNA, 15 bp, Homo sapiens
atcaaatcccagagg

SEQ ID NO: 226219 - DNA, 15 bp, Homo sapiens
gatcaaatcccagag

SEQ ID NO: 226220 - DNA, 15 bp, Homo sapiens
tgatcaaatcccaga

SEQ ID NO: 226221 - DNA, 15 bp, Homo sapiens
ctgatcaaatcccag

SEQ ID NO: 226222 - DNA, 15 bp, Homo sapiens
cctgatcaaatccca

SEQ ID NO: 226223 - DNA, 15 bp, Homo sapiens
ccctgatcaaatccc

SEQ ID NO: 226224 - DNA, 15 bp, Homo sapiens
tccctgatcaaatcc

SEQ ID NO: 226225 - DNA, 15 bp, Homo sapiens
ctccctgatcaaatc

SEQ ID NO: 226226 - DNA, 15 bp, Homo sapiens
cctccctgatcaaat

SEQ ID NO: 226227 - DNA, 15 bp, Homo sapiens
tcctccctgatcaaa

SEQ ID NO: 226228 - DNA, 15 bp, Homo sapiens
atcctccctgatcaa

SEQ ID NO: 226229 - DNA, 15 bp, Homo sapiens
catcctccctgatca

SEQ ID NO: 226230 - DNA, 15 bp, Homo sapiens
tcatcctccctgatc

SEQ ID NO: 226231 - DNA, 15 bp, Homo sapiens
ttcatcctccctgat

SEQ ID NO: 226232 - DNA, 15 bp, Homo sapiens
cttcatcctccctga

SEQ ID NO: 226233 - DNA, 15 bp, Homo sapiens
tcttcatcctccctg

SEQ ID NO: 226234 - DNA, 15 bp, Homo sapiens
atcttcatcctccct

SEQ ID NO: 226235 - DNA, 15 bp, Homo sapiens
catcttcatcctccc

SEQ ID NO: 226236 - DNA, 15 bp, Homo sapiens
ccatcttcatcctcc

SEQ ID NO: 226237 - DNA, 15 bp, Homo sapiens
accatcttcatcctc

SEQ ID NO: 226238 - DNA, 15 bp, Homo sapiens
aaccatcttcatcct

SEQ ID NO: 226239 - DNA, 15 bp, Homo sapiens
caaccatcttcatcc

SEQ ID NO: 226240 - DNA, 15 bp, Homo sapiens
ccaaccatcttcatc

SEQ ID NO: 226241 - DNA, 15 bp, Homo sapiens
cccaaccatcttcat

SEQ ID NO: 226242 - DNA, 15 bp, Homo sapiens
ccccaaccatcttca

SEQ ID NO: 226243 - DNA, 15 bp, Homo sapiens
tccccaaccatcttc

SEQ ID NO: 226244 - DNA, 15 bp, Homo sapiens
ctccccaaccatctt

SEQ ID NO: 226245 - DNA, 15 bp, Homo sapiens
gctccccaaccatct

SEQ ID NO: 226246 - DNA, 15 bp, Homo sapiens
tgctccccaaccatc

SEQ ID NO: 226247 - DNA, 15 bp, Homo sapiens
ttgctccccaaccat

SEQ ID NO: 226248 - DNA, 15 bp, Homo sapiens
attgctccccaacca

SEQ ID NO: 226249 - DNA, 15 bp, Homo sapiens
cattgctccccaacc

SEQ ID NO: 226250 - DNA, 15 bp, Homo sapiens
ccattgctccccaac

SEQ ID NO: 226251 - DNA, 15 bp, Homo sapiens
cccattgctccccaa

SEQ ID NO: 226252 - DNA, 15 bp, Homo sapiens
ccccattgctcccca

SEQ ID NO: 226253 - DNA, 15 bp, Homo sapiens
tccccattgctcccc

SEQ ID NO: 226254 - DNA, 15 bp, Homo sapiens
ctccccattgctccc

SEQ ID NO: 226255 - DNA, 15 bp, Homo sapiens
tctccccattgctcc

SEQ ID NO: 226256 - DNA, 15 bp, Homo sapiens
ctctccccattgctc

SEQ ID NO: 226257 - DNA, 15 bp, Homo sapiens
gctctccccattgct

SEQ ID NO: 226258 - DNA, 15 bp, Homo sapiens
tgctctccccattgc

SEQ ID NO: 226259 - DNA, 15 bp, Homo sapiens
atgctctccccattg

SEQ ID NO: 226260 - DNA, 15 bp, Homo sapiens
gatgctctccccatt

SEQ ID NO: 226261 - DNA, 15 bp, Homo sapiens
ggatgctctccccat

SEQ ID NO: 226262 - DNA, 15 bp, Homo sapiens
gggatgctctcccca

SEQ ID NO: 226263 - DNA, 15 bp, Homo sapiens
tgggatgctctcccc

SEQ ID NO: 226264 - DNA, 15 bp, Homo sapiens
ctgggatgctctccc

SEQ ID NO: 226265 - DNA, 15 bp, Homo sapiens
cctgggatgctctcc

SEQ ID NO: 226266 - DNA, 15 bp, Homo sapiens
tcctgggatgctctc

SEQ ID NO: 226267 - DNA, 15 bp, Homo sapiens
ctcctgggatgctct

SEQ ID NO: 226268 - DNA, 15 bp, Homo sapiens
actcctgggatgctc

SEQ ID NO: 226269 - DNA, 15 bp, Homo sapiens
cactcctgggatgct

SEQ ID NO: 226270 - DNA, 15 bp, Homo sapiens
ccactcctgggatgc

SEQ ID NO: 226271 - DNA, 15 bp, Homo sapiens
cccactcctgggatg

SEQ ID NO: 226272 - DNA, 15 bp, Homo sapiens
tcccactcctgggat

SEQ ID NO: 226273 - DNA, 15 bp, Homo sapiens
ttcccactcctggga

SEQ ID NO: 226274 - DNA, 15 bp, Homo sapiens
gttcccactcctggg

SEQ ID NO: 226275 - DNA, 15 bp, Homo sapiens
tgttcccactcctgg

SEQ ID NO: 226276 - DNA, 15 bp, Homo sapiens
ctgttcccactcctg

SEQ ID NO: 226277 - DNA, 15 bp, Homo sapiens
gctgttcccactcct

SEQ ID NO: 226278 - DNA, 15 bp, Homo sapiens
ggctgttcccactcc

SEQ ID NO: 226279 - DNA, 15 bp, Homo sapiens
tggctgttcccactc

SEQ ID NO: 226280 - DNA, 15 bp, Homo sapiens
ctggctgttcccact

SEQ ID NO: 226281 - DNA, 15 bp, Homo sapiens
gctggctgttcccac

SEQ ID NO: 226282 - DNA, 15 bp, Homo sapiens
tgctggctgttccca

SEQ ID NO: 226283 - DNA, 15 bp, Homo sapiens
gtgctggctgttccc

SEQ ID NO: 226284 - DNA, 15 bp, Homo sapiens
cgtgctggctgttcc

SEQ ID NO: 226285 - DNA, 15 bp, Homo sapiens
ccgtgctggctgttc

SEQ ID NO: 226286 - DNA, 15 bp, Homo sapiens
tccgtgctggctgtt

SEQ ID NO: 226287 - DNA, 15 bp, Homo sapiens
ctccgtgctggctgt

SEQ ID NO: 226288 - DNA, 15 bp, Homo sapiens
cctccgtgctggctg

SEQ ID NO: 226289 - DNA, 15 bp, Homo sapiens
acctccgtgctggct

SEQ ID NO: 226290 - DNA, 15 bp, Homo sapiens
cacctccgtgctggc

SEQ ID NO: 226291 - DNA, 15 bp, Homo sapiens
acacctccgtgctgg

SEQ ID NO: 226292 - DNA, 15 bp, Homo sapiens
cacacctccgtgctg

SEQ ID NO: 226293 - DNA, 15 bp, Homo sapiens
ccacacctccgtgct

SEQ ID NO: 226294 - DNA, 15 bp, Homo sapiens
gccacacctccgtgc

SEQ ID NO: 226295 - DNA, 15 bp, Homo sapiens
tgccacacctccgtg

SEQ ID NO: 226296 - DNA, 15 bp, Homo sapiens
ctgccacacctccgt

SEQ ID NO: 226297 - DNA, 15 bp, Homo sapiens
actgccacacctccg

SEQ ID NO: 226298 - DNA, 15 bp, Homo sapiens
gactgccacacctcc

SEQ ID NO: 226299 - DNA, 15 bp, Homo sapiens
tgactgccacacctc

SEQ ID NO: 226300 - DNA, 15 bp, Homo sapiens
ctgactgccacacct

SEQ ID NO: 226301 - DNA, 15 bp, Homo sapiens
cctgactgccacacc

SEQ ID NO: 226302 - DNA, 15 bp, Homo sapiens
tcctgactgccacac

SEQ ID NO: 226303 - DNA, 15 bp, Homo sapiens
ctcctgactgccaca

SEQ ID NO: 226304 - DNA, 15 bp, Homo sapiens
cctcctgactgccac

SEQ ID NO: 226305 - DNA, 15 bp, Homo sapiens
tcctcctgactgcca

SEQ ID NO: 226306 - DNA, 15 bp, Homo sapiens
gtcctcctgactgcc

SEQ ID NO: 226307 - DNA, 15 bp, Homo sapiens
ggtcctcctgactgc

SEQ ID NO: 226308 - DNA, 15 bp, Homo sapiens
tggtcctcctgactg

SEQ ID NO: 226309 - DNA, 15 bp, Homo sapiens
ttggtcctcctgact

SEQ ID NO: 226310 - DNA, 15 bp, Homo sapiens
cttggtcctcctgac

SEQ ID NO: 226311 - DNA, 15 bp, Homo sapiens
acttggtcctcctga

SEQ ID NO: 226312 - DNA, 15 bp, Homo sapiens
gacttggtcctcctg

SEQ ID NO: 226313 - DNA, 15 bp, Homo sapiens
tgacttggtcctcct

SEQ ID NO: 226314 - DNA, 15 bp, Homo sapiens
atgacttggtcctcc

SEQ ID NO: 226315 - DNA, 15 bp, Homo sapiens
tatgacttggtcctc

SEQ ID NO: 226316 - DNA, 15 bp, Homo sapiens
ctatgacttggtcct

SEQ ID NO: 226317 - DNA, 15 bp, Homo sapiens
gctatgacttggtcc

SEQ ID NO: 226318 - DNA, 15 bp, Homo sapiens
ggctatgacttggtc

SEQ ID NO: 226319 - DNA, 15 bp, Homo sapiens
cggctatgacttggt

SEQ ID NO: 226320 - DNA, 15 bp, Homo sapiens
tcggctatgacttgg

SEQ ID NO: 226321 - DNA, 15 bp, Homo sapiens
ctcggctatgacttg

SEQ ID NO: 226322 - DNA, 15 bp, Homo sapiens
tctcggctatgactt

SEQ ID NO: 226323 - DNA, 15 bp, Homo sapiens
ttctcggctatgact

SEQ ID NO: 226324 - DNA, 15 bp, Homo sapiens
cttctcggctatgac

SEQ ID NO: 226325 - DNA, 15 bp, Homo sapiens
acttctcggctatga

SEQ ID NO: 226326 - DNA, 15 bp, Homo sapiens
gacttctcggctatg

SEQ ID NO: 226327 - DNA, 15 bp, Homo sapiens
tgacttctcggctat

SEQ ID NO: 226328 - DNA, 15 bp, Homo sapiens
ctgacttctcggcta

SEQ ID NO: 226329 - DNA, 15 bp, Homo sapiens
cctgacttctcggct

SEQ ID NO: 226330 - DNA, 15 bp, Homo sapiens
acctgacttctcggc

SEQ ID NO: 226331 - DNA, 15 bp, Homo sapiens
cacctgacttctcgg

SEQ ID NO: 226332 - DNA, 15 bp, Homo sapiens
ccacctgacttctcg

SEQ ID NO: 226333 - DNA, 15 bp, Homo sapiens
tccacctgacttctc

SEQ ID NO: 226334 - DNA, 15 bp, Homo sapiens
ttccacctgacttct

SEQ ID NO: 226335 - DNA, 15 bp, Homo sapiens
cttccacctgacttc

SEQ ID NO: 226336 - DNA, 15 bp, Homo sapiens
tcttccacctgactt

SEQ ID NO: 226337 - DNA, 15 bp, Homo sapiens
ctcttccacctgact

SEQ ID NO: 226338 - DNA, 15 bp, Homo sapiens
gctcttccacctgac

SEQ ID NO: 226339 - DNA, 15 bp, Homo sapiens
tgctcttccacctga

SEQ ID NO: 226340 - DNA, 15 bp, Homo sapiens
ctgctcttccacctg

SEQ ID NO: 226341 - DNA, 15 bp, Homo sapiens
cctgctcttccacct

SEQ ID NO: 226342 - DNA, 15 bp, Homo sapiens
acctgctcttccacc

SEQ ID NO: 226343 - DNA, 15 bp, Homo sapiens
gacctgctcttccac

SEQ ID NO: 226344 - DNA, 15 bp, Homo sapiens
tgacctgctcttcca

SEQ ID NO: 226345 - DNA, 15 bp, Homo sapiens
ctgacctgctcttcc

SEQ ID NO: 226346 - DNA, 15 bp, Homo sapiens
actgacctgctcttc

SEQ ID NO: 226347 - DNA, 15 bp, Homo sapiens
cactgacctgctctt

SEQ ID NO: 226348 - DNA, 15 bp, Homo sapiens
tcactgacctgctct

SEQ ID NO: 226349 - DNA, 15 bp, Homo sapiens
gtcactgacctgctc

SEQ ID NO: 226350 - DNA, 15 bp, Homo sapiens
cgtcactgacctgct

SEQ ID NO: 226351 - DNA, 15 bp, Homo sapiens
tcgtcactgacctgc

SEQ ID NO: 226352 - DNA, 15 bp, Homo sapiens
ctcgtcactgacctg

SEQ ID NO: 226353 - DNA, 15 bp, Homo sapiens
actcgtcactgacct

SEQ ID NO: 226354 - DNA, 15 bp, Homo sapiens
cactcgtcactgacc

SEQ ID NO: 226355 - DNA, 15 bp, Homo sapiens
ccactcgtcactgac

SEQ ID NO: 226356 - DNA, 15 bp, Homo sapiens
cccactcgtcactga

SEQ ID NO: 226357 - DNA, 15 bp, Homo sapiens
ccccactcgtcactg

SEQ ID NO: 226358 - DNA, 15 bp, Homo sapiens
tccccactcgtcact

SEQ ID NO: 226359 - DNA, 15 bp, Homo sapiens
ctccccactcgtcac

SEQ ID NO: 226360 - DNA, 15 bp, Homo sapiens
cctccccactcgtca

SEQ ID NO: 226361 - DNA, 15 bp, Homo sapiens
ccctccccactcgtc

SEQ ID NO: 226362 - DNA, 15 bp, Homo sapiens
gccctccccactcgt

SEQ ID NO: 226363 - DNA, 15 bp, Homo sapiens
tgccctccccactcg

SEQ ID NO: 226364 - DNA, 15 bp, Homo sapiens
ctgccctccccactc

SEQ ID NO: 226365 - DNA, 15 bp, Homo sapiens
gctgccctccccact

SEQ ID NO: 226366 - DNA, 15 bp, Homo sapiens
ggctgccctccccac

SEQ ID NO: 226367 - DNA, 15 bp, Homo sapiens
cggctgccctcccca

SEQ ID NO: 226368 - DNA, 15 bp, Homo sapiens
ccggctgccctcccc

SEQ ID NO: 226369 - DNA, 15 bp, Homo sapiens
gccggctgccctccc

SEQ ID NO: 226370 - DNA, 15 bp, Homo sapiens
atgagtaacccgaga

SEQ ID NO: 226371 - DNA, 15 bp, Homo sapiens
gatgagtaacccgag

SEQ ID NO: 226372 - DNA, 15 bp, Homo sapiens
agatgagtaacccga

SEQ ID NO: 226373 - DNA, 15 bp, Homo sapiens
aagatgagtaacccg

SEQ ID NO: 226374 - DNA, 15 bp, Homo sapiens
aaagatgagtaaccc

SEQ ID NO: 226375 - DNA, 15 bp, Homo sapiens
aaaagatgagtaacc

SEQ ID NO: 226376 - DNA, 15 bp, Homo sapiens
aaaaagatgagtaac

SEQ ID NO: 226377 - DNA, 15 bp, Homo sapiens
taaaaagatgagtaa

SEQ ID NO: 226378 - DNA, 15 bp, Homo sapiens
gtaaaaagatgagta

SEQ ID NO: 226379 - DNA, 15 bp, Homo sapiens
agtaaaaagatgagt

SEQ ID NO: 226380 - DNA, 15 bp, Homo sapiens
gagtaaaaagatgag

SEQ ID NO: 226381 - DNA, 15 bp, Homo sapiens
ggagtaaaaagatga

SEQ ID NO: 226382 - DNA, 15 bp, Homo sapiens
tggagtaaaaagatg

SEQ ID NO: 226383 - DNA, 15 bp, Homo sapiens
ttggagtaaaaagat

SEQ ID NO: 226384 - DNA, 15 bp, Homo sapiens
tttggagtaaaaaga

SEQ ID NO: 226385 - DNA, 15 bp, Homo sapiens
atttggagtaaaaag

SEQ ID NO: 226386 - DNA, 15 bp, Homo sapiens
aatttggagtaaaaa

SEQ ID NO: 226387 - DNA, 15 bp, Homo sapiens
caatttggagtaaaa

SEQ ID NO: 226388 - DNA, 15 bp, Homo sapiens
gcaatttggagtaaa

SEQ ID NO: 226389 - DNA, 15 bp, Homo sapiens
agcaatttggagtaa

SEQ ID NO: 226390 - DNA, 15 bp, Homo sapiens
aagcaatttggagta

SEQ ID NO: 226391 - DNA, 15 bp, Homo sapiens
caagcaatttggagt

SEQ ID NO: 226392 - DNA, 15 bp, Homo sapiens
ccaagcaatttggag

SEQ ID NO: 226393 - DNA, 15 bp, Homo sapiens
tccaagcaatttgga

SEQ ID NO: 226394 - DNA, 15 bp, Homo sapiens
ctccaagcaatttgg

SEQ ID NO: 226395 - DNA, 15 bp, Homo sapiens
actccaagcaatttg

SEQ ID NO: 226396 - DNA, 15 bp, Homo sapiens
gactccaagcaattt

SEQ ID NO: 226397 - DNA, 15 bp, Homo sapiens
ggactccaagcaatt

SEQ ID NO: 226398 - DNA, 15 bp, Homo sapiens
aggactccaagcaat

SEQ ID NO: 226399 - DNA, 15 bp, Homo sapiens
gaggactccaagcaa

SEQ ID NO: 226400 - DNA, 15 bp, Homo sapiens
agaggactccaagca

SEQ ID NO: 226401 - DNA, 15 bp, Homo sapiens
cagaggactccaagc

SEQ ID NO: 226402 - DNA, 15 bp, Homo sapiens
acagaggactccaag

SEQ ID NO: 226403 - DNA, 15 bp, Homo sapiens
aacagaggactccaa

SEQ ID NO: 226404 - DNA, 15 bp, Homo sapiens
caacagaggactcca

SEQ ID NO: 226405 - DNA, 15 bp, Homo sapiens
tcaacagaggactcc

SEQ ID NO: 226406 - DNA, 15 bp, Homo sapiens
gtcaacagaggactc

SEQ ID NO: 226407 - DNA, 15 bp, Homo sapiens
agtcaacagaggact

SEQ ID NO: 226408 - DNA, 15 bp, Homo sapiens
gagtcaacagaggac

SEQ ID NO: 226409 - DNA, 15 bp, Homo sapiens
agagtcaacagagga

SEQ ID NO: 226410 - DNA, 15 bp, Homo sapiens
cagagtcaacagagg

SEQ ID NO: 226411 - DNA, 15 bp, Homo sapiens
tcagagtcaacagag

SEQ ID NO: 226412 - DNA, 15 bp, Homo sapiens
ttcagagtcaacaga

SEQ ID NO: 226413 - DNA, 15 bp, Homo sapiens
cttcagagtcaacag

SEQ ID NO: 226414 - DNA, 15 bp, Homo sapiens
ccttcagagtcaaca

SEQ ID NO: 226415 - DNA, 15 bp, Homo sapiens
cccttcagagtcaac

SEQ ID NO: 226416 - DNA, 15 bp, Homo sapiens
tcccttcagagtcaa

SEQ ID NO: 226417 - DNA, 15 bp, Homo sapiens
ttcccttcagagtca

SEQ ID NO: 226418 - DNA, 15 bp, Homo sapiens
attcccttcagagtc

SEQ ID NO: 226419 - DNA, 15 bp, Homo sapiens
tattcccttcagagt

SEQ ID NO: 226420 - DNA, 15 bp, Homo sapiens
atattcccttcagag

SEQ ID NO: 226421 - DNA, 15 bp, Homo sapiens
aatattcccttcaga

SEQ ID NO: 226422 - DNA, 15 bp, Homo sapiens
gaatattcccttcag

SEQ ID NO: 226423 - DNA, 15 bp, Homo sapiens
tgaatattcccttca

SEQ ID NO: 226424 - DNA, 15 bp, Homo sapiens
ttgaatattcccttc

SEQ ID NO: 226425 - DNA, 15 bp, Homo sapiens
gttgaatattccctt

SEQ ID NO: 226426 - DNA, 15 bp, Homo sapiens
ggttgaatattccct

SEQ ID NO: 226427 - DNA, 15 bp, Homo sapiens
tggttgaatattccc

SEQ ID NO: 226428 - DNA, 15 bp, Homo sapiens
atggttgaatattcc

SEQ ID NO: 226429 - DNA, 15 bp, Homo sapiens
tatggttgaatattc

SEQ ID NO: 226430 - DNA, 15 bp, Homo sapiens
ttatggttgaatatt

SEQ ID NO: 226431 - DNA, 15 bp, Homo sapiens
tttatggttgaatat

SEQ ID NO: 226432 - DNA, 15 bp, Homo sapiens
gtttatggttgaata

SEQ ID NO: 226433 - DNA, 15 bp, Homo sapiens
tgtttatggttgaat

SEQ ID NO: 226434 - DNA, 15 bp, Homo sapiens
ttgtttatggttgaa

SEQ ID NO: 226435 - DNA, 15 bp, Homo sapiens
attgtttatggttga

SEQ ID NO: 226436 - DNA, 15 bp, Homo sapiens
aattgtttatggttg

SEQ ID NO: 226437 - DNA, 15 bp, Homo sapiens
gaattgtttatggtt

SEQ ID NO: 226438 - DNA, 15 bp, Homo sapiens
tgaattgtttatggt

SEQ ID NO: 226439 - DNA, 15 bp, Homo sapiens
atgaattgtttatgg

SEQ ID NO: 226440 - DNA, 15 bp, Homo sapiens
gatgaattgtttatg

SEQ ID NO: 226441 - DNA, 15 bp, Homo sapiens
ggatgaattgtttat

SEQ ID NO: 226442 - DNA, 15 bp, Homo sapiens
aggatgaattgttta

SEQ ID NO: 226443 - DNA, 15 bp, Homo sapiens
taggatgaattgttt

SEQ ID NO: 226444 - DNA, 15 bp, Homo sapiens
ataggatgaattgtt

SEQ ID NO: 226445 - DNA, 15 bp, Homo sapiens
gataggatgaattgt

SEQ ID NO: 226446 - DNA, 15 bp, Homo sapiens
agataggatgaattg

SEQ ID NO: 226447 - DNA, 15 bp, Homo sapiens
cagataggatgaatt

SEQ ID NO: 226448 - DNA, 15 bp, Homo sapiens
gcagataggatgaat

SEQ ID NO: 226449 - DNA, 15 bp, Homo sapiens
agcagataggatgaa

SEQ ID NO: 226450 - DNA, 15 bp, Homo sapiens
tagcagataggatga

SEQ ID NO: 226451 - DNA, 15 bp, Homo sapiens
atagcagataggatg

SEQ ID NO: 226452 - DNA, 15 bp, Homo sapiens
gatagcagataggat

SEQ ID NO: 226453 - DNA, 15 bp, Homo sapiens
agatagcagatagga

SEQ ID NO: 226454 - DNA, 15 bp, Homo sapiens
cagatagcagatagg

SEQ ID NO: 226455 - DNA, 15 bp, Homo sapiens
acagatagcagatag

SEQ ID NO: 226456 - DNA, 15 bp, Homo sapiens
cacagatagcagata

SEQ ID NO: 226457 - DNA, 15 bp, Homo sapiens
ccacagatagcagat

SEQ ID NO: 226458 - DNA, 15 bp, Homo sapiens
accacagatagcaga

SEQ ID NO: 226459 - DNA, 15 bp, Homo sapiens
aaccacagatagcag

SEQ ID NO: 226460 - DNA, 15 bp, Homo sapiens
caaccacagatagca

SEQ ID NO: 226461 - DNA, 15 bp, Homo sapiens
tcaaccacagatagc

SEQ ID NO: 226462 - DNA, 15 bp, Homo sapiens
ttcaaccacagatag

SEQ ID NO: 226463 - DNA, 15 bp, Homo sapiens
attcaaccacagata

SEQ ID NO: 226464 - DNA, 15 bp, Homo sapiens
aattcaaccacagat

SEQ ID NO: 226465 - DNA, 15 bp, Homo sapiens
gaattcaaccacaga

SEQ ID NO: 226466 - DNA, 15 bp, Homo sapiens
agaattcaaccacag

SEQ ID NO: 226467 - DNA, 15 bp, Homo sapiens
aagaattcaaccaca

SEQ ID NO: 226468 - DNA, 15 bp, Homo sapiens
aaagaattcaaccac

SEQ ID NO: 226469 - DNA, 15 bp, Homo sapiens
gaaagaattcaacca

SEQ ID NO: 226470 - DNA, 15 bp, Homo sapiens
agaaagaattcaacc

SEQ ID NO: 226471 - DNA, 15 bp, Homo sapiens
aagaaagaattcaac

SEQ ID NO: 226472 - DNA, 15 bp, Homo sapiens
gaagaaagaattcaa

SEQ ID NO: 226473 - DNA, 15 bp, Homo sapiens
ggaagaaagaattca

SEQ ID NO: 226474 - DNA, 15 bp, Homo sapiens
gggaagaaagaattc

SEQ ID NO: 226475 - DNA, 15 bp, Homo sapiens
tgggaagaaagaatt

SEQ ID NO: 226476 - DNA, 15 bp, Homo sapiens
ctgggaagaaagaat

SEQ ID NO: 226477 - DNA, 15 bp, Homo sapiens
actgggaagaaagaa

SEQ ID NO: 226478 - DNA, 15 bp, Homo sapiens
aactgggaagaaaga

SEQ ID NO: 226479 - DNA, 15 bp, Homo sapiens
caactgggaagaaag

SEQ ID NO: 226480 - DNA, 15 bp, Homo sapiens
gcaactgggaagaaa

SEQ ID NO: 226481 - DNA, 15 bp, Homo sapiens
ggcaactgggaagaa

SEQ ID NO: 226482 - DNA, 15 bp, Homo sapiens
gggcaactgggaaga

SEQ ID NO: 226483 - DNA, 15 bp, Homo sapiens
ggggcaactgggaag

SEQ ID NO: 226484 - DNA, 15 bp, Homo sapiens
aggggcaactgggaa

SEQ ID NO: 226485 - DNA, 15 bp, Homo sapiens
aaggggcaactggga

SEQ ID NO: 226486 - DNA, 15 bp, Homo sapiens
caaggggcaactggg

SEQ ID NO: 226487 - DNA, 15 bp, Homo sapiens
ccaaggggcaactgg

SEQ ID NO: 226488 - DNA, 15 bp, Homo sapiens
cccaaggggcaactg

SEQ ID NO: 226489 - DNA, 15 bp, Homo sapiens
acccaaggggcaact

SEQ ID NO: 226490 - DNA, 15 bp, Homo sapiens
cacccaaggggcaac

SEQ ID NO: 226491 - DNA, 15 bp, Homo sapiens
ccacccaaggggcaa

SEQ ID NO: 226492 - DNA, 15 bp, Homo sapiens
accacccaaggggca

SEQ ID NO: 226493 - DNA, 15 bp, Homo sapiens
caccacccaaggggc

SEQ ID NO: 226494 - DNA, 15 bp, Homo sapiens
ccaccacccaagggg

SEQ ID NO: 226495 - DNA, 15 bp, Homo sapiens
gccaccacccaaggg

SEQ ID NO: 226496 - DNA, 15 bp, Homo sapiens
agccaccacccaagg

SEQ ID NO: 226497 - DNA, 15 bp, Homo sapiens
aagccaccacccaag

SEQ ID NO: 226498 - DNA, 15 bp, Homo sapiens
caagccaccacccaa

SEQ ID NO: 226499 - DNA, 15 bp, Homo sapiens
ccaagccaccaccca

SEQ ID NO: 226500 - DNA, 15 bp, Homo sapiens
cccaagccaccaccc

SEQ ID NO: 226501 - DNA, 15 bp, Homo sapiens
ccccaagccaccacc

SEQ ID NO: 226502 - DNA, 15 bp, Homo sapiens
gccccaagccaccac

SEQ ID NO: 226503 - DNA, 15 bp, Homo sapiens
ggccccaagccacca

SEQ ID NO: 226504 - DNA, 15 bp, Homo sapiens
tggccccaagccacc

SEQ ID NO: 226505 - DNA, 15 bp, Homo sapiens
gtggccccaagccac

SEQ ID NO: 226506 - DNA, 15 bp, Homo sapiens
cgtggccccaagcca

SEQ ID NO: 226507 - DNA, 15 bp, Homo sapiens
ccgtggccccaagcc

SEQ ID NO: 226508 - DNA, 15 bp, Homo sapiens
accgtggccccaagc

SEQ ID NO: 226509 - DNA, 15 bp, Homo sapiens
taccgtggccccaag

SEQ ID NO: 226510 - DNA, 15 bp, Homo sapiens
ttaccgtggccccaa

SEQ ID NO: 226511 - DNA, 15 bp, Homo sapiens
gttaccgtggcccca

SEQ ID NO: 226512 - DNA, 15 bp, Homo sapiens
tgttaccgtggcccc

SEQ ID NO: 226513 - DNA, 15 bp, Homo sapiens
gtgttaccgtggccc

SEQ ID NO: 226514 - DNA, 15 bp, Homo sapiens
agtgttaccgtggcc

SEQ ID NO: 226515 - DNA, 15 bp, Homo sapiens
aagtgttaccgtggc

SEQ ID NO: 226516 - DNA, 15 bp, Homo sapiens
caagtgttaccgtgg

SEQ ID NO: 226517 - DNA, 15 bp, Homo sapiens
acaagtgttaccgtg

SEQ ID NO: 226518 - DNA, 15 bp, Homo sapiens
tacaagtgttaccgt

SEQ ID NO: 226519 - DNA, 15 bp, Homo sapiens
ctacaagtgttaccg

SEQ ID NO: 226520 - DNA, 15 bp, Homo sapiens
actacaagtgttacc

SEQ ID NO: 226521 - DNA, 15 bp, Homo sapiens
tactacaagtgttac

SEQ ID NO: 226522 - DNA, 15 bp, Homo sapiens
atactacaagtgtta

SEQ ID NO: 226523 - DNA, 15 bp, Homo sapiens
aatactacaagtgtt

SEQ ID NO: 226524 - DNA, 15 bp, Homo sapiens
aaatactacaagtgt

SEQ ID NO: 226525 - DNA, 15 bp, Homo sapiens
gaaatactacaagtg

SEQ ID NO: 226526 - DNA, 15 bp, Homo sapiens
ggaaatactacaagt

SEQ ID NO: 226527 - DNA, 15 bp, Homo sapiens
gggaaatactacaag

SEQ ID NO: 226528 - DNA, 15 bp, Homo sapiens
cgggaaatactacaa

SEQ ID NO: 226529 - DNA, 15 bp, Homo sapiens
ccgggaaatactaca

SEQ ID NO: 226530 - DNA, 15 bp, Homo sapiens
cccgggaaatactac

SEQ ID NO: 226531 - DNA, 15 bp, Homo sapiens
tcccgggaaatacta

SEQ ID NO: 226532 - DNA, 15 bp, Homo sapiens
ctcccgggaaatact

SEQ ID NO: 226533 - DNA, 15 bp, Homo sapiens
cctcccgggaaatac

SEQ ID NO: 226534 - DNA, 15 bp, Homo sapiens
acctcccgggaaata

SEQ ID NO: 226535 - DNA, 15 bp, Homo sapiens
aacctcccgggaaat

SEQ ID NO: 226536 - DNA, 15 bp, Homo sapiens
caacctcccgggaaa

SEQ ID NO: 226537 - DNA, 15 bp, Homo sapiens
acaacctcccgggaa

SEQ ID NO: 226538 - DNA, 15 bp, Homo sapiens
aacaacctcccggga

SEQ ID NO: 226539 - DNA, 15 bp, Homo sapiens
taacaacctcccggg

SEQ ID NO: 226540 - DNA, 15 bp, Homo sapiens
ataacaacctcccgg

SEQ ID NO: 226541 - DNA, 15 bp, Homo sapiens
tataacaacctcccg

SEQ ID NO: 226542 - DNA, 15 bp, Homo sapiens
ctataacaacctccc

SEQ ID NO: 226543 - DNA, 15 bp, Homo sapiens
actataacaacctcc

SEQ ID NO: 226544 - DNA, 15 bp, Homo sapiens
aactataacaacctc

SEQ ID NO: 226545 - DNA, 15 bp, Homo sapiens
gaactataacaacct

SEQ ID NO: 226546 - DNA, 15 bp, Homo sapiens
agaactataacaacc

SEQ ID NO: 226547 - DNA, 15 bp, Homo sapiens
cagaactataacaac

SEQ ID NO: 226548 - DNA, 15 bp, Homo sapiens
acagaactataacaa

SEQ ID NO: 226549 - DNA, 15 bp, Homo sapiens
cacagaactataaca

SEQ ID NO: 226550 - DNA, 15 bp, Homo sapiens
gcacagaactataac

SEQ ID NO: 226551 - DNA, 15 bp, Homo sapiens
tgcacagaactataa

SEQ ID NO: 226552 - DNA, 15 bp, Homo sapiens
atgcacagaactata

SEQ ID NO: 226553 - DNA, 15 bp, Homo sapiens
aatgcacagaactat

SEQ ID NO: 226554 - DNA, 15 bp, Homo sapiens
aaatgcacagaacta

SEQ ID NO: 226555 - DNA, 15 bp, Homo sapiens
gaaatgcacagaact

SEQ ID NO: 226556 - DNA, 15 bp, Homo sapiens
ggaaatgcacagaac

SEQ ID NO: 226557 - DNA, 15 bp, Homo sapiens
aggaaatgcacagaa

SEQ ID NO: 226558 - DNA, 15 bp, Homo sapiens
caggaaatgcacaga

SEQ ID NO: 226559 - DNA, 15 bp, Homo sapiens
gcaggaaatgcacag

SEQ ID NO: 226560 - DNA, 15 bp, Homo sapiens
tgcaggaaatgcaca

SEQ ID NO: 226561 - DNA, 15 bp, Homo sapiens
ctgcaggaaatgcac

SEQ ID NO: 226562 - DNA, 15 bp, Homo sapiens
actgcaggaaatgca

SEQ ID NO: 226563 - DNA, 15 bp, Homo sapiens
tactgcaggaaatgc

SEQ ID NO: 226564 - DNA, 15 bp, Homo sapiens
ctactgcaggaaatg

SEQ ID NO: 226565 - DNA, 15 bp, Homo sapiens
actactgcaggaaat

SEQ ID NO: 226566 - DNA, 15 bp, Homo sapiens
cactactgcaggaaa

SEQ ID NO: 226567 - DNA, 15 bp, Homo sapiens
ccactactgcaggaa

SEQ ID NO: 226568 - DNA, 15 bp, Homo sapiens
accactactgcagga

SEQ ID NO: 226569 - DNA, 15 bp, Homo sapiens
taccactactgcagg

SEQ ID NO: 226570 - DNA, 15 bp, Homo sapiens
ctaccactactgcag

SEQ ID NO: 226571 - DNA, 15 bp, Homo sapiens
actaccactactgca

SEQ ID NO: 226572 - DNA, 15 bp, Homo sapiens
cactaccactactgc

SEQ ID NO: 226573 - DNA, 15 bp, Homo sapiens
tcactaccactactg

SEQ ID NO: 226574 - DNA, 15 bp, Homo sapiens
ttcactaccactact

SEQ ID NO: 226575 - DNA, 15 bp, Homo sapiens
cttcactaccactac

SEQ ID NO: 226576 - DNA, 15 bp, Homo sapiens
ccttcactaccacta

SEQ ID NO: 226577 - DNA, 15 bp, Homo sapiens
gccttcactaccact

SEQ ID NO: 226578 - DNA, 15 bp, Homo sapiens
tgccttcactaccac

SEQ ID NO: 226579 - DNA, 15 bp, Homo sapiens
atgccttcactacca

SEQ ID NO: 226580 - DNA, 15 bp, Homo sapiens
aatgccttcactacc

SEQ ID NO: 226581 - DNA, 15 bp, Homo sapiens
taatgccttcactac

SEQ ID NO: 226582 - DNA, 15 bp, Homo sapiens
ctaatgccttcacta

SEQ ID NO: 226583 - DNA, 15 bp, Homo sapiens
tctaatgccttcact

SEQ ID NO: 226584 - DNA, 15 bp, Homo sapiens
atctaatgccttcac

SEQ ID NO: 226585 - DNA, 15 bp, Homo sapiens
catctaatgccttca

SEQ ID NO: 226586 - DNA, 15 bp, Homo sapiens
gcatctaatgccttc

SEQ ID NO: 226587 - DNA, 15 bp, Homo sapiens
ggcatctaatgcctt

SEQ ID NO: 226588 - DNA, 15 bp, Homo sapiens
tggcatctaatgcct

SEQ ID NO: 226589 - DNA, 15 bp, Homo sapiens
ctggcatctaatgcc

SEQ ID NO: 226590 - DNA, 15 bp, Homo sapiens
cctggcatctaatgc

SEQ ID NO: 226591 - DNA, 15 bp, Homo sapiens
tcctggcatctaatg

SEQ ID NO: 226592 - DNA, 15 bp, Homo sapiens
ttcctggcatctaat

SEQ ID NO: 226593 - DNA, 15 bp, Homo sapiens
gttcctggcatctaa

SEQ ID NO: 226594 - DNA, 15 bp, Homo sapiens
agttcctggcatcta

SEQ ID NO: 226595 - DNA, 15 bp, Homo sapiens
gagttcctggcatct

SEQ ID NO: 226596 - DNA, 15 bp, Homo sapiens
tgagttcctggcatc

SEQ ID NO: 226597 - DNA, 15 bp, Homo sapiens
ctgagttcctggcat

SEQ ID NO: 226598 - DNA, 15 bp, Homo sapiens
cctgagttcctggca

SEQ ID NO: 226599 - DNA, 15 bp, Homo sapiens
gcctgagttcctggc

SEQ ID NO: 226600 - DNA, 15 bp, Homo sapiens
cgcctgagttcctgg

SEQ ID NO: 226601 - DNA, 15 bp, Homo sapiens
ccgcctgagttcctg

SEQ ID NO: 226602 - DNA, 15 bp, Homo sapiens
accgcctgagttcct

SEQ ID NO: 226603 - DNA, 15 bp, Homo sapiens
aaccgcctgagttcc

SEQ ID NO: 226604 - DNA, 15 bp, Homo sapiens
caaccgcctgagttc

SEQ ID NO: 226605 - DNA, 15 bp, Homo sapiens
ccaaccgcctgagtt

SEQ ID NO: 226606 - DNA, 15 bp, Homo sapiens
accaaccgcctgagt

SEQ ID NO: 226607 - DNA, 15 bp, Homo sapiens
taccaaccgcctgag

SEQ ID NO: 226608 - DNA, 15 bp, Homo sapiens
ataccaaccgcctga

SEQ ID NO: 226609 - DNA, 15 bp, Homo sapiens
cataccaaccgcctg

SEQ ID NO: 226610 - DNA, 15 bp, Homo sapiens
ccataccaaccgcct

SEQ ID NO: 226611 - DNA, 15 bp, Homo sapiens
gccataccaaccgcc

SEQ ID NO: 226612 - DNA, 15 bp, Homo sapiens
ggccataccaaccgc

SEQ ID NO: 226613 - DNA, 15 bp, Homo sapiens
gggccataccaaccg

SEQ ID NO: 226614 - DNA, 15 bp, Homo sapiens
agggccataccaacc

SEQ ID NO: 226615 - DNA, 15 bp, Homo sapiens
cagggccataccaac

SEQ ID NO: 226616 - DNA, 15 bp, Homo sapiens
tcagggccataccaa

SEQ ID NO: 226617 - DNA, 15 bp, Homo sapiens
ctcagggccatacca

SEQ ID NO: 226618 - DNA, 15 bp, Homo sapiens
gctcagggccatacc

SEQ ID NO: 226619 - DNA, 15 bp, Homo sapiens
agctcagggccatac

SEQ ID NO: 226620 - DNA, 15 bp, Homo sapiens
gagctcagggccata

SEQ ID NO: 226621 - DNA, 15 bp, Homo sapiens
agagctcagggccat

SEQ ID NO: 226622 - DNA, 15 bp, Homo sapiens
cagagctcagggcca

SEQ ID NO: 226623 - DNA, 15 bp, Homo sapiens
tcagagctcagggcc

SEQ ID NO: 226624 - DNA, 15 bp, Homo sapiens
ttcagagctcagggc

SEQ ID NO: 226625 - DNA, 15 bp, Homo sapiens
tttcagagctcaggg

SEQ ID NO: 226626 - DNA, 15 bp, Homo sapiens
ttttcagagctcagg

SEQ ID NO: 226627 - DNA, 15 bp, Homo sapiens
attttcagagctcag

SEQ ID NO: 226628 - DNA, 15 bp, Homo sapiens
cattttcagagctca

SEQ ID NO: 226629 - DNA, 15 bp, Homo sapiens
gcattttcagagctc

SEQ ID NO: 226630 - DNA, 15 bp, Homo sapiens
agcattttcagagct

SEQ ID NO: 226631 - DNA, 15 bp, Homo sapiens
aagcattttcagagc

SEQ ID NO: 226632 - DNA, 15 bp, Homo sapiens
caagcattttcagag

SEQ ID NO: 226633 - DNA, 15 bp, Homo sapiens
gcaagcattttcaga

SEQ ID NO: 226634 - DNA, 15 bp, Homo sapiens
ggcaagcattttcag

SEQ ID NO: 226635 - DNA, 15 bp, Homo sapiens
aggcaagcattttca

SEQ ID NO: 226636 - DNA, 15 bp, Homo sapiens
aaggcaagcattttc

SEQ ID NO: 226637 - DNA, 15 bp, Homo sapiens
gaaggcaagcatttt

SEQ ID NO: 226638 - DNA, 15 bp, Homo sapiens
ggaaggcaagcattt

SEQ ID NO: 226639 - DNA, 15 bp, Homo sapiens
gggaaggcaagcatt

SEQ ID NO: 226640 - DNA, 15 bp, Homo sapiens
ggggaaggcaagcat

SEQ ID NO: 226641 - DNA, 15 bp, Homo sapiens
aggggaaggcaagca

SEQ ID NO: 226642 - DNA, 15 bp, Homo sapiens
aaggggaaggcaagc

SEQ ID NO: 226643 - DNA, 15 bp, Homo sapiens
aaaggggaaggcaag

SEQ ID NO: 226644 - DNA, 15 bp, Homo sapiens
gaaaggggaaggcaa

SEQ ID NO: 226645 - DNA, 15 bp, Homo sapiens
ggaaaggggaaggca

SEQ ID NO: 226646 - DNA, 15 bp, Homo sapiens
gggaaaggggaaggc

SEQ ID NO: 226647 - DNA, 15 bp, Homo sapiens
ggggaaaggggaagg

SEQ ID NO: 226648 - DNA, 15 bp, Homo sapiens
aggggaaaggggaag

SEQ ID NO: 226649 - DNA, 15 bp, Homo sapiens
taggggaaaggggaa

SEQ ID NO: 226650 - DNA, 15 bp, Homo sapiens
ataggggaaagggga

SEQ ID NO: 226651 - DNA, 15 bp, Homo sapiens
aataggggaaagggg

SEQ ID NO: 226652 - DNA, 15 bp, Homo sapiens
caataggggaaaggg

SEQ ID NO: 226653 - DNA, 15 bp, Homo sapiens
acaataggggaaagg

SEQ ID NO: 226654 - DNA, 15 bp, Homo sapiens
cacaataggggaaag

SEQ ID NO: 226655 - DNA, 15 bp, Homo sapiens
acacaataggggaaa

SEQ ID NO: 226656 - DNA, 15 bp, Homo sapiens
cacacaataggggaa

SEQ ID NO: 226657 - DNA, 15 bp, Homo sapiens
ccacacaatagggga

SEQ ID NO: 226658 - DNA, 15 bp, Homo sapiens
cccacacaatagggg

SEQ ID NO: 226659 - DNA, 15 bp, Homo sapiens
gcccacacaataggg

SEQ ID NO: 226660 - DNA, 15 bp, Homo sapiens
ggcccacacaatagg

SEQ ID NO: 226661 - DNA, 15 bp, Homo sapiens
tggcccacacaatag

SEQ ID NO: 226662 - DNA, 15 bp, Homo sapiens
ctggcccacacaata

SEQ ID NO: 226663 - DNA, 15 bp, Homo sapiens
gctggcccacacaat

SEQ ID NO: 226664 - DNA, 15 bp, Homo sapiens
tgctggcccacacaa

SEQ ID NO: 226665 - DNA, 15 bp, Homo sapiens
ctgctggcccacaca

SEQ ID NO: 226666 - DNA, 15 bp, Homo sapiens
gctgctggcccacac

SEQ ID NO: 226667 - DNA, 15 bp, Homo sapiens
agctgctggcccaca

SEQ ID NO: 226668 - DNA, 15 bp, Homo sapiens
aagctgctggcccac

SEQ ID NO: 226669 - DNA, 15 bp, Homo sapiens
caagctgctggccca

SEQ ID NO: 226670 - DNA, 15 bp, Homo sapiens
gcaagctgctggccc

SEQ ID NO: 226671 - DNA, 15 bp, Homo sapiens
tgcaagctgctggcc

SEQ ID NO: 226672 - DNA, 15 bp, Homo sapiens
ctgcaagctgctggc

SEQ ID NO: 226673 - DNA, 15 bp, Homo sapiens
tctgcaagctgctgg

SEQ ID NO: 226674 - DNA, 15 bp, Homo sapiens
ctctgcaagctgctg

SEQ ID NO: 226675 - DNA, 15 bp, Homo sapiens
gctctgcaagctgct

SEQ ID NO: 226676 - DNA, 15 bp, Homo sapiens
agctctgcaagctgc

SEQ ID NO: 226677 - DNA, 15 bp, Homo sapiens
gagctctgcaagctg

SEQ ID NO: 226678 - DNA, 15 bp, Homo sapiens
ggagctctgcaagct

SEQ ID NO: 226679 - DNA, 15 bp, Homo sapiens
aggagctctgcaagc

SEQ ID NO: 226680 - DNA, 15 bp, Homo sapiens
gaggagctctgcaag

SEQ ID NO: 226681 - DNA, 15 bp, Homo sapiens
ggaggagctctgcaa

SEQ ID NO: 226682 - DNA, 15 bp, Homo sapiens
tggaggagctctgca

SEQ ID NO: 226683 - DNA, 15 bp, Homo sapiens
ctggaggagctctgc

SEQ ID NO: 226684 - DNA, 15 bp, Homo sapiens
gctggaggagctctg

SEQ ID NO: 226685 - DNA, 15 bp, Homo sapiens
ggctggaggagctct

SEQ ID NO: 226686 - DNA, 15 bp, Homo sapiens
gggctggaggagctc

SEQ ID NO: 226687 - DNA, 15 bp, Homo sapiens
agggctggaggagct

SEQ ID NO: 226688 - DNA, 15 bp, Homo sapiens
cagggctggaggagc

SEQ ID NO: 226689 - DNA, 15 bp, Homo sapiens
tcagggctggaggag

SEQ ID NO: 226690 - DNA, 15 bp, Homo sapiens
ctcagggctggagga

SEQ ID NO: 226691 - DNA, 15 bp, Homo sapiens
tctcagggctggagg

SEQ ID NO: 226692 - DNA, 15 bp, Homo sapiens
ctctcagggctggag

SEQ ID NO: 226693 - DNA, 15 bp, Homo sapiens
tctctcagggctgga

SEQ ID NO: 226694 - DNA, 15 bp, Homo sapiens
gtctctcagggctgg

SEQ ID NO: 226695 - DNA, 15 bp, Homo sapiens
ggtctctcagggctg

SEQ ID NO: 226696 - DNA, 15 bp, Homo sapiens
tggtctctcagggct

SEQ ID NO: 226697 - DNA, 15 bp, Homo sapiens
atggtctctcagggc

SEQ ID NO: 226698 - DNA, 15 bp, Homo sapiens
catggtctctcaggg

SEQ ID NO: 226699 - DNA, 15 bp, Homo sapiens
gcatggtctctcagg

SEQ ID NO: 226700 - DNA, 15 bp, Homo sapiens
ggcatggtctctcag

SEQ ID NO: 226701 - DNA, 15 bp, Homo sapiens
aggcatggtctctca

SEQ ID NO: 226702 - DNA, 15 bp, Homo sapiens
gaggcatggtctctc

SEQ ID NO: 226703 - DNA, 15 bp, Homo sapiens
ggaggcatggtctct

SEQ ID NO: 226704 - DNA, 15 bp, Homo sapiens
tggaggcatggtctc

SEQ ID NO: 226705 - DNA, 15 bp, Homo sapiens
atggaggcatggtct

SEQ ID NO: 226706 - DNA, 15 bp, Homo sapiens
gatggaggcatggtc

SEQ ID NO: 226707 - DNA, 15 bp, Homo sapiens
ggatggaggcatggt

SEQ ID NO: 226708 - DNA, 15 bp, Homo sapiens
gggatggaggcatgg

SEQ ID NO: 226709 - DNA, 15 bp, Homo sapiens
agggatggaggcatg

SEQ ID NO: 226710 - DNA, 15 bp, Homo sapiens
gagggatggaggcat

SEQ ID NO: 226711 - DNA, 15 bp, Homo sapiens
tgagggatggaggca

SEQ ID NO: 226712 - DNA, 15 bp, Homo sapiens
ctgagggatggaggc

SEQ ID NO: 226713 - DNA, 15 bp, Homo sapiens
tctgagggatggagg

SEQ ID NO: 226714 - DNA, 15 bp, Homo sapiens
gtctgagggatggag

SEQ ID NO: 226715 - DNA, 15 bp, Homo sapiens
ggtctgagggatgga

SEQ ID NO: 226716 - DNA, 15 bp, Homo sapiens
gggtctgagggatgg

SEQ ID NO: 226717 - DNA, 15 bp, Homo sapiens
agggtctgagggatg

SEQ ID NO: 226718 - DNA, 15 bp, Homo sapiens
tagggtctgagggat

SEQ ID NO: 226719 - DNA, 15 bp, Homo sapiens
gtagggtctgaggga

SEQ ID NO: 226720 - DNA, 15 bp, Homo sapiens
ggtagggtctgaggg

SEQ ID NO: 226721 - DNA, 15 bp, Homo sapiens
aggtagggtctgagg

SEQ ID NO: 226722 - DNA, 15 bp, Homo sapiens
aaggtagggtctgag

SEQ ID NO: 226723 - DNA, 15 bp, Homo sapiens
aaaggtagggtctga

SEQ ID NO: 226724 - DNA, 15 bp, Homo sapiens
gaaaggtagggtctg

SEQ ID NO: 226725 - DNA, 15 bp, Homo sapiens
ggaaaggtagggtct

SEQ ID NO: 226726 - DNA, 15 bp, Homo sapiens
aggaaaggtagggtc

SEQ ID NO: 226727 - DNA, 15 bp, Homo sapiens
caggaaaggtagggt

SEQ ID NO: 226728 - DNA, 15 bp, Homo sapiens
ccaggaaaggtaggg

SEQ ID NO: 226729 - DNA, 15 bp, Homo sapiens
gccaggaaaggtagg

SEQ ID NO: 226730 - DNA, 15 bp, Homo sapiens
ggccaggaaaggtag

SEQ ID NO: 226731 - DNA, 15 bp, Homo sapiens
gggccaggaaaggta

SEQ ID NO: 226732 - DNA, 15 bp, Homo sapiens
ggggccaggaaaggt

SEQ ID NO: 226733 - DNA, 15 bp, Homo sapiens
tggggccaggaaagg

SEQ ID NO: 226734 - DNA, 15 bp, Homo sapiens
ttggggccaggaaag

SEQ ID NO: 226735 - DNA, 15 bp, Homo sapiens
cttggggccaggaaa

SEQ ID NO: 226736 - DNA, 15 bp, Homo sapiens
ccttggggccaggaa

SEQ ID NO: 226737 - DNA, 15 bp, Homo sapiens
gccttggggccagga

SEQ ID NO: 226738 - DNA, 15 bp, Homo sapiens
agccttggggccagg

SEQ ID NO: 226739 - DNA, 15 bp, Homo sapiens
cagccttggggccag

SEQ ID NO: 226740 - DNA, 15 bp, Homo sapiens
gcagccttggggcca

SEQ ID NO: 226741 - DNA, 15 bp, Homo sapiens
ggcagccttggggcc

SEQ ID NO: 226742 - DNA, 15 bp, Homo sapiens
aggcagccttggggc

SEQ ID NO: 226743 - DNA, 15 bp, Homo sapiens
gaggcagccttgggg

SEQ ID NO: 226744 - DNA, 15 bp, Homo sapiens
agaggcagccttggg

SEQ ID NO: 226745 - DNA, 15 bp, Homo sapiens
cagaggcagccttgg

SEQ ID NO: 226746 - DNA, 15 bp, Homo sapiens
ccagaggcagccttg

SEQ ID NO: 226747 - DNA, 15 bp, Homo sapiens
gccagaggcagcctt

SEQ ID NO: 226748 - DNA, 15 bp, Homo sapiens
agccagaggcagcct

SEQ ID NO: 226749 - DNA, 15 bp, Homo sapiens
tagccagaggcagcc

SEQ ID NO: 226750 - DNA, 15 bp, Homo sapiens
ctagccagaggcagc

SEQ ID NO: 226751 - DNA, 15 bp, Homo sapiens
actagccagaggcag

SEQ ID NO: 226752 - DNA, 15 bp, Homo sapiens
cactagccagaggca

SEQ ID NO: 226753 - DNA, 15 bp, Homo sapiens
acactagccagaggc

SEQ ID NO: 226754 - DNA, 15 bp, Homo sapiens
cacactagccagagg

SEQ ID NO: 226755 - DNA, 15 bp, Homo sapiens
tcacactagccagag

SEQ ID NO: 226756 - DNA, 15 bp, Homo sapiens
gtcacactagccaga

SEQ ID NO: 226757 - DNA, 15 bp, Homo sapiens
tgtcacactagccag

SEQ ID NO: 226758 - DNA, 15 bp, Homo sapiens
ctgtcacactagcca

SEQ ID NO: 226759 - DNA, 15 bp, Homo sapiens
tctgtcacactagcc

SEQ ID NO: 226760 - DNA, 15 bp, Homo sapiens
gtctgtcacactagc

SEQ ID NO: 226761 - DNA, 15 bp, Homo sapiens
tgtctgtcacactag

SEQ ID NO: 226762 - DNA, 15 bp, Homo sapiens
gtgtctgtcacacta

SEQ ID NO: 226763 - DNA, 15 bp, Homo sapiens
tgtgtctgtcacact

SEQ ID NO: 226764 - DNA, 15 bp, Homo sapiens
gtgtgtctgtcacac

SEQ ID NO: 226765 - DNA, 15 bp, Homo sapiens
ggtgtgtctgtcaca

SEQ ID NO: 226766 - DNA, 15 bp, Homo sapiens
gggtgtgtctgtcac

SEQ ID NO: 226767 - DNA, 15 bp, Homo sapiens
agggtgtgtctgtca

SEQ ID NO: 226768 - DNA, 15 bp, Homo sapiens
cagggtgtgtctgtc

SEQ ID NO: 226769 - DNA, 15 bp, Homo sapiens
ccagggtgtgtctgt

SEQ ID NO: 226770 - DNA, 15 bp, Homo sapiens
cccagggtgtgtctg

SEQ ID NO: 226771 - DNA, 15 bp, Homo sapiens
gcccagggtgtgtct

SEQ ID NO: 226772 - DNA, 15 bp, Homo sapiens
ggcccagggtgtgtc

SEQ ID NO: 226773 - DNA, 15 bp, Homo sapiens
gggcccagggtgtgt

SEQ ID NO: 226774 - DNA, 15 bp, Homo sapiens
ggggcccagggtgtg

SEQ ID NO: 226775 - DNA, 15 bp, Homo sapiens
aggggcccagggtgt

SEQ ID NO: 226776 - DNA, 15 bp, Homo sapiens
caggggcccagggtg

SEQ ID NO: 226777 - DNA, 15 bp, Homo sapiens
tcaggggcccagggt

SEQ ID NO: 226778 - DNA, 15 bp, Homo sapiens
ttcaggggcccaggg

SEQ ID NO: 226779 - DNA, 15 bp, Homo sapiens
cttcaggggcccagg

SEQ ID NO: 226780 - DNA, 15 bp, Homo sapiens
acttcaggggcccag

SEQ ID NO: 226781 - DNA, 15 bp, Homo sapiens
gacttcaggggccca

SEQ ID NO: 226782 - DNA, 15 bp, Homo sapiens
agacttcaggggccc

SEQ ID NO: 226783 - DNA, 15 bp, Homo sapiens
cagacttcaggggcc

SEQ ID NO: 226784 - DNA, 15 bp, Homo sapiens
tcagacttcaggggc

SEQ ID NO: 226785 - DNA, 15 bp, Homo sapiens
ttcagacttcagggg

SEQ ID NO: 226786 - DNA, 15 bp, Homo sapiens
tttcagacttcaggg

SEQ ID NO: 226787 - DNA, 15 bp, Homo sapiens
ctttcagacttcagg

SEQ ID NO: 226788 - DNA, 15 bp, Homo sapiens
gctttcagacttcag

SEQ ID NO: 226789 - DNA, 15 bp, Homo sapiens
ggctttcagacttca

SEQ ID NO: 226790 - DNA, 15 bp, Homo sapiens
tggctttcagacttc

SEQ ID NO: 226791 - DNA, 15 bp, Homo sapiens
gtggctttcagactt

SEQ ID NO: 226792 - DNA, 15 bp, Homo sapiens
tgtggctttcagact

SEQ ID NO: 226793 - DNA, 15 bp, Homo sapiens
atgtggctttcagac

SEQ ID NO: 226794 - DNA, 15 bp, Homo sapiens
aatgtggctttcaga

SEQ ID NO: 226795 - DNA, 15 bp, Homo sapiens
aaatgtggctttcag

SEQ ID NO: 226796 - DNA, 15 bp, Homo sapiens
aaaatgtggctttca

SEQ ID NO: 226797 - DNA, 15 bp, Homo sapiens
aaaaatgtggctttc

SEQ ID NO: 226798 - DNA, 15 bp, Homo sapiens
gaaaaatgtggcttt

SEQ ID NO: 226799 - DNA, 15 bp, Homo sapiens
cgaaaaatgtggctt

SEQ ID NO: 226800 - DNA, 15 bp, Homo sapiens
tcgaaaaatgtggct

SEQ ID NO: 226801 - DNA, 15 bp, Homo sapiens
ctcgaaaaatgtggc

SEQ ID NO: 226802 - DNA, 15 bp, Homo sapiens
cctcgaaaaatgtgg

SEQ ID NO: 226803 - DNA, 15 bp, Homo sapiens
ccctcgaaaaatgtg

SEQ ID NO: 226804 - DNA, 15 bp, Homo sapiens
cccctcgaaaaatgt

SEQ ID NO: 226805 - DNA, 15 bp, Homo sapiens
tcccctcgaaaaatg

SEQ ID NO: 226806 - DNA, 15 bp, Homo sapiens
ttcccctcgaaaaat

SEQ ID NO: 226807 - DNA, 15 bp, Homo sapiens
gttcccctcgaaaaa

SEQ ID NO: 226808 - DNA, 15 bp, Homo sapiens
ggttcccctcgaaaa

SEQ ID NO: 226809 - DNA, 15 bp, Homo sapiens
aggttcccctcgaaa

SEQ ID NO: 226810 - DNA, 15 bp, Homo sapiens
caggttcccctcgaa

SEQ ID NO: 226811 - DNA, 15 bp, Homo sapiens
ccaggttcccctcga

SEQ ID NO: 226812 - DNA, 15 bp, Homo sapiens
gccaggttcccctcg

SEQ ID NO: 226813 - DNA, 15 bp, Homo sapiens
ggccaggttcccctc

SEQ ID NO: 226814 - DNA, 15 bp, Homo sapiens
tggccaggttcccct

SEQ ID NO: 226815 - DNA, 15 bp, Homo sapiens
gtggccaggttcccc

SEQ ID NO: 226816 - DNA, 15 bp, Homo sapiens
agtggccaggttccc

SEQ ID NO: 226817 - DNA, 15 bp, Homo sapiens
tagtggccaggttcc

SEQ ID NO: 226818 - DNA, 15 bp, Homo sapiens
atagtggccaggttc

SEQ ID NO: 226819 - DNA, 15 bp, Homo sapiens
catagtggccaggtt

SEQ ID NO: 226820 - DNA, 15 bp, Homo sapiens
tcatagtggccaggt

SEQ ID NO: 226821 - DNA, 15 bp, Homo sapiens
ctcatagtggccagg

SEQ ID NO: 226822 - DNA, 15 bp, Homo sapiens
actcatagtggccag

SEQ ID NO: 226823 - DNA, 15 bp, Homo sapiens
cactcatagtggcca

SEQ ID NO: 226824 - DNA, 15 bp, Homo sapiens
acactcatagtggcc

SEQ ID NO: 226825 - DNA, 15 bp, Homo sapiens
cacactcatagtggc

SEQ ID NO: 226826 - DNA, 15 bp, Homo sapiens
ccacactcatagtgg

SEQ ID NO: 226827 - DNA, 15 bp, Homo sapiens
tccacactcatagtg

SEQ ID NO: 226828 - DNA, 15 bp, Homo sapiens
ttccacactcatagt

SEQ ID NO: 226829 - DNA, 15 bp, Homo sapiens
attccacactcatag

SEQ ID NO: 226830 - DNA, 15 bp, Homo sapiens
tattccacactcata

SEQ ID NO: 226831 - DNA, 15 bp, Homo sapiens
atattccacactcat

SEQ ID NO: 226832 - DNA, 15 bp, Homo sapiens
aatattccacactca

SEQ ID NO: 226833 - DNA, 15 bp, Homo sapiens
caatattccacactc

SEQ ID NO: 226834 - DNA, 15 bp, Homo sapiens
ccaatattccacact

SEQ ID NO: 226835 - DNA, 15 bp, Homo sapiens
cccaatattccacac

SEQ ID NO: 226836 - DNA, 15 bp, Homo sapiens
ccccaatattccaca

SEQ ID NO: 226837 - DNA, 15 bp, Homo sapiens
gccccaatattccac

SEQ ID NO: 226838 - DNA, 15 bp, Homo sapiens
ggccccaatattcca

SEQ ID NO: 226839 - DNA, 15 bp, Homo sapiens
aggccccaatattcc

SEQ ID NO: 226840 - DNA, 15 bp, Homo sapiens
aaggccccaatattc

SEQ ID NO: 226841 - DNA, 15 bp, Homo sapiens
taaggccccaatatt

SEQ ID NO: 226842 - DNA, 15 bp, Homo sapiens
ttaaggccccaatat

SEQ ID NO: 226843 - DNA, 15 bp, Homo sapiens
tttaaggccccaata

SEQ ID NO: 226844 - DNA, 15 bp, Homo sapiens
atttaaggccccaat

SEQ ID NO: 226845 - DNA, 15 bp, Homo sapiens
aatttaaggccccaa

SEQ ID NO: 226846 - DNA, 15 bp, Homo sapiens
aaatttaaggcccca

SEQ ID NO: 226847 - DNA, 15 bp, Homo sapiens
gaaatttaaggcccc

SEQ ID NO: 226848 - DNA, 15 bp, Homo sapiens
ggaaatttaaggccc

SEQ ID NO: 226849 - DNA, 15 bp, Homo sapiens
aggaaatttaaggcc

SEQ ID NO: 226850 - DNA, 15 bp, Homo sapiens
caggaaatttaaggc

SEQ ID NO: 226851 - DNA, 15 bp, Homo sapiens
gcaggaaatttaagg

SEQ ID NO: 226852 - DNA, 15 bp, Homo sapiens
ggcaggaaatttaag

SEQ ID NO: 226853 - DNA, 15 bp, Homo sapiens
aggcaggaaatttaa

SEQ ID NO: 226854 - DNA, 15 bp, Homo sapiens
caggcaggaaattta

SEQ ID NO: 226855 - DNA, 15 bp, Homo sapiens
acaggcaggaaattt

SEQ ID NO: 226856 - DNA, 15 bp, Homo sapiens
tacaggcaggaaatt

SEQ ID NO: 226857 - DNA, 15 bp, Homo sapiens
ctacaggcaggaaat

SEQ ID NO: 226858 - DNA, 15 bp, Homo sapiens
tctacaggcaggaaa

SEQ ID NO: 226859 - DNA, 15 bp, Homo sapiens
ttctacaggcaggaa

SEQ ID NO: 226860 - DNA, 15 bp, Homo sapiens
attctacaggcagga

SEQ ID NO: 226861 - DNA, 15 bp, Homo sapiens
cattctacaggcagg

SEQ ID NO: 226862 - DNA, 15 bp, Homo sapiens
tcattctacaggcag

SEQ ID NO: 226863 - DNA, 15 bp, Homo sapiens
ctcattctacaggca

SEQ ID NO: 226864 - DNA, 15 bp, Homo sapiens
cctcattctacaggc

SEQ ID NO: 226865 - DNA, 15 bp, Homo sapiens
gcctcattctacagg

SEQ ID NO: 226866 - DNA, 15 bp, Homo sapiens
tgcctcattctacag

SEQ ID NO: 226867 - DNA, 15 bp, Homo sapiens
atgcctcattctaca

SEQ ID NO: 226868 - DNA, 15 bp, Homo sapiens
aatgcctcattctac

SEQ ID NO: 226869 - DNA, 15 bp, Homo sapiens
aaatgcctcattcta

SEQ ID NO: 226870 - DNA, 15 bp, Homo sapiens
caaatgcctcattct

SEQ ID NO: 226871 - DNA, 15 bp, Homo sapiens
ccaaatgcctcattc

SEQ ID NO: 226872 - DNA, 15 bp, Homo sapiens
cccaaatgcctcatt

SEQ ID NO: 226873 - DNA, 15 bp, Homo sapiens
gcccaaatgcctcat

SEQ ID NO: 226874 - DNA, 15 bp, Homo sapiens
agcccaaatgcctca

SEQ ID NO: 226875 - DNA, 15 bp, Homo sapiens
tagcccaaatgcctc

SEQ ID NO: 226876 - DNA, 15 bp, Homo sapiens
ctagcccaaatgcct

SEQ ID NO: 226877 - DNA, 15 bp, Homo sapiens
cctagcccaaatgcc

SEQ ID NO: 226878 - DNA, 15 bp, Homo sapiens
ccctagcccaaatgc

SEQ ID NO: 226879 - DNA, 15 bp, Homo sapiens
cccctagcccaaatg

SEQ ID NO: 226880 - DNA, 15 bp, Homo sapiens
tcccctagcccaaat

SEQ ID NO: 226881 - DNA, 15 bp, Homo sapiens
ctcccctagcccaaa

SEQ ID NO: 226882 - DNA, 15 bp, Homo sapiens
actcccctagcccaa

SEQ ID NO: 226883 - DNA, 15 bp, Homo sapiens
cactcccctagccca

SEQ ID NO: 226884 - DNA, 15 bp, Homo sapiens
ccactcccctagccc

SEQ ID NO: 226885 - DNA, 15 bp, Homo sapiens
accactcccctagcc

SEQ ID NO: 226886 - DNA, 15 bp, Homo sapiens
aaccactcccctagc

SEQ ID NO: 226887 - DNA, 15 bp, Homo sapiens
gaaccactcccctag

SEQ ID NO: 226888 - DNA, 15 bp, Homo sapiens
ggaaccactccccta

SEQ ID NO: 226889 - DNA, 15 bp, Homo sapiens
aggaaccactcccct

SEQ ID NO: 226890 - DNA, 15 bp, Homo sapiens
taggaaccactcccc

SEQ ID NO: 226891 - DNA, 15 bp, Homo sapiens
ctaggaaccactccc

SEQ ID NO: 226892 - DNA, 15 bp, Homo sapiens
tctaggaaccactcc

SEQ ID NO: 226893 - DNA, 15 bp, Homo sapiens
gtctaggaaccactc

SEQ ID NO: 226894 - DNA, 15 bp, Homo sapiens
agtctaggaaccact

SEQ ID NO: 226895 - DNA, 15 bp, Homo sapiens
aagtctaggaaccac

SEQ ID NO: 226896 - DNA, 15 bp, Homo sapiens
aaagtctaggaacca

SEQ ID NO: 226897 - DNA, 15 bp, Homo sapiens
aaaagtctaggaacc

SEQ ID NO: 226898 - DNA, 15 bp, Homo sapiens
aaaaagtctaggaac

SEQ ID NO: 226899 - DNA, 15 bp, Homo sapiens
caaaaagtctaggaa

SEQ ID NO: 226900 - DNA, 15 bp, Homo sapiens
acaaaaagtctagga

SEQ ID NO: 226901 - DNA, 15 bp, Homo sapiens
cacaaaaagtctagg

SEQ ID NO: 226902 - DNA, 15 bp, Homo sapiens
ccacaaaaagtctag

SEQ ID NO: 226903 - DNA, 15 bp, Homo sapiens
cccacaaaaagtcta

SEQ ID NO: 226904 - DNA, 15 bp, Homo sapiens
tcccacaaaaagtct

SEQ ID NO: 226905 - DNA, 15 bp, Homo sapiens
atcccacaaaaagtc

SEQ ID NO: 226906 - DNA, 15 bp, Homo sapiens
tatcccacaaaaagt

SEQ ID NO: 226907 - DNA, 15 bp, Homo sapiens
ttatcccacaaaaag

SEQ ID NO: 226908 - DNA, 15 bp, Homo sapiens
attatcccacaaaaa

SEQ ID NO: 226909 - DNA, 15 bp, Homo sapiens
gattatcccacaaaa

SEQ ID NO: 226910 - DNA, 15 bp, Homo sapiens
tgattatcccacaaa

SEQ ID NO: 226911 - DNA, 15 bp, Homo sapiens
ttgattatcccacaa

SEQ ID NO: 226912 - DNA, 15 bp, Homo sapiens
attgattatcccaca

SEQ ID NO: 226913 - DNA, 15 bp, Homo sapiens
cattgattatcccac

SEQ ID NO: 226914 - DNA, 15 bp, Homo sapiens
tcattgattatccca

SEQ ID NO: 226915 - DNA, 15 bp, Homo sapiens
ttcattgattatccc

SEQ ID NO: 226916 - DNA, 15 bp, Homo sapiens
attcattgattatcc

SEQ ID NO: 226917 - DNA, 15 bp, Homo sapiens
aattcattgattatc

SEQ ID NO: 226918 - DNA, 15 bp, Homo sapiens
aaattcattgattat

SEQ ID NO: 226919 - DNA, 15 bp, Homo sapiens
taaaaattcattgat

SEQ ID NO: 226920 - DNA, 15 bp, Homo sapiens
ataaaaattcattga

SEQ ID NO: 226921 - DNA, 15 bp, Homo sapiens
tataaaaattcattg

SEQ ID NO: 226922 - DNA, 15 bp, Homo sapiens
ttataaaaattcatt

SEQ ID NO: 226923 - DNA, 15 bp, Homo sapiens
tttataaaaattcat

SEQ ID NO: 226924 - DNA, 15 bp, Homo sapiens
ttttataaaaattca

SEQ ID NO: 226925 - DNA, 15 bp, Homo sapiens
gttttataaaaattc

SEQ ID NO: 226926 - DNA, 15 bp, Homo sapiens
tgttttataaaaatt

SEQ ID NO: 226927 - DNA, 15 bp, Homo sapiens
ctgttttataaaaat

SEQ ID NO: 226928 - DNA, 15 bp, Homo sapiens
tctgttttataaaaa

SEQ ID NO: 226929 - DNA, 15 bp, Homo sapiens
ttctgttttataaaa

SEQ ID NO: 226930 - DNA, 15 bp, Homo sapiens
attctgttttataaa

SEQ ID NO: 226931 - DNA, 15 bp, Homo sapiens
tattctgttttataa

SEQ ID NO: 226932 - DNA, 15 bp, Homo sapiens
atattctgttttata

SEQ ID NO: 226933 - DNA, 15 bp, Homo sapiens
gatattctgttttat

SEQ ID NO: 226934 - DNA, 15 bp, Homo sapiens
tgatattctgtttta

SEQ ID NO: 226935 - DNA, 15 bp, Homo sapiens
gtgatattctgtttt

SEQ ID NO: 226936 - DNA, 15 bp, Homo sapiens
tgtgatattctgttt

SEQ ID NO: 226937 - DNA, 15 bp, Homo sapiens
ttgtgatattctgtt

SEQ ID NO: 226938 - DNA, 15 bp, Homo sapiens
cttgtgatattctgt

SEQ ID NO: 226939 - DNA, 15 bp, Homo sapiens
ccttgtgatattctg

SEQ ID NO: 226940 - DNA, 15 bp, Homo sapiens
gccttgtgatattct

SEQ ID NO: 226941 - DNA, 15 bp, Homo sapiens
ggccttgtgatattc

SEQ ID NO: 226942 - DNA, 15 bp, Homo sapiens
tggccttgtgatatt

SEQ ID NO: 226943 - DNA, 15 bp, Homo sapiens
gtggccttgtgatat

SEQ ID NO: 226944 - DNA, 15 bp, Homo sapiens
ggtggccttgtgata

SEQ ID NO: 226945 - DNA, 15 bp, Homo sapiens
tggtggccttgtgat

SEQ ID NO: 226946 - DNA, 15 bp, Homo sapiens
ctggtggccttgtga

SEQ ID NO: 226947 - DNA, 15 bp, Homo sapiens
gctggtggccttgtg

SEQ ID NO: 226948 - DNA, 15 bp, Homo sapiens
agctggtggccttgt

SEQ ID NO: 226949 - DNA, 15 bp, Homo sapiens
aagctggtggccttg

SEQ ID NO: 226950 - DNA, 15 bp, Homo sapiens
aaagctggtggcctt

SEQ ID NO: 226951 - DNA, 15 bp, Homo sapiens
aaaagctggtggcct

SEQ ID NO: 226952 - DNA, 15 bp, Homo sapiens
aaaaagctggtggcc

SEQ ID NO: 226953 - DNA, 15 bp, Homo sapiens
taaaaagctggtggc

SEQ ID NO: 226954 - DNA, 15 bp, Homo sapiens
ataaaaagctggtgg

SEQ ID NO: 226955 - DNA, 15 bp, Homo sapiens
aataaaaagctggtg

SEQ ID NO: 226956 - DNA, 15 bp, Homo sapiens
aaataaaaagctggt

SEQ ID NO: 226957 - DNA, 15 bp, Homo sapiens
aaaataaaaagctgg

SEQ ID NO: 226958 - DNA, 15 bp, Homo sapiens
caaaataaaaagctg

SEQ ID NO: 226959 - DNA, 15 bp, Homo sapiens
tcaaaataaaaagct

SEQ ID NO: 226960 - DNA, 15 bp, Homo sapiens
gtcaaaataaaaagc

SEQ ID NO: 226961 - DNA, 15 bp, Homo sapiens
tgtcaaaataaaaag

SEQ ID NO: 226962 - DNA, 15 bp, Homo sapiens
ttgtcaaaataaaaa

SEQ ID NO: 226963 - DNA, 15 bp, Homo sapiens
cttgtcaaaataaaa

SEQ ID NO: 226964 - DNA, 15 bp, Homo sapiens
gcttgtcaaaataaa

SEQ ID NO: 226965 - DNA, 15 bp, Homo sapiens
tgcttgtcaaaataa

SEQ ID NO: 226966 - DNA, 15 bp, Homo sapiens
ttgcttgtcaaaata

SEQ ID NO: 226967 - DNA, 15 bp, Homo sapiens
tttgcttgtcaaaat

SEQ ID NO: 226968 - DNA, 15 bp, Homo sapiens
ttttgcttgtcaaaa

SEQ ID NO: 226969 - DNA, 15 bp, Homo sapiens
tttttgcttgtcaaa

SEQ ID NO: 226970 - DNA, 15 bp, Homo sapiens
gtttttgcttgtcaa

SEQ ID NO: 226971 - DNA, 15 bp, Homo sapiens
tgtttttgcttgtca

SEQ ID NO: 226972 - DNA, 15 bp, Homo sapiens
atgtttttgcttgtc

SEQ ID NO: 226973 - DNA, 15 bp, Homo sapiens
tatgtttttgcttgt

SEQ ID NO: 226974 - DNA, 15 bp, Homo sapiens
ttatgtttttgcttg

SEQ ID NO: 226975 - DNA, 15 bp, Homo sapiens
tttatgtttttgctt

SEQ ID NO: 226976 - DNA, 15 bp, Homo sapiens
ttttatgtttttgct

SEQ ID NO: 226977 - DNA, 15 bp, Homo sapiens
tttttatgtttttgc

SEQ ID NO: 226978 - DNA, 15 bp, Homo sapiens
ttttttatgtttttg

SEQ ID NO: 226979 - DNA, 15 bp, Homo sapiens
tttttttatgttttt

SEQ ID NO: 226980 - DNA, 15 bp, Homo sapiens
ctttttttatgtttt

SEQ ID NO: 226981 - DNA, 15 bp, Homo sapiens
tctttttttatgttt

SEQ ID NO: 226982 - DNA, 15 bp, Homo sapiens
ttctttttttatgtt

SEQ ID NO: 226983 - DNA, 15 bp, Homo sapiens
tttctttttttatgt

SEQ ID NO: 226984 - DNA, 15 bp, Homo sapiens
gtttctttttttatg

SEQ ID NO: 226985 - DNA, 15 bp, Homo sapiens
agtttctttttttat

SEQ ID NO: 226986 - DNA, 15 bp, Homo sapiens
cagtttcttttttta

SEQ ID NO: 226987 - DNA, 15 bp, Homo sapiens
acagtttcttttttt

SEQ ID NO: 226988 - DNA, 15 bp, Homo sapiens
gacagtttctttttt

SEQ ID NO: 226989 - DNA, 15 bp, Homo sapiens
tgacagtttcttttt

SEQ ID NO: 226990 - DNA, 15 bp, Homo sapiens
ttgacagtttctttt

SEQ ID NO: 226991 - DNA, 15 bp, Homo sapiens
tttgacagtttcttt

SEQ ID NO: 226992 - DNA, 15 bp, Homo sapiens
atttgacagtttctt

SEQ ID NO: 226993 - DNA, 15 bp, Homo sapiens
catttgacagtttct

SEQ ID NO: 226994 - DNA, 15 bp, Homo sapiens
gcatttgacagtttc

SEQ ID NO: 226995 - DNA, 15 bp, Homo sapiens
ggcatttgacagttt

SEQ ID NO: 226996 - DNA, 15 bp, Homo sapiens
tggcatttgacagtt

SEQ ID NO: 226997 - DNA, 15 bp, Homo sapiens
ctggcatttgacagt

SEQ ID NO: 226998 - DNA, 15 bp, Homo sapiens
gctggcatttgacag

SEQ ID NO: 226999 - DNA, 15 bp, Homo sapiens
agctggcatttgaca

SEQ ID NO: 227000 - DNA, 15 bp, Homo sapiens
gagctggcatttgac

SEQ ID NO: 227001 - DNA, 15 bp, Homo sapiens
agagctggcatttga

SEQ ID NO: 227002 - DNA, 15 bp, Homo sapiens
cagagctggcatttg

SEQ ID NO: 227003 - DNA, 15 bp, Homo sapiens
gcagagctggcattt

SEQ ID NO: 227004 - DNA, 15 bp, Homo sapiens
ggcagagctggcatt

SEQ ID NO: 227005 - DNA, 15 bp, Homo sapiens
tggcagagctggcat

SEQ ID NO: 227006 - DNA, 15 bp, Homo sapiens
gtggcagagctggca

SEQ ID NO: 227007 - DNA, 15 bp, Homo sapiens
ggtggcagagctggc

SEQ ID NO: 227008 - DNA, 15 bp, Homo sapiens
tggtggcagagctgg

SEQ ID NO: 227009 - DNA, 15 bp, Homo sapiens
atggtggcagagctg

SEQ ID NO: 227010 - DNA, 15 bp, Homo sapiens
aatggtggcagagct

SEQ ID NO: 227011 - DNA, 15 bp, Homo sapiens
caatggtggcagagc

SEQ ID NO: 227012 - DNA, 15 bp, Homo sapiens
acaatggtggcagag

SEQ ID NO: 227013 - DNA, 15 bp, Homo sapiens
gacaatggtggcaga

SEQ ID NO: 227014 - DNA, 15 bp, Homo sapiens
tgacaatggtggcag

SEQ ID NO: 227015 - DNA, 15 bp, Homo sapiens
atgacaatggtggca

SEQ ID NO: 227016 - DNA, 15 bp, Homo sapiens
aatgacaatggtggc

SEQ ID NO: 227017 - DNA, 15 bp, Homo sapiens
aaatgacaatggtgg

SEQ ID NO: 227018 - DNA, 15 bp, Homo sapiens
gaaatgacaatggtg

SEQ ID NO: 227019 - DNA, 15 bp, Homo sapiens
tgaaatgacaatggt

SEQ ID NO: 227020 - DNA, 15 bp, Homo sapiens
atgaaatgacaatgg

SEQ ID NO: 227021 - DNA, 15 bp, Homo sapiens
aatgaaatgacaatg

SEQ ID NO: 227022 - DNA, 15 bp, Homo sapiens
taatgaaatgacaat

SEQ ID NO: 227023 - DNA, 15 bp, Homo sapiens
ttaatgaaatgacaa

SEQ ID NO: 227024 - DNA, 15 bp, Homo sapiens
tttaatgaaatgaca

SEQ ID NO: 227025 - DNA, 15 bp, Homo sapiens
ttttaatgaaatgac

SEQ ID NO: 227026 - DNA, 15 bp, Homo sapiens
cttttaatgaaatga

SEQ ID NO: 227027 - DNA, 15 bp, Homo sapiens
ccttttaatgaaatg

SEQ ID NO: 227028 - DNA, 15 bp, Homo sapiens
tccttttaatgaaat

SEQ ID NO: 227029 - DNA, 15 bp, Homo sapiens
gtccttttaatgaaa

SEQ ID NO: 227030 - DNA, 15 bp, Homo sapiens
tgtccttttaatgaa

SEQ ID NO: 227031 - DNA, 15 bp, Homo sapiens
atgtccttttaatga

SEQ ID NO: 227032 - DNA, 15 bp, Homo sapiens
catgtccttttaatg

SEQ ID NO: 227033 - DNA, 15 bp, Homo sapiens
acatgtccttttaat

SEQ ID NO: 227034 - DNA, 15 bp, Homo sapiens
aacatgtccttttaa

SEQ ID NO: 227035 - DNA, 15 bp, Homo sapiens
taacatgtcctttta

SEQ ID NO: 227036 - DNA, 15 bp, Homo sapiens
ttaacatgtcctttt

SEQ ID NO: 227037 - DNA, 15 bp, Homo sapiens
attaacatgtccttt

SEQ ID NO: 227038 - DNA, 15 bp, Homo sapiens
tattaacatgtcctt

SEQ ID NO: 227039 - DNA, 15 bp, Homo sapiens
gtattaacatgtcct

SEQ ID NO: 227040 - DNA, 15 bp, Homo sapiens
ggtattaacatgtcc

SEQ ID NO: 227041 - DNA, 15 bp, Homo sapiens
gggtattaacatgtc

SEQ ID NO: 227042 - DNA, 15 bp, Homo sapiens
tgggtattaacatgt

SEQ ID NO: 227043 - DNA, 15 bp, Homo sapiens
ttgggtattaacatg

SEQ ID NO: 227044 - DNA, 15 bp, Homo sapiens
gttgggtattaacat

SEQ ID NO: 227045 - DNA, 15 bp, Homo sapiens
tgttgggtattaaca

SEQ ID NO: 227046 - DNA, 15 bp, Homo sapiens
ttgttgggtattaac

SEQ ID NO: 227047 - DNA, 15 bp, Homo sapiens
tttgttgggtattaa

SEQ ID NO: 227048 - DNA, 15 bp, Homo sapiens
ctttgttgggtatta

SEQ ID NO: 227049 - DNA, 15 bp, Homo sapiens
cctttgttgggtatt

SEQ ID NO: 227050 - DNA, 15 bp, Homo sapiens
tcctttgttgggtat

SEQ ID NO: 227051 - DNA, 15 bp, Homo sapiens
ctcctttgttgggta

SEQ ID NO: 227052 - DNA, 15 bp, Homo sapiens
actcctttgttgggt

SEQ ID NO: 227053 - DNA, 15 bp, Homo sapiens
tactcctttgttggg

SEQ ID NO: 227054 - DNA, 15 bp, Homo sapiens
ttactcctttgttgg

SEQ ID NO: 227055 - DNA, 15 bp, Homo sapiens
gttactcctttgttg

SEQ ID NO: 227056 - DNA, 15 bp, Homo sapiens
cgttactcctttgtt

SEQ ID NO: 227057 - DNA, 15 bp, Homo sapiens
tcgttactcctttgt

SEQ ID NO: 227058 - DNA, 15 bp, Homo sapiens
atcgttactcctttg

SEQ ID NO: 227059 - DNA, 15 bp, Homo sapiens
tatcgttactccttt

SEQ ID NO: 227060 - DNA, 15 bp, Homo sapiens
atatcgttactcctt

SEQ ID NO: 227061 - DNA, 15 bp, Homo sapiens
tatatcgttactcct

SEQ ID NO: 227062 - DNA, 15 bp, Homo sapiens
ttatatcgttactcc

SEQ ID NO: 227063 - DNA, 15 bp, Homo sapiens
attatatcgttactc

SEQ ID NO: 227064 - DNA, 15 bp, Homo sapiens
cattatatcgttact

SEQ ID NO: 227065 - DNA, 15 bp, Homo sapiens
acattatatcgttac

SEQ ID NO: 227066 - DNA, 15 bp, Homo sapiens
gacattatatcgtta

SEQ ID NO: 227067 - DNA, 15 bp, Homo sapiens
tgacattatatcgtt

SEQ ID NO: 227068 - DNA, 15 bp, Homo sapiens
ttgacattatatcgt

SEQ ID NO: 227069 - DNA, 15 bp, Homo sapiens
tttgacattatatcg

SEQ ID NO: 227070 - DNA, 15 bp, Homo sapiens
ctttgacattatatc

SEQ ID NO: 227071 - DNA, 15 bp, Homo sapiens
tctttgacattatat

SEQ ID NO: 227072 - DNA, 15 bp, Homo sapiens
ttctttgacattata

SEQ ID NO: 227073 - DNA, 15 bp, Homo sapiens
tttctttgacattat

SEQ ID NO: 227074 - DNA, 15 bp, Homo sapiens
ttttctttgacatta

SEQ ID NO: 227075 - DNA, 15 bp, Homo sapiens
cttttctttgacatt

SEQ ID NO: 227076 - DNA, 15 bp, Homo sapiens
ccttttctttgacat

SEQ ID NO: 227077 - DNA, 15 bp, Homo sapiens
tccttttctttgaca

SEQ ID NO: 227078 - DNA, 15 bp, Homo sapiens
gtccttttctttgac

SEQ ID NO: 227079 - DNA, 15 bp, Homo sapiens
tgtccttttctttga

SEQ ID NO: 227080 - DNA, 15 bp, Homo sapiens
ctgtccttttctttg

SEQ ID NO: 227081 - DNA, 15 bp, Homo sapiens
actgtccttttcttt

SEQ ID NO: 227082 - DNA, 15 bp, Homo sapiens
aactgtccttttctt

SEQ ID NO: 227083 - DNA, 15 bp, Homo sapiens
gaactgtccttttct

SEQ ID NO: 227084 - DNA, 15 bp, Homo sapiens
agaactgtccttttc

SEQ ID NO: 227085 - DNA, 15 bp, Homo sapiens
aagaactgtcctttt

SEQ ID NO: 227086 - DNA, 15 bp, Homo sapiens
gaagaactgtccttt

SEQ ID NO: 227087 - DNA, 15 bp, Homo sapiens
ggaagaactgtcctt

SEQ ID NO: 227088 - DNA, 15 bp, Homo sapiens
aggaagaactgtcct

SEQ ID NO: 227089 - DNA, 15 bp, Homo sapiens
caggaagaactgtcc

SEQ ID NO: 227090 - DNA, 15 bp, Homo sapiens
ccaggaagaactgtc

SEQ ID NO: 227091 - DNA, 15 bp, Homo sapiens
cccaggaagaactgt

SEQ ID NO: 227092 - DNA, 15 bp, Homo sapiens
tcccaggaagaactg

SEQ ID NO: 227093 - DNA, 15 bp, Homo sapiens
ctcccaggaagaact

SEQ ID NO: 227094 - DNA, 15 bp, Homo sapiens
tctcccaggaagaac

SEQ ID NO: 227095 - DNA, 15 bp, Homo sapiens
ctctcccaggaagaa

SEQ ID NO: 227096 - DNA, 15 bp, Homo sapiens
cctctcccaggaaga

SEQ ID NO: 227097 - DNA, 15 bp, Homo sapiens
gcctctcccaggaag

SEQ ID NO: 227098 - DNA, 15 bp, Homo sapiens
ggcctctcccaggaa

SEQ ID NO: 227099 - DNA, 15 bp, Homo sapiens
gggcctctcccagga

SEQ ID NO: 227100 - DNA, 15 bp, Homo sapiens
agggcctctcccagg

SEQ ID NO: 227101 - DNA, 15 bp, Homo sapiens
aagggcctctcccag

SEQ ID NO: 227102 - DNA, 15 bp, Homo sapiens
gaagggcctctccca

SEQ ID NO: 227103 - DNA, 15 bp, Homo sapiens
tgaagggcctctccc

SEQ ID NO: 227104 - DNA, 15 bp, Homo sapiens
atgaagggcctctcc

SEQ ID NO: 227105 - DNA, 15 bp, Homo sapiens
gatgaagggcctctc

SEQ ID NO: 227106 - DNA, 15 bp, Homo sapiens
tgatgaagggcctct

SEQ ID NO: 227107 - DNA, 15 bp, Homo sapiens
ctgatgaagggcctc

SEQ ID NO: 227108 - DNA, 15 bp, Homo sapiens
actgatgaagggcct

SEQ ID NO: 227109 - DNA, 15 bp, Homo sapiens
aactgatgaagggcc

SEQ ID NO: 227110 - DNA, 15 bp, Homo sapiens
caactgatgaagggc

SEQ ID NO: 227111 - DNA, 15 bp, Homo sapiens
acaactgatgaaggg

SEQ ID NO: 227112 - DNA, 15 bp, Homo sapiens
gacaactgatgaagg

SEQ ID NO: 227113 - DNA, 15 bp, Homo sapiens
agacaactgatgaag

SEQ ID NO: 227114 - DNA, 15 bp, Homo sapiens
aagacaactgatgaa

SEQ ID NO: 227115 - DNA, 15 bp, Homo sapiens
gaagacaactgatga

SEQ ID NO: 227116 - DNA, 15 bp, Homo sapiens
ggaagacaactgatg

SEQ ID NO: 227117 - DNA, 15 bp, Homo sapiens
tggaagacaactgat

SEQ ID NO: 227118 - DNA, 15 bp, Homo sapiens
gtggaagacaactga

SEQ ID NO: 227119 - DNA, 15 bp, Homo sapiens
agtggaagacaactg

SEQ ID NO: 227120 - DNA, 15 bp, Homo sapiens
cagtggaagacaact

SEQ ID NO: 227121 - DNA, 15 bp, Homo sapiens
tcagtggaagacaac

SEQ ID NO: 227122 - DNA, 15 bp, Homo sapiens
gtcagtggaagacaa

SEQ ID NO: 227123 - DNA, 15 bp, Homo sapiens
tgtcagtggaagaca

SEQ ID NO: 227124 - DNA, 15 bp, Homo sapiens
gtgtcagtggaagac

SEQ ID NO: 227125 - DNA, 15 bp, Homo sapiens
tgtgtcagtggaaga

SEQ ID NO: 227126 - DNA, 15 bp, Homo sapiens
gtgtgtcagtggaag

SEQ ID NO: 227127 - DNA, 15 bp, Homo sapiens
tgtgtgtcagtggaa

SEQ ID NO: 227128 - DNA, 15 bp, Homo sapiens
gtgtgtgtcagtgga

SEQ ID NO: 227129 - DNA, 15 bp, Homo sapiens
tgtgtgtgtcagtgg

SEQ ID NO: 227130 - DNA, 15 bp, Homo sapiens
ctgtgtgtgtcagtg

SEQ ID NO: 227131 - DNA, 15 bp, Homo sapiens
actgtgtgtgtcagt

SEQ ID NO: 227132 - DNA, 15 bp, Homo sapiens
cactgtgtgtgtcag

SEQ ID NO: 227133 - DNA, 15 bp, Homo sapiens
gcactgtgtgtgtca

SEQ ID NO: 227134 - DNA, 15 bp, Homo sapiens
cgcactgtgtgtgtc

SEQ ID NO: 227135 - DNA, 15 bp, Homo sapiens
gcgcactgtgtgtgt

SEQ ID NO: 227136 - DNA, 15 bp, Homo sapiens
agcgcactgtgtgtg

SEQ ID NO: 227137 - DNA, 15 bp, Homo sapiens
cagcgcactgtgtgt

SEQ ID NO: 227138 - DNA, 15 bp, Homo sapiens
acagcgcactgtgtg

SEQ ID NO: 227139 - DNA, 15 bp, Homo sapiens
tacagcgcactgtgt

SEQ ID NO: 227140 - DNA, 15 bp, Homo sapiens
gtacagcgcactgtg

SEQ ID NO: 227141 - DNA, 15 bp, Homo sapiens
agtacagcgcactgt

SEQ ID NO: 227142 - DNA, 15 bp, Homo sapiens
cagtacagcgcactg

SEQ ID NO: 227143 - DNA, 15 bp, Homo sapiens
tcagtacagcgcact

SEQ ID NO: 227144 - DNA, 15 bp, Homo sapiens
ctcagtacagcgcac

SEQ ID NO: 227145 - DNA, 15 bp, Homo sapiens
cctcagtacagcgca

SEQ ID NO: 227146 - DNA, 15 bp, Homo sapiens
gcctcagtacagcgc

SEQ ID NO: 227147 - DNA, 15 bp, Homo sapiens
agcctcagtacagcg

SEQ ID NO: 227148 - DNA, 15 bp, Homo sapiens
aagcctcagtacagc

SEQ ID NO: 227149 - DNA, 15 bp, Homo sapiens
aaagcctcagtacag

SEQ ID NO: 227150 - DNA, 15 bp, Homo sapiens
aaaagcctcagtaca

SEQ ID NO: 227151 - DNA, 15 bp, Homo sapiens
gaaaagcctcagtac

SEQ ID NO: 227152 - DNA, 15 bp, Homo sapiens
tgaaaagcctcagta

SEQ ID NO: 227153 - DNA, 15 bp, Homo sapiens
atgaaaagcctcagt

SEQ ID NO: 227154 - DNA, 15 bp, Homo sapiens
aatgaaaagcctcag

SEQ ID NO: 227155 - DNA, 15 bp, Homo sapiens
gaatgaaaagcctca

SEQ ID NO: 227156 - DNA, 15 bp, Homo sapiens
ggaatgaaaagcctc

SEQ ID NO: 227157 - DNA, 15 bp, Homo sapiens
cggaatgaaaagcct

SEQ ID NO: 227158 - DNA, 15 bp, Homo sapiens
acggaatgaaaagcc

SEQ ID NO: 227159 - DNA, 15 bp, Homo sapiens
tacggaatgaaaagc

SEQ ID NO: 227160 - DNA, 15 bp, Homo sapiens
gtacggaatgaaaag

SEQ ID NO: 227161 - DNA, 15 bp, Homo sapiens
ggtacggaatgaaaa

SEQ ID NO: 227162 - DNA, 15 bp, Homo sapiens
tggtacggaatgaaa

SEQ ID NO: 227163 - DNA, 15 bp, Homo sapiens
gtggtacggaatgaa

SEQ ID NO: 227164 - DNA, 15 bp, Homo sapiens
tgtggtacggaatga

SEQ ID NO: 227165 - DNA, 15 bp, Homo sapiens
atgtggtacggaatg

SEQ ID NO: 227166 - DNA, 15 bp, Homo sapiens
gatgtggtacggaat

SEQ ID NO: 227167 - DNA, 15 bp, Homo sapiens
tgatgtggtacggaa

SEQ ID NO: 227168 - DNA, 15 bp, Homo sapiens
ctgatgtggtacgga

SEQ ID NO: 227169 - DNA, 15 bp, Homo sapiens
cctgatgtggtacgg

SEQ ID NO: 227170 - DNA, 15 bp, Homo sapiens
ccctgatgtggtacg

SEQ ID NO: 227171 - DNA, 15 bp, Homo sapiens
cccctgatgtggtac

SEQ ID NO: 227172 - DNA, 15 bp, Homo sapiens
gcccctgatgtggta

SEQ ID NO: 227173 - DNA, 15 bp, Homo sapiens
tgcccctgatgtggt

SEQ ID NO: 227174 - DNA, 15 bp, Homo sapiens
ctgcccctgatgtgg

SEQ ID NO: 227175 - DNA, 15 bp, Homo sapiens
gctgcccctgatgtg

SEQ ID NO: 227176 - DNA, 15 bp, Homo sapiens
tgctgcccctgatgt

SEQ ID NO: 227177 - DNA, 15 bp, Homo sapiens
gtgctgcccctgatg

SEQ ID NO: 227178 - DNA, 15 bp, Homo sapiens
agtgctgcccctgat

SEQ ID NO: 227179 - DNA, 15 bp, Homo sapiens
cagtgctgcccctga

SEQ ID NO: 227180 - DNA, 15 bp, Homo sapiens
gcagtgctgcccctg

SEQ ID NO: 227181 - DNA, 15 bp, Homo sapiens
ggcagtgctgcccct

SEQ ID NO: 227182 - DNA, 15 bp, Homo sapiens
gggcagtgctgcccc

SEQ ID NO: 227183 - DNA, 15 bp, Homo sapiens
agggcagtgctgccc

SEQ ID NO: 227184 - DNA, 15 bp, Homo sapiens
cagggcagtgctgcc

SEQ ID NO: 227185 - DNA, 15 bp, Homo sapiens
acagggcagtgctgc

SEQ ID NO: 227186 - DNA, 15 bp, Homo sapiens
cacagggcagtgctg

SEQ ID NO: 227187 - DNA, 15 bp, Homo sapiens
ccacagggcagtgct

SEQ ID NO: 227188 - DNA, 15 bp, Homo sapiens
gccacagggcagtgc

SEQ ID NO: 227189 - DNA, 15 bp, Homo sapiens
ggccacagggcagtg

SEQ ID NO: 227190 - DNA, 15 bp, Homo sapiens
tggccacagggcagt

SEQ ID NO: 227191 - DNA, 15 bp, Homo sapiens
atggccacagggcag

SEQ ID NO: 227192 - DNA, 15 bp, Homo sapiens
catggccacagggca

SEQ ID NO: 227193 - DNA, 15 bp, Homo sapiens
gcatggccacagggc

SEQ ID NO: 227194 - DNA, 15 bp, Homo sapiens
tgcatggccacaggg

SEQ ID NO: 227195 - DNA, 15 bp, Homo sapiens
ctgcatggccacagg

SEQ ID NO: 227196 - DNA, 15 bp, Homo sapiens
cctgcatggccacag

SEQ ID NO: 227197 - DNA, 15 bp, Homo sapiens
tcctgcatggccaca

SEQ ID NO: 227198 - DNA, 15 bp, Homo sapiens
gtcctgcatggccac

SEQ ID NO: 227199 - DNA, 15 bp, Homo sapiens
ggtcctgcatggcca

SEQ ID NO: 227200 - DNA, 15 bp, Homo sapiens
gggtcctgcatggcc

SEQ ID NO: 227201 - DNA, 15 bp, Homo sapiens
tgggtcctgcatggc

SEQ ID NO: 227202 - DNA, 15 bp, Homo sapiens
atgggtcctgcatgg

SEQ ID NO: 227203 - DNA, 15 bp, Homo sapiens
catgggtcctgcatg

SEQ ID NO: 227204 - DNA, 15 bp, Homo sapiens
ccatgggtcctgcat

SEQ ID NO: 227205 - DNA, 15 bp, Homo sapiens
cccatgggtcctgca

SEQ ID NO: 227206 - DNA, 15 bp, Homo sapiens
tcccatgggtcctgc

SEQ ID NO: 227207 - DNA, 15 bp, Homo sapiens
ttcccatgggtcctg

SEQ ID NO: 227208 - DNA, 15 bp, Homo sapiens
gttcccatgggtcct

SEQ ID NO: 227209 - DNA, 15 bp, Homo sapiens
tgttcccatgggtcc

SEQ ID NO: 227210 - DNA, 15 bp, Homo sapiens
ctgttcccatgggtc

SEQ ID NO: 227211 - DNA, 15 bp, Homo sapiens
tctgttcccatgggt

SEQ ID NO: 227212 - DNA, 15 bp, Homo sapiens
ctctgttcccatggg

SEQ ID NO: 227213 - DNA, 15 bp, Homo sapiens
gctctgttcccatgg

SEQ ID NO: 227214 - DNA, 15 bp, Homo sapiens
tgctctgttcccatg

SEQ ID NO: 227215 - DNA, 15 bp, Homo sapiens
gtgctctgttcccat

SEQ ID NO: 227216 - DNA, 15 bp, Homo sapiens
ggtgctctgttccca

SEQ ID NO: 227217 - DNA, 15 bp, Homo sapiens
aggtgctctgttccc

SEQ ID NO: 227218 - DNA, 15 bp, Homo sapiens
caggtgctctgttcc

SEQ ID NO: 227219 - DNA, 15 bp, Homo sapiens
acaggtgctctgttc

SEQ ID NO: 227220 - DNA, 15 bp, Homo sapiens
cacaggtgctctgtt

SEQ ID NO: 227221 - DNA, 15 bp, Homo sapiens
tcacaggtgctctgt

SEQ ID NO: 227222 - DNA, 15 bp, Homo sapiens
ctcacaggtgctctg

SEQ ID NO: 227223 - DNA, 15 bp, Homo sapiens
gctcacaggtgctct

SEQ ID NO: 227224 - DNA, 15 bp, Homo sapiens
agctcacaggtgctc

SEQ ID NO: 227225 - DNA, 15 bp, Homo sapiens
tagctcacaggtgct

SEQ ID NO: 227226 - DNA, 15 bp, Homo sapiens
gtagctcacaggtgc

SEQ ID NO: 227227 - DNA, 15 bp, Homo sapiens
ggtagctcacaggtg

SEQ ID NO: 227228 - DNA, 15 bp, Homo sapiens
aggtagctcacaggt

SEQ ID NO: 227229 - DNA, 15 bp, Homo sapiens
caggtagctcacagg

SEQ ID NO: 227230 - DNA, 15 bp, Homo sapiens
gcaggtagctcacag

SEQ ID NO: 227231 - DNA, 15 bp, Homo sapiens
tgcaggtagctcaca

SEQ ID NO: 227232 - DNA, 15 bp, Homo sapiens
ctgcaggtagctcac

SEQ ID NO: 227233 - DNA, 15 bp, Homo sapiens
cctgcaggtagctca

SEQ ID NO: 227234 - DNA, 15 bp, Homo sapiens
tcctgcaggtagctc

SEQ ID NO: 227235 - DNA, 15 bp, Homo sapiens
ctcctgcaggtagct

SEQ ID NO: 227236 - DNA, 15 bp, Homo sapiens
gctcctgcaggtagc

SEQ ID NO: 227237 - DNA, 15 bp, Homo sapiens
ggctcctgcaggtag

SEQ ID NO: 227238 - DNA, 15 bp, Homo sapiens
aggctcctgcaggta

SEQ ID NO: 227239 - DNA, 15 bp, Homo sapiens
aaggctcctgcaggt

SEQ ID NO: 227240 - DNA, 15 bp, Homo sapiens
aaaggctcctgcagg

SEQ ID NO: 227241 - DNA, 15 bp, Homo sapiens
caaaggctcctgcag

SEQ ID NO: 227242 - DNA, 15 bp, Homo sapiens
gcaaaggctcctgca

SEQ ID NO: 227243 - DNA, 15 bp, Homo sapiens
agcaaaggctcctgc

SEQ ID NO: 227244 - DNA, 15 bp, Homo sapiens
cagcaaaggctcctg

SEQ ID NO: 227245 - DNA, 15 bp, Homo sapiens
tcagcaaaggctcct

SEQ ID NO: 227246 - DNA, 15 bp, Homo sapiens
ctcagcaaaggctcc

SEQ ID NO: 227247 - DNA, 15 bp, Homo sapiens
cctcagcaaaggctc

SEQ ID NO: 227248 - DNA, 15 bp, Homo sapiens
tcctcagcaaaggct

SEQ ID NO: 227249 - DNA, 15 bp, Homo sapiens
ctcctcagcaaaggc

SEQ ID NO: 227250 - DNA, 15 bp, Homo sapiens
tctcctcagcaaagg

SEQ ID NO: 227251 - DNA, 15 bp, Homo sapiens
ctctcctcagcaaag

SEQ ID NO: 227252 - DNA, 15 bp, Homo sapiens
actctcctcagcaaa

SEQ ID NO: 227253 - DNA, 15 bp, Homo sapiens
cactctcctcagcaa

SEQ ID NO: 227254 - DNA, 15 bp, Homo sapiens
tcactctcctcagca

SEQ ID NO: 227255 - DNA, 15 bp, Homo sapiens
ctcactctcctcagc

SEQ ID NO: 227256 - DNA, 15 bp, Homo sapiens
cctcactctcctcag

SEQ ID NO: 227257 - DNA, 15 bp, Homo sapiens
gcctcactctcctca

SEQ ID NO: 227258 - DNA, 15 bp, Homo sapiens
agcctcactctcctc

SEQ ID NO: 227259 - DNA, 15 bp, Homo sapiens
gagcctcactctcct

SEQ ID NO: 227260 - DNA, 15 bp, Homo sapiens
ggagcctcactctcc

SEQ ID NO: 227261 - DNA, 15 bp, Homo sapiens
aggagcctcactctc

SEQ ID NO: 227262 - DNA, 15 bp, Homo sapiens
aaggagcctcactct

SEQ ID NO: 227263 - DNA, 15 bp, Homo sapiens
caaggagcctcactc

SEQ ID NO: 227264 - DNA, 15 bp, Homo sapiens
ccaaggagcctcact

SEQ ID NO: 227265 - DNA, 15 bp, Homo sapiens
cccaaggagcctcac

SEQ ID NO: 227266 - DNA, 15 bp, Homo sapiens
ccccaaggagcctca

SEQ ID NO: 227267 - DNA, 15 bp, Homo sapiens
cccccaaggagcctc

SEQ ID NO: 227268 - DNA, 15 bp, Homo sapiens
gcccccaaggagcct

SEQ ID NO: 227269 - DNA, 15 bp, Homo sapiens
agcccccaaggagcc

SEQ ID NO: 227270 - DNA, 15 bp, Homo sapiens
cagcccccaaggagc

SEQ ID NO: 227271 - DNA, 15 bp, Homo sapiens
ccagcccccaaggag

SEQ ID NO: 227272 - DNA, 15 bp, Homo sapiens
tccagcccccaagga

SEQ ID NO: 227273 - DNA, 15 bp, Homo sapiens
atccagcccccaagg

SEQ ID NO: 227274 - DNA, 15 bp, Homo sapiens
gatccagcccccaag

SEQ ID NO: 227275 - DNA, 15 bp, Homo sapiens
ggatccagcccccaa

SEQ ID NO: 227276 - DNA, 15 bp, Homo sapiens
aggatccagccccca

SEQ ID NO: 227277 - DNA, 15 bp, Homo sapiens
gaggatccagccccc

SEQ ID NO: 227278 - DNA, 15 bp, Homo sapiens
ggaggatccagcccc

SEQ ID NO: 227279 - DNA, 15 bp, Homo sapiens
aggaggatccagccc

SEQ ID NO: 227280 - DNA, 15 bp, Homo sapiens
gaggaggatccagcc

SEQ ID NO: 227281 - DNA, 15 bp, Homo sapiens
ggaggaggatccagc

SEQ ID NO: 227282 - DNA, 15 bp, Homo sapiens
aggaggaggatccag

SEQ ID NO: 227283 - DNA, 15 bp, Homo sapiens
caggaggaggatcca

SEQ ID NO: 227284 - DNA, 15 bp, Homo sapiens
ccaggaggaggatcc

SEQ ID NO: 227285 - DNA, 15 bp, Homo sapiens
accaggaggaggatc

SEQ ID NO: 227286 - DNA, 15 bp, Homo sapiens
gaccaggaggaggat

SEQ ID NO: 227287 - DNA, 15 bp, Homo sapiens
agaccaggaggagga

SEQ ID NO: 227288 - DNA, 15 bp, Homo sapiens
tagaccaggaggagg

SEQ ID NO: 227289 - DNA, 15 bp, Homo sapiens
gtagaccaggaggag

SEQ ID NO: 227290 - DNA, 15 bp, Homo sapiens
tgtagaccaggagga

SEQ ID NO: 227291 - DNA, 15 bp, Homo sapiens
ctgtagaccaggagg

SEQ ID NO: 227292 - DNA, 15 bp, Homo sapiens
cctgtagaccaggag

SEQ ID NO: 227293 - DNA, 15 bp, Homo sapiens
tcctgtagaccagga

SEQ ID NO: 227294 - DNA, 15 bp, Homo sapiens
atcctgtagaccagg

SEQ ID NO: 227295 - DNA, 15 bp, Homo sapiens
catcctgtagaccag

SEQ ID NO: 227296 - DNA, 15 bp, Homo sapiens
ccatcctgtagacca

SEQ ID NO: 227297 - DNA, 15 bp, Homo sapiens
gccatcctgtagacc

SEQ ID NO: 227298 - DNA, 15 bp, Homo sapiens
tgccatcctgtagac

SEQ ID NO: 227299 - DNA, 15 bp, Homo sapiens
ttgccatcctgtaga

SEQ ID NO: 227300 - DNA, 15 bp, Homo sapiens
attgccatcctgtag

SEQ ID NO: 227301 - DNA, 15 bp, Homo sapiens
cattgccatcctgta

SEQ ID NO: 227302 - DNA, 15 bp, Homo sapiens
ccattgccatcctgt

SEQ ID NO: 227303 - DNA, 15 bp, Homo sapiens
cccattgccatcctg

SEQ ID NO: 227304 - DNA, 15 bp, Homo sapiens
gcccattgccatcct

SEQ ID NO: 227305 - DNA, 15 bp, Homo sapiens
agcccattgccatcc

SEQ ID NO: 227306 - DNA, 15 bp, Homo sapiens
gagcccattgccatc

SEQ ID NO: 227307 - DNA, 15 bp, Homo sapiens
ggagcccattgccat

SEQ ID NO: 227308 - DNA, 15 bp, Homo sapiens
agggagcccattgcc

SEQ ID NO: 227309 - DNA, 15 bp, Homo sapiens
gagggagcccattgc

SEQ ID NO: 227310 - DNA, 15 bp, Homo sapiens
ggagggagcccattg

SEQ ID NO: 227311 - DNA, 15 bp, Homo sapiens
cggagggagcccatt

SEQ ID NO: 227312 - DNA, 15 bp, Homo sapiens
ccggagggagcccat

SEQ ID NO: 227313 - DNA, 15 bp, Homo sapiens
accggagggagccca

SEQ ID NO: 227314 - DNA, 15 bp, Homo sapiens
taccggagggagccc

SEQ ID NO: 227315 - DNA, 15 bp, Homo sapiens
ttaccggagggagcc

SEQ ID NO: 227316 - DNA, 15 bp, Homo sapiens
tttaccggagggagc

SEQ ID NO: 227317 - DNA, 15 bp, Homo sapiens
ttttaccggagggag

SEQ ID NO: 227318 - DNA, 15 bp, Homo sapiens
cttttaccggaggga

SEQ ID NO: 227319 - DNA, 15 bp, Homo sapiens
acttttaccggaggg

SEQ ID NO: 227320 - DNA, 15 bp, Homo sapiens
aacttttaccggagg

SEQ ID NO: 227321 - DNA, 15 bp, Homo sapiens
taacttttaccggag

SEQ ID NO: 227322 - DNA, 15 bp, Homo sapiens
ttaacttttaccgga

SEQ ID NO: 227323 - DNA, 15 bp, Homo sapiens
gttaacttttaccgg

SEQ ID NO: 227324 - DNA, 15 bp, Homo sapiens
agttaacttttaccg

SEQ ID NO: 227325 - DNA, 15 bp, Homo sapiens
aagttaacttttacc

SEQ ID NO: 227326 - DNA, 15 bp, Homo sapiens
caagttaacttttac

SEQ ID NO: 227327 - DNA, 15 bp, Homo sapiens
ccaagttaactttta

SEQ ID NO: 227328 - DNA, 15 bp, Homo sapiens
gccaagttaactttt

SEQ ID NO: 227329 - DNA, 15 bp, Homo sapiens
tgccaagttaacttt

SEQ ID NO: 227330 - DNA, 15 bp, Homo sapiens
gtgccaagttaactt

SEQ ID NO: 227331 - DNA, 15 bp, Homo sapiens
cgtgccaagttaact

SEQ ID NO: 227332 - DNA, 15 bp, Homo sapiens
tcgtgccaagttaac

SEQ ID NO: 227333 - DNA, 15 bp, Homo sapiens
ttcgtgccaagttaa

SEQ ID NO: 227334 - DNA, 15 bp, Homo sapiens
cttcgtgccaagtta

SEQ ID NO: 227335 - DNA, 15 bp, Homo sapiens
tcttcgtgccaagtt

SEQ ID NO: 227336 - DNA, 15 bp, Homo sapiens
atcttcgtgccaagt

SEQ ID NO: 227337 - DNA, 15 bp, Homo sapiens
aatcttcgtgccaag

SEQ ID NO: 227338 - DNA, 15 bp, Homo sapiens
aaatcttcgtgccaa

SEQ ID NO: 227339 - DNA, 15 bp, Homo sapiens
gaaatcttcgtgcca

SEQ ID NO: 227340 - DNA, 15 bp, Homo sapiens
agaaatcttcgtgcc

SEQ ID NO: 227341 - DNA, 15 bp, Homo sapiens
cagaaatcttcgtgc

SEQ ID NO: 227342 - DNA, 15 bp, Homo sapiens
gcagaaatcttcgtg

SEQ ID NO: 227343 - DNA, 15 bp, Homo sapiens
tgcagaaatcttcgt

SEQ ID NO: 227344 - DNA, 15 bp, Homo sapiens
atgcagaaatcttcg

SEQ ID NO: 227345 - DNA, 15 bp, Homo sapiens
aatgcagaaatcttc

SEQ ID NO: 227346 - DNA, 15 bp, Homo sapiens
gaatgcagaaatctt

SEQ ID NO: 227347 - DNA, 15 bp, Homo sapiens
agaatgcagaaatct

SEQ ID NO: 227348 - DNA, 15 bp, Homo sapiens
aagaatgcagaaatc

SEQ ID NO: 227349 - DNA, 15 bp, Homo sapiens
aaagaatgcagaaat

SEQ ID NO: 227350 - DNA, 15 bp, Homo sapiens
aaaagaatgcagaaa

SEQ ID NO: 227351 - DNA, 15 bp, Homo sapiens
taaaagaatgcagaa

SEQ ID NO: 227352 - DNA, 15 bp, Homo sapiens
ataaaagaatgcaga

SEQ ID NO: 227353 - DNA, 15 bp, Homo sapiens
cataaaagaatgcag

SEQ ID NO: 227354 - DNA, 15 bp, Homo sapiens
tcataaaagaatgca

SEQ ID NO: 227355 - DNA, 15 bp, Homo sapiens
ttcataaaagaatgc

SEQ ID NO: 227356 - DNA, 15 bp, Homo sapiens
gttcataaaagaatg

SEQ ID NO: 227357 - DNA, 15 bp, Homo sapiens
tgttcataaaagaat

SEQ ID NO: 227358 - DNA, 15 bp, Homo sapiens
atgttcataaaagaa

SEQ ID NO: 227359 - DNA, 15 bp, Homo sapiens
catgttcataaaaga

SEQ ID NO: 227360 - DNA, 15 bp, Homo sapiens
tcatgttcataaaag

SEQ ID NO: 227361 - DNA, 15 bp, Homo sapiens
ctcatgttcataaaa

SEQ ID NO: 227362 - DNA, 15 bp, Homo sapiens
cctcatgttcataaa

SEQ ID NO: 227363 - DNA, 15 bp, Homo sapiens
ccctcatgttcataa

SEQ ID NO: 227364 - DNA, 15 bp, Homo sapiens
accctcatgttcata

SEQ ID NO: 227365 - DNA, 15 bp, Homo sapiens
aaccctcatgttcat

SEQ ID NO: 227366 - DNA, 15 bp, Homo sapiens
aaaccctcatgttca

SEQ ID NO: 227367 - DNA, 15 bp, Homo sapiens
caaaccctcatgttc

SEQ ID NO: 227368 - DNA, 15 bp, Homo sapiens
ccaaaccctcatgtt

SEQ ID NO: 227369 - DNA, 15 bp, Homo sapiens
cccaaaccctcatgt

SEQ ID NO: 227370 - DNA, 15 bp, Homo sapiens
tcccaaaccctcatg

SEQ ID NO: 227371 - DNA, 15 bp, Homo sapiens
atcccaaaccctcat

SEQ ID NO: 227372 - DNA, 15 bp, Homo sapiens
aatcccaaaccctca

SEQ ID NO: 227373 - DNA, 15 bp, Homo sapiens
aaatcccaaaccctc

SEQ ID NO: 227374 - DNA, 15 bp, Homo sapiens
gaaatcccaaaccct

SEQ ID NO: 227375 - DNA, 15 bp, Homo sapiens
ggaaatcccaaaccc

SEQ ID NO: 227376 - DNA, 15 bp, Homo sapiens
aggaaatcccaaacc

SEQ ID NO: 227377 - DNA, 15 bp, Homo sapiens
caggaaatcccaaac

SEQ ID NO: 227378 - DNA, 15 bp, Homo sapiens
acaggaaatcccaaa

SEQ ID NO: 227379 - DNA, 15 bp, Homo sapiens
cacaggaaatcccaa

SEQ ID NO: 227380 - DNA, 15 bp, Homo sapiens
acacaggaaatccca

SEQ ID NO: 227381 - DNA, 15 bp, Homo sapiens
cacacaggaaatccc

SEQ ID NO: 227382 - DNA, 15 bp, Homo sapiens
acacacaggaaatcc

SEQ ID NO: 227383 - DNA, 15 bp, Homo sapiens
aacacacaggaaatc

SEQ ID NO: 227384 - DNA, 15 bp, Homo sapiens
aaacacacaggaaat

SEQ ID NO: 227385 - DNA, 15 bp, Homo sapiens
caaacacacaggaaa

SEQ ID NO: 227386 - DNA, 15 bp, Homo sapiens
ccaaacacacaggaa

SEQ ID NO: 227387 - DNA, 15 bp, Homo sapiens
accaaacacacagga

SEQ ID NO: 227388 - DNA, 15 bp, Homo sapiens
aaccaaacacacagg

SEQ ID NO: 227389 - DNA, 15 bp, Homo sapiens
taaccaaacacacag

SEQ ID NO: 227390 - DNA, 15 bp, Homo sapiens
ataaccaaacacaca

SEQ ID NO: 227391 - DNA, 15 bp, Homo sapiens
gataaccaaacacac

SEQ ID NO: 227392 - DNA, 15 bp, Homo sapiens
ggataaccaaacaca

SEQ ID NO: 227393 - DNA, 15 bp, Homo sapiens
tggataaccaaacac

SEQ ID NO: 227394 - DNA, 15 bp, Homo sapiens
atggataaccaaaca

SEQ ID NO: 227395 - DNA, 15 bp, Homo sapiens
tatggataaccaaac

SEQ ID NO: 227396 - DNA, 15 bp, Homo sapiens
atatggataaccaaa

SEQ ID NO: 227397 - DNA, 15 bp, Homo sapiens
gatatggataaccaa

SEQ ID NO: 227398 - DNA, 15 bp, Homo sapiens
ggatatggataacca

SEQ ID NO: 227399 - DNA, 15 bp, Homo sapiens
gggatatggataacc

SEQ ID NO: 227400 - DNA, 15 bp, Homo sapiens
tgggatatggataac

SEQ ID NO: 227401 - DNA, 15 bp, Homo sapiens
ctgggatatggataa

SEQ ID NO: 227402 - DNA, 15 bp, Homo sapiens
actgggatatggata

SEQ ID NO: 227403 - DNA, 15 bp, Homo sapiens
gactgggatatggat

SEQ ID NO: 227404 - DNA, 15 bp, Homo sapiens
agactgggatatgga

SEQ ID NO: 227405 - DNA, 15 bp, Homo sapiens
cagactgggatatgg

SEQ ID NO: 227406 - DNA, 15 bp, Homo sapiens
gcagactgggatatg

SEQ ID NO: 227407 - DNA, 15 bp, Homo sapiens
ggcagactgggatat

SEQ ID NO: 227408 - DNA, 15 bp, Homo sapiens
gggcagactgggata

SEQ ID NO: 227409 - DNA, 15 bp, Homo sapiens
agggcagactgggat

SEQ ID NO: 227410 - DNA, 15 bp, Homo sapiens
cagggcagactggga

SEQ ID NO: 227411 - DNA, 15 bp, Homo sapiens
tcagggcagactggg

SEQ ID NO: 227412 - DNA, 15 bp, Homo sapiens
atcagggcagactgg

SEQ ID NO: 227413 - DNA, 15 bp, Homo sapiens
catcagggcagactg

SEQ ID NO: 227414 - DNA, 15 bp, Homo sapiens
tcatcagggcagact

SEQ ID NO: 227415 - DNA, 15 bp, Homo sapiens
ctcatcagggcagac

SEQ ID NO: 227416 - DNA, 15 bp, Homo sapiens
tctcatcagggcaga

SEQ ID NO: 227417 - DNA, 15 bp, Homo sapiens
ttctcatcagggcag

SEQ ID NO: 227418 - DNA, 15 bp, Homo sapiens
tttctcatcagggca

SEQ ID NO: 227419 - DNA, 15 bp, Homo sapiens
gtttctcatcagggc

SEQ ID NO: 227420 - DNA, 15 bp, Homo sapiens
tgtttctcatcaggg

SEQ ID NO: 227421 - DNA, 15 bp, Homo sapiens
ttgtttctcatcagg

SEQ ID NO: 227422 - DNA, 15 bp, Homo sapiens
tttgtttctcatcag

SEQ ID NO: 227423 - DNA, 15 bp, Homo sapiens
atttgtttctcatca

SEQ ID NO: 227424 - DNA, 15 bp, Homo sapiens
catttgtttctcatc

SEQ ID NO: 227425 - DNA, 15 bp, Homo sapiens
acatttgtttctcat

SEQ ID NO: 227426 - DNA, 15 bp, Homo sapiens
tacatttgtttctca

SEQ ID NO: 227427 - DNA, 15 bp, Homo sapiens
ttacatttgtttctc

SEQ ID NO: 227428 - DNA, 15 bp, Homo sapiens
attacatttgtttct

SEQ ID NO: 227429 - DNA, 15 bp, Homo sapiens
aattacatttgtttc

SEQ ID NO: 227430 - DNA, 15 bp, Homo sapiens
aaattacatttgttt

SEQ ID NO: 227431 - DNA, 15 bp, Homo sapiens
aaaattacatttgtt

SEQ ID NO: 227432 - DNA, 15 bp, Homo sapiens
aaaaattacatttgt

SEQ ID NO: 227433 - DNA, 15 bp, Homo sapiens
caaaaattacatttg

SEQ ID NO: 227434 - DNA, 15 bp, Homo sapiens
gcaaaaattacattt

SEQ ID NO: 227435 - DNA, 15 bp, Homo sapiens
ggcaaaaattacatt

SEQ ID NO: 227436 - DNA, 15 bp, Homo sapiens
aggcaaaaattacat

SEQ ID NO: 227437 - DNA, 15 bp, Homo sapiens
aaggcaaaaattaca

SEQ ID NO: 227438 - DNA, 15 bp, Homo sapiens
gaaggcaaaaattac

SEQ ID NO: 227439 - DNA, 15 bp, Homo sapiens
ggaaggcaaaaatta

SEQ ID NO: 227440 - DNA, 15 bp, Homo sapiens
aggaaggcaaaaatt

SEQ ID NO: 227441 - DNA, 15 bp, Homo sapiens
caggaaggcaaaaat

SEQ ID NO: 227442 - DNA, 15 bp, Homo sapiens
gcaggaaggcaaaaa

SEQ ID NO: 227443 - DNA, 15 bp, Homo sapiens
agcaggaaggcaaaa

SEQ ID NO: 227444 - DNA, 15 bp, Homo sapiens
cagcaggaaggcaaa

SEQ ID NO: 227445 - DNA, 15 bp, Homo sapiens
ccagcaggaaggcaa

SEQ ID NO: 227446 - DNA, 15 bp, Homo sapiens
cccagcaggaaggca

SEQ ID NO: 227447 - DNA, 15 bp, Homo sapiens
gcccagcaggaaggc

SEQ ID NO: 227448 - DNA, 15 bp, Homo sapiens
ggcccagcaggaagg

SEQ ID NO: 227449 - DNA, 15 bp, Homo sapiens
gggcccagcaggaag

SEQ ID NO: 227450 - DNA, 15 bp, Homo sapiens
ggggcccagcaggaa

SEQ ID NO: 227451 - DNA, 15 bp, Homo sapiens
aggggcccagcagga

SEQ ID NO: 227452 - DNA, 15 bp, Homo sapiens
caggggcccagcagg

SEQ ID NO: 227453 - DNA, 15 bp, Homo sapiens
gcaggggcccagcag

SEQ ID NO: 227454 - DNA, 15 bp, Homo sapiens
ggcaggggcccagca

SEQ ID NO: 227455 - DNA, 15 bp, Homo sapiens
tggcaggggcccagc

SEQ ID NO: 227456 - DNA, 15 bp, Homo sapiens
gtggcaggggcccag

SEQ ID NO: 227457 - DNA, 15 bp, Homo sapiens
tgtggcaggggccca

SEQ ID NO: 227458 - DNA, 15 bp, Homo sapiens
ctgtggcaggggccc

SEQ ID NO: 227459 - DNA, 15 bp, Homo sapiens
actgtggcaggggcc

SEQ ID NO: 227460 - DNA, 15 bp, Homo sapiens
aactgtggcaggggc

SEQ ID NO: 227461 - DNA, 15 bp, Homo sapiens
aaactgtggcagggg

SEQ ID NO: 227462 - DNA, 15 bp, Homo sapiens
aaaactgtggcaggg

SEQ ID NO: 227463 - DNA, 15 bp, Homo sapiens
gaaaactgtggcagg

SEQ ID NO: 227464 - DNA, 15 bp, Homo sapiens
agaaaactgtggcag

SEQ ID NO: 227465 - DNA, 15 bp, Homo sapiens
aagaaaactgtggca

SEQ ID NO: 227466 - DNA, 15 bp, Homo sapiens
caagaaaactgtggc

SEQ ID NO: 227467 - DNA, 15 bp, Homo sapiens
acaagaaaactgtgg

SEQ ID NO: 227468 - DNA, 15 bp, Homo sapiens
gacaagaaaactgtg

SEQ ID NO: 227469 - DNA, 15 bp, Homo sapiens
agacaagaaaactgt

SEQ ID NO: 227470 - DNA, 15 bp, Homo sapiens
cagacaagaaaactg

SEQ ID NO: 227471 - DNA, 15 bp, Homo sapiens
ccagacaagaaaact

SEQ ID NO: 227472 - DNA, 15 bp, Homo sapiens
cccagacaagaaaac

SEQ ID NO: 227473 - DNA, 15 bp, Homo sapiens
gcccagacaagaaaa

SEQ ID NO: 227474 - DNA, 15 bp, Homo sapiens
tgcccagacaagaaa

SEQ ID NO: 227475 - DNA, 15 bp, Homo sapiens
ctgcccagacaagaa

SEQ ID NO: 227476 - DNA, 15 bp, Homo sapiens
cctgcccagacaaga

SEQ ID NO: 227477 - DNA, 15 bp, Homo sapiens
acctgcccagacaag

SEQ ID NO: 227478 - DNA, 15 bp, Homo sapiens
gacctgcccagacaa

SEQ ID NO: 227479 - DNA, 15 bp, Homo sapiens
agacctgcccagaca

SEQ ID NO: 227480 - DNA, 15 bp, Homo sapiens
aagacctgcccagac

SEQ ID NO: 227481 - DNA, 15 bp, Homo sapiens
caagacctgcccaga

SEQ ID NO: 227482 - DNA, 15 bp, Homo sapiens
tcaagacctgcccag

SEQ ID NO: 227483 - DNA, 15 bp, Homo sapiens
ctcaagacctgccca

SEQ ID NO: 227484 - DNA, 15 bp, Homo sapiens
gctcaagacctgccc

SEQ ID NO: 227485 - DNA, 15 bp, Homo sapiens
agctcaagacctgcc

SEQ ID NO: 227486 - DNA, 15 bp, Homo sapiens
cagctcaagacctgc

SEQ ID NO: 227487 - DNA, 15 bp, Homo sapiens
tcagctcaagacctg

SEQ ID NO: 227488 - DNA, 15 bp, Homo sapiens
ctcagctcaagacct

SEQ ID NO: 227489 - DNA, 15 bp, Homo sapiens
gctcagctcaagacc

SEQ ID NO: 227490 - DNA, 15 bp, Homo sapiens
agctcagctcaagac

SEQ ID NO: 227491 - DNA, 15 bp, Homo sapiens
aagctcagctcaaga

SEQ ID NO: 227492 - DNA, 15 bp, Homo sapiens
gaagctcagctcaag

SEQ ID NO: 227493 - DNA, 15 bp, Homo sapiens
agaagctcagctcaa

SEQ ID NO: 227494 - DNA, 15 bp, Homo sapiens
cagaagctcagctca

SEQ ID NO: 227495 - DNA, 15 bp, Homo sapiens
ccagaagctcagctc

SEQ ID NO: 227496 - DNA, 15 bp, Homo sapiens
cccagaagctcagct

SEQ ID NO: 227497 - DNA, 15 bp, Homo sapiens
ccccagaagctcagc

SEQ ID NO: 227498 - DNA, 15 bp, Homo sapiens
gccccagaagctcag

SEQ ID NO: 227499 - DNA, 15 bp, Homo sapiens
tgccccagaagctca

SEQ ID NO: 227500 - DNA, 15 bp, Homo sapiens
ctgccccagaagctc

SEQ ID NO: 227501 - DNA, 15 bp, Homo sapiens
cctgccccagaagct

SEQ ID NO: 227502 - DNA, 15 bp, Homo sapiens
tcctgccccagaagc

SEQ ID NO: 227503 - DNA, 15 bp, Homo sapiens
atcctgccccagaag

SEQ ID NO: 227504 - DNA, 15 bp, Homo sapiens
catcctgccccagaa

SEQ ID NO: 227505 - DNA, 15 bp, Homo sapiens
ccatcctgccccaga

SEQ ID NO: 227506 - DNA, 15 bp, Homo sapiens
cccatcctgccccag

SEQ ID NO: 227507 - DNA, 15 bp, Homo sapiens
gcccatcctgcccca

SEQ ID NO: 227508 - DNA, 15 bp, Homo sapiens
agcccatcctgcccc

SEQ ID NO: 227509 - DNA, 15 bp, Homo sapiens
cagcccatcctgccc

SEQ ID NO: 227510 - DNA, 15 bp, Homo sapiens
gcagcccatcctgcc

SEQ ID NO: 227511 - DNA, 15 bp, Homo sapiens
ggcagcccatcctgc

SEQ ID NO: 227512 - DNA, 15 bp, Homo sapiens
gggcagcccatcctg

SEQ ID NO: 227513 - DNA, 15 bp, Homo sapiens
agggcagcccatcct

SEQ ID NO: 227514 - DNA, 15 bp, Homo sapiens
cagggcagcccatcc

SEQ ID NO: 227515 - DNA, 15 bp, Homo sapiens
gcagggcagcccatc

SEQ ID NO: 227516 - DNA, 15 bp, Homo sapiens
tgcagggcagcccat

SEQ ID NO: 227517 - DNA, 15 bp, Homo sapiens
ctgcagggcagccca

SEQ ID NO: 227518 - DNA, 15 bp, Homo sapiens
tctgcagggcagccc

SEQ ID NO: 227519 - DNA, 15 bp, Homo sapiens
gtctgcagggcagcc

SEQ ID NO: 227520 - DNA, 15 bp, Homo sapiens
agtctgcagggcagc

SEQ ID NO: 227521 - DNA, 15 bp, Homo sapiens
cagtctgcagggcag

SEQ ID NO: 227522 - DNA, 15 bp, Homo sapiens
ccagtctgcagggca

SEQ ID NO: 227523 - DNA, 15 bp, Homo sapiens
gccagtctgcagggc

SEQ ID NO: 227524 - DNA, 15 bp, Homo sapiens
tgccagtctgcaggg

SEQ ID NO: 227525 - DNA, 15 bp, Homo sapiens
ctgccagtctgcagg

SEQ ID NO: 227526 - DNA, 15 bp, Homo sapiens
gctgccagtctgcag

SEQ ID NO: 227527 - DNA, 15 bp, Homo sapiens
agctgccagtctgca

SEQ ID NO: 227528 - DNA, 15 bp, Homo sapiens
cagctgccagtctgc

SEQ ID NO: 227529 - DNA, 15 bp, Homo sapiens
tcagctgccagtctg

SEQ ID NO: 227530 - DNA, 15 bp, Homo sapiens
ctcagctgccagtct

SEQ ID NO: 227531 - DNA, 15 bp, Homo sapiens
actcagctgccagtc

SEQ ID NO: 227532 - DNA, 15 bp, Homo sapiens
gactcagctgccagt

SEQ ID NO: 227533 - DNA, 15 bp, Homo sapiens
agactcagctgccag

SEQ ID NO: 227534 - DNA, 15 bp, Homo sapiens
gagactcagctgcca

SEQ ID NO: 227535 - DNA, 15 bp, Homo sapiens
ggagactcagctgcc

SEQ ID NO: 227536 - DNA, 15 bp, Homo sapiens
cggagactcagctgc

SEQ ID NO: 227537 - DNA, 15 bp, Homo sapiens
tcggagactcagctg

SEQ ID NO: 227538 - DNA, 15 bp, Homo sapiens
ctcggagactcagct

SEQ ID NO: 227539 - DNA, 15 bp, Homo sapiens
actcggagactcagc

SEQ ID NO: 227540 - DNA, 15 bp, Homo sapiens
gactcggagactcag

SEQ ID NO: 227541 - DNA, 15 bp, Homo sapiens
agactcggagactca

SEQ ID NO: 227542 - DNA, 15 bp, Homo sapiens
gagactcggagactc

SEQ ID NO: 227543 - DNA, 15 bp, Homo sapiens
agagactcggagact

SEQ ID NO: 227544 - DNA, 15 bp, Homo sapiens
cagagactcggagac

SEQ ID NO: 227545 - DNA, 15 bp, Homo sapiens
tcagagactcggaga

SEQ ID NO: 227546 - DNA, 15 bp, Homo sapiens
atcagagactcggag

SEQ ID NO: 227547 - DNA, 15 bp, Homo sapiens
catcagagactcgga

SEQ ID NO: 227548 - DNA, 15 bp, Homo sapiens
ccatcagagactcgg

SEQ ID NO: 227549 - DNA, 15 bp, Homo sapiens
tccatcagagactcg

SEQ ID NO: 227550 - DNA, 15 bp, Homo sapiens
gtccatcagagactc

SEQ ID NO: 227551 - DNA, 15 bp, Homo sapiens
tgtccatcagagact

SEQ ID NO: 227552 - DNA, 15 bp, Homo sapiens
ctgtccatcagagac

SEQ ID NO: 227553 - DNA, 15 bp, Homo sapiens
gctgtccatcagaga

SEQ ID NO: 227554 - DNA, 15 bp, Homo sapiens
tgctgtccatcagag

SEQ ID NO: 227555 - DNA, 15 bp, Homo sapiens
ctgctgtccatcaga

SEQ ID NO: 227556 - DNA, 15 bp, Homo sapiens
cctgctgtccatcag

SEQ ID NO: 227557 - DNA, 15 bp, Homo sapiens
gcctgctgtccatca

SEQ ID NO: 227558 - DNA, 15 bp, Homo sapiens
agcctgctgtccatc

SEQ ID NO: 227559 - DNA, 15 bp, Homo sapiens
cagcctgctgtccat

SEQ ID NO: 227560 - DNA, 15 bp, Homo sapiens
acagcctgctgtcca

SEQ ID NO: 227561 - DNA, 15 bp, Homo sapiens
gacagcctgctgtcc

SEQ ID NO: 227562 - DNA, 15 bp, Homo sapiens
agacagcctgctgtc

SEQ ID NO: 227563 - DNA, 15 bp, Homo sapiens
aagacagcctgctgt

SEQ ID NO: 227564 - DNA, 15 bp, Homo sapiens
caagacagcctgctg

SEQ ID NO: 227565 - DNA, 15 bp, Homo sapiens
ccaagacagcctgct

SEQ ID NO: 227566 - DNA, 15 bp, Homo sapiens
tccaagacagcctgc

SEQ ID NO: 227567 - DNA, 15 bp, Homo sapiens
gtccaagacagcctg

SEQ ID NO: 227568 - DNA, 15 bp, Homo sapiens
ggtccaagacagcct

SEQ ID NO: 227569 - DNA, 15 bp, Homo sapiens
gggtccaagacagcc

SEQ ID NO: 227570 - DNA, 15 bp, Homo sapiens
agggtccaagacagc

SEQ ID NO: 227571 - DNA, 15 bp, Homo sapiens
cagggtccaagacag

SEQ ID NO: 227572 - DNA, 15 bp, Homo sapiens
gcagggtccaagaca

SEQ ID NO: 227573 - DNA, 15 bp, Homo sapiens
ggcagggtccaagac

SEQ ID NO: 227574 - DNA, 15 bp, Homo sapiens
tggcagggtccaaga

SEQ ID NO: 227575 - DNA, 15 bp, Homo sapiens
ctggcagggtccaag

SEQ ID NO: 227576 - DNA, 15 bp, Homo sapiens
cctggcagggtccaa

SEQ ID NO: 227577 - DNA, 15 bp, Homo sapiens
ccctggcagggtcca

SEQ ID NO: 227578 - DNA, 15 bp, Homo sapiens
accctggcagggtcc

SEQ ID NO: 227579 - DNA, 15 bp, Homo sapiens
gaccctggcagggtc

SEQ ID NO: 227580 - DNA, 15 bp, Homo sapiens
tgaccctggcagggt

SEQ ID NO: 227581 - DNA, 15 bp, Homo sapiens
atgaccctggcaggg

SEQ ID NO: 227582 - DNA, 15 bp, Homo sapiens
gatgaccctggcagg

SEQ ID NO: 227583 - DNA, 15 bp, Homo sapiens
ggatgaccctggcag

SEQ ID NO: 227584 - DNA, 15 bp, Homo sapiens
aggatgaccctggca

SEQ ID NO: 227585 - DNA, 15 bp, Homo sapiens
caggatgaccctggc

SEQ ID NO: 227586 - DNA, 15 bp, Homo sapiens
ccaggatgaccctgg

SEQ ID NO: 227587 - DNA, 15 bp, Homo sapiens
gccaggatgaccctg

SEQ ID NO: 227588 - DNA, 15 bp, Homo sapiens
agccaggatgaccct

SEQ ID NO: 227589 - DNA, 15 bp, Homo sapiens
cagccaggatgaccc

SEQ ID NO: 227590 - DNA, 15 bp, Homo sapiens
tcagccaggatgacc

SEQ ID NO: 227591 - DNA, 15 bp, Homo sapiens
ctcagccaggatgac

SEQ ID NO: 227592 - DNA, 15 bp, Homo sapiens
cctcagccaggatga

SEQ ID NO: 227593 - DNA, 15 bp, Homo sapiens
tcctcagccaggatg

SEQ ID NO: 227594 - DNA, 15 bp, Homo sapiens
gtcctcagccaggat

SEQ ID NO: 227595 - DNA, 15 bp, Homo sapiens
agtcctcagccagga

SEQ ID NO: 227596 - DNA, 15 bp, Homo sapiens
gagtcctcagccagg

SEQ ID NO: 227597 - DNA, 15 bp, Homo sapiens
agagtcctcagccag

SEQ ID NO: 227598 - DNA, 15 bp, Homo sapiens
tagagtcctcagcca

SEQ ID NO: 227599 - DNA, 15 bp, Homo sapiens
gtagagtcctcagcc

SEQ ID NO: 227600 - DNA, 15 bp, Homo sapiens
agtagagtcctcagc

SEQ ID NO: 227601 - DNA, 15 bp, Homo sapiens
tagtagagtcctcag

SEQ ID NO: 227602 - DNA, 15 bp, Homo sapiens
ttagtagagtcctca

SEQ ID NO: 227603 - DNA, 15 bp, Homo sapiens
attagtagagtcctc

SEQ ID NO: 227604 - DNA, 15 bp, Homo sapiens
gattagtagagtcct

SEQ ID NO: 227605 - DNA, 15 bp, Homo sapiens
ggattagtagagtcc

SEQ ID NO: 227606 - DNA, 15 bp, Homo sapiens
tggattagtagagtc

SEQ ID NO: 227607 - DNA, 15 bp, Homo sapiens
ttggattagtagagt

SEQ ID NO: 227608 - DNA, 15 bp, Homo sapiens
attggattagtagag

SEQ ID NO: 227609 - DNA, 15 bp, Homo sapiens
aattggattagtaga

SEQ ID NO: 227610 - DNA, 15 bp, Homo sapiens
gaattggattagtag

SEQ ID NO: 227611 - DNA, 15 bp, Homo sapiens
tgaattggattagta

SEQ ID NO: 227612 - DNA, 15 bp, Homo sapiens
ttgaattggattagt

SEQ ID NO: 227613 - DNA, 15 bp, Homo sapiens
tttgaattggattag

SEQ ID NO: 227614 - DNA, 15 bp, Homo sapiens
ctttgaattggatta

SEQ ID NO: 227615 - DNA, 15 bp, Homo sapiens
actttgaattggatt

SEQ ID NO: 227616 - DNA, 15 bp, Homo sapiens
gactttgaattggat

SEQ ID NO: 227617 - DNA, 15 bp, Homo sapiens
agactttgaattgga

SEQ ID NO: 227618 - DNA, 15 bp, Homo sapiens
gagactttgaattgg

SEQ ID NO: 227619 - DNA, 15 bp, Homo sapiens
agagactttgaattg

SEQ ID NO: 227620 - DNA, 15 bp, Homo sapiens
tagagactttgaatt

SEQ ID NO: 227621 - DNA, 15 bp, Homo sapiens
atagagactttgaat

SEQ ID NO: 227622 - DNA, 15 bp, Homo sapiens
catagagactttgaa

SEQ ID NO: 227623 - DNA, 15 bp, Homo sapiens
ccatagagactttga

SEQ ID NO: 227624 - DNA, 15 bp, Homo sapiens
gccatagagactttg

SEQ ID NO: 227625 - DNA, 15 bp, Homo sapiens
agccatagagacttt

SEQ ID NO: 227626 - DNA, 15 bp, Homo sapiens
gagccatagagactt

SEQ ID NO: 227627 - DNA, 15 bp, Homo sapiens
agagccatagagact

SEQ ID NO: 227628 - DNA, 15 bp, Homo sapiens
cagagccatagagac

SEQ ID NO: 227629 - DNA, 15 bp, Homo sapiens
tcagagccatagaga

SEQ ID NO: 227630 - DNA, 15 bp, Homo sapiens
atcagagccatagag

SEQ ID NO: 227631 - DNA, 15 bp, Homo sapiens
tatcagagccataga

SEQ ID NO: 227632 - DNA, 15 bp, Homo sapiens
ctatcagagccatag

SEQ ID NO: 227633 - DNA, 15 bp, Homo sapiens
actatcagagccata

SEQ ID NO: 227634 - DNA, 15 bp, Homo sapiens
cactatcagagccat

SEQ ID NO: 227635 - DNA, 15 bp, Homo sapiens
ccactatcagagcca

SEQ ID NO: 227636 - DNA, 15 bp, Homo sapiens
tccactatcagagcc

SEQ ID NO: 227637 - DNA, 15 bp, Homo sapiens
gtccactatcagagc

SEQ ID NO: 227638 - DNA, 15 bp, Homo sapiens
agtccactatcagag

SEQ ID NO: 227639 - DNA, 15 bp, Homo sapiens
gagtccactatcaga

SEQ ID NO: 227640 - DNA, 15 bp, Homo sapiens
agagtccactatcag

SEQ ID NO: 227641 - DNA, 15 bp, Homo sapiens
cagagtccactatca

SEQ ID NO: 227642 - DNA, 15 bp, Homo sapiens
ccagagtccactatc

SEQ ID NO: 227643 - DNA, 15 bp, Homo sapiens
tccagagtccactat

SEQ ID NO: 227644 - DNA, 15 bp, Homo sapiens
gtccagagtccacta

SEQ ID NO: 227645 - DNA, 15 bp, Homo sapiens
agtccagagtccact

SEQ ID NO: 227646 - DNA, 15 bp, Homo sapiens
cagtccagagtccac

SEQ ID NO: 227647 - DNA, 15 bp, Homo sapiens
acagtccagagtcca

SEQ ID NO: 227648 - DNA, 15 bp, Homo sapiens
gacagtccagagtcc

SEQ ID NO: 227649 - DNA, 15 bp, Homo sapiens
tgacagtccagagtc

SEQ ID NO: 227650 - DNA, 15 bp, Homo sapiens
gtgacagtccagagt

SEQ ID NO: 227651 - DNA, 15 bp, Homo sapiens
agtgacagtccagag

SEQ ID NO: 227652 - DNA, 15 bp, Homo sapiens
aagtgacagtccaga

SEQ ID NO: 227653 - DNA, 15 bp, Homo sapiens
taagtgacagtccag

SEQ ID NO: 227654 - DNA, 15 bp, Homo sapiens
ataagtgacagtcca

SEQ ID NO: 227655 - DNA, 15 bp, Homo sapiens
tataagtgacagtcc

SEQ ID NO: 227656 - DNA, 15 bp, Homo sapiens
atataagtgacagtc

SEQ ID NO: 227657 - DNA, 15 bp, Homo sapiens
aatataagtgacagt

SEQ ID NO: 227658 - DNA, 15 bp, Homo sapiens
aaatataagtgacag

SEQ ID NO: 227659 - DNA, 15 bp, Homo sapiens
aaaatataagtgaca

SEQ ID NO: 227660 - DNA, 15 bp, Homo sapiens
gaaaatataagtgac

SEQ ID NO: 227661 - DNA, 15 bp, Homo sapiens
ggaaaatataagtga

SEQ ID NO: 227662 - DNA, 15 bp, Homo sapiens
tggaaaatataagtg

SEQ ID NO: 227663 - DNA, 15 bp, Homo sapiens
ttggaaaatataagt

SEQ ID NO: 227664 - DNA, 15 bp, Homo sapiens
attggaaaatataag

SEQ ID NO: 227665 - DNA, 15 bp, Homo sapiens
aattggaaaatataa

SEQ ID NO: 227666 - DNA, 15 bp, Homo sapiens
aaattggaaaatata

SEQ ID NO: 227667 - DNA, 15 bp, Homo sapiens
aaaattggaaaatat

SEQ ID NO: 227668 - DNA, 15 bp, Homo sapiens
taaaattggaaaata

SEQ ID NO: 227669 - DNA, 15 bp, Homo sapiens
ataaaattggaaaat

SEQ ID NO: 227670 - DNA, 15 bp, Homo sapiens
aataaaattggaaaa

SEQ ID NO: 227671 - DNA, 15 bp, Homo sapiens
taataaaattggaaa

SEQ ID NO: 227672 - DNA, 15 bp, Homo sapiens
ttaataaaattggaa

SEQ ID NO: 227673 - DNA, 15 bp, Homo sapiens
cttaataaaattgga

SEQ ID NO: 227674 - DNA, 15 bp, Homo sapiens
gcttaataaaattgg

SEQ ID NO: 227675 - DNA, 15 bp, Homo sapiens
agcttaataaaattg

SEQ ID NO: 227676 - DNA, 15 bp, Homo sapiens
tagcttaataaaatt

SEQ ID NO: 227677 - DNA, 15 bp, Homo sapiens
ttagcttaataaaat

SEQ ID NO: 227678 - DNA, 15 bp, Homo sapiens
attagcttaataaaa

SEQ ID NO: 227679 - DNA, 15 bp, Homo sapiens
aattagcttaataaa

SEQ ID NO: 227680 - DNA, 15 bp, Homo sapiens
caattagcttaataa

SEQ ID NO: 227681 - DNA, 15 bp, Homo sapiens
tcaattagcttaata

SEQ ID NO: 227682 - DNA, 15 bp, Homo sapiens
ttcaattagcttaat

SEQ ID NO: 227683 - DNA, 15 bp, Homo sapiens
tttcaattagcttaa

SEQ ID NO: 227684 - DNA, 15 bp, Homo sapiens
ctttcaattagctta

SEQ ID NO: 227685 - DNA, 15 bp, Homo sapiens
tctttcaattagctt

SEQ ID NO: 227686 - DNA, 15 bp, Homo sapiens
ctctttcaattagct

SEQ ID NO: 227687 - DNA, 15 bp, Homo sapiens
tctctttcaattagc

SEQ ID NO: 227688 - DNA, 15 bp, Homo sapiens
ttctctttcaattag

SEQ ID NO: 227689 - DNA, 15 bp, Homo sapiens
cttctctttcaatta

SEQ ID NO: 227690 - DNA, 15 bp, Homo sapiens
ccttctctttcaatt

SEQ ID NO: 227691 - DNA, 15 bp, Homo sapiens
tccttctctttcaat

SEQ ID NO: 227692 - DNA, 15 bp, Homo sapiens
ctccttctctttcaa

SEQ ID NO: 227693 - DNA, 15 bp, Homo sapiens
tctccttctctttca

SEQ ID NO: 227694 - DNA, 15 bp, Homo sapiens
atctccttctctttc

SEQ ID NO: 227695 - DNA, 15 bp, Homo sapiens
aatctccttctcttt

SEQ ID NO: 227696 - DNA, 15 bp, Homo sapiens
caatctccttctctt

SEQ ID NO: 227697 - DNA, 15 bp, Homo sapiens
acaatctccttctct

SEQ ID NO: 227698 - DNA, 15 bp, Homo sapiens
aacaatctccttctc

SEQ ID NO: 227699 - DNA, 15 bp, Homo sapiens
taacaatctccttct

SEQ ID NO: 227700 - DNA, 15 bp, Homo sapiens
ataacaatctccttc

SEQ ID NO: 227701 - DNA, 15 bp, Homo sapiens
aataacaatctcctt

SEQ ID NO: 227702 - DNA, 15 bp, Homo sapiens
aaataacaatctcct

SEQ ID NO: 227703 - DNA, 15 bp, Homo sapiens
aaaataacaatctcc

SEQ ID NO: 227704 - DNA, 15 bp, Homo sapiens
taaaataacaatctc

SEQ ID NO: 227705 - DNA, 15 bp, Homo sapiens
gtaaaataacaatct

SEQ ID NO: 227706 - DNA, 15 bp, Homo sapiens
tgtaaaataacaatc

SEQ ID NO: 227707 - DNA, 15 bp, Homo sapiens
ttgtaaaataacaat

SEQ ID NO: 227708 - DNA, 15 bp, Homo sapiens
tttgtaaaataacaa

SEQ ID NO: 227709 - DNA, 15 bp, Homo sapiens
atttgtaaaataaca

SEQ ID NO: 227710 - DNA, 15 bp, Homo sapiens
tatttgtaaaataac

SEQ ID NO: 227711 - DNA, 15 bp, Homo sapiens
gtatttgtaaaataa

SEQ ID NO: 227712 - DNA, 15 bp, Homo sapiens
cgtatttgtaaaata

SEQ ID NO: 227713 - DNA, 15 bp, Homo sapiens
ccgtatttgtaaaat

SEQ ID NO: 227714 - DNA, 15 bp, Homo sapiens
gccgtatttgtaaaa

SEQ ID NO: 227715 - DNA, 15 bp, Homo sapiens
tgccgtatttgtaaa

SEQ ID NO: 227716 - DNA, 15 bp, Homo sapiens
gtgccgtatttgtaa

SEQ ID NO: 227717 - DNA, 15 bp, Homo sapiens
tgtgccgtatttgta

SEQ ID NO: 227718 - DNA, 15 bp, Homo sapiens
atgtgccgtatttgt

SEQ ID NO: 227719 - DNA, 15 bp, Homo sapiens
aatgtgccgtatttg

SEQ ID NO: 227720 - DNA, 15 bp, Homo sapiens
caatgtgccgtattt

SEQ ID NO: 227721 - DNA, 15 bp, Homo sapiens
ccaatgtgccgtatt

SEQ ID NO: 227722 - DNA, 15 bp, Homo sapiens
gccaatgtgccgtat

SEQ ID NO: 227723 - DNA, 15 bp, Homo sapiens
ggccaatgtgccgta

SEQ ID NO: 227724 - DNA, 15 bp, Homo sapiens
tggccaatgtgccgt

SEQ ID NO: 227725 - DNA, 15 bp, Homo sapiens
ctggccaatgtgccg

SEQ ID NO: 227726 - DNA, 15 bp, Homo sapiens
cctggccaatgtgcc

SEQ ID NO: 227727 - DNA, 15 bp, Homo sapiens
tcctggccaatgtgc

SEQ ID NO: 227728 - DNA, 15 bp, Homo sapiens
catcctggccaatgt

SEQ ID NO: 227729 - DNA, 15 bp, Homo sapiens
acatcctggccaatg

SEQ ID NO: 227730 - DNA, 15 bp, Homo sapiens
tacatcctggccaat

SEQ ID NO: 227731 - DNA, 15 bp, Homo sapiens
atacatcctggccaa

SEQ ID NO: 227732 - DNA, 15 bp, Homo sapiens
catacatcctggcca

SEQ ID NO: 227733 - DNA, 15 bp, Homo sapiens
acatacatcctggcc

SEQ ID NO: 227734 - DNA, 15 bp, Homo sapiens
tacatacatcctggc

SEQ ID NO: 227735 - DNA, 15 bp, Homo sapiens
atacatacatcctgg

SEQ ID NO: 227736 - DNA, 15 bp, Homo sapiens
aatacatacatcctg

SEQ ID NO: 227737 - DNA, 15 bp, Homo sapiens
taatacatacatcct

SEQ ID NO: 227738 - DNA, 15 bp, Homo sapiens
ctaatacatacatcc

SEQ ID NO: 227739 - DNA, 15 bp, Homo sapiens
gctaatacatacatc

SEQ ID NO: 227740 - DNA, 15 bp, Homo sapiens
ggctaatacatacat

SEQ ID NO: 227741 - DNA, 15 bp, Homo sapiens
gggctaatacataca

SEQ ID NO: 227742 - DNA, 15 bp, Homo sapiens
agggctaatacatac

SEQ ID NO: 227743 - DNA, 15 bp, Homo sapiens
cagggctaatacata

SEQ ID NO: 227744 - DNA, 15 bp, Homo sapiens
tcagggctaatacat

SEQ ID NO: 227745 - DNA, 15 bp, Homo sapiens
ttcagggctaataca

SEQ ID NO: 227746 - DNA, 15 bp, Homo sapiens
tttcagggctaatac

SEQ ID NO: 227747 - DNA, 15 bp, Homo sapiens
ctttcagggctaata

SEQ ID NO: 227748 - DNA, 15 bp, Homo sapiens
actttcagggctaat

SEQ ID NO: 227749 - DNA, 15 bp, Homo sapiens
aactttcagggctaa

SEQ ID NO: 227750 - DNA, 15 bp, Homo sapiens
aaactttcagggcta

SEQ ID NO: 227751 - DNA, 15 bp, Homo sapiens
caaactttcagggct

SEQ ID NO: 227752 - DNA, 15 bp, Homo sapiens
ccaaactttcagggc

SEQ ID NO: 227753 - DNA, 15 bp, Homo sapiens
tccaaactttcaggg

SEQ ID NO: 227754 - DNA, 15 bp, Homo sapiens
ctccaaactttcagg

SEQ ID NO: 227755 - DNA, 15 bp, Homo sapiens
cctccaaactttcag

SEQ ID NO: 227756 - DNA, 15 bp, Homo sapiens
acctccaaactttca

SEQ ID NO: 227757 - DNA, 15 bp, Homo sapiens
aacctccaaactttc

SEQ ID NO: 227758 - DNA, 15 bp, Homo sapiens
caacctccaaacttt

SEQ ID NO: 227759 - DNA, 15 bp, Homo sapiens
gcaacctccaaactt

SEQ ID NO: 227760 - DNA, 15 bp, Homo sapiens
ggcaacctccaaact

SEQ ID NO: 227761 - DNA, 15 bp, Homo sapiens
aggcaacctccaaac

SEQ ID NO: 227762 - DNA, 15 bp, Homo sapiens
aaggcaacctccaaa

SEQ ID NO: 227763 - DNA, 15 bp, Homo sapiens
taaggcaacctccaa

SEQ ID NO: 227764 - DNA, 15 bp, Homo sapiens
gtaaggcaacctcca

SEQ ID NO: 227765 - DNA, 15 bp, Homo sapiens
agtaaggcaacctcc

SEQ ID NO: 227766 - DNA, 15 bp, Homo sapiens
tagtaaggcaacctc

SEQ ID NO: 227767 - DNA, 15 bp, Homo sapiens
ttagtaaggcaacct

SEQ ID NO: 227768 - DNA, 15 bp, Homo sapiens
attagtaaggcaacc

SEQ ID NO: 227769 - DNA, 15 bp, Homo sapiens
aattagtaaggcaac

SEQ ID NO: 227770 - DNA, 15 bp, Homo sapiens
aaattagtaaggcaa

SEQ ID NO: 227771 - DNA, 15 bp, Homo sapiens
aaaattagtaaggca

SEQ ID NO: 227772 - DNA, 15 bp, Homo sapiens
taaaattagtaaggc

SEQ ID NO: 227773 - DNA, 15 bp, Homo sapiens
ctaaaattagtaagg

SEQ ID NO: 227774 - DNA, 15 bp, Homo sapiens
cctaaaattagtaag

SEQ ID NO: 227775 - DNA, 15 bp, Homo sapiens
gcctaaaattagtaa

SEQ ID NO: 227776 - DNA, 15 bp, Homo sapiens
tgcctaaaattagta

SEQ ID NO: 227777 - DNA, 15 bp, Homo sapiens
ctgcctaaaattagt

SEQ ID NO: 227778 - DNA, 15 bp, Homo sapiens
gctgcctaaaattag

SEQ ID NO: 227779 - DNA, 15 bp, Homo sapiens
tgctgcctaaaatta

SEQ ID NO: 227780 - DNA, 15 bp, Homo sapiens
atgctgcctaaaatt

SEQ ID NO: 227781 - DNA, 15 bp, Homo sapiens
tatgctgcctaaaat

SEQ ID NO: 227782 - DNA, 15 bp, Homo sapiens
atatgctgcctaaaa

SEQ ID NO: 227783 - DNA, 15 bp, Homo sapiens
catatgctgcctaaa

SEQ ID NO: 227784 - DNA, 15 bp, Homo sapiens
acatatgctgcctaa

SEQ ID NO: 227785 - DNA, 15 bp, Homo sapiens
cacatatgctgccta

SEQ ID NO: 227786 - DNA, 15 bp, Homo sapiens
ccacatatgctgcct

SEQ ID NO: 227787 - DNA, 15 bp, Homo sapiens
gccacatatgctgcc

SEQ ID NO: 227788 - DNA, 15 bp, Homo sapiens
ggccacatatgctgc

SEQ ID NO: 227789 - DNA, 15 bp, Homo sapiens
tggccacatatgctg

SEQ ID NO: 227790 - DNA, 15 bp, Homo sapiens
atggccacatatgct

SEQ ID NO: 227791 - DNA, 15 bp, Homo sapiens
aatggccacatatgc

SEQ ID NO: 227792 - DNA, 15 bp, Homo sapiens
aaatggccacatatg

SEQ ID NO: 227793 - DNA, 15 bp, Homo sapiens
caaatggccacatat

SEQ ID NO: 227794 - DNA, 15 bp, Homo sapiens
tcaaatggccacata

SEQ ID NO: 227795 - DNA, 15 bp, Homo sapiens
ctcaaatggccacat

SEQ ID NO: 227796 - DNA, 15 bp, Homo sapiens
tctcaaatggccaca

SEQ ID NO: 227797 - DNA, 15 bp, Homo sapiens
ttctcaaatggccac

SEQ ID NO: 227798 - DNA, 15 bp, Homo sapiens
gttctcaaatggcca

SEQ ID NO: 227799 - DNA, 15 bp, Homo sapiens
tgttctcaaatggcc

SEQ ID NO: 227800 - DNA, 15 bp, Homo sapiens
atgttctcaaatggc

SEQ ID NO: 227801 - DNA, 15 bp, Homo sapiens
tatgttctcaaatgg

SEQ ID NO: 227802 - DNA, 15 bp, Homo sapiens
atatgttctcaaatg

SEQ ID NO: 227803 - DNA, 15 bp, Homo sapiens
gatatgttctcaaat

SEQ ID NO: 227804 - DNA, 15 bp, Homo sapiens
agatatgttctcaaa

SEQ ID NO: 227805 - DNA, 15 bp, Homo sapiens
tagatatgttctcaa

SEQ ID NO: 227806 - DNA, 15 bp, Homo sapiens
ttagatatgttctca

SEQ ID NO: 227807 - DNA, 15 bp, Homo sapiens
attagatatgttctc

SEQ ID NO: 227808 - DNA, 15 bp, Homo sapiens
cattagatatgttct

SEQ ID NO: 227809 - DNA, 15 bp, Homo sapiens
acattagatatgttc

SEQ ID NO: 227810 - DNA, 15 bp, Homo sapiens
gacattagatatgtt

SEQ ID NO: 227811 - DNA, 15 bp, Homo sapiens
agacattagatatgt

SEQ ID NO: 227812 - DNA, 15 bp, Homo sapiens
tagacattagatatg

SEQ ID NO: 227813 - DNA, 15 bp, Homo sapiens
ttagacattagatat

SEQ ID NO: 227814 - DNA, 15 bp, Homo sapiens
attagacattagata

SEQ ID NO: 227815 - DNA, 15 bp, Homo sapiens
cattagacattagat

SEQ ID NO: 227816 - DNA, 15 bp, Homo sapiens
tcattagacattaga

SEQ ID NO: 227817 - DNA, 15 bp, Homo sapiens
ctcattagacattag

SEQ ID NO: 227818 - DNA, 15 bp, Homo sapiens
gctcattagacatta

SEQ ID NO: 227819 - DNA, 15 bp, Homo sapiens
tgctcattagacatt

SEQ ID NO: 227820 - DNA, 15 bp, Homo sapiens
atgctcattagacat

SEQ ID NO: 227821 - DNA, 15 bp, Homo sapiens
aatgctcattagaca

SEQ ID NO: 227822 - DNA, 15 bp, Homo sapiens
caatgctcattagac

SEQ ID NO: 227823 - DNA, 15 bp, Homo sapiens
acaatgctcattaga

SEQ ID NO: 227824 - DNA, 15 bp, Homo sapiens
tacaatgctcattag

SEQ ID NO: 227825 - DNA, 15 bp, Homo sapiens
atacaatgctcatta

SEQ ID NO: 227826 - DNA, 15 bp, Homo sapiens
aatacaatgctcatt

SEQ ID NO: 227827 - DNA, 15 bp, Homo sapiens
gaatacaatgctcat

SEQ ID NO: 227828 - DNA, 15 bp, Homo sapiens
ggaatacaatgctca

SEQ ID NO: 227829 - DNA, 15 bp, Homo sapiens
gggaatacaatgctc

SEQ ID NO: 227830 - DNA, 15 bp, Homo sapiens
tgggaatacaatgct

SEQ ID NO: 227831 - DNA, 15 bp, Homo sapiens
ctgggaatacaatgc

SEQ ID NO: 227832 - DNA, 15 bp, Homo sapiens
cctgggaatacaatg

SEQ ID NO: 227833 - DNA, 15 bp, Homo sapiens
acctgggaatacaat

SEQ ID NO: 227834 - DNA, 15 bp, Homo sapiens
aacctgggaatacaa

SEQ ID NO: 227835 - DNA, 15 bp, Homo sapiens
caacctgggaataca

SEQ ID NO: 227836 - DNA, 15 bp, Homo sapiens
ccaacctgggaatac

SEQ ID NO: 227837 - DNA, 15 bp, Homo sapiens
tccaacctgggaata

SEQ ID NO: 227838 - DNA, 15 bp, Homo sapiens
atccaacctgggaat

SEQ ID NO: 227839 - DNA, 15 bp, Homo sapiens
gatccaacctgggaa

SEQ ID NO: 227840 - DNA, 15 bp, Homo sapiens
ggatccaacctggga

SEQ ID NO: 227841 - DNA, 15 bp, Homo sapiens
gggatccaacctggg

SEQ ID NO: 227842 - DNA, 15 bp, Homo sapiens
ggggatccaacctgg

SEQ ID NO: 227843 - DNA, 15 bp, Homo sapiens
cggggatccaacctg

SEQ ID NO: 227844 - DNA, 15 bp, Homo sapiens
acggggatccaacct

SEQ ID NO: 227845 - DNA, 15 bp, Homo sapiens
gacggggatccaacc

SEQ ID NO: 227846 - DNA, 15 bp, Homo sapiens
ggacggggatccaac

SEQ ID NO: 227847 - DNA, 15 bp, Homo sapiens
gggacggggatccaa

SEQ ID NO: 227848 - DNA, 15 bp, Homo sapiens
ggggacggggatcca

SEQ ID NO: 227849 - DNA, 15 bp, Homo sapiens
aggggacggggatcc

SEQ ID NO: 227850 - DNA, 15 bp, Homo sapiens
taggggacggggatc

SEQ ID NO: 227851 - DNA, 15 bp, Homo sapiens
ctaggggacggggat

SEQ ID NO: 227852 - DNA, 15 bp, Homo sapiens
gctaggggacgggga

SEQ ID NO: 227853 - DNA, 15 bp, Homo sapiens
ggctaggggacgggg

SEQ ID NO: 227854 - DNA, 15 bp, Homo sapiens
gggctaggggacggg

SEQ ID NO: 227855 - DNA, 15 bp, Homo sapiens
tgggctaggggacgg

SEQ ID NO: 227856 - DNA, 15 bp, Homo sapiens
atgggctaggggacg

SEQ ID NO: 227857 - DNA, 15 bp, Homo sapiens
aatgggctaggggac

SEQ ID NO: 227858 - DNA, 15 bp, Homo sapiens
aaatgggctagggga

SEQ ID NO: 227859 - DNA, 15 bp, Homo sapiens
gaaatgggctagggg

SEQ ID NO: 227860 - DNA, 15 bp, Homo sapiens
agaaatgggctaggg

SEQ ID NO: 227861 - DNA, 15 bp, Homo sapiens
gagaaatgggctagg

SEQ ID NO: 227862 - DNA, 15 bp, Homo sapiens
ggagaaatgggctag

SEQ ID NO: 227863 - DNA, 15 bp, Homo sapiens
tggagaaatgggcta

SEQ ID NO: 227864 - DNA, 15 bp, Homo sapiens
ttggagaaatgggct

SEQ ID NO: 227865 - DNA, 15 bp, Homo sapiens
gttggagaaatgggc

SEQ ID NO: 227866 - DNA, 15 bp, Homo sapiens
agttggagaaatggg

SEQ ID NO: 227867 - DNA, 15 bp, Homo sapiens
gagttggagaaatgg

SEQ ID NO: 227868 - DNA, 15 bp, Homo sapiens
agagttggagaaatg

SEQ ID NO: 227869 - DNA, 15 bp, Homo sapiens
gagagttggagaaat

SEQ ID NO: 227870 - DNA, 15 bp, Homo sapiens
agagagttggagaaa

SEQ ID NO: 227871 - DNA, 15 bp, Homo sapiens
cagagagttggagaa

SEQ ID NO: 227872 - DNA, 15 bp, Homo sapiens
acagagagttggaga

SEQ ID NO: 227873 - DNA, 15 bp, Homo sapiens
gacagagagttggag

SEQ ID NO: 227874 - DNA, 15 bp, Homo sapiens
ggacagagagttgga

SEQ ID NO: 227875 - DNA, 15 bp, Homo sapiens
cggacagagagttgg

SEQ ID NO: 227876 - DNA, 15 bp, Homo sapiens
acggacagagagttg

SEQ ID NO: 227877 - DNA, 15 bp, Homo sapiens
tacggacagagagtt

SEQ ID NO: 227878 - DNA, 15 bp, Homo sapiens
gtacggacagagagt

SEQ ID NO: 227879 - DNA, 15 bp, Homo sapiens
tgtacggacagagag

SEQ ID NO: 227880 - DNA, 15 bp, Homo sapiens
atgtacggacagaga

SEQ ID NO: 227881 - DNA, 15 bp, Homo sapiens
tatgtacggacagag

SEQ ID NO: 227882 - DNA, 15 bp, Homo sapiens
ctatgtacggacaga

SEQ ID NO: 227883 - DNA, 15 bp, Homo sapiens
actatgtacggacag

SEQ ID NO: 227884 - DNA, 15 bp, Homo sapiens
cactatgtacggaca

SEQ ID NO: 227885 - DNA, 15 bp, Homo sapiens
ccactatgtacggac

SEQ ID NO: 227886 - DNA, 15 bp, Homo sapiens
tccactatgtacgga

SEQ ID NO: 227887 - DNA, 15 bp, Homo sapiens
atccactatgtacgg

SEQ ID NO: 227888 - DNA, 15 bp, Homo sapiens
aatccactatgtacg

SEQ ID NO: 227889 - DNA, 15 bp, Homo sapiens
taatccactatgtac

SEQ ID NO: 227890 - DNA, 15 bp, Homo sapiens
ataatccactatgta

SEQ ID NO: 227891 - DNA, 15 bp, Homo sapiens
tataatccactatgt

SEQ ID NO: 227892 - DNA, 15 bp, Homo sapiens
ttataatccactatg

SEQ ID NO: 227893 - DNA, 15 bp, Homo sapiens
gttataatccactat

SEQ ID NO: 227894 - DNA, 15 bp, Homo sapiens
agttataatccacta

SEQ ID NO: 227895 - DNA, 15 bp, Homo sapiens
cagttataatccact

SEQ ID NO: 227896 - DNA, 15 bp, Homo sapiens
tcagttataatccac

SEQ ID NO: 227897 - DNA, 15 bp, Homo sapiens
ttcagttataatcca

SEQ ID NO: 227898 - DNA, 15 bp, Homo sapiens
attcagttataatcc

SEQ ID NO: 227899 - DNA, 15 bp, Homo sapiens
aattcagttataatc

SEQ ID NO: 227900 - DNA, 15 bp, Homo sapiens
aaattcagttataat

SEQ ID NO: 227901 - DNA, 15 bp, Homo sapiens
taaattcagttataa

SEQ ID NO: 227902 - DNA, 15 bp, Homo sapiens
ctaaattcagttata

SEQ ID NO: 227903 - DNA, 15 bp, Homo sapiens
tctaaattcagttat

SEQ ID NO: 227904 - DNA, 15 bp, Homo sapiens
atctaaattcagtta

SEQ ID NO: 227905 - DNA, 15 bp, Homo sapiens
catctaaattcagtt

SEQ ID NO: 227906 - DNA, 15 bp, Homo sapiens
acatctaaattcagt

SEQ ID NO: 227907 - DNA, 15 bp, Homo sapiens
gacatctaaattcag

SEQ ID NO: 227908 - DNA, 15 bp, Homo sapiens
agacatctaaattca

SEQ ID NO: 227909 - DNA, 15 bp, Homo sapiens
cagacatctaaattc

SEQ ID NO: 227910 - DNA, 15 bp, Homo sapiens
acagacatctaaatt

SEQ ID NO: 227911 - DNA, 15 bp, Homo sapiens
tacagacatctaaat

SEQ ID NO: 227912 - DNA, 15 bp, Homo sapiens
gtacagacatctaaa

SEQ ID NO: 227913 - DNA, 15 bp, Homo sapiens
agtacagacatctaa

SEQ ID NO: 227914 - DNA, 15 bp, Homo sapiens
tagtacagacatcta

SEQ ID NO: 227915 - DNA, 15 bp, Homo sapiens
gtagtacagacatct

SEQ ID NO: 227916 - DNA, 15 bp, Homo sapiens
tgtagtacagacatc

SEQ ID NO: 227917 - DNA, 15 bp, Homo sapiens
ctgtagtacagacat

SEQ ID NO: 227918 - DNA, 15 bp, Homo sapiens
cctgtagtacagaca

SEQ ID NO: 227919 - DNA, 15 bp, Homo sapiens
tcctgtagtacagac

SEQ ID NO: 227920 - DNA, 15 bp, Homo sapiens
atcctgtagtacaga

SEQ ID NO: 227921 - DNA, 15 bp, Homo sapiens
aatcctgtagtacag

SEQ ID NO: 227922 - DNA, 15 bp, Homo sapiens
aaatcctgtagtaca

SEQ ID NO: 227923 - DNA, 15 bp, Homo sapiens
aaaatcctgtagtac

SEQ ID NO: 227924 - DNA, 15 bp, Homo sapiens
caaaatcctgtagta

SEQ ID NO: 227925 - DNA, 15 bp, Homo sapiens
acaaaatcctgtagt

SEQ ID NO: 227926 - DNA, 15 bp, Homo sapiens
aacaaaatcctgtag

SEQ ID NO: 227927 - DNA, 15 bp, Homo sapiens
taacaaaatcctgta

SEQ ID NO: 227928 - DNA, 15 bp, Homo sapiens
gtaacaaaatcctgt

SEQ ID NO: 227929 - DNA, 15 bp, Homo sapiens
agtaacaaaatcctg

SEQ ID NO: 227930 - DNA, 15 bp, Homo sapiens
aagtaacaaaatcct

SEQ ID NO: 227931 - DNA, 15 bp, Homo sapiens
taagtaacaaaatcc

SEQ ID NO: 227932 - DNA, 15 bp, Homo sapiens
ctaagtaacaaaatc

SEQ ID NO: 227933 - DNA, 15 bp, Homo sapiens
tctaagtaacaaaat

SEQ ID NO: 227934 - DNA, 15 bp, Homo sapiens
ttctaagtaacaaaa

SEQ ID NO: 227935 - DNA, 15 bp, Homo sapiens
cttctaagtaacaaa

SEQ ID NO: 227936 - DNA, 15 bp, Homo sapiens
gcttctaagtaacaa

SEQ ID NO: 227937 - DNA, 15 bp, Homo sapiens
ggcttctaagtaaca

SEQ ID NO: 227938 - DNA, 15 bp, Homo sapiens
tggcttctaagtaac

SEQ ID NO: 227939 - DNA, 15 bp, Homo sapiens
atggcttctaagtaa

SEQ ID NO: 227940 - DNA, 15 bp, Homo sapiens
tatggcttctaagta

SEQ ID NO: 227941 - DNA, 15 bp, Homo sapiens
ctatggcttctaagt

SEQ ID NO: 227942 - DNA, 15 bp, Homo sapiens
cctatggcttctaag

SEQ ID NO: 227943 - DNA, 15 bp, Homo sapiens
acctatggcttctaa

SEQ ID NO: 227944 - DNA, 15 bp, Homo sapiens
aacctatggcttcta

SEQ ID NO: 227945 - DNA, 15 bp, Homo sapiens
caacctatggcttct

SEQ ID NO: 227946 - DNA, 15 bp, Homo sapiens
acaacctatggcttc

SEQ ID NO: 227947 - DNA, 15 bp, Homo sapiens
cacaacctatggctt

SEQ ID NO: 227948 - DNA, 15 bp, Homo sapiens
tcacaacctatggct

SEQ ID NO: 227949 - DNA, 15 bp, Homo sapiens
ctcacaacctatggc

SEQ ID NO: 227950 - DNA, 15 bp, Homo sapiens
tctcacaacctatgg

SEQ ID NO: 227951 - DNA, 15 bp, Homo sapiens
atctcacaacctatg

SEQ ID NO: 227952 - DNA, 15 bp, Homo sapiens
catctcacaacctat

SEQ ID NO: 227953 - DNA, 15 bp, Homo sapiens
ccatctcacaaccta

SEQ ID NO: 227954 - DNA, 15 bp, Homo sapiens
accatctcacaacct

SEQ ID NO: 227955 - DNA, 15 bp, Homo sapiens
aaccatctcacaacc

SEQ ID NO: 227956 - DNA, 15 bp, Homo sapiens
caaccatctcacaac

SEQ ID NO: 227957 - DNA, 15 bp, Homo sapiens
acaaccatctcacaa

SEQ ID NO: 227958 - DNA, 15 bp, Homo sapiens
aacaaccatctcaca

SEQ ID NO: 227959 - DNA, 15 bp, Homo sapiens
aaacaaccatctcac

SEQ ID NO: 227960 - DNA, 15 bp, Homo sapiens
gaaacaaccatctca

SEQ ID NO: 227961 - DNA, 15 bp, Homo sapiens
tgaaacaaccatctc

SEQ ID NO: 227962 - DNA, 15 bp, Homo sapiens
ctgaaacaaccatct

SEQ ID NO: 227963 - DNA, 15 bp, Homo sapiens
actgaaacaaccatc

SEQ ID NO: 227964 - DNA, 15 bp, Homo sapiens
tactgaaacaaccat

SEQ ID NO: 227965 - DNA, 15 bp, Homo sapiens
ctactgaaacaacca

SEQ ID NO: 227966 - DNA, 15 bp, Homo sapiens
actactgaaacaacc

SEQ ID NO: 227967 - DNA, 15 bp, Homo sapiens
tactactgaaacaac

SEQ ID NO: 227968 - DNA, 15 bp, Homo sapiens
ctactactgaaacaa

SEQ ID NO: 227969 - DNA, 15 bp, Homo sapiens
actactactgaaaca

SEQ ID NO: 227970 - DNA, 15 bp, Homo sapiens
tactactactgaaac

SEQ ID NO: 227971 - DNA, 15 bp, Homo sapiens
ctactactactgaaa

SEQ ID NO: 227972 - DNA, 15 bp, Homo sapiens
actactactactgaa

SEQ ID NO: 227973 - DNA, 15 bp, Homo sapiens
tactactactactga

SEQ ID NO: 227974 - DNA, 15 bp, Homo sapiens
ttactactactactg

SEQ ID NO: 227975 - DNA, 15 bp, Homo sapiens
tttactactactact

SEQ ID NO: 227976 - DNA, 15 bp, Homo sapiens
gtttactactactac

SEQ ID NO: 227977 - DNA, 15 bp, Homo sapiens
tgtttactactacta

SEQ ID NO: 227978 - DNA, 15 bp, Homo sapiens
ctgtttactactact

SEQ ID NO: 227979 - DNA, 15 bp, Homo sapiens
tctgtttactactac

SEQ ID NO: 227980 - DNA, 15 bp, Homo sapiens
ttctgtttactacta

SEQ ID NO: 227981 - DNA, 15 bp, Homo sapiens
attctgtttactact

SEQ ID NO: 227982 - DNA, 15 bp, Homo sapiens
aattctgtttactac

SEQ ID NO: 227983 - DNA, 15 bp, Homo sapiens
aaattctgtttacta

SEQ ID NO: 227984 - DNA, 15 bp, Homo sapiens
aaaattctgtttact

SEQ ID NO: 227985 - DNA, 15 bp, Homo sapiens
taaaattctgtttac

SEQ ID NO: 227986 - DNA, 15 bp, Homo sapiens
ataaaattctgttta

SEQ ID NO: 227987 - DNA, 15 bp, Homo sapiens
tataaaattctgttt

SEQ ID NO: 227988 - DNA, 15 bp, Homo sapiens
atataaaattctgtt

SEQ ID NO: 227989 - DNA, 15 bp, Homo sapiens
catataaaattctgt

SEQ ID NO: 227990 - DNA, 15 bp, Homo sapiens
ccatataaaattctg

SEQ ID NO: 227991 - DNA, 15 bp, Homo sapiens
tccatataaaattct

SEQ ID NO: 227992 - DNA, 15 bp, Homo sapiens
ctccatataaaattc

SEQ ID NO: 227993 - DNA, 15 bp, Homo sapiens
tctccatataaaatt

SEQ ID NO: 227994 - DNA, 15 bp, Homo sapiens
atctccatataaaat

SEQ ID NO: 227995 - DNA, 15 bp, Homo sapiens
aatctccatataaaa

SEQ ID NO: 227996 - DNA, 15 bp, Homo sapiens
gaatctccatataaa

SEQ ID NO: 227997 - DNA, 15 bp, Homo sapiens
ggaatctccatataa

SEQ ID NO: 227998 - DNA, 15 bp, Homo sapiens
tggaatctccatata

SEQ ID NO: 227999 - DNA, 15 bp, Homo sapiens
atggaatctccatat

SEQ ID NO: 228000 - DNA, 15 bp, Homo sapiens
gatggaatctccata

SEQ ID NO: 228001 - DNA, 15 bp, Homo sapiens
agatggaatctccat

SEQ ID NO: 228002 - DNA, 15 bp, Homo sapiens
gagatggaatctcca

SEQ ID NO: 228003 - DNA, 15 bp, Homo sapiens
agagatggaatctcc

SEQ ID NO: 228004 - DNA, 15 bp, Homo sapiens
cagagatggaatctc

SEQ ID NO: 228005 - DNA, 15 bp, Homo sapiens
acagagatggaatct

SEQ ID NO: 228006 - DNA, 15 bp, Homo sapiens
aacagagatggaatc

SEQ ID NO: 228007 - DNA, 15 bp, Homo sapiens
gaacagagatggaat

SEQ ID NO: 228008 - DNA, 15 bp, Homo sapiens
agaacagagatggaa

SEQ ID NO: 228009 - DNA, 15 bp, Homo sapiens
aagaacagagatgga

SEQ ID NO: 228010 - DNA, 15 bp, Homo sapiens
caagaacagagatgg

SEQ ID NO: 228011 - DNA, 15 bp, Homo sapiens
gcaagaacagagatg

SEQ ID NO: 228012 - DNA, 15 bp, Homo sapiens
tgcaagaacagagat

SEQ ID NO: 228013 - DNA, 15 bp, Homo sapiens
gtgcaagaacagaga

SEQ ID NO: 228014 - DNA, 15 bp, Homo sapiens
tgtgcaagaacagag

SEQ ID NO: 228015 - DNA, 15 bp, Homo sapiens
atgtgcaagaacaga

SEQ ID NO: 228016 - DNA, 15 bp, Homo sapiens
aatgtgcaagaacag

SEQ ID NO: 228017 - DNA, 15 bp, Homo sapiens
caatgtgcaagaaca

SEQ ID NO: 228018 - DNA, 15 bp, Homo sapiens
ccaatgtgcaagaac

SEQ ID NO: 228019 - DNA, 15 bp, Homo sapiens
tccaatgtgcaagaa

SEQ ID NO: 228020 - DNA, 15 bp, Homo sapiens
gtccaatgtgcaaga

SEQ ID NO: 228021 - DNA, 15 bp, Homo sapiens
ggtccaatgtgcaag

SEQ ID NO: 228022 - DNA, 15 bp, Homo sapiens
aggtccaatgtgcaa

SEQ ID NO: 228023 - DNA, 15 bp, Homo sapiens
taggtccaatgtgca

SEQ ID NO: 228024 - DNA, 15 bp, Homo sapiens
ataggtccaatgtgc

SEQ ID NO: 228025 - DNA, 15 bp, Homo sapiens
gataggtccaatgtg

SEQ ID NO: 228026 - DNA, 15 bp, Homo sapiens
ggataggtccaatgt

SEQ ID NO: 228027 - DNA, 15 bp, Homo sapiens
gggataggtccaatg

SEQ ID NO: 228028 - DNA, 15 bp, Homo sapiens
tgggataggtccaat

SEQ ID NO: 228029 - DNA, 15 bp, Homo sapiens
ttgggataggtccaa

SEQ ID NO: 228030 - DNA, 15 bp, Homo sapiens
cttgggataggtcca

SEQ ID NO: 228031 - DNA, 15 bp, Homo sapiens
tcttgggataggtcc

SEQ ID NO: 228032 - DNA, 15 bp, Homo sapiens
gtcttgggataggtc

SEQ ID NO: 228033 - DNA, 15 bp, Homo sapiens
tgtcttgggataggt

SEQ ID NO: 228034 - DNA, 15 bp, Homo sapiens
ctgtcttgggatagg

SEQ ID NO: 228035 - DNA, 15 bp, Homo sapiens
actgtcttgggatag

SEQ ID NO: 228036 - DNA, 15 bp, Homo sapiens
cactgtcttgggata

SEQ ID NO: 228037 - DNA, 15 bp, Homo sapiens
acactgtcttgggat

SEQ ID NO: 228038 - DNA, 15 bp, Homo sapiens
cacactgtcttggga

SEQ ID NO: 228039 - DNA, 15 bp, Homo sapiens
ccacactgtcttggg

SEQ ID NO: 228040 - DNA, 15 bp, Homo sapiens
tccacactgtcttgg

SEQ ID NO: 228041 - DNA, 15 bp, Homo sapiens
ttccacactgtcttg

SEQ ID NO: 228042 - DNA, 15 bp, Homo sapiens
attccacactgtctt

SEQ ID NO: 228043 - DNA, 15 bp, Homo sapiens
tattccacactgtct

SEQ ID NO: 228044 - DNA, 15 bp, Homo sapiens
ctattccacactgtc

SEQ ID NO: 228045 - DNA, 15 bp, Homo sapiens
tctattccacactgt

SEQ ID NO: 228046 - DNA, 15 bp, Homo sapiens
ctctattccacactg

SEQ ID NO: 228047 - DNA, 15 bp, Homo sapiens
tctctattccacact

SEQ ID NO: 228048 - DNA, 15 bp, Homo sapiens
ctctctattccacac

SEQ ID NO: 228049 - DNA, 15 bp, Homo sapiens
tctctctattccaca

SEQ ID NO: 228050 - DNA, 15 bp, Homo sapiens
ttctctctattccac

SEQ ID NO: 228051 - DNA, 15 bp, Homo sapiens
tttctctctattcca

SEQ ID NO: 228052 - DNA, 15 bp, Homo sapiens
ttttctctctattcc

SEQ ID NO: 228053 - DNA, 15 bp, Homo sapiens
tttttctctctattc

SEQ ID NO: 228054 - DNA, 15 bp, Homo sapiens
ttttttctctctatt

SEQ ID NO: 228055 - DNA, 15 bp, Homo sapiens
attttttctctctat

SEQ ID NO: 228056 - DNA, 15 bp, Homo sapiens
tattttttctctcta

SEQ ID NO: 228057 - DNA, 15 bp, Homo sapiens
atattttttctctct

SEQ ID NO: 228058 - DNA, 15 bp, Homo sapiens
catattttttctctc

SEQ ID NO: 228059 - DNA, 15 bp, Homo sapiens
ccatattttttctct

SEQ ID NO: 228060 - DNA, 15 bp, Homo sapiens
gccatattttttctc

SEQ ID NO: 228061 - DNA, 15 bp, Homo sapiens
ggccatattttttct

SEQ ID NO: 228062 - DNA, 15 bp, Homo sapiens
aggccatattttttc

SEQ ID NO: 228063 - DNA, 15 bp, Homo sapiens
aaggccatatttttt

SEQ ID NO: 228064 - DNA, 15 bp, Homo sapiens
gaaggccatattttt

SEQ ID NO: 228065 - DNA, 15 bp, Homo sapiens
tgaaggccatatttt

SEQ ID NO: 228066 - DNA, 15 bp, Homo sapiens
ctgaaggccatattt

SEQ ID NO: 228067 - DNA, 15 bp, Homo sapiens
tctgaaggccatatt

SEQ ID NO: 228068 - DNA, 15 bp, Homo sapiens
ctctgaaggccatat

SEQ ID NO: 228069 - DNA, 15 bp, Homo sapiens
actctgaaggccata

SEQ ID NO: 228070 - DNA, 15 bp, Homo sapiens
aactctgaaggccat

SEQ ID NO: 228071 - DNA, 15 bp, Homo sapiens
taactctgaaggcca

SEQ ID NO: 228072 - DNA, 15 bp, Homo sapiens
ctaactctgaaggcc

SEQ ID NO: 228073 - DNA, 15 bp, Homo sapiens
tctaactctgaaggc

SEQ ID NO: 228074 - DNA, 15 bp, Homo sapiens
ttctaactctgaagg

SEQ ID NO: 228075 - DNA, 15 bp, Homo sapiens
attctaactctgaag

SEQ ID NO: 228076 - DNA, 15 bp, Homo sapiens
cattctaactctgaa

SEQ ID NO: 228077 - DNA, 15 bp, Homo sapiens
ccattctaactctga

SEQ ID NO: 228078 - DNA, 15 bp, Homo sapiens
tccattctaactctg

SEQ ID NO: 228079 - DNA, 15 bp, Homo sapiens
gtccattctaactct

SEQ ID NO: 228080 - DNA, 15 bp, Homo sapiens
agtccattctaactc

SEQ ID NO: 228081 - DNA, 15 bp, Homo sapiens
tagtccattctaact

SEQ ID NO: 228082 - DNA, 15 bp, Homo sapiens
ctagtccattctaac

SEQ ID NO: 228083 - DNA, 15 bp, Homo sapiens
tctagtccattctaa

SEQ ID NO: 228084 - DNA, 15 bp, Homo sapiens
atctagtccattcta

SEQ ID NO: 228085 - DNA, 15 bp, Homo sapiens
aatctagtccattct

SEQ ID NO: 228086 - DNA, 15 bp, Homo sapiens
caatctagtccattc

SEQ ID NO: 228087 - DNA, 15 bp, Homo sapiens
tcaatctagtccatt

SEQ ID NO: 228088 - DNA, 15 bp, Homo sapiens
ttcaatctagtccat

SEQ ID NO: 228089 - DNA, 15 bp, Homo sapiens
tttcaatctagtcca

SEQ ID NO: 228090 - DNA, 15 bp, Homo sapiens
atttcaatctagtcc

SEQ ID NO: 228091 - DNA, 15 bp, Homo sapiens
aatttcaatctagtc

SEQ ID NO: 228092 - DNA, 15 bp, Homo sapiens
aaatttcaatctagt

SEQ ID NO: 228093 - DNA, 15 bp, Homo sapiens
gaaatttcaatctag

SEQ ID NO: 228094 - DNA, 15 bp, Homo sapiens
tgaaatttcaatcta

SEQ ID NO: 228095 - DNA, 15 bp, Homo sapiens
ctgaaatttcaatct

SEQ ID NO: 228096 - DNA, 15 bp, Homo sapiens
gctgaaatttcaatc

SEQ ID NO: 228097 - DNA, 15 bp, Homo sapiens
agctgaaatttcaat

SEQ ID NO: 228098 - DNA, 15 bp, Homo sapiens
gagctgaaatttcaa

SEQ ID NO: 228099 - DNA, 15 bp, Homo sapiens
agagctgaaatttca

SEQ ID NO: 228100 - DNA, 15 bp, Homo sapiens
cagagctgaaatttc

SEQ ID NO: 228101 - DNA, 15 bp, Homo sapiens
gcagagctgaaattt

SEQ ID NO: 228102 - DNA, 15 bp, Homo sapiens
ggcagagctgaaatt

SEQ ID NO: 228103 - DNA, 15 bp, Homo sapiens
tggcagagctgaaat

SEQ ID NO: 228104 - DNA, 15 bp, Homo sapiens
gtggcagagctgaaa

SEQ ID NO: 228105 - DNA, 15 bp, Homo sapiens
agtggcagagctgaa

SEQ ID NO: 228106 - DNA, 15 bp, Homo sapiens
aagtggcagagctga

SEQ ID NO: 228107 - DNA, 15 bp, Homo sapiens
taagtggcagagctg

SEQ ID NO: 228108 - DNA, 15 bp, Homo sapiens
gtaagtggcagagct

SEQ ID NO: 228109 - DNA, 15 bp, Homo sapiens
tgtaagtggcagagc

SEQ ID NO: 228110 - DNA, 15 bp, Homo sapiens
ttgtaagtggcagag

SEQ ID NO: 228111 - DNA, 15 bp, Homo sapiens
cttgtaagtggcaga

SEQ ID NO: 228112 - DNA, 15 bp, Homo sapiens
tcttgtaagtggcag

SEQ ID NO: 228113 - DNA, 15 bp, Homo sapiens
atcttgtaagtggca

SEQ ID NO: 228114 - DNA, 15 bp, Homo sapiens
catcttgtaagtggc

SEQ ID NO: 228115 - DNA, 15 bp, Homo sapiens
ccatcttgtaagtgg

SEQ ID NO: 228116 - DNA, 15 bp, Homo sapiens
cccatcttgtaagtg

SEQ ID NO: 228117 - DNA, 15 bp, Homo sapiens
acccatcttgtaagt

SEQ ID NO: 228118 - DNA, 15 bp, Homo sapiens
tacccatcttgtaag

SEQ ID NO: 228119 - DNA, 15 bp, Homo sapiens
ttacccatcttgtaa

SEQ ID NO: 228120 - DNA, 15 bp, Homo sapiens
attacccatcttgta

SEQ ID NO: 228121 - DNA, 15 bp, Homo sapiens
gattacccatcttgt

SEQ ID NO: 228122 - DNA, 15 bp, Homo sapiens
agattacccatcttg

SEQ ID NO: 228123 - DNA, 15 bp, Homo sapiens
aagattacccatctt

SEQ ID NO: 228124 - DNA, 15 bp, Homo sapiens
caagattacccatct

SEQ ID NO: 228125 - DNA, 15 bp, Homo sapiens
ccaagattacccatc

SEQ ID NO: 228126 - DNA, 15 bp, Homo sapiens
tccaagattacccat

SEQ ID NO: 228127 - DNA, 15 bp, Homo sapiens
ttccaagattaccca

SEQ ID NO: 228128 - DNA, 15 bp, Homo sapiens
tttccaagattaccc

SEQ ID NO: 228129 - DNA, 15 bp, Homo sapiens
ttttccaagattacc

SEQ ID NO: 228130 - DNA, 15 bp, Homo sapiens
attttccaagattac

SEQ ID NO: 228131 - DNA, 15 bp, Homo sapiens
aattttccaagatta

SEQ ID NO: 228132 - DNA, 15 bp, Homo sapiens
taattttccaagatt

SEQ ID NO: 228133 - DNA, 15 bp, Homo sapiens
gtaattttccaagat

SEQ ID NO: 228134 - DNA, 15 bp, Homo sapiens
ggtaattttccaaga

SEQ ID NO: 228135 - DNA, 15 bp, Homo sapiens
gggtaattttccaag

SEQ ID NO: 228136 - DNA, 15 bp, Homo sapiens
tgggtaattttccaa

SEQ ID NO: 228137 - DNA, 15 bp, Homo sapiens
ttgggtaattttcca

SEQ ID NO: 228138 - DNA, 15 bp, Homo sapiens
attgggtaattttcc

SEQ ID NO: 228139 - DNA, 15 bp, Homo sapiens
gattgggtaattttc

SEQ ID NO: 228140 - DNA, 15 bp, Homo sapiens
agattgggtaatttt

SEQ ID NO: 228141 - DNA, 15 bp, Homo sapiens
gagattgggtaattt

SEQ ID NO: 228142 - DNA, 15 bp, Homo sapiens
agagattgggtaatt

SEQ ID NO: 228143 - DNA, 15 bp, Homo sapiens
gagagattgggtaat

SEQ ID NO: 228144 - DNA, 15 bp, Homo sapiens
agagagattgggtaa

SEQ ID NO: 228145 - DNA, 15 bp, Homo sapiens
cagagagattgggta

SEQ ID NO: 228146 - DNA, 15 bp, Homo sapiens
tcagagagattgggt

SEQ ID NO: 228147 - DNA, 15 bp, Homo sapiens
ctcagagagattggg

SEQ ID NO: 228148 - DNA, 15 bp, Homo sapiens
gctcagagagattgg

SEQ ID NO: 228149 - DNA, 15 bp, Homo sapiens
ggctcagagagattg

SEQ ID NO: 228150 - DNA, 15 bp, Homo sapiens
aggctcagagagatt

SEQ ID NO: 228151 - DNA, 15 bp, Homo sapiens
gaggctcagagagat

SEQ ID NO: 228152 - DNA, 15 bp, Homo sapiens
tgaggctcagagaga

SEQ ID NO: 228153 - DNA, 15 bp, Homo sapiens
atgaggctcagagag

SEQ ID NO: 228154 - DNA, 15 bp, Homo sapiens
catgaggctcagaga

SEQ ID NO: 228155 - DNA, 15 bp, Homo sapiens
tcatgaggctcagag

SEQ ID NO: 228156 - DNA, 15 bp, Homo sapiens
gtcatgaggctcaga

SEQ ID NO: 228157 - DNA, 15 bp, Homo sapiens
tgtcatgaggctcag

SEQ ID NO: 228158 - DNA, 15 bp, Homo sapiens
atgtcatgaggctca

SEQ ID NO: 228159 - DNA, 15 bp, Homo sapiens
aatgtcatgaggctc

SEQ ID NO: 228160 - DNA, 15 bp, Homo sapiens
gaatgtcatgaggct

SEQ ID NO: 228161 - DNA, 15 bp, Homo sapiens
ggaatgtcatgaggc

SEQ ID NO: 228162 - DNA, 15 bp, Homo sapiens
aggaatgtcatgagg

SEQ ID NO: 228163 - DNA, 15 bp, Homo sapiens
taggaatgtcatgag

SEQ ID NO: 228164 - DNA, 15 bp, Homo sapiens
gtaggaatgtcatga

SEQ ID NO: 228165 - DNA, 15 bp, Homo sapiens
ggtaggaatgtcatg

SEQ ID NO: 228166 - DNA, 15 bp, Homo sapiens
aggtaggaatgtcat

SEQ ID NO: 228167 - DNA, 15 bp, Homo sapiens
aaggtaggaatgtca

SEQ ID NO: 228168 - DNA, 15 bp, Homo sapiens
caaggtaggaatgtc

SEQ ID NO: 228169 - DNA, 15 bp, Homo sapiens
gcaaggtaggaatgt

SEQ ID NO: 228170 - DNA, 15 bp, Homo sapiens
tgcaaggtaggaatg

SEQ ID NO: 228171 - DNA, 15 bp, Homo sapiens
ctgcaaggtaggaat

SEQ ID NO: 228172 - DNA, 15 bp, Homo sapiens
gctgcaaggtaggaa

SEQ ID NO: 228173 - DNA, 15 bp, Homo sapiens
ggctgcaaggtagga

SEQ ID NO: 228174 - DNA, 15 bp, Homo sapiens
tggctgcaaggtagg

SEQ ID NO: 228175 - DNA, 15 bp, Homo sapiens
ctggctgcaaggtag

SEQ ID NO: 228176 - DNA, 15 bp, Homo sapiens
cctggctgcaaggta

SEQ ID NO: 228177 - DNA, 15 bp, Homo sapiens
gcctggctgcaaggt

SEQ ID NO: 228178 - DNA, 15 bp, Homo sapiens
cgcctggctgcaagg

SEQ ID NO: 228179 - DNA, 15 bp, Homo sapiens
acgcctggctgcaag

SEQ ID NO: 228180 - DNA, 15 bp, Homo sapiens
cacgcctggctgcaa

SEQ ID NO: 228181 - DNA, 15 bp, Homo sapiens
ccacgcctggctgca

SEQ ID NO: 228182 - DNA, 15 bp, Homo sapiens
accacgcctggctgc

SEQ ID NO: 228183 - DNA, 15 bp, Homo sapiens
caccacgcctggctg

SEQ ID NO: 228184 - DNA, 15 bp, Homo sapiens
gcccgcctcagcctc

SEQ ID NO: 228185 - DNA, 15 bp, Homo sapiens
tgcccgcctcagcct

SEQ ID NO: 228186 - DNA, 15 bp, Homo sapiens
ctgcccgcctcagcc

SEQ ID NO: 228187 - DNA, 15 bp, Homo sapiens
tctgcccgcctcagc

SEQ ID NO: 228188 - DNA, 15 bp, Homo sapiens
atctgcccgcctcag

SEQ ID NO: 228189 - DNA, 15 bp, Homo sapiens
gatctgcccgcctca

SEQ ID NO: 228190 - DNA, 15 bp, Homo sapiens
tgatctgcccgcctc

SEQ ID NO: 228191 - DNA, 15 bp, Homo sapiens
gtgatctgcccgcct

SEQ ID NO: 228192 - DNA, 15 bp, Homo sapiens
agtgatctgcccgcc

SEQ ID NO: 228193 - DNA, 15 bp, Homo sapiens
aagtgatctgcccgc

SEQ ID NO: 228194 - DNA, 15 bp, Homo sapiens
caagtgatctgcccg

SEQ ID NO: 228195 - DNA, 15 bp, Homo sapiens
acctcaagtgatctg

SEQ ID NO: 228196 - DNA, 15 bp, Homo sapiens
gacctcaagtgatct

SEQ ID NO: 228197 - DNA, 15 bp, Homo sapiens
ctgacctcaagtgat

SEQ ID NO: 228198 - DNA, 15 bp, Homo sapiens
cctgacctcaagtga

SEQ ID NO: 228199 - DNA, 15 bp, Homo sapiens
tcctgacctcaagtg

SEQ ID NO: 228200 - DNA, 15 bp, Homo sapiens
ctcctgacctcaagt

SEQ ID NO: 228201 - DNA, 15 bp, Homo sapiens
actcctgacctcaag

SEQ ID NO: 228202 - DNA, 15 bp, Homo sapiens
aactcctgacctcaa

SEQ ID NO: 228203 - DNA, 15 bp, Homo sapiens
ggaactcctgacctc

SEQ ID NO: 228204 - DNA, 15 bp, Homo sapiens
tggaactcctgacct

SEQ ID NO: 228205 - DNA, 15 bp, Homo sapiens
ctggaactcctgacc

SEQ ID NO: 228206 - DNA, 15 bp, Homo sapiens
tctggaactcctgac

SEQ ID NO: 228207 - DNA, 15 bp, Homo sapiens
gtctggaactcctga

SEQ ID NO: 228208 - DNA, 15 bp, Homo sapiens
ggtctggaactcctg

SEQ ID NO: 228209 - DNA, 15 bp, Homo sapiens
tggtctggaactcct

SEQ ID NO: 228210 - DNA, 15 bp, Homo sapiens
ctggtctggaactcc

SEQ ID NO: 228211 - DNA, 15 bp, Homo sapiens
gctggtctggaactc

SEQ ID NO: 228212 - DNA, 15 bp, Homo sapiens
ggctggtctggaact

SEQ ID NO: 228213 - DNA, 15 bp, Homo sapiens
aggctggtctggaac

SEQ ID NO: 228214 - DNA, 15 bp, Homo sapiens
taggctggtctggaa

SEQ ID NO: 228215 - DNA, 15 bp, Homo sapiens
ataggctggtctgga

SEQ ID NO: 228216 - DNA, 15 bp, Homo sapiens
gataggctggtctgg

SEQ ID NO: 228217 - DNA, 15 bp, Homo sapiens
ggataggctggtctg

SEQ ID NO: 228218 - DNA, 15 bp, Homo sapiens
tggataggctggtct

SEQ ID NO: 228219 - DNA, 15 bp, Homo sapiens
ttggataggctggtc

SEQ ID NO: 228220 - DNA, 15 bp, Homo sapiens
gttggataggctggt

SEQ ID NO: 228221 - DNA, 15 bp, Homo sapiens
tgttggataggctgg

SEQ ID NO: 228222 - DNA, 15 bp, Homo sapiens
atgttggataggctg

SEQ ID NO: 228223 - DNA, 15 bp, Homo sapiens
catgttggataggct

SEQ ID NO: 228224 - DNA, 15 bp, Homo sapiens
acatgttggataggc

SEQ ID NO: 228225 - DNA, 15 bp, Homo sapiens
aacatgttggatagg

SEQ ID NO: 228226 - DNA, 15 bp, Homo sapiens
caacatgttggatag

SEQ ID NO: 228227 - DNA, 15 bp, Homo sapiens
tcaacatgttggata

SEQ ID NO: 228228 - DNA, 15 bp, Homo sapiens
ttcaacatgttggat

SEQ ID NO: 228229 - DNA, 15 bp, Homo sapiens
tttcaacatgttgga

SEQ ID NO: 228230 - DNA, 15 bp, Homo sapiens
gtttcaacatgttgg

SEQ ID NO: 228231 - DNA, 15 bp, Homo sapiens
ggtttcaacatgttg

SEQ ID NO: 228232 - DNA, 15 bp, Homo sapiens
gggtttcaacatgtt

SEQ ID NO: 228233 - DNA, 15 bp, Homo sapiens
ggggtttcaacatgt

SEQ ID NO: 228234 - DNA, 15 bp, Homo sapiens
tggggtttcaacatg

SEQ ID NO: 228235 - DNA, 15 bp, Homo sapiens
atggggtttcaacat

SEQ ID NO: 228236 - DNA, 15 bp, Homo sapiens
gatggggtttcaaca

SEQ ID NO: 228237 - DNA, 15 bp, Homo sapiens
agatggggtttcaac

SEQ ID NO: 228238 - DNA, 15 bp, Homo sapiens
aagatggggtttcaa

SEQ ID NO: 228239 - DNA, 15 bp, Homo sapiens
taagatggggtttca

SEQ ID NO: 228240 - DNA, 15 bp, Homo sapiens
gtaagatggggtttc

SEQ ID NO: 228241 - DNA, 15 bp, Homo sapiens
agtaagatggggttt

SEQ ID NO: 228242 - DNA, 15 bp, Homo sapiens
tagtaagatggggtt

SEQ ID NO: 228243 - DNA, 15 bp, Homo sapiens
ctagtaagatggggt

SEQ ID NO: 228244 - DNA, 15 bp, Homo sapiens
cctagtaagatgggg

SEQ ID NO: 228245 - DNA, 15 bp, Homo sapiens
tcctagtaagatggg

SEQ ID NO: 228246 - DNA, 15 bp, Homo sapiens
ttcctagtaagatgg

SEQ ID NO: 228247 - DNA, 15 bp, Homo sapiens
tttcctagtaagatg

SEQ ID NO: 228248 - DNA, 15 bp, Homo sapiens
ttttcctagtaagat

SEQ ID NO: 228249 - DNA, 15 bp, Homo sapiens
tttttcctagtaaga

SEQ ID NO: 228250 - DNA, 15 bp, Homo sapiens
ttttttcctagtaag

SEQ ID NO: 228251 - DNA, 15 bp, Homo sapiens
tttttttcctagtaa

SEQ ID NO: 228252 - DNA, 15 bp, Homo sapiens
ttttttttcctagta

SEQ ID NO: 228253 - DNA, 15 bp, Homo sapiens
tttttttttcctagt

SEQ ID NO: 228254 - DNA, 15 bp, Homo sapiens
ttttttttttcctag

SEQ ID NO: 228255 - DNA, 15 bp, Homo sapiens
attttttttttccta

SEQ ID NO: 228256 - DNA, 15 bp, Homo sapiens
aattttttttttcct

SEQ ID NO: 228257 - DNA, 15 bp, Homo sapiens
taattttttttttcc

SEQ ID NO: 228258 - DNA, 15 bp, Homo sapiens
gtaattttttttttc

SEQ ID NO: 228259 - DNA, 15 bp, Homo sapiens
agtaatttttttttt

SEQ ID NO: 228260 - DNA, 15 bp, Homo sapiens
cagtaattttttttt

SEQ ID NO: 228261 - DNA, 15 bp, Homo sapiens
ccagtaatttttttt

SEQ ID NO: 228262 - DNA, 15 bp, Homo sapiens
tccagtaattttttt

SEQ ID NO: 228263 - DNA, 15 bp, Homo sapiens
ctccagtaatttttt

SEQ ID NO: 228264 - DNA, 15 bp, Homo sapiens
gctccagtaattttt

SEQ ID NO: 228265 - DNA, 15 bp, Homo sapiens
tgctccagtaatttt

SEQ ID NO: 228266 - DNA, 15 bp, Homo sapiens
atgctccagtaattt

SEQ ID NO: 228267 - DNA, 15 bp, Homo sapiens
catgctccagtaatt

SEQ ID NO: 228268 - DNA, 15 bp, Homo sapiens
ccatgctccagtaat

SEQ ID NO: 228269 - DNA, 15 bp, Homo sapiens
accatgctccagtaa

SEQ ID NO: 228270 - DNA, 15 bp, Homo sapiens
caccatgctccagta

SEQ ID NO: 228271 - DNA, 15 bp, Homo sapiens
ccaccatgctccagt

SEQ ID NO: 228272 - DNA, 15 bp, Homo sapiens
accaccatgctccag

SEQ ID NO: 228273 - DNA, 15 bp, Homo sapiens
caccaccatgctcca

SEQ ID NO: 228274 - DNA, 15 bp, Homo sapiens
ccaccaccatgctcc

SEQ ID NO: 228275 - DNA, 15 bp, Homo sapiens
cccaccaccatgctc

SEQ ID NO: 228276 - DNA, 15 bp, Homo sapiens
acccaccaccatgct

SEQ ID NO: 228277 - DNA, 15 bp, Homo sapiens
ttacaggcacccacc

SEQ ID NO: 228278 - DNA, 15 bp, Homo sapiens
attacaggcacccac

SEQ ID NO: 228279 - DNA, 15 bp, Homo sapiens
gattacaggcaccca

SEQ ID NO: 228280 - DNA, 15 bp, Homo sapiens
ggattacaggcaccc

SEQ ID NO: 228281 - DNA, 15 bp, Homo sapiens
gggattacaggcacc

SEQ ID NO: 228282 - DNA, 15 bp, Homo sapiens
tgggattacaggcac

SEQ ID NO: 228283 - DNA, 15 bp, Homo sapiens
ggtagctgggattac

SEQ ID NO: 228284 - DNA, 15 bp, Homo sapiens
aggtagctgggatta

SEQ ID NO: 228285 - DNA, 15 bp, Homo sapiens
caggtagctgggatt

SEQ ID NO: 228286 - DNA, 15 bp, Homo sapiens
ccaggtagctgggat

SEQ ID NO: 228287 - DNA, 15 bp, Homo sapiens
cccaggtagctggga

SEQ ID NO: 228288 - DNA, 15 bp, Homo sapiens
tcccaggtagctggg

SEQ ID NO: 228289 - DNA, 15 bp, Homo sapiens
ctcccaggtagctgg

SEQ ID NO: 228290 - DNA, 15 bp, Homo sapiens
cctcccaggtagctg

SEQ ID NO: 228291 - DNA, 15 bp, Homo sapiens
gcctcccaggtagct

SEQ ID NO: 228292 - DNA, 15 bp, Homo sapiens
agcctcccaggtagc

SEQ ID NO: 228293 - DNA, 15 bp, Homo sapiens
cagcctcccaggtag

SEQ ID NO: 228294 - DNA, 15 bp, Homo sapiens
tcagcctcccaggta

SEQ ID NO: 228295 - DNA, 15 bp, Homo sapiens
ctcagcctcccaggt

SEQ ID NO: 228296 - DNA, 15 bp, Homo sapiens
cctcagcctcccagg

SEQ ID NO: 228297 - DNA, 15 bp, Homo sapiens
tcctcagcctcccag

SEQ ID NO: 228298 - DNA, 15 bp, Homo sapiens
cctcctcagcctccc

SEQ ID NO: 228299 - DNA, 15 bp, Homo sapiens
tcctcctcagcctcc

SEQ ID NO: 228300 - DNA, 15 bp, Homo sapiens
ctcctcctcagcctc

SEQ ID NO: 228301 - DNA, 15 bp, Homo sapiens
tctcctcctcagcct

SEQ ID NO: 228302 - DNA, 15 bp, Homo sapiens
ttctcctcctcagcc

SEQ ID NO: 228303 - DNA, 15 bp, Homo sapiens
attctcctcctcagc

SEQ ID NO: 228304 - DNA, 15 bp, Homo sapiens
gattctcctcctcag

SEQ ID NO: 228305 - DNA, 15 bp, Homo sapiens
cgattctcctcctca

SEQ ID NO: 228306 - DNA, 15 bp, Homo sapiens
acgattctcctcctc

SEQ ID NO: 228307 - DNA, 15 bp, Homo sapiens
aacgattctcctcct

SEQ ID NO: 228308 - DNA, 15 bp, Homo sapiens
aaacgattctcctcc

SEQ ID NO: 228309 - DNA, 15 bp, Homo sapiens
caaacgattctcctc

SEQ ID NO: 228310 - DNA, 15 bp, Homo sapiens
tcaaacgattctcct

SEQ ID NO: 228311 - DNA, 15 bp, Homo sapiens
ttcaaacgattctcc

SEQ ID NO: 228312 - DNA, 15 bp, Homo sapiens
gttcaaacgattctc

SEQ ID NO: 228313 - DNA, 15 bp, Homo sapiens
ggttcaaacgattct

SEQ ID NO: 228314 - DNA, 15 bp, Homo sapiens
aggttcaaacgattc

SEQ ID NO: 228315 - DNA, 15 bp, Homo sapiens
caggttcaaacgatt

SEQ ID NO: 228316 - DNA, 15 bp, Homo sapiens
ccaggttcaaacgat

SEQ ID NO: 228317 - DNA, 15 bp, Homo sapiens
cccaggttcaaacga

SEQ ID NO: 228318 - DNA, 15 bp, Homo sapiens
tcccaggttcaaacg

SEQ ID NO: 228319 - DNA, 15 bp, Homo sapiens
ctcccaggttcaaac

SEQ ID NO: 228320 - DNA, 15 bp, Homo sapiens
cctcccaggttcaaa

SEQ ID NO: 228321 - DNA, 15 bp, Homo sapiens
gcctccgcctcccag

SEQ ID NO: 228322 - DNA, 15 bp, Homo sapiens
agcctccgcctccca

SEQ ID NO: 228323 - DNA, 15 bp, Homo sapiens
cagcctccgcctccc

SEQ ID NO: 228324 - DNA, 15 bp, Homo sapiens
gcagcctccgcctcc

SEQ ID NO: 228325 - DNA, 15 bp, Homo sapiens
tgcagcctccgcctc

SEQ ID NO: 228326 - DNA, 15 bp, Homo sapiens
ctgcagcctccgcct

SEQ ID NO: 228327 - DNA, 15 bp, Homo sapiens
actgcagcctccgcc

SEQ ID NO: 228328 - DNA, 15 bp, Homo sapiens
cactgcagcctccgc

SEQ ID NO: 228329 - DNA, 15 bp, Homo sapiens
tcactgcagcctccg

SEQ ID NO: 228330 - DNA, 15 bp, Homo sapiens
ctcactgcagcctcc

SEQ ID NO: 228331 - DNA, 15 bp, Homo sapiens
gctcactgcagcctc

SEQ ID NO: 228332 - DNA, 15 bp, Homo sapiens
agctcactgcagcct

SEQ ID NO: 228333 - DNA, 15 bp, Homo sapiens
cagctcactgcagcc

SEQ ID NO: 228334 - DNA, 15 bp, Homo sapiens
tcagctcactgcagc

SEQ ID NO: 228335 - DNA, 15 bp, Homo sapiens
ctcagctcactgcag

SEQ ID NO: 228336 - DNA, 15 bp, Homo sapiens
gcaatctcagctcac

SEQ ID NO: 228337 - DNA, 15 bp, Homo sapiens
tgcaatctcagctca

SEQ ID NO: 228338 - DNA, 15 bp, Homo sapiens
atgcaatctcagctc

SEQ ID NO: 228339 - DNA, 15 bp, Homo sapiens
gatgcaatctcagct

SEQ ID NO: 228340 - DNA, 15 bp, Homo sapiens
tgatgcaatctcagc

SEQ ID NO: 228341 - DNA, 15 bp, Homo sapiens
gtgatgcaatctcag

SEQ ID NO: 228342 - DNA, 15 bp, Homo sapiens
agtgatgcaatctca

SEQ ID NO: 228343 - DNA, 15 bp, Homo sapiens
atggagtgcagtgat

SEQ ID NO: 228344 - DNA, 15 bp, Homo sapiens
gatggagtgcagtga

SEQ ID NO: 228345 - DNA, 15 bp, Homo sapiens
ggatggagtgcagtg

SEQ ID NO: 228346 - DNA, 15 bp, Homo sapiens
aggatggagtgcagt

SEQ ID NO: 228347 - DNA, 15 bp, Homo sapiens
caggatggagtgcag

SEQ ID NO: 228348 - DNA, 15 bp, Homo sapiens
ccaggatggagtgca

SEQ ID NO: 228349 - DNA, 15 bp, Homo sapiens
cccaggatggagtgc

SEQ ID NO: 228350 - DNA, 15 bp, Homo sapiens
gcccaggatggagtg

SEQ ID NO: 228351 - DNA, 15 bp, Homo sapiens
cgcccaggatggagt

SEQ ID NO: 228352 - DNA, 15 bp, Homo sapiens
tcgcccaggatggag

SEQ ID NO: 228353 - DNA, 15 bp, Homo sapiens
gtcgcccaggatgga

SEQ ID NO: 228354 - DNA, 15 bp, Homo sapiens
tgtcgcccaggatgg

SEQ ID NO: 228355 - DNA, 15 bp, Homo sapiens
ctgtcgcccaggatg

SEQ ID NO: 228356 - DNA, 15 bp, Homo sapiens
tctgtcgcccaggat

SEQ ID NO: 228357 - DNA, 15 bp, Homo sapiens
ctctgtcgcccagga

SEQ ID NO: 228358 - DNA, 15 bp, Homo sapiens
cttttgagacagagt

SEQ ID NO: 228359 - DNA, 15 bp, Homo sapiens
tcttttgagacagag

SEQ ID NO: 228360 - DNA, 15 bp, Homo sapiens
ttcttttgagacaga

SEQ ID NO: 228361 - DNA, 15 bp, Homo sapiens
tttcttttgagacag

SEQ ID NO: 228362 - DNA, 15 bp, Homo sapiens
ttttcttttgagaca

SEQ ID NO: 228363 - DNA, 15 bp, Homo sapiens
tttttcttttgagac

SEQ ID NO: 228364 - DNA, 15 bp, Homo sapiens
ctttttcttttgaga

SEQ ID NO: 228365 - DNA, 15 bp, Homo sapiens
tctttttcttttgag

SEQ ID NO: 228366 - DNA, 15 bp, Homo sapiens
ttctttttcttttga

SEQ ID NO: 228367 - DNA, 15 bp, Homo sapiens
tttctttttcttttg

SEQ ID NO: 228368 - DNA, 15 bp, Homo sapiens
ttttctttttctttt

SEQ ID NO: 228369 - DNA, 15 bp, Homo sapiens
tttttctttttcttt

SEQ ID NO: 228370 - DNA, 15 bp, Homo sapiens
ttttttctttttctt

SEQ ID NO: 228371 - DNA, 15 bp, Homo sapiens
cttttttctttttct

SEQ ID NO: 228372 - DNA, 15 bp, Homo sapiens
tcttttttctttttc

SEQ ID NO: 228373 - DNA, 15 bp, Homo sapiens
ttcttttttcttttt

SEQ ID NO: 228374 - DNA, 15 bp, Homo sapiens
tttcttttttctttt

SEQ ID NO: 228375 - DNA, 15 bp, Homo sapiens
ttttcttttttcttt

SEQ ID NO: 228376 - DNA, 15 bp, Homo sapiens
tttttcttttttctt

SEQ ID NO: 228377 - DNA, 15 bp, Homo sapiens
ttttttcttttttct

SEQ ID NO: 228378 - DNA, 15 bp, Homo sapiens
tttttttcttttttc

SEQ ID NO: 228379 - DNA, 15 bp, Homo sapiens
ctttttttctttttt

SEQ ID NO: 228380 - DNA, 15 bp, Homo sapiens
ttctttttttctttt

SEQ ID NO: 228381 - DNA, 15 bp, Homo sapiens
tttctttttttcttt

SEQ ID NO: 228382 - DNA, 15 bp, Homo sapiens
ttttctttttttctt

SEQ ID NO: 228383 - DNA, 15 bp, Homo sapiens
tttttctttttttct

SEQ ID NO: 228384 - DNA, 15 bp, Homo sapiens
ttttttctttttttc

SEQ ID NO: 228385 - DNA, 15 bp, Homo sapiens
gttttttcttttttt

SEQ ID NO: 228386 - DNA, 15 bp, Homo sapiens
tgttttttctttttt

SEQ ID NO: 228387 - DNA, 15 bp, Homo sapiens
atgttttttcttttt

SEQ ID NO: 228388 - DNA, 15 bp, Homo sapiens
aatgttttttctttt

SEQ ID NO: 228389 - DNA, 15 bp, Homo sapiens
gaatgttttttcttt

SEQ ID NO: 228390 - DNA, 15 bp, Homo sapiens
ggaatgttttttctt

SEQ ID NO: 228391 - DNA, 15 bp, Homo sapiens
aggaatgttttttct

SEQ ID NO: 228392 - DNA, 15 bp, Homo sapiens
taggaatgttttttc

SEQ ID NO: 228393 - DNA, 15 bp, Homo sapiens
ataggaatgtttttt

SEQ ID NO: 228394 - DNA, 15 bp, Homo sapiens
gataggaatgttttt

SEQ ID NO: 228395 - DNA, 15 bp, Homo sapiens
agataggaatgtttt

SEQ ID NO: 228396 - DNA, 15 bp, Homo sapiens
aagataggaatgttt

SEQ ID NO: 228397 - DNA, 15 bp, Homo sapiens
caagataggaatgtt

SEQ ID NO: 228398 - DNA, 15 bp, Homo sapiens
gcaagataggaatgt

SEQ ID NO: 228399 - DNA, 15 bp, Homo sapiens
tgcaagataggaatg

SEQ ID NO: 228400 - DNA, 15 bp, Homo sapiens
ctgcaagataggaat

SEQ ID NO: 228401 - DNA, 15 bp, Homo sapiens
cctgcaagataggaa

SEQ ID NO: 228402 - DNA, 15 bp, Homo sapiens
gcctgcaagatagga

SEQ ID NO: 228403 - DNA, 15 bp, Homo sapiens
agcctgcaagatagg

SEQ ID NO: 228404 - DNA, 15 bp, Homo sapiens
aagcctgcaagatag

SEQ ID NO: 228405 - DNA, 15 bp, Homo sapiens
gaagcctgcaagata

SEQ ID NO: 228406 - DNA, 15 bp, Homo sapiens
agaagcctgcaagat

SEQ ID NO: 228407 - DNA, 15 bp, Homo sapiens
aagaagcctgcaaga

SEQ ID NO: 228408 - DNA, 15 bp, Homo sapiens
caagaagcctgcaag

SEQ ID NO: 228409 - DNA, 15 bp, Homo sapiens
acaagaagcctgcaa

SEQ ID NO: 228410 - DNA, 15 bp, Homo sapiens
cacaagaagcctgca

SEQ ID NO: 228411 - DNA, 15 bp, Homo sapiens
tcacaagaagcctgc

SEQ ID NO: 228412 - DNA, 15 bp, Homo sapiens
ttcacaagaagcctg

SEQ ID NO: 228413 - DNA, 15 bp, Homo sapiens
cttcacaagaagcct

SEQ ID NO: 228414 - DNA, 15 bp, Homo sapiens
tcttcacaagaagcc

SEQ ID NO: 228415 - DNA, 15 bp, Homo sapiens
atcttcacaagaagc

SEQ ID NO: 228416 - DNA, 15 bp, Homo sapiens
aatcttcacaagaag

SEQ ID NO: 228417 - DNA, 15 bp, Homo sapiens
taatcttcacaagaa

SEQ ID NO: 228418 - DNA, 15 bp, Homo sapiens
ttaatcttcacaaga

SEQ ID NO: 228419 - DNA, 15 bp, Homo sapiens
cttaatcttcacaag

SEQ ID NO: 228420 - DNA, 15 bp, Homo sapiens
acttaatcttcacaa

SEQ ID NO: 228421 - DNA, 15 bp, Homo sapiens
aacttaatcttcaca

SEQ ID NO: 228422 - DNA, 15 bp, Homo sapiens
caacttaatcttcac

SEQ ID NO: 228423 - DNA, 15 bp, Homo sapiens
ccaacttaatcttca

SEQ ID NO: 228424 - DNA, 15 bp, Homo sapiens
accaacttaatcttc

SEQ ID NO: 228425 - DNA, 15 bp, Homo sapiens
caccaacttaatctt

SEQ ID NO: 228426 - DNA, 15 bp, Homo sapiens
acaccaacttaatct

SEQ ID NO: 228427 - DNA, 15 bp, Homo sapiens
tacaccaacttaatc

SEQ ID NO: 228428 - DNA, 15 bp, Homo sapiens
ttacaccaacttaat

SEQ ID NO: 228429 - DNA, 15 bp, Homo sapiens
tttacaccaacttaa

SEQ ID NO: 228430 - DNA, 15 bp, Homo sapiens
ttttacaccaactta

SEQ ID NO: 228431 - DNA, 15 bp, Homo sapiens
attttacaccaactt

SEQ ID NO: 228432 - DNA, 15 bp, Homo sapiens
gattttacaccaact

SEQ ID NO: 228433 - DNA, 15 bp, Homo sapiens
tgattttacaccaac

SEQ ID NO: 228434 - DNA, 15 bp, Homo sapiens
ggtgattttacacca

SEQ ID NO: 228435 - DNA, 15 bp, Homo sapiens
tggtgattttacacc

SEQ ID NO: 228436 - DNA, 15 bp, Homo sapiens
ttggtgattttacac

SEQ ID NO: 228437 - DNA, 15 bp, Homo sapiens
cttggtgattttaca

SEQ ID NO: 228438 - DNA, 15 bp, Homo sapiens
ccttggtgattttac

SEQ ID NO: 228439 - DNA, 15 bp, Homo sapiens
tccttggtgatttta

SEQ ID NO: 228440 - DNA, 15 bp, Homo sapiens
gtccttggtgatttt

SEQ ID NO: 228441 - DNA, 15 bp, Homo sapiens
tgtccttggtgattt

SEQ ID NO: 228442 - DNA, 15 bp, Homo sapiens
ctgtccttggtgatt

SEQ ID NO: 228443 - DNA, 15 bp, Homo sapiens
tctgtccttggtgat

SEQ ID NO: 228444 - DNA, 15 bp, Homo sapiens
ttctgtccttggtga

SEQ ID NO: 228445 - DNA, 15 bp, Homo sapiens
gttctgtccttggtg

SEQ ID NO: 228446 - DNA, 15 bp, Homo sapiens
tgttctgtccttggt

SEQ ID NO: 228447 - DNA, 15 bp, Homo sapiens
gtgttctgtccttgg

SEQ ID NO: 228448 - DNA, 15 bp, Homo sapiens
tgtgttctgtccttg

SEQ ID NO: 228449 - DNA, 15 bp, Homo sapiens
ctgtgttctgtcctt

SEQ ID NO: 228450 - DNA, 15 bp, Homo sapiens
actgtgttctgtcct

SEQ ID NO: 228451 - DNA, 15 bp, Homo sapiens
tactgtgttctgtcc

SEQ ID NO: 228452 - DNA, 15 bp, Homo sapiens
ctactgtgttctgtc

SEQ ID NO: 228453 - DNA, 15 bp, Homo sapiens
tctactgtgttctgt

SEQ ID NO: 228454 - DNA, 15 bp, Homo sapiens
atctactgtgttctg

SEQ ID NO: 228455 - DNA, 15 bp, Homo sapiens
catctactgtgttct

SEQ ID NO: 228456 - DNA, 15 bp, Homo sapiens
acatctactgtgttc

SEQ ID NO: 228457 - DNA, 15 bp, Homo sapiens
tacatctactgtgtt

SEQ ID NO: 228458 - DNA, 15 bp, Homo sapiens
ttacatctactgtgt

SEQ ID NO: 228459 - DNA, 15 bp, Homo sapiens
cttacatctactgtg

SEQ ID NO: 228460 - DNA, 15 bp, Homo sapiens
tcttacatctactgt

SEQ ID NO: 228461 - DNA, 15 bp, Homo sapiens
ctcttacatctactg

SEQ ID NO: 228462 - DNA, 15 bp, Homo sapiens
cctcttacatctact

SEQ ID NO: 228463 - DNA, 15 bp, Homo sapiens
ccctcttacatctac

SEQ ID NO: 228464 - DNA, 15 bp, Homo sapiens
cccctcttacatcta

SEQ ID NO: 228465 - DNA, 15 bp, Homo sapiens
tcccctcttacatct

SEQ ID NO: 228466 - DNA, 15 bp, Homo sapiens
atcccctcttacatc

SEQ ID NO: 228467 - DNA, 15 bp, Homo sapiens
gatcccctcttacat

SEQ ID NO: 228468 - DNA, 15 bp, Homo sapiens
tgatcccctcttaca

SEQ ID NO: 228469 - DNA, 15 bp, Homo sapiens
ctgatcccctcttac

SEQ ID NO: 228470 - DNA, 15 bp, Homo sapiens
actgatcccctctta

SEQ ID NO: 228471 - DNA, 15 bp, Homo sapiens
cactgatcccctctt

SEQ ID NO: 228472 - DNA, 15 bp, Homo sapiens
tcactgatcccctct

SEQ ID NO: 228473 - DNA, 15 bp, Homo sapiens
atcactgatcccctc

SEQ ID NO: 228474 - DNA, 15 bp, Homo sapiens
gatcactgatcccct

SEQ ID NO: 228475 - DNA, 15 bp, Homo sapiens
agatcactgatcccc

SEQ ID NO: 228476 - DNA, 15 bp, Homo sapiens
gagatcactgatccc

SEQ ID NO: 228477 - DNA, 15 bp, Homo sapiens
ggagatcactgatcc

SEQ ID NO: 228478 - DNA, 15 bp, Homo sapiens
aggagatcactgatc

SEQ ID NO: 228479 - DNA, 15 bp, Homo sapiens
caggagatcactgat

SEQ ID NO: 228480 - DNA, 15 bp, Homo sapiens
tcaggagatcactga

SEQ ID NO: 228481 - DNA, 15 bp, Homo sapiens
ctcaggagatcactg

SEQ ID NO: 228482 - DNA, 15 bp, Homo sapiens
gctcaggagatcact

SEQ ID NO: 228483 - DNA, 15 bp, Homo sapiens
tgctcaggagatcac

SEQ ID NO: 228484 - DNA, 15 bp, Homo sapiens
gtgctcaggagatca

SEQ ID NO: 228485 - DNA, 15 bp, Homo sapiens
ggtgctcaggagatc

SEQ ID NO: 228486 - DNA, 15 bp, Homo sapiens
tggtgctcaggagat

SEQ ID NO: 228487 - DNA, 15 bp, Homo sapiens
ctggtgctcaggaga

SEQ ID NO: 228488 - DNA, 15 bp, Homo sapiens
actggtgctcaggag

SEQ ID NO: 228489 - DNA, 15 bp, Homo sapiens
aactggtgctcagga

SEQ ID NO: 228490 - DNA, 15 bp, Homo sapiens
caactggtgctcagg

SEQ ID NO: 228491 - DNA, 15 bp, Homo sapiens
tcaactggtgctcag

SEQ ID NO: 228492 - DNA, 15 bp, Homo sapiens
gtcaactggtgctca

SEQ ID NO: 228493 - DNA, 15 bp, Homo sapiens
ggtcaactggtgctc

SEQ ID NO: 228494 - DNA, 15 bp, Homo sapiens
gggtcaactggtgct

SEQ ID NO: 228495 - DNA, 15 bp, Homo sapiens
ggggtcaactggtgc

SEQ ID NO: 228496 - DNA, 15 bp, Homo sapiens
gggggtcaactggtg

SEQ ID NO: 228497 - DNA, 15 bp, Homo sapiens
agggggtcaactggt

SEQ ID NO: 228498 - DNA, 15 bp, Homo sapiens
aagggggtcaactgg

SEQ ID NO: 228499 - DNA, 15 bp, Homo sapiens
caagggggtcaactg

SEQ ID NO: 228500 - DNA, 15 bp, Homo sapiens
ccaagggggtcaact

SEQ ID NO: 228501 - DNA, 15 bp, Homo sapiens
accaagggggtcaac

SEQ ID NO: 228502 - DNA, 15 bp, Homo sapiens
gaccaagggggtcaa

SEQ ID NO: 228503 - DNA, 15 bp, Homo sapiens
ggaccaagggggtca

SEQ ID NO: 228504 - DNA, 15 bp, Homo sapiens
aggaccaagggggtc

SEQ ID NO: 228505 - DNA, 15 bp, Homo sapiens
gaggaccaagggggt

SEQ ID NO: 228506 - DNA, 15 bp, Homo sapiens
tgaggaccaaggggg

SEQ ID NO: 228507 - DNA, 15 bp, Homo sapiens
ctgaggaccaagggg

SEQ ID NO: 228508 - DNA, 15 bp, Homo sapiens
cctgaggaccaaggg

SEQ ID NO: 228509 - DNA, 15 bp, Homo sapiens
ttccctgaggaccaa

SEQ ID NO: 228510 - DNA, 15 bp, Homo sapiens
attccctgaggacca

SEQ ID NO: 228511 - DNA, 15 bp, Homo sapiens
cattccctgaggacc

SEQ ID NO: 228512 - DNA, 15 bp, Homo sapiens
ccattccctgaggac

SEQ ID NO: 228513 - DNA, 15 bp, Homo sapiens
cccattccctgagga

SEQ ID NO: 228514 - DNA, 15 bp, Homo sapiens
tcccattccctgagg

SEQ ID NO: 228515 - DNA, 15 bp, Homo sapiens
ctcccattccctgag

SEQ ID NO: 228516 - DNA, 15 bp, Homo sapiens
tctcccattccctga

SEQ ID NO: 228517 - DNA, 15 bp, Homo sapiens
ctctcccattccctg

SEQ ID NO: 228518 - DNA, 15 bp, Homo sapiens
gctctcccattccct

SEQ ID NO: 228519 - DNA, 15 bp, Homo sapiens
tgctctcccattccc

SEQ ID NO: 228520 - DNA, 15 bp, Homo sapiens
ctgctctcccattcc

SEQ ID NO: 228521 - DNA, 15 bp, Homo sapiens
gctgctctcccattc

SEQ ID NO: 228522 - DNA, 15 bp, Homo sapiens
agctgctctcccatt

SEQ ID NO: 228523 - DNA, 15 bp, Homo sapiens
aagctgctctcccat

SEQ ID NO: 228524 - DNA, 15 bp, Homo sapiens
aaagctgctctccca

SEQ ID NO: 228525 - DNA, 15 bp, Homo sapiens
caaagctgctctccc

SEQ ID NO: 228526 - DNA, 15 bp, Homo sapiens
tcaaagctgctctcc

SEQ ID NO: 228527 - DNA, 15 bp, Homo sapiens
ttcaaagctgctctc

SEQ ID NO: 228528 - DNA, 15 bp, Homo sapiens
gttcaaagctgctct

SEQ ID NO: 228529 - DNA, 15 bp, Homo sapiens
ggttcaaagctgctc

SEQ ID NO: 228530 - DNA, 15 bp, Homo sapiens
aggttcaaagctgct

SEQ ID NO: 228531 - DNA, 15 bp, Homo sapiens
caggttcaaagctgc

SEQ ID NO: 228532 - DNA, 15 bp, Homo sapiens
ccaggttcaaagctg

SEQ ID NO: 228533 - DNA, 15 bp, Homo sapiens
gccaggttcaaagct

SEQ ID NO: 228534 - DNA, 15 bp, Homo sapiens
agccaggttcaaagc

SEQ ID NO: 228535 - DNA, 15 bp, Homo sapiens
gagccaggttcaaag

SEQ ID NO: 228536 - DNA, 15 bp, Homo sapiens
agagccaggttcaaa

SEQ ID NO: 228537 - DNA, 15 bp, Homo sapiens
cagagccaggttcaa

SEQ ID NO: 228538 - DNA, 15 bp, Homo sapiens
tcagagccaggttca

SEQ ID NO: 228539 - DNA, 15 bp, Homo sapiens
ctcagagccaggttc

SEQ ID NO: 228540 - DNA, 15 bp, Homo sapiens
tctcagagccaggtt

SEQ ID NO: 228541 - DNA, 15 bp, Homo sapiens
ttctcagagccaggt

SEQ ID NO: 228542 - DNA, 15 bp, Homo sapiens
cttctcagagccagg

SEQ ID NO: 228543 - DNA, 15 bp, Homo sapiens
tcttctcagagccag

SEQ ID NO: 228544 - DNA, 15 bp, Homo sapiens
ctcttctcagagcca

SEQ ID NO: 228545 - DNA, 15 bp, Homo sapiens
gctcttctcagagcc

SEQ ID NO: 228546 - DNA, 15 bp, Homo sapiens
agctcttctcagagc

SEQ ID NO: 228547 - DNA, 15 bp, Homo sapiens
cagctcttctcagag

SEQ ID NO: 228548 - DNA, 15 bp, Homo sapiens
tcagctcttctcaga

SEQ ID NO: 228549 - DNA, 15 bp, Homo sapiens
ttcagctcttctcag

SEQ ID NO: 228550 - DNA, 15 bp, Homo sapiens
tttcagctcttctca

SEQ ID NO: 228551 - DNA, 15 bp, Homo sapiens
ttttcagctcttctc

SEQ ID NO: 228552 - DNA, 15 bp, Homo sapiens
cttttcagctcttct

SEQ ID NO: 228553 - DNA, 15 bp, Homo sapiens
ccttttcagctcttc

SEQ ID NO: 228554 - DNA, 15 bp, Homo sapiens
tccttttcagctctt

SEQ ID NO: 228555 - DNA, 15 bp, Homo sapiens
ttccttttcagctct

SEQ ID NO: 228556 - DNA, 15 bp, Homo sapiens
attccttttcagctc

SEQ ID NO: 228557 - DNA, 15 bp, Homo sapiens
gattccttttcagct

SEQ ID NO: 228558 - DNA, 15 bp, Homo sapiens
agattccttttcagc

SEQ ID NO: 228559 - DNA, 15 bp, Homo sapiens
cagattccttttcag

SEQ ID NO: 228560 - DNA, 15 bp, Homo sapiens
acagattccttttca

SEQ ID NO: 228561 - DNA, 15 bp, Homo sapiens
gacagattccttttc

SEQ ID NO: 228562 - DNA, 15 bp, Homo sapiens
ggacagattcctttt

SEQ ID NO: 228563 - DNA, 15 bp, Homo sapiens
aggacagattccttt

SEQ ID NO: 228564 - DNA, 15 bp, Homo sapiens
caggacagattcctt

SEQ ID NO: 228565 - DNA, 15 bp, Homo sapiens
gcaggacagattcct

SEQ ID NO: 228566 - DNA, 15 bp, Homo sapiens
tgcaggacagattcc

SEQ ID NO: 228567 - DNA, 15 bp, Homo sapiens
ctgcaggacagattc

SEQ ID NO: 228568 - DNA, 15 bp, Homo sapiens
gctgcaggacagatt

SEQ ID NO: 228569 - DNA, 15 bp, Homo sapiens
tgctgcaggacagat

SEQ ID NO: 228570 - DNA, 15 bp, Homo sapiens
atgctgcaggacaga

SEQ ID NO: 228571 - DNA, 15 bp, Homo sapiens
aatgctgcaggacag

SEQ ID NO: 228572 - DNA, 15 bp, Homo sapiens
aaatgctgcaggaca

SEQ ID NO: 228573 - DNA, 15 bp, Homo sapiens
gaaatgctgcaggac

SEQ ID NO: 228574 - DNA, 15 bp, Homo sapiens
ggaaatgctgcagga

SEQ ID NO: 228575 - DNA, 15 bp, Homo sapiens
gggaaatgctgcagg

SEQ ID NO: 228576 - DNA, 15 bp, Homo sapiens
cgggaaatgctgcag

SEQ ID NO: 228577 - DNA, 15 bp, Homo sapiens
ccgggaaatgctgca

SEQ ID NO: 228578 - DNA, 15 bp, Homo sapiens
cccgggaaatgctgc

SEQ ID NO: 228579 - DNA, 15 bp, Homo sapiens
ccccgggaaatgctg

SEQ ID NO: 228580 - DNA, 15 bp, Homo sapiens
cccccgggaaatgct

SEQ ID NO: 228581 - DNA, 15 bp, Homo sapiens
tcccccgggaaatgc

SEQ ID NO: 228582 - DNA, 15 bp, Homo sapiens
ctcccccgggaaatg

SEQ ID NO: 228583 - DNA, 15 bp, Homo sapiens
cctcccccgggaaat

SEQ ID NO: 228584 - DNA, 15 bp, Homo sapiens
ccctcccccgggaaa

SEQ ID NO: 228585 - DNA, 15 bp, Homo sapiens
tccctcccccgggaa

SEQ ID NO: 228586 - DNA, 15 bp, Homo sapiens
ttccctcccccggga

SEQ ID NO: 228587 - DNA, 15 bp, Homo sapiens
tttccctcccccggg

SEQ ID NO: 228588 - DNA, 15 bp, Homo sapiens
atttccctcccccgg

SEQ ID NO: 228589 - DNA, 15 bp, Homo sapiens
catttccctcccccg

SEQ ID NO: 228590 - DNA, 15 bp, Homo sapiens
tcatttccctccccc

SEQ ID NO: 228591 - DNA, 15 bp, Homo sapiens
atcatttccctcccc

SEQ ID NO: 228592 - DNA, 15 bp, Homo sapiens
catcatttccctccc

SEQ ID NO: 228593 - DNA, 15 bp, Homo sapiens
gcatcatttccctcc

SEQ ID NO: 228594 - DNA, 15 bp, Homo sapiens
agcatcatttccctc

SEQ ID NO: 228595 - DNA, 15 bp, Homo sapiens
aagcatcatttccct

SEQ ID NO: 228596 - DNA, 15 bp, Homo sapiens
caagcatcatttccc

SEQ ID NO: 228597 - DNA, 15 bp, Homo sapiens
tcaagcatcatttcc

SEQ ID NO: 228598 - DNA, 15 bp, Homo sapiens
atcaagcatcatttc

SEQ ID NO: 228599 - DNA, 15 bp, Homo sapiens
aatcaagcatcattt

SEQ ID NO: 228600 - DNA, 15 bp, Homo sapiens
caatcaagcatcatt

SEQ ID NO: 228601 - DNA, 15 bp, Homo sapiens
tcaatcaagcatcat

SEQ ID NO: 228602 - DNA, 15 bp, Homo sapiens
gtcaatcaagcatca

SEQ ID NO: 228603 - DNA, 15 bp, Homo sapiens
agtcaatcaagcatc

SEQ ID NO: 228604 - DNA, 15 bp, Homo sapiens
aagtcaatcaagcat

SEQ ID NO: 228605 - DNA, 15 bp, Homo sapiens
caagtcaatcaagca

SEQ ID NO: 228606 - DNA, 15 bp, Homo sapiens
gcaagtcaatcaagc

SEQ ID NO: 228607 - DNA, 15 bp, Homo sapiens
ggcaagtcaatcaag

SEQ ID NO: 228608 - DNA, 15 bp, Homo sapiens
gggcaagtcaatcaa

SEQ ID NO: 228609 - DNA, 15 bp, Homo sapiens
tgggcaagtcaatca

SEQ ID NO: 228610 - DNA, 15 bp, Homo sapiens
ctgggcaagtcaatc

SEQ ID NO: 228611 - DNA, 15 bp, Homo sapiens
cctgggcaagtcaat

SEQ ID NO: 228612 - DNA, 15 bp, Homo sapiens
ccctgggcaagtcaa

SEQ ID NO: 228613 - DNA, 15 bp, Homo sapiens
accctgggcaagtca

SEQ ID NO: 228614 - DNA, 15 bp, Homo sapiens
aaccctgggcaagtc

SEQ ID NO: 228615 - DNA, 15 bp, Homo sapiens
taaccctgggcaagt

SEQ ID NO: 228616 - DNA, 15 bp, Homo sapiens
gtaaccctgggcaag

SEQ ID NO: 228617 - DNA, 15 bp, Homo sapiens
tgtaaccctgggcaa

SEQ ID NO: 228618 - DNA, 15 bp, Homo sapiens
ctgtaaccctgggca

SEQ ID NO: 228619 - DNA, 15 bp, Homo sapiens
tctgtaaccctgggc

SEQ ID NO: 228620 - DNA, 15 bp, Homo sapiens
ctctgtaaccctggg

SEQ ID NO: 228621 - DNA, 15 bp, Homo sapiens
gctctgtaaccctgg

SEQ ID NO: 228622 - DNA, 15 bp, Homo sapiens
agctctgtaaccctg

SEQ ID NO: 228623 - DNA, 15 bp, Homo sapiens
cagctctgtaaccct

SEQ ID NO: 228624 - DNA, 15 bp, Homo sapiens
tcagctctgtaaccc

SEQ ID NO: 228625 - DNA, 15 bp, Homo sapiens
ctcagctctgtaacc

SEQ ID NO: 228626 - DNA, 15 bp, Homo sapiens
tctcagctctgtaac

SEQ ID NO: 228627 - DNA, 15 bp, Homo sapiens
gtctcagctctgtaa

SEQ ID NO: 228628 - DNA, 15 bp, Homo sapiens
tgtctcagctctgta

SEQ ID NO: 228629 - DNA, 15 bp, Homo sapiens
ctgtctcagctctgt

SEQ ID NO: 228630 - DNA, 15 bp, Homo sapiens
actgtctcagctctg

SEQ ID NO: 228631 - DNA, 15 bp, Homo sapiens
cactgtctcagctct

SEQ ID NO: 228632 - DNA, 15 bp, Homo sapiens
gcactgtctcagctc

SEQ ID NO: 228633 - DNA, 15 bp, Homo sapiens
cgcactgtctcagct

SEQ ID NO: 228634 - DNA, 15 bp, Homo sapiens
acgcactgtctcagc

SEQ ID NO: 228635 - DNA, 15 bp, Homo sapiens
cacgcactgtctcag

SEQ ID NO: 228636 - DNA, 15 bp, Homo sapiens
gcacgcactgtctca

SEQ ID NO: 228637 - DNA, 15 bp, Homo sapiens
tgcacgcactgtctc

SEQ ID NO: 228638 - DNA, 15 bp, Homo sapiens
ttgcacgcactgtct

SEQ ID NO: 228639 - DNA, 15 bp, Homo sapiens
tttgcacgcactgtc

SEQ ID NO: 228640 - DNA, 15 bp, Homo sapiens
ctttgcacgcactgt

SEQ ID NO: 228641 - DNA, 15 bp, Homo sapiens
actttgcacgcactg

SEQ ID NO: 228642 - DNA, 15 bp, Homo sapiens
tactttgcacgcact

SEQ ID NO: 228643 - DNA, 15 bp, Homo sapiens
ttactttgcacgcac

SEQ ID NO: 228644 - DNA, 15 bp, Homo sapiens
cttactttgcacgca

SEQ ID NO: 228645 - DNA, 15 bp, Homo sapiens
ccttactttgcacgc

SEQ ID NO: 228646 - DNA, 15 bp, Homo sapiens
cccttactttgcacg

SEQ ID NO: 228647 - DNA, 15 bp, Homo sapiens
tcccttactttgcac

SEQ ID NO: 228648 - DNA, 15 bp, Homo sapiens
gtcccttactttgca

SEQ ID NO: 228649 - DNA, 15 bp, Homo sapiens
agtcccttactttgc

SEQ ID NO: 228650 - DNA, 15 bp, Homo sapiens
aagtcccttactttg

SEQ ID NO: 228651 - DNA, 15 bp, Homo sapiens
taagtcccttacttt

SEQ ID NO: 228652 - DNA, 15 bp, Homo sapiens
ttaagtcccttactt

SEQ ID NO: 228653 - DNA, 15 bp, Homo sapiens
gttaagtcccttact

SEQ ID NO: 228654 - DNA, 15 bp, Homo sapiens
tgttaagtcccttac

SEQ ID NO: 228655 - DNA, 15 bp, Homo sapiens
ttgttaagtccctta

SEQ ID NO: 228656 - DNA, 15 bp, Homo sapiens
attgttaagtccctt

SEQ ID NO: 228657 - DNA, 15 bp, Homo sapiens
gattgttaagtccct

SEQ ID NO: 228658 - DNA, 15 bp, Homo sapiens
ggattgttaagtccc

SEQ ID NO: 228659 - DNA, 15 bp, Homo sapiens
tggattgttaagtcc

SEQ ID NO: 228660 - DNA, 15 bp, Homo sapiens
ctggattgttaagtc

SEQ ID NO: 228661 - DNA, 15 bp, Homo sapiens
cctggattgttaagt

SEQ ID NO: 228662 - DNA, 15 bp, Homo sapiens
gcctggattgttaag

SEQ ID NO: 228663 - DNA, 15 bp, Homo sapiens
ggcctggattgttaa

SEQ ID NO: 228664 - DNA, 15 bp, Homo sapiens
aggcctggattgtta

SEQ ID NO: 228665 - DNA, 15 bp, Homo sapiens
gaggcctggattgtt

SEQ ID NO: 228666 - DNA, 15 bp, Homo sapiens
ggaggcctggattgt

SEQ ID NO: 228667 - DNA, 15 bp, Homo sapiens
cggaggcctggattg

SEQ ID NO: 228668 - DNA, 15 bp, Homo sapiens
ccggaggcctggatt

SEQ ID NO: 228669 - DNA, 15 bp, Homo sapiens
cccggaggcctggat

SEQ ID NO: 228670 - DNA, 15 bp, Homo sapiens
acccggaggcctgga

SEQ ID NO: 228671 - DNA, 15 bp, Homo sapiens
gacccggaggcctgg

SEQ ID NO: 228672 - DNA, 15 bp, Homo sapiens
tgacccggaggcctg

SEQ ID NO: 228673 - DNA, 15 bp, Homo sapiens
ctgacccggaggcct

SEQ ID NO: 228674 - DNA, 15 bp, Homo sapiens
tctgacccggaggcc

SEQ ID NO: 228675 - DNA, 15 bp, Homo sapiens
gtctgacccggaggc

SEQ ID NO: 228676 - DNA, 15 bp, Homo sapiens
tgtctgacccggagg

SEQ ID NO: 228677 - DNA, 15 bp, Homo sapiens
ctgtctgacccggag

SEQ ID NO: 228678 - DNA, 15 bp, Homo sapiens
actgtctgacccgga

SEQ ID NO: 228679 - DNA, 15 bp, Homo sapiens
aactgtctgacccgg

SEQ ID NO: 228680 - DNA, 15 bp, Homo sapiens
aaactgtctgacccg

SEQ ID NO: 228681 - DNA, 15 bp, Homo sapiens
taaactgtctgaccc

SEQ ID NO: 228682 - DNA, 15 bp, Homo sapiens
ctaaactgtctgacc

SEQ ID NO: 228683 - DNA, 15 bp, Homo sapiens
tctaaactgtctgac

SEQ ID NO: 228684 - DNA, 15 bp, Homo sapiens
ctctaaactgtctga

SEQ ID NO: 228685 - DNA, 15 bp, Homo sapiens
gctctaaactgtctg

SEQ ID NO: 228686 - DNA, 15 bp, Homo sapiens
agctctaaactgtct

SEQ ID NO: 228687 - DNA, 15 bp, Homo sapiens
cagctctaaactgtc

SEQ ID NO: 228688 - DNA, 15 bp, Homo sapiens
ccagctctaaactgt

SEQ ID NO: 228689 - DNA, 15 bp, Homo sapiens
tccagctctaaactg

SEQ ID NO: 228690 - DNA, 15 bp, Homo sapiens
gtccagctctaaact

SEQ ID NO: 228691 - DNA, 15 bp, Homo sapiens
tgtccagctctaaac

SEQ ID NO: 228692 - DNA, 15 bp, Homo sapiens
ctgtccagctctaaa

SEQ ID NO: 228693 - DNA, 15 bp, Homo sapiens
tctgtccagctctaa

SEQ ID NO: 228694 - DNA, 15 bp, Homo sapiens
gtctgtccagctcta

SEQ ID NO: 228695 - DNA, 15 bp, Homo sapiens
ggtctgtccagctct

SEQ ID NO: 228696 - DNA, 15 bp, Homo sapiens
aggtctgtccagctc

SEQ ID NO: 228697 - DNA, 15 bp, Homo sapiens
aaggtctgtccagct

SEQ ID NO: 228698 - DNA, 15 bp, Homo sapiens
caaggtctgtccagc

SEQ ID NO: 228699 - DNA, 15 bp, Homo sapiens
ccaaggtctgtccag

SEQ ID NO: 228700 - DNA, 15 bp, Homo sapiens
cccaaggtctgtcca

SEQ ID NO: 228701 - DNA, 15 bp, Homo sapiens
ccccaaggtctgtcc

SEQ ID NO: 228702 - DNA, 15 bp, Homo sapiens
tccccaaggtctgtc

SEQ ID NO: 228703 - DNA, 15 bp, Homo sapiens
ctccccaaggtctgt

SEQ ID NO: 228704 - DNA, 15 bp, Homo sapiens
actccccaaggtctg

SEQ ID NO: 228705 - DNA, 15 bp, Homo sapiens
cactccccaaggtct

SEQ ID NO: 228706 - DNA, 15 bp, Homo sapiens
acactccccaaggtc

SEQ ID NO: 228707 - DNA, 15 bp, Homo sapiens
aacactccccaaggt

SEQ ID NO: 228708 - DNA, 15 bp, Homo sapiens
aaacactccccaagg

SEQ ID NO: 228709 - DNA, 15 bp, Homo sapiens
taaacactccccaag

SEQ ID NO: 228710 - DNA, 15 bp, Homo sapiens
gtaaacactccccaa

SEQ ID NO: 228711 - DNA, 15 bp, Homo sapiens
tgtaaacactcccca

SEQ ID NO: 228712 - DNA, 15 bp, Homo sapiens
atgtaaacactcccc

SEQ ID NO: 228713 - DNA, 15 bp, Homo sapiens
catgtaaacactccc

SEQ ID NO: 228714 - DNA, 15 bp, Homo sapiens
ccatgtaaacactcc

SEQ ID NO: 228715 - DNA, 15 bp, Homo sapiens
gccatgtaaacactc

SEQ ID NO: 228716 - DNA, 15 bp, Homo sapiens
agccatgtaaacact

SEQ ID NO: 228717 - DNA, 15 bp, Homo sapiens
gagccatgtaaacac

SEQ ID NO: 228718 - DNA, 15 bp, Homo sapiens
ggagccatgtaaaca

SEQ ID NO: 228719 - DNA, 15 bp, Homo sapiens
gggagccatgtaaac

SEQ ID NO: 228720 - DNA, 15 bp, Homo sapiens
agggagccatgtaaa

SEQ ID NO: 228721 - DNA, 15 bp, Homo sapiens
cagggagccatgtaa

SEQ ID NO: 228722 - DNA, 15 bp, Homo sapiens
gcagggagccatgta

SEQ ID NO: 228723 - DNA, 15 bp, Homo sapiens
tgcagggagccatgt

SEQ ID NO: 228724 - DNA, 15 bp, Homo sapiens
atgcagggagccatg

SEQ ID NO: 228725 - DNA, 15 bp, Homo sapiens
aatgcagggagccat

SEQ ID NO: 228726 - DNA, 15 bp, Homo sapiens
aaatgcagggagcca

SEQ ID NO: 228727 - DNA, 15 bp, Homo sapiens
caaatgcagggagcc

SEQ ID NO: 228728 - DNA, 15 bp, Homo sapiens
tcaaatgcagggagc

SEQ ID NO: 228729 - DNA, 15 bp, Homo sapiens
ctcaaatgcagggag

SEQ ID NO: 228730 - DNA, 15 bp, Homo sapiens
tctcaaatgcaggga

SEQ ID NO: 228731 - DNA, 15 bp, Homo sapiens
gtctcaaatgcaggg

SEQ ID NO: 228732 - DNA, 15 bp, Homo sapiens
tgtctcaaatgcagg

SEQ ID NO: 228733 - DNA, 15 bp, Homo sapiens
ttgtctcaaatgcag

SEQ ID NO: 228734 - DNA, 15 bp, Homo sapiens
tttgtctcaaatgca

SEQ ID NO: 228735 - DNA, 15 bp, Homo sapiens
ctttgtctcaaatgc

SEQ ID NO: 228736 - DNA, 15 bp, Homo sapiens
tctttgtctcaaatg

SEQ ID NO: 228737 - DNA, 15 bp, Homo sapiens
ttctttgtctcaaat

SEQ ID NO: 228738 - DNA, 15 bp, Homo sapiens
tttctttgtctcaaa

SEQ ID NO: 228739 - DNA, 15 bp, Homo sapiens
gtttctttgtctcaa

SEQ ID NO: 228740 - DNA, 15 bp, Homo sapiens
ggtttctttgtctca

SEQ ID NO: 228741 - DNA, 15 bp, Homo sapiens
aggtttctttgtctc

SEQ ID NO: 228742 - DNA, 15 bp, Homo sapiens
caggtttctttgtct

SEQ ID NO: 228743 - DNA, 15 bp, Homo sapiens
tcaggtttctttgtc

SEQ ID NO: 228744 - DNA, 15 bp, Homo sapiens
ctcaggtttctttgt

SEQ ID NO: 228745 - DNA, 15 bp, Homo sapiens
cctcaggtttctttg

SEQ ID NO: 228746 - DNA, 15 bp, Homo sapiens
gcctcaggtttcttt

SEQ ID NO: 228747 - DNA, 15 bp, Homo sapiens
tgcctcaggtttctt

SEQ ID NO: 228748 - DNA, 15 bp, Homo sapiens
gtgcctcaggtttct

SEQ ID NO: 228749 - DNA, 15 bp, Homo sapiens
tgtgcctcaggtttc

SEQ ID NO: 228750 - DNA, 15 bp, Homo sapiens
ttgtgcctcaggttt

SEQ ID NO: 228751 - DNA, 15 bp, Homo sapiens
cttgtgcctcaggtt

SEQ ID NO: 228752 - DNA, 15 bp, Homo sapiens
tcttgtgcctcaggt

SEQ ID NO: 228753 - DNA, 15 bp, Homo sapiens
atcttgtgcctcagg

SEQ ID NO: 228754 - DNA, 15 bp, Homo sapiens
catcttgtgcctcag

SEQ ID NO: 228755 - DNA, 15 bp, Homo sapiens
ccatcttgtgcctca

SEQ ID NO: 228756 - DNA, 15 bp, Homo sapiens
accatcttgtgcctc

SEQ ID NO: 228757 - DNA, 15 bp, Homo sapiens
taccatcttgtgcct

SEQ ID NO: 228758 - DNA, 15 bp, Homo sapiens
ttaccatcttgtgcc

SEQ ID NO: 228759 - DNA, 15 bp, Homo sapiens
cttaccatcttgtgc

SEQ ID NO: 228760 - DNA, 15 bp, Homo sapiens
ccttaccatcttgtg

SEQ ID NO: 228761 - DNA, 15 bp, Homo sapiens
tccttaccatcttgt

SEQ ID NO: 228762 - DNA, 15 bp, Homo sapiens
gtccttaccatcttg

SEQ ID NO: 228763 - DNA, 15 bp, Homo sapiens
agtccttaccatctt

SEQ ID NO: 228764 - DNA, 15 bp, Homo sapiens
aagtccttaccatct

SEQ ID NO: 228765 - DNA, 15 bp, Homo sapiens
caagtccttaccatc

SEQ ID NO: 228766 - DNA, 15 bp, Homo sapiens
acaagtccttaccat

SEQ ID NO: 228767 - DNA, 15 bp, Homo sapiens
aacaagtccttacca

SEQ ID NO: 228768 - DNA, 15 bp, Homo sapiens
taacaagtccttacc

SEQ ID NO: 228769 - DNA, 15 bp, Homo sapiens
ttaacaagtccttac

SEQ ID NO: 228770 - DNA, 15 bp, Homo sapiens
tttaacaagtcctta

SEQ ID NO: 228771 - DNA, 15 bp, Homo sapiens
ctttaacaagtcctt

SEQ ID NO: 228772 - DNA, 15 bp, Homo sapiens
cctttaacaagtcct

SEQ ID NO: 228773 - DNA, 15 bp, Homo sapiens
acctttaacaagtcc

SEQ ID NO: 228774 - DNA, 15 bp, Homo sapiens
gacctttaacaagtc

SEQ ID NO: 228775 - DNA, 15 bp, Homo sapiens
tgacctttaacaagt

SEQ ID NO: 228776 - DNA, 15 bp, Homo sapiens
gtgacctttaacaag

SEQ ID NO: 228777 - DNA, 15 bp, Homo sapiens
ggtgacctttaacaa

SEQ ID NO: 228778 - DNA, 15 bp, Homo sapiens
aggtgacctttaaca

SEQ ID NO: 228779 - DNA, 15 bp, Homo sapiens
caggtgacctttaac

SEQ ID NO: 228780 - DNA, 15 bp, Homo sapiens
ccaggtgacctttaa

SEQ ID NO: 228781 - DNA, 15 bp, Homo sapiens
gccaggtgaccttta

SEQ ID NO: 228782 - DNA, 15 bp, Homo sapiens
ggccaggtgaccttt

SEQ ID NO: 228783 - DNA, 15 bp, Homo sapiens
aggccaggtgacctt

SEQ ID NO: 228784 - DNA, 15 bp, Homo sapiens
aaggccaggtgacct

SEQ ID NO: 228785 - DNA, 15 bp, Homo sapiens
aaaggccaggtgacc

SEQ ID NO: 228786 - DNA, 15 bp, Homo sapiens
aaaaggccaggtgac

SEQ ID NO: 228787 - DNA, 15 bp, Homo sapiens
aaaaaggccaggtga

SEQ ID NO: 228788 - DNA, 15 bp, Homo sapiens
gaaaaaggccaggtg

SEQ ID NO: 228789 - DNA, 15 bp, Homo sapiens
agaaaaaggccaggt

SEQ ID NO: 228790 - DNA, 15 bp, Homo sapiens
tagaaaaaggccagg

SEQ ID NO: 228791 - DNA, 15 bp, Homo sapiens
gtagaaaaaggccag

SEQ ID NO: 228792 - DNA, 15 bp, Homo sapiens
ggtagaaaaaggcca

SEQ ID NO: 228793 - DNA, 15 bp, Homo sapiens
tggtagaaaaaggcc

SEQ ID NO: 228794 - DNA, 15 bp, Homo sapiens
atggtagaaaaaggc

SEQ ID NO: 228795 - DNA, 15 bp, Homo sapiens
catggtagaaaaagg

SEQ ID NO: 228796 - DNA, 15 bp, Homo sapiens
tcatggtagaaaaag

SEQ ID NO: 228797 - DNA, 15 bp, Homo sapiens
ttcatggtagaaaaa

SEQ ID NO: 228798 - DNA, 15 bp, Homo sapiens
cttcatggtagaaaa

SEQ ID NO: 228799 - DNA, 15 bp, Homo sapiens
tcttcatggtagaaa

SEQ ID NO: 228800 - DNA, 15 bp, Homo sapiens
gtcttcatggtagaa

SEQ ID NO: 228801 - DNA, 15 bp, Homo sapiens
agtcttcatggtaga

SEQ ID NO: 228802 - DNA, 15 bp, Homo sapiens
aagtcttcatggtag

SEQ ID NO: 228803 - DNA, 15 bp, Homo sapiens
gaagtcttcatggta

SEQ ID NO: 228804 - DNA, 15 bp, Homo sapiens
ggaagtcttcatggt

SEQ ID NO: 228805 - DNA, 15 bp, Homo sapiens
tggaagtcttcatgg

SEQ ID NO: 228806 - DNA, 15 bp, Homo sapiens
ttggaagtcttcatg

SEQ ID NO: 228807 - DNA, 15 bp, Homo sapiens
tttggaagtcttcat

SEQ ID NO: 228808 - DNA, 15 bp, Homo sapiens
ctttggaagtcttca

SEQ ID NO: 228809 - DNA, 15 bp, Homo sapiens
tctttggaagtcttc

SEQ ID NO: 228810 - DNA, 15 bp, Homo sapiens
ctctttggaagtctt

SEQ ID NO: 228811 - DNA, 15 bp, Homo sapiens
actctttggaagtct

SEQ ID NO: 228812 - DNA, 15 bp, Homo sapiens
tactctttggaagtc

SEQ ID NO: 228813 - DNA, 15 bp, Homo sapiens
ctactctttggaagt

SEQ ID NO: 228814 - DNA, 15 bp, Homo sapiens
actactctttggaag

SEQ ID NO: 228815 - DNA, 15 bp, Homo sapiens
aactactctttggaa

SEQ ID NO: 228816 - DNA, 15 bp, Homo sapiens
caactactctttgga

SEQ ID NO: 228817 - DNA, 15 bp, Homo sapiens
acaactactctttgg

SEQ ID NO: 228818 - DNA, 15 bp, Homo sapiens
aacaactactctttg

SEQ ID NO: 228819 - DNA, 15 bp, Homo sapiens
gaacaactactcttt

SEQ ID NO: 228820 - DNA, 15 bp, Homo sapiens
tgaacaactactctt

SEQ ID NO: 228821 - DNA, 15 bp, Homo sapiens
gtgaacaactactct

SEQ ID NO: 228822 - DNA, 15 bp, Homo sapiens
tgtgaacaactactc

SEQ ID NO: 228823 - DNA, 15 bp, Homo sapiens
gtgtgaacaactact

SEQ ID NO: 228824 - DNA, 15 bp, Homo sapiens
ggtgtgaacaactac

SEQ ID NO: 228825 - DNA, 15 bp, Homo sapiens
gggtgtgaacaacta

SEQ ID NO: 228826 - DNA, 15 bp, Homo sapiens
tgggtgtgaacaact

SEQ ID NO: 228827 - DNA, 15 bp, Homo sapiens
ctgggtgtgaacaac

SEQ ID NO: 228828 - DNA, 15 bp, Homo sapiens
gctgggtgtgaacaa

SEQ ID NO: 228829 - DNA, 15 bp, Homo sapiens
cgctgggtgtgaaca

SEQ ID NO: 228830 - DNA, 15 bp, Homo sapiens
gcgctgggtgtgaac

SEQ ID NO: 228831 - DNA, 15 bp, Homo sapiens
tgcgctgggtgtgaa

SEQ ID NO: 228832 - DNA, 15 bp, Homo sapiens
ctgcgctgggtgtga

SEQ ID NO: 228833 - DNA, 15 bp, Homo sapiens
cctgcgctgggtgtg

SEQ ID NO: 228834 - DNA, 15 bp, Homo sapiens
ccctgcgctgggtgt

SEQ ID NO: 228835 - DNA, 15 bp, Homo sapiens
cccctgcgctgggtg

SEQ ID NO: 228836 - DNA, 15 bp, Homo sapiens
acccctgcgctgggt

SEQ ID NO: 228837 - DNA, 15 bp, Homo sapiens
cacccctgcgctggg

SEQ ID NO: 228838 - DNA, 15 bp, Homo sapiens
gcacccctgcgctgg

SEQ ID NO: 228839 - DNA, 15 bp, Homo sapiens
agcacccctgcgctg

SEQ ID NO: 228840 - DNA, 15 bp, Homo sapiens
aagcacccctgcgct

SEQ ID NO: 228841 - DNA, 15 bp, Homo sapiens
gaagcacccctgcgc

SEQ ID NO: 228842 - DNA, 15 bp, Homo sapiens
agaagcacccctgcg

SEQ ID NO: 228843 - DNA, 15 bp, Homo sapiens
tagaagcacccctgc

SEQ ID NO: 228844 - DNA, 15 bp, Homo sapiens
ttagaagcacccctg

SEQ ID NO: 228845 - DNA, 15 bp, Homo sapiens
cttagaagcacccct

SEQ ID NO: 228846 - DNA, 15 bp, Homo sapiens
tcttagaagcacccc

SEQ ID NO: 228847 - DNA, 15 bp, Homo sapiens
ctcttagaagcaccc

SEQ ID NO: 228848 - DNA, 15 bp, Homo sapiens
actcttagaagcacc

SEQ ID NO: 228849 - DNA, 15 bp, Homo sapiens
cactcttagaagcac

SEQ ID NO: 228850 - DNA, 15 bp, Homo sapiens
tcactcttagaagca

SEQ ID NO: 228851 - DNA, 15 bp, Homo sapiens
ctcactcttagaagc

SEQ ID NO: 228852 - DNA, 15 bp, Homo sapiens
tctcactcttagaag

SEQ ID NO: 228853 - DNA, 15 bp, Homo sapiens
ttctcactcttagaa

SEQ ID NO: 228854 - DNA, 15 bp, Homo sapiens
attctcactcttaga

SEQ ID NO: 228855 - DNA, 15 bp, Homo sapiens
gattctcactcttag

SEQ ID NO: 228856 - DNA, 15 bp, Homo sapiens
agattctcactctta

SEQ ID NO: 228857 - DNA, 15 bp, Homo sapiens
cagattctcactctt

SEQ ID NO: 228858 - DNA, 15 bp, Homo sapiens
ccagattctcactct

SEQ ID NO: 228859 - DNA, 15 bp, Homo sapiens
tccagattctcactc

SEQ ID NO: 228860 - DNA, 15 bp, Homo sapiens
gtccagattctcact

SEQ ID NO: 228861 - DNA, 15 bp, Homo sapiens
tgtccagattctcac

SEQ ID NO: 228862 - DNA, 15 bp, Homo sapiens
ctgtccagattctca

SEQ ID NO: 228863 - DNA, 15 bp, Homo sapiens
cctgtccagattctc

SEQ ID NO: 228864 - DNA, 15 bp, Homo sapiens
ccctgtccagattct

SEQ ID NO: 228865 - DNA, 15 bp, Homo sapiens
gccctgtccagattc

SEQ ID NO: 228866 - DNA, 15 bp, Homo sapiens
tgccctgtccagatt

SEQ ID NO: 228867 - DNA, 15 bp, Homo sapiens
gtgccctgtccagat

SEQ ID NO: 228868 - DNA, 15 bp, Homo sapiens
ggtgccctgtccaga

SEQ ID NO: 228869 - DNA, 15 bp, Homo sapiens
gggtgccctgtccag

SEQ ID NO: 228870 - DNA, 15 bp, Homo sapiens
tgggtgccctgtcca

SEQ ID NO: 228871 - DNA, 15 bp, Homo sapiens
ctgggtgccctgtcc

SEQ ID NO: 228872 - DNA, 15 bp, Homo sapiens
tctgggtgccctgtc

SEQ ID NO: 228873 - DNA, 15 bp, Homo sapiens
ttctgggtgccctgt

SEQ ID NO: 228874 - DNA, 15 bp, Homo sapiens
tttctgggtgccctg

SEQ ID NO: 228875 - DNA, 15 bp, Homo sapiens
ctttctgggtgccct

SEQ ID NO: 228876 - DNA, 15 bp, Homo sapiens
gctttctgggtgccc

SEQ ID NO: 228877 - DNA, 15 bp, Homo sapiens
tgctttctgggtgcc

SEQ ID NO: 228878 - DNA, 15 bp, Homo sapiens
ttgctttctgggtgc

SEQ ID NO: 228879 - DNA, 15 bp, Homo sapiens
attgctttctgggtg

SEQ ID NO: 228880 - DNA, 15 bp, Homo sapiens
cattgctttctgggt

SEQ ID NO: 228881 - DNA, 15 bp, Homo sapiens
ccattgctttctggg

SEQ ID NO: 228882 - DNA, 15 bp, Homo sapiens
gccattgctttctgg

SEQ ID NO: 228883 - DNA, 15 bp, Homo sapiens
agccattgctttctg

SEQ ID NO: 228884 - DNA, 15 bp, Homo sapiens
tagccattgctttct

SEQ ID NO: 228885 - DNA, 15 bp, Homo sapiens
ttagccattgctttc

SEQ ID NO: 228886 - DNA, 15 bp, Homo sapiens
tttagccattgcttt

SEQ ID NO: 228887 - DNA, 15 bp, Homo sapiens
ttttagccattgctt

SEQ ID NO: 228888 - DNA, 15 bp, Homo sapiens
tttttagccattgct

SEQ ID NO: 228889 - DNA, 15 bp, Homo sapiens
atttttagccattgc

SEQ ID NO: 228890 - DNA, 15 bp, Homo sapiens
catttttagccattg

SEQ ID NO: 228891 - DNA, 15 bp, Homo sapiens
gcatttttagccatt

SEQ ID NO: 228892 - DNA, 15 bp, Homo sapiens
ggcatttttagccat

SEQ ID NO: 228893 - DNA, 15 bp, Homo sapiens
aggcatttttagcca

SEQ ID NO: 228894 - DNA, 15 bp, Homo sapiens
gaggcatttttagcc

SEQ ID NO: 228895 - DNA, 15 bp, Homo sapiens
tgaggcatttttagc

SEQ ID NO: 228896 - DNA, 15 bp, Homo sapiens
ttgaggcatttttag

SEQ ID NO: 228897 - DNA, 15 bp, Homo sapiens
attgaggcattttta

SEQ ID NO: 228898 - DNA, 15 bp, Homo sapiens
cattgaggcattttt

SEQ ID NO: 228899 - DNA, 15 bp, Homo sapiens
ccattgaggcatttt

SEQ ID NO: 228900 - DNA, 15 bp, Homo sapiens
accattgaggcattt

SEQ ID NO: 228901 - DNA, 15 bp, Homo sapiens
caccattgaggcatt

SEQ ID NO: 228902 - DNA, 15 bp, Homo sapiens
ccaccattgaggcat

SEQ ID NO: 228903 - DNA, 15 bp, Homo sapiens
tccaccattgaggca

SEQ ID NO: 228904 - DNA, 15 bp, Homo sapiens
ctccaccattgaggc

SEQ ID NO: 228905 - DNA, 15 bp, Homo sapiens
gctccaccattgagg

SEQ ID NO: 228906 - DNA, 15 bp, Homo sapiens
tgctccaccattgag

SEQ ID NO: 228907 - DNA, 15 bp, Homo sapiens
gtgctccaccattga

SEQ ID NO: 228908 - DNA, 15 bp, Homo sapiens
agtgctccaccattg

SEQ ID NO: 228909 - DNA, 15 bp, Homo sapiens
cagtgctccaccatt

SEQ ID NO: 228910 - DNA, 15 bp, Homo sapiens
acagtgctccaccat

SEQ ID NO: 228911 - DNA, 15 bp, Homo sapiens
tacagtgctccacca

SEQ ID NO: 228912 - DNA, 15 bp, Homo sapiens
ctacagtgctccacc

SEQ ID NO: 228913 - DNA, 15 bp, Homo sapiens
cctacagtgctccac

SEQ ID NO: 228914 - DNA, 15 bp, Homo sapiens
acctacagtgctcca

SEQ ID NO: 228915 - DNA, 15 bp, Homo sapiens
gacctacagtgctcc

SEQ ID NO: 228916 - DNA, 15 bp, Homo sapiens
ggacctacagtgctc

SEQ ID NO: 228917 - DNA, 15 bp, Homo sapiens
tggacctacagtgct

SEQ ID NO: 228918 - DNA, 15 bp, Homo sapiens
ctggacctacagtgc

SEQ ID NO: 228919 - DNA, 15 bp, Homo sapiens
gctggacctacagtg

SEQ ID NO: 228920 - DNA, 15 bp, Homo sapiens
ggctggacctacagt

SEQ ID NO: 228921 - DNA, 15 bp, Homo sapiens
cggctggacctacag

SEQ ID NO: 228922 - DNA, 15 bp, Homo sapiens
tcggctggacctaca

SEQ ID NO: 228923 - DNA, 15 bp, Homo sapiens
ctcggctggacctac

SEQ ID NO: 228924 - DNA, 15 bp, Homo sapiens
tctcggctggaccta

SEQ ID NO: 228925 - DNA, 15 bp, Homo sapiens
gtctcggctggacct

SEQ ID NO: 228926 - DNA, 15 bp, Homo sapiens
tgtctcggctggacc

SEQ ID NO: 228927 - DNA, 15 bp, Homo sapiens
gtgtctcggctggac

SEQ ID NO: 228928 - DNA, 15 bp, Homo sapiens
ggtgtctcggctgga

SEQ ID NO: 228929 - DNA, 15 bp, Homo sapiens
gggtgtctcggctgg

SEQ ID NO: 228930 - DNA, 15 bp, Homo sapiens
tgggtgtctcggctg

SEQ ID NO: 228931 - DNA, 15 bp, Homo sapiens
ctgggtgtctcggct

SEQ ID NO: 228932 - DNA, 15 bp, Homo sapiens
actgggtgtctcggc

SEQ ID NO: 228933 - DNA, 15 bp, Homo sapiens
tactgggtgtctcgg

SEQ ID NO: 228934 - DNA, 15 bp, Homo sapiens
ttactgggtgtctcg

SEQ ID NO: 228935 - DNA, 15 bp, Homo sapiens
tttactgggtgtctc

SEQ ID NO: 228936 - DNA, 15 bp, Homo sapiens
gtttactgggtgtct

SEQ ID NO: 228937 - DNA, 15 bp, Homo sapiens
agtttactgggtgtc

SEQ ID NO: 228938 - DNA, 15 bp, Homo sapiens
gagtttactgggtgt

SEQ ID NO: 228939 - DNA, 15 bp, Homo sapiens
tgagtttactgggtg

SEQ ID NO: 228940 - DNA, 15 bp, Homo sapiens
gtgagtttactgggt

SEQ ID NO: 228941 - DNA, 15 bp, Homo sapiens
tgtgagtttactggg

SEQ ID NO: 228942 - DNA, 15 bp, Homo sapiens
ctgtgagtttactgg

SEQ ID NO: 228943 - DNA, 15 bp, Homo sapiens
cctgtgagtttactg

SEQ ID NO: 228944 - DNA, 15 bp, Homo sapiens
ccctgtgagtttact

SEQ ID NO: 228945 - DNA, 15 bp, Homo sapiens
gccctgtgagtttac

SEQ ID NO: 228946 - DNA, 15 bp, Homo sapiens
agccctgtgagttta

SEQ ID NO: 228947 - DNA, 15 bp, Homo sapiens
aagccctgtgagttt

SEQ ID NO: 228948 - DNA, 15 bp, Homo sapiens
aaagccctgtgagtt

SEQ ID NO: 228949 - DNA, 15 bp, Homo sapiens
gaaagccctgtgagt

SEQ ID NO: 228950 - DNA, 15 bp, Homo sapiens
agaaagccctgtgag

SEQ ID NO: 228951 - DNA, 15 bp, Homo sapiens
cagaaagccctgtga

SEQ ID NO: 228952 - DNA, 15 bp, Homo sapiens
tcagaaagccctgtg

SEQ ID NO: 228953 - DNA, 15 bp, Homo sapiens
gtcagaaagccctgt

SEQ ID NO: 228954 - DNA, 15 bp, Homo sapiens
tgtcagaaagccctg

SEQ ID NO: 228955 - DNA, 15 bp, Homo sapiens
ctgtcagaaagccct

SEQ ID NO: 228956 - DNA, 15 bp, Homo sapiens
gctgtcagaaagccc

SEQ ID NO: 228957 - DNA, 15 bp, Homo sapiens
agctgtcagaaagcc

SEQ ID NO: 228958 - DNA, 15 bp, Homo sapiens
gagctgtcagaaagc

SEQ ID NO: 228959 - DNA, 15 bp, Homo sapiens
cgagctgtcagaaag

SEQ ID NO: 228960 - DNA, 15 bp, Homo sapiens
ccgagctgtcagaaa

SEQ ID NO: 228961 - DNA, 15 bp, Homo sapiens
cccgagctgtcagaa

SEQ ID NO: 228962 - DNA, 15 bp, Homo sapiens
ccccgagctgtcaga

SEQ ID NO: 228963 - DNA, 15 bp, Homo sapiens
accccgagctgtcag

SEQ ID NO: 228964 - DNA, 15 bp, Homo sapiens
taccccgagctgtca

SEQ ID NO: 228965 - DNA, 15 bp, Homo sapiens
ttaccccgagctgtc

SEQ ID NO: 228966 - DNA, 15 bp, Homo sapiens
attaccccgagctgt

SEQ ID NO: 228967 - DNA, 15 bp, Homo sapiens
gattaccccgagctg

SEQ ID NO: 228968 - DNA, 15 bp, Homo sapiens
cgattaccccgagct

SEQ ID NO: 228969 - DNA, 15 bp, Homo sapiens
ccgattaccccgagc

SEQ ID NO: 228970 - DNA, 15 bp, Homo sapiens
accgattaccccgag

SEQ ID NO: 228971 - DNA, 15 bp, Homo sapiens
aaccgattaccccga

SEQ ID NO: 228972 - DNA, 15 bp, Homo sapiens
taaccgattaccccg

SEQ ID NO: 228973 - DNA, 15 bp, Homo sapiens
ctaaccgattacccc

SEQ ID NO: 228974 - DNA, 15 bp, Homo sapiens
cctaaccgattaccc

SEQ ID NO: 228975 - DNA, 15 bp, Homo sapiens
acctaaccgattacc

SEQ ID NO: 228976 - DNA, 15 bp, Homo sapiens
gacctaaccgattac

SEQ ID NO: 228977 - DNA, 15 bp, Homo sapiens
ggacctaaccgatta

SEQ ID NO: 228978 - DNA, 15 bp, Homo sapiens
gggacctaaccgatt

SEQ ID NO: 228979 - DNA, 15 bp, Homo sapiens
tgggacctaaccgat

SEQ ID NO: 228980 - DNA, 15 bp, Homo sapiens
ctgggacctaaccga

SEQ ID NO: 228981 - DNA, 15 bp, Homo sapiens
gctgggacctaaccg

SEQ ID NO: 228982 - DNA, 15 bp, Homo sapiens
agctgggacctaacc

SEQ ID NO: 228983 - DNA, 15 bp, Homo sapiens
aagctgggacctaac

SEQ ID NO: 228984 - DNA, 15 bp, Homo sapiens
gaagctgggacctaa

SEQ ID NO: 228985 - DNA, 15 bp, Homo sapiens
agaagctgggaccta

SEQ ID NO: 228986 - DNA, 15 bp, Homo sapiens
aagaagctgggacct

SEQ ID NO: 228987 - DNA, 15 bp, Homo sapiens
aaagaagctgggacc

SEQ ID NO: 228988 - DNA, 15 bp, Homo sapiens
taaagaagctgggac

SEQ ID NO: 228989 - DNA, 15 bp, Homo sapiens
ataaagaagctggga

SEQ ID NO: 228990 - DNA, 15 bp, Homo sapiens
tataaagaagctggg

SEQ ID NO: 228991 - DNA, 15 bp, Homo sapiens
ttataaagaagctgg

SEQ ID NO: 228992 - DNA, 15 bp, Homo sapiens
cttataaagaagctg

SEQ ID NO: 228993 - DNA, 15 bp, Homo sapiens
acttataaagaagct

SEQ ID NO: 228994 - DNA, 15 bp, Homo sapiens
aacttataaagaagc

SEQ ID NO: 228995 - DNA, 15 bp, Homo sapiens
gaacttataaagaag

SEQ ID NO: 228996 - DNA, 15 bp, Homo sapiens
ggaacttataaagaa

SEQ ID NO: 228997 - DNA, 15 bp, Homo sapiens
aggaacttataaaga

SEQ ID NO: 228998 - DNA, 15 bp, Homo sapiens
caggaacttataaag

SEQ ID NO: 228999 - DNA, 15 bp, Homo sapiens
acaggaacttataaa

SEQ ID NO: 229000 - DNA, 15 bp, Homo sapiens
aacaggaacttataa

SEQ ID NO: 229001 - DNA, 15 bp, Homo sapiens
caacaggaacttata

SEQ ID NO: 229002 - DNA, 15 bp, Homo sapiens
gcaacaggaacttat

SEQ ID NO: 229003 - DNA, 15 bp, Homo sapiens
ggcaacaggaactta

SEQ ID NO: 229004 - DNA, 15 bp, Homo sapiens
aggcaacaggaactt

SEQ ID NO: 229005 - DNA, 15 bp, Homo sapiens
caggcaacaggaact

SEQ ID NO: 229006 - DNA, 15 bp, Homo sapiens
tcaggcaacaggaac

SEQ ID NO: 229007 - DNA, 15 bp, Homo sapiens
ttcaggcaacaggaa

SEQ ID NO: 229008 - DNA, 15 bp, Homo sapiens
attcaggcaacagga

SEQ ID NO: 229009 - DNA, 15 bp, Homo sapiens
gattcaggcaacagg

SEQ ID NO: 229010 - DNA, 15 bp, Homo sapiens
agattcaggcaacag

SEQ ID NO: 229011 - DNA, 15 bp, Homo sapiens
cagattcaggcaaca

SEQ ID NO: 229012 - DNA, 15 bp, Homo sapiens
acagattcaggcaac

SEQ ID NO: 229013 - DNA, 15 bp, Homo sapiens
cacagattcaggcaa

SEQ ID NO: 229014 - DNA, 15 bp, Homo sapiens
ccacagattcaggca

SEQ ID NO: 229015 - DNA, 15 bp, Homo sapiens
tccacagattcaggc

SEQ ID NO: 229016 - DNA, 15 bp, Homo sapiens
gtccacagattcagg

SEQ ID NO: 229017 - DNA, 15 bp, Homo sapiens
tgtccacagattcag

SEQ ID NO: 229018 - DNA, 15 bp, Homo sapiens
ctgtccacagattca

SEQ ID NO: 229019 - DNA, 15 bp, Homo sapiens
actgtccacagattc

SEQ ID NO: 229020 - DNA, 15 bp, Homo sapiens
cactgtccacagatt

SEQ ID NO: 229021 - DNA, 15 bp, Homo sapiens
acactgtccacagat

SEQ ID NO: 229022 - DNA, 15 bp, Homo sapiens
cacactgtccacaga

SEQ ID NO: 229023 - DNA, 15 bp, Homo sapiens
acacactgtccacag

SEQ ID NO: 229024 - DNA, 15 bp, Homo sapiens
gacacactgtccaca

SEQ ID NO: 229025 - DNA, 15 bp, Homo sapiens
ggacacactgtccac

SEQ ID NO: 229026 - DNA, 15 bp, Homo sapiens
gggacacactgtcca

SEQ ID NO: 229027 - DNA, 15 bp, Homo sapiens
agggacacactgtcc

SEQ ID NO: 229028 - DNA, 15 bp, Homo sapiens
aagggacacactgtc

SEQ ID NO: 229029 - DNA, 15 bp, Homo sapiens
gaagggacacactgt

SEQ ID NO: 229030 - DNA, 15 bp, Homo sapiens
ggaagggacacactg

SEQ ID NO: 229031 - DNA, 15 bp, Homo sapiens
gggaagggacacact

SEQ ID NO: 229032 - DNA, 15 bp, Homo sapiens
agggaagggacacac

SEQ ID NO: 229033 - DNA, 15 bp, Homo sapiens
tagggaagggacaca

SEQ ID NO: 229034 - DNA, 15 bp, Homo sapiens
ttagggaagggacac

SEQ ID NO: 229035 - DNA, 15 bp, Homo sapiens
tttagggaagggaca

SEQ ID NO: 229036 - DNA, 15 bp, Homo sapiens
ctttagggaagggac

SEQ ID NO: 229037 - DNA, 15 bp, Homo sapiens
cctttagggaaggga

SEQ ID NO: 229038 - DNA, 15 bp, Homo sapiens
acctttagggaaggg

SEQ ID NO: 229039 - DNA, 15 bp, Homo sapiens
tacctttagggaagg

SEQ ID NO: 229040 - DNA, 15 bp, Homo sapiens
gtacctttagggaag

SEQ ID NO: 229041 - DNA, 15 bp, Homo sapiens
tgtacctttagggaa

SEQ ID NO: 229042 - DNA, 15 bp, Homo sapiens
ctgtacctttaggga

SEQ ID NO: 229043 - DNA, 15 bp, Homo sapiens
gctgtacctttaggg

SEQ ID NO: 229044 - DNA, 15 bp, Homo sapiens
ggctgtacctttagg

SEQ ID NO: 229045 - DNA, 15 bp, Homo sapiens
gggctgtacctttag

SEQ ID NO: 229046 - DNA, 15 bp, Homo sapiens
tgggctgtaccttta

SEQ ID NO: 229047 - DNA, 15 bp, Homo sapiens
gtgggctgtaccttt

SEQ ID NO: 229048 - DNA, 15 bp, Homo sapiens
tgtgggctgtacctt

SEQ ID NO: 229049 - DNA, 15 bp, Homo sapiens
ctgtgggctgtacct

SEQ ID NO: 229050 - DNA, 15 bp, Homo sapiens
actgtgggctgtacc

SEQ ID NO: 229051 - DNA, 15 bp, Homo sapiens
aactgtgggctgtac

SEQ ID NO: 229052 - DNA, 15 bp, Homo sapiens
taactgtgggctgta

SEQ ID NO: 229053 - DNA, 15 bp, Homo sapiens
ctaactgtgggctgt

SEQ ID NO: 229054 - DNA, 15 bp, Homo sapiens
gctaactgtgggctg

SEQ ID NO: 229055 - DNA, 15 bp, Homo sapiens
tgctaactgtgggct

SEQ ID NO: 229056 - DNA, 15 bp, Homo sapiens
ttgctaactgtgggc

SEQ ID NO: 229057 - DNA, 15 bp, Homo sapiens
tttgctaactgtggg

SEQ ID NO: 229058 - DNA, 15 bp, Homo sapiens
gtttgctaactgtgg

SEQ ID NO: 229059 - DNA, 15 bp, Homo sapiens
tgtttgctaactgtg

SEQ ID NO: 229060 - DNA, 15 bp, Homo sapiens
gtgtttgctaactgt

SEQ ID NO: 229061 - DNA, 15 bp, Homo sapiens
tgtgtttgctaactg

SEQ ID NO: 229062 - DNA, 15 bp, Homo sapiens
ctgtgtttgctaact

SEQ ID NO: 229063 - DNA, 15 bp, Homo sapiens
actgtgtttgctaac

SEQ ID NO: 229064 - DNA, 15 bp, Homo sapiens
tactgtgtttgctaa

SEQ ID NO: 229065 - DNA, 15 bp, Homo sapiens
ttactgtgtttgcta

SEQ ID NO: 229066 - DNA, 15 bp, Homo sapiens
gttactgtgtttgct

SEQ ID NO: 229067 - DNA, 15 bp, Homo sapiens
agttactgtgtttgc

SEQ ID NO: 229068 - DNA, 15 bp, Homo sapiens
cagttactgtgtttg

SEQ ID NO: 229069 - DNA, 15 bp, Homo sapiens
gcagttactgtgttt

SEQ ID NO: 229070 - DNA, 15 bp, Homo sapiens
agcagttactgtgtt

SEQ ID NO: 229071 - DNA, 15 bp, Homo sapiens
tagcagttactgtgt

SEQ ID NO: 229072 - DNA, 15 bp, Homo sapiens
ctagcagttactgtg

SEQ ID NO: 229073 - DNA, 15 bp, Homo sapiens
cctagcagttactgt

SEQ ID NO: 229074 - DNA, 15 bp, Homo sapiens
acctagcagttactg

SEQ ID NO: 229075 - DNA, 15 bp, Homo sapiens
cacctagcagttact

SEQ ID NO: 229076 - DNA, 15 bp, Homo sapiens
tcacctagcagttac

SEQ ID NO: 229077 - DNA, 15 bp, Homo sapiens
ttcacctagcagtta

SEQ ID NO: 229078 - DNA, 15 bp, Homo sapiens
attcacctagcagtt

SEQ ID NO: 229079 - DNA, 15 bp, Homo sapiens
aattcacctagcagt

SEQ ID NO: 229080 - DNA, 15 bp, Homo sapiens
taattcacctagcag

SEQ ID NO: 229081 - DNA, 15 bp, Homo sapiens
ttaattcacctagca

SEQ ID NO: 229082 - DNA, 15 bp, Homo sapiens
attaattcacctagc

SEQ ID NO: 229083 - DNA, 15 bp, Homo sapiens
gattaattcacctag

SEQ ID NO: 229084 - DNA, 15 bp, Homo sapiens
tgattaattcaccta

SEQ ID NO: 229085 - DNA, 15 bp, Homo sapiens
ctgattaattcacct

SEQ ID NO: 229086 - DNA, 15 bp, Homo sapiens
actgattaattcacc

SEQ ID NO: 229087 - DNA, 15 bp, Homo sapiens
cactgattaattcac

SEQ ID NO: 229088 - DNA, 15 bp, Homo sapiens
gcactgattaattca

SEQ ID NO: 229089 - DNA, 15 bp, Homo sapiens
tgcactgattaattc

SEQ ID NO: 229090 - DNA, 15 bp, Homo sapiens
ttgcactgattaatt

SEQ ID NO: 229091 - DNA, 15 bp, Homo sapiens
tttgcactgattaat

SEQ ID NO: 229092 - DNA, 15 bp, Homo sapiens
atttgcactgattaa

SEQ ID NO: 229093 - DNA, 15 bp, Homo sapiens
catttgcactgatta

SEQ ID NO: 229094 - DNA, 15 bp, Homo sapiens
acatttgcactgatt

SEQ ID NO: 229095 - DNA, 15 bp, Homo sapiens
gacatttgcactgat

SEQ ID NO: 229096 - DNA, 15 bp, Homo sapiens
agacatttgcactga

SEQ ID NO: 229097 - DNA, 15 bp, Homo sapiens
aagacatttgcactg

SEQ ID NO: 229098 - DNA, 15 bp, Homo sapiens
taagacatttgcact

SEQ ID NO: 229099 - DNA, 15 bp, Homo sapiens
ttaagacatttgcac

SEQ ID NO: 229100 - DNA, 15 bp, Homo sapiens
cttaagacatttgca

SEQ ID NO: 229101 - DNA, 15 bp, Homo sapiens
gcttaagacatttgc

SEQ ID NO: 229102 - DNA, 15 bp, Homo sapiens
ggcttaagacatttg

SEQ ID NO: 229103 - DNA, 15 bp, Homo sapiens
gggcttaagacattt

SEQ ID NO: 229104 - DNA, 15 bp, Homo sapiens
agggcttaagacatt

SEQ ID NO: 229105 - DNA, 15 bp, Homo sapiens
cagggcttaagacat

SEQ ID NO: 229106 - DNA, 15 bp, Homo sapiens
gcagggcttaagaca

SEQ ID NO: 229107 - DNA, 15 bp, Homo sapiens
agcagggcttaagac

SEQ ID NO: 229108 - DNA, 15 bp, Homo sapiens
cagcagggcttaaga

SEQ ID NO: 229109 - DNA, 15 bp, Homo sapiens
ccagcagggcttaag

SEQ ID NO: 229110 - DNA, 15 bp, Homo sapiens
accagcagggcttaa

SEQ ID NO: 229111 - DNA, 15 bp, Homo sapiens
caccagcagggctta

SEQ ID NO: 229112 - DNA, 15 bp, Homo sapiens
gcaccagcagggctt

SEQ ID NO: 229113 - DNA, 15 bp, Homo sapiens
tgcaccagcagggct

SEQ ID NO: 229114 - DNA, 15 bp, Homo sapiens
ctgcaccagcagggc

SEQ ID NO: 229115 - DNA, 15 bp, Homo sapiens
tctgcaccagcaggg

SEQ ID NO: 229116 - DNA, 15 bp, Homo sapiens
ctctgcaccagcagg

SEQ ID NO: 229117 - DNA, 15 bp, Homo sapiens
actctgcaccagcag

SEQ ID NO: 229118 - DNA, 15 bp, Homo sapiens
gactctgcaccagca

SEQ ID NO: 229119 - DNA, 15 bp, Homo sapiens
agactctgcaccagc

SEQ ID NO: 229120 - DNA, 15 bp, Homo sapiens
gagactctgcaccag

SEQ ID NO: 229121 - DNA, 15 bp, Homo sapiens
ggagactctgcacca

SEQ ID NO: 229122 - DNA, 15 bp, Homo sapiens
cggagactctgcacc

SEQ ID NO: 229123 - DNA, 15 bp, Homo sapiens
ccggagactctgcac

SEQ ID NO: 229124 - DNA, 15 bp, Homo sapiens
cccggagactctgca

SEQ ID NO: 229125 - DNA, 15 bp, Homo sapiens
ccccggagactctgc

SEQ ID NO: 229126 - DNA, 15 bp, Homo sapiens
accccggagactctg

SEQ ID NO: 229127 - DNA, 15 bp, Homo sapiens
caccccggagactct

SEQ ID NO: 229128 - DNA, 15 bp, Homo sapiens
gcaccccggagactc

SEQ ID NO: 229129 - DNA, 15 bp, Homo sapiens
tgcaccccggagact

SEQ ID NO: 229130 - DNA, 15 bp, Homo sapiens
ctgcaccccggagac

SEQ ID NO: 229131 - DNA, 15 bp, Homo sapiens
tctgcaccccggaga

SEQ ID NO: 229132 - DNA, 15 bp, Homo sapiens
ctctgcaccccggag

SEQ ID NO: 229133 - DNA, 15 bp, Homo sapiens
gctctgcaccccgga

SEQ ID NO: 229134 - DNA, 15 bp, Homo sapiens
tgctctgcaccccgg

SEQ ID NO: 229135 - DNA, 15 bp, Homo sapiens
ctgctctgcaccccg

SEQ ID NO: 229136 - DNA, 15 bp, Homo sapiens
cctgctctgcacccc

SEQ ID NO: 229137 - DNA, 15 bp, Homo sapiens
tcctgctctgcaccc

SEQ ID NO: 229138 - DNA, 15 bp, Homo sapiens
ctcctgctctgcacc

SEQ ID NO: 229139 - DNA, 15 bp, Homo sapiens
tctcctgctctgcac

SEQ ID NO: 229140 - DNA, 15 bp, Homo sapiens
ttctcctgctctgca

SEQ ID NO: 229141 - DNA, 15 bp, Homo sapiens
cttctcctgctctgc

SEQ ID NO: 229142 - DNA, 15 bp, Homo sapiens
acttctcctgctctg

SEQ ID NO: 229143 - DNA, 15 bp, Homo sapiens
cacttctcctgctct

SEQ ID NO: 229144 - DNA, 15 bp, Homo sapiens
tcacttctcctgctc

SEQ ID NO: 229145 - DNA, 15 bp, Homo sapiens
atcacttctcctgct

SEQ ID NO: 229146 - DNA, 15 bp, Homo sapiens
catcacttctcctgc

SEQ ID NO: 229147 - DNA, 15 bp, Homo sapiens
ccatcacttctcctg

SEQ ID NO: 229148 - DNA, 15 bp, Homo sapiens
gccatcacttctcct

SEQ ID NO: 229149 - DNA, 15 bp, Homo sapiens
tgccatcacttctcc

SEQ ID NO: 229150 - DNA, 15 bp, Homo sapiens
ctgccatcacttctc

SEQ ID NO: 229151 - DNA, 15 bp, Homo sapiens
gctgccatcacttct

SEQ ID NO: 229152 - DNA, 15 bp, Homo sapiens
ggctgccatcacttc

SEQ ID NO: 229153 - DNA, 15 bp, Homo sapiens
tggctgccatcactt

SEQ ID NO: 229154 - DNA, 15 bp, Homo sapiens
ctggctgccatcact

SEQ ID NO: 229155 - DNA, 15 bp, Homo sapiens
cctggctgccatcac

SEQ ID NO: 229156 - DNA, 15 bp, Homo sapiens
ccctggctgccatca

SEQ ID NO: 229157 - DNA, 15 bp, Homo sapiens
tccctggctgccatc

SEQ ID NO: 229158 - DNA, 15 bp, Homo sapiens
ctccctggctgccat

SEQ ID NO: 229159 - DNA, 15 bp, Homo sapiens
tctccctggctgcca

SEQ ID NO: 229160 - DNA, 15 bp, Homo sapiens
ctctccctggctgcc

SEQ ID NO: 229161 - DNA, 15 bp, Homo sapiens
cctctccctggctgc

SEQ ID NO: 229162 - DNA, 15 bp, Homo sapiens
acctctccctggctg

SEQ ID NO: 229163 - DNA, 15 bp, Homo sapiens
aacctctccctggct

SEQ ID NO: 229164 - DNA, 15 bp, Homo sapiens
caacctctccctggc

SEQ ID NO: 229165 - DNA, 15 bp, Homo sapiens
ccaacctctccctgg

SEQ ID NO: 229166 - DNA, 15 bp, Homo sapiens
tccaacctctccctg

SEQ ID NO: 229167 - DNA, 15 bp, Homo sapiens
gtccaacctctccct

SEQ ID NO: 229168 - DNA, 15 bp, Homo sapiens
agtccaacctctccc

SEQ ID NO: 229169 - DNA, 15 bp, Homo sapiens
tagtccaacctctcc

SEQ ID NO: 229170 - DNA, 15 bp, Homo sapiens
atagtccaacctctc

SEQ ID NO: 229171 - DNA, 15 bp, Homo sapiens
catagtccaacctct

SEQ ID NO: 229172 - DNA, 15 bp, Homo sapiens
gcatagtccaacctc

SEQ ID NO: 229173 - DNA, 15 bp, Homo sapiens
tgcatagtccaacct

SEQ ID NO: 229174 - DNA, 15 bp, Homo sapiens
ttgcatagtccaacc

SEQ ID NO: 229175 - DNA, 15 bp, Homo sapiens
gttgcatagtccaac

SEQ ID NO: 229176 - DNA, 15 bp, Homo sapiens
agttgcatagtccaa

SEQ ID NO: 229177 - DNA, 15 bp, Homo sapiens
aagttgcatagtcca

SEQ ID NO: 229178 - DNA, 15 bp, Homo sapiens
gaagttgcatagtcc

SEQ ID NO: 229179 - DNA, 15 bp, Homo sapiens
ggaagttgcatagtc

SEQ ID NO: 229180 - DNA, 15 bp, Homo sapiens
gggaagttgcatagt

SEQ ID NO: 229181 - DNA, 15 bp, Homo sapiens
tgggaagttgcatag

SEQ ID NO: 229182 - DNA, 15 bp, Homo sapiens
ctgggaagttgcata

SEQ ID NO: 229183 - DNA, 15 bp, Homo sapiens
cctgggaagttgcat

SEQ ID NO: 229184 - DNA, 15 bp, Homo sapiens
ccctgggaagttgca

SEQ ID NO: 229185 - DNA, 15 bp, Homo sapiens
cccctgggaagttgc

SEQ ID NO: 229186 - DNA, 15 bp, Homo sapiens
gcccctgggaagttg

SEQ ID NO: 229187 - DNA, 15 bp, Homo sapiens
tgcccctgggaagtt

SEQ ID NO: 229188 - DNA, 15 bp, Homo sapiens
ctgcccctgggaagt

SEQ ID NO: 229189 - DNA, 15 bp, Homo sapiens
tctgcccctgggaag

SEQ ID NO: 229190 - DNA, 15 bp, Homo sapiens
ttctgcccctgggaa

SEQ ID NO: 229191 - DNA, 15 bp, Homo sapiens
cttctgcccctggga

SEQ ID NO: 229192 - DNA, 15 bp, Homo sapiens
acttctgcccctggg

SEQ ID NO: 229193 - DNA, 15 bp, Homo sapiens
cacttctgcccctgg

SEQ ID NO: 229194 - DNA, 15 bp, Homo sapiens
tcacttctgcccctg

SEQ ID NO: 229195 - DNA, 15 bp, Homo sapiens
ttcacttctgcccct

SEQ ID NO: 229196 - DNA, 15 bp, Homo sapiens
gttcacttctgcccc

SEQ ID NO: 229197 - DNA, 15 bp, Homo sapiens
agttcacttctgccc

SEQ ID NO: 229198 - DNA, 15 bp, Homo sapiens
gagttcacttctgcc

SEQ ID NO: 229199 - DNA, 15 bp, Homo sapiens
agagttcacttctgc

SEQ ID NO: 229200 - DNA, 15 bp, Homo sapiens
cagagttcacttctg

SEQ ID NO: 229201 - DNA, 15 bp, Homo sapiens
gcagagttcacttct

SEQ ID NO: 229202 - DNA, 15 bp, Homo sapiens
ggcagagttcacttc

SEQ ID NO: 229203 - DNA, 15 bp, Homo sapiens
tggcagagttcactt

SEQ ID NO: 229204 - DNA, 15 bp, Homo sapiens
gtggcagagttcact

SEQ ID NO: 229205 - DNA, 15 bp, Homo sapiens
agtggcagagttcac

SEQ ID NO: 229206 - DNA, 15 bp, Homo sapiens
gagtggcagagttca

SEQ ID NO: 229207 - DNA, 15 bp, Homo sapiens
ggagtggcagagttc

SEQ ID NO: 229208 - DNA, 15 bp, Homo sapiens
aggagtggcagagtt

SEQ ID NO: 229209 - DNA, 15 bp, Homo sapiens
caggagtggcagagt

SEQ ID NO: 229210 - DNA, 15 bp, Homo sapiens
tcaggagtggcagag

SEQ ID NO: 229211 - DNA, 15 bp, Homo sapiens
gtcaggagtggcaga

SEQ ID NO: 229212 - DNA, 15 bp, Homo sapiens
tgtcaggagtggcag

SEQ ID NO: 229213 - DNA, 15 bp, Homo sapiens
gtgtcaggagtggca

SEQ ID NO: 229214 - DNA, 15 bp, Homo sapiens
ggtgtcaggagtggc

SEQ ID NO: 229215 - DNA, 15 bp, Homo sapiens
tggtgtcaggagtgg

SEQ ID NO: 229216 - DNA, 15 bp, Homo sapiens
ctggtgtcaggagtg

SEQ ID NO: 229217 - DNA, 15 bp, Homo sapiens
gctggtgtcaggagt

SEQ ID NO: 229218 - DNA, 15 bp, Homo sapiens
agctggtgtcaggag

SEQ ID NO: 229219 - DNA, 15 bp, Homo sapiens
gagctggtgtcagga

SEQ ID NO: 229220 - DNA, 15 bp, Homo sapiens
agagctggtgtcagg

SEQ ID NO: 229221 - DNA, 15 bp, Homo sapiens
tagagctggtgtcag

SEQ ID NO: 229222 - DNA, 15 bp, Homo sapiens
ctagagctggtgtca

SEQ ID NO: 229223 - DNA, 15 bp, Homo sapiens
cctagagctggtgtc

SEQ ID NO: 229224 - DNA, 15 bp, Homo sapiens
tcctagagctggtgt

SEQ ID NO: 229225 - DNA, 15 bp, Homo sapiens
ttcctagagctggtg

SEQ ID NO: 229226 - DNA, 15 bp, Homo sapiens
tttcctagagctggt

SEQ ID NO: 229227 - DNA, 15 bp, Homo sapiens
ctttcctagagctgg

SEQ ID NO: 229228 - DNA, 15 bp, Homo sapiens
tctttcctagagctg

SEQ ID NO: 229229 - DNA, 15 bp, Homo sapiens
gtctttcctagagct

SEQ ID NO: 229230 - DNA, 15 bp, Homo sapiens
ggtctttcctagagc

SEQ ID NO: 229231 - DNA, 15 bp, Homo sapiens
aggtctttcctagag

SEQ ID NO: 229232 - DNA, 15 bp, Homo sapiens
caggtctttcctaga

SEQ ID NO: 229233 - DNA, 15 bp, Homo sapiens
ccaggtctttcctag

SEQ ID NO: 229234 - DNA, 15 bp, Homo sapiens
cccaggtctttccta

SEQ ID NO: 229235 - DNA, 15 bp, Homo sapiens
acccaggtctttcct

SEQ ID NO: 229236 - DNA, 15 bp, Homo sapiens
gacccaggtctttcc

SEQ ID NO: 229237 - DNA, 15 bp, Homo sapiens
ggacccaggtctttc

SEQ ID NO: 229238 - DNA, 15 bp, Homo sapiens
gggacccaggtcttt

SEQ ID NO: 229239 - DNA, 15 bp, Homo sapiens
ggggacccaggtctt

SEQ ID NO: 229240 - DNA, 15 bp, Homo sapiens
aggggacccaggtct

SEQ ID NO: 229241 - DNA, 15 bp, Homo sapiens
caggggacccaggtc

SEQ ID NO: 229242 - DNA, 15 bp, Homo sapiens
acaggggacccaggt

SEQ ID NO: 229243 - DNA, 15 bp, Homo sapiens
aacaggggacccagg

SEQ ID NO: 229244 - DNA, 15 bp, Homo sapiens
caacaggggacccag

SEQ ID NO: 229245 - DNA, 15 bp, Homo sapiens
gcaacaggggaccca

SEQ ID NO: 229246 - DNA, 15 bp, Homo sapiens
ggcaacaggggaccc

SEQ ID NO: 229247 - DNA, 15 bp, Homo sapiens
gggcaacaggggacc

SEQ ID NO: 229248 - DNA, 15 bp, Homo sapiens
agggcaacaggggac

SEQ ID NO: 229249 - DNA, 15 bp, Homo sapiens
tagggcaacagggga

SEQ ID NO: 229250 - DNA, 15 bp, Homo sapiens
atagggcaacagggg

SEQ ID NO: 229251 - DNA, 15 bp, Homo sapiens
aatagggcaacaggg

SEQ ID NO: 229252 - DNA, 15 bp, Homo sapiens
aaatagggcaacagg

SEQ ID NO: 229253 - DNA, 15 bp, Homo sapiens
gaaatagggcaacag

SEQ ID NO: 229254 - DNA, 15 bp, Homo sapiens
agaaatagggcaaca

SEQ ID NO: 229255 - DNA, 15 bp, Homo sapiens
gagaaatagggcaac

SEQ ID NO: 229256 - DNA, 15 bp, Homo sapiens
agagaaatagggcaa

SEQ ID NO: 229257 - DNA, 15 bp, Homo sapiens
cagagaaatagggca

SEQ ID NO: 229258 - DNA, 15 bp, Homo sapiens
ccagagaaatagggc

SEQ ID NO: 229259 - DNA, 15 bp, Homo sapiens
accagagaaataggg

SEQ ID NO: 229260 - DNA, 15 bp, Homo sapiens
gaccagagaaatagg

SEQ ID NO: 229261 - DNA, 15 bp, Homo sapiens
ggaccagagaaatag

SEQ ID NO: 229262 - DNA, 15 bp, Homo sapiens
aggaccagagaaata

SEQ ID NO: 229263 - DNA, 15 bp, Homo sapiens
aaggaccagagaaat

SEQ ID NO: 229264 - DNA, 15 bp, Homo sapiens
caaggaccagagaaa

SEQ ID NO: 229265 - DNA, 15 bp, Homo sapiens
tcaaggaccagagaa

SEQ ID NO: 229266 - DNA, 15 bp, Homo sapiens
ctcaaggaccagaga

SEQ ID NO: 229267 - DNA, 15 bp, Homo sapiens
actcaaggaccagag

SEQ ID NO: 229268 - DNA, 15 bp, Homo sapiens
gactcaaggaccaga

SEQ ID NO: 229269 - DNA, 15 bp, Homo sapiens
agactcaaggaccag

SEQ ID NO: 229270 - DNA, 15 bp, Homo sapiens
gagactcaaggacca

SEQ ID NO: 229271 - DNA, 15 bp, Homo sapiens
tgagactcaaggacc

SEQ ID NO: 229272 - DNA, 15 bp, Homo sapiens
ctgagactcaaggac

SEQ ID NO: 229273 - DNA, 15 bp, Homo sapiens
tctgagactcaagga

SEQ ID NO: 229274 - DNA, 15 bp, Homo sapiens
ctctgagactcaagg

SEQ ID NO: 229275 - DNA, 15 bp, Homo sapiens
actctgagactcaag

SEQ ID NO: 229276 - DNA, 15 bp, Homo sapiens
tactctgagactcaa

SEQ ID NO: 229277 - DNA, 15 bp, Homo sapiens
ttactctgagactca

SEQ ID NO: 229278 - DNA, 15 bp, Homo sapiens
gttactctgagactc

SEQ ID NO: 229279 - DNA, 15 bp, Homo sapiens
ggttactctgagact

SEQ ID NO: 229280 - DNA, 15 bp, Homo sapiens
tggttactctgagac

SEQ ID NO: 229281 - DNA, 15 bp, Homo sapiens
gtggttactctgaga

SEQ ID NO: 229282 - DNA, 15 bp, Homo sapiens
ggtggttactctgag

SEQ ID NO: 229283 - DNA, 15 bp, Homo sapiens
aggtggttactctga

SEQ ID NO: 229284 - DNA, 15 bp, Homo sapiens
gaggtggttactctg

SEQ ID NO: 229285 - DNA, 15 bp, Homo sapiens
ggaggtggttactct

SEQ ID NO: 229286 - DNA, 15 bp, Homo sapiens
aggaggtggttactc

SEQ ID NO: 229287 - DNA, 15 bp, Homo sapiens
gaggaggtggttact

SEQ ID NO: 229288 - DNA, 15 bp, Homo sapiens
ggaggaggtggttac

SEQ ID NO: 229289 - DNA, 15 bp, Homo sapiens
tggaggaggtggtta

SEQ ID NO: 229290 - DNA, 15 bp, Homo sapiens
atggaggaggtggtt

SEQ ID NO: 229291 - DNA, 15 bp, Homo sapiens
gatggaggaggtggt

SEQ ID NO: 229292 - DNA, 15 bp, Homo sapiens
tggatggaggaggtg

SEQ ID NO: 229293 - DNA, 15 bp, Homo sapiens
atggatggaggaggt

SEQ ID NO: 229294 - DNA, 15 bp, Homo sapiens
aatggatggaggagg

SEQ ID NO: 229295 - DNA, 15 bp, Homo sapiens
gaatggatggaggag

SEQ ID NO: 229296 - DNA, 15 bp, Homo sapiens
ggaatggatggagga

SEQ ID NO: 229297 - DNA, 15 bp, Homo sapiens
gggaatggatggagg

SEQ ID NO: 229298 - DNA, 15 bp, Homo sapiens
agggaatggatggag

SEQ ID NO: 229299 - DNA, 15 bp, Homo sapiens
aagggaatggatgga

SEQ ID NO: 229300 - DNA, 15 bp, Homo sapiens
aaagggaatggatgg

SEQ ID NO: 229301 - DNA, 15 bp, Homo sapiens
caaagggaatggatg

SEQ ID NO: 229302 - DNA, 15 bp, Homo sapiens
gcaaagggaatggat

SEQ ID NO: 229303 - DNA, 15 bp, Homo sapiens
tgcaaagggaatgga

SEQ ID NO: 229304 - DNA, 15 bp, Homo sapiens
ctgcaaagggaatgg

SEQ ID NO: 229305 - DNA, 15 bp, Homo sapiens
tctgcaaagggaatg

SEQ ID NO: 229306 - DNA, 15 bp, Homo sapiens
ttctgcaaagggaat

SEQ ID NO: 229307 - DNA, 15 bp, Homo sapiens
gttctgcaaagggaa

SEQ ID NO: 229308 - DNA, 15 bp, Homo sapiens
agttctgcaaaggga

SEQ ID NO: 229309 - DNA, 15 bp, Homo sapiens
gagttctgcaaaggg

SEQ ID NO: 229310 - DNA, 15 bp, Homo sapiens
agagttctgcaaagg

SEQ ID NO: 229311 - DNA, 15 bp, Homo sapiens
aagagttctgcaaag

SEQ ID NO: 229312 - DNA, 15 bp, Homo sapiens
caagagttctgcaaa

SEQ ID NO: 229313 - DNA, 15 bp, Homo sapiens
gcaagagttctgcaa

SEQ ID NO: 229314 - DNA, 15 bp, Homo sapiens
ggcaagagttctgca

SEQ ID NO: 229315 - DNA, 15 bp, Homo sapiens
tggcaagagttctgc

SEQ ID NO: 229316 - DNA, 15 bp, Homo sapiens
atggcaagagttctg

SEQ ID NO: 229317 - DNA, 15 bp, Homo sapiens
catggcaagagttct

SEQ ID NO: 229318 - DNA, 15 bp, Homo sapiens
tcatggcaagagttc

SEQ ID NO: 229319 - DNA, 15 bp, Homo sapiens
ttcatggcaagagtt

SEQ ID NO: 229320 - DNA, 15 bp, Homo sapiens
tttcatggcaagagt

SEQ ID NO: 229321 - DNA, 15 bp, Homo sapiens
ttttcatggcaagag

SEQ ID NO: 229322 - DNA, 15 bp, Homo sapiens
gttttcatggcaaga

SEQ ID NO: 229323 - DNA, 15 bp, Homo sapiens
ggttttcatggcaag

SEQ ID NO: 229324 - DNA, 15 bp, Homo sapiens
gggttttcatggcaa

SEQ ID NO: 229325 - DNA, 15 bp, Homo sapiens
ggggttttcatggca

SEQ ID NO: 229326 - DNA, 15 bp, Homo sapiens
tggggttttcatggc

SEQ ID NO: 229327 - DNA, 15 bp, Homo sapiens
ctggggttttcatgg

SEQ ID NO: 229328 - DNA, 15 bp, Homo sapiens
gctggggttttcatg

SEQ ID NO: 229329 - DNA, 15 bp, Homo sapiens
agctggggttttcat

SEQ ID NO: 229330 - DNA, 15 bp, Homo sapiens
cagctggggttttca

SEQ ID NO: 229331 - DNA, 15 bp, Homo sapiens
ccagctggggttttc

SEQ ID NO: 229332 - DNA, 15 bp, Homo sapiens
accagctggggtttt

SEQ ID NO: 229333 - DNA, 15 bp, Homo sapiens
caccagctggggttt

SEQ ID NO: 229334 - DNA, 15 bp, Homo sapiens
ccaccagctggggtt

SEQ ID NO: 229335 - DNA, 15 bp, Homo sapiens
accaccagctggggt

SEQ ID NO: 229336 - DNA, 15 bp, Homo sapiens
caccaccagctgggg

SEQ ID NO: 229337 - DNA, 15 bp, Homo sapiens
gcaccaccagctggg

SEQ ID NO: 229338 - DNA, 15 bp, Homo sapiens
ggcaccaccagctgg

SEQ ID NO: 229339 - DNA, 15 bp, Homo sapiens
gggcaccaccagctg

SEQ ID NO: 229340 - DNA, 15 bp, Homo sapiens
tgggcaccaccagct

SEQ ID NO: 229341 - DNA, 15 bp, Homo sapiens
atgggcaccaccagc

SEQ ID NO: 229342 - DNA, 15 bp, Homo sapiens
catgggcaccaccag

SEQ ID NO: 229343 - DNA, 15 bp, Homo sapiens
gcatgggcaccacca

SEQ ID NO: 229344 - DNA, 15 bp, Homo sapiens
agcatgggcaccacc

SEQ ID NO: 229345 - DNA, 15 bp, Homo sapiens
tagcatgggcaccac

SEQ ID NO: 229346 - DNA, 15 bp, Homo sapiens
atagcatgggcacca

SEQ ID NO: 229347 - DNA, 15 bp, Homo sapiens
catagcatgggcacc

SEQ ID NO: 229348 - DNA, 15 bp, Homo sapiens
gcatagcatgggcac

SEQ ID NO: 229349 - DNA, 15 bp, Homo sapiens
agcatagcatgggca

SEQ ID NO: 229350 - DNA, 15 bp, Homo sapiens
aagcatagcatgggc

SEQ ID NO: 229351 - DNA, 15 bp, Homo sapiens
caagcatagcatggg

SEQ ID NO: 229352 - DNA, 15 bp, Homo sapiens
tcaagcatagcatgg

SEQ ID NO: 229353 - DNA, 15 bp, Homo sapiens
atcaagcatagcatg

SEQ ID NO: 229354 - DNA, 15 bp, Homo sapiens
aatcaagcatagcat

SEQ ID NO: 229355 - DNA, 15 bp, Homo sapiens
aaatcaagcatagca

SEQ ID NO: 229356 - DNA, 15 bp, Homo sapiens
caaatcaagcatagc

SEQ ID NO: 229357 - DNA, 15 bp, Homo sapiens
gcaaatcaagcatag

SEQ ID NO: 229358 - DNA, 15 bp, Homo sapiens
agcaaatcaagcata

SEQ ID NO: 229359 - DNA, 15 bp, Homo sapiens
aagcaaatcaagcat

SEQ ID NO: 229360 - DNA, 15 bp, Homo sapiens
caagcaaatcaagca

SEQ ID NO: 229361 - DNA, 15 bp, Homo sapiens
tcaagcaaatcaagc

SEQ ID NO: 229362 - DNA, 15 bp, Homo sapiens
ctcaagcaaatcaag

SEQ ID NO: 229363 - DNA, 15 bp, Homo sapiens
gctcaagcaaatcaa

SEQ ID NO: 229364 - DNA, 15 bp, Homo sapiens
agctcaagcaaatca

SEQ ID NO: 229365 - DNA, 15 bp, Homo sapiens
cagctcaagcaaatc

SEQ ID NO: 229366 - DNA, 15 bp, Homo sapiens
gcagctcaagcaaat

SEQ ID NO: 229367 - DNA, 15 bp, Homo sapiens
agcagctcaagcaaa

SEQ ID NO: 229368 - DNA, 15 bp, Homo sapiens
aagcagctcaagcaa

SEQ ID NO: 229369 - DNA, 15 bp, Homo sapiens
aaagcagctcaagca

SEQ ID NO: 229370 - DNA, 15 bp, Homo sapiens
caaagcagctcaagc

SEQ ID NO: 229371 - DNA, 15 bp, Homo sapiens
ccaaagcagctcaag

SEQ ID NO: 229372 - DNA, 15 bp, Homo sapiens
cccaaagcagctcaa

SEQ ID NO: 229373 - DNA, 15 bp, Homo sapiens
acccaaagcagctca

SEQ ID NO: 229374 - DNA, 15 bp, Homo sapiens
tacccaaagcagctc

SEQ ID NO: 229375 - DNA, 15 bp, Homo sapiens
ttacccaaagcagct

SEQ ID NO: 229376 - DNA, 15 bp, Homo sapiens
attacccaaagcagc

SEQ ID NO: 229377 - DNA, 15 bp, Homo sapiens
gattacccaaagcag

SEQ ID NO: 229378 - DNA, 15 bp, Homo sapiens
agattacccaaagca

SEQ ID NO: 229379 - DNA, 15 bp, Homo sapiens
cagattacccaaagc

SEQ ID NO: 229380 - DNA, 15 bp, Homo sapiens
gcagattacccaaag

SEQ ID NO: 229381 - DNA, 15 bp, Homo sapiens
ggcagattacccaaa

SEQ ID NO: 229382 - DNA, 15 bp, Homo sapiens
aggcagattacccaa

SEQ ID NO: 229383 - DNA, 15 bp, Homo sapiens
taggcagattaccca

SEQ ID NO: 229384 - DNA, 15 bp, Homo sapiens
ttaggcagattaccc

SEQ ID NO: 229385 - DNA, 15 bp, Homo sapiens
attaggcagattacc

SEQ ID NO: 229386 - DNA, 15 bp, Homo sapiens
tattaggcagattac

SEQ ID NO: 229387 - DNA, 15 bp, Homo sapiens
gtattaggcagatta

SEQ ID NO: 229388 - DNA, 15 bp, Homo sapiens
ggtattaggcagatt

SEQ ID NO: 229389 - DNA, 15 bp, Homo sapiens
gggtattaggcagat

SEQ ID NO: 229390 - DNA, 15 bp, Homo sapiens
agggtattaggcaga

SEQ ID NO: 229391 - DNA, 15 bp, Homo sapiens
tagggtattaggcag

SEQ ID NO: 229392 - DNA, 15 bp, Homo sapiens
ttagggtattaggca

SEQ ID NO: 229393 - DNA, 15 bp, Homo sapiens
attagggtattaggc

SEQ ID NO: 229394 - DNA, 15 bp, Homo sapiens
tattagggtattagg

SEQ ID NO: 229395 - DNA, 15 bp, Homo sapiens
atattagggtattag

SEQ ID NO: 229396 - DNA, 15 bp, Homo sapiens
catattagggtatta

SEQ ID NO: 229397 - DNA, 15 bp, Homo sapiens
gcatattagggtatt

SEQ ID NO: 229398 - DNA, 15 bp, Homo sapiens
tgcatattagggtat

SEQ ID NO: 229399 - DNA, 15 bp, Homo sapiens
ctgcatattagggta

SEQ ID NO: 229400 - DNA, 15 bp, Homo sapiens
cctgcatattagggt

SEQ ID NO: 229401 - DNA, 15 bp, Homo sapiens
tcctgcatattaggg

SEQ ID NO: 229402 - DNA, 15 bp, Homo sapiens
atcctgcatattagg

SEQ ID NO: 229403 - DNA, 15 bp, Homo sapiens
aatcctgcatattag

SEQ ID NO: 229404 - DNA, 15 bp, Homo sapiens
taatcctgcatatta

SEQ ID NO: 229405 - DNA, 15 bp, Homo sapiens
ataatcctgcatatt

SEQ ID NO: 229406 - DNA, 15 bp, Homo sapiens
aataatcctgcatat

SEQ ID NO: 229407 - DNA, 15 bp, Homo sapiens
caataatcctgcata

SEQ ID NO: 229408 - DNA, 15 bp, Homo sapiens
ccaataatcctgcat

SEQ ID NO: 229409 - DNA, 15 bp, Homo sapiens
accaataatcctgca

SEQ ID NO: 229410 - DNA, 15 bp, Homo sapiens
taccaataatcctgc

SEQ ID NO: 229411 - DNA, 15 bp, Homo sapiens
gtaccaataatcctg

SEQ ID NO: 229412 - DNA, 15 bp, Homo sapiens
ggtaccaataatcct

SEQ ID NO: 229413 - DNA, 15 bp, Homo sapiens
aggtaccaataatcc

SEQ ID NO: 229414 - DNA, 15 bp, Homo sapiens
caggtaccaataatc

SEQ ID NO: 229415 - DNA, 15 bp, Homo sapiens
ccaggtaccaataat

SEQ ID NO: 229416 - DNA, 15 bp, Homo sapiens
cccaggtaccaataa

SEQ ID NO: 229417 - DNA, 15 bp, Homo sapiens
tcccaggtaccaata

SEQ ID NO: 229418 - DNA, 15 bp, Homo sapiens
ctcccaggtaccaat

SEQ ID NO: 229419 - DNA, 15 bp, Homo sapiens
tctcccaggtaccaa

SEQ ID NO: 229420 - DNA, 15 bp, Homo sapiens
ttctcccaggtacca

SEQ ID NO: 229421 - DNA, 15 bp, Homo sapiens
attctcccaggtacc

SEQ ID NO: 229422 - DNA, 15 bp, Homo sapiens
cattctcccaggtac

SEQ ID NO: 229423 - DNA, 15 bp, Homo sapiens
gcattctcccaggta

SEQ ID NO: 229424 - DNA, 15 bp, Homo sapiens
ggcattctcccaggt

SEQ ID NO: 229425 - DNA, 15 bp, Homo sapiens
gggcattctcccagg

SEQ ID NO: 229426 - DNA, 15 bp, Homo sapiens
cgggcattctcccag

SEQ ID NO: 229427 - DNA, 15 bp, Homo sapiens
acgggcattctccca

SEQ ID NO: 229428 - DNA, 15 bp, Homo sapiens
cacgggcattctccc

SEQ ID NO: 229429 - DNA, 15 bp, Homo sapiens
ccacgggcattctcc

SEQ ID NO: 229430 - DNA, 15 bp, Homo sapiens
gccacgggcattctc

SEQ ID NO: 229431 - DNA, 15 bp, Homo sapiens
agccacgggcattct

SEQ ID NO: 229432 - DNA, 15 bp, Homo sapiens
cagccacgggcattc

SEQ ID NO: 229433 - DNA, 15 bp, Homo sapiens
ccagccacgggcatt

SEQ ID NO: 229434 - DNA, 15 bp, Homo sapiens
cccagccacgggcat

SEQ ID NO: 229435 - DNA, 15 bp, Homo sapiens
tcccagccacgggca

SEQ ID NO: 229436 - DNA, 15 bp, Homo sapiens
ttcccagccacgggc

SEQ ID NO: 229437 - DNA, 15 bp, Homo sapiens
tttcccagccacggg

SEQ ID NO: 229438 - DNA, 15 bp, Homo sapiens
gtttcccagccacgg

SEQ ID NO: 229439 - DNA, 15 bp, Homo sapiens
ggtttcccagccacg

SEQ ID NO: 229440 - DNA, 15 bp, Homo sapiens
gggtttcccagccac

SEQ ID NO: 229441 - DNA, 15 bp, Homo sapiens
tatggcgaccaattc

SEQ ID NO: 229442 - DNA, 15 bp, Homo sapiens
ctatggcgaccaatt

SEQ ID NO: 229443 - DNA, 15 bp, Homo sapiens
gctatggcgaccaat

SEQ ID NO: 229444 - DNA, 15 bp, Homo sapiens
ggctatggcgaccaa

SEQ ID NO: 229445 - DNA, 15 bp, Homo sapiens
tggctatggcgacca

SEQ ID NO: 229446 - DNA, 15 bp, Homo sapiens
ctggctatggcgacc

SEQ ID NO: 229447 - DNA, 15 bp, Homo sapiens
cctggctatggcgac

SEQ ID NO: 229448 - DNA, 15 bp, Homo sapiens
gcctggctatggcga

SEQ ID NO: 229449 - DNA, 15 bp, Homo sapiens
ggcctggctatggcg

SEQ ID NO: 229450 - DNA, 15 bp, Homo sapiens
gggcctggctatggc

SEQ ID NO: 229451 - DNA, 15 bp, Homo sapiens
tgggcctggctatgg

SEQ ID NO: 229452 - DNA, 15 bp, Homo sapiens
atgggcctggctatg

SEQ ID NO: 229453 - DNA, 15 bp, Homo sapiens
catgggcctggctat

SEQ ID NO: 229454 - DNA, 15 bp, Homo sapiens
gcatgggcctggcta

SEQ ID NO: 229455 - DNA, 15 bp, Homo sapiens
agcatgggcctggct

SEQ ID NO: 229456 - DNA, 15 bp, Homo sapiens
gagcatgggcctggc

SEQ ID NO: 229457 - DNA, 15 bp, Homo sapiens
agagcatgggcctgg

SEQ ID NO: 229458 - DNA, 15 bp, Homo sapiens
tagagcatgggcctg

SEQ ID NO: 229459 - DNA, 15 bp, Homo sapiens
ctagagcatgggcct

SEQ ID NO: 229460 - DNA, 15 bp, Homo sapiens
cctagagcatgggcc

SEQ ID NO: 229461 - DNA, 15 bp, Homo sapiens
tcctagagcatgggc

SEQ ID NO: 229462 - DNA, 15 bp, Homo sapiens
ttcctagagcatggg

SEQ ID NO: 229463 - DNA, 15 bp, Homo sapiens
tttcctagagcatgg

SEQ ID NO: 229464 - DNA, 15 bp, Homo sapiens
ctttcctagagcatg

SEQ ID NO: 229465 - DNA, 15 bp, Homo sapiens
gctttcctagagcat

SEQ ID NO: 229466 - DNA, 15 bp, Homo sapiens
ggctttcctagagca

SEQ ID NO: 229467 - DNA, 15 bp, Homo sapiens
gggctttcctagagc

SEQ ID NO: 229468 - DNA, 15 bp, Homo sapiens
agggctttcctagag

SEQ ID NO: 229469 - DNA, 15 bp, Homo sapiens
tagggctttcctaga

SEQ ID NO: 229470 - DNA, 15 bp, Homo sapiens
ctagggctttcctag

SEQ ID NO: 229471 - DNA, 15 bp, Homo sapiens
gctagggctttccta

SEQ ID NO: 229472 - DNA, 15 bp, Homo sapiens
agctagggctttcct

SEQ ID NO: 229473 - DNA, 15 bp, Homo sapiens
aagctagggctttcc

SEQ ID NO: 229474 - DNA, 15 bp, Homo sapiens
caagctagggctttc

SEQ ID NO: 229475 - DNA, 15 bp, Homo sapiens
gcaagctagggcttt

SEQ ID NO: 229476 - DNA, 15 bp, Homo sapiens
agcaagctagggctt

SEQ ID NO: 229477 - DNA, 15 bp, Homo sapiens
aagcaagctagggct

SEQ ID NO: 229478 - DNA, 15 bp, Homo sapiens
aaagcaagctagggc

SEQ ID NO: 229479 - DNA, 15 bp, Homo sapiens
gaaagcaagctaggg

SEQ ID NO: 229480 - DNA, 15 bp, Homo sapiens
agaaagcaagctagg

SEQ ID NO: 229481 - DNA, 15 bp, Homo sapiens
aagaaagcaagctag

SEQ ID NO: 229482 - DNA, 15 bp, Homo sapiens
caagaaagcaagcta

SEQ ID NO: 229483 - DNA, 15 bp, Homo sapiens
ccaagaaagcaagct

SEQ ID NO: 229484 - DNA, 15 bp, Homo sapiens
cccaagaaagcaagc

SEQ ID NO: 229485 - DNA, 15 bp, Homo sapiens
acccaagaaagcaag

SEQ ID NO: 229486 - DNA, 15 bp, Homo sapiens
gacccaagaaagcaa

SEQ ID NO: 229487 - DNA, 15 bp, Homo sapiens
agacccaagaaagca

SEQ ID NO: 229488 - DNA, 15 bp, Homo sapiens
cagacccaagaaagc

SEQ ID NO: 229489 - DNA, 15 bp, Homo sapiens
gcagacccaagaaag

SEQ ID NO: 229490 - DNA, 15 bp, Homo sapiens
agcagacccaagaaa

SEQ ID NO: 229491 - DNA, 15 bp, Homo sapiens
gagcagacccaagaa

SEQ ID NO: 229492 - DNA, 15 bp, Homo sapiens
agagcagacccaaga

SEQ ID NO: 229493 - DNA, 15 bp, Homo sapiens
cagagcagacccaag

SEQ ID NO: 229494 - DNA, 15 bp, Homo sapiens
ccagagcagacccaa

SEQ ID NO: 229495 - DNA, 15 bp, Homo sapiens
cccagagcagaccca

SEQ ID NO: 229496 - DNA, 15 bp, Homo sapiens
acccagagcagaccc

SEQ ID NO: 229497 - DNA, 15 bp, Homo sapiens
gacccagagcagacc

SEQ ID NO: 229498 - DNA, 15 bp, Homo sapiens
tgacccagagcagac

SEQ ID NO: 229499 - DNA, 15 bp, Homo sapiens
ctgacccagagcaga

SEQ ID NO: 229500 - DNA, 15 bp, Homo sapiens
cctgacccagagcag

SEQ ID NO: 229501 - DNA, 15 bp, Homo sapiens
tcctgacccagagca

SEQ ID NO: 229502 - DNA, 15 bp, Homo sapiens
ctcctgacccagagc

SEQ ID NO: 229503 - DNA, 15 bp, Homo sapiens
actcctgacccagag

SEQ ID NO: 229504 - DNA, 15 bp, Homo sapiens
aactcctgacccaga

SEQ ID NO: 229505 - DNA, 15 bp, Homo sapiens
aaactcctgacccag

SEQ ID NO: 229506 - DNA, 15 bp, Homo sapiens
gaaactcctgaccca

SEQ ID NO: 229507 - DNA, 15 bp, Homo sapiens
ggaaactcctgaccc

SEQ ID NO: 229508 - DNA, 15 bp, Homo sapiens
gggaaactcctgacc

SEQ ID NO: 229509 - DNA, 15 bp, Homo sapiens
agggaaactcctgac

SEQ ID NO: 229510 - DNA, 15 bp, Homo sapiens
cagggaaactcctga

SEQ ID NO: 229511 - DNA, 15 bp, Homo sapiens
tcagggaaactcctg

SEQ ID NO: 229512 - DNA, 15 bp, Homo sapiens
ctcagggaaactcct

SEQ ID NO: 229513 - DNA, 15 bp, Homo sapiens
tctcagggaaactcc

SEQ ID NO: 229514 - DNA, 15 bp, Homo sapiens
ttctcagggaaactc

SEQ ID NO: 229515 - DNA, 15 bp, Homo sapiens
cttctcagggaaact

SEQ ID NO: 229516 - DNA, 15 bp, Homo sapiens
ccttctcagggaaac

SEQ ID NO: 229517 - DNA, 15 bp, Homo sapiens
tccttctcagggaaa

SEQ ID NO: 229518 - DNA, 15 bp, Homo sapiens
atccttctcagggaa

SEQ ID NO: 229519 - DNA, 15 bp, Homo sapiens
tatccttctcaggga

SEQ ID NO: 229520 - DNA, 15 bp, Homo sapiens
atatccttctcaggg

SEQ ID NO: 229521 - DNA, 15 bp, Homo sapiens
aatatccttctcagg

SEQ ID NO: 229522 - DNA, 15 bp, Homo sapiens
caatatccttctcag

SEQ ID NO: 229523 - DNA, 15 bp, Homo sapiens
gcaatatccttctca

SEQ ID NO: 229524 - DNA, 15 bp, Homo sapiens
tgcaatatccttctc

SEQ ID NO: 229525 - DNA, 15 bp, Homo sapiens
atgcaatatccttct

SEQ ID NO: 229526 - DNA, 15 bp, Homo sapiens
aatgcaatatccttc

SEQ ID NO: 229527 - DNA, 15 bp, Homo sapiens
gaatgcaatatcctt

SEQ ID NO: 229528 - DNA, 15 bp, Homo sapiens
cgaatgcaatatcct

SEQ ID NO: 229529 - DNA, 15 bp, Homo sapiens
ccgaatgcaatatcc

SEQ ID NO: 229530 - DNA, 15 bp, Homo sapiens
tccgaatgcaatatc

SEQ ID NO: 229531 - DNA, 15 bp, Homo sapiens
ctccgaatgcaatat

SEQ ID NO: 229532 - DNA, 15 bp, Homo sapiens
actccgaatgcaata

SEQ ID NO: 229533 - DNA, 15 bp, Homo sapiens
cactccgaatgcaat

SEQ ID NO: 229534 - DNA, 15 bp, Homo sapiens
tcactccgaatgcaa

SEQ ID NO: 229535 - DNA, 15 bp, Homo sapiens
atcactccgaatgca

SEQ ID NO: 229536 - DNA, 15 bp, Homo sapiens
aatcactccgaatgc

SEQ ID NO: 229537 - DNA, 15 bp, Homo sapiens
aaatcactccgaatg

SEQ ID NO: 229538 - DNA, 15 bp, Homo sapiens
gaaatcactccgaat

SEQ ID NO: 229539 - DNA, 15 bp, Homo sapiens
agaaatcactccgaa

SEQ ID NO: 229540 - DNA, 15 bp, Homo sapiens
gagaaatcactccga

SEQ ID NO: 229541 - DNA, 15 bp, Homo sapiens
tgagaaatcactccg

SEQ ID NO: 229542 - DNA, 15 bp, Homo sapiens
atgagaaatcactcc

SEQ ID NO: 229543 - DNA, 15 bp, Homo sapiens
aatgagaaatcactc

SEQ ID NO: 229544 - DNA, 15 bp, Homo sapiens
caatgagaaatcact

SEQ ID NO: 229545 - DNA, 15 bp, Homo sapiens
acaatgagaaatcac

SEQ ID NO: 229546 - DNA, 15 bp, Homo sapiens
cacaatgagaaatca

SEQ ID NO: 229547 - DNA, 15 bp, Homo sapiens
tcacaatgagaaatc

SEQ ID NO: 229548 - DNA, 15 bp, Homo sapiens
atcacaatgagaaat

SEQ ID NO: 229549 - DNA, 15 bp, Homo sapiens
aatcacaatgagaaa

SEQ ID NO: 229550 - DNA, 15 bp, Homo sapiens
gaatcacaatgagaa

SEQ ID NO: 229551 - DNA, 15 bp, Homo sapiens
agaatcacaatgaga

SEQ ID NO: 229552 - DNA, 15 bp, Homo sapiens
cagaatcacaatgag

SEQ ID NO: 229553 - DNA, 15 bp, Homo sapiens
ccagaatcacaatga

SEQ ID NO: 229554 - DNA, 15 bp, Homo sapiens
tccagaatcacaatg

SEQ ID NO: 229555 - DNA, 15 bp, Homo sapiens
ttccagaatcacaat

SEQ ID NO: 229556 - DNA, 15 bp, Homo sapiens
cttccagaatcacaa

SEQ ID NO: 229557 - DNA, 15 bp, Homo sapiens
gcttccagaatcaca

SEQ ID NO: 229558 - DNA, 15 bp, Homo sapiens
agcttccagaatcac

SEQ ID NO: 229559 - DNA, 15 bp, Homo sapiens
cagcttccagaatca

SEQ ID NO: 229560 - DNA, 15 bp, Homo sapiens
acagcttccagaatc

SEQ ID NO: 229561 - DNA, 15 bp, Homo sapiens
aacagcttccagaat

SEQ ID NO: 229562 - DNA, 15 bp, Homo sapiens
aaacagcttccagaa

SEQ ID NO: 229563 - DNA, 15 bp, Homo sapiens
aaaacagcttccaga

SEQ ID NO: 229564 - DNA, 15 bp, Homo sapiens
caaaacagcttccag

SEQ ID NO: 229565 - DNA, 15 bp, Homo sapiens
acaaaacagcttcca

SEQ ID NO: 229566 - DNA, 15 bp, Homo sapiens
aacaaaacagcttcc

SEQ ID NO: 229567 - DNA, 15 bp, Homo sapiens
aaacaaaacagcttc

SEQ ID NO: 229568 - DNA, 15 bp, Homo sapiens
caaacaaaacagctt

SEQ ID NO: 229569 - DNA, 15 bp, Homo sapiens
ccaaacaaaacagct

SEQ ID NO: 229570 - DNA, 15 bp, Homo sapiens
cccaaacaaaacagc

SEQ ID NO: 229571 - DNA, 15 bp, Homo sapiens
gcccaaacaaaacag

SEQ ID NO: 229572 - DNA, 15 bp, Homo sapiens
ggcccaaacaaaaca

SEQ ID NO: 229573 - DNA, 15 bp, Homo sapiens
tggcccaaacaaaac

SEQ ID NO: 229574 - DNA, 15 bp, Homo sapiens
gtggcccaaacaaaa

SEQ ID NO: 229575 - DNA, 15 bp, Homo sapiens
ggtggcccaaacaaa

SEQ ID NO: 229576 - DNA, 15 bp, Homo sapiens
aggtggcccaaacaa

SEQ ID NO: 229577 - DNA, 15 bp, Homo sapiens
caggtggcccaaaca

SEQ ID NO: 229578 - DNA, 15 bp, Homo sapiens
acaggtggcccaaac

SEQ ID NO: 229579 - DNA, 15 bp, Homo sapiens
gacaggtggcccaaa

SEQ ID NO: 229580 - DNA, 15 bp, Homo sapiens
ggacaggtggcccaa

SEQ ID NO: 229581 - DNA, 15 bp, Homo sapiens
aggacaggtggccca

SEQ ID NO: 229582 - DNA, 15 bp, Homo sapiens
caggacaggtggccc

SEQ ID NO: 229583 - DNA, 15 bp, Homo sapiens
ccaggacaggtggcc

SEQ ID NO: 229584 - DNA, 15 bp, Homo sapiens
gccaggacaggtggc

SEQ ID NO: 229585 - DNA, 15 bp, Homo sapiens
tgccaggacaggtgg

SEQ ID NO: 229586 - DNA, 15 bp, Homo sapiens
atgccaggacaggtg

SEQ ID NO: 229587 - DNA, 15 bp, Homo sapiens
catgccaggacaggt

SEQ ID NO: 229588 - DNA, 15 bp, Homo sapiens
tcatgccaggacagg

SEQ ID NO: 229589 - DNA, 15 bp, Homo sapiens
ttcatgccaggacag

SEQ ID NO: 229590 - DNA, 15 bp, Homo sapiens
cttcatgccaggaca

SEQ ID NO: 229591 - DNA, 15 bp, Homo sapiens
gcttcatgccaggac

SEQ ID NO: 229592 - DNA, 15 bp, Homo sapiens
agcttcatgccagga

SEQ ID NO: 229593 - DNA, 15 bp, Homo sapiens
tagcttcatgccagg

SEQ ID NO: 229594 - DNA, 15 bp, Homo sapiens
ctagcttcatgccag

SEQ ID NO: 229595 - DNA, 15 bp, Homo sapiens
cctagcttcatgcca

SEQ ID NO: 229596 - DNA, 15 bp, Homo sapiens
ccctagcttcatgcc

SEQ ID NO: 229597 - DNA, 15 bp, Homo sapiens
gccctagcttcatgc

SEQ ID NO: 229598 - DNA, 15 bp, Homo sapiens
agccctagcttcatg

SEQ ID NO: 229599 - DNA, 15 bp, Homo sapiens
gagccctagcttcat

SEQ ID NO: 229600 - DNA, 15 bp, Homo sapiens
tgagccctagcttca

SEQ ID NO: 229601 - DNA, 15 bp, Homo sapiens
ctgagccctagcttc

SEQ ID NO: 229602 - DNA, 15 bp, Homo sapiens
actgagccctagctt

SEQ ID NO: 229603 - DNA, 15 bp, Homo sapiens
gactgagccctagct

SEQ ID NO: 229604 - DNA, 15 bp, Homo sapiens
tgactgagccctagc

SEQ ID NO: 229605 - DNA, 15 bp, Homo sapiens
ttgactgagccctag

SEQ ID NO: 229606 - DNA, 15 bp, Homo sapiens
cttgactgagcccta

SEQ ID NO: 229607 - DNA, 15 bp, Homo sapiens
tcttgactgagccct

SEQ ID NO: 229608 - DNA, 15 bp, Homo sapiens
ctcttgactgagccc

SEQ ID NO: 229609 - DNA, 15 bp, Homo sapiens
actcttgactgagcc

SEQ ID NO: 229610 - DNA, 15 bp, Homo sapiens
gactcttgactgagc

SEQ ID NO: 229611 - DNA, 15 bp, Homo sapiens
tgactcttgactgag

SEQ ID NO: 229612 - DNA, 15 bp, Homo sapiens
atgactcttgactga

SEQ ID NO: 229613 - DNA, 15 bp, Homo sapiens
aatgactcttgactg

SEQ ID NO: 229614 - DNA, 15 bp, Homo sapiens
aaatgactcttgact

SEQ ID NO: 229615 - DNA, 15 bp, Homo sapiens
caaatgactcttgac

SEQ ID NO: 229616 - DNA, 15 bp, Homo sapiens
ccaaatgactcttga

SEQ ID NO: 229617 - DNA, 15 bp, Homo sapiens
gccaaatgactcttg

SEQ ID NO: 229618 - DNA, 15 bp, Homo sapiens
agccaaatgactctt

SEQ ID NO: 229619 - DNA, 15 bp, Homo sapiens
gagccaaatgactct

SEQ ID NO: 229620 - DNA, 15 bp, Homo sapiens
tgagccaaatgactc

SEQ ID NO: 229621 - DNA, 15 bp, Homo sapiens
atgagccaaatgact

SEQ ID NO: 229622 - DNA, 15 bp, Homo sapiens
tatgagccaaatgac

SEQ ID NO: 229623 - DNA, 15 bp, Homo sapiens
ctatgagccaaatga

SEQ ID NO: 229624 - DNA, 15 bp, Homo sapiens
tctatgagccaaatg

SEQ ID NO: 229625 - DNA, 15 bp, Homo sapiens
atctatgagccaaat

SEQ ID NO: 229626 - DNA, 15 bp, Homo sapiens
catctatgagccaaa

SEQ ID NO: 229627 - DNA, 15 bp, Homo sapiens
ccatctatgagccaa

SEQ ID NO: 229628 - DNA, 15 bp, Homo sapiens
tccatctatgagcca

SEQ ID NO: 229629 - DNA, 15 bp, Homo sapiens
ttccatctatgagcc

SEQ ID NO: 229630 - DNA, 15 bp, Homo sapiens
cttccatctatgagc

SEQ ID NO: 229631 - DNA, 15 bp, Homo sapiens
ccttccatctatgag

SEQ ID NO: 229632 - DNA, 15 bp, Homo sapiens
tccttccatctatga

SEQ ID NO: 229633 - DNA, 15 bp, Homo sapiens
ctccttccatctatg

SEQ ID NO: 229634 - DNA, 15 bp, Homo sapiens
actccttccatctat

SEQ ID NO: 229635 - DNA, 15 bp, Homo sapiens
tactccttccatcta

SEQ ID NO: 229636 - DNA, 15 bp, Homo sapiens
ctactccttccatct

SEQ ID NO: 229637 - DNA, 15 bp, Homo sapiens
cctactccttccatc

SEQ ID NO: 229638 - DNA, 15 bp, Homo sapiens
ccctactccttccat

SEQ ID NO: 229639 - DNA, 15 bp, Homo sapiens
tccctactccttcca

SEQ ID NO: 229640 - DNA, 15 bp, Homo sapiens
gtccctactccttcc

SEQ ID NO: 229641 - DNA, 15 bp, Homo sapiens
tgtccctactccttc

SEQ ID NO: 229642 - DNA, 15 bp, Homo sapiens
atgtccctactcctt

SEQ ID NO: 229643 - DNA, 15 bp, Homo sapiens
gatgtccctactcct

SEQ ID NO: 229644 - DNA, 15 bp, Homo sapiens
ggatgtccctactcc

SEQ ID NO: 229645 - DNA, 15 bp, Homo sapiens
aggatgtccctactc

SEQ ID NO: 229646 - DNA, 15 bp, Homo sapiens
caggatgtccctact

SEQ ID NO: 229647 - DNA, 15 bp, Homo sapiens
tcaggatgtccctac

SEQ ID NO: 229648 - DNA, 15 bp, Homo sapiens
ctcaggatgtcccta

SEQ ID NO: 229649 - DNA, 15 bp, Homo sapiens
cctcaggatgtccct

SEQ ID NO: 229650 - DNA, 15 bp, Homo sapiens
gcctcaggatgtccc

SEQ ID NO: 229651 - DNA, 15 bp, Homo sapiens
ggcctcaggatgtcc

SEQ ID NO: 229652 - DNA, 15 bp, Homo sapiens
aggcctcaggatgtc

SEQ ID NO: 229653 - DNA, 15 bp, Homo sapiens
caggcctcaggatgt

SEQ ID NO: 229654 - DNA, 15 bp, Homo sapiens
gcaggcctcaggatg

SEQ ID NO: 229655 - DNA, 15 bp, Homo sapiens
cgcaggcctcaggat

SEQ ID NO: 229656 - DNA, 15 bp, Homo sapiens
tcgcaggcctcagga

SEQ ID NO: 229657 - DNA, 15 bp, Homo sapiens
ctcgcaggcctcagg

SEQ ID NO: 229658 - DNA, 15 bp, Homo sapiens
cctcgcaggcctcag

SEQ ID NO: 229659 - DNA, 15 bp, Homo sapiens
gcctcgcaggcctca

SEQ ID NO: 229660 - DNA, 15 bp, Homo sapiens
agcctcgcaggcctc

SEQ ID NO: 229661 - DNA, 15 bp, Homo sapiens
gagcctcgcaggcct

SEQ ID NO: 229662 - DNA, 15 bp, Homo sapiens
tgagcctcgcaggcc

SEQ ID NO: 229663 - DNA, 15 bp, Homo sapiens
ttgagcctcgcaggc

SEQ ID NO: 229664 - DNA, 15 bp, Homo sapiens
tttgagcctcgcagg

SEQ ID NO: 229665 - DNA, 15 bp, Homo sapiens
ctttgagcctcgcag

SEQ ID NO: 229666 - DNA, 15 bp, Homo sapiens
tctttgagcctcgca

SEQ ID NO: 229667 - DNA, 15 bp, Homo sapiens
gtctttgagcctcgc

SEQ ID NO: 229668 - DNA, 15 bp, Homo sapiens
ggtctttgagcctcg

SEQ ID NO: 229669 - DNA, 15 bp, Homo sapiens
tggtctttgagcctc

SEQ ID NO: 229670 - DNA, 15 bp, Homo sapiens
ctggtctttgagcct

SEQ ID NO: 229671 - DNA, 15 bp, Homo sapiens
cctggtctttgagcc

SEQ ID NO: 229672 - DNA, 15 bp, Homo sapiens
gcctggtctttgagc

SEQ ID NO: 229673 - DNA, 15 bp, Homo sapiens
tgcctggtctttgag

SEQ ID NO: 229674 - DNA, 15 bp, Homo sapiens
ctgcctggtctttga

SEQ ID NO: 229675 - DNA, 15 bp, Homo sapiens
cctgcctggtctttg

SEQ ID NO: 229676 - DNA, 15 bp, Homo sapiens
ccctgcctggtcttt

SEQ ID NO: 229677 - DNA, 15 bp, Homo sapiens
tccctgcctggtctt

SEQ ID NO: 229678 - DNA, 15 bp, Homo sapiens
gtccctgcctggtct

SEQ ID NO: 229679 - DNA, 15 bp, Homo sapiens
tgtccctgcctggtc

SEQ ID NO: 229680 - DNA, 15 bp, Homo sapiens
gtgtccctgcctggt

SEQ ID NO: 229681 - DNA, 15 bp, Homo sapiens
agtgtccctgcctgg

SEQ ID NO: 229682 - DNA, 15 bp, Homo sapiens
cagtgtccctgcctg

SEQ ID NO: 229683 - DNA, 15 bp, Homo sapiens
ccagtgtccctgcct

SEQ ID NO: 229684 - DNA, 15 bp, Homo sapiens
tccagtgtccctgcc

SEQ ID NO: 229685 - DNA, 15 bp, Homo sapiens
ttccagtgtccctgc

SEQ ID NO: 229686 - DNA, 15 bp, Homo sapiens
tttccagtgtccctg

SEQ ID NO: 229687 - DNA, 15 bp, Homo sapiens
ttttccagtgtccct

SEQ ID NO: 229688 - DNA, 15 bp, Homo sapiens
gttttccagtgtccc

SEQ ID NO: 229689 - DNA, 15 bp, Homo sapiens
tgttttccagtgtcc

SEQ ID NO: 229690 - DNA, 15 bp, Homo sapiens
ctgttttccagtgtc

SEQ ID NO: 229691 - DNA, 15 bp, Homo sapiens
actgttttccagtgt

SEQ ID NO: 229692 - DNA, 15 bp, Homo sapiens
gactgttttccagtg

SEQ ID NO: 229693 - DNA, 15 bp, Homo sapiens
tgactgttttccagt

SEQ ID NO: 229694 - DNA, 15 bp, Homo sapiens
atgactgttttccag

SEQ ID NO: 229695 - DNA, 15 bp, Homo sapiens
aatgactgttttcca

SEQ ID NO: 229696 - DNA, 15 bp, Homo sapiens
taatgactgttttcc

SEQ ID NO: 229697 - DNA, 15 bp, Homo sapiens
ataatgactgttttc

SEQ ID NO: 229698 - DNA, 15 bp, Homo sapiens
gataatgactgtttt

SEQ ID NO: 229699 - DNA, 15 bp, Homo sapiens
agataatgactgttt

SEQ ID NO: 229700 - DNA, 15 bp, Homo sapiens
gagataatgactgtt

SEQ ID NO: 229701 - DNA, 15 bp, Homo sapiens
agagataatgactgt

SEQ ID NO: 229702 - DNA, 15 bp, Homo sapiens
cagagataatgactg

SEQ ID NO: 229703 - DNA, 15 bp, Homo sapiens
tcagagataatgact

SEQ ID NO: 229704 - DNA, 15 bp, Homo sapiens
ctcagagataatgac

SEQ ID NO: 229705 - DNA, 15 bp, Homo sapiens
actcagagataatga

SEQ ID NO: 229706 - DNA, 15 bp, Homo sapiens
gactcagagataatg

SEQ ID NO: 229707 - DNA, 15 bp, Homo sapiens
agactcagagataat

SEQ ID NO: 229708 - DNA, 15 bp, Homo sapiens
gagactcagagataa

SEQ ID NO: 229709 - DNA, 15 bp, Homo sapiens
tgagactcagagata

SEQ ID NO: 229710 - DNA, 15 bp, Homo sapiens
gtgagactcagagat

SEQ ID NO: 229711 - DNA, 15 bp, Homo sapiens
tgtgagactcagaga

SEQ ID NO: 229712 - DNA, 15 bp, Homo sapiens
ctgtgagactcagag

SEQ ID NO: 229713 - DNA, 15 bp, Homo sapiens
gctgtgagactcaga

SEQ ID NO: 229714 - DNA, 15 bp, Homo sapiens
tgctgtgagactcag

SEQ ID NO: 229715 - DNA, 15 bp, Homo sapiens
ttgctgtgagactca

SEQ ID NO: 229716 - DNA, 15 bp, Homo sapiens
tttgctgtgagactc

SEQ ID NO: 229717 - DNA, 15 bp, Homo sapiens
ttttgctgtgagact

SEQ ID NO: 229718 - DNA, 15 bp, Homo sapiens
tttttgctgtgagac

SEQ ID NO: 229719 - DNA, 15 bp, Homo sapiens
gtttttgctgtgaga

SEQ ID NO: 229720 - DNA, 15 bp, Homo sapiens
agtttttgctgtgag

SEQ ID NO: 229721 - DNA, 15 bp, Homo sapiens
gagtttttgctgtga

SEQ ID NO: 229722 - DNA, 15 bp, Homo sapiens
tgagtttttgctgtg

SEQ ID NO: 229723 - DNA, 15 bp, Homo sapiens
ctgagtttttgctgt

SEQ ID NO: 229724 - DNA, 15 bp, Homo sapiens
actgagtttttgctg

SEQ ID NO: 229725 - DNA, 15 bp, Homo sapiens
cactgagtttttgct

SEQ ID NO: 229726 - DNA, 15 bp, Homo sapiens
tcactgagtttttgc

SEQ ID NO: 229727 - DNA, 15 bp, Homo sapiens
ttcactgagtttttg

SEQ ID NO: 229728 - DNA, 15 bp, Homo sapiens
cttcactgagttttt

SEQ ID NO: 229729 - DNA, 15 bp, Homo sapiens
tcttcactgagtttt

SEQ ID NO: 229730 - DNA, 15 bp, Homo sapiens
ctcttcactgagttt

SEQ ID NO: 229731 - DNA, 15 bp, Homo sapiens
cctcttcactgagtt

SEQ ID NO: 229732 - DNA, 15 bp, Homo sapiens
acctcttcactgagt

SEQ ID NO: 229733 - DNA, 15 bp, Homo sapiens
cacctcttcactgag

SEQ ID NO: 229734 - DNA, 15 bp, Homo sapiens
tcacctcttcactga

SEQ ID NO: 229735 - DNA, 15 bp, Homo sapiens
gtcacctcttcactg

SEQ ID NO: 229736 - DNA, 15 bp, Homo sapiens
agtcacctcttcact

SEQ ID NO: 229737 - DNA, 15 bp, Homo sapiens
cagtcacctcttcac

SEQ ID NO: 229738 - DNA, 15 bp, Homo sapiens
acagtcacctcttca

SEQ ID NO: 229739 - DNA, 15 bp, Homo sapiens
tacagtcacctcttc

SEQ ID NO: 229740 - DNA, 15 bp, Homo sapiens
ctacagtcacctctt

SEQ ID NO: 229741 - DNA, 15 bp, Homo sapiens
tctacagtcacctct

SEQ ID NO: 229742 - DNA, 15 bp, Homo sapiens
atctacagtcacctc

SEQ ID NO: 229743 - DNA, 15 bp, Homo sapiens
catctacagtcacct

SEQ ID NO: 229744 - DNA, 15 bp, Homo sapiens
ccatctacagtcacc

SEQ ID NO: 229745 - DNA, 15 bp, Homo sapiens
tccatctacagtcac

SEQ ID NO: 229746 - DNA, 15 bp, Homo sapiens
ctccatctacagtca

SEQ ID NO: 229747 - DNA, 15 bp, Homo sapiens
cctccatctacagtc

SEQ ID NO: 229748 - DNA, 15 bp, Homo sapiens
ccctccatctacagt

SEQ ID NO: 229749 - DNA, 15 bp, Homo sapiens
tccctccatctacag

SEQ ID NO: 229750 - DNA, 15 bp, Homo sapiens
ctccctccatctaca

SEQ ID NO: 229751 - DNA, 15 bp, Homo sapiens
cctccctccatctac

SEQ ID NO: 229752 - DNA, 15 bp, Homo sapiens
acctccctccatcta

SEQ ID NO: 229753 - DNA, 15 bp, Homo sapiens
cacctccctccatct

SEQ ID NO: 229754 - DNA, 15 bp, Homo sapiens
ccacctccctccatc

SEQ ID NO: 229755 - DNA, 15 bp, Homo sapiens
accacctccctccat

SEQ ID NO: 229756 - DNA, 15 bp, Homo sapiens
caccacctccctcca

SEQ ID NO: 229757 - DNA, 15 bp, Homo sapiens
tcaccacctccctcc

SEQ ID NO: 229758 - DNA, 15 bp, Homo sapiens
ctcaccacctccctc

SEQ ID NO: 229759 - DNA, 15 bp, Homo sapiens
tctcaccacctccct

SEQ ID NO: 229760 - DNA, 15 bp, Homo sapiens
ttctcaccacctccc

SEQ ID NO: 229761 - DNA, 15 bp, Homo sapiens
attctcaccacctcc

SEQ ID NO: 229762 - DNA, 15 bp, Homo sapiens
aattctcaccacctc

SEQ ID NO: 229763 - DNA, 15 bp, Homo sapiens
aaattctcaccacct

SEQ ID NO: 229764 - DNA, 15 bp, Homo sapiens
gaaattctcaccacc

SEQ ID NO: 229765 - DNA, 15 bp, Homo sapiens
tgaaattctcaccac

SEQ ID NO: 229766 - DNA, 15 bp, Homo sapiens
gtgaaattctcacca

SEQ ID NO: 229767 - DNA, 15 bp, Homo sapiens
agtgaaattctcacc

SEQ ID NO: 229768 - DNA, 15 bp, Homo sapiens
aagtgaaattctcac

SEQ ID NO: 229769 - DNA, 15 bp, Homo sapiens
gaagtgaaattctca

SEQ ID NO: 229770 - DNA, 15 bp, Homo sapiens
agaagtgaaattctc

SEQ ID NO: 229771 - DNA, 15 bp, Homo sapiens
gagaagtgaaattct

SEQ ID NO: 229772 - DNA, 15 bp, Homo sapiens
tgagaagtgaaattc

SEQ ID NO: 229773 - DNA, 15 bp, Homo sapiens
ctgagaagtgaaatt

SEQ ID NO: 229774 - DNA, 15 bp, Homo sapiens
tctgagaagtgaaat

SEQ ID NO: 229775 - DNA, 15 bp, Homo sapiens
ttctgagaagtgaaa

SEQ ID NO: 229776 - DNA, 15 bp, Homo sapiens
attctgagaagtgaa

SEQ ID NO: 229777 - DNA, 15 bp, Homo sapiens
gattctgagaagtga

SEQ ID NO: 229778 - DNA, 15 bp, Homo sapiens
ggattctgagaagtg

SEQ ID NO: 229779 - DNA, 15 bp, Homo sapiens
aggattctgagaagt

SEQ ID NO: 229780 - DNA, 15 bp, Homo sapiens
aaggattctgagaag

SEQ ID NO: 229781 - DNA, 15 bp, Homo sapiens
gaaggattctgagaa

SEQ ID NO: 229782 - DNA, 15 bp, Homo sapiens
agaaggattctgaga

SEQ ID NO: 229783 - DNA, 15 bp, Homo sapiens
aagaaggattctgag

SEQ ID NO: 229784 - DNA, 15 bp, Homo sapiens
caagaaggattctga

SEQ ID NO: 229785 - DNA, 15 bp, Homo sapiens
ccaagaaggattctg

SEQ ID NO: 229786 - DNA, 15 bp, Homo sapiens
cccaagaaggattct

SEQ ID NO: 229787 - DNA, 15 bp, Homo sapiens
ccccaagaaggattc

SEQ ID NO: 229788 - DNA, 15 bp, Homo sapiens
tccccaagaaggatt

SEQ ID NO: 229789 - DNA, 15 bp, Homo sapiens
ctccccaagaaggat

SEQ ID NO: 229790 - DNA, 15 bp, Homo sapiens
tctccccaagaagga

SEQ ID NO: 229791 - DNA, 15 bp, Homo sapiens
ttctccccaagaagg

SEQ ID NO: 229792 - DNA, 15 bp, Homo sapiens
gttctccccaagaag

SEQ ID NO: 229793 - DNA, 15 bp, Homo sapiens
agttctccccaagaa

SEQ ID NO: 229794 - DNA, 15 bp, Homo sapiens
gagttctccccaaga

SEQ ID NO: 229795 - DNA, 15 bp, Homo sapiens
tgagttctccccaag

SEQ ID NO: 229796 - DNA, 15 bp, Homo sapiens
ttgagttctccccaa

SEQ ID NO: 229797 - DNA, 15 bp, Homo sapiens
attgagttctcccca

SEQ ID NO: 229798 - DNA, 15 bp, Homo sapiens
cattgagttctcccc

SEQ ID NO: 229799 - DNA, 15 bp, Homo sapiens
acattgagttctccc

SEQ ID NO: 229800 - DNA, 15 bp, Homo sapiens
aacattgagttctcc

SEQ ID NO: 229801 - DNA, 15 bp, Homo sapiens
taacattgagttctc

SEQ ID NO: 229802 - DNA, 15 bp, Homo sapiens
ataacattgagttct

SEQ ID NO: 229803 - DNA, 15 bp, Homo sapiens
cataacattgagttc

SEQ ID NO: 229804 - DNA, 15 bp, Homo sapiens
acataacattgagtt

SEQ ID NO: 229805 - DNA, 15 bp, Homo sapiens
gacataacattgagt

SEQ ID NO: 229806 - DNA, 15 bp, Homo sapiens
agacataacattgag

SEQ ID NO: 229807 - DNA, 15 bp, Homo sapiens
cagacataacattga

SEQ ID NO: 229808 - DNA, 15 bp, Homo sapiens
ccagacataacattg

SEQ ID NO: 229809 - DNA, 15 bp, Homo sapiens
cccagacataacatt

SEQ ID NO: 229810 - DNA, 15 bp, Homo sapiens
tcccagacataacat

SEQ ID NO: 229811 - DNA, 15 bp, Homo sapiens
atcccagacataaca

SEQ ID NO: 229812 - DNA, 15 bp, Homo sapiens
gatcccagacataac

SEQ ID NO: 229813 - DNA, 15 bp, Homo sapiens
tgatcccagacataa

SEQ ID NO: 229814 - DNA, 15 bp, Homo sapiens
ttgatcccagacata

SEQ ID NO: 229815 - DNA, 15 bp, Homo sapiens
attgatcccagacat

SEQ ID NO: 229816 - DNA, 15 bp, Homo sapiens
tattgatcccagaca

SEQ ID NO: 229817 - DNA, 15 bp, Homo sapiens
atattgatcccagac

SEQ ID NO: 229818 - DNA, 15 bp, Homo sapiens
gatattgatcccaga

SEQ ID NO: 229819 - DNA, 15 bp, Homo sapiens
tgatattgatcccag

SEQ ID NO: 229820 - DNA, 15 bp, Homo sapiens
gtgatattgatccca

SEQ ID NO: 229821 - DNA, 15 bp, Homo sapiens
tgtgatattgatccc

SEQ ID NO: 229822 - DNA, 15 bp, Homo sapiens
gtgtgatattgatcc

SEQ ID NO: 229823 - DNA, 15 bp, Homo sapiens
tgtgtgatattgatc

SEQ ID NO: 229824 - DNA, 15 bp, Homo sapiens
gtgtgtgatattgat

SEQ ID NO: 229825 - DNA, 15 bp, Homo sapiens
tgtgtgtgatattga

SEQ ID NO: 229826 - DNA, 15 bp, Homo sapiens
gtgtgtgtgatattg

SEQ ID NO: 229827 - DNA, 15 bp, Homo sapiens
agtgtgtgtgatatt

SEQ ID NO: 229828 - DNA, 15 bp, Homo sapiens
aagtgtgtgtgatat

SEQ ID NO: 229829 - DNA, 15 bp, Homo sapiens
aaagtgtgtgtgata

SEQ ID NO: 229830 - DNA, 15 bp, Homo sapiens
aaaagtgtgtgtgat

SEQ ID NO: 229831 - DNA, 15 bp, Homo sapiens
caaaagtgtgtgtga

SEQ ID NO: 229832 - DNA, 15 bp, Homo sapiens
acaaaagtgtgtgtg

SEQ ID NO: 229833 - DNA, 15 bp, Homo sapiens
cacaaaagtgtgtgt

SEQ ID NO: 229834 - DNA, 15 bp, Homo sapiens
ccacaaaagtgtgtg

SEQ ID NO: 229835 - DNA, 15 bp, Homo sapiens
cccacaaaagtgtgt

SEQ ID NO: 229836 - DNA, 15 bp, Homo sapiens
tcccacaaaagtgtg

SEQ ID NO: 229837 - DNA, 15 bp, Homo sapiens
ttcccacaaaagtgt

SEQ ID NO: 229838 - DNA, 15 bp, Homo sapiens
cttcccacaaaagtg

SEQ ID NO: 229839 - DNA, 15 bp, Homo sapiens
ccttcccacaaaagt

SEQ ID NO: 229840 - DNA, 15 bp, Homo sapiens
tccttcccacaaaag

SEQ ID NO: 229841 - DNA, 15 bp, Homo sapiens
ctccttcccacaaaa

SEQ ID NO: 229842 - DNA, 15 bp, Homo sapiens
actccttcccacaaa

SEQ ID NO: 229843 - DNA, 15 bp, Homo sapiens
cactccttcccacaa

SEQ ID NO: 229844 - DNA, 15 bp, Homo sapiens
tcactccttcccaca

SEQ ID NO: 229845 - DNA, 15 bp, Homo sapiens
ctcactccttcccac

SEQ ID NO: 229846 - DNA, 15 bp, Homo sapiens
tctcactccttccca

SEQ ID NO: 229847 - DNA, 15 bp, Homo sapiens
ctctcactccttccc

SEQ ID NO: 229848 - DNA, 15 bp, Homo sapiens
tctctcactccttcc

SEQ ID NO: 229849 - DNA, 15 bp, Homo sapiens
ttctctcactccttc

SEQ ID NO: 229850 - DNA, 15 bp, Homo sapiens
attctctcactcctt

SEQ ID NO: 229851 - DNA, 15 bp, Homo sapiens
cattctctcactcct

SEQ ID NO: 229852 - DNA, 15 bp, Homo sapiens
tcattctctcactcc

SEQ ID NO: 229853 - DNA, 15 bp, Homo sapiens
ttcattctctcactc

SEQ ID NO: 229854 - DNA, 15 bp, Homo sapiens
gttcattctctcact

SEQ ID NO: 229855 - DNA, 15 bp, Homo sapiens
cgttcattctctcac

SEQ ID NO: 229856 - DNA, 15 bp, Homo sapiens
acgttcattctctca

SEQ ID NO: 229857 - DNA, 15 bp, Homo sapiens
cacgttcattctctc

SEQ ID NO: 229858 - DNA, 15 bp, Homo sapiens
ccacgttcattctct

SEQ ID NO: 229859 - DNA, 15 bp, Homo sapiens
accacgttcattctc

SEQ ID NO: 229860 - DNA, 15 bp, Homo sapiens
caccacgttcattct

SEQ ID NO: 229861 - DNA, 15 bp, Homo sapiens
gcaccacgttcattc

SEQ ID NO: 229862 - DNA, 15 bp, Homo sapiens
agcaccacgttcatt

SEQ ID NO: 229863 - DNA, 15 bp, Homo sapiens
aagcaccacgttcat

SEQ ID NO: 229864 - DNA, 15 bp, Homo sapiens
caagcaccacgttca

SEQ ID NO: 229865 - DNA, 15 bp, Homo sapiens
tcaagcaccacgttc

SEQ ID NO: 229866 - DNA, 15 bp, Homo sapiens
ctcaagcaccacgtt

SEQ ID NO: 229867 - DNA, 15 bp, Homo sapiens
actcaagcaccacgt

SEQ ID NO: 229868 - DNA, 15 bp, Homo sapiens
tactcaagcaccacg

SEQ ID NO: 229869 - DNA, 15 bp, Homo sapiens
ttactcaagcaccac

SEQ ID NO: 229870 - DNA, 15 bp, Homo sapiens
attactcaagcacca

SEQ ID NO: 229871 - DNA, 15 bp, Homo sapiens
gattactcaagcacc

SEQ ID NO: 229872 - DNA, 15 bp, Homo sapiens
tgattactcaagcac

SEQ ID NO: 229873 - DNA, 15 bp, Homo sapiens
ttgattactcaagca

SEQ ID NO: 229874 - DNA, 15 bp, Homo sapiens
tttgattactcaagc

SEQ ID NO: 229875 - DNA, 15 bp, Homo sapiens
ctttgattactcaag

SEQ ID NO: 229876 - DNA, 15 bp, Homo sapiens
cctttgattactcaa

SEQ ID NO: 229877 - DNA, 15 bp, Homo sapiens
acctttgattactca

SEQ ID NO: 229878 - DNA, 15 bp, Homo sapiens
cacctttgattactc

SEQ ID NO: 229879 - DNA, 15 bp, Homo sapiens
gcacctttgattact

SEQ ID NO: 229880 - DNA, 15 bp, Homo sapiens
agcacctttgattac

SEQ ID NO: 229881 - DNA, 15 bp, Homo sapiens
cagcacctttgatta

SEQ ID NO: 229882 - DNA, 15 bp, Homo sapiens
ccagcacctttgatt

SEQ ID NO: 229883 - DNA, 15 bp, Homo sapiens
gccagcacctttgat

SEQ ID NO: 229884 - DNA, 15 bp, Homo sapiens
ggccagcacctttga

SEQ ID NO: 229885 - DNA, 15 bp, Homo sapiens
tggccagcacctttg

SEQ ID NO: 229886 - DNA, 15 bp, Homo sapiens
gtggccagcaccttt

SEQ ID NO: 229887 - DNA, 15 bp, Homo sapiens
tgtggccagcacctt

SEQ ID NO: 229888 - DNA, 15 bp, Homo sapiens
gtgtggccagcacct

SEQ ID NO: 229889 - DNA, 15 bp, Homo sapiens
tgtgtggccagcacc

SEQ ID NO: 229890 - DNA, 15 bp, Homo sapiens
ctgtgtggccagcac

SEQ ID NO: 229891 - DNA, 15 bp, Homo sapiens
gctgtgtggccagca

SEQ ID NO: 229892 - DNA, 15 bp, Homo sapiens
ggctgtgtggccagc

SEQ ID NO: 229893 - DNA, 15 bp, Homo sapiens
aggctgtgtggccag

SEQ ID NO: 229894 - DNA, 15 bp, Homo sapiens
aaggctgtgtggcca

SEQ ID NO: 229895 - DNA, 15 bp, Homo sapiens
gaaggctgtgtggcc

SEQ ID NO: 229896 - DNA, 15 bp, Homo sapiens
tgaaggctgtgtggc

SEQ ID NO: 229897 - DNA, 15 bp, Homo sapiens
ttgaaggctgtgtgg

SEQ ID NO: 229898 - DNA, 15 bp, Homo sapiens
cttgaaggctgtgtg

SEQ ID NO: 229899 - DNA, 15 bp, Homo sapiens
tcttgaaggctgtgt

SEQ ID NO: 229900 - DNA, 15 bp, Homo sapiens
ttcttgaaggctgtg

SEQ ID NO: 229901 - DNA, 15 bp, Homo sapiens
tttcttgaaggctgt

SEQ ID NO: 229902 - DNA, 15 bp, Homo sapiens
ctttcttgaaggctg

SEQ ID NO: 229903 - DNA, 15 bp, Homo sapiens
tctttcttgaaggct

SEQ ID NO: 229904 - DNA, 15 bp, Homo sapiens
gtctttcttgaaggc

SEQ ID NO: 229905 - DNA, 15 bp, Homo sapiens
tgtctttcttgaagg

SEQ ID NO: 229906 - DNA, 15 bp, Homo sapiens
ctgtctttcttgaag

SEQ ID NO: 229907 - DNA, 15 bp, Homo sapiens
cctgtctttcttgaa

SEQ ID NO: 229908 - DNA, 15 bp, Homo sapiens
acctgtctttcttga

SEQ ID NO: 229909 - DNA, 15 bp, Homo sapiens
aacctgtctttcttg

SEQ ID NO: 229910 - DNA, 15 bp, Homo sapiens
gaacctgtctttctt

SEQ ID NO: 229911 - DNA, 15 bp, Homo sapiens
agaacctgtctttct

SEQ ID NO: 229912 - DNA, 15 bp, Homo sapiens
cagaacctgtctttc

SEQ ID NO: 229913 - DNA, 15 bp, Homo sapiens
acagaacctgtcttt

SEQ ID NO: 229914 - DNA, 15 bp, Homo sapiens
aacagaacctgtctt

SEQ ID NO: 229915 - DNA, 15 bp, Homo sapiens
gaacagaacctgtct

SEQ ID NO: 229916 - DNA, 15 bp, Homo sapiens
tgaacagaacctgtc

SEQ ID NO: 229917 - DNA, 15 bp, Homo sapiens
gtgaacagaacctgt

SEQ ID NO: 229918 - DNA, 15 bp, Homo sapiens
ggtgaacagaacctg

SEQ ID NO: 229919 - DNA, 15 bp, Homo sapiens
cggtgaacagaacct

SEQ ID NO: 229920 - DNA, 15 bp, Homo sapiens
tcggtgaacagaacc

SEQ ID NO: 229921 - DNA, 15 bp, Homo sapiens
ctcggtgaacagaac

SEQ ID NO: 229922 - DNA, 15 bp, Homo sapiens
cctcggtgaacagaa

SEQ ID NO: 229923 - DNA, 15 bp, Homo sapiens
ccctcggtgaacaga

SEQ ID NO: 229924 - DNA, 15 bp, Homo sapiens
tccctcggtgaacag

SEQ ID NO: 229925 - DNA, 15 bp, Homo sapiens
atccctcggtgaaca

SEQ ID NO: 229926 - DNA, 15 bp, Homo sapiens
gatccctcggtgaac

SEQ ID NO: 229927 - DNA, 15 bp, Homo sapiens
agatccctcggtgaa

SEQ ID NO: 229928 - DNA, 15 bp, Homo sapiens
cagatccctcggtga

SEQ ID NO: 229929 - DNA, 15 bp, Homo sapiens
gcagatccctcggtg

SEQ ID NO: 229930 - DNA, 15 bp, Homo sapiens
ggcagatccctcggt

SEQ ID NO: 229931 - DNA, 15 bp, Homo sapiens
cggcagatccctcgg

SEQ ID NO: 229932 - DNA, 15 bp, Homo sapiens
acggcagatccctcg

SEQ ID NO: 229933 - DNA, 15 bp, Homo sapiens
cacggcagatccctc

SEQ ID NO: 229934 - DNA, 15 bp, Homo sapiens
tcacggcagatccct

SEQ ID NO: 229935 - DNA, 15 bp, Homo sapiens
ctcacggcagatccc

SEQ ID NO: 229936 - DNA, 15 bp, Homo sapiens
gctcacggcagatcc

SEQ ID NO: 229937 - DNA, 15 bp, Homo sapiens
agctcacggcagatc

SEQ ID NO: 229938 - DNA, 15 bp, Homo sapiens
cagctcacggcagat

SEQ ID NO: 229939 - DNA, 15 bp, Homo sapiens
acagctcacggcaga

SEQ ID NO: 229940 - DNA, 15 bp, Homo sapiens
cacagctcacggcag

SEQ ID NO: 229941 - DNA, 15 bp, Homo sapiens
acacagctcacggca

SEQ ID NO: 229942 - DNA, 15 bp, Homo sapiens
cacacagctcacggc

SEQ ID NO: 229943 - DNA, 15 bp, Homo sapiens
gcacacagctcacgg

SEQ ID NO: 229944 - DNA, 15 bp, Homo sapiens
agcacacagctcacg

SEQ ID NO: 229945 - DNA, 15 bp, Homo sapiens
cagcacacagctcac

SEQ ID NO: 229946 - DNA, 15 bp, Homo sapiens
tcagcacacagctca

SEQ ID NO: 229947 - DNA, 15 bp, Homo sapiens
ttcagcacacagctc

SEQ ID NO: 229948 - DNA, 15 bp, Homo sapiens
cttcagcacacagct

SEQ ID NO: 229949 - DNA, 15 bp, Homo sapiens
ccttcagcacacagc

SEQ ID NO: 229950 - DNA, 15 bp, Homo sapiens
cccttcagcacacag

SEQ ID NO: 229951 - DNA, 15 bp, Homo sapiens
acccttcagcacaca

SEQ ID NO: 229952 - DNA, 15 bp, Homo sapiens
gacccttcagcacac

SEQ ID NO: 229953 - DNA, 15 bp, Homo sapiens
agacccttcagcaca

SEQ ID NO: 229954 - DNA, 15 bp, Homo sapiens
cagacccttcagcac

SEQ ID NO: 229955 - DNA, 15 bp, Homo sapiens
ccagacccttcagca

SEQ ID NO: 229956 - DNA, 15 bp, Homo sapiens
accagacccttcagc

SEQ ID NO: 229957 - DNA, 15 bp, Homo sapiens
aaccagacccttcag

SEQ ID NO: 229958 - DNA, 15 bp, Homo sapiens
taaccagacccttca

SEQ ID NO: 229959 - DNA, 15 bp, Homo sapiens
ataaccagacccttc

SEQ ID NO: 229960 - DNA, 15 bp, Homo sapiens
cataaccagaccctt

SEQ ID NO: 229961 - DNA, 15 bp, Homo sapiens
tcataaccagaccct

SEQ ID NO: 229962 - DNA, 15 bp, Homo sapiens
ttcataaccagaccc

SEQ ID NO: 229963 - DNA, 15 bp, Homo sapiens
tttcataaccagacc

SEQ ID NO: 229964 - DNA, 15 bp, Homo sapiens
gtttcataaccagac

SEQ ID NO: 229965 - DNA, 15 bp, Homo sapiens
ggtttcataaccaga

SEQ ID NO: 229966 - DNA, 15 bp, Homo sapiens
tggtttcataaccag

SEQ ID NO: 229967 - DNA, 15 bp, Homo sapiens
atggtttcataacca

SEQ ID NO: 229968 - DNA, 15 bp, Homo sapiens
catggtttcataacc

SEQ ID NO: 229969 - DNA, 15 bp, Homo sapiens
ccatggtttcataac

SEQ ID NO: 229970 - DNA, 15 bp, Homo sapiens
gccatggtttcataa

SEQ ID NO: 229971 - DNA, 15 bp, Homo sapiens
agccatggtttcata

SEQ ID NO: 229972 - DNA, 15 bp, Homo sapiens
cagccatggtttcat

SEQ ID NO: 229973 - DNA, 15 bp, Homo sapiens
tcagccatggtttca

SEQ ID NO: 229974 - DNA, 15 bp, Homo sapiens
atcagccatggtttc

SEQ ID NO: 229975 - DNA, 15 bp, Homo sapiens
catcagccatggttt

SEQ ID NO: 229976 - DNA, 15 bp, Homo sapiens
acatcagccatggtt

SEQ ID NO: 229977 - DNA, 15 bp, Homo sapiens
gacatcagccatggt

SEQ ID NO: 229978 - DNA, 15 bp, Homo sapiens
tgacatcagccatgg

SEQ ID NO: 229979 - DNA, 15 bp, Homo sapiens
ttgacatcagccatg

SEQ ID NO: 229980 - DNA, 15 bp, Homo sapiens
attgacatcagccat

SEQ ID NO: 229981 - DNA, 15 bp, Homo sapiens
aattgacatcagcca

SEQ ID NO: 229982 - DNA, 15 bp, Homo sapiens
caattgacatcagcc

SEQ ID NO: 229983 - DNA, 15 bp, Homo sapiens
tcaattgacatcagc

SEQ ID NO: 229984 - DNA, 15 bp, Homo sapiens
atcaattgacatcag

SEQ ID NO: 229985 - DNA, 15 bp, Homo sapiens
catcaattgacatca

SEQ ID NO: 229986 - DNA, 15 bp, Homo sapiens
ccatcaattgacatc

SEQ ID NO: 229987 - DNA, 15 bp, Homo sapiens
gccatcaattgacat

SEQ ID NO: 229988 - DNA, 15 bp, Homo sapiens
tgccatcaattgaca

SEQ ID NO: 229989 - DNA, 15 bp, Homo sapiens
ttgccatcaattgac

SEQ ID NO: 229990 - DNA, 15 bp, Homo sapiens
tttgccatcaattga

SEQ ID NO: 229991 - DNA, 15 bp, Homo sapiens
ttttgccatcaattg

SEQ ID NO: 229992 - DNA, 15 bp, Homo sapiens
attttgccatcaatt

SEQ ID NO: 229993 - DNA, 15 bp, Homo sapiens
cattttgccatcaat

SEQ ID NO: 229994 - DNA, 15 bp, Homo sapiens
ccattttgccatcaa

SEQ ID NO: 229995 - DNA, 15 bp, Homo sapiens
tccattttgccatca

SEQ ID NO: 229996 - DNA, 15 bp, Homo sapiens
ttccattttgccatc

SEQ ID NO: 229997 - DNA, 15 bp, Homo sapiens
tttccattttgccat

SEQ ID NO: 229998 - DNA, 15 bp, Homo sapiens
ctttccattttgcca

SEQ ID NO: 229999 - DNA, 15 bp, Homo sapiens
tctttccattttgcc

SEQ ID NO: 230000 - DNA, 15 bp, Homo sapiens
ctctttccattttgc

SEQ ID NO: 230001 - DNA, 15 bp, Homo sapiens
cctctttccattttg

SEQ ID NO: 230002 - DNA, 15 bp, Homo sapiens
ccctctttccatttt

SEQ ID NO: 230003 - DNA, 15 bp, Homo sapiens
cccctctttccattt

SEQ ID NO: 230004 - DNA, 15 bp, Homo sapiens
tcccctctttccatt

SEQ ID NO: 230005 - DNA, 15 bp, Homo sapiens
gtcccctctttccat

SEQ ID NO: 230006 - DNA, 15 bp, Homo sapiens
tgtcccctctttcca

SEQ ID NO: 230007 - DNA, 15 bp, Homo sapiens
aatgtcccctctttc

SEQ ID NO: 230008 - DNA, 15 bp, Homo sapiens
aaatgtcccctcttt

SEQ ID NO: 230009 - DNA, 15 bp, Homo sapiens
taaatgtcccctctt

SEQ ID NO: 230010 - DNA, 15 bp, Homo sapiens
ttaaatgtcccctct

SEQ ID NO: 230011 - DNA, 15 bp, Homo sapiens
tttaaatgtcccctc

SEQ ID NO: 230012 - DNA, 15 bp, Homo sapiens
ctttaaatgtcccct

SEQ ID NO: 230013 - DNA, 15 bp, Homo sapiens
actttaaatgtcccc

SEQ ID NO: 230014 - DNA, 15 bp, Homo sapiens
aactttaaatgtccc

SEQ ID NO: 230015 - DNA, 15 bp, Homo sapiens
caactttaaatgtcc

SEQ ID NO: 230016 - DNA, 15 bp, Homo sapiens
ccaactttaaatgtc

SEQ ID NO: 230017 - DNA, 15 bp, Homo sapiens
tccaactttaaatgt

SEQ ID NO: 230018 - DNA, 15 bp, Homo sapiens
ctccaactttaaatg

SEQ ID NO: 230019 - DNA, 15 bp, Homo sapiens
actccaactttaaat

SEQ ID NO: 230020 - DNA, 15 bp, Homo sapiens
aactccaactttaaa

SEQ ID NO: 230021 - DNA, 15 bp, Homo sapiens
aaactccaactttaa

SEQ ID NO: 230022 - DNA, 15 bp, Homo sapiens
aaaactccaacttta

SEQ ID NO: 230023 - DNA, 15 bp, Homo sapiens
caaaactccaacttt

SEQ ID NO: 230024 - DNA, 15 bp, Homo sapiens
ccaaaactccaactt

SEQ ID NO: 230025 - DNA, 15 bp, Homo sapiens
tccaaaactccaact

SEQ ID NO: 230026 - DNA, 15 bp, Homo sapiens
ctccaaaactccaac

SEQ ID NO: 230027 - DNA, 15 bp, Homo sapiens
cctccaaaactccaa

SEQ ID NO: 230028 - DNA, 15 bp, Homo sapiens
tcctccaaaactcca

SEQ ID NO: 230029 - DNA, 15 bp, Homo sapiens
ctcctccaaaactcc

SEQ ID NO: 230030 - DNA, 15 bp, Homo sapiens
cctcctccaaaactc

SEQ ID NO: 230031 - DNA, 15 bp, Homo sapiens
tcctcctccaaaact

SEQ ID NO: 230032 - DNA, 15 bp, Homo sapiens
ctcctcctccaaaac

SEQ ID NO: 230033 - DNA, 15 bp, Homo sapiens
tctcctcctccaaaa

SEQ ID NO: 230034 - DNA, 15 bp, Homo sapiens
ctctcctcctccaaa

SEQ ID NO: 230035 - DNA, 15 bp, Homo sapiens
tctctcctcctccaa

SEQ ID NO: 230036 - DNA, 15 bp, Homo sapiens
ctctctcctcctcca

SEQ ID NO: 230037 - DNA, 15 bp, Homo sapiens
tctctctcctcctcc

SEQ ID NO: 230038 - DNA, 15 bp, Homo sapiens
ttctctctcctcctc

SEQ ID NO: 230039 - DNA, 15 bp, Homo sapiens
tttctctctcctcct

SEQ ID NO: 230040 - DNA, 15 bp, Homo sapiens
gtttctctctcctcc

SEQ ID NO: 230041 - DNA, 15 bp, Homo sapiens
agtttctctctcctc

SEQ ID NO: 230042 - DNA, 15 bp, Homo sapiens
cagtttctctctcct

SEQ ID NO: 230043 - DNA, 15 bp, Homo sapiens
ccagtttctctctcc

SEQ ID NO: 230044 - DNA, 15 bp, Homo sapiens
accagtttctctctc

SEQ ID NO: 230045 - DNA, 15 bp, Homo sapiens
caccagtttctctct

SEQ ID NO: 230046 - DNA, 15 bp, Homo sapiens
tcaccagtttctctc

SEQ ID NO: 230047 - DNA, 15 bp, Homo sapiens
ctcaccagtttctct

SEQ ID NO: 230048 - DNA, 15 bp, Homo sapiens
cctcaccagtttctc

SEQ ID NO: 230049 - DNA, 15 bp, Homo sapiens
acctcaccagtttct

SEQ ID NO: 230050 - DNA, 15 bp, Homo sapiens
gacctcaccagtttc

SEQ ID NO: 230051 - DNA, 15 bp, Homo sapiens
tgacctcaccagttt

SEQ ID NO: 230052 - DNA, 15 bp, Homo sapiens
ctgacctcaccagtt

SEQ ID NO: 230053 - DNA, 15 bp, Homo sapiens
actgacctcaccagt

SEQ ID NO: 230054 - DNA, 15 bp, Homo sapiens
cactgacctcaccag

SEQ ID NO: 230055 - DNA, 15 bp, Homo sapiens
ccactgacctcacca

SEQ ID NO: 230056 - DNA, 15 bp, Homo sapiens
gccactgacctcacc

SEQ ID NO: 230057 - DNA, 15 bp, Homo sapiens
agccactgacctcac

SEQ ID NO: 230058 - DNA, 15 bp, Homo sapiens
cagccactgacctca

SEQ ID NO: 230059 - DNA, 15 bp, Homo sapiens
gcagccactgacctc

SEQ ID NO: 230060 - DNA, 15 bp, Homo sapiens
agcagccactgacct

SEQ ID NO: 230061 - DNA, 15 bp, Homo sapiens
aagcagccactgacc

SEQ ID NO: 230062 - DNA, 15 bp, Homo sapiens
caagcagccactgac

SEQ ID NO: 230063 - DNA, 15 bp, Homo sapiens
ccaagcagccactga

SEQ ID NO: 230064 - DNA, 15 bp, Homo sapiens
tccaagcagccactg

SEQ ID NO: 230065 - DNA, 15 bp, Homo sapiens
ctccaagcagccact

SEQ ID NO: 230066 - DNA, 15 bp, Homo sapiens
cctccaagcagccac

SEQ ID NO: 230067 - DNA, 15 bp, Homo sapiens
tcctccaagcagcca

SEQ ID NO: 230068 - DNA, 15 bp, Homo sapiens
ttcctccaagcagcc

SEQ ID NO: 230069 - DNA, 15 bp, Homo sapiens
cttcctccaagcagc

SEQ ID NO: 230070 - DNA, 15 bp, Homo sapiens
ccttcctccaagcag

SEQ ID NO: 230071 - DNA, 15 bp, Homo sapiens
gccttcctccaagca

SEQ ID NO: 230072 - DNA, 15 bp, Homo sapiens
tgccttcctccaagc

SEQ ID NO: 230073 - DNA, 15 bp, Homo sapiens
ctgccttcctccaag

SEQ ID NO: 230074 - DNA, 15 bp, Homo sapiens
tctgccttcctccaa

SEQ ID NO: 230075 - DNA, 15 bp, Homo sapiens
ctctgccttcctcca

SEQ ID NO: 230076 - DNA, 15 bp, Homo sapiens
tctctgccttcctcc

SEQ ID NO: 230077 - DNA, 15 bp, Homo sapiens
ctctctgccttcctc

SEQ ID NO: 230078 - DNA, 15 bp, Homo sapiens
cctctctgccttcct

SEQ ID NO: 230079 - DNA, 15 bp, Homo sapiens
ccctctctgccttcc

SEQ ID NO: 230080 - DNA, 15 bp, Homo sapiens
tccctctctgccttc

SEQ ID NO: 230081 - DNA, 15 bp, Homo sapiens
ctccctctctgcctt

SEQ ID NO: 230082 - DNA, 15 bp, Homo sapiens
tctccctctctgcct

SEQ ID NO: 230083 - DNA, 15 bp, Homo sapiens
gtctccctctctgcc

SEQ ID NO: 230084 - DNA, 15 bp, Homo sapiens
tgtctccctctctgc

SEQ ID NO: 230085 - DNA, 15 bp, Homo sapiens
ttgtctccctctctg

SEQ ID NO: 230086 - DNA, 15 bp, Homo sapiens
attgtctccctctct

SEQ ID NO: 230087 - DNA, 15 bp, Homo sapiens
aattgtctccctctc

SEQ ID NO: 230088 - DNA, 15 bp, Homo sapiens
gaattgtctccctct

SEQ ID NO: 230089 - DNA, 15 bp, Homo sapiens
tgaattgtctccctc

SEQ ID NO: 230090 - DNA, 15 bp, Homo sapiens
ctgaattgtctccct

SEQ ID NO: 230091 - DNA, 15 bp, Homo sapiens
actgaattgtctccc

SEQ ID NO: 230092 - DNA, 15 bp, Homo sapiens
gactgaattgtctcc

SEQ ID NO: 230093 - DNA, 15 bp, Homo sapiens
agactgaattgtctc

SEQ ID NO: 230094 - DNA, 15 bp, Homo sapiens
cagactgaattgtct

SEQ ID NO: 230095 - DNA, 15 bp, Homo sapiens
ccagactgaattgtc

SEQ ID NO: 230096 - DNA, 15 bp, Homo sapiens
accagactgaattgt

SEQ ID NO: 230097 - DNA, 15 bp, Homo sapiens
caccagactgaattg

SEQ ID NO: 230098 - DNA, 15 bp, Homo sapiens
acaccagactgaatt

SEQ ID NO: 230099 - DNA, 15 bp, Homo sapiens
cacaccagactgaat

SEQ ID NO: 230100 - DNA, 15 bp, Homo sapiens
tcacaccagactgaa

SEQ ID NO: 230101 - DNA, 15 bp, Homo sapiens
gtcacaccagactga

SEQ ID NO: 230102 - DNA, 15 bp, Homo sapiens
ggtcacaccagactg

SEQ ID NO: 230103 - DNA, 15 bp, Homo sapiens
gggtcacaccagact

SEQ ID NO: 230104 - DNA, 15 bp, Homo sapiens
tgggtcacaccagac

SEQ ID NO: 230105 - DNA, 15 bp, Homo sapiens
ctgggtcacaccaga

SEQ ID NO: 230106 - DNA, 15 bp, Homo sapiens
cctgggtcacaccag

SEQ ID NO: 230107 - DNA, 15 bp, Homo sapiens
tcctgggtcacacca

SEQ ID NO: 230108 - DNA, 15 bp, Homo sapiens
ctcctgggtcacacc

SEQ ID NO: 230109 - DNA, 15 bp, Homo sapiens
cctcctgggtcacac

SEQ ID NO: 230110 - DNA, 15 bp, Homo sapiens
ccctcctgggtcaca

SEQ ID NO: 230111 - DNA, 15 bp, Homo sapiens
tccctcctgggtcac

SEQ ID NO: 230112 - DNA, 15 bp, Homo sapiens
gtccctcctgggtca

SEQ ID NO: 230113 - DNA, 15 bp, Homo sapiens
tgtccctcctgggtc

SEQ ID NO: 230114 - DNA, 15 bp, Homo sapiens
ctgtccctcctgggt

SEQ ID NO: 230115 - DNA, 15 bp, Homo sapiens
actgtccctcctggg

SEQ ID NO: 230116 - DNA, 15 bp, Homo sapiens
cactgtccctcctgg

SEQ ID NO: 230117 - DNA, 15 bp, Homo sapiens
acactgtccctcctg

SEQ ID NO: 230118 - DNA, 15 bp, Homo sapiens
gacactgtccctcct

SEQ ID NO: 230119 - DNA, 15 bp, Homo sapiens
agacactgtccctcc

SEQ ID NO: 230120 - DNA, 15 bp, Homo sapiens
tagacactgtccctc

SEQ ID NO: 230121 - DNA, 15 bp, Homo sapiens
ctagacactgtccct

SEQ ID NO: 230122 - DNA, 15 bp, Homo sapiens
actagacactgtccc

SEQ ID NO: 230123 - DNA, 15 bp, Homo sapiens
cactagacactgtcc

SEQ ID NO: 230124 - DNA, 15 bp, Homo sapiens
ccactagacactgtc

SEQ ID NO: 230125 - DNA, 15 bp, Homo sapiens
cccactagacactgt

SEQ ID NO: 230126 - DNA, 15 bp, Homo sapiens
ccccactagacactg

SEQ ID NO: 230127 - DNA, 15 bp, Homo sapiens
tccccactagacact

SEQ ID NO: 230128 - DNA, 15 bp, Homo sapiens
gtccccactagacac

SEQ ID NO: 230129 - DNA, 15 bp, Homo sapiens
agtccccactagaca

SEQ ID NO: 230130 - DNA, 15 bp, Homo sapiens
aagtccccactagac

SEQ ID NO: 230131 - DNA, 15 bp, Homo sapiens
caagtccccactaga

SEQ ID NO: 230132 - DNA, 15 bp, Homo sapiens
ccaagtccccactag

SEQ ID NO: 230133 - DNA, 15 bp, Homo sapiens
tccaagtccccacta

SEQ ID NO: 230134 - DNA, 15 bp, Homo sapiens
ctccaagtccccact

SEQ ID NO: 230135 - DNA, 15 bp, Homo sapiens
cctccaagtccccac

SEQ ID NO: 230136 - DNA, 15 bp, Homo sapiens
acctccaagtcccca

SEQ ID NO: 230137 - DNA, 15 bp, Homo sapiens
cacctccaagtcccc

SEQ ID NO: 230138 - DNA, 15 bp, Homo sapiens
tcacctccaagtccc

SEQ ID NO: 230139 - DNA, 15 bp, Homo sapiens
gtcacctccaagtcc

SEQ ID NO: 230140 - DNA, 15 bp, Homo sapiens
agtcacctccaagtc

SEQ ID NO: 230141 - DNA, 15 bp, Homo sapiens
aagtcacctccaagt

SEQ ID NO: 230142 - DNA, 15 bp, Homo sapiens
caagtcacctccaag

SEQ ID NO: 230143 - DNA, 15 bp, Homo sapiens
gcaagtcacctccaa

SEQ ID NO: 230144 - DNA, 15 bp, Homo sapiens
agcaagtcacctcca

SEQ ID NO: 230145 - DNA, 15 bp, Homo sapiens
cagcaagtcacctcc

SEQ ID NO: 230146 - DNA, 15 bp, Homo sapiens
acagcaagtcacctc

SEQ ID NO: 230147 - DNA, 15 bp, Homo sapiens
aacagcaagtcacct

SEQ ID NO: 230148 - DNA, 15 bp, Homo sapiens
caacagcaagtcacc

SEQ ID NO: 230149 - DNA, 15 bp, Homo sapiens
ccaacagcaagtcac

SEQ ID NO: 230150 - DNA, 15 bp, Homo sapiens
gccaacagcaagtca

SEQ ID NO: 230151 - DNA, 15 bp, Homo sapiens
agccaacagcaagtc

SEQ ID NO: 230152 - DNA, 15 bp, Homo sapiens
cagccaacagcaagt

SEQ ID NO: 230153 - DNA, 15 bp, Homo sapiens
tcagccaacagcaag

SEQ ID NO: 230154 - DNA, 15 bp, Homo sapiens
ctcagccaacagcaa

SEQ ID NO: 230155 - DNA, 15 bp, Homo sapiens
gctcagccaacagca

SEQ ID NO: 230156 - DNA, 15 bp, Homo sapiens
agctcagccaacagc

SEQ ID NO: 230157 - DNA, 15 bp, Homo sapiens
cagctcagccaacag

SEQ ID NO: 230158 - DNA, 15 bp, Homo sapiens
acagctcagccaaca

SEQ ID NO: 230159 - DNA, 15 bp, Homo sapiens
cacagctcagccaac

SEQ ID NO: 230160 - DNA, 15 bp, Homo sapiens
acacagctcagccaa

SEQ ID NO: 230161 - DNA, 15 bp, Homo sapiens
tacacagctcagcca

SEQ ID NO: 230162 - DNA, 15 bp, Homo sapiens
ttacacagctcagcc

SEQ ID NO: 230163 - DNA, 15 bp, Homo sapiens
gttacacagctcagc

SEQ ID NO: 230164 - DNA, 15 bp, Homo sapiens
tgttacacagctcag

SEQ ID NO: 230165 - DNA, 15 bp, Homo sapiens
ctgttacacagctca

SEQ ID NO: 230166 - DNA, 15 bp, Homo sapiens
gctgttacacagctc

SEQ ID NO: 230167 - DNA, 15 bp, Homo sapiens
tgctgttacacagct

SEQ ID NO: 230168 - DNA, 15 bp, Homo sapiens
gtgctgttacacagc

SEQ ID NO: 230169 - DNA, 15 bp, Homo sapiens
ggtgctgttacacag

SEQ ID NO: 230170 - DNA, 15 bp, Homo sapiens
aggtgctgttacaca

SEQ ID NO: 230171 - DNA, 15 bp, Homo sapiens
gaggtgctgttacac

SEQ ID NO: 230172 - DNA, 15 bp, Homo sapiens
agaggtgctgttaca

SEQ ID NO: 230173 - DNA, 15 bp, Homo sapiens
tagaggtgctgttac

SEQ ID NO: 230174 - DNA, 15 bp, Homo sapiens
atagaggtgctgtta

SEQ ID NO: 230175 - DNA, 15 bp, Homo sapiens
gatagaggtgctgtt

SEQ ID NO: 230176 - DNA, 15 bp, Homo sapiens
agatagaggtgctgt

SEQ ID NO: 230177 - DNA, 15 bp, Homo sapiens
gagatagaggtgctg

SEQ ID NO: 230178 - DNA, 15 bp, Homo sapiens
agagatagaggtgct

SEQ ID NO: 230179 - DNA, 15 bp, Homo sapiens
gagagatagaggtgc

SEQ ID NO: 230180 - DNA, 15 bp, Homo sapiens
ggagagatagaggtg

SEQ ID NO: 230181 - DNA, 15 bp, Homo sapiens
aggagagatagaggt

SEQ ID NO: 230182 - DNA, 15 bp, Homo sapiens
gaggagagatagagg

SEQ ID NO: 230183 - DNA, 15 bp, Homo sapiens
ggaggagagatagag

SEQ ID NO: 230184 - DNA, 15 bp, Homo sapiens
aggaggagagataga

SEQ ID NO: 230185 - DNA, 15 bp, Homo sapiens
caggaggagagatag

SEQ ID NO: 230186 - DNA, 15 bp, Homo sapiens
gcaggaggagagata

SEQ ID NO: 230187 - DNA, 15 bp, Homo sapiens
ggcaggaggagagat

SEQ ID NO: 230188 - DNA, 15 bp, Homo sapiens
aggcaggaggagaga

SEQ ID NO: 230189 - DNA, 15 bp, Homo sapiens
gaggcaggaggagag

SEQ ID NO: 230190 - DNA, 15 bp, Homo sapiens
agaggcaggaggaga

SEQ ID NO: 230191 - DNA, 15 bp, Homo sapiens
aagaggcaggaggag

SEQ ID NO: 230192 - DNA, 15 bp, Homo sapiens
caagaggcaggagga

SEQ ID NO: 230193 - DNA, 15 bp, Homo sapiens
tcaagaggcaggagg

SEQ ID NO: 230194 - DNA, 15 bp, Homo sapiens
gtcaagaggcaggag

SEQ ID NO: 230195 - DNA, 15 bp, Homo sapiens
agtcaagaggcagga

SEQ ID NO: 230196 - DNA, 15 bp, Homo sapiens
cagtcaagaggcagg

SEQ ID NO: 230197 - DNA, 15 bp, Homo sapiens
tcagtcaagaggcag

SEQ ID NO: 230198 - DNA, 15 bp, Homo sapiens
ttcagtcaagaggca

SEQ ID NO: 230199 - DNA, 15 bp, Homo sapiens
cttcagtcaagaggc

SEQ ID NO: 230200 - DNA, 15 bp, Homo sapiens
acttcagtcaagagg

SEQ ID NO: 230201 - DNA, 15 bp, Homo sapiens
gacttcagtcaagag

SEQ ID NO: 230202 - DNA, 15 bp, Homo sapiens
agacttcagtcaaga

SEQ ID NO: 230203 - DNA, 15 bp, Homo sapiens
gagacttcagtcaag

SEQ ID NO: 230204 - DNA, 15 bp, Homo sapiens
ggagacttcagtcaa

SEQ ID NO: 230205 - DNA, 15 bp, Homo sapiens
tggagacttcagtca

SEQ ID NO: 230206 - DNA, 15 bp, Homo sapiens
atggagacttcagtc

SEQ ID NO: 230207 - DNA, 15 bp, Homo sapiens
aatggagacttcagt

SEQ ID NO: 230208 - DNA, 15 bp, Homo sapiens
caatggagacttcag

SEQ ID NO: 230209 - DNA, 15 bp, Homo sapiens
gcaatggagacttca

SEQ ID NO: 230210 - DNA, 15 bp, Homo sapiens
agcaatggagacttc

SEQ ID NO: 230211 - DNA, 15 bp, Homo sapiens
gagcaatggagactt

SEQ ID NO: 230212 - DNA, 15 bp, Homo sapiens
agagcaatggagact

SEQ ID NO: 230213 - DNA, 15 bp, Homo sapiens
aagagcaatggagac

SEQ ID NO: 230214 - DNA, 15 bp, Homo sapiens
aaagagcaatggaga

SEQ ID NO: 230215 - DNA, 15 bp, Homo sapiens
gaaagagcaatggag

SEQ ID NO: 230216 - DNA, 15 bp, Homo sapiens
tgaaagagcaatgga

SEQ ID NO: 230217 - DNA, 15 bp, Homo sapiens
atgaaagagcaatgg

SEQ ID NO: 230218 - DNA, 15 bp, Homo sapiens
catgaaagagcaatg

SEQ ID NO: 230219 - DNA, 15 bp, Homo sapiens
gcatgaaagagcaat

SEQ ID NO: 230220 - DNA, 15 bp, Homo sapiens
agcatgaaagagcaa

SEQ ID NO: 230221 - DNA, 15 bp, Homo sapiens
aagcatgaaagagca

SEQ ID NO: 230222 - DNA, 15 bp, Homo sapiens
caagcatgaaagagc

SEQ ID NO: 230223 - DNA, 15 bp, Homo sapiens
tcaagcatgaaagag

SEQ ID NO: 230224 - DNA, 15 bp, Homo sapiens
ttcaagcatgaaaga

SEQ ID NO: 230225 - DNA, 15 bp, Homo sapiens
cttcaagcatgaaag

SEQ ID NO: 230226 - DNA, 15 bp, Homo sapiens
tcttcaagcatgaaa

SEQ ID NO: 230227 - DNA, 15 bp, Homo sapiens
ctcttcaagcatgaa

SEQ ID NO: 230228 - DNA, 15 bp, Homo sapiens
cctcttcaagcatga

SEQ ID NO: 230229 - DNA, 15 bp, Homo sapiens
tcctcttcaagcatg

SEQ ID NO: 230230 - DNA, 15 bp, Homo sapiens
ctcctcttcaagcat

SEQ ID NO: 230231 - DNA, 15 bp, Homo sapiens
actcctcttcaagca

SEQ ID NO: 230232 - DNA, 15 bp, Homo sapiens
cactcctcttcaagc

SEQ ID NO: 230233 - DNA, 15 bp, Homo sapiens
ccactcctcttcaag

SEQ ID NO: 230234 - DNA, 15 bp, Homo sapiens
tccactcctcttcaa

SEQ ID NO: 230235 - DNA, 15 bp, Homo sapiens
atccactcctcttca

SEQ ID NO: 230236 - DNA, 15 bp, Homo sapiens
aatccactcctcttc

SEQ ID NO: 230237 - DNA, 15 bp, Homo sapiens
gaatccactcctctt

SEQ ID NO: 230238 - DNA, 15 bp, Homo sapiens
agaatccactcctct

SEQ ID NO: 230239 - DNA, 15 bp, Homo sapiens
cagaatccactcctc

SEQ ID NO: 230240 - DNA, 15 bp, Homo sapiens
gcagaatccactcct

SEQ ID NO: 230241 - DNA, 15 bp, Homo sapiens
tgcagaatccactcc

SEQ ID NO: 230242 - DNA, 15 bp, Homo sapiens
atgcagaatccactc

SEQ ID NO: 230243 - DNA, 15 bp, Homo sapiens
aatgcagaatccact

SEQ ID NO: 230244 - DNA, 15 bp, Homo sapiens
caatgcagaatccac

SEQ ID NO: 230245 - DNA, 15 bp, Homo sapiens
ccaatgcagaatcca

SEQ ID NO: 230246 - DNA, 15 bp, Homo sapiens
tccaatgcagaatcc

SEQ ID NO: 230247 - DNA, 15 bp, Homo sapiens
ttccaatgcagaatc

SEQ ID NO: 230248 - DNA, 15 bp, Homo sapiens
tttccaatgcagaat

SEQ ID NO: 230249 - DNA, 15 bp, Homo sapiens
gtttccaatgcagaa

SEQ ID NO: 230250 - DNA, 15 bp, Homo sapiens
agtttccaatgcaga

SEQ ID NO: 230251 - DNA, 15 bp, Homo sapiens
aagtttccaatgcag

SEQ ID NO: 230252 - DNA, 15 bp, Homo sapiens
taagtttccaatgca

SEQ ID NO: 230253 - DNA, 15 bp, Homo sapiens
ttaagtttccaatgc

SEQ ID NO: 230254 - DNA, 15 bp, Homo sapiens
cttaagtttccaatg

SEQ ID NO: 230255 - DNA, 15 bp, Homo sapiens
tcttaagtttccaat

SEQ ID NO: 230256 - DNA, 15 bp, Homo sapiens
ctcttaagtttccaa

SEQ ID NO: 230257 - DNA, 15 bp, Homo sapiens
tctcttaagtttcca

SEQ ID NO: 230258 - DNA, 15 bp, Homo sapiens
ctctcttaagtttcc

SEQ ID NO: 230259 - DNA, 15 bp, Homo sapiens
cctctcttaagtttc

SEQ ID NO: 230260 - DNA, 15 bp, Homo sapiens
acctctcttaagttt

SEQ ID NO: 230261 - DNA, 15 bp, Homo sapiens
aacctctcttaagtt

SEQ ID NO: 230262 - DNA, 15 bp, Homo sapiens
caacctctcttaagt

SEQ ID NO: 230263 - DNA, 15 bp, Homo sapiens
tcaacctctcttaag

SEQ ID NO: 230264 - DNA, 15 bp, Homo sapiens
ttcaacctctcttaa

SEQ ID NO: 230265 - DNA, 15 bp, Homo sapiens
attcaacctctctta

SEQ ID NO: 230266 - DNA, 15 bp, Homo sapiens
aattcaacctctctt

SEQ ID NO: 230267 - DNA, 15 bp, Homo sapiens
gaattcaacctctct

SEQ ID NO: 230268 - DNA, 15 bp, Homo sapiens
agaattcaacctctc

SEQ ID NO: 230269 - DNA, 15 bp, Homo sapiens
cagaattcaacctct

SEQ ID NO: 230270 - DNA, 15 bp, Homo sapiens
tcagaattcaacctc

SEQ ID NO: 230271 - DNA, 15 bp, Homo sapiens
ctcagaattcaacct

SEQ ID NO: 230272 - DNA, 15 bp, Homo sapiens
actcagaattcaacc

SEQ ID NO: 230273 - DNA, 15 bp, Homo sapiens
gactcagaattcaac

SEQ ID NO: 230274 - DNA, 15 bp, Homo sapiens
agactcagaattcaa

SEQ ID NO: 230275 - DNA, 15 bp, Homo sapiens
cagactcagaattca

SEQ ID NO: 230276 - DNA, 15 bp, Homo sapiens
ccagactcagaattc

SEQ ID NO: 230277 - DNA, 15 bp, Homo sapiens
cccagactcagaatt

SEQ ID NO: 230278 - DNA, 15 bp, Homo sapiens
acccagactcagaat

SEQ ID NO: 230279 - DNA, 15 bp, Homo sapiens
tacccagactcagaa

SEQ ID NO: 230280 - DNA, 15 bp, Homo sapiens
atacccagactcaga

SEQ ID NO: 230281 - DNA, 15 bp, Homo sapiens
aatacccagactcag

SEQ ID NO: 230282 - DNA, 15 bp, Homo sapiens
gaatacccagactca

SEQ ID NO: 230283 - DNA, 15 bp, Homo sapiens
tgaatacccagactc

SEQ ID NO: 230284 - DNA, 15 bp, Homo sapiens
atgaatacccagact

SEQ ID NO: 230285 - DNA, 15 bp, Homo sapiens
catgaatacccagac

SEQ ID NO: 230286 - DNA, 15 bp, Homo sapiens
ccatgaatacccaga

SEQ ID NO: 230287 - DNA, 15 bp, Homo sapiens
cccatgaatacccag

SEQ ID NO: 230288 - DNA, 15 bp, Homo sapiens
ccccatgaataccca

SEQ ID NO: 230289 - DNA, 15 bp, Homo sapiens
tccccatgaataccc

SEQ ID NO: 230290 - DNA, 15 bp, Homo sapiens
gtccccatgaatacc

SEQ ID NO: 230291 - DNA, 15 bp, Homo sapiens
tgtccccatgaatac

SEQ ID NO: 230292 - DNA, 15 bp, Homo sapiens
ttgtccccatgaata

SEQ ID NO: 230293 - DNA, 15 bp, Homo sapiens
tttgtccccatgaat

SEQ ID NO: 230294 - DNA, 15 bp, Homo sapiens
ttttgtccccatgaa

SEQ ID NO: 230295 - DNA, 15 bp, Homo sapiens
attttgtccccatga

SEQ ID NO: 230296 - DNA, 15 bp, Homo sapiens
cattttgtccccatg

SEQ ID NO: 230297 - DNA, 15 bp, Homo sapiens
ccattttgtccccat

SEQ ID NO: 230298 - DNA, 15 bp, Homo sapiens
tccattttgtcccca

SEQ ID NO: 230299 - DNA, 15 bp, Homo sapiens
ctccattttgtcccc

SEQ ID NO: 230300 - DNA, 15 bp, Homo sapiens
cctccattttgtccc

SEQ ID NO: 230301 - DNA, 15 bp, Homo sapiens
acctccattttgtcc

SEQ ID NO: 230302 - DNA, 15 bp, Homo sapiens
tacctccattttgtc

SEQ ID NO: 230303 - DNA, 15 bp, Homo sapiens
ctacctccattttgt

SEQ ID NO: 230304 - DNA, 15 bp, Homo sapiens
actacctccattttg

SEQ ID NO: 230305 - DNA, 15 bp, Homo sapiens
cactacctccatttt

SEQ ID NO: 230306 - DNA, 15 bp, Homo sapiens
acactacctccattt

SEQ ID NO: 230307 - DNA, 15 bp, Homo sapiens
tacactacctccatt

SEQ ID NO: 230308 - DNA, 15 bp, Homo sapiens
atacactacctccat

SEQ ID NO: 230309 - DNA, 15 bp, Homo sapiens
aatacactacctcca

SEQ ID NO: 230310 - DNA, 15 bp, Homo sapiens
gaatacactacctcc

SEQ ID NO: 230311 - DNA, 15 bp, Homo sapiens
agaatacactacctc

SEQ ID NO: 230312 - DNA, 15 bp, Homo sapiens
tagaatacactacct

SEQ ID NO: 230313 - DNA, 15 bp, Homo sapiens
atagaatacactacc

SEQ ID NO: 230314 - DNA, 15 bp, Homo sapiens
tatagaatacactac

SEQ ID NO: 230315 - DNA, 15 bp, Homo sapiens
atatagaatacacta

SEQ ID NO: 230316 - DNA, 15 bp, Homo sapiens
catatagaatacact

SEQ ID NO: 230317 - DNA, 15 bp, Homo sapiens
acatatagaatacac

SEQ ID NO: 230318 - DNA, 15 bp, Homo sapiens
tacatatagaataca

SEQ ID NO: 230319 - DNA, 15 bp, Homo sapiens
atacatatagaatac

SEQ ID NO: 230320 - DNA, 15 bp, Homo sapiens
catacatatagaata

SEQ ID NO: 230321 - DNA, 15 bp, Homo sapiens
ccatacatatagaat

SEQ ID NO: 230322 - DNA, 15 bp, Homo sapiens
accatacatatagaa

SEQ ID NO: 230323 - DNA, 15 bp, Homo sapiens
caccatacatataga

SEQ ID NO: 230324 - DNA, 15 bp, Homo sapiens
ccaccatacatatag

SEQ ID NO: 230325 - DNA, 15 bp, Homo sapiens
accaccatacatata

SEQ ID NO: 230326 - DNA, 15 bp, Homo sapiens
caccaccatacatat

SEQ ID NO: 230327 - DNA, 15 bp, Homo sapiens
tcaccaccatacata

SEQ ID NO: 230328 - DNA, 15 bp, Homo sapiens
atcaccaccatacat

SEQ ID NO: 230329 - DNA, 15 bp, Homo sapiens
tatcaccaccataca

SEQ ID NO: 230330 - DNA, 15 bp, Homo sapiens
ctatcaccaccatac

SEQ ID NO: 230331 - DNA, 15 bp, Homo sapiens
actatcaccaccata

SEQ ID NO: 230332 - DNA, 15 bp, Homo sapiens
cactatcaccaccat

SEQ ID NO: 230333 - DNA, 15 bp, Homo sapiens
tcactatcaccacca

SEQ ID NO: 230334 - DNA, 15 bp, Homo sapiens
ttcactatcaccacc

SEQ ID NO: 230335 - DNA, 15 bp, Homo sapiens
attcactatcaccac

SEQ ID NO: 230336 - DNA, 15 bp, Homo sapiens
cattcactatcacca

SEQ ID NO: 230337 - DNA, 15 bp, Homo sapiens
ccattcactatcacc

SEQ ID NO: 230338 - DNA, 15 bp, Homo sapiens
cccattcactatcac

SEQ ID NO: 230339 - DNA, 15 bp, Homo sapiens
ccccattcactatca

SEQ ID NO: 230340 - DNA, 15 bp, Homo sapiens
tccccattcactatc

SEQ ID NO: 230341 - DNA, 15 bp, Homo sapiens
ctccccattcactat

SEQ ID NO: 230342 - DNA, 15 bp, Homo sapiens
gctccccattcacta

SEQ ID NO: 230343 - DNA, 15 bp, Homo sapiens
tgctccccattcact

SEQ ID NO: 230344 - DNA, 15 bp, Homo sapiens
ctgctccccattcac

SEQ ID NO: 230345 - DNA, 15 bp, Homo sapiens
gctgctccccattca

SEQ ID NO: 230346 - DNA, 15 bp, Homo sapiens
tgctgctccccattc

SEQ ID NO: 230347 - DNA, 15 bp, Homo sapiens
ctgctgctccccatt

SEQ ID NO: 230348 - DNA, 15 bp, Homo sapiens
tctgctgctccccat

SEQ ID NO: 230349 - DNA, 15 bp, Homo sapiens
gtctgctgctcccca

SEQ ID NO: 230350 - DNA, 15 bp, Homo sapiens
tgtctgctgctcccc

SEQ ID NO: 230351 - DNA, 15 bp, Homo sapiens
ctgtctgctgctccc

SEQ ID NO: 230352 - DNA, 15 bp, Homo sapiens
actgtctgctgctcc

SEQ ID NO: 230353 - DNA, 15 bp, Homo sapiens
aactgtctgctgctc

SEQ ID NO: 230354 - DNA, 15 bp, Homo sapiens
aaactgtctgctgct

SEQ ID NO: 230355 - DNA, 15 bp, Homo sapiens
taaactgtctgctgc

SEQ ID NO: 230356 - DNA, 15 bp, Homo sapiens
ctaaactgtctgctg

SEQ ID NO: 230357 - DNA, 15 bp, Homo sapiens
gctaaactgtctgct

SEQ ID NO: 230358 - DNA, 15 bp, Homo sapiens
agctaaactgtctgc

SEQ ID NO: 230359 - DNA, 15 bp, Homo sapiens
cagctaaactgtctg

SEQ ID NO: 230360 - DNA, 15 bp, Homo sapiens
gcagctaaactgtct

SEQ ID NO: 230361 - DNA, 15 bp, Homo sapiens
tgcagctaaactgtc

SEQ ID NO: 230362 - DNA, 15 bp, Homo sapiens
gtgcagctaaactgt

SEQ ID NO: 230363 - DNA, 15 bp, Homo sapiens
tgtgcagctaaactg

SEQ ID NO: 230364 - DNA, 15 bp, Homo sapiens
ttgtgcagctaaact

SEQ ID NO: 230365 - DNA, 15 bp, Homo sapiens
tttgtgcagctaaac

SEQ ID NO: 230366 - DNA, 15 bp, Homo sapiens
atttgtgcagctaaa

SEQ ID NO: 230367 - DNA, 15 bp, Homo sapiens
catttgtgcagctaa

SEQ ID NO: 230368 - DNA, 15 bp, Homo sapiens
acatttgtgcagcta

SEQ ID NO: 230369 - DNA, 15 bp, Homo sapiens
cacatttgtgcagct

SEQ ID NO: 230370 - DNA, 15 bp, Homo sapiens
tcacatttgtgcagc

SEQ ID NO: 230371 - DNA, 15 bp, Homo sapiens
gtcacatttgtgcag

SEQ ID NO: 230372 - DNA, 15 bp, Homo sapiens
tgtcacatttgtgca

SEQ ID NO: 230373 - DNA, 15 bp, Homo sapiens
gtgtcacatttgtgc

SEQ ID NO: 230374 - DNA, 15 bp, Homo sapiens
agtgtcacatttgtg

SEQ ID NO: 230375 - DNA, 15 bp, Homo sapiens
aagtgtcacatttgt

SEQ ID NO: 230376 - DNA, 15 bp, Homo sapiens
caagtgtcacatttg

SEQ ID NO: 230377 - DNA, 15 bp, Homo sapiens
acaagtgtcacattt

SEQ ID NO: 230378 - DNA, 15 bp, Homo sapiens
aacaagtgtcacatt

SEQ ID NO: 230379 - DNA, 15 bp, Homo sapiens
gaacaagtgtcacat

SEQ ID NO: 230380 - DNA, 15 bp, Homo sapiens
ggaacaagtgtcaca

SEQ ID NO: 230381 - DNA, 15 bp, Homo sapiens
aggaacaagtgtcac

SEQ ID NO: 230382 - DNA, 15 bp, Homo sapiens
aaggaacaagtgtca

SEQ ID NO: 230383 - DNA, 15 bp, Homo sapiens
gaaggaacaagtgtc

SEQ ID NO: 230384 - DNA, 15 bp, Homo sapiens
ggaaggaacaagtgt

SEQ ID NO: 230385 - DNA, 15 bp, Homo sapiens
tggaaggaacaagtg

SEQ ID NO: 230386 - DNA, 15 bp, Homo sapiens
atggaaggaacaagt

SEQ ID NO: 230387 - DNA, 15 bp, Homo sapiens
catggaaggaacaag

SEQ ID NO: 230388 - DNA, 15 bp, Homo sapiens
acatggaaggaacaa

SEQ ID NO: 230389 - DNA, 15 bp, Homo sapiens
cacatggaaggaaca

SEQ ID NO: 230390 - DNA, 15 bp, Homo sapiens
ccacatggaaggaac

SEQ ID NO: 230391 - DNA, 15 bp, Homo sapiens
gccacatggaaggaa

SEQ ID NO: 230392 - DNA, 15 bp, Homo sapiens
ggccacatggaagga

SEQ ID NO: 230393 - DNA, 15 bp, Homo sapiens
tggccacatggaagg

SEQ ID NO: 230394 - DNA, 15 bp, Homo sapiens
atggccacatggaag

SEQ ID NO: 230395 - DNA, 15 bp, Homo sapiens
aatggccacatggaa

SEQ ID NO: 230396 - DNA, 15 bp, Homo sapiens
taatggccacatgga

SEQ ID NO: 230397 - DNA, 15 bp, Homo sapiens
ataatggccacatgg

SEQ ID NO: 230398 - DNA, 15 bp, Homo sapiens
tataatggccacatg

SEQ ID NO: 230399 - DNA, 15 bp, Homo sapiens
ctataatggccacat

SEQ ID NO: 230400 - DNA, 15 bp, Homo sapiens
tctataatggccaca

SEQ ID NO: 230401 - DNA, 15 bp, Homo sapiens
gtctataatggccac

SEQ ID NO: 230402 - DNA, 15 bp, Homo sapiens
tgtctataatggcca

SEQ ID NO: 230403 - DNA, 15 bp, Homo sapiens
ctgtctataatggcc

SEQ ID NO: 230404 - DNA, 15 bp, Homo sapiens
actgtctataatggc

SEQ ID NO: 230405 - DNA, 15 bp, Homo sapiens
aactgtctataatgg

SEQ ID NO: 230406 - DNA, 15 bp, Homo sapiens
gaactgtctataatg

SEQ ID NO: 230407 - DNA, 15 bp, Homo sapiens
agaactgtctataat

SEQ ID NO: 230408 - DNA, 15 bp, Homo sapiens
tagaactgtctataa

SEQ ID NO: 230409 - DNA, 15 bp, Homo sapiens
ttagaactgtctata

SEQ ID NO: 230410 - DNA, 15 bp, Homo sapiens
attagaactgtctat

SEQ ID NO: 230411 - DNA, 15 bp, Homo sapiens
aattagaactgtcta

SEQ ID NO: 230412 - DNA, 15 bp, Homo sapiens
aaattagaactgtct

SEQ ID NO: 230413 - DNA, 15 bp, Homo sapiens
aaaattagaactgtc

SEQ ID NO: 230414 - DNA, 15 bp, Homo sapiens
gaaaattagaactgt

SEQ ID NO: 230415 - DNA, 15 bp, Homo sapiens
agaaaattagaactg

SEQ ID NO: 230416 - DNA, 15 bp, Homo sapiens
aagaaaattagaact

SEQ ID NO: 230417 - DNA, 15 bp, Homo sapiens
gaagaaaattagaac

SEQ ID NO: 230418 - DNA, 15 bp, Homo sapiens
tgaagaaaattagaa

SEQ ID NO: 230419 - DNA, 15 bp, Homo sapiens
atgaagaaaattaga

SEQ ID NO: 230420 - DNA, 15 bp, Homo sapiens
gatgaagaaaattag

SEQ ID NO: 230421 - DNA, 15 bp, Homo sapiens
tgatgaagaaaatta

SEQ ID NO: 230422 - DNA, 15 bp, Homo sapiens
ctgatgaagaaaatt

SEQ ID NO: 230423 - DNA, 15 bp, Homo sapiens
gctgatgaagaaaat

SEQ ID NO: 230424 - DNA, 15 bp, Homo sapiens
tgctgatgaagaaaa

SEQ ID NO: 230425 - DNA, 15 bp, Homo sapiens
atgctgatgaagaaa

SEQ ID NO: 230426 - DNA, 15 bp, Homo sapiens
aatgctgatgaagaa

SEQ ID NO: 230427 - DNA, 15 bp, Homo sapiens
caatgctgatgaaga

SEQ ID NO: 230428 - DNA, 15 bp, Homo sapiens
gcaatgctgatgaag

SEQ ID NO: 230429 - DNA, 15 bp, Homo sapiens
tgcaatgctgatgaa

SEQ ID NO: 230430 - DNA, 15 bp, Homo sapiens
ttgcaatgctgatga

SEQ ID NO: 230431 - DNA, 15 bp, Homo sapiens
cttgcaatgctgatg

SEQ ID NO: 230432 - DNA, 15 bp, Homo sapiens
tcttgcaatgctgat

SEQ ID NO: 230433 - DNA, 15 bp, Homo sapiens
ctcttgcaatgctga

SEQ ID NO: 230434 - DNA, 15 bp, Homo sapiens
actcttgcaatgctg

SEQ ID NO: 230435 - DNA, 15 bp, Homo sapiens
aactcttgcaatgct

SEQ ID NO: 230436 - DNA, 15 bp, Homo sapiens
taactcttgcaatgc

SEQ ID NO: 230437 - DNA, 15 bp, Homo sapiens
gtaactcttgcaatg

SEQ ID NO: 230438 - DNA, 15 bp, Homo sapiens
agtaactcttgcaat

SEQ ID NO: 230439 - DNA, 15 bp, Homo sapiens
cagtaactcttgcaa

SEQ ID NO: 230440 - DNA, 15 bp, Homo sapiens
tcagtaactcttgca

SEQ ID NO: 230441 - DNA, 15 bp, Homo sapiens
ttcagtaactcttgc

SEQ ID NO: 230442 - DNA, 15 bp, Homo sapiens
gttcagtaactcttg

SEQ ID NO: 230443 - DNA, 15 bp, Homo sapiens
tgttcagtaactctt

SEQ ID NO: 230444 - DNA, 15 bp, Homo sapiens
gtgttcagtaactct

SEQ ID NO: 230445 - DNA, 15 bp, Homo sapiens
agtgttcagtaactc

SEQ ID NO: 230446 - DNA, 15 bp, Homo sapiens
tagtgttcagtaact

SEQ ID NO: 230447 - DNA, 15 bp, Homo sapiens
ttagtgttcagtaac

SEQ ID NO: 230448 - DNA, 15 bp, Homo sapiens
attagtgttcagtaa

SEQ ID NO: 230449 - DNA, 15 bp, Homo sapiens
aattagtgttcagta

SEQ ID NO: 230450 - DNA, 15 bp, Homo sapiens
gaattagtgttcagt

SEQ ID NO: 230451 - DNA, 15 bp, Homo sapiens
agaattagtgttcag

SEQ ID NO: 230452 - DNA, 15 bp, Homo sapiens
cagaattagtgttca

SEQ ID NO: 230453 - DNA, 15 bp, Homo sapiens
ccagaattagtgttc

SEQ ID NO: 230454 - DNA, 15 bp, Homo sapiens
cccagaattagtgtt

SEQ ID NO: 230455 - DNA, 15 bp, Homo sapiens
gcccagaattagtgt

SEQ ID NO: 230456 - DNA, 15 bp, Homo sapiens
ggcccagaattagtg

SEQ ID NO: 230457 - DNA, 15 bp, Homo sapiens
tggcccagaattagt

SEQ ID NO: 230458 - DNA, 15 bp, Homo sapiens
ttggcccagaattag

SEQ ID NO: 230459 - DNA, 15 bp, Homo sapiens
cttggcccagaatta

SEQ ID NO: 230460 - DNA, 15 bp, Homo sapiens
acttggcccagaatt

SEQ ID NO: 230461 - DNA, 15 bp, Homo sapiens
cacttggcccagaat

SEQ ID NO: 230462 - DNA, 15 bp, Homo sapiens
acacttggcccagaa

SEQ ID NO: 230463 - DNA, 15 bp, Homo sapiens
tacacttggcccaga

SEQ ID NO: 230464 - DNA, 15 bp, Homo sapiens
atacacttggcccag

SEQ ID NO: 230465 - DNA, 15 bp, Homo sapiens
aatacacttggccca

SEQ ID NO: 230466 - DNA, 15 bp, Homo sapiens
aaatacacttggccc

SEQ ID NO: 230467 - DNA, 15 bp, Homo sapiens
caaatacacttggcc

SEQ ID NO: 230468 - DNA, 15 bp, Homo sapiens
acaaatacacttggc

SEQ ID NO: 230469 - DNA, 15 bp, Homo sapiens
aacaaatacacttgg

SEQ ID NO: 230470 - DNA, 15 bp, Homo sapiens
aaacaaatacacttg

SEQ ID NO: 230471 - DNA, 15 bp, Homo sapiens
gaaacaaatacactt

SEQ ID NO: 230472 - DNA, 15 bp, Homo sapiens
tgaaacaaatacact

SEQ ID NO: 230473 - DNA, 15 bp, Homo sapiens
ctgaaacaaatacac

SEQ ID NO: 230474 - DNA, 15 bp, Homo sapiens
gctgaaacaaataca

SEQ ID NO: 230475 - DNA, 15 bp, Homo sapiens
agctgaaacaaatac

SEQ ID NO: 230476 - DNA, 15 bp, Homo sapiens
gagctgaaacaaata

SEQ ID NO: 230477 - DNA, 15 bp, Homo sapiens
agagctgaaacaaat

SEQ ID NO: 230478 - DNA, 15 bp, Homo sapiens
cagagctgaaacaaa

SEQ ID NO: 230479 - DNA, 15 bp, Homo sapiens
ccagagctgaaacaa

SEQ ID NO: 230480 - DNA, 15 bp, Homo sapiens
tccagagctgaaaca

SEQ ID NO: 230481 - DNA, 15 bp, Homo sapiens
ctccagagctgaaac

SEQ ID NO: 230482 - DNA, 15 bp, Homo sapiens
tctccagagctgaaa

SEQ ID NO: 230483 - DNA, 15 bp, Homo sapiens
ttctccagagctgaa

SEQ ID NO: 230484 - DNA, 15 bp, Homo sapiens
tttctccagagctga

SEQ ID NO: 230485 - DNA, 15 bp, Homo sapiens
ttttctccagagctg

SEQ ID NO: 230486 - DNA, 15 bp, Homo sapiens
gttttctccagagct

SEQ ID NO: 230487 - DNA, 15 bp, Homo sapiens
tgttttctccagagc

SEQ ID NO: 230488 - DNA, 15 bp, Homo sapiens
ttgttttctccagag

SEQ ID NO: 230489 - DNA, 15 bp, Homo sapiens
cttgttttctccaga

SEQ ID NO: 230490 - DNA, 15 bp, Homo sapiens
ccttgttttctccag

SEQ ID NO: 230491 - DNA, 15 bp, Homo sapiens
tccttgttttctcca

SEQ ID NO: 230492 - DNA, 15 bp, Homo sapiens
ttccttgttttctcc

SEQ ID NO: 230493 - DNA, 15 bp, Homo sapiens
cttccttgttttctc

SEQ ID NO: 230494 - DNA, 15 bp, Homo sapiens
ccttccttgttttct

SEQ ID NO: 230495 - DNA, 15 bp, Homo sapiens
tccttccttgttttc

SEQ ID NO: 230496 - DNA, 15 bp, Homo sapiens
atccttccttgtttt

SEQ ID NO: 230497 - DNA, 15 bp, Homo sapiens
gatccttccttgttt

SEQ ID NO: 230498 - DNA, 15 bp, Homo sapiens
ggatccttccttgtt

SEQ ID NO: 230499 - DNA, 15 bp, Homo sapiens
aggatccttccttgt

SEQ ID NO: 230500 - DNA, 15 bp, Homo sapiens
caggatccttccttg

SEQ ID NO: 230501 - DNA, 15 bp, Homo sapiens
tcaggatccttcctt

SEQ ID NO: 230502 - DNA, 15 bp, Homo sapiens
atcaggatccttcct

SEQ ID NO: 230503 - DNA, 15 bp, Homo sapiens
aatcaggatccttcc

SEQ ID NO: 230504 - DNA, 15 bp, Homo sapiens
gaatcaggatccttc

SEQ ID NO: 230505 - DNA, 15 bp, Homo sapiens
agaatcaggatcctt

SEQ ID NO: 230506 - DNA, 15 bp, Homo sapiens
tagaatcaggatcct

SEQ ID NO: 230507 - DNA, 15 bp, Homo sapiens
atagaatcaggatcc

SEQ ID NO: 230508 - DNA, 15 bp, Homo sapiens
aatagaatcaggatc

SEQ ID NO: 230509 - DNA, 15 bp, Homo sapiens
caatagaatcaggat

SEQ ID NO: 230510 - DNA, 15 bp, Homo sapiens
gcaatagaatcagga

SEQ ID NO: 230511 - DNA, 15 bp, Homo sapiens
tgcaatagaatcagg

SEQ ID NO: 230512 - DNA, 15 bp, Homo sapiens
gtgcaatagaatcag

SEQ ID NO: 230513 - DNA, 15 bp, Homo sapiens
ggtgcaatagaatca

SEQ ID NO: 230514 - DNA, 15 bp, Homo sapiens
tggtgcaatagaatc

SEQ ID NO: 230515 - DNA, 15 bp, Homo sapiens
atggtgcaatagaat

SEQ ID NO: 230516 - DNA, 15 bp, Homo sapiens
tatggtgcaatagaa

SEQ ID NO: 230517 - DNA, 15 bp, Homo sapiens
atatggtgcaataga

SEQ ID NO: 230518 - DNA, 15 bp, Homo sapiens
catatggtgcaatag

SEQ ID NO: 230519 - DNA, 15 bp, Homo sapiens
gcatatggtgcaata

SEQ ID NO: 230520 - DNA, 15 bp, Homo sapiens
cgcatatggtgcaat

SEQ ID NO: 230521 - DNA, 15 bp, Homo sapiens
ccgcatatggtgcaa

SEQ ID NO: 230522 - DNA, 15 bp, Homo sapiens
tccgcatatggtgca

SEQ ID NO: 230523 - DNA, 15 bp, Homo sapiens
ttccgcatatggtgc

SEQ ID NO: 230524 - DNA, 15 bp, Homo sapiens
cttccgcatatggtg

SEQ ID NO: 230525 - DNA, 15 bp, Homo sapiens
acttccgcatatggt

SEQ ID NO: 230526 - DNA, 15 bp, Homo sapiens
aacttccgcatatgg

SEQ ID NO: 230527 - DNA, 15 bp, Homo sapiens
taacttccgcatatg

SEQ ID NO: 230528 - DNA, 15 bp, Homo sapiens
ataacttccgcatat

SEQ ID NO: 230529 - DNA, 15 bp, Homo sapiens
aataacttccgcata

SEQ ID NO: 230530 - DNA, 15 bp, Homo sapiens
caataacttccgcat

SEQ ID NO: 230531 - DNA, 15 bp, Homo sapiens
tcaataacttccgca

SEQ ID NO: 230532 - DNA, 15 bp, Homo sapiens
ttcaataacttccgc

SEQ ID NO: 230533 - DNA, 15 bp, Homo sapiens
cttcaataacttccg

SEQ ID NO: 230534 - DNA, 15 bp, Homo sapiens
ccttcaataacttcc

SEQ ID NO: 230535 - DNA, 15 bp, Homo sapiens
tccttcaataacttc

SEQ ID NO: 230536 - DNA, 15 bp, Homo sapiens
ttccttcaataactt

SEQ ID NO: 230537 - DNA, 15 bp, Homo sapiens
attccttcaataact

SEQ ID NO: 230538 - DNA, 15 bp, Homo sapiens
cattccttcaataac

SEQ ID NO: 230539 - DNA, 15 bp, Homo sapiens
gcattccttcaataa

SEQ ID NO: 230540 - DNA, 15 bp, Homo sapiens
tgcattccttcaata

SEQ ID NO: 230541 - DNA, 15 bp, Homo sapiens
atgcattccttcaat

SEQ ID NO: 230542 - DNA, 15 bp, Homo sapiens
catgcattccttcaa

SEQ ID NO: 230543 - DNA, 15 bp, Homo sapiens
ccatgcattccttca

SEQ ID NO: 230544 - DNA, 15 bp, Homo sapiens
tccatgcattccttc

SEQ ID NO: 230545 - DNA, 15 bp, Homo sapiens
ctccatgcattcctt

SEQ ID NO: 230546 - DNA, 15 bp, Homo sapiens
cctccatgcattcct

SEQ ID NO: 230547 - DNA, 15 bp, Homo sapiens
tcctccatgcattcc

SEQ ID NO: 230548 - DNA, 15 bp, Homo sapiens
atcctccatgcattc

SEQ ID NO: 230549 - DNA, 15 bp, Homo sapiens
tatcctccatgcatt

SEQ ID NO: 230550 - DNA, 15 bp, Homo sapiens
ttatcctccatgcat

SEQ ID NO: 230551 - DNA, 15 bp, Homo sapiens
cttatcctccatgca

SEQ ID NO: 230552 - DNA, 15 bp, Homo sapiens
acttatcctccatgc

SEQ ID NO: 230553 - DNA, 15 bp, Homo sapiens
cacttatcctccatg

SEQ ID NO: 230554 - DNA, 15 bp, Homo sapiens
gcacttatcctccat

SEQ ID NO: 230555 - DNA, 15 bp, Homo sapiens
agcacttatcctcca

SEQ ID NO: 230556 - DNA, 15 bp, Homo sapiens
tagcacttatcctcc

SEQ ID NO: 230557 - DNA, 15 bp, Homo sapiens
atagcacttatcctc

SEQ ID NO: 230558 - DNA, 15 bp, Homo sapiens
catagcacttatcct

SEQ ID NO: 230559 - DNA, 15 bp, Homo sapiens
tcatagcacttatcc

SEQ ID NO: 230560 - DNA, 15 bp, Homo sapiens
ctcatagcacttatc

SEQ ID NO: 230561 - DNA, 15 bp, Homo sapiens
actcatagcacttat

SEQ ID NO: 230562 - DNA, 15 bp, Homo sapiens
tactcatagcactta

SEQ ID NO: 230563 - DNA, 15 bp, Homo sapiens
gtactcatagcactt

SEQ ID NO: 230564 - DNA, 15 bp, Homo sapiens
tgtactcatagcact

SEQ ID NO: 230565 - DNA, 15 bp, Homo sapiens
ttgtactcatagcac

SEQ ID NO: 230566 - DNA, 15 bp, Homo sapiens
tttgtactcatagca

SEQ ID NO: 230567 - DNA, 15 bp, Homo sapiens
gtttgtactcatagc

SEQ ID NO: 230568 - DNA, 15 bp, Homo sapiens
tgtttgtactcatag

SEQ ID NO: 230569 - DNA, 15 bp, Homo sapiens
gtgtttgtactcata

SEQ ID NO: 230570 - DNA, 15 bp, Homo sapiens
cgtgtttgtactcat

SEQ ID NO: 230571 - DNA, 15 bp, Homo sapiens
ccgtgtttgtactca

SEQ ID NO: 230572 - DNA, 15 bp, Homo sapiens
accgtgtttgtactc

SEQ ID NO: 230573 - DNA, 15 bp, Homo sapiens
caccgtgtttgtact

SEQ ID NO: 230574 - DNA, 15 bp, Homo sapiens
acaccgtgtttgtac

SEQ ID NO: 230575 - DNA, 15 bp, Homo sapiens
cacaccgtgtttgta

SEQ ID NO: 230576 - DNA, 15 bp, Homo sapiens
gcacaccgtgtttgt

SEQ ID NO: 230577 - DNA, 15 bp, Homo sapiens
tgcacaccgtgtttg

SEQ ID NO: 230578 - DNA, 15 bp, Homo sapiens
gtgcacaccgtgttt

SEQ ID NO: 230579 - DNA, 15 bp, Homo sapiens
agtgcacaccgtgtt

SEQ ID NO: 230580 - DNA, 15 bp, Homo sapiens
aagtgcacaccgtgt

SEQ ID NO: 230581 - DNA, 15 bp, Homo sapiens
caagtgcacaccgtg

SEQ ID NO: 230582 - DNA, 15 bp, Homo sapiens
acaagtgcacaccgt

SEQ ID NO: 230583 - DNA, 15 bp, Homo sapiens
cacaagtgcacaccg

SEQ ID NO: 230584 - DNA, 15 bp, Homo sapiens
ccacaagtgcacacc

SEQ ID NO: 230585 - DNA, 15 bp, Homo sapiens
tccacaagtgcacac

SEQ ID NO: 230586 - DNA, 15 bp, Homo sapiens
ctccacaagtgcaca

SEQ ID NO: 230587 - DNA, 15 bp, Homo sapiens
actccacaagtgcac

SEQ ID NO: 230588 - DNA, 15 bp, Homo sapiens
cactccacaagtgca

SEQ ID NO: 230589 - DNA, 15 bp, Homo sapiens
acactccacaagtgc

SEQ ID NO: 230590 - DNA, 15 bp, Homo sapiens
cacactccacaagtg

SEQ ID NO: 230591 - DNA, 15 bp, Homo sapiens
ccacactccacaagt

SEQ ID NO: 230592 - DNA, 15 bp, Homo sapiens
cccacactccacaag

SEQ ID NO: 230593 - DNA, 15 bp, Homo sapiens
ccccacactccacaa

SEQ ID NO: 230594 - DNA, 15 bp, Homo sapiens
tccccacactccaca

SEQ ID NO: 230595 - DNA, 15 bp, Homo sapiens
ctccccacactccac

SEQ ID NO: 230596 - DNA, 15 bp, Homo sapiens
cctccccacactcca

SEQ ID NO: 230597 - DNA, 15 bp, Homo sapiens
ccctccccacactcc

SEQ ID NO: 230598 - DNA, 15 bp, Homo sapiens
cccctccccacactc

SEQ ID NO: 230599 - DNA, 15 bp, Homo sapiens
gcccctccccacact

SEQ ID NO: 230600 - DNA, 15 bp, Homo sapiens
agcccctccccacac

SEQ ID NO: 230601 - DNA, 15 bp, Homo sapiens
cagcccctccccaca

SEQ ID NO: 230602 - DNA, 15 bp, Homo sapiens
acagcccctccccac

SEQ ID NO: 230603 - DNA, 15 bp, Homo sapiens
tacagcccctcccca

SEQ ID NO: 230604 - DNA, 15 bp, Homo sapiens
ctacagcccctcccc

SEQ ID NO: 230605 - DNA, 15 bp, Homo sapiens
cctacagcccctccc

SEQ ID NO: 230606 - DNA, 15 bp, Homo sapiens
ccctacagcccctcc

SEQ ID NO: 230607 - DNA, 15 bp, Homo sapiens
cccctacagcccctc

SEQ ID NO: 230608 - DNA, 15 bp, Homo sapiens
tcccctacagcccct

SEQ ID NO: 230609 - DNA, 15 bp, Homo sapiens
ttcccctacagcccc

SEQ ID NO: 230610 - DNA, 15 bp, Homo sapiens
tttcccctacagccc

SEQ ID NO: 230611 - DNA, 15 bp, Homo sapiens
ctttcccctacagcc

SEQ ID NO: 230612 - DNA, 15 bp, Homo sapiens
actttcccctacagc

SEQ ID NO: 230613 - DNA, 15 bp, Homo sapiens
tactttcccctacag

SEQ ID NO: 230614 - DNA, 15 bp, Homo sapiens
ctactttcccctaca

SEQ ID NO: 230615 - DNA, 15 bp, Homo sapiens
cctactttcccctac

SEQ ID NO: 230616 - DNA, 15 bp, Homo sapiens
ccctactttccccta

SEQ ID NO: 230617 - DNA, 15 bp, Homo sapiens
gccctactttcccct

SEQ ID NO: 230618 - DNA, 15 bp, Homo sapiens
agccctactttcccc

SEQ ID NO: 230619 - DNA, 15 bp, Homo sapiens
cagccctactttccc

SEQ ID NO: 230620 - DNA, 15 bp, Homo sapiens
tcagccctactttcc

SEQ ID NO: 230621 - DNA, 15 bp, Homo sapiens
atcagccctactttc

SEQ ID NO: 230622 - DNA, 15 bp, Homo sapiens
gatcagccctacttt

SEQ ID NO: 230623 - DNA, 15 bp, Homo sapiens
tgatcagccctactt

SEQ ID NO: 230624 - DNA, 15 bp, Homo sapiens
ctgatcagccctact

SEQ ID NO: 230625 - DNA, 15 bp, Homo sapiens
tctgatcagccctac

SEQ ID NO: 230626 - DNA, 15 bp, Homo sapiens
ttctgatcagcccta

SEQ ID NO: 230627 - DNA, 15 bp, Homo sapiens
tttctgatcagccct

SEQ ID NO: 230628 - DNA, 15 bp, Homo sapiens
ttttctgatcagccc

SEQ ID NO: 230629 - DNA, 15 bp, Homo sapiens
cttttctgatcagcc

SEQ ID NO: 230630 - DNA, 15 bp, Homo sapiens
gcttttctgatcagc

SEQ ID NO: 230631 - DNA, 15 bp, Homo sapiens
agcttttctgatcag

SEQ ID NO: 230632 - DNA, 15 bp, Homo sapiens
aagcttttctgatca

SEQ ID NO: 230633 - DNA, 15 bp, Homo sapiens
aaagcttttctgatc

SEQ ID NO: 230634 - DNA, 15 bp, Homo sapiens
gaaagcttttctgat

SEQ ID NO: 230635 - DNA, 15 bp, Homo sapiens
tgaaagcttttctga

SEQ ID NO: 230636 - DNA, 15 bp, Homo sapiens
atgaaagcttttctg

SEQ ID NO: 230637 - DNA, 15 bp, Homo sapiens
tatgaaagcttttct

SEQ ID NO: 230638 - DNA, 15 bp, Homo sapiens
ctatgaaagcttttc

SEQ ID NO: 230639 - DNA, 15 bp, Homo sapiens
cctatgaaagctttt

SEQ ID NO: 230640 - DNA, 15 bp, Homo sapiens
ccctatgaaagcttt

SEQ ID NO: 230641 - DNA, 15 bp, Homo sapiens
tccctatgaaagctt

SEQ ID NO: 230642 - DNA, 15 bp, Homo sapiens
ctccctatgaaagct

SEQ ID NO: 230643 - DNA, 15 bp, Homo sapiens
cctccctatgaaagc

SEQ ID NO: 230644 - DNA, 15 bp, Homo sapiens
tcctccctatgaaag

SEQ ID NO: 230645 - DNA, 15 bp, Homo sapiens
ttcctccctatgaaa

SEQ ID NO: 230646 - DNA, 15 bp, Homo sapiens
tttcctccctatgaa

SEQ ID NO: 230647 - DNA, 15 bp, Homo sapiens
ctttcctccctatga

SEQ ID NO: 230648 - DNA, 15 bp, Homo sapiens
actttcctccctatg

SEQ ID NO: 230649 - DNA, 15 bp, Homo sapiens
gactttcctccctat

SEQ ID NO: 230650 - DNA, 15 bp, Homo sapiens
agactttcctcccta

SEQ ID NO: 230651 - DNA, 15 bp, Homo sapiens
aagactttcctccct

SEQ ID NO: 230652 - DNA, 15 bp, Homo sapiens
aaagactttcctccc

SEQ ID NO: 230653 - DNA, 15 bp, Homo sapiens
caaagactttcctcc

SEQ ID NO: 230654 - DNA, 15 bp, Homo sapiens
tcaaagactttcctc

SEQ ID NO: 230655 - DNA, 15 bp, Homo sapiens
ttcaaagactttcct

SEQ ID NO: 230656 - DNA, 15 bp, Homo sapiens
gttcaaagactttcc

SEQ ID NO: 230657 - DNA, 15 bp, Homo sapiens
agttcaaagactttc

SEQ ID NO: 230658 - DNA, 15 bp, Homo sapiens
tagttcaaagacttt

SEQ ID NO: 230659 - DNA, 15 bp, Homo sapiens
ttagttcaaagactt

SEQ ID NO: 230660 - DNA, 15 bp, Homo sapiens
tttagttcaaagact

SEQ ID NO: 230661 - DNA, 15 bp, Homo sapiens
ttttagttcaaagac

SEQ ID NO: 230662 - DNA, 15 bp, Homo sapiens
gttttagttcaaaga

SEQ ID NO: 230663 - DNA, 15 bp, Homo sapiens
agttttagttcaaag

SEQ ID NO: 230664 - DNA, 15 bp, Homo sapiens
gagttttagttcaaa

SEQ ID NO: 230665 - DNA, 15 bp, Homo sapiens
ggagttttagttcaa

SEQ ID NO: 230666 - DNA, 15 bp, Homo sapiens
gggagttttagttca

SEQ ID NO: 230667 - DNA, 15 bp, Homo sapiens
tgggagttttagttc

SEQ ID NO: 230668 - DNA, 15 bp, Homo sapiens
atgggagttttagtt

SEQ ID NO: 230669 - DNA, 15 bp, Homo sapiens
aatgggagttttagt

SEQ ID NO: 230670 - DNA, 15 bp, Homo sapiens
aaatgggagttttag

SEQ ID NO: 230671 - DNA, 15 bp, Homo sapiens
gaaatgggagtttta

SEQ ID NO: 230672 - DNA, 15 bp, Homo sapiens
tgaaatgggagtttt

SEQ ID NO: 230673 - DNA, 15 bp, Homo sapiens
ttgaaatgggagttt

SEQ ID NO: 230674 - DNA, 15 bp, Homo sapiens
cttgaaatgggagtt

SEQ ID NO: 230675 - DNA, 15 bp, Homo sapiens
tcttgaaatgggagt

SEQ ID NO: 230676 - DNA, 15 bp, Homo sapiens
atcttgaaatgggag

SEQ ID NO: 230677 - DNA, 15 bp, Homo sapiens
catcttgaaatggga

SEQ ID NO: 230678 - DNA, 15 bp, Homo sapiens
tcatcttgaaatggg

SEQ ID NO: 230679 - DNA, 15 bp, Homo sapiens
ctcatcttgaaatgg

SEQ ID NO: 230680 - DNA, 15 bp, Homo sapiens
gctcatcttgaaatg

SEQ ID NO: 230681 - DNA, 15 bp, Homo sapiens
agctcatcttgaaat

SEQ ID NO: 230682 - DNA, 15 bp, Homo sapiens
cagctcatcttgaaa

SEQ ID NO: 230683 - DNA, 15 bp, Homo sapiens
gcagctcatcttgaa

SEQ ID NO: 230684 - DNA, 15 bp, Homo sapiens
agcagctcatcttga

SEQ ID NO: 230685 - DNA, 15 bp, Homo sapiens
aagcagctcatcttg

SEQ ID NO: 230686 - DNA, 15 bp, Homo sapiens
aaagcagctcatctt

SEQ ID NO: 230687 - DNA, 15 bp, Homo sapiens
taaagcagctcatct

SEQ ID NO: 230688 - DNA, 15 bp, Homo sapiens
ataaagcagctcatc

SEQ ID NO: 230689 - DNA, 15 bp, Homo sapiens
cataaagcagctcat

SEQ ID NO: 230690 - DNA, 15 bp, Homo sapiens
ccataaagcagctca

SEQ ID NO: 230691 - DNA, 15 bp, Homo sapiens
gccataaagcagctc

SEQ ID NO: 230692 - DNA, 15 bp, Homo sapiens
cgccataaagcagct

SEQ ID NO: 230693 - DNA, 15 bp, Homo sapiens
ccgccataaagcagc

SEQ ID NO: 230694 - DNA, 15 bp, Homo sapiens
cccgccataaagcag

SEQ ID NO: 230695 - DNA, 15 bp, Homo sapiens
tcccgccataaagca

SEQ ID NO: 230696 - DNA, 15 bp, Homo sapiens
ttcccgccataaagc

SEQ ID NO: 230697 - DNA, 15 bp, Homo sapiens
cttcccgccataaag

SEQ ID NO: 230698 - DNA, 15 bp, Homo sapiens
tcttcccgccataaa

SEQ ID NO: 230699 - DNA, 15 bp, Homo sapiens
atcttcccgccataa

SEQ ID NO: 230700 - DNA, 15 bp, Homo sapiens
tatcttcccgccata

SEQ ID NO: 230701 - DNA, 15 bp, Homo sapiens
atatcttcccgccat

SEQ ID NO: 230702 - DNA, 15 bp, Homo sapiens
tatatcttcccgcca

SEQ ID NO: 230703 - DNA, 15 bp, Homo sapiens
ttatatcttcccgcc

SEQ ID NO: 230704 - DNA, 15 bp, Homo sapiens
tttatatcttcccgc

SEQ ID NO: 230705 - DNA, 15 bp, Homo sapiens
ttttatatcttcccg

SEQ ID NO: 230706 - DNA, 15 bp, Homo sapiens
tttttatatcttccc

SEQ ID NO: 230707 - DNA, 15 bp, Homo sapiens
ttttttatatcttcc

SEQ ID NO: 230708 - DNA, 15 bp, Homo sapiens
attttttatatcttc

SEQ ID NO: 230709 - DNA, 15 bp, Homo sapiens
tattttttatatctt

SEQ ID NO: 230710 - DNA, 15 bp, Homo sapiens
ttattttttatatct

SEQ ID NO: 230711 - DNA, 15 bp, Homo sapiens
tttattttttatatc

SEQ ID NO: 230712 - DNA, 15 bp, Homo sapiens
ttttattttttatat

SEQ ID NO: 230713 - DNA, 15 bp, Homo sapiens
tttttattttttata

SEQ ID NO: 230714 - DNA, 15 bp, Homo sapiens
gtttttattttttat

SEQ ID NO: 230715 - DNA, 15 bp, Homo sapiens
tgtttttatttttta

SEQ ID NO: 230716 - DNA, 15 bp, Homo sapiens
atgtttttatttttt

SEQ ID NO: 230717 - DNA, 15 bp, Homo sapiens
tatgtttttattttt

SEQ ID NO: 230718 - DNA, 15 bp, Homo sapiens
atatgtttttatttt

SEQ ID NO: 230719 - DNA, 15 bp, Homo sapiens
gatatgtttttattt

SEQ ID NO: 230720 - DNA, 15 bp, Homo sapiens
ggatatgtttttatt

SEQ ID NO: 230721 - DNA, 15 bp, Homo sapiens
tggatatgtttttat

SEQ ID NO: 230722 - DNA, 15 bp, Homo sapiens
ctggatatgttttta

SEQ ID NO: 230723 - DNA, 15 bp, Homo sapiens
cctggatatgttttt

SEQ ID NO: 230724 - DNA, 15 bp, Homo sapiens
gcctggatatgtttt

SEQ ID NO: 230725 - DNA, 15 bp, Homo sapiens
agcctggatatgttt

SEQ ID NO: 230726 - DNA, 15 bp, Homo sapiens
aagcctggatatgtt

SEQ ID NO: 230727 - DNA, 15 bp, Homo sapiens
taagcctggatatgt

SEQ ID NO: 230728 - DNA, 15 bp, Homo sapiens
ttaagcctggatatg

SEQ ID NO: 230729 - DNA, 15 bp, Homo sapiens
tttaagcctggatat

SEQ ID NO: 230730 - DNA, 15 bp, Homo sapiens
gtttaagcctggata

SEQ ID NO: 230731 - DNA, 15 bp, Homo sapiens
tgtttaagcctggat

SEQ ID NO: 230732 - DNA, 15 bp, Homo sapiens
gtgtttaagcctgga

SEQ ID NO: 230733 - DNA, 15 bp, Homo sapiens
tgtgtttaagcctgg

SEQ ID NO: 230734 - DNA, 15 bp, Homo sapiens
ttgtgtttaagcctg

SEQ ID NO: 230735 - DNA, 15 bp, Homo sapiens
cttgtgtttaagcct

SEQ ID NO: 230736 - DNA, 15 bp, Homo sapiens
tcttgtgtttaagcc

SEQ ID NO: 230737 - DNA, 15 bp, Homo sapiens
ttcttgtgtttaagc

SEQ ID NO: 230738 - DNA, 15 bp, Homo sapiens
tttcttgtgtttaag

SEQ ID NO: 230739 - DNA, 15 bp, Homo sapiens
ttttcttgtgtttaa

SEQ ID NO: 230740 - DNA, 15 bp, Homo sapiens
attttcttgtgttta

SEQ ID NO: 230741 - DNA, 15 bp, Homo sapiens
cattttcttgtgttt

SEQ ID NO: 230742 - DNA, 15 bp, Homo sapiens
tcattttcttgtgtt

SEQ ID NO: 230743 - DNA, 15 bp, Homo sapiens
gtcattttcttgtgt

SEQ ID NO: 230744 - DNA, 15 bp, Homo sapiens
ggtcattttcttgtg

SEQ ID NO: 230745 - DNA, 15 bp, Homo sapiens
tggtcattttcttgt

SEQ ID NO: 230746 - DNA, 15 bp, Homo sapiens
gtggtcattttcttg

SEQ ID NO: 230747 - DNA, 15 bp, Homo sapiens
agtggtcattttctt

SEQ ID NO: 230748 - DNA, 15 bp, Homo sapiens
tagtggtcattttct

SEQ ID NO: 230749 - DNA, 15 bp, Homo sapiens
ctagtggtcattttc

SEQ ID NO: 230750 - DNA, 15 bp, Homo sapiens
cctagtggtcatttt

SEQ ID NO: 230751 - DNA, 15 bp, Homo sapiens
acctagtggtcattt

SEQ ID NO: 230752 - DNA, 15 bp, Homo sapiens
cacctagtggtcatt

SEQ ID NO: 230753 - DNA, 15 bp, Homo sapiens
ccacctagtggtcat

SEQ ID NO: 230754 - DNA, 15 bp, Homo sapiens
cccacctagtggtca

SEQ ID NO: 230755 - DNA, 15 bp, Homo sapiens
gcccacctagtggtc

SEQ ID NO: 230756 - DNA, 15 bp, Homo sapiens
agcccacctagtggt

SEQ ID NO: 230757 - DNA, 15 bp, Homo sapiens
cagcccacctagtgg

SEQ ID NO: 230758 - DNA, 15 bp, Homo sapiens
ccagcccacctagtg

SEQ ID NO: 230759 - DNA, 15 bp, Homo sapiens
tccagcccacctagt

SEQ ID NO: 230760 - DNA, 15 bp, Homo sapiens
ttccagcccacctag

SEQ ID NO: 230761 - DNA, 15 bp, Homo sapiens
attccagcccaccta

SEQ ID NO: 230762 - DNA, 15 bp, Homo sapiens
aattccagcccacct

SEQ ID NO: 230763 - DNA, 15 bp, Homo sapiens
aaattccagcccacc

SEQ ID NO: 230764 - DNA, 15 bp, Homo sapiens
caaattccagcccac

SEQ ID NO: 230765 - DNA, 15 bp, Homo sapiens
acaaattccagccca

SEQ ID NO: 230766 - DNA, 15 bp, Homo sapiens
cacaaattccagccc

SEQ ID NO: 230767 - DNA, 15 bp, Homo sapiens
tcacaaattccagcc

SEQ ID NO: 230768 - DNA, 15 bp, Homo sapiens
ttcacaaattccagc

SEQ ID NO: 230769 - DNA, 15 bp, Homo sapiens
cttcacaaattccag

SEQ ID NO: 230770 - DNA, 15 bp, Homo sapiens
tcttcacaaattcca

SEQ ID NO: 230771 - DNA, 15 bp, Homo sapiens
ttcttcacaaattcc

SEQ ID NO: 230772 - DNA, 15 bp, Homo sapiens
attcttcacaaattc

SEQ ID NO: 230773 - DNA, 15 bp, Homo sapiens
tattcttcacaaatt

SEQ ID NO: 230774 - DNA, 15 bp, Homo sapiens
gtattcttcacaaat

SEQ ID NO: 230775 - DNA, 15 bp, Homo sapiens
agtattcttcacaaa

SEQ ID NO: 230776 - DNA, 15 bp, Homo sapiens
aagtattcttcacaa

SEQ ID NO: 230777 - DNA, 15 bp, Homo sapiens
taagtattcttcaca

SEQ ID NO: 230778 - DNA, 15 bp, Homo sapiens
ttaagtattcttcac

SEQ ID NO: 230779 - DNA, 15 bp, Homo sapiens
attaagtattcttca

SEQ ID NO: 230780 - DNA, 15 bp, Homo sapiens
tattaagtattcttc

SEQ ID NO: 230781 - DNA, 15 bp, Homo sapiens
ttattaagtattctt

SEQ ID NO: 230782 - DNA, 15 bp, Homo sapiens
cttattaagtattct

SEQ ID NO: 230783 - DNA, 15 bp, Homo sapiens
tcttattaagtattc

SEQ ID NO: 230784 - DNA, 15 bp, Homo sapiens
gtcttattaagtatt

SEQ ID NO: 230785 - DNA, 15 bp, Homo sapiens
tgtcttattaagtat

SEQ ID NO: 230786 - DNA, 15 bp, Homo sapiens
ctgtcttattaagta

SEQ ID NO: 230787 - DNA, 15 bp, Homo sapiens
tctgtcttattaagt

SEQ ID NO: 230788 - DNA, 15 bp, Homo sapiens
ttctgtcttattaag

SEQ ID NO: 230789 - DNA, 15 bp, Homo sapiens
attctgtcttattaa

SEQ ID NO: 230790 - DNA, 15 bp, Homo sapiens
cattctgtcttatta

SEQ ID NO: 230791 - DNA, 15 bp, Homo sapiens
gcattctgtcttatt

SEQ ID NO: 230792 - DNA, 15 bp, Homo sapiens
tgcattctgtcttat

SEQ ID NO: 230793 - DNA, 15 bp, Homo sapiens
atgcattctgtctta

SEQ ID NO: 230794 - DNA, 15 bp, Homo sapiens
aatgcattctgtctt

SEQ ID NO: 230795 - DNA, 15 bp, Homo sapiens
aaatgcattctgtct

SEQ ID NO: 230796 - DNA, 15 bp, Homo sapiens
caaatgcattctgtc

SEQ ID NO: 230797 - DNA, 15 bp, Homo sapiens
gcaaatgcattctgt

SEQ ID NO: 230798 - DNA, 15 bp, Homo sapiens
tgcaaatgcattctg

SEQ ID NO: 230799 - DNA, 15 bp, Homo sapiens
ctgcaaatgcattct

SEQ ID NO: 230800 - DNA, 15 bp, Homo sapiens
actgcaaatgcattc

SEQ ID NO: 230801 - DNA, 15 bp, Homo sapiens
cactgcaaatgcatt

SEQ ID NO: 230802 - DNA, 15 bp, Homo sapiens
tcactgcaaatgcat

SEQ ID NO: 230803 - DNA, 15 bp, Homo sapiens
ctcactgcaaatgca

SEQ ID NO: 230804 - DNA, 15 bp, Homo sapiens
gctcactgcaaatgc

SEQ ID NO: 230805 - DNA, 15 bp, Homo sapiens
agctcactgcaaatg

SEQ ID NO: 230806 - DNA, 15 bp, Homo sapiens
aagctcactgcaaat

SEQ ID NO: 230807 - DNA, 15 bp, Homo sapiens
aaagctcactgcaaa

SEQ ID NO: 230808 - DNA, 15 bp, Homo sapiens
aaaagctcactgcaa

SEQ ID NO: 230809 - DNA, 15 bp, Homo sapiens
taaaagctcactgca

SEQ ID NO: 230810 - DNA, 15 bp, Homo sapiens
ttaaaagctcactgc

SEQ ID NO: 230811 - DNA, 15 bp, Homo sapiens
cttaaaagctcactg

SEQ ID NO: 230812 - DNA, 15 bp, Homo sapiens
acttaaaagctcact

SEQ ID NO: 230813 - DNA, 15 bp, Homo sapiens
cacttaaaagctcac

SEQ ID NO: 230814 - DNA, 15 bp, Homo sapiens
acacttaaaagctca

SEQ ID NO: 230815 - DNA, 15 bp, Homo sapiens
cacacttaaaagctc

SEQ ID NO: 230816 - DNA, 15 bp, Homo sapiens
tcacacttaaaagct

SEQ ID NO: 230817 - DNA, 15 bp, Homo sapiens
ctcacacttaaaagc

SEQ ID NO: 230818 - DNA, 15 bp, Homo sapiens
actcacacttaaaag

SEQ ID NO: 230819 - DNA, 15 bp, Homo sapiens
aactcacacttaaaa

SEQ ID NO: 230820 - DNA, 15 bp, Homo sapiens
taactcacacttaaa

SEQ ID NO: 230821 - DNA, 15 bp, Homo sapiens
ctaactcacacttaa

SEQ ID NO: 230822 - DNA, 15 bp, Homo sapiens
cctaactcacactta

SEQ ID NO: 230823 - DNA, 15 bp, Homo sapiens
tcctaactcacactt

SEQ ID NO: 230824 - DNA, 15 bp, Homo sapiens
atcctaactcacact

SEQ ID NO: 230825 - DNA, 15 bp, Homo sapiens
gatcctaactcacac

SEQ ID NO: 230826 - DNA, 15 bp, Homo sapiens
agatcctaactcaca

SEQ ID NO: 230827 - DNA, 15 bp, Homo sapiens
aagatcctaactcac

SEQ ID NO: 230828 - DNA, 15 bp, Homo sapiens
caagatcctaactca

SEQ ID NO: 230829 - DNA, 15 bp, Homo sapiens
tcaagatcctaactc

SEQ ID NO: 230830 - DNA, 15 bp, Homo sapiens
ctcaagatcctaact

SEQ ID NO: 230831 - DNA, 15 bp, Homo sapiens
tctcaagatcctaac

SEQ ID NO: 230832 - DNA, 15 bp, Homo sapiens
ctctcaagatcctaa

SEQ ID NO: 230833 - DNA, 15 bp, Homo sapiens
actctcaagatccta

SEQ ID NO: 230834 - DNA, 15 bp, Homo sapiens
aactctcaagatcct

SEQ ID NO: 230835 - DNA, 15 bp, Homo sapiens
taactctcaagatcc

SEQ ID NO: 230836 - DNA, 15 bp, Homo sapiens
ttaactctcaagatc

SEQ ID NO: 230837 - DNA, 15 bp, Homo sapiens
tttaactctcaagat

SEQ ID NO: 230838 - DNA, 15 bp, Homo sapiens
ctttaactctcaaga

SEQ ID NO: 230839 - DNA, 15 bp, Homo sapiens
cctttaactctcaag

SEQ ID NO: 230840 - DNA, 15 bp, Homo sapiens
tcctttaactctcaa

SEQ ID NO: 230841 - DNA, 15 bp, Homo sapiens
ctcctttaactctca

SEQ ID NO: 230842 - DNA, 15 bp, Homo sapiens
tctcctttaactctc

SEQ ID NO: 230843 - DNA, 15 bp, Homo sapiens
ttctcctttaactct

SEQ ID NO: 230844 - DNA, 15 bp, Homo sapiens
cttctcctttaactc

SEQ ID NO: 230845 - DNA, 15 bp, Homo sapiens
tcttctcctttaact

SEQ ID NO: 230846 - DNA, 15 bp, Homo sapiens
ttcttctcctttaac

SEQ ID NO: 230847 - DNA, 15 bp, Homo sapiens
tttcttctcctttaa

SEQ ID NO: 230848 - DNA, 15 bp, Homo sapiens
ctttcttctccttta

SEQ ID NO: 230849 - DNA, 15 bp, Homo sapiens
gctttcttctccttt

SEQ ID NO: 230850 - DNA, 15 bp, Homo sapiens
ggctttcttctcctt

SEQ ID NO: 230851 - DNA, 15 bp, Homo sapiens
aggctttcttctcct

SEQ ID NO: 230852 - DNA, 15 bp, Homo sapiens
aaggctttcttctcc

SEQ ID NO: 230853 - DNA, 15 bp, Homo sapiens
gaaggctttcttctc

SEQ ID NO: 230854 - DNA, 15 bp, Homo sapiens
tgaaggctttcttct

SEQ ID NO: 230855 - DNA, 15 bp, Homo sapiens
ttgaaggctttcttc

SEQ ID NO: 230856 - DNA, 15 bp, Homo sapiens
tttgaaggctttctt

SEQ ID NO: 230857 - DNA, 15 bp, Homo sapiens
ctttgaaggctttct

SEQ ID NO: 230858 - DNA, 15 bp, Homo sapiens
actttgaaggctttc

SEQ ID NO: 230859 - DNA, 15 bp, Homo sapiens
cactttgaaggcttt

SEQ ID NO: 230860 - DNA, 15 bp, Homo sapiens
tcactttgaaggctt

SEQ ID NO: 230861 - DNA, 15 bp, Homo sapiens
ctcactttgaaggct

SEQ ID NO: 230862 - DNA, 15 bp, Homo sapiens
cctcactttgaaggc

SEQ ID NO: 230863 - DNA, 15 bp, Homo sapiens
tcctcactttgaagg

SEQ ID NO: 230864 - DNA, 15 bp, Homo sapiens
ctcctcactttgaag

SEQ ID NO: 230865 - DNA, 15 bp, Homo sapiens
gctcctcactttgaa

SEQ ID NO: 230866 - DNA, 15 bp, Homo sapiens
tgctcctcactttga

SEQ ID NO: 230867 - DNA, 15 bp, Homo sapiens
ctgctcctcactttg

SEQ ID NO: 230868 - DNA, 15 bp, Homo sapiens
cctgctcctcacttt

SEQ ID NO: 230869 - DNA, 15 bp, Homo sapiens
tcctgctcctcactt

SEQ ID NO: 230870 - DNA, 15 bp, Homo sapiens
ttcctgctcctcact

SEQ ID NO: 230871 - DNA, 15 bp, Homo sapiens
tttcctgctcctcac

SEQ ID NO: 230872 - DNA, 15 bp, Homo sapiens
ttttcctgctcctca

SEQ ID NO: 230873 - DNA, 15 bp, Homo sapiens
tttttcctgctcctc

SEQ ID NO: 230874 - DNA, 15 bp, Homo sapiens
gtttttcctgctcct

SEQ ID NO: 230875 - DNA, 15 bp, Homo sapiens
tgtttttcctgctcc

SEQ ID NO: 230876 - DNA, 15 bp, Homo sapiens
ctgtttttcctgctc

SEQ ID NO: 230877 - DNA, 15 bp, Homo sapiens
tctgtttttcctgct

SEQ ID NO: 230878 - DNA, 15 bp, Homo sapiens
ctctgtttttcctgc

SEQ ID NO: 230879 - DNA, 15 bp, Homo sapiens
tctctgtttttcctg

SEQ ID NO: 230880 - DNA, 15 bp, Homo sapiens
ttctctgtttttcct

SEQ ID NO: 230881 - DNA, 15 bp, Homo sapiens
cttctctgtttttcc

SEQ ID NO: 230882 - DNA, 15 bp, Homo sapiens
ccttctctgtttttc

SEQ ID NO: 230883 - DNA, 15 bp, Homo sapiens
tccttctctgttttt

SEQ ID NO: 230884 - DNA, 15 bp, Homo sapiens
ctccttctctgtttt

SEQ ID NO: 230885 - DNA, 15 bp, Homo sapiens
gctccttctctgttt

SEQ ID NO: 230886 - DNA, 15 bp, Homo sapiens
ggctccttctctgtt

SEQ ID NO: 230887 - DNA, 15 bp, Homo sapiens
aggctccttctctgt

SEQ ID NO: 230888 - DNA, 15 bp, Homo sapiens
caggctccttctctg

SEQ ID NO: 230889 - DNA, 15 bp, Homo sapiens
ccaggctccttctct

SEQ ID NO: 230890 - DNA, 15 bp, Homo sapiens
gccaggctccttctc

SEQ ID NO: 230891 - DNA, 15 bp, Homo sapiens
cgccaggctccttct

SEQ ID NO: 230892 - DNA, 15 bp, Homo sapiens
gcgccaggctccttc

SEQ ID NO: 230893 - DNA, 15 bp, Homo sapiens
agcgccaggctcctt

SEQ ID NO: 230894 - DNA, 15 bp, Homo sapiens
gagcgccaggctcct

SEQ ID NO: 230895 - DNA, 15 bp, Homo sapiens
agagcgccaggctcc

SEQ ID NO: 230896 - DNA, 15 bp, Homo sapiens
cagagcgccaggctc

SEQ ID NO: 230897 - DNA, 15 bp, Homo sapiens
ccagagcgccaggct

SEQ ID NO: 230898 - DNA, 15 bp, Homo sapiens
cccagagcgccaggc

SEQ ID NO: 230899 - DNA, 15 bp, Homo sapiens
tcccagagcgccagg

SEQ ID NO: 230900 - DNA, 15 bp, Homo sapiens
ttcccagagcgccag

SEQ ID NO: 230901 - DNA, 15 bp, Homo sapiens
tttcccagagcgcca

SEQ ID NO: 230902 - DNA, 15 bp, Homo sapiens
atttcccagagcgcc

SEQ ID NO: 230903 - DNA, 15 bp, Homo sapiens
catttcccagagcgc

SEQ ID NO: 230904 - DNA, 15 bp, Homo sapiens
ccatttcccagagcg

SEQ ID NO: 230905 - DNA, 15 bp, Homo sapiens
cccatttcccagagc

SEQ ID NO: 230906 - DNA, 15 bp, Homo sapiens
ccccatttcccagag

SEQ ID NO: 230907 - DNA, 15 bp, Homo sapiens
cccccatttcccaga

SEQ ID NO: 230908 - DNA, 15 bp, Homo sapiens
ccccccatttcccag

SEQ ID NO: 230909 - DNA, 15 bp, Homo sapiens
accccccatttccca

SEQ ID NO: 230910 - DNA, 15 bp, Homo sapiens
caccccccatttccc

SEQ ID NO: 230911 - DNA, 15 bp, Homo sapiens
gcaccccccatttcc

SEQ ID NO: 230912 - DNA, 15 bp, Homo sapiens
tgcaccccccatttc

SEQ ID NO: 230913 - DNA, 15 bp, Homo sapiens
ctgcaccccccattt

SEQ ID NO: 230914 - DNA, 15 bp, Homo sapiens
tctgcaccccccatt

SEQ ID NO: 230915 - DNA, 15 bp, Homo sapiens
gtctgcaccccccat

SEQ ID NO: 230916 - DNA, 15 bp, Homo sapiens
ggtctgcacccccca

SEQ ID NO: 230917 - DNA, 15 bp, Homo sapiens
gggtctgcacccccc

SEQ ID NO: 230918 - DNA, 15 bp, Homo sapiens
ggggtctgcaccccc

SEQ ID NO: 230919 - DNA, 15 bp, Homo sapiens
tggggtctgcacccc

SEQ ID NO: 230920 - DNA, 15 bp, Homo sapiens
ttggggtctgcaccc

SEQ ID NO: 230921 - DNA, 15 bp, Homo sapiens
tttggggtctgcacc

SEQ ID NO: 230922 - DNA, 15 bp, Homo sapiens
ctttggggtctgcac

SEQ ID NO: 230923 - DNA, 15 bp, Homo sapiens
actttggggtctgca

SEQ ID NO: 230924 - DNA, 15 bp, Homo sapiens
gactttggggtctgc

SEQ ID NO: 230925 - DNA, 15 bp, Homo sapiens
agactttggggtctg

SEQ ID NO: 230926 - DNA, 15 bp, Homo sapiens
cagactttggggtct

SEQ ID NO: 230927 - DNA, 15 bp, Homo sapiens
ccagactttggggtc

SEQ ID NO: 230928 - DNA, 15 bp, Homo sapiens
cccagactttggggt

SEQ ID NO: 230929 - DNA, 15 bp, Homo sapiens
ccccagactttgggg

SEQ ID NO: 230930 - DNA, 15 bp, Homo sapiens
tccccagactttggg

SEQ ID NO: 230931 - DNA, 15 bp, Homo sapiens
ttccccagactttgg

SEQ ID NO: 230932 - DNA, 15 bp, Homo sapiens
cttccccagactttg

SEQ ID NO: 230933 - DNA, 15 bp, Homo sapiens
acttccccagacttt

SEQ ID NO: 230934 - DNA, 15 bp, Homo sapiens
cacttccccagactt

SEQ ID NO: 230935 - DNA, 15 bp, Homo sapiens
acacttccccagact

SEQ ID NO: 230936 - DNA, 15 bp, Homo sapiens
gacacttccccagac

SEQ ID NO: 230937 - DNA, 15 bp, Homo sapiens
ggacacttccccaga

SEQ ID NO: 230938 - DNA, 15 bp, Homo sapiens
aggacacttccccag

SEQ ID NO: 230939 - DNA, 15 bp, Homo sapiens
caggacacttcccca

SEQ ID NO: 230940 - DNA, 15 bp, Homo sapiens
ccaggacacttcccc

SEQ ID NO: 230941 - DNA, 15 bp, Homo sapiens
tccaggacacttccc

SEQ ID NO: 230942 - DNA, 15 bp, Homo sapiens
ctccaggacacttcc

SEQ ID NO: 230943 - DNA, 15 bp, Homo sapiens
tctccaggacacttc

SEQ ID NO: 230944 - DNA, 15 bp, Homo sapiens
gtctccaggacactt

SEQ ID NO: 230945 - DNA, 15 bp, Homo sapiens
tgtctccaggacact

SEQ ID NO: 230946 - DNA, 15 bp, Homo sapiens
ctgtctccaggacac

SEQ ID NO: 230947 - DNA, 15 bp, Homo sapiens
gctgtctccaggaca

SEQ ID NO: 230948 - DNA, 15 bp, Homo sapiens
ggctgtctccaggac

SEQ ID NO: 230949 - DNA, 15 bp, Homo sapiens
aggctgtctccagga

SEQ ID NO: 230950 - DNA, 15 bp, Homo sapiens
caggctgtctccagg

SEQ ID NO: 230951 - DNA, 15 bp, Homo sapiens
ccaggctgtctccag

SEQ ID NO: 230952 - DNA, 15 bp, Homo sapiens
accaggctgtctcca

SEQ ID NO: 230953 - DNA, 15 bp, Homo sapiens
caccaggctgtctcc

SEQ ID NO: 230954 - DNA, 15 bp, Homo sapiens
ccaccaggctgtctc

SEQ ID NO: 230955 - DNA, 15 bp, Homo sapiens
cccaccaggctgtct

SEQ ID NO: 230956 - DNA, 15 bp, Homo sapiens
ccccaccaggctgtc

SEQ ID NO: 230957 - DNA, 15 bp, Homo sapiens
gccccaccaggctgt

SEQ ID NO: 230958 - DNA, 15 bp, Homo sapiens
agccccaccaggctg

SEQ ID NO: 230959 - DNA, 15 bp, Homo sapiens
aagccccaccaggct

SEQ ID NO: 230960 - DNA, 15 bp, Homo sapiens
aaagccccaccaggc

SEQ ID NO: 230961 - DNA, 15 bp, Homo sapiens
taaagccccaccagg

SEQ ID NO: 230962 - DNA, 15 bp, Homo sapiens
ttaaagccccaccag

SEQ ID NO: 230963 - DNA, 15 bp, Homo sapiens
tttaaagccccacca

SEQ ID NO: 230964 - DNA, 15 bp, Homo sapiens
ctttaaagccccacc

SEQ ID NO: 230965 - DNA, 15 bp, Homo sapiens
cctttaaagccccac

SEQ ID NO: 230966 - DNA, 15 bp, Homo sapiens
gcctttaaagcccca

SEQ ID NO: 230967 - DNA, 15 bp, Homo sapiens
ggcctttaaagcccc

SEQ ID NO: 230968 - DNA, 15 bp, Homo sapiens
tggcctttaaagccc

SEQ ID NO: 230969 - DNA, 15 bp, Homo sapiens
atggcctttaaagcc

SEQ ID NO: 230970 - DNA, 15 bp, Homo sapiens
catggcctttaaagc

SEQ ID NO: 230971 - DNA, 15 bp, Homo sapiens
gcatggcctttaaag

SEQ ID NO: 230972 - DNA, 15 bp, Homo sapiens
agcatggcctttaaa

SEQ ID NO: 230973 - DNA, 15 bp, Homo sapiens
tagcatggcctttaa

SEQ ID NO: 230974 - DNA, 15 bp, Homo sapiens
ttagcatggccttta

SEQ ID NO: 230975 - DNA, 15 bp, Homo sapiens
tttagcatggccttt

SEQ ID NO: 230976 - DNA, 15 bp, Homo sapiens
ctttagcatggcctt

SEQ ID NO: 230977 - DNA, 15 bp, Homo sapiens
tctttagcatggcct

SEQ ID NO: 230978 - DNA, 15 bp, Homo sapiens
ttctttagcatggcc

SEQ ID NO: 230979 - DNA, 15 bp, Homo sapiens
attctttagcatggc

SEQ ID NO: 230980 - DNA, 15 bp, Homo sapiens
aattctttagcatgg

SEQ ID NO: 230981 - DNA, 15 bp, Homo sapiens
aaattctttagcatg

SEQ ID NO: 230982 - DNA, 15 bp, Homo sapiens
aaaattctttagcat

SEQ ID NO: 230983 - DNA, 15 bp, Homo sapiens
caaaattctttagca

SEQ ID NO: 230984 - DNA, 15 bp, Homo sapiens
ccaaaattctttagc

SEQ ID NO: 230985 - DNA, 15 bp, Homo sapiens
cccaaaattctttag

SEQ ID NO: 230986 - DNA, 15 bp, Homo sapiens
ccccaaaattcttta

SEQ ID NO: 230987 - DNA, 15 bp, Homo sapiens
gccccaaaattcttt

SEQ ID NO: 230988 - DNA, 15 bp, Homo sapiens
ggccccaaaattctt

SEQ ID NO: 230989 - DNA, 15 bp, Homo sapiens
tggccccaaaattct

SEQ ID NO: 230990 - DNA, 15 bp, Homo sapiens
ctggccccaaaattc

SEQ ID NO: 230991 - DNA, 15 bp, Homo sapiens
cctggccccaaaatt

SEQ ID NO: 230992 - DNA, 15 bp, Homo sapiens
gcctggccccaaaat

SEQ ID NO: 230993 - DNA, 15 bp, Homo sapiens
cgcctggccccaaaa

SEQ ID NO: 230994 - DNA, 15 bp, Homo sapiens
acgcctggccccaaa

SEQ ID NO: 230995 - DNA, 15 bp, Homo sapiens
cacgcctggccccaa

SEQ ID NO: 230996 - DNA, 15 bp, Homo sapiens
ccacgcctggcccca

SEQ ID NO: 230997 - DNA, 15 bp, Homo sapiens
accacgcctggcccc

SEQ ID NO: 230998 - DNA, 15 bp, Homo sapiens
caccacgcctggccc

SEQ ID NO: 230999 - DNA, 15 bp, Homo sapiens
gtaagccaccacgcc

SEQ ID NO: 231000 - DNA, 15 bp, Homo sapiens
tgtaagccaccacgc

SEQ ID NO: 231001 - DNA, 15 bp, Homo sapiens
gtgtaagccaccacg

SEQ ID NO: 231002 - DNA, 15 bp, Homo sapiens
ggtgtaagccaccac

SEQ ID NO: 231003 - DNA, 15 bp, Homo sapiens
aggtgtaagccacca

SEQ ID NO: 231004 - DNA, 15 bp, Homo sapiens
caggtgtaagccacc

SEQ ID NO: 231005 - DNA, 15 bp, Homo sapiens
acaggtgtaagccac

SEQ ID NO: 231006 - DNA, 15 bp, Homo sapiens
tacaggtgtaagcca

SEQ ID NO: 231007 - DNA, 15 bp, Homo sapiens
ttacaggtgtaagcc

SEQ ID NO: 231008 - DNA, 15 bp, Homo sapiens
attacaggtgtaagc

SEQ ID NO: 231009 - DNA, 15 bp, Homo sapiens
gattacaggtgtaag

SEQ ID NO: 231010 - DNA, 15 bp, Homo sapiens
ggattacaggtgtaa

SEQ ID NO: 231011 - DNA, 15 bp, Homo sapiens
gggattacaggtgta

SEQ ID NO: 231012 - DNA, 15 bp, Homo sapiens
gagcctcccaaagtg

SEQ ID NO: 231013 - DNA, 15 bp, Homo sapiens
tgagcctcccaaagt

SEQ ID NO: 231014 - DNA, 15 bp, Homo sapiens
ctgagcctcccaaag

SEQ ID NO: 231015 - DNA, 15 bp, Homo sapiens
cctgagcctcccaaa

SEQ ID NO: 231016 - DNA, 15 bp, Homo sapiens
acctgagcctcccaa

SEQ ID NO: 231017 - DNA, 15 bp, Homo sapiens
cacctgagcctccca

SEQ ID NO: 231018 - DNA, 15 bp, Homo sapiens
ccacctgagcctccc

SEQ ID NO: 231019 - DNA, 15 bp, Homo sapiens
cccacctgagcctcc

SEQ ID NO: 231020 - DNA, 15 bp, Homo sapiens
acccacctgagcctc

SEQ ID NO: 231021 - DNA, 15 bp, Homo sapiens
cacccacctgagcct

SEQ ID NO: 231022 - DNA, 15 bp, Homo sapiens
ccacccacctgagcc

SEQ ID NO: 231023 - DNA, 15 bp, Homo sapiens
tccacccacctgagc

SEQ ID NO: 231024 - DNA, 15 bp, Homo sapiens
atccacccacctgag

SEQ ID NO: 231025 - DNA, 15 bp, Homo sapiens
gatccacccacctga

SEQ ID NO: 231026 - DNA, 15 bp, Homo sapiens
tgatccacccacctg

SEQ ID NO: 231027 - DNA, 15 bp, Homo sapiens
cgtgatccacccacc

SEQ ID NO: 231028 - DNA, 15 bp, Homo sapiens
tcgtgatccacccac

SEQ ID NO: 231029 - DNA, 15 bp, Homo sapiens
ctcgtgatccaccca

SEQ ID NO: 231030 - DNA, 15 bp, Homo sapiens
cctcgtgatccaccc

SEQ ID NO: 231031 - DNA, 15 bp, Homo sapiens
ggacctcgtgatcca

SEQ ID NO: 231032 - DNA, 15 bp, Homo sapiens
cggacctcgtgatcc

SEQ ID NO: 231033 - DNA, 15 bp, Homo sapiens
ccggacctcgtgatc

SEQ ID NO: 231034 - DNA, 15 bp, Homo sapiens
tccggacctcgtgat

SEQ ID NO: 231035 - DNA, 15 bp, Homo sapiens
ctccggacctcgtga

SEQ ID NO: 231036 - DNA, 15 bp, Homo sapiens
tctccggacctcgtg

SEQ ID NO: 231037 - DNA, 15 bp, Homo sapiens
atctccggacctcgt

SEQ ID NO: 231038 - DNA, 15 bp, Homo sapiens
gatctccggacctcg

SEQ ID NO: 231039 - DNA, 15 bp, Homo sapiens
cgatctccggacctc

SEQ ID NO: 231040 - DNA, 15 bp, Homo sapiens
tcgatctccggacct

SEQ ID NO: 231041 - DNA, 15 bp, Homo sapiens
ctcgatctccggacc

SEQ ID NO: 231042 - DNA, 15 bp, Homo sapiens
tctcgatctccggac

SEQ ID NO: 231043 - DNA, 15 bp, Homo sapiens
gtctcgatctccgga

SEQ ID NO: 231044 - DNA, 15 bp, Homo sapiens
ggtctcgatctccgg

SEQ ID NO: 231045 - DNA, 15 bp, Homo sapiens
tggtctcgatctccg

SEQ ID NO: 231046 - DNA, 15 bp, Homo sapiens
tggggtttcactgtg

SEQ ID NO: 231047 - DNA, 15 bp, Homo sapiens
atggggtttcactgt

SEQ ID NO: 231048 - DNA, 15 bp, Homo sapiens
gatggggtttcactg

SEQ ID NO: 231049 - DNA, 15 bp, Homo sapiens
agatggggtttcact

SEQ ID NO: 231050 - DNA, 15 bp, Homo sapiens
actggctaatttttt

SEQ ID NO: 231051 - DNA, 15 bp, Homo sapiens
cactggctaattttt

SEQ ID NO: 231052 - DNA, 15 bp, Homo sapiens
acactggctaatttt

SEQ ID NO: 231053 - DNA, 15 bp, Homo sapiens
cacactggctaattt

SEQ ID NO: 231054 - DNA, 15 bp, Homo sapiens
ccacactggctaatt

SEQ ID NO: 231055 - DNA, 15 bp, Homo sapiens
accacactggctaat

SEQ ID NO: 231056 - DNA, 15 bp, Homo sapiens
caccacactggctaa

SEQ ID NO: 231057 - DNA, 15 bp, Homo sapiens
ccaccacactggcta

SEQ ID NO: 231058 - DNA, 15 bp, Homo sapiens
gccaccacactggct

SEQ ID NO: 231059 - DNA, 15 bp, Homo sapiens
cgccaccacactggc

SEQ ID NO: 231060 - DNA, 15 bp, Homo sapiens
ccgccaccacactgg

SEQ ID NO: 231061 - DNA, 15 bp, Homo sapiens
cccgccaccacactg

SEQ ID NO: 231062 - DNA, 15 bp, Homo sapiens
acccgccaccacact

SEQ ID NO: 231063 - DNA, 15 bp, Homo sapiens
cacccgccaccacac

SEQ ID NO: 231064 - DNA, 15 bp, Homo sapiens
gcacccgccaccaca

SEQ ID NO: 231065 - DNA, 15 bp, Homo sapiens
ggcacccgccaccac

SEQ ID NO: 231066 - DNA, 15 bp, Homo sapiens
aggcacccgccacca

SEQ ID NO: 231067 - DNA, 15 bp, Homo sapiens
caggcacccgccacc

SEQ ID NO: 231068 - DNA, 15 bp, Homo sapiens
acaggcacccgccac

SEQ ID NO: 231069 - DNA, 15 bp, Homo sapiens
tacaggcacccgcca

SEQ ID NO: 231070 - DNA, 15 bp, Homo sapiens
ctacaggcacccgcc

SEQ ID NO: 231071 - DNA, 15 bp, Homo sapiens
actacaggcacccgc

SEQ ID NO: 231072 - DNA, 15 bp, Homo sapiens
gactacaggcacccg

SEQ ID NO: 231073 - DNA, 15 bp, Homo sapiens
tcgagtagctgggac

SEQ ID NO: 231074 - DNA, 15 bp, Homo sapiens
ctcgagtagctggga

SEQ ID NO: 231075 - DNA, 15 bp, Homo sapiens
tctcgagtagctggg

SEQ ID NO: 231076 - DNA, 15 bp, Homo sapiens
ctctcgagtagctgg

SEQ ID NO: 231077 - DNA, 15 bp, Homo sapiens
cctctcgagtagctg

SEQ ID NO: 231078 - DNA, 15 bp, Homo sapiens
gcctctcgagtagct

SEQ ID NO: 231079 - DNA, 15 bp, Homo sapiens
agcctctcgagtagc

SEQ ID NO: 231080 - DNA, 15 bp, Homo sapiens
cagcctctcgagtag

SEQ ID NO: 231081 - DNA, 15 bp, Homo sapiens
tcagcctctcgagta

SEQ ID NO: 231082 - DNA, 15 bp, Homo sapiens
ctcagcctctcgagt

SEQ ID NO: 231083 - DNA, 15 bp, Homo sapiens
cctcagcctctcgag

SEQ ID NO: 231084 - DNA, 15 bp, Homo sapiens
gcctcagcctctcga

SEQ ID NO: 231085 - DNA, 15 bp, Homo sapiens
tgcctcagcctctcg

SEQ ID NO: 231086 - DNA, 15 bp, Homo sapiens
ctgcctcagcctctc

SEQ ID NO: 231087 - DNA, 15 bp, Homo sapiens
cctgcctcagcctct

SEQ ID NO: 231088 - DNA, 15 bp, Homo sapiens
atcctgcctcagcct

SEQ ID NO: 231089 - DNA, 15 bp, Homo sapiens
tatcctgcctcagcc

SEQ ID NO: 231090 - DNA, 15 bp, Homo sapiens
ttatcctgcctcagc

SEQ ID NO: 231091 - DNA, 15 bp, Homo sapiens
attatcctgcctcag

SEQ ID NO: 231092 - DNA, 15 bp, Homo sapiens
cattatcctgcctca

SEQ ID NO: 231093 - DNA, 15 bp, Homo sapiens
ccattatcctgcctc

SEQ ID NO: 231094 - DNA, 15 bp, Homo sapiens
gccattatcctgcct

SEQ ID NO: 231095 - DNA, 15 bp, Homo sapiens
tgccattatcctgcc

SEQ ID NO: 231096 - DNA, 15 bp, Homo sapiens
gtgccattatcctgc

SEQ ID NO: 231097 - DNA, 15 bp, Homo sapiens
cgtgccattatcctg

SEQ ID NO: 231098 - DNA, 15 bp, Homo sapiens
ccgtgccattatcct

SEQ ID NO: 231099 - DNA, 15 bp, Homo sapiens
tccgtgccattatcc

SEQ ID NO: 231100 - DNA, 15 bp, Homo sapiens
gtccgtgccattatc

SEQ ID NO: 231101 - DNA, 15 bp, Homo sapiens
ggtccgtgccattat

SEQ ID NO: 231102 - DNA, 15 bp, Homo sapiens
gggtccgtgccatta

SEQ ID NO: 231103 - DNA, 15 bp, Homo sapiens
tgggtccgtgccatt

SEQ ID NO: 231104 - DNA, 15 bp, Homo sapiens
ctgggtccgtgccat

SEQ ID NO: 231105 - DNA, 15 bp, Homo sapiens
cctgggtccgtgcca

SEQ ID NO: 231106 - DNA, 15 bp, Homo sapiens
tcctgggtccgtgcc

SEQ ID NO: 231107 - DNA, 15 bp, Homo sapiens
ctcctgggtccgtgc

SEQ ID NO: 231108 - DNA, 15 bp, Homo sapiens
cctcctgggtccgtg

SEQ ID NO: 231109 - DNA, 15 bp, Homo sapiens
gcctcctgggtccgt

SEQ ID NO: 231110 - DNA, 15 bp, Homo sapiens
cgcctcctgggtccg

SEQ ID NO: 231111 - DNA, 15 bp, Homo sapiens
ccgcctcctgggtcc

SEQ ID NO: 231112 - DNA, 15 bp, Homo sapiens
tccgcctcctgggtc

SEQ ID NO: 231113 - DNA, 15 bp, Homo sapiens
ttccgcctcctgggt

SEQ ID NO: 231114 - DNA, 15 bp, Homo sapiens
gttccgcctcctggg

SEQ ID NO: 231115 - DNA, 15 bp, Homo sapiens
agttccgcctcctgg

SEQ ID NO: 231116 - DNA, 15 bp, Homo sapiens
aagttccgcctcctg

SEQ ID NO: 231117 - DNA, 15 bp, Homo sapiens
caagttccgcctcct

SEQ ID NO: 231118 - DNA, 15 bp, Homo sapiens
gcaagttccgcctcc

SEQ ID NO: 231119 - DNA, 15 bp, Homo sapiens
tgcaagttccgcctc

SEQ ID NO: 231120 - DNA, 15 bp, Homo sapiens
ctgcaagttccgcct

SEQ ID NO: 231121 - DNA, 15 bp, Homo sapiens
actgcaagttccgcc

SEQ ID NO: 231122 - DNA, 15 bp, Homo sapiens
cactgcaagttccgc

SEQ ID NO: 231123 - DNA, 15 bp, Homo sapiens
tcactgcaagttccg

SEQ ID NO: 231124 - DNA, 15 bp, Homo sapiens
ctcactgcaagttcc

SEQ ID NO: 231125 - DNA, 15 bp, Homo sapiens
gctcactgcaagttc

SEQ ID NO: 231126 - DNA, 15 bp, Homo sapiens
cgctcactgcaagtt

SEQ ID NO: 231127 - DNA, 15 bp, Homo sapiens
ccgctcactgcaagt

SEQ ID NO: 231128 - DNA, 15 bp, Homo sapiens
gccgctcactgcaag

SEQ ID NO: 231129 - DNA, 15 bp, Homo sapiens
agccgctcactgcaa

SEQ ID NO: 231130 - DNA, 15 bp, Homo sapiens
gagccgctcactgca

SEQ ID NO: 231131 - DNA, 15 bp, Homo sapiens
agagccgctcactgc

SEQ ID NO: 231132 - DNA, 15 bp, Homo sapiens
cagagccgctcactg

SEQ ID NO: 231133 - DNA, 15 bp, Homo sapiens
gcagagccgctcact

SEQ ID NO: 231134 - DNA, 15 bp, Homo sapiens
agcagagccgctcac

SEQ ID NO: 231135 - DNA, 15 bp, Homo sapiens
cagcagagccgctca

SEQ ID NO: 231136 - DNA, 15 bp, Homo sapiens
tcagcagagccgctc

SEQ ID NO: 231137 - DNA, 15 bp, Homo sapiens
ctcagcagagccgct

SEQ ID NO: 231138 - DNA, 15 bp, Homo sapiens
tctcagcagagccgc

SEQ ID NO: 231139 - DNA, 15 bp, Homo sapiens
atctcagcagagccg

SEQ ID NO: 231140 - DNA, 15 bp, Homo sapiens
gatctcagcagagcc

SEQ ID NO: 231141 - DNA, 15 bp, Homo sapiens
cgatctcagcagagc

SEQ ID NO: 231142 - DNA, 15 bp, Homo sapiens
gcgatctcagcagag

SEQ ID NO: 231143 - DNA, 15 bp, Homo sapiens
ggcgatctcagcaga

SEQ ID NO: 231144 - DNA, 15 bp, Homo sapiens
gggcgatctcagcag

SEQ ID NO: 231145 - DNA, 15 bp, Homo sapiens
ggggcgatctcagca

SEQ ID NO: 231146 - DNA, 15 bp, Homo sapiens
tggggcgatctcagc

SEQ ID NO: 231147 - DNA, 15 bp, Homo sapiens
gtggggcgatctcag

SEQ ID NO: 231148 - DNA, 15 bp, Homo sapiens
agtggggcgatctca

SEQ ID NO: 231149 - DNA, 15 bp, Homo sapiens
cagtggggcgatctc

SEQ ID NO: 231150 - DNA, 15 bp, Homo sapiens
gcagtggggcgatct

SEQ ID NO: 231151 - DNA, 15 bp, Homo sapiens
tgcagtggggcgatc

SEQ ID NO: 231152 - DNA, 15 bp, Homo sapiens
atgcagtggggcgat

SEQ ID NO: 231153 - DNA, 15 bp, Homo sapiens
aatgcagtggggcga

SEQ ID NO: 231154 - DNA, 15 bp, Homo sapiens
gaatgcagtggggcg

SEQ ID NO: 231155 - DNA, 15 bp, Homo sapiens
ggaatgcagtggggc

SEQ ID NO: 231156 - DNA, 15 bp, Homo sapiens
tggaatgcagtgggg

SEQ ID NO: 231157 - DNA, 15 bp, Homo sapiens
ctggaatgcagtggg

SEQ ID NO: 231158 - DNA, 15 bp, Homo sapiens
gctggaatgcagtgg

SEQ ID NO: 231159 - DNA, 15 bp, Homo sapiens
ggctggaatgcagtg

SEQ ID NO: 231160 - DNA, 15 bp, Homo sapiens
aggctggaatgcagt

SEQ ID NO: 231161 - DNA, 15 bp, Homo sapiens
caggctggaatgcag

SEQ ID NO: 231162 - DNA, 15 bp, Homo sapiens
ccaggctggaatgca

SEQ ID NO: 231163 - DNA, 15 bp, Homo sapiens
cccaggctggaatgc

SEQ ID NO: 231164 - DNA, 15 bp, Homo sapiens
acccaggctggaatg

SEQ ID NO: 231165 - DNA, 15 bp, Homo sapiens
cacccaggctggaat

SEQ ID NO: 231166 - DNA, 15 bp, Homo sapiens
tcacccaggctggaa

SEQ ID NO: 231167 - DNA, 15 bp, Homo sapiens
tgctctgtcacccag

SEQ ID NO: 231168 - DNA, 15 bp, Homo sapiens
ttgctctgtcaccca

SEQ ID NO: 231169 - DNA, 15 bp, Homo sapiens
cttgctctgtcaccc

SEQ ID NO: 231170 - DNA, 15 bp, Homo sapiens
tcttgctctgtcacc

SEQ ID NO: 231171 - DNA, 15 bp, Homo sapiens
gtcttgctctgtcac

SEQ ID NO: 231172 - DNA, 15 bp, Homo sapiens
agtcttgctctgtca

SEQ ID NO: 231173 - DNA, 15 bp, Homo sapiens
gagtcttgctctgtc

SEQ ID NO: 231174 - DNA, 15 bp, Homo sapiens
ggagtcttgctctgt

SEQ ID NO: 231175 - DNA, 15 bp, Homo sapiens
cggagtcttgctctg

SEQ ID NO: 231176 - DNA, 15 bp, Homo sapiens
acggagtcttgctct

SEQ ID NO: 231177 - DNA, 15 bp, Homo sapiens
gacggagtcttgctc

SEQ ID NO: 231178 - DNA, 15 bp, Homo sapiens
agacggagtcttgct

SEQ ID NO: 231179 - DNA, 15 bp, Homo sapiens
gagacggagtcttgc

SEQ ID NO: 231180 - DNA, 15 bp, Homo sapiens
tgagacggagtcttg

SEQ ID NO: 231181 - DNA, 15 bp, Homo sapiens
ttgagacggagtctt

SEQ ID NO: 231182 - DNA, 15 bp, Homo sapiens
atttttttttttttg

SEQ ID NO: 231183 - DNA, 15 bp, Homo sapiens
cattttttttttttt

SEQ ID NO: 231184 - DNA, 15 bp, Homo sapiens
tcatttttttttttt

SEQ ID NO: 231185 - DNA, 15 bp, Homo sapiens
ttcattttttttttt

SEQ ID NO: 231186 - DNA, 15 bp, Homo sapiens
attcatttttttttt

SEQ ID NO: 231187 - DNA, 15 bp, Homo sapiens
aattcattttttttt

SEQ ID NO: 231188 - DNA, 15 bp, Homo sapiens
aaattcatttttttt

SEQ ID NO: 231189 - DNA, 15 bp, Homo sapiens
aaaattcattttttt

SEQ ID NO: 231190 - DNA, 15 bp, Homo sapiens
aaaaattcatttttt

SEQ ID NO: 231191 - DNA, 15 bp, Homo sapiens
caaaaattcattttt

SEQ ID NO: 231192 - DNA, 15 bp, Homo sapiens
tcaaaaattcatttt

SEQ ID NO: 231193 - DNA, 15 bp, Homo sapiens
ttcaaaaattcattt

SEQ ID NO: 231194 - DNA, 15 bp, Homo sapiens
cttcaaaaattcatt

SEQ ID NO: 231195 - DNA, 15 bp, Homo sapiens
acttcaaaaattcat

SEQ ID NO: 231196 - DNA, 15 bp, Homo sapiens
aacttcaaaaattca

SEQ ID NO: 231197 - DNA, 15 bp, Homo sapiens
aaacttcaaaaattc

SEQ ID NO: 231198 - DNA, 15 bp, Homo sapiens
caaacttcaaaaatt

SEQ ID NO: 231199 - DNA, 15 bp, Homo sapiens
acaaacttcaaaaat

SEQ ID NO: 231200 - DNA, 15 bp, Homo sapiens
tacaaacttcaaaaa

SEQ ID NO: 231201 - DNA, 15 bp, Homo sapiens
ctacaaacttcaaaa

SEQ ID NO: 231202 - DNA, 15 bp, Homo sapiens
tctacaaacttcaaa

SEQ ID NO: 231203 - DNA, 15 bp, Homo sapiens
ttctacaaacttcaa

SEQ ID NO: 231204 - DNA, 15 bp, Homo sapiens
gttctacaaacttca

SEQ ID NO: 231205 - DNA, 15 bp, Homo sapiens
tgttctacaaacttc

SEQ ID NO: 231206 - DNA, 15 bp, Homo sapiens
ttgttctacaaactt

SEQ ID NO: 231207 - DNA, 15 bp, Homo sapiens
cttgttctacaaact

SEQ ID NO: 231208 - DNA, 15 bp, Homo sapiens
ccttgttctacaaac

SEQ ID NO: 231209 - DNA, 15 bp, Homo sapiens
tccttgttctacaaa

SEQ ID NO: 231210 - DNA, 15 bp, Homo sapiens
ctccttgttctacaa

SEQ ID NO: 231211 - DNA, 15 bp, Homo sapiens
tctccttgttctaca

SEQ ID NO: 231212 - DNA, 15 bp, Homo sapiens
atctccttgttctac

SEQ ID NO: 231213 - DNA, 15 bp, Homo sapiens
aatctccttgttcta

SEQ ID NO: 231214 - DNA, 15 bp, Homo sapiens
aaatctccttgttct

SEQ ID NO: 231215 - DNA, 15 bp, Homo sapiens
aaaatctccttgttc

SEQ ID NO: 231216 - DNA, 15 bp, Homo sapiens
caaaatctccttgtt

SEQ ID NO: 231217 - DNA, 15 bp, Homo sapiens
tcaaaatctccttgt

SEQ ID NO: 231218 - DNA, 15 bp, Homo sapiens
ctcaaaatctccttg

SEQ ID NO: 231219 - DNA, 15 bp, Homo sapiens
cctcaaaatctcctt

SEQ ID NO: 231220 - DNA, 15 bp, Homo sapiens
gcctcaaaatctcct

SEQ ID NO: 231221 - DNA, 15 bp, Homo sapiens
tgcctcaaaatctcc

SEQ ID NO: 231222 - DNA, 15 bp, Homo sapiens
ctgcctcaaaatctc

SEQ ID NO: 231223 - DNA, 15 bp, Homo sapiens
cctgcctcaaaatct

SEQ ID NO: 231224 - DNA, 15 bp, Homo sapiens
ccctgcctcaaaatc

SEQ ID NO: 231225 - DNA, 15 bp, Homo sapiens
cccctgcctcaaaat

SEQ ID NO: 231226 - DNA, 15 bp, Homo sapiens
ccccctgcctcaaaa

SEQ ID NO: 231227 - DNA, 15 bp, Homo sapiens
accccctgcctcaaa

SEQ ID NO: 231228 - DNA, 15 bp, Homo sapiens
caccccctgcctcaa

SEQ ID NO: 231229 - DNA, 15 bp, Homo sapiens
acaccccctgcctca

SEQ ID NO: 231230 - DNA, 15 bp, Homo sapiens
aacaccccctgcctc

SEQ ID NO: 231231 - DNA, 15 bp, Homo sapiens
caacaccccctgcct

SEQ ID NO: 231232 - DNA, 15 bp, Homo sapiens
acaacaccccctgcc

SEQ ID NO: 231233 - DNA, 15 bp, Homo sapiens
tacaacaccccctgc

SEQ ID NO: 231234 - DNA, 15 bp, Homo sapiens
gtacaacaccccctg

SEQ ID NO: 231235 - DNA, 15 bp, Homo sapiens
tgtacaacaccccct

SEQ ID NO: 231236 - DNA, 15 bp, Homo sapiens
ctgtacaacaccccc

SEQ ID NO: 231237 - DNA, 15 bp, Homo sapiens
tctgtacaacacccc

SEQ ID NO: 231238 - DNA, 15 bp, Homo sapiens
ctctgtacaacaccc

SEQ ID NO: 231239 - DNA, 15 bp, Homo sapiens
tctctgtacaacacc

SEQ ID NO: 231240 - DNA, 15 bp, Homo sapiens
ctctctgtacaacac

SEQ ID NO: 231241 - DNA, 15 bp, Homo sapiens
tctctctgtacaaca

SEQ ID NO: 231242 - DNA, 15 bp, Homo sapiens
ctctctctgtacaac

SEQ ID NO: 231243 - DNA, 15 bp, Homo sapiens
gctctctctgtacaa

SEQ ID NO: 231244 - DNA, 15 bp, Homo sapiens
agctctctctgtaca

SEQ ID NO: 231245 - DNA, 15 bp, Homo sapiens
cagctctctctgtac

SEQ ID NO: 231246 - DNA, 15 bp, Homo sapiens
ccagctctctctgta

SEQ ID NO: 231247 - DNA, 15 bp, Homo sapiens
cccagctctctctgt

SEQ ID NO: 231248 - DNA, 15 bp, Homo sapiens
ccccagctctctctg

SEQ ID NO: 231249 - DNA, 15 bp, Homo sapiens
cccccagctctctct

SEQ ID NO: 231250 - DNA, 15 bp, Homo sapiens
tcccccagctctctc

SEQ ID NO: 231251 - DNA, 15 bp, Homo sapiens
gtcccccagctctct

SEQ ID NO: 231252 - DNA, 15 bp, Homo sapiens
tgtcccccagctctc

SEQ ID NO: 231253 - DNA, 15 bp, Homo sapiens
ttgtcccccagctct

SEQ ID NO: 231254 - DNA, 15 bp, Homo sapiens
cttgtcccccagctc

SEQ ID NO: 231255 - DNA, 15 bp, Homo sapiens
acttgtcccccagct

SEQ ID NO: 231256 - DNA, 15 bp, Homo sapiens
cacttgtcccccagc

SEQ ID NO: 231257 - DNA, 15 bp, Homo sapiens
ccacttgtcccccag

SEQ ID NO: 231258 - DNA, 15 bp, Homo sapiens
tccacttgtccccca

SEQ ID NO: 231259 - DNA, 15 bp, Homo sapiens
ctccacttgtccccc

SEQ ID NO: 231260 - DNA, 15 bp, Homo sapiens
tctccacttgtcccc

SEQ ID NO: 231261 - DNA, 15 bp, Homo sapiens
gtctccacttgtccc

SEQ ID NO: 231262 - DNA, 15 bp, Homo sapiens
agtctccacttgtcc

SEQ ID NO: 231263 - DNA, 15 bp, Homo sapiens
cagtctccacttgtc

SEQ ID NO: 231264 - DNA, 15 bp, Homo sapiens
tcagtctccacttgt

SEQ ID NO: 231265 - DNA, 15 bp, Homo sapiens
ttcagtctccacttg

SEQ ID NO: 231266 - DNA, 15 bp, Homo sapiens
attcagtctccactt

SEQ ID NO: 231267 - DNA, 15 bp, Homo sapiens
cattcagtctccact

SEQ ID NO: 231268 - DNA, 15 bp, Homo sapiens
ccattcagtctccac

SEQ ID NO: 231269 - DNA, 15 bp, Homo sapiens
cccattcagtctcca

SEQ ID NO: 231270 - DNA, 15 bp, Homo sapiens
acccattcagtctcc

SEQ ID NO: 231271 - DNA, 15 bp, Homo sapiens
cacccattcagtctc

SEQ ID NO: 231272 - DNA, 15 bp, Homo sapiens
tcacccattcagtct

SEQ ID NO: 231273 - DNA, 15 bp, Homo sapiens
ctcacccattcagtc

SEQ ID NO: 231274 - DNA, 15 bp, Homo sapiens
cctcacccattcagt

SEQ ID NO: 231275 - DNA, 15 bp, Homo sapiens
gcctcacccattcag

SEQ ID NO: 231276 - DNA, 15 bp, Homo sapiens
agcctcacccattca

SEQ ID NO: 231277 - DNA, 15 bp, Homo sapiens
tagcctcacccattc

SEQ ID NO: 231278 - DNA, 15 bp, Homo sapiens
ctagcctcacccatt

SEQ ID NO: 231279 - DNA, 15 bp, Homo sapiens
tctagcctcacccat

SEQ ID NO: 231280 - DNA, 15 bp, Homo sapiens
ctctagcctcaccca

SEQ ID NO: 231281 - DNA, 15 bp, Homo sapiens
gctctagcctcaccc

SEQ ID NO: 231282 - DNA, 15 bp, Homo sapiens
agctctagcctcacc

SEQ ID NO: 231283 - DNA, 15 bp, Homo sapiens
aagctctagcctcac

SEQ ID NO: 231284 - DNA, 15 bp, Homo sapiens
caagctctagcctca

SEQ ID NO: 231285 - DNA, 15 bp, Homo sapiens
ccaagctctagcctc

SEQ ID NO: 231286 - DNA, 15 bp, Homo sapiens
tccaagctctagcct

SEQ ID NO: 231287 - DNA, 15 bp, Homo sapiens
ctccaagctctagcc

SEQ ID NO: 231288 - DNA, 15 bp, Homo sapiens
cctccaagctctagc

SEQ ID NO: 231289 - DNA, 15 bp, Homo sapiens
gcctccaagctctag

SEQ ID NO: 231290 - DNA, 15 bp, Homo sapiens
agcctccaagctcta

SEQ ID NO: 231291 - DNA, 15 bp, Homo sapiens
tagcctccaagctct

SEQ ID NO: 231292 - DNA, 15 bp, Homo sapiens
atagcctccaagctc

SEQ ID NO: 231293 - DNA, 15 bp, Homo sapiens
tatagcctccaagct

SEQ ID NO: 231294 - DNA, 15 bp, Homo sapiens
ctatagcctccaagc

SEQ ID NO: 231295 - DNA, 15 bp, Homo sapiens
cctatagcctccaag

SEQ ID NO: 231296 - DNA, 15 bp, Homo sapiens
tcctatagcctccaa

SEQ ID NO: 231297 - DNA, 15 bp, Homo sapiens
gtcctatagcctcca

SEQ ID NO: 231298 - DNA, 15 bp, Homo sapiens
tgtcctatagcctcc

SEQ ID NO: 231299 - DNA, 15 bp, Homo sapiens
ttgtcctatagcctc

SEQ ID NO: 231300 - DNA, 15 bp, Homo sapiens
cttgtcctatagcct

SEQ ID NO: 231301 - DNA, 15 bp, Homo sapiens
acttgtcctatagcc

SEQ ID NO: 231302 - DNA, 15 bp, Homo sapiens
aacttgtcctatagc

SEQ ID NO: 231303 - DNA, 15 bp, Homo sapiens
taacttgtcctatag

SEQ ID NO: 231304 - DNA, 15 bp, Homo sapiens
ctaacttgtcctata

SEQ ID NO: 231305 - DNA, 15 bp, Homo sapiens
cctaacttgtcctat

SEQ ID NO: 231306 - DNA, 15 bp, Homo sapiens
ccctaacttgtccta

SEQ ID NO: 231307 - DNA, 15 bp, Homo sapiens
gccctaacttgtcct

SEQ ID NO: 231308 - DNA, 15 bp, Homo sapiens
tgccctaacttgtcc

SEQ ID NO: 231309 - DNA, 15 bp, Homo sapiens
ctgccctaacttgtc

SEQ ID NO: 231310 - DNA, 15 bp, Homo sapiens
actgccctaacttgt

SEQ ID NO: 231311 - DNA, 15 bp, Homo sapiens
tactgccctaacttg

SEQ ID NO: 231312 - DNA, 15 bp, Homo sapiens
ttactgccctaactt

SEQ ID NO: 231313 - DNA, 15 bp, Homo sapiens
cttactgccctaact

SEQ ID NO: 231314 - DNA, 15 bp, Homo sapiens
gcttactgccctaac

SEQ ID NO: 231315 - DNA, 15 bp, Homo sapiens
agcttactgccctaa

SEQ ID NO: 231316 - DNA, 15 bp, Homo sapiens
tagcttactgcccta

SEQ ID NO: 231317 - DNA, 15 bp, Homo sapiens
gtagcttactgccct

SEQ ID NO: 231318 - DNA, 15 bp, Homo sapiens
agtagcttactgccc

SEQ ID NO: 231319 - DNA, 15 bp, Homo sapiens
cagtagcttactgcc

SEQ ID NO: 231320 - DNA, 15 bp, Homo sapiens
gcagtagcttactgc

SEQ ID NO: 231321 - DNA, 15 bp, Homo sapiens
agcagtagcttactg

SEQ ID NO: 231322 - DNA, 15 bp, Homo sapiens
aagcagtagcttact

SEQ ID NO: 231323 - DNA, 15 bp, Homo sapiens
aaagcagtagcttac

SEQ ID NO: 231324 - DNA, 15 bp, Homo sapiens
taaagcagtagctta

SEQ ID NO: 231325 - DNA, 15 bp, Homo sapiens
ctaaagcagtagctt

SEQ ID NO: 231326 - DNA, 15 bp, Homo sapiens
actaaagcagtagct

SEQ ID NO: 231327 - DNA, 15 bp, Homo sapiens
cactaaagcagtagc

SEQ ID NO: 231328 - DNA, 15 bp, Homo sapiens
tcactaaagcagtag

SEQ ID NO: 231329 - DNA, 15 bp, Homo sapiens
atcactaaagcagta

SEQ ID NO: 231330 - DNA, 15 bp, Homo sapiens
catcactaaagcagt

SEQ ID NO: 231331 - DNA, 15 bp, Homo sapiens
ccatcactaaagcag

SEQ ID NO: 231332 - DNA, 15 bp, Homo sapiens
gccatcactaaagca

SEQ ID NO: 231333 - DNA, 15 bp, Homo sapiens
tgccatcactaaagc

SEQ ID NO: 231334 - DNA, 15 bp, Homo sapiens
atgccatcactaaag

SEQ ID NO: 231335 - DNA, 15 bp, Homo sapiens
catgccatcactaaa

SEQ ID NO: 231336 - DNA, 15 bp, Homo sapiens
ccatgccatcactaa

SEQ ID NO: 231337 - DNA, 15 bp, Homo sapiens
cccatgccatcacta

SEQ ID NO: 231338 - DNA, 15 bp, Homo sapiens
tcccatgccatcact

SEQ ID NO: 231339 - DNA, 15 bp, Homo sapiens
ctcccatgccatcac

SEQ ID NO: 231340 - DNA, 15 bp, Homo sapiens
gctcccatgccatca

SEQ ID NO: 231341 - DNA, 15 bp, Homo sapiens
tgctcccatgccatc

SEQ ID NO: 231342 - DNA, 15 bp, Homo sapiens
ctgctcccatgccat

SEQ ID NO: 231343 - DNA, 15 bp, Homo sapiens
tctgctcccatgcca

SEQ ID NO: 231344 - DNA, 15 bp, Homo sapiens
atctgctcccatgcc

SEQ ID NO: 231345 - DNA, 15 bp, Homo sapiens
aatctgctcccatgc

SEQ ID NO: 231346 - DNA, 15 bp, Homo sapiens
gaatctgctcccatg

SEQ ID NO: 231347 - DNA, 15 bp, Homo sapiens
ggaatctgctcccat

SEQ ID NO: 231348 - DNA, 15 bp, Homo sapiens
aggaatctgctccca

SEQ ID NO: 231349 - DNA, 15 bp, Homo sapiens
caggaatctgctccc

SEQ ID NO: 231350 - DNA, 15 bp, Homo sapiens
tcaggaatctgctcc

SEQ ID NO: 231351 - DNA, 15 bp, Homo sapiens
atcaggaatctgctc

SEQ ID NO: 231352 - DNA, 15 bp, Homo sapiens
catcaggaatctgct

SEQ ID NO: 231353 - DNA, 15 bp, Homo sapiens
acatcaggaatctgc

SEQ ID NO: 231354 - DNA, 15 bp, Homo sapiens
cacatcaggaatctg

SEQ ID NO: 231355 - DNA, 15 bp, Homo sapiens
ccacatcaggaatct

SEQ ID NO: 231356 - DNA, 15 bp, Homo sapiens
accacatcaggaatc

SEQ ID NO: 231357 - DNA, 15 bp, Homo sapiens
gaccacatcaggaat

SEQ ID NO: 231358 - DNA, 15 bp, Homo sapiens
ggaccacatcaggaa

SEQ ID NO: 231359 - DNA, 15 bp, Homo sapiens
aggaccacatcagga

SEQ ID NO: 231360 - DNA, 15 bp, Homo sapiens
caggaccacatcagg

SEQ ID NO: 231361 - DNA, 15 bp, Homo sapiens
ccaggaccacatcag

SEQ ID NO: 231362 - DNA, 15 bp, Homo sapiens
accaggaccacatca

SEQ ID NO: 231363 - DNA, 15 bp, Homo sapiens
caccaggaccacatc

SEQ ID NO: 231364 - DNA, 15 bp, Homo sapiens
ccaccaggaccacat

SEQ ID NO: 231365 - DNA, 15 bp, Homo sapiens
cccaccaggaccaca

SEQ ID NO: 231366 - DNA, 15 bp, Homo sapiens
ccccaccaggaccac

SEQ ID NO: 231367 - DNA, 15 bp, Homo sapiens
gccccaccaggacca

SEQ ID NO: 231368 - DNA, 15 bp, Homo sapiens
tgccccaccaggacc

SEQ ID NO: 231369 - DNA, 15 bp, Homo sapiens
gtgccccaccaggac

SEQ ID NO: 231370 - DNA, 15 bp, Homo sapiens
cgtgccccaccagga

SEQ ID NO: 231371 - DNA, 15 bp, Homo sapiens
ccgtgccccaccagg

SEQ ID NO: 231372 - DNA, 15 bp, Homo sapiens
accgtgccccaccag

SEQ ID NO: 231373 - DNA, 15 bp, Homo sapiens
gaccgtgccccacca

SEQ ID NO: 231374 - DNA, 15 bp, Homo sapiens
agaccgtgccccacc

SEQ ID NO: 231375 - DNA, 15 bp, Homo sapiens
cagaccgtgccccac

SEQ ID NO: 231376 - DNA, 15 bp, Homo sapiens
gcagaccgtgcccca

SEQ ID NO: 231377 - DNA, 15 bp, Homo sapiens
tgcagaccgtgcccc

SEQ ID NO: 231378 - DNA, 15 bp, Homo sapiens
gtgcagaccgtgccc

SEQ ID NO: 231379 - DNA, 15 bp, Homo sapiens
agtgcagaccgtgcc

SEQ ID NO: 231380 - DNA, 15 bp, Homo sapiens
cagtgcagaccgtgc

SEQ ID NO: 231381 - DNA, 15 bp, Homo sapiens
tcagtgcagaccgtg

SEQ ID NO: 231382 - DNA, 15 bp, Homo sapiens
gtcagtgcagaccgt

SEQ ID NO: 231383 - DNA, 15 bp, Homo sapiens
tgtcagtgcagaccg

SEQ ID NO: 231384 - DNA, 15 bp, Homo sapiens
gtgtcagtgcagacc

SEQ ID NO: 231385 - DNA, 15 bp, Homo sapiens
ggtgtcagtgcagac

SEQ ID NO: 231386 - DNA, 15 bp, Homo sapiens
tggtgtcagtgcaga

SEQ ID NO: 231387 - DNA, 15 bp, Homo sapiens
ttggtgtcagtgcag

SEQ ID NO: 231388 - DNA, 15 bp, Homo sapiens
cttggtgtcagtgca

SEQ ID NO: 231389 - DNA, 15 bp, Homo sapiens
gcttggtgtcagtgc

SEQ ID NO: 231390 - DNA, 15 bp, Homo sapiens
tgcttggtgtcagtg

SEQ ID NO: 231391 - DNA, 15 bp, Homo sapiens
ctgcttggtgtcagt

SEQ ID NO: 231392 - DNA, 15 bp, Homo sapiens
tctgcttggtgtcag

SEQ ID NO: 231393 - DNA, 15 bp, Homo sapiens
ttctgcttggtgtca

SEQ ID NO: 231394 - DNA, 15 bp, Homo sapiens
cttctgcttggtgtc

SEQ ID NO: 231395 - DNA, 15 bp, Homo sapiens
tcttctgcttggtgt

SEQ ID NO: 231396 - DNA, 15 bp, Homo sapiens
atcttctgcttggtg

SEQ ID NO: 231397 - DNA, 15 bp, Homo sapiens
catcttctgcttggt

SEQ ID NO: 231398 - DNA, 15 bp, Homo sapiens
gcatcttctgcttgg

SEQ ID NO: 231399 - DNA, 15 bp, Homo sapiens
tgcatcttctgcttg

SEQ ID NO: 231400 - DNA, 15 bp, Homo sapiens
ctgcatcttctgctt

SEQ ID NO: 231401 - DNA, 15 bp, Homo sapiens
cctgcatcttctgct

SEQ ID NO: 231402 - DNA, 15 bp, Homo sapiens
acctgcatcttctgc

SEQ ID NO: 231403 - DNA, 15 bp, Homo sapiens
tacctgcatcttctg

SEQ ID NO: 231404 - DNA, 15 bp, Homo sapiens
ctacctgcatcttct

SEQ ID NO: 231405 - DNA, 15 bp, Homo sapiens
gctacctgcatcttc

SEQ ID NO: 231406 - DNA, 15 bp, Homo sapiens
ggctacctgcatctt

SEQ ID NO: 231407 - DNA, 15 bp, Homo sapiens
gggctacctgcatct

SEQ ID NO: 231408 - DNA, 15 bp, Homo sapiens
tgggctacctgcatc

SEQ ID NO: 231409 - DNA, 15 bp, Homo sapiens
atgggctacctgcat

SEQ ID NO: 231410 - DNA, 15 bp, Homo sapiens
catgggctacctgca

SEQ ID NO: 231411 - DNA, 15 bp, Homo sapiens
acatgggctacctgc

SEQ ID NO: 231412 - DNA, 15 bp, Homo sapiens
cacatgggctacctg

SEQ ID NO: 231413 - DNA, 15 bp, Homo sapiens
ccacatgggctacct

SEQ ID NO: 231414 - DNA, 15 bp, Homo sapiens
cccacatgggctacc

SEQ ID NO: 231415 - DNA, 15 bp, Homo sapiens
acccacatgggctac

SEQ ID NO: 231416 - DNA, 15 bp, Homo sapiens
cacccacatgggcta

SEQ ID NO: 231417 - DNA, 15 bp, Homo sapiens
tcacccacatgggct

SEQ ID NO: 231418 - DNA, 15 bp, Homo sapiens
atcacccacatgggc

SEQ ID NO: 231419 - DNA, 15 bp, Homo sapiens
tatcacccacatggg

SEQ ID NO: 231420 - DNA, 15 bp, Homo sapiens
atatcacccacatgg

SEQ ID NO: 231421 - DNA, 15 bp, Homo sapiens
gatatcacccacatg

SEQ ID NO: 231422 - DNA, 15 bp, Homo sapiens
tgatatcacccacat

SEQ ID NO: 231423 - DNA, 15 bp, Homo sapiens
atgatatcacccaca

SEQ ID NO: 231424 - DNA, 15 bp, Homo sapiens
catgatatcacccac

SEQ ID NO: 231425 - DNA, 15 bp, Homo sapiens
ccatgatatcaccca

SEQ ID NO: 231426 - DNA, 15 bp, Homo sapiens
tccatgatatcaccc

SEQ ID NO: 231427 - DNA, 15 bp, Homo sapiens
ttccatgatatcacc

SEQ ID NO: 231428 - DNA, 15 bp, Homo sapiens
tttccatgatatcac

SEQ ID NO: 231429 - DNA, 15 bp, Homo sapiens
atttccatgatatca

SEQ ID NO: 231430 - DNA, 15 bp, Homo sapiens
catttccatgatatc

SEQ ID NO: 231431 - DNA, 15 bp, Homo sapiens
ccatttccatgatat

SEQ ID NO: 231432 - DNA, 15 bp, Homo sapiens
tccatttccatgata

SEQ ID NO: 231433 - DNA, 15 bp, Homo sapiens
ttccatttccatgat

SEQ ID NO: 231434 - DNA, 15 bp, Homo sapiens
gttccatttccatga

SEQ ID NO: 231435 - DNA, 15 bp, Homo sapiens
agttccatttccatg

SEQ ID NO: 231436 - DNA, 15 bp, Homo sapiens
gagttccatttccat

SEQ ID NO: 231437 - DNA, 15 bp, Homo sapiens
tgagttccatttcca

SEQ ID NO: 231438 - DNA, 15 bp, Homo sapiens
atgagttccatttcc

SEQ ID NO: 231439 - DNA, 15 bp, Homo sapiens
aatgagttccatttc

SEQ ID NO: 231440 - DNA, 15 bp, Homo sapiens
caatgagttccattt

SEQ ID NO: 231441 - DNA, 15 bp, Homo sapiens
ccaatgagttccatt

SEQ ID NO: 231442 - DNA, 15 bp, Homo sapiens
cccaatgagttccat

SEQ ID NO: 231443 - DNA, 15 bp, Homo sapiens
gcccaatgagttcca

SEQ ID NO: 231444 - DNA, 15 bp, Homo sapiens
ggcccaatgagttcc

SEQ ID NO: 231445 - DNA, 15 bp, Homo sapiens
gggcccaatgagttc

SEQ ID NO: 231446 - DNA, 15 bp, Homo sapiens
tgggcccaatgagtt

SEQ ID NO: 231447 - DNA, 15 bp, Homo sapiens
ctgggcccaatgagt

SEQ ID NO: 231448 - DNA, 15 bp, Homo sapiens
gctgggcccaatgag

SEQ ID NO: 231449 - DNA, 15 bp, Homo sapiens
tgctgggcccaatga

SEQ ID NO: 231450 - DNA, 15 bp, Homo sapiens
gtgctgggcccaatg

SEQ ID NO: 231451 - DNA, 15 bp, Homo sapiens
tgtgctgggcccaat

SEQ ID NO: 231452 - DNA, 15 bp, Homo sapiens
gtgtgctgggcccaa

SEQ ID NO: 231453 - DNA, 15 bp, Homo sapiens
ggtgtgctgggccca

SEQ ID NO: 231454 - DNA, 15 bp, Homo sapiens
gggtgtgctgggccc

SEQ ID NO: 231455 - DNA, 15 bp, Homo sapiens
tgggtgtgctgggcc

SEQ ID NO: 231456 - DNA, 15 bp, Homo sapiens
ctgggtgtgctgggc

SEQ ID NO: 231457 - DNA, 15 bp, Homo sapiens
gctgggtgtgctggg

SEQ ID NO: 231458 - DNA, 15 bp, Homo sapiens
cgctgggtgtgctgg

SEQ ID NO: 231459 - DNA, 15 bp, Homo sapiens
ccgctgggtgtgctg

SEQ ID NO: 231460 - DNA, 15 bp, Homo sapiens
gccgctgggtgtgct

SEQ ID NO: 231461 - DNA, 15 bp, Homo sapiens
ggccgctgggtgtgc

SEQ ID NO: 231462 - DNA, 15 bp, Homo sapiens
tggccgctgggtgtg

SEQ ID NO: 231463 - DNA, 15 bp, Homo sapiens
gtggccgctgggtgt

SEQ ID NO: 231464 - DNA, 15 bp, Homo sapiens
ggtggccgctgggtg

SEQ ID NO: 231465 - DNA, 15 bp, Homo sapiens
aggtggccgctgggt

SEQ ID NO: 231466 - DNA, 15 bp, Homo sapiens
aaggtggccgctggg

SEQ ID NO: 231467 - DNA, 15 bp, Homo sapiens
caaggtggccgctgg

SEQ ID NO: 231468 - DNA, 15 bp, Homo sapiens
tcaaggtggccgctg

SEQ ID NO: 231469 - DNA, 15 bp, Homo sapiens
ctcaaggtggccgct

SEQ ID NO: 231470 - DNA, 15 bp, Homo sapiens
tctcaaggtggccgc

SEQ ID NO: 231471 - DNA, 15 bp, Homo sapiens
gtctcaaggtggccg

SEQ ID NO: 231472 - DNA, 15 bp, Homo sapiens
agtctcaaggtggcc

SEQ ID NO: 231473 - DNA, 15 bp, Homo sapiens
gagtctcaaggtggc

SEQ ID NO: 231474 - DNA, 15 bp, Homo sapiens
agagtctcaaggtgg

SEQ ID NO: 231475 - DNA, 15 bp, Homo sapiens
gagagtctcaaggtg

SEQ ID NO: 231476 - DNA, 15 bp, Homo sapiens
ggagagtctcaaggt

SEQ ID NO: 231477 - DNA, 15 bp, Homo sapiens
aggagagtctcaagg

SEQ ID NO: 231478 - DNA, 15 bp, Homo sapiens
caggagagtctcaag

SEQ ID NO: 231479 - DNA, 15 bp, Homo sapiens
ccaggagagtctcaa

SEQ ID NO: 231480 - DNA, 15 bp, Homo sapiens
gccaggagagtctca

SEQ ID NO: 231481 - DNA, 15 bp, Homo sapiens
tgccaggagagtctc

SEQ ID NO: 231482 - DNA, 15 bp, Homo sapiens
ttgccaggagagtct

SEQ ID NO: 231483 - DNA, 15 bp, Homo sapiens
attgccaggagagtc

SEQ ID NO: 231484 - DNA, 15 bp, Homo sapiens
gattgccaggagagt

SEQ ID NO: 231485 - DNA, 15 bp, Homo sapiens
tgattgccaggagag

SEQ ID NO: 231486 - DNA, 15 bp, Homo sapiens
gtgattgccaggaga

SEQ ID NO: 231487 - DNA, 15 bp, Homo sapiens
tgtgattgccaggag

SEQ ID NO: 231488 - DNA, 15 bp, Homo sapiens
gtgtgattgccagga

SEQ ID NO: 231489 - DNA, 15 bp, Homo sapiens
agtgtgattgccagg

SEQ ID NO: 231490 - DNA, 15 bp, Homo sapiens
cagtgtgattgccag

SEQ ID NO: 231491 - DNA, 15 bp, Homo sapiens
acagtgtgattgcca

SEQ ID NO: 231492 - DNA, 15 bp, Homo sapiens
aacagtgtgattgcc

SEQ ID NO: 231493 - DNA, 15 bp, Homo sapiens
caacagtgtgattgc

SEQ ID NO: 231494 - DNA, 15 bp, Homo sapiens
tcaacagtgtgattg

SEQ ID NO: 231495 - DNA, 15 bp, Homo sapiens
ttcaacagtgtgatt

SEQ ID NO: 231496 - DNA, 15 bp, Homo sapiens
gttcaacagtgtgat

SEQ ID NO: 231497 - DNA, 15 bp, Homo sapiens
cgttcaacagtgtga

SEQ ID NO: 231498 - DNA, 15 bp, Homo sapiens
gcgttcaacagtgtg

SEQ ID NO: 231499 - DNA, 15 bp, Homo sapiens
ggcgttcaacagtgt

SEQ ID NO: 231500 - DNA, 15 bp, Homo sapiens
aggcgttcaacagtg

SEQ ID NO: 231501 - DNA, 15 bp, Homo sapiens
gaggcgttcaacagt

SEQ ID NO: 231502 - DNA, 15 bp, Homo sapiens
agaggcgttcaacag

SEQ ID NO: 231503 - DNA, 15 bp, Homo sapiens
aagaggcgttcaaca

SEQ ID NO: 231504 - DNA, 15 bp, Homo sapiens
caagaggcgttcaac

SEQ ID NO: 231505 - DNA, 15 bp, Homo sapiens
acaagaggcgttcaa

SEQ ID NO: 231506 - DNA, 15 bp, Homo sapiens
cacaagaggcgttca

SEQ ID NO: 231507 - DNA, 15 bp, Homo sapiens
tcacaagaggcgttc

SEQ ID NO: 231508 - DNA, 15 bp, Homo sapiens
atcacaagaggcgtt

SEQ ID NO: 231509 - DNA, 15 bp, Homo sapiens
gatcacaagaggcgt

SEQ ID NO: 231510 - DNA, 15 bp, Homo sapiens
ggatcacaagaggcg

SEQ ID NO: 231511 - DNA, 15 bp, Homo sapiens
tggatcacaagaggc

SEQ ID NO: 231512 - DNA, 15 bp, Homo sapiens
ctggatcacaagagg

SEQ ID NO: 231513 - DNA, 15 bp, Homo sapiens
cctggatcacaagag

SEQ ID NO: 231514 - DNA, 15 bp, Homo sapiens
gcctggatcacaaga

SEQ ID NO: 231515 - DNA, 15 bp, Homo sapiens
tgcctggatcacaag

SEQ ID NO: 231516 - DNA, 15 bp, Homo sapiens
gtgcctggatcacaa

SEQ ID NO: 231517 - DNA, 15 bp, Homo sapiens
agtgcctggatcaca

SEQ ID NO: 231518 - DNA, 15 bp, Homo sapiens
cagtgcctggatcac

SEQ ID NO: 231519 - DNA, 15 bp, Homo sapiens
acagtgcctggatca

SEQ ID NO: 231520 - DNA, 15 bp, Homo sapiens
cacagtgcctggatc

SEQ ID NO: 231521 - DNA, 15 bp, Homo sapiens
gcacagtgcctggat

SEQ ID NO: 231522 - DNA, 15 bp, Homo sapiens
agcacagtgcctgga

SEQ ID NO: 231523 - DNA, 15 bp, Homo sapiens
tagcacagtgcctgg

SEQ ID NO: 231524 - DNA, 15 bp, Homo sapiens
ttagcacagtgcctg

SEQ ID NO: 231525 - DNA, 15 bp, Homo sapiens
gttagcacagtgcct

SEQ ID NO: 231526 - DNA, 15 bp, Homo sapiens
ggttagcacagtgcc

SEQ ID NO: 231527 - DNA, 15 bp, Homo sapiens
aggttagcacagtgc

SEQ ID NO: 231528 - DNA, 15 bp, Homo sapiens
aaggttagcacagtg

SEQ ID NO: 231529 - DNA, 15 bp, Homo sapiens
taaggttagcacagt

SEQ ID NO: 231530 - DNA, 15 bp, Homo sapiens
ataaggttagcacag

SEQ ID NO: 231531 - DNA, 15 bp, Homo sapiens
tataaggttagcaca

SEQ ID NO: 231532 - DNA, 15 bp, Homo sapiens
atataaggttagcac

SEQ ID NO: 231533 - DNA, 15 bp, Homo sapiens
catataaggttagca

SEQ ID NO: 231534 - DNA, 15 bp, Homo sapiens
acatataaggttagc

SEQ ID NO: 231535 - DNA, 15 bp, Homo sapiens
aacatataaggttag

SEQ ID NO: 231536 - DNA, 15 bp, Homo sapiens
taacatataaggtta

SEQ ID NO: 231537 - DNA, 15 bp, Homo sapiens
ataacatataaggtt

SEQ ID NO: 231538 - DNA, 15 bp, Homo sapiens
cataacatataaggt

SEQ ID NO: 231539 - DNA, 15 bp, Homo sapiens
tcataacatataagg

SEQ ID NO: 231540 - DNA, 15 bp, Homo sapiens
atcataacatataag

SEQ ID NO: 231541 - DNA, 15 bp, Homo sapiens
gatcataacatataa

SEQ ID NO: 231542 - DNA, 15 bp, Homo sapiens
tgatcataacatata

SEQ ID NO: 231543 - DNA, 15 bp, Homo sapiens
ctgatcataacatat

SEQ ID NO: 231544 - DNA, 15 bp, Homo sapiens
actgatcataacata

SEQ ID NO: 231545 - DNA, 15 bp, Homo sapiens
aactgatcataacat

SEQ ID NO: 231546 - DNA, 15 bp, Homo sapiens
aaactgatcataaca

SEQ ID NO: 231547 - DNA, 15 bp, Homo sapiens
caaactgatcataac

SEQ ID NO: 231548 - DNA, 15 bp, Homo sapiens
tcaaactgatcataa

SEQ ID NO: 231549 - DNA, 15 bp, Homo sapiens
ttcaaactgatcata

SEQ ID NO: 231550 - DNA, 15 bp, Homo sapiens
cttcaaactgatcat

SEQ ID NO: 231551 - DNA, 15 bp, Homo sapiens
ccttcaaactgatca

SEQ ID NO: 231552 - DNA, 15 bp, Homo sapiens
cccttcaaactgatc

SEQ ID NO: 231553 - DNA, 15 bp, Homo sapiens
ccccttcaaactgat

SEQ ID NO: 231554 - DNA, 15 bp, Homo sapiens
tccccttcaaactga

SEQ ID NO: 231555 - DNA, 15 bp, Homo sapiens
ttccccttcaaactg

SEQ ID NO: 231556 - DNA, 15 bp, Homo sapiens
cttccccttcaaact

SEQ ID NO: 231557 - DNA, 15 bp, Homo sapiens
ccttccccttcaaac

SEQ ID NO: 231558 - DNA, 15 bp, Homo sapiens
tccttccccttcaaa

SEQ ID NO: 231559 - DNA, 15 bp, Homo sapiens
gtccttccccttcaa

SEQ ID NO: 231560 - DNA, 15 bp, Homo sapiens
tgtccttccccttca

SEQ ID NO: 231561 - DNA, 15 bp, Homo sapiens
ttgtccttccccttc

SEQ ID NO: 231562 - DNA, 15 bp, Homo sapiens
attgtccttcccctt

SEQ ID NO: 231563 - DNA, 15 bp, Homo sapiens
cattgtccttcccct

SEQ ID NO: 231564 - DNA, 15 bp, Homo sapiens
acattgtccttcccc

SEQ ID NO: 231565 - DNA, 15 bp, Homo sapiens
gacattgtccttccc

SEQ ID NO: 231566 - DNA, 15 bp, Homo sapiens
cgacattgtccttcc

SEQ ID NO: 231567 - DNA, 15 bp, Homo sapiens
acgacattgtccttc

SEQ ID NO: 231568 - DNA, 15 bp, Homo sapiens
tacgacattgtcctt

SEQ ID NO: 231569 - DNA, 15 bp, Homo sapiens
atacgacattgtcct

SEQ ID NO: 231570 - DNA, 15 bp, Homo sapiens
aatacgacattgtcc

SEQ ID NO: 231571 - DNA, 15 bp, Homo sapiens
aaatacgacattgtc

SEQ ID NO: 231572 - DNA, 15 bp, Homo sapiens
gaaatacgacattgt

SEQ ID NO: 231573 - DNA, 15 bp, Homo sapiens
agaaatacgacattg

SEQ ID NO: 231574 - DNA, 15 bp, Homo sapiens
aagaaatacgacatt

SEQ ID NO: 231575 - DNA, 15 bp, Homo sapiens
gaagaaatacgacat

SEQ ID NO: 231576 - DNA, 15 bp, Homo sapiens
ggaagaaatacgaca

SEQ ID NO: 231577 - DNA, 15 bp, Homo sapiens
cggaagaaatacgac

SEQ ID NO: 231578 - DNA, 15 bp, Homo sapiens
acggaagaaatacga

SEQ ID NO: 231579 - DNA, 15 bp, Homo sapiens
tacggaagaaatacg

SEQ ID NO: 231580 - DNA, 15 bp, Homo sapiens
atacggaagaaatac

SEQ ID NO: 231581 - DNA, 15 bp, Homo sapiens
gatacggaagaaata

SEQ ID NO: 231582 - DNA, 15 bp, Homo sapiens
agatacggaagaaat

SEQ ID NO: 231583 - DNA, 15 bp, Homo sapiens
gagatacggaagaaa

SEQ ID NO: 231584 - DNA, 15 bp, Homo sapiens
ggagatacggaagaa

SEQ ID NO: 231585 - DNA, 15 bp, Homo sapiens
aggagatacggaaga

SEQ ID NO: 231586 - DNA, 15 bp, Homo sapiens
aaggagatacggaag

SEQ ID NO: 231587 - DNA, 15 bp, Homo sapiens
taaggagatacggaa

SEQ ID NO: 231588 - DNA, 15 bp, Homo sapiens
ataaggagatacgga

SEQ ID NO: 231589 - DNA, 15 bp, Homo sapiens
aataaggagatacgg

SEQ ID NO: 231590 - DNA, 15 bp, Homo sapiens
caataaggagatacg

SEQ ID NO: 231591 - DNA, 15 bp, Homo sapiens
gcaataaggagatac

SEQ ID NO: 231592 - DNA, 15 bp, Homo sapiens
agcaataaggagata

SEQ ID NO: 231593 - DNA, 15 bp, Homo sapiens
cagcaataaggagat

SEQ ID NO: 231594 - DNA, 15 bp, Homo sapiens
acagcaataaggaga

SEQ ID NO: 231595 - DNA, 15 bp, Homo sapiens
aacagcaataaggag

SEQ ID NO: 231596 - DNA, 15 bp, Homo sapiens
caacagcaataagga

SEQ ID NO: 231597 - DNA, 15 bp, Homo sapiens
acaacagcaataagg

SEQ ID NO: 231598 - DNA, 15 bp, Homo sapiens
cacaacagcaataag

SEQ ID NO: 231599 - DNA, 15 bp, Homo sapiens
acacaacagcaataa

SEQ ID NO: 231600 - DNA, 15 bp, Homo sapiens
aacacaacagcaata

SEQ ID NO: 231601 - DNA, 15 bp, Homo sapiens
caacacaacagcaat

SEQ ID NO: 231602 - DNA, 15 bp, Homo sapiens
acaacacaacagcaa

SEQ ID NO: 231603 - DNA, 15 bp, Homo sapiens
tacaacacaacagca

SEQ ID NO: 231604 - DNA, 15 bp, Homo sapiens
ctacaacacaacagc

SEQ ID NO: 231605 - DNA, 15 bp, Homo sapiens
cctacaacacaacag

SEQ ID NO: 231606 - DNA, 15 bp, Homo sapiens
ccctacaacacaaca

SEQ ID NO: 231607 - DNA, 15 bp, Homo sapiens
cccctacaacacaac

SEQ ID NO: 231608 - DNA, 15 bp, Homo sapiens
acccctacaacacaa

SEQ ID NO: 231609 - DNA, 15 bp, Homo sapiens
aacccctacaacaca

SEQ ID NO: 231610 - DNA, 15 bp, Homo sapiens
gaacccctacaacac

SEQ ID NO: 231611 - DNA, 15 bp, Homo sapiens
tgaacccctacaaca

SEQ ID NO: 231612 - DNA, 15 bp, Homo sapiens
atgaacccctacaac

SEQ ID NO: 231613 - DNA, 15 bp, Homo sapiens
aatgaacccctacaa

SEQ ID NO: 231614 - DNA, 15 bp, Homo sapiens
taatgaacccctaca

SEQ ID NO: 231615 - DNA, 15 bp, Homo sapiens
gtaatgaacccctac

SEQ ID NO: 231616 - DNA, 15 bp, Homo sapiens
tgtaatgaaccccta

SEQ ID NO: 231617 - DNA, 15 bp, Homo sapiens
ttgtaatgaacccct

SEQ ID NO: 231618 - DNA, 15 bp, Homo sapiens
cttgtaatgaacccc

SEQ ID NO: 231619 - DNA, 15 bp, Homo sapiens
tcttgtaatgaaccc

SEQ ID NO: 231620 - DNA, 15 bp, Homo sapiens
ttcttgtaatgaacc

SEQ ID NO: 231621 - DNA, 15 bp, Homo sapiens
tttcttgtaatgaac

SEQ ID NO: 231622 - DNA, 15 bp, Homo sapiens
ttttcttgtaatgaa

SEQ ID NO: 231623 - DNA, 15 bp, Homo sapiens
gttttcttgtaatga

SEQ ID NO: 231624 - DNA, 15 bp, Homo sapiens
tgttttcttgtaatg

SEQ ID NO: 231625 - DNA, 15 bp, Homo sapiens
ctgttttcttgtaat

SEQ ID NO: 231626 - DNA, 15 bp, Homo sapiens
cctgttttcttgtaa

SEQ ID NO: 231627 - DNA, 15 bp, Homo sapiens
gcctgttttcttgta

SEQ ID NO: 231628 - DNA, 15 bp, Homo sapiens
ggcctgttttcttgt

SEQ ID NO: 231629 - DNA, 15 bp, Homo sapiens
tggcctgttttcttg

SEQ ID NO: 231630 - DNA, 15 bp, Homo sapiens
ttggcctgttttctt

SEQ ID NO: 231631 - DNA, 15 bp, Homo sapiens
attggcctgttttct

SEQ ID NO: 231632 - DNA, 15 bp, Homo sapiens
gattggcctgttttc

SEQ ID NO: 231633 - DNA, 15 bp, Homo sapiens
agattggcctgtttt

SEQ ID NO: 231634 - DNA, 15 bp, Homo sapiens
aagattggcctgttt

SEQ ID NO: 231635 - DNA, 15 bp, Homo sapiens
taagattggcctgtt

SEQ ID NO: 231636 - DNA, 15 bp, Homo sapiens
ataagattggcctgt

SEQ ID NO: 231637 - DNA, 15 bp, Homo sapiens
gataagattggcctg

SEQ ID NO: 231638 - DNA, 15 bp, Homo sapiens
tgataagattggcct

SEQ ID NO: 231639 - DNA, 15 bp, Homo sapiens
ctgataagattggcc

SEQ ID NO: 231640 - DNA, 15 bp, Homo sapiens
actgataagattggc

SEQ ID NO: 231641 - DNA, 15 bp, Homo sapiens
cactgataagattgg

SEQ ID NO: 231642 - DNA, 15 bp, Homo sapiens
tcactgataagattg

SEQ ID NO: 231643 - DNA, 15 bp, Homo sapiens
ttcactgataagatt

SEQ ID NO: 231644 - DNA, 15 bp, Homo sapiens
attcactgataagat

SEQ ID NO: 231645 - DNA, 15 bp, Homo sapiens
aattcactgataaga

SEQ ID NO: 231646 - DNA, 15 bp, Homo sapiens
gaattcactgataag

SEQ ID NO: 231647 - DNA, 15 bp, Homo sapiens
tgaattcactgataa

SEQ ID NO: 231648 - DNA, 15 bp, Homo sapiens
atgaattcactgata

SEQ ID NO: 231649 - DNA, 15 bp, Homo sapiens
gatgaattcactgat

SEQ ID NO: 231650 - DNA, 15 bp, Homo sapiens
agatgaattcactga

SEQ ID NO: 231651 - DNA, 15 bp, Homo sapiens
gagatgaattcactg

SEQ ID NO: 231652 - DNA, 15 bp, Homo sapiens
agagatgaattcact

SEQ ID NO: 231653 - DNA, 15 bp, Homo sapiens
cagagatgaattcac

SEQ ID NO: 231654 - DNA, 15 bp, Homo sapiens
acagagatgaattca

SEQ ID NO: 231655 - DNA, 15 bp, Homo sapiens
aacagagatgaattc

SEQ ID NO: 231656 - DNA, 15 bp, Homo sapiens
aaacagagatgaatt

SEQ ID NO: 231657 - DNA, 15 bp, Homo sapiens
aaaacagagatgaat

SEQ ID NO: 231658 - DNA, 15 bp, Homo sapiens
taaaacagagatgaa

SEQ ID NO: 231659 - DNA, 15 bp, Homo sapiens
gtaaaacagagatga

SEQ ID NO: 231660 - DNA, 15 bp, Homo sapiens
tgtaaaacagagatg

SEQ ID NO: 231661 - DNA, 15 bp, Homo sapiens
ctgtaaaacagagat

SEQ ID NO: 231662 - DNA, 15 bp, Homo sapiens
actgtaaaacagaga

SEQ ID NO: 231663 - DNA, 15 bp, Homo sapiens
aactgtaaaacagag

SEQ ID NO: 231664 - DNA, 15 bp, Homo sapiens
caactgtaaaacaga

SEQ ID NO: 231665 - DNA, 15 bp, Homo sapiens
tcaactgtaaaacag

SEQ ID NO: 231666 - DNA, 15 bp, Homo sapiens
ctcaactgtaaaaca

SEQ ID NO: 231667 - DNA, 15 bp, Homo sapiens
tctcaactgtaaaac

SEQ ID NO: 231668 - DNA, 15 bp, Homo sapiens
ttctcaactgtaaaa

SEQ ID NO: 231669 - DNA, 15 bp, Homo sapiens
tttctcaactgtaaa

SEQ ID NO: 231670 - DNA, 15 bp, Homo sapiens
ttttctcaactgtaa

SEQ ID NO: 231671 - DNA, 15 bp, Homo sapiens
attttctcaactgta

SEQ ID NO: 231672 - DNA, 15 bp, Homo sapiens
gattttctcaactgt

SEQ ID NO: 231673 - DNA, 15 bp, Homo sapiens
tgattttctcaactg

SEQ ID NO: 231674 - DNA, 15 bp, Homo sapiens
ttgattttctcaact

SEQ ID NO: 231675 - DNA, 15 bp, Homo sapiens
cttgattttctcaac

SEQ ID NO: 231676 - DNA, 15 bp, Homo sapiens
tcttgattttctcaa

SEQ ID NO: 231677 - DNA, 15 bp, Homo sapiens
atcttgattttctca

SEQ ID NO: 231678 - DNA, 15 bp, Homo sapiens
tatcttgattttctc

SEQ ID NO: 231679 - DNA, 15 bp, Homo sapiens
atatcttgattttct

SEQ ID NO: 231680 - DNA, 15 bp, Homo sapiens
tatatcttgattttc

SEQ ID NO: 231681 - DNA, 15 bp, Homo sapiens
ctatatcttgatttt

SEQ ID NO: 231682 - DNA, 15 bp, Homo sapiens
gctatatcttgattt

SEQ ID NO: 231683 - DNA, 15 bp, Homo sapiens
tgctatatcttgatt

SEQ ID NO: 231684 - DNA, 15 bp, Homo sapiens
ttgctatatcttgat

SEQ ID NO: 231685 - DNA, 15 bp, Homo sapiens
cttgctatatcttga

SEQ ID NO: 231686 - DNA, 15 bp, Homo sapiens
ccttgctatatcttg

SEQ ID NO: 231687 - DNA, 15 bp, Homo sapiens
cccttgctatatctt

SEQ ID NO: 231688 - DNA, 15 bp, Homo sapiens
gcccttgctatatct

SEQ ID NO: 231689 - DNA, 15 bp, Homo sapiens
tgcccttgctatatc

SEQ ID NO: 231690 - DNA, 15 bp, Homo sapiens
ttgcccttgctatat

SEQ ID NO: 231691 - DNA, 15 bp, Homo sapiens
attgcccttgctata

SEQ ID NO: 231692 - DNA, 15 bp, Homo sapiens
aattgcccttgctat

SEQ ID NO: 231693 - DNA, 15 bp, Homo sapiens
taattgcccttgcta

SEQ ID NO: 231694 - DNA, 15 bp, Homo sapiens
ataattgcccttgct

SEQ ID NO: 231695 - DNA, 15 bp, Homo sapiens
aataattgcccttgc

SEQ ID NO: 231696 - DNA, 15 bp, Homo sapiens
aaataattgcccttg

SEQ ID NO: 231697 - DNA, 15 bp, Homo sapiens
caaataattgccctt

SEQ ID NO: 231698 - DNA, 15 bp, Homo sapiens
acaaataattgccct

SEQ ID NO: 231699 - DNA, 15 bp, Homo sapiens
gacaaataattgccc

SEQ ID NO: 231700 - DNA, 15 bp, Homo sapiens
agacaaataattgcc

SEQ ID NO: 231701 - DNA, 15 bp, Homo sapiens
tagacaaataattgc

SEQ ID NO: 231702 - DNA, 15 bp, Homo sapiens
ttagacaaataattg

SEQ ID NO: 231703 - DNA, 15 bp, Homo sapiens
tttagacaaataatt

SEQ ID NO: 231704 - DNA, 15 bp, Homo sapiens
ttttagacaaataat

SEQ ID NO: 231705 - DNA, 15 bp, Homo sapiens
tttttagacaaataa

SEQ ID NO: 231706 - DNA, 15 bp, Homo sapiens
gtttttagacaaata

SEQ ID NO: 231707 - DNA, 15 bp, Homo sapiens
tgtttttagacaaat

SEQ ID NO: 231708 - DNA, 15 bp, Homo sapiens
atgtttttagacaaa

SEQ ID NO: 231709 - DNA, 15 bp, Homo sapiens
aatgtttttagacaa

SEQ ID NO: 231710 - DNA, 15 bp, Homo sapiens
gaatgtttttagaca

SEQ ID NO: 231711 - DNA, 15 bp, Homo sapiens
tgaatgtttttagac

SEQ ID NO: 231712 - DNA, 15 bp, Homo sapiens
ctgaatgtttttaga

SEQ ID NO: 231713 - DNA, 15 bp, Homo sapiens
gctgaatgtttttag

SEQ ID NO: 231714 - DNA, 15 bp, Homo sapiens
agctgaatgttttta

SEQ ID NO: 231715 - DNA, 15 bp, Homo sapiens
aagctgaatgttttt

SEQ ID NO: 231716 - DNA, 15 bp, Homo sapiens
aaagctgaatgtttt

SEQ ID NO: 231717 - DNA, 15 bp, Homo sapiens
caaagctgaatgttt

SEQ ID NO: 231718 - DNA, 15 bp, Homo sapiens
tcaaagctgaatgtt

SEQ ID NO: 231719 - DNA, 15 bp, Homo sapiens
ctcaaagctgaatgt

SEQ ID NO: 231720 - DNA, 15 bp, Homo sapiens
actcaaagctgaatg

SEQ ID NO: 231721 - DNA, 15 bp, Homo sapiens
cactcaaagctgaat

SEQ ID NO: 231722 - DNA, 15 bp, Homo sapiens
tcactcaaagctgaa

SEQ ID NO: 231723 - DNA, 15 bp, Homo sapiens
gtcactcaaagctga

SEQ ID NO: 231724 - DNA, 15 bp, Homo sapiens
tgtcactcaaagctg

SEQ ID NO: 231725 - DNA, 15 bp, Homo sapiens
ctgtcactcaaagct

SEQ ID NO: 231726 - DNA, 15 bp, Homo sapiens
tctgtcactcaaagc

SEQ ID NO: 231727 - DNA, 15 bp, Homo sapiens
ctctgtcactcaaag

SEQ ID NO: 231728 - DNA, 15 bp, Homo sapiens
gctctgtcactcaaa

SEQ ID NO: 231729 - DNA, 15 bp, Homo sapiens
ggctctgtcactcaa

SEQ ID NO: 231730 - DNA, 15 bp, Homo sapiens
tggctctgtcactca

SEQ ID NO: 231731 - DNA, 15 bp, Homo sapiens
ctggctctgtcactc

SEQ ID NO: 231732 - DNA, 15 bp, Homo sapiens
cctggctctgtcact

SEQ ID NO: 231733 - DNA, 15 bp, Homo sapiens
gcctggctctgtcac

SEQ ID NO: 231734 - DNA, 15 bp, Homo sapiens
agcctggctctgtca

SEQ ID NO: 231735 - DNA, 15 bp, Homo sapiens
tagcctggctctgtc

SEQ ID NO: 231736 - DNA, 15 bp, Homo sapiens
ctagcctggctctgt

SEQ ID NO: 231737 - DNA, 15 bp, Homo sapiens
actagcctggctctg

SEQ ID NO: 231738 - DNA, 15 bp, Homo sapiens
tactagcctggctct

SEQ ID NO: 231739 - DNA, 15 bp, Homo sapiens
gtactagcctggctc

SEQ ID NO: 231740 - DNA, 15 bp, Homo sapiens
ggtactagcctggct

SEQ ID NO: 231741 - DNA, 15 bp, Homo sapiens
aggtactagcctggc

SEQ ID NO: 231742 - DNA, 15 bp, Homo sapiens
caggtactagcctgg

SEQ ID NO: 231743 - DNA, 15 bp, Homo sapiens
gcaggtactagcctg

SEQ ID NO: 231744 - DNA, 15 bp, Homo sapiens
ggcaggtactagcct

SEQ ID NO: 231745 - DNA, 15 bp, Homo sapiens
tggcaggtactagcc

SEQ ID NO: 231746 - DNA, 15 bp, Homo sapiens
ctggcaggtactagc

SEQ ID NO: 231747 - DNA, 15 bp, Homo sapiens
gctggcaggtactag

SEQ ID NO: 231748 - DNA, 15 bp, Homo sapiens
agctggcaggtacta

SEQ ID NO: 231749 - DNA, 15 bp, Homo sapiens
gagctggcaggtact

SEQ ID NO: 231750 - DNA, 15 bp, Homo sapiens
ggagctggcaggtac

SEQ ID NO: 231751 - DNA, 15 bp, Homo sapiens
gggagctggcaggta

SEQ ID NO: 231752 - DNA, 15 bp, Homo sapiens
agggagctggcaggt

SEQ ID NO: 231753 - DNA, 15 bp, Homo sapiens
cagggagctggcagg

SEQ ID NO: 231754 - DNA, 15 bp, Homo sapiens
acagggagctggcag

SEQ ID NO: 231755 - DNA, 15 bp, Homo sapiens
gacagggagctggca

SEQ ID NO: 231756 - DNA, 15 bp, Homo sapiens
agacagggagctggc

SEQ ID NO: 231757 - DNA, 15 bp, Homo sapiens
gagacagggagctgg

SEQ ID NO: 231758 - DNA, 15 bp, Homo sapiens
ggagacagggagctg

SEQ ID NO: 231759 - DNA, 15 bp, Homo sapiens
gggagacagggagct

SEQ ID NO: 231760 - DNA, 15 bp, Homo sapiens
tgggagacagggagc

SEQ ID NO: 231761 - DNA, 15 bp, Homo sapiens
ctgggagacagggag

SEQ ID NO: 231762 - DNA, 15 bp, Homo sapiens
actgggagacaggga

SEQ ID NO: 231763 - DNA, 15 bp, Homo sapiens
gactgggagacaggg

SEQ ID NO: 231764 - DNA, 15 bp, Homo sapiens
agactgggagacagg

SEQ ID NO: 231765 - DNA, 15 bp, Homo sapiens
cagactgggagacag

SEQ ID NO: 231766 - DNA, 15 bp, Homo sapiens
ccagactgggagaca

SEQ ID NO: 231767 - DNA, 15 bp, Homo sapiens
accagactgggagac

SEQ ID NO: 231768 - DNA, 15 bp, Homo sapiens
caccagactgggaga

SEQ ID NO: 231769 - DNA, 15 bp, Homo sapiens
gcaccagactgggag

SEQ ID NO: 231770 - DNA, 15 bp, Homo sapiens
agcaccagactggga

SEQ ID NO: 231771 - DNA, 15 bp, Homo sapiens
gagcaccagactggg

SEQ ID NO: 231772 - DNA, 15 bp, Homo sapiens
ggagcaccagactgg

SEQ ID NO: 231773 - DNA, 15 bp, Homo sapiens
aggagcaccagactg

SEQ ID NO: 231774 - DNA, 15 bp, Homo sapiens
aaggagcaccagact

SEQ ID NO: 231775 - DNA, 15 bp, Homo sapiens
aaaggagcaccagac

SEQ ID NO: 231776 - DNA, 15 bp, Homo sapiens
aaaaggagcaccaga

SEQ ID NO: 231777 - DNA, 15 bp, Homo sapiens
caaaaggagcaccag

SEQ ID NO: 231778 - DNA, 15 bp, Homo sapiens
acaaaaggagcacca

SEQ ID NO: 231779 - DNA, 15 bp, Homo sapiens
cacaaaaggagcacc

SEQ ID NO: 231780 - DNA, 15 bp, Homo sapiens
acacaaaaggagcac

SEQ ID NO: 231781 - DNA, 15 bp, Homo sapiens
gacacaaaaggagca

SEQ ID NO: 231782 - DNA, 15 bp, Homo sapiens
tgacacaaaaggagc

SEQ ID NO: 231783 - DNA, 15 bp, Homo sapiens
atgacacaaaaggag

SEQ ID NO: 231784 - DNA, 15 bp, Homo sapiens
aatgacacaaaagga

SEQ ID NO: 231785 - DNA, 15 bp, Homo sapiens
taatgacacaaaagg

SEQ ID NO: 231786 - DNA, 15 bp, Homo sapiens
gtaatgacacaaaag

SEQ ID NO: 231787 - DNA, 15 bp, Homo sapiens
agtaatgacacaaaa

SEQ ID NO: 231788 - DNA, 15 bp, Homo sapiens
aagtaatgacacaaa

SEQ ID NO: 231789 - DNA, 15 bp, Homo sapiens
gaagtaatgacacaa

SEQ ID NO: 231790 - DNA, 15 bp, Homo sapiens
ggaagtaatgacaca

SEQ ID NO: 231791 - DNA, 15 bp, Homo sapiens
gggaagtaatgacac

SEQ ID NO: 231792 - DNA, 15 bp, Homo sapiens
tgggaagtaatgaca

SEQ ID NO: 231793 - DNA, 15 bp, Homo sapiens
ctgggaagtaatgac

SEQ ID NO: 231794 - DNA, 15 bp, Homo sapiens
actgggaagtaatga

SEQ ID NO: 231795 - DNA, 15 bp, Homo sapiens
gactgggaagtaatg

SEQ ID NO: 231796 - DNA, 15 bp, Homo sapiens
cgactgggaagtaat

SEQ ID NO: 231797 - DNA, 15 bp, Homo sapiens
tcgactgggaagtaa

SEQ ID NO: 231798 - DNA, 15 bp, Homo sapiens
ttcgactgggaagta

SEQ ID NO: 231799 - DNA, 15 bp, Homo sapiens
cttcgactgggaagt

SEQ ID NO: 231800 - DNA, 15 bp, Homo sapiens
tcttcgactgggaag

SEQ ID NO: 231801 - DNA, 15 bp, Homo sapiens
atcttcgactgggaa

SEQ ID NO: 231802 - DNA, 15 bp, Homo sapiens
tatcttcgactggga

SEQ ID NO: 231803 - DNA, 15 bp, Homo sapiens
ttatcttcgactggg

SEQ ID NO: 231804 - DNA, 15 bp, Homo sapiens
attatcttcgactgg

SEQ ID NO: 231805 - DNA, 15 bp, Homo sapiens
cattatcttcgactg

SEQ ID NO: 231806 - DNA, 15 bp, Homo sapiens
gcattatcttcgact

SEQ ID NO: 231807 - DNA, 15 bp, Homo sapiens
ggcattatcttcgac

SEQ ID NO: 231808 - DNA, 15 bp, Homo sapiens
aggcattatcttcga

SEQ ID NO: 231809 - DNA, 15 bp, Homo sapiens
aaggcattatcttcg

SEQ ID NO: 231810 - DNA, 15 bp, Homo sapiens
aaaggcattatcttc

SEQ ID NO: 231811 - DNA, 15 bp, Homo sapiens
aaaaggcattatctt

SEQ ID NO: 231812 - DNA, 15 bp, Homo sapiens
gaaaaggcattatct

SEQ ID NO: 231813 - DNA, 15 bp, Homo sapiens
agaaaaggcattatc

SEQ ID NO: 231814 - DNA, 15 bp, Homo sapiens
aagaaaaggcattat

SEQ ID NO: 231815 - DNA, 15 bp, Homo sapiens
aaagaaaaggcatta

SEQ ID NO: 231816 - DNA, 15 bp, Homo sapiens
aaaagaaaaggcatt

SEQ ID NO: 231817 - DNA, 15 bp, Homo sapiens
gaaaagaaaaggcat

SEQ ID NO: 231818 - DNA, 15 bp, Homo sapiens
agaaaagaaaaggca

SEQ ID NO: 231819 - DNA, 15 bp, Homo sapiens
tagaaaagaaaaggc

SEQ ID NO: 231820 - DNA, 15 bp, Homo sapiens
ttagaaaagaaaagg

SEQ ID NO: 231821 - DNA, 15 bp, Homo sapiens
cttagaaaagaaaag

SEQ ID NO: 231822 - DNA, 15 bp, Homo sapiens
gcttagaaaagaaaa

SEQ ID NO: 231823 - DNA, 15 bp, Homo sapiens
ggcttagaaaagaaa

SEQ ID NO: 231824 - DNA, 15 bp, Homo sapiens
tggcttagaaaagaa

SEQ ID NO: 231825 - DNA, 15 bp, Homo sapiens
gtggcttagaaaaga

SEQ ID NO: 231826 - DNA, 15 bp, Homo sapiens
agtggcttagaaaag

SEQ ID NO: 231827 - DNA, 15 bp, Homo sapiens
cagtggcttagaaaa

SEQ ID NO: 231828 - DNA, 15 bp, Homo sapiens
tcagtggcttagaaa

SEQ ID NO: 231829 - DNA, 15 bp, Homo sapiens
gtcagtggcttagaa

SEQ ID NO: 231830 - DNA, 15 bp, Homo sapiens
tgtcagtggcttaga

SEQ ID NO: 231831 - DNA, 15 bp, Homo sapiens
ctgtcagtggcttag

SEQ ID NO: 231832 - DNA, 15 bp, Homo sapiens
gctgtcagtggctta

SEQ ID NO: 231833 - DNA, 15 bp, Homo sapiens
agctgtcagtggctt

SEQ ID NO: 231834 - DNA, 15 bp, Homo sapiens
cagctgtcagtggct

SEQ ID NO: 231835 - DNA, 15 bp, Homo sapiens
acagctgtcagtggc

SEQ ID NO: 231836 - DNA, 15 bp, Homo sapiens
gacagctgtcagtgg

SEQ ID NO: 231837 - DNA, 15 bp, Homo sapiens
tgacagctgtcagtg

SEQ ID NO: 231838 - DNA, 15 bp, Homo sapiens
gtgacagctgtcagt

SEQ ID NO: 231839 - DNA, 15 bp, Homo sapiens
agtgacagctgtcag

SEQ ID NO: 231840 - DNA, 15 bp, Homo sapiens
aagtgacagctgtca

SEQ ID NO: 231841 - DNA, 15 bp, Homo sapiens
aaagtgacagctgtc

SEQ ID NO: 231842 - DNA, 15 bp, Homo sapiens
caaagtgacagctgt

SEQ ID NO: 231843 - DNA, 15 bp, Homo sapiens
ccaaagtgacagctg

SEQ ID NO: 231844 - DNA, 15 bp, Homo sapiens
gccaaagtgacagct

SEQ ID NO: 231845 - DNA, 15 bp, Homo sapiens
agccaaagtgacagc

SEQ ID NO: 231846 - DNA, 15 bp, Homo sapiens
cagccaaagtgacag

SEQ ID NO: 231847 - DNA, 15 bp, Homo sapiens
acagccaaagtgaca

SEQ ID NO: 231848 - DNA, 15 bp, Homo sapiens
cacagccaaagtgac

SEQ ID NO: 231849 - DNA, 15 bp, Homo sapiens
tcacagccaaagtga

SEQ ID NO: 231850 - DNA, 15 bp, Homo sapiens
gtcacagccaaagtg

SEQ ID NO: 231851 - DNA, 15 bp, Homo sapiens
tgtcacagccaaagt

SEQ ID NO: 231852 - DNA, 15 bp, Homo sapiens
atgtcacagccaaag

SEQ ID NO: 231853 - DNA, 15 bp, Homo sapiens
aatgtcacagccaaa

SEQ ID NO: 231854 - DNA, 15 bp, Homo sapiens
aaatgtcacagccaa

SEQ ID NO: 231855 - DNA, 15 bp, Homo sapiens
aaaatgtcacagcca

SEQ ID NO: 231856 - DNA, 15 bp, Homo sapiens
caaaatgtcacagcc

SEQ ID NO: 231857 - DNA, 15 bp, Homo sapiens
tcaaaatgtcacagc

SEQ ID NO: 231858 - DNA, 15 bp, Homo sapiens
gtcaaaatgtcacag

SEQ ID NO: 231859 - DNA, 15 bp, Homo sapiens
tgtcaaaatgtcaca

SEQ ID NO: 231860 - DNA, 15 bp, Homo sapiens
atgtcaaaatgtcac

SEQ ID NO: 231861 - DNA, 15 bp, Homo sapiens
aatgtcaaaatgtca

SEQ ID NO: 231862 - DNA, 15 bp, Homo sapiens
taatgtcaaaatgtc

SEQ ID NO: 231863 - DNA, 15 bp, Homo sapiens
gtaatgtcaaaatgt

SEQ ID NO: 231864 - DNA, 15 bp, Homo sapiens
ggtaatgtcaaaatg

SEQ ID NO: 231865 - DNA, 15 bp, Homo sapiens
tggtaatgtcaaaat

SEQ ID NO: 231866 - DNA, 15 bp, Homo sapiens
atggtaatgtcaaaa

SEQ ID NO: 231867 - DNA, 15 bp, Homo sapiens
gatggtaatgtcaaa

SEQ ID NO: 231868 - DNA, 15 bp, Homo sapiens
agatggtaatgtcaa

SEQ ID NO: 231869 - DNA, 15 bp, Homo sapiens
aagatggtaatgtca

SEQ ID NO: 231870 - DNA, 15 bp, Homo sapiens
aaagatggtaatgtc

SEQ ID NO: 231871 - DNA, 15 bp, Homo sapiens
aaaagatggtaatgt

SEQ ID NO: 231872 - DNA, 15 bp, Homo sapiens
taaaagatggtaatg

SEQ ID NO: 231873 - DNA, 15 bp, Homo sapiens
ctaaaagatggtaat

SEQ ID NO: 231874 - DNA, 15 bp, Homo sapiens
gctaaaagatggtaa

SEQ ID NO: 231875 - DNA, 15 bp, Homo sapiens
ggctaaaagatggta

SEQ ID NO: 231876 - DNA, 15 bp, Homo sapiens
tggctaaaagatggt

SEQ ID NO: 231877 - DNA, 15 bp, Homo sapiens
ttggctaaaagatgg

SEQ ID NO: 231878 - DNA, 15 bp, Homo sapiens
attggctaaaagatg

SEQ ID NO: 231879 - DNA, 15 bp, Homo sapiens
aattggctaaaagat

SEQ ID NO: 231880 - DNA, 15 bp, Homo sapiens
aaattggctaaaaga

SEQ ID NO: 231881 - DNA, 15 bp, Homo sapiens
caaattggctaaaag

SEQ ID NO: 231882 - DNA, 15 bp, Homo sapiens
ccaaattggctaaaa

SEQ ID NO: 231883 - DNA, 15 bp, Homo sapiens
accaaattggctaaa

SEQ ID NO: 231884 - DNA, 15 bp, Homo sapiens
gaccaaattggctaa

SEQ ID NO: 231885 - DNA, 15 bp, Homo sapiens
ggaccaaattggcta

SEQ ID NO: 231886 - DNA, 15 bp, Homo sapiens
aggaccaaattggct

SEQ ID NO: 231887 - DNA, 15 bp, Homo sapiens
caggaccaaattggc

SEQ ID NO: 231888 - DNA, 15 bp, Homo sapiens
tcaggaccaaattgg

SEQ ID NO: 231889 - DNA, 15 bp, Homo sapiens
ctcaggaccaaattg

SEQ ID NO: 231890 - DNA, 15 bp, Homo sapiens
cctcaggaccaaatt

SEQ ID NO: 231891 - DNA, 15 bp, Homo sapiens
tcctcaggaccaaat

SEQ ID NO: 231892 - DNA, 15 bp, Homo sapiens
atcctcaggaccaaa

SEQ ID NO: 231893 - DNA, 15 bp, Homo sapiens
catcctcaggaccaa

SEQ ID NO: 231894 - DNA, 15 bp, Homo sapiens
gcatcctcaggacca

SEQ ID NO: 231895 - DNA, 15 bp, Homo sapiens
agcatcctcaggacc

SEQ ID NO: 231896 - DNA, 15 bp, Homo sapiens
aagcatcctcaggac

SEQ ID NO: 231897 - DNA, 15 bp, Homo sapiens
caagcatcctcagga

SEQ ID NO: 231898 - DNA, 15 bp, Homo sapiens
ccaagcatcctcagg

SEQ ID NO: 231899 - DNA, 15 bp, Homo sapiens
gccaagcatcctcag

SEQ ID NO: 231900 - DNA, 15 bp, Homo sapiens
ggccaagcatcctca

SEQ ID NO: 231901 - DNA, 15 bp, Homo sapiens
aggccaagcatcctc

SEQ ID NO: 231902 - DNA, 15 bp, Homo sapiens
caggccaagcatcct

SEQ ID NO: 231903 - DNA, 15 bp, Homo sapiens
gcaggccaagcatcc

SEQ ID NO: 231904 - DNA, 15 bp, Homo sapiens
agcaggccaagcatc

SEQ ID NO: 231905 - DNA, 15 bp, Homo sapiens
aagcaggccaagcat

SEQ ID NO: 231906 - DNA, 15 bp, Homo sapiens
caagcaggccaagca

SEQ ID NO: 231907 - DNA, 15 bp, Homo sapiens
acaagcaggccaagc

SEQ ID NO: 231908 - DNA, 15 bp, Homo sapiens
aacaagcaggccaag

SEQ ID NO: 231909 - DNA, 15 bp, Homo sapiens
taacaagcaggccaa

SEQ ID NO: 231910 - DNA, 15 bp, Homo sapiens
ttaacaagcaggcca

SEQ ID NO: 231911 - DNA, 15 bp, Homo sapiens
tttaacaagcaggcc

SEQ ID NO: 231912 - DNA, 15 bp, Homo sapiens
gtttaacaagcaggc

SEQ ID NO: 231913 - DNA, 15 bp, Homo sapiens
tgtttaacaagcagg

SEQ ID NO: 231914 - DNA, 15 bp, Homo sapiens
atgtttaacaagcag

SEQ ID NO: 231915 - DNA, 15 bp, Homo sapiens
aatgtttaacaagca

SEQ ID NO: 231916 - DNA, 15 bp, Homo sapiens
aaatgtttaacaagc

SEQ ID NO: 231917 - DNA, 15 bp, Homo sapiens
caaatgtttaacaag

SEQ ID NO: 231918 - DNA, 15 bp, Homo sapiens
gcaaatgtttaacaa

SEQ ID NO: 231919 - DNA, 15 bp, Homo sapiens
tgcaaatgtttaaca

SEQ ID NO: 231920 - DNA, 15 bp, Homo sapiens
atgcaaatgtttaac

SEQ ID NO: 231921 - DNA, 15 bp, Homo sapiens
catgcaaatgtttaa

SEQ ID NO: 231922 - DNA, 15 bp, Homo sapiens
acatgcaaatgttta

SEQ ID NO: 231923 - DNA, 15 bp, Homo sapiens
tacatgcaaatgttt

SEQ ID NO: 231924 - DNA, 15 bp, Homo sapiens
ctacatgcaaatgtt

SEQ ID NO: 231925 - DNA, 15 bp, Homo sapiens
tctacatgcaaatgt

SEQ ID NO: 231926 - DNA, 15 bp, Homo sapiens
ttctacatgcaaatg

SEQ ID NO: 231927 - DNA, 15 bp, Homo sapiens
cttctacatgcaaat

SEQ ID NO: 231928 - DNA, 15 bp, Homo sapiens
gcttctacatgcaaa

SEQ ID NO: 231929 - DNA, 15 bp, Homo sapiens
tgcttctacatgcaa

SEQ ID NO: 231930 - DNA, 15 bp, Homo sapiens
atgcttctacatgca

SEQ ID NO: 231931 - DNA, 15 bp, Homo sapiens
catgcttctacatgc

SEQ ID NO: 231932 - DNA, 15 bp, Homo sapiens
ccatgcttctacatg

SEQ ID NO: 231933 - DNA, 15 bp, Homo sapiens
accatgcttctacat

SEQ ID NO: 231934 - DNA, 15 bp, Homo sapiens
gaccatgcttctaca

SEQ ID NO: 231935 - DNA, 15 bp, Homo sapiens
ggaccatgcttctac

SEQ ID NO: 231936 - DNA, 15 bp, Homo sapiens
tggaccatgcttcta

SEQ ID NO: 231937 - DNA, 15 bp, Homo sapiens
gtggaccatgcttct

SEQ ID NO: 231938 - DNA, 15 bp, Homo sapiens
agtggaccatgcttc

SEQ ID NO: 231939 - DNA, 15 bp, Homo sapiens
gagtggaccatgctt

SEQ ID NO: 231940 - DNA, 15 bp, Homo sapiens
tgagtggaccatgct

SEQ ID NO: 231941 - DNA, 15 bp, Homo sapiens
ctgagtggaccatgc

SEQ ID NO: 231942 - DNA, 15 bp, Homo sapiens
cctgagtggaccatg

SEQ ID NO: 231943 - DNA, 15 bp, Homo sapiens
gcctgagtggaccat

SEQ ID NO: 231944 - DNA, 15 bp, Homo sapiens
ggcctgagtggacca

SEQ ID NO: 231945 - DNA, 15 bp, Homo sapiens
aggcctgagtggacc

SEQ ID NO: 231946 - DNA, 15 bp, Homo sapiens
gaggcctgagtggac

SEQ ID NO: 231947 - DNA, 15 bp, Homo sapiens
agaggcctgagtgga

SEQ ID NO: 231948 - DNA, 15 bp, Homo sapiens
aagaggcctgagtgg

SEQ ID NO: 231949 - DNA, 15 bp, Homo sapiens
aaagaggcctgagtg

SEQ ID NO: 231950 - DNA, 15 bp, Homo sapiens
caaagaggcctgagt

SEQ ID NO: 231951 - DNA, 15 bp, Homo sapiens
gcaaagaggcctgag

SEQ ID NO: 231952 - DNA, 15 bp, Homo sapiens
ggcaaagaggcctga

SEQ ID NO: 231953 - DNA, 15 bp, Homo sapiens
aggcaaagaggcctg

SEQ ID NO: 231954 - DNA, 15 bp, Homo sapiens
caggcaaagaggcct

SEQ ID NO: 231955 - DNA, 15 bp, Homo sapiens
tcaggcaaagaggcc

SEQ ID NO: 231956 - DNA, 15 bp, Homo sapiens
ctcaggcaaagaggc

SEQ ID NO: 231957 - DNA, 15 bp, Homo sapiens
gctcaggcaaagagg

SEQ ID NO: 231958 - DNA, 15 bp, Homo sapiens
ggctcaggcaaagag

SEQ ID NO: 231959 - DNA, 15 bp, Homo sapiens
aggctcaggcaaaga

SEQ ID NO: 231960 - DNA, 15 bp, Homo sapiens
caggctcaggcaaag

SEQ ID NO: 231961 - DNA, 15 bp, Homo sapiens
gcaggctcaggcaaa

SEQ ID NO: 231962 - DNA, 15 bp, Homo sapiens
ggcaggctcaggcaa

SEQ ID NO: 231963 - DNA, 15 bp, Homo sapiens
gggcaggctcaggca

SEQ ID NO: 231964 - DNA, 15 bp, Homo sapiens
tgggcaggctcaggc

SEQ ID NO: 231965 - DNA, 15 bp, Homo sapiens
ttgggcaggctcagg

SEQ ID NO: 231966 - DNA, 15 bp, Homo sapiens
cttgggcaggctcag

SEQ ID NO: 231967 - DNA, 15 bp, Homo sapiens
ccttgggcaggctca

SEQ ID NO: 231968 - DNA, 15 bp, Homo sapiens
accttgggcaggctc

SEQ ID NO: 231969 - DNA, 15 bp, Homo sapiens
caccttgggcaggct

SEQ ID NO: 231970 - DNA, 15 bp, Homo sapiens
gcaccttgggcaggc

SEQ ID NO: 231971 - DNA, 15 bp, Homo sapiens
ggcaccttgggcagg

SEQ ID NO: 231972 - DNA, 15 bp, Homo sapiens
tggcaccttgggcag

SEQ ID NO: 231973 - DNA, 15 bp, Homo sapiens
ctggcaccttgggca

SEQ ID NO: 231974 - DNA, 15 bp, Homo sapiens
gctggcaccttgggc

SEQ ID NO: 231975 - DNA, 15 bp, Homo sapiens
agctggcaccttggg

SEQ ID NO: 231976 - DNA, 15 bp, Homo sapiens
cagctggcaccttgg

SEQ ID NO: 231977 - DNA, 15 bp, Homo sapiens
gcagctggcaccttg

SEQ ID NO: 231978 - DNA, 15 bp, Homo sapiens
agcagctggcacctt

SEQ ID NO: 231979 - DNA, 15 bp, Homo sapiens
gagcagctggcacct

SEQ ID NO: 231980 - DNA, 15 bp, Homo sapiens
agagcagctggcacc

SEQ ID NO: 231981 - DNA, 15 bp, Homo sapiens
gagagcagctggcac

SEQ ID NO: 231982 - DNA, 15 bp, Homo sapiens
agagagcagctggca

SEQ ID NO: 231983 - DNA, 15 bp, Homo sapiens
cagagagcagctggc

SEQ ID NO: 231984 - DNA, 15 bp, Homo sapiens
tcagagagcagctgg

SEQ ID NO: 231985 - DNA, 15 bp, Homo sapiens
ttcagagagcagctg

SEQ ID NO: 231986 - DNA, 15 bp, Homo sapiens
cttcagagagcagct

SEQ ID NO: 231987 - DNA, 15 bp, Homo sapiens
ccttcagagagcagc

SEQ ID NO: 231988 - DNA, 15 bp, Homo sapiens
accttcagagagcag

SEQ ID NO: 231989 - DNA, 15 bp, Homo sapiens
gaccttcagagagca

SEQ ID NO: 231990 - DNA, 15 bp, Homo sapiens
agaccttcagagagc

SEQ ID NO: 231991 - DNA, 15 bp, Homo sapiens
gagaccttcagagag

SEQ ID NO: 231992 - DNA, 15 bp, Homo sapiens
ggagaccttcagaga

SEQ ID NO: 231993 - DNA, 15 bp, Homo sapiens
aggagaccttcagag

SEQ ID NO: 231994 - DNA, 15 bp, Homo sapiens
aaggagaccttcaga

SEQ ID NO: 231995 - DNA, 15 bp, Homo sapiens
caaggagaccttcag

SEQ ID NO: 231996 - DNA, 15 bp, Homo sapiens
ccaaggagaccttca

SEQ ID NO: 231997 - DNA, 15 bp, Homo sapiens
tccaaggagaccttc

SEQ ID NO: 231998 - DNA, 15 bp, Homo sapiens
ctccaaggagacctt

SEQ ID NO: 231999 - DNA, 15 bp, Homo sapiens
tctccaaggagacct

SEQ ID NO: 232000 - DNA, 15 bp, Homo sapiens
ttctccaaggagacc

SEQ ID NO: 232001 - DNA, 15 bp, Homo sapiens
tttctccaaggagac

SEQ ID NO: 232002 - DNA, 15 bp, Homo sapiens
ttttctccaaggaga

SEQ ID NO: 232003 - DNA, 15 bp, Homo sapiens
attttctccaaggag

SEQ ID NO: 232004 - DNA, 15 bp, Homo sapiens
gattttctccaagga

SEQ ID NO: 232005 - DNA, 15 bp, Homo sapiens
ggattttctccaagg

SEQ ID NO: 232006 - DNA, 15 bp, Homo sapiens
aggattttctccaag

SEQ ID NO: 232007 - DNA, 15 bp, Homo sapiens
caggattttctccaa

SEQ ID NO: 232008 - DNA, 15 bp, Homo sapiens
gcaggattttctcca

SEQ ID NO: 232009 - DNA, 15 bp, Homo sapiens
ggcaggattttctcc

SEQ ID NO: 232010 - DNA, 15 bp, Homo sapiens
gggcaggattttctc

SEQ ID NO: 232011 - DNA, 15 bp, Homo sapiens
tgggcaggattttct

SEQ ID NO: 232012 - DNA, 15 bp, Homo sapiens
ctgggcaggattttc

SEQ ID NO: 232013 - DNA, 15 bp, Homo sapiens
cctgggcaggatttt

SEQ ID NO: 232014 - DNA, 15 bp, Homo sapiens
gcctgggcaggattt

SEQ ID NO: 232015 - DNA, 15 bp, Homo sapiens
agcctgggcaggatt

SEQ ID NO: 232016 - DNA, 15 bp, Homo sapiens
cagcctgggcaggat

SEQ ID NO: 232017 - DNA, 15 bp, Homo sapiens
acagcctgggcagga

SEQ ID NO: 232018 - DNA, 15 bp, Homo sapiens
aacagcctgggcagg

SEQ ID NO: 232019 - DNA, 15 bp, Homo sapiens
caacagcctgggcag

SEQ ID NO: 232020 - DNA, 15 bp, Homo sapiens
ccaacagcctgggca

SEQ ID NO: 232021 - DNA, 15 bp, Homo sapiens
cccaacagcctgggc

SEQ ID NO: 232022 - DNA, 15 bp, Homo sapiens
ccccaacagcctggg

SEQ ID NO: 232023 - DNA, 15 bp, Homo sapiens
gccccaacagcctgg

SEQ ID NO: 232024 - DNA, 15 bp, Homo sapiens
ggccccaacagcctg

SEQ ID NO: 232025 - DNA, 15 bp, Homo sapiens
tggccccaacagcct

SEQ ID NO: 232026 - DNA, 15 bp, Homo sapiens
atggccccaacagcc

SEQ ID NO: 232027 - DNA, 15 bp, Homo sapiens
catggccccaacagc

SEQ ID NO: 232028 - DNA, 15 bp, Homo sapiens
gcatggccccaacag

SEQ ID NO: 232029 - DNA, 15 bp, Homo sapiens
tgcatggccccaaca

SEQ ID NO: 232030 - DNA, 15 bp, Homo sapiens
ctgcatggccccaac

SEQ ID NO: 232031 - DNA, 15 bp, Homo sapiens
tctgcatggccccaa

SEQ ID NO: 232032 - DNA, 15 bp, Homo sapiens
ctctgcatggcccca

SEQ ID NO: 232033 - DNA, 15 bp, Homo sapiens
gctctgcatggcccc

SEQ ID NO: 232034 - DNA, 15 bp, Homo sapiens
tgctctgcatggccc

SEQ ID NO: 232035 - DNA, 15 bp, Homo sapiens
ttgctctgcatggcc

SEQ ID NO: 232036 - DNA, 15 bp, Homo sapiens
cttgctctgcatggc

SEQ ID NO: 232037 - DNA, 15 bp, Homo sapiens
acttgctctgcatgg

SEQ ID NO: 232038 - DNA, 15 bp, Homo sapiens
cacttgctctgcatg

SEQ ID NO: 232039 - DNA, 15 bp, Homo sapiens
ccacttgctctgcat

SEQ ID NO: 232040 - DNA, 15 bp, Homo sapiens
cccacttgctctgca

SEQ ID NO: 232041 - DNA, 15 bp, Homo sapiens
tcccacttgctctgc

SEQ ID NO: 232042 - DNA, 15 bp, Homo sapiens
gtcccacttgctctg

SEQ ID NO: 232043 - DNA, 15 bp, Homo sapiens
ggtcccacttgctct

SEQ ID NO: 232044 - DNA, 15 bp, Homo sapiens
aggtcccacttgctc

SEQ ID NO: 232045 - DNA, 15 bp, Homo sapiens
caggtcccacttgct

SEQ ID NO: 232046 - DNA, 15 bp, Homo sapiens
gcaggtcccacttgc

SEQ ID NO: 232047 - DNA, 15 bp, Homo sapiens
agcaggtcccacttg

SEQ ID NO: 232048 - DNA, 15 bp, Homo sapiens
cagcaggtcccactt

SEQ ID NO: 232049 - DNA, 15 bp, Homo sapiens
gcagcaggtcccact

SEQ ID NO: 232050 - DNA, 15 bp, Homo sapiens
tgcagcaggtcccac

SEQ ID NO: 232051 - DNA, 15 bp, Homo sapiens
gtgcagcaggtccca

SEQ ID NO: 232052 - DNA, 15 bp, Homo sapiens
tgtgcagcaggtccc

SEQ ID NO: 232053 - DNA, 15 bp, Homo sapiens
ctgtgcagcaggtcc

SEQ ID NO: 232054 - DNA, 15 bp, Homo sapiens
tctgtgcagcaggtc

SEQ ID NO: 232055 - DNA, 15 bp, Homo sapiens
ttctgtgcagcaggt

SEQ ID NO: 232056 - DNA, 15 bp, Homo sapiens
tttctgtgcagcagg

SEQ ID NO: 232057 - DNA, 15 bp, Homo sapiens
ctttctgtgcagcag

SEQ ID NO: 232058 - DNA, 15 bp, Homo sapiens
gctttctgtgcagca

SEQ ID NO: 232059 - DNA, 15 bp, Homo sapiens
tgctttctgtgcagc

SEQ ID NO: 232060 - DNA, 15 bp, Homo sapiens
ctgctttctgtgcag

SEQ ID NO: 232061 - DNA, 15 bp, Homo sapiens
cctgctttctgtgca

SEQ ID NO: 232062 - DNA, 15 bp, Homo sapiens
gcctgctttctgtgc

SEQ ID NO: 232063 - DNA, 15 bp, Homo sapiens
tgcctgctttctgtg

SEQ ID NO: 232064 - DNA, 15 bp, Homo sapiens
atgcctgctttctgt

SEQ ID NO: 232065 - DNA, 15 bp, Homo sapiens
gatgcctgctttctg

SEQ ID NO: 232066 - DNA, 15 bp, Homo sapiens
agatgcctgctttct

SEQ ID NO: 232067 - DNA, 15 bp, Homo sapiens
gagatgcctgctttc

SEQ ID NO: 232068 - DNA, 15 bp, Homo sapiens
tgagatgcctgcttt

SEQ ID NO: 232069 - DNA, 15 bp, Homo sapiens
ctgagatgcctgctt

SEQ ID NO: 232070 - DNA, 15 bp, Homo sapiens
tctgagatgcctgct

SEQ ID NO: 232071 - DNA, 15 bp, Homo sapiens
ctctgagatgcctgc

SEQ ID NO: 232072 - DNA, 15 bp, Homo sapiens
gctctgagatgcctg

SEQ ID NO: 232073 - DNA, 15 bp, Homo sapiens
agctctgagatgcct

SEQ ID NO: 232074 - DNA, 15 bp, Homo sapiens
gagctctgagatgcc

SEQ ID NO: 232075 - DNA, 15 bp, Homo sapiens
ggagctctgagatgc

SEQ ID NO: 232076 - DNA, 15 bp, Homo sapiens
tggagctctgagatg

SEQ ID NO: 232077 - DNA, 15 bp, Homo sapiens
ctggagctctgagat

SEQ ID NO: 232078 - DNA, 15 bp, Homo sapiens
cctggagctctgaga

SEQ ID NO: 232079 - DNA, 15 bp, Homo sapiens
gcctggagctctgag

SEQ ID NO: 232080 - DNA, 15 bp, Homo sapiens
cgcctggagctctga

SEQ ID NO: 232081 - DNA, 15 bp, Homo sapiens
ccgcctggagctctg

SEQ ID NO: 232082 - DNA, 15 bp, Homo sapiens
accgcctggagctct

SEQ ID NO: 232083 - DNA, 15 bp, Homo sapiens
taccgcctggagctc

SEQ ID NO: 232084 - DNA, 15 bp, Homo sapiens
ataccgcctggagct

SEQ ID NO: 232085 - DNA, 15 bp, Homo sapiens
gataccgcctggagc

SEQ ID NO: 232086 - DNA, 15 bp, Homo sapiens
ggataccgcctggag

SEQ ID NO: 232087 - DNA, 15 bp, Homo sapiens
aggataccgcctgga

SEQ ID NO: 232088 - DNA, 15 bp, Homo sapiens
caggataccgcctgg

SEQ ID NO: 232089 - DNA, 15 bp, Homo sapiens
tcaggataccgcctg

SEQ ID NO: 232090 - DNA, 15 bp, Homo sapiens
ctcaggataccgcct

SEQ ID NO: 232091 - DNA, 15 bp, Homo sapiens
tctcaggataccgcc

SEQ ID NO: 232092 - DNA, 15 bp, Homo sapiens
ttctcaggataccgc

SEQ ID NO: 232093 - DNA, 15 bp, Homo sapiens
attctcaggataccg

SEQ ID NO: 232094 - DNA, 15 bp, Homo sapiens
tattctcaggatacc

SEQ ID NO: 232095 - DNA, 15 bp, Homo sapiens
ctattctcaggatac

SEQ ID NO: 232096 - DNA, 15 bp, Homo sapiens
cctattctcaggata

SEQ ID NO: 232097 - DNA, 15 bp, Homo sapiens
gcctattctcaggat

SEQ ID NO: 232098 - DNA, 15 bp, Homo sapiens
ggcctattctcagga

SEQ ID NO: 232099 - DNA, 15 bp, Homo sapiens
aggcctattctcagg

SEQ ID NO: 232100 - DNA, 15 bp, Homo sapiens
caggcctattctcag

SEQ ID NO: 232101 - DNA, 15 bp, Homo sapiens
gcaggcctattctca

SEQ ID NO: 232102 - DNA, 15 bp, Homo sapiens
ggcaggcctattctc

SEQ ID NO: 232103 - DNA, 15 bp, Homo sapiens
gggcaggcctattct

SEQ ID NO: 232104 - DNA, 15 bp, Homo sapiens
agggcaggcctattc

SEQ ID NO: 232105 - DNA, 15 bp, Homo sapiens
aagggcaggcctatt

SEQ ID NO: 232106 - DNA, 15 bp, Homo sapiens
aaagggcaggcctat

SEQ ID NO: 232107 - DNA, 15 bp, Homo sapiens
taaagggcaggccta

SEQ ID NO: 232108 - DNA, 15 bp, Homo sapiens
ctaaagggcaggcct

SEQ ID NO: 232109 - DNA, 15 bp, Homo sapiens
cctaaagggcaggcc

SEQ ID NO: 232110 - DNA, 15 bp, Homo sapiens
tcctaaagggcaggc

SEQ ID NO: 232111 - DNA, 15 bp, Homo sapiens
ctcctaaagggcagg

SEQ ID NO: 232112 - DNA, 15 bp, Homo sapiens
gctcctaaagggcag

SEQ ID NO: 232113 - DNA, 15 bp, Homo sapiens
tgctcctaaagggca

SEQ ID NO: 232114 - DNA, 15 bp, Homo sapiens
ctgctcctaaagggc

SEQ ID NO: 232115 - DNA, 15 bp, Homo sapiens
cctgctcctaaaggg

SEQ ID NO: 232116 - DNA, 15 bp, Homo sapiens
gcctgctcctaaagg

SEQ ID NO: 232117 - DNA, 15 bp, Homo sapiens
tgcctgctcctaaag

SEQ ID NO: 232118 - DNA, 15 bp, Homo sapiens
ctgcctgctcctaaa

SEQ ID NO: 232119 - DNA, 15 bp, Homo sapiens
cctgcctgctcctaa

SEQ ID NO: 232120 - DNA, 15 bp, Homo sapiens
acctgcctgctccta

SEQ ID NO: 232121 - DNA, 15 bp, Homo sapiens
gacctgcctgctcct

SEQ ID NO: 232122 - DNA, 15 bp, Homo sapiens
ggacctgcctgctcc

SEQ ID NO: 232123 - DNA, 15 bp, Homo sapiens
gggacctgcctgctc

SEQ ID NO: 232124 - DNA, 15 bp, Homo sapiens
agggacctgcctgct

SEQ ID NO: 232125 - DNA, 15 bp, Homo sapiens
cagggacctgcctgc

SEQ ID NO: 232126 - DNA, 15 bp, Homo sapiens
gcagggacctgcctg

SEQ ID NO: 232127 - DNA, 15 bp, Homo sapiens
tgcagggacctgcct

SEQ ID NO: 232128 - DNA, 15 bp, Homo sapiens
gtgcagggacctgcc

SEQ ID NO: 232129 - DNA, 15 bp, Homo sapiens
agtgcagggacctgc

SEQ ID NO: 232130 - DNA, 15 bp, Homo sapiens
cagtgcagggacctg

SEQ ID NO: 232131 - DNA, 15 bp, Homo sapiens
tcagtgcagggacct

SEQ ID NO: 232132 - DNA, 15 bp, Homo sapiens
ttcagtgcagggacc

SEQ ID NO: 232133 - DNA, 15 bp, Homo sapiens
gttcagtgcagggac

SEQ ID NO: 232134 - DNA, 15 bp, Homo sapiens
tgttcagtgcaggga

SEQ ID NO: 232135 - DNA, 15 bp, Homo sapiens
ttgttcagtgcaggg

SEQ ID NO: 232136 - DNA, 15 bp, Homo sapiens
tttgttcagtgcagg

SEQ ID NO: 232137 - DNA, 15 bp, Homo sapiens
ctttgttcagtgcag

SEQ ID NO: 232138 - DNA, 15 bp, Homo sapiens
tctttgttcagtgca

SEQ ID NO: 232139 - DNA, 15 bp, Homo sapiens
ttctttgttcagtgc

SEQ ID NO: 232140 - DNA, 15 bp, Homo sapiens
cttctttgttcagtg

SEQ ID NO: 232141 - DNA, 15 bp, Homo sapiens
tcttctttgttcagt

SEQ ID NO: 232142 - DNA, 15 bp, Homo sapiens
ctcttctttgttcag

SEQ ID NO: 232143 - DNA, 15 bp, Homo sapiens
tctcttctttgttca

SEQ ID NO: 232144 - DNA, 15 bp, Homo sapiens
atctcttctttgttc

SEQ ID NO: 232145 - DNA, 15 bp, Homo sapiens
aatctcttctttgtt

SEQ ID NO: 232146 - DNA, 15 bp, Homo sapiens
aaatctcttctttgt

SEQ ID NO: 232147 - DNA, 15 bp, Homo sapiens
gaaatctcttctttg

SEQ ID NO: 232148 - DNA, 15 bp, Homo sapiens
tgaaatctcttcttt

SEQ ID NO: 232149 - DNA, 15 bp, Homo sapiens
gtgaaatctcttctt

SEQ ID NO: 232150 - DNA, 15 bp, Homo sapiens
tgtgaaatctcttct

SEQ ID NO: 232151 - DNA, 15 bp, Homo sapiens
ttgtgaaatctcttc

SEQ ID NO: 232152 - DNA, 15 bp, Homo sapiens
attgtgaaatctctt

SEQ ID NO: 232153 - DNA, 15 bp, Homo sapiens
aattgtgaaatctct

SEQ ID NO: 232154 - DNA, 15 bp, Homo sapiens
taattgtgaaatctc

SEQ ID NO: 232155 - DNA, 15 bp, Homo sapiens
ttaattgtgaaatct

SEQ ID NO: 232156 - DNA, 15 bp, Homo sapiens
cttaattgtgaaatc

SEQ ID NO: 232157 - DNA, 15 bp, Homo sapiens
acttaattgtgaaat

SEQ ID NO: 232158 - DNA, 15 bp, Homo sapiens
tacttaattgtgaaa

SEQ ID NO: 232159 - DNA, 15 bp, Homo sapiens
ttacttaattgtgaa

SEQ ID NO: 232160 - DNA, 15 bp, Homo sapiens
attacttaattgtga

SEQ ID NO: 232161 - DNA, 15 bp, Homo sapiens
cattacttaattgtg

SEQ ID NO: 232162 - DNA, 15 bp, Homo sapiens
ccattacttaattgt

SEQ ID NO: 232163 - DNA, 15 bp, Homo sapiens
gccattacttaattg

SEQ ID NO: 232164 - DNA, 15 bp, Homo sapiens
cgccattacttaatt

SEQ ID NO: 232165 - DNA, 15 bp, Homo sapiens
ccgccattacttaat

SEQ ID NO: 232166 - DNA, 15 bp, Homo sapiens
cccgccattacttaa

SEQ ID NO: 232167 - DNA, 15 bp, Homo sapiens
gcccgccattactta

SEQ ID NO: 232168 - DNA, 15 bp, Homo sapiens
tgcccgccattactt

SEQ ID NO: 232169 - DNA, 15 bp, Homo sapiens
ttgcccgccattact

SEQ ID NO: 232170 - DNA, 15 bp, Homo sapiens
cttgcccgccattac

SEQ ID NO: 232171 - DNA, 15 bp, Homo sapiens
tcttgcccgccatta

SEQ ID NO: 232172 - DNA, 15 bp, Homo sapiens
ctcttgcccgccatt

SEQ ID NO: 232173 - DNA, 15 bp, Homo sapiens
tctcttgcccgccat

SEQ ID NO: 232174 - DNA, 15 bp, Homo sapiens
ttctcttgcccgcca

SEQ ID NO: 232175 - DNA, 15 bp, Homo sapiens
tttctcttgcccgcc

SEQ ID NO: 232176 - DNA, 15 bp, Homo sapiens
ctttctcttgcccgc

SEQ ID NO: 232177 - DNA, 15 bp, Homo sapiens
gctttctcttgcccg

SEQ ID NO: 232178 - DNA, 15 bp, Homo sapiens
tgctttctcttgccc

SEQ ID NO: 232179 - DNA, 15 bp, Homo sapiens
ctgctttctcttgcc

SEQ ID NO: 232180 - DNA, 15 bp, Homo sapiens
gctgctttctcttgc

SEQ ID NO: 232181 - DNA, 15 bp, Homo sapiens
tgctgctttctcttg

SEQ ID NO: 232182 - DNA, 15 bp, Homo sapiens
gtgctgctttctctt

SEQ ID NO: 232183 - DNA, 15 bp, Homo sapiens
agtgctgctttctct

SEQ ID NO: 232184 - DNA, 15 bp, Homo sapiens
cagtgctgctttctc

SEQ ID NO: 232185 - DNA, 15 bp, Homo sapiens
gcagtgctgctttct

SEQ ID NO: 232186 - DNA, 15 bp, Homo sapiens
ggcagtgctgctttc

SEQ ID NO: 232187 - DNA, 15 bp, Homo sapiens
aggcagtgctgcttt

SEQ ID NO: 232188 - DNA, 15 bp, Homo sapiens
caggcagtgctgctt

SEQ ID NO: 232189 - DNA, 15 bp, Homo sapiens
acaggcagtgctgct

SEQ ID NO: 232190 - DNA, 15 bp, Homo sapiens
aacaggcagtgctgc

SEQ ID NO: 232191 - DNA, 15 bp, Homo sapiens
gaacaggcagtgctg

SEQ ID NO: 232192 - DNA, 15 bp, Homo sapiens
tgaacaggcagtgct

SEQ ID NO: 232193 - DNA, 15 bp, Homo sapiens
ctgaacaggcagtgc

SEQ ID NO: 232194 - DNA, 15 bp, Homo sapiens
tctgaacaggcagtg

SEQ ID NO: 232195 - DNA, 15 bp, Homo sapiens
ttctgaacaggcagt

SEQ ID NO: 232196 - DNA, 15 bp, Homo sapiens
gttctgaacaggcag

SEQ ID NO: 232197 - DNA, 15 bp, Homo sapiens
ggttctgaacaggca

SEQ ID NO: 232198 - DNA, 15 bp, Homo sapiens
gggttctgaacaggc

SEQ ID NO: 232199 - DNA, 15 bp, Homo sapiens
tgggttctgaacagg

SEQ ID NO: 232200 - DNA, 15 bp, Homo sapiens
ttgggttctgaacag

SEQ ID NO: 232201 - DNA, 15 bp, Homo sapiens
tttgggttctgaaca

SEQ ID NO: 232202 - DNA, 15 bp, Homo sapiens
ctttgggttctgaac

SEQ ID NO: 232203 - DNA, 15 bp, Homo sapiens
gctttgggttctgaa

SEQ ID NO: 232204 - DNA, 15 bp, Homo sapiens
agctttgggttctga

SEQ ID NO: 232205 - DNA, 15 bp, Homo sapiens
cagctttgggttctg

SEQ ID NO: 232206 - DNA, 15 bp, Homo sapiens
acagctttgggttct

SEQ ID NO: 232207 - DNA, 15 bp, Homo sapiens
cacagctttgggttc

SEQ ID NO: 232208 - DNA, 15 bp, Homo sapiens
acacagctttgggtt

SEQ ID NO: 232209 - DNA, 15 bp, Homo sapiens
aacacagctttgggt

SEQ ID NO: 232210 - DNA, 15 bp, Homo sapiens
aaacacagctttggg

SEQ ID NO: 232211 - DNA, 15 bp, Homo sapiens
caaacacagctttgg

SEQ ID NO: 232212 - DNA, 15 bp, Homo sapiens
acaaacacagctttg

SEQ ID NO: 232213 - DNA, 15 bp, Homo sapiens
gacaaacacagcttt

SEQ ID NO: 232214 - DNA, 15 bp, Homo sapiens
agacaaacacagctt

SEQ ID NO: 232215 - DNA, 15 bp, Homo sapiens
aagacaaacacagct

SEQ ID NO: 232216 - DNA, 15 bp, Homo sapiens
caagacaaacacagc

SEQ ID NO: 232217 - DNA, 15 bp, Homo sapiens
tcaagacaaacacag

SEQ ID NO: 232218 - DNA, 15 bp, Homo sapiens
ctcaagacaaacaca

SEQ ID NO: 232219 - DNA, 15 bp, Homo sapiens
gctcaagacaaacac

SEQ ID NO: 232220 - DNA, 15 bp, Homo sapiens
ggctcaagacaaaca

SEQ ID NO: 232221 - DNA, 15 bp, Homo sapiens
cggctcaagacaaac

SEQ ID NO: 232222 - DNA, 15 bp, Homo sapiens
acggctcaagacaaa

SEQ ID NO: 232223 - DNA, 15 bp, Homo sapiens
gacggctcaagacaa

SEQ ID NO: 232224 - DNA, 15 bp, Homo sapiens
ggacggctcaagaca

SEQ ID NO: 232225 - DNA, 15 bp, Homo sapiens
tggacggctcaagac

SEQ ID NO: 232226 - DNA, 15 bp, Homo sapiens
ttggacggctcaaga

SEQ ID NO: 232227 - DNA, 15 bp, Homo sapiens
tttggacggctcaag

SEQ ID NO: 232228 - DNA, 15 bp, Homo sapiens
atttggacggctcaa

SEQ ID NO: 232229 - DNA, 15 bp, Homo sapiens
catttggacggctca

SEQ ID NO: 232230 - DNA, 15 bp, Homo sapiens
acatttggacggctc

SEQ ID NO: 232231 - DNA, 15 bp, Homo sapiens
aacatttggacggct

SEQ ID NO: 232232 - DNA, 15 bp, Homo sapiens
aaacatttggacggc

SEQ ID NO: 232233 - DNA, 15 bp, Homo sapiens
taaacatttggacgg

SEQ ID NO: 232234 - DNA, 15 bp, Homo sapiens
ataaacatttggacg

SEQ ID NO: 232235 - DNA, 15 bp, Homo sapiens
gataaacatttggac

SEQ ID NO: 232236 - DNA, 15 bp, Homo sapiens
ggataaacatttgga

SEQ ID NO: 232237 - DNA, 15 bp, Homo sapiens
gggataaacatttgg

SEQ ID NO: 232238 - DNA, 15 bp, Homo sapiens
agggataaacatttg

SEQ ID NO: 232239 - DNA, 15 bp, Homo sapiens
cagggataaacattt

SEQ ID NO: 232240 - DNA, 15 bp, Homo sapiens
gcagggataaacatt

SEQ ID NO: 232241 - DNA, 15 bp, Homo sapiens
tgcagggataaacat

SEQ ID NO: 232242 - DNA, 15 bp, Homo sapiens
ttgcagggataaaca

SEQ ID NO: 232243 - DNA, 15 bp, Homo sapiens
gttgcagggataaac

SEQ ID NO: 232244 - DNA, 15 bp, Homo sapiens
tgttgcagggataaa

SEQ ID NO: 232245 - DNA, 15 bp, Homo sapiens
ttgttgcagggataa

SEQ ID NO: 232246 - DNA, 15 bp, Homo sapiens
attgttgcagggata

SEQ ID NO: 232247 - DNA, 15 bp, Homo sapiens
cattgttgcagggat

SEQ ID NO: 232248 - DNA, 15 bp, Homo sapiens
ccattgttgcaggga

SEQ ID NO: 232249 - DNA, 15 bp, Homo sapiens
cccattgttgcaggg

SEQ ID NO: 232250 - DNA, 15 bp, Homo sapiens
tcccattgttgcagg

SEQ ID NO: 232251 - DNA, 15 bp, Homo sapiens
gtcccattgttgcag

SEQ ID NO: 232252 - DNA, 15 bp, Homo sapiens
ggtcccattgttgca

SEQ ID NO: 232253 - DNA, 15 bp, Homo sapiens
tggtcccattgttgc

SEQ ID NO: 232254 - DNA, 15 bp, Homo sapiens
ttggtcccattgttg

SEQ ID NO: 232255 - DNA, 15 bp, Homo sapiens
tttggtcccattgtt

SEQ ID NO: 232256 - DNA, 15 bp, Homo sapiens
ctttggtcccattgt

SEQ ID NO: 232257 - DNA, 15 bp, Homo sapiens
gctttggtcccattg

SEQ ID NO: 232258 - DNA, 15 bp, Homo sapiens
tgctttggtcccatt

SEQ ID NO: 232259 - DNA, 15 bp, Homo sapiens
ttgctttggtcccat

SEQ ID NO: 232260 - DNA, 15 bp, Homo sapiens
cttgctttggtccca

SEQ ID NO: 232261 - DNA, 15 bp, Homo sapiens
tcttgctttggtccc

SEQ ID NO: 232262 - DNA, 15 bp, Homo sapiens
gtcttgctttggtcc

SEQ ID NO: 232263 - DNA, 15 bp, Homo sapiens
ggtcttgctttggtc

SEQ ID NO: 232264 - DNA, 15 bp, Homo sapiens
tggtcttgctttggt

SEQ ID NO: 232265 - DNA, 15 bp, Homo sapiens
ctggtcttgctttgg

SEQ ID NO: 232266 - DNA, 15 bp, Homo sapiens
tctggtcttgctttg

SEQ ID NO: 232267 - DNA, 15 bp, Homo sapiens
gtctggtcttgcttt

SEQ ID NO: 232268 - DNA, 15 bp, Homo sapiens
tgtctggtcttgctt

SEQ ID NO: 232269 - DNA, 15 bp, Homo sapiens
ctgtctggtcttgct

SEQ ID NO: 232270 - DNA, 15 bp, Homo sapiens
gctgtctggtcttgc

SEQ ID NO: 232271 - DNA, 15 bp, Homo sapiens
agctgtctggtcttg

SEQ ID NO: 232272 - DNA, 15 bp, Homo sapiens
cagctgtctggtctt

SEQ ID NO: 232273 - DNA, 15 bp, Homo sapiens
ccagctgtctggtct

SEQ ID NO: 232274 - DNA, 15 bp, Homo sapiens
gccagctgtctggtc

SEQ ID NO: 232275 - DNA, 15 bp, Homo sapiens
agccagctgtctggt

SEQ ID NO: 232276 - DNA, 15 bp, Homo sapiens
tagccagctgtctgg

SEQ ID NO: 232277 - DNA, 15 bp, Homo sapiens
atagccagctgtctg

SEQ ID NO: 232278 - DNA, 15 bp, Homo sapiens
aatagccagctgtct

SEQ ID NO: 232279 - DNA, 15 bp, Homo sapiens
gaatagccagctgtc

SEQ ID NO: 232280 - DNA, 15 bp, Homo sapiens
tgaatagccagctgt

SEQ ID NO: 232281 - DNA, 15 bp, Homo sapiens
ctgaatagccagctg

SEQ ID NO: 232282 - DNA, 15 bp, Homo sapiens
actgaatagccagct

SEQ ID NO: 232283 - DNA, 15 bp, Homo sapiens
aactgaatagccagc

SEQ ID NO: 232284 - DNA, 15 bp, Homo sapiens
aaactgaatagccag

SEQ ID NO: 232285 - DNA, 15 bp, Homo sapiens
gaaactgaatagcca

SEQ ID NO: 232286 - DNA, 15 bp, Homo sapiens
ggaaactgaatagcc

SEQ ID NO: 232287 - DNA, 15 bp, Homo sapiens
gggaaactgaatagc

SEQ ID NO: 232288 - DNA, 15 bp, Homo sapiens
cgggaaactgaatag

SEQ ID NO: 232289 - DNA, 15 bp, Homo sapiens
acgggaaactgaata

SEQ ID NO: 232290 - DNA, 15 bp, Homo sapiens
aacgggaaactgaat

SEQ ID NO: 232291 - DNA, 15 bp, Homo sapiens
aaacgggaaactgaa

SEQ ID NO: 232292 - DNA, 15 bp, Homo sapiens
gaaacgggaaactga

SEQ ID NO: 232293 - DNA, 15 bp, Homo sapiens
tgaaacgggaaactg

SEQ ID NO: 232294 - DNA, 15 bp, Homo sapiens
ttgaaacgggaaact

SEQ ID NO: 232295 - DNA, 15 bp, Homo sapiens
attgaaacgggaaac

SEQ ID NO: 232296 - DNA, 15 bp, Homo sapiens
aattgaaacgggaaa

SEQ ID NO: 232297 - DNA, 15 bp, Homo sapiens
aaattgaaacgggaa

SEQ ID NO: 232298 - DNA, 15 bp, Homo sapiens
aaaattgaaacggga

SEQ ID NO: 232299 - DNA, 15 bp, Homo sapiens
aaaaattgaaacggg

SEQ ID NO: 232300 - DNA, 15 bp, Homo sapiens
taaaaattgaaacgg

SEQ ID NO: 232301 - DNA, 15 bp, Homo sapiens
ttaaaaattgaaacg

SEQ ID NO: 232302 - DNA, 15 bp, Homo sapiens
attaaaaattgaaac

SEQ ID NO: 232303 - DNA, 15 bp, Homo sapiens
aattaaaaattgaaa

SEQ ID NO: 232304 - DNA, 15 bp, Homo sapiens
aaattaaaaattgaa

SEQ ID NO: 232305 - DNA, 15 bp, Homo sapiens
caaattaaaaattga

SEQ ID NO: 232306 - DNA, 15 bp, Homo sapiens
acaaattaaaaattg

SEQ ID NO: 232307 - DNA, 15 bp, Homo sapiens
aacaaattaaaaatt

SEQ ID NO: 232308 - DNA, 15 bp, Homo sapiens
aaacaaattaaaaat

SEQ ID NO: 232309 - DNA, 15 bp, Homo sapiens
aaaacaaattaaaaa

SEQ ID NO: 232310 - DNA, 15 bp, Homo sapiens
gaaaacaaattaaaa

SEQ ID NO: 232311 - DNA, 15 bp, Homo sapiens
ggaaaacaaattaaa

SEQ ID NO: 232312 - DNA, 15 bp, Homo sapiens
aggaaaacaaattaa

SEQ ID NO: 232313 - DNA, 15 bp, Homo sapiens
aaggaaaacaaatta

SEQ ID NO: 232314 - DNA, 15 bp, Homo sapiens
caaggaaaacaaatt

SEQ ID NO: 232315 - DNA, 15 bp, Homo sapiens
tcaaggaaaacaaat

SEQ ID NO: 232316 - DNA, 15 bp, Homo sapiens
atcaaggaaaacaaa

SEQ ID NO: 232317 - DNA, 15 bp, Homo sapiens
catcaaggaaaacaa

SEQ ID NO: 232318 - DNA, 15 bp, Homo sapiens
gcatcaaggaaaaca

SEQ ID NO: 232319 - DNA, 15 bp, Homo sapiens
tgcatcaaggaaaac

SEQ ID NO: 232320 - DNA, 15 bp, Homo sapiens
gtgcatcaaggaaaa

SEQ ID NO: 232321 - DNA, 15 bp, Homo sapiens
cgtgcatcaaggaaa

SEQ ID NO: 232322 - DNA, 15 bp, Homo sapiens
gcgtgcatcaaggaa

SEQ ID NO: 232323 - DNA, 15 bp, Homo sapiens
agcgtgcatcaagga

SEQ ID NO: 232324 - DNA, 15 bp, Homo sapiens
gagcgtgcatcaagg

SEQ ID NO: 232325 - DNA, 15 bp, Homo sapiens
tgagcgtgcatcaag

SEQ ID NO: 232326 - DNA, 15 bp, Homo sapiens
ctgagcgtgcatcaa

SEQ ID NO: 232327 - DNA, 15 bp, Homo sapiens
cctgagcgtgcatca

SEQ ID NO: 232328 - DNA, 15 bp, Homo sapiens
tcctgagcgtgcatc

SEQ ID NO: 232329 - DNA, 15 bp, Homo sapiens
ctcctgagcgtgcat

SEQ ID NO: 232330 - DNA, 15 bp, Homo sapiens
gctcctgagcgtgca

SEQ ID NO: 232331 - DNA, 15 bp, Homo sapiens
agctcctgagcgtgc

SEQ ID NO: 232332 - DNA, 15 bp, Homo sapiens
aagctcctgagcgtg

SEQ ID NO: 232333 - DNA, 15 bp, Homo sapiens
caagctcctgagcgt

SEQ ID NO: 232334 - DNA, 15 bp, Homo sapiens
ccaagctcctgagcg

SEQ ID NO: 232335 - DNA, 15 bp, Homo sapiens
gccaagctcctgagc

SEQ ID NO: 232336 - DNA, 15 bp, Homo sapiens
ggccaagctcctgag

SEQ ID NO: 232337 - DNA, 15 bp, Homo sapiens
aggccaagctcctga

SEQ ID NO: 232338 - DNA, 15 bp, Homo sapiens
gaggccaagctcctg

SEQ ID NO: 232339 - DNA, 15 bp, Homo sapiens
ggaggccaagctcct

SEQ ID NO: 232340 - DNA, 15 bp, Homo sapiens
aggaggccaagctcc

SEQ ID NO: 232341 - DNA, 15 bp, Homo sapiens
gaggaggccaagctc

SEQ ID NO: 232342 - DNA, 15 bp, Homo sapiens
tgaggaggccaagct

SEQ ID NO: 232343 - DNA, 15 bp, Homo sapiens
atgaggaggccaagc

SEQ ID NO: 232344 - DNA, 15 bp, Homo sapiens
gatgaggaggccaag

SEQ ID NO: 232345 - DNA, 15 bp, Homo sapiens
agatgaggaggccaa

SEQ ID NO: 232346 - DNA, 15 bp, Homo sapiens
cagatgaggaggcca

SEQ ID NO: 232347 - DNA, 15 bp, Homo sapiens
ccagatgaggaggcc

SEQ ID NO: 232348 - DNA, 15 bp, Homo sapiens
cccagatgaggaggc

SEQ ID NO: 232349 - DNA, 15 bp, Homo sapiens
gcccagatgaggagg

SEQ ID NO: 232350 - DNA, 15 bp, Homo sapiens
ggcccagatgaggag

SEQ ID NO: 232351 - DNA, 15 bp, Homo sapiens
aggcccagatgagga

SEQ ID NO: 232352 - DNA, 15 bp, Homo sapiens
gaggcccagatgagg

SEQ ID NO: 232353 - DNA, 15 bp, Homo sapiens
agaggcccagatgag

SEQ ID NO: 232354 - DNA, 15 bp, Homo sapiens
tagaggcccagatga

SEQ ID NO: 232355 - DNA, 15 bp, Homo sapiens
atagaggcccagatg

SEQ ID NO: 232356 - DNA, 15 bp, Homo sapiens
gatagaggcccagat

SEQ ID NO: 232357 - DNA, 15 bp, Homo sapiens
agatagaggcccaga

SEQ ID NO: 232358 - DNA, 15 bp, Homo sapiens
gagatagaggcccag

SEQ ID NO: 232359 - DNA, 15 bp, Homo sapiens
tgagatagaggccca

SEQ ID NO: 232360 - DNA, 15 bp, Homo sapiens
gtgagatagaggccc

SEQ ID NO: 232361 - DNA, 15 bp, Homo sapiens
ggtgagatagaggcc

SEQ ID NO: 232362 - DNA, 15 bp, Homo sapiens
aggtgagatagaggc

SEQ ID NO: 232363 - DNA, 15 bp, Homo sapiens
caggtgagatagagg

SEQ ID NO: 232364 - DNA, 15 bp, Homo sapiens
acaggtgagatagag

SEQ ID NO: 232365 - DNA, 15 bp, Homo sapiens
gacaggtgagataga

SEQ ID NO: 232366 - DNA, 15 bp, Homo sapiens
agacaggtgagatag

SEQ ID NO: 232367 - DNA, 15 bp, Homo sapiens
tagacaggtgagata

SEQ ID NO: 232368 - DNA, 15 bp, Homo sapiens
ttagacaggtgagat

SEQ ID NO: 232369 - DNA, 15 bp, Homo sapiens
attagacaggtgaga

SEQ ID NO: 232370 - DNA, 15 bp, Homo sapiens
aattagacaggtgag

SEQ ID NO: 232371 - DNA, 15 bp, Homo sapiens
caattagacaggtga

SEQ ID NO: 232372 - DNA, 15 bp, Homo sapiens
acaattagacaggtg

SEQ ID NO: 232373 - DNA, 15 bp, Homo sapiens
gacaattagacaggt

SEQ ID NO: 232374 - DNA, 15 bp, Homo sapiens
tgacaattagacagg

SEQ ID NO: 232375 - DNA, 15 bp, Homo sapiens
gtgacaattagacag

SEQ ID NO: 232376 - DNA, 15 bp, Homo sapiens
tgtgacaattagaca

SEQ ID NO: 232377 - DNA, 15 bp, Homo sapiens
ctgtgacaattagac

SEQ ID NO: 232378 - DNA, 15 bp, Homo sapiens
cctgtgacaattaga

SEQ ID NO: 232379 - DNA, 15 bp, Homo sapiens
acctgtgacaattag

SEQ ID NO: 232380 - DNA, 15 bp, Homo sapiens
cacctgtgacaatta

SEQ ID NO: 232381 - DNA, 15 bp, Homo sapiens
acacctgtgacaatt

SEQ ID NO: 232382 - DNA, 15 bp, Homo sapiens
cacacctgtgacaat

SEQ ID NO: 232383 - DNA, 15 bp, Homo sapiens
tcacacctgtgacaa

SEQ ID NO: 232384 - DNA, 15 bp, Homo sapiens
ttcacacctgtgaca

SEQ ID NO: 232385 - DNA, 15 bp, Homo sapiens
attcacacctgtgac

SEQ ID NO: 232386 - DNA, 15 bp, Homo sapiens
gattcacacctgtga

SEQ ID NO: 232387 - DNA, 15 bp, Homo sapiens
agattcacacctgtg

SEQ ID NO: 232388 - DNA, 15 bp, Homo sapiens
gagattcacacctgt

SEQ ID NO: 232389 - DNA, 15 bp, Homo sapiens
cgagattcacacctg

SEQ ID NO: 232390 - DNA, 15 bp, Homo sapiens
tcgagattcacacct

SEQ ID NO: 232391 - DNA, 15 bp, Homo sapiens
ttcgagattcacacc

SEQ ID NO: 232392 - DNA, 15 bp, Homo sapiens
cttcgagattcacac

SEQ ID NO: 232393 - DNA, 15 bp, Homo sapiens
gcttcgagattcaca

SEQ ID NO: 232394 - DNA, 15 bp, Homo sapiens
agcttcgagattcac

SEQ ID NO: 232395 - DNA, 15 bp, Homo sapiens
cagcttcgagattca

SEQ ID NO: 232396 - DNA, 15 bp, Homo sapiens
ccagcttcgagattc

SEQ ID NO: 232397 - DNA, 15 bp, Homo sapiens
cccagcttcgagatt

SEQ ID NO: 232398 - DNA, 15 bp, Homo sapiens
tcccagcttcgagat

SEQ ID NO: 232399 - DNA, 15 bp, Homo sapiens
gtcccagcttcgaga

SEQ ID NO: 232400 - DNA, 15 bp, Homo sapiens
tgtcccagcttcgag

SEQ ID NO: 232401 - DNA, 15 bp, Homo sapiens
atgtcccagcttcga

SEQ ID NO: 232402 - DNA, 15 bp, Homo sapiens
gatgtcccagcttcg

SEQ ID NO: 232403 - DNA, 15 bp, Homo sapiens
tgatgtcccagcttc

SEQ ID NO: 232404 - DNA, 15 bp, Homo sapiens
atgatgtcccagctt

SEQ ID NO: 232405 - DNA, 15 bp, Homo sapiens
catgatgtcccagct

SEQ ID NO: 232406 - DNA, 15 bp, Homo sapiens
tcatgatgtcccagc

SEQ ID NO: 232407 - DNA, 15 bp, Homo sapiens
ctcatgatgtcccag

SEQ ID NO: 232408 - DNA, 15 bp, Homo sapiens
actcatgatgtccca

SEQ ID NO: 232409 - DNA, 15 bp, Homo sapiens
tactcatgatgtccc

SEQ ID NO: 232410 - DNA, 15 bp, Homo sapiens
ttactcatgatgtcc

SEQ ID NO: 232411 - DNA, 15 bp, Homo sapiens
cttactcatgatgtc

SEQ ID NO: 232412 - DNA, 15 bp, Homo sapiens
ccttactcatgatgt

SEQ ID NO: 232413 - DNA, 15 bp, Homo sapiens
accttactcatgatg

SEQ ID NO: 232414 - DNA, 15 bp, Homo sapiens
gaccttactcatgat

SEQ ID NO: 232415 - DNA, 15 bp, Homo sapiens
ggaccttactcatga

SEQ ID NO: 232416 - DNA, 15 bp, Homo sapiens
tggaccttactcatg

SEQ ID NO: 232417 - DNA, 15 bp, Homo sapiens
ctggaccttactcat

SEQ ID NO: 232418 - DNA, 15 bp, Homo sapiens
gctggaccttactca

SEQ ID NO: 232419 - DNA, 15 bp, Homo sapiens
agctggaccttactc

SEQ ID NO: 232420 - DNA, 15 bp, Homo sapiens
cagctggaccttact

SEQ ID NO: 232421 - DNA, 15 bp, Homo sapiens
ccagctggaccttac

SEQ ID NO: 232422 - DNA, 15 bp, Homo sapiens
cccagctggacctta

SEQ ID NO: 232423 - DNA, 15 bp, Homo sapiens
ccccagctggacctt

SEQ ID NO: 232424 - DNA, 15 bp, Homo sapiens
tccccagctggacct

SEQ ID NO: 232425 - DNA, 15 bp, Homo sapiens
ttccccagctggacc

SEQ ID NO: 232426 - DNA, 15 bp, Homo sapiens
cttccccagctggac

SEQ ID NO: 232427 - DNA, 15 bp, Homo sapiens
tcttccccagctgga

SEQ ID NO: 232428 - DNA, 15 bp, Homo sapiens
ttcttccccagctgg

SEQ ID NO: 232429 - DNA, 15 bp, Homo sapiens
attcttccccagctg

SEQ ID NO: 232430 - DNA, 15 bp, Homo sapiens
aattcttccccagct

SEQ ID NO: 232431 - DNA, 15 bp, Homo sapiens
aaattcttccccagc

SEQ ID NO: 232432 - DNA, 15 bp, Homo sapiens
caaattcttccccag

SEQ ID NO: 232433 - DNA, 15 bp, Homo sapiens
gcaaattcttcccca

SEQ ID NO: 232434 - DNA, 15 bp, Homo sapiens
ggcaaattcttcccc

SEQ ID NO: 232435 - DNA, 15 bp, Homo sapiens
tggcaaattcttccc

SEQ ID NO: 232436 - DNA, 15 bp, Homo sapiens
ttggcaaattcttcc

SEQ ID NO: 232437 - DNA, 15 bp, Homo sapiens
attggcaaattcttc

SEQ ID NO: 232438 - DNA, 15 bp, Homo sapiens
tattggcaaattctt

SEQ ID NO: 232439 - DNA, 15 bp, Homo sapiens
gtattggcaaattct

SEQ ID NO: 232440 - DNA, 15 bp, Homo sapiens
tgtattggcaaattc

SEQ ID NO: 232441 - DNA, 15 bp, Homo sapiens
ttgtattggcaaatt

SEQ ID NO: 232442 - DNA, 15 bp, Homo sapiens
gttgtattggcaaat

SEQ ID NO: 232443 - DNA, 15 bp, Homo sapiens
ggttgtattggcaaa

SEQ ID NO: 232444 - DNA, 15 bp, Homo sapiens
aggttgtattggcaa

SEQ ID NO: 232445 - DNA, 15 bp, Homo sapiens
gaggttgtattggca

SEQ ID NO: 232446 - DNA, 15 bp, Homo sapiens
tgaggttgtattggc

SEQ ID NO: 232447 - DNA, 15 bp, Homo sapiens
ctgaggttgtattgg

SEQ ID NO: 232448 - DNA, 15 bp, Homo sapiens
tctgaggttgtattg

SEQ ID NO: 232449 - DNA, 15 bp, Homo sapiens
ttctgaggttgtatt

SEQ ID NO: 232450 - DNA, 15 bp, Homo sapiens
attctgaggttgtat

SEQ ID NO: 232451 - DNA, 15 bp, Homo sapiens
tattctgaggttgta

SEQ ID NO: 232452 - DNA, 15 bp, Homo sapiens
atattctgaggttgt

SEQ ID NO: 232453 - DNA, 15 bp, Homo sapiens
gatattctgaggttg

SEQ ID NO: 232454 - DNA, 15 bp, Homo sapiens
agatattctgaggtt

SEQ ID NO: 232455 - DNA, 15 bp, Homo sapiens
cagatattctgaggt

SEQ ID NO: 232456 - DNA, 15 bp, Homo sapiens
acagatattctgagg

SEQ ID NO: 232457 - DNA, 15 bp, Homo sapiens
tacagatattctgag

SEQ ID NO: 232458 - DNA, 15 bp, Homo sapiens
ctacagatattctga

SEQ ID NO: 232459 - DNA, 15 bp, Homo sapiens
cctacagatattctg

SEQ ID NO: 232460 - DNA, 15 bp, Homo sapiens
tcctacagatattct

SEQ ID NO: 232461 - DNA, 15 bp, Homo sapiens
atcctacagatattc

SEQ ID NO: 232462 - DNA, 15 bp, Homo sapiens
gatcctacagatatt

SEQ ID NO: 232463 - DNA, 15 bp, Homo sapiens
agatcctacagatat

SEQ ID NO: 232464 - DNA, 15 bp, Homo sapiens
gagatcctacagata

SEQ ID NO: 232465 - DNA, 15 bp, Homo sapiens
ggagatcctacagat

SEQ ID NO: 232466 - DNA, 15 bp, Homo sapiens
gggagatcctacaga

SEQ ID NO: 232467 - DNA, 15 bp, Homo sapiens
tgggagatcctacag

SEQ ID NO: 232468 - DNA, 15 bp, Homo sapiens
ctgggagatcctaca

SEQ ID NO: 232469 - DNA, 15 bp, Homo sapiens
tctgggagatcctac

SEQ ID NO: 232470 - DNA, 15 bp, Homo sapiens
gtctgggagatccta

SEQ ID NO: 232471 - DNA, 15 bp, Homo sapiens
cgtctgggagatcct

SEQ ID NO: 232472 - DNA, 15 bp, Homo sapiens
tcgtctgggagatcc

SEQ ID NO: 232473 - DNA, 15 bp, Homo sapiens
ctcgtctgggagatc

SEQ ID NO: 232474 - DNA, 15 bp, Homo sapiens
gctcgtctgggagat

SEQ ID NO: 232475 - DNA, 15 bp, Homo sapiens
tgctcgtctgggaga

SEQ ID NO: 232476 - DNA, 15 bp, Homo sapiens
gtgctcgtctgggag

SEQ ID NO: 232477 - DNA, 15 bp, Homo sapiens
tgtgctcgtctggga

SEQ ID NO: 232478 - DNA, 15 bp, Homo sapiens
atgtgctcgtctggg

SEQ ID NO: 232479 - DNA, 15 bp, Homo sapiens
gatgtgctcgtctgg

SEQ ID NO: 232480 - DNA, 15 bp, Homo sapiens
ggatgtgctcgtctg

SEQ ID NO: 232481 - DNA, 15 bp, Homo sapiens
cggatgtgctcgtct

SEQ ID NO: 232482 - DNA, 15 bp, Homo sapiens
acggatgtgctcgtc

SEQ ID NO: 232483 - DNA, 15 bp, Homo sapiens
aacggatgtgctcgt

SEQ ID NO: 232484 - DNA, 15 bp, Homo sapiens
taacggatgtgctcg

SEQ ID NO: 232485 - DNA, 15 bp, Homo sapiens
ataacggatgtgctc

SEQ ID NO: 232486 - DNA, 15 bp, Homo sapiens
aataacggatgtgct

SEQ ID NO: 232487 - DNA, 15 bp, Homo sapiens
gaataacggatgtgc

SEQ ID NO: 232488 - DNA, 15 bp, Homo sapiens
tgaataacggatgtg

SEQ ID NO: 232489 - DNA, 15 bp, Homo sapiens
gtgaataacggatgt

SEQ ID NO: 232490 - DNA, 15 bp, Homo sapiens
agtgaataacggatg

SEQ ID NO: 232491 - DNA, 15 bp, Homo sapiens
tagtgaataacggat

SEQ ID NO: 232492 - DNA, 15 bp, Homo sapiens
ttagtgaataacgga

SEQ ID NO: 232493 - DNA, 15 bp, Homo sapiens
cttagtgaataacgg

SEQ ID NO: 232494 - DNA, 15 bp, Homo sapiens
acttagtgaataacg

SEQ ID NO: 232495 - DNA, 15 bp, Homo sapiens
cacttagtgaataac

SEQ ID NO: 232496 - DNA, 15 bp, Homo sapiens
acacttagtgaataa

SEQ ID NO: 232497 - DNA, 15 bp, Homo sapiens
aacacttagtgaata

SEQ ID NO: 232498 - DNA, 15 bp, Homo sapiens
aaacacttagtgaat

SEQ ID NO: 232499 - DNA, 15 bp, Homo sapiens
taaacacttagtgaa

SEQ ID NO: 232500 - DNA, 15 bp, Homo sapiens
gtaaacacttagtga

SEQ ID NO: 232501 - DNA, 15 bp, Homo sapiens
agtaaacacttagtg

SEQ ID NO: 232502 - DNA, 15 bp, Homo sapiens
cagtaaacacttagt

SEQ ID NO: 232503 - DNA, 15 bp, Homo sapiens
gcagtaaacacttag

SEQ ID NO: 232504 - DNA, 15 bp, Homo sapiens
agcagtaaacactta

SEQ ID NO: 232505 - DNA, 15 bp, Homo sapiens
gagcagtaaacactt

SEQ ID NO: 232506 - DNA, 15 bp, Homo sapiens
tgagcagtaaacact

SEQ ID NO: 232507 - DNA, 15 bp, Homo sapiens
atgagcagtaaacac

SEQ ID NO: 232508 - DNA, 15 bp, Homo sapiens
gatgagcagtaaaca

SEQ ID NO: 232509 - DNA, 15 bp, Homo sapiens
agatgagcagtaaac

SEQ ID NO: 232510 - DNA, 15 bp, Homo sapiens
cagatgagcagtaaa

SEQ ID NO: 232511 - DNA, 15 bp, Homo sapiens
acagatgagcagtaa

SEQ ID NO: 232512 - DNA, 15 bp, Homo sapiens
tacagatgagcagta

SEQ ID NO: 232513 - DNA, 15 bp, Homo sapiens
gtacagatgagcagt

SEQ ID NO: 232514 - DNA, 15 bp, Homo sapiens
ggtacagatgagcag

SEQ ID NO: 232515 - DNA, 15 bp, Homo sapiens
aggtacagatgagca

SEQ ID NO: 232516 - DNA, 15 bp, Homo sapiens
caggtacagatgagc

SEQ ID NO: 232517 - DNA, 15 bp, Homo sapiens
ccaggtacagatgag

SEQ ID NO: 232518 - DNA, 15 bp, Homo sapiens
gccaggtacagatga

SEQ ID NO: 232519 - DNA, 15 bp, Homo sapiens
tgccaggtacagatg

SEQ ID NO: 232520 - DNA, 15 bp, Homo sapiens
gtgccaggtacagat

SEQ ID NO: 232521 - DNA, 15 bp, Homo sapiens
agtgccaggtacaga

SEQ ID NO: 232522 - DNA, 15 bp, Homo sapiens
cagtgccaggtacag

SEQ ID NO: 232523 - DNA, 15 bp, Homo sapiens
acagtgccaggtaca

SEQ ID NO: 232524 - DNA, 15 bp, Homo sapiens
aacagtgccaggtac

SEQ ID NO: 232525 - DNA, 15 bp, Homo sapiens
gaacagtgccaggta

SEQ ID NO: 232526 - DNA, 15 bp, Homo sapiens
tgaacagtgccaggt

SEQ ID NO: 232527 - DNA, 15 bp, Homo sapiens
ttgaacagtgccagg

SEQ ID NO: 232528 - DNA, 15 bp, Homo sapiens
cttgaacagtgccag

SEQ ID NO: 232529 - DNA, 15 bp, Homo sapiens
ccttgaacagtgcca

SEQ ID NO: 232530 - DNA, 15 bp, Homo sapiens
gccttgaacagtgcc

SEQ ID NO: 232531 - DNA, 15 bp, Homo sapiens
tgccttgaacagtgc

SEQ ID NO: 232532 - DNA, 15 bp, Homo sapiens
gtgccttgaacagtg

SEQ ID NO: 232533 - DNA, 15 bp, Homo sapiens
agtgccttgaacagt

SEQ ID NO: 232534 - DNA, 15 bp, Homo sapiens
cagtgccttgaacag

SEQ ID NO: 232535 - DNA, 15 bp, Homo sapiens
ccagtgccttgaaca

SEQ ID NO: 232536 - DNA, 15 bp, Homo sapiens
cccagtgccttgaac

SEQ ID NO: 232537 - DNA, 15 bp, Homo sapiens
gcccagtgccttgaa

SEQ ID NO: 232538 - DNA, 15 bp, Homo sapiens
tgcccagtgccttga

SEQ ID NO: 232539 - DNA, 15 bp, Homo sapiens
atgcccagtgccttg

SEQ ID NO: 232540 - DNA, 15 bp, Homo sapiens
tatgcccagtgcctt

SEQ ID NO: 232541 - DNA, 15 bp, Homo sapiens
ttatgcccagtgcct

SEQ ID NO: 232542 - DNA, 15 bp, Homo sapiens
tttatgcccagtgcc

SEQ ID NO: 232543 - DNA, 15 bp, Homo sapiens
ctttatgcccagtgc

SEQ ID NO: 232544 - DNA, 15 bp, Homo sapiens
gctttatgcccagtg

SEQ ID NO: 232545 - DNA, 15 bp, Homo sapiens
tgctttatgcccagt

SEQ ID NO: 232546 - DNA, 15 bp, Homo sapiens
ctgctttatgcccag

SEQ ID NO: 232547 - DNA, 15 bp, Homo sapiens
actgctttatgccca

SEQ ID NO: 232548 - DNA, 15 bp, Homo sapiens
cactgctttatgccc

SEQ ID NO: 232549 - DNA, 15 bp, Homo sapiens
tcactgctttatgcc

SEQ ID NO: 232550 - DNA, 15 bp, Homo sapiens
ctcactgctttatgc

SEQ ID NO: 232551 - DNA, 15 bp, Homo sapiens
gctcactgctttatg

SEQ ID NO: 232552 - DNA, 15 bp, Homo sapiens
tgctcactgctttat

SEQ ID NO: 232553 - DNA, 15 bp, Homo sapiens
ttgctcactgcttta

SEQ ID NO: 232554 - DNA, 15 bp, Homo sapiens
gttgctcactgcttt

SEQ ID NO: 232555 - DNA, 15 bp, Homo sapiens
tgttgctcactgctt

SEQ ID NO: 232556 - DNA, 15 bp, Homo sapiens
ctgttgctcactgct

SEQ ID NO: 232557 - DNA, 15 bp, Homo sapiens
tctgttgctcactgc

SEQ ID NO: 232558 - DNA, 15 bp, Homo sapiens
ctctgttgctcactg

SEQ ID NO: 232559 - DNA, 15 bp, Homo sapiens
tctctgttgctcact

SEQ ID NO: 232560 - DNA, 15 bp, Homo sapiens
atctctgttgctcac

SEQ ID NO: 232561 - DNA, 15 bp, Homo sapiens
gatctctgttgctca

SEQ ID NO: 232562 - DNA, 15 bp, Homo sapiens
ggatctctgttgctc

SEQ ID NO: 232563 - DNA, 15 bp, Homo sapiens
tggatctctgttgct

SEQ ID NO: 232564 - DNA, 15 bp, Homo sapiens
ctggatctctgttgc

SEQ ID NO: 232565 - DNA, 15 bp, Homo sapiens
cctggatctctgttg

SEQ ID NO: 232566 - DNA, 15 bp, Homo sapiens
acctggatctctgtt

SEQ ID NO: 232567 - DNA, 15 bp, Homo sapiens
cacctggatctctgt

SEQ ID NO: 232568 - DNA, 15 bp, Homo sapiens
acacctggatctctg

SEQ ID NO: 232569 - DNA, 15 bp, Homo sapiens
cacacctggatctct

SEQ ID NO: 232570 - DNA, 15 bp, Homo sapiens
tcacacctggatctc

SEQ ID NO: 232571 - DNA, 15 bp, Homo sapiens
ttcacacctggatct

SEQ ID NO: 232572 - DNA, 15 bp, Homo sapiens
attcacacctggatc

SEQ ID NO: 232573 - DNA, 15 bp, Homo sapiens
aattcacacctggat

SEQ ID NO: 232574 - DNA, 15 bp, Homo sapiens
taattcacacctgga

SEQ ID NO: 232575 - DNA, 15 bp, Homo sapiens
ataattcacacctgg

SEQ ID NO: 232576 - DNA, 15 bp, Homo sapiens
aataattcacacctg

SEQ ID NO: 232577 - DNA, 15 bp, Homo sapiens
aaataattcacacct

SEQ ID NO: 232578 - DNA, 15 bp, Homo sapiens
taaataattcacacc

SEQ ID NO: 232579 - DNA, 15 bp, Homo sapiens
ataaataattcacac

SEQ ID NO: 232580 - DNA, 15 bp, Homo sapiens
tataaataattcaca

SEQ ID NO: 232581 - DNA, 15 bp, Homo sapiens
atataaataattcac

SEQ ID NO: 232582 - DNA, 15 bp, Homo sapiens
aatataaataattca

SEQ ID NO: 232583 - DNA, 15 bp, Homo sapiens
caatataaataattc

SEQ ID NO: 232584 - DNA, 15 bp, Homo sapiens
tcaatataaataatt

SEQ ID NO: 232585 - DNA, 15 bp, Homo sapiens
atcaatataaataat

SEQ ID NO: 232586 - DNA, 15 bp, Homo sapiens
tatcaatataaataa

SEQ ID NO: 232587 - DNA, 15 bp, Homo sapiens
ttatcaatataaata

SEQ ID NO: 232588 - DNA, 15 bp, Homo sapiens
tttatcaatataaat

SEQ ID NO: 232589 - DNA, 15 bp, Homo sapiens
gtttatcaatataaa

SEQ ID NO: 232590 - DNA, 15 bp, Homo sapiens
agtttatcaatataa

SEQ ID NO: 232591 - DNA, 15 bp, Homo sapiens
tagtttatcaatata

SEQ ID NO: 232592 - DNA, 15 bp, Homo sapiens
ctagtttatcaatat

SEQ ID NO: 232593 - DNA, 15 bp, Homo sapiens
tctagtttatcaata

SEQ ID NO: 232594 - DNA, 15 bp, Homo sapiens
atctagtttatcaat

SEQ ID NO: 232595 - DNA, 15 bp, Homo sapiens
tatctagtttatcaa

SEQ ID NO: 232596 - DNA, 15 bp, Homo sapiens
atatctagtttatca

SEQ ID NO: 232597 - DNA, 15 bp, Homo sapiens
tatatctagtttatc

SEQ ID NO: 232598 - DNA, 15 bp, Homo sapiens
ttatatctagtttat

SEQ ID NO: 232599 - DNA, 15 bp, Homo sapiens
cttatatctagttta

SEQ ID NO: 232600 - DNA, 15 bp, Homo sapiens
ccttatatctagttt

SEQ ID NO: 232601 - DNA, 15 bp, Homo sapiens
tccttatatctagtt

SEQ ID NO: 232602 - DNA, 15 bp, Homo sapiens
atccttatatctagt

SEQ ID NO: 232603 - DNA, 15 bp, Homo sapiens
catccttatatctag

SEQ ID NO: 232604 - DNA, 15 bp, Homo sapiens
gcatccttatatcta

SEQ ID NO: 232605 - DNA, 15 bp, Homo sapiens
tgcatccttatatct

SEQ ID NO: 232606 - DNA, 15 bp, Homo sapiens
ctgcatccttatatc

SEQ ID NO: 232607 - DNA, 15 bp, Homo sapiens
tctgcatccttatat

SEQ ID NO: 232608 - DNA, 15 bp, Homo sapiens
ctctgcatccttata

SEQ ID NO: 232609 - DNA, 15 bp, Homo sapiens
gctctgcatccttat

SEQ ID NO: 232610 - DNA, 15 bp, Homo sapiens
agctctgcatcctta

SEQ ID NO: 232611 - DNA, 15 bp, Homo sapiens
gagctctgcatcctt

SEQ ID NO: 232612 - DNA, 15 bp, Homo sapiens
tgagctctgcatcct

SEQ ID NO: 232613 - DNA, 15 bp, Homo sapiens
ttgagctctgcatcc

SEQ ID NO: 232614 - DNA, 15 bp, Homo sapiens
attgagctctgcatc

SEQ ID NO: 232615 - DNA, 15 bp, Homo sapiens
aattgagctctgcat

SEQ ID NO: 232616 - DNA, 15 bp, Homo sapiens
aaattgagctctgca

SEQ ID NO: 232617 - DNA, 15 bp, Homo sapiens
taaattgagctctgc

SEQ ID NO: 232618 - DNA, 15 bp, Homo sapiens
ttaaattgagctctg

SEQ ID NO: 232619 - DNA, 15 bp, Homo sapiens
cttaaattgagctct

SEQ ID NO: 232620 - DNA, 15 bp, Homo sapiens
tcttaaattgagctc

SEQ ID NO: 232621 - DNA, 15 bp, Homo sapiens
ttcttaaattgagct

SEQ ID NO: 232622 - DNA, 15 bp, Homo sapiens
tttcttaaattgagc

SEQ ID NO: 232623 - DNA, 15 bp, Homo sapiens
atttcttaaattgag

SEQ ID NO: 232624 - DNA, 15 bp, Homo sapiens
catttcttaaattga

SEQ ID NO: 232625 - DNA, 15 bp, Homo sapiens
tcatttcttaaattg

SEQ ID NO: 232626 - DNA, 15 bp, Homo sapiens
gtcatttcttaaatt

SEQ ID NO: 232627 - DNA, 15 bp, Homo sapiens
tgtcatttcttaaat

SEQ ID NO: 232628 - DNA, 15 bp, Homo sapiens
ttgtcatttcttaaa

SEQ ID NO: 232629 - DNA, 15 bp, Homo sapiens
tttgtcatttcttaa

SEQ ID NO: 232630 - DNA, 15 bp, Homo sapiens
atttgtcatttctta

SEQ ID NO: 232631 - DNA, 15 bp, Homo sapiens
catttgtcatttctt

SEQ ID NO: 232632 - DNA, 15 bp, Homo sapiens
tcatttgtcatttct

SEQ ID NO: 232633 - DNA, 15 bp, Homo sapiens
atcatttgtcatttc

SEQ ID NO: 232634 - DNA, 15 bp, Homo sapiens
tatcatttgtcattt

SEQ ID NO: 232635 - DNA, 15 bp, Homo sapiens
ttatcatttgtcatt

SEQ ID NO: 232636 - DNA, 15 bp, Homo sapiens
attatcatttgtcat

SEQ ID NO: 232637 - DNA, 15 bp, Homo sapiens
aattatcatttgtca

SEQ ID NO: 232638 - DNA, 15 bp, Homo sapiens
caattatcatttgtc

SEQ ID NO: 232639 - DNA, 15 bp, Homo sapiens
gcaattatcatttgt

SEQ ID NO: 232640 - DNA, 15 bp, Homo sapiens
ggcaattatcatttg

SEQ ID NO: 232641 - DNA, 15 bp, Homo sapiens
tggcaattatcattt

SEQ ID NO: 232642 - DNA, 15 bp, Homo sapiens
atggcaattatcatt

SEQ ID NO: 232643 - DNA, 15 bp, Homo sapiens
aatggcaattatcat

SEQ ID NO: 232644 - DNA, 15 bp, Homo sapiens
gaatggcaattatca

SEQ ID NO: 232645 - DNA, 15 bp, Homo sapiens
tgaatggcaattatc

SEQ ID NO: 232646 - DNA, 15 bp, Homo sapiens
gtgaatggcaattat

SEQ ID NO: 232647 - DNA, 15 bp, Homo sapiens
ggtgaatggcaatta

SEQ ID NO: 232648 - DNA, 15 bp, Homo sapiens
tggtgaatggcaatt

SEQ ID NO: 232649 - DNA, 15 bp, Homo sapiens
ctggtgaatggcaat

SEQ ID NO: 232650 - DNA, 15 bp, Homo sapiens
actggtgaatggcaa

SEQ ID NO: 232651 - DNA, 15 bp, Homo sapiens
cactggtgaatggca

SEQ ID NO: 232652 - DNA, 15 bp, Homo sapiens
gcactggtgaatggc

SEQ ID NO: 232653 - DNA, 15 bp, Homo sapiens
agcactggtgaatgg

SEQ ID NO: 232654 - DNA, 15 bp, Homo sapiens
aagcactggtgaatg

SEQ ID NO: 232655 - DNA, 15 bp, Homo sapiens
aaagcactggtgaat

SEQ ID NO: 232656 - DNA, 15 bp, Homo sapiens
aaaagcactggtgaa

SEQ ID NO: 232657 - DNA, 15 bp, Homo sapiens
aaaaagcactggtga

SEQ ID NO: 232658 - DNA, 15 bp, Homo sapiens
taaaaagcactggtg

SEQ ID NO: 232659 - DNA, 15 bp, Homo sapiens
ataaaaagcactggt

SEQ ID NO: 232660 - DNA, 15 bp, Homo sapiens
tataaaaagcactgg

SEQ ID NO: 232661 - DNA, 15 bp, Homo sapiens
ctataaaaagcactg

SEQ ID NO: 232662 - DNA, 15 bp, Homo sapiens
actataaaaagcact

SEQ ID NO: 232663 - DNA, 15 bp, Homo sapiens
gactataaaaagcac

SEQ ID NO: 232664 - DNA, 15 bp, Homo sapiens
tgactataaaaagca

SEQ ID NO: 232665 - DNA, 15 bp, Homo sapiens
ttgactataaaaagc

SEQ ID NO: 232666 - DNA, 15 bp, Homo sapiens
gttgactataaaaag

SEQ ID NO: 232667 - DNA, 15 bp, Homo sapiens
cgttgactataaaaa

SEQ ID NO: 232668 - DNA, 15 bp, Homo sapiens
gcgttgactataaaa

SEQ ID NO: 232669 - DNA, 15 bp, Homo sapiens
ggcgttgactataaa

SEQ ID NO: 232670 - DNA, 15 bp, Homo sapiens
aggcgttgactataa

SEQ ID NO: 232671 - DNA, 15 bp, Homo sapiens
caggcgttgactata

SEQ ID NO: 232672 - DNA, 15 bp, Homo sapiens
ccaggcgttgactat

SEQ ID NO: 232673 - DNA, 15 bp, Homo sapiens
tccaggcgttgacta

SEQ ID NO: 232674 - DNA, 15 bp, Homo sapiens
ctccaggcgttgact

SEQ ID NO: 232675 - DNA, 15 bp, Homo sapiens
gctccaggcgttgac

SEQ ID NO: 232676 - DNA, 15 bp, Homo sapiens
ggctccaggcgttga

SEQ ID NO: 232677 - DNA, 15 bp, Homo sapiens
aggctccaggcgttg

SEQ ID NO: 232678 - DNA, 15 bp, Homo sapiens
caggctccaggcgtt

SEQ ID NO: 232679 - DNA, 15 bp, Homo sapiens
tcaggctccaggcgt

SEQ ID NO: 232680 - DNA, 15 bp, Homo sapiens
atcaggctccaggcg

SEQ ID NO: 232681 - DNA, 15 bp, Homo sapiens
aatcaggctccaggc

SEQ ID NO: 232682 - DNA, 15 bp, Homo sapiens
taatcaggctccagg

SEQ ID NO: 232683 - DNA, 15 bp, Homo sapiens
ataatcaggctccag

SEQ ID NO: 232684 - DNA, 15 bp, Homo sapiens
gataatcaggctcca

SEQ ID NO: 232685 - DNA, 15 bp, Homo sapiens
ggataatcaggctcc

SEQ ID NO: 232686 - DNA, 15 bp, Homo sapiens
tggataatcaggctc

SEQ ID NO: 232687 - DNA, 15 bp, Homo sapiens
gtggataatcaggct

SEQ ID NO: 232688 - DNA, 15 bp, Homo sapiens
tgtggataatcaggc

SEQ ID NO: 232689 - DNA, 15 bp, Homo sapiens
atgtggataatcagg

SEQ ID NO: 232690 - DNA, 15 bp, Homo sapiens
catgtggataatcag

SEQ ID NO: 232691 - DNA, 15 bp, Homo sapiens
tcatgtggataatca

SEQ ID NO: 232692 - DNA, 15 bp, Homo sapiens
atcatgtggataatc

SEQ ID NO: 232693 - DNA, 15 bp, Homo sapiens
tatcatgtggataat

SEQ ID NO: 232694 - DNA, 15 bp, Homo sapiens
ttatcatgtggataa

SEQ ID NO: 232695 - DNA, 15 bp, Homo sapiens
tttatcatgtggata

SEQ ID NO: 232696 - DNA, 15 bp, Homo sapiens
ttttatcatgtggat

SEQ ID NO: 232697 - DNA, 15 bp, Homo sapiens
tttttatcatgtgga

SEQ ID NO: 232698 - DNA, 15 bp, Homo sapiens
atttttatcatgtgg

SEQ ID NO: 232699 - DNA, 15 bp, Homo sapiens
aatttttatcatgtg

SEQ ID NO: 232700 - DNA, 15 bp, Homo sapiens
gaatttttatcatgt

SEQ ID NO: 232701 - DNA, 15 bp, Homo sapiens
ggaatttttatcatg

SEQ ID NO: 232702 - DNA, 15 bp, Homo sapiens
aggaatttttatcat

SEQ ID NO: 232703 - DNA, 15 bp, Homo sapiens
aaggaatttttatca

SEQ ID NO: 232704 - DNA, 15 bp, Homo sapiens
caaggaatttttatc

SEQ ID NO: 232705 - DNA, 15 bp, Homo sapiens
tcaaggaatttttat

SEQ ID NO: 232706 - DNA, 15 bp, Homo sapiens
gtcaaggaattttta

SEQ ID NO: 232707 - DNA, 15 bp, Homo sapiens
ggtcaaggaattttt

SEQ ID NO: 232708 - DNA, 15 bp, Homo sapiens
gggtcaaggaatttt

SEQ ID NO: 232709 - DNA, 15 bp, Homo sapiens
ggggtcaaggaattt

SEQ ID NO: 232710 - DNA, 15 bp, Homo sapiens
gggggtcaaggaatt

SEQ ID NO: 232711 - DNA, 15 bp, Homo sapiens
ggggggtcaaggaat

SEQ ID NO: 232712 - DNA, 15 bp, Homo sapiens
cggggggtcaaggaa

SEQ ID NO: 232713 - DNA, 15 bp, Homo sapiens
ccggggggtcaagga

SEQ ID NO: 232714 - DNA, 15 bp, Homo sapiens
gccggggggtcaagg

SEQ ID NO: 232715 - DNA, 15 bp, Homo sapiens
agccggggggtcaag

SEQ ID NO: 232716 - DNA, 15 bp, Homo sapiens
gagccggggggtcaa

SEQ ID NO: 232717 - DNA, 15 bp, Homo sapiens
ggagccggggggtca

SEQ ID NO: 232718 - DNA, 15 bp, Homo sapiens
tggagccggggggtc

SEQ ID NO: 232719 - DNA, 15 bp, Homo sapiens
ctggagccggggggt

SEQ ID NO: 232720 - DNA, 15 bp, Homo sapiens
tctggagccgggggg

SEQ ID NO: 232721 - DNA, 15 bp, Homo sapiens
atctggagccggggg

SEQ ID NO: 232722 - DNA, 15 bp, Homo sapiens
gatctggagccgggg

SEQ ID NO: 232723 - DNA, 15 bp, Homo sapiens
agatctggagccggg

SEQ ID NO: 232724 - DNA, 15 bp, Homo sapiens
gagatctggagccgg

SEQ ID NO: 232725 - DNA, 15 bp, Homo sapiens
tgagatctggagccg

SEQ ID NO: 232726 - DNA, 15 bp, Homo sapiens
ctgagatctggagcc

SEQ ID NO: 232727 - DNA, 15 bp, Homo sapiens
tctgagatctggagc

SEQ ID NO: 232728 - DNA, 15 bp, Homo sapiens
ttctgagatctggag

SEQ ID NO: 232729 - DNA, 15 bp, Homo sapiens
attctgagatctgga

SEQ ID NO: 232730 - DNA, 15 bp, Homo sapiens
tattctgagatctgg

SEQ ID NO: 232731 - DNA, 15 bp, Homo sapiens
ctattctgagatctg

SEQ ID NO: 232732 - DNA, 15 bp, Homo sapiens
gctattctgagatct

SEQ ID NO: 232733 - DNA, 15 bp, Homo sapiens
ggctattctgagatc

SEQ ID NO: 232734 - DNA, 15 bp, Homo sapiens
aggctattctgagat

SEQ ID NO: 232735 - DNA, 15 bp, Homo sapiens
caggctattctgaga

SEQ ID NO: 232736 - DNA, 15 bp, Homo sapiens
acaggctattctgag

SEQ ID NO: 232737 - DNA, 15 bp, Homo sapiens
gacaggctattctga

SEQ ID NO: 232738 - DNA, 15 bp, Homo sapiens
agacaggctattctg

SEQ ID NO: 232739 - DNA, 15 bp, Homo sapiens
aagacaggctattct

SEQ ID NO: 232740 - DNA, 15 bp, Homo sapiens
aaagacaggctattc

SEQ ID NO: 232741 - DNA, 15 bp, Homo sapiens
caaagacaggctatt

SEQ ID NO: 232742 - DNA, 15 bp, Homo sapiens
gcaaagacaggctat

SEQ ID NO: 232743 - DNA, 15 bp, Homo sapiens
ggcaaagacaggcta

SEQ ID NO: 232744 - DNA, 15 bp, Homo sapiens
aggcaaagacaggct

SEQ ID NO: 232745 - DNA, 15 bp, Homo sapiens
gaggcaaagacaggc

SEQ ID NO: 232746 - DNA, 15 bp, Homo sapiens
ggaggcaaagacagg

SEQ ID NO: 232747 - DNA, 15 bp, Homo sapiens
aggaggcaaagacag

SEQ ID NO: 232748 - DNA, 15 bp, Homo sapiens
gaggaggcaaagaca

SEQ ID NO: 232749 - DNA, 15 bp, Homo sapiens
agaggaggcaaagac

SEQ ID NO: 232750 - DNA, 15 bp, Homo sapiens
gagaggaggcaaaga

SEQ ID NO: 232751 - DNA, 15 bp, Homo sapiens
agagaggaggcaaag

SEQ ID NO: 232752 - DNA, 15 bp, Homo sapiens
gagagaggaggcaaa

SEQ ID NO: 232753 - DNA, 15 bp, Homo sapiens
tgagagaggaggcaa

SEQ ID NO: 232754 - DNA, 15 bp, Homo sapiens
gtgagagaggaggca

SEQ ID NO: 232755 - DNA, 15 bp, Homo sapiens
ggtgagagaggaggc

SEQ ID NO: 232756 - DNA, 15 bp, Homo sapiens
gggtgagagaggagg

SEQ ID NO: 232757 - DNA, 15 bp, Homo sapiens
agggtgagagaggag

SEQ ID NO: 232758 - DNA, 15 bp, Homo sapiens
cagggtgagagagga

SEQ ID NO: 232759 - DNA, 15 bp, Homo sapiens
ccagggtgagagagg

SEQ ID NO: 232760 - DNA, 15 bp, Homo sapiens
gccagggtgagagag

SEQ ID NO: 232761 - DNA, 15 bp, Homo sapiens
tgccagggtgagaga

SEQ ID NO: 232762 - DNA, 15 bp, Homo sapiens
gtgccagggtgagag

SEQ ID NO: 232763 - DNA, 15 bp, Homo sapiens
agtgccagggtgaga

SEQ ID NO: 232764 - DNA, 15 bp, Homo sapiens
gagtgccagggtgag

SEQ ID NO: 232765 - DNA, 15 bp, Homo sapiens
tgagtgccagggtga

SEQ ID NO: 232766 - DNA, 15 bp, Homo sapiens
ctgagtgccagggtg

SEQ ID NO: 232767 - DNA, 15 bp, Homo sapiens
cctgagtgccagggt

SEQ ID NO: 232768 - DNA, 15 bp, Homo sapiens
gcctgagtgccaggg

SEQ ID NO: 232769 - DNA, 15 bp, Homo sapiens
agcctgagtgccagg

SEQ ID NO: 232770 - DNA, 15 bp, Homo sapiens
gagcctgagtgccag

SEQ ID NO: 232771 - DNA, 15 bp, Homo sapiens
tgagcctgagtgcca

SEQ ID NO: 232772 - DNA, 15 bp, Homo sapiens
ttgagcctgagtgcc

SEQ ID NO: 232773 - DNA, 15 bp, Homo sapiens
gttgagcctgagtgc

SEQ ID NO: 232774 - DNA, 15 bp, Homo sapiens
agttgagcctgagtg

SEQ ID NO: 232775 - DNA, 15 bp, Homo sapiens
cagttgagcctgagt

SEQ ID NO: 232776 - DNA, 15 bp, Homo sapiens
ccagttgagcctgag

SEQ ID NO: 232777 - DNA, 15 bp, Homo sapiens
gccagttgagcctga

SEQ ID NO: 232778 - DNA, 15 bp, Homo sapiens
ggccagttgagcctg

SEQ ID NO: 232779 - DNA, 15 bp, Homo sapiens
tggccagttgagcct

SEQ ID NO: 232780 - DNA, 15 bp, Homo sapiens
ttggccagttgagcc

SEQ ID NO: 232781 - DNA, 15 bp, Homo sapiens
tttggccagttgagc

SEQ ID NO: 232782 - DNA, 15 bp, Homo sapiens
ttttggccagttgag

SEQ ID NO: 232783 - DNA, 15 bp, Homo sapiens
tttttggccagttga

SEQ ID NO: 232784 - DNA, 15 bp, Homo sapiens
gtttttggccagttg

SEQ ID NO: 232785 - DNA, 15 bp, Homo sapiens
tgtttttggccagtt

SEQ ID NO: 232786 - DNA, 15 bp, Homo sapiens
ctgtttttggccagt

SEQ ID NO: 232787 - DNA, 15 bp, Homo sapiens
gctgtttttggccag

SEQ ID NO: 232788 - DNA, 15 bp, Homo sapiens
tgctgtttttggcca

SEQ ID NO: 232789 - DNA, 15 bp, Homo sapiens
ctgctgtttttggcc

SEQ ID NO: 232790 - DNA, 15 bp, Homo sapiens
cctgctgtttttggc

SEQ ID NO: 232791 - DNA, 15 bp, Homo sapiens
tcctgctgtttttgg

SEQ ID NO: 232792 - DNA, 15 bp, Homo sapiens
gtcctgctgtttttg

SEQ ID NO: 232793 - DNA, 15 bp, Homo sapiens
agtcctgctgttttt

SEQ ID NO: 232794 - DNA, 15 bp, Homo sapiens
cagtcctgctgtttt

SEQ ID NO: 232795 - DNA, 15 bp, Homo sapiens
ccagtcctgctgttt

SEQ ID NO: 232796 - DNA, 15 bp, Homo sapiens
tccagtcctgctgtt

SEQ ID NO: 232797 - DNA, 15 bp, Homo sapiens
gtccagtcctgctgt

SEQ ID NO: 232798 - DNA, 15 bp, Homo sapiens
tgtccagtcctgctg

SEQ ID NO: 232799 - DNA, 15 bp, Homo sapiens
ctgtccagtcctgct

SEQ ID NO: 232800 - DNA, 15 bp, Homo sapiens
tctgtccagtcctgc

SEQ ID NO: 232801 - DNA, 15 bp, Homo sapiens
ctctgtccagtcctg

SEQ ID NO: 232802 - DNA, 15 bp, Homo sapiens
gctctgtccagtcct

SEQ ID NO: 232803 - DNA, 15 bp, Homo sapiens
ggctctgtccagtcc

SEQ ID NO: 232804 - DNA, 15 bp, Homo sapiens
aggctctgtccagtc

SEQ ID NO: 232805 - DNA, 15 bp, Homo sapiens
aaggctctgtccagt

SEQ ID NO: 232806 - DNA, 15 bp, Homo sapiens
gaaggctctgtccag

SEQ ID NO: 232807 - DNA, 15 bp, Homo sapiens
agaaggctctgtcca

SEQ ID NO: 232808 - DNA, 15 bp, Homo sapiens
gagaaggctctgtcc

SEQ ID NO: 232809 - DNA, 15 bp, Homo sapiens
agagaaggctctgtc

SEQ ID NO: 232810 - DNA, 15 bp, Homo sapiens
aagagaaggctctgt

SEQ ID NO: 232811 - DNA, 15 bp, Homo sapiens
caagagaaggctctg

SEQ ID NO: 232812 - DNA, 15 bp, Homo sapiens
ccaagagaaggctct

SEQ ID NO: 232813 - DNA, 15 bp, Homo sapiens
tccaagagaaggctc

SEQ ID NO: 232814 - DNA, 15 bp, Homo sapiens
ctccaagagaaggct

SEQ ID NO: 232815 - DNA, 15 bp, Homo sapiens
gctccaagagaaggc

SEQ ID NO: 232816 - DNA, 15 bp, Homo sapiens
tgctccaagagaagg

SEQ ID NO: 232817 - DNA, 15 bp, Homo sapiens
gtgctccaagagaag

SEQ ID NO: 232818 - DNA, 15 bp, Homo sapiens
cgtgctccaagagaa

SEQ ID NO: 232819 - DNA, 15 bp, Homo sapiens
acgtgctccaagaga

SEQ ID NO: 232820 - DNA, 15 bp, Homo sapiens
cacgtgctccaagag

SEQ ID NO: 232821 - DNA, 15 bp, Homo sapiens
ccacgtgctccaaga

SEQ ID NO: 232822 - DNA, 15 bp, Homo sapiens
gccacgtgctccaag

SEQ ID NO: 232823 - DNA, 15 bp, Homo sapiens
agccacgtgctccaa

SEQ ID NO: 232824 - DNA, 15 bp, Homo sapiens
cagccacgtgctcca

SEQ ID NO: 232825 - DNA, 15 bp, Homo sapiens
tcagccacgtgctcc

SEQ ID NO: 232826 - DNA, 15 bp, Homo sapiens
ctcagccacgtgctc

SEQ ID NO: 232827 - DNA, 15 bp, Homo sapiens
cctcagccacgtgct

SEQ ID NO: 232828 - DNA, 15 bp, Homo sapiens
ccctcagccacgtgc

SEQ ID NO: 232829 - DNA, 15 bp, Homo sapiens
tccctcagccacgtg

SEQ ID NO: 232830 - DNA, 15 bp, Homo sapiens
atccctcagccacgt

SEQ ID NO: 232831 - DNA, 15 bp, Homo sapiens
aatccctcagccacg

SEQ ID NO: 232832 - DNA, 15 bp, Homo sapiens
gaatccctcagccac

SEQ ID NO: 232833 - DNA, 15 bp, Homo sapiens
agaatccctcagcca

SEQ ID NO: 232834 - DNA, 15 bp, Homo sapiens
tagaatccctcagcc

SEQ ID NO: 232835 - DNA, 15 bp, Homo sapiens
gtagaatccctcagc

SEQ ID NO: 232836 - DNA, 15 bp, Homo sapiens
tgtagaatccctcag

SEQ ID NO: 232837 - DNA, 15 bp, Homo sapiens
atgtagaatccctca

SEQ ID NO: 232838 - DNA, 15 bp, Homo sapiens
aatgtagaatccctc

SEQ ID NO: 232839 - DNA, 15 bp, Homo sapiens
taatgtagaatccct

SEQ ID NO: 232840 - DNA, 15 bp, Homo sapiens
ttaatgtagaatccc

SEQ ID NO: 232841 - DNA, 15 bp, Homo sapiens
tttaatgtagaatcc

SEQ ID NO: 232842 - DNA, 15 bp, Homo sapiens
ctttaatgtagaatc

SEQ ID NO: 232843 - DNA, 15 bp, Homo sapiens
actttaatgtagaat

SEQ ID NO: 232844 - DNA, 15 bp, Homo sapiens
cactttaatgtagaa

SEQ ID NO: 232845 - DNA, 15 bp, Homo sapiens
tcactttaatgtaga

SEQ ID NO: 232846 - DNA, 15 bp, Homo sapiens
ttcactttaatgtag

SEQ ID NO: 232847 - DNA, 15 bp, Homo sapiens
gttcactttaatgta

SEQ ID NO: 232848 - DNA, 15 bp, Homo sapiens
tgttcactttaatgt

SEQ ID NO: 232849 - DNA, 15 bp, Homo sapiens
gtgttcactttaatg

SEQ ID NO: 232850 - DNA, 15 bp, Homo sapiens
ggtgttcactttaat

SEQ ID NO: 232851 - DNA, 15 bp, Homo sapiens
tggtgttcactttaa

SEQ ID NO: 232852 - DNA, 15 bp, Homo sapiens
ctggtgttcacttta

SEQ ID NO: 232853 - DNA, 15 bp, Homo sapiens
cctggtgttcacttt

SEQ ID NO: 232854 - DNA, 15 bp, Homo sapiens
gcctggtgttcactt

SEQ ID NO: 232855 - DNA, 15 bp, Homo sapiens
agcctggtgttcact

SEQ ID NO: 232856 - DNA, 15 bp, Homo sapiens
cagcctggtgttcac

SEQ ID NO: 232857 - DNA, 15 bp, Homo sapiens
acagcctggtgttca

SEQ ID NO: 232858 - DNA, 15 bp, Homo sapiens
gacagcctggtgttc

SEQ ID NO: 232859 - DNA, 15 bp, Homo sapiens
tgacagcctggtgtt

SEQ ID NO: 232860 - DNA, 15 bp, Homo sapiens
ttgacagcctggtgt

SEQ ID NO: 232861 - DNA, 15 bp, Homo sapiens
cttgacagcctggtg

SEQ ID NO: 232862 - DNA, 15 bp, Homo sapiens
tcttgacagcctggt

SEQ ID NO: 232863 - DNA, 15 bp, Homo sapiens
ctcttgacagcctgg

SEQ ID NO: 232864 - DNA, 15 bp, Homo sapiens
actcttgacagcctg

SEQ ID NO: 232865 - DNA, 15 bp, Homo sapiens
tactcttgacagcct

SEQ ID NO: 232866 - DNA, 15 bp, Homo sapiens
gtactcttgacagcc

SEQ ID NO: 232867 - DNA, 15 bp, Homo sapiens
agtactcttgacagc

SEQ ID NO: 232868 - DNA, 15 bp, Homo sapiens
cagtactcttgacag

SEQ ID NO: 232869 - DNA, 15 bp, Homo sapiens
gcagtactcttgaca

SEQ ID NO: 232870 - DNA, 15 bp, Homo sapiens
agcagtactcttgac

SEQ ID NO: 232871 - DNA, 15 bp, Homo sapiens
aagcagtactcttga

SEQ ID NO: 232872 - DNA, 15 bp, Homo sapiens
gaagcagtactcttg

SEQ ID NO: 232873 - DNA, 15 bp, Homo sapiens
ggaagcagtactctt

SEQ ID NO: 232874 - DNA, 15 bp, Homo sapiens
aggaagcagtactct

SEQ ID NO: 232875 - DNA, 15 bp, Homo sapiens
aaggaagcagtactc

SEQ ID NO: 232876 - DNA, 15 bp, Homo sapiens
aaaggaagcagtact

SEQ ID NO: 232877 - DNA, 15 bp, Homo sapiens
aaaaggaagcagtac

SEQ ID NO: 232878 - DNA, 15 bp, Homo sapiens
taaaaggaagcagta

SEQ ID NO: 232879 - DNA, 15 bp, Homo sapiens
ataaaaggaagcagt

SEQ ID NO: 232880 - DNA, 15 bp, Homo sapiens
aataaaaggaagcag

SEQ ID NO: 232881 - DNA, 15 bp, Homo sapiens
aaataaaaggaagca

SEQ ID NO: 232882 - DNA, 15 bp, Homo sapiens
aaaataaaaggaagc

SEQ ID NO: 232883 - DNA, 15 bp, Homo sapiens
aaaaataaaaggaag

SEQ ID NO: 232884 - DNA, 15 bp, Homo sapiens
aaaaaataaaaggaa

SEQ ID NO: 232885 - DNA, 15 bp, Homo sapiens
aaaaaaataaaagga

SEQ ID NO: 232886 - DNA, 15 bp, Homo sapiens
gaaaaaaataaaagg

SEQ ID NO: 232887 - DNA, 15 bp, Homo sapiens
agaaaaaaataaaag

SEQ ID NO: 232888 - DNA, 15 bp, Homo sapiens
aagaaaaaaataaaa

SEQ ID NO: 232889 - DNA, 15 bp, Homo sapiens
taagaaaaaaataaa

SEQ ID NO: 232890 - DNA, 15 bp, Homo sapiens
ttaagaaaaaaataa

SEQ ID NO: 232891 - DNA, 15 bp, Homo sapiens
gttaagaaaaaaata

SEQ ID NO: 232892 - DNA, 15 bp, Homo sapiens
agttaagaaaaaaat

SEQ ID NO: 232893 - DNA, 15 bp, Homo sapiens
tagttaagaaaaaaa

SEQ ID NO: 232894 - DNA, 15 bp, Homo sapiens
ttagttaagaaaaaa

SEQ ID NO: 232895 - DNA, 15 bp, Homo sapiens
tttagttaagaaaaa

SEQ ID NO: 232896 - DNA, 15 bp, Homo sapiens
gtttagttaagaaaa

SEQ ID NO: 232897 - DNA, 15 bp, Homo sapiens
tgtttagttaagaaa

SEQ ID NO: 232898 - DNA, 15 bp, Homo sapiens
ttgtttagttaagaa

SEQ ID NO: 232899 - DNA, 15 bp, Homo sapiens
tttgtttagttaaga

SEQ ID NO: 232900 - DNA, 15 bp, Homo sapiens
atttgtttagttaag

SEQ ID NO: 232901 - DNA, 15 bp, Homo sapiens
catttgtttagttaa

SEQ ID NO: 232902 - DNA, 15 bp, Homo sapiens
acatttgtttagtta

SEQ ID NO: 232903 - DNA, 15 bp, Homo sapiens
aacatttgtttagtt

SEQ ID NO: 232904 - DNA, 15 bp, Homo sapiens
aaacatttgtttagt

SEQ ID NO: 232905 - DNA, 15 bp, Homo sapiens
taaacatttgtttag

SEQ ID NO: 232906 - DNA, 15 bp, Homo sapiens
ataaacatttgttta

SEQ ID NO: 232907 - DNA, 15 bp, Homo sapiens
aataaacatttgttt

SEQ ID NO: 232908 - DNA, 15 bp, Homo sapiens
aaataaacatttgtt

SEQ ID NO: 232909 - DNA, 15 bp, Homo sapiens
aaaataaacatttgt

SEQ ID NO: 232910 - DNA, 15 bp, Homo sapiens
gaaaataaacatttg

SEQ ID NO: 232911 - DNA, 15 bp, Homo sapiens
agaaaataaacattt

SEQ ID NO: 232912 - DNA, 15 bp, Homo sapiens
cagaaaataaacatt

SEQ ID NO: 232913 - DNA, 15 bp, Homo sapiens
tcagaaaataaacat

SEQ ID NO: 232914 - DNA, 15 bp, Homo sapiens
atcagaaaataaaca

SEQ ID NO: 232915 - DNA, 15 bp, Homo sapiens
aatcagaaaataaac

SEQ ID NO: 232916 - DNA, 15 bp, Homo sapiens
taatcagaaaataaa

SEQ ID NO: 232917 - DNA, 15 bp, Homo sapiens
ataatcagaaaataa

SEQ ID NO: 232918 - DNA, 15 bp, Homo sapiens
tataatcagaaaata

SEQ ID NO: 232919 - DNA, 15 bp, Homo sapiens
ttataatcagaaaat

SEQ ID NO: 232920 - DNA, 15 bp, Homo sapiens
tttataatcagaaaa

SEQ ID NO: 232921 - DNA, 15 bp, Homo sapiens
ttttataatcagaaa

SEQ ID NO: 232922 - DNA, 15 bp, Homo sapiens
cttttataatcagaa

SEQ ID NO: 232923 - DNA, 15 bp, Homo sapiens
acttttataatcaga

SEQ ID NO: 232924 - DNA, 15 bp, Homo sapiens
tacttttataatcag

SEQ ID NO: 232925 - DNA, 15 bp, Homo sapiens
ttacttttataatca

SEQ ID NO: 232926 - DNA, 15 bp, Homo sapiens
attacttttataatc

SEQ ID NO: 232927 - DNA, 15 bp, Homo sapiens
tattacttttataat

SEQ ID NO: 232928 - DNA, 15 bp, Homo sapiens
atattacttttataa

SEQ ID NO: 232929 - DNA, 15 bp, Homo sapiens
tatattacttttata

SEQ ID NO: 232930 - DNA, 15 bp, Homo sapiens
atatattacttttat

SEQ ID NO: 232931 - DNA, 15 bp, Homo sapiens
catatattactttta

SEQ ID NO: 232932 - DNA, 15 bp, Homo sapiens
acatatattactttt

SEQ ID NO: 232933 - DNA, 15 bp, Homo sapiens
aacatatattacttt

SEQ ID NO: 232934 - DNA, 15 bp, Homo sapiens
aaacatatattactt

SEQ ID NO: 232935 - DNA, 15 bp, Homo sapiens
caaacatatattact

SEQ ID NO: 232936 - DNA, 15 bp, Homo sapiens
gcaaacatatattac

SEQ ID NO: 232937 - DNA, 15 bp, Homo sapiens
agcaaacatatatta

SEQ ID NO: 232938 - DNA, 15 bp, Homo sapiens
aagcaaacatatatt

SEQ ID NO: 232939 - DNA, 15 bp, Homo sapiens
aaagcaaacatatat

SEQ ID NO: 232940 - DNA, 15 bp, Homo sapiens
aaaagcaaacatata

SEQ ID NO: 232941 - DNA, 15 bp, Homo sapiens
aaaaagcaaacatat

SEQ ID NO: 232942 - DNA, 15 bp, Homo sapiens
aaaaaagcaaacata

SEQ ID NO: 232943 - DNA, 15 bp, Homo sapiens
aaaaaaagcaaacat

SEQ ID NO: 232944 - DNA, 15 bp, Homo sapiens
taaaaaaagcaaaca

SEQ ID NO: 232945 - DNA, 15 bp, Homo sapiens
ttaaaaaaagcaaac

SEQ ID NO: 232946 - DNA, 15 bp, Homo sapiens
tttaaaaaaagcaaa

SEQ ID NO: 232947 - DNA, 15 bp, Homo sapiens
ttttaaaaaaagcaa

SEQ ID NO: 232948 - DNA, 15 bp, Homo sapiens
tttttaaaaaaagca

SEQ ID NO: 232949 - DNA, 15 bp, Homo sapiens
ttttttaaaaaaagc

SEQ ID NO: 232950 - DNA, 15 bp, Homo sapiens
tttttttaaaaaaag

SEQ ID NO: 232951 - DNA, 15 bp, Homo sapiens
atttttttaaaaaaa

SEQ ID NO: 232952 - DNA, 15 bp, Homo sapiens
aatttttttaaaaaa

SEQ ID NO: 232953 - DNA, 15 bp, Homo sapiens
caatttttttaaaaa

SEQ ID NO: 232954 - DNA, 15 bp, Homo sapiens
tcaatttttttaaaa

SEQ ID NO: 232955 - DNA, 15 bp, Homo sapiens
ttcaatttttttaaa

SEQ ID NO: 232956 - DNA, 15 bp, Homo sapiens
tttcaatttttttaa

SEQ ID NO: 232957 - DNA, 15 bp, Homo sapiens
atttcaattttttta

SEQ ID NO: 232958 - DNA, 15 bp, Homo sapiens
catttcaattttttt

SEQ ID NO: 232959 - DNA, 15 bp, Homo sapiens
acatttcaatttttt

SEQ ID NO: 232960 - DNA, 15 bp, Homo sapiens
cacatttcaattttt

SEQ ID NO: 232961 - DNA, 15 bp, Homo sapiens
gcacatttcaatttt

SEQ ID NO: 232962 - DNA, 15 bp, Homo sapiens
agcacatttcaattt

SEQ ID NO: 232963 - DNA, 15 bp, Homo sapiens
cagcacatttcaatt

SEQ ID NO: 232964 - DNA, 15 bp, Homo sapiens
ccagcacatttcaat

SEQ ID NO: 232965 - DNA, 15 bp, Homo sapiens
tccagcacatttcaa

SEQ ID NO: 232966 - DNA, 15 bp, Homo sapiens
ttccagcacatttca

SEQ ID NO: 232967 - DNA, 15 bp, Homo sapiens
cttccagcacatttc

SEQ ID NO: 232968 - DNA, 15 bp, Homo sapiens
tcttccagcacattt

SEQ ID NO: 232969 - DNA, 15 bp, Homo sapiens
gtcttccagcacatt

SEQ ID NO: 232970 - DNA, 15 bp, Homo sapiens
cgtcttccagcacat

SEQ ID NO: 232971 - DNA, 15 bp, Homo sapiens
acgtcttccagcaca

SEQ ID NO: 232972 - DNA, 15 bp, Homo sapiens
cacgtcttccagcac

SEQ ID NO: 232973 - DNA, 15 bp, Homo sapiens
gcacgtcttccagca

SEQ ID NO: 232974 - DNA, 15 bp, Homo sapiens
agcacgtcttccagc

SEQ ID NO: 232975 - DNA, 15 bp, Homo sapiens
cagcacgtcttccag

SEQ ID NO: 232976 - DNA, 15 bp, Homo sapiens
tcagcacgtcttcca

SEQ ID NO: 232977 - DNA, 15 bp, Homo sapiens
atcagcacgtcttcc

SEQ ID NO: 232978 - DNA, 15 bp, Homo sapiens
tatcagcacgtcttc

SEQ ID NO: 232979 - DNA, 15 bp, Homo sapiens
ttatcagcacgtctt

SEQ ID NO: 232980 - DNA, 15 bp, Homo sapiens
tttatcagcacgtct

SEQ ID NO: 232981 - DNA, 15 bp, Homo sapiens
atttatcagcacgtc

SEQ ID NO: 232982 - DNA, 15 bp, Homo sapiens
aatttatcagcacgt

SEQ ID NO: 232983 - DNA, 15 bp, Homo sapiens
gaatttatcagcacg

SEQ ID NO: 232984 - DNA, 15 bp, Homo sapiens
ggaatttatcagcac

SEQ ID NO: 232985 - DNA, 15 bp, Homo sapiens
tggaatttatcagca

SEQ ID NO: 232986 - DNA, 15 bp, Homo sapiens
gtggaatttatcagc

SEQ ID NO: 232987 - DNA, 15 bp, Homo sapiens
agtggaatttatcag

SEQ ID NO: 232988 - DNA, 15 bp, Homo sapiens
cagtggaatttatca

SEQ ID NO: 232989 - DNA, 15 bp, Homo sapiens
acagtggaatttatc

SEQ ID NO: 232990 - DNA, 15 bp, Homo sapiens
cacagtggaatttat

SEQ ID NO: 232991 - DNA, 15 bp, Homo sapiens
ccacagtggaattta

SEQ ID NO: 232992 - DNA, 15 bp, Homo sapiens
cccacagtggaattt

SEQ ID NO: 232993 - DNA, 15 bp, Homo sapiens
tcccacagtggaatt

SEQ ID NO: 232994 - DNA, 15 bp, Homo sapiens
atcccacagtggaat

SEQ ID NO: 232995 - DNA, 15 bp, Homo sapiens
aatcccacagtggaa

SEQ ID NO: 232996 - DNA, 15 bp, Homo sapiens
aaatcccacagtgga

SEQ ID NO: 232997 - DNA, 15 bp, Homo sapiens
caaatcccacagtgg

SEQ ID NO: 232998 - DNA, 15 bp, Homo sapiens
ccaaatcccacagtg

SEQ ID NO: 232999 - DNA, 15 bp, Homo sapiens
tccaaatcccacagt

SEQ ID NO: 233000 - DNA, 15 bp, Homo sapiens
ctccaaatcccacag

SEQ ID NO: 233001 - DNA, 15 bp, Homo sapiens
actccaaatcccaca

SEQ ID NO: 233002 - DNA, 15 bp, Homo sapiens
gactccaaatcccac

SEQ ID NO: 233003 - DNA, 15 bp, Homo sapiens
cgactccaaatccca

SEQ ID NO: 233004 - DNA, 15 bp, Homo sapiens
ccgactccaaatccc

SEQ ID NO: 233005 - DNA, 15 bp, Homo sapiens
gccgactccaaatcc

SEQ ID NO: 233006 - DNA, 15 bp, Homo sapiens
agccgactccaaatc

SEQ ID NO: 233007 - DNA, 15 bp, Homo sapiens
gagccgactccaaat

SEQ ID NO: 233008 - DNA, 15 bp, Homo sapiens
tgagccgactccaaa

SEQ ID NO: 233009 - DNA, 15 bp, Homo sapiens
atgagccgactccaa

SEQ ID NO: 233010 - DNA, 15 bp, Homo sapiens
catgagccgactcca

SEQ ID NO: 233011 - DNA, 15 bp, Homo sapiens
gcatgagccgactcc

SEQ ID NO: 233012 - DNA, 15 bp, Homo sapiens
cgcatgagccgactc

SEQ ID NO: 233013 - DNA, 15 bp, Homo sapiens
ccgcatgagccgact

SEQ ID NO: 233014 - DNA, 15 bp, Homo sapiens
tccgcatgagccgac

SEQ ID NO: 233015 - DNA, 15 bp, Homo sapiens
ctccgcatgagccga

SEQ ID NO: 233016 - DNA, 15 bp, Homo sapiens
cctccgcatgagccg

SEQ ID NO: 233017 - DNA, 15 bp, Homo sapiens
ccctccgcatgagcc

SEQ ID NO: 233018 - DNA, 15 bp, Homo sapiens
tccctccgcatgagc

SEQ ID NO: 233019 - DNA, 15 bp, Homo sapiens
ttccctccgcatgag

SEQ ID NO: 233020 - DNA, 15 bp, Homo sapiens
tttccctccgcatga

SEQ ID NO: 233021 - DNA, 15 bp, Homo sapiens
atttccctccgcatg

SEQ ID NO: 233022 - DNA, 15 bp, Homo sapiens
aatttccctccgcat

SEQ ID NO: 233023 - DNA, 15 bp, Homo sapiens
aaatttccctccgca

SEQ ID NO: 233024 - DNA, 15 bp, Homo sapiens
caaatttccctccgc

SEQ ID NO: 233025 - DNA, 15 bp, Homo sapiens
ccaaatttccctccg

SEQ ID NO: 233026 - DNA, 15 bp, Homo sapiens
tccaaatttccctcc

SEQ ID NO: 233027 - DNA, 15 bp, Homo sapiens
atccaaatttccctc

SEQ ID NO: 233028 - DNA, 15 bp, Homo sapiens
tatccaaatttccct

SEQ ID NO: 233029 - DNA, 15 bp, Homo sapiens
atatccaaatttccc

SEQ ID NO: 233030 - DNA, 15 bp, Homo sapiens
tatatccaaatttcc

SEQ ID NO: 233031 - DNA, 15 bp, Homo sapiens
ctatatccaaatttc

SEQ ID NO: 233032 - DNA, 15 bp, Homo sapiens
gctatatccaaattt

SEQ ID NO: 233033 - DNA, 15 bp, Homo sapiens
tgctatatccaaatt

SEQ ID NO: 233034 - DNA, 15 bp, Homo sapiens
ctgctatatccaaat

SEQ ID NO: 233035 - DNA, 15 bp, Homo sapiens
actgctatatccaaa

SEQ ID NO: 233036 - DNA, 15 bp, Homo sapiens
gactgctatatccaa

SEQ ID NO: 233037 - DNA, 15 bp, Homo sapiens
tgactgctatatcca

SEQ ID NO: 233038 - DNA, 15 bp, Homo sapiens
ttgactgctatatcc

SEQ ID NO: 233039 - DNA, 15 bp, Homo sapiens
attgactgctatatc

SEQ ID NO: 233040 - DNA, 15 bp, Homo sapiens
cattgactgctatat

SEQ ID NO: 233041 - DNA, 15 bp, Homo sapiens
acattgactgctata

SEQ ID NO: 233042 - DNA, 15 bp, Homo sapiens
gacattgactgctat

SEQ ID NO: 233043 - DNA, 15 bp, Homo sapiens
cgacattgactgcta

SEQ ID NO: 233044 - DNA, 15 bp, Homo sapiens
acgacattgactgct

SEQ ID NO: 233045 - DNA, 15 bp, Homo sapiens
gacgacattgactgc

SEQ ID NO: 233046 - DNA, 15 bp, Homo sapiens
tgacgacattgactg

SEQ ID NO: 233047 - DNA, 15 bp, Homo sapiens
ctgacgacattgact

SEQ ID NO: 233048 - DNA, 15 bp, Homo sapiens
cctgacgacattgac

SEQ ID NO: 233049 - DNA, 15 bp, Homo sapiens
tcctgacgacattga

SEQ ID NO: 233050 - DNA, 15 bp, Homo sapiens
atcctgacgacattg

SEQ ID NO: 233051 - DNA, 15 bp, Homo sapiens
aatcctgacgacatt

SEQ ID NO: 233052 - DNA, 15 bp, Homo sapiens
aaatcctgacgacat

SEQ ID NO: 233053 - DNA, 15 bp, Homo sapiens
gaaatcctgacgaca

SEQ ID NO: 233054 - DNA, 15 bp, Homo sapiens
agaaatcctgacgac

SEQ ID NO: 233055 - DNA, 15 bp, Homo sapiens
gagaaatcctgacga

SEQ ID NO: 233056 - DNA, 15 bp, Homo sapiens
agagaaatcctgacg

SEQ ID NO: 233057 - DNA, 15 bp, Homo sapiens
aagagaaatcctgac

SEQ ID NO: 233058 - DNA, 15 bp, Homo sapiens
taagagaaatcctga

SEQ ID NO: 233059 - DNA, 15 bp, Homo sapiens
ttaagagaaatcctg

SEQ ID NO: 233060 - DNA, 15 bp, Homo sapiens
gttaagagaaatcct

SEQ ID NO: 233061 - DNA, 15 bp, Homo sapiens
agttaagagaaatcc

SEQ ID NO: 233062 - DNA, 15 bp, Homo sapiens
cagttaagagaaatc

SEQ ID NO: 233063 - DNA, 15 bp, Homo sapiens
acagttaagagaaat

SEQ ID NO: 233064 - DNA, 15 bp, Homo sapiens
aacagttaagagaaa

SEQ ID NO: 233065 - DNA, 15 bp, Homo sapiens
aaacagttaagagaa

SEQ ID NO: 233066 - DNA, 15 bp, Homo sapiens
caaacagttaagaga

SEQ ID NO: 233067 - DNA, 15 bp, Homo sapiens
ccaaacagttaagag

SEQ ID NO: 233068 - DNA, 15 bp, Homo sapiens
cccaaacagttaaga

SEQ ID NO: 233069 - DNA, 15 bp, Homo sapiens
acccaaacagttaag

SEQ ID NO: 233070 - DNA, 15 bp, Homo sapiens
cacccaaacagttaa

SEQ ID NO: 233071 - DNA, 15 bp, Homo sapiens
acacccaaacagtta

SEQ ID NO: 233072 - DNA, 15 bp, Homo sapiens
gacacccaaacagtt

SEQ ID NO: 233073 - DNA, 15 bp, Homo sapiens
tgacacccaaacagt

SEQ ID NO: 233074 - DNA, 15 bp, Homo sapiens
atgacacccaaacag

SEQ ID NO: 233075 - DNA, 15 bp, Homo sapiens
aatgacacccaaaca

SEQ ID NO: 233076 - DNA, 15 bp, Homo sapiens
caatgacacccaaac

SEQ ID NO: 233077 - DNA, 15 bp, Homo sapiens
tcaatgacacccaaa

SEQ ID NO: 233078 - DNA, 15 bp, Homo sapiens
ctcaatgacacccaa

SEQ ID NO: 233079 - DNA, 15 bp, Homo sapiens
cctcaatgacaccca

SEQ ID NO: 233080 - DNA, 15 bp, Homo sapiens
tcctcaatgacaccc

SEQ ID NO: 233081 - DNA, 15 bp, Homo sapiens
gtcctcaatgacacc

SEQ ID NO: 233082 - DNA, 15 bp, Homo sapiens
agtcctcaatgacac

SEQ ID NO: 233083 - DNA, 15 bp, Homo sapiens
aagtcctcaatgaca

SEQ ID NO: 233084 - DNA, 15 bp, Homo sapiens
aaagtcctcaatgac

SEQ ID NO: 233085 - DNA, 15 bp, Homo sapiens
caaagtcctcaatga

SEQ ID NO: 233086 - DNA, 15 bp, Homo sapiens
acaaagtcctcaatg

SEQ ID NO: 233087 - DNA, 15 bp, Homo sapiens
aacaaagtcctcaat

SEQ ID NO: 233088 - DNA, 15 bp, Homo sapiens
gaacaaagtcctcaa

SEQ ID NO: 233089 - DNA, 15 bp, Homo sapiens
tgaacaaagtcctca

SEQ ID NO: 233090 - DNA, 15 bp, Homo sapiens
gtgaacaaagtcctc

SEQ ID NO: 233091 - DNA, 15 bp, Homo sapiens
agtgaacaaagtcct

SEQ ID NO: 233092 - DNA, 15 bp, Homo sapiens
cagtgaacaaagtcc

SEQ ID NO: 233093 - DNA, 15 bp, Homo sapiens
gcagtgaacaaagtc

SEQ ID NO: 233094 - DNA, 15 bp, Homo sapiens
tgcagtgaacaaagt

SEQ ID NO: 233095 - DNA, 15 bp, Homo sapiens
atgcagtgaacaaag

SEQ ID NO: 233096 - DNA, 15 bp, Homo sapiens
gatgcagtgaacaaa

SEQ ID NO: 233097 - DNA, 15 bp, Homo sapiens
agatgcagtgaacaa

SEQ ID NO: 233098 - DNA, 15 bp, Homo sapiens
gagatgcagtgaaca

SEQ ID NO: 233099 - DNA, 15 bp, Homo sapiens
tgagatgcagtgaac

SEQ ID NO: 233100 - DNA, 15 bp, Homo sapiens
atgagatgcagtgaa

SEQ ID NO: 233101 - DNA, 15 bp, Homo sapiens
catgagatgcagtga

SEQ ID NO: 233102 - DNA, 15 bp, Homo sapiens
acatgagatgcagtg

SEQ ID NO: 233103 - DNA, 15 bp, Homo sapiens
aacatgagatgcagt

SEQ ID NO: 233104 - DNA, 15 bp, Homo sapiens
taacatgagatgcag

SEQ ID NO: 233105 - DNA, 15 bp, Homo sapiens
gtaacatgagatgca

SEQ ID NO: 233106 - DNA, 15 bp, Homo sapiens
ggtaacatgagatgc

SEQ ID NO: 233107 - DNA, 15 bp, Homo sapiens
aggtaacatgagatg

SEQ ID NO: 233108 - DNA, 15 bp, Homo sapiens
caggtaacatgagat

SEQ ID NO: 233109 - DNA, 15 bp, Homo sapiens
gcaggtaacatgaga

SEQ ID NO: 233110 - DNA, 15 bp, Homo sapiens
agcaggtaacatgag

SEQ ID NO: 233111 - DNA, 15 bp, Homo sapiens
aagcaggtaacatga

SEQ ID NO: 233112 - DNA, 15 bp, Homo sapiens
aaagcaggtaacatg

SEQ ID NO: 233113 - DNA, 15 bp, Homo sapiens
taaagcaggtaacat

SEQ ID NO: 233114 - DNA, 15 bp, Homo sapiens
ataaagcaggtaaca

SEQ ID NO: 233115 - DNA, 15 bp, Homo sapiens
cataaagcaggtaac

SEQ ID NO: 233116 - DNA, 15 bp, Homo sapiens
gcataaagcaggtaa

SEQ ID NO: 233117 - DNA, 15 bp, Homo sapiens
tgcataaagcaggta

SEQ ID NO: 233118 - DNA, 15 bp, Homo sapiens
gtgcataaagcaggt

SEQ ID NO: 233119 - DNA, 15 bp, Homo sapiens
tgtgcataaagcagg

SEQ ID NO: 233120 - DNA, 15 bp, Homo sapiens
ctgtgcataaagcag

SEQ ID NO: 233121 - DNA, 15 bp, Homo sapiens
tctgtgcataaagca

SEQ ID NO: 233122 - DNA, 15 bp, Homo sapiens
gtctgtgcataaagc

SEQ ID NO: 233123 - DNA, 15 bp, Homo sapiens
agtctgtgcataaag

SEQ ID NO: 233124 - DNA, 15 bp, Homo sapiens
gagtctgtgcataaa

SEQ ID NO: 233125 - DNA, 15 bp, Homo sapiens
tgagtctgtgcataa

SEQ ID NO: 233126 - DNA, 15 bp, Homo sapiens
atgagtctgtgcata

SEQ ID NO: 233127 - DNA, 15 bp, Homo sapiens
catgagtctgtgcat

SEQ ID NO: 233128 - DNA, 15 bp, Homo sapiens
ccatgagtctgtgca

SEQ ID NO: 233129 - DNA, 15 bp, Homo sapiens
cccatgagtctgtgc

SEQ ID NO: 233130 - DNA, 15 bp, Homo sapiens
tcccatgagtctgtg

SEQ ID NO: 233131 - DNA, 15 bp, Homo sapiens
atcccatgagtctgt

SEQ ID NO: 233132 - DNA, 15 bp, Homo sapiens
tatcccatgagtctg

SEQ ID NO: 233133 - DNA, 15 bp, Homo sapiens
ttatcccatgagtct

SEQ ID NO: 233134 - DNA, 15 bp, Homo sapiens
cttatcccatgagtc

SEQ ID NO: 233135 - DNA, 15 bp, Homo sapiens
acttatcccatgagt

SEQ ID NO: 233136 - DNA, 15 bp, Homo sapiens
tacttatcccatgag

SEQ ID NO: 233137 - DNA, 15 bp, Homo sapiens
ctacttatcccatga

SEQ ID NO: 233138 - DNA, 15 bp, Homo sapiens
actacttatcccatg

SEQ ID NO: 233139 - DNA, 15 bp, Homo sapiens
cactacttatcccat

SEQ ID NO: 233140 - DNA, 15 bp, Homo sapiens
acactacttatccca

SEQ ID NO: 233141 - DNA, 15 bp, Homo sapiens
aacactacttatccc

SEQ ID NO: 233142 - DNA, 15 bp, Homo sapiens
aaacactacttatcc

SEQ ID NO: 233143 - DNA, 15 bp, Homo sapiens
aaaacactacttatc

SEQ ID NO: 233144 - DNA, 15 bp, Homo sapiens
caaaacactacttat

SEQ ID NO: 233145 - DNA, 15 bp, Homo sapiens
gcaaaacactactta

SEQ ID NO: 233146 - DNA, 15 bp, Homo sapiens
tgcaaaacactactt

SEQ ID NO: 233147 - DNA, 15 bp, Homo sapiens
gtgcaaaacactact

SEQ ID NO: 233148 - DNA, 15 bp, Homo sapiens
ggtgcaaaacactac

SEQ ID NO: 233149 - DNA, 15 bp, Homo sapiens
tggtgcaaaacacta

SEQ ID NO: 233150 - DNA, 15 bp, Homo sapiens
ctggtgcaaaacact

SEQ ID NO: 233151 - DNA, 15 bp, Homo sapiens
tctggtgcaaaacac

SEQ ID NO: 233152 - DNA, 15 bp, Homo sapiens
ctctggtgcaaaaca

SEQ ID NO: 233153 - DNA, 15 bp, Homo sapiens
tctctggtgcaaaac

SEQ ID NO: 233154 - DNA, 15 bp, Homo sapiens
atctctggtgcaaaa

SEQ ID NO: 233155 - DNA, 15 bp, Homo sapiens
aatctctggtgcaaa

SEQ ID NO: 233156 - DNA, 15 bp, Homo sapiens
caatctctggtgcaa

SEQ ID NO: 233157 - DNA, 15 bp, Homo sapiens
acaatctctggtgca

SEQ ID NO: 233158 - DNA, 15 bp, Homo sapiens
aacaatctctggtgc

SEQ ID NO: 233159 - DNA, 15 bp, Homo sapiens
caacaatctctggtg

SEQ ID NO: 233160 - DNA, 15 bp, Homo sapiens
acaacaatctctggt

SEQ ID NO: 233161 - DNA, 15 bp, Homo sapiens
cacaacaatctctgg

SEQ ID NO: 233162 - DNA, 15 bp, Homo sapiens
ccacaacaatctctg

SEQ ID NO: 233163 - DNA, 15 bp, Homo sapiens
accacaacaatctct

SEQ ID NO: 233164 - DNA, 15 bp, Homo sapiens
aaccacaacaatctc

SEQ ID NO: 233165 - DNA, 15 bp, Homo sapiens
aaaccacaacaatct

SEQ ID NO: 233166 - DNA, 15 bp, Homo sapiens
aaaaccacaacaatc

SEQ ID NO: 233167 - DNA, 15 bp, Homo sapiens
gaaaaccacaacaat

SEQ ID NO: 233168 - DNA, 15 bp, Homo sapiens
ggaaaaccacaacaa

SEQ ID NO: 233169 - DNA, 15 bp, Homo sapiens
aggaaaaccacaaca

SEQ ID NO: 233170 - DNA, 15 bp, Homo sapiens
caggaaaaccacaac

SEQ ID NO: 233171 - DNA, 15 bp, Homo sapiens
ccaggaaaaccacaa

SEQ ID NO: 233172 - DNA, 15 bp, Homo sapiens
accaggaaaaccaca

SEQ ID NO: 233173 - DNA, 15 bp, Homo sapiens
caccaggaaaaccac

SEQ ID NO: 233174 - DNA, 15 bp, Homo sapiens
tcaccaggaaaacca

SEQ ID NO: 233175 - DNA, 15 bp, Homo sapiens
ttcaccaggaaaacc

SEQ ID NO: 233176 - DNA, 15 bp, Homo sapiens
gttcaccaggaaaac

SEQ ID NO: 233177 - DNA, 15 bp, Homo sapiens
tgttcaccaggaaaa

SEQ ID NO: 233178 - DNA, 15 bp, Homo sapiens
atgttcaccaggaaa

SEQ ID NO: 233179 - DNA, 15 bp, Homo sapiens
gatgttcaccaggaa

SEQ ID NO: 233180 - DNA, 15 bp, Homo sapiens
ggatgttcaccagga

SEQ ID NO: 233181 - DNA, 15 bp, Homo sapiens
tggatgttcaccagg

SEQ ID NO: 233182 - DNA, 15 bp, Homo sapiens
ctggatgttcaccag

SEQ ID NO: 233183 - DNA, 15 bp, Homo sapiens
actggatgttcacca

SEQ ID NO: 233184 - DNA, 15 bp, Homo sapiens
cactggatgttcacc

SEQ ID NO: 233185 - DNA, 15 bp, Homo sapiens
tcactggatgttcac

SEQ ID NO: 233186 - DNA, 15 bp, Homo sapiens
ctcactggatgttca

SEQ ID NO: 233187 - DNA, 15 bp, Homo sapiens
gctcactggatgttc

SEQ ID NO: 233188 - DNA, 15 bp, Homo sapiens
tgctcactggatgtt

SEQ ID NO: 233189 - DNA, 15 bp, Homo sapiens
atgctcactggatgt

SEQ ID NO: 233190 - DNA, 15 bp, Homo sapiens
catgctcactggatg

SEQ ID NO: 233191 - DNA, 15 bp, Homo sapiens
gcatgctcactggat

SEQ ID NO: 233192 - DNA, 15 bp, Homo sapiens
agcatgctcactgga

SEQ ID NO: 233193 - DNA, 15 bp, Homo sapiens
tagcatgctcactgg

SEQ ID NO: 233194 - DNA, 15 bp, Homo sapiens
ttagcatgctcactg

SEQ ID NO: 233195 - DNA, 15 bp, Homo sapiens
tttagcatgctcact

SEQ ID NO: 233196 - DNA, 15 bp, Homo sapiens
atttagcatgctcac

SEQ ID NO: 233197 - DNA, 15 bp, Homo sapiens
gatttagcatgctca

SEQ ID NO: 233198 - DNA, 15 bp, Homo sapiens
cgatttagcatgctc

SEQ ID NO: 233199 - DNA, 15 bp, Homo sapiens
tcgatttagcatgct

SEQ ID NO: 233200 - DNA, 15 bp, Homo sapiens
ctcgatttagcatgc

SEQ ID NO: 233201 - DNA, 15 bp, Homo sapiens
tctcgatttagcatg

SEQ ID NO: 233202 - DNA, 15 bp, Homo sapiens
ttctcgatttagcat

SEQ ID NO: 233203 - DNA, 15 bp, Homo sapiens
tttctcgatttagca

SEQ ID NO: 233204 - DNA, 15 bp, Homo sapiens
ctttctcgatttagc

SEQ ID NO: 233205 - DNA, 15 bp, Homo sapiens
cctttctcgatttag

SEQ ID NO: 233206 - DNA, 15 bp, Homo sapiens
ccctttctcgattta

SEQ ID NO: 233207 - DNA, 15 bp, Homo sapiens
tccctttctcgattt

SEQ ID NO: 233208 - DNA, 15 bp, Homo sapiens
atccctttctcgatt

SEQ ID NO: 233209 - DNA, 15 bp, Homo sapiens
gatccctttctcgat

SEQ ID NO: 233210 - DNA, 15 bp, Homo sapiens
tgatccctttctcga

SEQ ID NO: 233211 - DNA, 15 bp, Homo sapiens
atgatccctttctcg

SEQ ID NO: 233212 - DNA, 15 bp, Homo sapiens
catgatccctttctc

SEQ ID NO: 233213 - DNA, 15 bp, Homo sapiens
acatgatccctttct

SEQ ID NO: 233214 - DNA, 15 bp, Homo sapiens
gacatgatccctttc

SEQ ID NO: 233215 - DNA, 15 bp, Homo sapiens
agacatgatcccttt

SEQ ID NO: 233216 - DNA, 15 bp, Homo sapiens
gagacatgatccctt

SEQ ID NO: 233217 - DNA, 15 bp, Homo sapiens
agagacatgatccct

SEQ ID NO: 233218 - DNA, 15 bp, Homo sapiens
gagagacatgatccc

SEQ ID NO: 233219 - DNA, 15 bp, Homo sapiens
tgagagacatgatcc

SEQ ID NO: 233220 - DNA, 15 bp, Homo sapiens
ctgagagacatgatc

SEQ ID NO: 233221 - DNA, 15 bp, Homo sapiens
actgagagacatgat

SEQ ID NO: 233222 - DNA, 15 bp, Homo sapiens
cactgagagacatga

SEQ ID NO: 233223 - DNA, 15 bp, Homo sapiens
ccactgagagacatg

SEQ ID NO: 233224 - DNA, 15 bp, Homo sapiens
accactgagagacat

SEQ ID NO: 233225 - DNA, 15 bp, Homo sapiens
caccactgagagaca

SEQ ID NO: 233226 - DNA, 15 bp, Homo sapiens
ccaccactgagagac

SEQ ID NO: 233227 - DNA, 15 bp, Homo sapiens
gccaccactgagaga

SEQ ID NO: 233228 - DNA, 15 bp, Homo sapiens
agccaccactgagag

SEQ ID NO: 233229 - DNA, 15 bp, Homo sapiens
cagccaccactgaga

SEQ ID NO: 233230 - DNA, 15 bp, Homo sapiens
gcagccaccactgag

SEQ ID NO: 233231 - DNA, 15 bp, Homo sapiens
agcagccaccactga

SEQ ID NO: 233232 - DNA, 15 bp, Homo sapiens
gagcagccaccactg

SEQ ID NO: 233233 - DNA, 15 bp, Homo sapiens
tgagcagccaccact

SEQ ID NO: 233234 - DNA, 15 bp, Homo sapiens
ctgagcagccaccac

SEQ ID NO: 233235 - DNA, 15 bp, Homo sapiens
tctgagcagccacca

SEQ ID NO: 233236 - DNA, 15 bp, Homo sapiens
ctctgagcagccacc

SEQ ID NO: 233237 - DNA, 15 bp, Homo sapiens
gctctgagcagccac

SEQ ID NO: 233238 - DNA, 15 bp, Homo sapiens
ggctctgagcagcca

SEQ ID NO: 233239 - DNA, 15 bp, Homo sapiens
tggctctgagcagcc

SEQ ID NO: 233240 - DNA, 15 bp, Homo sapiens
ttggctctgagcagc

SEQ ID NO: 233241 - DNA, 15 bp, Homo sapiens
cttggctctgagcag

SEQ ID NO: 233242 - DNA, 15 bp, Homo sapiens
acttggctctgagca

SEQ ID NO: 233243 - DNA, 15 bp, Homo sapiens
gacttggctctgagc

SEQ ID NO: 233244 - DNA, 15 bp, Homo sapiens
cgacttggctctgag

SEQ ID NO: 233245 - DNA, 15 bp, Homo sapiens
ccgacttggctctga

SEQ ID NO: 233246 - DNA, 15 bp, Homo sapiens
accgacttggctctg

SEQ ID NO: 233247 - DNA, 15 bp, Homo sapiens
caccgacttggctct

SEQ ID NO: 233248 - DNA, 15 bp, Homo sapiens
ccaccgacttggctc

SEQ ID NO: 233249 - DNA, 15 bp, Homo sapiens
gccaccgacttggct

SEQ ID NO: 233250 - DNA, 15 bp, Homo sapiens
agccaccgacttggc

SEQ ID NO: 233251 - DNA, 15 bp, Homo sapiens
aagccaccgacttgg

SEQ ID NO: 233252 - DNA, 15 bp, Homo sapiens
taagccaccgacttg

SEQ ID NO: 233253 - DNA, 15 bp, Homo sapiens
ataagccaccgactt

SEQ ID NO: 233254 - DNA, 15 bp, Homo sapiens
cataagccaccgact

SEQ ID NO: 233255 - DNA, 15 bp, Homo sapiens
ccataagccaccgac

SEQ ID NO: 233256 - DNA, 15 bp, Homo sapiens
tccataagccaccga

SEQ ID NO: 233257 - DNA, 15 bp, Homo sapiens
ttccataagccaccg

SEQ ID NO: 233258 - DNA, 15 bp, Homo sapiens
tttccataagccacc

SEQ ID NO: 233259 - DNA, 15 bp, Homo sapiens
ttttccataagccac

SEQ ID NO: 233260 - DNA, 15 bp, Homo sapiens
attttccataagcca

SEQ ID NO: 233261 - DNA, 15 bp, Homo sapiens
tattttccataagcc

SEQ ID NO: 233262 - DNA, 15 bp, Homo sapiens
gtattttccataagc

SEQ ID NO: 233263 - DNA, 15 bp, Homo sapiens
tgtattttccataag

SEQ ID NO: 233264 - DNA, 15 bp, Homo sapiens
ctgtattttccataa

SEQ ID NO: 233265 - DNA, 15 bp, Homo sapiens
tctgtattttccata

SEQ ID NO: 233266 - DNA, 15 bp, Homo sapiens
ctctgtattttccat

SEQ ID NO: 233267 - DNA, 15 bp, Homo sapiens
actctgtattttcca

SEQ ID NO: 233268 - DNA, 15 bp, Homo sapiens
cactctgtattttcc

SEQ ID NO: 233269 - DNA, 15 bp, Homo sapiens
ccactctgtattttc

SEQ ID NO: 233270 - DNA, 15 bp, Homo sapiens
gccactctgtatttt

SEQ ID NO: 233271 - DNA, 15 bp, Homo sapiens
agccactctgtattt

SEQ ID NO: 233272 - DNA, 15 bp, Homo sapiens
gagccactctgtatt

SEQ ID NO: 233273 - DNA, 15 bp, Homo sapiens
tgagccactctgtat

SEQ ID NO: 233274 - DNA, 15 bp, Homo sapiens
ctgagccactctgta

SEQ ID NO: 233275 - DNA, 15 bp, Homo sapiens
cctgagccactctgt

SEQ ID NO: 233276 - DNA, 15 bp, Homo sapiens
acctgagccactctg

SEQ ID NO: 233277 - DNA, 15 bp, Homo sapiens
aacctgagccactct

SEQ ID NO: 233278 - DNA, 15 bp, Homo sapiens
aaacctgagccactc

SEQ ID NO: 233279 - DNA, 15 bp, Homo sapiens
caaacctgagccact

SEQ ID NO: 233280 - DNA, 15 bp, Homo sapiens
gcaaacctgagccac

SEQ ID NO: 233281 - DNA, 15 bp, Homo sapiens
cgcaaacctgagcca

SEQ ID NO: 233282 - DNA, 15 bp, Homo sapiens
gcgcaaacctgagcc

SEQ ID NO: 233283 - DNA, 15 bp, Homo sapiens
agcgcaaacctgagc

SEQ ID NO: 233284 - DNA, 15 bp, Homo sapiens
gagcgcaaacctgag

SEQ ID NO: 233285 - DNA, 15 bp, Homo sapiens
agagcgcaaacctga

SEQ ID NO: 233286 - DNA, 15 bp, Homo sapiens
cagagcgcaaacctg

SEQ ID NO: 233287 - DNA, 15 bp, Homo sapiens
acagagcgcaaacct

SEQ ID NO: 233288 - DNA, 15 bp, Homo sapiens
cacagagcgcaaacc

SEQ ID NO: 233289 - DNA, 15 bp, Homo sapiens
acacagagcgcaaac

SEQ ID NO: 233290 - DNA, 15 bp, Homo sapiens
gacacagagcgcaaa

SEQ ID NO: 233291 - DNA, 15 bp, Homo sapiens
agacacagagcgcaa

SEQ ID NO: 233292 - DNA, 15 bp, Homo sapiens
aagacacagagcgca

SEQ ID NO: 233293 - DNA, 15 bp, Homo sapiens
aaagacacagagcgc

SEQ ID NO: 233294 - DNA, 15 bp, Homo sapiens
caaagacacagagcg

SEQ ID NO: 233295 - DNA, 15 bp, Homo sapiens
gcaaagacacagagc

SEQ ID NO: 233296 - DNA, 15 bp, Homo sapiens
tgcaaagacacagag

SEQ ID NO: 233297 - DNA, 15 bp, Homo sapiens
gtgcaaagacacaga

SEQ ID NO: 233298 - DNA, 15 bp, Homo sapiens
ggtgcaaagacacag

SEQ ID NO: 233299 - DNA, 15 bp, Homo sapiens
gggtgcaaagacaca

SEQ ID NO: 233300 - DNA, 15 bp, Homo sapiens
ggggtgcaaagacac

SEQ ID NO: 233301 - DNA, 15 bp, Homo sapiens
aggggtgcaaagaca

SEQ ID NO: 233302 - DNA, 15 bp, Homo sapiens
caggggtgcaaagac

SEQ ID NO: 233303 - DNA, 15 bp, Homo sapiens
gcaggggtgcaaaga

SEQ ID NO: 233304 - DNA, 15 bp, Homo sapiens
agcaggggtgcaaag

SEQ ID NO: 233305 - DNA, 15 bp, Homo sapiens
gagcaggggtgcaaa

SEQ ID NO: 233306 - DNA, 15 bp, Homo sapiens
agagcaggggtgcaa

SEQ ID NO: 233307 - DNA, 15 bp, Homo sapiens
cagagcaggggtgca

SEQ ID NO: 233308 - DNA, 15 bp, Homo sapiens
ccagagcaggggtgc

SEQ ID NO: 233309 - DNA, 15 bp, Homo sapiens
gccagagcaggggtg

SEQ ID NO: 233310 - DNA, 15 bp, Homo sapiens
agccagagcaggggt

SEQ ID NO: 233311 - DNA, 15 bp, Homo sapiens
aagccagagcagggg

SEQ ID NO: 233312 - DNA, 15 bp, Homo sapiens
caagccagagcaggg

SEQ ID NO: 233313 - DNA, 15 bp, Homo sapiens
acaagccagagcagg

SEQ ID NO: 233314 - DNA, 15 bp, Homo sapiens
gacaagccagagcag

SEQ ID NO: 233315 - DNA, 15 bp, Homo sapiens
agacaagccagagca

SEQ ID NO: 233316 - DNA, 15 bp, Homo sapiens
aagacaagccagagc

SEQ ID NO: 233317 - DNA, 15 bp, Homo sapiens
gaagacaagccagag

SEQ ID NO: 233318 - DNA, 15 bp, Homo sapiens
tgaagacaagccaga

SEQ ID NO: 233319 - DNA, 15 bp, Homo sapiens
atgaagacaagccag

SEQ ID NO: 233320 - DNA, 15 bp, Homo sapiens
gatgaagacaagcca

SEQ ID NO: 233321 - DNA, 15 bp, Homo sapiens
tgatgaagacaagcc

SEQ ID NO: 233322 - DNA, 15 bp, Homo sapiens
atgatgaagacaagc

SEQ ID NO: 233323 - DNA, 15 bp, Homo sapiens
gatgatgaagacaag

SEQ ID NO: 233324 - DNA, 15 bp, Homo sapiens
agatgatgaagacaa

SEQ ID NO: 233325 - DNA, 15 bp, Homo sapiens
gagatgatgaagaca

SEQ ID NO: 233326 - DNA, 15 bp, Homo sapiens
agagatgatgaagac

SEQ ID NO: 233327 - DNA, 15 bp, Homo sapiens
gagagatgatgaaga

SEQ ID NO: 233328 - DNA, 15 bp, Homo sapiens
ggagagatgatgaag

SEQ ID NO: 233329 - DNA, 15 bp, Homo sapiens
aggagagatgatgaa

SEQ ID NO: 233330 - DNA, 15 bp, Homo sapiens
gaggagagatgatga

SEQ ID NO: 233331 - DNA, 15 bp, Homo sapiens
agaggagagatgatg

SEQ ID NO: 233332 - DNA, 15 bp, Homo sapiens
gagaggagagatgat

SEQ ID NO: 233333 - DNA, 15 bp, Homo sapiens
tgagaggagagatga

SEQ ID NO: 233334 - DNA, 15 bp, Homo sapiens
atgagaggagagatg

SEQ ID NO: 233335 - DNA, 15 bp, Homo sapiens
aatgagaggagagat

SEQ ID NO: 233336 - DNA, 15 bp, Homo sapiens
aaatgagaggagaga

SEQ ID NO: 233337 - DNA, 15 bp, Homo sapiens
aaaatgagaggagag

SEQ ID NO: 233338 - DNA, 15 bp, Homo sapiens
gaaaatgagaggaga

SEQ ID NO: 233339 - DNA, 15 bp, Homo sapiens
ggaaaatgagaggag

SEQ ID NO: 233340 - DNA, 15 bp, Homo sapiens
gggaaaatgagagga

SEQ ID NO: 233341 - DNA, 15 bp, Homo sapiens
agggaaaatgagagg

SEQ ID NO: 233342 - DNA, 15 bp, Homo sapiens
aagggaaaatgagag

SEQ ID NO: 233343 - DNA, 15 bp, Homo sapiens
aaagggaaaatgaga

SEQ ID NO: 233344 - DNA, 15 bp, Homo sapiens
caaagggaaaatgag

SEQ ID NO: 233345 - DNA, 15 bp, Homo sapiens
gcaaagggaaaatga

SEQ ID NO: 233346 - DNA, 15 bp, Homo sapiens
ggcaaagggaaaatg

SEQ ID NO: 233347 - DNA, 15 bp, Homo sapiens
gggcaaagggaaaat

SEQ ID NO: 233348 - DNA, 15 bp, Homo sapiens
agggcaaagggaaaa

SEQ ID NO: 233349 - DNA, 15 bp, Homo sapiens
tagggcaaagggaaa

SEQ ID NO: 233350 - DNA, 15 bp, Homo sapiens
gtagggcaaagggaa

SEQ ID NO: 233351 - DNA, 15 bp, Homo sapiens
agtagggcaaaggga

SEQ ID NO: 233352 - DNA, 15 bp, Homo sapiens
aagtagggcaaaggg

SEQ ID NO: 233353 - DNA, 15 bp, Homo sapiens
aaagtagggcaaagg

SEQ ID NO: 233354 - DNA, 15 bp, Homo sapiens
aaaagtagggcaaag

SEQ ID NO: 233355 - DNA, 15 bp, Homo sapiens
gaaaagtagggcaaa

SEQ ID NO: 233356 - DNA, 15 bp, Homo sapiens
agaaaagtagggcaa

SEQ ID NO: 233357 - DNA, 15 bp, Homo sapiens
aagaaaagtagggca

SEQ ID NO: 233358 - DNA, 15 bp, Homo sapiens
taagaaaagtagggc

SEQ ID NO: 233359 - DNA, 15 bp, Homo sapiens
gtaagaaaagtaggg

SEQ ID NO: 233360 - DNA, 15 bp, Homo sapiens
agtaagaaaagtagg

SEQ ID NO: 233361 - DNA, 15 bp, Homo sapiens
gagtaagaaaagtag

SEQ ID NO: 233362 - DNA, 15 bp, Homo sapiens
ggagtaagaaaagta

SEQ ID NO: 233363 - DNA, 15 bp, Homo sapiens
aggagtaagaaaagt

SEQ ID NO: 233364 - DNA, 15 bp, Homo sapiens
taggagtaagaaaag

SEQ ID NO: 233365 - DNA, 15 bp, Homo sapiens
ataggagtaagaaaa

SEQ ID NO: 233366 - DNA, 15 bp, Homo sapiens
aataggagtaagaaa

SEQ ID NO: 233367 - DNA, 15 bp, Homo sapiens
aaataggagtaagaa

SEQ ID NO: 233368 - DNA, 15 bp, Homo sapiens
caaataggagtaaga

SEQ ID NO: 233369 - DNA, 15 bp, Homo sapiens
ccaaataggagtaag

SEQ ID NO: 233370 - DNA, 15 bp, Homo sapiens
tccaaataggagtaa

SEQ ID NO: 233371 - DNA, 15 bp, Homo sapiens
ttccaaataggagta

SEQ ID NO: 233372 - DNA, 15 bp, Homo sapiens
attccaaataggagt

SEQ ID NO: 233373 - DNA, 15 bp, Homo sapiens
aattccaaataggag

SEQ ID NO: 233374 - DNA, 15 bp, Homo sapiens
aaattccaaatagga

SEQ ID NO: 233375 - DNA, 15 bp, Homo sapiens
taaattccaaatagg

SEQ ID NO: 233376 - DNA, 15 bp, Homo sapiens
gtaaattccaaatag

SEQ ID NO: 233377 - DNA, 15 bp, Homo sapiens
tgtaaattccaaata

SEQ ID NO: 233378 - DNA, 15 bp, Homo sapiens
atgtaaattccaaat

SEQ ID NO: 233379 - DNA, 15 bp, Homo sapiens
catgtaaattccaaa

SEQ ID NO: 233380 - DNA, 15 bp, Homo sapiens
acatgtaaattccaa

SEQ ID NO: 233381 - DNA, 15 bp, Homo sapiens
tacatgtaaattcca

SEQ ID NO: 233382 - DNA, 15 bp, Homo sapiens
atacatgtaaattcc

SEQ ID NO: 233383 - DNA, 15 bp, Homo sapiens
catacatgtaaattc

SEQ ID NO: 233384 - DNA, 15 bp, Homo sapiens
gcatacatgtaaatt

SEQ ID NO: 233385 - DNA, 15 bp, Homo sapiens
tgcatacatgtaaat

SEQ ID NO: 233386 - DNA, 15 bp, Homo sapiens
ctgcatacatgtaaa

SEQ ID NO: 233387 - DNA, 15 bp, Homo sapiens
actgcatacatgtaa

SEQ ID NO: 233388 - DNA, 15 bp, Homo sapiens
aactgcatacatgta

SEQ ID NO: 233389 - DNA, 15 bp, Homo sapiens
taactgcatacatgt

SEQ ID NO: 233390 - DNA, 15 bp, Homo sapiens
ataactgcatacatg

SEQ ID NO: 233391 - DNA, 15 bp, Homo sapiens
cataactgcatacat

SEQ ID NO: 233392 - DNA, 15 bp, Homo sapiens
acataactgcataca

SEQ ID NO: 233393 - DNA, 15 bp, Homo sapiens
cacataactgcatac

SEQ ID NO: 233394 - DNA, 15 bp, Homo sapiens
acacataactgcata

SEQ ID NO: 233395 - DNA, 15 bp, Homo sapiens
aacacataactgcat

SEQ ID NO: 233396 - DNA, 15 bp, Homo sapiens
gaacacataactgca

SEQ ID NO: 233397 - DNA, 15 bp, Homo sapiens
ggaacacataactgc

SEQ ID NO: 233398 - DNA, 15 bp, Homo sapiens
tggaacacataactg

SEQ ID NO: 233399 - DNA, 15 bp, Homo sapiens
atggaacacataact

SEQ ID NO: 233400 - DNA, 15 bp, Homo sapiens
tatggaacacataac

SEQ ID NO: 233401 - DNA, 15 bp, Homo sapiens
gtatggaacacataa

SEQ ID NO: 233402 - DNA, 15 bp, Homo sapiens
tgtatggaacacata

SEQ ID NO: 233403 - DNA, 15 bp, Homo sapiens
atgtatggaacacat

SEQ ID NO: 233404 - DNA, 15 bp, Homo sapiens
aatgtatggaacaca

SEQ ID NO: 233405 - DNA, 15 bp, Homo sapiens
aaatgtatggaacac

SEQ ID NO: 233406 - DNA, 15 bp, Homo sapiens
aaaatgtatggaaca

SEQ ID NO: 233407 - DNA, 15 bp, Homo sapiens
aaaaatgtatggaac

SEQ ID NO: 233408 - DNA, 15 bp, Homo sapiens
cacatatatttcttc

SEQ ID NO: 233409 - DNA, 15 bp, Homo sapiens
tcacatatatttctt

SEQ ID NO: 233410 - DNA, 15 bp, Homo sapiens
ttcacatatatttct

SEQ ID NO: 233411 - DNA, 15 bp, Homo sapiens
tttcacatatatttc

SEQ ID NO: 233412 - DNA, 15 bp, Homo sapiens
ctttcacatatattt

SEQ ID NO: 233413 - DNA, 15 bp, Homo sapiens
gctttcacatatatt

SEQ ID NO: 233414 - DNA, 15 bp, Homo sapiens
tgctttcacatatat

SEQ ID NO: 233415 - DNA, 15 bp, Homo sapiens
gtgctttcacatata

SEQ ID NO: 233416 - DNA, 15 bp, Homo sapiens
tgtgctttcacatat

SEQ ID NO: 233417 - DNA, 15 bp, Homo sapiens
atgtgctttcacata

SEQ ID NO: 233418 - DNA, 15 bp, Homo sapiens
aatgtgctttcacat

SEQ ID NO: 233419 - DNA, 15 bp, Homo sapiens
caatgtgctttcaca

SEQ ID NO: 233420 - DNA, 15 bp, Homo sapiens
acaatgtgctttcac

SEQ ID NO: 233421 - DNA, 15 bp, Homo sapiens
gacaatgtgctttca

SEQ ID NO: 233422 - DNA, 15 bp, Homo sapiens
tgacaatgtgctttc

SEQ ID NO: 233423 - DNA, 15 bp, Homo sapiens
atgacaatgtgcttt

SEQ ID NO: 233424 - DNA, 15 bp, Homo sapiens
tatgacaatgtgctt

SEQ ID NO: 233425 - DNA, 15 bp, Homo sapiens
atatgacaatgtgct

SEQ ID NO: 233426 - DNA, 15 bp, Homo sapiens
aatatgacaatgtgc

SEQ ID NO: 233427 - DNA, 15 bp, Homo sapiens
aaatatgacaatgtg

SEQ ID NO: 233428 - DNA, 15 bp, Homo sapiens
aaaatatgacaatgt

SEQ ID NO: 233429 - DNA, 15 bp, Homo sapiens
aaaaatatgacaatg

SEQ ID NO: 233430 - DNA, 15 bp, Homo sapiens
taaaaatatgacaat

SEQ ID NO: 233431 - DNA, 15 bp, Homo sapiens
ataaaaatatgacaa

SEQ ID NO: 233432 - DNA, 15 bp, Homo sapiens
aataaaaatatgaca

SEQ ID NO: 233433 - DNA, 15 bp, Homo sapiens
gaataaaaatatgac

SEQ ID NO: 233434 - DNA, 15 bp, Homo sapiens
tgaataaaaatatga

SEQ ID NO: 233435 - DNA, 15 bp, Homo sapiens
ttgaataaaaatatg

SEQ ID NO: 233436 - DNA, 15 bp, Homo sapiens
attgaataaaaatat

SEQ ID NO: 233437 - DNA, 15 bp, Homo sapiens
tattgaataaaaata

SEQ ID NO: 233438 - DNA, 15 bp, Homo sapiens
ttattgaataaaaat

SEQ ID NO: 233439 - DNA, 15 bp, Homo sapiens
attattgaataaaaa

SEQ ID NO: 233440 - DNA, 15 bp, Homo sapiens
gattattgaataaaa

SEQ ID NO: 233441 - DNA, 15 bp, Homo sapiens
tgattattgaataaa

SEQ ID NO: 233442 - DNA, 15 bp, Homo sapiens
ttgattattgaataa

SEQ ID NO: 233443 - DNA, 15 bp, Homo sapiens
attgattattgaata

SEQ ID NO: 233444 - DNA, 15 bp, Homo sapiens
tattgattattgaat

SEQ ID NO: 233445 - DNA, 15 bp, Homo sapiens
ttattgattattgaa

SEQ ID NO: 233446 - DNA, 15 bp, Homo sapiens
attattgattattga

SEQ ID NO: 233447 - DNA, 15 bp, Homo sapiens
aattattgattattg

SEQ ID NO: 233448 - DNA, 15 bp, Homo sapiens
gaattattgattatt

SEQ ID NO: 233449 - DNA, 15 bp, Homo sapiens
tgaattattgattat

SEQ ID NO: 233450 - DNA, 15 bp, Homo sapiens
ttgaattattgatta

SEQ ID NO: 233451 - DNA, 15 bp, Homo sapiens
attgaattattgatt

SEQ ID NO: 233452 - DNA, 15 bp, Homo sapiens
tattgaattattgat

SEQ ID NO: 233453 - DNA, 15 bp, Homo sapiens
ttattgaattattga

SEQ ID NO: 233454 - DNA, 15 bp, Homo sapiens
attattgaattattg

SEQ ID NO: 233455 - DNA, 15 bp, Homo sapiens
gattattgaattatt

SEQ ID NO: 233456 - DNA, 15 bp, Homo sapiens
agattattgaattat

SEQ ID NO: 233457 - DNA, 15 bp, Homo sapiens
aagattattgaatta

SEQ ID NO: 233458 - DNA, 15 bp, Homo sapiens
taagattattgaatt

SEQ ID NO: 233459 - DNA, 15 bp, Homo sapiens
ataagattattgaat

SEQ ID NO: 233460 - DNA, 15 bp, Homo sapiens
aataagattattgaa

SEQ ID NO: 233461 - DNA, 15 bp, Homo sapiens
caataagattattga

SEQ ID NO: 233462 - DNA, 15 bp, Homo sapiens
tcaataagattattg

SEQ ID NO: 233463 - DNA, 15 bp, Homo sapiens
ctcaataagattatt

SEQ ID NO: 233464 - DNA, 15 bp, Homo sapiens
actcaataagattat

SEQ ID NO: 233465 - DNA, 15 bp, Homo sapiens
tactcaataagatta

SEQ ID NO: 233466 - DNA, 15 bp, Homo sapiens
atactcaataagatt

SEQ ID NO: 233467 - DNA, 15 bp, Homo sapiens
gatactcaataagat

SEQ ID NO: 233468 - DNA, 15 bp, Homo sapiens
agatactcaataaga

SEQ ID NO: 233469 - DNA, 15 bp, Homo sapiens
cagatactcaataag

SEQ ID NO: 233470 - DNA, 15 bp, Homo sapiens
ccagatactcaataa

SEQ ID NO: 233471 - DNA, 15 bp, Homo sapiens
tccagatactcaata

SEQ ID NO: 233472 - DNA, 15 bp, Homo sapiens
ctccagatactcaat

SEQ ID NO: 233473 - DNA, 15 bp, Homo sapiens
tctccagatactcaa

SEQ ID NO: 233474 - DNA, 15 bp, Homo sapiens
ctctccagatactca

SEQ ID NO: 233475 - DNA, 15 bp, Homo sapiens
tctctccagatactc

SEQ ID NO: 233476 - DNA, 15 bp, Homo sapiens
gtctctccagatact

SEQ ID NO: 233477 - DNA, 15 bp, Homo sapiens
ggtctctccagatac

SEQ ID NO: 233478 - DNA, 15 bp, Homo sapiens
tggtctctccagata

SEQ ID NO: 233479 - DNA, 15 bp, Homo sapiens
ctggtctctccagat

SEQ ID NO: 233480 - DNA, 15 bp, Homo sapiens
cctggtctctccaga

SEQ ID NO: 233481 - DNA, 15 bp, Homo sapiens
gcctggtctctccag

SEQ ID NO: 233482 - DNA, 15 bp, Homo sapiens
agcctggtctctcca

SEQ ID NO: 233483 - DNA, 15 bp, Homo sapiens
gagcctggtctctcc

SEQ ID NO: 233484 - DNA, 15 bp, Homo sapiens
agagcctggtctctc

SEQ ID NO: 233485 - DNA, 15 bp, Homo sapiens
gagagcctggtctct

SEQ ID NO: 233486 - DNA, 15 bp, Homo sapiens
agagagcctggtctc

SEQ ID NO: 233487 - DNA, 15 bp, Homo sapiens
cagagagcctggtct

SEQ ID NO: 233488 - DNA, 15 bp, Homo sapiens
acagagagcctggtc

SEQ ID NO: 233489 - DNA, 15 bp, Homo sapiens
aacagagagcctggt

SEQ ID NO: 233490 - DNA, 15 bp, Homo sapiens
caacagagagcctgg

SEQ ID NO: 233491 - DNA, 15 bp, Homo sapiens
ccaacagagagcctg

SEQ ID NO: 233492 - DNA, 15 bp, Homo sapiens
cccaacagagagcct

SEQ ID NO: 233493 - DNA, 15 bp, Homo sapiens
acccaacagagagcc

SEQ ID NO: 233494 - DNA, 15 bp, Homo sapiens
tacccaacagagagc

SEQ ID NO: 233495 - DNA, 15 bp, Homo sapiens
ttacccaacagagag

SEQ ID NO: 233496 - DNA, 15 bp, Homo sapiens
attacccaacagaga

SEQ ID NO: 233497 - DNA, 15 bp, Homo sapiens
aattacccaacagag

SEQ ID NO: 233498 - DNA, 15 bp, Homo sapiens
caattacccaacaga

SEQ ID NO: 233499 - DNA, 15 bp, Homo sapiens
acaattacccaacag

SEQ ID NO: 233500 - DNA, 15 bp, Homo sapiens
aacaattacccaaca

SEQ ID NO: 233501 - DNA, 15 bp, Homo sapiens
caacaattacccaac

SEQ ID NO: 233502 - DNA, 15 bp, Homo sapiens
tcaacaattacccaa

SEQ ID NO: 233503 - DNA, 15 bp, Homo sapiens
atcaacaattaccca

SEQ ID NO: 233504 - DNA, 15 bp, Homo sapiens
gatcaacaattaccc

SEQ ID NO: 233505 - DNA, 15 bp, Homo sapiens
tgatcaacaattacc

SEQ ID NO: 233506 - DNA, 15 bp, Homo sapiens
ttgatcaacaattac

SEQ ID NO: 233507 - DNA, 15 bp, Homo sapiens
tttgatcaacaatta

SEQ ID NO: 233508 - DNA, 15 bp, Homo sapiens
ttttgatcaacaatt

SEQ ID NO: 233509 - DNA, 15 bp, Homo sapiens
attttgatcaacaat

SEQ ID NO: 233510 - DNA, 15 bp, Homo sapiens
cattttgatcaacaa

SEQ ID NO: 233511 - DNA, 15 bp, Homo sapiens
ccattttgatcaaca

SEQ ID NO: 233512 - DNA, 15 bp, Homo sapiens
tccattttgatcaac

SEQ ID NO: 233513 - DNA, 15 bp, Homo sapiens
ttccattttgatcaa

SEQ ID NO: 233514 - DNA, 15 bp, Homo sapiens
attccattttgatca

SEQ ID NO: 233515 - DNA, 15 bp, Homo sapiens
cattccattttgatc

SEQ ID NO: 233516 - DNA, 15 bp, Homo sapiens
tcattccattttgat

SEQ ID NO: 233517 - DNA, 15 bp, Homo sapiens
ctcattccattttga

SEQ ID NO: 233518 - DNA, 15 bp, Homo sapiens
tctcattccattttg

SEQ ID NO: 233519 - DNA, 15 bp, Homo sapiens
atctcattccatttt

SEQ ID NO: 233520 - DNA, 15 bp, Homo sapiens
tatctcattccattt

SEQ ID NO: 233521 - DNA, 15 bp, Homo sapiens
atatctcattccatt

SEQ ID NO: 233522 - DNA, 15 bp, Homo sapiens
tatatctcattccat

SEQ ID NO: 233523 - DNA, 15 bp, Homo sapiens
ttatatctcattcca

SEQ ID NO: 233524 - DNA, 15 bp, Homo sapiens
tttatatctcattcc

SEQ ID NO: 233525 - DNA, 15 bp, Homo sapiens
atttatatctcattc

SEQ ID NO: 233526 - DNA, 15 bp, Homo sapiens
gatttatatctcatt

SEQ ID NO: 233527 - DNA, 15 bp, Homo sapiens
tgatttatatctcat

SEQ ID NO: 233528 - DNA, 15 bp, Homo sapiens
atgatttatatctca

SEQ ID NO: 233529 - DNA, 15 bp, Homo sapiens
catgatttatatctc

SEQ ID NO: 233530 - DNA, 15 bp, Homo sapiens
acatgatttatatct

SEQ ID NO: 233531 - DNA, 15 bp, Homo sapiens
tacatgatttatatc

SEQ ID NO: 233532 - DNA, 15 bp, Homo sapiens
atacatgatttatat

SEQ ID NO: 233533 - DNA, 15 bp, Homo sapiens
tatacatgatttata

SEQ ID NO: 233534 - DNA, 15 bp, Homo sapiens
ttatacatgatttat

SEQ ID NO: 233535 - DNA, 15 bp, Homo sapiens
tttatacatgattta

SEQ ID NO: 233536 - DNA, 15 bp, Homo sapiens
gtttatacatgattt

SEQ ID NO: 233537 - DNA, 15 bp, Homo sapiens
tgtttatacatgatt

SEQ ID NO: 233538 - DNA, 15 bp, Homo sapiens
gtgtttatacatgat

SEQ ID NO: 233539 - DNA, 15 bp, Homo sapiens
tgtgtttatacatga

SEQ ID NO: 233540 - DNA, 15 bp, Homo sapiens
atgtgtttatacatg

SEQ ID NO: 233541 - DNA, 15 bp, Homo sapiens
aatgtgtttatacat

SEQ ID NO: 233542 - DNA, 15 bp, Homo sapiens
caatgtgtttataca

SEQ ID NO: 233543 - DNA, 15 bp, Homo sapiens
tcaatgtgtttatac

SEQ ID NO: 233544 - DNA, 15 bp, Homo sapiens
ctcaatgtgtttata

SEQ ID NO: 233545 - DNA, 15 bp, Homo sapiens
actcaatgtgtttat

SEQ ID NO: 233546 - DNA, 15 bp, Homo sapiens
tactcaatgtgttta

SEQ ID NO: 233547 - DNA, 15 bp, Homo sapiens
atactcaatgtgttt

SEQ ID NO: 233548 - DNA, 15 bp, Homo sapiens
catactcaatgtgtt

SEQ ID NO: 233549 - DNA, 15 bp, Homo sapiens
tcatactcaatgtgt

SEQ ID NO: 233550 - DNA, 15 bp, Homo sapiens
gtcatactcaatgtg

SEQ ID NO: 233551 - DNA, 15 bp, Homo sapiens
agtcatactcaatgt

SEQ ID NO: 233552 - DNA, 15 bp, Homo sapiens
cagtcatactcaatg

SEQ ID NO: 233553 - DNA, 15 bp, Homo sapiens
acagtcatactcaat

SEQ ID NO: 233554 - DNA, 15 bp, Homo sapiens
cacagtcatactcaa

SEQ ID NO: 233555 - DNA, 15 bp, Homo sapiens
acacagtcatactca

SEQ ID NO: 233556 - DNA, 15 bp, Homo sapiens
tacacagtcatactc

SEQ ID NO: 233557 - DNA, 15 bp, Homo sapiens
ctacacagtcatact

SEQ ID NO: 233558 - DNA, 15 bp, Homo sapiens
tctacacagtcatac

SEQ ID NO: 233559 - DNA, 15 bp, Homo sapiens
ttctacacagtcata

SEQ ID NO: 233560 - DNA, 15 bp, Homo sapiens
cttctacacagtcat

SEQ ID NO: 233561 - DNA, 15 bp, Homo sapiens
tcttctacacagtca

SEQ ID NO: 233562 - DNA, 15 bp, Homo sapiens
gtcttctacacagtc

SEQ ID NO: 233563 - DNA, 15 bp, Homo sapiens
tgtcttctacacagt

SEQ ID NO: 233564 - DNA, 15 bp, Homo sapiens
ttgtcttctacacag

SEQ ID NO: 233565 - DNA, 15 bp, Homo sapiens
cttgtcttctacaca

SEQ ID NO: 233566 - DNA, 15 bp, Homo sapiens
acttgtcttctacac

SEQ ID NO: 233567 - DNA, 15 bp, Homo sapiens
cacttgtcttctaca

SEQ ID NO: 233568 - DNA, 15 bp, Homo sapiens
ccacttgtcttctac

SEQ ID NO: 233569 - DNA, 15 bp, Homo sapiens
gccacttgtcttcta

SEQ ID NO: 233570 - DNA, 15 bp, Homo sapiens
tgccacttgtcttct

SEQ ID NO: 233571 - DNA, 15 bp, Homo sapiens
ttgccacttgtcttc

SEQ ID NO: 233572 - DNA, 15 bp, Homo sapiens
tttgccacttgtctt

SEQ ID NO: 233573 - DNA, 15 bp, Homo sapiens
gtttgccacttgtct

SEQ ID NO: 233574 - DNA, 15 bp, Homo sapiens
tgtttgccacttgtc

SEQ ID NO: 233575 - DNA, 15 bp, Homo sapiens
atgtttgccacttgt

SEQ ID NO: 233576 - DNA, 15 bp, Homo sapiens
aatgtttgccacttg

SEQ ID NO: 233577 - DNA, 15 bp, Homo sapiens
taatgtttgccactt

SEQ ID NO: 233578 - DNA, 15 bp, Homo sapiens
ataatgtttgccact

SEQ ID NO: 233579 - DNA, 15 bp, Homo sapiens
aataatgtttgccac

SEQ ID NO: 233580 - DNA, 15 bp, Homo sapiens
gaataatgtttgcca

SEQ ID NO: 233581 - DNA, 15 bp, Homo sapiens
agaataatgtttgcc

SEQ ID NO: 233582 - DNA, 15 bp, Homo sapiens
aagaataatgtttgc

SEQ ID NO: 233583 - DNA, 15 bp, Homo sapiens
gaagaataatgtttg

SEQ ID NO: 233584 - DNA, 15 bp, Homo sapiens
agaagaataatgttt

SEQ ID NO: 233585 - DNA, 15 bp, Homo sapiens
gagaagaataatgtt

SEQ ID NO: 233586 - DNA, 15 bp, Homo sapiens
agagaagaataatgt

SEQ ID NO: 233587 - DNA, 15 bp, Homo sapiens
aagagaagaataatg

SEQ ID NO: 233588 - DNA, 15 bp, Homo sapiens
caagagaagaataat

SEQ ID NO: 233589 - DNA, 15 bp, Homo sapiens
acaagagaagaataa

SEQ ID NO: 233590 - DNA, 15 bp, Homo sapiens
gacaagagaagaata

SEQ ID NO: 233591 - DNA, 15 bp, Homo sapiens
ggacaagagaagaat

SEQ ID NO: 233592 - DNA, 15 bp, Homo sapiens
gggacaagagaagaa

SEQ ID NO: 233593 - DNA, 15 bp, Homo sapiens
ggggacaagagaaga

SEQ ID NO: 233594 - DNA, 15 bp, Homo sapiens
tggggacaagagaag

SEQ ID NO: 233595 - DNA, 15 bp, Homo sapiens
atggggacaagagaa

SEQ ID NO: 233596 - DNA, 15 bp, Homo sapiens
catggggacaagaga

SEQ ID NO: 233597 - DNA, 15 bp, Homo sapiens
acatggggacaagag

SEQ ID NO: 233598 - DNA, 15 bp, Homo sapiens
aacatggggacaaga

SEQ ID NO: 233599 - DNA, 15 bp, Homo sapiens
taacatggggacaag

SEQ ID NO: 233600 - DNA, 15 bp, Homo sapiens
gtaacatggggacaa

SEQ ID NO: 233601 - DNA, 15 bp, Homo sapiens
tgtaacatggggaca

SEQ ID NO: 233602 - DNA, 15 bp, Homo sapiens
ctgtaacatggggac

SEQ ID NO: 233603 - DNA, 15 bp, Homo sapiens
cctgtaacatgggga

SEQ ID NO: 233604 - DNA, 15 bp, Homo sapiens
acctgtaacatgggg

SEQ ID NO: 233605 - DNA, 15 bp, Homo sapiens
cacctgtaacatggg

SEQ ID NO: 233606 - DNA, 15 bp, Homo sapiens
tcacctgtaacatgg

SEQ ID NO: 233607 - DNA, 15 bp, Homo sapiens
ctcacctgtaacatg

SEQ ID NO: 233608 - DNA, 15 bp, Homo sapiens
tctcacctgtaacat

SEQ ID NO: 233609 - DNA, 15 bp, Homo sapiens
ttctcacctgtaaca

SEQ ID NO: 233610 - DNA, 15 bp, Homo sapiens
tttctcacctgtaac

SEQ ID NO: 233611 - DNA, 15 bp, Homo sapiens
ttttctcacctgtaa

SEQ ID NO: 233612 - DNA, 15 bp, Homo sapiens
gttttctcacctgta

SEQ ID NO: 233613 - DNA, 15 bp, Homo sapiens
ggttttctcacctgt

SEQ ID NO: 233614 - DNA, 15 bp, Homo sapiens
tggttttctcacctg

SEQ ID NO: 233615 - DNA, 15 bp, Homo sapiens
ttggttttctcacct

SEQ ID NO: 233616 - DNA, 15 bp, Homo sapiens
cttggttttctcacc

SEQ ID NO: 233617 - DNA, 15 bp, Homo sapiens
ccttggttttctcac

SEQ ID NO: 233618 - DNA, 15 bp, Homo sapiens
gccttggttttctca

SEQ ID NO: 233619 - DNA, 15 bp, Homo sapiens
agccttggttttctc

SEQ ID NO: 233620 - DNA, 15 bp, Homo sapiens
gagccttggttttct

SEQ ID NO: 233621 - DNA, 15 bp, Homo sapiens
tgagccttggttttc

SEQ ID NO: 233622 - DNA, 15 bp, Homo sapiens
ctgagccttggtttt

SEQ ID NO: 233623 - DNA, 15 bp, Homo sapiens
tctgagccttggttt

SEQ ID NO: 233624 - DNA, 15 bp, Homo sapiens
ctctgagccttggtt

SEQ ID NO: 233625 - DNA, 15 bp, Homo sapiens
tctctgagccttggt

SEQ ID NO: 233626 - DNA, 15 bp, Homo sapiens
ttctctgagccttgg

SEQ ID NO: 233627 - DNA, 15 bp, Homo sapiens
attctctgagccttg

SEQ ID NO: 233628 - DNA, 15 bp, Homo sapiens
gattctctgagcctt

SEQ ID NO: 233629 - DNA, 15 bp, Homo sapiens
agattctctgagcct

SEQ ID NO: 233630 - DNA, 15 bp, Homo sapiens
aagattctctgagcc

SEQ ID NO: 233631 - DNA, 15 bp, Homo sapiens
aaagattctctgagc

SEQ ID NO: 233632 - DNA, 15 bp, Homo sapiens
taaagattctctgag

SEQ ID NO: 233633 - DNA, 15 bp, Homo sapiens
ttaaagattctctga

SEQ ID NO: 233634 - DNA, 15 bp, Homo sapiens
attaaagattctctg

SEQ ID NO: 233635 - DNA, 15 bp, Homo sapiens
tattaaagattctct

SEQ ID NO: 233636 - DNA, 15 bp, Homo sapiens
ctattaaagattctc

SEQ ID NO: 233637 - DNA, 15 bp, Homo sapiens
gctattaaagattct

SEQ ID NO: 233638 - DNA, 15 bp, Homo sapiens
agctattaaagattc

SEQ ID NO: 233639 - DNA, 15 bp, Homo sapiens
aagctattaaagatt

SEQ ID NO: 233640 - DNA, 15 bp, Homo sapiens
taagctattaaagat

SEQ ID NO: 233641 - DNA, 15 bp, Homo sapiens
ctaagctattaaaga

SEQ ID NO: 233642 - DNA, 15 bp, Homo sapiens
cctaagctattaaag

SEQ ID NO: 233643 - DNA, 15 bp, Homo sapiens
acctaagctattaaa

SEQ ID NO: 233644 - DNA, 15 bp, Homo sapiens
cacctaagctattaa

SEQ ID NO: 233645 - DNA, 15 bp, Homo sapiens
tcacctaagctatta

SEQ ID NO: 233646 - DNA, 15 bp, Homo sapiens
ctcacctaagctatt

SEQ ID NO: 233647 - DNA, 15 bp, Homo sapiens
tctcacctaagctat

SEQ ID NO: 233648 - DNA, 15 bp, Homo sapiens
atctcacctaagcta

SEQ ID NO: 233649 - DNA, 15 bp, Homo sapiens
gatctcacctaagct

SEQ ID NO: 233650 - DNA, 15 bp, Homo sapiens
tgatctcacctaagc

SEQ ID NO: 233651 - DNA, 15 bp, Homo sapiens
gtgatctcacctaag

SEQ ID NO: 233652 - DNA, 15 bp, Homo sapiens
tgtgatctcacctaa

SEQ ID NO: 233653 - DNA, 15 bp, Homo sapiens
gtgtgatctcaccta

SEQ ID NO: 233654 - DNA, 15 bp, Homo sapiens
tgtgtgatctcacct

SEQ ID NO: 233655 - DNA, 15 bp, Homo sapiens
atgtgtgatctcacc

SEQ ID NO: 233656 - DNA, 15 bp, Homo sapiens
gatgtgtgatctcac

SEQ ID NO: 233657 - DNA, 15 bp, Homo sapiens
ggatgtgtgatctca

SEQ ID NO: 233658 - DNA, 15 bp, Homo sapiens
tggatgtgtgatctc

SEQ ID NO: 233659 - DNA, 15 bp, Homo sapiens
ttggatgtgtgatct

SEQ ID NO: 233660 - DNA, 15 bp, Homo sapiens
attggatgtgtgatc

SEQ ID NO: 233661 - DNA, 15 bp, Homo sapiens
tattggatgtgtgat

SEQ ID NO: 233662 - DNA, 15 bp, Homo sapiens
ttattggatgtgtga

SEQ ID NO: 233663 - DNA, 15 bp, Homo sapiens
cttattggatgtgtg

SEQ ID NO: 233664 - DNA, 15 bp, Homo sapiens
gcttattggatgtgt

SEQ ID NO: 233665 - DNA, 15 bp, Homo sapiens
tgcttattggatgtg

SEQ ID NO: 233666 - DNA, 15 bp, Homo sapiens
atgcttattggatgt

SEQ ID NO: 233667 - DNA, 15 bp, Homo sapiens
gatgcttattggatg

SEQ ID NO: 233668 - DNA, 15 bp, Homo sapiens
agatgcttattggat

SEQ ID NO: 233669 - DNA, 15 bp, Homo sapiens
cagatgcttattgga

SEQ ID NO: 233670 - DNA, 15 bp, Homo sapiens
tcagatgcttattgg

SEQ ID NO: 233671 - DNA, 15 bp, Homo sapiens
ttcagatgcttattg

SEQ ID NO: 233672 - DNA, 15 bp, Homo sapiens
gttcagatgcttatt

SEQ ID NO: 233673 - DNA, 15 bp, Homo sapiens
agttcagatgcttat

SEQ ID NO: 233674 - DNA, 15 bp, Homo sapiens
cagttcagatgctta

SEQ ID NO: 233675 - DNA, 15 bp, Homo sapiens
tcagttcagatgctt

SEQ ID NO: 233676 - DNA, 15 bp, Homo sapiens
ctcagttcagatgct

SEQ ID NO: 233677 - DNA, 15 bp, Homo sapiens
tctcagttcagatgc

SEQ ID NO: 233678 - DNA, 15 bp, Homo sapiens
atctcagttcagatg

SEQ ID NO: 233679 - DNA, 15 bp, Homo sapiens
aatctcagttcagat

SEQ ID NO: 233680 - DNA, 15 bp, Homo sapiens
aaatctcagttcaga

SEQ ID NO: 233681 - DNA, 15 bp, Homo sapiens
taaatctcagttcag

SEQ ID NO: 233682 - DNA, 15 bp, Homo sapiens
ttaaatctcagttca

SEQ ID NO: 233683 - DNA, 15 bp, Homo sapiens
tttaaatctcagttc

SEQ ID NO: 233684 - DNA, 15 bp, Homo sapiens
atttaaatctcagtt

SEQ ID NO: 233685 - DNA, 15 bp, Homo sapiens
gatttaaatctcagt

SEQ ID NO: 233686 - DNA, 15 bp, Homo sapiens
agatttaaatctcag

SEQ ID NO: 233687 - DNA, 15 bp, Homo sapiens
cagatttaaatctca

SEQ ID NO: 233688 - DNA, 15 bp, Homo sapiens
ccagatttaaatctc

SEQ ID NO: 233689 - DNA, 15 bp, Homo sapiens
cccagatttaaatct

SEQ ID NO: 233690 - DNA, 15 bp, Homo sapiens
tcccagatttaaatc

SEQ ID NO: 233691 - DNA, 15 bp, Homo sapiens
atcccagatttaaat

SEQ ID NO: 233692 - DNA, 15 bp, Homo sapiens
gatcccagatttaaa

SEQ ID NO: 233693 - DNA, 15 bp, Homo sapiens
agatcccagatttaa

SEQ ID NO: 233694 - DNA, 15 bp, Homo sapiens
gagatcccagattta

SEQ ID NO: 233695 - DNA, 15 bp, Homo sapiens
tgagatcccagattt

SEQ ID NO: 233696 - DNA, 15 bp, Homo sapiens
atgagatcccagatt

SEQ ID NO: 233697 - DNA, 15 bp, Homo sapiens
catgagatcccagat

SEQ ID NO: 233698 - DNA, 15 bp, Homo sapiens
tcatgagatcccaga

SEQ ID NO: 233699 - DNA, 15 bp, Homo sapiens
gtcatgagatcccag

SEQ ID NO: 233700 - DNA, 15 bp, Homo sapiens
agtcatgagatccca

SEQ ID NO: 233701 - DNA, 15 bp, Homo sapiens
gagtcatgagatccc

SEQ ID NO: 233702 - DNA, 15 bp, Homo sapiens
cgagtcatgagatcc

SEQ ID NO: 233703 - DNA, 15 bp, Homo sapiens
tcgagtcatgagatc

SEQ ID NO: 233704 - DNA, 15 bp, Homo sapiens
atcgagtcatgagat

SEQ ID NO: 233705 - DNA, 15 bp, Homo sapiens
catcgagtcatgaga

SEQ ID NO: 233706 - DNA, 15 bp, Homo sapiens
tcatcgagtcatgag

SEQ ID NO: 233707 - DNA, 15 bp, Homo sapiens
gtcatcgagtcatga

SEQ ID NO: 233708 - DNA, 15 bp, Homo sapiens
ggtcatcgagtcatg

SEQ ID NO: 233709 - DNA, 15 bp, Homo sapiens
gggtcatcgagtcat

SEQ ID NO: 233710 - DNA, 15 bp, Homo sapiens
tgggtcatcgagtca

SEQ ID NO: 233711 - DNA, 15 bp, Homo sapiens
ctgggtcatcgagtc

SEQ ID NO: 233712 - DNA, 15 bp, Homo sapiens
cctgggtcatcgagt

SEQ ID NO: 233713 - DNA, 15 bp, Homo sapiens
gcctgggtcatcgag

SEQ ID NO: 233714 - DNA, 15 bp, Homo sapiens
agcctgggtcatcga

SEQ ID NO: 233715 - DNA, 15 bp, Homo sapiens
cagcctgggtcatcg

SEQ ID NO: 233716 - DNA, 15 bp, Homo sapiens
acagcctgggtcatc

SEQ ID NO: 233717 - DNA, 15 bp, Homo sapiens
aacagcctgggtcat

SEQ ID NO: 233718 - DNA, 15 bp, Homo sapiens
aaacagcctgggtca

SEQ ID NO: 233719 - DNA, 15 bp, Homo sapiens
aaaacagcctgggtc

SEQ ID NO: 233720 - DNA, 15 bp, Homo sapiens
gaaaacagcctgggt

SEQ ID NO: 233721 - DNA, 15 bp, Homo sapiens
tgaaaacagcctggg

SEQ ID NO: 233722 - DNA, 15 bp, Homo sapiens
atgaaaacagcctgg

SEQ ID NO: 233723 - DNA, 15 bp, Homo sapiens
catgaaaacagcctg

SEQ ID NO: 233724 - DNA, 15 bp, Homo sapiens
acatgaaaacagcct

SEQ ID NO: 233725 - DNA, 15 bp, Homo sapiens
aacatgaaaacagcc

SEQ ID NO: 233726 - DNA, 15 bp, Homo sapiens
taacatgaaaacagc

SEQ ID NO: 233727 - DNA, 15 bp, Homo sapiens
gtaacatgaaaacag

SEQ ID NO: 233728 - DNA, 15 bp, Homo sapiens
ggtaacatgaaaaca

SEQ ID NO: 233729 - DNA, 15 bp, Homo sapiens
tggtaacatgaaaac

SEQ ID NO: 233730 - DNA, 15 bp, Homo sapiens
atggtaacatgaaaa

SEQ ID NO: 233731 - DNA, 15 bp, Homo sapiens
catggtaacatgaaa

SEQ ID NO: 233732 - DNA, 15 bp, Homo sapiens
ccatggtaacatgaa

SEQ ID NO: 233733 - DNA, 15 bp, Homo sapiens
accatggtaacatga

SEQ ID NO: 233734 - DNA, 15 bp, Homo sapiens
caccatggtaacatg

SEQ ID NO: 233735 - DNA, 15 bp, Homo sapiens
gcaccatggtaacat

SEQ ID NO: 233736 - DNA, 15 bp, Homo sapiens
agcaccatggtaaca

SEQ ID NO: 233737 - DNA, 15 bp, Homo sapiens
aagcaccatggtaac

SEQ ID NO: 233738 - DNA, 15 bp, Homo sapiens
gaagcaccatggtaa

SEQ ID NO: 233739 - DNA, 15 bp, Homo sapiens
agaagcaccatggta

SEQ ID NO: 233740 - DNA, 15 bp, Homo sapiens
gagaagcaccatggt

SEQ ID NO: 233741 - DNA, 15 bp, Homo sapiens
tgagaagcaccatgg

SEQ ID NO: 233742 - DNA, 15 bp, Homo sapiens
atgagaagcaccatg

SEQ ID NO: 233743 - DNA, 15 bp, Homo sapiens
aatgagaagcaccat

SEQ ID NO: 233744 - DNA, 15 bp, Homo sapiens
gaatgagaagcacca

SEQ ID NO: 233745 - DNA, 15 bp, Homo sapiens
tgaatgagaagcacc

SEQ ID NO: 233746 - DNA, 15 bp, Homo sapiens
ttgaatgagaagcac

SEQ ID NO: 233747 - DNA, 15 bp, Homo sapiens
cttgaatgagaagca

SEQ ID NO: 233748 - DNA, 15 bp, Homo sapiens
tcttgaatgagaagc

SEQ ID NO: 233749 - DNA, 15 bp, Homo sapiens
ttcttgaatgagaag

SEQ ID NO: 233750 - DNA, 15 bp, Homo sapiens
attcttgaatgagaa

SEQ ID NO: 233751 - DNA, 15 bp, Homo sapiens
cattcttgaatgaga

SEQ ID NO: 233752 - DNA, 15 bp, Homo sapiens
tcattcttgaatgag

SEQ ID NO: 233753 - DNA, 15 bp, Homo sapiens
ctcattcttgaatga

SEQ ID NO: 233754 - DNA, 15 bp, Homo sapiens
actcattcttgaatg

SEQ ID NO: 233755 - DNA, 15 bp, Homo sapiens
cactcattcttgaat

SEQ ID NO: 233756 - DNA, 15 bp, Homo sapiens
tcactcattcttgaa

SEQ ID NO: 233757 - DNA, 15 bp, Homo sapiens
ttcactcattcttga

SEQ ID NO: 233758 - DNA, 15 bp, Homo sapiens
cttcactcattcttg

SEQ ID NO: 233759 - DNA, 15 bp, Homo sapiens
ccttcactcattctt

SEQ ID NO: 233760 - DNA, 15 bp, Homo sapiens
tccttcactcattct

SEQ ID NO: 233761 - DNA, 15 bp, Homo sapiens
ttccttcactcattc

SEQ ID NO: 233762 - DNA, 15 bp, Homo sapiens
attccttcactcatt

SEQ ID NO: 233763 - DNA, 15 bp, Homo sapiens
cattccttcactcat

SEQ ID NO: 233764 - DNA, 15 bp, Homo sapiens
tcattccttcactca

SEQ ID NO: 233765 - DNA, 15 bp, Homo sapiens
ttcattccttcactc

SEQ ID NO: 233766 - DNA, 15 bp, Homo sapiens
attcattccttcact

SEQ ID NO: 233767 - DNA, 15 bp, Homo sapiens
cattcattccttcac

SEQ ID NO: 233768 - DNA, 15 bp, Homo sapiens
ccattcattccttca

SEQ ID NO: 233769 - DNA, 15 bp, Homo sapiens
cccattcattccttc

SEQ ID NO: 233770 - DNA, 15 bp, Homo sapiens
gcccattcattcctt

SEQ ID NO: 233771 - DNA, 15 bp, Homo sapiens
tgcccattcattcct

SEQ ID NO: 233772 - DNA, 15 bp, Homo sapiens
atgcccattcattcc

SEQ ID NO: 233773 - DNA, 15 bp, Homo sapiens
tatgcccattcattc

SEQ ID NO: 233774 - DNA, 15 bp, Homo sapiens
ctatgcccattcatt

SEQ ID NO: 233775 - DNA, 15 bp, Homo sapiens
cctatgcccattcat

SEQ ID NO: 233776 - DNA, 15 bp, Homo sapiens
tcctatgcccattca

SEQ ID NO: 233777 - DNA, 15 bp, Homo sapiens
ttcctatgcccattc

SEQ ID NO: 233778 - DNA, 15 bp, Homo sapiens
tttcctatgcccatt

SEQ ID NO: 233779 - DNA, 15 bp, Homo sapiens
ctttcctatgcccat

SEQ ID NO: 233780 - DNA, 15 bp, Homo sapiens
tctttcctatgccca

SEQ ID NO: 233781 - DNA, 15 bp, Homo sapiens
ttctttcctatgccc

SEQ ID NO: 233782 - DNA, 15 bp, Homo sapiens
attctttcctatgcc

SEQ ID NO: 233783 - DNA, 15 bp, Homo sapiens
cattctttcctatgc

SEQ ID NO: 233784 - DNA, 15 bp, Homo sapiens
tcattctttcctatg

SEQ ID NO: 233785 - DNA, 15 bp, Homo sapiens
ttcattctttcctat

SEQ ID NO: 233786 - DNA, 15 bp, Homo sapiens
attcattctttccta

SEQ ID NO: 233787 - DNA, 15 bp, Homo sapiens
cattcattctttcct

SEQ ID NO: 233788 - DNA, 15 bp, Homo sapiens
tcattcattctttcc

SEQ ID NO: 233789 - DNA, 15 bp, Homo sapiens
ttcattcattctttc

SEQ ID NO: 233790 - DNA, 15 bp, Homo sapiens
attcattcattcttt

SEQ ID NO: 233791 - DNA, 15 bp, Homo sapiens
cattcattcattctt

SEQ ID NO: 233792 - DNA, 15 bp, Homo sapiens
ccattcattcattct

SEQ ID NO: 233793 - DNA, 15 bp, Homo sapiens
cccattcattcattc

SEQ ID NO: 233794 - DNA, 15 bp, Homo sapiens
tcccattcattcatt

SEQ ID NO: 233795 - DNA, 15 bp, Homo sapiens
ttcccattcattcat

SEQ ID NO: 233796 - DNA, 15 bp, Homo sapiens
cttcccattcattca

SEQ ID NO: 233797 - DNA, 15 bp, Homo sapiens
tcttcccattcattc

SEQ ID NO: 233798 - DNA, 15 bp, Homo sapiens
atcttcccattcatt

SEQ ID NO: 233799 - DNA, 15 bp, Homo sapiens
gatcttcccattcat

SEQ ID NO: 233800 - DNA, 15 bp, Homo sapiens
agatcttcccattca

SEQ ID NO: 233801 - DNA, 15 bp, Homo sapiens
gagatcttcccattc

SEQ ID NO: 233802 - DNA, 15 bp, Homo sapiens
tgagatcttcccatt

SEQ ID NO: 233803 - DNA, 15 bp, Homo sapiens
ttgagatcttcccat

SEQ ID NO: 233804 - DNA, 15 bp, Homo sapiens
tttgagatcttccca

SEQ ID NO: 233805 - DNA, 15 bp, Homo sapiens
gtttgagatcttccc

SEQ ID NO: 233806 - DNA, 15 bp, Homo sapiens
tgtttgagatcttcc

SEQ ID NO: 233807 - DNA, 15 bp, Homo sapiens
atgtttgagatcttc

SEQ ID NO: 233808 - DNA, 15 bp, Homo sapiens
tatgtttgagatctt

SEQ ID NO: 233809 - DNA, 15 bp, Homo sapiens
gtatgtttgagatct

SEQ ID NO: 233810 - DNA, 15 bp, Homo sapiens
cgtatgtttgagatc

SEQ ID NO: 233811 - DNA, 15 bp, Homo sapiens
acgtatgtttgagat

SEQ ID NO: 233812 - DNA, 15 bp, Homo sapiens
cacgtatgtttgaga

SEQ ID NO: 233813 - DNA, 15 bp, Homo sapiens
ccacgtatgtttgag

SEQ ID NO: 233814 - DNA, 15 bp, Homo sapiens
gccacgtatgtttga

SEQ ID NO: 233815 - DNA, 15 bp, Homo sapiens
agccacgtatgtttg

SEQ ID NO: 233816 - DNA, 15 bp, Homo sapiens
gagccacgtatgttt

SEQ ID NO: 233817 - DNA, 15 bp, Homo sapiens
ggagccacgtatgtt

SEQ ID NO: 233818 - DNA, 15 bp, Homo sapiens
tggagccacgtatgt

SEQ ID NO: 233819 - DNA, 15 bp, Homo sapiens
ctggagccacgtatg

SEQ ID NO: 233820 - DNA, 15 bp, Homo sapiens
tctggagccacgtat

SEQ ID NO: 233821 - DNA, 15 bp, Homo sapiens
ttctggagccacgta

SEQ ID NO: 233822 - DNA, 15 bp, Homo sapiens
tttctggagccacgt

SEQ ID NO: 233823 - DNA, 15 bp, Homo sapiens
ctttctggagccacg

SEQ ID NO: 233824 - DNA, 15 bp, Homo sapiens
tctttctggagccac

SEQ ID NO: 233825 - DNA, 15 bp, Homo sapiens
ctctttctggagcca

SEQ ID NO: 233826 - DNA, 15 bp, Homo sapiens
tctctttctggagcc

SEQ ID NO: 233827 - DNA, 15 bp, Homo sapiens
ctctctttctggagc

SEQ ID NO: 233828 - DNA, 15 bp, Homo sapiens
gctctctttctggag

SEQ ID NO: 233829 - DNA, 15 bp, Homo sapiens
tgctctctttctgga

SEQ ID NO: 233830 - DNA, 15 bp, Homo sapiens
ttgctctctttctgg

SEQ ID NO: 233831 - DNA, 15 bp, Homo sapiens
tttgctctctttctg

SEQ ID NO: 233832 - DNA, 15 bp, Homo sapiens
gtttgctctctttct

SEQ ID NO: 233833 - DNA, 15 bp, Homo sapiens
ggtttgctctctttc

SEQ ID NO: 233834 - DNA, 15 bp, Homo sapiens
tggtttgctctcttt

SEQ ID NO: 233835 - DNA, 15 bp, Homo sapiens
ctggtttgctctctt

SEQ ID NO: 233836 - DNA, 15 bp, Homo sapiens
tctggtttgctctct

SEQ ID NO: 233837 - DNA, 15 bp, Homo sapiens
ctctggtttgctctc

SEQ ID NO: 233838 - DNA, 15 bp, Homo sapiens
cctctggtttgctct

SEQ ID NO: 233839 - DNA, 15 bp, Homo sapiens
gcctctggtttgctc

SEQ ID NO: 233840 - DNA, 15 bp, Homo sapiens
agcctctggtttgct

SEQ ID NO: 233841 - DNA, 15 bp, Homo sapiens
aagcctctggtttgc

SEQ ID NO: 233842 - DNA, 15 bp, Homo sapiens
caagcctctggtttg

SEQ ID NO: 233843 - DNA, 15 bp, Homo sapiens
gcaagcctctggttt

SEQ ID NO: 233844 - DNA, 15 bp, Homo sapiens
ggcaagcctctggtt

SEQ ID NO: 233845 - DNA, 15 bp, Homo sapiens
tggcaagcctctggt

SEQ ID NO: 233846 - DNA, 15 bp, Homo sapiens
atggcaagcctctgg

SEQ ID NO: 233847 - DNA, 15 bp, Homo sapiens
tatggcaagcctctg

SEQ ID NO: 233848 - DNA, 15 bp, Homo sapiens
ctatggcaagcctct

SEQ ID NO: 233849 - DNA, 15 bp, Homo sapiens
tctatggcaagcctc

SEQ ID NO: 233850 - DNA, 15 bp, Homo sapiens
ttctatggcaagcct

SEQ ID NO: 233851 - DNA, 15 bp, Homo sapiens
tttctatggcaagcc

SEQ ID NO: 233852 - DNA, 15 bp, Homo sapiens
ctttctatggcaagc

SEQ ID NO: 233853 - DNA, 15 bp, Homo sapiens
actttctatggcaag

SEQ ID NO: 233854 - DNA, 15 bp, Homo sapiens
cactttctatggcaa

SEQ ID NO: 233855 - DNA, 15 bp, Homo sapiens
tcactttctatggca

SEQ ID NO: 233856 - DNA, 15 bp, Homo sapiens
ctcactttctatggc

SEQ ID NO: 233857 - DNA, 15 bp, Homo sapiens
actcactttctatgg

SEQ ID NO: 233858 - DNA, 15 bp, Homo sapiens
aactcactttctatg

SEQ ID NO: 233859 - DNA, 15 bp, Homo sapiens
caactcactttctat

SEQ ID NO: 233860 - DNA, 15 bp, Homo sapiens
acaactcactttcta

SEQ ID NO: 233861 - DNA, 15 bp, Homo sapiens
tacaactcactttct

SEQ ID NO: 233862 - DNA, 15 bp, Homo sapiens
ttacaactcactttc

SEQ ID NO: 233863 - DNA, 15 bp, Homo sapiens
cttacaactcacttt

SEQ ID NO: 233864 - DNA, 15 bp, Homo sapiens
acttacaactcactt

SEQ ID NO: 233865 - DNA, 15 bp, Homo sapiens
gacttacaactcact

SEQ ID NO: 233866 - DNA, 15 bp, Homo sapiens
tgacttacaactcac

SEQ ID NO: 233867 - DNA, 15 bp, Homo sapiens
ctgacttacaactca

SEQ ID NO: 233868 - DNA, 15 bp, Homo sapiens
gctgacttacaactc

SEQ ID NO: 233869 - DNA, 15 bp, Homo sapiens
agctgacttacaact

SEQ ID NO: 233870 - DNA, 15 bp, Homo sapiens
aagctgacttacaac

SEQ ID NO: 233871 - DNA, 15 bp, Homo sapiens
caagctgacttacaa

SEQ ID NO: 233872 - DNA, 15 bp, Homo sapiens
ccaagctgacttaca

SEQ ID NO: 233873 - DNA, 15 bp, Homo sapiens
cccaagctgacttac

SEQ ID NO: 233874 - DNA, 15 bp, Homo sapiens
gcccaagctgactta

SEQ ID NO: 233875 - DNA, 15 bp, Homo sapiens
tgcccaagctgactt

SEQ ID NO: 233876 - DNA, 15 bp, Homo sapiens
ctgcccaagctgact

SEQ ID NO: 233877 - DNA, 15 bp, Homo sapiens
cctgcccaagctgac

SEQ ID NO: 233878 - DNA, 15 bp, Homo sapiens
acctgcccaagctga

SEQ ID NO: 233879 - DNA, 15 bp, Homo sapiens
tacctgcccaagctg

SEQ ID NO: 233880 - DNA, 15 bp, Homo sapiens
ctacctgcccaagct

SEQ ID NO: 233881 - DNA, 15 bp, Homo sapiens
gctacctgcccaagc

SEQ ID NO: 233882 - DNA, 15 bp, Homo sapiens
tgctacctgcccaag

SEQ ID NO: 233883 - DNA, 15 bp, Homo sapiens
ttgctacctgcccaa

SEQ ID NO: 233884 - DNA, 15 bp, Homo sapiens
tttgctacctgccca

SEQ ID NO: 233885 - DNA, 15 bp, Homo sapiens
atttgctacctgccc

SEQ ID NO: 233886 - DNA, 15 bp, Homo sapiens
gatttgctacctgcc

SEQ ID NO: 233887 - DNA, 15 bp, Homo sapiens
ggatttgctacctgc

SEQ ID NO: 233888 - DNA, 15 bp, Homo sapiens
gggatttgctacctg

SEQ ID NO: 233889 - DNA, 15 bp, Homo sapiens
agggatttgctacct

SEQ ID NO: 233890 - DNA, 15 bp, Homo sapiens
cagggatttgctacc

SEQ ID NO: 233891 - DNA, 15 bp, Homo sapiens
tcagggatttgctac

SEQ ID NO: 233892 - DNA, 15 bp, Homo sapiens
ttcagggatttgcta

SEQ ID NO: 233893 - DNA, 15 bp, Homo sapiens
cttcagggatttgct

SEQ ID NO: 233894 - DNA, 15 bp, Homo sapiens
gcttcagggatttgc

SEQ ID NO: 233895 - DNA, 15 bp, Homo sapiens
ggcttcagggatttg

SEQ ID NO: 233896 - DNA, 15 bp, Homo sapiens
tggcttcagggattt

SEQ ID NO: 233897 - DNA, 15 bp, Homo sapiens
atggcttcagggatt

SEQ ID NO: 233898 - DNA, 15 bp, Homo sapiens
tatggcttcagggat

SEQ ID NO: 233899 - DNA, 15 bp, Homo sapiens
ttatggcttcaggga

SEQ ID NO: 233900 - DNA, 15 bp, Homo sapiens
gttatggcttcaggg

SEQ ID NO: 233901 - DNA, 15 bp, Homo sapiens
ggttatggcttcagg

SEQ ID NO: 233902 - DNA, 15 bp, Homo sapiens
tggttatggcttcag

SEQ ID NO: 233903 - DNA, 15 bp, Homo sapiens
atggttatggcttca

SEQ ID NO: 233904 - DNA, 15 bp, Homo sapiens
aatggttatggcttc

SEQ ID NO: 233905 - DNA, 15 bp, Homo sapiens
aaatggttatggctt

SEQ ID NO: 233906 - DNA, 15 bp, Homo sapiens
caaatggttatggct

SEQ ID NO: 233907 - DNA, 15 bp, Homo sapiens
acaaatggttatggc

SEQ ID NO: 233908 - DNA, 15 bp, Homo sapiens
gacaaatggttatgg

SEQ ID NO: 233909 - DNA, 15 bp, Homo sapiens
ggacaaatggttatg

SEQ ID NO: 233910 - DNA, 15 bp, Homo sapiens
tggacaaatggttat

SEQ ID NO: 233911 - DNA, 15 bp, Homo sapiens
ctggacaaatggtta

SEQ ID NO: 233912 - DNA, 15 bp, Homo sapiens
actggacaaatggtt

SEQ ID NO: 233913 - DNA, 15 bp, Homo sapiens
gactggacaaatggt

SEQ ID NO: 233914 - DNA, 15 bp, Homo sapiens
cgactggacaaatgg

SEQ ID NO: 233915 - DNA, 15 bp, Homo sapiens
tcgactggacaaatg

SEQ ID NO: 233916 - DNA, 15 bp, Homo sapiens
ctcgactggacaaat

SEQ ID NO: 233917 - DNA, 15 bp, Homo sapiens
gctcgactggacaaa

SEQ ID NO: 233918 - DNA, 15 bp, Homo sapiens
tgctcgactggacaa

SEQ ID NO: 233919 - DNA, 15 bp, Homo sapiens
atgctcgactggaca

SEQ ID NO: 233920 - DNA, 15 bp, Homo sapiens
aatgctcgactggac

SEQ ID NO: 233921 - DNA, 15 bp, Homo sapiens
gaatgctcgactgga

SEQ ID NO: 233922 - DNA, 15 bp, Homo sapiens
tgaatgctcgactgg

SEQ ID NO: 233923 - DNA, 15 bp, Homo sapiens
gtgaatgctcgactg

SEQ ID NO: 233924 - DNA, 15 bp, Homo sapiens
agtgaatgctcgact

SEQ ID NO: 233925 - DNA, 15 bp, Homo sapiens
tagtgaatgctcgac

SEQ ID NO: 233926 - DNA, 15 bp, Homo sapiens
atagtgaatgctcga

SEQ ID NO: 233927 - DNA, 15 bp, Homo sapiens
catagtgaatgctcg

SEQ ID NO: 233928 - DNA, 15 bp, Homo sapiens
ccatagtgaatgctc

SEQ ID NO: 233929 - DNA, 15 bp, Homo sapiens
accatagtgaatgct

SEQ ID NO: 233930 - DNA, 15 bp, Homo sapiens
caccatagtgaatgc

SEQ ID NO: 233931 - DNA, 15 bp, Homo sapiens
ccaccatagtgaatg

SEQ ID NO: 233932 - DNA, 15 bp, Homo sapiens
accaccatagtgaat

SEQ ID NO: 233933 - DNA, 15 bp, Homo sapiens
caccaccatagtgaa

SEQ ID NO: 233934 - DNA, 15 bp, Homo sapiens
tcaccaccatagtga

SEQ ID NO: 233935 - DNA, 15 bp, Homo sapiens
ctcaccaccatagtg

SEQ ID NO: 233936 - DNA, 15 bp, Homo sapiens
tctcaccaccatagt

SEQ ID NO: 233937 - DNA, 15 bp, Homo sapiens
atctcaccaccatag

SEQ ID NO: 233938 - DNA, 15 bp, Homo sapiens
catctcaccaccata

SEQ ID NO: 233939 - DNA, 15 bp, Homo sapiens
ccatctcaccaccat

SEQ ID NO: 233940 - DNA, 15 bp, Homo sapiens
cccatctcaccacca

SEQ ID NO: 233941 - DNA, 15 bp, Homo sapiens
ccccatctcaccacc

SEQ ID NO: 233942 - DNA, 15 bp, Homo sapiens
gccccatctcaccac

SEQ ID NO: 233943 - DNA, 15 bp, Homo sapiens
tgccccatctcacca

SEQ ID NO: 233944 - DNA, 15 bp, Homo sapiens
ctgccccatctcacc

SEQ ID NO: 233945 - DNA, 15 bp, Homo sapiens
actgccccatctcac

SEQ ID NO: 233946 - DNA, 15 bp, Homo sapiens
aactgccccatctca

SEQ ID NO: 233947 - DNA, 15 bp, Homo sapiens
aaactgccccatctc

SEQ ID NO: 233948 - DNA, 15 bp, Homo sapiens
gaaactgccccatct

SEQ ID NO: 233949 - DNA, 15 bp, Homo sapiens
tgaaactgccccatc

SEQ ID NO: 233950 - DNA, 15 bp, Homo sapiens
atgaaactgccccat

SEQ ID NO: 233951 - DNA, 15 bp, Homo sapiens
aatgaaactgcccca

SEQ ID NO: 233952 - DNA, 15 bp, Homo sapiens
caatgaaactgcccc

SEQ ID NO: 233953 - DNA, 15 bp, Homo sapiens
gcaatgaaactgccc

SEQ ID NO: 233954 - DNA, 15 bp, Homo sapiens
ggcaatgaaactgcc

SEQ ID NO: 233955 - DNA, 15 bp, Homo sapiens
aggcaatgaaactgc

SEQ ID NO: 233956 - DNA, 15 bp, Homo sapiens
gaggcaatgaaactg

SEQ ID NO: 233957 - DNA, 15 bp, Homo sapiens
ggaggcaatgaaact

SEQ ID NO: 233958 - DNA, 15 bp, Homo sapiens
gggaggcaatgaaac

SEQ ID NO: 233959 - DNA, 15 bp, Homo sapiens
ggggaggcaatgaaa

SEQ ID NO: 233960 - DNA, 15 bp, Homo sapiens
aggggaggcaatgaa

SEQ ID NO: 233961 - DNA, 15 bp, Homo sapiens
aaggggaggcaatga

SEQ ID NO: 233962 - DNA, 15 bp, Homo sapiens
aaaggggaggcaatg

SEQ ID NO: 233963 - DNA, 15 bp, Homo sapiens
caaaggggaggcaat

SEQ ID NO: 233964 - DNA, 15 bp, Homo sapiens
ccaaaggggaggcaa

SEQ ID NO: 233965 - DNA, 15 bp, Homo sapiens
cccaaaggggaggca

SEQ ID NO: 233966 - DNA, 15 bp, Homo sapiens
ccccaaaggggaggc

SEQ ID NO: 233967 - DNA, 15 bp, Homo sapiens
tccccaaaggggagg

SEQ ID NO: 233968 - DNA, 15 bp, Homo sapiens
gtccccaaaggggag

SEQ ID NO: 233969 - DNA, 15 bp, Homo sapiens
ggtccccaaagggga

SEQ ID NO: 233970 - DNA, 15 bp, Homo sapiens
tggtccccaaagggg

SEQ ID NO: 233971 - DNA, 15 bp, Homo sapiens
gtggtccccaaaggg

SEQ ID NO: 233972 - DNA, 15 bp, Homo sapiens
ggtggtccccaaagg

SEQ ID NO: 233973 - DNA, 15 bp, Homo sapiens
aggtggtccccaaag

SEQ ID NO: 233974 - DNA, 15 bp, Homo sapiens
aaggtggtccccaaa

SEQ ID NO: 233975 - DNA, 15 bp, Homo sapiens
caaggtggtccccaa

SEQ ID NO: 233976 - DNA, 15 bp, Homo sapiens
gcaaggtggtcccca

SEQ ID NO: 233977 - DNA, 15 bp, Homo sapiens
agcaaggtggtcccc

SEQ ID NO: 233978 - DNA, 15 bp, Homo sapiens
tagcaaggtggtccc

SEQ ID NO: 233979 - DNA, 15 bp, Homo sapiens
gtagcaaggtggtcc

SEQ ID NO: 233980 - DNA, 15 bp, Homo sapiens
ggtagcaaggtggtc

SEQ ID NO: 233981 - DNA, 15 bp, Homo sapiens
gggtagcaaggtggt

SEQ ID NO: 233982 - DNA, 15 bp, Homo sapiens
ggggtagcaaggtgg

SEQ ID NO: 233983 - DNA, 15 bp, Homo sapiens
aggggtagcaaggtg

SEQ ID NO: 233984 - DNA, 15 bp, Homo sapiens
taggggtagcaaggt

SEQ ID NO: 233985 - DNA, 15 bp, Homo sapiens
ctaggggtagcaagg

SEQ ID NO: 233986 - DNA, 15 bp, Homo sapiens
actaggggtagcaag

SEQ ID NO: 233987 - DNA, 15 bp, Homo sapiens
cactaggggtagcaa

SEQ ID NO: 233988 - DNA, 15 bp, Homo sapiens
acactaggggtagca

SEQ ID NO: 233989 - DNA, 15 bp, Homo sapiens
gacactaggggtagc

SEQ ID NO: 233990 - DNA, 15 bp, Homo sapiens
tgacactaggggtag

SEQ ID NO: 233991 - DNA, 15 bp, Homo sapiens
atgacactaggggta

SEQ ID NO: 233992 - DNA, 15 bp, Homo sapiens
tatgacactaggggt

SEQ ID NO: 233993 - DNA, 15 bp, Homo sapiens
gtatgacactagggg

SEQ ID NO: 233994 - DNA, 15 bp, Homo sapiens
ggtatgacactaggg

SEQ ID NO: 233995 - DNA, 15 bp, Homo sapiens
aggtatgacactagg

SEQ ID NO: 233996 - DNA, 15 bp, Homo sapiens
gaggtatgacactag

SEQ ID NO: 233997 - DNA, 15 bp, Homo sapiens
tgaggtatgacacta

SEQ ID NO: 233998 - DNA, 15 bp, Homo sapiens
ctgaggtatgacact

SEQ ID NO: 233999 - DNA, 15 bp, Homo sapiens
actgaggtatgacac

SEQ ID NO: 234000 - DNA, 15 bp, Homo sapiens
cactgaggtatgaca

SEQ ID NO: 234001 - DNA, 15 bp, Homo sapiens
gcactgaggtatgac

SEQ ID NO: 234002 - DNA, 15 bp, Homo sapiens
agcactgaggtatga

SEQ ID NO: 234003 - DNA, 15 bp, Homo sapiens
gagcactgaggtatg

SEQ ID NO: 234004 - DNA, 15 bp, Homo sapiens
agagcactgaggtat

SEQ ID NO: 234005 - DNA, 15 bp, Homo sapiens
gagagcactgaggta

SEQ ID NO: 234006 - DNA, 15 bp, Homo sapiens
ggagagcactgaggt

SEQ ID NO: 234007 - DNA, 15 bp, Homo sapiens
tggagagcactgagg

SEQ ID NO: 234008 - DNA, 15 bp, Homo sapiens
ctggagagcactgag

SEQ ID NO: 234009 - DNA, 15 bp, Homo sapiens
actggagagcactga

SEQ ID NO: 234010 - DNA, 15 bp, Homo sapiens
aactggagagcactg

SEQ ID NO: 234011 - DNA, 15 bp, Homo sapiens
taactggagagcact

SEQ ID NO: 234012 - DNA, 15 bp, Homo sapiens
ataactggagagcac

SEQ ID NO: 234013 - DNA, 15 bp, Homo sapiens
aataactggagagca

SEQ ID NO: 234014 - DNA, 15 bp, Homo sapiens
aaataactggagagc

SEQ ID NO: 234015 - DNA, 15 bp, Homo sapiens
gaaataactggagag

SEQ ID NO: 234016 - DNA, 15 bp, Homo sapiens
ggaaataactggaga

SEQ ID NO: 234017 - DNA, 15 bp, Homo sapiens
gggaaataactggag

SEQ ID NO: 234018 - DNA, 15 bp, Homo sapiens
agggaaataactgga

SEQ ID NO: 234019 - DNA, 15 bp, Homo sapiens
gagggaaataactgg

SEQ ID NO: 234020 - DNA, 15 bp, Homo sapiens
agagggaaataactg

SEQ ID NO: 234021 - DNA, 15 bp, Homo sapiens
cagagggaaataact

SEQ ID NO: 234022 - DNA, 15 bp, Homo sapiens
acagagggaaataac

SEQ ID NO: 234023 - DNA, 15 bp, Homo sapiens
cacagagggaaataa

SEQ ID NO: 234024 - DNA, 15 bp, Homo sapiens
ccacagagggaaata

SEQ ID NO: 234025 - DNA, 15 bp, Homo sapiens
gccacagagggaaat

SEQ ID NO: 234026 - DNA, 15 bp, Homo sapiens
tgccacagagggaaa

SEQ ID NO: 234027 - DNA, 15 bp, Homo sapiens
ttgccacagagggaa

SEQ ID NO: 234028 - DNA, 15 bp, Homo sapiens
cttgccacagaggga

SEQ ID NO: 234029 - DNA, 15 bp, Homo sapiens
tcttgccacagaggg

SEQ ID NO: 234030 - DNA, 15 bp, Homo sapiens
ctcttgccacagagg

SEQ ID NO: 234031 - DNA, 15 bp, Homo sapiens
actcttgccacagag

SEQ ID NO: 234032 - DNA, 15 bp, Homo sapiens
cactcttgccacaga

SEQ ID NO: 234033 - DNA, 15 bp, Homo sapiens
ccactcttgccacag

SEQ ID NO: 234034 - DNA, 15 bp, Homo sapiens
gccactcttgccaca

SEQ ID NO: 234035 - DNA, 15 bp, Homo sapiens
agccactcttgccac

SEQ ID NO: 234036 - DNA, 15 bp, Homo sapiens
aagccactcttgcca

SEQ ID NO: 234037 - DNA, 15 bp, Homo sapiens
aaagccactcttgcc

SEQ ID NO: 234038 - DNA, 15 bp, Homo sapiens
taaagccactcttgc

SEQ ID NO: 234039 - DNA, 15 bp, Homo sapiens
ataaagccactcttg

SEQ ID NO: 234040 - DNA, 15 bp, Homo sapiens
aataaagccactctt

SEQ ID NO: 234041 - DNA, 15 bp, Homo sapiens
aaataaagccactct

SEQ ID NO: 234042 - DNA, 15 bp, Homo sapiens
aaaataaagccactc

SEQ ID NO: 234043 - DNA, 15 bp, Homo sapiens
gaaaataaagccact

SEQ ID NO: 234044 - DNA, 15 bp, Homo sapiens
agaaaataaagccac

SEQ ID NO: 234045 - DNA, 15 bp, Homo sapiens
aagaaaataaagcca

SEQ ID NO: 234046 - DNA, 15 bp, Homo sapiens
gaagaaaataaagcc

SEQ ID NO: 234047 - DNA, 15 bp, Homo sapiens
agaagaaaataaagc

SEQ ID NO: 234048 - DNA, 15 bp, Homo sapiens
gagaagaaaataaag

SEQ ID NO: 234049 - DNA, 15 bp, Homo sapiens
agagaagaaaataaa

SEQ ID NO: 234050 - DNA, 15 bp, Homo sapiens
aagagaagaaaataa

SEQ ID NO: 234051 - DNA, 15 bp, Homo sapiens
aaagagaagaaaata

SEQ ID NO: 234052 - DNA, 15 bp, Homo sapiens
aaaagagaagaaaat

SEQ ID NO: 234053 - DNA, 15 bp, Homo sapiens
caaaagagaagaaaa

SEQ ID NO: 234054 - DNA, 15 bp, Homo sapiens
ccaaaagagaagaaa

SEQ ID NO: 234055 - DNA, 15 bp, Homo sapiens
cccaaaagagaagaa

SEQ ID NO: 234056 - DNA, 15 bp, Homo sapiens
acccaaaagagaaga

SEQ ID NO: 234057 - DNA, 15 bp, Homo sapiens
tacccaaaagagaag

SEQ ID NO: 234058 - DNA, 15 bp, Homo sapiens
atacccaaaagagaa

SEQ ID NO: 234059 - DNA, 15 bp, Homo sapiens
aatacccaaaagaga

SEQ ID NO: 234060 - DNA, 15 bp, Homo sapiens
taatacccaaaagag

SEQ ID NO: 234061 - DNA, 15 bp, Homo sapiens
gtaatacccaaaaga

SEQ ID NO: 234062 - DNA, 15 bp, Homo sapiens
ggtaatacccaaaag

SEQ ID NO: 234063 - DNA, 15 bp, Homo sapiens
gggtaatacccaaaa

SEQ ID NO: 234064 - DNA, 15 bp, Homo sapiens
tgggtaatacccaaa

SEQ ID NO: 234065 - DNA, 15 bp, Homo sapiens
ctgggtaatacccaa

SEQ ID NO: 234066 - DNA, 15 bp, Homo sapiens
cctgggtaataccca

SEQ ID NO: 234067 - DNA, 15 bp, Homo sapiens
tcctgggtaataccc

SEQ ID NO: 234068 - DNA, 15 bp, Homo sapiens
gtcctgggtaatacc

SEQ ID NO: 234069 - DNA, 15 bp, Homo sapiens
tgtcctgggtaatac

SEQ ID NO: 234070 - DNA, 15 bp, Homo sapiens
ttgtcctgggtaata

SEQ ID NO: 234071 - DNA, 15 bp, Homo sapiens
tttgtcctgggtaat

SEQ ID NO: 234072 - DNA, 15 bp, Homo sapiens
gtttgtcctgggtaa

SEQ ID NO: 234073 - DNA, 15 bp, Homo sapiens
tgtttgtcctgggta

SEQ ID NO: 234074 - DNA, 15 bp, Homo sapiens
ctgtttgtcctgggt

SEQ ID NO: 234075 - DNA, 15 bp, Homo sapiens
actgtttgtcctggg

SEQ ID NO: 234076 - DNA, 15 bp, Homo sapiens
cactgtttgtcctgg

SEQ ID NO: 234077 - DNA, 15 bp, Homo sapiens
ccactgtttgtcctg

SEQ ID NO: 234078 - DNA, 15 bp, Homo sapiens
tccactgtttgtcct

SEQ ID NO: 234079 - DNA, 15 bp, Homo sapiens
atccactgtttgtcc

SEQ ID NO: 234080 - DNA, 15 bp, Homo sapiens
catccactgtttgtc

SEQ ID NO: 234081 - DNA, 15 bp, Homo sapiens
acatccactgtttgt

SEQ ID NO: 234082 - DNA, 15 bp, Homo sapiens
cacatccactgtttg

SEQ ID NO: 234083 - DNA, 15 bp, Homo sapiens
tcacatccactgttt

SEQ ID NO: 234084 - DNA, 15 bp, Homo sapiens
gtcacatccactgtt

SEQ ID NO: 234085 - DNA, 15 bp, Homo sapiens
cgtcacatccactgt

SEQ ID NO: 234086 - DNA, 15 bp, Homo sapiens
tcgtcacatccactg

SEQ ID NO: 234087 - DNA, 15 bp, Homo sapiens
atcgtcacatccact

SEQ ID NO: 234088 - DNA, 15 bp, Homo sapiens
catcgtcacatccac

SEQ ID NO: 234089 - DNA, 15 bp, Homo sapiens
ccatcgtcacatcca

SEQ ID NO: 234090 - DNA, 15 bp, Homo sapiens
tccatcgtcacatcc

SEQ ID NO: 234091 - DNA, 15 bp, Homo sapiens
atccatcgtcacatc

SEQ ID NO: 234092 - DNA, 15 bp, Homo sapiens
catccatcgtcacat

SEQ ID NO: 234093 - DNA, 15 bp, Homo sapiens
ccatccatcgtcaca

SEQ ID NO: 234094 - DNA, 15 bp, Homo sapiens
accatccatcgtcac

SEQ ID NO: 234095 - DNA, 15 bp, Homo sapiens
taccatccatcgtca

SEQ ID NO: 234096 - DNA, 15 bp, Homo sapiens
ttaccatccatcgtc

SEQ ID NO: 234097 - DNA, 15 bp, Homo sapiens
tttaccatccatcgt

SEQ ID NO: 234098 - DNA, 15 bp, Homo sapiens
ctttaccatccatcg

SEQ ID NO: 234099 - DNA, 15 bp, Homo sapiens
cctttaccatccatc

SEQ ID NO: 234100 - DNA, 15 bp, Homo sapiens
acctttaccatccat

SEQ ID NO: 234101 - DNA, 15 bp, Homo sapiens
tacctttaccatcca

SEQ ID NO: 234102 - DNA, 15 bp, Homo sapiens
gtacctttaccatcc

SEQ ID NO: 234103 - DNA, 15 bp, Homo sapiens
cgtacctttaccatc

SEQ ID NO: 234104 - DNA, 15 bp, Homo sapiens
acgtacctttaccat

SEQ ID NO: 234105 - DNA, 15 bp, Homo sapiens
gacgtacctttacca

SEQ ID NO: 234106 - DNA, 15 bp, Homo sapiens
tgacgtacctttacc

SEQ ID NO: 234107 - DNA, 15 bp, Homo sapiens
atgacgtacctttac

SEQ ID NO: 234108 - DNA, 15 bp, Homo sapiens
gatgacgtaccttta

SEQ ID NO: 234109 - DNA, 15 bp, Homo sapiens
tgatgacgtaccttt

SEQ ID NO: 234110 - DNA, 15 bp, Homo sapiens
atgatgacgtacctt

SEQ ID NO: 234111 - DNA, 15 bp, Homo sapiens
aatgatgacgtacct

SEQ ID NO: 234112 - DNA, 15 bp, Homo sapiens
gaatgatgacgtacc

SEQ ID NO: 234113 - DNA, 15 bp, Homo sapiens
ggaatgatgacgtac

SEQ ID NO: 234114 - DNA, 15 bp, Homo sapiens
gggaatgatgacgta

SEQ ID NO: 234115 - DNA, 15 bp, Homo sapiens
agggaatgatgacgt

SEQ ID NO: 234116 - DNA, 15 bp, Homo sapiens
gagggaatgatgacg

SEQ ID NO: 234117 - DNA, 15 bp, Homo sapiens
agagggaatgatgac

SEQ ID NO: 234118 - DNA, 15 bp, Homo sapiens
aagagggaatgatga

SEQ ID NO: 234119 - DNA, 15 bp, Homo sapiens
aaagagggaatgatg

SEQ ID NO: 234120 - DNA, 15 bp, Homo sapiens
caaagagggaatgat

SEQ ID NO: 234121 - DNA, 15 bp, Homo sapiens
tcaaagagggaatga

SEQ ID NO: 234122 - DNA, 15 bp, Homo sapiens
atcaaagagggaatg

SEQ ID NO: 234123 - DNA, 15 bp, Homo sapiens
catcaaagagggaat

SEQ ID NO: 234124 - DNA, 15 bp, Homo sapiens
acatcaaagagggaa

SEQ ID NO: 234125 - DNA, 15 bp, Homo sapiens
cacatcaaagaggga

SEQ ID NO: 234126 - DNA, 15 bp, Homo sapiens
gcacatcaaagaggg

SEQ ID NO: 234127 - DNA, 15 bp, Homo sapiens
agcacatcaaagagg

SEQ ID NO: 234128 - DNA, 15 bp, Homo sapiens
aagcacatcaaagag

SEQ ID NO: 234129 - DNA, 15 bp, Homo sapiens
aaagcacatcaaaga

SEQ ID NO: 234130 - DNA, 15 bp, Homo sapiens
gaaagcacatcaaag

SEQ ID NO: 234131 - DNA, 15 bp, Homo sapiens
tgaaagcacatcaaa

SEQ ID NO: 234132 - DNA, 15 bp, Homo sapiens
atgaaagcacatcaa

SEQ ID NO: 234133 - DNA, 15 bp, Homo sapiens
gatgaaagcacatca

SEQ ID NO: 234134 - DNA, 15 bp, Homo sapiens
tgatgaaagcacatc

SEQ ID NO: 234135 - DNA, 15 bp, Homo sapiens
atgatgaaagcacat

SEQ ID NO: 234136 - DNA, 15 bp, Homo sapiens
tatgatgaaagcaca

SEQ ID NO: 234137 - DNA, 15 bp, Homo sapiens
ttatgatgaaagcac

SEQ ID NO: 234138 - DNA, 15 bp, Homo sapiens
attatgatgaaagca

SEQ ID NO: 234139 - DNA, 15 bp, Homo sapiens
cattatgatgaaagc

SEQ ID NO: 234140 - DNA, 15 bp, Homo sapiens
ccattatgatgaaag

SEQ ID NO: 234141 - DNA, 15 bp, Homo sapiens
cccattatgatgaaa

SEQ ID NO: 234142 - DNA, 15 bp, Homo sapiens
gcccattatgatgaa

SEQ ID NO: 234143 - DNA, 15 bp, Homo sapiens
ggcccattatgatga

SEQ ID NO: 234144 - DNA, 15 bp, Homo sapiens
aggcccattatgatg

SEQ ID NO: 234145 - DNA, 15 bp, Homo sapiens
taggcccattatgat

SEQ ID NO: 234146 - DNA, 15 bp, Homo sapiens
ataggcccattatga

SEQ ID NO: 234147 - DNA, 15 bp, Homo sapiens
aataggcccattatg

SEQ ID NO: 234148 - DNA, 15 bp, Homo sapiens
aaataggcccattat

SEQ ID NO: 234149 - DNA, 15 bp, Homo sapiens
caaataggcccatta

SEQ ID NO: 234150 - DNA, 15 bp, Homo sapiens
ccaaataggcccatt

SEQ ID NO: 234151 - DNA, 15 bp, Homo sapiens
tccaaataggcccat

SEQ ID NO: 234152 - DNA, 15 bp, Homo sapiens
ttccaaataggccca

SEQ ID NO: 234153 - DNA, 15 bp, Homo sapiens
cttccaaataggccc

SEQ ID NO: 234154 - DNA, 15 bp, Homo sapiens
ccttccaaataggcc

SEQ ID NO: 234155 - DNA, 15 bp, Homo sapiens
accttccaaataggc

SEQ ID NO: 234156 - DNA, 15 bp, Homo sapiens
aaccttccaaatagg

SEQ ID NO: 234157 - DNA, 15 bp, Homo sapiens
aaaccttccaaatag

SEQ ID NO: 234158 - DNA, 15 bp, Homo sapiens
gaaaccttccaaata

SEQ ID NO: 234159 - DNA, 15 bp, Homo sapiens
ggaaaccttccaaat

SEQ ID NO: 234160 - DNA, 15 bp, Homo sapiens
tggaaaccttccaaa

SEQ ID NO: 234161 - DNA, 15 bp, Homo sapiens
atggaaaccttccaa

SEQ ID NO: 234162 - DNA, 15 bp, Homo sapiens
tatggaaaccttcca

SEQ ID NO: 234163 - DNA, 15 bp, Homo sapiens
ttatggaaaccttcc

SEQ ID NO: 234164 - DNA, 15 bp, Homo sapiens
cttatggaaaccttc

SEQ ID NO: 234165 - DNA, 15 bp, Homo sapiens
acttatggaaacctt

SEQ ID NO: 234166 - DNA, 15 bp, Homo sapiens
tacttatggaaacct

SEQ ID NO: 234167 - DNA, 15 bp, Homo sapiens
gtacttatggaaacc

SEQ ID NO: 234168 - DNA, 15 bp, Homo sapiens
tgtacttatggaaac

SEQ ID NO: 234169 - DNA, 15 bp, Homo sapiens
ctgtacttatggaaa

SEQ ID NO: 234170 - DNA, 15 bp, Homo sapiens
cctgtacttatggaa

SEQ ID NO: 234171 - DNA, 15 bp, Homo sapiens
tcctgtacttatgga

SEQ ID NO: 234172 - DNA, 15 bp, Homo sapiens
ttcctgtacttatgg

SEQ ID NO: 234173 - DNA, 15 bp, Homo sapiens
gttcctgtacttatg

SEQ ID NO: 234174 - DNA, 15 bp, Homo sapiens
tgttcctgtacttat

SEQ ID NO: 234175 - DNA, 15 bp, Homo sapiens
ttgttcctgtactta

SEQ ID NO: 234176 - DNA, 15 bp, Homo sapiens
attgttcctgtactt

SEQ ID NO: 234177 - DNA, 15 bp, Homo sapiens
cattgttcctgtact

SEQ ID NO: 234178 - DNA, 15 bp, Homo sapiens
gcattgttcctgtac

SEQ ID NO: 234179 - DNA, 15 bp, Homo sapiens
ggcattgttcctgta

SEQ ID NO: 234180 - DNA, 15 bp, Homo sapiens
aggcattgttcctgt

SEQ ID NO: 234181 - DNA, 15 bp, Homo sapiens
gaggcattgttcctg

SEQ ID NO: 234182 - DNA, 15 bp, Homo sapiens
agaggcattgttcct

SEQ ID NO: 234183 - DNA, 15 bp, Homo sapiens
gagaggcattgttcc

SEQ ID NO: 234184 - DNA, 15 bp, Homo sapiens
ggagaggcattgttc

SEQ ID NO: 234185 - DNA, 15 bp, Homo sapiens
tggagaggcattgtt

SEQ ID NO: 234186 - DNA, 15 bp, Homo sapiens
gtggagaggcattgt

SEQ ID NO: 234187 - DNA, 15 bp, Homo sapiens
agtggagaggcattg

SEQ ID NO: 234188 - DNA, 15 bp, Homo sapiens
cagtggagaggcatt

SEQ ID NO: 234189 - DNA, 15 bp, Homo sapiens
ccagtggagaggcat

SEQ ID NO: 234190 - DNA, 15 bp, Homo sapiens
cccagtggagaggca

SEQ ID NO: 234191 - DNA, 15 bp, Homo sapiens
gcccagtggagaggc

SEQ ID NO: 234192 - DNA, 15 bp, Homo sapiens
agcccagtggagagg

SEQ ID NO: 234193 - DNA, 15 bp, Homo sapiens
aagcccagtggagag

SEQ ID NO: 234194 - DNA, 15 bp, Homo sapiens
gaagcccagtggaga

SEQ ID NO: 234195 - DNA, 15 bp, Homo sapiens
cgaagcccagtggag

SEQ ID NO: 234196 - DNA, 15 bp, Homo sapiens
acgaagcccagtgga

SEQ ID NO: 234197 - DNA, 15 bp, Homo sapiens
gacgaagcccagtgg

SEQ ID NO: 234198 - DNA, 15 bp, Homo sapiens
tgacgaagcccagtg

SEQ ID NO: 234199 - DNA, 15 bp, Homo sapiens
ctgacgaagcccagt

SEQ ID NO: 234200 - DNA, 15 bp, Homo sapiens
gctgacgaagcccag

SEQ ID NO: 234201 - DNA, 15 bp, Homo sapiens
ggctgacgaagccca

SEQ ID NO: 234202 - DNA, 15 bp, Homo sapiens
tggctgacgaagccc

SEQ ID NO: 234203 - DNA, 15 bp, Homo sapiens
gtggctgacgaagcc

SEQ ID NO: 234204 - DNA, 15 bp, Homo sapiens
ggtggctgacgaagc

SEQ ID NO: 234205 - DNA, 15 bp, Homo sapiens
tggtggctgacgaag

SEQ ID NO: 234206 - DNA, 15 bp, Homo sapiens
ttggtggctgacgaa

SEQ ID NO: 234207 - DNA, 15 bp, Homo sapiens
attggtggctgacga

SEQ ID NO: 234208 - DNA, 15 bp, Homo sapiens
cattggtggctgacg

SEQ ID NO: 234209 - DNA, 15 bp, Homo sapiens
tcattggtggctgac

SEQ ID NO: 234210 - DNA, 15 bp, Homo sapiens
atcattggtggctga

SEQ ID NO: 234211 - DNA, 15 bp, Homo sapiens
gatcattggtggctg

SEQ ID NO: 234212 - DNA, 15 bp, Homo sapiens
ggatcattggtggct

SEQ ID NO: 234213 - DNA, 15 bp, Homo sapiens
cggatcattggtggc

SEQ ID NO: 234214 - DNA, 15 bp, Homo sapiens
tcggatcattggtgg

SEQ ID NO: 234215 - DNA, 15 bp, Homo sapiens
ctcggatcattggtg

SEQ ID NO: 234216 - DNA, 15 bp, Homo sapiens
gctcggatcattggt

SEQ ID NO: 234217 - DNA, 15 bp, Homo sapiens
tgctcggatcattgg

SEQ ID NO: 234218 - DNA, 15 bp, Homo sapiens
gtgctcggatcattg

SEQ ID NO: 234219 - DNA, 15 bp, Homo sapiens
ggtgctcggatcatt

SEQ ID NO: 234220 - DNA, 15 bp, Homo sapiens
tggtgctcggatcat

SEQ ID NO: 234221 - DNA, 15 bp, Homo sapiens
ctggtgctcggatca

SEQ ID NO: 234222 - DNA, 15 bp, Homo sapiens
cctggtgctcggatc

SEQ ID NO: 234223 - DNA, 15 bp, Homo sapiens
ccctggtgctcggat

SEQ ID NO: 234224 - DNA, 15 bp, Homo sapiens
tccctggtgctcgga

SEQ ID NO: 234225 - DNA, 15 bp, Homo sapiens
ttccctggtgctcgg

SEQ ID NO: 234226 - DNA, 15 bp, Homo sapiens
tttccctggtgctcg

SEQ ID NO: 234227 - DNA, 15 bp, Homo sapiens
ttttccctggtgctc

SEQ ID NO: 234228 - DNA, 15 bp, Homo sapiens
tttttccctggtgct

SEQ ID NO: 234229 - DNA, 15 bp, Homo sapiens
ctttttccctggtgc

SEQ ID NO: 234230 - DNA, 15 bp, Homo sapiens
actttttccctggtg

SEQ ID NO: 234231 - DNA, 15 bp, Homo sapiens
gactttttccctggt

SEQ ID NO: 234232 - DNA, 15 bp, Homo sapiens
agactttttccctgg

SEQ ID NO: 234233 - DNA, 15 bp, Homo sapiens
cagactttttccctg

SEQ ID NO: 234234 - DNA, 15 bp, Homo sapiens
ccagactttttccct

SEQ ID NO: 234235 - DNA, 15 bp, Homo sapiens
tccagactttttccc

SEQ ID NO: 234236 - DNA, 15 bp, Homo sapiens
ctccagactttttcc

SEQ ID NO: 234237 - DNA, 15 bp, Homo sapiens
actccagactttttc

SEQ ID NO: 234238 - DNA, 15 bp, Homo sapiens
cactccagacttttt

SEQ ID NO: 234239 - DNA, 15 bp, Homo sapiens
tcactccagactttt

SEQ ID NO: 234240 - DNA, 15 bp, Homo sapiens
atcactccagacttt

SEQ ID NO: 234241 - DNA, 15 bp, Homo sapiens
catcactccagactt

SEQ ID NO: 234242 - DNA, 15 bp, Homo sapiens
gcatcactccagact

SEQ ID NO: 234243 - DNA, 15 bp, Homo sapiens
agcatcactccagac

SEQ ID NO: 234244 - DNA, 15 bp, Homo sapiens
cagcatcactccaga

SEQ ID NO: 234245 - DNA, 15 bp, Homo sapiens
ccagcatcactccag

SEQ ID NO: 234246 - DNA, 15 bp, Homo sapiens
gccagcatcactcca

SEQ ID NO: 234247 - DNA, 15 bp, Homo sapiens
agccagcatcactcc

SEQ ID NO: 234248 - DNA, 15 bp, Homo sapiens
cagccagcatcactc

SEQ ID NO: 234249 - DNA, 15 bp, Homo sapiens
ccagccagcatcact

SEQ ID NO: 234250 - DNA, 15 bp, Homo sapiens
accagccagcatcac

SEQ ID NO: 234251 - DNA, 15 bp, Homo sapiens
aaccagccagcatca

SEQ ID NO: 234252 - DNA, 15 bp, Homo sapiens
aaaccagccagcatc

SEQ ID NO: 234253 - DNA, 15 bp, Homo sapiens
gaaaccagccagcat

SEQ ID NO: 234254 - DNA, 15 bp, Homo sapiens
ggaaaccagccagca

SEQ ID NO: 234255 - DNA, 15 bp, Homo sapiens
tggaaaccagccagc

SEQ ID NO: 234256 - DNA, 15 bp, Homo sapiens
atggaaaccagccag

SEQ ID NO: 234257 - DNA, 15 bp, Homo sapiens
catggaaaccagcca

SEQ ID NO: 234258 - DNA, 15 bp, Homo sapiens
ccatggaaaccagcc

SEQ ID NO: 234259 - DNA, 15 bp, Homo sapiens
gccatggaaaccagc

SEQ ID NO: 234260 - DNA, 15 bp, Homo sapiens
tgccatggaaaccag

SEQ ID NO: 234261 - DNA, 15 bp, Homo sapiens
ttgccatggaaacca

SEQ ID NO: 234262 - DNA, 15 bp, Homo sapiens
gttgccatggaaacc

SEQ ID NO: 234263 - DNA, 15 bp, Homo sapiens
ggttgccatggaaac

SEQ ID NO: 234264 - DNA, 15 bp, Homo sapiens
tggttgccatggaaa

SEQ ID NO: 234265 - DNA, 15 bp, Homo sapiens
gtggttgccatggaa

SEQ ID NO: 234266 - DNA, 15 bp, Homo sapiens
cgtggttgccatgga

SEQ ID NO: 234267 - DNA, 15 bp, Homo sapiens
ccgtggttgccatgg

SEQ ID NO: 234268 - DNA, 15 bp, Homo sapiens
gccgtggttgccatg

SEQ ID NO: 234269 - DNA, 15 bp, Homo sapiens
agccgtggttgccat

SEQ ID NO: 234270 - DNA, 15 bp, Homo sapiens
aagccgtggttgcca

SEQ ID NO: 234271 - DNA, 15 bp, Homo sapiens
caagccgtggttgcc

SEQ ID NO: 234272 - DNA, 15 bp, Homo sapiens
gcaagccgtggttgc

SEQ ID NO: 234273 - DNA, 15 bp, Homo sapiens
ggcaagccgtggttg

SEQ ID NO: 234274 - DNA, 15 bp, Homo sapiens
aggcaagccgtggtt

SEQ ID NO: 234275 - DNA, 15 bp, Homo sapiens
gaggcaagccgtggt

SEQ ID NO: 234276 - DNA, 15 bp, Homo sapiens
tgaggcaagccgtgg

SEQ ID NO: 234277 - DNA, 15 bp, Homo sapiens
ttgaggcaagccgtg

SEQ ID NO: 234278 - DNA, 15 bp, Homo sapiens
gttgaggcaagccgt

SEQ ID NO: 234279 - DNA, 15 bp, Homo sapiens
ggttgaggcaagccg

SEQ ID NO: 234280 - DNA, 15 bp, Homo sapiens
gggttgaggcaagcc

SEQ ID NO: 234281 - DNA, 15 bp, Homo sapiens
agggttgaggcaagc

SEQ ID NO: 234282 - DNA, 15 bp, Homo sapiens
cagggttgaggcaag

SEQ ID NO: 234283 - DNA, 15 bp, Homo sapiens
gcagggttgaggcaa

SEQ ID NO: 234284 - DNA, 15 bp, Homo sapiens
tgcagggttgaggca

SEQ ID NO: 234285 - DNA, 15 bp, Homo sapiens
gtgcagggttgaggc

SEQ ID NO: 234286 - DNA, 15 bp, Homo sapiens
tgtgcagggttgagg

SEQ ID NO: 234287 - DNA, 15 bp, Homo sapiens
gtgtgcagggttgag

SEQ ID NO: 234288 - DNA, 15 bp, Homo sapiens
tgtgtgcagggttga

SEQ ID NO: 234289 - DNA, 15 bp, Homo sapiens
atgtgtgcagggttg

SEQ ID NO: 234290 - DNA, 15 bp, Homo sapiens
catgtgtgcagggtt

SEQ ID NO: 234291 - DNA, 15 bp, Homo sapiens
gcatgtgtgcagggt

SEQ ID NO: 234292 - DNA, 15 bp, Homo sapiens
agcatgtgtgcaggg

SEQ ID NO: 234293 - DNA, 15 bp, Homo sapiens
cagcatgtgtgcagg

SEQ ID NO: 234294 - DNA, 15 bp, Homo sapiens
gcagcatgtgtgcag

SEQ ID NO: 234295 - DNA, 15 bp, Homo sapiens
ggcagcatgtgtgca

SEQ ID NO: 234296 - DNA, 15 bp, Homo sapiens
gggcagcatgtgtgc

SEQ ID NO: 234297 - DNA, 15 bp, Homo sapiens
agggcagcatgtgtg

SEQ ID NO: 234298 - DNA, 15 bp, Homo sapiens
gagggcagcatgtgt

SEQ ID NO: 234299 - DNA, 15 bp, Homo sapiens
agagggcagcatgtg

SEQ ID NO: 234300 - DNA, 15 bp, Homo sapiens
aagagggcagcatgt

SEQ ID NO: 234301 - DNA, 15 bp, Homo sapiens
aaagagggcagcatg

SEQ ID NO: 234302 - DNA, 15 bp, Homo sapiens
gaaagagggcagcat

SEQ ID NO: 234303 - DNA, 15 bp, Homo sapiens
ggaaagagggcagca

SEQ ID NO: 234304 - DNA, 15 bp, Homo sapiens
tggaaagagggcagc

SEQ ID NO: 234305 - DNA, 15 bp, Homo sapiens
ttggaaagagggcag

SEQ ID NO: 234306 - DNA, 15 bp, Homo sapiens
cttggaaagagggca

SEQ ID NO: 234307 - DNA, 15 bp, Homo sapiens
acttggaaagagggc

SEQ ID NO: 234308 - DNA, 15 bp, Homo sapiens
tacttggaaagaggg

SEQ ID NO: 234309 - DNA, 15 bp, Homo sapiens
ctacttggaaagagg

SEQ ID NO: 234310 - DNA, 15 bp, Homo sapiens
cctacttggaaagag

SEQ ID NO: 234311 - DNA, 15 bp, Homo sapiens
tcctacttggaaaga

SEQ ID NO: 234312 - DNA, 15 bp, Homo sapiens
ttcctacttggaaag

SEQ ID NO: 234313 - DNA, 15 bp, Homo sapiens
attcctacttggaaa

SEQ ID NO: 234314 - DNA, 15 bp, Homo sapiens
cattcctacttggaa

SEQ ID NO: 234315 - DNA, 15 bp, Homo sapiens
acattcctacttgga

SEQ ID NO: 234316 - DNA, 15 bp, Homo sapiens
cacattcctacttgg

SEQ ID NO: 234317 - DNA, 15 bp, Homo sapiens
acacattcctacttg

SEQ ID NO: 234318 - DNA, 15 bp, Homo sapiens
aacacattcctactt

SEQ ID NO: 234319 - DNA, 15 bp, Homo sapiens
aaacacattcctact

SEQ ID NO: 234320 - DNA, 15 bp, Homo sapiens
taaacacattcctac

SEQ ID NO: 234321 - DNA, 15 bp, Homo sapiens
ataaacacattccta

SEQ ID NO: 234322 - DNA, 15 bp, Homo sapiens
aataaacacattcct

SEQ ID NO: 234323 - DNA, 15 bp, Homo sapiens
aaataaacacattcc

SEQ ID NO: 234324 - DNA, 15 bp, Homo sapiens
taaataaacacattc

SEQ ID NO: 234325 - DNA, 15 bp, Homo sapiens
ataaataaacacatt

SEQ ID NO: 234326 - DNA, 15 bp, Homo sapiens
aataaataaacacat

SEQ ID NO: 234327 - DNA, 15 bp, Homo sapiens
taataaataaacaca

SEQ ID NO: 234328 - DNA, 15 bp, Homo sapiens
ataataaataaacac

SEQ ID NO: 234329 - DNA, 15 bp, Homo sapiens
aataataaataaaca

SEQ ID NO: 234330 - DNA, 15 bp, Homo sapiens
caataataaataaac

SEQ ID NO: 234331 - DNA, 15 bp, Homo sapiens
ccaataataaataaa

SEQ ID NO: 234332 - DNA, 15 bp, Homo sapiens
accaataataaataa

SEQ ID NO: 234333 - DNA, 15 bp, Homo sapiens
gaccaataataaata

SEQ ID NO: 234334 - DNA, 15 bp, Homo sapiens
ggaccaataataaat

SEQ ID NO: 234335 - DNA, 15 bp, Homo sapiens
tggaccaataataaa

SEQ ID NO: 234336 - DNA, 15 bp, Homo sapiens
ttggaccaataataa

SEQ ID NO: 234337 - DNA, 15 bp, Homo sapiens
gttggaccaataata

SEQ ID NO: 234338 - DNA, 15 bp, Homo sapiens
ggttggaccaataat

SEQ ID NO: 234339 - DNA, 15 bp, Homo sapiens
aggttggaccaataa

SEQ ID NO: 234340 - DNA, 15 bp, Homo sapiens
caggttggaccaata

SEQ ID NO: 234341 - DNA, 15 bp, Homo sapiens
ccaggttggaccaat

SEQ ID NO: 234342 - DNA, 15 bp, Homo sapiens
cccaggttggaccaa

SEQ ID NO: 234343 - DNA, 15 bp, Homo sapiens
tcccaggttggacca

SEQ ID NO: 234344 - DNA, 15 bp, Homo sapiens
ctcccaggttggacc

SEQ ID NO: 234345 - DNA, 15 bp, Homo sapiens
actcccaggttggac

SEQ ID NO: 234346 - DNA, 15 bp, Homo sapiens
cactcccaggttgga

SEQ ID NO: 234347 - DNA, 15 bp, Homo sapiens
gcactcccaggttgg

SEQ ID NO: 234348 - DNA, 15 bp, Homo sapiens
ggcactcccaggttg

SEQ ID NO: 234349 - DNA, 15 bp, Homo sapiens
aggcactcccaggtt

SEQ ID NO: 234350 - DNA, 15 bp, Homo sapiens
caggcactcccaggt

SEQ ID NO: 234351 - DNA, 15 bp, Homo sapiens
acaggcactcccagg

SEQ ID NO: 234352 - DNA, 15 bp, Homo sapiens
cacaggcactcccag

SEQ ID NO: 234353 - DNA, 15 bp, Homo sapiens
gcacaggcactccca

SEQ ID NO: 234354 - DNA, 15 bp, Homo sapiens
tgcacaggcactccc

SEQ ID NO: 234355 - DNA, 15 bp, Homo sapiens
ctgcacaggcactcc

SEQ ID NO: 234356 - DNA, 15 bp, Homo sapiens
gctgcacaggcactc

SEQ ID NO: 234357 - DNA, 15 bp, Homo sapiens
agctgcacaggcact

SEQ ID NO: 234358 - DNA, 15 bp, Homo sapiens
cagctgcacaggcac

SEQ ID NO: 234359 - DNA, 15 bp, Homo sapiens
gcagctgcacaggca

SEQ ID NO: 234360 - DNA, 15 bp, Homo sapiens
tgcagctgcacaggc

SEQ ID NO: 234361 - DNA, 15 bp, Homo sapiens
atgcagctgcacagg

SEQ ID NO: 234362 - DNA, 15 bp, Homo sapiens
tatgcagctgcacag

SEQ ID NO: 234363 - DNA, 15 bp, Homo sapiens
ctatgcagctgcaca

SEQ ID NO: 234364 - DNA, 15 bp, Homo sapiens
cctatgcagctgcac

SEQ ID NO: 234365 - DNA, 15 bp, Homo sapiens
acctatgcagctgca

SEQ ID NO: 234366 - DNA, 15 bp, Homo sapiens
cacctatgcagctgc

SEQ ID NO: 234367 - DNA, 15 bp, Homo sapiens
acacctatgcagctg

SEQ ID NO: 234368 - DNA, 15 bp, Homo sapiens
aacacctatgcagct

SEQ ID NO: 234369 - DNA, 15 bp, Homo sapiens
caacacctatgcagc

SEQ ID NO: 234370 - DNA, 15 bp, Homo sapiens
acaacacctatgcag

SEQ ID NO: 234371 - DNA, 15 bp, Homo sapiens
gacaacacctatgca

SEQ ID NO: 234372 - DNA, 15 bp, Homo sapiens
ggacaacacctatgc

SEQ ID NO: 234373 - DNA, 15 bp, Homo sapiens
gggacaacacctatg

SEQ ID NO: 234374 - DNA, 15 bp, Homo sapiens
agggacaacacctat

SEQ ID NO: 234375 - DNA, 15 bp, Homo sapiens
tagggacaacaccta

SEQ ID NO: 234376 - DNA, 15 bp, Homo sapiens
gtagggacaacacct

SEQ ID NO: 234377 - DNA, 15 bp, Homo sapiens
ggtagggacaacacc

SEQ ID NO: 234378 - DNA, 15 bp, Homo sapiens
aggtagggacaacac

SEQ ID NO: 234379 - DNA, 15 bp, Homo sapiens
gaggtagggacaaca

SEQ ID NO: 234380 - DNA, 15 bp, Homo sapiens
agaggtagggacaac

SEQ ID NO: 234381 - DNA, 15 bp, Homo sapiens
cagaggtagggacaa

SEQ ID NO: 234382 - DNA, 15 bp, Homo sapiens
gcagaggtagggaca

SEQ ID NO: 234383 - DNA, 15 bp, Homo sapiens
ggcagaggtagggac

SEQ ID NO: 234384 - DNA, 15 bp, Homo sapiens
tggcagaggtaggga

SEQ ID NO: 234385 - DNA, 15 bp, Homo sapiens
atggcagaggtaggg

SEQ ID NO: 234386 - DNA, 15 bp, Homo sapiens
aatggcagaggtagg

SEQ ID NO: 234387 - DNA, 15 bp, Homo sapiens
caatggcagaggtag

SEQ ID NO: 234388 - DNA, 15 bp, Homo sapiens
tcaatggcagaggta

SEQ ID NO: 234389 - DNA, 15 bp, Homo sapiens
ctcaatggcagaggt

SEQ ID NO: 234390 - DNA, 15 bp, Homo sapiens
cctcaatggcagagg

SEQ ID NO: 234391 - DNA, 15 bp, Homo sapiens
acctcaatggcagag

SEQ ID NO: 234392 - DNA, 15 bp, Homo sapiens
gacctcaatggcaga

SEQ ID NO: 234393 - DNA, 15 bp, Homo sapiens
tgacctcaatggcag

SEQ ID NO: 234394 - DNA, 15 bp, Homo sapiens
atgacctcaatggca

SEQ ID NO: 234395 - DNA, 15 bp, Homo sapiens
catgacctcaatggc

SEQ ID NO: 234396 - DNA, 15 bp, Homo sapiens
acatgacctcaatgg

SEQ ID NO: 234397 - DNA, 15 bp, Homo sapiens
aacatgacctcaatg

SEQ ID NO: 234398 - DNA, 15 bp, Homo sapiens
gaacatgacctcaat

SEQ ID NO: 234399 - DNA, 15 bp, Homo sapiens
agaacatgacctcaa

SEQ ID NO: 234400 - DNA, 15 bp, Homo sapiens
gagaacatgacctca

SEQ ID NO: 234401 - DNA, 15 bp, Homo sapiens
tgagaacatgacctc

SEQ ID NO: 234402 - DNA, 15 bp, Homo sapiens
ttgagaacatgacct

SEQ ID NO: 234403 - DNA, 15 bp, Homo sapiens
gttgagaacatgacc

SEQ ID NO: 234404 - DNA, 15 bp, Homo sapiens
agttgagaacatgac

SEQ ID NO: 234405 - DNA, 15 bp, Homo sapiens
cagttgagaacatga

SEQ ID NO: 234406 - DNA, 15 bp, Homo sapiens
ccagttgagaacatg

SEQ ID NO: 234407 - DNA, 15 bp, Homo sapiens
cccagttgagaacat

SEQ ID NO: 234408 - DNA, 15 bp, Homo sapiens
tcccagttgagaaca

SEQ ID NO: 234409 - DNA, 15 bp, Homo sapiens
ctcccagttgagaac

SEQ ID NO: 234410 - DNA, 15 bp, Homo sapiens
tctcccagttgagaa

SEQ ID NO: 234411 - DNA, 15 bp, Homo sapiens
atctcccagttgaga

SEQ ID NO: 234412 - DNA, 15 bp, Homo sapiens
catctcccagttgag

SEQ ID NO: 234413 - DNA, 15 bp, Homo sapiens
tcatctcccagttga

SEQ ID NO: 234414 - DNA, 15 bp, Homo sapiens
ttcatctcccagttg

SEQ ID NO: 234415 - DNA, 15 bp, Homo sapiens
tttcatctcccagtt

SEQ ID NO: 234416 - DNA, 15 bp, Homo sapiens
atttcatctcccagt

SEQ ID NO: 234417 - DNA, 15 bp, Homo sapiens
gatttcatctcccag

SEQ ID NO: 234418 - DNA, 15 bp, Homo sapiens
tgatttcatctccca

SEQ ID NO: 234419 - DNA, 15 bp, Homo sapiens
gtgatttcatctccc

SEQ ID NO: 234420 - DNA, 15 bp, Homo sapiens
tgtgatttcatctcc

SEQ ID NO: 234421 - DNA, 15 bp, Homo sapiens
ctgtgatttcatctc

SEQ ID NO: 234422 - DNA, 15 bp, Homo sapiens
gctgtgatttcatct

SEQ ID NO: 234423 - DNA, 15 bp, Homo sapiens
agctgtgatttcatc

SEQ ID NO: 234424 - DNA, 15 bp, Homo sapiens
cagctgtgatttcat

SEQ ID NO: 234425 - DNA, 15 bp, Homo sapiens
ccagctgtgatttca

SEQ ID NO: 234426 - DNA, 15 bp, Homo sapiens
cccagctgtgatttc

SEQ ID NO: 234427 - DNA, 15 bp, Homo sapiens
acccagctgtgattt

SEQ ID NO: 234428 - DNA, 15 bp, Homo sapiens
cacccagctgtgatt

SEQ ID NO: 234429 - DNA, 15 bp, Homo sapiens
tcacccagctgtgat

SEQ ID NO: 234430 - DNA, 15 bp, Homo sapiens
atcacccagctgtga

SEQ ID NO: 234431 - DNA, 15 bp, Homo sapiens
catcacccagctgtg

SEQ ID NO: 234432 - DNA, 15 bp, Homo sapiens
ccatcacccagctgt

SEQ ID NO: 234433 - DNA, 15 bp, Homo sapiens
tccatcacccagctg

SEQ ID NO: 234434 - DNA, 15 bp, Homo sapiens
ctccatcacccagct

SEQ ID NO: 234435 - DNA, 15 bp, Homo sapiens
cctccatcacccagc

SEQ ID NO: 234436 - DNA, 15 bp, Homo sapiens
gcctccatcacccag

SEQ ID NO: 234437 - DNA, 15 bp, Homo sapiens
tgcctccatcaccca

SEQ ID NO: 234438 - DNA, 15 bp, Homo sapiens
gtgcctccatcaccc

SEQ ID NO: 234439 - DNA, 15 bp, Homo sapiens
cgtgcctccatcacc

SEQ ID NO: 234440 - DNA, 15 bp, Homo sapiens
ccgtgcctccatcac

SEQ ID NO: 234441 - DNA, 15 bp, Homo sapiens
accgtgcctccatca

SEQ ID NO: 234442 - DNA, 15 bp, Homo sapiens
taccgtgcctccatc

SEQ ID NO: 234443 - DNA, 15 bp, Homo sapiens
ataccgtgcctccat

SEQ ID NO: 234444 - DNA, 15 bp, Homo sapiens
aataccgtgcctcca

SEQ ID NO: 234445 - DNA, 15 bp, Homo sapiens
aaataccgtgcctcc

SEQ ID NO: 234446 - DNA, 15 bp, Homo sapiens
caaataccgtgcctc

SEQ ID NO: 234447 - DNA, 15 bp, Homo sapiens
gcaaataccgtgcct

SEQ ID NO: 234448 - DNA, 15 bp, Homo sapiens
agcaaataccgtgcc

SEQ ID NO: 234449 - DNA, 15 bp, Homo sapiens
gagcaaataccgtgc

SEQ ID NO: 234450 - DNA, 15 bp, Homo sapiens
ggagcaaataccgtg

SEQ ID NO: 234451 - DNA, 15 bp, Homo sapiens
tggagcaaataccgt

SEQ ID NO: 234452 - DNA, 15 bp, Homo sapiens
gtggagcaaataccg

SEQ ID NO: 234453 - DNA, 15 bp, Homo sapiens
ggtggagcaaatacc

SEQ ID NO: 234454 - DNA, 15 bp, Homo sapiens
tggtggagcaaatac

SEQ ID NO: 234455 - DNA, 15 bp, Homo sapiens
ctggtggagcaaata

SEQ ID NO: 234456 - DNA, 15 bp, Homo sapiens
cctggtggagcaaat

SEQ ID NO: 234457 - DNA, 15 bp, Homo sapiens
tcctggtggagcaaa

SEQ ID NO: 234458 - DNA, 15 bp, Homo sapiens
ttcctggtggagcaa

SEQ ID NO: 234459 - DNA, 15 bp, Homo sapiens
tttcctggtggagca

SEQ ID NO: 234460 - DNA, 15 bp, Homo sapiens
ttttcctggtggagc

SEQ ID NO: 234461 - DNA, 15 bp, Homo sapiens
cttttcctggtggag

SEQ ID NO: 234462 - DNA, 15 bp, Homo sapiens
gcttttcctggtgga

SEQ ID NO: 234463 - DNA, 15 bp, Homo sapiens
agcttttcctggtgg

SEQ ID NO: 234464 - DNA, 15 bp, Homo sapiens
gagcttttcctggtg

SEQ ID NO: 234465 - DNA, 15 bp, Homo sapiens
agagcttttcctggt

SEQ ID NO: 234466 - DNA, 15 bp, Homo sapiens
gagagcttttcctgg

SEQ ID NO: 234467 - DNA, 15 bp, Homo sapiens
tgagagcttttcctg

SEQ ID NO: 234468 - DNA, 15 bp, Homo sapiens
atgagagcttttcct

SEQ ID NO: 234469 - DNA, 15 bp, Homo sapiens
aatgagagcttttcc

SEQ ID NO: 234470 - DNA, 15 bp, Homo sapiens
aaatgagagcttttc

SEQ ID NO: 234471 - DNA, 15 bp, Homo sapiens
taaatgagagctttt

SEQ ID NO: 234472 - DNA, 15 bp, Homo sapiens
ctaaatgagagcttt

SEQ ID NO: 234473 - DNA, 15 bp, Homo sapiens
cctaaatgagagctt

SEQ ID NO: 234474 - DNA, 15 bp, Homo sapiens
gcctaaatgagagct

SEQ ID NO: 234475 - DNA, 15 bp, Homo sapiens
agcctaaatgagagc

SEQ ID NO: 234476 - DNA, 15 bp, Homo sapiens
aagcctaaatgagag

SEQ ID NO: 234477 - DNA, 15 bp, Homo sapiens
gaagcctaaatgaga

SEQ ID NO: 234478 - DNA, 15 bp, Homo sapiens
tgaagcctaaatgag

SEQ ID NO: 234479 - DNA, 15 bp, Homo sapiens
ctgaagcctaaatga

SEQ ID NO: 234480 - DNA, 15 bp, Homo sapiens
tctgaagcctaaatg

SEQ ID NO: 234481 - DNA, 15 bp, Homo sapiens
atctgaagcctaaat

SEQ ID NO: 234482 - DNA, 15 bp, Homo sapiens
gatctgaagcctaaa

SEQ ID NO: 234483 - DNA, 15 bp, Homo sapiens
agatctgaagcctaa

SEQ ID NO: 234484 - DNA, 15 bp, Homo sapiens
aagatctgaagccta

SEQ ID NO: 234485 - DNA, 15 bp, Homo sapiens
caagatctgaagcct

SEQ ID NO: 234486 - DNA, 15 bp, Homo sapiens
acaagatctgaagcc

SEQ ID NO: 234487 - DNA, 15 bp, Homo sapiens
tacaagatctgaagc

SEQ ID NO: 234488 - DNA, 15 bp, Homo sapiens
atacaagatctgaag

SEQ ID NO: 234489 - DNA, 15 bp, Homo sapiens
aatacaagatctgaa

SEQ ID NO: 234490 - DNA, 15 bp, Homo sapiens
caatacaagatctga

SEQ ID NO: 234491 - DNA, 15 bp, Homo sapiens
acaatacaagatctg

SEQ ID NO: 234492 - DNA, 15 bp, Homo sapiens
gacaatacaagatct

SEQ ID NO: 234493 - DNA, 15 bp, Homo sapiens
ggacaatacaagatc

SEQ ID NO: 234494 - DNA, 15 bp, Homo sapiens
tggacaatacaagat

SEQ ID NO: 234495 - DNA, 15 bp, Homo sapiens
atggacaatacaaga

SEQ ID NO: 234496 - DNA, 15 bp, Homo sapiens
gatggacaatacaag

SEQ ID NO: 234497 - DNA, 15 bp, Homo sapiens
tgatggacaatacaa

SEQ ID NO: 234498 - DNA, 15 bp, Homo sapiens
ctgatggacaataca

SEQ ID NO: 234499 - DNA, 15 bp, Homo sapiens
gctgatggacaatac

SEQ ID NO: 234500 - DNA, 15 bp, Homo sapiens
cgctgatggacaata

SEQ ID NO: 234501 - DNA, 15 bp, Homo sapiens
acgctgatggacaat

SEQ ID NO: 234502 - DNA, 15 bp, Homo sapiens
cacgctgatggacaa

SEQ ID NO: 234503 - DNA, 15 bp, Homo sapiens
tcacgctgatggaca

SEQ ID NO: 234504 - DNA, 15 bp, Homo sapiens
atcacgctgatggac

SEQ ID NO: 234505 - DNA, 15 bp, Homo sapiens
catcacgctgatgga

SEQ ID NO: 234506 - DNA, 15 bp, Homo sapiens
gcatcacgctgatgg

SEQ ID NO: 234507 - DNA, 15 bp, Homo sapiens
ggcatcacgctgatg

SEQ ID NO: 234508 - DNA, 15 bp, Homo sapiens
tggcatcacgctgat

SEQ ID NO: 234509 - DNA, 15 bp, Homo sapiens
ctggcatcacgctga

SEQ ID NO: 234510 - DNA, 15 bp, Homo sapiens
actggcatcacgctg

SEQ ID NO: 234511 - DNA, 15 bp, Homo sapiens
cactggcatcacgct

SEQ ID NO: 234512 - DNA, 15 bp, Homo sapiens
tcactggcatcacgc

SEQ ID NO: 234513 - DNA, 15 bp, Homo sapiens
atcactggcatcacg

SEQ ID NO: 234514 - DNA, 15 bp, Homo sapiens
gatcactggcatcac

SEQ ID NO: 234515 - DNA, 15 bp, Homo sapiens
agatcactggcatca

SEQ ID NO: 234516 - DNA, 15 bp, Homo sapiens
gagatcactggcatc

SEQ ID NO: 234517 - DNA, 15 bp, Homo sapiens
ggagatcactggcat

SEQ ID NO: 234518 - DNA, 15 bp, Homo sapiens
cggagatcactggca

SEQ ID NO: 234519 - DNA, 15 bp, Homo sapiens
gcggagatcactggc

SEQ ID NO: 234520 - DNA, 15 bp, Homo sapiens
cgcggagatcactgg

SEQ ID NO: 234521 - DNA, 15 bp, Homo sapiens
ccgcggagatcactg

SEQ ID NO: 234522 - DNA, 15 bp, Homo sapiens
cccgcggagatcact

SEQ ID NO: 234523 - DNA, 15 bp, Homo sapiens
ccccgcggagatcac

SEQ ID NO: 234524 - DNA, 15 bp, Homo sapiens
cccccgcggagatca

SEQ ID NO: 234525 - DNA, 15 bp, Homo sapiens
acccccgcggagatc

SEQ ID NO: 234526 - DNA, 15 bp, Homo sapiens
aacccccgcggagat

SEQ ID NO: 234527 - DNA, 15 bp, Homo sapiens
taacccccgcggaga

SEQ ID NO: 234528 - DNA, 15 bp, Homo sapiens
ctaacccccgcggag

SEQ ID NO: 234529 - DNA, 15 bp, Homo sapiens
tctaacccccgcgga

SEQ ID NO: 234530 - DNA, 15 bp, Homo sapiens
ctctaacccccgcgg

SEQ ID NO: 234531 - DNA, 15 bp, Homo sapiens
tctctaacccccgcg

SEQ ID NO: 234532 - DNA, 15 bp, Homo sapiens
ctctctaacccccgc

SEQ ID NO: 234533 - DNA, 15 bp, Homo sapiens
cctctctaacccccg

SEQ ID NO: 234534 - DNA, 15 bp, Homo sapiens
gcctctctaaccccc

SEQ ID NO: 234535 - DNA, 15 bp, Homo sapiens
agcctctctaacccc

SEQ ID NO: 234536 - DNA, 15 bp, Homo sapiens
cagcctctctaaccc

SEQ ID NO: 234537 - DNA, 15 bp, Homo sapiens
tcagcctctctaacc

SEQ ID NO: 234538 - DNA, 15 bp, Homo sapiens
atcagcctctctaac

SEQ ID NO: 234539 - DNA, 15 bp, Homo sapiens
gatcagcctctctaa

SEQ ID NO: 234540 - DNA, 15 bp, Homo sapiens
agatcagcctctcta

SEQ ID NO: 234541 - DNA, 15 bp, Homo sapiens
tagatcagcctctct

SEQ ID NO: 234542 - DNA, 15 bp, Homo sapiens
ctagatcagcctctc

SEQ ID NO: 234543 - DNA, 15 bp, Homo sapiens
tctagatcagcctct

SEQ ID NO: 234544 - DNA, 15 bp, Homo sapiens
ttctagatcagcctc

SEQ ID NO: 234545 - DNA, 15 bp, Homo sapiens
gttctagatcagcct

SEQ ID NO: 234546 - DNA, 15 bp, Homo sapiens
ggttctagatcagcc

SEQ ID NO: 234547 - DNA, 15 bp, Homo sapiens
tggttctagatcagc

SEQ ID NO: 234548 - DNA, 15 bp, Homo sapiens
atggttctagatcag

SEQ ID NO: 234549 - DNA, 15 bp, Homo sapiens
aatggttctagatca

SEQ ID NO: 234550 - DNA, 15 bp, Homo sapiens
taatggttctagatc

SEQ ID NO: 234551 - DNA, 15 bp, Homo sapiens
ctaatggttctagat

SEQ ID NO: 234552 - DNA, 15 bp, Homo sapiens
tctaatggttctaga

SEQ ID NO: 234553 - DNA, 15 bp, Homo sapiens
ctctaatggttctag

SEQ ID NO: 234554 - DNA, 15 bp, Homo sapiens
actctaatggttcta

SEQ ID NO: 234555 - DNA, 15 bp, Homo sapiens
gactctaatggttct

SEQ ID NO: 234556 - DNA, 15 bp, Homo sapiens
tgactctaatggttc

SEQ ID NO: 234557 - DNA, 15 bp, Homo sapiens
ctgactctaatggtt

SEQ ID NO: 234558 - DNA, 15 bp, Homo sapiens
tctgactctaatggt

SEQ ID NO: 234559 - DNA, 15 bp, Homo sapiens
gtctgactctaatgg

SEQ ID NO: 234560 - DNA, 15 bp, Homo sapiens
tgtctgactctaatg

SEQ ID NO: 234561 - DNA, 15 bp, Homo sapiens
gtgtctgactctaat

SEQ ID NO: 234562 - DNA, 15 bp, Homo sapiens
ggtgtctgactctaa

SEQ ID NO: 234563 - DNA, 15 bp, Homo sapiens
tggtgtctgactcta

SEQ ID NO: 234564 - DNA, 15 bp, Homo sapiens
atggtgtctgactct

SEQ ID NO: 234565 - DNA, 15 bp, Homo sapiens
gatggtgtctgactc

SEQ ID NO: 234566 - DNA, 15 bp, Homo sapiens
agatggtgtctgact

SEQ ID NO: 234567 - DNA, 15 bp, Homo sapiens
tagatggtgtctgac

SEQ ID NO: 234568 - DNA, 15 bp, Homo sapiens
ctagatggtgtctga

SEQ ID NO: 234569 - DNA, 15 bp, Homo sapiens
cctagatggtgtctg

SEQ ID NO: 234570 - DNA, 15 bp, Homo sapiens
ccctagatggtgtct

SEQ ID NO: 234571 - DNA, 15 bp, Homo sapiens
accctagatggtgtc

SEQ ID NO: 234572 - DNA, 15 bp, Homo sapiens
gaccctagatggtgt

SEQ ID NO: 234573 - DNA, 15 bp, Homo sapiens
ggaccctagatggtg

SEQ ID NO: 234574 - DNA, 15 bp, Homo sapiens
aggaccctagatggt

SEQ ID NO: 234575 - DNA, 15 bp, Homo sapiens
caggaccctagatgg

SEQ ID NO: 234576 - DNA, 15 bp, Homo sapiens
gcaggaccctagatg

SEQ ID NO: 234577 - DNA, 15 bp, Homo sapiens
cgcaggaccctagat

SEQ ID NO: 234578 - DNA, 15 bp, Homo sapiens
ccgcaggaccctaga

SEQ ID NO: 234579 - DNA, 15 bp, Homo sapiens
accgcaggaccctag

SEQ ID NO: 234580 - DNA, 15 bp, Homo sapiens
caccgcaggacccta

SEQ ID NO: 234581 - DNA, 15 bp, Homo sapiens
tcaccgcaggaccct

SEQ ID NO: 234582 - DNA, 15 bp, Homo sapiens
ttcaccgcaggaccc

SEQ ID NO: 234583 - DNA, 15 bp, Homo sapiens
attcaccgcaggacc

SEQ ID NO: 234584 - DNA, 15 bp, Homo sapiens
gattcaccgcaggac

SEQ ID NO: 234585 - DNA, 15 bp, Homo sapiens
cgattcaccgcagga

SEQ ID NO: 234586 - DNA, 15 bp, Homo sapiens
gcgattcaccgcagg

SEQ ID NO: 234587 - DNA, 15 bp, Homo sapiens
tgcgattcaccgcag

SEQ ID NO: 234588 - DNA, 15 bp, Homo sapiens
ttgcgattcaccgca

SEQ ID NO: 234589 - DNA, 15 bp, Homo sapiens
tttgcgattcaccgc

SEQ ID NO: 234590 - DNA, 15 bp, Homo sapiens
gtttgcgattcaccg

SEQ ID NO: 234591 - DNA, 15 bp, Homo sapiens
agtttgcgattcacc

SEQ ID NO: 234592 - DNA, 15 bp, Homo sapiens
cagtttgcgattcac

SEQ ID NO: 234593 - DNA, 15 bp, Homo sapiens
gcagtttgcgattca

SEQ ID NO: 234594 - DNA, 15 bp, Homo sapiens
ggcagtttgcgattc

SEQ ID NO: 234595 - DNA, 15 bp, Homo sapiens
gggcagtttgcgatt

SEQ ID NO: 234596 - DNA, 15 bp, Homo sapiens
ggggcagtttgcgat

SEQ ID NO: 234597 - DNA, 15 bp, Homo sapiens
tggggcagtttgcga

SEQ ID NO: 234598 - DNA, 15 bp, Homo sapiens
ctggggcagtttgcg

SEQ ID NO: 234599 - DNA, 15 bp, Homo sapiens
tctggggcagtttgc

SEQ ID NO: 234600 - DNA, 15 bp, Homo sapiens
ctctggggcagtttg

SEQ ID NO: 234601 - DNA, 15 bp, Homo sapiens
tctctggggcagttt

SEQ ID NO: 234602 - DNA, 15 bp, Homo sapiens
ctctctggggcagtt

SEQ ID NO: 234603 - DNA, 15 bp, Homo sapiens
gctctctggggcagt

SEQ ID NO: 234604 - DNA, 15 bp, Homo sapiens
cagctctctggggca

SEQ ID NO: 234605 - DNA, 15 bp, Homo sapiens
tcagctctctggggc

SEQ ID NO: 234606 - DNA, 15 bp, Homo sapiens
atcagctctctgggg

SEQ ID NO: 234607 - DNA, 15 bp, Homo sapiens
catcagctctctggg

SEQ ID NO: 234608 - DNA, 15 bp, Homo sapiens
ccatcagctctctgg

SEQ ID NO: 234609 - DNA, 15 bp, Homo sapiens
accatcagctctctg

SEQ ID NO: 234610 - DNA, 15 bp, Homo sapiens
caccatcagctctct

SEQ ID NO: 234611 - DNA, 15 bp, Homo sapiens
tcaccatcagctctc

SEQ ID NO: 234612 - DNA, 15 bp, Homo sapiens
gtcaccatcagctct

SEQ ID NO: 234613 - DNA, 15 bp, Homo sapiens
cgtcaccatcagctc

SEQ ID NO: 234614 - DNA, 15 bp, Homo sapiens
gcgtcaccatcagct

SEQ ID NO: 234615 - DNA, 15 bp, Homo sapiens
tgcgtcaccatcagc

SEQ ID NO: 234616 - DNA, 15 bp, Homo sapiens
gtgcgtcaccatcag

SEQ ID NO: 234617 - DNA, 15 bp, Homo sapiens
tgtgcgtcaccatca

SEQ ID NO: 234618 - DNA, 15 bp, Homo sapiens
ttgtgcgtcaccatc

SEQ ID NO: 234619 - DNA, 15 bp, Homo sapiens
tttgtgcgtcaccat

SEQ ID NO: 234620 - DNA, 15 bp, Homo sapiens
atttgtgcgtcacca

SEQ ID NO: 234621 - DNA, 15 bp, Homo sapiens
gatttgtgcgtcacc

SEQ ID NO: 234622 - DNA, 15 bp, Homo sapiens
agatttgtgcgtcac

SEQ ID NO: 234623 - DNA, 15 bp, Homo sapiens
aagatttgtgcgtca

SEQ ID NO: 234624 - DNA, 15 bp, Homo sapiens
aaagatttgtgcgtc

SEQ ID NO: 234625 - DNA, 15 bp, Homo sapiens
gaaagatttgtgcgt

SEQ ID NO: 234626 - DNA, 15 bp, Homo sapiens
tgaaagatttgtgcg

SEQ ID NO: 234627 - DNA, 15 bp, Homo sapiens
atgaaagatttgtgc

SEQ ID NO: 234628 - DNA, 15 bp, Homo sapiens
tatgaaagatttgtg

SEQ ID NO: 234629 - DNA, 15 bp, Homo sapiens
ttatgaaagatttgt

SEQ ID NO: 234630 - DNA, 15 bp, Homo sapiens
tttatgaaagatttg

SEQ ID NO: 234631 - DNA, 15 bp, Homo sapiens
gtttatgaaagattt

SEQ ID NO: 234632 - DNA, 15 bp, Homo sapiens
tgtttatgaaagatt

SEQ ID NO: 234633 - DNA, 15 bp, Homo sapiens
atgtttatgaaagat

SEQ ID NO: 234634 - DNA, 15 bp, Homo sapiens
tatgtttatgaaaga

SEQ ID NO: 234635 - DNA, 15 bp, Homo sapiens
gtatgtttatgaaag

SEQ ID NO: 234636 - DNA, 15 bp, Homo sapiens
tgtatgtttatgaaa

SEQ ID NO: 234637 - DNA, 15 bp, Homo sapiens
ctgtatgtttatgaa

SEQ ID NO: 234638 - DNA, 15 bp, Homo sapiens
gctgtatgtttatga

SEQ ID NO: 234639 - DNA, 15 bp, Homo sapiens
tgctgtatgtttatg

SEQ ID NO: 234640 - DNA, 15 bp, Homo sapiens
atgctgtatgtttat

SEQ ID NO: 234641 - DNA, 15 bp, Homo sapiens
catgctgtatgttta

SEQ ID NO: 234642 - DNA, 15 bp, Homo sapiens
gcatgctgtatgttt

SEQ ID NO: 234643 - DNA, 15 bp, Homo sapiens
agcatgctgtatgtt

SEQ ID NO: 234644 - DNA, 15 bp, Homo sapiens
cagcatgctgtatgt

SEQ ID NO: 234645 - DNA, 15 bp, Homo sapiens
gcagcatgctgtatg

SEQ ID NO: 234646 - DNA, 15 bp, Homo sapiens
agcagcatgctgtat

SEQ ID NO: 234647 - DNA, 15 bp, Homo sapiens
cagcagcatgctgta

SEQ ID NO: 234648 - DNA, 15 bp, Homo sapiens
acagcagcatgctgt

SEQ ID NO: 234649 - DNA, 15 bp, Homo sapiens
gacagcagcatgctg

SEQ ID NO: 234650 - DNA, 15 bp, Homo sapiens
ggacagcagcatgct

SEQ ID NO: 234651 - DNA, 15 bp, Homo sapiens
gggacagcagcatgc

SEQ ID NO: 234652 - DNA, 15 bp, Homo sapiens
agggacagcagcatg

SEQ ID NO: 234653 - DNA, 15 bp, Homo sapiens
aagggacagcagcat

SEQ ID NO: 234654 - DNA, 15 bp, Homo sapiens
caagggacagcagca

SEQ ID NO: 234655 - DNA, 15 bp, Homo sapiens
ccaagggacagcagc

SEQ ID NO: 234656 - DNA, 15 bp, Homo sapiens
tccaagggacagcag

SEQ ID NO: 234657 - DNA, 15 bp, Homo sapiens
ctccaagggacagca

SEQ ID NO: 234658 - DNA, 15 bp, Homo sapiens
tctccaagggacagc

SEQ ID NO: 234659 - DNA, 15 bp, Homo sapiens
atctccaagggacag

SEQ ID NO: 234660 - DNA, 15 bp, Homo sapiens
catctccaagggaca

SEQ ID NO: 234661 - DNA, 15 bp, Homo sapiens
gcatctccaagggac

SEQ ID NO: 234662 - DNA, 15 bp, Homo sapiens
ggcatctccaaggga

SEQ ID NO: 234663 - DNA, 15 bp, Homo sapiens
gggcatctccaaggg

SEQ ID NO: 234664 - DNA, 15 bp, Homo sapiens
tgggcatctccaagg

SEQ ID NO: 234665 - DNA, 15 bp, Homo sapiens
atgggcatctccaag

SEQ ID NO: 234666 - DNA, 15 bp, Homo sapiens
catgggcatctccaa

SEQ ID NO: 234667 - DNA, 15 bp, Homo sapiens
tcatgggcatctcca

SEQ ID NO: 234668 - DNA, 15 bp, Homo sapiens
ctcatgggcatctcc

SEQ ID NO: 234669 - DNA, 15 bp, Homo sapiens
gctcatgggcatctc

SEQ ID NO: 234670 - DNA, 15 bp, Homo sapiens
agctcatgggcatct

SEQ ID NO: 234671 - DNA, 15 bp, Homo sapiens
cagctcatgggcatc

SEQ ID NO: 234672 - DNA, 15 bp, Homo sapiens
ccagctcatgggcat

SEQ ID NO: 234673 - DNA, 15 bp, Homo sapiens
gccagctcatgggca

SEQ ID NO: 234674 - DNA, 15 bp, Homo sapiens
agccagctcatgggc

SEQ ID NO: 234675 - DNA, 15 bp, Homo sapiens
cagccagctcatggg

SEQ ID NO: 234676 - DNA, 15 bp, Homo sapiens
tcagccagctcatgg

SEQ ID NO: 234677 - DNA, 15 bp, Homo sapiens
ctcagccagctcatg

SEQ ID NO: 234678 - DNA, 15 bp, Homo sapiens
gctcagccagctcat

SEQ ID NO: 234679 - DNA, 15 bp, Homo sapiens
tgctcagccagctca

SEQ ID NO: 234680 - DNA, 15 bp, Homo sapiens
gtgctcagccagctc

SEQ ID NO: 234681 - DNA, 15 bp, Homo sapiens
cgtgctcagccagct

SEQ ID NO: 234682 - DNA, 15 bp, Homo sapiens
gcgtgctcagccagc

SEQ ID NO: 234683 - DNA, 15 bp, Homo sapiens
tgcgtgctcagccag

SEQ ID NO: 234684 - DNA, 15 bp, Homo sapiens
gtgcgtgctcagcca

SEQ ID NO: 234685 - DNA, 15 bp, Homo sapiens
tgtgcgtgctcagcc

SEQ ID NO: 234686 - DNA, 15 bp, Homo sapiens
ttgtgcgtgctcagc

SEQ ID NO: 234687 - DNA, 15 bp, Homo sapiens
cttgtgcgtgctcag

SEQ ID NO: 234688 - DNA, 15 bp, Homo sapiens
gcttgtgcgtgctca

SEQ ID NO: 234689 - DNA, 15 bp, Homo sapiens
ggcttgtgcgtgctc

SEQ ID NO: 234690 - DNA, 15 bp, Homo sapiens
aggcttgtgcgtgct

SEQ ID NO: 234691 - DNA, 15 bp, Homo sapiens
caggcttgtgcgtgc

SEQ ID NO: 234692 - DNA, 15 bp, Homo sapiens
tcaggcttgtgcgtg

SEQ ID NO: 234693 - DNA, 15 bp, Homo sapiens
ctcaggcttgtgcgt

SEQ ID NO: 234694 - DNA, 15 bp, Homo sapiens
tctcaggcttgtgcg

SEQ ID NO: 234695 - DNA, 15 bp, Homo sapiens
ttctcaggcttgtgc

SEQ ID NO: 234696 - DNA, 15 bp, Homo sapiens
tttctcaggcttgtg

SEQ ID NO: 234697 - DNA, 15 bp, Homo sapiens
gtttctcaggcttgt

SEQ ID NO: 234698 - DNA, 15 bp, Homo sapiens
agtttctcaggcttg

SEQ ID NO: 234699 - DNA, 15 bp, Homo sapiens
aagtttctcaggctt

SEQ ID NO: 234700 - DNA, 15 bp, Homo sapiens
aaagtttctcaggct

SEQ ID NO: 234701 - DNA, 15 bp, Homo sapiens
taaagtttctcaggc

SEQ ID NO: 234702 - DNA, 15 bp, Homo sapiens
ttaaagtttctcagg

SEQ ID NO: 234703 - DNA, 15 bp, Homo sapiens
tttaaagtttctcag

SEQ ID NO: 234704 - DNA, 15 bp, Homo sapiens
gtttaaagtttctca

SEQ ID NO: 234705 - DNA, 15 bp, Homo sapiens
ggtttaaagtttctc

SEQ ID NO: 234706 - DNA, 15 bp, Homo sapiens
aggtttaaagtttct

SEQ ID NO: 234707 - DNA, 15 bp, Homo sapiens
caggtttaaagtttc

SEQ ID NO: 234708 - DNA, 15 bp, Homo sapiens
ccaggtttaaagttt

SEQ ID NO: 234709 - DNA, 15 bp, Homo sapiens
cccaggtttaaagtt

SEQ ID NO: 234710 - DNA, 15 bp, Homo sapiens
gcccaggtttaaagt

SEQ ID NO: 234711 - DNA, 15 bp, Homo sapiens
tgcccaggtttaaag

SEQ ID NO: 234712 - DNA, 15 bp, Homo sapiens
ctgcccaggtttaaa

SEQ ID NO: 234713 - DNA, 15 bp, Homo sapiens
actgcccaggtttaa

SEQ ID NO: 234714 - DNA, 15 bp, Homo sapiens
gactgcccaggttta

SEQ ID NO: 234715 - DNA, 15 bp, Homo sapiens
ggactgcccaggttt

SEQ ID NO: 234716 - DNA, 15 bp, Homo sapiens
tggactgcccaggtt

SEQ ID NO: 234717 - DNA, 15 bp, Homo sapiens
ttggactgcccaggt

SEQ ID NO: 234718 - DNA, 15 bp, Homo sapiens
gttggactgcccagg

SEQ ID NO: 234719 - DNA, 15 bp, Homo sapiens
tgttggactgcccag

SEQ ID NO: 234720 - DNA, 15 bp, Homo sapiens
gtgttggactgccca

SEQ ID NO: 234721 - DNA, 15 bp, Homo sapiens
ggtgttggactgccc

SEQ ID NO: 234722 - DNA, 15 bp, Homo sapiens
cggtgttggactgcc

SEQ ID NO: 234723 - DNA, 15 bp, Homo sapiens
ccggtgttggactgc

SEQ ID NO: 234724 - DNA, 15 bp, Homo sapiens
accggtgttggactg

SEQ ID NO: 234725 - DNA, 15 bp, Homo sapiens
caccggtgttggact

SEQ ID NO: 234726 - DNA, 15 bp, Homo sapiens
ccaccggtgttggac

SEQ ID NO: 234727 - DNA, 15 bp, Homo sapiens
accaccggtgttgga

SEQ ID NO: 234728 - DNA, 15 bp, Homo sapiens
gaccaccggtgttgg

SEQ ID NO: 234729 - DNA, 15 bp, Homo sapiens
tgaccaccggtgttg

SEQ ID NO: 234730 - DNA, 15 bp, Homo sapiens
ctgaccaccggtgtt

SEQ ID NO: 234731 - DNA, 15 bp, Homo sapiens
actgaccaccggtgt

SEQ ID NO: 234732 - DNA, 15 bp, Homo sapiens
cactgaccaccggtg

SEQ ID NO: 234733 - DNA, 15 bp, Homo sapiens
tcactgaccaccggt

SEQ ID NO: 234734 - DNA, 15 bp, Homo sapiens
ctcactgaccaccgg

SEQ ID NO: 234735 - DNA, 15 bp, Homo sapiens
gctcactgaccaccg

SEQ ID NO: 234736 - DNA, 15 bp, Homo sapiens
tgctcactgaccacc

SEQ ID NO: 234737 - DNA, 15 bp, Homo sapiens
atgctcactgaccac

SEQ ID NO: 234738 - DNA, 15 bp, Homo sapiens
gatgctcactgacca

SEQ ID NO: 234739 - DNA, 15 bp, Homo sapiens
agatgctcactgacc

SEQ ID NO: 234740 - DNA, 15 bp, Homo sapiens
cagatgctcactgac

SEQ ID NO: 234741 - DNA, 15 bp, Homo sapiens
tcagatgctcactga

SEQ ID NO: 234742 - DNA, 15 bp, Homo sapiens
ttcagatgctcactg

SEQ ID NO: 234743 - DNA, 15 bp, Homo sapiens
tttcagatgctcact

SEQ ID NO: 234744 - DNA, 15 bp, Homo sapiens
atttcagatgctcac

SEQ ID NO: 234745 - DNA, 15 bp, Homo sapiens
tatttcagatgctca

SEQ ID NO: 234746 - DNA, 15 bp, Homo sapiens
atatttcagatgctc

SEQ ID NO: 234747 - DNA, 15 bp, Homo sapiens
catatttcagatgct

SEQ ID NO: 234748 - DNA, 15 bp, Homo sapiens
tcatatttcagatgc

SEQ ID NO: 234749 - DNA, 15 bp, Homo sapiens
ttcatatttcagatg

SEQ ID NO: 234750 - DNA, 15 bp, Homo sapiens
attcatatttcagat

SEQ ID NO: 234751 - DNA, 15 bp, Homo sapiens
aattcatatttcaga

SEQ ID NO: 234752 - DNA, 15 bp, Homo sapiens
caattcatatttcag

SEQ ID NO: 234753 - DNA, 15 bp, Homo sapiens
gcaattcatatttca

SEQ ID NO: 234754 - DNA, 15 bp, Homo sapiens
agcaattcatatttc

SEQ ID NO: 234755 - DNA, 15 bp, Homo sapiens
cagcaattcatattt

SEQ ID NO: 234756 - DNA, 15 bp, Homo sapiens
acagcaattcatatt

SEQ ID NO: 234757 - DNA, 15 bp, Homo sapiens
cacagcaattcatat

SEQ ID NO: 234758 - DNA, 15 bp, Homo sapiens
acacagcaattcata

SEQ ID NO: 234759 - DNA, 15 bp, Homo sapiens
cacacagcaattcat

SEQ ID NO: 234760 - DNA, 15 bp, Homo sapiens
gcacacagcaattca

SEQ ID NO: 234761 - DNA, 15 bp, Homo sapiens
agcacacagcaattc

SEQ ID NO: 234762 - DNA, 15 bp, Homo sapiens
cagcacacagcaatt

SEQ ID NO: 234763 - DNA, 15 bp, Homo sapiens
acagcacacagcaat

SEQ ID NO: 234764 - DNA, 15 bp, Homo sapiens
tacagcacacagcaa

SEQ ID NO: 234765 - DNA, 15 bp, Homo sapiens
ttacagcacacagca

SEQ ID NO: 234766 - DNA, 15 bp, Homo sapiens
tttacagcacacagc

SEQ ID NO: 234767 - DNA, 15 bp, Homo sapiens
ctttacagcacacag

SEQ ID NO: 234768 - DNA, 15 bp, Homo sapiens
gctttacagcacaca

SEQ ID NO: 234769 - DNA, 15 bp, Homo sapiens
agctttacagcacac

SEQ ID NO: 234770 - DNA, 15 bp, Homo sapiens
cagctttacagcaca

SEQ ID NO: 234771 - DNA, 15 bp, Homo sapiens
ccagctttacagcac

SEQ ID NO: 234772 - DNA, 15 bp, Homo sapiens
cccagctttacagca

SEQ ID NO: 234773 - DNA, 15 bp, Homo sapiens
tcccagctttacagc

SEQ ID NO: 234774 - DNA, 15 bp, Homo sapiens
ctcccagctttacag

SEQ ID NO: 234775 - DNA, 15 bp, Homo sapiens
actcccagctttaca

SEQ ID NO: 234776 - DNA, 15 bp, Homo sapiens
tactcccagctttac

SEQ ID NO: 234777 - DNA, 15 bp, Homo sapiens
ctactcccagcttta

SEQ ID NO: 234778 - DNA, 15 bp, Homo sapiens
actactcccagcttt

SEQ ID NO: 234779 - DNA, 15 bp, Homo sapiens
tactactcccagctt

SEQ ID NO: 234780 - DNA, 15 bp, Homo sapiens
ctactactcccagct

SEQ ID NO: 234781 - DNA, 15 bp, Homo sapiens
actactactcccagc

SEQ ID NO: 234782 - DNA, 15 bp, Homo sapiens
cactactactcccag

SEQ ID NO: 234783 - DNA, 15 bp, Homo sapiens
gcactactactccca

SEQ ID NO: 234784 - DNA, 15 bp, Homo sapiens
tgcactactactccc

SEQ ID NO: 234785 - DNA, 15 bp, Homo sapiens
gtgcactactactcc

SEQ ID NO: 234786 - DNA, 15 bp, Homo sapiens
tgtgcactactactc

SEQ ID NO: 234787 - DNA, 15 bp, Homo sapiens
gtgtgcactactact

SEQ ID NO: 234788 - DNA, 15 bp, Homo sapiens
ggtgtgcactactac

SEQ ID NO: 234789 - DNA, 15 bp, Homo sapiens
aggtgtgcactacta

SEQ ID NO: 234790 - DNA, 15 bp, Homo sapiens
caggtgtgcactact

SEQ ID NO: 234791 - DNA, 15 bp, Homo sapiens
acaggtgtgcactac

SEQ ID NO: 234792 - DNA, 15 bp, Homo sapiens
tacaggtgtgcacta

SEQ ID NO: 234793 - DNA, 15 bp, Homo sapiens
ctacaggtgtgcact

SEQ ID NO: 234794 - DNA, 15 bp, Homo sapiens
actacaggtgtgcac

SEQ ID NO: 234795 - DNA, 15 bp, Homo sapiens
gactacaggtgtgca

SEQ ID NO: 234796 - DNA, 15 bp, Homo sapiens
ggactacaggtgtgc

SEQ ID NO: 234797 - DNA, 15 bp, Homo sapiens
gggactacaggtgtg

SEQ ID NO: 234798 - DNA, 15 bp, Homo sapiens
tgggactacaggtgt

SEQ ID NO: 234799 - DNA, 15 bp, Homo sapiens
ttgggactacaggtg

SEQ ID NO: 234800 - DNA, 15 bp, Homo sapiens
gttgggactacaggt

SEQ ID NO: 234801 - DNA, 15 bp, Homo sapiens
agttgggactacagg

SEQ ID NO: 234802 - DNA, 15 bp, Homo sapiens
tagttgggactacag

SEQ ID NO: 234803 - DNA, 15 bp, Homo sapiens
gtagttgggactaca

SEQ ID NO: 234804 - DNA, 15 bp, Homo sapiens
agtagttgggactac

SEQ ID NO: 234805 - DNA, 15 bp, Homo sapiens
aagtagttgggacta

SEQ ID NO: 234806 - DNA, 15 bp, Homo sapiens
aaagtagttgggact

SEQ ID NO: 234807 - DNA, 15 bp, Homo sapiens
caaagtagttgggac

SEQ ID NO: 234808 - DNA, 15 bp, Homo sapiens
ccaaagtagttggga

SEQ ID NO: 234809 - DNA, 15 bp, Homo sapiens
tccaaagtagttggg

SEQ ID NO: 234810 - DNA, 15 bp, Homo sapiens
ctccaaagtagttgg

SEQ ID NO: 234811 - DNA, 15 bp, Homo sapiens
cctccaaagtagttg

SEQ ID NO: 234812 - DNA, 15 bp, Homo sapiens
acctccaaagtagtt

SEQ ID NO: 234813 - DNA, 15 bp, Homo sapiens
cacctccaaagtagt

SEQ ID NO: 234814 - DNA, 15 bp, Homo sapiens
tcacctccaaagtag

SEQ ID NO: 234815 - DNA, 15 bp, Homo sapiens
ctcacctccaaagta

SEQ ID NO: 234816 - DNA, 15 bp, Homo sapiens
cctcacctccaaagt

SEQ ID NO: 234817 - DNA, 15 bp, Homo sapiens
gcctcacctccaaag

SEQ ID NO: 234818 - DNA, 15 bp, Homo sapiens
tgcctcacctccaaa

SEQ ID NO: 234819 - DNA, 15 bp, Homo sapiens
ctgcctcacctccaa

SEQ ID NO: 234820 - DNA, 15 bp, Homo sapiens
cctgcctcacctcca

SEQ ID NO: 234821 - DNA, 15 bp, Homo sapiens
tcctgcctcacctcc

SEQ ID NO: 234822 - DNA, 15 bp, Homo sapiens
ctcctgcctcacctc

SEQ ID NO: 234823 - DNA, 15 bp, Homo sapiens
tctcctgcctcacct

SEQ ID NO: 234824 - DNA, 15 bp, Homo sapiens
ttctcctgcctcacc

SEQ ID NO: 234825 - DNA, 15 bp, Homo sapiens
attctcctgcctcac

SEQ ID NO: 234826 - DNA, 15 bp, Homo sapiens
cgattctcctgcctc

SEQ ID NO: 234827 - DNA, 15 bp, Homo sapiens
gcgattctcctgcct

SEQ ID NO: 234828 - DNA, 15 bp, Homo sapiens
agcgattctcctgcc

SEQ ID NO: 234829 - DNA, 15 bp, Homo sapiens
aagcgattctcctgc

SEQ ID NO: 234830 - DNA, 15 bp, Homo sapiens
ctcaagcgattctcc

SEQ ID NO: 234831 - DNA, 15 bp, Homo sapiens
cctcaagcgattctc

SEQ ID NO: 234832 - DNA, 15 bp, Homo sapiens
gcctcaagcgattct

SEQ ID NO: 234833 - DNA, 15 bp, Homo sapiens
ggcctcaagcgattc

SEQ ID NO: 234834 - DNA, 15 bp, Homo sapiens
tggcctcaagcgatt

SEQ ID NO: 234835 - DNA, 15 bp, Homo sapiens
ctggcctcaagcgat

SEQ ID NO: 234836 - DNA, 15 bp, Homo sapiens
cctggcctcaagcga

SEQ ID NO: 234837 - DNA, 15 bp, Homo sapiens
tcctggcctcaagcg

SEQ ID NO: 234838 - DNA, 15 bp, Homo sapiens
ctcctggcctcaagc

SEQ ID NO: 234839 - DNA, 15 bp, Homo sapiens
actcctggcctcaag

SEQ ID NO: 234840 - DNA, 15 bp, Homo sapiens
aactcctggcctcaa

SEQ ID NO: 234841 - DNA, 15 bp, Homo sapiens
gaactcctggcctca

SEQ ID NO: 234842 - DNA, 15 bp, Homo sapiens
tgaactcctggcctc

SEQ ID NO: 234843 - DNA, 15 bp, Homo sapiens
ttgaactcctggcct

SEQ ID NO: 234844 - DNA, 15 bp, Homo sapiens
cttgaactcctggcc

SEQ ID NO: 234845 - DNA, 15 bp, Homo sapiens
ccttgaactcctggc

SEQ ID NO: 234846 - DNA, 15 bp, Homo sapiens
tccttgaactcctgg

SEQ ID NO: 234847 - DNA, 15 bp, Homo sapiens
gtccttgaactcctg

SEQ ID NO: 234848 - DNA, 15 bp, Homo sapiens
agtccttgaactcct

SEQ ID NO: 234849 - DNA, 15 bp, Homo sapiens
cagtccttgaactcc

SEQ ID NO: 234850 - DNA, 15 bp, Homo sapiens
acagtccttgaactc

SEQ ID NO: 234851 - DNA, 15 bp, Homo sapiens
cacagtccttgaact

SEQ ID NO: 234852 - DNA, 15 bp, Homo sapiens
gcacagtccttgaac

SEQ ID NO: 234853 - DNA, 15 bp, Homo sapiens
tgcacagtccttgaa

SEQ ID NO: 234854 - DNA, 15 bp, Homo sapiens
ctgcacagtccttga

SEQ ID NO: 234855 - DNA, 15 bp, Homo sapiens
actgcacagtccttg

SEQ ID NO: 234856 - DNA, 15 bp, Homo sapiens
cactgcacagtcctt

SEQ ID NO: 234857 - DNA, 15 bp, Homo sapiens
tcactgcacagtcct

SEQ ID NO: 234858 - DNA, 15 bp, Homo sapiens
ctcactgcacagtcc

SEQ ID NO: 234859 - DNA, 15 bp, Homo sapiens
gctcactgcacagtc

SEQ ID NO: 234860 - DNA, 15 bp, Homo sapiens
agctcactgcacagt

SEQ ID NO: 234861 - DNA, 15 bp, Homo sapiens
tagctcactgcacag

SEQ ID NO: 234862 - DNA, 15 bp, Homo sapiens
atagctcactgcaca

SEQ ID NO: 234863 - DNA, 15 bp, Homo sapiens
catagctcactgcac

SEQ ID NO: 234864 - DNA, 15 bp, Homo sapiens
tcatagctcactgca

SEQ ID NO: 234865 - DNA, 15 bp, Homo sapiens
atcatagctcactgc

SEQ ID NO: 234866 - DNA, 15 bp, Homo sapiens
gatcatagctcactg

SEQ ID NO: 234867 - DNA, 15 bp, Homo sapiens
tgatcatagctcact

SEQ ID NO: 234868 - DNA, 15 bp, Homo sapiens
atgatcatagctcac

SEQ ID NO: 234869 - DNA, 15 bp, Homo sapiens
catgatcatagctca

SEQ ID NO: 234870 - DNA, 15 bp, Homo sapiens
gcatgatcatagctc

SEQ ID NO: 234871 - DNA, 15 bp, Homo sapiens
ggcatgatcatagct

SEQ ID NO: 234872 - DNA, 15 bp, Homo sapiens
tggcatgatcatagc

SEQ ID NO: 234873 - DNA, 15 bp, Homo sapiens
ctggcatgatcatag

SEQ ID NO: 234874 - DNA, 15 bp, Homo sapiens
actggcatgatcata

SEQ ID NO: 234875 - DNA, 15 bp, Homo sapiens
cactggcatgatcat

SEQ ID NO: 234876 - DNA, 15 bp, Homo sapiens
gcactggcatgatca

SEQ ID NO: 234877 - DNA, 15 bp, Homo sapiens
tgcactggcatgatc

SEQ ID NO: 234878 - DNA, 15 bp, Homo sapiens
gtgcactggcatgat

SEQ ID NO: 234879 - DNA, 15 bp, Homo sapiens
agtgcactggcatga

SEQ ID NO: 234880 - DNA, 15 bp, Homo sapiens
gagtgcactggcatg

SEQ ID NO: 234881 - DNA, 15 bp, Homo sapiens
ggagtgcactggcat

SEQ ID NO: 234882 - DNA, 15 bp, Homo sapiens
tggagtgcactggca

SEQ ID NO: 234883 - DNA, 15 bp, Homo sapiens
tctggagtgcactgg

SEQ ID NO: 234884 - DNA, 15 bp, Homo sapiens
ctctggagtgcactg

SEQ ID NO: 234885 - DNA, 15 bp, Homo sapiens
tctctggagtgcact

SEQ ID NO: 234886 - DNA, 15 bp, Homo sapiens
ctctctggagtgcac

SEQ ID NO: 234887 - DNA, 15 bp, Homo sapiens
tctctctggagtgca

SEQ ID NO: 234888 - DNA, 15 bp, Homo sapiens
gtctctctggagtgc

SEQ ID NO: 234889 - DNA, 15 bp, Homo sapiens
ggtctctctggagtg

SEQ ID NO: 234890 - DNA, 15 bp, Homo sapiens
gggtctctctggagt

SEQ ID NO: 234891 - DNA, 15 bp, Homo sapiens
agggtctctctggag

SEQ ID NO: 234892 - DNA, 15 bp, Homo sapiens
cagggtctctctgga

SEQ ID NO: 234893 - DNA, 15 bp, Homo sapiens
acagggtctctctgg

SEQ ID NO: 234894 - DNA, 15 bp, Homo sapiens
gacagggtctctctg

SEQ ID NO: 234895 - DNA, 15 bp, Homo sapiens
agacagggtctctct

SEQ ID NO: 234896 - DNA, 15 bp, Homo sapiens
gagacagggtctctc

SEQ ID NO: 234897 - DNA, 15 bp, Homo sapiens
agagacagggtctct

SEQ ID NO: 234898 - DNA, 15 bp, Homo sapiens
ttttttagagacagg

SEQ ID NO: 234899 - DNA, 15 bp, Homo sapiens
cttttttagagacag

SEQ ID NO: 234900 - DNA, 15 bp, Homo sapiens
gcttttttagagaca

SEQ ID NO: 234901 - DNA, 15 bp, Homo sapiens
tgcttttttagagac

SEQ ID NO: 234902 - DNA, 15 bp, Homo sapiens
ttgcttttttagaga

SEQ ID NO: 234903 - DNA, 15 bp, Homo sapiens
gttgcttttttagag

SEQ ID NO: 234904 - DNA, 15 bp, Homo sapiens
tgttgcttttttaga

SEQ ID NO: 234905 - DNA, 15 bp, Homo sapiens
ttgttgcttttttag

SEQ ID NO: 234906 - DNA, 15 bp, Homo sapiens
attgttgctttttta

SEQ ID NO: 234907 - DNA, 15 bp, Homo sapiens
cattgttgctttttt

SEQ ID NO: 234908 - DNA, 15 bp, Homo sapiens
gcattgttgcttttt

SEQ ID NO: 234909 - DNA, 15 bp, Homo sapiens
agcattgttgctttt

SEQ ID NO: 234910 - DNA, 15 bp, Homo sapiens
cagcattgttgcttt

SEQ ID NO: 234911 - DNA, 15 bp, Homo sapiens
acagcattgttgctt

SEQ ID NO: 234912 - DNA, 15 bp, Homo sapiens
tacagcattgttgct

SEQ ID NO: 234913 - DNA, 15 bp, Homo sapiens
ttacagcattgttgc

SEQ ID NO: 234914 - DNA, 15 bp, Homo sapiens
cttacagcattgttg

SEQ ID NO: 234915 - DNA, 15 bp, Homo sapiens
acttacagcattgtt

SEQ ID NO: 234916 - DNA, 15 bp, Homo sapiens
cacttacagcattgt

SEQ ID NO: 234917 - DNA, 15 bp, Homo sapiens
ccacttacagcattg

SEQ ID NO: 234918 - DNA, 15 bp, Homo sapiens
tccacttacagcatt

SEQ ID NO: 234919 - DNA, 15 bp, Homo sapiens
ttccacttacagcat

SEQ ID NO: 234920 - DNA, 15 bp, Homo sapiens
tttccacttacagca

SEQ ID NO: 234921 - DNA, 15 bp, Homo sapiens
atttccacttacagc

SEQ ID NO: 234922 - DNA, 15 bp, Homo sapiens
aatttccacttacag

SEQ ID NO: 234923 - DNA, 15 bp, Homo sapiens
aaatttccacttaca

SEQ ID NO: 234924 - DNA, 15 bp, Homo sapiens
taaatttccacttac

SEQ ID NO: 234925 - DNA, 15 bp, Homo sapiens
ctaaatttccactta

SEQ ID NO: 234926 - DNA, 15 bp, Homo sapiens
actaaatttccactt

SEQ ID NO: 234927 - DNA, 15 bp, Homo sapiens
tactaaatttccact

SEQ ID NO: 234928 - DNA, 15 bp, Homo sapiens
gtactaaatttccac

SEQ ID NO: 234929 - DNA, 15 bp, Homo sapiens
tgtactaaatttcca

SEQ ID NO: 234930 - DNA, 15 bp, Homo sapiens
ttgtactaaatttcc

SEQ ID NO: 234931 - DNA, 15 bp, Homo sapiens
tttgtactaaatttc

SEQ ID NO: 234932 - DNA, 15 bp, Homo sapiens
ttttgtactaaattt

SEQ ID NO: 234933 - DNA, 15 bp, Homo sapiens
tttttgtactaaatt

SEQ ID NO: 234934 - DNA, 15 bp, Homo sapiens
ttttttgtactaaat

SEQ ID NO: 234935 - DNA, 15 bp, Homo sapiens
tttttttgtactaaa

SEQ ID NO: 234936 - DNA, 15 bp, Homo sapiens
ctttttttgtactaa

SEQ ID NO: 234937 - DNA, 15 bp, Homo sapiens
tctttttttgtacta

SEQ ID NO: 234938 - DNA, 15 bp, Homo sapiens
gtctttttttgtact

SEQ ID NO: 234939 - DNA, 15 bp, Homo sapiens
agtctttttttgtac

SEQ ID NO: 234940 - DNA, 15 bp, Homo sapiens
cagtctttttttgta

SEQ ID NO: 234941 - DNA, 15 bp, Homo sapiens
acagtctttttttgt

SEQ ID NO: 234942 - DNA, 15 bp, Homo sapiens
tacagtctttttttg

SEQ ID NO: 234943 - DNA, 15 bp, Homo sapiens
ttacagtcttttttt

SEQ ID NO: 234944 - DNA, 15 bp, Homo sapiens
tttacagtctttttt

SEQ ID NO: 234945 - DNA, 15 bp, Homo sapiens
ttttacagtcttttt

SEQ ID NO: 234946 - DNA, 15 bp, Homo sapiens
tttttacagtctttt

SEQ ID NO: 234947 - DNA, 15 bp, Homo sapiens
ttttttacagtcttt

SEQ ID NO: 234948 - DNA, 15 bp, Homo sapiens
tttttttacagtctt

SEQ ID NO: 234949 - DNA, 15 bp, Homo sapiens
gtttttttacagtct

SEQ ID NO: 234950 - DNA, 15 bp, Homo sapiens
ggtttttttacagtc

SEQ ID NO: 234951 - DNA, 15 bp, Homo sapiens
aggtttttttacagt

SEQ ID NO: 234952 - DNA, 15 bp, Homo sapiens
aaggtttttttacag

SEQ ID NO: 234953 - DNA, 15 bp, Homo sapiens
taaggtttttttaca

SEQ ID NO: 234954 - DNA, 15 bp, Homo sapiens
ataaggtttttttac

SEQ ID NO: 234955 - DNA, 15 bp, Homo sapiens
aataaggttttttta

SEQ ID NO: 234956 - DNA, 15 bp, Homo sapiens
taataaggttttttt

SEQ ID NO: 234957 - DNA, 15 bp, Homo sapiens
ataataaggtttttt

SEQ ID NO: 234958 - DNA, 15 bp, Homo sapiens
tataataaggttttt

SEQ ID NO: 234959 - DNA, 15 bp, Homo sapiens
ttataataaggtttt

SEQ ID NO: 234960 - DNA, 15 bp, Homo sapiens
attataataaggttt

SEQ ID NO: 234961 - DNA, 15 bp, Homo sapiens
cattataataaggtt

SEQ ID NO: 234962 - DNA, 15 bp, Homo sapiens
acattataataaggt

SEQ ID NO: 234963 - DNA, 15 bp, Homo sapiens
aacattataataagg

SEQ ID NO: 234964 - DNA, 15 bp, Homo sapiens
aaacattataataag

SEQ ID NO: 234965 - DNA, 15 bp, Homo sapiens
taaacattataataa

SEQ ID NO: 234966 - DNA, 15 bp, Homo sapiens
ataaacattataata

SEQ ID NO: 234967 - DNA, 15 bp, Homo sapiens
tataaacattataat

SEQ ID NO: 234968 - DNA, 15 bp, Homo sapiens
atataaacattataa

SEQ ID NO: 234969 - DNA, 15 bp, Homo sapiens
aatataaacattata

SEQ ID NO: 234970 - DNA, 15 bp, Homo sapiens
caatataaacattat

SEQ ID NO: 234971 - DNA, 15 bp, Homo sapiens
tcaatataaacatta

SEQ ID NO: 234972 - DNA, 15 bp, Homo sapiens
atcaatataaacatt

SEQ ID NO: 234973 - DNA, 15 bp, Homo sapiens
aatcaatataaacat

SEQ ID NO: 234974 - DNA, 15 bp, Homo sapiens
taatcaatataaaca

SEQ ID NO: 234975 - DNA, 15 bp, Homo sapiens
gtaatcaatataaac

SEQ ID NO: 234976 - DNA, 15 bp, Homo sapiens
agtaatcaatataaa

SEQ ID NO: 234977 - DNA, 15 bp, Homo sapiens
aagtaatcaatataa

SEQ ID NO: 234978 - DNA, 15 bp, Homo sapiens
taagtaatcaatata

SEQ ID NO: 234979 - DNA, 15 bp, Homo sapiens
ataagtaatcaatat

SEQ ID NO: 234980 - DNA, 15 bp, Homo sapiens
aataagtaatcaata

SEQ ID NO: 234981 - DNA, 15 bp, Homo sapiens
caataagtaatcaat

SEQ ID NO: 234982 - DNA, 15 bp, Homo sapiens
tcaataagtaatcaa

SEQ ID NO: 234983 - DNA, 15 bp, Homo sapiens
atcaataagtaatca

SEQ ID NO: 234984 - DNA, 15 bp, Homo sapiens
tatcaataagtaatc

SEQ ID NO: 234985 - DNA, 15 bp, Homo sapiens
ttatcaataagtaat

SEQ ID NO: 234986 - DNA, 15 bp, Homo sapiens
attatcaataagtaa

SEQ ID NO: 234987 - DNA, 15 bp, Homo sapiens
tattatcaataagta

SEQ ID NO: 234988 - DNA, 15 bp, Homo sapiens
atattatcaataagt

SEQ ID NO: 234989 - DNA, 15 bp, Homo sapiens
aatattatcaataag

SEQ ID NO: 234990 - DNA, 15 bp, Homo sapiens
aaatattatcaataa

SEQ ID NO: 234991 - DNA, 15 bp, Homo sapiens
aaaatattatcaata

SEQ ID NO: 234992 - DNA, 15 bp, Homo sapiens
caaaatattatcaat

SEQ ID NO: 234993 - DNA, 15 bp, Homo sapiens
acaaaatattatcaa

SEQ ID NO: 234994 - DNA, 15 bp, Homo sapiens
tacaaaatattatca

SEQ ID NO: 234995 - DNA, 15 bp, Homo sapiens
atacaaaatattatc

SEQ ID NO: 234996 - DNA, 15 bp, Homo sapiens
tatacaaaatattat

SEQ ID NO: 234997 - DNA, 15 bp, Homo sapiens
ctatacaaaatatta

SEQ ID NO: 234998 - DNA, 15 bp, Homo sapiens
tctatacaaaatatt

SEQ ID NO: 234999 - DNA, 15 bp, Homo sapiens
atctatacaaaatat

SEQ ID NO: 235000 - DNA, 15 bp, Homo sapiens
aatctatacaaaata

SEQ ID NO: 235001 - DNA, 15 bp, Homo sapiens
taatctatacaaaat

SEQ ID NO: 235002 - DNA, 15 bp, Homo sapiens
ttaatctatacaaaa

SEQ ID NO: 235003 - DNA, 15 bp, Homo sapiens
tttaatctatacaaa

SEQ ID NO: 235004 - DNA, 15 bp, Homo sapiens
gtttaatctatacaa

SEQ ID NO: 235005 - DNA, 15 bp, Homo sapiens
agtttaatctataca

SEQ ID NO: 235006 - DNA, 15 bp, Homo sapiens
gagtttaatctatac

SEQ ID NO: 235007 - DNA, 15 bp, Homo sapiens
ggagtttaatctata

SEQ ID NO: 235008 - DNA, 15 bp, Homo sapiens
tggagtttaatctat

SEQ ID NO: 235009 - DNA, 15 bp, Homo sapiens
atggagtttaatcta

SEQ ID NO: 235010 - DNA, 15 bp, Homo sapiens
aatggagtttaatct

SEQ ID NO: 235011 - DNA, 15 bp, Homo sapiens
taatggagtttaatc

SEQ ID NO: 235012 - DNA, 15 bp, Homo sapiens
ataatggagtttaat

SEQ ID NO: 235013 - DNA, 15 bp, Homo sapiens
aataatggagtttaa

SEQ ID NO: 235014 - DNA, 15 bp, Homo sapiens
taataatggagttta

SEQ ID NO: 235015 - DNA, 15 bp, Homo sapiens
ttaataatggagttt

SEQ ID NO: 235016 - DNA, 15 bp, Homo sapiens
tttaataatggagtt

SEQ ID NO: 235017 - DNA, 15 bp, Homo sapiens
ttttaataatggagt

SEQ ID NO: 235018 - DNA, 15 bp, Homo sapiens
attttaataatggag

SEQ ID NO: 235019 - DNA, 15 bp, Homo sapiens
aattttaataatgga

SEQ ID NO: 235020 - DNA, 15 bp, Homo sapiens
taattttaataatgg

SEQ ID NO: 235021 - DNA, 15 bp, Homo sapiens
ttaattttaataatg

SEQ ID NO: 235022 - DNA, 15 bp, Homo sapiens
attaattttaataat

SEQ ID NO: 235023 - DNA, 15 bp, Homo sapiens
aattaattttaataa

SEQ ID NO: 235024 - DNA, 15 bp, Homo sapiens
aaattaattttaata

SEQ ID NO: 235025 - DNA, 15 bp, Homo sapiens
gaaattaattttaat

SEQ ID NO: 235026 - DNA, 15 bp, Homo sapiens
tgaaattaattttaa

SEQ ID NO: 235027 - DNA, 15 bp, Homo sapiens
gtgaaattaatttta

SEQ ID NO: 235028 - DNA, 15 bp, Homo sapiens
agtgaaattaatttt

SEQ ID NO: 235029 - DNA, 15 bp, Homo sapiens
aagtgaaattaattt

SEQ ID NO: 235030 - DNA, 15 bp, Homo sapiens
aaagtgaaattaatt

SEQ ID NO: 235031 - DNA, 15 bp, Homo sapiens
aaaagtgaaattaat

SEQ ID NO: 235032 - DNA, 15 bp, Homo sapiens
aaaaagtgaaattaa

SEQ ID NO: 235033 - DNA, 15 bp, Homo sapiens
aaaaaagtgaaatta

SEQ ID NO: 235034 - DNA, 15 bp, Homo sapiens
gaaaaaagtgaaatt

SEQ ID NO: 235035 - DNA, 15 bp, Homo sapiens
agaaaaaagtgaaat

SEQ ID NO: 235036 - DNA, 15 bp, Homo sapiens
aagaaaaaagtgaaa

SEQ ID NO: 235037 - DNA, 15 bp, Homo sapiens
aaagaaaaaagtgaa

SEQ ID NO: 235038 - DNA, 15 bp, Homo sapiens
aaaagaaaaaagtga

SEQ ID NO: 235039 - DNA, 15 bp, Homo sapiens
aaaaagaaaaaagtg

SEQ ID NO: 235040 - DNA, 15 bp, Homo sapiens
taaaaagaaaaaagt

SEQ ID NO: 235041 - DNA, 15 bp, Homo sapiens
gtaaaaagaaaaaag

SEQ ID NO: 235042 - DNA, 15 bp, Homo sapiens
agtaaaaagaaaaaa

SEQ ID NO: 235043 - DNA, 15 bp, Homo sapiens
aagtaaaaagaaaaa

SEQ ID NO: 235044 - DNA, 15 bp, Homo sapiens
aaagtaaaaagaaaa

SEQ ID NO: 235045 - DNA, 15 bp, Homo sapiens
aaaagtaaaaagaaa

SEQ ID NO: 235046 - DNA, 15 bp, Homo sapiens
taaaagtaaaaagaa

SEQ ID NO: 235047 - DNA, 15 bp, Homo sapiens
ttaaaagtaaaaaga

SEQ ID NO: 235048 - DNA, 15 bp, Homo sapiens
tttaaaagtaaaaag

SEQ ID NO: 235049 - DNA, 15 bp, Homo sapiens
ttttaaaagtaaaaa

SEQ ID NO: 235050 - DNA, 15 bp, Homo sapiens
tttttaaaagtaaaa

SEQ ID NO: 235051 - DNA, 15 bp, Homo sapiens
ttttttaaaagtaaa

SEQ ID NO: 235052 - DNA, 15 bp, Homo sapiens
attttttaaaagtaa

SEQ ID NO: 235053 - DNA, 15 bp, Homo sapiens
tattttttaaaagta

SEQ ID NO: 235054 - DNA, 15 bp, Homo sapiens
atattttttaaaagt

SEQ ID NO: 235055 - DNA, 15 bp, Homo sapiens
catattttttaaaag

SEQ ID NO: 235056 - DNA, 15 bp, Homo sapiens
gcatattttttaaaa

SEQ ID NO: 235057 - DNA, 15 bp, Homo sapiens
agcatattttttaaa

SEQ ID NO: 235058 - DNA, 15 bp, Homo sapiens
aagcatattttttaa

SEQ ID NO: 235059 - DNA, 15 bp, Homo sapiens
aaagcatatttttta

SEQ ID NO: 235060 - DNA, 15 bp, Homo sapiens
gaaagcatatttttt

SEQ ID NO: 235061 - DNA, 15 bp, Homo sapiens
agaaagcatattttt

SEQ ID NO: 235062 - DNA, 15 bp, Homo sapiens
tagaaagcatatttt

SEQ ID NO: 235063 - DNA, 15 bp, Homo sapiens
ctagaaagcatattt

SEQ ID NO: 235064 - DNA, 15 bp, Homo sapiens
tctagaaagcatatt

SEQ ID NO: 235065 - DNA, 15 bp, Homo sapiens
atctagaaagcatat

SEQ ID NO: 235066 - DNA, 15 bp, Homo sapiens
catctagaaagcata

SEQ ID NO: 235067 - DNA, 15 bp, Homo sapiens
ccatctagaaagcat

SEQ ID NO: 235068 - DNA, 15 bp, Homo sapiens
tccatctagaaagca

SEQ ID NO: 235069 - DNA, 15 bp, Homo sapiens
atccatctagaaagc

SEQ ID NO: 235070 - DNA, 15 bp, Homo sapiens
tatccatctagaaag

SEQ ID NO: 235071 - DNA, 15 bp, Homo sapiens
ttatccatctagaaa

SEQ ID NO: 235072 - DNA, 15 bp, Homo sapiens
attatccatctagaa

SEQ ID NO: 235073 - DNA, 15 bp, Homo sapiens
cattatccatctaga

SEQ ID NO: 235074 - DNA, 15 bp, Homo sapiens
ccattatccatctag

SEQ ID NO: 235075 - DNA, 15 bp, Homo sapiens
accattatccatcta

SEQ ID NO: 235076 - DNA, 15 bp, Homo sapiens
caccattatccatct

SEQ ID NO: 235077 - DNA, 15 bp, Homo sapiens
tcaccattatccatc

SEQ ID NO: 235078 - DNA, 15 bp, Homo sapiens
atcaccattatccat

SEQ ID NO: 235079 - DNA, 15 bp, Homo sapiens
catcaccattatcca

SEQ ID NO: 235080 - DNA, 15 bp, Homo sapiens
ccatcaccattatcc

SEQ ID NO: 235081 - DNA, 15 bp, Homo sapiens
gccatcaccattatc

SEQ ID NO: 235082 - DNA, 15 bp, Homo sapiens
agccatcaccattat

SEQ ID NO: 235083 - DNA, 15 bp, Homo sapiens
cagccatcaccatta

SEQ ID NO: 235084 - DNA, 15 bp, Homo sapiens
tcagccatcaccatt

SEQ ID NO: 235085 - DNA, 15 bp, Homo sapiens
ctcagccatcaccat

SEQ ID NO: 235086 - DNA, 15 bp, Homo sapiens
gctcagccatcacca

SEQ ID NO: 235087 - DNA, 15 bp, Homo sapiens
cgctcagccatcacc

SEQ ID NO: 235088 - DNA, 15 bp, Homo sapiens
tcgctcagccatcac

SEQ ID NO: 235089 - DNA, 15 bp, Homo sapiens
gtcgctcagccatca

SEQ ID NO: 235090 - DNA, 15 bp, Homo sapiens
ggtcgctcagccatc

SEQ ID NO: 235091 - DNA, 15 bp, Homo sapiens
tggtcgctcagccat

SEQ ID NO: 235092 - DNA, 15 bp, Homo sapiens
atggtcgctcagcca

SEQ ID NO: 235093 - DNA, 15 bp, Homo sapiens
catggtcgctcagcc

SEQ ID NO: 235094 - DNA, 15 bp, Homo sapiens
acatggtcgctcagc

SEQ ID NO: 235095 - DNA, 15 bp, Homo sapiens
cacatggtcgctcag

SEQ ID NO: 235096 - DNA, 15 bp, Homo sapiens
tcacatggtcgctca

SEQ ID NO: 235097 - DNA, 15 bp, Homo sapiens
ttcacatggtcgctc

SEQ ID NO: 235098 - DNA, 15 bp, Homo sapiens
attcacatggtcgct

SEQ ID NO: 235099 - DNA, 15 bp, Homo sapiens
cattcacatggtcgc

SEQ ID NO: 235100 - DNA, 15 bp, Homo sapiens
acattcacatggtcg

SEQ ID NO: 235101 - DNA, 15 bp, Homo sapiens
tacattcacatggtc

SEQ ID NO: 235102 - DNA, 15 bp, Homo sapiens
gtacattcacatggt

SEQ ID NO: 235103 - DNA, 15 bp, Homo sapiens
agtacattcacatgg

SEQ ID NO: 235104 - DNA, 15 bp, Homo sapiens
aagtacattcacatg

SEQ ID NO: 235105 - DNA, 15 bp, Homo sapiens
taagtacattcacat

SEQ ID NO: 235106 - DNA, 15 bp, Homo sapiens
ttaagtacattcaca

SEQ ID NO: 235107 - DNA, 15 bp, Homo sapiens
attaagtacattcac

SEQ ID NO: 235108 - DNA, 15 bp, Homo sapiens
tattaagtacattca

SEQ ID NO: 235109 - DNA, 15 bp, Homo sapiens
gtattaagtacattc

SEQ ID NO: 235110 - DNA, 15 bp, Homo sapiens
ggtattaagtacatt

SEQ ID NO: 235111 - DNA, 15 bp, Homo sapiens
tggtattaagtacat

SEQ ID NO: 235112 - DNA, 15 bp, Homo sapiens
gtggtattaagtaca

SEQ ID NO: 235113 - DNA, 15 bp, Homo sapiens
agtggtattaagtac

SEQ ID NO: 235114 - DNA, 15 bp, Homo sapiens
cagtggtattaagta

SEQ ID NO: 235115 - DNA, 15 bp, Homo sapiens
tcagtggtattaagt

SEQ ID NO: 235116 - DNA, 15 bp, Homo sapiens
ctcagtggtattaag

SEQ ID NO: 235117 - DNA, 15 bp, Homo sapiens
gctcagtggtattaa

SEQ ID NO: 235118 - DNA, 15 bp, Homo sapiens
agctcagtggtatta

SEQ ID NO: 235119 - DNA, 15 bp, Homo sapiens
cagctcagtggtatt

SEQ ID NO: 235120 - DNA, 15 bp, Homo sapiens
acagctcagtggtat

SEQ ID NO: 235121 - DNA, 15 bp, Homo sapiens
tacagctcagtggta

SEQ ID NO: 235122 - DNA, 15 bp, Homo sapiens
atacagctcagtggt

SEQ ID NO: 235123 - DNA, 15 bp, Homo sapiens
tatacagctcagtgg

SEQ ID NO: 235124 - DNA, 15 bp, Homo sapiens
gtatacagctcagtg

SEQ ID NO: 235125 - DNA, 15 bp, Homo sapiens
agtatacagctcagt

SEQ ID NO: 235126 - DNA, 15 bp, Homo sapiens
aagtatacagctcag

SEQ ID NO: 235127 - DNA, 15 bp, Homo sapiens
taagtatacagctca

SEQ ID NO: 235128 - DNA, 15 bp, Homo sapiens
ttaagtatacagctc

SEQ ID NO: 235129 - DNA, 15 bp, Homo sapiens
tttaagtatacagct

SEQ ID NO: 235130 - DNA, 15 bp, Homo sapiens
ttttaagtatacagc

SEQ ID NO: 235131 - DNA, 15 bp, Homo sapiens
tttttaagtatacag

SEQ ID NO: 235132 - DNA, 15 bp, Homo sapiens
atttttaagtataca

SEQ ID NO: 235133 - DNA, 15 bp, Homo sapiens
aatttttaagtatac

SEQ ID NO: 235134 - DNA, 15 bp, Homo sapiens
taatttttaagtata

SEQ ID NO: 235135 - DNA, 15 bp, Homo sapiens
gtaatttttaagtat

SEQ ID NO: 235136 - DNA, 15 bp, Homo sapiens
agtaatttttaagta

SEQ ID NO: 235137 - DNA, 15 bp, Homo sapiens
aagtaatttttaagt

SEQ ID NO: 235138 - DNA, 15 bp, Homo sapiens
taagtaatttttaag

SEQ ID NO: 235139 - DNA, 15 bp, Homo sapiens
ttaagtaatttttaa

SEQ ID NO: 235140 - DNA, 15 bp, Homo sapiens
tttaagtaattttta

SEQ ID NO: 235141 - DNA, 15 bp, Homo sapiens
atttaagtaattttt

SEQ ID NO: 235142 - DNA, 15 bp, Homo sapiens
catttaagtaatttt

SEQ ID NO: 235143 - DNA, 15 bp, Homo sapiens
ccatttaagtaattt

SEQ ID NO: 235144 - DNA, 15 bp, Homo sapiens
accatttaagtaatt

SEQ ID NO: 235145 - DNA, 15 bp, Homo sapiens
taccatttaagtaat

SEQ ID NO: 235146 - DNA, 15 bp, Homo sapiens
ttaccatttaagtaa

SEQ ID NO: 235147 - DNA, 15 bp, Homo sapiens
tttaccatttaagta

SEQ ID NO: 235148 - DNA, 15 bp, Homo sapiens
atttaccatttaagt

SEQ ID NO: 235149 - DNA, 15 bp, Homo sapiens
aatttaccatttaag

SEQ ID NO: 235150 - DNA, 15 bp, Homo sapiens
aaatttaccatttaa

SEQ ID NO: 235151 - DNA, 15 bp, Homo sapiens
aaaatttaccattta

SEQ ID NO: 235152 - DNA, 15 bp, Homo sapiens
taaaatttaccattt

SEQ ID NO: 235153 - DNA, 15 bp, Homo sapiens
gataaaatttaccat

SEQ ID NO: 235154 - DNA, 15 bp, Homo sapiens
agataaaatttacca

SEQ ID NO: 235155 - DNA, 15 bp, Homo sapiens
aagataaaatttacc

SEQ ID NO: 235156 - DNA, 15 bp, Homo sapiens
taagataaaatttac

SEQ ID NO: 235157 - DNA, 15 bp, Homo sapiens
ataagataaaattta

SEQ ID NO: 235158 - DNA, 15 bp, Homo sapiens
cataagataaaattt

SEQ ID NO: 235159 - DNA, 15 bp, Homo sapiens
acataagataaaatt

SEQ ID NO: 235160 - DNA, 15 bp, Homo sapiens
tacataagataaaat

SEQ ID NO: 235161 - DNA, 15 bp, Homo sapiens
atacataagataaaa

SEQ ID NO: 235162 - DNA, 15 bp, Homo sapiens
tatacataagataaa

SEQ ID NO: 235163 - DNA, 15 bp, Homo sapiens
atatacataagataa

SEQ ID NO: 235164 - DNA, 15 bp, Homo sapiens
aatatacataagata

SEQ ID NO: 235165 - DNA, 15 bp, Homo sapiens
aaatatacataagat

SEQ ID NO: 235166 - DNA, 15 bp, Homo sapiens
aaaatatacataaga

SEQ ID NO: 235167 - DNA, 15 bp, Homo sapiens
taaaatatacataag

SEQ ID NO: 235168 - DNA, 15 bp, Homo sapiens
ataaaatatacataa

SEQ ID NO: 235169 - DNA, 15 bp, Homo sapiens
gataaaatatacata

SEQ ID NO: 235170 - DNA, 15 bp, Homo sapiens
tgataaaatatacat

SEQ ID NO: 235171 - DNA, 15 bp, Homo sapiens
atgataaaatataca

SEQ ID NO: 235172 - DNA, 15 bp, Homo sapiens
tatgataaaatatac

SEQ ID NO: 235173 - DNA, 15 bp, Homo sapiens
gtatgataaaatata

SEQ ID NO: 235174 - DNA, 15 bp, Homo sapiens
agtatgataaaatat

SEQ ID NO: 235175 - DNA, 15 bp, Homo sapiens
tagtatgataaaata

SEQ ID NO: 235176 - DNA, 15 bp, Homo sapiens
ttagtatgataaaat

SEQ ID NO: 235177 - DNA, 15 bp, Homo sapiens
tttagtatgataaaa

SEQ ID NO: 235178 - DNA, 15 bp, Homo sapiens
ttttagtatgataaa

SEQ ID NO: 235179 - DNA, 15 bp, Homo sapiens
tttttagtatgataa

SEQ ID NO: 235180 - DNA, 15 bp, Homo sapiens
ctttttagtatgata

SEQ ID NO: 235181 - DNA, 15 bp, Homo sapiens
tctttttagtatgat

SEQ ID NO: 235182 - DNA, 15 bp, Homo sapiens
ttctttttagtatga

SEQ ID NO: 235183 - DNA, 15 bp, Homo sapiens
tttctttttagtatg

SEQ ID NO: 235184 - DNA, 15 bp, Homo sapiens
ctttctttttagtat

SEQ ID NO: 235185 - DNA, 15 bp, Homo sapiens
gctttctttttagta

SEQ ID NO: 235186 - DNA, 15 bp, Homo sapiens
tgctttctttttagt

SEQ ID NO: 235187 - DNA, 15 bp, Homo sapiens
ttgctttctttttag

SEQ ID NO: 235188 - DNA, 15 bp, Homo sapiens
tttgctttcttttta

SEQ ID NO: 235189 - DNA, 15 bp, Homo sapiens
ttttgctttcttttt

SEQ ID NO: 235190 - DNA, 15 bp, Homo sapiens
tttttgctttctttt

SEQ ID NO: 235191 - DNA, 15 bp, Homo sapiens
ttttttgctttcttt

SEQ ID NO: 235192 - DNA, 15 bp, Homo sapiens
tttttttgctttctt

SEQ ID NO: 235193 - DNA, 15 bp, Homo sapiens
ttttttttgctttct

SEQ ID NO: 235194 - DNA, 15 bp, Homo sapiens
tttttttttgctttc

SEQ ID NO: 235195 - DNA, 15 bp, Homo sapiens
ttttttttttgcttt

SEQ ID NO: 235196 - DNA, 15 bp, Homo sapiens
tttttttttttgctt

SEQ ID NO: 235197 - DNA, 15 bp, Homo sapiens
ttttttttttttgct

SEQ ID NO: 235198 - DNA, 15 bp, Homo sapiens
agatttttttttttt

SEQ ID NO: 235199 - DNA, 15 bp, Homo sapiens
gagattttttttttt

SEQ ID NO: 235200 - DNA, 15 bp, Homo sapiens
cgagatttttttttt

SEQ ID NO: 235201 - DNA, 15 bp, Homo sapiens
tcgagattttttttt

SEQ ID NO: 235202 - DNA, 15 bp, Homo sapiens
ctcgagatttttttt

SEQ ID NO: 235203 - DNA, 15 bp, Homo sapiens
cctcgagattttttt

SEQ ID NO: 235204 - DNA, 15 bp, Homo sapiens
acctcgagatttttt

SEQ ID NO: 235205 - DNA, 15 bp, Homo sapiens
aacctcgagattttt

SEQ ID NO: 235206 - DNA, 15 bp, Homo sapiens
taacctcgagatttt

SEQ ID NO: 235207 - DNA, 15 bp, Homo sapiens
ttaacctcgagattt

SEQ ID NO: 235208 - DNA, 15 bp, Homo sapiens
cttaacctcgagatt

SEQ ID NO: 235209 - DNA, 15 bp, Homo sapiens
gcttaacctcgagat

SEQ ID NO: 235210 - DNA, 15 bp, Homo sapiens
tgcttaacctcgaga

SEQ ID NO: 235211 - DNA, 15 bp, Homo sapiens
ttgcttaacctcgag

SEQ ID NO: 235212 - DNA, 15 bp, Homo sapiens
gttgcttaacctcga

SEQ ID NO: 235213 - DNA, 15 bp, Homo sapiens
ggttgcttaacctcg

SEQ ID NO: 235214 - DNA, 15 bp, Homo sapiens
tggttgcttaacctc

SEQ ID NO: 235215 - DNA, 15 bp, Homo sapiens
atggttgcttaacct

SEQ ID NO: 235216 - DNA, 15 bp, Homo sapiens
gatggttgcttaacc

SEQ ID NO: 235217 - DNA, 15 bp, Homo sapiens
agatggttgcttaac

SEQ ID NO: 235218 - DNA, 15 bp, Homo sapiens
gagatggttgcttaa

SEQ ID NO: 235219 - DNA, 15 bp, Homo sapiens
agagatggttgctta

SEQ ID NO: 235220 - DNA, 15 bp, Homo sapiens
gagagatggttgctt

SEQ ID NO: 235221 - DNA, 15 bp, Homo sapiens
ggagagatggttgct

SEQ ID NO: 235222 - DNA, 15 bp, Homo sapiens
tggagagatggttgc

SEQ ID NO: 235223 - DNA, 15 bp, Homo sapiens
ctggagagatggttg

SEQ ID NO: 235224 - DNA, 15 bp, Homo sapiens
cctggagagatggtt

SEQ ID NO: 235225 - DNA, 15 bp, Homo sapiens
gcctggagagatggt

SEQ ID NO: 235226 - DNA, 15 bp, Homo sapiens
ggcctggagagatgg

SEQ ID NO: 235227 - DNA, 15 bp, Homo sapiens
aggcctggagagatg

SEQ ID NO: 235228 - DNA, 15 bp, Homo sapiens
gaggcctggagagat

SEQ ID NO: 235229 - DNA, 15 bp, Homo sapiens
agaggcctggagaga

SEQ ID NO: 235230 - DNA, 15 bp, Homo sapiens
aagaggcctggagag

SEQ ID NO: 235231 - DNA, 15 bp, Homo sapiens
gaagaggcctggaga

SEQ ID NO: 235232 - DNA, 15 bp, Homo sapiens
agaagaggcctggag

SEQ ID NO: 235233 - DNA, 15 bp, Homo sapiens
aagaagaggcctgga

SEQ ID NO: 235234 - DNA, 15 bp, Homo sapiens
gaagaagaggcctgg

SEQ ID NO: 235235 - DNA, 15 bp, Homo sapiens
tgaagaagaggcctg

SEQ ID NO: 235236 - DNA, 15 bp, Homo sapiens
ctgaagaagaggcct

SEQ ID NO: 235237 - DNA, 15 bp, Homo sapiens
gctgaagaagaggcc

SEQ ID NO: 235238 - DNA, 15 bp, Homo sapiens
tgctgaagaagaggc

SEQ ID NO: 235239 - DNA, 15 bp, Homo sapiens
ctgctgaagaagagg

SEQ ID NO: 235240 - DNA, 15 bp, Homo sapiens
actgctgaagaagag

SEQ ID NO: 235241 - DNA, 15 bp, Homo sapiens
gactgctgaagaaga

SEQ ID NO: 235242 - DNA, 15 bp, Homo sapiens
agactgctgaagaag

SEQ ID NO: 235243 - DNA, 15 bp, Homo sapiens
cagactgctgaagaa

SEQ ID NO: 235244 - DNA, 15 bp, Homo sapiens
ccagactgctgaaga

SEQ ID NO: 235245 - DNA, 15 bp, Homo sapiens
gccagactgctgaag

SEQ ID NO: 235246 - DNA, 15 bp, Homo sapiens
ggccagactgctgaa

SEQ ID NO: 235247 - DNA, 15 bp, Homo sapiens
gggccagactgctga

SEQ ID NO: 235248 - DNA, 15 bp, Homo sapiens
tgggccagactgctg

SEQ ID NO: 235249 - DNA, 15 bp, Homo sapiens
gtgggccagactgct

SEQ ID NO: 235250 - DNA, 15 bp, Homo sapiens
tgtgggccagactgc

SEQ ID NO: 235251 - DNA, 15 bp, Homo sapiens
atgtgggccagactg

SEQ ID NO: 235252 - DNA, 15 bp, Homo sapiens
aatgtgggccagact

SEQ ID NO: 235253 - DNA, 15 bp, Homo sapiens
aaatgtgggccagac

SEQ ID NO: 235254 - DNA, 15 bp, Homo sapiens
gaaatgtgggccaga

SEQ ID NO: 235255 - DNA, 15 bp, Homo sapiens
agaaatgtgggccag

SEQ ID NO: 235256 - DNA, 15 bp, Homo sapiens
tagaaatgtgggcca

SEQ ID NO: 235257 - DNA, 15 bp, Homo sapiens
ctagaaatgtgggcc

SEQ ID NO: 235258 - DNA, 15 bp, Homo sapiens
tctagaaatgtgggc

SEQ ID NO: 235259 - DNA, 15 bp, Homo sapiens
ttctagaaatgtggg

SEQ ID NO: 235260 - DNA, 15 bp, Homo sapiens
cttctagaaatgtgg

SEQ ID NO: 235261 - DNA, 15 bp, Homo sapiens
gcttctagaaatgtg

SEQ ID NO: 235262 - DNA, 15 bp, Homo sapiens
ggcttctagaaatgt

SEQ ID NO: 235263 - DNA, 15 bp, Homo sapiens
gggcttctagaaatg

SEQ ID NO: 235264 - DNA, 15 bp, Homo sapiens
ggggcttctagaaat

SEQ ID NO: 235265 - DNA, 15 bp, Homo sapiens
gggggcttctagaaa

SEQ ID NO: 235266 - DNA, 15 bp, Homo sapiens
tgggggcttctagaa

SEQ ID NO: 235267 - DNA, 15 bp, Homo sapiens
ctgggggcttctaga

SEQ ID NO: 235268 - DNA, 15 bp, Homo sapiens
gctgggggcttctag

SEQ ID NO: 235269 - DNA, 15 bp, Homo sapiens
tgctgggggcttcta

SEQ ID NO: 235270 - DNA, 15 bp, Homo sapiens
gtgctgggggcttct

SEQ ID NO: 235271 - DNA, 15 bp, Homo sapiens
tgtgctgggggcttc

SEQ ID NO: 235272 - DNA, 15 bp, Homo sapiens
gtgtgctgggggctt

SEQ ID NO: 235273 - DNA, 15 bp, Homo sapiens
ggtgtgctgggggct

SEQ ID NO: 235274 - DNA, 15 bp, Homo sapiens
aggtgtgctgggggc

SEQ ID NO: 235275 - DNA, 15 bp, Homo sapiens
caggtgtgctggggg

SEQ ID NO: 235276 - DNA, 15 bp, Homo sapiens
gcaggtgtgctgggg

SEQ ID NO: 235277 - DNA, 15 bp, Homo sapiens
tgcaggtgtgctggg

SEQ ID NO: 235278 - DNA, 15 bp, Homo sapiens
gtgcaggtgtgctgg

SEQ ID NO: 235279 - DNA, 15 bp, Homo sapiens
tgtgcaggtgtgctg

SEQ ID NO: 235280 - DNA, 15 bp, Homo sapiens
atgtgcaggtgtgct

SEQ ID NO: 235281 - DNA, 15 bp, Homo sapiens
aatgtgcaggtgtgc

SEQ ID NO: 235282 - DNA, 15 bp, Homo sapiens
aaatgtgcaggtgtg

SEQ ID NO: 235283 - DNA, 15 bp, Homo sapiens
taaatgtgcaggtgt

SEQ ID NO: 235284 - DNA, 15 bp, Homo sapiens
ataaatgtgcaggtg

SEQ ID NO: 235285 - DNA, 15 bp, Homo sapiens
aataaatgtgcaggt

SEQ ID NO: 235286 - DNA, 15 bp, Homo sapiens
aaataaatgtgcagg

SEQ ID NO: 235287 - DNA, 15 bp, Homo sapiens
gaaataaatgtgcag

SEQ ID NO: 235288 - DNA, 15 bp, Homo sapiens
tgaaataaatgtgca

SEQ ID NO: 235289 - DNA, 15 bp, Homo sapiens
gtgaaataaatgtgc

SEQ ID NO: 235290 - DNA, 15 bp, Homo sapiens
tgtgaaataaatgtg

SEQ ID NO: 235291 - DNA, 15 bp, Homo sapiens
ctgtgaaataaatgt

SEQ ID NO: 235292 - DNA, 15 bp, Homo sapiens
cctgtgaaataaatg

SEQ ID NO: 235293 - DNA, 15 bp, Homo sapiens
acctgtgaaataaat

SEQ ID NO: 235294 - DNA, 15 bp, Homo sapiens
gacctgtgaaataaa

SEQ ID NO: 235295 - DNA, 15 bp, Homo sapiens
tgacctgtgaaataa

SEQ ID NO: 235296 - DNA, 15 bp, Homo sapiens
ttgacctgtgaaata

SEQ ID NO: 235297 - DNA, 15 bp, Homo sapiens
cttgacctgtgaaat

SEQ ID NO: 235298 - DNA, 15 bp, Homo sapiens
tcttgacctgtgaaa

SEQ ID NO: 235299 - DNA, 15 bp, Homo sapiens
ttcttgacctgtgaa

SEQ ID NO: 235300 - DNA, 15 bp, Homo sapiens
gttcttgacctgtga

SEQ ID NO: 235301 - DNA, 15 bp, Homo sapiens
ggttcttgacctgtg

SEQ ID NO: 235302 - DNA, 15 bp, Homo sapiens
tggttcttgacctgt

SEQ ID NO: 235303 - DNA, 15 bp, Homo sapiens
ctggttcttgacctg

SEQ ID NO: 235304 - DNA, 15 bp, Homo sapiens
actggttcttgacct

SEQ ID NO: 235305 - DNA, 15 bp, Homo sapiens
gactggttcttgacc

SEQ ID NO: 235306 - DNA, 15 bp, Homo sapiens
tgactggttcttgac

SEQ ID NO: 235307 - DNA, 15 bp, Homo sapiens
gtgactggttcttga

SEQ ID NO: 235308 - DNA, 15 bp, Homo sapiens
tgtgactggttcttg

SEQ ID NO: 235309 - DNA, 15 bp, Homo sapiens
ctgtgactggttctt

SEQ ID NO: 235310 - DNA, 15 bp, Homo sapiens
cctgtgactggttct

SEQ ID NO: 235311 - DNA, 15 bp, Homo sapiens
acctgtgactggttc

SEQ ID NO: 235312 - DNA, 15 bp, Homo sapiens
gacctgtgactggtt

SEQ ID NO: 235313 - DNA, 15 bp, Homo sapiens
cgacctgtgactggt

SEQ ID NO: 235314 - DNA, 15 bp, Homo sapiens
ccgacctgtgactgg

SEQ ID NO: 235315 - DNA, 15 bp, Homo sapiens
accgacctgtgactg

SEQ ID NO: 235316 - DNA, 15 bp, Homo sapiens
gaccgacctgtgact

SEQ ID NO: 235317 - DNA, 15 bp, Homo sapiens
ggaccgacctgtgac

SEQ ID NO: 235318 - DNA, 15 bp, Homo sapiens
aggaccgacctgtga

SEQ ID NO: 235319 - DNA, 15 bp, Homo sapiens
taggaccgacctgtg

SEQ ID NO: 235320 - DNA, 15 bp, Homo sapiens
ttaggaccgacctgt

SEQ ID NO: 235321 - DNA, 15 bp, Homo sapiens
cttaggaccgacctg

SEQ ID NO: 235322 - DNA, 15 bp, Homo sapiens
gcttaggaccgacct

SEQ ID NO: 235323 - DNA, 15 bp, Homo sapiens
ggcttaggaccgacc

SEQ ID NO: 235324 - DNA, 15 bp, Homo sapiens
tggcttaggaccgac

SEQ ID NO: 235325 - DNA, 15 bp, Homo sapiens
ttggcttaggaccga

SEQ ID NO: 235326 - DNA, 15 bp, Homo sapiens
attggcttaggaccg

SEQ ID NO: 235327 - DNA, 15 bp, Homo sapiens
aattggcttaggacc

SEQ ID NO: 235328 - DNA, 15 bp, Homo sapiens
caattggcttaggac

SEQ ID NO: 235329 - DNA, 15 bp, Homo sapiens
acaattggcttagga

SEQ ID NO: 235330 - DNA, 15 bp, Homo sapiens
aacaattggcttagg

SEQ ID NO: 235331 - DNA, 15 bp, Homo sapiens
caacaattggcttag

SEQ ID NO: 235332 - DNA, 15 bp, Homo sapiens
ccaacaattggctta

SEQ ID NO: 235333 - DNA, 15 bp, Homo sapiens
gccaacaattggctt

SEQ ID NO: 235334 - DNA, 15 bp, Homo sapiens
tgccaacaattggct

SEQ ID NO: 235335 - DNA, 15 bp, Homo sapiens
atgccaacaattggc

SEQ ID NO: 235336 - DNA, 15 bp, Homo sapiens
tatgccaacaattgg

SEQ ID NO: 235337 - DNA, 15 bp, Homo sapiens
ttatgccaacaattg

SEQ ID NO: 235338 - DNA, 15 bp, Homo sapiens
cttatgccaacaatt

SEQ ID NO: 235339 - DNA, 15 bp, Homo sapiens
tcttatgccaacaat

SEQ ID NO: 235340 - DNA, 15 bp, Homo sapiens
ttcttatgccaacaa

SEQ ID NO: 235341 - DNA, 15 bp, Homo sapiens
attcttatgccaaca

SEQ ID NO: 235342 - DNA, 15 bp, Homo sapiens
cattcttatgccaac

SEQ ID NO: 235343 - DNA, 15 bp, Homo sapiens
tcattcttatgccaa

SEQ ID NO: 235344 - DNA, 15 bp, Homo sapiens
ctcattcttatgcca

SEQ ID NO: 235345 - DNA, 15 bp, Homo sapiens
tctcattcttatgcc

SEQ ID NO: 235346 - DNA, 15 bp, Homo sapiens
ctctcattcttatgc

SEQ ID NO: 235347 - DNA, 15 bp, Homo sapiens
gctctcattcttatg

SEQ ID NO: 235348 - DNA, 15 bp, Homo sapiens
tgctctcattcttat

SEQ ID NO: 235349 - DNA, 15 bp, Homo sapiens
gtgctctcattctta

SEQ ID NO: 235350 - DNA, 15 bp, Homo sapiens
ggtgctctcattctt

SEQ ID NO: 235351 - DNA, 15 bp, Homo sapiens
tggtgctctcattct

SEQ ID NO: 235352 - DNA, 15 bp, Homo sapiens
ctggtgctctcattc

SEQ ID NO: 235353 - DNA, 15 bp, Homo sapiens
cctggtgctctcatt

SEQ ID NO: 235354 - DNA, 15 bp, Homo sapiens
ccctggtgctctcat

SEQ ID NO: 235355 - DNA, 15 bp, Homo sapiens
gccctggtgctctca

SEQ ID NO: 235356 - DNA, 15 bp, Homo sapiens
agccctggtgctctc

SEQ ID NO: 235357 - DNA, 15 bp, Homo sapiens
aagccctggtgctct

SEQ ID NO: 235358 - DNA, 15 bp, Homo sapiens
caagccctggtgctc

SEQ ID NO: 235359 - DNA, 15 bp, Homo sapiens
gcaagccctggtgct

SEQ ID NO: 235360 - DNA, 15 bp, Homo sapiens
agcaagccctggtgc

SEQ ID NO: 235361 - DNA, 15 bp, Homo sapiens
gagcaagccctggtg

SEQ ID NO: 235362 - DNA, 15 bp, Homo sapiens
tgagcaagccctggt

SEQ ID NO: 235363 - DNA, 15 bp, Homo sapiens
ctgagcaagccctgg

SEQ ID NO: 235364 - DNA, 15 bp, Homo sapiens
tctgagcaagccctg

SEQ ID NO: 235365 - DNA, 15 bp, Homo sapiens
gtctgagcaagccct

SEQ ID NO: 235366 - DNA, 15 bp, Homo sapiens
agtctgagcaagccc

SEQ ID NO: 235367 - DNA, 15 bp, Homo sapiens
tagtctgagcaagcc

SEQ ID NO: 235368 - DNA, 15 bp, Homo sapiens
ttagtctgagcaagc

SEQ ID NO: 235369 - DNA, 15 bp, Homo sapiens
attagtctgagcaag

SEQ ID NO: 235370 - DNA, 15 bp, Homo sapiens
gattagtctgagcaa

SEQ ID NO: 235371 - DNA, 15 bp, Homo sapiens
cgattagtctgagca

SEQ ID NO: 235372 - DNA, 15 bp, Homo sapiens
tcgattagtctgagc

SEQ ID NO: 235373 - DNA, 15 bp, Homo sapiens
ctcgattagtctgag

SEQ ID NO: 235374 - DNA, 15 bp, Homo sapiens
cctcgattagtctga

SEQ ID NO: 235375 - DNA, 15 bp, Homo sapiens
acctcgattagtctg

SEQ ID NO: 235376 - DNA, 15 bp, Homo sapiens
gacctcgattagtct

SEQ ID NO: 235377 - DNA, 15 bp, Homo sapiens
agacctcgattagtc

SEQ ID NO: 235378 - DNA, 15 bp, Homo sapiens
cagacctcgattagt

SEQ ID NO: 235379 - DNA, 15 bp, Homo sapiens
gcagacctcgattag

SEQ ID NO: 235380 - DNA, 15 bp, Homo sapiens
ggcagacctcgatta

SEQ ID NO: 235381 - DNA, 15 bp, Homo sapiens
gggcagacctcgatt

SEQ ID NO: 235382 - DNA, 15 bp, Homo sapiens
tgggcagacctcgat

SEQ ID NO: 235383 - DNA, 15 bp, Homo sapiens
ctgggcagacctcga

SEQ ID NO: 235384 - DNA, 15 bp, Homo sapiens
cctgggcagacctcg

SEQ ID NO: 235385 - DNA, 15 bp, Homo sapiens
tcctgggcagacctc

SEQ ID NO: 235386 - DNA, 15 bp, Homo sapiens
ctcctgggcagacct

SEQ ID NO: 235387 - DNA, 15 bp, Homo sapiens
actcctgggcagacc

SEQ ID NO: 235388 - DNA, 15 bp, Homo sapiens
cactcctgggcagac

SEQ ID NO: 235389 - DNA, 15 bp, Homo sapiens
ccactcctgggcaga

SEQ ID NO: 235390 - DNA, 15 bp, Homo sapiens
cccactcctgggcag

SEQ ID NO: 235391 - DNA, 15 bp, Homo sapiens
ccccactcctgggca

SEQ ID NO: 235392 - DNA, 15 bp, Homo sapiens
gccccactcctgggc

SEQ ID NO: 235393 - DNA, 15 bp, Homo sapiens
ggccccactcctggg

SEQ ID NO: 235394 - DNA, 15 bp, Homo sapiens
tggccccactcctgg

SEQ ID NO: 235395 - DNA, 15 bp, Homo sapiens
ctggccccactcctg

SEQ ID NO: 235396 - DNA, 15 bp, Homo sapiens
gctggccccactcct

SEQ ID NO: 235397 - DNA, 15 bp, Homo sapiens
tgctggccccactcc

SEQ ID NO: 235398 - DNA, 15 bp, Homo sapiens
atgctggccccactc

SEQ ID NO: 235399 - DNA, 15 bp, Homo sapiens
gatgctggccccact

SEQ ID NO: 235400 - DNA, 15 bp, Homo sapiens
tgatgctggccccac

SEQ ID NO: 235401 - DNA, 15 bp, Homo sapiens
ctgatgctggcccca

SEQ ID NO: 235402 - DNA, 15 bp, Homo sapiens
actgatgctggcccc

SEQ ID NO: 235403 - DNA, 15 bp, Homo sapiens
aactgatgctggccc

SEQ ID NO: 235404 - DNA, 15 bp, Homo sapiens
aaactgatgctggcc

SEQ ID NO: 235405 - DNA, 15 bp, Homo sapiens
aaaactgatgctggc

SEQ ID NO: 235406 - DNA, 15 bp, Homo sapiens
caaaactgatgctgg

SEQ ID NO: 235407 - DNA, 15 bp, Homo sapiens
ccaaaactgatgctg

SEQ ID NO: 235408 - DNA, 15 bp, Homo sapiens
accaaaactgatgct

SEQ ID NO: 235409 - DNA, 15 bp, Homo sapiens
caccaaaactgatgc

SEQ ID NO: 235410 - DNA, 15 bp, Homo sapiens
tcaccaaaactgatg

SEQ ID NO: 235411 - DNA, 15 bp, Homo sapiens
ctcaccaaaactgat

SEQ ID NO: 235412 - DNA, 15 bp, Homo sapiens
cctcaccaaaactga

SEQ ID NO: 235413 - DNA, 15 bp, Homo sapiens
acctcaccaaaactg

SEQ ID NO: 235414 - DNA, 15 bp, Homo sapiens
tacctcaccaaaact

SEQ ID NO: 235415 - DNA, 15 bp, Homo sapiens
gtacctcaccaaaac

SEQ ID NO: 235416 - DNA, 15 bp, Homo sapiens
ggtacctcaccaaaa

SEQ ID NO: 235417 - DNA, 15 bp, Homo sapiens
aggtacctcaccaaa

SEQ ID NO: 235418 - DNA, 15 bp, Homo sapiens
caggtacctcaccaa

SEQ ID NO: 235419 - DNA, 15 bp, Homo sapiens
gcaggtacctcacca

SEQ ID NO: 235420 - DNA, 15 bp, Homo sapiens
tgcaggtacctcacc

SEQ ID NO: 235421 - DNA, 15 bp, Homo sapiens
gtgcaggtacctcac

SEQ ID NO: 235422 - DNA, 15 bp, Homo sapiens
ggtgcaggtacctca

SEQ ID NO: 235423 - DNA, 15 bp, Homo sapiens
gggtgcaggtacctc

SEQ ID NO: 235424 - DNA, 15 bp, Homo sapiens
ggggtgcaggtacct

SEQ ID NO: 235425 - DNA, 15 bp, Homo sapiens
aggggtgcaggtacc

SEQ ID NO: 235426 - DNA, 15 bp, Homo sapiens
caggggtgcaggtac

SEQ ID NO: 235427 - DNA, 15 bp, Homo sapiens
tcaggggtgcaggta

SEQ ID NO: 235428 - DNA, 15 bp, Homo sapiens
ttcaggggtgcaggt

SEQ ID NO: 235429 - DNA, 15 bp, Homo sapiens
gttcaggggtgcagg

SEQ ID NO: 235430 - DNA, 15 bp, Homo sapiens
tgttcaggggtgcag

SEQ ID NO: 235431 - DNA, 15 bp, Homo sapiens
ttgttcaggggtgca

SEQ ID NO: 235432 - DNA, 15 bp, Homo sapiens
tttgttcaggggtgc

SEQ ID NO: 235433 - DNA, 15 bp, Homo sapiens
ttttgttcaggggtg

SEQ ID NO: 235434 - DNA, 15 bp, Homo sapiens
attttgttcaggggt

SEQ ID NO: 235435 - DNA, 15 bp, Homo sapiens
gattttgttcagggg

SEQ ID NO: 235436 - DNA, 15 bp, Homo sapiens
tgattttgttcaggg

SEQ ID NO: 235437 - DNA, 15 bp, Homo sapiens
ctgattttgttcagg

SEQ ID NO: 235438 - DNA, 15 bp, Homo sapiens
cctgattttgttcag

SEQ ID NO: 235439 - DNA, 15 bp, Homo sapiens
ccctgattttgttca

SEQ ID NO: 235440 - DNA, 15 bp, Homo sapiens
accctgattttgttc

SEQ ID NO: 235441 - DNA, 15 bp, Homo sapiens
aaccctgattttgtt

SEQ ID NO: 235442 - DNA, 15 bp, Homo sapiens
gaaccctgattttgt

SEQ ID NO: 235443 - DNA, 15 bp, Homo sapiens
agaaccctgattttg

SEQ ID NO: 235444 - DNA, 15 bp, Homo sapiens
gagaaccctgatttt

SEQ ID NO: 235445 - DNA, 15 bp, Homo sapiens
agagaaccctgattt

SEQ ID NO: 235446 - DNA, 15 bp, Homo sapiens
cagagaaccctgatt

SEQ ID NO: 235447 - DNA, 15 bp, Homo sapiens
tcagagaaccctgat

SEQ ID NO: 235448 - DNA, 15 bp, Homo sapiens
ttcagagaaccctga

SEQ ID NO: 235449 - DNA, 15 bp, Homo sapiens
attcagagaaccctg

SEQ ID NO: 235450 - DNA, 15 bp, Homo sapiens
cattcagagaaccct

SEQ ID NO: 235451 - DNA, 15 bp, Homo sapiens
tcattcagagaaccc

SEQ ID NO: 235452 - DNA, 15 bp, Homo sapiens
ctcattcagagaacc

SEQ ID NO: 235453 - DNA, 15 bp, Homo sapiens
cctcattcagagaac

SEQ ID NO: 235454 - DNA, 15 bp, Homo sapiens
ccctcattcagagaa

SEQ ID NO: 235455 - DNA, 15 bp, Homo sapiens
tccctcattcagaga

SEQ ID NO: 235456 - DNA, 15 bp, Homo sapiens
ctccctcattcagag

SEQ ID NO: 235457 - DNA, 15 bp, Homo sapiens
cctccctcattcaga

SEQ ID NO: 235458 - DNA, 15 bp, Homo sapiens
ccctccctcattcag

SEQ ID NO: 235459 - DNA, 15 bp, Homo sapiens
cccctccctcattca

SEQ ID NO: 235460 - DNA, 15 bp, Homo sapiens
ccccctccctcattc

SEQ ID NO: 235461 - DNA, 15 bp, Homo sapiens
tccccctccctcatt

SEQ ID NO: 235462 - DNA, 15 bp, Homo sapiens
atccccctccctcat

SEQ ID NO: 235463 - DNA, 15 bp, Homo sapiens
catccccctccctca

SEQ ID NO: 235464 - DNA, 15 bp, Homo sapiens
ccatccccctccctc

SEQ ID NO: 235465 - DNA, 15 bp, Homo sapiens
tccatccccctccct

SEQ ID NO: 235466 - DNA, 15 bp, Homo sapiens
ttccatccccctccc

SEQ ID NO: 235467 - DNA, 15 bp, Homo sapiens
tttccatccccctcc

SEQ ID NO: 235468 - DNA, 15 bp, Homo sapiens
atttccatccccctc

SEQ ID NO: 235469 - DNA, 15 bp, Homo sapiens
catttccatccccct

SEQ ID NO: 235470 - DNA, 15 bp, Homo sapiens
tcatttccatccccc

SEQ ID NO: 235471 - DNA, 15 bp, Homo sapiens
gtcatttccatcccc

SEQ ID NO: 235472 - DNA, 15 bp, Homo sapiens
agtcatttccatccc

SEQ ID NO: 235473 - DNA, 15 bp, Homo sapiens
cagtcatttccatcc

SEQ ID NO: 235474 - DNA, 15 bp, Homo sapiens
acagtcatttccatc

SEQ ID NO: 235475 - DNA, 15 bp, Homo sapiens
aacagtcatttccat

SEQ ID NO: 235476 - DNA, 15 bp, Homo sapiens
taacagtcatttcca

SEQ ID NO: 235477 - DNA, 15 bp, Homo sapiens
ctaacagtcatttcc

SEQ ID NO: 235478 - DNA, 15 bp, Homo sapiens
cctaacagtcatttc

SEQ ID NO: 235479 - DNA, 15 bp, Homo sapiens
tcctaacagtcattt

SEQ ID NO: 235480 - DNA, 15 bp, Homo sapiens
ctcctaacagtcatt

SEQ ID NO: 235481 - DNA, 15 bp, Homo sapiens
cctcctaacagtcat

SEQ ID NO: 235482 - DNA, 15 bp, Homo sapiens
gcctcctaacagtca

SEQ ID NO: 235483 - DNA, 15 bp, Homo sapiens
tgcctcctaacagtc

SEQ ID NO: 235484 - DNA, 15 bp, Homo sapiens
ttgcctcctaacagt

SEQ ID NO: 235485 - DNA, 15 bp, Homo sapiens
attgcctcctaacag

SEQ ID NO: 235486 - DNA, 15 bp, Homo sapiens
gattgcctcctaaca

SEQ ID NO: 235487 - DNA, 15 bp, Homo sapiens
tgattgcctcctaac

SEQ ID NO: 235488 - DNA, 15 bp, Homo sapiens
ttgattgcctcctaa

SEQ ID NO: 235489 - DNA, 15 bp, Homo sapiens
gttgattgcctccta

SEQ ID NO: 235490 - DNA, 15 bp, Homo sapiens
tgttgattgcctcct

SEQ ID NO: 235491 - DNA, 15 bp, Homo sapiens
atgttgattgcctcc

SEQ ID NO: 235492 - DNA, 15 bp, Homo sapiens
aatgttgattgcctc

SEQ ID NO: 235493 - DNA, 15 bp, Homo sapiens
taatgttgattgcct

SEQ ID NO: 235494 - DNA, 15 bp, Homo sapiens
ataatgttgattgcc

SEQ ID NO: 235495 - DNA, 15 bp, Homo sapiens
tataatgttgattgc

SEQ ID NO: 235496 - DNA, 15 bp, Homo sapiens
ttataatgttgattg

SEQ ID NO: 235497 - DNA, 15 bp, Homo sapiens
attataatgttgatt

SEQ ID NO: 235498 - DNA, 15 bp, Homo sapiens
gattataatgttgat

SEQ ID NO: 235499 - DNA, 15 bp, Homo sapiens
agattataatgttga

SEQ ID NO: 235500 - DNA, 15 bp, Homo sapiens
aagattataatgttg

SEQ ID NO: 235501 - DNA, 15 bp, Homo sapiens
taagattataatgtt

SEQ ID NO: 235502 - DNA, 15 bp, Homo sapiens
ttaagattataatgt

SEQ ID NO: 235503 - DNA, 15 bp, Homo sapiens
tttaagattataatg

SEQ ID NO: 235504 - DNA, 15 bp, Homo sapiens
ctttaagattataat

SEQ ID NO: 235505 - DNA, 15 bp, Homo sapiens
tctttaagattataa

SEQ ID NO: 235506 - DNA, 15 bp, Homo sapiens
ttctttaagattata

SEQ ID NO: 235507 - DNA, 15 bp, Homo sapiens
tttctttaagattat

SEQ ID NO: 235508 - DNA, 15 bp, Homo sapiens
ttttctttaagatta

SEQ ID NO: 235509 - DNA, 15 bp, Homo sapiens
tttttctttaagatt

SEQ ID NO: 235510 - DNA, 15 bp, Homo sapiens
atttttctttaagat

SEQ ID NO: 235511 - DNA, 15 bp, Homo sapiens
catttttctttaaga

SEQ ID NO: 235512 - DNA, 15 bp, Homo sapiens
acatttttctttaag

SEQ ID NO: 235513 - DNA, 15 bp, Homo sapiens
tacatttttctttaa

SEQ ID NO: 235514 - DNA, 15 bp, Homo sapiens
gtacatttttcttta

SEQ ID NO: 235515 - DNA, 15 bp, Homo sapiens
tgtacatttttcttt

SEQ ID NO: 235516 - DNA, 15 bp, Homo sapiens
ttgtacatttttctt

SEQ ID NO: 235517 - DNA, 15 bp, Homo sapiens
cttgtacatttttct

SEQ ID NO: 235518 - DNA, 15 bp, Homo sapiens
tcttgtacatttttc

SEQ ID NO: 235519 - DNA, 15 bp, Homo sapiens
ttcttgtacattttt

SEQ ID NO: 235520 - DNA, 15 bp, Homo sapiens
tttcttgtacatttt

SEQ ID NO: 235521 - DNA, 15 bp, Homo sapiens
ttttcttgtacattt

SEQ ID NO: 235522 - DNA, 15 bp, Homo sapiens
attttcttgtacatt

SEQ ID NO: 235523 - DNA, 15 bp, Homo sapiens
aattttcttgtacat

SEQ ID NO: 235524 - DNA, 15 bp, Homo sapiens
taattttcttgtaca

SEQ ID NO: 235525 - DNA, 15 bp, Homo sapiens
ttaattttcttgtac

SEQ ID NO: 235526 - DNA, 15 bp, Homo sapiens
attaattttcttgta

SEQ ID NO: 235527 - DNA, 15 bp, Homo sapiens
cattaattttcttgt

SEQ ID NO: 235528 - DNA, 15 bp, Homo sapiens
acattaattttcttg

SEQ ID NO: 235529 - DNA, 15 bp, Homo sapiens
tacattaattttctt

SEQ ID NO: 235530 - DNA, 15 bp, Homo sapiens
atacattaattttct

SEQ ID NO: 235531 - DNA, 15 bp, Homo sapiens
catacattaattttc

SEQ ID NO: 235532 - DNA, 15 bp, Homo sapiens
ccatacattaatttt

SEQ ID NO: 235533 - DNA, 15 bp, Homo sapiens
cccatacattaattt

SEQ ID NO: 235534 - DNA, 15 bp, Homo sapiens
tcccatacattaatt

SEQ ID NO: 235535 - DNA, 15 bp, Homo sapiens
ctcccatacattaat

SEQ ID NO: 235536 - DNA, 15 bp, Homo sapiens
actcccatacattaa

SEQ ID NO: 235537 - DNA, 15 bp, Homo sapiens
aactcccatacatta

SEQ ID NO: 235538 - DNA, 15 bp, Homo sapiens
taactcccatacatt

SEQ ID NO: 235539 - DNA, 15 bp, Homo sapiens
gtaactcccatacat

SEQ ID NO: 235540 - DNA, 15 bp, Homo sapiens
tgtaactcccataca

SEQ ID NO: 235541 - DNA, 15 bp, Homo sapiens
ttgtaactcccatac

SEQ ID NO: 235542 - DNA, 15 bp, Homo sapiens
cttgtaactcccata

SEQ ID NO: 235543 - DNA, 15 bp, Homo sapiens
acttgtaactcccat

SEQ ID NO: 235544 - DNA, 15 bp, Homo sapiens
cacttgtaactccca

SEQ ID NO: 235545 - DNA, 15 bp, Homo sapiens
tcacttgtaactccc

SEQ ID NO: 235546 - DNA, 15 bp, Homo sapiens
ctcacttgtaactcc

SEQ ID NO: 235547 - DNA, 15 bp, Homo sapiens
tctcacttgtaactc

SEQ ID NO: 235548 - DNA, 15 bp, Homo sapiens
ctctcacttgtaact

SEQ ID NO: 235549 - DNA, 15 bp, Homo sapiens
gctctcacttgtaac

SEQ ID NO: 235550 - DNA, 15 bp, Homo sapiens
tgctctcacttgtaa

SEQ ID NO: 235551 - DNA, 15 bp, Homo sapiens
ttgctctcacttgta

SEQ ID NO: 235552 - DNA, 15 bp, Homo sapiens
attgctctcacttgt

SEQ ID NO: 235553 - DNA, 15 bp, Homo sapiens
gattgctctcacttg

SEQ ID NO: 235554 - DNA, 15 bp, Homo sapiens
agattgctctcactt

SEQ ID NO: 235555 - DNA, 15 bp, Homo sapiens
cagattgctctcact

SEQ ID NO: 235556 - DNA, 15 bp, Homo sapiens
tcagattgctctcac

SEQ ID NO: 235557 - DNA, 15 bp, Homo sapiens
ttcagattgctctca

SEQ ID NO: 235558 - DNA, 15 bp, Homo sapiens
tttcagattgctctc

SEQ ID NO: 235559 - DNA, 15 bp, Homo sapiens
ttttcagattgctct

SEQ ID NO: 235560 - DNA, 15 bp, Homo sapiens
gttttcagattgctc

SEQ ID NO: 235561 - DNA, 15 bp, Homo sapiens
agttttcagattgct

SEQ ID NO: 235562 - DNA, 15 bp, Homo sapiens
aagttttcagattgc

SEQ ID NO: 235563 - DNA, 15 bp, Homo sapiens
gaagttttcagattg

SEQ ID NO: 235564 - DNA, 15 bp, Homo sapiens
agaagttttcagatt

SEQ ID NO: 235565 - DNA, 15 bp, Homo sapiens
aagaagttttcagat

SEQ ID NO: 235566 - DNA, 15 bp, Homo sapiens
aaagaagttttcaga

SEQ ID NO: 235567 - DNA, 15 bp, Homo sapiens
gaaagaagttttcag

SEQ ID NO: 235568 - DNA, 15 bp, Homo sapiens
ggaaagaagttttca

SEQ ID NO: 235569 - DNA, 15 bp, Homo sapiens
aggaaagaagttttc

SEQ ID NO: 235570 - DNA, 15 bp, Homo sapiens
gaggaaagaagtttt

SEQ ID NO: 235571 - DNA, 15 bp, Homo sapiens
ggaggaaagaagttt

SEQ ID NO: 235572 - DNA, 15 bp, Homo sapiens
tggaggaaagaagtt

SEQ ID NO: 235573 - DNA, 15 bp, Homo sapiens
gtggaggaaagaagt

SEQ ID NO: 235574 - DNA, 15 bp, Homo sapiens
agtggaggaaagaag

SEQ ID NO: 235575 - DNA, 15 bp, Homo sapiens
aagtggaggaaagaa

SEQ ID NO: 235576 - DNA, 15 bp, Homo sapiens
caagtggaggaaaga

SEQ ID NO: 235577 - DNA, 15 bp, Homo sapiens
ccaagtggaggaaag

SEQ ID NO: 235578 - DNA, 15 bp, Homo sapiens
tccaagtggaggaaa

SEQ ID NO: 235579 - DNA, 15 bp, Homo sapiens
ttccaagtggaggaa

SEQ ID NO: 235580 - DNA, 15 bp, Homo sapiens
attccaagtggagga

SEQ ID NO: 235581 - DNA, 15 bp, Homo sapiens
tattccaagtggagg

SEQ ID NO: 235582 - DNA, 15 bp, Homo sapiens
atattccaagtggag

SEQ ID NO: 235583 - DNA, 15 bp, Homo sapiens
tatattccaagtgga

SEQ ID NO: 235584 - DNA, 15 bp, Homo sapiens
atatattccaagtgg

SEQ ID NO: 235585 - DNA, 15 bp, Homo sapiens
tatatattccaagtg

SEQ ID NO: 235586 - DNA, 15 bp, Homo sapiens
atatatattccaagt

SEQ ID NO: 235587 - DNA, 15 bp, Homo sapiens
tatatatattccaag

SEQ ID NO: 235588 - DNA, 15 bp, Homo sapiens
atatatatattccaa

SEQ ID NO: 235589 - DNA, 15 bp, Homo sapiens
tatatatatattcca

SEQ ID NO: 235590 - DNA, 15 bp, Homo sapiens
atatatatatattcc

SEQ ID NO: 235591 - DNA, 15 bp, Homo sapiens
tatatatatatattc

SEQ ID NO: 235592 - DNA, 15 bp, Homo sapiens
atatatatatatatt

SEQ ID NO: 235593 - DNA, 15 bp, Homo sapiens
tgtgtgtatatatat

SEQ ID NO: 235594 - DNA, 15 bp, Homo sapiens
gtgtgtgtatatata

SEQ ID NO: 235595 - DNA, 15 bp, Homo sapiens
gtgtgtgtgtatata

SEQ ID NO: 235596 - DNA, 15 bp, Homo sapiens
tgtgtgtgtgtatat

SEQ ID NO: 235597 - DNA, 15 bp, Homo sapiens
gtgtgtgtgtgtata

SEQ ID NO: 235598 - DNA, 15 bp, Homo sapiens
cgtgtgtgtgtgtgt

SEQ ID NO: 235599 - DNA, 15 bp, Homo sapiens
acgtgtgtgtgtgtg

SEQ ID NO: 235600 - DNA, 15 bp, Homo sapiens
tacgtgtgtgtgtgt

SEQ ID NO: 235601 - DNA, 15 bp, Homo sapiens
atacgtgtgtgtgtg

SEQ ID NO: 235602 - DNA, 15 bp, Homo sapiens
tatacgtgtgtgtgt

SEQ ID NO: 235603 - DNA, 15 bp, Homo sapiens
atatacgtgtgtgtg

SEQ ID NO: 235604 - DNA, 15 bp, Homo sapiens
tatatacgtgtgtgt

SEQ ID NO: 235605 - DNA, 15 bp, Homo sapiens
atatatacgtgtgtg

SEQ ID NO: 235606 - DNA, 15 bp, Homo sapiens
tatatatacgtgtgt

SEQ ID NO: 235607 - DNA, 15 bp, Homo sapiens
atatatatacgtgtg

SEQ ID NO: 235608 - DNA, 15 bp, Homo sapiens
catatatatacgtgt

SEQ ID NO: 235609 - DNA, 15 bp, Homo sapiens
acatatatatacgtg

SEQ ID NO: 235610 - DNA, 15 bp, Homo sapiens
tacatatatatacgt

SEQ ID NO: 235611 - DNA, 15 bp, Homo sapiens
atacatatatatacg

SEQ ID NO: 235612 - DNA, 15 bp, Homo sapiens
tatacatatatatac

SEQ ID NO: 235613 - DNA, 15 bp, Homo sapiens
atatacatatatata

SEQ ID NO: 235614 - DNA, 15 bp, Homo sapiens
catatacatatatat

SEQ ID NO: 235615 - DNA, 15 bp, Homo sapiens
acatatacatatata

SEQ ID NO: 235616 - DNA, 15 bp, Homo sapiens
cacatatacatatat

SEQ ID NO: 235617 - DNA, 15 bp, Homo sapiens
acacatatacatata

SEQ ID NO: 235618 - DNA, 15 bp, Homo sapiens
tacacatatacatat

SEQ ID NO: 235619 - DNA, 15 bp, Homo sapiens
atacacatatacata

SEQ ID NO: 235620 - DNA, 15 bp, Homo sapiens
tatacacatatacat

SEQ ID NO: 235621 - DNA, 15 bp, Homo sapiens
atatacacatataca

SEQ ID NO: 235622 - DNA, 15 bp, Homo sapiens
tatatacacatatac

SEQ ID NO: 235623 - DNA, 15 bp, Homo sapiens
atatatacacatata

SEQ ID NO: 235624 - DNA, 15 bp, Homo sapiens
catatatacacatat

SEQ ID NO: 235625 - DNA, 15 bp, Homo sapiens
acatatatacacata

SEQ ID NO: 235626 - DNA, 15 bp, Homo sapiens
tacatatatacacat

SEQ ID NO: 235627 - DNA, 15 bp, Homo sapiens
atacatatatacaca

SEQ ID NO: 235628 - DNA, 15 bp, Homo sapiens
tatacatatatacac

SEQ ID NO: 235629 - DNA, 15 bp, Homo sapiens
atatacatatataca

SEQ ID NO: 235630 - DNA, 15 bp, Homo sapiens
tatatacatatatac

SEQ ID NO: 235631 - DNA, 15 bp, Homo sapiens
catatatatacatat

SEQ ID NO: 235632 - DNA, 15 bp, Homo sapiens
acatatatatacata

SEQ ID NO: 235633 - DNA, 15 bp, Homo sapiens
tacatatatatacat

SEQ ID NO: 235634 - DNA, 15 bp, Homo sapiens
atacatatatataca

SEQ ID NO: 235635 - DNA, 15 bp, Homo sapiens
catacatatatatac

SEQ ID NO: 235636 - DNA, 15 bp, Homo sapiens
acatacatatatata

SEQ ID NO: 235637 - DNA, 15 bp, Homo sapiens
cacatacatatatat

SEQ ID NO: 235638 - DNA, 15 bp, Homo sapiens
acacatacatatata

SEQ ID NO: 235639 - DNA, 15 bp, Homo sapiens
cacacatacatatat

SEQ ID NO: 235640 - DNA, 15 bp, Homo sapiens
acacacatacatata

SEQ ID NO: 235641 - DNA, 15 bp, Homo sapiens
cacacacatacatat

SEQ ID NO: 235642 - DNA, 15 bp, Homo sapiens
acacacacatacata

SEQ ID NO: 235643 - DNA, 15 bp, Homo sapiens
cacacacacatacat

SEQ ID NO: 235644 - DNA, 15 bp, Homo sapiens
aatatatatatatat

SEQ ID NO: 235645 - DNA, 15 bp, Homo sapiens
aaatatatatatata

SEQ ID NO: 235646 - DNA, 15 bp, Homo sapiens
aaaatatatatatat

SEQ ID NO: 235647 - DNA, 15 bp, Homo sapiens
aaaaatatatatata

SEQ ID NO: 235648 - DNA, 15 bp, Homo sapiens
aaaaaatatatatat

SEQ ID NO: 235649 - DNA, 15 bp, Homo sapiens
aaaaaaatatatata

SEQ ID NO: 235650 - DNA, 15 bp, Homo sapiens
aaaaaaaatatatat

SEQ ID NO: 235651 - DNA, 15 bp, Homo sapiens
aaaaaaaaatatata

SEQ ID NO: 235652 - DNA, 15 bp, Homo sapiens
aaaaaaaaaatatat

SEQ ID NO: 235653 - DNA, 15 bp, Homo sapiens
aaaaaaaaaaatata

SEQ ID NO: 235654 - DNA, 15 bp, Homo sapiens
aaaaaaaaaaaatat

SEQ ID NO: 235655 - DNA, 15 bp, Homo sapiens
gctccgtctcaaaaa

SEQ ID NO: 235656 - DNA, 15 bp, Homo sapiens
agctccgtctcaaaa

SEQ ID NO: 235657 - DNA, 15 bp, Homo sapiens
aagctccgtctcaaa

SEQ ID NO: 235658 - DNA, 15 bp, Homo sapiens
aaagctccgtctcaa

SEQ ID NO: 235659 - DNA, 15 bp, Homo sapiens
caaagctccgtctca

SEQ ID NO: 235660 - DNA, 15 bp, Homo sapiens
gcaaagctccgtctc

SEQ ID NO: 235661 - DNA, 15 bp, Homo sapiens
agcaaagctccgtct

SEQ ID NO: 235662 - DNA, 15 bp, Homo sapiens
gagcaaagctccgtc

SEQ ID NO: 235663 - DNA, 15 bp, Homo sapiens
agagcaaagctccgt

SEQ ID NO: 235664 - DNA, 15 bp, Homo sapiens
aagagcaaagctccg

SEQ ID NO: 235665 - DNA, 15 bp, Homo sapiens
caagagcaaagctcc

SEQ ID NO: 235666 - DNA, 15 bp, Homo sapiens
acaagagcaaagctc

SEQ ID NO: 235667 - DNA, 15 bp, Homo sapiens
gacaagagcaaagct

SEQ ID NO: 235668 - DNA, 15 bp, Homo sapiens
agacaagagcaaagc

SEQ ID NO: 235669 - DNA, 15 bp, Homo sapiens
gagacaagagcaaag

SEQ ID NO: 235670 - DNA, 15 bp, Homo sapiens
ggagacaagagcaaa

SEQ ID NO: 235671 - DNA, 15 bp, Homo sapiens
gggagacaagagcaa

SEQ ID NO: 235672 - DNA, 15 bp, Homo sapiens
tgggagacaagagca

SEQ ID NO: 235673 - DNA, 15 bp, Homo sapiens
ctgggagacaagagc

SEQ ID NO: 235674 - DNA, 15 bp, Homo sapiens
cctgggagacaagag

SEQ ID NO: 235675 - DNA, 15 bp, Homo sapiens
gcctgggagacaaga

SEQ ID NO: 235676 - DNA, 15 bp, Homo sapiens
agcctgggagacaag

SEQ ID NO: 235677 - DNA, 15 bp, Homo sapiens
cagcctgggagacaa

SEQ ID NO: 235678 - DNA, 15 bp, Homo sapiens
ccagcctgggagaca

SEQ ID NO: 235679 - DNA, 15 bp, Homo sapiens
tccagcctgggagac

SEQ ID NO: 235680 - DNA, 15 bp, Homo sapiens
ttccagcctgggaga

SEQ ID NO: 235681 - DNA, 15 bp, Homo sapiens
attccagcctgggag

SEQ ID NO: 235682 - DNA, 15 bp, Homo sapiens
cattccagcctggga

SEQ ID NO: 235683 - DNA, 15 bp, Homo sapiens
gcattccagcctggg

SEQ ID NO: 235684 - DNA, 15 bp, Homo sapiens
tgcattccagcctgg

SEQ ID NO: 235685 - DNA, 15 bp, Homo sapiens
ttgcattccagcctg

SEQ ID NO: 235686 - DNA, 15 bp, Homo sapiens
attgcattccagcct

SEQ ID NO: 235687 - DNA, 15 bp, Homo sapiens
cattgcattccagcc

SEQ ID NO: 235688 - DNA, 15 bp, Homo sapiens
ccattgcattccagc

SEQ ID NO: 235689 - DNA, 15 bp, Homo sapiens
accattgcattccag

SEQ ID NO: 235690 - DNA, 15 bp, Homo sapiens
caccattgcattcca

SEQ ID NO: 235691 - DNA, 15 bp, Homo sapiens
acaccattgcattcc

SEQ ID NO: 235692 - DNA, 15 bp, Homo sapiens
cacaccattgcattc

SEQ ID NO: 235693 - DNA, 15 bp, Homo sapiens
tcacaccattgcatt

SEQ ID NO: 235694 - DNA, 15 bp, Homo sapiens
atcacaccattgcat

SEQ ID NO: 235695 - DNA, 15 bp, Homo sapiens
gagatcacaccattg

SEQ ID NO: 235696 - DNA, 15 bp, Homo sapiens
cgagatcacaccatt

SEQ ID NO: 235697 - DNA, 15 bp, Homo sapiens
ccgagatcacaccat

SEQ ID NO: 235698 - DNA, 15 bp, Homo sapiens
agtaagccgagatca

SEQ ID NO: 235699 - DNA, 15 bp, Homo sapiens
cagtaagccgagatc

SEQ ID NO: 235700 - DNA, 15 bp, Homo sapiens
gcagtaagccgagat

SEQ ID NO: 235701 - DNA, 15 bp, Homo sapiens
tgcagtaagccgaga

SEQ ID NO: 235702 - DNA, 15 bp, Homo sapiens
ttgcagtaagccgag

SEQ ID NO: 235703 - DNA, 15 bp, Homo sapiens
gttgcagtaagccga

SEQ ID NO: 235704 - DNA, 15 bp, Homo sapiens
ggttgcagtaagccg

SEQ ID NO: 235705 - DNA, 15 bp, Homo sapiens
ggaggttgcagtaag

SEQ ID NO: 235706 - DNA, 15 bp, Homo sapiens
tggaggttgcagtaa

SEQ ID NO: 235707 - DNA, 15 bp, Homo sapiens
gtggaggttgcagta

SEQ ID NO: 235708 - DNA, 15 bp, Homo sapiens
aaggtggaggttgca

SEQ ID NO: 235709 - DNA, 15 bp, Homo sapiens
gaaggtggaggttgc

SEQ ID NO: 235710 - DNA, 15 bp, Homo sapiens
agaaggtggaggttg

SEQ ID NO: 235711 - DNA, 15 bp, Homo sapiens
cagaaggtggaggtt

SEQ ID NO: 235712 - DNA, 15 bp, Homo sapiens
ccagaaggtggaggt

SEQ ID NO: 235713 - DNA, 15 bp, Homo sapiens
cccagaaggtggagg

SEQ ID NO: 235714 - DNA, 15 bp, Homo sapiens
acccagaaggtggag

SEQ ID NO: 235715 - DNA, 15 bp, Homo sapiens
aacccagaaggtgga

SEQ ID NO: 235716 - DNA, 15 bp, Homo sapiens
gaacccagaaggtgg

SEQ ID NO: 235717 - DNA, 15 bp, Homo sapiens
tgaacccagaaggtg

SEQ ID NO: 235718 - DNA, 15 bp, Homo sapiens
ttgaacccagaaggt

SEQ ID NO: 235719 - DNA, 15 bp, Homo sapiens
cttgaacccagaagg

SEQ ID NO: 235720 - DNA, 15 bp, Homo sapiens
acttgaacccagaag

SEQ ID NO: 235721 - DNA, 15 bp, Homo sapiens
cacttgaacccagaa

SEQ ID NO: 235722 - DNA, 15 bp, Homo sapiens
tcacttgaacccaga

SEQ ID NO: 235723 - DNA, 15 bp, Homo sapiens
cctgaggcaggagaa

SEQ ID NO: 235724 - DNA, 15 bp, Homo sapiens
gcctgaggcaggaga

SEQ ID NO: 235725 - DNA, 15 bp, Homo sapiens
aggagcctgaggcag

SEQ ID NO: 235726 - DNA, 15 bp, Homo sapiens
caggagcctgaggca

SEQ ID NO: 235727 - DNA, 15 bp, Homo sapiens
tcaggagcctgaggc

SEQ ID NO: 235728 - DNA, 15 bp, Homo sapiens
ctcaggagcctgagg

SEQ ID NO: 235729 - DNA, 15 bp, Homo sapiens
actcaggagcctgag

SEQ ID NO: 235730 - DNA, 15 bp, Homo sapiens
tactcaggagcctga

SEQ ID NO: 235731 - DNA, 15 bp, Homo sapiens
ctactcaggagcctg

SEQ ID NO: 235732 - DNA, 15 bp, Homo sapiens
gctactcaggagcct

SEQ ID NO: 235733 - DNA, 15 bp, Homo sapiens
agctactcaggagcc

SEQ ID NO: 235734 - DNA, 15 bp, Homo sapiens
cagctactcaggagc

SEQ ID NO: 235735 - DNA, 15 bp, Homo sapiens
gtgcctgtaatccca

SEQ ID NO: 235736 - DNA, 15 bp, Homo sapiens
ggtgcctgtaatccc

SEQ ID NO: 235737 - DNA, 15 bp, Homo sapiens
gggtgcctgtaatcc

SEQ ID NO: 235738 - DNA, 15 bp, Homo sapiens
tgggtgcctgtaatc

SEQ ID NO: 235739 - DNA, 15 bp, Homo sapiens
gtgggtgcctgtaat

SEQ ID NO: 235740 - DNA, 15 bp, Homo sapiens
ggtgggtgcctgtaa

SEQ ID NO: 235741 - DNA, 15 bp, Homo sapiens
tggtgggtgcctgta

SEQ ID NO: 235742 - DNA, 15 bp, Homo sapiens
gtggtgggtgcctgt

SEQ ID NO: 235743 - DNA, 15 bp, Homo sapiens
ggtggtgggtgcctg

SEQ ID NO: 235744 - DNA, 15 bp, Homo sapiens
tggtggtgggtgcct

SEQ ID NO: 235745 - DNA, 15 bp, Homo sapiens
gtggtggtgggtgcc

SEQ ID NO: 235746 - DNA, 15 bp, Homo sapiens
tgtggtggtgggtgc

SEQ ID NO: 235747 - DNA, 15 bp, Homo sapiens
gtgtggtggtgggtg

SEQ ID NO: 235748 - DNA, 15 bp, Homo sapiens
ggtgtggtggtgggt

SEQ ID NO: 235749 - DNA, 15 bp, Homo sapiens
cggtgtggtggtggg

SEQ ID NO: 235750 - DNA, 15 bp, Homo sapiens
tcggtgtggtggtgg

SEQ ID NO: 235751 - DNA, 15 bp, Homo sapiens
ctcggtgtggtggtg

SEQ ID NO: 235752 - DNA, 15 bp, Homo sapiens
gctcggtgtggtggt

SEQ ID NO: 235753 - DNA, 15 bp, Homo sapiens
agctcggtgtggtgg

SEQ ID NO: 235754 - DNA, 15 bp, Homo sapiens
tagctcggtgtggtg

SEQ ID NO: 235755 - DNA, 15 bp, Homo sapiens
ttagctcggtgtggt

SEQ ID NO: 235756 - DNA, 15 bp, Homo sapiens
attagctcggtgtgg

SEQ ID NO: 235757 - DNA, 15 bp, Homo sapiens
aattagctcggtgtg

SEQ ID NO: 235758 - DNA, 15 bp, Homo sapiens
aaattagctcggtgt

SEQ ID NO: 235759 - DNA, 15 bp, Homo sapiens
aaaattagctcggtg

SEQ ID NO: 235760 - DNA, 15 bp, Homo sapiens
aaaaattagctcggt

SEQ ID NO: 235761 - DNA, 15 bp, Homo sapiens
caaaaattagctcgg

SEQ ID NO: 235762 - DNA, 15 bp, Homo sapiens
acaaaaattagctcg

SEQ ID NO: 235763 - DNA, 15 bp, Homo sapiens
tacaaaaattagctc

SEQ ID NO: 235764 - DNA, 15 bp, Homo sapiens
aaaaccctgtctcta

SEQ ID NO: 235765 - DNA, 15 bp, Homo sapiens
taaaaccctgtctct

SEQ ID NO: 235766 - DNA, 15 bp, Homo sapiens
gtaaaaccctgtctc

SEQ ID NO: 235767 - DNA, 15 bp, Homo sapiens
ggtaaaaccctgtct

SEQ ID NO: 235768 - DNA, 15 bp, Homo sapiens
tggtaaaaccctgtc

SEQ ID NO: 235769 - DNA, 15 bp, Homo sapiens
atggtaaaaccctgt

SEQ ID NO: 235770 - DNA, 15 bp, Homo sapiens
catggtaaaaccctg

SEQ ID NO: 235771 - DNA, 15 bp, Homo sapiens
acatggtaaaaccct

SEQ ID NO: 235772 - DNA, 15 bp, Homo sapiens
aacatggtaaaaccc

SEQ ID NO: 235773 - DNA, 15 bp, Homo sapiens
ttggccaacatggta

SEQ ID NO: 235774 - DNA, 15 bp, Homo sapiens
cttggccaacatggt

SEQ ID NO: 235775 - DNA, 15 bp, Homo sapiens
gcttggccaacatgg

SEQ ID NO: 235776 - DNA, 15 bp, Homo sapiens
agcttggccaacatg

SEQ ID NO: 235777 - DNA, 15 bp, Homo sapiens
cagcttggccaacat

SEQ ID NO: 235778 - DNA, 15 bp, Homo sapiens
acagcttggccaaca

SEQ ID NO: 235779 - DNA, 15 bp, Homo sapiens
aacagcttggccaac

SEQ ID NO: 235780 - DNA, 15 bp, Homo sapiens
gaacagcttggccaa

SEQ ID NO: 235781 - DNA, 15 bp, Homo sapiens
agaacagcttggcca

SEQ ID NO: 235782 - DNA, 15 bp, Homo sapiens
gagaacagcttggcc

SEQ ID NO: 235783 - DNA, 15 bp, Homo sapiens
tgagaacagcttggc

SEQ ID NO: 235784 - DNA, 15 bp, Homo sapiens
ttgagaacagcttgg

SEQ ID NO: 235785 - DNA, 15 bp, Homo sapiens
tttgagaacagcttg

SEQ ID NO: 235786 - DNA, 15 bp, Homo sapiens
gtttgagaacagctt

SEQ ID NO: 235787 - DNA, 15 bp, Homo sapiens
agtttgagaacagct

SEQ ID NO: 235788 - DNA, 15 bp, Homo sapiens
gagtttgagaacagc

SEQ ID NO: 235789 - DNA, 15 bp, Homo sapiens
ggagtttgagaacag

SEQ ID NO: 235790 - DNA, 15 bp, Homo sapiens
aggagtttgagaaca

SEQ ID NO: 235791 - DNA, 15 bp, Homo sapiens
caggagtttgagaac

SEQ ID NO: 235792 - DNA, 15 bp, Homo sapiens
tcaggagtttgagaa

SEQ ID NO: 235793 - DNA, 15 bp, Homo sapiens
gcgggtggatcacct

SEQ ID NO: 235794 - DNA, 15 bp, Homo sapiens
ggcgggtggatcacc

SEQ ID NO: 235795 - DNA, 15 bp, Homo sapiens
catacctgtaatccc

SEQ ID NO: 235796 - DNA, 15 bp, Homo sapiens
tcatacctgtaatcc

SEQ ID NO: 235797 - DNA, 15 bp, Homo sapiens
ctcatacctgtaatc

SEQ ID NO: 235798 - DNA, 15 bp, Homo sapiens
gctcatacctgtaat

SEQ ID NO: 235799 - DNA, 15 bp, Homo sapiens
ggctcatacctgtaa

SEQ ID NO: 235800 - DNA, 15 bp, Homo sapiens
tggctcatacctgta

SEQ ID NO: 235801 - DNA, 15 bp, Homo sapiens
gtggctcatacctgt

SEQ ID NO: 235802 - DNA, 15 bp, Homo sapiens
ggtggctcatacctg

SEQ ID NO: 235803 - DNA, 15 bp, Homo sapiens
tggtggctcatacct

SEQ ID NO: 235804 - DNA, 15 bp, Homo sapiens
atggtggctcatacc

SEQ ID NO: 235805 - DNA, 15 bp, Homo sapiens
catggtggctcatac

SEQ ID NO: 235806 - DNA, 15 bp, Homo sapiens
gcatggtggctcata

SEQ ID NO: 235807 - DNA, 15 bp, Homo sapiens
cgggcatggtggctc

SEQ ID NO: 235808 - DNA, 15 bp, Homo sapiens
ccgggcatggtggct

SEQ ID NO: 235809 - DNA, 15 bp, Homo sapiens
gccgggcatggtggc

SEQ ID NO: 235810 - DNA, 15 bp, Homo sapiens
ggccgggcatggtgg

SEQ ID NO: 235811 - DNA, 15 bp, Homo sapiens
gggccgggcatggtg

SEQ ID NO: 235812 - DNA, 15 bp, Homo sapiens
ggggccgggcatggt

SEQ ID NO: 235813 - DNA, 15 bp, Homo sapiens
tggggccgggcatgg

SEQ ID NO: 235814 - DNA, 15 bp, Homo sapiens
gtggggccgggcatg

SEQ ID NO: 235815 - DNA, 15 bp, Homo sapiens
agtggggccgggcat

SEQ ID NO: 235816 - DNA, 15 bp, Homo sapiens
aagtggggccgggca

SEQ ID NO: 235817 - DNA, 15 bp, Homo sapiens
caagtggggccgggc

SEQ ID NO: 235818 - DNA, 15 bp, Homo sapiens
ccaagtggggccggg

SEQ ID NO: 235819 - DNA, 15 bp, Homo sapiens
tccaagtggggccgg

SEQ ID NO: 235820 - DNA, 15 bp, Homo sapiens
ttccaagtggggccg

SEQ ID NO: 235821 - DNA, 15 bp, Homo sapiens
attccaagtggggcc

SEQ ID NO: 235822 - DNA, 15 bp, Homo sapiens
tattccaagtggggc

SEQ ID NO: 235823 - DNA, 15 bp, Homo sapiens
atattccaagtgggg

SEQ ID NO: 235824 - DNA, 15 bp, Homo sapiens
aatattccaagtggg

SEQ ID NO: 235825 - DNA, 15 bp, Homo sapiens
taatattccaagtgg

SEQ ID NO: 235826 - DNA, 15 bp, Homo sapiens
ataatattccaagtg

SEQ ID NO: 235827 - DNA, 15 bp, Homo sapiens
aataatattccaagt

SEQ ID NO: 235828 - DNA, 15 bp, Homo sapiens
aaataatattccaag

SEQ ID NO: 235829 - DNA, 15 bp, Homo sapiens
caaataatattccaa

SEQ ID NO: 235830 - DNA, 15 bp, Homo sapiens
acaaataatattcca

SEQ ID NO: 235831 - DNA, 15 bp, Homo sapiens
gacaaataatattcc

SEQ ID NO: 235832 - DNA, 15 bp, Homo sapiens
agacaaataatattc

SEQ ID NO: 235833 - DNA, 15 bp, Homo sapiens
aagacaaataatatt

SEQ ID NO: 235834 - DNA, 15 bp, Homo sapiens
aaagacaaataatat

SEQ ID NO: 235835 - DNA, 15 bp, Homo sapiens
taaagacaaataata

SEQ ID NO: 235836 - DNA, 15 bp, Homo sapiens
ttaaagacaaataat

SEQ ID NO: 235837 - DNA, 15 bp, Homo sapiens
tttaaagacaaataa

SEQ ID NO: 235838 - DNA, 15 bp, Homo sapiens
atttaaagacaaata

SEQ ID NO: 235839 - DNA, 15 bp, Homo sapiens
aatttaaagacaaat

SEQ ID NO: 235840 - DNA, 15 bp, Homo sapiens
aaatttaaagacaaa

SEQ ID NO: 235841 - DNA, 15 bp, Homo sapiens
caaatttaaagacaa

SEQ ID NO: 235842 - DNA, 15 bp, Homo sapiens
gcaaatttaaagaca

SEQ ID NO: 235843 - DNA, 15 bp, Homo sapiens
tgcaaatttaaagac

SEQ ID NO: 235844 - DNA, 15 bp, Homo sapiens
atgcaaatttaaaga

SEQ ID NO: 235845 - DNA, 15 bp, Homo sapiens
tatgcaaatttaaag

SEQ ID NO: 235846 - DNA, 15 bp, Homo sapiens
ctatgcaaatttaaa

SEQ ID NO: 235847 - DNA, 15 bp, Homo sapiens
tctatgcaaatttaa

SEQ ID NO: 235848 - DNA, 15 bp, Homo sapiens
ctctatgcaaattta

SEQ ID NO: 235849 - DNA, 15 bp, Homo sapiens
actctatgcaaattt

SEQ ID NO: 235850 - DNA, 15 bp, Homo sapiens
aactctatgcaaatt

SEQ ID NO: 235851 - DNA, 15 bp, Homo sapiens
caactctatgcaaat

SEQ ID NO: 235852 - DNA, 15 bp, Homo sapiens
acaactctatgcaaa

SEQ ID NO: 235853 - DNA, 15 bp, Homo sapiens
tacaactctatgcaa

SEQ ID NO: 235854 - DNA, 15 bp, Homo sapiens
ttacaactctatgca

SEQ ID NO: 235855 - DNA, 15 bp, Homo sapiens
tttacaactctatgc

SEQ ID NO: 235856 - DNA, 15 bp, Homo sapiens
atttacaactctatg

SEQ ID NO: 235857 - DNA, 15 bp, Homo sapiens
tatttacaactctat

SEQ ID NO: 235858 - DNA, 15 bp, Homo sapiens
ttatttacaactcta

SEQ ID NO: 235859 - DNA, 15 bp, Homo sapiens
tttatttacaactct

SEQ ID NO: 235860 - DNA, 15 bp, Homo sapiens
ttttatttacaactc

SEQ ID NO: 235861 - DNA, 15 bp, Homo sapiens
attttatttacaact

SEQ ID NO: 235862 - DNA, 15 bp, Homo sapiens
tattttatttacaac

SEQ ID NO: 235863 - DNA, 15 bp, Homo sapiens
ttattttatttacaa

SEQ ID NO: 235864 - DNA, 15 bp, Homo sapiens
cttattttatttaca

SEQ ID NO: 235865 - DNA, 15 bp, Homo sapiens
acttattttatttac

SEQ ID NO: 235866 - DNA, 15 bp, Homo sapiens
cacttattttattta

SEQ ID NO: 235867 - DNA, 15 bp, Homo sapiens
acacttattttattt

SEQ ID NO: 235868 - DNA, 15 bp, Homo sapiens
gacacttattttatt

SEQ ID NO: 235869 - DNA, 15 bp, Homo sapiens
tgacacttattttat

SEQ ID NO: 235870 - DNA, 15 bp, Homo sapiens
ttgacacttatttta

SEQ ID NO: 235871 - DNA, 15 bp, Homo sapiens
tttgacacttatttt

SEQ ID NO: 235872 - DNA, 15 bp, Homo sapiens
ctttgacacttattt

SEQ ID NO: 235873 - DNA, 15 bp, Homo sapiens
tctttgacacttatt

SEQ ID NO: 235874 - DNA, 15 bp, Homo sapiens
ttctttgacacttat

SEQ ID NO: 235875 - DNA, 15 bp, Homo sapiens
tttctttgacactta

SEQ ID NO: 235876 - DNA, 15 bp, Homo sapiens
atttctttgacactt

SEQ ID NO: 235877 - DNA, 15 bp, Homo sapiens
catttctttgacact

SEQ ID NO: 235878 - DNA, 15 bp, Homo sapiens
acatttctttgacac

SEQ ID NO: 235879 - DNA, 15 bp, Homo sapiens
cacatttctttgaca

SEQ ID NO: 235880 - DNA, 15 bp, Homo sapiens
gcacatttctttgac

SEQ ID NO: 235881 - DNA, 15 bp, Homo sapiens
ggcacatttctttga

SEQ ID NO: 235882 - DNA, 15 bp, Homo sapiens
aggcacatttctttg

SEQ ID NO: 235883 - DNA, 15 bp, Homo sapiens
aaggcacatttcttt

SEQ ID NO: 235884 - DNA, 15 bp, Homo sapiens
gaaggcacatttctt

SEQ ID NO: 235885 - DNA, 15 bp, Homo sapiens
agaaggcacatttct

SEQ ID NO: 235886 - DNA, 15 bp, Homo sapiens
tagaaggcacatttc

SEQ ID NO: 235887 - DNA, 15 bp, Homo sapiens
ctagaaggcacattt

SEQ ID NO: 235888 - DNA, 15 bp, Homo sapiens
tctagaaggcacatt

SEQ ID NO: 235889 - DNA, 15 bp, Homo sapiens
ttctagaaggcacat

SEQ ID NO: 235890 - DNA, 15 bp, Homo sapiens
tttctagaaggcaca

SEQ ID NO: 235891 - DNA, 15 bp, Homo sapiens
ttttctagaaggcac

SEQ ID NO: 235892 - DNA, 15 bp, Homo sapiens
attttctagaaggca

SEQ ID NO: 235893 - DNA, 15 bp, Homo sapiens
aattttctagaaggc

SEQ ID NO: 235894 - DNA, 15 bp, Homo sapiens
aaattttctagaagg

SEQ ID NO: 235895 - DNA, 15 bp, Homo sapiens
taaattttctagaag

SEQ ID NO: 235896 - DNA, 15 bp, Homo sapiens
ctaaattttctagaa

SEQ ID NO: 235897 - DNA, 15 bp, Homo sapiens
tctaaattttctaga

SEQ ID NO: 235898 - DNA, 15 bp, Homo sapiens
ttctaaattttctag

SEQ ID NO: 235899 - DNA, 15 bp, Homo sapiens
attctaaattttcta

SEQ ID NO: 235900 - DNA, 15 bp, Homo sapiens
cattctaaattttct

SEQ ID NO: 235901 - DNA, 15 bp, Homo sapiens
tcattctaaattttc

SEQ ID NO: 235902 - DNA, 15 bp, Homo sapiens
gtcattctaaatttt

SEQ ID NO: 235903 - DNA, 15 bp, Homo sapiens
ggtcattctaaattt

SEQ ID NO: 235904 - DNA, 15 bp, Homo sapiens
aggtcattctaaatt

SEQ ID NO: 235905 - DNA, 15 bp, Homo sapiens
caggtcattctaaat

SEQ ID NO: 235906 - DNA, 15 bp, Homo sapiens
acaggtcattctaaa

SEQ ID NO: 235907 - DNA, 15 bp, Homo sapiens
cacaggtcattctaa

SEQ ID NO: 235908 - DNA, 15 bp, Homo sapiens
acacaggtcattcta

SEQ ID NO: 235909 - DNA, 15 bp, Homo sapiens
cacacaggtcattct

SEQ ID NO: 235910 - DNA, 15 bp, Homo sapiens
ccacacaggtcattc

SEQ ID NO: 235911 - DNA, 15 bp, Homo sapiens
accacacaggtcatt

SEQ ID NO: 235912 - DNA, 15 bp, Homo sapiens
aaccacacaggtcat

SEQ ID NO: 235913 - DNA, 15 bp, Homo sapiens
aaaccacacaggtca

SEQ ID NO: 235914 - DNA, 15 bp, Homo sapiens
caaaccacacaggtc

SEQ ID NO: 235915 - DNA, 15 bp, Homo sapiens
acaaaccacacaggt

SEQ ID NO: 235916 - DNA, 15 bp, Homo sapiens
gacaaaccacacagg

SEQ ID NO: 235917 - DNA, 15 bp, Homo sapiens
agacaaaccacacag

SEQ ID NO: 235918 - DNA, 15 bp, Homo sapiens
aagacaaaccacaca

SEQ ID NO: 235919 - DNA, 15 bp, Homo sapiens
taagacaaaccacac

SEQ ID NO: 235920 - DNA, 15 bp, Homo sapiens
ataagacaaaccaca

SEQ ID NO: 235921 - DNA, 15 bp, Homo sapiens
cataagacaaaccac

SEQ ID NO: 235922 - DNA, 15 bp, Homo sapiens
acataagacaaacca

SEQ ID NO: 235923 - DNA, 15 bp, Homo sapiens
aacataagacaaacc

SEQ ID NO: 235924 - DNA, 15 bp, Homo sapiens
aaacataagacaaac

SEQ ID NO: 235925 - DNA, 15 bp, Homo sapiens
gaaacataagacaaa

SEQ ID NO: 235926 - DNA, 15 bp, Homo sapiens
agaaacataagacaa

SEQ ID NO: 235927 - DNA, 15 bp, Homo sapiens
aagaaacataagaca

SEQ ID NO: 235928 - DNA, 15 bp, Homo sapiens
gaagaaacataagac

SEQ ID NO: 235929 - DNA, 15 bp, Homo sapiens
agaagaaacataaga

SEQ ID NO: 235930 - DNA, 15 bp, Homo sapiens
cagaagaaacataag

SEQ ID NO: 235931 - DNA, 15 bp, Homo sapiens
ccagaagaaacataa

SEQ ID NO: 235932 - DNA, 15 bp, Homo sapiens
tccagaagaaacata

SEQ ID NO: 235933 - DNA, 15 bp, Homo sapiens
gtccagaagaaacat

SEQ ID NO: 235934 - DNA, 15 bp, Homo sapiens
tgtccagaagaaaca

SEQ ID NO: 235935 - DNA, 15 bp, Homo sapiens
ctgtccagaagaaac

SEQ ID NO: 235936 - DNA, 15 bp, Homo sapiens
gctgtccagaagaaa

SEQ ID NO: 235937 - DNA, 15 bp, Homo sapiens
cgctgtccagaagaa

SEQ ID NO: 235938 - DNA, 15 bp, Homo sapiens
tcgctgtccagaaga

SEQ ID NO: 235939 - DNA, 15 bp, Homo sapiens
atcgctgtccagaag

SEQ ID NO: 235940 - DNA, 15 bp, Homo sapiens
catcgctgtccagaa

SEQ ID NO: 235941 - DNA, 15 bp, Homo sapiens
gcatcgctgtccaga

SEQ ID NO: 235942 - DNA, 15 bp, Homo sapiens
agcatcgctgtccag

SEQ ID NO: 235943 - DNA, 15 bp, Homo sapiens
cagcatcgctgtcca

SEQ ID NO: 235944 - DNA, 15 bp, Homo sapiens
tcagcatcgctgtcc

SEQ ID NO: 235945 - DNA, 15 bp, Homo sapiens
atcagcatcgctgtc

SEQ ID NO: 235946 - DNA, 15 bp, Homo sapiens
tatcagcatcgctgt

SEQ ID NO: 235947 - DNA, 15 bp, Homo sapiens
ctatcagcatcgctg

SEQ ID NO: 235948 - DNA, 15 bp, Homo sapiens
cctatcagcatcgct

SEQ ID NO: 235949 - DNA, 15 bp, Homo sapiens
ccctatcagcatcgc

SEQ ID NO: 235950 - DNA, 15 bp, Homo sapiens
cccctatcagcatcg

SEQ ID NO: 235951 - DNA, 15 bp, Homo sapiens
gcccctatcagcatc

SEQ ID NO: 235952 - DNA, 15 bp, Homo sapiens
agcccctatcagcat

SEQ ID NO: 235953 - DNA, 15 bp, Homo sapiens
gagcccctatcagca

SEQ ID NO: 235954 - DNA, 15 bp, Homo sapiens
agagcccctatcagc

SEQ ID NO: 235955 - DNA, 15 bp, Homo sapiens
aagagcccctatcag

SEQ ID NO: 235956 - DNA, 15 bp, Homo sapiens
gaagagcccctatca

SEQ ID NO: 235957 - DNA, 15 bp, Homo sapiens
agaagagcccctatc

SEQ ID NO: 235958 - DNA, 15 bp, Homo sapiens
gagaagagcccctat

SEQ ID NO: 235959 - DNA, 15 bp, Homo sapiens
ggagaagagccccta

SEQ ID NO: 235960 - DNA, 15 bp, Homo sapiens
aggagaagagcccct

SEQ ID NO: 235961 - DNA, 15 bp, Homo sapiens
gaggagaagagcccc

SEQ ID NO: 235962 - DNA, 15 bp, Homo sapiens
ggaggagaagagccc

SEQ ID NO: 235963 - DNA, 15 bp, Homo sapiens
tggaggagaagagcc

SEQ ID NO: 235964 - DNA, 15 bp, Homo sapiens
ttggaggagaagagc

SEQ ID NO: 235965 - DNA, 15 bp, Homo sapiens
attggaggagaagag

SEQ ID NO: 235966 - DNA, 15 bp, Homo sapiens
aattggaggagaaga

SEQ ID NO: 235967 - DNA, 15 bp, Homo sapiens
taattggaggagaag

SEQ ID NO: 235968 - DNA, 15 bp, Homo sapiens
gtaattggaggagaa

SEQ ID NO: 235969 - DNA, 15 bp, Homo sapiens
tgtaattggaggaga

SEQ ID NO: 235970 - DNA, 15 bp, Homo sapiens
ttgtaattggaggag

SEQ ID NO: 235971 - DNA, 15 bp, Homo sapiens
tttgtaattggagga

SEQ ID NO: 235972 - DNA, 15 bp, Homo sapiens
gtttgtaattggagg

SEQ ID NO: 235973 - DNA, 15 bp, Homo sapiens
agtttgtaattggag

SEQ ID NO: 235974 - DNA, 15 bp, Homo sapiens
cagtttgtaattgga

SEQ ID NO: 235975 - DNA, 15 bp, Homo sapiens
acagtttgtaattgg

SEQ ID NO: 235976 - DNA, 15 bp, Homo sapiens
gacagtttgtaattg

SEQ ID NO: 235977 - DNA, 15 bp, Homo sapiens
tgacagtttgtaatt

SEQ ID NO: 235978 - DNA, 15 bp, Homo sapiens
atgacagtttgtaat

SEQ ID NO: 235979 - DNA, 15 bp, Homo sapiens
gatgacagtttgtaa

SEQ ID NO: 235980 - DNA, 15 bp, Homo sapiens
agatgacagtttgta

SEQ ID NO: 235981 - DNA, 15 bp, Homo sapiens
aagatgacagtttgt

SEQ ID NO: 235982 - DNA, 15 bp, Homo sapiens
caagatgacagtttg

SEQ ID NO: 235983 - DNA, 15 bp, Homo sapiens
ccaagatgacagttt

SEQ ID NO: 235984 - DNA, 15 bp, Homo sapiens
tccaagatgacagtt

SEQ ID NO: 235985 - DNA, 15 bp, Homo sapiens
gtccaagatgacagt

SEQ ID NO: 235986 - DNA, 15 bp, Homo sapiens
tgtccaagatgacag

SEQ ID NO: 235987 - DNA, 15 bp, Homo sapiens
ttgtccaagatgaca

SEQ ID NO: 235988 - DNA, 15 bp, Homo sapiens
cttgtccaagatgac

SEQ ID NO: 235989 - DNA, 15 bp, Homo sapiens
gcttgtccaagatga

SEQ ID NO: 235990 - DNA, 15 bp, Homo sapiens
agcttgtccaagatg

SEQ ID NO: 235991 - DNA, 15 bp, Homo sapiens
cagcttgtccaagat

SEQ ID NO: 235992 - DNA, 15 bp, Homo sapiens
gcagcttgtccaaga

SEQ ID NO: 235993 - DNA, 15 bp, Homo sapiens
agcagcttgtccaag

SEQ ID NO: 235994 - DNA, 15 bp, Homo sapiens
aagcagcttgtccaa

SEQ ID NO: 235995 - DNA, 15 bp, Homo sapiens
gaagcagcttgtcca

SEQ ID NO: 235996 - DNA, 15 bp, Homo sapiens
tgaagcagcttgtcc

SEQ ID NO: 235997 - DNA, 15 bp, Homo sapiens
gtgaagcagcttgtc

SEQ ID NO: 235998 - DNA, 15 bp, Homo sapiens
agtgaagcagcttgt

SEQ ID NO: 235999 - DNA, 15 bp, Homo sapiens
cagtgaagcagcttg

SEQ ID NO: 236000 - DNA, 15 bp, Homo sapiens
acagtgaagcagctt

SEQ ID NO: 236001 - DNA, 15 bp, Homo sapiens
cacagtgaagcagct

SEQ ID NO: 236002 - DNA, 15 bp, Homo sapiens
acacagtgaagcagc

SEQ ID NO: 236003 - DNA, 15 bp, Homo sapiens
gacacagtgaagcag

SEQ ID NO: 236004 - DNA, 15 bp, Homo sapiens
agacacagtgaagca

SEQ ID NO: 236005 - DNA, 15 bp, Homo sapiens
gagacacagtgaagc

SEQ ID NO: 236006 - DNA, 15 bp, Homo sapiens
tgagacacagtgaag

SEQ ID NO: 236007 - DNA, 15 bp, Homo sapiens
gtgagacacagtgaa

SEQ ID NO: 236008 - DNA, 15 bp, Homo sapiens
agtgagacacagtga

SEQ ID NO: 236009 - DNA, 15 bp, Homo sapiens
aagtgagacacagtg

SEQ ID NO: 236010 - DNA, 15 bp, Homo sapiens
caagtgagacacagt

SEQ ID NO: 236011 - DNA, 15 bp, Homo sapiens
gcaagtgagacacag

SEQ ID NO: 236012 - DNA, 15 bp, Homo sapiens
agcaagtgagacaca

SEQ ID NO: 236013 - DNA, 15 bp, Homo sapiens
aagcaagtgagacac

SEQ ID NO: 236014 - DNA, 15 bp, Homo sapiens
gaagcaagtgagaca

SEQ ID NO: 236015 - DNA, 15 bp, Homo sapiens
tgaagcaagtgagac

SEQ ID NO: 236016 - DNA, 15 bp, Homo sapiens
atgaagcaagtgaga

SEQ ID NO: 236017 - DNA, 15 bp, Homo sapiens
gatgaagcaagtgag

SEQ ID NO: 236018 - DNA, 15 bp, Homo sapiens
agatgaagcaagtga

SEQ ID NO: 236019 - DNA, 15 bp, Homo sapiens
cagatgaagcaagtg

SEQ ID NO: 236020 - DNA, 15 bp, Homo sapiens
acagatgaagcaagt

SEQ ID NO: 236021 - DNA, 15 bp, Homo sapiens
tacagatgaagcaag

SEQ ID NO: 236022 - DNA, 15 bp, Homo sapiens
ttacagatgaagcaa

SEQ ID NO: 236023 - DNA, 15 bp, Homo sapiens
tttacagatgaagca

SEQ ID NO: 236024 - DNA, 15 bp, Homo sapiens
ttttacagatgaagc

SEQ ID NO: 236025 - DNA, 15 bp, Homo sapiens
cattattcccatttt

SEQ ID NO: 236026 - DNA, 15 bp, Homo sapiens
tcattattcccattt

SEQ ID NO: 236027 - DNA, 15 bp, Homo sapiens
atcattattcccatt

SEQ ID NO: 236028 - DNA, 15 bp, Homo sapiens
tatcattattcccat

SEQ ID NO: 236029 - DNA, 15 bp, Homo sapiens
ttatcattattccca

SEQ ID NO: 236030 - DNA, 15 bp, Homo sapiens
gttatcattattccc

SEQ ID NO: 236031 - DNA, 15 bp, Homo sapiens
tgttatcattattcc

SEQ ID NO: 236032 - DNA, 15 bp, Homo sapiens
gtgttatcattattc

SEQ ID NO: 236033 - DNA, 15 bp, Homo sapiens
ggtgttatcattatt

SEQ ID NO: 236034 - DNA, 15 bp, Homo sapiens
aggtgttatcattat

SEQ ID NO: 236035 - DNA, 15 bp, Homo sapiens
caggtgttatcatta

SEQ ID NO: 236036 - DNA, 15 bp, Homo sapiens
acaggtgttatcatt

SEQ ID NO: 236037 - DNA, 15 bp, Homo sapiens
aacaggtgttatcat

SEQ ID NO: 236038 - DNA, 15 bp, Homo sapiens
aaacaggtgttatca

SEQ ID NO: 236039 - DNA, 15 bp, Homo sapiens
gaaacaggtgttatc

SEQ ID NO: 236040 - DNA, 15 bp, Homo sapiens
tgaaacaggtgttat

SEQ ID NO: 236041 - DNA, 15 bp, Homo sapiens
atgaaacaggtgtta

SEQ ID NO: 236042 - DNA, 15 bp, Homo sapiens
tatgaaacaggtgtt

SEQ ID NO: 236043 - DNA, 15 bp, Homo sapiens
ctatgaaacaggtgt

SEQ ID NO: 236044 - DNA, 15 bp, Homo sapiens
tctatgaaacaggtg

SEQ ID NO: 236045 - DNA, 15 bp, Homo sapiens
gtctatgaaacaggt

SEQ ID NO: 236046 - DNA, 15 bp, Homo sapiens
agtctatgaaacagg

SEQ ID NO: 236047 - DNA, 15 bp, Homo sapiens
aagtctatgaaacag

SEQ ID NO: 236048 - DNA, 15 bp, Homo sapiens
caagtctatgaaaca

SEQ ID NO: 236049 - DNA, 15 bp, Homo sapiens
acaagtctatgaaac

SEQ ID NO: 236050 - DNA, 15 bp, Homo sapiens
aacaagtctatgaaa

SEQ ID NO: 236051 - DNA, 15 bp, Homo sapiens
taacaagtctatgaa

SEQ ID NO: 236052 - DNA, 15 bp, Homo sapiens
ctaacaagtctatga

SEQ ID NO: 236053 - DNA, 15 bp, Homo sapiens
actaacaagtctatg

SEQ ID NO: 236054 - DNA, 15 bp, Homo sapiens
aactaacaagtctat

SEQ ID NO: 236055 - DNA, 15 bp, Homo sapiens
taactaacaagtcta

SEQ ID NO: 236056 - DNA, 15 bp, Homo sapiens
ttaactaacaagtct

SEQ ID NO: 236057 - DNA, 15 bp, Homo sapiens
attaactaacaagtc

SEQ ID NO: 236058 - DNA, 15 bp, Homo sapiens
tattaactaacaagt

SEQ ID NO: 236059 - DNA, 15 bp, Homo sapiens
gtattaactaacaag

SEQ ID NO: 236060 - DNA, 15 bp, Homo sapiens
tgtattaactaacaa

SEQ ID NO: 236061 - DNA, 15 bp, Homo sapiens
atgtattaactaaca

SEQ ID NO: 236062 - DNA, 15 bp, Homo sapiens
catgtattaactaac

SEQ ID NO: 236063 - DNA, 15 bp, Homo sapiens
acatgtattaactaa

SEQ ID NO: 236064 - DNA, 15 bp, Homo sapiens
tacatgtattaacta

SEQ ID NO: 236065 - DNA, 15 bp, Homo sapiens
ttacatgtattaact

SEQ ID NO: 236066 - DNA, 15 bp, Homo sapiens
tttacatgtattaac

SEQ ID NO: 236067 - DNA, 15 bp, Homo sapiens
ctttacatgtattaa

SEQ ID NO: 236068 - DNA, 15 bp, Homo sapiens
actttacatgtatta

SEQ ID NO: 236069 - DNA, 15 bp, Homo sapiens
cactttacatgtatt

SEQ ID NO: 236070 - DNA, 15 bp, Homo sapiens
gcactttacatgtat

SEQ ID NO: 236071 - DNA, 15 bp, Homo sapiens
agcactttacatgta

SEQ ID NO: 236072 - DNA, 15 bp, Homo sapiens
aagcactttacatgt

SEQ ID NO: 236073 - DNA, 15 bp, Homo sapiens
taagcactttacatg

SEQ ID NO: 236074 - DNA, 15 bp, Homo sapiens
tctaagcactttaca

SEQ ID NO: 236075 - DNA, 15 bp, Homo sapiens
ttctaagcactttac

SEQ ID NO: 236076 - DNA, 15 bp, Homo sapiens
attctaagcacttta

SEQ ID NO: 236077 - DNA, 15 bp, Homo sapiens
cattctaagcacttt

SEQ ID NO: 236078 - DNA, 15 bp, Homo sapiens
acattctaagcactt

SEQ ID NO: 236079 - DNA, 15 bp, Homo sapiens
cacattctaagcact

SEQ ID NO: 236080 - DNA, 15 bp, Homo sapiens
acacattctaagcac

SEQ ID NO: 236081 - DNA, 15 bp, Homo sapiens
gacacattctaagca

SEQ ID NO: 236082 - DNA, 15 bp, Homo sapiens
agacacattctaagc

SEQ ID NO: 236083 - DNA, 15 bp, Homo sapiens
tagacacattctaag

SEQ ID NO: 236084 - DNA, 15 bp, Homo sapiens
ctagacacattctaa

SEQ ID NO: 236085 - DNA, 15 bp, Homo sapiens
gctagacacattcta

SEQ ID NO: 236086 - DNA, 15 bp, Homo sapiens
tgctagacacattct

SEQ ID NO: 236087 - DNA, 15 bp, Homo sapiens
gtgctagacacattc

SEQ ID NO: 236088 - DNA, 15 bp, Homo sapiens
tgtgctagacacatt

SEQ ID NO: 236089 - DNA, 15 bp, Homo sapiens
atgtgctagacacat

SEQ ID NO: 236090 - DNA, 15 bp, Homo sapiens
tatgtgctagacaca

SEQ ID NO: 236091 - DNA, 15 bp, Homo sapiens
ctatgtgctagacac

SEQ ID NO: 236092 - DNA, 15 bp, Homo sapiens
gctatgtgctagaca

SEQ ID NO: 236093 - DNA, 15 bp, Homo sapiens
tgctatgtgctagac

SEQ ID NO: 236094 - DNA, 15 bp, Homo sapiens
ctgctatgtgctaga

SEQ ID NO: 236095 - DNA, 15 bp, Homo sapiens
cctgctatgtgctag

SEQ ID NO: 236096 - DNA, 15 bp, Homo sapiens
tcctgctatgtgcta

SEQ ID NO: 236097 - DNA, 15 bp, Homo sapiens
ctcctgctatgtgct

SEQ ID NO: 236098 - DNA, 15 bp, Homo sapiens
actcctgctatgtgc

SEQ ID NO: 236099 - DNA, 15 bp, Homo sapiens
aactcctgctatgtg

SEQ ID NO: 236100 - DNA, 15 bp, Homo sapiens
caactcctgctatgt

SEQ ID NO: 236101 - DNA, 15 bp, Homo sapiens
tcaactcctgctatg

SEQ ID NO: 236102 - DNA, 15 bp, Homo sapiens
ttcaactcctgctat

SEQ ID NO: 236103 - DNA, 15 bp, Homo sapiens
gttcaactcctgcta

SEQ ID NO: 236104 - DNA, 15 bp, Homo sapiens
tgttcaactcctgct

SEQ ID NO: 236105 - DNA, 15 bp, Homo sapiens
ttgttcaactcctgc

SEQ ID NO: 236106 - DNA, 15 bp, Homo sapiens
cttgttcaactcctg

SEQ ID NO: 236107 - DNA, 15 bp, Homo sapiens
ccttgttcaactcct

SEQ ID NO: 236108 - DNA, 15 bp, Homo sapiens
tccttgttcaactcc

SEQ ID NO: 236109 - DNA, 15 bp, Homo sapiens
atccttgttcaactc

SEQ ID NO: 236110 - DNA, 15 bp, Homo sapiens
gatccttgttcaact

SEQ ID NO: 236111 - DNA, 15 bp, Homo sapiens
tgatccttgttcaac

SEQ ID NO: 236112 - DNA, 15 bp, Homo sapiens
gtgatccttgttcaa

SEQ ID NO: 236113 - DNA, 15 bp, Homo sapiens
ggtgatccttgttca

SEQ ID NO: 236114 - DNA, 15 bp, Homo sapiens
aggtgatccttgttc

SEQ ID NO: 236115 - DNA, 15 bp, Homo sapiens
gaggtgatccttgtt

SEQ ID NO: 236116 - DNA, 15 bp, Homo sapiens
agaggtgatccttgt

SEQ ID NO: 236117 - DNA, 15 bp, Homo sapiens
gagaggtgatccttg

SEQ ID NO: 236118 - DNA, 15 bp, Homo sapiens
tgagaggtgatcctt

SEQ ID NO: 236119 - DNA, 15 bp, Homo sapiens
atgagaggtgatcct

SEQ ID NO: 236120 - DNA, 15 bp, Homo sapiens
aatgagaggtgatcc

SEQ ID NO: 236121 - DNA, 15 bp, Homo sapiens
taatgagaggtgatc

SEQ ID NO: 236122 - DNA, 15 bp, Homo sapiens
ctaatgagaggtgat

SEQ ID NO: 236123 - DNA, 15 bp, Homo sapiens
cctaatgagaggtga

SEQ ID NO: 236124 - DNA, 15 bp, Homo sapiens
ccctaatgagaggtg

SEQ ID NO: 236125 - DNA, 15 bp, Homo sapiens
cccctaatgagaggt

SEQ ID NO: 236126 - DNA, 15 bp, Homo sapiens
gcccctaatgagagg

SEQ ID NO: 236127 - DNA, 15 bp, Homo sapiens
agcccctaatgagag

SEQ ID NO: 236128 - DNA, 15 bp, Homo sapiens
cagcccctaatgaga

SEQ ID NO: 236129 - DNA, 15 bp, Homo sapiens
gcagcccctaatgag

SEQ ID NO: 236130 - DNA, 15 bp, Homo sapiens
tgcagcccctaatga

SEQ ID NO: 236131 - DNA, 15 bp, Homo sapiens
ctgcagcccctaatg

SEQ ID NO: 236132 - DNA, 15 bp, Homo sapiens
cctgcagcccctaat

SEQ ID NO: 236133 - DNA, 15 bp, Homo sapiens
ccctgcagcccctaa

SEQ ID NO: 236134 - DNA, 15 bp, Homo sapiens
cccctgcagccccta

SEQ ID NO: 236135 - DNA, 15 bp, Homo sapiens
ccccctgcagcccct

SEQ ID NO: 236136 - DNA, 15 bp, Homo sapiens
tccccctgcagcccc

SEQ ID NO: 236137 - DNA, 15 bp, Homo sapiens
gtccccctgcagccc

SEQ ID NO: 236138 - DNA, 15 bp, Homo sapiens
agtccccctgcagcc

SEQ ID NO: 236139 - DNA, 15 bp, Homo sapiens
cagtccccctgcagc

SEQ ID NO: 236140 - DNA, 15 bp, Homo sapiens
ccagtccccctgcag

SEQ ID NO: 236141 - DNA, 15 bp, Homo sapiens
accagtccccctgca

SEQ ID NO: 236142 - DNA, 15 bp, Homo sapiens
caccagtccccctgc

SEQ ID NO: 236143 - DNA, 15 bp, Homo sapiens
ccaccagtccccctg

SEQ ID NO: 236144 - DNA, 15 bp, Homo sapiens
gccaccagtccccct

SEQ ID NO: 236145 - DNA, 15 bp, Homo sapiens
agccaccagtccccc

SEQ ID NO: 236146 - DNA, 15 bp, Homo sapiens
cagccaccagtcccc

SEQ ID NO: 236147 - DNA, 15 bp, Homo sapiens
gcagccaccagtccc

SEQ ID NO: 236148 - DNA, 15 bp, Homo sapiens
agcagccaccagtcc

SEQ ID NO: 236149 - DNA, 15 bp, Homo sapiens
cagcagccaccagtc

SEQ ID NO: 236150 - DNA, 15 bp, Homo sapiens
gcagcagccaccagt

SEQ ID NO: 236151 - DNA, 15 bp, Homo sapiens
agcagcagccaccag

SEQ ID NO: 236152 - DNA, 15 bp, Homo sapiens
cagcagcagccacca

SEQ ID NO: 236153 - DNA, 15 bp, Homo sapiens
tcagcagcagccacc

SEQ ID NO: 236154 - DNA, 15 bp, Homo sapiens
ttcagcagcagccac

SEQ ID NO: 236155 - DNA, 15 bp, Homo sapiens
gcttcagcagcagcc

SEQ ID NO: 236156 - DNA, 15 bp, Homo sapiens
ggcttcagcagcagc

SEQ ID NO: 236157 - DNA, 15 bp, Homo sapiens
aggcttcagcagcag

SEQ ID NO: 236158 - DNA, 15 bp, Homo sapiens
aaggcttcagcagca

SEQ ID NO: 236159 - DNA, 15 bp, Homo sapiens
gaaggcttcagcagc

SEQ ID NO: 236160 - DNA, 15 bp, Homo sapiens
tgaaggcttcagcag

SEQ ID NO: 236161 - DNA, 15 bp, Homo sapiens
ctgaaggcttcagca

SEQ ID NO: 236162 - DNA, 15 bp, Homo sapiens
tctgaaggcttcagc

SEQ ID NO: 236163 - DNA, 15 bp, Homo sapiens
ttctgaaggcttcag

SEQ ID NO: 236164 - DNA, 15 bp, Homo sapiens
gttctgaaggcttca

SEQ ID NO: 236165 - DNA, 15 bp, Homo sapiens
ggttctgaaggcttc

SEQ ID NO: 236166 - DNA, 15 bp, Homo sapiens
aggttctgaaggctt

SEQ ID NO: 236167 - DNA, 15 bp, Homo sapiens
gaggttctgaaggct

SEQ ID NO: 236168 - DNA, 15 bp, Homo sapiens
ggaggttctgaaggc

SEQ ID NO: 236169 - DNA, 15 bp, Homo sapiens
gggaggttctgaagg

SEQ ID NO: 236170 - DNA, 15 bp, Homo sapiens
agggaggttctgaag

SEQ ID NO: 236171 - DNA, 15 bp, Homo sapiens
aagggaggttctgaa

SEQ ID NO: 236172 - DNA, 15 bp, Homo sapiens
gaagggaggttctga

SEQ ID NO: 236173 - DNA, 15 bp, Homo sapiens
tgaagggaggttctg

SEQ ID NO: 236174 - DNA, 15 bp, Homo sapiens
gtgaagggaggttct

SEQ ID NO: 236175 - DNA, 15 bp, Homo sapiens
tgtgaagggaggttc

SEQ ID NO: 236176 - DNA, 15 bp, Homo sapiens
atgtgaagggaggtt

SEQ ID NO: 236177 - DNA, 15 bp, Homo sapiens
catgtgaagggaggt

SEQ ID NO: 236178 - DNA, 15 bp, Homo sapiens
gcatgtgaagggagg

SEQ ID NO: 236179 - DNA, 15 bp, Homo sapiens
agcatgtgaagggag

SEQ ID NO: 236180 - DNA, 15 bp, Homo sapiens
gagcatgtgaaggga

SEQ ID NO: 236181 - DNA, 15 bp, Homo sapiens
tgagcatgtgaaggg

SEQ ID NO: 236182 - DNA, 15 bp, Homo sapiens
gtgagcatgtgaagg

SEQ ID NO: 236183 - DNA, 15 bp, Homo sapiens
ggtgagcatgtgaag

SEQ ID NO: 236184 - DNA, 15 bp, Homo sapiens
tggtgagcatgtgaa

SEQ ID NO: 236185 - DNA, 15 bp, Homo sapiens
gtggtgagcatgtga

SEQ ID NO: 236186 - DNA, 15 bp, Homo sapiens
tgtggtgagcatgtg

SEQ ID NO: 236187 - DNA, 15 bp, Homo sapiens
ctgtggtgagcatgt

SEQ ID NO: 236188 - DNA, 15 bp, Homo sapiens
gctgtggtgagcatg

SEQ ID NO: 236189 - DNA, 15 bp, Homo sapiens
agctgtggtgagcat

SEQ ID NO: 236190 - DNA, 15 bp, Homo sapiens
gagctgtggtgagca

SEQ ID NO: 236191 - DNA, 15 bp, Homo sapiens
ggagctgtggtgagc

SEQ ID NO: 236192 - DNA, 15 bp, Homo sapiens
aggagctgtggtgag

SEQ ID NO: 236193 - DNA, 15 bp, Homo sapiens
gaggagctgtggtga

SEQ ID NO: 236194 - DNA, 15 bp, Homo sapiens
ggaggagctgtggtg

SEQ ID NO: 236195 - DNA, 15 bp, Homo sapiens
tggaggagctgtggt

SEQ ID NO: 236196 - DNA, 15 bp, Homo sapiens
ctggaggagctgtgg

SEQ ID NO: 236197 - DNA, 15 bp, Homo sapiens
gctggaggagctgtg

SEQ ID NO: 236198 - DNA, 15 bp, Homo sapiens
tgctggaggagctgt

SEQ ID NO: 236199 - DNA, 15 bp, Homo sapiens
ctgctggaggagctg

SEQ ID NO: 236200 - DNA, 15 bp, Homo sapiens
cctgctggaggagct

SEQ ID NO: 236201 - DNA, 15 bp, Homo sapiens
gcctgctggaggagc

SEQ ID NO: 236202 - DNA, 15 bp, Homo sapiens
tgcctgctggaggag

SEQ ID NO: 236203 - DNA, 15 bp, Homo sapiens
ctgcctgctggagga

SEQ ID NO: 236204 - DNA, 15 bp, Homo sapiens
tctgcctgctggagg

SEQ ID NO: 236205 - DNA, 15 bp, Homo sapiens
ttctgcctgctggag

SEQ ID NO: 236206 - DNA, 15 bp, Homo sapiens
cttctgcctgctgga

SEQ ID NO: 236207 - DNA, 15 bp, Homo sapiens
ccttctgcctgctgg

SEQ ID NO: 236208 - DNA, 15 bp, Homo sapiens
gccttctgcctgctg

SEQ ID NO: 236209 - DNA, 15 bp, Homo sapiens
agccttctgcctgct

SEQ ID NO: 236210 - DNA, 15 bp, Homo sapiens
aagccttctgcctgc

SEQ ID NO: 236211 - DNA, 15 bp, Homo sapiens
taagccttctgcctg

SEQ ID NO: 236212 - DNA, 15 bp, Homo sapiens
gtaagccttctgcct

SEQ ID NO: 236213 - DNA, 15 bp, Homo sapiens
agtaagccttctgcc

SEQ ID NO: 236214 - DNA, 15 bp, Homo sapiens
gagtaagccttctgc

SEQ ID NO: 236215 - DNA, 15 bp, Homo sapiens
cgagtaagccttctg

SEQ ID NO: 236216 - DNA, 15 bp, Homo sapiens
ccgagtaagccttct

SEQ ID NO: 236217 - DNA, 15 bp, Homo sapiens
accgagtaagccttc

SEQ ID NO: 236218 - DNA, 15 bp, Homo sapiens
caccgagtaagcctt

SEQ ID NO: 236219 - DNA, 15 bp, Homo sapiens
ccaccgagtaagcct

SEQ ID NO: 236220 - DNA, 15 bp, Homo sapiens
accaccgagtaagcc

SEQ ID NO: 236221 - DNA, 15 bp, Homo sapiens
caccaccgagtaagc

SEQ ID NO: 236222 - DNA, 15 bp, Homo sapiens
gcaccaccgagtaag

SEQ ID NO: 236223 - DNA, 15 bp, Homo sapiens
tgcaccaccgagtaa

SEQ ID NO: 236224 - DNA, 15 bp, Homo sapiens
ctgcaccaccgagta

SEQ ID NO: 236225 - DNA, 15 bp, Homo sapiens
tctgcaccaccgagt

SEQ ID NO: 236226 - DNA, 15 bp, Homo sapiens
ctctgcaccaccgag

SEQ ID NO: 236227 - DNA, 15 bp, Homo sapiens
tctctgcaccaccga

SEQ ID NO: 236228 - DNA, 15 bp, Homo sapiens
ttctctgcaccaccg

SEQ ID NO: 236229 - DNA, 15 bp, Homo sapiens
tttctctgcaccacc

SEQ ID NO: 236230 - DNA, 15 bp, Homo sapiens
atttctctgcaccac

SEQ ID NO: 236231 - DNA, 15 bp, Homo sapiens
aatttctctgcacca

SEQ ID NO: 236232 - DNA, 15 bp, Homo sapiens
taatttctctgcacc

SEQ ID NO: 236233 - DNA, 15 bp, Homo sapiens
gtaatttctctgcac

SEQ ID NO: 236234 - DNA, 15 bp, Homo sapiens
ggtaatttctctgca

SEQ ID NO: 236235 - DNA, 15 bp, Homo sapiens
gggtaatttctctgc

SEQ ID NO: 236236 - DNA, 15 bp, Homo sapiens
ggggtaatttctctg

SEQ ID NO: 236237 - DNA, 15 bp, Homo sapiens
tggggtaatttctct

SEQ ID NO: 236238 - DNA, 15 bp, Homo sapiens
ttggggtaatttctc

SEQ ID NO: 236239 - DNA, 15 bp, Homo sapiens
tttggggtaatttct

SEQ ID NO: 236240 - DNA, 15 bp, Homo sapiens
ctttggggtaatttc

SEQ ID NO: 236241 - DNA, 15 bp, Homo sapiens
cctttggggtaattt

SEQ ID NO: 236242 - DNA, 15 bp, Homo sapiens
tcctttggggtaatt

SEQ ID NO: 236243 - DNA, 15 bp, Homo sapiens
ttcctttggggtaat

SEQ ID NO: 236244 - DNA, 15 bp, Homo sapiens
cttcctttggggtaa

SEQ ID NO: 236245 - DNA, 15 bp, Homo sapiens
gcttcctttggggta

SEQ ID NO: 236246 - DNA, 15 bp, Homo sapiens
agcttcctttggggt

SEQ ID NO: 236247 - DNA, 15 bp, Homo sapiens
aagcttcctttgggg

SEQ ID NO: 236248 - DNA, 15 bp, Homo sapiens
aaagcttcctttggg

SEQ ID NO: 236249 - DNA, 15 bp, Homo sapiens
aaaagcttcctttgg

SEQ ID NO: 236250 - DNA, 15 bp, Homo sapiens
gaaaagcttcctttg

SEQ ID NO: 236251 - DNA, 15 bp, Homo sapiens
tgaaaagcttccttt

SEQ ID NO: 236252 - DNA, 15 bp, Homo sapiens
atgaaaagcttcctt

SEQ ID NO: 236253 - DNA, 15 bp, Homo sapiens
gatgaaaagcttcct

SEQ ID NO: 236254 - DNA, 15 bp, Homo sapiens
tgatgaaaagcttcc

SEQ ID NO: 236255 - DNA, 15 bp, Homo sapiens
ctgatgaaaagcttc

SEQ ID NO: 236256 - DNA, 15 bp, Homo sapiens
tctgatgaaaagctt

SEQ ID NO: 236257 - DNA, 15 bp, Homo sapiens
ctctgatgaaaagct

SEQ ID NO: 236258 - DNA, 15 bp, Homo sapiens
cctctgatgaaaagc

SEQ ID NO: 236259 - DNA, 15 bp, Homo sapiens
acctctgatgaaaag

SEQ ID NO: 236260 - DNA, 15 bp, Homo sapiens
cacctctgatgaaaa

SEQ ID NO: 236261 - DNA, 15 bp, Homo sapiens
ccacctctgatgaaa

SEQ ID NO: 236262 - DNA, 15 bp, Homo sapiens
gccacctctgatgaa

SEQ ID NO: 236263 - DNA, 15 bp, Homo sapiens
agccacctctgatga

SEQ ID NO: 236264 - DNA, 15 bp, Homo sapiens
cagccacctctgatg

SEQ ID NO: 236265 - DNA, 15 bp, Homo sapiens
tcagccacctctgat

SEQ ID NO: 236266 - DNA, 15 bp, Homo sapiens
atcagccacctctga

SEQ ID NO: 236267 - DNA, 15 bp, Homo sapiens
catcagccacctctg

SEQ ID NO: 236268 - DNA, 15 bp, Homo sapiens
tcatcagccacctct

SEQ ID NO: 236269 - DNA, 15 bp, Homo sapiens
ctcatcagccacctc

SEQ ID NO: 236270 - DNA, 15 bp, Homo sapiens
actcatcagccacct

SEQ ID NO: 236271 - DNA, 15 bp, Homo sapiens
cactcatcagccacc

SEQ ID NO: 236272 - DNA, 15 bp, Homo sapiens
gcactcatcagccac

SEQ ID NO: 236273 - DNA, 15 bp, Homo sapiens
ggcactcatcagcca

SEQ ID NO: 236274 - DNA, 15 bp, Homo sapiens
aggcactcatcagcc

SEQ ID NO: 236275 - DNA, 15 bp, Homo sapiens
caggcactcatcagc

SEQ ID NO: 236276 - DNA, 15 bp, Homo sapiens
tcaggcactcatcag

SEQ ID NO: 236277 - DNA, 15 bp, Homo sapiens
atcaggcactcatca

SEQ ID NO: 236278 - DNA, 15 bp, Homo sapiens
catcaggcactcatc

SEQ ID NO: 236279 - DNA, 15 bp, Homo sapiens
ccatcaggcactcat

SEQ ID NO: 236280 - DNA, 15 bp, Homo sapiens
tccatcaggcactca

SEQ ID NO: 236281 - DNA, 15 bp, Homo sapiens
atccatcaggcactc

SEQ ID NO: 236282 - DNA, 15 bp, Homo sapiens
catccatcaggcact

SEQ ID NO: 236283 - DNA, 15 bp, Homo sapiens
gcatccatcaggcac

SEQ ID NO: 236284 - DNA, 15 bp, Homo sapiens
ggcatccatcaggca

SEQ ID NO: 236285 - DNA, 15 bp, Homo sapiens
aggcatccatcaggc

SEQ ID NO: 236286 - DNA, 15 bp, Homo sapiens
aaggcatccatcagg

SEQ ID NO: 236287 - DNA, 15 bp, Homo sapiens
aaaggcatccatcag

SEQ ID NO: 236288 - DNA, 15 bp, Homo sapiens
aaaaggcatccatca

SEQ ID NO: 236289 - DNA, 15 bp, Homo sapiens
gaaaaggcatccatc

SEQ ID NO: 236290 - DNA, 15 bp, Homo sapiens
ggaaaaggcatccat

SEQ ID NO: 236291 - DNA, 15 bp, Homo sapiens
aggaaaaggcatcca

SEQ ID NO: 236292 - DNA, 15 bp, Homo sapiens
gaggaaaaggcatcc

SEQ ID NO: 236293 - DNA, 15 bp, Homo sapiens
ggaggaaaaggcatc

SEQ ID NO: 236294 - DNA, 15 bp, Homo sapiens
gggaggaaaaggcat

SEQ ID NO: 236295 - DNA, 15 bp, Homo sapiens
agggaggaaaaggca

SEQ ID NO: 236296 - DNA, 15 bp, Homo sapiens
tagggaggaaaaggc

SEQ ID NO: 236297 - DNA, 15 bp, Homo sapiens
ctagggaggaaaagg

SEQ ID NO: 236298 - DNA, 15 bp, Homo sapiens
tctagggaggaaaag

SEQ ID NO: 236299 - DNA, 15 bp, Homo sapiens
atctagggaggaaaa

SEQ ID NO: 236300 - DNA, 15 bp, Homo sapiens
catctagggaggaaa

SEQ ID NO: 236301 - DNA, 15 bp, Homo sapiens
ccatctagggaggaa

SEQ ID NO: 236302 - DNA, 15 bp, Homo sapiens
accatctagggagga

SEQ ID NO: 236303 - DNA, 15 bp, Homo sapiens
gaccatctagggagg

SEQ ID NO: 236304 - DNA, 15 bp, Homo sapiens
ggaccatctagggag

SEQ ID NO: 236305 - DNA, 15 bp, Homo sapiens
gggaccatctaggga

SEQ ID NO: 236306 - DNA, 15 bp, Homo sapiens
tgggaccatctaggg

SEQ ID NO: 236307 - DNA, 15 bp, Homo sapiens
ttgggaccatctagg

SEQ ID NO: 236308 - DNA, 15 bp, Homo sapiens
cttgggaccatctag

SEQ ID NO: 236309 - DNA, 15 bp, Homo sapiens
tcttgggaccatcta

SEQ ID NO: 236310 - DNA, 15 bp, Homo sapiens
atcttgggaccatct

SEQ ID NO: 236311 - DNA, 15 bp, Homo sapiens
catcttgggaccatc

SEQ ID NO: 236312 - DNA, 15 bp, Homo sapiens
tcatcttgggaccat

SEQ ID NO: 236313 - DNA, 15 bp, Homo sapiens
gtcatcttgggacca

SEQ ID NO: 236314 - DNA, 15 bp, Homo sapiens
agtcatcttgggacc

SEQ ID NO: 236315 - DNA, 15 bp, Homo sapiens
gagtcatcttgggac

SEQ ID NO: 236316 - DNA, 15 bp, Homo sapiens
agagtcatcttggga

SEQ ID NO: 236317 - DNA, 15 bp, Homo sapiens
aagagtcatcttggg

SEQ ID NO: 236318 - DNA, 15 bp, Homo sapiens
gaagagtcatcttgg

SEQ ID NO: 236319 - DNA, 15 bp, Homo sapiens
ggaagagtcatcttg

SEQ ID NO: 236320 - DNA, 15 bp, Homo sapiens
aggaagagtcatctt

SEQ ID NO: 236321 - DNA, 15 bp, Homo sapiens
taggaagagtcatct

SEQ ID NO: 236322 - DNA, 15 bp, Homo sapiens
ctaggaagagtcatc

SEQ ID NO: 236323 - DNA, 15 bp, Homo sapiens
tctaggaagagtcat

SEQ ID NO: 236324 - DNA, 15 bp, Homo sapiens
atctaggaagagtca

SEQ ID NO: 236325 - DNA, 15 bp, Homo sapiens
catctaggaagagtc

SEQ ID NO: 236326 - DNA, 15 bp, Homo sapiens
tcatctaggaagagt

SEQ ID NO: 236327 - DNA, 15 bp, Homo sapiens
ttcatctaggaagag

SEQ ID NO: 236328 - DNA, 15 bp, Homo sapiens
cttcatctaggaaga

SEQ ID NO: 236329 - DNA, 15 bp, Homo sapiens
ccttcatctaggaag

SEQ ID NO: 236330 - DNA, 15 bp, Homo sapiens
cccttcatctaggaa

SEQ ID NO: 236331 - DNA, 15 bp, Homo sapiens
gcccttcatctagga

SEQ ID NO: 236332 - DNA, 15 bp, Homo sapiens
ggcccttcatctagg

SEQ ID NO: 236333 - DNA, 15 bp, Homo sapiens
aggcccttcatctag

SEQ ID NO: 236334 - DNA, 15 bp, Homo sapiens
gaggcccttcatcta

SEQ ID NO: 236335 - DNA, 15 bp, Homo sapiens
ggaggcccttcatct

SEQ ID NO: 236336 - DNA, 15 bp, Homo sapiens
aggaggcccttcatc

SEQ ID NO: 236337 - DNA, 15 bp, Homo sapiens
gaggaggcccttcat

SEQ ID NO: 236338 - DNA, 15 bp, Homo sapiens
ggaggaggcccttca

SEQ ID NO: 236339 - DNA, 15 bp, Homo sapiens
aggaggaggcccttc

SEQ ID NO: 236340 - DNA, 15 bp, Homo sapiens
caggaggaggccctt

SEQ ID NO: 236341 - DNA, 15 bp, Homo sapiens
tcaggaggaggccct

SEQ ID NO: 236342 - DNA, 15 bp, Homo sapiens
ctcaggaggaggccc

SEQ ID NO: 236343 - DNA, 15 bp, Homo sapiens
gctcaggaggaggcc

SEQ ID NO: 236344 - DNA, 15 bp, Homo sapiens
ggctcaggaggaggc

SEQ ID NO: 236345 - DNA, 15 bp, Homo sapiens
aggctcaggaggagg

SEQ ID NO: 236346 - DNA, 15 bp, Homo sapiens
aaggctcaggaggag

SEQ ID NO: 236347 - DNA, 15 bp, Homo sapiens
caaggctcaggagga

SEQ ID NO: 236348 - DNA, 15 bp, Homo sapiens
acaaggctcaggagg

SEQ ID NO: 236349 - DNA, 15 bp, Homo sapiens
aacaaggctcaggag

SEQ ID NO: 236350 - DNA, 15 bp, Homo sapiens
caacaaggctcagga

SEQ ID NO: 236351 - DNA, 15 bp, Homo sapiens
acaacaaggctcagg

SEQ ID NO: 236352 - DNA, 15 bp, Homo sapiens
tacaacaaggctcag

SEQ ID NO: 236353 - DNA, 15 bp, Homo sapiens
ctacaacaaggctca

SEQ ID NO: 236354 - DNA, 15 bp, Homo sapiens
gctacaacaaggctc

SEQ ID NO: 236355 - DNA, 15 bp, Homo sapiens
agctacaacaaggct

SEQ ID NO: 236356 - DNA, 15 bp, Homo sapiens
gagctacaacaaggc

SEQ ID NO: 236357 - DNA, 15 bp, Homo sapiens
tgagctacaacaagg

SEQ ID NO: 236358 - DNA, 15 bp, Homo sapiens
ctgagctacaacaag

SEQ ID NO: 236359 - DNA, 15 bp, Homo sapiens
actgagctacaacaa

SEQ ID NO: 236360 - DNA, 15 bp, Homo sapiens
cactgagctacaaca

SEQ ID NO: 236361 - DNA, 15 bp, Homo sapiens
ccactgagctacaac

SEQ ID NO: 236362 - DNA, 15 bp, Homo sapiens
tccactgagctacaa

SEQ ID NO: 236363 - DNA, 15 bp, Homo sapiens
ttccactgagctaca

SEQ ID NO: 236364 - DNA, 15 bp, Homo sapiens
tttccactgagctac

SEQ ID NO: 236365 - DNA, 15 bp, Homo sapiens
ttttccactgagcta

SEQ ID NO: 236366 - DNA, 15 bp, Homo sapiens
attttccactgagct

SEQ ID NO: 236367 - DNA, 15 bp, Homo sapiens
tattttccactgagc

SEQ ID NO: 236368 - DNA, 15 bp, Homo sapiens
ttattttccactgag

SEQ ID NO: 236369 - DNA, 15 bp, Homo sapiens
tttattttccactga

SEQ ID NO: 236370 - DNA, 15 bp, Homo sapiens
atttattttccactg

SEQ ID NO: 236371 - DNA, 15 bp, Homo sapiens
tatttattttccact

SEQ ID NO: 236372 - DNA, 15 bp, Homo sapiens
ttatttattttccac

SEQ ID NO: 236373 - DNA, 15 bp, Homo sapiens
tttatttattttcca

SEQ ID NO: 236374 - DNA, 15 bp, Homo sapiens
ctttatttattttcc

SEQ ID NO: 236375 - DNA, 15 bp, Homo sapiens
tctttatttattttc

SEQ ID NO: 236376 - DNA, 15 bp, Homo sapiens
ctctttatttatttt

SEQ ID NO: 236377 - DNA, 15 bp, Homo sapiens
cctctttatttattt

SEQ ID NO: 236378 - DNA, 15 bp, Homo sapiens
ccctctttatttatt

SEQ ID NO: 236379 - DNA, 15 bp, Homo sapiens
tccctctttatttat

SEQ ID NO: 236380 - DNA, 15 bp, Homo sapiens
ttccctctttattta

SEQ ID NO: 236381 - DNA, 15 bp, Homo sapiens
gttccctctttattt

SEQ ID NO: 236382 - DNA, 15 bp, Homo sapiens
tgttccctctttatt

SEQ ID NO: 236383 - DNA, 15 bp, Homo sapiens
ttgttccctctttat

SEQ ID NO: 236384 - DNA, 15 bp, Homo sapiens
tttgttccctcttta

SEQ ID NO: 236385 - DNA, 15 bp, Homo sapiens
ttttgttccctcttt

SEQ ID NO: 236386 - DNA, 15 bp, Homo sapiens
tttttgttccctctt

SEQ ID NO: 236387 - DNA, 15 bp, Homo sapiens
ctttttgttccctct

SEQ ID NO: 236388 - DNA, 15 bp, Homo sapiens
actttttgttccctc

SEQ ID NO: 236389 - DNA, 15 bp, Homo sapiens
gactttttgttccct

SEQ ID NO: 236390 - DNA, 15 bp, Homo sapiens
ggactttttgttccc

SEQ ID NO: 236391 - DNA, 15 bp, Homo sapiens
tggactttttgttcc

SEQ ID NO: 236392 - DNA, 15 bp, Homo sapiens
gtggactttttgttc

SEQ ID NO: 236393 - DNA, 15 bp, Homo sapiens
cgtggactttttgtt

SEQ ID NO: 236394 - DNA, 15 bp, Homo sapiens
tcgtggactttttgt

SEQ ID NO: 236395 - DNA, 15 bp, Homo sapiens
ttcgtggactttttg

SEQ ID NO: 236396 - DNA, 15 bp, Homo sapiens
cttcgtggacttttt

SEQ ID NO: 236397 - DNA, 15 bp, Homo sapiens
tcttcgtggactttt

SEQ ID NO: 236398 - DNA, 15 bp, Homo sapiens
ttcttcgtggacttt

SEQ ID NO: 236399 - DNA, 15 bp, Homo sapiens
cttcttcgtggactt

SEQ ID NO: 236400 - DNA, 15 bp, Homo sapiens
tcttcttcgtggact

SEQ ID NO: 236401 - DNA, 15 bp, Homo sapiens
ttcttcttcgtggac

SEQ ID NO: 236402 - DNA, 15 bp, Homo sapiens
tttcttcttcgtgga

SEQ ID NO: 236403 - DNA, 15 bp, Homo sapiens
gtttcttcttcgtgg

SEQ ID NO: 236404 - DNA, 15 bp, Homo sapiens
tgtttcttcttcgtg

SEQ ID NO: 236405 - DNA, 15 bp, Homo sapiens
ctgtttcttcttcgt

SEQ ID NO: 236406 - DNA, 15 bp, Homo sapiens
actgtttcttcttcg

SEQ ID NO: 236407 - DNA, 15 bp, Homo sapiens
aactgtttcttcttc

SEQ ID NO: 236408 - DNA, 15 bp, Homo sapiens
aaactgtttcttctt

SEQ ID NO: 236409 - DNA, 15 bp, Homo sapiens
caaactgtttcttct

SEQ ID NO: 236410 - DNA, 15 bp, Homo sapiens
acaaactgtttcttc

SEQ ID NO: 236411 - DNA, 15 bp, Homo sapiens
aacaaactgtttctt

SEQ ID NO: 236412 - DNA, 15 bp, Homo sapiens
caacaaactgtttct

SEQ ID NO: 236413 - DNA, 15 bp, Homo sapiens
ccaacaaactgtttc

SEQ ID NO: 236414 - DNA, 15 bp, Homo sapiens
cccaacaaactgttt

SEQ ID NO: 236415 - DNA, 15 bp, Homo sapiens
acccaacaaactgtt

SEQ ID NO: 236416 - DNA, 15 bp, Homo sapiens
cacccaacaaactgt

SEQ ID NO: 236417 - DNA, 15 bp, Homo sapiens
ccacccaacaaactg

SEQ ID NO: 236418 - DNA, 15 bp, Homo sapiens
gccacccaacaaact

SEQ ID NO: 236419 - DNA, 15 bp, Homo sapiens
cgccacccaacaaac

SEQ ID NO: 236420 - DNA, 15 bp, Homo sapiens
gcgccacccaacaaa

SEQ ID NO: 236421 - DNA, 15 bp, Homo sapiens
ggcgccacccaacaa

SEQ ID NO: 236422 - DNA, 15 bp, Homo sapiens
aggcgccacccaaca

SEQ ID NO: 236423 - DNA, 15 bp, Homo sapiens
gaggcgccacccaac

SEQ ID NO: 236424 - DNA, 15 bp, Homo sapiens
agaggcgccacccaa

SEQ ID NO: 236425 - DNA, 15 bp, Homo sapiens
gagaggcgccaccca

SEQ ID NO: 236426 - DNA, 15 bp, Homo sapiens
tgagaggcgccaccc

SEQ ID NO: 236427 - DNA, 15 bp, Homo sapiens
ctgagaggcgccacc

SEQ ID NO: 236428 - DNA, 15 bp, Homo sapiens
cctgagaggcgccac

SEQ ID NO: 236429 - DNA, 15 bp, Homo sapiens
ccctgagaggcgcca

SEQ ID NO: 236430 - DNA, 15 bp, Homo sapiens
gccctgagaggcgcc

SEQ ID NO: 236431 - DNA, 15 bp, Homo sapiens
ggccctgagaggcgc

SEQ ID NO: 236432 - DNA, 15 bp, Homo sapiens
tggccctgagaggcg

SEQ ID NO: 236433 - DNA, 15 bp, Homo sapiens
ctggccctgagaggc

SEQ ID NO: 236434 - DNA, 15 bp, Homo sapiens
actggccctgagagg

SEQ ID NO: 236435 - DNA, 15 bp, Homo sapiens
tactggccctgagag

SEQ ID NO: 236436 - DNA, 15 bp, Homo sapiens
atactggccctgaga

SEQ ID NO: 236437 - DNA, 15 bp, Homo sapiens
catactggccctgag

SEQ ID NO: 236438 - DNA, 15 bp, Homo sapiens
tcatactggccctga

SEQ ID NO: 236439 - DNA, 15 bp, Homo sapiens
atcatactggccctg

SEQ ID NO: 236440 - DNA, 15 bp, Homo sapiens
aatcatactggccct

SEQ ID NO: 236441 - DNA, 15 bp, Homo sapiens
aaatcatactggccc

SEQ ID NO: 236442 - DNA, 15 bp, Homo sapiens
taaatcatactggcc

SEQ ID NO: 236443 - DNA, 15 bp, Homo sapiens
ttaaatcatactggc

SEQ ID NO: 236444 - DNA, 15 bp, Homo sapiens
attaaatcatactgg

SEQ ID NO: 236445 - DNA, 15 bp, Homo sapiens
aattaaatcatactg

SEQ ID NO: 236446 - DNA, 15 bp, Homo sapiens
caattaaatcatact

SEQ ID NO: 236447 - DNA, 15 bp, Homo sapiens
tcaattaaatcatac

SEQ ID NO: 236448 - DNA, 15 bp, Homo sapiens
gtcaattaaatcata

SEQ ID NO: 236449 - DNA, 15 bp, Homo sapiens
cgtcaattaaatcat

SEQ ID NO: 236450 - DNA, 15 bp, Homo sapiens
acgtcaattaaatca

SEQ ID NO: 236451 - DNA, 15 bp, Homo sapiens
gacgtcaattaaatc

SEQ ID NO: 236452 - DNA, 15 bp, Homo sapiens
tgacgtcaattaaat

SEQ ID NO: 236453 - DNA, 15 bp, Homo sapiens
ttgacgtcaattaaa

SEQ ID NO: 236454 - DNA, 15 bp, Homo sapiens
cttgacgtcaattaa

SEQ ID NO: 236455 - DNA, 15 bp, Homo sapiens
gcttgacgtcaatta

SEQ ID NO: 236456 - DNA, 15 bp, Homo sapiens
ggcttgacgtcaatt

SEQ ID NO: 236457 - DNA, 15 bp, Homo sapiens
aggcttgacgtcaat

SEQ ID NO: 236458 - DNA, 15 bp, Homo sapiens
caggcttgacgtcaa

SEQ ID NO: 236459 - DNA, 15 bp, Homo sapiens
acaggcttgacgtca

SEQ ID NO: 236460 - DNA, 15 bp, Homo sapiens
aacaggcttgacgtc

SEQ ID NO: 236461 - DNA, 15 bp, Homo sapiens
taacaggcttgacgt

SEQ ID NO: 236462 - DNA, 15 bp, Homo sapiens
ataacaggcttgacg

SEQ ID NO: 236463 - DNA, 15 bp, Homo sapiens
cataacaggcttgac

SEQ ID NO: 236464 - DNA, 15 bp, Homo sapiens
tcataacaggcttga

SEQ ID NO: 236465 - DNA, 15 bp, Homo sapiens
ctcataacaggcttg

SEQ ID NO: 236466 - DNA, 15 bp, Homo sapiens
actcataacaggctt

SEQ ID NO: 236467 - DNA, 15 bp, Homo sapiens
tactcataacaggct

SEQ ID NO: 236468 - DNA, 15 bp, Homo sapiens
gtactcataacaggc

SEQ ID NO: 236469 - DNA, 15 bp, Homo sapiens
agtactcataacagg

SEQ ID NO: 236470 - DNA, 15 bp, Homo sapiens
gagtactcataacag

SEQ ID NO: 236471 - DNA, 15 bp, Homo sapiens
tgagtactcataaca

SEQ ID NO: 236472 - DNA, 15 bp, Homo sapiens
atgagtactcataac

SEQ ID NO: 236473 - DNA, 15 bp, Homo sapiens
catgagtactcataa

SEQ ID NO: 236474 - DNA, 15 bp, Homo sapiens
acatgagtactcata

SEQ ID NO: 236475 - DNA, 15 bp, Homo sapiens
cacatgagtactcat

SEQ ID NO: 236476 - DNA, 15 bp, Homo sapiens
ccacatgagtactca

SEQ ID NO: 236477 - DNA, 15 bp, Homo sapiens
gccacatgagtactc

SEQ ID NO: 236478 - DNA, 15 bp, Homo sapiens
agccacatgagtact

SEQ ID NO: 236479 - DNA, 15 bp, Homo sapiens
tagccacatgagtac

SEQ ID NO: 236480 - DNA, 15 bp, Homo sapiens
ctagccacatgagta

SEQ ID NO: 236481 - DNA, 15 bp, Homo sapiens
cctagccacatgagt

SEQ ID NO: 236482 - DNA, 15 bp, Homo sapiens
tcctagccacatgag

SEQ ID NO: 236483 - DNA, 15 bp, Homo sapiens
atcctagccacatga

SEQ ID NO: 236484 - DNA, 15 bp, Homo sapiens
tatcctagccacatg

SEQ ID NO: 236485 - DNA, 15 bp, Homo sapiens
ttatcctagccacat

SEQ ID NO: 236486 - DNA, 15 bp, Homo sapiens
cttatcctagccaca

SEQ ID NO: 236487 - DNA, 15 bp, Homo sapiens
acttatcctagccac

SEQ ID NO: 236488 - DNA, 15 bp, Homo sapiens
cacttatcctagcca

SEQ ID NO: 236489 - DNA, 15 bp, Homo sapiens
ccacttatcctagcc

SEQ ID NO: 236490 - DNA, 15 bp, Homo sapiens
gccacttatcctagc

SEQ ID NO: 236491 - DNA, 15 bp, Homo sapiens
tgccacttatcctag

SEQ ID NO: 236492 - DNA, 15 bp, Homo sapiens
atgccacttatccta

SEQ ID NO: 236493 - DNA, 15 bp, Homo sapiens
aatgccacttatcct

SEQ ID NO: 236494 - DNA, 15 bp, Homo sapiens
caatgccacttatcc

SEQ ID NO: 236495 - DNA, 15 bp, Homo sapiens
ccaatgccacttatc

SEQ ID NO: 236496 - DNA, 15 bp, Homo sapiens
tccaatgccacttat

SEQ ID NO: 236497 - DNA, 15 bp, Homo sapiens
ttccaatgccactta

SEQ ID NO: 236498 - DNA, 15 bp, Homo sapiens
cttccaatgccactt

SEQ ID NO: 236499 - DNA, 15 bp, Homo sapiens
gcttccaatgccact

SEQ ID NO: 236500 - DNA, 15 bp, Homo sapiens
ggcttccaatgccac

SEQ ID NO: 236501 - DNA, 15 bp, Homo sapiens
cggcttccaatgcca

SEQ ID NO: 236502 - DNA, 15 bp, Homo sapiens
ccggcttccaatgcc

SEQ ID NO: 236503 - DNA, 15 bp, Homo sapiens
cccggcttccaatgc

SEQ ID NO: 236504 - DNA, 15 bp, Homo sapiens
acccggcttccaatg

SEQ ID NO: 236505 - DNA, 15 bp, Homo sapiens
aacccggcttccaat

SEQ ID NO: 236506 - DNA, 15 bp, Homo sapiens
caacccggcttccaa

SEQ ID NO: 236507 - DNA, 15 bp, Homo sapiens
gcaacccggcttcca

SEQ ID NO: 236508 - DNA, 15 bp, Homo sapiens
ggcaacccggcttcc

SEQ ID NO: 236509 - DNA, 15 bp, Homo sapiens
gggcaacccggcttc

SEQ ID NO: 236510 - DNA, 15 bp, Homo sapiens
tgggcaacccggctt

SEQ ID NO: 236511 - DNA, 15 bp, Homo sapiens
ctgggcaacccggct

SEQ ID NO: 236512 - DNA, 15 bp, Homo sapiens
gctgggcaacccggc

SEQ ID NO: 236513 - DNA, 15 bp, Homo sapiens
tgctgggcaacccgg

SEQ ID NO: 236514 - DNA, 15 bp, Homo sapiens
atgctgggcaacccg

SEQ ID NO: 236515 - DNA, 15 bp, Homo sapiens
gatgctgggcaaccc

SEQ ID NO: 236516 - DNA, 15 bp, Homo sapiens
ggatgctgggcaacc

SEQ ID NO: 236517 - DNA, 15 bp, Homo sapiens
aggatgctgggcaac

SEQ ID NO: 236518 - DNA, 15 bp, Homo sapiens
aaggatgctgggcaa

SEQ ID NO: 236519 - DNA, 15 bp, Homo sapiens
caaggatgctgggca

SEQ ID NO: 236520 - DNA, 15 bp, Homo sapiens
gcaaggatgctgggc

SEQ ID NO: 236521 - DNA, 15 bp, Homo sapiens
agcaaggatgctggg

SEQ ID NO: 236522 - DNA, 15 bp, Homo sapiens
gagcaaggatgctgg

SEQ ID NO: 236523 - DNA, 15 bp, Homo sapiens
agagcaaggatgctg

SEQ ID NO: 236524 - DNA, 15 bp, Homo sapiens
gagagcaaggatgct

SEQ ID NO: 236525 - DNA, 15 bp, Homo sapiens
tgagagcaaggatgc

SEQ ID NO: 236526 - DNA, 15 bp, Homo sapiens
ctgagagcaaggatg

SEQ ID NO: 236527 - DNA, 15 bp, Homo sapiens
tctgagagcaaggat

SEQ ID NO: 236528 - DNA, 15 bp, Homo sapiens
ctctgagagcaagga

SEQ ID NO: 236529 - DNA, 15 bp, Homo sapiens
gctctgagagcaagg

SEQ ID NO: 236530 - DNA, 15 bp, Homo sapiens
ggctctgagagcaag

SEQ ID NO: 236531 - DNA, 15 bp, Homo sapiens
gggctctgagagcaa

SEQ ID NO: 236532 - DNA, 15 bp, Homo sapiens
ggggctctgagagca

SEQ ID NO: 236533 - DNA, 15 bp, Homo sapiens
tggggctctgagagc

SEQ ID NO: 236534 - DNA, 15 bp, Homo sapiens
gtggggctctgagag

SEQ ID NO: 236535 - DNA, 15 bp, Homo sapiens
agtggggctctgaga

SEQ ID NO: 236536 - DNA, 15 bp, Homo sapiens
aagtggggctctgag

SEQ ID NO: 236537 - DNA, 15 bp, Homo sapiens
caagtggggctctga

SEQ ID NO: 236538 - DNA, 15 bp, Homo sapiens
tcaagtggggctctg

SEQ ID NO: 236539 - DNA, 15 bp, Homo sapiens
atcaagtggggctct

SEQ ID NO: 236540 - DNA, 15 bp, Homo sapiens
catcaagtggggctc

SEQ ID NO: 236541 - DNA, 15 bp, Homo sapiens
tcatcaagtggggct

SEQ ID NO: 236542 - DNA, 15 bp, Homo sapiens
gtcatcaagtggggc

SEQ ID NO: 236543 - DNA, 15 bp, Homo sapiens
ggtcatcaagtgggg

SEQ ID NO: 236544 - DNA, 15 bp, Homo sapiens
aggtcatcaagtggg

SEQ ID NO: 236545 - DNA, 15 bp, Homo sapiens
aaggtcatcaagtgg

SEQ ID NO: 236546 - DNA, 15 bp, Homo sapiens
gaaggtcatcaagtg

SEQ ID NO: 236547 - DNA, 15 bp, Homo sapiens
agaaggtcatcaagt

SEQ ID NO: 236548 - DNA, 15 bp, Homo sapiens
aagaaggtcatcaag

SEQ ID NO: 236549 - DNA, 15 bp, Homo sapiens
taagaaggtcatcaa

SEQ ID NO: 236550 - DNA, 15 bp, Homo sapiens
ctaagaaggtcatca

SEQ ID NO: 236551 - DNA, 15 bp, Homo sapiens
cctaagaaggtcatc

SEQ ID NO: 236552 - DNA, 15 bp, Homo sapiens
ccctaagaaggtcat

SEQ ID NO: 236553 - DNA, 15 bp, Homo sapiens
cccctaagaaggtca

SEQ ID NO: 236554 - DNA, 15 bp, Homo sapiens
acccctaagaaggtc

SEQ ID NO: 236555 - DNA, 15 bp, Homo sapiens
aacccctaagaaggt

SEQ ID NO: 236556 - DNA, 15 bp, Homo sapiens
taacccctaagaagg

SEQ ID NO: 236557 - DNA, 15 bp, Homo sapiens
ctaacccctaagaag

SEQ ID NO: 236558 - DNA, 15 bp, Homo sapiens
actaacccctaagaa

SEQ ID NO: 236559 - DNA, 15 bp, Homo sapiens
cactaacccctaaga

SEQ ID NO: 236560 - DNA, 15 bp, Homo sapiens
gcactaacccctaag

SEQ ID NO: 236561 - DNA, 15 bp, Homo sapiens
ggcactaacccctaa

SEQ ID NO: 236562 - DNA, 15 bp, Homo sapiens
aggcactaaccccta

SEQ ID NO: 236563 - DNA, 15 bp, Homo sapiens
taggcactaacccct

SEQ ID NO: 236564 - DNA, 15 bp, Homo sapiens
ataggcactaacccc

SEQ ID NO: 236565 - DNA, 15 bp, Homo sapiens
gataggcactaaccc

SEQ ID NO: 236566 - DNA, 15 bp, Homo sapiens
tgataggcactaacc

SEQ ID NO: 236567 - DNA, 15 bp, Homo sapiens
ctgataggcactaac

SEQ ID NO: 236568 - DNA, 15 bp, Homo sapiens
cctgataggcactaa

SEQ ID NO: 236569 - DNA, 15 bp, Homo sapiens
tcctgataggcacta

SEQ ID NO: 236570 - DNA, 15 bp, Homo sapiens
ctcctgataggcact

SEQ ID NO: 236571 - DNA, 15 bp, Homo sapiens
cctcctgataggcac

SEQ ID NO: 236572 - DNA, 15 bp, Homo sapiens
gcctcctgataggca

SEQ ID NO: 236573 - DNA, 15 bp, Homo sapiens
agcctcctgataggc

SEQ ID NO: 236574 - DNA, 15 bp, Homo sapiens
cagcctcctgatagg

SEQ ID NO: 236575 - DNA, 15 bp, Homo sapiens
acagcctcctgatag

SEQ ID NO: 236576 - DNA, 15 bp, Homo sapiens
aacagcctcctgata

SEQ ID NO: 236577 - DNA, 15 bp, Homo sapiens
aaacagcctcctgat

SEQ ID NO: 236578 - DNA, 15 bp, Homo sapiens
aaaacagcctcctga

SEQ ID NO: 236579 - DNA, 15 bp, Homo sapiens
caaaacagcctcctg

SEQ ID NO: 236580 - DNA, 15 bp, Homo sapiens
tcaaaacagcctcct

SEQ ID NO: 236581 - DNA, 15 bp, Homo sapiens
ctcaaaacagcctcc

SEQ ID NO: 236582 - DNA, 15 bp, Homo sapiens
tctcaaaacagcctc

SEQ ID NO: 236583 - DNA, 15 bp, Homo sapiens
ctctcaaaacagcct

SEQ ID NO: 236584 - DNA, 15 bp, Homo sapiens
actctcaaaacagcc

SEQ ID NO: 236585 - DNA, 15 bp, Homo sapiens
tactctcaaaacagc

SEQ ID NO: 236586 - DNA, 15 bp, Homo sapiens
atactctcaaaacag

SEQ ID NO: 236587 - DNA, 15 bp, Homo sapiens
gatactctcaaaaca

SEQ ID NO: 236588 - DNA, 15 bp, Homo sapiens
agatactctcaaaac

SEQ ID NO: 236589 - DNA, 15 bp, Homo sapiens
cagatactctcaaaa

SEQ ID NO: 236590 - DNA, 15 bp, Homo sapiens
acagatactctcaaa

SEQ ID NO: 236591 - DNA, 15 bp, Homo sapiens
cacagatactctcaa

SEQ ID NO: 236592 - DNA, 15 bp, Homo sapiens
ccacagatactctca

SEQ ID NO: 236593 - DNA, 15 bp, Homo sapiens
cccacagatactctc

SEQ ID NO: 236594 - DNA, 15 bp, Homo sapiens
ccccacagatactct

SEQ ID NO: 236595 - DNA, 15 bp, Homo sapiens
tccccacagatactc

SEQ ID NO: 236596 - DNA, 15 bp, Homo sapiens
ttccccacagatact

SEQ ID NO: 236597 - DNA, 15 bp, Homo sapiens
cttccccacagatac

SEQ ID NO: 236598 - DNA, 15 bp, Homo sapiens
tcttccccacagata

SEQ ID NO: 236599 - DNA, 15 bp, Homo sapiens
ttcttccccacagat

SEQ ID NO: 236600 - DNA, 15 bp, Homo sapiens
cttcttccccacaga

SEQ ID NO: 236601 - DNA, 15 bp, Homo sapiens
ccttcttccccacag

SEQ ID NO: 236602 - DNA, 15 bp, Homo sapiens
cccttcttccccaca

SEQ ID NO: 236603 - DNA, 15 bp, Homo sapiens
gcccttcttccccac

SEQ ID NO: 236604 - DNA, 15 bp, Homo sapiens
agcccttcttcccca

SEQ ID NO: 236605 - DNA, 15 bp, Homo sapiens
gagcccttcttcccc

SEQ ID NO: 236606 - DNA, 15 bp, Homo sapiens
tgagcccttcttccc

SEQ ID NO: 236607 - DNA, 15 bp, Homo sapiens
ctgagcccttcttcc

SEQ ID NO: 236608 - DNA, 15 bp, Homo sapiens
tctgagcccttcttc

SEQ ID NO: 236609 - DNA, 15 bp, Homo sapiens
atctgagcccttctt

SEQ ID NO: 236610 - DNA, 15 bp, Homo sapiens
aatctgagcccttct

SEQ ID NO: 236611 - DNA, 15 bp, Homo sapiens
aaatctgagcccttc

SEQ ID NO: 236612 - DNA, 15 bp, Homo sapiens
taaatctgagccctt

SEQ ID NO: 236613 - DNA, 15 bp, Homo sapiens
ttaaatctgagccct

SEQ ID NO: 236614 - DNA, 15 bp, Homo sapiens
tttaaatctgagccc

SEQ ID NO: 236615 - DNA, 15 bp, Homo sapiens
ttttaaatctgagcc

SEQ ID NO: 236616 - DNA, 15 bp, Homo sapiens
gttttaaatctgagc

SEQ ID NO: 236617 - DNA, 15 bp, Homo sapiens
agttttaaatctgag

SEQ ID NO: 236618 - DNA, 15 bp, Homo sapiens
cagttttaaatctga

SEQ ID NO: 236619 - DNA, 15 bp, Homo sapiens
tcagttttaaatctg

SEQ ID NO: 236620 - DNA, 15 bp, Homo sapiens
atcagttttaaatct

SEQ ID NO: 236621 - DNA, 15 bp, Homo sapiens
aatcagttttaaatc

SEQ ID NO: 236622 - DNA, 15 bp, Homo sapiens
gaatcagttttaaat

SEQ ID NO: 236623 - DNA, 15 bp, Homo sapiens
agaatcagttttaaa

SEQ ID NO: 236624 - DNA, 15 bp, Homo sapiens
tagaatcagttttaa

SEQ ID NO: 236625 - DNA, 15 bp, Homo sapiens
ttagaatcagtttta

SEQ ID NO: 236626 - DNA, 15 bp, Homo sapiens
cttagaatcagtttt

SEQ ID NO: 236627 - DNA, 15 bp, Homo sapiens
acttagaatcagttt

SEQ ID NO: 236628 - DNA, 15 bp, Homo sapiens
gacttagaatcagtt

SEQ ID NO: 236629 - DNA, 15 bp, Homo sapiens
tgacttagaatcagt

SEQ ID NO: 236630 - DNA, 15 bp, Homo sapiens
ttgacttagaatcag

SEQ ID NO: 236631 - DNA, 15 bp, Homo sapiens
gttgacttagaatca

SEQ ID NO: 236632 - DNA, 15 bp, Homo sapiens
tgttgacttagaatc

SEQ ID NO: 236633 - DNA, 15 bp, Homo sapiens
ttgttgacttagaat

SEQ ID NO: 236634 - DNA, 15 bp, Homo sapiens
attgttgacttagaa

SEQ ID NO: 236635 - DNA, 15 bp, Homo sapiens
aattgttgacttaga

SEQ ID NO: 236636 - DNA, 15 bp, Homo sapiens
gaattgttgacttag

SEQ ID NO: 236637 - DNA, 15 bp, Homo sapiens
tgaattgttgactta

SEQ ID NO: 236638 - DNA, 15 bp, Homo sapiens
ttgaattgttgactt

SEQ ID NO: 236639 - DNA, 15 bp, Homo sapiens
tttgaattgttgact

SEQ ID NO: 236640 - DNA, 15 bp, Homo sapiens
ttttgaattgttgac

SEQ ID NO: 236641 - DNA, 15 bp, Homo sapiens
tttttgaattgttga

SEQ ID NO: 236642 - DNA, 15 bp, Homo sapiens
atttttgaattgttg

SEQ ID NO: 236643 - DNA, 15 bp, Homo sapiens
tatttttgaattgtt

SEQ ID NO: 236644 - DNA, 15 bp, Homo sapiens
atatttttgaattgt

SEQ ID NO: 236645 - DNA, 15 bp, Homo sapiens
tatatttttgaattg

SEQ ID NO: 236646 - DNA, 15 bp, Homo sapiens
ttatatttttgaatt

SEQ ID NO: 236647 - DNA, 15 bp, Homo sapiens
tttatatttttgaat

SEQ ID NO: 236648 - DNA, 15 bp, Homo sapiens
gtttatatttttgaa

SEQ ID NO: 236649 - DNA, 15 bp, Homo sapiens
tgtttatatttttga

SEQ ID NO: 236650 - DNA, 15 bp, Homo sapiens
ttgtttatatttttg

SEQ ID NO: 236651 - DNA, 15 bp, Homo sapiens
cttgtttatattttt

SEQ ID NO: 236652 - DNA, 15 bp, Homo sapiens
ccttgtttatatttt

SEQ ID NO: 236653 - DNA, 15 bp, Homo sapiens
cccttgtttatattt

SEQ ID NO: 236654 - DNA, 15 bp, Homo sapiens
tcccttgtttatatt

SEQ ID NO: 236655 - DNA, 15 bp, Homo sapiens
ttcccttgtttatat

SEQ ID NO: 236656 - DNA, 15 bp, Homo sapiens
attcccttgtttata

SEQ ID NO: 236657 - DNA, 15 bp, Homo sapiens
aattcccttgtttat

SEQ ID NO: 236658 - DNA, 15 bp, Homo sapiens
aaattcccttgttta

SEQ ID NO: 236659 - DNA, 15 bp, Homo sapiens
caaattcccttgttt

SEQ ID NO: 236660 - DNA, 15 bp, Homo sapiens
acaaattcccttgtt

SEQ ID NO: 236661 - DNA, 15 bp, Homo sapiens
cacaaattcccttgt

SEQ ID NO: 236662 - DNA, 15 bp, Homo sapiens
ccacaaattcccttg

SEQ ID NO: 236663 - DNA, 15 bp, Homo sapiens
accacaaattccctt

SEQ ID NO: 236664 - DNA, 15 bp, Homo sapiens
aaccacaaattccct

SEQ ID NO: 236665 - DNA, 15 bp, Homo sapiens
caaccacaaattccc

SEQ ID NO: 236666 - DNA, 15 bp, Homo sapiens
gcaaccacaaattcc

SEQ ID NO: 236667 - DNA, 15 bp, Homo sapiens
agcaaccacaaattc

SEQ ID NO: 236668 - DNA, 15 bp, Homo sapiens
gagcaaccacaaatt

SEQ ID NO: 236669 - DNA, 15 bp, Homo sapiens
agagcaaccacaaat

SEQ ID NO: 236670 - DNA, 15 bp, Homo sapiens
gagagcaaccacaaa

SEQ ID NO: 236671 - DNA, 15 bp, Homo sapiens
tgagagcaaccacaa

SEQ ID NO: 236672 - DNA, 15 bp, Homo sapiens
gtgagagcaaccaca

SEQ ID NO: 236673 - DNA, 15 bp, Homo sapiens
tgtgagagcaaccac

SEQ ID NO: 236674 - DNA, 15 bp, Homo sapiens
ttgtgagagcaacca

SEQ ID NO: 236675 - DNA, 15 bp, Homo sapiens
attgtgagagcaacc

SEQ ID NO: 236676 - DNA, 15 bp, Homo sapiens
aattgtgagagcaac

SEQ ID NO: 236677 - DNA, 15 bp, Homo sapiens
taattgtgagagcaa

SEQ ID NO: 236678 - DNA, 15 bp, Homo sapiens
ttaattgtgagagca

SEQ ID NO: 236679 - DNA, 15 bp, Homo sapiens
attaattgtgagagc

SEQ ID NO: 236680 - DNA, 15 bp, Homo sapiens
aattaattgtgagag

SEQ ID NO: 236681 - DNA, 15 bp, Homo sapiens
aaattaattgtgaga

SEQ ID NO: 236682 - DNA, 15 bp, Homo sapiens
caaattaattgtgag

SEQ ID NO: 236683 - DNA, 15 bp, Homo sapiens
ccaaattaattgtga

SEQ ID NO: 236684 - DNA, 15 bp, Homo sapiens
tccaaattaattgtg

SEQ ID NO: 236685 - DNA, 15 bp, Homo sapiens
gtccaaattaattgt

SEQ ID NO: 236686 - DNA, 15 bp, Homo sapiens
ggtccaaattaattg

SEQ ID NO: 236687 - DNA, 15 bp, Homo sapiens
tggtccaaattaatt

SEQ ID NO: 236688 - DNA, 15 bp, Homo sapiens
ctggtccaaattaat

SEQ ID NO: 236689 - DNA, 15 bp, Homo sapiens
gctggtccaaattaa

SEQ ID NO: 236690 - DNA, 15 bp, Homo sapiens
tgctggtccaaatta

SEQ ID NO: 236691 - DNA, 15 bp, Homo sapiens
ctgctggtccaaatt

SEQ ID NO: 236692 - DNA, 15 bp, Homo sapiens
gctgctggtccaaat

SEQ ID NO: 236693 - DNA, 15 bp, Homo sapiens
ggctgctggtccaaa

SEQ ID NO: 236694 - DNA, 15 bp, Homo sapiens
gggctgctggtccaa

SEQ ID NO: 236695 - DNA, 15 bp, Homo sapiens
tgggctgctggtcca

SEQ ID NO: 236696 - DNA, 15 bp, Homo sapiens
gtgggctgctggtcc

SEQ ID NO: 236697 - DNA, 15 bp, Homo sapiens
agtgggctgctggtc

SEQ ID NO: 236698 - DNA, 15 bp, Homo sapiens
cagtgggctgctggt

SEQ ID NO: 236699 - DNA, 15 bp, Homo sapiens
ccagtgggctgctgg

SEQ ID NO: 236700 - DNA, 15 bp, Homo sapiens
tccagtgggctgctg

SEQ ID NO: 236701 - DNA, 15 bp, Homo sapiens
ctccagtgggctgct

SEQ ID NO: 236702 - DNA, 15 bp, Homo sapiens
tctccagtgggctgc

SEQ ID NO: 236703 - DNA, 15 bp, Homo sapiens
gtctccagtgggctg

SEQ ID NO: 236704 - DNA, 15 bp, Homo sapiens
tgtctccagtgggct

SEQ ID NO: 236705 - DNA, 15 bp, Homo sapiens
atgtctccagtgggc

SEQ ID NO: 236706 - DNA, 15 bp, Homo sapiens
aatgtctccagtggg

SEQ ID NO: 236707 - DNA, 15 bp, Homo sapiens
caatgtctccagtgg

SEQ ID NO: 236708 - DNA, 15 bp, Homo sapiens
gcaatgtctccagtg

SEQ ID NO: 236709 - DNA, 15 bp, Homo sapiens
agcaatgtctccagt

SEQ ID NO: 236710 - DNA, 15 bp, Homo sapiens
cagcaatgtctccag

SEQ ID NO: 236711 - DNA, 15 bp, Homo sapiens
ccagcaatgtctcca

SEQ ID NO: 236712 - DNA, 15 bp, Homo sapiens
cccagcaatgtctcc

SEQ ID NO: 236713 - DNA, 15 bp, Homo sapiens
tcccagcaatgtctc

SEQ ID NO: 236714 - DNA, 15 bp, Homo sapiens
ttcccagcaatgtct

SEQ ID NO: 236715 - DNA, 15 bp, Homo sapiens
gttcccagcaatgtc

SEQ ID NO: 236716 - DNA, 15 bp, Homo sapiens
ggttcccagcaatgt

SEQ ID NO: 236717 - DNA, 15 bp, Homo sapiens
gggttcccagcaatg

SEQ ID NO: 236718 - DNA, 15 bp, Homo sapiens
ggggttcccagcaat

SEQ ID NO: 236719 - DNA, 15 bp, Homo sapiens
tggggttcccagcaa

SEQ ID NO: 236720 - DNA, 15 bp, Homo sapiens
ttggggttcccagca

SEQ ID NO: 236721 - DNA, 15 bp, Homo sapiens
cttggggttcccagc

SEQ ID NO: 236722 - DNA, 15 bp, Homo sapiens
ccttggggttcccag

SEQ ID NO: 236723 - DNA, 15 bp, Homo sapiens
tccttggggttccca

SEQ ID NO: 236724 - DNA, 15 bp, Homo sapiens
ttccttggggttccc

SEQ ID NO: 236725 - DNA, 15 bp, Homo sapiens
attccttggggttcc

SEQ ID NO: 236726 - DNA, 15 bp, Homo sapiens
cattccttggggttc

SEQ ID NO: 236727 - DNA, 15 bp, Homo sapiens
acattccttggggtt

SEQ ID NO: 236728 - DNA, 15 bp, Homo sapiens
tacattccttggggt

SEQ ID NO: 236729 - DNA, 15 bp, Homo sapiens
ctacattccttgggg

SEQ ID NO: 236730 - DNA, 15 bp, Homo sapiens
cctacattccttggg

SEQ ID NO: 236731 - DNA, 15 bp, Homo sapiens
ccctacattccttgg

SEQ ID NO: 236732 - DNA, 15 bp, Homo sapiens
tccctacattccttg

SEQ ID NO: 236733 - DNA, 15 bp, Homo sapiens
atccctacattcctt

SEQ ID NO: 236734 - DNA, 15 bp, Homo sapiens
aatccctacattcct

SEQ ID NO: 236735 - DNA, 15 bp, Homo sapiens
aaatccctacattcc

SEQ ID NO: 236736 - DNA, 15 bp, Homo sapiens
taaatccctacattc

SEQ ID NO: 236737 - DNA, 15 bp, Homo sapiens
ttaaatccctacatt

SEQ ID NO: 236738 - DNA, 15 bp, Homo sapiens
tttaaatccctacat

SEQ ID NO: 236739 - DNA, 15 bp, Homo sapiens
ttttaaatccctaca

SEQ ID NO: 236740 - DNA, 15 bp, Homo sapiens
tttttaaatccctac

SEQ ID NO: 236741 - DNA, 15 bp, Homo sapiens
ttttttaaatcccta

SEQ ID NO: 236742 - DNA, 15 bp, Homo sapiens
tttttttaaatccct

SEQ ID NO: 236743 - DNA, 15 bp, Homo sapiens
ttttttttaaatccc

SEQ ID NO: 236744 - DNA, 15 bp, Homo sapiens
tttttttttaaatcc

SEQ ID NO: 236745 - DNA, 15 bp, Homo sapiens
ctttttttttaaatc

SEQ ID NO: 236746 - DNA, 15 bp, Homo sapiens
tgactttttttttaa

SEQ ID NO: 236747 - DNA, 15 bp, Homo sapiens
atgacttttttttta

SEQ ID NO: 236748 - DNA, 15 bp, Homo sapiens
aatgacttttttttt

SEQ ID NO: 236749 - DNA, 15 bp, Homo sapiens
caatgactttttttt

SEQ ID NO: 236750 - DNA, 15 bp, Homo sapiens
tcaatgacttttttt

SEQ ID NO: 236751 - DNA, 15 bp, Homo sapiens
ttcaatgactttttt

SEQ ID NO: 236752 - DNA, 15 bp, Homo sapiens
tttcaatgacttttt

SEQ ID NO: 236753 - DNA, 15 bp, Homo sapiens
gtttcaatgactttt

SEQ ID NO: 236754 - DNA, 15 bp, Homo sapiens
agtttcaatgacttt

SEQ ID NO: 236755 - DNA, 15 bp, Homo sapiens
aagtttcaatgactt

SEQ ID NO: 236756 - DNA, 15 bp, Homo sapiens
taagtttcaatgact

SEQ ID NO: 236757 - DNA, 15 bp, Homo sapiens
ctaagtttcaatgac

SEQ ID NO: 236758 - DNA, 15 bp, Homo sapiens
tctaagtttcaatga

SEQ ID NO: 236759 - DNA, 15 bp, Homo sapiens
gtctaagtttcaatg

SEQ ID NO: 236760 - DNA, 15 bp, Homo sapiens
ggtctaagtttcaat

SEQ ID NO: 236761 - DNA, 15 bp, Homo sapiens
tggtctaagtttcaa

SEQ ID NO: 236762 - DNA, 15 bp, Homo sapiens
gtggtctaagtttca

SEQ ID NO: 236763 - DNA, 15 bp, Homo sapiens
tgtggtctaagtttc

SEQ ID NO: 236764 - DNA, 15 bp, Homo sapiens
ttgtggtctaagttt

SEQ ID NO: 236765 - DNA, 15 bp, Homo sapiens
attgtggtctaagtt

SEQ ID NO: 236766 - DNA, 15 bp, Homo sapiens
gattgtggtctaagt

SEQ ID NO: 236767 - DNA, 15 bp, Homo sapiens
tgattgtggtctaag

SEQ ID NO: 236768 - DNA, 15 bp, Homo sapiens
gtgattgtggtctaa

SEQ ID NO: 236769 - DNA, 15 bp, Homo sapiens
agtgattgtggtcta

SEQ ID NO: 236770 - DNA, 15 bp, Homo sapiens
cagtgattgtggtct

SEQ ID NO: 236771 - DNA, 15 bp, Homo sapiens
ccagtgattgtggtc

SEQ ID NO: 236772 - DNA, 15 bp, Homo sapiens
cccagtgattgtggt

SEQ ID NO: 236773 - DNA, 15 bp, Homo sapiens
acccagtgattgtgg

SEQ ID NO: 236774 - DNA, 15 bp, Homo sapiens
gacccagtgattgtg

SEQ ID NO: 236775 - DNA, 15 bp, Homo sapiens
ggacccagtgattgt

SEQ ID NO: 236776 - DNA, 15 bp, Homo sapiens
gggacccagtgattg

SEQ ID NO: 236777 - DNA, 15 bp, Homo sapiens
tgggacccagtgatt

SEQ ID NO: 236778 - DNA, 15 bp, Homo sapiens
ttgggacccagtgat

SEQ ID NO: 236779 - DNA, 15 bp, Homo sapiens
gttgggacccagtga

SEQ ID NO: 236780 - DNA, 15 bp, Homo sapiens
tgttgggacccagtg

SEQ ID NO: 236781 - DNA, 15 bp, Homo sapiens
ctgttgggacccagt

SEQ ID NO: 236782 - DNA, 15 bp, Homo sapiens
cctgttgggacccag

SEQ ID NO: 236783 - DNA, 15 bp, Homo sapiens
gcctgttgggaccca

SEQ ID NO: 236784 - DNA, 15 bp, Homo sapiens
agcctgttgggaccc

SEQ ID NO: 236785 - DNA, 15 bp, Homo sapiens
gagcctgttgggacc

SEQ ID NO: 236786 - DNA, 15 bp, Homo sapiens
agagcctgttgggac

SEQ ID NO: 236787 - DNA, 15 bp, Homo sapiens
tagagcctgttggga

SEQ ID NO: 236788 - DNA, 15 bp, Homo sapiens
ctagagcctgttggg

SEQ ID NO: 236789 - DNA, 15 bp, Homo sapiens
actagagcctgttgg

SEQ ID NO: 236790 - DNA, 15 bp, Homo sapiens
cactagagcctgttg

SEQ ID NO: 236791 - DNA, 15 bp, Homo sapiens
acactagagcctgtt

SEQ ID NO: 236792 - DNA, 15 bp, Homo sapiens
aacactagagcctgt

SEQ ID NO: 236793 - DNA, 15 bp, Homo sapiens
taacactagagcctg

SEQ ID NO: 236794 - DNA, 15 bp, Homo sapiens
ttaacactagagcct

SEQ ID NO: 236795 - DNA, 15 bp, Homo sapiens
attaacactagagcc

SEQ ID NO: 236796 - DNA, 15 bp, Homo sapiens
aattaacactagagc

SEQ ID NO: 236797 - DNA, 15 bp, Homo sapiens
gaattaacactagag

SEQ ID NO: 236798 - DNA, 15 bp, Homo sapiens
tgaattaacactaga

SEQ ID NO: 236799 - DNA, 15 bp, Homo sapiens
ttgaattaacactag

SEQ ID NO: 236800 - DNA, 15 bp, Homo sapiens
tttgaattaacacta

SEQ ID NO: 236801 - DNA, 15 bp, Homo sapiens
atttgaattaacact

SEQ ID NO: 236802 - DNA, 15 bp, Homo sapiens
aatttgaattaacac

SEQ ID NO: 236803 - DNA, 15 bp, Homo sapiens
caatttgaattaaca

SEQ ID NO: 236804 - DNA, 15 bp, Homo sapiens
gcaatttgaattaac

SEQ ID NO: 236805 - DNA, 15 bp, Homo sapiens
agcaatttgaattaa

SEQ ID NO: 236806 - DNA, 15 bp, Homo sapiens
tagcaatttgaatta

SEQ ID NO: 236807 - DNA, 15 bp, Homo sapiens
atagcaatttgaatt

SEQ ID NO: 236808 - DNA, 15 bp, Homo sapiens
gatagcaatttgaat

SEQ ID NO: 236809 - DNA, 15 bp, Homo sapiens
agatagcaatttgaa

SEQ ID NO: 236810 - DNA, 15 bp, Homo sapiens
tagatagcaatttga

SEQ ID NO: 236811 - DNA, 15 bp, Homo sapiens
atagatagcaatttg

SEQ ID NO: 236812 - DNA, 15 bp, Homo sapiens
aatagatagcaattt

SEQ ID NO: 236813 - DNA, 15 bp, Homo sapiens
caatagatagcaatt

SEQ ID NO: 236814 - DNA, 15 bp, Homo sapiens
ccaatagatagcaat

SEQ ID NO: 236815 - DNA, 15 bp, Homo sapiens
cccaatagatagcaa

SEQ ID NO: 236816 - DNA, 15 bp, Homo sapiens
acccaatagatagca

SEQ ID NO: 236817 - DNA, 15 bp, Homo sapiens
tacccaatagatagc

SEQ ID NO: 236818 - DNA, 15 bp, Homo sapiens
ctacccaatagatag

SEQ ID NO: 236819 - DNA, 15 bp, Homo sapiens
tctacccaatagata

SEQ ID NO: 236820 - DNA, 15 bp, Homo sapiens
ctctacccaatagat

SEQ ID NO: 236821 - DNA, 15 bp, Homo sapiens
tctctacccaataga

SEQ ID NO: 236822 - DNA, 15 bp, Homo sapiens
ttctctacccaatag

SEQ ID NO: 236823 - DNA, 15 bp, Homo sapiens
tttctctacccaata

SEQ ID NO: 236824 - DNA, 15 bp, Homo sapiens
ctttctctacccaat

SEQ ID NO: 236825 - DNA, 15 bp, Homo sapiens
tctttctctacccaa

SEQ ID NO: 236826 - DNA, 15 bp, Homo sapiens
ctctttctctaccca

SEQ ID NO: 236827 - DNA, 15 bp, Homo sapiens
tctctttctctaccc

SEQ ID NO: 236828 - DNA, 15 bp, Homo sapiens
ttctctttctctacc

SEQ ID NO: 236829 - DNA, 15 bp, Homo sapiens
attctctttctctac

SEQ ID NO: 236830 - DNA, 15 bp, Homo sapiens
aattctctttctcta

SEQ ID NO: 236831 - DNA, 15 bp, Homo sapiens
aaattctctttctct

SEQ ID NO: 236832 - DNA, 15 bp, Homo sapiens
gaaattctctttctc

SEQ ID NO: 236833 - DNA, 15 bp, Homo sapiens
tgaaattctctttct

SEQ ID NO: 236834 - DNA, 15 bp, Homo sapiens
ctgaaattctctttc

SEQ ID NO: 236835 - DNA, 15 bp, Homo sapiens
actgaaattctcttt

SEQ ID NO: 236836 - DNA, 15 bp, Homo sapiens
cactgaaattctctt

SEQ ID NO: 236837 - DNA, 15 bp, Homo sapiens
gcactgaaattctct

SEQ ID NO: 236838 - DNA, 15 bp, Homo sapiens
ggcactgaaattctc

SEQ ID NO: 236839 - DNA, 15 bp, Homo sapiens
tggcactgaaattct

SEQ ID NO: 236840 - DNA, 15 bp, Homo sapiens
ctggcactgaaattc

SEQ ID NO: 236841 - DNA, 15 bp, Homo sapiens
tctggcactgaaatt

SEQ ID NO: 236842 - DNA, 15 bp, Homo sapiens
ttctggcactgaaat

SEQ ID NO: 236843 - DNA, 15 bp, Homo sapiens
cttctggcactgaaa

SEQ ID NO: 236844 - DNA, 15 bp, Homo sapiens
gcttctggcactgaa

SEQ ID NO: 236845 - DNA, 15 bp, Homo sapiens
agcttctggcactga

SEQ ID NO: 236846 - DNA, 15 bp, Homo sapiens
tagcttctggcactg

SEQ ID NO: 236847 - DNA, 15 bp, Homo sapiens
gtagcttctggcact

SEQ ID NO: 236848 - DNA, 15 bp, Homo sapiens
ggtagcttctggcac

SEQ ID NO: 236849 - DNA, 15 bp, Homo sapiens
tggtagcttctggca

SEQ ID NO: 236850 - DNA, 15 bp, Homo sapiens
atggtagcttctggc

SEQ ID NO: 236851 - DNA, 15 bp, Homo sapiens
tatggtagcttctgg

SEQ ID NO: 236852 - DNA, 15 bp, Homo sapiens
ctatggtagcttctg

SEQ ID NO: 236853 - DNA, 15 bp, Homo sapiens
tctatggtagcttct

SEQ ID NO: 236854 - DNA, 15 bp, Homo sapiens
ctctatggtagcttc

SEQ ID NO: 236855 - DNA, 15 bp, Homo sapiens
tctctatggtagctt

SEQ ID NO: 236856 - DNA, 15 bp, Homo sapiens
atctctatggtagct

SEQ ID NO: 236857 - DNA, 15 bp, Homo sapiens
tatctctatggtagc

SEQ ID NO: 236858 - DNA, 15 bp, Homo sapiens
gtatctctatggtag

SEQ ID NO: 236859 - DNA, 15 bp, Homo sapiens
ggtatctctatggta

SEQ ID NO: 236860 - DNA, 15 bp, Homo sapiens
aggtatctctatggt

SEQ ID NO: 236861 - DNA, 15 bp, Homo sapiens
aaggtatctctatgg

SEQ ID NO: 236862 - DNA, 15 bp, Homo sapiens
caaggtatctctatg

SEQ ID NO: 236863 - DNA, 15 bp, Homo sapiens
acaaggtatctctat

SEQ ID NO: 236864 - DNA, 15 bp, Homo sapiens
tacaaggtatctcta

SEQ ID NO: 236865 - DNA, 15 bp, Homo sapiens
ctacaaggtatctct

SEQ ID NO: 236866 - DNA, 15 bp, Homo sapiens
actacaaggtatctc

SEQ ID NO: 236867 - DNA, 15 bp, Homo sapiens
aactacaaggtatct

SEQ ID NO: 236868 - DNA, 15 bp, Homo sapiens
gaactacaaggtatc

SEQ ID NO: 236869 - DNA, 15 bp, Homo sapiens
ggaactacaaggtat

SEQ ID NO: 236870 - DNA, 15 bp, Homo sapiens
tggaactacaaggta

SEQ ID NO: 236871 - DNA, 15 bp, Homo sapiens
gtggaactacaaggt

SEQ ID NO: 236872 - DNA, 15 bp, Homo sapiens
cagttacaagcaaca

SEQ ID NO: 236873 - DNA, 15 bp, Homo sapiens
tcagttacaagcaac

SEQ ID NO: 236874 - DNA, 15 bp, Homo sapiens
ttcagttacaagcaa

SEQ ID NO: 236875 - DNA, 15 bp, Homo sapiens
gttcagttacaagca

SEQ ID NO: 236876 - DNA, 15 bp, Homo sapiens
tgttcagttacaagc

SEQ ID NO: 236877 - DNA, 15 bp, Homo sapiens
ctgttcagttacaag

SEQ ID NO: 236878 - DNA, 15 bp, Homo sapiens
actgttcagttacaa

SEQ ID NO: 236879 - DNA, 15 bp, Homo sapiens
cactgttcagttaca

SEQ ID NO: 236880 - DNA, 15 bp, Homo sapiens
tcactgttcagttac

SEQ ID NO: 236881 - DNA, 15 bp, Homo sapiens
ttcactgttcagtta

SEQ ID NO: 236882 - DNA, 15 bp, Homo sapiens
tttcactgttcagtt

SEQ ID NO: 236883 - DNA, 15 bp, Homo sapiens
ttttcactgttcagt

SEQ ID NO: 236884 - DNA, 15 bp, Homo sapiens
attttcactgttcag

SEQ ID NO: 236885 - DNA, 15 bp, Homo sapiens
cattttcactgttca

SEQ ID NO: 236886 - DNA, 15 bp, Homo sapiens
tcattttcactgttc

SEQ ID NO: 236887 - DNA, 15 bp, Homo sapiens
ctcattttcactgtt

SEQ ID NO: 236888 - DNA, 15 bp, Homo sapiens
gctcattttcactgt

SEQ ID NO: 236889 - DNA, 15 bp, Homo sapiens
cgctcattttcactg

SEQ ID NO: 236890 - DNA, 15 bp, Homo sapiens
acgctcattttcact

SEQ ID NO: 236891 - DNA, 15 bp, Homo sapiens
tacgctcattttcac

SEQ ID NO: 236892 - DNA, 15 bp, Homo sapiens
gtacgctcattttca

SEQ ID NO: 236893 - DNA, 15 bp, Homo sapiens
tgtacgctcattttc

SEQ ID NO: 236894 - DNA, 15 bp, Homo sapiens
atgtacgctcatttt

SEQ ID NO: 236895 - DNA, 15 bp, Homo sapiens
catgtacgctcattt

SEQ ID NO: 236896 - DNA, 15 bp, Homo sapiens
acatgtacgctcatt

SEQ ID NO: 236897 - DNA, 15 bp, Homo sapiens
tacatgtacgctcat

SEQ ID NO: 236898 - DNA, 15 bp, Homo sapiens
ctacatgtacgctca

SEQ ID NO: 236899 - DNA, 15 bp, Homo sapiens
cctacatgtacgctc

SEQ ID NO: 236900 - DNA, 15 bp, Homo sapiens
ccctacatgtacgct

SEQ ID NO: 236901 - DNA, 15 bp, Homo sapiens
cccctacatgtacgc

SEQ ID NO: 236902 - DNA, 15 bp, Homo sapiens
gcccctacatgtacg

SEQ ID NO: 236903 - DNA, 15 bp, Homo sapiens
ggcccctacatgtac

SEQ ID NO: 236904 - DNA, 15 bp, Homo sapiens
tggcccctacatgta

SEQ ID NO: 236905 - DNA, 15 bp, Homo sapiens
atggcccctacatgt

SEQ ID NO: 236906 - DNA, 15 bp, Homo sapiens
catggcccctacatg

SEQ ID NO: 236907 - DNA, 15 bp, Homo sapiens
ccatggcccctacat

SEQ ID NO: 236908 - DNA, 15 bp, Homo sapiens
tccatggcccctaca

SEQ ID NO: 236909 - DNA, 15 bp, Homo sapiens
ttccatggcccctac

SEQ ID NO: 236910 - DNA, 15 bp, Homo sapiens
attccatggccccta

SEQ ID NO: 236911 - DNA, 15 bp, Homo sapiens
cattccatggcccct

SEQ ID NO: 236912 - DNA, 15 bp, Homo sapiens
tcattccatggcccc

SEQ ID NO: 236913 - DNA, 15 bp, Homo sapiens
ctcattccatggccc

SEQ ID NO: 236914 - DNA, 15 bp, Homo sapiens
cctcattccatggcc

SEQ ID NO: 236915 - DNA, 15 bp, Homo sapiens
tcctcattccatggc

SEQ ID NO: 236916 - DNA, 15 bp, Homo sapiens
atcctcattccatgg

SEQ ID NO: 236917 - DNA, 15 bp, Homo sapiens
aatcctcattccatg

SEQ ID NO: 236918 - DNA, 15 bp, Homo sapiens
aaatcctcattccat

SEQ ID NO: 236919 - DNA, 15 bp, Homo sapiens
aaaatcctcattcca

SEQ ID NO: 236920 - DNA, 15 bp, Homo sapiens
taaaatcctcattcc

SEQ ID NO: 236921 - DNA, 15 bp, Homo sapiens
ttaaaatcctcattc

SEQ ID NO: 236922 - DNA, 15 bp, Homo sapiens
attaaaatcctcatt

SEQ ID NO: 236923 - DNA, 15 bp, Homo sapiens
aattaaaatcctcat

SEQ ID NO: 236924 - DNA, 15 bp, Homo sapiens
aaattaaaatcctca

SEQ ID NO: 236925 - DNA, 15 bp, Homo sapiens
caaattaaaatcctc

SEQ ID NO: 236926 - DNA, 15 bp, Homo sapiens
tcaaattaaaatcct

SEQ ID NO: 236927 - DNA, 15 bp, Homo sapiens
ttcaaattaaaatcc

SEQ ID NO: 236928 - DNA, 15 bp, Homo sapiens
attcaaattaaaatc

SEQ ID NO: 236929 - DNA, 15 bp, Homo sapiens
gattcaaattaaaat

SEQ ID NO: 236930 - DNA, 15 bp, Homo sapiens
tgattcaaattaaaa

SEQ ID NO: 236931 - DNA, 15 bp, Homo sapiens
ctgattcaaattaaa

SEQ ID NO: 236932 - DNA, 15 bp, Homo sapiens
tctgattcaaattaa

SEQ ID NO: 236933 - DNA, 15 bp, Homo sapiens
ctctgattcaaatta

SEQ ID NO: 236934 - DNA, 15 bp, Homo sapiens
cctctgattcaaatt

SEQ ID NO: 236935 - DNA, 15 bp, Homo sapiens
tcctctgattcaaat

SEQ ID NO: 236936 - DNA, 15 bp, Homo sapiens
atcctctgattcaaa

SEQ ID NO: 236937 - DNA, 15 bp, Homo sapiens
catcctctgattcaa

SEQ ID NO: 236938 - DNA, 15 bp, Homo sapiens
ccatcctctgattca

SEQ ID NO: 236939 - DNA, 15 bp, Homo sapiens
cccatcctctgattc

SEQ ID NO: 236940 - DNA, 15 bp, Homo sapiens
ccccatcctctgatt

SEQ ID NO: 236941 - DNA, 15 bp, Homo sapiens
accccatcctctgat

SEQ ID NO: 236942 - DNA, 15 bp, Homo sapiens
caccccatcctctga

SEQ ID NO: 236943 - DNA, 15 bp, Homo sapiens
tcaccccatcctctg

SEQ ID NO: 236944 - DNA, 15 bp, Homo sapiens
ttcaccccatcctct

SEQ ID NO: 236945 - DNA, 15 bp, Homo sapiens
cttcaccccatcctc

SEQ ID NO: 236946 - DNA, 15 bp, Homo sapiens
tcttcaccccatcct

SEQ ID NO: 236947 - DNA, 15 bp, Homo sapiens
ctcttcaccccatcc

SEQ ID NO: 236948 - DNA, 15 bp, Homo sapiens
gctcttcaccccatc

SEQ ID NO: 236949 - DNA, 15 bp, Homo sapiens
tgctcttcaccccat

SEQ ID NO: 236950 - DNA, 15 bp, Homo sapiens
ctgctcttcacccca

SEQ ID NO: 236951 - DNA, 15 bp, Homo sapiens
actgctcttcacccc

SEQ ID NO: 236952 - DNA, 15 bp, Homo sapiens
gactgctcttcaccc

SEQ ID NO: 236953 - DNA, 15 bp, Homo sapiens
tgactgctcttcacc

SEQ ID NO: 236954 - DNA, 15 bp, Homo sapiens
atgactgctcttcac

SEQ ID NO: 236955 - DNA, 15 bp, Homo sapiens
aatgactgctcttca

SEQ ID NO: 236956 - DNA, 15 bp, Homo sapiens
aaatgactgctcttc

SEQ ID NO: 236957 - DNA, 15 bp, Homo sapiens
taaatgactgctctt

SEQ ID NO: 236958 - DNA, 15 bp, Homo sapiens
gtaaatgactgctct

SEQ ID NO: 236959 - DNA, 15 bp, Homo sapiens
tgtaaatgactgctc

SEQ ID NO: 236960 - DNA, 15 bp, Homo sapiens
ttgtaaatgactgct

SEQ ID NO: 236961 - DNA, 15 bp, Homo sapiens
attgtaaatgactgc

SEQ ID NO: 236962 - DNA, 15 bp, Homo sapiens
tattgtaaatgactg

SEQ ID NO: 236963 - DNA, 15 bp, Homo sapiens
atattgtaaatgact

SEQ ID NO: 236964 - DNA, 15 bp, Homo sapiens
aatattgtaaatgac

SEQ ID NO: 236965 - DNA, 15 bp, Homo sapiens
taatattgtaaatga

SEQ ID NO: 236966 - DNA, 15 bp, Homo sapiens
gtaatattgtaaatg

SEQ ID NO: 236967 - DNA, 15 bp, Homo sapiens
tgtaatattgtaaat

SEQ ID NO: 236968 - DNA, 15 bp, Homo sapiens
gtgtaatattgtaaa

SEQ ID NO: 236969 - DNA, 15 bp, Homo sapiens
tgtgtaatattgtaa

SEQ ID NO: 236970 - DNA, 15 bp, Homo sapiens
ttgtgtaatattgta

SEQ ID NO: 236971 - DNA, 15 bp, Homo sapiens
cttgtgtaatattgt

SEQ ID NO: 236972 - DNA, 15 bp, Homo sapiens
acttgtgtaatattg

SEQ ID NO: 236973 - DNA, 15 bp, Homo sapiens
gacttgtgtaatatt

SEQ ID NO: 236974 - DNA, 15 bp, Homo sapiens
tgacttgtgtaatat

SEQ ID NO: 236975 - DNA, 15 bp, Homo sapiens
atgacttgtgtaata

SEQ ID NO: 236976 - DNA, 15 bp, Homo sapiens
gatgacttgtgtaat

SEQ ID NO: 236977 - DNA, 15 bp, Homo sapiens
agatgacttgtgtaa

SEQ ID NO: 236978 - DNA, 15 bp, Homo sapiens
aagatgacttgtgta

SEQ ID NO: 236979 - DNA, 15 bp, Homo sapiens
taagatgacttgtgt

SEQ ID NO: 236980 - DNA, 15 bp, Homo sapiens
gtaagatgacttgtg

SEQ ID NO: 236981 - DNA, 15 bp, Homo sapiens
tgtaagatgacttgt

SEQ ID NO: 236982 - DNA, 15 bp, Homo sapiens
ttgtaagatgacttg

SEQ ID NO: 236983 - DNA, 15 bp, Homo sapiens
attgtaagatgactt

SEQ ID NO: 236984 - DNA, 15 bp, Homo sapiens
cattgtaagatgact

SEQ ID NO: 236985 - DNA, 15 bp, Homo sapiens
tcattgtaagatgac

SEQ ID NO: 236986 - DNA, 15 bp, Homo sapiens
ttcattgtaagatga

SEQ ID NO: 236987 - DNA, 15 bp, Homo sapiens
attcattgtaagatg

SEQ ID NO: 236988 - DNA, 15 bp, Homo sapiens
tattcattgtaagat

SEQ ID NO: 236989 - DNA, 15 bp, Homo sapiens
ttattcattgtaaga

SEQ ID NO: 236990 - DNA, 15 bp, Homo sapiens
attattcattgtaag

SEQ ID NO: 236991 - DNA, 15 bp, Homo sapiens
tattattcattgtaa

SEQ ID NO: 236992 - DNA, 15 bp, Homo sapiens
ttattattcattgta

SEQ ID NO: 236993 - DNA, 15 bp, Homo sapiens
attattattcattgt

SEQ ID NO: 236994 - DNA, 15 bp, Homo sapiens
aattattattcattg

SEQ ID NO: 236995 - DNA, 15 bp, Homo sapiens
gaattattattcatt

SEQ ID NO: 236996 - DNA, 15 bp, Homo sapiens
agaattattattcat

SEQ ID NO: 236997 - DNA, 15 bp, Homo sapiens
tagaattattattca

SEQ ID NO: 236998 - DNA, 15 bp, Homo sapiens
atagaattattattc

SEQ ID NO: 236999 - DNA, 15 bp, Homo sapiens
gatagaattattatt

SEQ ID NO: 237000 - DNA, 15 bp, Homo sapiens
agatagaattattat

SEQ ID NO: 237001 - DNA, 15 bp, Homo sapiens
aagatagaattatta

SEQ ID NO: 237002 - DNA, 15 bp, Homo sapiens
caagatagaattatt

SEQ ID NO: 237003 - DNA, 15 bp, Homo sapiens
tcaagatagaattat

SEQ ID NO: 237004 - DNA, 15 bp, Homo sapiens
ttcaagatagaatta

SEQ ID NO: 237005 - DNA, 15 bp, Homo sapiens
tttcaagatagaatt

SEQ ID NO: 237006 - DNA, 15 bp, Homo sapiens
atttcaagatagaat

SEQ ID NO: 237007 - DNA, 15 bp, Homo sapiens
aatttcaagatagaa

SEQ ID NO: 237008 - DNA, 15 bp, Homo sapiens
gaatttcaagataga

SEQ ID NO: 237009 - DNA, 15 bp, Homo sapiens
ggaatttcaagatag

SEQ ID NO: 237010 - DNA, 15 bp, Homo sapiens
tggaatttcaagata

SEQ ID NO: 237011 - DNA, 15 bp, Homo sapiens
gtggaatttcaagat

SEQ ID NO: 237012 - DNA, 15 bp, Homo sapiens
ggtggaatttcaaga

SEQ ID NO: 237013 - DNA, 15 bp, Homo sapiens
gggtggaatttcaag

SEQ ID NO: 237014 - DNA, 15 bp, Homo sapiens
agggtggaatttcaa

SEQ ID NO: 237015 - DNA, 15 bp, Homo sapiens
aagggtggaatttca

SEQ ID NO: 237016 - DNA, 15 bp, Homo sapiens
gaagggtggaatttc

SEQ ID NO: 237017 - DNA, 15 bp, Homo sapiens
ggaagggtggaattt

SEQ ID NO: 237018 - DNA, 15 bp, Homo sapiens
aggaagggtggaatt

SEQ ID NO: 237019 - DNA, 15 bp, Homo sapiens
caggaagggtggaat

SEQ ID NO: 237020 - DNA, 15 bp, Homo sapiens
gcaggaagggtggaa

SEQ ID NO: 237021 - DNA, 15 bp, Homo sapiens
ggcaggaagggtgga

SEQ ID NO: 237022 - DNA, 15 bp, Homo sapiens
tggcaggaagggtgg

SEQ ID NO: 237023 - DNA, 15 bp, Homo sapiens
atggcaggaagggtg

SEQ ID NO: 237024 - DNA, 15 bp, Homo sapiens
catggcaggaagggt

SEQ ID NO: 237025 - DNA, 15 bp, Homo sapiens
acatggcaggaaggg

SEQ ID NO: 237026 - DNA, 15 bp, Homo sapiens
cacatggcaggaagg

SEQ ID NO: 237027 - DNA, 15 bp, Homo sapiens
tcacatggcaggaag

SEQ ID NO: 237028 - DNA, 15 bp, Homo sapiens
atcacatggcaggaa

SEQ ID NO: 237029 - DNA, 15 bp, Homo sapiens
aatcacatggcagga

SEQ ID NO: 237030 - DNA, 15 bp, Homo sapiens
taatcacatggcagg

SEQ ID NO: 237031 - DNA, 15 bp, Homo sapiens
ataatcacatggcag

SEQ ID NO: 237032 - DNA, 15 bp, Homo sapiens
tataatcacatggca

SEQ ID NO: 237033 - DNA, 15 bp, Homo sapiens
ttataatcacatggc

SEQ ID NO: 237034 - DNA, 15 bp, Homo sapiens
tttataatcacatgg

SEQ ID NO: 237035 - DNA, 15 bp, Homo sapiens
atttataatcacatg

SEQ ID NO: 237036 - DNA, 15 bp, Homo sapiens
aatttataatcacat

SEQ ID NO: 237037 - DNA, 15 bp, Homo sapiens
aaatttataatcaca

SEQ ID NO: 237038 - DNA, 15 bp, Homo sapiens
caaatttataatcac

SEQ ID NO: 237039 - DNA, 15 bp, Homo sapiens
acaaatttataatca

SEQ ID NO: 237040 - DNA, 15 bp, Homo sapiens
aacaaatttataatc

SEQ ID NO: 237041 - DNA, 15 bp, Homo sapiens
aaacaaatttataat

SEQ ID NO: 237042 - DNA, 15 bp, Homo sapiens
taaacaaatttataa

SEQ ID NO: 237043 - DNA, 15 bp, Homo sapiens
ataaacaaatttata

SEQ ID NO: 237044 - DNA, 15 bp, Homo sapiens
tataaacaaatttat

SEQ ID NO: 237045 - DNA, 15 bp, Homo sapiens
ttataaacaaattta

SEQ ID NO: 237046 - DNA, 15 bp, Homo sapiens
attataaacaaattt

SEQ ID NO: 237047 - DNA, 15 bp, Homo sapiens
aattataaacaaatt

SEQ ID NO: 237048 - DNA, 15 bp, Homo sapiens
caattataaacaaat

SEQ ID NO: 237049 - DNA, 15 bp, Homo sapiens
ccaattataaacaaa

SEQ ID NO: 237050 - DNA, 15 bp, Homo sapiens
cccaattataaacaa

SEQ ID NO: 237051 - DNA, 15 bp, Homo sapiens
acccaattataaaca

SEQ ID NO: 237052 - DNA, 15 bp, Homo sapiens
tacccaattataaac

SEQ ID NO: 237053 - DNA, 15 bp, Homo sapiens
ttacccaattataaa

SEQ ID NO: 237054 - DNA, 15 bp, Homo sapiens
cttacccaattataa

SEQ ID NO: 237055 - DNA, 15 bp, Homo sapiens
acttacccaattata

SEQ ID NO: 237056 - DNA, 15 bp, Homo sapiens
gacttacccaattat

SEQ ID NO: 237057 - DNA, 15 bp, Homo sapiens
ggacttacccaatta

SEQ ID NO: 237058 - DNA, 15 bp, Homo sapiens
gggacttacccaatt

SEQ ID NO: 237059 - DNA, 15 bp, Homo sapiens
tgggacttacccaat

SEQ ID NO: 237060 - DNA, 15 bp, Homo sapiens
gtgggacttacccaa

SEQ ID NO: 237061 - DNA, 15 bp, Homo sapiens
ggtgggacttaccca

SEQ ID NO: 237062 - DNA, 15 bp, Homo sapiens
tggtgggacttaccc

SEQ ID NO: 237063 - DNA, 15 bp, Homo sapiens
ctggtgggacttacc

SEQ ID NO: 237064 - DNA, 15 bp, Homo sapiens
actggtgggacttac

SEQ ID NO: 237065 - DNA, 15 bp, Homo sapiens
gactggtgggactta

SEQ ID NO: 237066 - DNA, 15 bp, Homo sapiens
ggactggtgggactt

SEQ ID NO: 237067 - DNA, 15 bp, Homo sapiens
aggactggtgggact

SEQ ID NO: 237068 - DNA, 15 bp, Homo sapiens
caggactggtgggac

SEQ ID NO: 237069 - DNA, 15 bp, Homo sapiens
acaggactggtggga

SEQ ID NO: 237070 - DNA, 15 bp, Homo sapiens
cacaggactggtggg

SEQ ID NO: 237071 - DNA, 15 bp, Homo sapiens
tcacaggactggtgg

SEQ ID NO: 237072 - DNA, 15 bp, Homo sapiens
ctcacaggactggtg

SEQ ID NO: 237073 - DNA, 15 bp, Homo sapiens
tctcacaggactggt

SEQ ID NO: 237074 - DNA, 15 bp, Homo sapiens
atctcacaggactgg

SEQ ID NO: 237075 - DNA, 15 bp, Homo sapiens
aatctcacaggactg

SEQ ID NO: 237076 - DNA, 15 bp, Homo sapiens
caatctcacaggact

SEQ ID NO: 237077 - DNA, 15 bp, Homo sapiens
gcaatctcacaggac

SEQ ID NO: 237078 - DNA, 15 bp, Homo sapiens
tgcaatctcacagga

SEQ ID NO: 237079 - DNA, 15 bp, Homo sapiens
gtgcaatctcacagg

SEQ ID NO: 237080 - DNA, 15 bp, Homo sapiens
ggtgcaatctcacag

SEQ ID NO: 237081 - DNA, 15 bp, Homo sapiens
tggtgcaatctcaca

SEQ ID NO: 237082 - DNA, 15 bp, Homo sapiens
atggtgcaatctcac

SEQ ID NO: 237083 - DNA, 15 bp, Homo sapiens
catggtgcaatctca

SEQ ID NO: 237084 - DNA, 15 bp, Homo sapiens
gcatggtgcaatctc

SEQ ID NO: 237085 - DNA, 15 bp, Homo sapiens
agcatggtgcaatct

SEQ ID NO: 237086 - DNA, 15 bp, Homo sapiens
aagcatggtgcaatc

SEQ ID NO: 237087 - DNA, 15 bp, Homo sapiens
aaagcatggtgcaat

SEQ ID NO: 237088 - DNA, 15 bp, Homo sapiens
taaagcatggtgcaa

SEQ ID NO: 237089 - DNA, 15 bp, Homo sapiens
ataaagcatggtgca

SEQ ID NO: 237090 - DNA, 15 bp, Homo sapiens
cataaagcatggtgc

SEQ ID NO: 237091 - DNA, 15 bp, Homo sapiens
acataaagcatggtg

SEQ ID NO: 237092 - DNA, 15 bp, Homo sapiens
aacataaagcatggt

SEQ ID NO: 237093 - DNA, 15 bp, Homo sapiens
aaacataaagcatgg

SEQ ID NO: 237094 - DNA, 15 bp, Homo sapiens
caaacataaagcatg

SEQ ID NO: 237095 - DNA, 15 bp, Homo sapiens
gcaaacataaagcat

SEQ ID NO: 237096 - DNA, 15 bp, Homo sapiens
tgcaaacataaagca

SEQ ID NO: 237097 - DNA, 15 bp, Homo sapiens
atgcaaacataaagc

SEQ ID NO: 237098 - DNA, 15 bp, Homo sapiens
tatgcaaacataaag

SEQ ID NO: 237099 - DNA, 15 bp, Homo sapiens
gtatgcaaacataaa

SEQ ID NO: 237100 - DNA, 15 bp, Homo sapiens
tgtatgcaaacataa

SEQ ID NO: 237101 - DNA, 15 bp, Homo sapiens
ctgtatgcaaacata

SEQ ID NO: 237102 - DNA, 15 bp, Homo sapiens
actgtatgcaaacat

SEQ ID NO: 237103 - DNA, 15 bp, Homo sapiens
cactgtatgcaaaca

SEQ ID NO: 237104 - DNA, 15 bp, Homo sapiens
gcactgtatgcaaac

SEQ ID NO: 237105 - DNA, 15 bp, Homo sapiens
agcactgtatgcaaa

SEQ ID NO: 237106 - DNA, 15 bp, Homo sapiens
aagcactgtatgcaa

SEQ ID NO: 237107 - DNA, 15 bp, Homo sapiens
aaagcactgtatgca

SEQ ID NO: 237108 - DNA, 15 bp, Homo sapiens
taaagcactgtatgc

SEQ ID NO: 237109 - DNA, 15 bp, Homo sapiens
ataaagcactgtatg

SEQ ID NO: 237110 - DNA, 15 bp, Homo sapiens
cataaagcactgtat

SEQ ID NO: 237111 - DNA, 15 bp, Homo sapiens
gcataaagcactgta

SEQ ID NO: 237112 - DNA, 15 bp, Homo sapiens
agcataaagcactgt

SEQ ID NO: 237113 - DNA, 15 bp, Homo sapiens
aagcataaagcactg

SEQ ID NO: 237114 - DNA, 15 bp, Homo sapiens
caagcataaagcact

SEQ ID NO: 237115 - DNA, 15 bp, Homo sapiens
acaagcataaagcac

SEQ ID NO: 237116 - DNA, 15 bp, Homo sapiens
gacaagcataaagca

SEQ ID NO: 237117 - DNA, 15 bp, Homo sapiens
tgacaagcataaagc

SEQ ID NO: 237118 - DNA, 15 bp, Homo sapiens
ttgacaagcataaag

SEQ ID NO: 237119 - DNA, 15 bp, Homo sapiens
cttgacaagcataaa

SEQ ID NO: 237120 - DNA, 15 bp, Homo sapiens
ccttgacaagcataa

SEQ ID NO: 237121 - DNA, 15 bp, Homo sapiens
accttgacaagcata

SEQ ID NO: 237122 - DNA, 15 bp, Homo sapiens
caccttgacaagcat

SEQ ID NO: 237123 - DNA, 15 bp, Homo sapiens
gcaccttgacaagca

SEQ ID NO: 237124 - DNA, 15 bp, Homo sapiens
agcaccttgacaagc

SEQ ID NO: 237125 - DNA, 15 bp, Homo sapiens
gagcaccttgacaag

SEQ ID NO: 237126 - DNA, 15 bp, Homo sapiens
agagcaccttgacaa

SEQ ID NO: 237127 - DNA, 15 bp, Homo sapiens
cagagcaccttgaca

SEQ ID NO: 237128 - DNA, 15 bp, Homo sapiens
gcagagcaccttgac

SEQ ID NO: 237129 - DNA, 15 bp, Homo sapiens
ggcagagcaccttga

SEQ ID NO: 237130 - DNA, 15 bp, Homo sapiens
aggcagagcaccttg

SEQ ID NO: 237131 - DNA, 15 bp, Homo sapiens
aaggcagagcacctt

SEQ ID NO: 237132 - DNA, 15 bp, Homo sapiens
gaaggcagagcacct

SEQ ID NO: 237133 - DNA, 15 bp, Homo sapiens
agaaggcagagcacc

SEQ ID NO: 237134 - DNA, 15 bp, Homo sapiens
cagaaggcagagcac

SEQ ID NO: 237135 - DNA, 15 bp, Homo sapiens
gcagaaggcagagca

SEQ ID NO: 237136 - DNA, 15 bp, Homo sapiens
agcagaaggcagagc

SEQ ID NO: 237137 - DNA, 15 bp, Homo sapiens
cagcagaaggcagag

SEQ ID NO: 237138 - DNA, 15 bp, Homo sapiens
acagcagaaggcaga

SEQ ID NO: 237139 - DNA, 15 bp, Homo sapiens
gacagcagaaggcag

SEQ ID NO: 237140 - DNA, 15 bp, Homo sapiens
agacagcagaaggca

SEQ ID NO: 237141 - DNA, 15 bp, Homo sapiens
aagacagcagaaggc

SEQ ID NO: 237142 - DNA, 15 bp, Homo sapiens
taagacagcagaagg

SEQ ID NO: 237143 - DNA, 15 bp, Homo sapiens
ataagacagcagaag

SEQ ID NO: 237144 - DNA, 15 bp, Homo sapiens
aataagacagcagaa

SEQ ID NO: 237145 - DNA, 15 bp, Homo sapiens
aaataagacagcaga

SEQ ID NO: 237146 - DNA, 15 bp, Homo sapiens
caaataagacagcag

SEQ ID NO: 237147 - DNA, 15 bp, Homo sapiens
ccaaataagacagca

SEQ ID NO: 237148 - DNA, 15 bp, Homo sapiens
gccaaataagacagc

SEQ ID NO: 237149 - DNA, 15 bp, Homo sapiens
tgccaaataagacag

SEQ ID NO: 237150 - DNA, 15 bp, Homo sapiens
atgccaaataagaca

SEQ ID NO: 237151 - DNA, 15 bp, Homo sapiens
gatgccaaataagac

SEQ ID NO: 237152 - DNA, 15 bp, Homo sapiens
agatgccaaataaga

SEQ ID NO: 237153 - DNA, 15 bp, Homo sapiens
tagatgccaaataag

SEQ ID NO: 237154 - DNA, 15 bp, Homo sapiens
ttagatgccaaataa

SEQ ID NO: 237155 - DNA, 15 bp, Homo sapiens
tttagatgccaaata

SEQ ID NO: 237156 - DNA, 15 bp, Homo sapiens
gtttagatgccaaat

SEQ ID NO: 237157 - DNA, 15 bp, Homo sapiens
tgtttagatgccaaa

SEQ ID NO: 237158 - DNA, 15 bp, Homo sapiens
atgtttagatgccaa

SEQ ID NO: 237159 - DNA, 15 bp, Homo sapiens
gatgtttagatgcca

SEQ ID NO: 237160 - DNA, 15 bp, Homo sapiens
ggatgtttagatgcc

SEQ ID NO: 237161 - DNA, 15 bp, Homo sapiens
aggatgtttagatgc

SEQ ID NO: 237162 - DNA, 15 bp, Homo sapiens
taggatgtttagatg

SEQ ID NO: 237163 - DNA, 15 bp, Homo sapiens
ttaggatgtttagat

SEQ ID NO: 237164 - DNA, 15 bp, Homo sapiens
tttaggatgtttaga

SEQ ID NO: 237165 - DNA, 15 bp, Homo sapiens
atttaggatgtttag

SEQ ID NO: 237166 - DNA, 15 bp, Homo sapiens
tatttaggatgttta

SEQ ID NO: 237167 - DNA, 15 bp, Homo sapiens
gtatttaggatgttt

SEQ ID NO: 237168 - DNA, 15 bp, Homo sapiens
ggtatttaggatgtt

SEQ ID NO: 237169 - DNA, 15 bp, Homo sapiens
gggtatttaggatgt

SEQ ID NO: 237170 - DNA, 15 bp, Homo sapiens
agggtatttaggatg

SEQ ID NO: 237171 - DNA, 15 bp, Homo sapiens
cagggtatttaggat

SEQ ID NO: 237172 - DNA, 15 bp, Homo sapiens
tcagggtatttagga

SEQ ID NO: 237173 - DNA, 15 bp, Homo sapiens
ttcagggtatttagg

SEQ ID NO: 237174 - DNA, 15 bp, Homo sapiens
tttcagggtatttag

SEQ ID NO: 237175 - DNA, 15 bp, Homo sapiens
ctttcagggtattta

SEQ ID NO: 237176 - DNA, 15 bp, Homo sapiens
actttcagggtattt

SEQ ID NO: 237177 - DNA, 15 bp, Homo sapiens
tactttcagggtatt

SEQ ID NO: 237178 - DNA, 15 bp, Homo sapiens
ttactttcagggtat

SEQ ID NO: 237179 - DNA, 15 bp, Homo sapiens
attactttcagggta

SEQ ID NO: 237180 - DNA, 15 bp, Homo sapiens
cattactttcagggt

SEQ ID NO: 237181 - DNA, 15 bp, Homo sapiens
tcattactttcaggg

SEQ ID NO: 237182 - DNA, 15 bp, Homo sapiens
ctcattactttcagg

SEQ ID NO: 237183 - DNA, 15 bp, Homo sapiens
tctcattactttcag

SEQ ID NO: 237184 - DNA, 15 bp, Homo sapiens
gtctcattactttca

SEQ ID NO: 237185 - DNA, 15 bp, Homo sapiens
ggtctcattactttc

SEQ ID NO: 237186 - DNA, 15 bp, Homo sapiens
aggtctcattacttt

SEQ ID NO: 237187 - DNA, 15 bp, Homo sapiens
caggtctcattactt

SEQ ID NO: 237188 - DNA, 15 bp, Homo sapiens
ccaggtctcattact

SEQ ID NO: 237189 - DNA, 15 bp, Homo sapiens
tccaggtctcattac

SEQ ID NO: 237190 - DNA, 15 bp, Homo sapiens
ctccaggtctcatta

SEQ ID NO: 237191 - DNA, 15 bp, Homo sapiens
gctccaggtctcatt

SEQ ID NO: 237192 - DNA, 15 bp, Homo sapiens
agctccaggtctcat

SEQ ID NO: 237193 - DNA, 15 bp, Homo sapiens
tagctccaggtctca

SEQ ID NO: 237194 - DNA, 15 bp, Homo sapiens
ttagctccaggtctc

SEQ ID NO: 237195 - DNA, 15 bp, Homo sapiens
cttagctccaggtct

SEQ ID NO: 237196 - DNA, 15 bp, Homo sapiens
tcttagctccaggtc

SEQ ID NO: 237197 - DNA, 15 bp, Homo sapiens
ctcttagctccaggt

SEQ ID NO: 237198 - DNA, 15 bp, Homo sapiens
gctcttagctccagg

SEQ ID NO: 237199 - DNA, 15 bp, Homo sapiens
agctcttagctccag

SEQ ID NO: 237200 - DNA, 15 bp, Homo sapiens
gagctcttagctcca

SEQ ID NO: 237201 - DNA, 15 bp, Homo sapiens
agagctcttagctcc

SEQ ID NO: 237202 - DNA, 15 bp, Homo sapiens
gagagctcttagctc

SEQ ID NO: 237203 - DNA, 15 bp, Homo sapiens
agagagctcttagct

SEQ ID NO: 237204 - DNA, 15 bp, Homo sapiens
aagagagctcttagc

SEQ ID NO: 237205 - DNA, 15 bp, Homo sapiens
aaagagagctcttag

SEQ ID NO: 237206 - DNA, 15 bp, Homo sapiens
taaagagagctctta

SEQ ID NO: 237207 - DNA, 15 bp, Homo sapiens
gtaaagagagctctt

SEQ ID NO: 237208 - DNA, 15 bp, Homo sapiens
tgtaaagagagctct

SEQ ID NO: 237209 - DNA, 15 bp, Homo sapiens
ttgtaaagagagctc

SEQ ID NO: 237210 - DNA, 15 bp, Homo sapiens
attgtaaagagagct

SEQ ID NO: 237211 - DNA, 15 bp, Homo sapiens
cattgtaaagagagc

SEQ ID NO: 237212 - DNA, 15 bp, Homo sapiens
tcattgtaaagagag

SEQ ID NO: 237213 - DNA, 15 bp, Homo sapiens
ctcattgtaaagaga

SEQ ID NO: 237214 - DNA, 15 bp, Homo sapiens
cctcattgtaaagag

SEQ ID NO: 237215 - DNA, 15 bp, Homo sapiens
tcctcattgtaaaga

SEQ ID NO: 237216 - DNA, 15 bp, Homo sapiens
ttcctcattgtaaag

SEQ ID NO: 237217 - DNA, 15 bp, Homo sapiens
cttcctcattgtaaa

SEQ ID NO: 237218 - DNA, 15 bp, Homo sapiens
gcttcctcattgtaa

SEQ ID NO: 237219 - DNA, 15 bp, Homo sapiens
agcttcctcattgta

SEQ ID NO: 237220 - DNA, 15 bp, Homo sapiens
cagcttcctcattgt

SEQ ID NO: 237221 - DNA, 15 bp, Homo sapiens
tcagcttcctcattg

SEQ ID NO: 237222 - DNA, 15 bp, Homo sapiens
ctcagcttcctcatt

SEQ ID NO: 237223 - DNA, 15 bp, Homo sapiens
cctcagcttcctcat

SEQ ID NO: 237224 - DNA, 15 bp, Homo sapiens
tcctcagcttcctca

SEQ ID NO: 237225 - DNA, 15 bp, Homo sapiens
atcctcagcttcctc

SEQ ID NO: 237226 - DNA, 15 bp, Homo sapiens
gatcctcagcttcct

SEQ ID NO: 237227 - DNA, 15 bp, Homo sapiens
tgatcctcagcttcc

SEQ ID NO: 237228 - DNA, 15 bp, Homo sapiens
ctgatcctcagcttc

SEQ ID NO: 237229 - DNA, 15 bp, Homo sapiens
tctgatcctcagctt

SEQ ID NO: 237230 - DNA, 15 bp, Homo sapiens
ctctgatcctcagct

SEQ ID NO: 237231 - DNA, 15 bp, Homo sapiens
tctctgatcctcagc

SEQ ID NO: 237232 - DNA, 15 bp, Homo sapiens
ctctctgatcctcag

SEQ ID NO: 237233 - DNA, 15 bp, Homo sapiens
gctctctgatcctca

SEQ ID NO: 237234 - DNA, 15 bp, Homo sapiens
agctctctgatcctc

SEQ ID NO: 237235 - DNA, 15 bp, Homo sapiens
aagctctctgatcct

SEQ ID NO: 237236 - DNA, 15 bp, Homo sapiens
taagctctctgatcc

SEQ ID NO: 237237 - DNA, 15 bp, Homo sapiens
ataagctctctgatc

SEQ ID NO: 237238 - DNA, 15 bp, Homo sapiens
cataagctctctgat

SEQ ID NO: 237239 - DNA, 15 bp, Homo sapiens
acataagctctctga

SEQ ID NO: 237240 - DNA, 15 bp, Homo sapiens
gacataagctctctg

SEQ ID NO: 237241 - DNA, 15 bp, Homo sapiens
tgacataagctctct

SEQ ID NO: 237242 - DNA, 15 bp, Homo sapiens
atgacataagctctc

SEQ ID NO: 237243 - DNA, 15 bp, Homo sapiens
aatgacataagctct

SEQ ID NO: 237244 - DNA, 15 bp, Homo sapiens
aaatgacataagctc

SEQ ID NO: 237245 - DNA, 15 bp, Homo sapiens
caaatgacataagct

SEQ ID NO: 237246 - DNA, 15 bp, Homo sapiens
gcaaatgacataagc

SEQ ID NO: 237247 - DNA, 15 bp, Homo sapiens
ggcaaatgacataag

SEQ ID NO: 237248 - DNA, 15 bp, Homo sapiens
aggcaaatgacataa

SEQ ID NO: 237249 - DNA, 15 bp, Homo sapiens
aaggcaaatgacata

SEQ ID NO: 237250 - DNA, 15 bp, Homo sapiens
caaggcaaatgacat

SEQ ID NO: 237251 - DNA, 15 bp, Homo sapiens
tcaaggcaaatgaca

SEQ ID NO: 237252 - DNA, 15 bp, Homo sapiens
gtcaaggcaaatgac

SEQ ID NO: 237253 - DNA, 15 bp, Homo sapiens
agtcaaggcaaatga

SEQ ID NO: 237254 - DNA, 15 bp, Homo sapiens
tagtcaaggcaaatg

SEQ ID NO: 237255 - DNA, 15 bp, Homo sapiens
gtagtcaaggcaaat

SEQ ID NO: 237256 - DNA, 15 bp, Homo sapiens
tgtagtcaaggcaaa

SEQ ID NO: 237257 - DNA, 15 bp, Homo sapiens
ctgtagtcaaggcaa

SEQ ID NO: 237258 - DNA, 15 bp, Homo sapiens
gctgtagtcaaggca

SEQ ID NO: 237259 - DNA, 15 bp, Homo sapiens
tgctgtagtcaaggc

SEQ ID NO: 237260 - DNA, 15 bp, Homo sapiens
ttgctgtagtcaagg

SEQ ID NO: 237261 - DNA, 15 bp, Homo sapiens
cttgctgtagtcaag

SEQ ID NO: 237262 - DNA, 15 bp, Homo sapiens
acttgctgtagtcaa

SEQ ID NO: 237263 - DNA, 15 bp, Homo sapiens
aacttgctgtagtca

SEQ ID NO: 237264 - DNA, 15 bp, Homo sapiens
caacttgctgtagtc

SEQ ID NO: 237265 - DNA, 15 bp, Homo sapiens
gcaacttgctgtagt

SEQ ID NO: 237266 - DNA, 15 bp, Homo sapiens
agcaacttgctgtag

SEQ ID NO: 237267 - DNA, 15 bp, Homo sapiens
tagcaacttgctgta

SEQ ID NO: 237268 - DNA, 15 bp, Homo sapiens
ctagcaacttgctgt

SEQ ID NO: 237269 - DNA, 15 bp, Homo sapiens
actagcaacttgctg

SEQ ID NO: 237270 - DNA, 15 bp, Homo sapiens
cactagcaacttgct

SEQ ID NO: 237271 - DNA, 15 bp, Homo sapiens
ccactagcaacttgc

SEQ ID NO: 237272 - DNA, 15 bp, Homo sapiens
gccactagcaacttg

SEQ ID NO: 237273 - DNA, 15 bp, Homo sapiens
agccactagcaactt

SEQ ID NO: 237274 - DNA, 15 bp, Homo sapiens
cagccactagcaact

SEQ ID NO: 237275 - DNA, 15 bp, Homo sapiens
acagccactagcaac

SEQ ID NO: 237276 - DNA, 15 bp, Homo sapiens
tacagccactagcaa

SEQ ID NO: 237277 - DNA, 15 bp, Homo sapiens
ctacagccactagca

SEQ ID NO: 237278 - DNA, 15 bp, Homo sapiens
tctacagccactagc

SEQ ID NO: 237279 - DNA, 15 bp, Homo sapiens
gtctacagccactag

SEQ ID NO: 237280 - DNA, 15 bp, Homo sapiens
ggtctacagccacta

SEQ ID NO: 237281 - DNA, 15 bp, Homo sapiens
gggtctacagccact

SEQ ID NO: 237282 - DNA, 15 bp, Homo sapiens
tgggtctacagccac

SEQ ID NO: 237283 - DNA, 15 bp, Homo sapiens
ttgggtctacagcca

SEQ ID NO: 237284 - DNA, 15 bp, Homo sapiens
attgggtctacagcc

SEQ ID NO: 237285 - DNA, 15 bp, Homo sapiens
cattgggtctacagc

SEQ ID NO: 237286 - DNA, 15 bp, Homo sapiens
gcattgggtctacag

SEQ ID NO: 237287 - DNA, 15 bp, Homo sapiens
tgcattgggtctaca

SEQ ID NO: 237288 - DNA, 15 bp, Homo sapiens
ttgcattgggtctac

SEQ ID NO: 237289 - DNA, 15 bp, Homo sapiens
tttgcattgggtcta

SEQ ID NO: 237290 - DNA, 15 bp, Homo sapiens
gtttgcattgggtct

SEQ ID NO: 237291 - DNA, 15 bp, Homo sapiens
ggtttgcattgggtc

SEQ ID NO: 237292 - DNA, 15 bp, Homo sapiens
gggtttgcattgggt

SEQ ID NO: 237293 - DNA, 15 bp, Homo sapiens
ggggtttgcattggg

SEQ ID NO: 237294 - DNA, 15 bp, Homo sapiens
tggggtttgcattgg

SEQ ID NO: 237295 - DNA, 15 bp, Homo sapiens
gtggggtttgcattg

SEQ ID NO: 237296 - DNA, 15 bp, Homo sapiens
ggtggggtttgcatt

SEQ ID NO: 237297 - DNA, 15 bp, Homo sapiens
gggtggggtttgcat

SEQ ID NO: 237298 - DNA, 15 bp, Homo sapiens
tgggtggggtttgca

SEQ ID NO: 237299 - DNA, 15 bp, Homo sapiens
ttgggtggggtttgc

SEQ ID NO: 237300 - DNA, 15 bp, Homo sapiens
tttgggtggggtttg

SEQ ID NO: 237301 - DNA, 15 bp, Homo sapiens
gtttgggtggggttt

SEQ ID NO: 237302 - DNA, 15 bp, Homo sapiens
ggtttgggtggggtt

SEQ ID NO: 237303 - DNA, 15 bp, Homo sapiens
tggtttgggtggggt

SEQ ID NO: 237304 - DNA, 15 bp, Homo sapiens
ctggtttgggtgggg

SEQ ID NO: 237305 - DNA, 15 bp, Homo sapiens
tctggtttgggtggg

SEQ ID NO: 237306 - DNA, 15 bp, Homo sapiens
ctctggtttgggtgg

SEQ ID NO: 237307 - DNA, 15 bp, Homo sapiens
gctctggtttgggtg

SEQ ID NO: 237308 - DNA, 15 bp, Homo sapiens
ggctctggtttgggt

SEQ ID NO: 237309 - DNA, 15 bp, Homo sapiens
gggctctggtttggg

SEQ ID NO: 237310 - DNA, 15 bp, Homo sapiens
ggggctctggtttgg

SEQ ID NO: 237311 - DNA, 15 bp, Homo sapiens
tggggctctggtttg

SEQ ID NO: 237312 - DNA, 15 bp, Homo sapiens
gtggggctctggttt

SEQ ID NO: 237313 - DNA, 15 bp, Homo sapiens
ggtggggctctggtt

SEQ ID NO: 237314 - DNA, 15 bp, Homo sapiens
gggtggggctctggt

SEQ ID NO: 237315 - DNA, 15 bp, Homo sapiens
tgggtggggctctgg

SEQ ID NO: 237316 - DNA, 15 bp, Homo sapiens
ttgggtggggctctg

SEQ ID NO: 237317 - DNA, 15 bp, Homo sapiens
tttgggtggggctct

SEQ ID NO: 237318 - DNA, 15 bp, Homo sapiens
gtttgggtggggctc

SEQ ID NO: 237319 - DNA, 15 bp, Homo sapiens
ggtttgggtggggct

SEQ ID NO: 237320 - DNA, 15 bp, Homo sapiens
tggtttgggtggggc

SEQ ID NO: 237321 - DNA, 15 bp, Homo sapiens
cctggtttgggtggg

SEQ ID NO: 237322 - DNA, 15 bp, Homo sapiens
ccctggtttgggtgg

SEQ ID NO: 237323 - DNA, 15 bp, Homo sapiens
gccctggtttgggtg

SEQ ID NO: 237324 - DNA, 15 bp, Homo sapiens
agccctggtttgggt

SEQ ID NO: 237325 - DNA, 15 bp, Homo sapiens
aagccctggtttggg

SEQ ID NO: 237326 - DNA, 15 bp, Homo sapiens
aaagccctggtttgg

SEQ ID NO: 237327 - DNA, 15 bp, Homo sapiens
aaaagccctggtttg

SEQ ID NO: 237328 - DNA, 15 bp, Homo sapiens
gaaaagccctggttt

SEQ ID NO: 237329 - DNA, 15 bp, Homo sapiens
agaaaagccctggtt

SEQ ID NO: 237330 - DNA, 15 bp, Homo sapiens
gagaaaagccctggt

SEQ ID NO: 237331 - DNA, 15 bp, Homo sapiens
agagaaaagccctgg

SEQ ID NO: 237332 - DNA, 15 bp, Homo sapiens
aagagaaaagccctg

SEQ ID NO: 237333 - DNA, 15 bp, Homo sapiens
caagagaaaagccct

SEQ ID NO: 237334 - DNA, 15 bp, Homo sapiens
tcaagagaaaagccc

SEQ ID NO: 237335 - DNA, 15 bp, Homo sapiens
ttcaagagaaaagcc

SEQ ID NO: 237336 - DNA, 15 bp, Homo sapiens
attcaagagaaaagc

SEQ ID NO: 237337 - DNA, 15 bp, Homo sapiens
cattcaagagaaaag

SEQ ID NO: 237338 - DNA, 15 bp, Homo sapiens
gcattcaagagaaaa

SEQ ID NO: 237339 - DNA, 15 bp, Homo sapiens
tgcattcaagagaaa

SEQ ID NO: 237340 - DNA, 15 bp, Homo sapiens
atgcattcaagagaa

SEQ ID NO: 237341 - DNA, 15 bp, Homo sapiens
tatgcattcaagaga

SEQ ID NO: 237342 - DNA, 15 bp, Homo sapiens
atatgcattcaagag

SEQ ID NO: 237343 - DNA, 15 bp, Homo sapiens
catatgcattcaaga

SEQ ID NO: 237344 - DNA, 15 bp, Homo sapiens
ccatatgcattcaag

SEQ ID NO: 237345 - DNA, 15 bp, Homo sapiens
gccatatgcattcaa

SEQ ID NO: 237346 - DNA, 15 bp, Homo sapiens
tgccatatgcattca

SEQ ID NO: 237347 - DNA, 15 bp, Homo sapiens
ttgccatatgcattc

SEQ ID NO: 237348 - DNA, 15 bp, Homo sapiens
cttgccatatgcatt

SEQ ID NO: 237349 - DNA, 15 bp, Homo sapiens
tcttgccatatgcat

SEQ ID NO: 237350 - DNA, 15 bp, Homo sapiens
ctcttgccatatgca

SEQ ID NO: 237351 - DNA, 15 bp, Homo sapiens
tctcttgccatatgc

SEQ ID NO: 237352 - DNA, 15 bp, Homo sapiens
ctctcttgccatatg

SEQ ID NO: 237353 - DNA, 15 bp, Homo sapiens
tctctcttgccatat

SEQ ID NO: 237354 - DNA, 15 bp, Homo sapiens
ctctctcttgccata

SEQ ID NO: 237355 - DNA, 15 bp, Homo sapiens
tctctctcttgccat

SEQ ID NO: 237356 - DNA, 15 bp, Homo sapiens
gtctctctcttgcca

SEQ ID NO: 237357 - DNA, 15 bp, Homo sapiens
tgtctctctcttgcc

SEQ ID NO: 237358 - DNA, 15 bp, Homo sapiens
atgtctctctcttgc

SEQ ID NO: 237359 - DNA, 15 bp, Homo sapiens
gatgtctctctcttg

SEQ ID NO: 237360 - DNA, 15 bp, Homo sapiens
ggatgtctctctctt

SEQ ID NO: 237361 - DNA, 15 bp, Homo sapiens
gggatgtctctctct

SEQ ID NO: 237362 - DNA, 15 bp, Homo sapiens
tgggatgtctctctc

SEQ ID NO: 237363 - DNA, 15 bp, Homo sapiens
gtgggatgtctctct

SEQ ID NO: 237364 - DNA, 15 bp, Homo sapiens
agtgggatgtctctc

SEQ ID NO: 237365 - DNA, 15 bp, Homo sapiens
cagtgggatgtctct

SEQ ID NO: 237366 - DNA, 15 bp, Homo sapiens
acagtgggatgtctc

SEQ ID NO: 237367 - DNA, 15 bp, Homo sapiens
gacagtgggatgtct

SEQ ID NO: 237368 - DNA, 15 bp, Homo sapiens
ggacagtgggatgtc

SEQ ID NO: 237369 - DNA, 15 bp, Homo sapiens
tggacagtgggatgt

SEQ ID NO: 237370 - DNA, 15 bp, Homo sapiens
atggacagtgggatg

SEQ ID NO: 237371 - DNA, 15 bp, Homo sapiens
aatggacagtgggat

SEQ ID NO: 237372 - DNA, 15 bp, Homo sapiens
caatggacagtggga

SEQ ID NO: 237373 - DNA, 15 bp, Homo sapiens
acaatggacagtggg

SEQ ID NO: 237374 - DNA, 15 bp, Homo sapiens
cacaatggacagtgg

SEQ ID NO: 237375 - DNA, 15 bp, Homo sapiens
acacaatggacagtg

SEQ ID NO: 237376 - DNA, 15 bp, Homo sapiens
aacacaatggacagt

SEQ ID NO: 237377 - DNA, 15 bp, Homo sapiens
caacacaatggacag

SEQ ID NO: 237378 - DNA, 15 bp, Homo sapiens
tcaacacaatggaca

SEQ ID NO: 237379 - DNA, 15 bp, Homo sapiens
ttcaacacaatggac

SEQ ID NO: 237380 - DNA, 15 bp, Homo sapiens
cttcaacacaatgga

SEQ ID NO: 237381 - DNA, 15 bp, Homo sapiens
ccttcaacacaatgg

SEQ ID NO: 237382 - DNA, 15 bp, Homo sapiens
accttcaacacaatg

SEQ ID NO: 237383 - DNA, 15 bp, Homo sapiens
taccttcaacacaat

SEQ ID NO: 237384 - DNA, 15 bp, Homo sapiens
ctaccttcaacacaa

SEQ ID NO: 237385 - DNA, 15 bp, Homo sapiens
tctaccttcaacaca

SEQ ID NO: 237386 - DNA, 15 bp, Homo sapiens
ttctaccttcaacac

SEQ ID NO: 237387 - DNA, 15 bp, Homo sapiens
tttctaccttcaaca

SEQ ID NO: 237388 - DNA, 15 bp, Homo sapiens
ttttctaccttcaac

SEQ ID NO: 237389 - DNA, 15 bp, Homo sapiens
attttctaccttcaa

SEQ ID NO: 237390 - DNA, 15 bp, Homo sapiens
cattttctaccttca

SEQ ID NO: 237391 - DNA, 15 bp, Homo sapiens
gcattttctaccttc

SEQ ID NO: 237392 - DNA, 15 bp, Homo sapiens
tgcattttctacctt

SEQ ID NO: 237393 - DNA, 15 bp, Homo sapiens
ctgcattttctacct

SEQ ID NO: 237394 - DNA, 15 bp, Homo sapiens
tctgcattttctacc

SEQ ID NO: 237395 - DNA, 15 bp, Homo sapiens
ttctgcattttctac

SEQ ID NO: 237396 - DNA, 15 bp, Homo sapiens
attctgcattttcta

SEQ ID NO: 237397 - DNA, 15 bp, Homo sapiens
cattctgcattttct

SEQ ID NO: 237398 - DNA, 15 bp, Homo sapiens
acattctgcattttc

SEQ ID NO: 237399 - DNA, 15 bp, Homo sapiens
cacattctgcatttt

SEQ ID NO: 237400 - DNA, 15 bp, Homo sapiens
ccacattctgcattt

SEQ ID NO: 237401 - DNA, 15 bp, Homo sapiens
gccacattctgcatt

SEQ ID NO: 237402 - DNA, 15 bp, Homo sapiens
tgccacattctgcat

SEQ ID NO: 237403 - DNA, 15 bp, Homo sapiens
ctgccacattctgca

SEQ ID NO: 237404 - DNA, 15 bp, Homo sapiens
tctgccacattctgc

SEQ ID NO: 237405 - DNA, 15 bp, Homo sapiens
ctctgccacattctg

SEQ ID NO: 237406 - DNA, 15 bp, Homo sapiens
actctgccacattct

SEQ ID NO: 237407 - DNA, 15 bp, Homo sapiens
cactctgccacattc

SEQ ID NO: 237408 - DNA, 15 bp, Homo sapiens
tcactctgccacatt

SEQ ID NO: 237409 - DNA, 15 bp, Homo sapiens
ctcactctgccacat

SEQ ID NO: 237410 - DNA, 15 bp, Homo sapiens
gctcactctgccaca

SEQ ID NO: 237411 - DNA, 15 bp, Homo sapiens
agctcactctgccac

SEQ ID NO: 237412 - DNA, 15 bp, Homo sapiens
tagctcactctgcca

SEQ ID NO: 237413 - DNA, 15 bp, Homo sapiens
ttagctcactctgcc

SEQ ID NO: 237414 - DNA, 15 bp, Homo sapiens
gttagctcactctgc

SEQ ID NO: 237415 - DNA, 15 bp, Homo sapiens
ggttagctcactctg

SEQ ID NO: 237416 - DNA, 15 bp, Homo sapiens
gggttagctcactct

SEQ ID NO: 237417 - DNA, 15 bp, Homo sapiens
cgggttagctcactc

SEQ ID NO: 237418 - DNA, 15 bp, Homo sapiens
gcgggttagctcact

SEQ ID NO: 237419 - DNA, 15 bp, Homo sapiens
agcgggttagctcac

SEQ ID NO: 237420 - DNA, 15 bp, Homo sapiens
aagcgggttagctca

SEQ ID NO: 237421 - DNA, 15 bp, Homo sapiens
caagcgggttagctc

SEQ ID NO: 237422 - DNA, 15 bp, Homo sapiens
ccaagcgggttagct

SEQ ID NO: 237423 - DNA, 15 bp, Homo sapiens
accaagcgggttagc

SEQ ID NO: 237424 - DNA, 15 bp, Homo sapiens
caccaagcgggttag

SEQ ID NO: 237425 - DNA, 15 bp, Homo sapiens
ccaccaagcgggtta

SEQ ID NO: 237426 - DNA, 15 bp, Homo sapiens
gccaccaagcgggtt

SEQ ID NO: 237427 - DNA, 15 bp, Homo sapiens
ggccaccaagcgggt

SEQ ID NO: 237428 - DNA, 15 bp, Homo sapiens
gggccaccaagcggg

SEQ ID NO: 237429 - DNA, 15 bp, Homo sapiens
agggccaccaagcgg

SEQ ID NO: 237430 - DNA, 15 bp, Homo sapiens
gagggccaccaagcg

SEQ ID NO: 237431 - DNA, 15 bp, Homo sapiens
tgagggccaccaagc

SEQ ID NO: 237432 - DNA, 15 bp, Homo sapiens
gtgagggccaccaag

SEQ ID NO: 237433 - DNA, 15 bp, Homo sapiens
ggtgagggccaccaa

SEQ ID NO: 237434 - DNA, 15 bp, Homo sapiens
gggtgagggccacca

SEQ ID NO: 237435 - DNA, 15 bp, Homo sapiens
agggtgagggccacc

SEQ ID NO: 237436 - DNA, 15 bp, Homo sapiens
cagggtgagggccac

SEQ ID NO: 237437 - DNA, 15 bp, Homo sapiens
ccagggtgagggcca

SEQ ID NO: 237438 - DNA, 15 bp, Homo sapiens
gccagggtgagggcc

SEQ ID NO: 237439 - DNA, 15 bp, Homo sapiens
tgccagggtgagggc

SEQ ID NO: 237440 - DNA, 15 bp, Homo sapiens
ttgccagggtgaggg

SEQ ID NO: 237441 - DNA, 15 bp, Homo sapiens
cttgccagggtgagg

SEQ ID NO: 237442 - DNA, 15 bp, Homo sapiens
tcttgccagggtgag

SEQ ID NO: 237443 - DNA, 15 bp, Homo sapiens
ctcttgccagggtga

SEQ ID NO: 237444 - DNA, 15 bp, Homo sapiens
tctcttgccagggtg

SEQ ID NO: 237445 - DNA, 15 bp, Homo sapiens
gtctcttgccagggt

SEQ ID NO: 237446 - DNA, 15 bp, Homo sapiens
tgtctcttgccaggg

SEQ ID NO: 237447 - DNA, 15 bp, Homo sapiens
ctgtctcttgccagg

SEQ ID NO: 237448 - DNA, 15 bp, Homo sapiens
tctgtctcttgccag

SEQ ID NO: 237449 - DNA, 15 bp, Homo sapiens
atctgtctcttgcca

SEQ ID NO: 237450 - DNA, 15 bp, Homo sapiens
aatctgtctcttgcc

SEQ ID NO: 237451 - DNA, 15 bp, Homo sapiens
aaatctgtctcttgc

SEQ ID NO: 237452 - DNA, 15 bp, Homo sapiens
aaaatctgtctcttg

SEQ ID NO: 237453 - DNA, 15 bp, Homo sapiens
gaaaatctgtctctt

SEQ ID NO: 237454 - DNA, 15 bp, Homo sapiens
ggaaaatctgtctct

SEQ ID NO: 237455 - DNA, 15 bp, Homo sapiens
aggaaaatctgtctc

SEQ ID NO: 237456 - DNA, 15 bp, Homo sapiens
aaggaaaatctgtct

SEQ ID NO: 237457 - DNA, 15 bp, Homo sapiens
gaaggaaaatctgtc

SEQ ID NO: 237458 - DNA, 15 bp, Homo sapiens
ggaaggaaaatctgt

SEQ ID NO: 237459 - DNA, 15 bp, Homo sapiens
aggaaggaaaatctg

SEQ ID NO: 237460 - DNA, 15 bp, Homo sapiens
gaggaaggaaaatct

SEQ ID NO: 237461 - DNA, 15 bp, Homo sapiens
agaggaaggaaaatc

SEQ ID NO: 237462 - DNA, 15 bp, Homo sapiens
gagaggaaggaaaat

SEQ ID NO: 237463 - DNA, 15 bp, Homo sapiens
ggagaggaaggaaaa

SEQ ID NO: 237464 - DNA, 15 bp, Homo sapiens
gggagaggaaggaaa

SEQ ID NO: 237465 - DNA, 15 bp, Homo sapiens
agggagaggaaggaa

SEQ ID NO: 237466 - DNA, 15 bp, Homo sapiens
cagggagaggaagga

SEQ ID NO: 237467 - DNA, 15 bp, Homo sapiens
tcagggagaggaagg

SEQ ID NO: 237468 - DNA, 15 bp, Homo sapiens
ttcagggagaggaag

SEQ ID NO: 237469 - DNA, 15 bp, Homo sapiens
cttcagggagaggaa

SEQ ID NO: 237470 - DNA, 15 bp, Homo sapiens
ccttcagggagagga

SEQ ID NO: 237471 - DNA, 15 bp, Homo sapiens
cccttcagggagagg

SEQ ID NO: 237472 - DNA, 15 bp, Homo sapiens
acccttcagggagag

SEQ ID NO: 237473 - DNA, 15 bp, Homo sapiens
aacccttcagggaga

SEQ ID NO: 237474 - DNA, 15 bp, Homo sapiens
taacccttcagggag

SEQ ID NO: 237475 - DNA, 15 bp, Homo sapiens
ttaacccttcaggga

SEQ ID NO: 237476 - DNA, 15 bp, Homo sapiens
cttaacccttcaggg

SEQ ID NO: 237477 - DNA, 15 bp, Homo sapiens
tcttaacccttcagg

SEQ ID NO: 237478 - DNA, 15 bp, Homo sapiens
gtcttaacccttcag

SEQ ID NO: 237479 - DNA, 15 bp, Homo sapiens
tgtcttaacccttca

SEQ ID NO: 237480 - DNA, 15 bp, Homo sapiens
ttgtcttaacccttc

SEQ ID NO: 237481 - DNA, 15 bp, Homo sapiens
tttgtcttaaccctt

SEQ ID NO: 237482 - DNA, 15 bp, Homo sapiens
ctttgtcttaaccct

SEQ ID NO: 237483 - DNA, 15 bp, Homo sapiens
tctttgtcttaaccc

SEQ ID NO: 237484 - DNA, 15 bp, Homo sapiens
ttctttgtcttaacc

SEQ ID NO: 237485 - DNA, 15 bp, Homo sapiens
tttctttgtcttaac

SEQ ID NO: 237486 - DNA, 15 bp, Homo sapiens
ttttctttgtcttaa

SEQ ID NO: 237487 - DNA, 15 bp, Homo sapiens
attttctttgtctta

SEQ ID NO: 237488 - DNA, 15 bp, Homo sapiens
tattttctttgtctt

SEQ ID NO: 237489 - DNA, 15 bp, Homo sapiens
atattttctttgtct

SEQ ID NO: 237490 - DNA, 15 bp, Homo sapiens
gatattttctttgtc

SEQ ID NO: 237491 - DNA, 15 bp, Homo sapiens
agatattttctttgt

SEQ ID NO: 237492 - DNA, 15 bp, Homo sapiens
cagatattttctttg

SEQ ID NO: 237493 - DNA, 15 bp, Homo sapiens
tcagatattttcttt

SEQ ID NO: 237494 - DNA, 15 bp, Homo sapiens
ttcagatattttctt

SEQ ID NO: 237495 - DNA, 15 bp, Homo sapiens
tttcagatattttct

SEQ ID NO: 237496 - DNA, 15 bp, Homo sapiens
gtttcagatattttc

SEQ ID NO: 237497 - DNA, 15 bp, Homo sapiens
agtttcagatatttt

SEQ ID NO: 237498 - DNA, 15 bp, Homo sapiens
aagtttcagatattt

SEQ ID NO: 237499 - DNA, 15 bp, Homo sapiens
aaagtttcagatatt

SEQ ID NO: 237500 - DNA, 15 bp, Homo sapiens
aaaagtttcagatat

SEQ ID NO: 237501 - DNA, 15 bp, Homo sapiens
gaaaagtttcagata

SEQ ID NO: 237502 - DNA, 15 bp, Homo sapiens
ggaaaagtttcagat

SEQ ID NO: 237503 - DNA, 15 bp, Homo sapiens
aggaaaagtttcaga

SEQ ID NO: 237504 - DNA, 15 bp, Homo sapiens
taggaaaagtttcag

SEQ ID NO: 237505 - DNA, 15 bp, Homo sapiens
ctaggaaaagtttca

SEQ ID NO: 237506 - DNA, 15 bp, Homo sapiens
gctaggaaaagtttc

SEQ ID NO: 237507 - DNA, 15 bp, Homo sapiens
agctaggaaaagttt

SEQ ID NO: 237508 - DNA, 15 bp, Homo sapiens
cagctaggaaaagtt

SEQ ID NO: 237509 - DNA, 15 bp, Homo sapiens
tcagctaggaaaagt

SEQ ID NO: 237510 - DNA, 15 bp, Homo sapiens
ctcagctaggaaaag

SEQ ID NO: 237511 - DNA, 15 bp, Homo sapiens
gctcagctaggaaaa

SEQ ID NO: 237512 - DNA, 15 bp, Homo sapiens
ggctcagctaggaaa

SEQ ID NO: 237513 - DNA, 15 bp, Homo sapiens
aggctcagctaggaa

SEQ ID NO: 237514 - DNA, 15 bp, Homo sapiens
aaggctcagctagga

SEQ ID NO: 237515 - DNA, 15 bp, Homo sapiens
aaaggctcagctagg

SEQ ID NO: 237516 - DNA, 15 bp, Homo sapiens
caaaggctcagctag

SEQ ID NO: 237517 - DNA, 15 bp, Homo sapiens
gcaaaggctcagcta

SEQ ID NO: 237518 - DNA, 15 bp, Homo sapiens
agcaaaggctcagct

SEQ ID NO: 237519 - DNA, 15 bp, Homo sapiens
gagcaaaggctcagc

SEQ ID NO: 237520 - DNA, 15 bp, Homo sapiens
ggagcaaaggctcag

SEQ ID NO: 237521 - DNA, 15 bp, Homo sapiens
tggagcaaaggctca

SEQ ID NO: 237522 - DNA, 15 bp, Homo sapiens
ctggagcaaaggctc

SEQ ID NO: 237523 - DNA, 15 bp, Homo sapiens
tctggagcaaaggct

SEQ ID NO: 237524 - DNA, 15 bp, Homo sapiens
ttctggagcaaaggc

SEQ ID NO: 237525 - DNA, 15 bp, Homo sapiens
gttctggagcaaagg

SEQ ID NO: 237526 - DNA, 15 bp, Homo sapiens
agttctggagcaaag

SEQ ID NO: 237527 - DNA, 15 bp, Homo sapiens
gagttctggagcaaa

SEQ ID NO: 237528 - DNA, 15 bp, Homo sapiens
tgagttctggagcaa

SEQ ID NO: 237529 - DNA, 15 bp, Homo sapiens
ctgagttctggagca

SEQ ID NO: 237530 - DNA, 15 bp, Homo sapiens
tctgagttctggagc

SEQ ID NO: 237531 - DNA, 15 bp, Homo sapiens
gtctgagttctggag

SEQ ID NO: 237532 - DNA, 15 bp, Homo sapiens
tgtctgagttctgga

SEQ ID NO: 237533 - DNA, 15 bp, Homo sapiens
gtgtctgagttctgg

SEQ ID NO: 237534 - DNA, 15 bp, Homo sapiens
agtgtctgagttctg

SEQ ID NO: 237535 - DNA, 15 bp, Homo sapiens
aagtgtctgagttct

SEQ ID NO: 237536 - DNA, 15 bp, Homo sapiens
aaagtgtctgagttc

SEQ ID NO: 237537 - DNA, 15 bp, Homo sapiens
aaaagtgtctgagtt

SEQ ID NO: 237538 - DNA, 15 bp, Homo sapiens
caaaagtgtctgagt

SEQ ID NO: 237539 - DNA, 15 bp, Homo sapiens
gcaaaagtgtctgag

SEQ ID NO: 237540 - DNA, 15 bp, Homo sapiens
cgcaaaagtgtctga

SEQ ID NO: 237541 - DNA, 15 bp, Homo sapiens
tcgcaaaagtgtctg

SEQ ID NO: 237542 - DNA, 15 bp, Homo sapiens
gtcgcaaaagtgtct

SEQ ID NO: 237543 - DNA, 15 bp, Homo sapiens
cgtcgcaaaagtgtc

SEQ ID NO: 237544 - DNA, 15 bp, Homo sapiens
ccgtcgcaaaagtgt

SEQ ID NO: 237545 - DNA, 15 bp, Homo sapiens
tccgtcgcaaaagtg

SEQ ID NO: 237546 - DNA, 15 bp, Homo sapiens
ttccgtcgcaaaagt

SEQ ID NO: 237547 - DNA, 15 bp, Homo sapiens
cttccgtcgcaaaag

SEQ ID NO: 237548 - DNA, 15 bp, Homo sapiens
acttccgtcgcaaaa

SEQ ID NO: 237549 - DNA, 15 bp, Homo sapiens
cacttccgtcgcaaa

SEQ ID NO: 237550 - DNA, 15 bp, Homo sapiens
ccacttccgtcgcaa

SEQ ID NO: 237551 - DNA, 15 bp, Homo sapiens
cccacttccgtcgca

SEQ ID NO: 237552 - DNA, 15 bp, Homo sapiens
ccccacttccgtcgc

SEQ ID NO: 237553 - DNA, 15 bp, Homo sapiens
gccccacttccgtcg

SEQ ID NO: 237554 - DNA, 15 bp, Homo sapiens
tgccccacttccgtc

SEQ ID NO: 237555 - DNA, 15 bp, Homo sapiens
atgccccacttccgt

SEQ ID NO: 237556 - DNA, 15 bp, Homo sapiens
aatgccccacttccg

SEQ ID NO: 237557 - DNA, 15 bp, Homo sapiens
caatgccccacttcc

SEQ ID NO: 237558 - DNA, 15 bp, Homo sapiens
ccaatgccccacttc

SEQ ID NO: 237559 - DNA, 15 bp, Homo sapiens
cccaatgccccactt

SEQ ID NO: 237560 - DNA, 15 bp, Homo sapiens
ccccaatgccccact

SEQ ID NO: 237561 - DNA, 15 bp, Homo sapiens
tccccaatgccccac

SEQ ID NO: 237562 - DNA, 15 bp, Homo sapiens
ctccccaatgcccca

SEQ ID NO: 237563 - DNA, 15 bp, Homo sapiens
cctccccaatgcccc

SEQ ID NO: 237564 - DNA, 15 bp, Homo sapiens
gcctccccaatgccc

SEQ ID NO: 237565 - DNA, 15 bp, Homo sapiens
tgcctccccaatgcc

SEQ ID NO: 237566 - DNA, 15 bp, Homo sapiens
ctgcctccccaatgc

SEQ ID NO: 237567 - DNA, 15 bp, Homo sapiens
tctgcctccccaatg

SEQ ID NO: 237568 - DNA, 15 bp, Homo sapiens
ttctgcctccccaat

SEQ ID NO: 237569 - DNA, 15 bp, Homo sapiens
tttctgcctccccaa

SEQ ID NO: 237570 - DNA, 15 bp, Homo sapiens
ttttctgcctcccca

SEQ ID NO: 237571 - DNA, 15 bp, Homo sapiens
tttttctgcctcccc

SEQ ID NO: 237572 - DNA, 15 bp, Homo sapiens
ctttttctgcctccc

SEQ ID NO: 237573 - DNA, 15 bp, Homo sapiens
gctttttctgcctcc

SEQ ID NO: 237574 - DNA, 15 bp, Homo sapiens
ggctttttctgcctc

SEQ ID NO: 237575 - DNA, 15 bp, Homo sapiens
tggctttttctgcct

SEQ ID NO: 237576 - DNA, 15 bp, Homo sapiens
ttggctttttctgcc

SEQ ID NO: 237577 - DNA, 15 bp, Homo sapiens
attggctttttctgc

SEQ ID NO: 237578 - DNA, 15 bp, Homo sapiens
tattggctttttctg

SEQ ID NO: 237579 - DNA, 15 bp, Homo sapiens
gtattggctttttct

SEQ ID NO: 237580 - DNA, 15 bp, Homo sapiens
tgtattggctttttc

SEQ ID NO: 237581 - DNA, 15 bp, Homo sapiens
atgtattggcttttt

SEQ ID NO: 237582 - DNA, 15 bp, Homo sapiens
tatgtattggctttt

SEQ ID NO: 237583 - DNA, 15 bp, Homo sapiens
ttatgtattggcttt

SEQ ID NO: 237584 - DNA, 15 bp, Homo sapiens
tttatgtattggctt

SEQ ID NO: 237585 - DNA, 15 bp, Homo sapiens
ttttatgtattggct

SEQ ID NO: 237586 - DNA, 15 bp, Homo sapiens
tttttatgtattggc

SEQ ID NO: 237587 - DNA, 15 bp, Homo sapiens
ttttttatgtattgg

SEQ ID NO: 237588 - DNA, 15 bp, Homo sapiens
cttttttatgtattg

SEQ ID NO: 237589 - DNA, 15 bp, Homo sapiens
gcttttttatgtatt

SEQ ID NO: 237590 - DNA, 15 bp, Homo sapiens
tgcttttttatgtat

SEQ ID NO: 237591 - DNA, 15 bp, Homo sapiens
ctgcttttttatgta

SEQ ID NO: 237592 - DNA, 15 bp, Homo sapiens
gctgcttttttatgt

SEQ ID NO: 237593 - DNA, 15 bp, Homo sapiens
tgctgcttttttatg

SEQ ID NO: 237594 - DNA, 15 bp, Homo sapiens
ttgctgcttttttat

SEQ ID NO: 237595 - DNA, 15 bp, Homo sapiens
gttgctgctttttta

SEQ ID NO: 237596 - DNA, 15 bp, Homo sapiens
ggttgctgctttttt

SEQ ID NO: 237597 - DNA, 15 bp, Homo sapiens
aggttgctgcttttt

SEQ ID NO: 237598 - DNA, 15 bp, Homo sapiens
gaggttgctgctttt

SEQ ID NO: 237599 - DNA, 15 bp, Homo sapiens
tgaggttgctgcttt

SEQ ID NO: 237600 - DNA, 15 bp, Homo sapiens
gtgaggttgctgctt

SEQ ID NO: 237601 - DNA, 15 bp, Homo sapiens
ggtgaggttgctgct

SEQ ID NO: 237602 - DNA, 15 bp, Homo sapiens
tggtgaggttgctgc

SEQ ID NO: 237603 - DNA, 15 bp, Homo sapiens
gtggtgaggttgctg

SEQ ID NO: 237604 - DNA, 15 bp, Homo sapiens
ggtggtgaggttgct

SEQ ID NO: 237605 - DNA, 15 bp, Homo sapiens
aggtggtgaggttgc

SEQ ID NO: 237606 - DNA, 15 bp, Homo sapiens
gaggtggtgaggttg

SEQ ID NO: 237607 - DNA, 15 bp, Homo sapiens
tgaggtggtgaggtt

SEQ ID NO: 237608 - DNA, 15 bp, Homo sapiens
gtgaggtggtgaggt

SEQ ID NO: 237609 - DNA, 15 bp, Homo sapiens
ggtgaggtggtgagg

SEQ ID NO: 237610 - DNA, 15 bp, Homo sapiens
aggtgaggtggtgag

SEQ ID NO: 237611 - DNA, 15 bp, Homo sapiens
caggtgaggtggtga

SEQ ID NO: 237612 - DNA, 15 bp, Homo sapiens
ccaggtgaggtggtg

SEQ ID NO: 237613 - DNA, 15 bp, Homo sapiens
cccaggtgaggtggt

SEQ ID NO: 237614 - DNA, 15 bp, Homo sapiens
acccaggtgaggtgg

SEQ ID NO: 237615 - DNA, 15 bp, Homo sapiens
gacccaggtgaggtg

SEQ ID NO: 237616 - DNA, 15 bp, Homo sapiens
ggacccaggtgaggt

SEQ ID NO: 237617 - DNA, 15 bp, Homo sapiens
gggacccaggtgagg

SEQ ID NO: 237618 - DNA, 15 bp, Homo sapiens
ggggacccaggtgag

SEQ ID NO: 237619 - DNA, 15 bp, Homo sapiens
tggggacccaggtga

SEQ ID NO: 237620 - DNA, 15 bp, Homo sapiens
atggggacccaggtg

SEQ ID NO: 237621 - DNA, 15 bp, Homo sapiens
catggggacccaggt

SEQ ID NO: 237622 - DNA, 15 bp, Homo sapiens
tcatggggacccagg

SEQ ID NO: 237623 - DNA, 15 bp, Homo sapiens
ttcatggggacccag

SEQ ID NO: 237624 - DNA, 15 bp, Homo sapiens
tttcatggggaccca

SEQ ID NO: 237625 - DNA, 15 bp, Homo sapiens
gtttcatggggaccc

SEQ ID NO: 237626 - DNA, 15 bp, Homo sapiens
ggtttcatggggacc

SEQ ID NO: 237627 - DNA, 15 bp, Homo sapiens
tggtttcatggggac

SEQ ID NO: 237628 - DNA, 15 bp, Homo sapiens
atggtttcatgggga

SEQ ID NO: 237629 - DNA, 15 bp, Homo sapiens
aatggtttcatgggg

SEQ ID NO: 237630 - DNA, 15 bp, Homo sapiens
gaatggtttcatggg

SEQ ID NO: 237631 - DNA, 15 bp, Homo sapiens
ggaatggtttcatgg

SEQ ID NO: 237632 - DNA, 15 bp, Homo sapiens
tggaatggtttcatg

SEQ ID NO: 237633 - DNA, 15 bp, Homo sapiens
gtggaatggtttcat

SEQ ID NO: 237634 - DNA, 15 bp, Homo sapiens
ggtggaatggtttca

SEQ ID NO: 237635 - DNA, 15 bp, Homo sapiens
gggtggaatggtttc

SEQ ID NO: 237636 - DNA, 15 bp, Homo sapiens
tgggtggaatggttt

SEQ ID NO: 237637 - DNA, 15 bp, Homo sapiens
ctgggtggaatggtt

SEQ ID NO: 237638 - DNA, 15 bp, Homo sapiens
tctgggtggaatggt

SEQ ID NO: 237639 - DNA, 15 bp, Homo sapiens
atctgggtggaatgg

SEQ ID NO: 237640 - DNA, 15 bp, Homo sapiens
catctgggtggaatg

SEQ ID NO: 237641 - DNA, 15 bp, Homo sapiens
tcatctgggtggaat

SEQ ID NO: 237642 - DNA, 15 bp, Homo sapiens
ctcatctgggtggaa

SEQ ID NO: 237643 - DNA, 15 bp, Homo sapiens
actcatctgggtgga

SEQ ID NO: 237644 - DNA, 15 bp, Homo sapiens
cactcatctgggtgg

SEQ ID NO: 237645 - DNA, 15 bp, Homo sapiens
tcactcatctgggtg

SEQ ID NO: 237646 - DNA, 15 bp, Homo sapiens
ctcactcatctgggt

SEQ ID NO: 237647 - DNA, 15 bp, Homo sapiens
actcactcatctggg

SEQ ID NO: 237648 - DNA, 15 bp, Homo sapiens
gactcactcatctgg

SEQ ID NO: 237649 - DNA, 15 bp, Homo sapiens
tgactcactcatctg

SEQ ID NO: 237650 - DNA, 15 bp, Homo sapiens
ctgactcactcatct

SEQ ID NO: 237651 - DNA, 15 bp, Homo sapiens
actgactcactcatc

SEQ ID NO: 237652 - DNA, 15 bp, Homo sapiens
cactgactcactcat

SEQ ID NO: 237653 - DNA, 15 bp, Homo sapiens
ccactgactcactca

SEQ ID NO: 237654 - DNA, 15 bp, Homo sapiens
cccactgactcactc

SEQ ID NO: 237655 - DNA, 15 bp, Homo sapiens
acccactgactcact

SEQ ID NO: 237656 - DNA, 15 bp, Homo sapiens
cacccactgactcac

SEQ ID NO: 237657 - DNA, 15 bp, Homo sapiens
acacccactgactca

SEQ ID NO: 237658 - DNA, 15 bp, Homo sapiens
aacacccactgactc

SEQ ID NO: 237659 - DNA, 15 bp, Homo sapiens
gaacacccactgact

SEQ ID NO: 237660 - DNA, 15 bp, Homo sapiens
agaacacccactgac

SEQ ID NO: 237661 - DNA, 15 bp, Homo sapiens
aagaacacccactga

SEQ ID NO: 237662 - DNA, 15 bp, Homo sapiens
aaagaacacccactg

SEQ ID NO: 237663 - DNA, 15 bp, Homo sapiens
aaaagaacacccact

SEQ ID NO: 237664 - DNA, 15 bp, Homo sapiens
gaaaagaacacccac

SEQ ID NO: 237665 - DNA, 15 bp, Homo sapiens
tgaaaagaacaccca

SEQ ID NO: 237666 - DNA, 15 bp, Homo sapiens
atgaaaagaacaccc

SEQ ID NO: 237667 - DNA, 15 bp, Homo sapiens
catgaaaagaacacc

SEQ ID NO: 237668 - DNA, 15 bp, Homo sapiens
ccatgaaaagaacac

SEQ ID NO: 237669 - DNA, 15 bp, Homo sapiens
gccatgaaaagaaca

SEQ ID NO: 237670 - DNA, 15 bp, Homo sapiens
ggccatgaaaagaac

SEQ ID NO: 237671 - DNA, 15 bp, Homo sapiens
aggccatgaaaagaa

SEQ ID NO: 237672 - DNA, 15 bp, Homo sapiens
caggccatgaaaaga

SEQ ID NO: 237673 - DNA, 15 bp, Homo sapiens
acaggccatgaaaag

SEQ ID NO: 237674 - DNA, 15 bp, Homo sapiens
gacaggccatgaaaa

SEQ ID NO: 237675 - DNA, 15 bp, Homo sapiens
cgacaggccatgaaa

SEQ ID NO: 237676 - DNA, 15 bp, Homo sapiens
ccgacaggccatgaa

SEQ ID NO: 237677 - DNA, 15 bp, Homo sapiens
gccgacaggccatga

SEQ ID NO: 237678 - DNA, 15 bp, Homo sapiens
agccgacaggccatg

SEQ ID NO: 237679 - DNA, 15 bp, Homo sapiens
gagccgacaggccat

SEQ ID NO: 237680 - DNA, 15 bp, Homo sapiens
cgagccgacaggcca

SEQ ID NO: 237681 - DNA, 15 bp, Homo sapiens
ccgagccgacaggcc

SEQ ID NO: 237682 - DNA, 15 bp, Homo sapiens
accgagccgacaggc

SEQ ID NO: 237683 - DNA, 15 bp, Homo sapiens
caccgagccgacagg

SEQ ID NO: 237684 - DNA, 15 bp, Homo sapiens
ccaccgagccgacag

SEQ ID NO: 237685 - DNA, 15 bp, Homo sapiens
gccaccgagccgaca

SEQ ID NO: 237686 - DNA, 15 bp, Homo sapiens
tgccaccgagccgac

SEQ ID NO: 237687 - DNA, 15 bp, Homo sapiens
gtgccaccgagccga

SEQ ID NO: 237688 - DNA, 15 bp, Homo sapiens
ggtgccaccgagccg

SEQ ID NO: 237689 - DNA, 15 bp, Homo sapiens
aggtgccaccgagcc

SEQ ID NO: 237690 - DNA, 15 bp, Homo sapiens
caggtgccaccgagc

SEQ ID NO: 237691 - DNA, 15 bp, Homo sapiens
tcaggtgccaccgag

SEQ ID NO: 237692 - DNA, 15 bp, Homo sapiens
ctcaggtgccaccga

SEQ ID NO: 237693 - DNA, 15 bp, Homo sapiens
cctcaggtgccaccg

SEQ ID NO: 237694 - DNA, 15 bp, Homo sapiens
gcctcaggtgccacc

SEQ ID NO: 237695 - DNA, 15 bp, Homo sapiens
agcctcaggtgccac

SEQ ID NO: 237696 - DNA, 15 bp, Homo sapiens
cagcctcaggtgcca

SEQ ID NO: 237697 - DNA, 15 bp, Homo sapiens
gcagcctcaggtgcc

SEQ ID NO: 237698 - DNA, 15 bp, Homo sapiens
tgcagcctcaggtgc

SEQ ID NO: 237699 - DNA, 15 bp, Homo sapiens
ctgcagcctcaggtg

SEQ ID NO: 237700 - DNA, 15 bp, Homo sapiens
actgcagcctcaggt

SEQ ID NO: 237701 - DNA, 15 bp, Homo sapiens
cactgcagcctcagg

SEQ ID NO: 237702 - DNA, 15 bp, Homo sapiens
tcactgcagcctcag

SEQ ID NO: 237703 - DNA, 15 bp, Homo sapiens
gtcactgcagcctca

SEQ ID NO: 237704 - DNA, 15 bp, Homo sapiens
ggtcactgcagcctc

SEQ ID NO: 237705 - DNA, 15 bp, Homo sapiens
gggtcactgcagcct

SEQ ID NO: 237706 - DNA, 15 bp, Homo sapiens
ggggtcactgcagcc

SEQ ID NO: 237707 - DNA, 15 bp, Homo sapiens
gggggtcactgcagc

SEQ ID NO: 237708 - DNA, 15 bp, Homo sapiens
tgggggtcactgcag

SEQ ID NO: 237709 - DNA, 15 bp, Homo sapiens
ctgggggtcactgca

SEQ ID NO: 237710 - DNA, 15 bp, Homo sapiens
actgggggtcactgc

SEQ ID NO: 237711 - DNA, 15 bp, Homo sapiens
cactgggggtcactg

SEQ ID NO: 237712 - DNA, 15 bp, Homo sapiens
gcactgggggtcact

SEQ ID NO: 237713 - DNA, 15 bp, Homo sapiens
agcactgggggtcac

SEQ ID NO: 237714 - DNA, 15 bp, Homo sapiens
cagcactgggggtca

SEQ ID NO: 237715 - DNA, 15 bp, Homo sapiens
gcagcactgggggtc

SEQ ID NO: 237716 - DNA, 15 bp, Homo sapiens
agcagcactgggggt

SEQ ID NO: 237717 - DNA, 15 bp, Homo sapiens
aagcagcactggggg

SEQ ID NO: 237718 - DNA, 15 bp, Homo sapiens
gaagcagcactgggg

SEQ ID NO: 237719 - DNA, 15 bp, Homo sapiens
tgaagcagcactggg

SEQ ID NO: 237720 - DNA, 15 bp, Homo sapiens
ctgaagcagcactgg

SEQ ID NO: 237721 - DNA, 15 bp, Homo sapiens
cctgaagcagcactg

SEQ ID NO: 237722 - DNA, 15 bp, Homo sapiens
acctgaagcagcact

SEQ ID NO: 237723 - DNA, 15 bp, Homo sapiens
cacctgaagcagcac

SEQ ID NO: 237724 - DNA, 15 bp, Homo sapiens
tcacctgaagcagca

SEQ ID NO: 237725 - DNA, 15 bp, Homo sapiens
ttcacctgaagcagc

SEQ ID NO: 237726 - DNA, 15 bp, Homo sapiens
attcacctgaagcag

SEQ ID NO: 237727 - DNA, 15 bp, Homo sapiens
cattcacctgaagca

SEQ ID NO: 237728 - DNA, 15 bp, Homo sapiens
tcattcacctgaagc

SEQ ID NO: 237729 - DNA, 15 bp, Homo sapiens
ctcattcacctgaag

SEQ ID NO: 237730 - DNA, 15 bp, Homo sapiens
gctcattcacctgaa

SEQ ID NO: 237731 - DNA, 15 bp, Homo sapiens
tgctcattcacctga

SEQ ID NO: 237732 - DNA, 15 bp, Homo sapiens
gtgctcattcacctg

SEQ ID NO: 237733 - DNA, 15 bp, Homo sapiens
tgtgctcattcacct

SEQ ID NO: 237734 - DNA, 15 bp, Homo sapiens
gtgtgctcattcacc

SEQ ID NO: 237735 - DNA, 15 bp, Homo sapiens
tgtgtgctcattcac

SEQ ID NO: 237736 - DNA, 15 bp, Homo sapiens
ctgtgtgctcattca

SEQ ID NO: 237737 - DNA, 15 bp, Homo sapiens
tctgtgtgctcattc

SEQ ID NO: 237738 - DNA, 15 bp, Homo sapiens
ctctgtgtgctcatt

SEQ ID NO: 237739 - DNA, 15 bp, Homo sapiens
gctctgtgtgctcat

SEQ ID NO: 237740 - DNA, 15 bp, Homo sapiens
tgctctgtgtgctca

SEQ ID NO: 237741 - DNA, 15 bp, Homo sapiens
atgctctgtgtgctc

SEQ ID NO: 237742 - DNA, 15 bp, Homo sapiens
aatgctctgtgtgct

SEQ ID NO: 237743 - DNA, 15 bp, Homo sapiens
aaatgctctgtgtgc

SEQ ID NO: 237744 - DNA, 15 bp, Homo sapiens
aaaatgctctgtgtg

SEQ ID NO: 237745 - DNA, 15 bp, Homo sapiens
gaaaatgctctgtgt

SEQ ID NO: 237746 - DNA, 15 bp, Homo sapiens
tgaaaatgctctgtg

SEQ ID NO: 237747 - DNA, 15 bp, Homo sapiens
ctgaaaatgctctgt

SEQ ID NO: 237748 - DNA, 15 bp, Homo sapiens
tctgaaaatgctctg

SEQ ID NO: 237749 - DNA, 15 bp, Homo sapiens
ttctgaaaatgctct

SEQ ID NO: 237750 - DNA, 15 bp, Homo sapiens
gttctgaaaatgctc

SEQ ID NO: 237751 - DNA, 15 bp, Homo sapiens
agttctgaaaatgct

SEQ ID NO: 237752 - DNA, 15 bp, Homo sapiens
tagttctgaaaatgc

SEQ ID NO: 237753 - DNA, 15 bp, Homo sapiens
atagttctgaaaatg

SEQ ID NO: 237754 - DNA, 15 bp, Homo sapiens
catagttctgaaaat

SEQ ID NO: 237755 - DNA, 15 bp, Homo sapiens
ccatagttctgaaaa

SEQ ID NO: 237756 - DNA, 15 bp, Homo sapiens
gccatagttctgaaa

SEQ ID NO: 237757 - DNA, 15 bp, Homo sapiens
agccatagttctgaa

SEQ ID NO: 237758 - DNA, 15 bp, Homo sapiens
aagccatagttctga

SEQ ID NO: 237759 - DNA, 15 bp, Homo sapiens
taagccatagttctg

SEQ ID NO: 237760 - DNA, 15 bp, Homo sapiens
gtaagccatagttct

SEQ ID NO: 237761 - DNA, 15 bp, Homo sapiens
agtaagccatagttc

SEQ ID NO: 237762 - DNA, 15 bp, Homo sapiens
gagtaagccatagtt

SEQ ID NO: 237763 - DNA, 15 bp, Homo sapiens
agagtaagccatagt

SEQ ID NO: 237764 - DNA, 15 bp, Homo sapiens
gagagtaagccatag

SEQ ID NO: 237765 - DNA, 15 bp, Homo sapiens
agagagtaagccata

SEQ ID NO: 237766 - DNA, 15 bp, Homo sapiens
gagagagtaagccat

SEQ ID NO: 237767 - DNA, 15 bp, Homo sapiens
tgagagagtaagcca

SEQ ID NO: 237768 - DNA, 15 bp, Homo sapiens
ctgagagagtaagcc

SEQ ID NO: 237769 - DNA, 15 bp, Homo sapiens
actgagagagtaagc

SEQ ID NO: 237770 - DNA, 15 bp, Homo sapiens
cactgagagagtaag

SEQ ID NO: 237771 - DNA, 15 bp, Homo sapiens
acactgagagagtaa

SEQ ID NO: 237772 - DNA, 15 bp, Homo sapiens
tacactgagagagta

SEQ ID NO: 237773 - DNA, 15 bp, Homo sapiens
atacactgagagagt

SEQ ID NO: 237774 - DNA, 15 bp, Homo sapiens
tatacactgagagag

SEQ ID NO: 237775 - DNA, 15 bp, Homo sapiens
ctatacactgagaga

SEQ ID NO: 237776 - DNA, 15 bp, Homo sapiens
gctatacactgagag

SEQ ID NO: 237777 - DNA, 15 bp, Homo sapiens
tgctatacactgaga

SEQ ID NO: 237778 - DNA, 15 bp, Homo sapiens
ctgctatacactgag

SEQ ID NO: 237779 - DNA, 15 bp, Homo sapiens
actgctatacactga

SEQ ID NO: 237780 - DNA, 15 bp, Homo sapiens
aactgctatacactg

SEQ ID NO: 237781 - DNA, 15 bp, Homo sapiens
aaactgctatacact

SEQ ID NO: 237782 - DNA, 15 bp, Homo sapiens
taaactgctatacac

SEQ ID NO: 237783 - DNA, 15 bp, Homo sapiens
ttaaactgctataca

SEQ ID NO: 237784 - DNA, 15 bp, Homo sapiens
cttaaactgctatac

SEQ ID NO: 237785 - DNA, 15 bp, Homo sapiens
acttaaactgctata

SEQ ID NO: 237786 - DNA, 15 bp, Homo sapiens
cacttaaactgctat

SEQ ID NO: 237787 - DNA, 15 bp, Homo sapiens
gcacttaaactgcta

SEQ ID NO: 237788 - DNA, 15 bp, Homo sapiens
agcacttaaactgct

SEQ ID NO: 237789 - DNA, 15 bp, Homo sapiens
tagcacttaaactgc

SEQ ID NO: 237790 - DNA, 15 bp, Homo sapiens
ctagcacttaaactg

SEQ ID NO: 237791 - DNA, 15 bp, Homo sapiens
cctagcacttaaact

SEQ ID NO: 237792 - DNA, 15 bp, Homo sapiens
ccctagcacttaaac

SEQ ID NO: 237793 - DNA, 15 bp, Homo sapiens
tccctagcacttaaa

SEQ ID NO: 237794 - DNA, 15 bp, Homo sapiens
gtccctagcacttaa

SEQ ID NO: 237795 - DNA, 15 bp, Homo sapiens
agtccctagcactta

SEQ ID NO: 237796 - DNA, 15 bp, Homo sapiens
aagtccctagcactt

SEQ ID NO: 237797 - DNA, 15 bp, Homo sapiens
gaagtccctagcact

SEQ ID NO: 237798 - DNA, 15 bp, Homo sapiens
agaagtccctagcac

SEQ ID NO: 237799 - DNA, 15 bp, Homo sapiens
gagaagtccctagca

SEQ ID NO: 237800 - DNA, 15 bp, Homo sapiens
agagaagtccctagc

SEQ ID NO: 237801 - DNA, 15 bp, Homo sapiens
cagagaagtccctag

SEQ ID NO: 237802 - DNA, 15 bp, Homo sapiens
tcagagaagtcccta

SEQ ID NO: 237803 - DNA, 15 bp, Homo sapiens
ttcagagaagtccct

SEQ ID NO: 237804 - DNA, 15 bp, Homo sapiens
gttcagagaagtccc

SEQ ID NO: 237805 - DNA, 15 bp, Homo sapiens
agttcagagaagtcc

SEQ ID NO: 237806 - DNA, 15 bp, Homo sapiens
gagttcagagaagtc

SEQ ID NO: 237807 - DNA, 15 bp, Homo sapiens
tgagttcagagaagt

SEQ ID NO: 237808 - DNA, 15 bp, Homo sapiens
atgagttcagagaag

SEQ ID NO: 237809 - DNA, 15 bp, Homo sapiens
aatgagttcagagaa

SEQ ID NO: 237810 - DNA, 15 bp, Homo sapiens
caatgagttcagaga

SEQ ID NO: 237811 - DNA, 15 bp, Homo sapiens
tcaatgagttcagag

SEQ ID NO: 237812 - DNA, 15 bp, Homo sapiens
ttcaatgagttcaga

SEQ ID NO: 237813 - DNA, 15 bp, Homo sapiens
tttcaatgagttcag

SEQ ID NO: 237814 - DNA, 15 bp, Homo sapiens
ctttcaatgagttca

SEQ ID NO: 237815 - DNA, 15 bp, Homo sapiens
tctttcaatgagttc

SEQ ID NO: 237816 - DNA, 15 bp, Homo sapiens
ttctttcaatgagtt

SEQ ID NO: 237817 - DNA, 15 bp, Homo sapiens
tttctttcaatgagt

SEQ ID NO: 237818 - DNA, 15 bp, Homo sapiens
atttctttcaatgag

SEQ ID NO: 237819 - DNA, 15 bp, Homo sapiens
tatttctttcaatga

SEQ ID NO: 237820 - DNA, 15 bp, Homo sapiens
ttatttctttcaatg

SEQ ID NO: 237821 - DNA, 15 bp, Homo sapiens
tttatttctttcaat

SEQ ID NO: 237822 - DNA, 15 bp, Homo sapiens
ctttatttctttcaa

SEQ ID NO: 237823 - DNA, 15 bp, Homo sapiens
gctttatttctttca

SEQ ID NO: 237824 - DNA, 15 bp, Homo sapiens
ggctttatttctttc

SEQ ID NO: 237825 - DNA, 15 bp, Homo sapiens
gggctttatttcttt

SEQ ID NO: 237826 - DNA, 15 bp, Homo sapiens
ggggctttatttctt

SEQ ID NO: 237827 - DNA, 15 bp, Homo sapiens
aggggctttatttct

SEQ ID NO: 237828 - DNA, 15 bp, Homo sapiens
gaggggctttatttc

SEQ ID NO: 237829 - DNA, 15 bp, Homo sapiens
agaggggctttattt

SEQ ID NO: 237830 - DNA, 15 bp, Homo sapiens
cagaggggctttatt

SEQ ID NO: 237831 - DNA, 15 bp, Homo sapiens
acagaggggctttat

SEQ ID NO: 237832 - DNA, 15 bp, Homo sapiens
gacagaggggcttta

SEQ ID NO: 237833 - DNA, 15 bp, Homo sapiens
agacagaggggcttt

SEQ ID NO: 237834 - DNA, 15 bp, Homo sapiens
aagacagaggggctt

SEQ ID NO: 237835 - DNA, 15 bp, Homo sapiens
aaagacagaggggct

SEQ ID NO: 237836 - DNA, 15 bp, Homo sapiens
caaagacagaggggc

SEQ ID NO: 237837 - DNA, 15 bp, Homo sapiens
acaaagacagagggg

SEQ ID NO: 237838 - DNA, 15 bp, Homo sapiens
tacaaagacagaggg

SEQ ID NO: 237839 - DNA, 15 bp, Homo sapiens
atacaaagacagagg

SEQ ID NO: 237840 - DNA, 15 bp, Homo sapiens
gatacaaagacagag

SEQ ID NO: 237841 - DNA, 15 bp, Homo sapiens
ggatacaaagacaga

SEQ ID NO: 237842 - DNA, 15 bp, Homo sapiens
gggatacaaagacag

SEQ ID NO: 237843 - DNA, 15 bp, Homo sapiens
agggatacaaagaca

SEQ ID NO: 237844 - DNA, 15 bp, Homo sapiens
tagggatacaaagac

SEQ ID NO: 237845 - DNA, 15 bp, Homo sapiens
ctagggatacaaaga

SEQ ID NO: 237846 - DNA, 15 bp, Homo sapiens
tctagggatacaaag

SEQ ID NO: 237847 - DNA, 15 bp, Homo sapiens
ttctagggatacaaa

SEQ ID NO: 237848 - DNA, 15 bp, Homo sapiens
attctagggatacaa

SEQ ID NO: 237849 - DNA, 15 bp, Homo sapiens
aattctagggataca

SEQ ID NO: 237850 - DNA, 15 bp, Homo sapiens
caattctagggatac

SEQ ID NO: 237851 - DNA, 15 bp, Homo sapiens
ccaattctagggata

SEQ ID NO: 237852 - DNA, 15 bp, Homo sapiens
tccaattctagggat

SEQ ID NO: 237853 - DNA, 15 bp, Homo sapiens
ttccaattctaggga

SEQ ID NO: 237854 - DNA, 15 bp, Homo sapiens
cttccaattctaggg

SEQ ID NO: 237855 - DNA, 15 bp, Homo sapiens
gcttccaattctagg

SEQ ID NO: 237856 - DNA, 15 bp, Homo sapiens
agcttccaattctag

SEQ ID NO: 237857 - DNA, 15 bp, Homo sapiens
gagcttccaattcta

SEQ ID NO: 237858 - DNA, 15 bp, Homo sapiens
tgagcttccaattct

SEQ ID NO: 237859 - DNA, 15 bp, Homo sapiens
atgagcttccaattc

SEQ ID NO: 237860 - DNA, 15 bp, Homo sapiens
catgagcttccaatt

SEQ ID NO: 237861 - DNA, 15 bp, Homo sapiens
acatgagcttccaat

SEQ ID NO: 237862 - DNA, 15 bp, Homo sapiens
tacatgagcttccaa

SEQ ID NO: 237863 - DNA, 15 bp, Homo sapiens
atacatgagcttcca

SEQ ID NO: 237864 - DNA, 15 bp, Homo sapiens
aatacatgagcttcc

SEQ ID NO: 237865 - DNA, 15 bp, Homo sapiens
aaatacatgagcttc

SEQ ID NO: 237866 - DNA, 15 bp, Homo sapiens
caaatacatgagctt

SEQ ID NO: 237867 - DNA, 15 bp, Homo sapiens
acaaatacatgagct

SEQ ID NO: 237868 - DNA, 15 bp, Homo sapiens
cacaaatacatgagc

SEQ ID NO: 237869 - DNA, 15 bp, Homo sapiens
tcacaaatacatgag

SEQ ID NO: 237870 - DNA, 15 bp, Homo sapiens
atcacaaatacatga

SEQ ID NO: 237871 - DNA, 15 bp, Homo sapiens
catcacaaatacatg

SEQ ID NO: 237872 - DNA, 15 bp, Homo sapiens
gcatcacaaatacat

SEQ ID NO: 237873 - DNA, 15 bp, Homo sapiens
agcatcacaaataca

SEQ ID NO: 237874 - DNA, 15 bp, Homo sapiens
cagcatcacaaatac

SEQ ID NO: 237875 - DNA, 15 bp, Homo sapiens
ccagcatcacaaata

SEQ ID NO: 237876 - DNA, 15 bp, Homo sapiens
tccagcatcacaaat

SEQ ID NO: 237877 - DNA, 15 bp, Homo sapiens
ttccagcatcacaaa

SEQ ID NO: 237878 - DNA, 15 bp, Homo sapiens
tttccagcatcacaa

SEQ ID NO: 237879 - DNA, 15 bp, Homo sapiens
ctttccagcatcaca

SEQ ID NO: 237880 - DNA, 15 bp, Homo sapiens
cctttccagcatcac

SEQ ID NO: 237881 - DNA, 15 bp, Homo sapiens
ccctttccagcatca

SEQ ID NO: 237882 - DNA, 15 bp, Homo sapiens
gccctttccagcatc

SEQ ID NO: 237883 - DNA, 15 bp, Homo sapiens
tgccctttccagcat

SEQ ID NO: 237884 - DNA, 15 bp, Homo sapiens
ttgccctttccagca

SEQ ID NO: 237885 - DNA, 15 bp, Homo sapiens
tttgccctttccagc

SEQ ID NO: 237886 - DNA, 15 bp, Homo sapiens
atttgccctttccag

SEQ ID NO: 237887 - DNA, 15 bp, Homo sapiens
tatttgccctttcca

SEQ ID NO: 237888 - DNA, 15 bp, Homo sapiens
atatttgccctttcc

SEQ ID NO: 237889 - DNA, 15 bp, Homo sapiens
aatatttgccctttc

SEQ ID NO: 237890 - DNA, 15 bp, Homo sapiens
gaatatttgcccttt

SEQ ID NO: 237891 - DNA, 15 bp, Homo sapiens
tgaatatttgccctt

SEQ ID NO: 237892 - DNA, 15 bp, Homo sapiens
atgaatatttgccct

SEQ ID NO: 237893 - DNA, 15 bp, Homo sapiens
aatgaatatttgccc

SEQ ID NO: 237894 - DNA, 15 bp, Homo sapiens
caatgaatatttgcc

SEQ ID NO: 237895 - DNA, 15 bp, Homo sapiens
tcaatgaatatttgc

SEQ ID NO: 237896 - DNA, 15 bp, Homo sapiens
ttcaatgaatatttg

SEQ ID NO: 237897 - DNA, 15 bp, Homo sapiens
tttcaatgaatattt

SEQ ID NO: 237898 - DNA, 15 bp, Homo sapiens
ctttcaatgaatatt

SEQ ID NO: 237899 - DNA, 15 bp, Homo sapiens
tctttcaatgaatat

SEQ ID NO: 237900 - DNA, 15 bp, Homo sapiens
ttctttcaatgaata

SEQ ID NO: 237901 - DNA, 15 bp, Homo sapiens
tttctttcaatgaat

SEQ ID NO: 237902 - DNA, 15 bp, Homo sapiens
ttttctttcaatgaa

SEQ ID NO: 237903 - DNA, 15 bp, Homo sapiens
attttctttcaatga

SEQ ID NO: 237904 - DNA, 15 bp, Homo sapiens
tattttctttcaatg

SEQ ID NO: 237905 - DNA, 15 bp, Homo sapiens
ctattttctttcaat

SEQ ID NO: 237906 - DNA, 15 bp, Homo sapiens
gctattttctttcaa

SEQ ID NO: 237907 - DNA, 15 bp, Homo sapiens
agctattttctttca

SEQ ID NO: 237908 - DNA, 15 bp, Homo sapiens
gagctattttctttc

SEQ ID NO: 237909 - DNA, 15 bp, Homo sapiens
tgagctattttcttt

SEQ ID NO: 237910 - DNA, 15 bp, Homo sapiens
gtgagctattttctt

SEQ ID NO: 237911 - DNA, 15 bp, Homo sapiens
tgtgagctattttct

SEQ ID NO: 237912 - DNA, 15 bp, Homo sapiens
atgtgagctattttc

SEQ ID NO: 237913 - DNA, 15 bp, Homo sapiens
aatgtgagctatttt

SEQ ID NO: 237914 - DNA, 15 bp, Homo sapiens
aaatgtgagctattt

SEQ ID NO: 237915 - DNA, 15 bp, Homo sapiens
taaatgtgagctatt

SEQ ID NO: 237916 - DNA, 15 bp, Homo sapiens
gtaaatgtgagctat

SEQ ID NO: 237917 - DNA, 15 bp, Homo sapiens
agtaaatgtgagcta

SEQ ID NO: 237918 - DNA, 15 bp, Homo sapiens
cagtaaatgtgagct

SEQ ID NO: 237919 - DNA, 15 bp, Homo sapiens
tcagtaaatgtgagc

SEQ ID NO: 237920 - DNA, 15 bp, Homo sapiens
ctcagtaaatgtgag

SEQ ID NO: 237921 - DNA, 15 bp, Homo sapiens
cctcagtaaatgtga

SEQ ID NO: 237922 - DNA, 15 bp, Homo sapiens
acctcagtaaatgtg

SEQ ID NO: 237923 - DNA, 15 bp, Homo sapiens
gacctcagtaaatgt

SEQ ID NO: 237924 - DNA, 15 bp, Homo sapiens
agacctcagtaaatg

SEQ ID NO: 237925 - DNA, 15 bp, Homo sapiens
gagacctcagtaaat

SEQ ID NO: 237926 - DNA, 15 bp, Homo sapiens
tgagacctcagtaaa

SEQ ID NO: 237927 - DNA, 15 bp, Homo sapiens
gtgagacctcagtaa

SEQ ID NO: 237928 - DNA, 15 bp, Homo sapiens
agtgagacctcagta

SEQ ID NO: 237929 - DNA, 15 bp, Homo sapiens
tagtgagacctcagt

SEQ ID NO: 237930 - DNA, 15 bp, Homo sapiens
atagtgagacctcag

SEQ ID NO: 237931 - DNA, 15 bp, Homo sapiens
catagtgagacctca

SEQ ID NO: 237932 - DNA, 15 bp, Homo sapiens
tcatagtgagacctc

SEQ ID NO: 237933 - DNA, 15 bp, Homo sapiens
ctcatagtgagacct

SEQ ID NO: 237934 - DNA, 15 bp, Homo sapiens
gctcatagtgagacc

SEQ ID NO: 237935 - DNA, 15 bp, Homo sapiens
ggctcatagtgagac

SEQ ID NO: 237936 - DNA, 15 bp, Homo sapiens
tggctcatagtgaga

SEQ ID NO: 237937 - DNA, 15 bp, Homo sapiens
ctggctcatagtgag

SEQ ID NO: 237938 - DNA, 15 bp, Homo sapiens
cctggctcatagtga

SEQ ID NO: 237939 - DNA, 15 bp, Homo sapiens
gcctggctcatagtg

SEQ ID NO: 237940 - DNA, 15 bp, Homo sapiens
tgcctggctcatagt

SEQ ID NO: 237941 - DNA, 15 bp, Homo sapiens
gtgcctggctcatag

SEQ ID NO: 237942 - DNA, 15 bp, Homo sapiens
cgtgcctggctcata

SEQ ID NO: 237943 - DNA, 15 bp, Homo sapiens
ccgtgcctggctcat

SEQ ID NO: 237944 - DNA, 15 bp, Homo sapiens
tccgtgcctggctca

SEQ ID NO: 237945 - DNA, 15 bp, Homo sapiens
ctccgtgcctggctc

SEQ ID NO: 237946 - DNA, 15 bp, Homo sapiens
actccgtgcctggct

SEQ ID NO: 237947 - DNA, 15 bp, Homo sapiens
cactccgtgcctggc

SEQ ID NO: 237948 - DNA, 15 bp, Homo sapiens
tcactccgtgcctgg

SEQ ID NO: 237949 - DNA, 15 bp, Homo sapiens
ttcactccgtgcctg

SEQ ID NO: 237950 - DNA, 15 bp, Homo sapiens
cttcactccgtgcct

SEQ ID NO: 237951 - DNA, 15 bp, Homo sapiens
gcttcactccgtgcc

SEQ ID NO: 237952 - DNA, 15 bp, Homo sapiens
tgcttcactccgtgc

SEQ ID NO: 237953 - DNA, 15 bp, Homo sapiens
ttgcttcactccgtg

SEQ ID NO: 237954 - DNA, 15 bp, Homo sapiens
gttgcttcactccgt

SEQ ID NO: 237955 - DNA, 15 bp, Homo sapiens
agttgcttcactccg

SEQ ID NO: 237956 - DNA, 15 bp, Homo sapiens
cagttgcttcactcc

SEQ ID NO: 237957 - DNA, 15 bp, Homo sapiens
ccagttgcttcactc

SEQ ID NO: 237958 - DNA, 15 bp, Homo sapiens
accagttgcttcact

SEQ ID NO: 237959 - DNA, 15 bp, Homo sapiens
aaccagttgcttcac

SEQ ID NO: 237960 - DNA, 15 bp, Homo sapiens
caaccagttgcttca

SEQ ID NO: 237961 - DNA, 15 bp, Homo sapiens
ccaaccagttgcttc

SEQ ID NO: 237962 - DNA, 15 bp, Homo sapiens
gccaaccagttgctt

SEQ ID NO: 237963 - DNA, 15 bp, Homo sapiens
ggccaaccagttgct

SEQ ID NO: 237964 - DNA, 15 bp, Homo sapiens
aggccaaccagttgc

SEQ ID NO: 237965 - DNA, 15 bp, Homo sapiens
gaggccaaccagttg

SEQ ID NO: 237966 - DNA, 15 bp, Homo sapiens
tgaggccaaccagtt

SEQ ID NO: 237967 - DNA, 15 bp, Homo sapiens
gtgaggccaaccagt

SEQ ID NO: 237968 - DNA, 15 bp, Homo sapiens
ggtgaggccaaccag

SEQ ID NO: 237969 - DNA, 15 bp, Homo sapiens
aggtgaggccaacca

SEQ ID NO: 237970 - DNA, 15 bp, Homo sapiens
aaggtgaggccaacc

SEQ ID NO: 237971 - DNA, 15 bp, Homo sapiens
caaggtgaggccaac

SEQ ID NO: 237972 - DNA, 15 bp, Homo sapiens
tcaaggtgaggccaa

SEQ ID NO: 237973 - DNA, 15 bp, Homo sapiens
ttcaaggtgaggcca

SEQ ID NO: 237974 - DNA, 15 bp, Homo sapiens
gttcaaggtgaggcc

SEQ ID NO: 237975 - DNA, 15 bp, Homo sapiens
agttcaaggtgaggc

SEQ ID NO: 237976 - DNA, 15 bp, Homo sapiens
gagttcaaggtgagg

SEQ ID NO: 237977 - DNA, 15 bp, Homo sapiens
agagttcaaggtgag

SEQ ID NO: 237978 - DNA, 15 bp, Homo sapiens
gagagttcaaggtga

SEQ ID NO: 237979 - DNA, 15 bp, Homo sapiens
tgagagttcaaggtg

SEQ ID NO: 237980 - DNA, 15 bp, Homo sapiens
gtgagagttcaaggt

SEQ ID NO: 237981 - DNA, 15 bp, Homo sapiens
tgtgagagttcaagg

SEQ ID NO: 237982 - DNA, 15 bp, Homo sapiens
gtgtgagagttcaag

SEQ ID NO: 237983 - DNA, 15 bp, Homo sapiens
ggtgtgagagttcaa

SEQ ID NO: 237984 - DNA, 15 bp, Homo sapiens
gggtgtgagagttca

SEQ ID NO: 237985 - DNA, 15 bp, Homo sapiens
tgggtgtgagagttc

SEQ ID NO: 237986 - DNA, 15 bp, Homo sapiens
ctgggtgtgagagtt

SEQ ID NO: 237987 - DNA, 15 bp, Homo sapiens
tctgggtgtgagagt

SEQ ID NO: 237988 - DNA, 15 bp, Homo sapiens
gtctgggtgtgagag

SEQ ID NO: 237989 - DNA, 15 bp, Homo sapiens
agtctgggtgtgaga

SEQ ID NO: 237990 - DNA, 15 bp, Homo sapiens
tagtctgggtgtgag

SEQ ID NO: 237991 - DNA, 15 bp, Homo sapiens
ctagtctgggtgtga

SEQ ID NO: 237992 - DNA, 15 bp, Homo sapiens
cctagtctgggtgtg

SEQ ID NO: 237993 - DNA, 15 bp, Homo sapiens
tcctagtctgggtgt

SEQ ID NO: 237994 - DNA, 15 bp, Homo sapiens
ctcctagtctgggtg

SEQ ID NO: 237995 - DNA, 15 bp, Homo sapiens
gctcctagtctgggt

SEQ ID NO: 237996 - DNA, 15 bp, Homo sapiens
agctcctagtctggg

SEQ ID NO: 237997 - DNA, 15 bp, Homo sapiens
tagctcctagtctgg

SEQ ID NO: 237998 - DNA, 15 bp, Homo sapiens
ctagctcctagtctg

SEQ ID NO: 237999 - DNA, 15 bp, Homo sapiens
cctagctcctagtct

SEQ ID NO: 238000 - DNA, 15 bp, Homo sapiens
gcctagctcctagtc

SEQ ID NO: 238001 - DNA, 15 bp, Homo sapiens
tgcctagctcctagt

SEQ ID NO: 238002 - DNA, 15 bp, Homo sapiens
gtgcctagctcctag

SEQ ID NO: 238003 - DNA, 15 bp, Homo sapiens
agtgcctagctccta

SEQ ID NO: 238004 - DNA, 15 bp, Homo sapiens
cagtgcctagctcct

SEQ ID NO: 238005 - DNA, 15 bp, Homo sapiens
acagtgcctagctcc

SEQ ID NO: 238006 - DNA, 15 bp, Homo sapiens
cacagtgcctagctc

SEQ ID NO: 238007 - DNA, 15 bp, Homo sapiens
tcacagtgcctagct

SEQ ID NO: 238008 - DNA, 15 bp, Homo sapiens
atcacagtgcctagc

SEQ ID NO: 238009 - DNA, 15 bp, Homo sapiens
tatcacagtgcctag

SEQ ID NO: 238010 - DNA, 15 bp, Homo sapiens
ttatcacagtgccta

SEQ ID NO: 238011 - DNA, 15 bp, Homo sapiens
gttatcacagtgcct

SEQ ID NO: 238012 - DNA, 15 bp, Homo sapiens
agttatcacagtgcc

SEQ ID NO: 238013 - DNA, 15 bp, Homo sapiens
cagttatcacagtgc

SEQ ID NO: 238014 - DNA, 15 bp, Homo sapiens
gcagttatcacagtg

SEQ ID NO: 238015 - DNA, 15 bp, Homo sapiens
agcagttatcacagt

SEQ ID NO: 238016 - DNA, 15 bp, Homo sapiens
cagcagttatcacag

SEQ ID NO: 238017 - DNA, 15 bp, Homo sapiens
acagcagttatcaca

SEQ ID NO: 238018 - DNA, 15 bp, Homo sapiens
aacagcagttatcac

SEQ ID NO: 238019 - DNA, 15 bp, Homo sapiens
aaacagcagttatca

SEQ ID NO: 238020 - DNA, 15 bp, Homo sapiens
aaaacagcagttatc

SEQ ID NO: 238021 - DNA, 15 bp, Homo sapiens
taaaacagcagttat

SEQ ID NO: 238022 - DNA, 15 bp, Homo sapiens
gtaaaacagcagtta

SEQ ID NO: 238023 - DNA, 15 bp, Homo sapiens
tgtaaaacagcagtt

SEQ ID NO: 238024 - DNA, 15 bp, Homo sapiens
gtgtaaaacagcagt

SEQ ID NO: 238025 - DNA, 15 bp, Homo sapiens
tgtgtaaaacagcag

SEQ ID NO: 238026 - DNA, 15 bp, Homo sapiens
ctgtgtaaaacagca

SEQ ID NO: 238027 - DNA, 15 bp, Homo sapiens
cctgtgtaaaacagc

SEQ ID NO: 238028 - DNA, 15 bp, Homo sapiens
tcctgtgtaaaacag

SEQ ID NO: 238029 - DNA, 15 bp, Homo sapiens
ctcctgtgtaaaaca

SEQ ID NO: 238030 - DNA, 15 bp, Homo sapiens
cctcctgtgtaaaac

SEQ ID NO: 238031 - DNA, 15 bp, Homo sapiens
ccctcctgtgtaaaa

SEQ ID NO: 238032 - DNA, 15 bp, Homo sapiens
tccctcctgtgtaaa

SEQ ID NO: 238033 - DNA, 15 bp, Homo sapiens
ttccctcctgtgtaa

SEQ ID NO: 238034 - DNA, 15 bp, Homo sapiens
gttccctcctgtgta

SEQ ID NO: 238035 - DNA, 15 bp, Homo sapiens
agttccctcctgtgt

SEQ ID NO: 238036 - DNA, 15 bp, Homo sapiens
gagttccctcctgtg

SEQ ID NO: 238037 - DNA, 15 bp, Homo sapiens
cgagttccctcctgt

SEQ ID NO: 238038 - DNA, 15 bp, Homo sapiens
ccgagttccctcctg

SEQ ID NO: 238039 - DNA, 15 bp, Homo sapiens
cccgagttccctcct

SEQ ID NO: 238040 - DNA, 15 bp, Homo sapiens
gcccgagttccctcc

SEQ ID NO: 238041 - DNA, 15 bp, Homo sapiens
agcccgagttccctc

SEQ ID NO: 238042 - DNA, 15 bp, Homo sapiens
gagcccgagttccct

SEQ ID NO: 238043 - DNA, 15 bp, Homo sapiens
tgagcccgagttccc

SEQ ID NO: 238044 - DNA, 15 bp, Homo sapiens
ctgagcccgagttcc

SEQ ID NO: 238045 - DNA, 15 bp, Homo sapiens
tctgagcccgagttc

SEQ ID NO: 238046 - DNA, 15 bp, Homo sapiens
ctctgagcccgagtt

SEQ ID NO: 238047 - DNA, 15 bp, Homo sapiens
actctgagcccgagt

SEQ ID NO: 238048 - DNA, 15 bp, Homo sapiens
cactctgagcccgag

SEQ ID NO: 238049 - DNA, 15 bp, Homo sapiens
ccactctgagcccga

SEQ ID NO: 238050 - DNA, 15 bp, Homo sapiens
tccactctgagcccg

SEQ ID NO: 238051 - DNA, 15 bp, Homo sapiens
atccactctgagccc

SEQ ID NO: 238052 - DNA, 15 bp, Homo sapiens
catccactctgagcc

SEQ ID NO: 238053 - DNA, 15 bp, Homo sapiens
tcatccactctgagc

SEQ ID NO: 238054 - DNA, 15 bp, Homo sapiens
ttcatccactctgag

SEQ ID NO: 238055 - DNA, 15 bp, Homo sapiens
attcatccactctga

SEQ ID NO: 238056 - DNA, 15 bp, Homo sapiens
cattcatccactctg

SEQ ID NO: 238057 - DNA, 15 bp, Homo sapiens
tcattcatccactct

SEQ ID NO: 238058 - DNA, 15 bp, Homo sapiens
gtcattcatccactc

SEQ ID NO: 238059 - DNA, 15 bp, Homo sapiens
agtcattcatccact

SEQ ID NO: 238060 - DNA, 15 bp, Homo sapiens
aagtcattcatccac

SEQ ID NO: 238061 - DNA, 15 bp, Homo sapiens
caagtcattcatcca

SEQ ID NO: 238062 - DNA, 15 bp, Homo sapiens
gcaagtcattcatcc

SEQ ID NO: 238063 - DNA, 15 bp, Homo sapiens
agcaagtcattcatc

SEQ ID NO: 238064 - DNA, 15 bp, Homo sapiens
cagcaagtcattcat

SEQ ID NO: 238065 - DNA, 15 bp, Homo sapiens
tcagcaagtcattca

SEQ ID NO: 238066 - DNA, 15 bp, Homo sapiens
ctcagcaagtcattc

SEQ ID NO: 238067 - DNA, 15 bp, Homo sapiens
cctcagcaagtcatt

SEQ ID NO: 238068 - DNA, 15 bp, Homo sapiens
ccctcagcaagtcat

SEQ ID NO: 238069 - DNA, 15 bp, Homo sapiens
accctcagcaagtca

SEQ ID NO: 238070 - DNA, 15 bp, Homo sapiens
aaccctcagcaagtc

SEQ ID NO: 238071 - DNA, 15 bp, Homo sapiens
caaccctcagcaagt

SEQ ID NO: 238072 - DNA, 15 bp, Homo sapiens
gcaaccctcagcaag

SEQ ID NO: 238073 - DNA, 15 bp, Homo sapiens
tgcaaccctcagcaa

SEQ ID NO: 238074 - DNA, 15 bp, Homo sapiens
gtgcaaccctcagca

SEQ ID NO: 238075 - DNA, 15 bp, Homo sapiens
tgtgcaaccctcagc

SEQ ID NO: 238076 - DNA, 15 bp, Homo sapiens
ctgtgcaaccctcag

SEQ ID NO: 238077 - DNA, 15 bp, Homo sapiens
gctgtgcaaccctca

SEQ ID NO: 238078 - DNA, 15 bp, Homo sapiens
agctgtgcaaccctc

SEQ ID NO: 238079 - DNA, 15 bp, Homo sapiens
tagctgtgcaaccct

SEQ ID NO: 238080 - DNA, 15 bp, Homo sapiens
atagctgtgcaaccc

SEQ ID NO: 238081 - DNA, 15 bp, Homo sapiens
aatagctgtgcaacc

SEQ ID NO: 238082 - DNA, 15 bp, Homo sapiens
taatagctgtgcaac

SEQ ID NO: 238083 - DNA, 15 bp, Homo sapiens
ttaatagctgtgcaa

SEQ ID NO: 238084 - DNA, 15 bp, Homo sapiens
cttaatagctgtgca

SEQ ID NO: 238085 - DNA, 15 bp, Homo sapiens
acttaatagctgtgc

SEQ ID NO: 238086 - DNA, 15 bp, Homo sapiens
cacttaatagctgtg

SEQ ID NO: 238087 - DNA, 15 bp, Homo sapiens
ccacttaatagctgt

SEQ ID NO: 238088 - DNA, 15 bp, Homo sapiens
accacttaatagctg

SEQ ID NO: 238089 - DNA, 15 bp, Homo sapiens
gaccacttaatagct

SEQ ID NO: 238090 - DNA, 15 bp, Homo sapiens
agaccacttaatagc

SEQ ID NO: 238091 - DNA, 15 bp, Homo sapiens
cagaccacttaatag

SEQ ID NO: 238092 - DNA, 15 bp, Homo sapiens
gcagaccacttaata

SEQ ID NO: 238093 - DNA, 15 bp, Homo sapiens
ggcagaccacttaat

SEQ ID NO: 238094 - DNA, 15 bp, Homo sapiens
aggcagaccacttaa

SEQ ID NO: 238095 - DNA, 15 bp, Homo sapiens
gaggcagaccactta

SEQ ID NO: 238096 - DNA, 15 bp, Homo sapiens
ggaggcagaccactt

SEQ ID NO: 238097 - DNA, 15 bp, Homo sapiens
tggaggcagaccact

SEQ ID NO: 238098 - DNA, 15 bp, Homo sapiens
atggaggcagaccac

SEQ ID NO: 238099 - DNA, 15 bp, Homo sapiens
tatggaggcagacca

SEQ ID NO: 238100 - DNA, 15 bp, Homo sapiens
ctatggaggcagacc

SEQ ID NO: 238101 - DNA, 15 bp, Homo sapiens
gctatggaggcagac

SEQ ID NO: 238102 - DNA, 15 bp, Homo sapiens
ggctatggaggcaga

SEQ ID NO: 238103 - DNA, 15 bp, Homo sapiens
aggctatggaggcag

SEQ ID NO: 238104 - DNA, 15 bp, Homo sapiens
gaggctatggaggca

SEQ ID NO: 238105 - DNA, 15 bp, Homo sapiens
agaggctatggaggc

SEQ ID NO: 238106 - DNA, 15 bp, Homo sapiens
tagaggctatggagg

SEQ ID NO: 238107 - DNA, 15 bp, Homo sapiens
gtagaggctatggag

SEQ ID NO: 238108 - DNA, 15 bp, Homo sapiens
agtagaggctatgga

SEQ ID NO: 238109 - DNA, 15 bp, Homo sapiens
aagtagaggctatgg

SEQ ID NO: 238110 - DNA, 15 bp, Homo sapiens
gaagtagaggctatg

SEQ ID NO: 238111 - DNA, 15 bp, Homo sapiens
ggaagtagaggctat

SEQ ID NO: 238112 - DNA, 15 bp, Homo sapiens
gggaagtagaggcta

SEQ ID NO: 238113 - DNA, 15 bp, Homo sapiens
tgggaagtagaggct

SEQ ID NO: 238114 - DNA, 15 bp, Homo sapiens
ctgggaagtagaggc

SEQ ID NO: 238115 - DNA, 15 bp, Homo sapiens
cctgggaagtagagg

SEQ ID NO: 238116 - DNA, 15 bp, Homo sapiens
tcctgggaagtagag

SEQ ID NO: 238117 - DNA, 15 bp, Homo sapiens
atcctgggaagtaga

SEQ ID NO: 238118 - DNA, 15 bp, Homo sapiens
gatcctgggaagtag

SEQ ID NO: 238119 - DNA, 15 bp, Homo sapiens
agatcctgggaagta

SEQ ID NO: 238120 - DNA, 15 bp, Homo sapiens
gagatcctgggaagt

SEQ ID NO: 238121 - DNA, 15 bp, Homo sapiens
ggagatcctgggaag

SEQ ID NO: 238122 - DNA, 15 bp, Homo sapiens
tggagatcctgggaa

SEQ ID NO: 238123 - DNA, 15 bp, Homo sapiens
ctggagatcctggga

SEQ ID NO: 238124 - DNA, 15 bp, Homo sapiens
gctggagatcctggg

SEQ ID NO: 238125 - DNA, 15 bp, Homo sapiens
tgctggagatcctgg

SEQ ID NO: 238126 - DNA, 15 bp, Homo sapiens
ttgctggagatcctg

SEQ ID NO: 238127 - DNA, 15 bp, Homo sapiens
cttgctggagatcct

SEQ ID NO: 238128 - DNA, 15 bp, Homo sapiens
ccttgctggagatcc

SEQ ID NO: 238129 - DNA, 15 bp, Homo sapiens
cccttgctggagatc

SEQ ID NO: 238130 - DNA, 15 bp, Homo sapiens
tcccttgctggagat

SEQ ID NO: 238131 - DNA, 15 bp, Homo sapiens
atcccttgctggaga

SEQ ID NO: 238132 - DNA, 15 bp, Homo sapiens
tatcccttgctggag

SEQ ID NO: 238133 - DNA, 15 bp, Homo sapiens
atatcccttgctgga

SEQ ID NO: 238134 - DNA, 15 bp, Homo sapiens
gatatcccttgctgg

SEQ ID NO: 238135 - DNA, 15 bp, Homo sapiens
agatatcccttgctg

SEQ ID NO: 238136 - DNA, 15 bp, Homo sapiens
gagatatcccttgct

SEQ ID NO: 238137 - DNA, 15 bp, Homo sapiens
ggagatatcccttgc

SEQ ID NO: 238138 - DNA, 15 bp, Homo sapiens
aggagatatcccttg

SEQ ID NO: 238139 - DNA, 15 bp, Homo sapiens
caggagatatccctt

SEQ ID NO: 238140 - DNA, 15 bp, Homo sapiens
tcaggagatatccct

SEQ ID NO: 238141 - DNA, 15 bp, Homo sapiens
ctcaggagatatccc

SEQ ID NO: 238142 - DNA, 15 bp, Homo sapiens
cctcaggagatatcc

SEQ ID NO: 238143 - DNA, 15 bp, Homo sapiens
gcctcaggagatatc

SEQ ID NO: 238144 - DNA, 15 bp, Homo sapiens
tgcctcaggagatat

SEQ ID NO: 238145 - DNA, 15 bp, Homo sapiens
ctgcctcaggagata

SEQ ID NO: 238146 - DNA, 15 bp, Homo sapiens
actgcctcaggagat

SEQ ID NO: 238147 - DNA, 15 bp, Homo sapiens
cactgcctcaggaga

SEQ ID NO: 238148 - DNA, 15 bp, Homo sapiens
ccactgcctcaggag

SEQ ID NO: 238149 - DNA, 15 bp, Homo sapiens
gccactgcctcagga

SEQ ID NO: 238150 - DNA, 15 bp, Homo sapiens
agccactgcctcagg

SEQ ID NO: 238151 - DNA, 15 bp, Homo sapiens
aagccactgcctcag

SEQ ID NO: 238152 - DNA, 15 bp, Homo sapiens
aaagccactgcctca

SEQ ID NO: 238153 - DNA, 15 bp, Homo sapiens
gaaagccactgcctc

SEQ ID NO: 238154 - DNA, 15 bp, Homo sapiens
tgaaagccactgcct

SEQ ID NO: 238155 - DNA, 15 bp, Homo sapiens
gtgaaagccactgcc

SEQ ID NO: 238156 - DNA, 15 bp, Homo sapiens
tgtgaaagccactgc

SEQ ID NO: 238157 - DNA, 15 bp, Homo sapiens
gtgtgaaagccactg

SEQ ID NO: 238158 - DNA, 15 bp, Homo sapiens
agtgtgaaagccact

SEQ ID NO: 238159 - DNA, 15 bp, Homo sapiens
gagtgtgaaagccac

SEQ ID NO: 238160 - DNA, 15 bp, Homo sapiens
agagtgtgaaagcca

SEQ ID NO: 238161 - DNA, 15 bp, Homo sapiens
aagagtgtgaaagcc

SEQ ID NO: 238162 - DNA, 15 bp, Homo sapiens
taagagtgtgaaagc

SEQ ID NO: 238163 - DNA, 15 bp, Homo sapiens
ctaagagtgtgaaag

SEQ ID NO: 238164 - DNA, 15 bp, Homo sapiens
tctaagagtgtgaaa

SEQ ID NO: 238165 - DNA, 15 bp, Homo sapiens
ctctaagagtgtgaa

SEQ ID NO: 238166 - DNA, 15 bp, Homo sapiens
cctctaagagtgtga

SEQ ID NO: 238167 - DNA, 15 bp, Homo sapiens
gcctctaagagtgtg

SEQ ID NO: 238168 - DNA, 15 bp, Homo sapiens
ggcctctaagagtgt

SEQ ID NO: 238169 - DNA, 15 bp, Homo sapiens
aggcctctaagagtg

SEQ ID NO: 238170 - DNA, 15 bp, Homo sapiens
caggcctctaagagt

SEQ ID NO: 238171 - DNA, 15 bp, Homo sapiens
ccaggcctctaagag

SEQ ID NO: 238172 - DNA, 15 bp, Homo sapiens
tccaggcctctaaga

SEQ ID NO: 238173 - DNA, 15 bp, Homo sapiens
ctccaggcctctaag

SEQ ID NO: 238174 - DNA, 15 bp, Homo sapiens
gctccaggcctctaa

SEQ ID NO: 238175 - DNA, 15 bp, Homo sapiens
agctccaggcctcta

SEQ ID NO: 238176 - DNA, 15 bp, Homo sapiens
gagctccaggcctct

SEQ ID NO: 238177 - DNA, 15 bp, Homo sapiens
agagctccaggcctc

SEQ ID NO: 238178 - DNA, 15 bp, Homo sapiens
cagagctccaggcct

SEQ ID NO: 238179 - DNA, 15 bp, Homo sapiens
acagagctccaggcc

SEQ ID NO: 238180 - DNA, 15 bp, Homo sapiens
cacagagctccaggc

SEQ ID NO: 238181 - DNA, 15 bp, Homo sapiens
acacagagctccagg

SEQ ID NO: 238182 - DNA, 15 bp, Homo sapiens
tacacagagctccag

SEQ ID NO: 238183 - DNA, 15 bp, Homo sapiens
gtacacagagctcca

SEQ ID NO: 238184 - DNA, 15 bp, Homo sapiens
tgtacacagagctcc

SEQ ID NO: 238185 - DNA, 15 bp, Homo sapiens
gtgtacacagagctc

SEQ ID NO: 238186 - DNA, 15 bp, Homo sapiens
agtgtacacagagct

SEQ ID NO: 238187 - DNA, 15 bp, Homo sapiens
tagtgtacacagagc

SEQ ID NO: 238188 - DNA, 15 bp, Homo sapiens
ttagtgtacacagag

SEQ ID NO: 238189 - DNA, 15 bp, Homo sapiens
gttagtgtacacaga

SEQ ID NO: 238190 - DNA, 15 bp, Homo sapiens
agttagtgtacacag

SEQ ID NO: 238191 - DNA, 15 bp, Homo sapiens
cagttagtgtacaca

SEQ ID NO: 238192 - DNA, 15 bp, Homo sapiens
tcagttagtgtacac

SEQ ID NO: 238193 - DNA, 15 bp, Homo sapiens
ttcagttagtgtaca

SEQ ID NO: 238194 - DNA, 15 bp, Homo sapiens
tttcagttagtgtac

SEQ ID NO: 238195 - DNA, 15 bp, Homo sapiens
gtttcagttagtgta

SEQ ID NO: 238196 - DNA, 15 bp, Homo sapiens
ggtttcagttagtgt

SEQ ID NO: 238197 - DNA, 15 bp, Homo sapiens
aggtttcagttagtg

SEQ ID NO: 238198 - DNA, 15 bp, Homo sapiens
taggtttcagttagt

SEQ ID NO: 238199 - DNA, 15 bp, Homo sapiens
ctaggtttcagttag

SEQ ID NO: 238200 - DNA, 15 bp, Homo sapiens
gctaggtttcagtta

SEQ ID NO: 238201 - DNA, 15 bp, Homo sapiens
agctaggtttcagtt

SEQ ID NO: 238202 - DNA, 15 bp, Homo sapiens
cagctaggtttcagt

SEQ ID NO: 238203 - DNA, 15 bp, Homo sapiens
gcagctaggtttcag

SEQ ID NO: 238204 - DNA, 15 bp, Homo sapiens
agcagctaggtttca

SEQ ID NO: 238205 - DNA, 15 bp, Homo sapiens
aagcagctaggtttc

SEQ ID NO: 238206 - DNA, 15 bp, Homo sapiens
aaagcagctaggttt

SEQ ID NO: 238207 - DNA, 15 bp, Homo sapiens
caaagcagctaggtt

SEQ ID NO: 238208 - DNA, 15 bp, Homo sapiens
ccaaagcagctaggt

SEQ ID NO: 238209 - DNA, 15 bp, Homo sapiens
accaaagcagctagg

SEQ ID NO: 238210 - DNA, 15 bp, Homo sapiens
aaccaaagcagctag

SEQ ID NO: 238211 - DNA, 15 bp, Homo sapiens
taaccaaagcagcta

SEQ ID NO: 238212 - DNA, 15 bp, Homo sapiens
ctaaccaaagcagct

SEQ ID NO: 238213 - DNA, 15 bp, Homo sapiens
tctaaccaaagcagc

SEQ ID NO: 238214 - DNA, 15 bp, Homo sapiens
ctctaaccaaagcag

SEQ ID NO: 238215 - DNA, 15 bp, Homo sapiens
cctctaaccaaagca

SEQ ID NO: 238216 - DNA, 15 bp, Homo sapiens
tcctctaaccaaagc

SEQ ID NO: 238217 - DNA, 15 bp, Homo sapiens
atcctctaaccaaag

SEQ ID NO: 238218 - DNA, 15 bp, Homo sapiens
aatcctctaaccaaa

SEQ ID NO: 238219 - DNA, 15 bp, Homo sapiens
caatcctctaaccaa

SEQ ID NO: 238220 - DNA, 15 bp, Homo sapiens
ccaatcctctaacca

SEQ ID NO: 238221 - DNA, 15 bp, Homo sapiens
cccaatcctctaacc

SEQ ID NO: 238222 - DNA, 15 bp, Homo sapiens
ccccaatcctctaac

SEQ ID NO: 238223 - DNA, 15 bp, Homo sapiens
accccaatcctctaa

SEQ ID NO: 238224 - DNA, 15 bp, Homo sapiens
gaccccaatcctcta

SEQ ID NO: 238225 - DNA, 15 bp, Homo sapiens
tgaccccaatcctct

SEQ ID NO: 238226 - DNA, 15 bp, Homo sapiens
ctgaccccaatcctc

SEQ ID NO: 238227 - DNA, 15 bp, Homo sapiens
cctgaccccaatcct

SEQ ID NO: 238228 - DNA, 15 bp, Homo sapiens
tcctgaccccaatcc

SEQ ID NO: 238229 - DNA, 15 bp, Homo sapiens
ctcctgaccccaatc

SEQ ID NO: 238230 - DNA, 15 bp, Homo sapiens
cctcctgaccccaat

SEQ ID NO: 238231 - DNA, 15 bp, Homo sapiens
tcctcctgaccccaa

SEQ ID NO: 238232 - DNA, 15 bp, Homo sapiens
ctcctcctgacccca

SEQ ID NO: 238233 - DNA, 15 bp, Homo sapiens
tctcctcctgacccc

SEQ ID NO: 238234 - DNA, 15 bp, Homo sapiens
gtctcctcctgaccc

SEQ ID NO: 238235 - DNA, 15 bp, Homo sapiens
agtctcctcctgacc

SEQ ID NO: 238236 - DNA, 15 bp, Homo sapiens
cagtctcctcctgac

SEQ ID NO: 238237 - DNA, 15 bp, Homo sapiens
acagtctcctcctga

SEQ ID NO: 238238 - DNA, 15 bp, Homo sapiens
tacagtctcctcctg

SEQ ID NO: 238239 - DNA, 15 bp, Homo sapiens
atacagtctcctcct

SEQ ID NO: 238240 - DNA, 15 bp, Homo sapiens
gatacagtctcctcc

SEQ ID NO: 238241 - DNA, 15 bp, Homo sapiens
ggatacagtctcctc

SEQ ID NO: 238242 - DNA, 15 bp, Homo sapiens
aggatacagtctcct

SEQ ID NO: 238243 - DNA, 15 bp, Homo sapiens
gaggatacagtctcc

SEQ ID NO: 238244 - DNA, 15 bp, Homo sapiens
tgaggatacagtctc

SEQ ID NO: 238245 - DNA, 15 bp, Homo sapiens
atgaggatacagtct

SEQ ID NO: 238246 - DNA, 15 bp, Homo sapiens
catgaggatacagtc

SEQ ID NO: 238247 - DNA, 15 bp, Homo sapiens
ccatgaggatacagt

SEQ ID NO: 238248 - DNA, 15 bp, Homo sapiens
gccatgaggatacag

SEQ ID NO: 238249 - DNA, 15 bp, Homo sapiens
ggccatgaggataca

SEQ ID NO: 238250 - DNA, 15 bp, Homo sapiens
gggccatgaggatac

SEQ ID NO: 238251 - DNA, 15 bp, Homo sapiens
tgggccatgaggata

SEQ ID NO: 238252 - DNA, 15 bp, Homo sapiens
ctgggccatgaggat

SEQ ID NO: 238253 - DNA, 15 bp, Homo sapiens
gctgggccatgagga

SEQ ID NO: 238254 - DNA, 15 bp, Homo sapiens
tgctgggccatgagg

SEQ ID NO: 238255 - DNA, 15 bp, Homo sapiens
ttgctgggccatgag

SEQ ID NO: 238256 - DNA, 15 bp, Homo sapiens
cttgctgggccatga

SEQ ID NO: 238257 - DNA, 15 bp, Homo sapiens
tcttgctgggccatg

SEQ ID NO: 238258 - DNA, 15 bp, Homo sapiens
ctcttgctgggccat

SEQ ID NO: 238259 - DNA, 15 bp, Homo sapiens
actcttgctgggcca

SEQ ID NO: 238260 - DNA, 15 bp, Homo sapiens
aactcttgctgggcc

SEQ ID NO: 238261 - DNA, 15 bp, Homo sapiens
gaactcttgctgggc

SEQ ID NO: 238262 - DNA, 15 bp, Homo sapiens
ggaactcttgctggg

SEQ ID NO: 238263 - DNA, 15 bp, Homo sapiens
cggaactcttgctgg

SEQ ID NO: 238264 - DNA, 15 bp, Homo sapiens
gcggaactcttgctg

SEQ ID NO: 238265 - DNA, 15 bp, Homo sapiens
tgcggaactcttgct

SEQ ID NO: 238266 - DNA, 15 bp, Homo sapiens
ttgcggaactcttgc

SEQ ID NO: 238267 - DNA, 15 bp, Homo sapiens
tttgcggaactcttg

SEQ ID NO: 238268 - DNA, 15 bp, Homo sapiens
ttttgcggaactctt

SEQ ID NO: 238269 - DNA, 15 bp, Homo sapiens
gttttgcggaactct

SEQ ID NO: 238270 - DNA, 15 bp, Homo sapiens
ggttttgcggaactc

SEQ ID NO: 238271 - DNA, 15 bp, Homo sapiens
gggttttgcggaact

SEQ ID NO: 238272 - DNA, 15 bp, Homo sapiens
agggttttgcggaac

SEQ ID NO: 238273 - DNA, 15 bp, Homo sapiens
aagggttttgcggaa

SEQ ID NO: 238274 - DNA, 15 bp, Homo sapiens
caagggttttgcgga

SEQ ID NO: 238275 - DNA, 15 bp, Homo sapiens
ccaagggttttgcgg

SEQ ID NO: 238276 - DNA, 15 bp, Homo sapiens
cccaagggttttgcg

SEQ ID NO: 238277 - DNA, 15 bp, Homo sapiens
tcccaagggttttgc

SEQ ID NO: 238278 - DNA, 15 bp, Homo sapiens
atcccaagggttttg

SEQ ID NO: 238279 - DNA, 15 bp, Homo sapiens
aatcccaagggtttt

SEQ ID NO: 238280 - DNA, 15 bp, Homo sapiens
gaatcccaagggttt

SEQ ID NO: 238281 - DNA, 15 bp, Homo sapiens
agaatcccaagggtt

SEQ ID NO: 238282 - DNA, 15 bp, Homo sapiens
gagaatcccaagggt

SEQ ID NO: 238283 - DNA, 15 bp, Homo sapiens
tgagaatcccaaggg

SEQ ID NO: 238284 - DNA, 15 bp, Homo sapiens
ctgagaatcccaagg

SEQ ID NO: 238285 - DNA, 15 bp, Homo sapiens
actgagaatcccaag

SEQ ID NO: 238286 - DNA, 15 bp, Homo sapiens
tactgagaatcccaa

SEQ ID NO: 238287 - DNA, 15 bp, Homo sapiens
ctactgagaatccca

SEQ ID NO: 238288 - DNA, 15 bp, Homo sapiens
tctactgagaatccc

SEQ ID NO: 238289 - DNA, 15 bp, Homo sapiens
ctctactgagaatcc

SEQ ID NO: 238290 - DNA, 15 bp, Homo sapiens
gctctactgagaatc

SEQ ID NO: 238291 - DNA, 15 bp, Homo sapiens
tgctctactgagaat

SEQ ID NO: 238292 - DNA, 15 bp, Homo sapiens
ctgctctactgagaa

SEQ ID NO: 238293 - DNA, 15 bp, Homo sapiens
tctgctctactgaga

SEQ ID NO: 238294 - DNA, 15 bp, Homo sapiens
atctgctctactgag

SEQ ID NO: 238295 - DNA, 15 bp, Homo sapiens
gatctgctctactga

SEQ ID NO: 238296 - DNA, 15 bp, Homo sapiens
tgatctgctctactg

SEQ ID NO: 238297 - DNA, 15 bp, Homo sapiens
ctgatctgctctact

SEQ ID NO: 238298 - DNA, 15 bp, Homo sapiens
cctgatctgctctac

SEQ ID NO: 238299 - DNA, 15 bp, Homo sapiens
tcctgatctgctcta

SEQ ID NO: 238300 - DNA, 15 bp, Homo sapiens
atcctgatctgctct

SEQ ID NO: 238301 - DNA, 15 bp, Homo sapiens
catcctgatctgctc

SEQ ID NO: 238302 - DNA, 15 bp, Homo sapiens
gcatcctgatctgct

SEQ ID NO: 238303 - DNA, 15 bp, Homo sapiens
agcatcctgatctgc

SEQ ID NO: 238304 - DNA, 15 bp, Homo sapiens
tagcatcctgatctg

SEQ ID NO: 238305 - DNA, 15 bp, Homo sapiens
ttagcatcctgatct

SEQ ID NO: 238306 - DNA, 15 bp, Homo sapiens
attagcatcctgatc

SEQ ID NO: 238307 - DNA, 15 bp, Homo sapiens
cattagcatcctgat

SEQ ID NO: 238308 - DNA, 15 bp, Homo sapiens
gcattagcatcctga

SEQ ID NO: 238309 - DNA, 15 bp, Homo sapiens
ggcattagcatcctg

SEQ ID NO: 238310 - DNA, 15 bp, Homo sapiens
tggcattagcatcct

SEQ ID NO: 238311 - DNA, 15 bp, Homo sapiens
ctggcattagcatcc

SEQ ID NO: 238312 - DNA, 15 bp, Homo sapiens
gctggcattagcatc

SEQ ID NO: 238313 - DNA, 15 bp, Homo sapiens
ggctggcattagcat

SEQ ID NO: 238314 - DNA, 15 bp, Homo sapiens
aggctggcattagca

SEQ ID NO: 238315 - DNA, 15 bp, Homo sapiens
cactcttcctccagt

SEQ ID NO: 238316 - DNA, 15 bp, Homo sapiens
acactcttcctccag

SEQ ID NO: 238317 - DNA, 15 bp, Homo sapiens
aacactcttcctcca

SEQ ID NO: 238318 - DNA, 15 bp, Homo sapiens
caacactcttcctcc

SEQ ID NO: 238319 - DNA, 15 bp, Homo sapiens
ccaacactcttcctc

SEQ ID NO: 238320 - DNA, 15 bp, Homo sapiens
tccaacactcttcct

SEQ ID NO: 238321 - DNA, 15 bp, Homo sapiens
ttccaacactcttcc

SEQ ID NO: 238322 - DNA, 15 bp, Homo sapiens
attccaacactcttc

SEQ ID NO: 238323 - DNA, 15 bp, Homo sapiens
cattccaacactctt

SEQ ID NO: 238324 - DNA, 15 bp, Homo sapiens
tcattccaacactct

SEQ ID NO: 238325 - DNA, 15 bp, Homo sapiens
ctcattccaacactc

SEQ ID NO: 238326 - DNA, 15 bp, Homo sapiens
tctcattccaacact

SEQ ID NO: 238327 - DNA, 15 bp, Homo sapiens
atctcattccaacac

SEQ ID NO: 238328 - DNA, 15 bp, Homo sapiens
aatctcattccaaca

SEQ ID NO: 238329 - DNA, 15 bp, Homo sapiens
caatctcattccaac

SEQ ID NO: 238330 - DNA, 15 bp, Homo sapiens
gcaatctcattccaa

SEQ ID NO: 238331 - DNA, 15 bp, Homo sapiens
agcaatctcattcca

SEQ ID NO: 238332 - DNA, 15 bp, Homo sapiens
tagcaatctcattcc

SEQ ID NO: 238333 - DNA, 15 bp, Homo sapiens
ttagcaatctcattc

SEQ ID NO: 238334 - DNA, 15 bp, Homo sapiens
tttagcaatctcatt

SEQ ID NO: 238335 - DNA, 15 bp, Homo sapiens
atttagcaatctcat

SEQ ID NO: 238336 - DNA, 15 bp, Homo sapiens
aatttagcaatctca

SEQ ID NO: 238337 - DNA, 15 bp, Homo sapiens
taatttagcaatctc

SEQ ID NO: 238338 - DNA, 15 bp, Homo sapiens
ctaatttagcaatct

SEQ ID NO: 238339 - DNA, 15 bp, Homo sapiens
tctaatttagcaatc

SEQ ID NO: 238340 - DNA, 15 bp, Homo sapiens
ttctaatttagcaat

SEQ ID NO: 238341 - DNA, 15 bp, Homo sapiens
tttctaatttagcaa

SEQ ID NO: 238342 - DNA, 15 bp, Homo sapiens
gtttctaatttagca

SEQ ID NO: 238343 - DNA, 15 bp, Homo sapiens
tgtttctaatttagc

SEQ ID NO: 238344 - DNA, 15 bp, Homo sapiens
ttgtttctaatttag

SEQ ID NO: 238345 - DNA, 15 bp, Homo sapiens
tttgtttctaattta

SEQ ID NO: 238346 - DNA, 15 bp, Homo sapiens
ttttgtttctaattt

SEQ ID NO: 238347 - DNA, 15 bp, Homo sapiens
gttttgtttctaatt

SEQ ID NO: 238348 - DNA, 15 bp, Homo sapiens
agttttgtttctaat

SEQ ID NO: 238349 - DNA, 15 bp, Homo sapiens
cagttttgtttctaa

SEQ ID NO: 238350 - DNA, 15 bp, Homo sapiens
ccagttttgtttcta

SEQ ID NO: 238351 - DNA, 15 bp, Homo sapiens
accagttttgtttct

SEQ ID NO: 238352 - DNA, 15 bp, Homo sapiens
aaccagttttgtttc

SEQ ID NO: 238353 - DNA, 15 bp, Homo sapiens
taaccagttttgttt

SEQ ID NO: 238354 - DNA, 15 bp, Homo sapiens
ttaaccagttttgtt

SEQ ID NO: 238355 - DNA, 15 bp, Homo sapiens
attaaccagttttgt

SEQ ID NO: 238356 - DNA, 15 bp, Homo sapiens
cattaaccagttttg

SEQ ID NO: 238357 - DNA, 15 bp, Homo sapiens
acattaaccagtttt

SEQ ID NO: 238358 - DNA, 15 bp, Homo sapiens
gacattaaccagttt

SEQ ID NO: 238359 - DNA, 15 bp, Homo sapiens
ggacattaaccagtt

SEQ ID NO: 238360 - DNA, 15 bp, Homo sapiens
aggacattaaccagt

SEQ ID NO: 238361 - DNA, 15 bp, Homo sapiens
taggacattaaccag

SEQ ID NO: 238362 - DNA, 15 bp, Homo sapiens
gtaggacattaacca

SEQ ID NO: 238363 - DNA, 15 bp, Homo sapiens
tgtaggacattaacc

SEQ ID NO: 238364 - DNA, 15 bp, Homo sapiens
gtgtaggacattaac

SEQ ID NO: 238365 - DNA, 15 bp, Homo sapiens
cgtgtaggacattaa

SEQ ID NO: 238366 - DNA, 15 bp, Homo sapiens
ccgtgtaggacatta

SEQ ID NO: 238367 - DNA, 15 bp, Homo sapiens
cccgtgtaggacatt

SEQ ID NO: 238368 - DNA, 15 bp, Homo sapiens
tcccgtgtaggacat

SEQ ID NO: 238369 - DNA, 15 bp, Homo sapiens
ctcccgtgtaggaca

SEQ ID NO: 238370 - DNA, 15 bp, Homo sapiens
actcccgtgtaggac

SEQ ID NO: 238371 - DNA, 15 bp, Homo sapiens
gactcccgtgtagga

SEQ ID NO: 238372 - DNA, 15 bp, Homo sapiens
tgactcccgtgtagg

SEQ ID NO: 238373 - DNA, 15 bp, Homo sapiens
ttgactcccgtgtag

SEQ ID NO: 238374 - DNA, 15 bp, Homo sapiens
attgactcccgtgta

SEQ ID NO: 238375 - DNA, 15 bp, Homo sapiens
aattgactcccgtgt

SEQ ID NO: 238376 - DNA, 15 bp, Homo sapiens
taattgactcccgtg

SEQ ID NO: 238377 - DNA, 15 bp, Homo sapiens
ttaattgactcccgt

SEQ ID NO: 238378 - DNA, 15 bp, Homo sapiens
attaattgactcccg

SEQ ID NO: 238379 - DNA, 15 bp, Homo sapiens
tattaattgactccc

SEQ ID NO: 238380 - DNA, 15 bp, Homo sapiens
ttattaattgactcc

SEQ ID NO: 238381 - DNA, 15 bp, Homo sapiens
tttattaattgactc

SEQ ID NO: 238382 - DNA, 15 bp, Homo sapiens
gtttattaattgact

SEQ ID NO: 238383 - DNA, 15 bp, Homo sapiens
agtttattaattgac

SEQ ID NO: 238384 - DNA, 15 bp, Homo sapiens
aagtttattaattga

SEQ ID NO: 238385 - DNA, 15 bp, Homo sapiens
aaagtttattaattg

SEQ ID NO: 238386 - DNA, 15 bp, Homo sapiens
caaagtttattaatt

SEQ ID NO: 238387 - DNA, 15 bp, Homo sapiens
tcaaagtttattaat

SEQ ID NO: 238388 - DNA, 15 bp, Homo sapiens
ctcaaagtttattaa

SEQ ID NO: 238389 - DNA, 15 bp, Homo sapiens
tctcaaagtttatta

SEQ ID NO: 238390 - DNA, 15 bp, Homo sapiens
atctcaaagtttatt

SEQ ID NO: 238391 - DNA, 15 bp, Homo sapiens
aatctcaaagtttat

SEQ ID NO: 238392 - DNA, 15 bp, Homo sapiens
taatctcaaagttta

SEQ ID NO: 238393 - DNA, 15 bp, Homo sapiens
ataatctcaaagttt

SEQ ID NO: 238394 - DNA, 15 bp, Homo sapiens
gataatctcaaagtt

SEQ ID NO: 238395 - DNA, 15 bp, Homo sapiens
agataatctcaaagt

SEQ ID NO: 238396 - DNA, 15 bp, Homo sapiens
aagataatctcaaag

SEQ ID NO: 238397 - DNA, 15 bp, Homo sapiens
aaagataatctcaaa

SEQ ID NO: 238398 - DNA, 15 bp, Homo sapiens
aaaagataatctcaa

SEQ ID NO: 238399 - DNA, 15 bp, Homo sapiens
gaaaagataatctca

SEQ ID NO: 238400 - DNA, 15 bp, Homo sapiens
agaaaagataatctc

SEQ ID NO: 238401 - DNA, 15 bp, Homo sapiens
gagaaaagataatct

SEQ ID NO: 238402 - DNA, 15 bp, Homo sapiens
ggagaaaagataatc

SEQ ID NO: 238403 - DNA, 15 bp, Homo sapiens
aggagaaaagataat

SEQ ID NO: 238404 - DNA, 15 bp, Homo sapiens
caggagaaaagataa

SEQ ID NO: 238405 - DNA, 15 bp, Homo sapiens
tcaggagaaaagata

SEQ ID NO: 238406 - DNA, 15 bp, Homo sapiens
ttcaggagaaaagat

SEQ ID NO: 238407 - DNA, 15 bp, Homo sapiens
gttcaggagaaaaga

SEQ ID NO: 238408 - DNA, 15 bp, Homo sapiens
tgttcaggagaaaag

SEQ ID NO: 238409 - DNA, 15 bp, Homo sapiens
ctgttcaggagaaaa

SEQ ID NO: 238410 - DNA, 15 bp, Homo sapiens
tctgttcaggagaaa

SEQ ID NO: 238411 - DNA, 15 bp, Homo sapiens
ttctgttcaggagaa

SEQ ID NO: 238412 - DNA, 15 bp, Homo sapiens
tttctgttcaggaga

SEQ ID NO: 238413 - DNA, 15 bp, Homo sapiens
ttttctgttcaggag

SEQ ID NO: 238414 - DNA, 15 bp, Homo sapiens
gttttctgttcagga

SEQ ID NO: 238415 - DNA, 15 bp, Homo sapiens
tgttttctgttcagg

SEQ ID NO: 238416 - DNA, 15 bp, Homo sapiens
atgttttctgttcag

SEQ ID NO: 238417 - DNA, 15 bp, Homo sapiens
aatgttttctgttca

SEQ ID NO: 238418 - DNA, 15 bp, Homo sapiens
aaatgttttctgttc

SEQ ID NO: 238419 - DNA, 15 bp, Homo sapiens
caaatgttttctgtt

SEQ ID NO: 238420 - DNA, 15 bp, Homo sapiens
acaaatgttttctgt

SEQ ID NO: 238421 - DNA, 15 bp, Homo sapiens
tacaaatgttttctg

SEQ ID NO: 238422 - DNA, 15 bp, Homo sapiens
atacaaatgttttct

SEQ ID NO: 238423 - DNA, 15 bp, Homo sapiens
aatacaaatgttttc

SEQ ID NO: 238424 - DNA, 15 bp, Homo sapiens
aaatacaaatgtttt

SEQ ID NO: 238425 - DNA, 15 bp, Homo sapiens
gaaatacaaatgttt

SEQ ID NO: 238426 - DNA, 15 bp, Homo sapiens
agaaatacaaatgtt

SEQ ID NO: 238427 - DNA, 15 bp, Homo sapiens
tagaaatacaaatgt

SEQ ID NO: 238428 - DNA, 15 bp, Homo sapiens
gtagaaatacaaatg

SEQ ID NO: 238429 - DNA, 15 bp, Homo sapiens
agtagaaatacaaat

SEQ ID NO: 238430 - DNA, 15 bp, Homo sapiens
tagtagaaatacaaa

SEQ ID NO: 238431 - DNA, 15 bp, Homo sapiens
ctagtagaaatacaa

SEQ ID NO: 238432 - DNA, 15 bp, Homo sapiens
cctagtagaaataca

SEQ ID NO: 238433 - DNA, 15 bp, Homo sapiens
gcctagtagaaatac

SEQ ID NO: 238434 - DNA, 15 bp, Homo sapiens
tgcctagtagaaata

SEQ ID NO: 238435 - DNA, 15 bp, Homo sapiens
ttgcctagtagaaat

SEQ ID NO: 238436 - DNA, 15 bp, Homo sapiens
tttgcctagtagaaa

SEQ ID NO: 238437 - DNA, 15 bp, Homo sapiens
ttttgcctagtagaa

SEQ ID NO: 238438 - DNA, 15 bp, Homo sapiens
attttgcctagtaga

SEQ ID NO: 238439 - DNA, 15 bp, Homo sapiens
gattttgcctagtag

SEQ ID NO: 238440 - DNA, 15 bp, Homo sapiens
ggattttgcctagta

SEQ ID NO: 238441 - DNA, 15 bp, Homo sapiens
aggattttgcctagt

SEQ ID NO: 238442 - DNA, 15 bp, Homo sapiens
taggattttgcctag

SEQ ID NO: 238443 - DNA, 15 bp, Homo sapiens
gtaggattttgccta

SEQ ID NO: 238444 - DNA, 15 bp, Homo sapiens
tgtaggattttgcct

SEQ ID NO: 238445 - DNA, 15 bp, Homo sapiens
gtgtaggattttgcc

SEQ ID NO: 238446 - DNA, 15 bp, Homo sapiens
tgtgtaggattttgc

SEQ ID NO: 238447 - DNA, 15 bp, Homo sapiens
atgtgtaggattttg

SEQ ID NO: 238448 - DNA, 15 bp, Homo sapiens
aatgtgtaggatttt

SEQ ID NO: 238449 - DNA, 15 bp, Homo sapiens
taatgtgtaggattt

SEQ ID NO: 238450 - DNA, 15 bp, Homo sapiens
ttaatgtgtaggatt

SEQ ID NO: 238451 - DNA, 15 bp, Homo sapiens
attaatgtgtaggat

SEQ ID NO: 238452 - DNA, 15 bp, Homo sapiens
cattaatgtgtagga

SEQ ID NO: 238453 - DNA, 15 bp, Homo sapiens
acattaatgtgtagg

SEQ ID NO: 238454 - DNA, 15 bp, Homo sapiens
cacattaatgtgtag

SEQ ID NO: 238455 - DNA, 15 bp, Homo sapiens
acacattaatgtgta

SEQ ID NO: 238456 - DNA, 15 bp, Homo sapiens
tacacattaatgtgt

SEQ ID NO: 238457 - DNA, 15 bp, Homo sapiens
ttacacattaatgtg

SEQ ID NO: 238458 - DNA, 15 bp, Homo sapiens
gttacacattaatgt

SEQ ID NO: 238459 - DNA, 15 bp, Homo sapiens
agttacacattaatg

SEQ ID NO: 238460 - DNA, 15 bp, Homo sapiens
aagttacacattaat

SEQ ID NO: 238461 - DNA, 15 bp, Homo sapiens
gaagttacacattaa

SEQ ID NO: 238462 - DNA, 15 bp, Homo sapiens
tgaagttacacatta

SEQ ID NO: 238463 - DNA, 15 bp, Homo sapiens
gtgaagttacacatt

SEQ ID NO: 238464 - DNA, 15 bp, Homo sapiens
tgtgaagttacacat

SEQ ID NO: 238465 - DNA, 15 bp, Homo sapiens
atgtgaagttacaca

SEQ ID NO: 238466 - DNA, 15 bp, Homo sapiens
tatgtgaagttacac

SEQ ID NO: 238467 - DNA, 15 bp, Homo sapiens
ttatgtgaagttaca

SEQ ID NO: 238468 - DNA, 15 bp, Homo sapiens
attatgtgaagttac

SEQ ID NO: 238469 - DNA, 15 bp, Homo sapiens
gattatgtgaagtta

SEQ ID NO: 238470 - DNA, 15 bp, Homo sapiens
agattatgtgaagtt

SEQ ID NO: 238471 - DNA, 15 bp, Homo sapiens
cagattatgtgaagt

SEQ ID NO: 238472 - DNA, 15 bp, Homo sapiens
ccagattatgtgaag

SEQ ID NO: 238473 - DNA, 15 bp, Homo sapiens
gccagattatgtgaa

SEQ ID NO: 238474 - DNA, 15 bp, Homo sapiens
agccagattatgtga

SEQ ID NO: 238475 - DNA, 15 bp, Homo sapiens
tagccagattatgtg

SEQ ID NO: 238476 - DNA, 15 bp, Homo sapiens
atagccagattatgt

SEQ ID NO: 238477 - DNA, 15 bp, Homo sapiens
aatagccagattatg

SEQ ID NO: 238478 - DNA, 15 bp, Homo sapiens
aaatagccagattat

SEQ ID NO: 238479 - DNA, 15 bp, Homo sapiens
taaatagccagatta

SEQ ID NO: 238480 - DNA, 15 bp, Homo sapiens
ctaaatagccagatt

SEQ ID NO: 238481 - DNA, 15 bp, Homo sapiens
actaaatagccagat

SEQ ID NO: 238482 - DNA, 15 bp, Homo sapiens
aactaaatagccaga

SEQ ID NO: 238483 - DNA, 15 bp, Homo sapiens
caactaaatagccag

SEQ ID NO: 238484 - DNA, 15 bp, Homo sapiens
ccaactaaatagcca

SEQ ID NO: 238485 - DNA, 15 bp, Homo sapiens
accaactaaatagcc

SEQ ID NO: 238486 - DNA, 15 bp, Homo sapiens
taccaactaaatagc

SEQ ID NO: 238487 - DNA, 15 bp, Homo sapiens
ctaccaactaaatag

SEQ ID NO: 238488 - DNA, 15 bp, Homo sapiens
gctaccaactaaata

SEQ ID NO: 238489 - DNA, 15 bp, Homo sapiens
tgctaccaactaaat

SEQ ID NO: 238490 - DNA, 15 bp, Homo sapiens
ttgctaccaactaaa

SEQ ID NO: 238491 - DNA, 15 bp, Homo sapiens
tttgctaccaactaa

SEQ ID NO: 238492 - DNA, 15 bp, Homo sapiens
atttgctaccaacta

SEQ ID NO: 238493 - DNA, 15 bp, Homo sapiens
tatttgctaccaact

SEQ ID NO: 238494 - DNA, 15 bp, Homo sapiens
atatttgctaccaac

SEQ ID NO: 238495 - DNA, 15 bp, Homo sapiens
gatatttgctaccaa

SEQ ID NO: 238496 - DNA, 15 bp, Homo sapiens
tgatatttgctacca

SEQ ID NO: 238497 - DNA, 15 bp, Homo sapiens
ttgatatttgctacc

SEQ ID NO: 238498 - DNA, 15 bp, Homo sapiens
cttgatatttgctac

SEQ ID NO: 238499 - DNA, 15 bp, Homo sapiens
acttgatatttgcta

SEQ ID NO: 238500 - DNA, 15 bp, Homo sapiens
gacttgatatttgct

SEQ ID NO: 238501 - DNA, 15 bp, Homo sapiens
tgacttgatatttgc

SEQ ID NO: 238502 - DNA, 15 bp, Homo sapiens
ttgacttgatatttg

SEQ ID NO: 238503 - DNA, 15 bp, Homo sapiens
gttgacttgatattt

SEQ ID NO: 238504 - DNA, 15 bp, Homo sapiens
tgttgacttgatatt

SEQ ID NO: 238505 - DNA, 15 bp, Homo sapiens
ttgttgacttgatat

SEQ ID NO: 238506 - DNA, 15 bp, Homo sapiens
tttgttgacttgata

SEQ ID NO: 238507 - DNA, 15 bp, Homo sapiens
ctttgttgacttgat

SEQ ID NO: 238508 - DNA, 15 bp, Homo sapiens
cctttgttgacttga

SEQ ID NO: 238509 - DNA, 15 bp, Homo sapiens
acctttgttgacttg

SEQ ID NO: 238510 - DNA, 15 bp, Homo sapiens
tacctttgttgactt

SEQ ID NO: 238511 - DNA, 15 bp, Homo sapiens
gtacctttgttgact

SEQ ID NO: 238512 - DNA, 15 bp, Homo sapiens
agtacctttgttgac

SEQ ID NO: 238513 - DNA, 15 bp, Homo sapiens
aagtacctttgttga

SEQ ID NO: 238514 - DNA, 15 bp, Homo sapiens
taagtacctttgttg

SEQ ID NO: 238515 - DNA, 15 bp, Homo sapiens
gtaagtacctttgtt

SEQ ID NO: 238516 - DNA, 15 bp, Homo sapiens
agtaagtacctttgt

SEQ ID NO: 238517 - DNA, 15 bp, Homo sapiens
aagtaagtacctttg

SEQ ID NO: 238518 - DNA, 15 bp, Homo sapiens
aaagtaagtaccttt

SEQ ID NO: 238519 - DNA, 15 bp, Homo sapiens
gaaagtaagtacctt

SEQ ID NO: 238520 - DNA, 15 bp, Homo sapiens
ggaaagtaagtacct

SEQ ID NO: 238521 - DNA, 15 bp, Homo sapiens
aggaaagtaagtacc

SEQ ID NO: 238522 - DNA, 15 bp, Homo sapiens
gaggaaagtaagtac

SEQ ID NO: 238523 - DNA, 15 bp, Homo sapiens
agaggaaagtaagta

SEQ ID NO: 238524 - DNA, 15 bp, Homo sapiens
tagaggaaagtaagt

SEQ ID NO: 238525 - DNA, 15 bp, Homo sapiens
ctagaggaaagtaag

SEQ ID NO: 238526 - DNA, 15 bp, Homo sapiens
cctagaggaaagtaa

SEQ ID NO: 238527 - DNA, 15 bp, Homo sapiens
acctagaggaaagta

SEQ ID NO: 238528 - DNA, 15 bp, Homo sapiens
tacctagaggaaagt

SEQ ID NO: 238529 - DNA, 15 bp, Homo sapiens
ttacctagaggaaag

SEQ ID NO: 238530 - DNA, 15 bp, Homo sapiens
attacctagaggaaa

SEQ ID NO: 238531 - DNA, 15 bp, Homo sapiens
aattacctagaggaa

SEQ ID NO: 238532 - DNA, 15 bp, Homo sapiens
taattacctagagga

SEQ ID NO: 238533 - DNA, 15 bp, Homo sapiens
ttaattacctagagg

SEQ ID NO: 238534 - DNA, 15 bp, Homo sapiens
tttaattacctagag

SEQ ID NO: 238535 - DNA, 15 bp, Homo sapiens
atttaattacctaga

SEQ ID NO: 238536 - DNA, 15 bp, Homo sapiens
tatttaattacctag

SEQ ID NO: 238537 - DNA, 15 bp, Homo sapiens
atatttaattaccta

SEQ ID NO: 238538 - DNA, 15 bp, Homo sapiens
aatatttaattacct

SEQ ID NO: 238539 - DNA, 15 bp, Homo sapiens
aaatatttaattacc

SEQ ID NO: 238540 - DNA, 15 bp, Homo sapiens
gaaatatttaattac

SEQ ID NO: 238541 - DNA, 15 bp, Homo sapiens
agaaatatttaatta

SEQ ID NO: 238542 - DNA, 15 bp, Homo sapiens
aagaaatatttaatt

SEQ ID NO: 238543 - DNA, 15 bp, Homo sapiens
caagaaatatttaat

SEQ ID NO: 238544 - DNA, 15 bp, Homo sapiens
ccaagaaatatttaa

SEQ ID NO: 238545 - DNA, 15 bp, Homo sapiens
cccaagaaatattta

SEQ ID NO: 238546 - DNA, 15 bp, Homo sapiens
gcccaagaaatattt

SEQ ID NO: 238547 - DNA, 15 bp, Homo sapiens
tgcccaagaaatatt

SEQ ID NO: 238548 - DNA, 15 bp, Homo sapiens
ctgcccaagaaatat

SEQ ID NO: 238549 - DNA, 15 bp, Homo sapiens
cctgcccaagaaata

SEQ ID NO: 238550 - DNA, 15 bp, Homo sapiens
gcctgcccaagaaat

SEQ ID NO: 238551 - DNA, 15 bp, Homo sapiens
agcctgcccaagaaa

SEQ ID NO: 238552 - DNA, 15 bp, Homo sapiens
cagcctgcccaagaa

SEQ ID NO: 238553 - DNA, 15 bp, Homo sapiens
acagcctgcccaaga

SEQ ID NO: 238554 - DNA, 15 bp, Homo sapiens
aacagcctgcccaag

SEQ ID NO: 238555 - DNA, 15 bp, Homo sapiens
taacagcctgcccaa

SEQ ID NO: 238556 - DNA, 15 bp, Homo sapiens
ttaacagcctgccca

SEQ ID NO: 238557 - DNA, 15 bp, Homo sapiens
tttaacagcctgccc

SEQ ID NO: 238558 - DNA, 15 bp, Homo sapiens
gtttaacagcctgcc

SEQ ID NO: 238559 - DNA, 15 bp, Homo sapiens
tgtttaacagcctgc

SEQ ID NO: 238560 - DNA, 15 bp, Homo sapiens
atgtttaacagcctg

SEQ ID NO: 238561 - DNA, 15 bp, Homo sapiens
aatgtttaacagcct

SEQ ID NO: 238562 - DNA, 15 bp, Homo sapiens
caatgtttaacagcc

SEQ ID NO: 238563 - DNA, 15 bp, Homo sapiens
gcaatgtttaacagc

SEQ ID NO: 238564 - DNA, 15 bp, Homo sapiens
agcaatgtttaacag

SEQ ID NO: 238565 - DNA, 15 bp, Homo sapiens
gagcaatgtttaaca

SEQ ID NO: 238566 - DNA, 15 bp, Homo sapiens
ggagcaatgtttaac

SEQ ID NO: 238567 - DNA, 15 bp, Homo sapiens
tggagcaatgtttaa

SEQ ID NO: 238568 - DNA, 15 bp, Homo sapiens
gtggagcaatgttta

SEQ ID NO: 238569 - DNA, 15 bp, Homo sapiens
tgtggagcaatgttt

SEQ ID NO: 238570 - DNA, 15 bp, Homo sapiens
ctgtggagcaatgtt

SEQ ID NO: 238571 - DNA, 15 bp, Homo sapiens
tctgtggagcaatgt

SEQ ID NO: 238572 - DNA, 15 bp, Homo sapiens
atctgtggagcaatg

SEQ ID NO: 238573 - DNA, 15 bp, Homo sapiens
catctgtggagcaat

SEQ ID NO: 238574 - DNA, 15 bp, Homo sapiens
tcatctgtggagcaa

SEQ ID NO: 238575 - DNA, 15 bp, Homo sapiens
gtcatctgtggagca

SEQ ID NO: 238576 - DNA, 15 bp, Homo sapiens
ggtcatctgtggagc

SEQ ID NO: 238577 - DNA, 15 bp, Homo sapiens
aggtcatctgtggag

SEQ ID NO: 238578 - DNA, 15 bp, Homo sapiens
aaggtcatctgtgga

SEQ ID NO: 238579 - DNA, 15 bp, Homo sapiens
caaggtcatctgtgg

SEQ ID NO: 238580 - DNA, 15 bp, Homo sapiens
tcaaggtcatctgtg

SEQ ID NO: 238581 - DNA, 15 bp, Homo sapiens
ttcaaggtcatctgt

SEQ ID NO: 238582 - DNA, 15 bp, Homo sapiens
tttcaaggtcatctg

SEQ ID NO: 238583 - DNA, 15 bp, Homo sapiens
ctttcaaggtcatct

SEQ ID NO: 238584 - DNA, 15 bp, Homo sapiens
cctttcaaggtcatc

SEQ ID NO: 238585 - DNA, 15 bp, Homo sapiens
tcctttcaaggtcat

SEQ ID NO: 238586 - DNA, 15 bp, Homo sapiens
gtcctttcaaggtca

SEQ ID NO: 238587 - DNA, 15 bp, Homo sapiens
tgtcctttcaaggtc

SEQ ID NO: 238588 - DNA, 15 bp, Homo sapiens
atgtcctttcaaggt

SEQ ID NO: 238589 - DNA, 15 bp, Homo sapiens
catgtcctttcaagg

SEQ ID NO: 238590 - DNA, 15 bp, Homo sapiens
tcatgtcctttcaag

SEQ ID NO: 238591 - DNA, 15 bp, Homo sapiens
gtcatgtcctttcaa

SEQ ID NO: 238592 - DNA, 15 bp, Homo sapiens
tgtcatgtcctttca

SEQ ID NO: 238593 - DNA, 15 bp, Homo sapiens
gtgtcatgtcctttc

SEQ ID NO: 238594 - DNA, 15 bp, Homo sapiens
tgtgtcatgtccttt

SEQ ID NO: 238595 - DNA, 15 bp, Homo sapiens
atgtgtcatgtcctt

SEQ ID NO: 238596 - DNA, 15 bp, Homo sapiens
aatgtgtcatgtcct

SEQ ID NO: 238597 - DNA, 15 bp, Homo sapiens
aaatgtgtcatgtcc

SEQ ID NO: 238598 - DNA, 15 bp, Homo sapiens
gaaatgtgtcatgtc

SEQ ID NO: 238599 - DNA, 15 bp, Homo sapiens
ggaaatgtgtcatgt

SEQ ID NO: 238600 - DNA, 15 bp, Homo sapiens
tggaaatgtgtcatg

SEQ ID NO: 238601 - DNA, 15 bp, Homo sapiens
atggaaatgtgtcat

SEQ ID NO: 238602 - DNA, 15 bp, Homo sapiens
aatggaaatgtgtca

SEQ ID NO: 238603 - DNA, 15 bp, Homo sapiens
gaatggaaatgtgtc

SEQ ID NO: 238604 - DNA, 15 bp, Homo sapiens
ggaatggaaatgtgt

SEQ ID NO: 238605 - DNA, 15 bp, Homo sapiens
tggaatggaaatgtg

SEQ ID NO: 238606 - DNA, 15 bp, Homo sapiens
atggaatggaaatgt

SEQ ID NO: 238607 - DNA, 15 bp, Homo sapiens
aatggaatggaaatg

SEQ ID NO: 238608 - DNA, 15 bp, Homo sapiens
caatggaatggaaat

SEQ ID NO: 238609 - DNA, 15 bp, Homo sapiens
gcaatggaatggaaa

SEQ ID NO: 238610 - DNA, 15 bp, Homo sapiens
agcaatggaatggaa

SEQ ID NO: 238611 - DNA, 15 bp, Homo sapiens
aagcaatggaatgga

SEQ ID NO: 238612 - DNA, 15 bp, Homo sapiens
caagcaatggaatgg

SEQ ID NO: 238613 - DNA, 15 bp, Homo sapiens
tcaagcaatggaatg

SEQ ID NO: 238614 - DNA, 15 bp, Homo sapiens
gtcaagcaatggaat

SEQ ID NO: 238615 - DNA, 15 bp, Homo sapiens
ggtcaagcaatggaa

SEQ ID NO: 238616 - DNA, 15 bp, Homo sapiens
gggtcaagcaatgga

SEQ ID NO: 238617 - DNA, 15 bp, Homo sapiens
ggggtcaagcaatgg

SEQ ID NO: 238618 - DNA, 15 bp, Homo sapiens
aggggtcaagcaatg

SEQ ID NO: 238619 - DNA, 15 bp, Homo sapiens
caggggtcaagcaat

SEQ ID NO: 238620 - DNA, 15 bp, Homo sapiens
gcaggggtcaagcaa

SEQ ID NO: 238621 - DNA, 15 bp, Homo sapiens
agcaggggtcaagca

SEQ ID NO: 238622 - DNA, 15 bp, Homo sapiens
tagcaggggtcaagc

SEQ ID NO: 238623 - DNA, 15 bp, Homo sapiens
ttagcaggggtcaag

SEQ ID NO: 238624 - DNA, 15 bp, Homo sapiens
attagcaggggtcaa

SEQ ID NO: 238625 - DNA, 15 bp, Homo sapiens
tattagcaggggtca

SEQ ID NO: 238626 - DNA, 15 bp, Homo sapiens
ctattagcaggggtc

SEQ ID NO: 238627 - DNA, 15 bp, Homo sapiens
tctattagcaggggt

SEQ ID NO: 238628 - DNA, 15 bp, Homo sapiens
ttctattagcagggg

SEQ ID NO: 238629 - DNA, 15 bp, Homo sapiens
gttctattagcaggg

SEQ ID NO: 238630 - DNA, 15 bp, Homo sapiens
ggttctattagcagg

SEQ ID NO: 238631 - DNA, 15 bp, Homo sapiens
tggttctattagcag

SEQ ID NO: 238632 - DNA, 15 bp, Homo sapiens
ttggttctattagca

SEQ ID NO: 238633 - DNA, 15 bp, Homo sapiens
cttggttctattagc

SEQ ID NO: 238634 - DNA, 15 bp, Homo sapiens
acttggttctattag

SEQ ID NO: 238635 - DNA, 15 bp, Homo sapiens
gacttggttctatta

SEQ ID NO: 238636 - DNA, 15 bp, Homo sapiens
agacttggttctatt

SEQ ID NO: 238637 - DNA, 15 bp, Homo sapiens
aagacttggttctat

SEQ ID NO: 238638 - DNA, 15 bp, Homo sapiens
gaagacttggttcta

SEQ ID NO: 238639 - DNA, 15 bp, Homo sapiens
agaagacttggttct

SEQ ID NO: 238640 - DNA, 15 bp, Homo sapiens
gagaagacttggttc

SEQ ID NO: 238641 - DNA, 15 bp, Homo sapiens
tgagaagacttggtt

SEQ ID NO: 238642 - DNA, 15 bp, Homo sapiens
gtgagaagacttggt

SEQ ID NO: 238643 - DNA, 15 bp, Homo sapiens
ggtgagaagacttgg

SEQ ID NO: 238644 - DNA, 15 bp, Homo sapiens
gggtgagaagacttg

SEQ ID NO: 238645 - DNA, 15 bp, Homo sapiens
tgggtgagaagactt

SEQ ID NO: 238646 - DNA, 15 bp, Homo sapiens
ttgggtgagaagact

SEQ ID NO: 238647 - DNA, 15 bp, Homo sapiens
cttgggtgagaagac

SEQ ID NO: 238648 - DNA, 15 bp, Homo sapiens
gcttgggtgagaaga

SEQ ID NO: 238649 - DNA, 15 bp, Homo sapiens
agcttgggtgagaag

SEQ ID NO: 238650 - DNA, 15 bp, Homo sapiens
cagcttgggtgagaa

SEQ ID NO: 238651 - DNA, 15 bp, Homo sapiens
gcagcttgggtgaga

SEQ ID NO: 238652 - DNA, 15 bp, Homo sapiens
agcagcttgggtgag

SEQ ID NO: 238653 - DNA, 15 bp, Homo sapiens
gagcagcttgggtga

SEQ ID NO: 238654 - DNA, 15 bp, Homo sapiens
ggagcagcttgggtg

SEQ ID NO: 238655 - DNA, 15 bp, Homo sapiens
aggagcagcttgggt

SEQ ID NO: 238656 - DNA, 15 bp, Homo sapiens
gaggagcagcttggg

SEQ ID NO: 238657 - DNA, 15 bp, Homo sapiens
agaggagcagcttgg

SEQ ID NO: 238658 - DNA, 15 bp, Homo sapiens
gagaggagcagcttg

SEQ ID NO: 238659 - DNA, 15 bp, Homo sapiens
agagaggagcagctt

SEQ ID NO: 238660 - DNA, 15 bp, Homo sapiens
aagagaggagcagct

SEQ ID NO: 238661 - DNA, 15 bp, Homo sapiens
gaagagaggagcagc

SEQ ID NO: 238662 - DNA, 15 bp, Homo sapiens
ggaagagaggagcag

SEQ ID NO: 238663 - DNA, 15 bp, Homo sapiens
aggaagagaggagca

SEQ ID NO: 238664 - DNA, 15 bp, Homo sapiens
gaggaagagaggagc

SEQ ID NO: 238665 - DNA, 15 bp, Homo sapiens
agaggaagagaggag

SEQ ID NO: 238666 - DNA, 15 bp, Homo sapiens
aagaggaagagagga

SEQ ID NO: 238667 - DNA, 15 bp, Homo sapiens
gaagaggaagagagg

SEQ ID NO: 238668 - DNA, 15 bp, Homo sapiens
ggaagaggaagagag

SEQ ID NO: 238669 - DNA, 15 bp, Homo sapiens
tggaagaggaagaga

SEQ ID NO: 238670 - DNA, 15 bp, Homo sapiens
atggaagaggaagag

SEQ ID NO: 238671 - DNA, 15 bp, Homo sapiens
gatggaagaggaaga

SEQ ID NO: 238672 - DNA, 15 bp, Homo sapiens
agatggaagaggaag

SEQ ID NO: 238673 - DNA, 15 bp, Homo sapiens
gagatggaagaggaa

SEQ ID NO: 238674 - DNA, 15 bp, Homo sapiens
agagatggaagagga

SEQ ID NO: 238675 - DNA, 15 bp, Homo sapiens
gagagatggaagagg

SEQ ID NO: 238676 - DNA, 15 bp, Homo sapiens
agagagatggaagag

SEQ ID NO: 238677 - DNA, 15 bp, Homo sapiens
cagagagatggaaga

SEQ ID NO: 238678 - DNA, 15 bp, Homo sapiens
gcagagagatggaag

SEQ ID NO: 238679 - DNA, 15 bp, Homo sapiens
agcagagagatggaa

SEQ ID NO: 238680 - DNA, 15 bp, Homo sapiens
cagcagagagatgga

SEQ ID NO: 238681 - DNA, 15 bp, Homo sapiens
gcagcagagagatgg

SEQ ID NO: 238682 - DNA, 15 bp, Homo sapiens
tgcagcagagagatg

SEQ ID NO: 238683 - DNA, 15 bp, Homo sapiens
atgcagcagagagat

SEQ ID NO: 238684 - DNA, 15 bp, Homo sapiens
catgcagcagagaga

SEQ ID NO: 238685 - DNA, 15 bp, Homo sapiens
gcatgcagcagagag

SEQ ID NO: 238686 - DNA, 15 bp, Homo sapiens
tgcatgcagcagaga

SEQ ID NO: 238687 - DNA, 15 bp, Homo sapiens
ctgcatgcagcagag

SEQ ID NO: 238688 - DNA, 15 bp, Homo sapiens
cctgcatgcagcaga

SEQ ID NO: 238689 - DNA, 15 bp, Homo sapiens
ccctgcatgcagcag

SEQ ID NO: 238690 - DNA, 15 bp, Homo sapiens
tccctgcatgcagca

SEQ ID NO: 238691 - DNA, 15 bp, Homo sapiens
ctccctgcatgcagc

SEQ ID NO: 238692 - DNA, 15 bp, Homo sapiens
gctccctgcatgcag

SEQ ID NO: 238693 - DNA, 15 bp, Homo sapiens
ggctccctgcatgca

SEQ ID NO: 238694 - DNA, 15 bp, Homo sapiens
aggctccctgcatgc

SEQ ID NO: 238695 - DNA, 15 bp, Homo sapiens
caggctccctgcatg

SEQ ID NO: 238696 - DNA, 15 bp, Homo sapiens
ccaggctccctgcat

SEQ ID NO: 238697 - DNA, 15 bp, Homo sapiens
accaggctccctgca

SEQ ID NO: 238698 - DNA, 15 bp, Homo sapiens
caccaggctccctgc

SEQ ID NO: 238699 - DNA, 15 bp, Homo sapiens
gcaccaggctccctg

SEQ ID NO: 238700 - DNA, 15 bp, Homo sapiens
ggcaccaggctccct

SEQ ID NO: 238701 - DNA, 15 bp, Homo sapiens
aggcaccaggctccc

SEQ ID NO: 238702 - DNA, 15 bp, Homo sapiens
aaggcaccaggctcc

SEQ ID NO: 238703 - DNA, 15 bp, Homo sapiens
caaggcaccaggctc

SEQ ID NO: 238704 - DNA, 15 bp, Homo sapiens
gcaaggcaccaggct

SEQ ID NO: 238705 - DNA, 15 bp, Homo sapiens
agcaaggcaccaggc

SEQ ID NO: 238706 - DNA, 15 bp, Homo sapiens
aagcaaggcaccagg

SEQ ID NO: 238707 - DNA, 15 bp, Homo sapiens
gaagcaaggcaccag

SEQ ID NO: 238708 - DNA, 15 bp, Homo sapiens
ggaagcaaggcacca

SEQ ID NO: 238709 - DNA, 15 bp, Homo sapiens
tggaagcaaggcacc

SEQ ID NO: 238710 - DNA, 15 bp, Homo sapiens
atggaagcaaggcac

SEQ ID NO: 238711 - DNA, 15 bp, Homo sapiens
aatggaagcaaggca

SEQ ID NO: 238712 - DNA, 15 bp, Homo sapiens
aaatggaagcaaggc

SEQ ID NO: 238713 - DNA, 15 bp, Homo sapiens
aaaatggaagcaagg

SEQ ID NO: 238714 - DNA, 15 bp, Homo sapiens
gaaaatggaagcaag

SEQ ID NO: 238715 - DNA, 15 bp, Homo sapiens
agaaaatggaagcaa

SEQ ID NO: 238716 - DNA, 15 bp, Homo sapiens
gagaaaatggaagca

SEQ ID NO: 238717 - DNA, 15 bp, Homo sapiens
tgagaaaatggaagc

SEQ ID NO: 238718 - DNA, 15 bp, Homo sapiens
atgagaaaatggaag

SEQ ID NO: 238719 - DNA, 15 bp, Homo sapiens
aatgagaaaatggaa

SEQ ID NO: 238720 - DNA, 15 bp, Homo sapiens
caatgagaaaatgga

SEQ ID NO: 238721 - DNA, 15 bp, Homo sapiens
ccaatgagaaaatgg

SEQ ID NO: 238722 - DNA, 15 bp, Homo sapiens
tccaatgagaaaatg

SEQ ID NO: 238723 - DNA, 15 bp, Homo sapiens
ttccaatgagaaaat

SEQ ID NO: 238724 - DNA, 15 bp, Homo sapiens
tttccaatgagaaaa

SEQ ID NO: 238725 - DNA, 15 bp, Homo sapiens
ttttccaatgagaaa

SEQ ID NO: 238726 - DNA, 15 bp, Homo sapiens
tttttccaatgagaa

SEQ ID NO: 238727 - DNA, 15 bp, Homo sapiens
atttttccaatgaga

SEQ ID NO: 238728 - DNA, 15 bp, Homo sapiens
catttttccaatgag

SEQ ID NO: 238729 - DNA, 15 bp, Homo sapiens
tcatttttccaatga

SEQ ID NO: 238730 - DNA, 15 bp, Homo sapiens
ctcatttttccaatg

SEQ ID NO: 238731 - DNA, 15 bp, Homo sapiens
cctcatttttccaat

SEQ ID NO: 238732 - DNA, 15 bp, Homo sapiens
ccctcatttttccaa

SEQ ID NO: 238733 - DNA, 15 bp, Homo sapiens
gccctcatttttcca

SEQ ID NO: 238734 - DNA, 15 bp, Homo sapiens
ggccctcatttttcc

SEQ ID NO: 238735 - DNA, 15 bp, Homo sapiens
tggccctcatttttc

SEQ ID NO: 238736 - DNA, 15 bp, Homo sapiens
atggccctcattttt

SEQ ID NO: 238737 - DNA, 15 bp, Homo sapiens
tatggccctcatttt

SEQ ID NO: 238738 - DNA, 15 bp, Homo sapiens
ttatggccctcattt

SEQ ID NO: 238739 - DNA, 15 bp, Homo sapiens
attatggccctcatt

SEQ ID NO: 238740 - DNA, 15 bp, Homo sapiens
tattatggccctcat

SEQ ID NO: 238741 - DNA, 15 bp, Homo sapiens
gtattatggccctca

SEQ ID NO: 238742 - DNA, 15 bp, Homo sapiens
agtattatggccctc

SEQ ID NO: 238743 - DNA, 15 bp, Homo sapiens
aagtattatggccct

SEQ ID NO: 238744 - DNA, 15 bp, Homo sapiens
caagtattatggccc

SEQ ID NO: 238745 - DNA, 15 bp, Homo sapiens
gcaagtattatggcc

SEQ ID NO: 238746 - DNA, 15 bp, Homo sapiens
ggcaagtattatggc

SEQ ID NO: 238747 - DNA, 15 bp, Homo sapiens
aggcaagtattatgg

SEQ ID NO: 238748 - DNA, 15 bp, Homo sapiens
aaggcaagtattatg

SEQ ID NO: 238749 - DNA, 15 bp, Homo sapiens
gaaggcaagtattat

SEQ ID NO: 238750 - DNA, 15 bp, Homo sapiens
agaaggcaagtatta

SEQ ID NO: 238751 - DNA, 15 bp, Homo sapiens
gagaaggcaagtatt

SEQ ID NO: 238752 - DNA, 15 bp, Homo sapiens
ggagaaggcaagtat

SEQ ID NO: 238753 - DNA, 15 bp, Homo sapiens
tggagaaggcaagta

SEQ ID NO: 238754 - DNA, 15 bp, Homo sapiens
gtggagaaggcaagt

SEQ ID NO: 238755 - DNA, 15 bp, Homo sapiens
ggtggagaaggcaag

SEQ ID NO: 238756 - DNA, 15 bp, Homo sapiens
tggtggagaaggcaa

SEQ ID NO: 238757 - DNA, 15 bp, Homo sapiens
ctggtggagaaggca

SEQ ID NO: 238758 - DNA, 15 bp, Homo sapiens
tctggtggagaaggc

SEQ ID NO: 238759 - DNA, 15 bp, Homo sapiens
gtctggtggagaagg

SEQ ID NO: 238760 - DNA, 15 bp, Homo sapiens
agtctggtggagaag

SEQ ID NO: 238761 - DNA, 15 bp, Homo sapiens
tagtctggtggagaa

SEQ ID NO: 238762 - DNA, 15 bp, Homo sapiens
ttagtctggtggaga

SEQ ID NO: 238763 - DNA, 15 bp, Homo sapiens
attagtctggtggag

SEQ ID NO: 238764 - DNA, 15 bp, Homo sapiens
aattagtctggtgga

SEQ ID NO: 238765 - DNA, 15 bp, Homo sapiens
taattagtctggtgg

SEQ ID NO: 238766 - DNA, 15 bp, Homo sapiens
ataattagtctggtg

SEQ ID NO: 238767 - DNA, 15 bp, Homo sapiens
cataattagtctggt

SEQ ID NO: 238768 - DNA, 15 bp, Homo sapiens
acataattagtctgg

SEQ ID NO: 238769 - DNA, 15 bp, Homo sapiens
gacataattagtctg

SEQ ID NO: 238770 - DNA, 15 bp, Homo sapiens
ggacataattagtct

SEQ ID NO: 238771 - DNA, 15 bp, Homo sapiens
tggacataattagtc

SEQ ID NO: 238772 - DNA, 15 bp, Homo sapiens
ctggacataattagt

SEQ ID NO: 238773 - DNA, 15 bp, Homo sapiens
actggacataattag

SEQ ID NO: 238774 - DNA, 15 bp, Homo sapiens
aactggacataatta

SEQ ID NO: 238775 - DNA, 15 bp, Homo sapiens
taactggacataatt

SEQ ID NO: 238776 - DNA, 15 bp, Homo sapiens
ataactggacataat

SEQ ID NO: 238777 - DNA, 15 bp, Homo sapiens
cataactggacataa

SEQ ID NO: 238778 - DNA, 15 bp, Homo sapiens
tcataactggacata

SEQ ID NO: 238779 - DNA, 15 bp, Homo sapiens
gtcataactggacat

SEQ ID NO: 238780 - DNA, 15 bp, Homo sapiens
agtcataactggaca

SEQ ID NO: 238781 - DNA, 15 bp, Homo sapiens
aagtcataactggac

SEQ ID NO: 238782 - DNA, 15 bp, Homo sapiens
caagtcataactgga

SEQ ID NO: 238783 - DNA, 15 bp, Homo sapiens
ccaagtcataactgg

SEQ ID NO: 238784 - DNA, 15 bp, Homo sapiens
cccaagtcataactg

SEQ ID NO: 238785 - DNA, 15 bp, Homo sapiens
ccccaagtcataact

SEQ ID NO: 238786 - DNA, 15 bp, Homo sapiens
tccccaagtcataac

SEQ ID NO: 238787 - DNA, 15 bp, Homo sapiens
ttccccaagtcataa

SEQ ID NO: 238788 - DNA, 15 bp, Homo sapiens
gttccccaagtcata

SEQ ID NO: 238789 - DNA, 15 bp, Homo sapiens
ggttccccaagtcat

SEQ ID NO: 238790 - DNA, 15 bp, Homo sapiens
tggttccccaagtca

SEQ ID NO: 238791 - DNA, 15 bp, Homo sapiens
ctggttccccaagtc

SEQ ID NO: 238792 - DNA, 15 bp, Homo sapiens
cctggttccccaagt

SEQ ID NO: 238793 - DNA, 15 bp, Homo sapiens
gcctggttccccaag

SEQ ID NO: 238794 - DNA, 15 bp, Homo sapiens
tgcctggttccccaa

SEQ ID NO: 238795 - DNA, 15 bp, Homo sapiens
ttgcctggttcccca

SEQ ID NO: 238796 - DNA, 15 bp, Homo sapiens
cttgcctggttcccc

SEQ ID NO: 238797 - DNA, 15 bp, Homo sapiens
gcttgcctggttccc

SEQ ID NO: 238798 - DNA, 15 bp, Homo sapiens
cgcttgcctggttcc

SEQ ID NO: 238799 - DNA, 15 bp, Homo sapiens
gcgcttgcctggttc

SEQ ID NO: 238800 - DNA, 15 bp, Homo sapiens
tgcgcttgcctggtt

SEQ ID NO: 238801 - DNA, 15 bp, Homo sapiens
atgcgcttgcctggt

SEQ ID NO: 238802 - DNA, 15 bp, Homo sapiens
catgcgcttgcctgg

SEQ ID NO: 238803 - DNA, 15 bp, Homo sapiens
ccatgcgcttgcctg

SEQ ID NO: 238804 - DNA, 15 bp, Homo sapiens
tccatgcgcttgcct

SEQ ID NO: 238805 - DNA, 15 bp, Homo sapiens
ttccatgcgcttgcc

SEQ ID NO: 238806 - DNA, 15 bp, Homo sapiens
cttccatgcgcttgc

SEQ ID NO: 238807 - DNA, 15 bp, Homo sapiens
tcttccatgcgcttg

SEQ ID NO: 238808 - DNA, 15 bp, Homo sapiens
ttcttccatgcgctt

SEQ ID NO: 238809 - DNA, 15 bp, Homo sapiens
cttcttccatgcgct

SEQ ID NO: 238810 - DNA, 15 bp, Homo sapiens
tcttcttccatgcgc

SEQ ID NO: 238811 - DNA, 15 bp, Homo sapiens
atcttcttccatgcg

SEQ ID NO: 238812 - DNA, 15 bp, Homo sapiens
gatcttcttccatgc

SEQ ID NO: 238813 - DNA, 15 bp, Homo sapiens
tgatcttcttccatg

SEQ ID NO: 238814 - DNA, 15 bp, Homo sapiens
gtgatcttcttccat

SEQ ID NO: 238815 - DNA, 15 bp, Homo sapiens
tgtgatcttcttcca

SEQ ID NO: 238816 - DNA, 15 bp, Homo sapiens
gtgtgatcttcttcc

SEQ ID NO: 238817 - DNA, 15 bp, Homo sapiens
tgtgtgatcttcttc

SEQ ID NO: 238818 - DNA, 15 bp, Homo sapiens
ttgtgtgatcttctt

SEQ ID NO: 238819 - DNA, 15 bp, Homo sapiens
attgtgtgatcttct

SEQ ID NO: 238820 - DNA, 15 bp, Homo sapiens
gattgtgtgatcttc

SEQ ID NO: 238821 - DNA, 15 bp, Homo sapiens
ggattgtgtgatctt

SEQ ID NO: 238822 - DNA, 15 bp, Homo sapiens
aggattgtgtgatct

SEQ ID NO: 238823 - DNA, 15 bp, Homo sapiens
caggattgtgtgatc

SEQ ID NO: 238824 - DNA, 15 bp, Homo sapiens
ccaggattgtgtgat

SEQ ID NO: 238825 - DNA, 15 bp, Homo sapiens
tccaggattgtgtga

SEQ ID NO: 238826 - DNA, 15 bp, Homo sapiens
atccaggattgtgtg

SEQ ID NO: 238827 - DNA, 15 bp, Homo sapiens
gatccaggattgtgt

SEQ ID NO: 238828 - DNA, 15 bp, Homo sapiens
ggatccaggattgtg

SEQ ID NO: 238829 - DNA, 15 bp, Homo sapiens
cggatccaggattgt

SEQ ID NO: 238830 - DNA, 15 bp, Homo sapiens
ccggatccaggattg

SEQ ID NO: 238831 - DNA, 15 bp, Homo sapiens
tccggatccaggatt

SEQ ID NO: 238832 - DNA, 15 bp, Homo sapiens
ttccggatccaggat

SEQ ID NO: 238833 - DNA, 15 bp, Homo sapiens
cttccggatccagga

SEQ ID NO: 238834 - DNA, 15 bp, Homo sapiens
tcttccggatccagg

SEQ ID NO: 238835 - DNA, 15 bp, Homo sapiens
gtcttccggatccag

SEQ ID NO: 238836 - DNA, 15 bp, Homo sapiens
ggtcttccggatcca

SEQ ID NO: 238837 - DNA, 15 bp, Homo sapiens
aggtcttccggatcc

SEQ ID NO: 238838 - DNA, 15 bp, Homo sapiens
aaggtcttccggatc

SEQ ID NO: 238839 - DNA, 15 bp, Homo sapiens
caaggtcttccggat

SEQ ID NO: 238840 - DNA, 15 bp, Homo sapiens
ccaaggtcttccgga

SEQ ID NO: 238841 - DNA, 15 bp, Homo sapiens
gccaaggtcttccgg

SEQ ID NO: 238842 - DNA, 15 bp, Homo sapiens
tgccaaggtcttccg

SEQ ID NO: 238843 - DNA, 15 bp, Homo sapiens
atgccaaggtcttcc

SEQ ID NO: 238844 - DNA, 15 bp, Homo sapiens
gatgccaaggtcttc

SEQ ID NO: 238845 - DNA, 15 bp, Homo sapiens
ggatgccaaggtctt

SEQ ID NO: 238846 - DNA, 15 bp, Homo sapiens
tggatgccaaggtct

SEQ ID NO: 238847 - DNA, 15 bp, Homo sapiens
ttggatgccaaggtc

SEQ ID NO: 238848 - DNA, 15 bp, Homo sapiens
cttggatgccaaggt

SEQ ID NO: 238849 - DNA, 15 bp, Homo sapiens
ccttggatgccaagg

SEQ ID NO: 238850 - DNA, 15 bp, Homo sapiens
cccttggatgccaag

SEQ ID NO: 238851 - DNA, 15 bp, Homo sapiens
tcccttggatgccaa

SEQ ID NO: 238852 - DNA, 15 bp, Homo sapiens
ttcccttggatgcca

SEQ ID NO: 238853 - DNA, 15 bp, Homo sapiens
tttcccttggatgcc

SEQ ID NO: 238854 - DNA, 15 bp, Homo sapiens
ttttcccttggatgc

SEQ ID NO: 238855 - DNA, 15 bp, Homo sapiens
tttttcccttggatg

SEQ ID NO: 238856 - DNA, 15 bp, Homo sapiens
gtttttcccttggat

SEQ ID NO: 238857 - DNA, 15 bp, Homo sapiens
tgtttttcccttgga

SEQ ID NO: 238858 - DNA, 15 bp, Homo sapiens
ctgtttttcccttgg

SEQ ID NO: 238859 - DNA, 15 bp, Homo sapiens
cctgtttttcccttg

SEQ ID NO: 238860 - DNA, 15 bp, Homo sapiens
acctgtttttccctt

SEQ ID NO: 238861 - DNA, 15 bp, Homo sapiens
cacctgtttttccct

SEQ ID NO: 238862 - DNA, 15 bp, Homo sapiens
acacctgtttttccc

SEQ ID NO: 238863 - DNA, 15 bp, Homo sapiens
cacacctgtttttcc

SEQ ID NO: 238864 - DNA, 15 bp, Homo sapiens
ccacacctgtttttc

SEQ ID NO: 238865 - DNA, 15 bp, Homo sapiens
cccacacctgttttt

SEQ ID NO: 238866 - DNA, 15 bp, Homo sapiens
gcccacacctgtttt

SEQ ID NO: 238867 - DNA, 15 bp, Homo sapiens
tgcccacacctgttt

SEQ ID NO: 238868 - DNA, 15 bp, Homo sapiens
ttgcccacacctgtt

SEQ ID NO: 238869 - DNA, 15 bp, Homo sapiens
tttgcccacacctgt

SEQ ID NO: 238870 - DNA, 15 bp, Homo sapiens
gtttgcccacacctg

SEQ ID NO: 238871 - DNA, 15 bp, Homo sapiens
tgtttgcccacacct

SEQ ID NO: 238872 - DNA, 15 bp, Homo sapiens
ttgtttgcccacacc

SEQ ID NO: 238873 - DNA, 15 bp, Homo sapiens
attgtttgcccacac

SEQ ID NO: 238874 - DNA, 15 bp, Homo sapiens
aattgtttgcccaca

SEQ ID NO: 238875 - DNA, 15 bp, Homo sapiens
caattgtttgcccac

SEQ ID NO: 238876 - DNA, 15 bp, Homo sapiens
gcaattgtttgccca

SEQ ID NO: 238877 - DNA, 15 bp, Homo sapiens
tgcaattgtttgccc

SEQ ID NO: 238878 - DNA, 15 bp, Homo sapiens
gtgcaattgtttgcc

SEQ ID NO: 238879 - DNA, 15 bp, Homo sapiens
ggtgcaattgtttgc

SEQ ID NO: 238880 - DNA, 15 bp, Homo sapiens
tggtgcaattgtttg

SEQ ID NO: 238881 - DNA, 15 bp, Homo sapiens
ttggtgcaattgttt

SEQ ID NO: 238882 - DNA, 15 bp, Homo sapiens
gttggtgcaattgtt

SEQ ID NO: 238883 - DNA, 15 bp, Homo sapiens
tgttggtgcaattgt

SEQ ID NO: 238884 - DNA, 15 bp, Homo sapiens
atgttggtgcaattg

SEQ ID NO: 238885 - DNA, 15 bp, Homo sapiens
aatgttggtgcaatt

SEQ ID NO: 238886 - DNA, 15 bp, Homo sapiens
aaatgttggtgcaat

SEQ ID NO: 238887 - DNA, 15 bp, Homo sapiens
caaatgttggtgcaa

SEQ ID NO: 238888 - DNA, 15 bp, Homo sapiens
ccaaatgttggtgca

SEQ ID NO: 238889 - DNA, 15 bp, Homo sapiens
gccaaatgttggtgc

SEQ ID NO: 238890 - DNA, 15 bp, Homo sapiens
tgccaaatgttggtg

SEQ ID NO: 238891 - DNA, 15 bp, Homo sapiens
ttgccaaatgttggt

SEQ ID NO: 238892 - DNA, 15 bp, Homo sapiens
attgccaaatgttgg

SEQ ID NO: 238893 - DNA, 15 bp, Homo sapiens
cattgccaaatgttg

SEQ ID NO: 238894 - DNA, 15 bp, Homo sapiens
ccattgccaaatgtt

SEQ ID NO: 238895 - DNA, 15 bp, Homo sapiens
gccattgccaaatgt

SEQ ID NO: 238896 - DNA, 15 bp, Homo sapiens
agccattgccaaatg

SEQ ID NO: 238897 - DNA, 15 bp, Homo sapiens
cagccattgccaaat

SEQ ID NO: 238898 - DNA, 15 bp, Homo sapiens
acagccattgccaaa

SEQ ID NO: 238899 - DNA, 15 bp, Homo sapiens
cacagccattgccaa

SEQ ID NO: 238900 - DNA, 15 bp, Homo sapiens
ccacagccattgcca

SEQ ID NO: 238901 - DNA, 15 bp, Homo sapiens
gccacagccattgcc

SEQ ID NO: 238902 - DNA, 15 bp, Homo sapiens
tgccacagccattgc

SEQ ID NO: 238903 - DNA, 15 bp, Homo sapiens
ctgccacagccattg

SEQ ID NO: 238904 - DNA, 15 bp, Homo sapiens
cctgccacagccatt

SEQ ID NO: 238905 - DNA, 15 bp, Homo sapiens
gcctgccacagccat

SEQ ID NO: 238906 - DNA, 15 bp, Homo sapiens
tgcctgccacagcca

SEQ ID NO: 238907 - DNA, 15 bp, Homo sapiens
ttgcctgccacagcc

SEQ ID NO: 238908 - DNA, 15 bp, Homo sapiens
cttgcctgccacagc

SEQ ID NO: 238909 - DNA, 15 bp, Homo sapiens
tcttgcctgccacag

SEQ ID NO: 238910 - DNA, 15 bp, Homo sapiens
ctcttgcctgccaca

SEQ ID NO: 238911 - DNA, 15 bp, Homo sapiens
gctcttgcctgccac

SEQ ID NO: 238912 - DNA, 15 bp, Homo sapiens
tgctcttgcctgcca

SEQ ID NO: 238913 - DNA, 15 bp, Homo sapiens
ttgctcttgcctgcc

SEQ ID NO: 238914 - DNA, 15 bp, Homo sapiens
tttgctcttgcctgc

SEQ ID NO: 238915 - DNA, 15 bp, Homo sapiens
ctttgctcttgcctg

SEQ ID NO: 238916 - DNA, 15 bp, Homo sapiens
cctttgctcttgcct

SEQ ID NO: 238917 - DNA, 15 bp, Homo sapiens
tcctttgctcttgcc

SEQ ID NO: 238918 - DNA, 15 bp, Homo sapiens
gtcctttgctcttgc

SEQ ID NO: 238919 - DNA, 15 bp, Homo sapiens
agtcctttgctcttg

SEQ ID NO: 238920 - DNA, 15 bp, Homo sapiens
cagtcctttgctctt

SEQ ID NO: 238921 - DNA, 15 bp, Homo sapiens
gcagtcctttgctct

SEQ ID NO: 238922 - DNA, 15 bp, Homo sapiens
cgcagtcctttgctc

SEQ ID NO: 238923 - DNA, 15 bp, Homo sapiens
ccgcagtcctttgct

SEQ ID NO: 238924 - DNA, 15 bp, Homo sapiens
gccgcagtcctttgc

SEQ ID NO: 238925 - DNA, 15 bp, Homo sapiens
cgccgcagtcctttg

SEQ ID NO: 238926 - DNA, 15 bp, Homo sapiens
gcgccgcagtccttt

SEQ ID NO: 238927 - DNA, 15 bp, Homo sapiens
ggcgccgcagtcctt

SEQ ID NO: 238928 - DNA, 15 bp, Homo sapiens
aggcgccgcagtcct

SEQ ID NO: 238929 - DNA, 15 bp, Homo sapiens
taggcgccgcagtcc

SEQ ID NO: 238930 - DNA, 15 bp, Homo sapiens
ctaggcgccgcagtc

SEQ ID NO: 238931 - DNA, 15 bp, Homo sapiens
tctaggcgccgcagt

SEQ ID NO: 238932 - DNA, 15 bp, Homo sapiens
ctctaggcgccgcag

SEQ ID NO: 238933 - DNA, 15 bp, Homo sapiens
tctctaggcgccgca

SEQ ID NO: 238934 - DNA, 15 bp, Homo sapiens
ctctctaggcgccgc

SEQ ID NO: 238935 - DNA, 15 bp, Homo sapiens
tctctctaggcgccg

SEQ ID NO: 238936 - DNA, 15 bp, Homo sapiens
ctctctctaggcgcc

SEQ ID NO: 238937 - DNA, 15 bp, Homo sapiens
cctctctctaggcgc

SEQ ID NO: 238938 - DNA, 15 bp, Homo sapiens
tcctctctctaggcg

SEQ ID NO: 238939 - DNA, 15 bp, Homo sapiens
ctcctctctctaggc

SEQ ID NO: 238940 - DNA, 15 bp, Homo sapiens
actcctctctctagg

SEQ ID NO: 238941 - DNA, 15 bp, Homo sapiens
cactcctctctctag

SEQ ID NO: 238942 - DNA, 15 bp, Homo sapiens
tcactcctctctcta

SEQ ID NO: 238943 - DNA, 15 bp, Homo sapiens
gtcactcctctctct

SEQ ID NO: 238944 - DNA, 15 bp, Homo sapiens
agtcactcctctctc

SEQ ID NO: 238945 - DNA, 15 bp, Homo sapiens
aagtcactcctctct

SEQ ID NO: 238946 - DNA, 15 bp, Homo sapiens
caagtcactcctctc

SEQ ID NO: 238947 - DNA, 15 bp, Homo sapiens
ccaagtcactcctct

SEQ ID NO: 238948 - DNA, 15 bp, Homo sapiens
gccaagtcactcctc

SEQ ID NO: 238949 - DNA, 15 bp, Homo sapiens
agccaagtcactcct

SEQ ID NO: 238950 - DNA, 15 bp, Homo sapiens
cagccaagtcactcc

SEQ ID NO: 238951 - DNA, 15 bp, Homo sapiens
tcagccaagtcactc

SEQ ID NO: 238952 - DNA, 15 bp, Homo sapiens
ctcagccaagtcact

SEQ ID NO: 238953 - DNA, 15 bp, Homo sapiens
actcagccaagtcac

SEQ ID NO: 238954 - DNA, 15 bp, Homo sapiens
tactcagccaagtca

SEQ ID NO: 238955 - DNA, 15 bp, Homo sapiens
ttactcagccaagtc

SEQ ID NO: 238956 - DNA, 15 bp, Homo sapiens
tttactcagccaagt

SEQ ID NO: 238957 - DNA, 15 bp, Homo sapiens
ctttactcagccaag

SEQ ID NO: 238958 - DNA, 15 bp, Homo sapiens
cctttactcagccaa

SEQ ID NO: 238959 - DNA, 15 bp, Homo sapiens
tcctttactcagcca

SEQ ID NO: 238960 - DNA, 15 bp, Homo sapiens
ttcctttactcagcc

SEQ ID NO: 238961 - DNA, 15 bp, Homo sapiens
cttcctttactcagc

SEQ ID NO: 238962 - DNA, 15 bp, Homo sapiens
tcttcctttactcag

SEQ ID NO: 238963 - DNA, 15 bp, Homo sapiens
ctcttcctttactca

SEQ ID NO: 238964 - DNA, 15 bp, Homo sapiens
tctcttcctttactc

SEQ ID NO: 238965 - DNA, 15 bp, Homo sapiens
ttctcttcctttact

SEQ ID NO: 238966 - DNA, 15 bp, Homo sapiens
tttctcttcctttac

SEQ ID NO: 238967 - DNA, 15 bp, Homo sapiens
ttttctcttccttta

SEQ ID NO: 238968 - DNA, 15 bp, Homo sapiens
tttttctcttccttt

SEQ ID NO: 238969 - DNA, 15 bp, Homo sapiens
ctttttctcttcctt

SEQ ID NO: 238970 - DNA, 15 bp, Homo sapiens
tctttttctcttcct

SEQ ID NO: 238971 - DNA, 15 bp, Homo sapiens
atctttttctcttcc

SEQ ID NO: 238972 - DNA, 15 bp, Homo sapiens
aatctttttctcttc

SEQ ID NO: 238973 - DNA, 15 bp, Homo sapiens
caatctttttctctt

SEQ ID NO: 238974 - DNA, 15 bp, Homo sapiens
tcaatctttttctct

SEQ ID NO: 238975 - DNA, 15 bp, Homo sapiens
ctcaatctttttctc

SEQ ID NO: 238976 - DNA, 15 bp, Homo sapiens
tctcaatctttttct

SEQ ID NO: 238977 - DNA, 15 bp, Homo sapiens
ctctcaatctttttc

SEQ ID NO: 238978 - DNA, 15 bp, Homo sapiens
tctctcaatcttttt

SEQ ID NO: 238979 - DNA, 15 bp, Homo sapiens
ctctctcaatctttt

SEQ ID NO: 238980 - DNA, 15 bp, Homo sapiens
cctctctcaatcttt

SEQ ID NO: 238981 - DNA, 15 bp, Homo sapiens
tcctctctcaatctt

SEQ ID NO: 238982 - DNA, 15 bp, Homo sapiens
ttcctctctcaatct

SEQ ID NO: 238983 - DNA, 15 bp, Homo sapiens
gttcctctctcaatc

SEQ ID NO: 238984 - DNA, 15 bp, Homo sapiens
tgttcctctctcaat

SEQ ID NO: 238985 - DNA, 15 bp, Homo sapiens
gtgttcctctctcaa

SEQ ID NO: 238986 - DNA, 15 bp, Homo sapiens
agtgttcctctctca

SEQ ID NO: 238987 - DNA, 15 bp, Homo sapiens
cagtgttcctctctc

SEQ ID NO: 238988 - DNA, 15 bp, Homo sapiens
tcagtgttcctctct

SEQ ID NO: 238989 - DNA, 15 bp, Homo sapiens
ttcagtgttcctctc

SEQ ID NO: 238990 - DNA, 15 bp, Homo sapiens
gttcagtgttcctct

SEQ ID NO: 238991 - DNA, 15 bp, Homo sapiens
agttcagtgttcctc

SEQ ID NO: 238992 - DNA, 15 bp, Homo sapiens
cagttcagtgttcct

SEQ ID NO: 238993 - DNA, 15 bp, Homo sapiens
ccagttcagtgttcc

SEQ ID NO: 238994 - DNA, 15 bp, Homo sapiens
cccagttcagtgttc

SEQ ID NO: 238995 - DNA, 15 bp, Homo sapiens
tcccagttcagtgtt

SEQ ID NO: 238996 - DNA, 15 bp, Homo sapiens
atcccagttcagtgt

SEQ ID NO: 238997 - DNA, 15 bp, Homo sapiens
aatcccagttcagtg

SEQ ID NO: 238998 - DNA, 15 bp, Homo sapiens
aaatcccagttcagt

SEQ ID NO: 238999 - DNA, 15 bp, Homo sapiens
gaaatcccagttcag

SEQ ID NO: 239000 - DNA, 15 bp, Homo sapiens
ggaaatcccagttca

SEQ ID NO: 239001 - DNA, 15 bp, Homo sapiens
tggaaatcccagttc

SEQ ID NO: 239002 - DNA, 15 bp, Homo sapiens
ttggaaatcccagtt

SEQ ID NO: 239003 - DNA, 15 bp, Homo sapiens
cttggaaatcccagt

SEQ ID NO: 239004 - DNA, 15 bp, Homo sapiens
tcttggaaatcccag

SEQ ID NO: 239005 - DNA, 15 bp, Homo sapiens
gtcttggaaatccca

SEQ ID NO: 239006 - DNA, 15 bp, Homo sapiens
ggtcttggaaatccc

SEQ ID NO: 239007 - DNA, 15 bp, Homo sapiens
gggtcttggaaatcc

SEQ ID NO: 239008 - DNA, 15 bp, Homo sapiens
cgggtcttggaaatc

SEQ ID NO: 239009 - DNA, 15 bp, Homo sapiens
acgggtcttggaaat

SEQ ID NO: 239010 - DNA, 15 bp, Homo sapiens
tacgggtcttggaaa

SEQ ID NO: 239011 - DNA, 15 bp, Homo sapiens
ctacgggtcttggaa

SEQ ID NO: 239012 - DNA, 15 bp, Homo sapiens
tctacgggtcttgga

SEQ ID NO: 239013 - DNA, 15 bp, Homo sapiens
atctacgggtcttgg

SEQ ID NO: 239014 - DNA, 15 bp, Homo sapiens
gatctacgggtcttg

SEQ ID NO: 239015 - DNA, 15 bp, Homo sapiens
agatctacgggtctt

SEQ ID NO: 239016 - DNA, 15 bp, Homo sapiens
cagatctacgggtct

SEQ ID NO: 239017 - DNA, 15 bp, Homo sapiens
acagatctacgggtc

SEQ ID NO: 239018 - DNA, 15 bp, Homo sapiens
aacagatctacgggt

SEQ ID NO: 239019 - DNA, 15 bp, Homo sapiens
caacagatctacggg

SEQ ID NO: 239020 - DNA, 15 bp, Homo sapiens
ccaacagatctacgg

SEQ ID NO: 239021 - DNA, 15 bp, Homo sapiens
accaacagatctacg

SEQ ID NO: 239022 - DNA, 15 bp, Homo sapiens
caccaacagatctac

SEQ ID NO: 239023 - DNA, 15 bp, Homo sapiens
tcaccaacagatcta

SEQ ID NO: 239024 - DNA, 15 bp, Homo sapiens
ttcaccaacagatct

SEQ ID NO: 239025 - DNA, 15 bp, Homo sapiens
tttcaccaacagatc

SEQ ID NO: 239026 - DNA, 15 bp, Homo sapiens
ttttcaccaacagat

SEQ ID NO: 239027 - DNA, 15 bp, Homo sapiens
cttttcaccaacaga

SEQ ID NO: 239028 - DNA, 15 bp, Homo sapiens
ccttttcaccaacag

SEQ ID NO: 239029 - DNA, 15 bp, Homo sapiens
cccttttcaccaaca

SEQ ID NO: 239030 - DNA, 15 bp, Homo sapiens
tcccttttcaccaac

SEQ ID NO: 239031 - DNA, 15 bp, Homo sapiens
ctcccttttcaccaa

SEQ ID NO: 239032 - DNA, 15 bp, Homo sapiens
tctcccttttcacca

SEQ ID NO: 239033 - DNA, 15 bp, Homo sapiens
ttctcccttttcacc

SEQ ID NO: 239034 - DNA, 15 bp, Homo sapiens
cttctcccttttcac

SEQ ID NO: 239035 - DNA, 15 bp, Homo sapiens
ccttctcccttttca

SEQ ID NO: 239036 - DNA, 15 bp, Homo sapiens
cccttctcccttttc

SEQ ID NO: 239037 - DNA, 15 bp, Homo sapiens
gcccttctccctttt

SEQ ID NO: 239038 - DNA, 15 bp, Homo sapiens
tgcccttctcccttt

SEQ ID NO: 239039 - DNA, 15 bp, Homo sapiens
atgcccttctccctt

SEQ ID NO: 239040 - DNA, 15 bp, Homo sapiens
catgcccttctccct

SEQ ID NO: 239041 - DNA, 15 bp, Homo sapiens
ccatgcccttctccc

SEQ ID NO: 239042 - DNA, 15 bp, Homo sapiens
accatgcccttctcc

SEQ ID NO: 239043 - DNA, 15 bp, Homo sapiens
gaccatgcccttctc

SEQ ID NO: 239044 - DNA, 15 bp, Homo sapiens
tgaccatgcccttct

SEQ ID NO: 239045 - DNA, 15 bp, Homo sapiens
ctgaccatgcccttc

SEQ ID NO: 239046 - DNA, 15 bp, Homo sapiens
gctgaccatgccctt

SEQ ID NO: 239047 - DNA, 15 bp, Homo sapiens
ggctgaccatgccct

SEQ ID NO: 239048 - DNA, 15 bp, Homo sapiens
aggctgaccatgccc

SEQ ID NO: 239049 - DNA, 15 bp, Homo sapiens
caggctgaccatgcc

SEQ ID NO: 239050 - DNA, 15 bp, Homo sapiens
ccaggctgaccatgc

SEQ ID NO: 239051 - DNA, 15 bp, Homo sapiens
accaggctgaccatg

SEQ ID NO: 239052 - DNA, 15 bp, Homo sapiens
caccaggctgaccat

SEQ ID NO: 239053 - DNA, 15 bp, Homo sapiens
tcaccaggctgacca

SEQ ID NO: 239054 - DNA, 15 bp, Homo sapiens
ttcaccaggctgacc

SEQ ID NO: 239055 - DNA, 15 bp, Homo sapiens
gttcaccaggctgac

SEQ ID NO: 239056 - DNA, 15 bp, Homo sapiens
agttcaccaggctga

SEQ ID NO: 239057 - DNA, 15 bp, Homo sapiens
cagttcaccaggctg

SEQ ID NO: 239058 - DNA, 15 bp, Homo sapiens
gcagttcaccaggct

SEQ ID NO: 239059 - DNA, 15 bp, Homo sapiens
tgcagttcaccaggc

SEQ ID NO: 239060 - DNA, 15 bp, Homo sapiens
ctgcagttcaccagg

SEQ ID NO: 239061 - DNA, 15 bp, Homo sapiens
tctgcagttcaccag

SEQ ID NO: 239062 - DNA, 15 bp, Homo sapiens
atctgcagttcacca

SEQ ID NO: 239063 - DNA, 15 bp, Homo sapiens
catctgcagttcacc

SEQ ID NO: 239064 - DNA, 15 bp, Homo sapiens
acatctgcagttcac

SEQ ID NO: 239065 - DNA, 15 bp, Homo sapiens
aacatctgcagttca

SEQ ID NO: 239066 - DNA, 15 bp, Homo sapiens
taacatctgcagttc

SEQ ID NO: 239067 - DNA, 15 bp, Homo sapiens
ttaacatctgcagtt

SEQ ID NO: 239068 - DNA, 15 bp, Homo sapiens
cttaacatctgcagt

SEQ ID NO: 239069 - DNA, 15 bp, Homo sapiens
tcttaacatctgcag

SEQ ID NO: 239070 - DNA, 15 bp, Homo sapiens
atcttaacatctgca

SEQ ID NO: 239071 - DNA, 15 bp, Homo sapiens
tatcttaacatctgc

SEQ ID NO: 239072 - DNA, 15 bp, Homo sapiens
atatcttaacatctg

SEQ ID NO: 239073 - DNA, 15 bp, Homo sapiens
tatatcttaacatct

SEQ ID NO: 239074 - DNA, 15 bp, Homo sapiens
ctatatcttaacatc

SEQ ID NO: 239075 - DNA, 15 bp, Homo sapiens
cctatatcttaacat

SEQ ID NO: 239076 - DNA, 15 bp, Homo sapiens
ccctatatcttaaca

SEQ ID NO: 239077 - DNA, 15 bp, Homo sapiens
tccctatatcttaac

SEQ ID NO: 239078 - DNA, 15 bp, Homo sapiens
gtccctatatcttaa

SEQ ID NO: 239079 - DNA, 15 bp, Homo sapiens
agtccctatatctta

SEQ ID NO: 239080 - DNA, 15 bp, Homo sapiens
tagtccctatatctt

SEQ ID NO: 239081 - DNA, 15 bp, Homo sapiens
ttagtccctatatct

SEQ ID NO: 239082 - DNA, 15 bp, Homo sapiens
tttagtccctatatc

SEQ ID NO: 239083 - DNA, 15 bp, Homo sapiens
ttttagtccctatat

SEQ ID NO: 239084 - DNA, 15 bp, Homo sapiens
tttttagtccctata

SEQ ID NO: 239085 - DNA, 15 bp, Homo sapiens
ctttttagtccctat

SEQ ID NO: 239086 - DNA, 15 bp, Homo sapiens
actttttagtcccta

SEQ ID NO: 239087 - DNA, 15 bp, Homo sapiens
tactttttagtccct

SEQ ID NO: 239088 - DNA, 15 bp, Homo sapiens
ttactttttagtccc

SEQ ID NO: 239089 - DNA, 15 bp, Homo sapiens
cttactttttagtcc

SEQ ID NO: 239090 - DNA, 15 bp, Homo sapiens
ccttactttttagtc

SEQ ID NO: 239091 - DNA, 15 bp, Homo sapiens
gccttactttttagt

SEQ ID NO: 239092 - DNA, 15 bp, Homo sapiens
tgccttactttttag

SEQ ID NO: 239093 - DNA, 15 bp, Homo sapiens
gtgccttacttttta

SEQ ID NO: 239094 - DNA, 15 bp, Homo sapiens
agtgccttacttttt

SEQ ID NO: 239095 - DNA, 15 bp, Homo sapiens
aagtgccttactttt

SEQ ID NO: 239096 - DNA, 15 bp, Homo sapiens
aaagtgccttacttt

SEQ ID NO: 239097 - DNA, 15 bp, Homo sapiens
gaaagtgccttactt

SEQ ID NO: 239098 - DNA, 15 bp, Homo sapiens
ggaaagtgccttact

SEQ ID NO: 239099 - DNA, 15 bp, Homo sapiens
tggaaagtgccttac

SEQ ID NO: 239100 - DNA, 15 bp, Homo sapiens
atggaaagtgcctta

SEQ ID NO: 239101 - DNA, 15 bp, Homo sapiens
aatggaaagtgcctt

SEQ ID NO: 239102 - DNA, 15 bp, Homo sapiens
aaatggaaagtgcct

SEQ ID NO: 239103 - DNA, 15 bp, Homo sapiens
taaatggaaagtgcc

SEQ ID NO: 239104 - DNA, 15 bp, Homo sapiens
ttaaatggaaagtgc

SEQ ID NO: 239105 - DNA, 15 bp, Homo sapiens
attaaatggaaagtg

SEQ ID NO: 239106 - DNA, 15 bp, Homo sapiens
cattaaatggaaagt

SEQ ID NO: 239107 - DNA, 15 bp, Homo sapiens
acattaaatggaaag

SEQ ID NO: 239108 - DNA, 15 bp, Homo sapiens
cacattaaatggaaa

SEQ ID NO: 239109 - DNA, 15 bp, Homo sapiens
gcacattaaatggaa

SEQ ID NO: 239110 - DNA, 15 bp, Homo sapiens
tgcacattaaatgga

SEQ ID NO: 239111 - DNA, 15 bp, Homo sapiens
atgcacattaaatgg

SEQ ID NO: 239112 - DNA, 15 bp, Homo sapiens
tatgcacattaaatg

SEQ ID NO: 239113 - DNA, 15 bp, Homo sapiens
atatgcacattaaat

SEQ ID NO: 239114 - DNA, 15 bp, Homo sapiens
catatgcacattaaa

SEQ ID NO: 239115 - DNA, 15 bp, Homo sapiens
gcatatgcacattaa

SEQ ID NO: 239116 - DNA, 15 bp, Homo sapiens
agcatatgcacatta

SEQ ID NO: 239117 - DNA, 15 bp, Homo sapiens
cagcatatgcacatt

SEQ ID NO: 239118 - DNA, 15 bp, Homo sapiens
tcagcatatgcacat

SEQ ID NO: 239119 - DNA, 15 bp, Homo sapiens
ctcagcatatgcaca

SEQ ID NO: 239120 - DNA, 15 bp, Homo sapiens
gctcagcatatgcac

SEQ ID NO: 239121 - DNA, 15 bp, Homo sapiens
agctcagcatatgca

SEQ ID NO: 239122 - DNA, 15 bp, Homo sapiens
aagctcagcatatgc

SEQ ID NO: 239123 - DNA, 15 bp, Homo sapiens
aaagctcagcatatg

SEQ ID NO: 239124 - DNA, 15 bp, Homo sapiens
aaaagctcagcatat

SEQ ID NO: 239125 - DNA, 15 bp, Homo sapiens
caaaagctcagcata

SEQ ID NO: 239126 - DNA, 15 bp, Homo sapiens
acaaaagctcagcat

SEQ ID NO: 239127 - DNA, 15 bp, Homo sapiens
aacaaaagctcagca

SEQ ID NO: 239128 - DNA, 15 bp, Homo sapiens
taacaaaagctcagc

SEQ ID NO: 239129 - DNA, 15 bp, Homo sapiens
ataacaaaagctcag

SEQ ID NO: 239130 - DNA, 15 bp, Homo sapiens
cataacaaaagctca

SEQ ID NO: 239131 - DNA, 15 bp, Homo sapiens
acataacaaaagctc

SEQ ID NO: 239132 - DNA, 15 bp, Homo sapiens
cacataacaaaagct

SEQ ID NO: 239133 - DNA, 15 bp, Homo sapiens
ccacataacaaaagc

SEQ ID NO: 239134 - DNA, 15 bp, Homo sapiens
gccacataacaaaag

SEQ ID NO: 239135 - DNA, 15 bp, Homo sapiens
tgccacataacaaaa

SEQ ID NO: 239136 - DNA, 15 bp, Homo sapiens
ctgccacataacaaa

SEQ ID NO: 239137 - DNA, 15 bp, Homo sapiens
cctgccacataacaa

SEQ ID NO: 239138 - DNA, 15 bp, Homo sapiens
acctgccacataaca

SEQ ID NO: 239139 - DNA, 15 bp, Homo sapiens
aacctgccacataac

SEQ ID NO: 239140 - DNA, 15 bp, Homo sapiens
gaacctgccacataa

SEQ ID NO: 239141 - DNA, 15 bp, Homo sapiens
agaacctgccacata

SEQ ID NO: 239142 - DNA, 15 bp, Homo sapiens
cagaacctgccacat

SEQ ID NO: 239143 - DNA, 15 bp, Homo sapiens
acagaacctgccaca

SEQ ID NO: 239144 - DNA, 15 bp, Homo sapiens
cacagaacctgccac

SEQ ID NO: 239145 - DNA, 15 bp, Homo sapiens
acacagaacctgcca

SEQ ID NO: 239146 - DNA, 15 bp, Homo sapiens
aacacagaacctgcc

SEQ ID NO: 239147 - DNA, 15 bp, Homo sapiens
aaacacagaacctgc

SEQ ID NO: 239148 - DNA, 15 bp, Homo sapiens
taaacacagaacctg

SEQ ID NO: 239149 - DNA, 15 bp, Homo sapiens
ctaaacacagaacct

SEQ ID NO: 239150 - DNA, 15 bp, Homo sapiens
gctaaacacagaacc

SEQ ID NO: 239151 - DNA, 15 bp, Homo sapiens
ggctaaacacagaac

SEQ ID NO: 239152 - DNA, 15 bp, Homo sapiens
gggctaaacacagaa

SEQ ID NO: 239153 - DNA, 15 bp, Homo sapiens
agggctaaacacaga

SEQ ID NO: 239154 - DNA, 15 bp, Homo sapiens
cagggctaaacacag

SEQ ID NO: 239155 - DNA, 15 bp, Homo sapiens
ccagggctaaacaca

SEQ ID NO: 239156 - DNA, 15 bp, Homo sapiens
cccagggctaaacac

SEQ ID NO: 239157 - DNA, 15 bp, Homo sapiens
ccccagggctaaaca

SEQ ID NO: 239158 - DNA, 15 bp, Homo sapiens
tccccagggctaaac

SEQ ID NO: 239159 - DNA, 15 bp, Homo sapiens
ctccccagggctaaa

SEQ ID NO: 239160 - DNA, 15 bp, Homo sapiens
actccccagggctaa

SEQ ID NO: 239161 - DNA, 15 bp, Homo sapiens
cactccccagggcta

SEQ ID NO: 239162 - DNA, 15 bp, Homo sapiens
ccactccccagggct

SEQ ID NO: 239163 - DNA, 15 bp, Homo sapiens
gccactccccagggc

SEQ ID NO: 239164 - DNA, 15 bp, Homo sapiens
tgccactccccaggg

SEQ ID NO: 239165 - DNA, 15 bp, Homo sapiens
ctgccactccccagg

SEQ ID NO: 239166 - DNA, 15 bp, Homo sapiens
gctgccactccccag

SEQ ID NO: 239167 - DNA, 15 bp, Homo sapiens
cgctgccactcccca

SEQ ID NO: 239168 - DNA, 15 bp, Homo sapiens
tcgctgccactcccc

SEQ ID NO: 239169 - DNA, 15 bp, Homo sapiens
atcgctgccactccc

SEQ ID NO: 239170 - DNA, 15 bp, Homo sapiens
catcgctgccactcc

SEQ ID NO: 239171 - DNA, 15 bp, Homo sapiens
ccatcgctgccactc

SEQ ID NO: 239172 - DNA, 15 bp, Homo sapiens
cccatcgctgccact

SEQ ID NO: 239173 - DNA, 15 bp, Homo sapiens
tcccatcgctgccac

SEQ ID NO: 239174 - DNA, 15 bp, Homo sapiens
ttcccatcgctgcca

SEQ ID NO: 239175 - DNA, 15 bp, Homo sapiens
gttcccatcgctgcc

SEQ ID NO: 239176 - DNA, 15 bp, Homo sapiens
tgttcccatcgctgc

SEQ ID NO: 239177 - DNA, 15 bp, Homo sapiens
ttgttcccatcgctg

SEQ ID NO: 239178 - DNA, 15 bp, Homo sapiens
attgttcccatcgct

SEQ ID NO: 239179 - DNA, 15 bp, Homo sapiens
gattgttcccatcgc

SEQ ID NO: 239180 - DNA, 15 bp, Homo sapiens
cgattgttcccatcg

SEQ ID NO: 239181 - DNA, 15 bp, Homo sapiens
acgattgttcccatc

SEQ ID NO: 239182 - DNA, 15 bp, Homo sapiens
cacgattgttcccat

SEQ ID NO: 239183 - DNA, 15 bp, Homo sapiens
ccacgattgttccca

SEQ ID NO: 239184 - DNA, 15 bp, Homo sapiens
cccacgattgttccc

SEQ ID NO: 239185 - DNA, 15 bp, Homo sapiens
gcccacgattgttcc

SEQ ID NO: 239186 - DNA, 15 bp, Homo sapiens
tgcccacgattgttc

SEQ ID NO: 239187 - DNA, 15 bp, Homo sapiens
ttgcccacgattgtt

SEQ ID NO: 239188 - DNA, 15 bp, Homo sapiens
tttgcccacgattgt

SEQ ID NO: 239189 - DNA, 15 bp, Homo sapiens
ttttgcccacgattg

SEQ ID NO: 239190 - DNA, 15 bp, Homo sapiens
gttttgcccacgatt

SEQ ID NO: 239191 - DNA, 15 bp, Homo sapiens
tgttttgcccacgat

SEQ ID NO: 239192 - DNA, 15 bp, Homo sapiens
ctgttttgcccacga

SEQ ID NO: 239193 - DNA, 15 bp, Homo sapiens
cctgttttgcccacg

SEQ ID NO: 239194 - DNA, 15 bp, Homo sapiens
tcctgttttgcccac

SEQ ID NO: 239195 - DNA, 15 bp, Homo sapiens
ttcctgttttgccca

SEQ ID NO: 239196 - DNA, 15 bp, Homo sapiens
tttcctgttttgccc

SEQ ID NO: 239197 - DNA, 15 bp, Homo sapiens
gtttcctgttttgcc

SEQ ID NO: 239198 - DNA, 15 bp, Homo sapiens
tgtttcctgttttgc

SEQ ID NO: 239199 - DNA, 15 bp, Homo sapiens
ttgtttcctgttttg

SEQ ID NO: 239200 - DNA, 15 bp, Homo sapiens
tttgtttcctgtttt

SEQ ID NO: 239201 - DNA, 15 bp, Homo sapiens
atttgtttcctgttt

SEQ ID NO: 239202 - DNA, 15 bp, Homo sapiens
aatttgtttcctgtt

SEQ ID NO: 239203 - DNA, 15 bp, Homo sapiens
gaatttgtttcctgt

SEQ ID NO: 239204 - DNA, 15 bp, Homo sapiens
agaatttgtttcctg

SEQ ID NO: 239205 - DNA, 15 bp, Homo sapiens
tagaatttgtttcct

SEQ ID NO: 239206 - DNA, 15 bp, Homo sapiens
ctagaatttgtttcc

SEQ ID NO: 239207 - DNA, 15 bp, Homo sapiens
actagaatttgtttc

SEQ ID NO: 239208 - DNA, 15 bp, Homo sapiens
gactagaatttgttt

SEQ ID NO: 239209 - DNA, 15 bp, Homo sapiens
ggactagaatttgtt

SEQ ID NO: 239210 - DNA, 15 bp, Homo sapiens
aggactagaatttgt

SEQ ID NO: 239211 - DNA, 15 bp, Homo sapiens
aaggactagaatttg

SEQ ID NO: 239212 - DNA, 15 bp, Homo sapiens
aaaggactagaattt

SEQ ID NO: 239213 - DNA, 15 bp, Homo sapiens
aaaaggactagaatt

SEQ ID NO: 239214 - DNA, 15 bp, Homo sapiens
caaaaggactagaat

SEQ ID NO: 239215 - DNA, 15 bp, Homo sapiens
ccaaaaggactagaa

SEQ ID NO: 239216 - DNA, 15 bp, Homo sapiens
tccaaaaggactaga

SEQ ID NO: 239217 - DNA, 15 bp, Homo sapiens
ctccaaaaggactag

SEQ ID NO: 239218 - DNA, 15 bp, Homo sapiens
actccaaaaggacta

SEQ ID NO: 239219 - DNA, 15 bp, Homo sapiens
cactccaaaaggact

SEQ ID NO: 239220 - DNA, 15 bp, Homo sapiens
tcactccaaaaggac

SEQ ID NO: 239221 - DNA, 15 bp, Homo sapiens
atcactccaaaagga

SEQ ID NO: 239222 - DNA, 15 bp, Homo sapiens
aatcactccaaaagg

SEQ ID NO: 239223 - DNA, 15 bp, Homo sapiens
gaatcactccaaaag

SEQ ID NO: 239224 - DNA, 15 bp, Homo sapiens
ggaatcactccaaaa

SEQ ID NO: 239225 - DNA, 15 bp, Homo sapiens
tggaatcactccaaa

SEQ ID NO: 239226 - DNA, 15 bp, Homo sapiens
ctggaatcactccaa

SEQ ID NO: 239227 - DNA, 15 bp, Homo sapiens
cctggaatcactcca

SEQ ID NO: 239228 - DNA, 15 bp, Homo sapiens
tcctggaatcactcc

SEQ ID NO: 239229 - DNA, 15 bp, Homo sapiens
ctcctggaatcactc

SEQ ID NO: 239230 - DNA, 15 bp, Homo sapiens
cctcctggaatcact

SEQ ID NO: 239231 - DNA, 15 bp, Homo sapiens
tcctcctggaatcac

SEQ ID NO: 239232 - DNA, 15 bp, Homo sapiens
atcctcctggaatca

SEQ ID NO: 239233 - DNA, 15 bp, Homo sapiens
catcctcctggaatc

SEQ ID NO: 239234 - DNA, 15 bp, Homo sapiens
ccatcctcctggaat

SEQ ID NO: 239235 - DNA, 15 bp, Homo sapiens
cccatcctcctggaa

SEQ ID NO: 239236 - DNA, 15 bp, Homo sapiens
ccccatcctcctgga

SEQ ID NO: 239237 - DNA, 15 bp, Homo sapiens
cccccatcctcctgg

SEQ ID NO: 239238 - DNA, 15 bp, Homo sapiens
acccccatcctcctg

SEQ ID NO: 239239 - DNA, 15 bp, Homo sapiens
aacccccatcctcct

SEQ ID NO: 239240 - DNA, 15 bp, Homo sapiens
aaacccccatcctcc

SEQ ID NO: 239241 - DNA, 15 bp, Homo sapiens
caaacccccatcctc

SEQ ID NO: 239242 - DNA, 15 bp, Homo sapiens
ccaaacccccatcct

SEQ ID NO: 239243 - DNA, 15 bp, Homo sapiens
cccaaacccccatcc

SEQ ID NO: 239244 - DNA, 15 bp, Homo sapiens
acccaaacccccatc

SEQ ID NO: 239245 - DNA, 15 bp, Homo sapiens
cacccaaacccccat

SEQ ID NO: 239246 - DNA, 15 bp, Homo sapiens
ccacccaaaccccca

SEQ ID NO: 239247 - DNA, 15 bp, Homo sapiens
tccacccaaaccccc

SEQ ID NO: 239248 - DNA, 15 bp, Homo sapiens
atccacccaaacccc

SEQ ID NO: 239249 - DNA, 15 bp, Homo sapiens
aatccacccaaaccc

SEQ ID NO: 239250 - DNA, 15 bp, Homo sapiens
aaatccacccaaacc

SEQ ID NO: 239251 - DNA, 15 bp, Homo sapiens
caaatccacccaaac

SEQ ID NO: 239252 - DNA, 15 bp, Homo sapiens
tcaaatccacccaaa

SEQ ID NO: 239253 - DNA, 15 bp, Homo sapiens
ctcaaatccacccaa

SEQ ID NO: 239254 - DNA, 15 bp, Homo sapiens
tctcaaatccaccca

SEQ ID NO: 239255 - DNA, 15 bp, Homo sapiens
ctctcaaatccaccc

SEQ ID NO: 239256 - DNA, 15 bp, Homo sapiens
cctctcaaatccacc

SEQ ID NO: 239257 - DNA, 15 bp, Homo sapiens
ccctctcaaatccac

SEQ ID NO: 239258 - DNA, 15 bp, Homo sapiens
cccctctcaaatcca

SEQ ID NO: 239259 - DNA, 15 bp, Homo sapiens
tcccctctcaaatcc

SEQ ID NO: 239260 - DNA, 15 bp, Homo sapiens
ttcccctctcaaatc

SEQ ID NO: 239261 - DNA, 15 bp, Homo sapiens
gttcccctctcaaat

SEQ ID NO: 239262 - DNA, 15 bp, Homo sapiens
tgttcccctctcaaa

SEQ ID NO: 239263 - DNA, 15 bp, Homo sapiens
ttgttcccctctcaa

SEQ ID NO: 239264 - DNA, 15 bp, Homo sapiens
cttgttcccctctca

SEQ ID NO: 239265 - DNA, 15 bp, Homo sapiens
ccttgttcccctctc

SEQ ID NO: 239266 - DNA, 15 bp, Homo sapiens
cccttgttcccctct

SEQ ID NO: 239267 - DNA, 15 bp, Homo sapiens
tcccttgttcccctc

SEQ ID NO: 239268 - DNA, 15 bp, Homo sapiens
ttcccttgttcccct

SEQ ID NO: 239269 - DNA, 15 bp, Homo sapiens
cttcccttgttcccc

SEQ ID NO: 239270 - DNA, 15 bp, Homo sapiens
acttcccttgttccc

SEQ ID NO: 239271 - DNA, 15 bp, Homo sapiens
cacttcccttgttcc

SEQ ID NO: 239272 - DNA, 15 bp, Homo sapiens
ccacttcccttgttc

SEQ ID NO: 239273 - DNA, 15 bp, Homo sapiens
tccacttcccttgtt

SEQ ID NO: 239274 - DNA, 15 bp, Homo sapiens
ctccacttcccttgt

SEQ ID NO: 239275 - DNA, 15 bp, Homo sapiens
actccacttcccttg

SEQ ID NO: 239276 - DNA, 15 bp, Homo sapiens
cactccacttccctt

SEQ ID NO: 239277 - DNA, 15 bp, Homo sapiens
ccactccacttccct

SEQ ID NO: 239278 - DNA, 15 bp, Homo sapiens
tccactccacttccc

SEQ ID NO: 239279 - DNA, 15 bp, Homo sapiens
ctccactccacttcc

SEQ ID NO: 239280 - DNA, 15 bp, Homo sapiens
cctccactccacttc

SEQ ID NO: 239281 - DNA, 15 bp, Homo sapiens
gcctccactccactt

SEQ ID NO: 239282 - DNA, 15 bp, Homo sapiens
tgcctccactccact

SEQ ID NO: 239283 - DNA, 15 bp, Homo sapiens
ttgcctccactccac

SEQ ID NO: 239284 - DNA, 15 bp, Homo sapiens
tttgcctccactcca

SEQ ID NO: 239285 - DNA, 15 bp, Homo sapiens
ttttgcctccactcc

SEQ ID NO: 239286 - DNA, 15 bp, Homo sapiens
cttttgcctccactc

SEQ ID NO: 239287 - DNA, 15 bp, Homo sapiens
tcttttgcctccact

SEQ ID NO: 239288 - DNA, 15 bp, Homo sapiens
ctcttttgcctccac

SEQ ID NO: 239289 - DNA, 15 bp, Homo sapiens
cctcttttgcctcca

SEQ ID NO: 239290 - DNA, 15 bp, Homo sapiens
gcctcttttgcctcc

SEQ ID NO: 239291 - DNA, 15 bp, Homo sapiens
agcctcttttgcctc

SEQ ID NO: 239292 - DNA, 15 bp, Homo sapiens
cagcctcttttgcct

SEQ ID NO: 239293 - DNA, 15 bp, Homo sapiens
ccagcctcttttgcc

SEQ ID NO: 239294 - DNA, 15 bp, Homo sapiens
tccagcctcttttgc

SEQ ID NO: 239295 - DNA, 15 bp, Homo sapiens
ctccagcctcttttg

SEQ ID NO: 239296 - DNA, 15 bp, Homo sapiens
tctccagcctctttt

SEQ ID NO: 239297 - DNA, 15 bp, Homo sapiens
ctctccagcctcttt

SEQ ID NO: 239298 - DNA, 15 bp, Homo sapiens
tctctccagcctctt

SEQ ID NO: 239299 - DNA, 15 bp, Homo sapiens
gtctctccagcctct

SEQ ID NO: 239300 - DNA, 15 bp, Homo sapiens
agtctctccagcctc

SEQ ID NO: 239301 - DNA, 15 bp, Homo sapiens
cagtctctccagcct

SEQ ID NO: 239302 - DNA, 15 bp, Homo sapiens
ccagtctctccagcc

SEQ ID NO: 239303 - DNA, 15 bp, Homo sapiens
accagtctctccagc

SEQ ID NO: 239304 - DNA, 15 bp, Homo sapiens
gaccagtctctccag

SEQ ID NO: 239305 - DNA, 15 bp, Homo sapiens
agaccagtctctcca

SEQ ID NO: 239306 - DNA, 15 bp, Homo sapiens
aagaccagtctctcc

SEQ ID NO: 239307 - DNA, 15 bp, Homo sapiens
caagaccagtctctc

SEQ ID NO: 239308 - DNA, 15 bp, Homo sapiens
gcaagaccagtctct

SEQ ID NO: 239309 - DNA, 15 bp, Homo sapiens
tgcaagaccagtctc

SEQ ID NO: 239310 - DNA, 15 bp, Homo sapiens
gtgcaagaccagtct

SEQ ID NO: 239311 - DNA, 15 bp, Homo sapiens
agtgcaagaccagtc

SEQ ID NO: 239312 - DNA, 15 bp, Homo sapiens
cagtgcaagaccagt

SEQ ID NO: 239313 - DNA, 15 bp, Homo sapiens
tcagtgcaagaccag

SEQ ID NO: 239314 - DNA, 15 bp, Homo sapiens
ctcagtgcaagacca

SEQ ID NO: 239315 - DNA, 15 bp, Homo sapiens
actcagtgcaagacc

SEQ ID NO: 239316 - DNA, 15 bp, Homo sapiens
cactcagtgcaagac

SEQ ID NO: 239317 - DNA, 15 bp, Homo sapiens
tcactcagtgcaaga

SEQ ID NO: 239318 - DNA, 15 bp, Homo sapiens
atcactcagtgcaag

SEQ ID NO: 239319 - DNA, 15 bp, Homo sapiens
catcactcagtgcaa

SEQ ID NO: 239320 - DNA, 15 bp, Homo sapiens
tcatcactcagtgca

SEQ ID NO: 239321 - DNA, 15 bp, Homo sapiens
atcatcactcagtgc

SEQ ID NO: 239322 - DNA, 15 bp, Homo sapiens
tatcatcactcagtg

SEQ ID NO: 239323 - DNA, 15 bp, Homo sapiens
atatcatcactcagt

SEQ ID NO: 239324 - DNA, 15 bp, Homo sapiens
catatcatcactcag

SEQ ID NO: 239325 - DNA, 15 bp, Homo sapiens
ccatatcatcactca

SEQ ID NO: 239326 - DNA, 15 bp, Homo sapiens
accatatcatcactc

SEQ ID NO: 239327 - DNA, 15 bp, Homo sapiens
aaccatatcatcact

SEQ ID NO: 239328 - DNA, 15 bp, Homo sapiens
caaccatatcatcac

SEQ ID NO: 239329 - DNA, 15 bp, Homo sapiens
tcaaccatatcatca

SEQ ID NO: 239330 - DNA, 15 bp, Homo sapiens
atcaaccatatcatc

SEQ ID NO: 239331 - DNA, 15 bp, Homo sapiens
tatcaaccatatcat

SEQ ID NO: 239332 - DNA, 15 bp, Homo sapiens
ctatcaaccatatca

SEQ ID NO: 239333 - DNA, 15 bp, Homo sapiens
gctatcaaccatatc

SEQ ID NO: 239334 - DNA, 15 bp, Homo sapiens
agctatcaaccatat

SEQ ID NO: 239335 - DNA, 15 bp, Homo sapiens
gagctatcaaccata

SEQ ID NO: 239336 - DNA, 15 bp, Homo sapiens
ggagctatcaaccat

SEQ ID NO: 239337 - DNA, 15 bp, Homo sapiens
aggagctatcaacca

SEQ ID NO: 239338 - DNA, 15 bp, Homo sapiens
caggagctatcaacc

SEQ ID NO: 239339 - DNA, 15 bp, Homo sapiens
tcaggagctatcaac

SEQ ID NO: 239340 - DNA, 15 bp, Homo sapiens
gtcaggagctatcaa

SEQ ID NO: 239341 - DNA, 15 bp, Homo sapiens
ggtcaggagctatca

SEQ ID NO: 239342 - DNA, 15 bp, Homo sapiens
tggtcaggagctatc

SEQ ID NO: 239343 - DNA, 15 bp, Homo sapiens
ttggtcaggagctat

SEQ ID NO: 239344 - DNA, 15 bp, Homo sapiens
tttggtcaggagcta

SEQ ID NO: 239345 - DNA, 15 bp, Homo sapiens
gtttggtcaggagct

SEQ ID NO: 239346 - DNA, 15 bp, Homo sapiens
tgtttggtcaggagc

SEQ ID NO: 239347 - DNA, 15 bp, Homo sapiens
ttgtttggtcaggag

SEQ ID NO: 239348 - DNA, 15 bp, Homo sapiens
attgtttggtcagga

SEQ ID NO: 239349 - DNA, 15 bp, Homo sapiens
aattgtttggtcagg

SEQ ID NO: 239350 - DNA, 15 bp, Homo sapiens
taattgtttggtcag

SEQ ID NO: 239351 - DNA, 15 bp, Homo sapiens
ttaattgtttggtca

SEQ ID NO: 239352 - DNA, 15 bp, Homo sapiens
attaattgtttggtc

SEQ ID NO: 239353 - DNA, 15 bp, Homo sapiens
gattaattgtttggt

SEQ ID NO: 239354 - DNA, 15 bp, Homo sapiens
agattaattgtttgg

SEQ ID NO: 239355 - DNA, 15 bp, Homo sapiens
aagattaattgtttg

SEQ ID NO: 239356 - DNA, 15 bp, Homo sapiens
aaagattaattgttt

SEQ ID NO: 239357 - DNA, 15 bp, Homo sapiens
caaagattaattgtt

SEQ ID NO: 239358 - DNA, 15 bp, Homo sapiens
acaaagattaattgt

SEQ ID NO: 239359 - DNA, 15 bp, Homo sapiens
aacaaagattaattg

SEQ ID NO: 239360 - DNA, 15 bp, Homo sapiens
gaacaaagattaatt

SEQ ID NO: 239361 - DNA, 15 bp, Homo sapiens
tgaacaaagattaat

SEQ ID NO: 239362 - DNA, 15 bp, Homo sapiens
ctgaacaaagattaa

SEQ ID NO: 239363 - DNA, 15 bp, Homo sapiens
tctgaacaaagatta

SEQ ID NO: 239364 - DNA, 15 bp, Homo sapiens
ttctgaacaaagatt

SEQ ID NO: 239365 - DNA, 15 bp, Homo sapiens
gttctgaacaaagat

SEQ ID NO: 239366 - DNA, 15 bp, Homo sapiens
agttctgaacaaaga

SEQ ID NO: 239367 - DNA, 15 bp, Homo sapiens
aagttctgaacaaag

SEQ ID NO: 239368 - DNA, 15 bp, Homo sapiens
aaagttctgaacaaa

SEQ ID NO: 239369 - DNA, 15 bp, Homo sapiens
gaaagttctgaacaa

SEQ ID NO: 239370 - DNA, 15 bp, Homo sapiens
ggaaagttctgaaca

SEQ ID NO: 239371 - DNA, 15 bp, Homo sapiens
gggaaagttctgaac

SEQ ID NO: 239372 - DNA, 15 bp, Homo sapiens
agggaaagttctgaa

SEQ ID NO: 239373 - DNA, 15 bp, Homo sapiens
aagggaaagttctga

SEQ ID NO: 239374 - DNA, 15 bp, Homo sapiens
aaagggaaagttctg

SEQ ID NO: 239375 - DNA, 15 bp, Homo sapiens
caaagggaaagttct

SEQ ID NO: 239376 - DNA, 15 bp, Homo sapiens
ccaaagggaaagttc

SEQ ID NO: 239377 - DNA, 15 bp, Homo sapiens
tccaaagggaaagtt

SEQ ID NO: 239378 - DNA, 15 bp, Homo sapiens
ttccaaagggaaagt

SEQ ID NO: 239379 - DNA, 15 bp, Homo sapiens
tttccaaagggaaag

SEQ ID NO: 239380 - DNA, 15 bp, Homo sapiens
ctttccaaagggaaa

SEQ ID NO: 239381 - DNA, 15 bp, Homo sapiens
actttccaaagggaa

SEQ ID NO: 239382 - DNA, 15 bp, Homo sapiens
gactttccaaaggga

SEQ ID NO: 239383 - DNA, 15 bp, Homo sapiens
agactttccaaaggg

SEQ ID NO: 239384 - DNA, 15 bp, Homo sapiens
cagactttccaaagg

SEQ ID NO: 239385 - DNA, 15 bp, Homo sapiens
acagactttccaaag

SEQ ID NO: 239386 - DNA, 15 bp, Homo sapiens
cacagactttccaaa

SEQ ID NO: 239387 - DNA, 15 bp, Homo sapiens
ccacagactttccaa

SEQ ID NO: 239388 - DNA, 15 bp, Homo sapiens
gccacagactttcca

SEQ ID NO: 239389 - DNA, 15 bp, Homo sapiens
agccacagactttcc

SEQ ID NO: 239390 - DNA, 15 bp, Homo sapiens
cagccacagactttc

SEQ ID NO: 239391 - DNA, 15 bp, Homo sapiens
gcagccacagacttt

SEQ ID NO: 239392 - DNA, 15 bp, Homo sapiens
ggcagccacagactt

SEQ ID NO: 239393 - DNA, 15 bp, Homo sapiens
aggcagccacagact

SEQ ID NO: 239394 - DNA, 15 bp, Homo sapiens
aaggcagccacagac

SEQ ID NO: 239395 - DNA, 15 bp, Homo sapiens
gaaggcagccacaga

SEQ ID NO: 239396 - DNA, 15 bp, Homo sapiens
agaaggcagccacag

SEQ ID NO: 239397 - DNA, 15 bp, Homo sapiens
cagaaggcagccaca

SEQ ID NO: 239398 - DNA, 15 bp, Homo sapiens
ccagaaggcagccac

SEQ ID NO: 239399 - DNA, 15 bp, Homo sapiens
cccagaaggcagcca

SEQ ID NO: 239400 - DNA, 15 bp, Homo sapiens
ccccagaaggcagcc

SEQ ID NO: 239401 - DNA, 15 bp, Homo sapiens
tccccagaaggcagc

SEQ ID NO: 239402 - DNA, 15 bp, Homo sapiens
ttccccagaaggcag

SEQ ID NO: 239403 - DNA, 15 bp, Homo sapiens
cttccccagaaggca

SEQ ID NO: 239404 - DNA, 15 bp, Homo sapiens
ccttccccagaaggc

SEQ ID NO: 239405 - DNA, 15 bp, Homo sapiens
gccttccccagaagg

SEQ ID NO: 239406 - DNA, 15 bp, Homo sapiens
tgccttccccagaag

SEQ ID NO: 239407 - DNA, 15 bp, Homo sapiens
ttgccttccccagaa

SEQ ID NO: 239408 - DNA, 15 bp, Homo sapiens
tttgccttccccaga

SEQ ID NO: 239409 - DNA, 15 bp, Homo sapiens
gtttgccttccccag

SEQ ID NO: 239410 - DNA, 15 bp, Homo sapiens
tgtttgccttcccca

SEQ ID NO: 239411 - DNA, 15 bp, Homo sapiens
ttgtttgccttcccc

SEQ ID NO: 239412 - DNA, 15 bp, Homo sapiens
tttgtttgccttccc

SEQ ID NO: 239413 - DNA, 15 bp, Homo sapiens
atttgtttgccttcc

SEQ ID NO: 239414 - DNA, 15 bp, Homo sapiens
catttgtttgccttc

SEQ ID NO: 239415 - DNA, 15 bp, Homo sapiens
acatttgtttgcctt

SEQ ID NO: 239416 - DNA, 15 bp, Homo sapiens
cacatttgtttgcct

SEQ ID NO: 239417 - DNA, 15 bp, Homo sapiens
tcacatttgtttgcc

SEQ ID NO: 239418 - DNA, 15 bp, Homo sapiens
ttcacatttgtttgc

SEQ ID NO: 239419 - DNA, 15 bp, Homo sapiens
gttcacatttgtttg

SEQ ID NO: 239420 - DNA, 15 bp, Homo sapiens
agttcacatttgttt

SEQ ID NO: 239421 - DNA, 15 bp, Homo sapiens
gagttcacatttgtt

SEQ ID NO: 239422 - DNA, 15 bp, Homo sapiens
tgagttcacatttgt

SEQ ID NO: 239423 - DNA, 15 bp, Homo sapiens
ttgagttcacatttg

SEQ ID NO: 239424 - DNA, 15 bp, Homo sapiens
cttgagttcacattt

SEQ ID NO: 239425 - DNA, 15 bp, Homo sapiens
tcttgagttcacatt

SEQ ID NO: 239426 - DNA, 15 bp, Homo sapiens
ttcttgagttcacat

SEQ ID NO: 239427 - DNA, 15 bp, Homo sapiens
cttcttgagttcaca

SEQ ID NO: 239428 - DNA, 15 bp, Homo sapiens
acttcttgagttcac

SEQ ID NO: 239429 - DNA, 15 bp, Homo sapiens
aacttcttgagttca

SEQ ID NO: 239430 - DNA, 15 bp, Homo sapiens
aaacttcttgagttc

SEQ ID NO: 239431 - DNA, 15 bp, Homo sapiens
taaacttcttgagtt

SEQ ID NO: 239432 - DNA, 15 bp, Homo sapiens
gtaaacttcttgagt

SEQ ID NO: 239433 - DNA, 15 bp, Homo sapiens
tgtaaacttcttgag

SEQ ID NO: 239434 - DNA, 15 bp, Homo sapiens
ttgtaaacttcttga

SEQ ID NO: 239435 - DNA, 15 bp, Homo sapiens
attgtaaacttcttg

SEQ ID NO: 239436 - DNA, 15 bp, Homo sapiens
aattgtaaacttctt

SEQ ID NO: 239437 - DNA, 15 bp, Homo sapiens
aaattgtaaacttct

SEQ ID NO: 239438 - DNA, 15 bp, Homo sapiens
taaattgtaaacttc

SEQ ID NO: 239439 - DNA, 15 bp, Homo sapiens
ctaaattgtaaactt

SEQ ID NO: 239440 - DNA, 15 bp, Homo sapiens
gctaaattgtaaact

SEQ ID NO: 239441 - DNA, 15 bp, Homo sapiens
agctaaattgtaaac

SEQ ID NO: 239442 - DNA, 15 bp, Homo sapiens
tagctaaattgtaaa

SEQ ID NO: 239443 - DNA, 15 bp, Homo sapiens
ctagctaaattgtaa

SEQ ID NO: 239444 - DNA, 15 bp, Homo sapiens
cctagctaaattgta

SEQ ID NO: 239445 - DNA, 15 bp, Homo sapiens
ccctagctaaattgt

SEQ ID NO: 239446 - DNA, 15 bp, Homo sapiens
tccctagctaaattg

SEQ ID NO: 239447 - DNA, 15 bp, Homo sapiens
ttccctagctaaatt

SEQ ID NO: 239448 - DNA, 15 bp, Homo sapiens
tttccctagctaaat

SEQ ID NO: 239449 - DNA, 15 bp, Homo sapiens
gtttccctagctaaa

SEQ ID NO: 239450 - DNA, 15 bp, Homo sapiens
tgtttccctagctaa

SEQ ID NO: 239451 - DNA, 15 bp, Homo sapiens
ctgtttccctagcta

SEQ ID NO: 239452 - DNA, 15 bp, Homo sapiens
cctgtttccctagct

SEQ ID NO: 239453 - DNA, 15 bp, Homo sapiens
tcctgtttccctagc

SEQ ID NO: 239454 - DNA, 15 bp, Homo sapiens
atcctgtttccctag

SEQ ID NO: 239455 - DNA, 15 bp, Homo sapiens
catcctgtttcccta

SEQ ID NO: 239456 - DNA, 15 bp, Homo sapiens
acatcctgtttccct

SEQ ID NO: 239457 - DNA, 15 bp, Homo sapiens
cacatcctgtttccc

SEQ ID NO: 239458 - DNA, 15 bp, Homo sapiens
gcacatcctgtttcc

SEQ ID NO: 239459 - DNA, 15 bp, Homo sapiens
tgcacatcctgtttc

SEQ ID NO: 239460 - DNA, 15 bp, Homo sapiens
ttgcacatcctgttt

SEQ ID NO: 239461 - DNA, 15 bp, Homo sapiens
tttgcacatcctgtt

SEQ ID NO: 239462 - DNA, 15 bp, Homo sapiens
gtttgcacatcctgt

SEQ ID NO: 239463 - DNA, 15 bp, Homo sapiens
tgtttgcacatcctg

SEQ ID NO: 239464 - DNA, 15 bp, Homo sapiens
ctgtttgcacatcct

SEQ ID NO: 239465 - DNA, 15 bp, Homo sapiens
cctgtttgcacatcc

SEQ ID NO: 239466 - DNA, 15 bp, Homo sapiens
tcctgtttgcacatc

SEQ ID NO: 239467 - DNA, 15 bp, Homo sapiens
ttcctgtttgcacat

SEQ ID NO: 239468 - DNA, 15 bp, Homo sapiens
cttcctgtttgcaca

SEQ ID NO: 239469 - DNA, 15 bp, Homo sapiens
tcttcctgtttgcac

SEQ ID NO: 239470 - DNA, 15 bp, Homo sapiens
ttcttcctgtttgca

SEQ ID NO: 239471 - DNA, 15 bp, Homo sapiens
gttcttcctgtttgc

SEQ ID NO: 239472 - DNA, 15 bp, Homo sapiens
ggttcttcctgtttg

SEQ ID NO: 239473 - DNA, 15 bp, Homo sapiens
tggttcttcctgttt

SEQ ID NO: 239474 - DNA, 15 bp, Homo sapiens
ttggttcttcctgtt

SEQ ID NO: 239475 - DNA, 15 bp, Homo sapiens
gttggttcttcctgt

SEQ ID NO: 239476 - DNA, 15 bp, Homo sapiens
agttggttcttcctg

SEQ ID NO: 239477 - DNA, 15 bp, Homo sapiens
tagttggttcttcct

SEQ ID NO: 239478 - DNA, 15 bp, Homo sapiens
atagttggttcttcc

SEQ ID NO: 239479 - DNA, 15 bp, Homo sapiens
catagttggttcttc

SEQ ID NO: 239480 - DNA, 15 bp, Homo sapiens
acatagttggttctt

SEQ ID NO: 239481 - DNA, 15 bp, Homo sapiens
cacatagttggttct

SEQ ID NO: 239482 - DNA, 15 bp, Homo sapiens
tcacatagttggttc

SEQ ID NO: 239483 - DNA, 15 bp, Homo sapiens
ttcacatagttggtt

SEQ ID NO: 239484 - DNA, 15 bp, Homo sapiens
cttcacatagttggt

SEQ ID NO: 239485 - DNA, 15 bp, Homo sapiens
ccttcacatagttgg

SEQ ID NO: 239486 - DNA, 15 bp, Homo sapiens
accttcacatagttg

SEQ ID NO: 239487 - DNA, 15 bp, Homo sapiens
taccttcacatagtt

SEQ ID NO: 239488 - DNA, 15 bp, Homo sapiens
ctaccttcacatagt

SEQ ID NO: 239489 - DNA, 15 bp, Homo sapiens
cctaccttcacatag

SEQ ID NO: 239490 - DNA, 15 bp, Homo sapiens
acctaccttcacata

SEQ ID NO: 239491 - DNA, 15 bp, Homo sapiens
tacctaccttcacat

SEQ ID NO: 239492 - DNA, 15 bp, Homo sapiens
ttacctaccttcaca

SEQ ID NO: 239493 - DNA, 15 bp, Homo sapiens
cttacctaccttcac

SEQ ID NO: 239494 - DNA, 15 bp, Homo sapiens
tcttacctaccttca

SEQ ID NO: 239495 - DNA, 15 bp, Homo sapiens
atcttacctaccttc

SEQ ID NO: 239496 - DNA, 15 bp, Homo sapiens
tatcttacctacctt

SEQ ID NO: 239497 - DNA, 15 bp, Homo sapiens
ttatcttacctacct

SEQ ID NO: 239498 - DNA, 15 bp, Homo sapiens
gttatcttacctacc

SEQ ID NO: 239499 - DNA, 15 bp, Homo sapiens
agttatcttacctac

SEQ ID NO: 239500 - DNA, 15 bp, Homo sapiens
cagttatcttaccta

SEQ ID NO: 239501 - DNA, 15 bp, Homo sapiens
acagttatcttacct

SEQ ID NO: 239502 - DNA, 15 bp, Homo sapiens
aacagttatcttacc

SEQ ID NO: 239503 - DNA, 15 bp, Homo sapiens
caacagttatcttac

SEQ ID NO: 239504 - DNA, 15 bp, Homo sapiens
tcaacagttatctta

SEQ ID NO: 239505 - DNA, 15 bp, Homo sapiens
gtcaacagttatctt

SEQ ID NO: 239506 - DNA, 15 bp, Homo sapiens
agtcaacagttatct

SEQ ID NO: 239507 - DNA, 15 bp, Homo sapiens
gagtcaacagttatc

SEQ ID NO: 239508 - DNA, 15 bp, Homo sapiens
ggagtcaacagttat

SEQ ID NO: 239509 - DNA, 15 bp, Homo sapiens
tggagtcaacagtta

SEQ ID NO: 239510 - DNA, 15 bp, Homo sapiens
atggagtcaacagtt

SEQ ID NO: 239511 - DNA, 15 bp, Homo sapiens
catggagtcaacagt

SEQ ID NO: 239512 - DNA, 15 bp, Homo sapiens
gcatggagtcaacag

SEQ ID NO: 239513 - DNA, 15 bp, Homo sapiens
agcatggagtcaaca

SEQ ID NO: 239514 - DNA, 15 bp, Homo sapiens
aagcatggagtcaac

SEQ ID NO: 239515 - DNA, 15 bp, Homo sapiens
aaagcatggagtcaa

SEQ ID NO: 239516 - DNA, 15 bp, Homo sapiens
taaagcatggagtca

SEQ ID NO: 239517 - DNA, 15 bp, Homo sapiens
ttaaagcatggagtc

SEQ ID NO: 239518 - DNA, 15 bp, Homo sapiens
cttaaagcatggagt

SEQ ID NO: 239519 - DNA, 15 bp, Homo sapiens
ccttaaagcatggag

SEQ ID NO: 239520 - DNA, 15 bp, Homo sapiens
tccttaaagcatgga

SEQ ID NO: 239521 - DNA, 15 bp, Homo sapiens
ttccttaaagcatgg

SEQ ID NO: 239522 - DNA, 15 bp, Homo sapiens
tttccttaaagcatg

SEQ ID NO: 239523 - DNA, 15 bp, Homo sapiens
ctttccttaaagcat

SEQ ID NO: 239524 - DNA, 15 bp, Homo sapiens
cctttccttaaagca

SEQ ID NO: 239525 - DNA, 15 bp, Homo sapiens
tcctttccttaaagc

SEQ ID NO: 239526 - DNA, 15 bp, Homo sapiens
ctcctttccttaaag

SEQ ID NO: 239527 - DNA, 15 bp, Homo sapiens
tctcctttccttaaa

SEQ ID NO: 239528 - DNA, 15 bp, Homo sapiens
ctctcctttccttaa

SEQ ID NO: 239529 - DNA, 15 bp, Homo sapiens
gctctcctttcctta

SEQ ID NO: 239530 - DNA, 15 bp, Homo sapiens
agctctcctttcctt

SEQ ID NO: 239531 - DNA, 15 bp, Homo sapiens
gagctctcctttcct

SEQ ID NO: 239532 - DNA, 15 bp, Homo sapiens
agagctctcctttcc

SEQ ID NO: 239533 - DNA, 15 bp, Homo sapiens
aagagctctcctttc

SEQ ID NO: 239534 - DNA, 15 bp, Homo sapiens
aaagagctctccttt

SEQ ID NO: 239535 - DNA, 15 bp, Homo sapiens
caaagagctctcctt

SEQ ID NO: 239536 - DNA, 15 bp, Homo sapiens
acaaagagctctcct

SEQ ID NO: 239537 - DNA, 15 bp, Homo sapiens
cacaaagagctctcc

SEQ ID NO: 239538 - DNA, 15 bp, Homo sapiens
ccacaaagagctctc

SEQ ID NO: 239539 - DNA, 15 bp, Homo sapiens
gccacaaagagctct

SEQ ID NO: 239540 - DNA, 15 bp, Homo sapiens
agccacaaagagctc

SEQ ID NO: 239541 - DNA, 15 bp, Homo sapiens
aagccacaaagagct

SEQ ID NO: 239542 - DNA, 15 bp, Homo sapiens
caagccacaaagagc

SEQ ID NO: 239543 - DNA, 15 bp, Homo sapiens
ccaagccacaaagag

SEQ ID NO: 239544 - DNA, 15 bp, Homo sapiens
cccaagccacaaaga

SEQ ID NO: 239545 - DNA, 15 bp, Homo sapiens
acccaagccacaaag

SEQ ID NO: 239546 - DNA, 15 bp, Homo sapiens
cacccaagccacaaa

SEQ ID NO: 239547 - DNA, 15 bp, Homo sapiens
ccacccaagccacaa

SEQ ID NO: 239548 - DNA, 15 bp, Homo sapiens
accacccaagccaca

SEQ ID NO: 239549 - DNA, 15 bp, Homo sapiens
gaccacccaagccac

SEQ ID NO: 239550 - DNA, 15 bp, Homo sapiens
tgaccacccaagcca

SEQ ID NO: 239551 - DNA, 15 bp, Homo sapiens
ctgaccacccaagcc

SEQ ID NO: 239552 - DNA, 15 bp, Homo sapiens
gctgaccacccaagc

SEQ ID NO: 239553 - DNA, 15 bp, Homo sapiens
tgctgaccacccaag

SEQ ID NO: 239554 - DNA, 15 bp, Homo sapiens
ttgctgaccacccaa

SEQ ID NO: 239555 - DNA, 15 bp, Homo sapiens
cttgctgaccaccca

SEQ ID NO: 239556 - DNA, 15 bp, Homo sapiens
tcttgctgaccaccc

SEQ ID NO: 239557 - DNA, 15 bp, Homo sapiens
ttcttgctgaccacc

SEQ ID NO: 239558 - DNA, 15 bp, Homo sapiens
attcttgctgaccac

SEQ ID NO: 239559 - DNA, 15 bp, Homo sapiens
aattcttgctgacca

SEQ ID NO: 239560 - DNA, 15 bp, Homo sapiens
aaattcttgctgacc

SEQ ID NO: 239561 - DNA, 15 bp, Homo sapiens
aaaattcttgctgac

SEQ ID NO: 239562 - DNA, 15 bp, Homo sapiens
aaaaattcttgctga

SEQ ID NO: 239563 - DNA, 15 bp, Homo sapiens
aaaaaattcttgctg

SEQ ID NO: 239564 - DNA, 15 bp, Homo sapiens
taaaaaattcttgct

SEQ ID NO: 239565 - DNA, 15 bp, Homo sapiens
ttaaaaaattcttgc

SEQ ID NO: 239566 - DNA, 15 bp, Homo sapiens
cttaaaaaattcttg

SEQ ID NO: 239567 - DNA, 15 bp, Homo sapiens
gcttaaaaaattctt

SEQ ID NO: 239568 - DNA, 15 bp, Homo sapiens
tgcttaaaaaattct

SEQ ID NO: 239569 - DNA, 15 bp, Homo sapiens
ctgcttaaaaaattc

SEQ ID NO: 239570 - DNA, 15 bp, Homo sapiens
tctgcttaaaaaatt

SEQ ID NO: 239571 - DNA, 15 bp, Homo sapiens
ctctgcttaaaaaat

SEQ ID NO: 239572 - DNA, 15 bp, Homo sapiens
tctctgcttaaaaaa

SEQ ID NO: 239573 - DNA, 15 bp, Homo sapiens
atctctgcttaaaaa

SEQ ID NO: 239574 - DNA, 15 bp, Homo sapiens
tatctctgcttaaaa

SEQ ID NO: 239575 - DNA, 15 bp, Homo sapiens
gtatctctgcttaaa

SEQ ID NO: 239576 - DNA, 15 bp, Homo sapiens
agtatctctgcttaa

SEQ ID NO: 239577 - DNA, 15 bp, Homo sapiens
gagtatctctgctta

SEQ ID NO: 239578 - DNA, 15 bp, Homo sapiens
agagtatctctgctt

SEQ ID NO: 239579 - DNA, 15 bp, Homo sapiens
aagagtatctctgct

SEQ ID NO: 239580 - DNA, 15 bp, Homo sapiens
caagagtatctctgc

SEQ ID NO: 239581 - DNA, 15 bp, Homo sapiens
tcaagagtatctctg

SEQ ID NO: 239582 - DNA, 15 bp, Homo sapiens
atcaagagtatctct

SEQ ID NO: 239583 - DNA, 15 bp, Homo sapiens
aatcaagagtatctc

SEQ ID NO: 239584 - DNA, 15 bp, Homo sapiens
caatcaagagtatct

SEQ ID NO: 239585 - DNA, 15 bp, Homo sapiens
ccaatcaagagtatc

SEQ ID NO: 239586 - DNA, 15 bp, Homo sapiens
cccaatcaagagtat

SEQ ID NO: 239587 - DNA, 15 bp, Homo sapiens
acccaatcaagagta

SEQ ID NO: 239588 - DNA, 15 bp, Homo sapiens
aacccaatcaagagt

SEQ ID NO: 239589 - DNA, 15 bp, Homo sapiens
caacccaatcaagag

SEQ ID NO: 239590 - DNA, 15 bp, Homo sapiens
ccaacccaatcaaga

SEQ ID NO: 239591 - DNA, 15 bp, Homo sapiens
tccaacccaatcaag

SEQ ID NO: 239592 - DNA, 15 bp, Homo sapiens
atccaacccaatcaa

SEQ ID NO: 239593 - DNA, 15 bp, Homo sapiens
tatccaacccaatca

SEQ ID NO: 239594 - DNA, 15 bp, Homo sapiens
ttatccaacccaatc

SEQ ID NO: 239595 - DNA, 15 bp, Homo sapiens
tttatccaacccaat

SEQ ID NO: 239596 - DNA, 15 bp, Homo sapiens
atttatccaacccaa

SEQ ID NO: 239597 - DNA, 15 bp, Homo sapiens
tatttatccaaccca

SEQ ID NO: 239598 - DNA, 15 bp, Homo sapiens
ttatttatccaaccc

SEQ ID NO: 239599 - DNA, 15 bp, Homo sapiens
tttatttatccaacc

SEQ ID NO: 239600 - DNA, 15 bp, Homo sapiens
ttttatttatccaac

SEQ ID NO: 239601 - DNA, 15 bp, Homo sapiens
cttttatttatccaa

SEQ ID NO: 239602 - DNA, 15 bp, Homo sapiens
tcttttatttatcca

SEQ ID NO: 239603 - DNA, 15 bp, Homo sapiens
ctcttttatttatcc

SEQ ID NO: 239604 - DNA, 15 bp, Homo sapiens
gctcttttatttatc

SEQ ID NO: 239605 - DNA, 15 bp, Homo sapiens
tgctcttttatttat

SEQ ID NO: 239606 - DNA, 15 bp, Homo sapiens
ttgctcttttattta

SEQ ID NO: 239607 - DNA, 15 bp, Homo sapiens
cttgctcttttattt

SEQ ID NO: 239608 - DNA, 15 bp, Homo sapiens
ccttgctcttttatt

SEQ ID NO: 239609 - DNA, 15 bp, Homo sapiens
tccttgctcttttat

SEQ ID NO: 239610 - DNA, 15 bp, Homo sapiens
ctccttgctctttta

SEQ ID NO: 239611 - DNA, 15 bp, Homo sapiens
cctccttgctctttt

SEQ ID NO: 239612 - DNA, 15 bp, Homo sapiens
tcctccttgctcttt

SEQ ID NO: 239613 - DNA, 15 bp, Homo sapiens
gtcctccttgctctt

SEQ ID NO: 239614 - DNA, 15 bp, Homo sapiens
tgtcctccttgctct

SEQ ID NO: 239615 - DNA, 15 bp, Homo sapiens
atgtcctccttgctc

SEQ ID NO: 239616 - DNA, 15 bp, Homo sapiens
aatgtcctccttgct

SEQ ID NO: 239617 - DNA, 15 bp, Homo sapiens
caatgtcctccttgc

SEQ ID NO: 239618 - DNA, 15 bp, Homo sapiens
acaatgtcctccttg

SEQ ID NO: 239619 - DNA, 15 bp, Homo sapiens
tacaatgtcctcctt

SEQ ID NO: 239620 - DNA, 15 bp, Homo sapiens
ctacaatgtcctcct

SEQ ID NO: 239621 - DNA, 15 bp, Homo sapiens
cctacaatgtcctcc

SEQ ID NO: 239622 - DNA, 15 bp, Homo sapiens
tcctacaatgtcctc

SEQ ID NO: 239623 - DNA, 15 bp, Homo sapiens
ctcctacaatgtcct

SEQ ID NO: 239624 - DNA, 15 bp, Homo sapiens
cctcctacaatgtcc

SEQ ID NO: 239625 - DNA, 15 bp, Homo sapiens
ccctcctacaatgtc

SEQ ID NO: 239626 - DNA, 15 bp, Homo sapiens
cccctcctacaatgt

SEQ ID NO: 239627 - DNA, 15 bp, Homo sapiens
tcccctcctacaatg

SEQ ID NO: 239628 - DNA, 15 bp, Homo sapiens
ttcccctcctacaat

SEQ ID NO: 239629 - DNA, 15 bp, Homo sapiens
attcccctcctacaa

SEQ ID NO: 239630 - DNA, 15 bp, Homo sapiens
aattcccctcctaca

SEQ ID NO: 239631 - DNA, 15 bp, Homo sapiens
caattcccctcctac

SEQ ID NO: 239632 - DNA, 15 bp, Homo sapiens
gcaattcccctccta

SEQ ID NO: 239633 - DNA, 15 bp, Homo sapiens
agcaattcccctcct

SEQ ID NO: 239634 - DNA, 15 bp, Homo sapiens
gagcaattcccctcc

SEQ ID NO: 239635 - DNA, 15 bp, Homo sapiens
ggagcaattcccctc

SEQ ID NO: 239636 - DNA, 15 bp, Homo sapiens
gggagcaattcccct

SEQ ID NO: 239637 - DNA, 15 bp, Homo sapiens
tgggagcaattcccc

SEQ ID NO: 239638 - DNA, 15 bp, Homo sapiens
ctgggagcaattccc

SEQ ID NO: 239639 - DNA, 15 bp, Homo sapiens
gctgggagcaattcc

SEQ ID NO: 239640 - DNA, 15 bp, Homo sapiens
tgctgggagcaattc

SEQ ID NO: 239641 - DNA, 15 bp, Homo sapiens
ctgctgggagcaatt

SEQ ID NO: 239642 - DNA, 15 bp, Homo sapiens
tctgctgggagcaat

SEQ ID NO: 239643 - DNA, 15 bp, Homo sapiens
ctctgctgggagcaa

SEQ ID NO: 239644 - DNA, 15 bp, Homo sapiens
gctctgctgggagca

SEQ ID NO: 239645 - DNA, 15 bp, Homo sapiens
ggctctgctgggagc

SEQ ID NO: 239646 - DNA, 15 bp, Homo sapiens
aggctctgctgggag

SEQ ID NO: 239647 - DNA, 15 bp, Homo sapiens
taggctctgctggga

SEQ ID NO: 239648 - DNA, 15 bp, Homo sapiens
ctaggctctgctggg

SEQ ID NO: 239649 - DNA, 15 bp, Homo sapiens
tctaggctctgctgg

SEQ ID NO: 239650 - DNA, 15 bp, Homo sapiens
ttctaggctctgctg

SEQ ID NO: 239651 - DNA, 15 bp, Homo sapiens
cttctaggctctgct

SEQ ID NO: 239652 - DNA, 15 bp, Homo sapiens
gcttctaggctctgc

SEQ ID NO: 239653 - DNA, 15 bp, Homo sapiens
tgcttctaggctctg

SEQ ID NO: 239654 - DNA, 15 bp, Homo sapiens
ctgcttctaggctct

SEQ ID NO: 239655 - DNA, 15 bp, Homo sapiens
tctgcttctaggctc

SEQ ID NO: 239656 - DNA, 15 bp, Homo sapiens
ctctgcttctaggct

SEQ ID NO: 239657 - DNA, 15 bp, Homo sapiens
tctctgcttctaggc

SEQ ID NO: 239658 - DNA, 15 bp, Homo sapiens
ctctctgcttctagg

SEQ ID NO: 239659 - DNA, 15 bp, Homo sapiens
tctctctgcttctag

SEQ ID NO: 239660 - DNA, 15 bp, Homo sapiens
atctctctgcttcta

SEQ ID NO: 239661 - DNA, 15 bp, Homo sapiens
aatctctctgcttct

SEQ ID NO: 239662 - DNA, 15 bp, Homo sapiens
aaatctctctgcttc

SEQ ID NO: 239663 - DNA, 15 bp, Homo sapiens
aaaatctctctgctt

SEQ ID NO: 239664 - DNA, 15 bp, Homo sapiens
gaaaatctctctgct

SEQ ID NO: 239665 - DNA, 15 bp, Homo sapiens
ggaaaatctctctgc

SEQ ID NO: 239666 - DNA, 15 bp, Homo sapiens
tggaaaatctctctg

SEQ ID NO: 239667 - DNA, 15 bp, Homo sapiens
ctggaaaatctctct

SEQ ID NO: 239668 - DNA, 15 bp, Homo sapiens
cctggaaaatctctc

SEQ ID NO: 239669 - DNA, 15 bp, Homo sapiens
ccctggaaaatctct

SEQ ID NO: 239670 - DNA, 15 bp, Homo sapiens
accctggaaaatctc

SEQ ID NO: 239671 - DNA, 15 bp, Homo sapiens
aaccctggaaaatct

SEQ ID NO: 239672 - DNA, 15 bp, Homo sapiens
gaaccctggaaaatc

SEQ ID NO: 239673 - DNA, 15 bp, Homo sapiens
ggaaccctggaaaat

SEQ ID NO: 239674 - DNA, 15 bp, Homo sapiens
gggaaccctggaaaa

SEQ ID NO: 239675 - DNA, 15 bp, Homo sapiens
tgggaaccctggaaa

SEQ ID NO: 239676 - DNA, 15 bp, Homo sapiens
ctgggaaccctggaa

SEQ ID NO: 239677 - DNA, 15 bp, Homo sapiens
cctgggaaccctgga

SEQ ID NO: 239678 - DNA, 15 bp, Homo sapiens
tcctgggaaccctgg

SEQ ID NO: 239679 - DNA, 15 bp, Homo sapiens
ctcctgggaaccctg

SEQ ID NO: 239680 - DNA, 15 bp, Homo sapiens
tctcctgggaaccct

SEQ ID NO: 239681 - DNA, 15 bp, Homo sapiens
ttctcctgggaaccc

SEQ ID NO: 239682 - DNA, 15 bp, Homo sapiens
cttctcctgggaacc

SEQ ID NO: 239683 - DNA, 15 bp, Homo sapiens
tcttctcctgggaac

SEQ ID NO: 239684 - DNA, 15 bp, Homo sapiens
ctcttctcctgggaa

SEQ ID NO: 239685 - DNA, 15 bp, Homo sapiens
tctcttctcctggga

SEQ ID NO: 239686 - DNA, 15 bp, Homo sapiens
atctcttctcctggg

SEQ ID NO: 239687 - DNA, 15 bp, Homo sapiens
aatctcttctcctgg

SEQ ID NO: 239688 - DNA, 15 bp, Homo sapiens
caatctcttctcctg

SEQ ID NO: 239689 - DNA, 15 bp, Homo sapiens
tcaatctcttctcct

SEQ ID NO: 239690 - DNA, 15 bp, Homo sapiens
ttcaatctcttctcc

SEQ ID NO: 239691 - DNA, 15 bp, Homo sapiens
attcaatctcttctc

SEQ ID NO: 239692 - DNA, 15 bp, Homo sapiens
tattcaatctcttct

SEQ ID NO: 239693 - DNA, 15 bp, Homo sapiens
ttattcaatctcttc

SEQ ID NO: 239694 - DNA, 15 bp, Homo sapiens
cttattcaatctctt

SEQ ID NO: 239695 - DNA, 15 bp, Homo sapiens
acttattcaatctct

SEQ ID NO: 239696 - DNA, 15 bp, Homo sapiens
cacttattcaatctc

SEQ ID NO: 239697 - DNA, 15 bp, Homo sapiens
gcacttattcaatct

SEQ ID NO: 239698 - DNA, 15 bp, Homo sapiens
tgcacttattcaatc

SEQ ID NO: 239699 - DNA, 15 bp, Homo sapiens
ctgcacttattcaat

SEQ ID NO: 239700 - DNA, 15 bp, Homo sapiens
actgcacttattcaa

SEQ ID NO: 239701 - DNA, 15 bp, Homo sapiens
cactgcacttattca

SEQ ID NO: 239702 - DNA, 15 bp, Homo sapiens
ccactgcacttattc

SEQ ID NO: 239703 - DNA, 15 bp, Homo sapiens
cccactgcacttatt

SEQ ID NO: 239704 - DNA, 15 bp, Homo sapiens
gcccactgcacttat

SEQ ID NO: 239705 - DNA, 15 bp, Homo sapiens
ggcccactgcactta

SEQ ID NO: 239706 - DNA, 15 bp, Homo sapiens
tggcccactgcactt

SEQ ID NO: 239707 - DNA, 15 bp, Homo sapiens
atggcccactgcact

SEQ ID NO: 239708 - DNA, 15 bp, Homo sapiens
catggcccactgcac

SEQ ID NO: 239709 - DNA, 15 bp, Homo sapiens
acatggcccactgca

SEQ ID NO: 239710 - DNA, 15 bp, Homo sapiens
cacatggcccactgc

SEQ ID NO: 239711 - DNA, 15 bp, Homo sapiens
ccacatggcccactg

SEQ ID NO: 239712 - DNA, 15 bp, Homo sapiens
accacatggcccact

SEQ ID NO: 239713 - DNA, 15 bp, Homo sapiens
caccacatggcccac

SEQ ID NO: 239714 - DNA, 15 bp, Homo sapiens
tcaccacatggccca

SEQ ID NO: 239715 - DNA, 15 bp, Homo sapiens
gtcaccacatggccc

SEQ ID NO: 239716 - DNA, 15 bp, Homo sapiens
tgtcaccacatggcc

SEQ ID NO: 239717 - DNA, 15 bp, Homo sapiens
gtgtcaccacatggc

SEQ ID NO: 239718 - DNA, 15 bp, Homo sapiens
tgtgtcaccacatgg

SEQ ID NO: 239719 - DNA, 15 bp, Homo sapiens
atgtgtcaccacatg

SEQ ID NO: 239720 - DNA, 15 bp, Homo sapiens
gatgtgtcaccacat

SEQ ID NO: 239721 - DNA, 15 bp, Homo sapiens
agatgtgtcaccaca

SEQ ID NO: 239722 - DNA, 15 bp, Homo sapiens
aagatgtgtcaccac

SEQ ID NO: 239723 - DNA, 15 bp, Homo sapiens
caagatgtgtcacca

SEQ ID NO: 239724 - DNA, 15 bp, Homo sapiens
tcaagatgtgtcacc

SEQ ID NO: 239725 - DNA, 15 bp, Homo sapiens
ctcaagatgtgtcac

SEQ ID NO: 239726 - DNA, 15 bp, Homo sapiens
actcaagatgtgtca

SEQ ID NO: 239727 - DNA, 15 bp, Homo sapiens
cactcaagatgtgtc

SEQ ID NO: 239728 - DNA, 15 bp, Homo sapiens
acactcaagatgtgt

SEQ ID NO: 239729 - DNA, 15 bp, Homo sapiens
gacactcaagatgtg

SEQ ID NO: 239730 - DNA, 15 bp, Homo sapiens
ggacactcaagatgt

SEQ ID NO: 239731 - DNA, 15 bp, Homo sapiens
tggacactcaagatg

SEQ ID NO: 239732 - DNA, 15 bp, Homo sapiens
ctggacactcaagat

SEQ ID NO: 239733 - DNA, 15 bp, Homo sapiens
gctggacactcaaga

SEQ ID NO: 239734 - DNA, 15 bp, Homo sapiens
agctggacactcaag

SEQ ID NO: 239735 - DNA, 15 bp, Homo sapiens
cagctggacactcaa

SEQ ID NO: 239736 - DNA, 15 bp, Homo sapiens
ccagctggacactca

SEQ ID NO: 239737 - DNA, 15 bp, Homo sapiens
tccagctggacactc

SEQ ID NO: 239738 - DNA, 15 bp, Homo sapiens
ctccagctggacact

SEQ ID NO: 239739 - DNA, 15 bp, Homo sapiens
tctccagctggacac

SEQ ID NO: 239740 - DNA, 15 bp, Homo sapiens
ttctccagctggaca

SEQ ID NO: 239741 - DNA, 15 bp, Homo sapiens
gttctccagctggac

SEQ ID NO: 239742 - DNA, 15 bp, Homo sapiens
agttctccagctgga

SEQ ID NO: 239743 - DNA, 15 bp, Homo sapiens
cagttctccagctgg

SEQ ID NO: 239744 - DNA, 15 bp, Homo sapiens
ccagttctccagctg

SEQ ID NO: 239745 - DNA, 15 bp, Homo sapiens
tccagttctccagct

SEQ ID NO: 239746 - DNA, 15 bp, Homo sapiens
ttccagttctccagc

SEQ ID NO: 239747 - DNA, 15 bp, Homo sapiens
cttccagttctccag

SEQ ID NO: 239748 - DNA, 15 bp, Homo sapiens
acttccagttctcca

SEQ ID NO: 239749 - DNA, 15 bp, Homo sapiens
cacttccagttctcc

SEQ ID NO: 239750 - DNA, 15 bp, Homo sapiens
gcacttccagttctc

SEQ ID NO: 239751 - DNA, 15 bp, Homo sapiens
tgcacttccagttct

SEQ ID NO: 239752 - DNA, 15 bp, Homo sapiens
atgcacttccagttc

SEQ ID NO: 239753 - DNA, 15 bp, Homo sapiens
tatgcacttccagtt

SEQ ID NO: 239754 - DNA, 15 bp, Homo sapiens
atatgcacttccagt

SEQ ID NO: 239755 - DNA, 15 bp, Homo sapiens
gatatgcacttccag

SEQ ID NO: 239756 - DNA, 15 bp, Homo sapiens
tgatatgcacttcca

SEQ ID NO: 239757 - DNA, 15 bp, Homo sapiens
atgatatgcacttcc

SEQ ID NO: 239758 - DNA, 15 bp, Homo sapiens
tatgatatgcacttc

SEQ ID NO: 239759 - DNA, 15 bp, Homo sapiens
ttatgatatgcactt

SEQ ID NO: 239760 - DNA, 15 bp, Homo sapiens
gttatgatatgcact

SEQ ID NO: 239761 - DNA, 15 bp, Homo sapiens
tgttatgatatgcac

SEQ ID NO: 239762 - DNA, 15 bp, Homo sapiens
ctgttatgatatgca

SEQ ID NO: 239763 - DNA, 15 bp, Homo sapiens
cctgttatgatatgc

SEQ ID NO: 239764 - DNA, 15 bp, Homo sapiens
ccctgttatgatatg

SEQ ID NO: 239765 - DNA, 15 bp, Homo sapiens
cccctgttatgatat

SEQ ID NO: 239766 - DNA, 15 bp, Homo sapiens
acccctgttatgata

SEQ ID NO: 239767 - DNA, 15 bp, Homo sapiens
cacccctgttatgat

SEQ ID NO: 239768 - DNA, 15 bp, Homo sapiens
ccacccctgttatga

SEQ ID NO: 239769 - DNA, 15 bp, Homo sapiens
tccacccctgttatg

SEQ ID NO: 239770 - DNA, 15 bp, Homo sapiens
ttccacccctgttat

SEQ ID NO: 239771 - DNA, 15 bp, Homo sapiens
tttccacccctgtta

SEQ ID NO: 239772 - DNA, 15 bp, Homo sapiens
ttttccacccctgtt

SEQ ID NO: 239773 - DNA, 15 bp, Homo sapiens
gttttccacccctgt

SEQ ID NO: 239774 - DNA, 15 bp, Homo sapiens
agttttccacccctg

SEQ ID NO: 239775 - DNA, 15 bp, Homo sapiens
gagttttccacccct

SEQ ID NO: 239776 - DNA, 15 bp, Homo sapiens
tgagttttccacccc

SEQ ID NO: 239777 - DNA, 15 bp, Homo sapiens
ctgagttttccaccc

SEQ ID NO: 239778 - DNA, 15 bp, Homo sapiens
tctgagttttccacc

SEQ ID NO: 239779 - DNA, 15 bp, Homo sapiens
ctctgagttttccac

SEQ ID NO: 239780 - DNA, 15 bp, Homo sapiens
cctctgagttttcca

SEQ ID NO: 239781 - DNA, 15 bp, Homo sapiens
acctctgagttttcc

SEQ ID NO: 239782 - DNA, 15 bp, Homo sapiens
aacctctgagttttc

SEQ ID NO: 239783 - DNA, 15 bp, Homo sapiens
caacctctgagtttt

SEQ ID NO: 239784 - DNA, 15 bp, Homo sapiens
tcaacctctgagttt

SEQ ID NO: 239785 - DNA, 15 bp, Homo sapiens
atcaacctctgagtt

SEQ ID NO: 239786 - DNA, 15 bp, Homo sapiens
tatcaacctctgagt

SEQ ID NO: 239787 - DNA, 15 bp, Homo sapiens
ctatcaacctctgag

SEQ ID NO: 239788 - DNA, 15 bp, Homo sapiens
cctatcaacctctga

SEQ ID NO: 239789 - DNA, 15 bp, Homo sapiens
ccctatcaacctctg

SEQ ID NO: 239790 - DNA, 15 bp, Homo sapiens
tccctatcaacctct

SEQ ID NO: 239791 - DNA, 15 bp, Homo sapiens
ttccctatcaacctc

SEQ ID NO: 239792 - DNA, 15 bp, Homo sapiens
attccctatcaacct

SEQ ID NO: 239793 - DNA, 15 bp, Homo sapiens
cattccctatcaacc

SEQ ID NO: 239794 - DNA, 15 bp, Homo sapiens
ccattccctatcaac

SEQ ID NO: 239795 - DNA, 15 bp, Homo sapiens
accattccctatcaa

SEQ ID NO: 239796 - DNA, 15 bp, Homo sapiens
caccattccctatca

SEQ ID NO: 239797 - DNA, 15 bp, Homo sapiens
tcaccattccctatc

SEQ ID NO: 239798 - DNA, 15 bp, Homo sapiens
ctcaccattccctat

SEQ ID NO: 239799 - DNA, 15 bp, Homo sapiens
cctcaccattcccta

SEQ ID NO: 239800 - DNA, 15 bp, Homo sapiens
acctcaccattccct

SEQ ID NO: 239801 - DNA, 15 bp, Homo sapiens
aacctcaccattccc

SEQ ID NO: 239802 - DNA, 15 bp, Homo sapiens
caacctcaccattcc

SEQ ID NO: 239803 - DNA, 15 bp, Homo sapiens
gcaacctcaccattc

SEQ ID NO: 239804 - DNA, 15 bp, Homo sapiens
tgcaacctcaccatt

SEQ ID NO: 239805 - DNA, 15 bp, Homo sapiens
ttgcaacctcaccat

SEQ ID NO: 239806 - DNA, 15 bp, Homo sapiens
attgcaacctcacca

SEQ ID NO: 239807 - DNA, 15 bp, Homo sapiens
cattgcaacctcacc

SEQ ID NO: 239808 - DNA, 15 bp, Homo sapiens
tcattgcaacctcac

SEQ ID NO: 239809 - DNA, 15 bp, Homo sapiens
ctcattgcaacctca

SEQ ID NO: 239810 - DNA, 15 bp, Homo sapiens
cctcattgcaacctc

SEQ ID NO: 239811 - DNA, 15 bp, Homo sapiens
ccctcattgcaacct

SEQ ID NO: 239812 - DNA, 15 bp, Homo sapiens
cccctcattgcaacc

SEQ ID NO: 239813 - DNA, 15 bp, Homo sapiens
tcccctcattgcaac

SEQ ID NO: 239814 - DNA, 15 bp, Homo sapiens
gtcccctcattgcaa

SEQ ID NO: 239815 - DNA, 15 bp, Homo sapiens
ggtcccctcattgca

SEQ ID NO: 239816 - DNA, 15 bp, Homo sapiens
cggtcccctcattgc

SEQ ID NO: 239817 - DNA, 15 bp, Homo sapiens
ccggtcccctcattg

SEQ ID NO: 239818 - DNA, 15 bp, Homo sapiens
accggtcccctcatt

SEQ ID NO: 239819 - DNA, 15 bp, Homo sapiens
caccggtcccctcat

SEQ ID NO: 239820 - DNA, 15 bp, Homo sapiens
ccaccggtcccctca

SEQ ID NO: 239821 - DNA, 15 bp, Homo sapiens
cccaccggtcccctc

SEQ ID NO: 239822 - DNA, 15 bp, Homo sapiens
ccccaccggtcccct

SEQ ID NO: 239823 - DNA, 15 bp, Homo sapiens
tccccaccggtcccc

SEQ ID NO: 239824 - DNA, 15 bp, Homo sapiens
gtccccaccggtccc

SEQ ID NO: 239825 - DNA, 15 bp, Homo sapiens
agtccccaccggtcc

SEQ ID NO: 239826 - DNA, 15 bp, Homo sapiens
aagtccccaccggtc

SEQ ID NO: 239827 - DNA, 15 bp, Homo sapiens
aaagtccccaccggt

SEQ ID NO: 239828 - DNA, 15 bp, Homo sapiens
caaagtccccaccgg

SEQ ID NO: 239829 - DNA, 15 bp, Homo sapiens
tcaaagtccccaccg

SEQ ID NO: 239830 - DNA, 15 bp, Homo sapiens
gtcaaagtccccacc

SEQ ID NO: 239831 - DNA, 15 bp, Homo sapiens
ggtcaaagtccccac

SEQ ID NO: 239832 - DNA, 15 bp, Homo sapiens
tggtcaaagtcccca

SEQ ID NO: 239833 - DNA, 15 bp, Homo sapiens
ctggtcaaagtcccc

SEQ ID NO: 239834 - DNA, 15 bp, Homo sapiens
actggtcaaagtccc

SEQ ID NO: 239835 - DNA, 15 bp, Homo sapiens
cactggtcaaagtcc

SEQ ID NO: 239836 - DNA, 15 bp, Homo sapiens
ccactggtcaaagtc

SEQ ID NO: 239837 - DNA, 15 bp, Homo sapiens
tccactggtcaaagt

SEQ ID NO: 239838 - DNA, 15 bp, Homo sapiens
ctccactggtcaaag

SEQ ID NO: 239839 - DNA, 15 bp, Homo sapiens
gctccactggtcaaa

SEQ ID NO: 239840 - DNA, 15 bp, Homo sapiens
tgctccactggtcaa

SEQ ID NO: 239841 - DNA, 15 bp, Homo sapiens
ttgctccactggtca

SEQ ID NO: 239842 - DNA, 15 bp, Homo sapiens
cttgctccactggtc

SEQ ID NO: 239843 - DNA, 15 bp, Homo sapiens
tcttgctccactggt

SEQ ID NO: 239844 - DNA, 15 bp, Homo sapiens
ctcttgctccactgg

SEQ ID NO: 239845 - DNA, 15 bp, Homo sapiens
actcttgctccactg

SEQ ID NO: 239846 - DNA, 15 bp, Homo sapiens
gactcttgctccact

SEQ ID NO: 239847 - DNA, 15 bp, Homo sapiens
agactcttgctccac

SEQ ID NO: 239848 - DNA, 15 bp, Homo sapiens
aagactcttgctcca

SEQ ID NO: 239849 - DNA, 15 bp, Homo sapiens
aaagactcttgctcc

SEQ ID NO: 239850 - DNA, 15 bp, Homo sapiens
gaaagactcttgctc

SEQ ID NO: 239851 - DNA, 15 bp, Homo sapiens
ggaaagactcttgct

SEQ ID NO: 239852 - DNA, 15 bp, Homo sapiens
tggaaagactcttgc

SEQ ID NO: 239853 - DNA, 15 bp, Homo sapiens
ctggaaagactcttg

SEQ ID NO: 239854 - DNA, 15 bp, Homo sapiens
tctggaaagactctt

SEQ ID NO: 239855 - DNA, 15 bp, Homo sapiens
atctggaaagactct

SEQ ID NO: 239856 - DNA, 15 bp, Homo sapiens
catctggaaagactc

SEQ ID NO: 239857 - DNA, 15 bp, Homo sapiens
tcatctggaaagact

SEQ ID NO: 239858 - DNA, 15 bp, Homo sapiens
ttcatctggaaagac

SEQ ID NO: 239859 - DNA, 15 bp, Homo sapiens
cttcatctggaaaga

SEQ ID NO: 239860 - DNA, 15 bp, Homo sapiens
ccttcatctggaaag

SEQ ID NO: 239861 - DNA, 15 bp, Homo sapiens
cccttcatctggaaa

SEQ ID NO: 239862 - DNA, 15 bp, Homo sapiens
tcccttcatctggaa

SEQ ID NO: 239863 - DNA, 15 bp, Homo sapiens
ctcccttcatctgga

SEQ ID NO: 239864 - DNA, 15 bp, Homo sapiens
gctcccttcatctgg

SEQ ID NO: 239865 - DNA, 15 bp, Homo sapiens
tgctcccttcatctg

SEQ ID NO: 239866 - DNA, 15 bp, Homo sapiens
ctgctcccttcatct

SEQ ID NO: 239867 - DNA, 15 bp, Homo sapiens
gctgctcccttcatc

SEQ ID NO: 239868 - DNA, 15 bp, Homo sapiens
agctgctcccttcat

SEQ ID NO: 239869 - DNA, 15 bp, Homo sapiens
cagctgctcccttca

SEQ ID NO: 239870 - DNA, 15 bp, Homo sapiens
gcagctgctcccttc

SEQ ID NO: 239871 - DNA, 15 bp, Homo sapiens
ggcagctgctccctt

SEQ ID NO: 239872 - DNA, 15 bp, Homo sapiens
aggcagctgctccct

SEQ ID NO: 239873 - DNA, 15 bp, Homo sapiens
gaggcagctgctccc

SEQ ID NO: 239874 - DNA, 15 bp, Homo sapiens
tgaggcagctgctcc

SEQ ID NO: 239875 - DNA, 15 bp, Homo sapiens
gtgaggcagctgctc

SEQ ID NO: 239876 - DNA, 15 bp, Homo sapiens
tgtgaggcagctgct

SEQ ID NO: 239877 - DNA, 15 bp, Homo sapiens
ctgtgaggcagctgc

SEQ ID NO: 239878 - DNA, 15 bp, Homo sapiens
gctgtgaggcagctg

SEQ ID NO: 239879 - DNA, 15 bp, Homo sapiens
agctgtgaggcagct

SEQ ID NO: 239880 - DNA, 15 bp, Homo sapiens
gagctgtgaggcagc

SEQ ID NO: 239881 - DNA, 15 bp, Homo sapiens
agagctgtgaggcag

SEQ ID NO: 239882 - DNA, 15 bp, Homo sapiens
cagagctgtgaggca

SEQ ID NO: 239883 - DNA, 15 bp, Homo sapiens
ccagagctgtgaggc

SEQ ID NO: 239884 - DNA, 15 bp, Homo sapiens
gccagagctgtgagg

SEQ ID NO: 239885 - DNA, 15 bp, Homo sapiens
ggccagagctgtgag

SEQ ID NO: 239886 - DNA, 15 bp, Homo sapiens
tggccagagctgtga

SEQ ID NO: 239887 - DNA, 15 bp, Homo sapiens
ctggccagagctgtg

SEQ ID NO: 239888 - DNA, 15 bp, Homo sapiens
gctggccagagctgt

SEQ ID NO: 239889 - DNA, 15 bp, Homo sapiens
agctggccagagctg

SEQ ID NO: 239890 - DNA, 15 bp, Homo sapiens
cagctggccagagct

SEQ ID NO: 239891 - DNA, 15 bp, Homo sapiens
acagctggccagagc

SEQ ID NO: 239892 - DNA, 15 bp, Homo sapiens
cacagctggccagag

SEQ ID NO: 239893 - DNA, 15 bp, Homo sapiens
ccacagctggccaga

SEQ ID NO: 239894 - DNA, 15 bp, Homo sapiens
tccacagctggccag

SEQ ID NO: 239895 - DNA, 15 bp, Homo sapiens
gtccacagctggcca

SEQ ID NO: 239896 - DNA, 15 bp, Homo sapiens
tgtccacagctggcc

SEQ ID NO: 239897 - DNA, 15 bp, Homo sapiens
atgtccacagctggc

SEQ ID NO: 239898 - DNA, 15 bp, Homo sapiens
aatgtccacagctgg

SEQ ID NO: 239899 - DNA, 15 bp, Homo sapiens
aaatgtccacagctg

SEQ ID NO: 239900 - DNA, 15 bp, Homo sapiens
caaatgtccacagct

SEQ ID NO: 239901 - DNA, 15 bp, Homo sapiens
ccaaatgtccacagc

SEQ ID NO: 239902 - DNA, 15 bp, Homo sapiens
gccaaatgtccacag

SEQ ID NO: 239903 - DNA, 15 bp, Homo sapiens
ggccaaatgtccaca

SEQ ID NO: 239904 - DNA, 15 bp, Homo sapiens
tggccaaatgtccac

SEQ ID NO: 239905 - DNA, 15 bp, Homo sapiens
ctggccaaatgtcca

SEQ ID NO: 239906 - DNA, 15 bp, Homo sapiens
actggccaaatgtcc

SEQ ID NO: 239907 - DNA, 15 bp, Homo sapiens
aactggccaaatgtc

SEQ ID NO: 239908 - DNA, 15 bp, Homo sapiens
aaactggccaaatgt

SEQ ID NO: 239909 - DNA, 15 bp, Homo sapiens
caaactggccaaatg

SEQ ID NO: 239910 - DNA, 15 bp, Homo sapiens
acaaactggccaaat

SEQ ID NO: 239911 - DNA, 15 bp, Homo sapiens
tacaaactggccaaa

SEQ ID NO: 239912 - DNA, 15 bp, Homo sapiens
ttacaaactggccaa

SEQ ID NO: 239913 - DNA, 15 bp, Homo sapiens
attacaaactggcca

SEQ ID NO: 239914 - DNA, 15 bp, Homo sapiens
aattacaaactggcc

SEQ ID NO: 239915 - DNA, 15 bp, Homo sapiens
aaattacaaactggc

SEQ ID NO: 239916 - DNA, 15 bp, Homo sapiens
caaattacaaactgg

SEQ ID NO: 239917 - DNA, 15 bp, Homo sapiens
acaaattacaaactg

SEQ ID NO: 239918 - DNA, 15 bp, Homo sapiens
gacaaattacaaact

SEQ ID NO: 239919 - DNA, 15 bp, Homo sapiens
tgacaaattacaaac

SEQ ID NO: 239920 - DNA, 15 bp, Homo sapiens
ttgacaaattacaaa

SEQ ID NO: 239921 - DNA, 15 bp, Homo sapiens
tttgacaaattacaa

SEQ ID NO: 239922 - DNA, 15 bp, Homo sapiens
ttttgacaaattaca

SEQ ID NO: 239923 - DNA, 15 bp, Homo sapiens
cttttgacaaattac

SEQ ID NO: 239924 - DNA, 15 bp, Homo sapiens
tcttttgacaaatta

SEQ ID NO: 239925 - DNA, 15 bp, Homo sapiens
ttcttttgacaaatt

SEQ ID NO: 239926 - DNA, 15 bp, Homo sapiens
cttcttttgacaaat

SEQ ID NO: 239927 - DNA, 15 bp, Homo sapiens
acttcttttgacaaa

SEQ ID NO: 239928 - DNA, 15 bp, Homo sapiens
gacttcttttgacaa

SEQ ID NO: 239929 - DNA, 15 bp, Homo sapiens
tgacttcttttgaca

SEQ ID NO: 239930 - DNA, 15 bp, Homo sapiens
ctgacttcttttgac

SEQ ID NO: 239931 - DNA, 15 bp, Homo sapiens
tctgacttcttttga

SEQ ID NO: 239932 - DNA, 15 bp, Homo sapiens
ttctgacttcttttg

SEQ ID NO: 239933 - DNA, 15 bp, Homo sapiens
tttctgacttctttt

SEQ ID NO: 239934 - DNA, 15 bp, Homo sapiens
atttctgacttcttt

SEQ ID NO: 239935 - DNA, 15 bp, Homo sapiens
gatttctgacttctt

SEQ ID NO: 239936 - DNA, 15 bp, Homo sapiens
agatttctgacttct

SEQ ID NO: 239937 - DNA, 15 bp, Homo sapiens
cagatttctgacttc

SEQ ID NO: 239938 - DNA, 15 bp, Homo sapiens
gcagatttctgactt

SEQ ID NO: 239939 - DNA, 15 bp, Homo sapiens
tgcagatttctgact

SEQ ID NO: 239940 - DNA, 15 bp, Homo sapiens
atgcagatttctgac

SEQ ID NO: 239941 - DNA, 15 bp, Homo sapiens
aatgcagatttctga

SEQ ID NO: 239942 - DNA, 15 bp, Homo sapiens
caatgcagatttctg

SEQ ID NO: 239943 - DNA, 15 bp, Homo sapiens
acaatgcagatttct

SEQ ID NO: 239944 - DNA, 15 bp, Homo sapiens
aacaatgcagatttc

SEQ ID NO: 239945 - DNA, 15 bp, Homo sapiens
caacaatgcagattt

SEQ ID NO: 239946 - DNA, 15 bp, Homo sapiens
acaacaatgcagatt

SEQ ID NO: 239947 - DNA, 15 bp, Homo sapiens
cacaacaatgcagat

SEQ ID NO: 239948 - DNA, 15 bp, Homo sapiens
tcacaacaatgcaga

SEQ ID NO: 239949 - DNA, 15 bp, Homo sapiens
ttcacaacaatgcag

SEQ ID NO: 239950 - DNA, 15 bp, Homo sapiens
tttcacaacaatgca

SEQ ID NO: 239951 - DNA, 15 bp, Homo sapiens
atttcacaacaatgc

SEQ ID NO: 239952 - DNA, 15 bp, Homo sapiens
gatttcacaacaatg

SEQ ID NO: 239953 - DNA, 15 bp, Homo sapiens
agatttcacaacaat

SEQ ID NO: 239954 - DNA, 15 bp, Homo sapiens
gagatttcacaacaa

SEQ ID NO: 239955 - DNA, 15 bp, Homo sapiens
ggagatttcacaaca

SEQ ID NO: 239956 - DNA, 15 bp, Homo sapiens
tggagatttcacaac

SEQ ID NO: 239957 - DNA, 15 bp, Homo sapiens
ctggagatttcacaa

SEQ ID NO: 239958 - DNA, 15 bp, Homo sapiens
tctggagatttcaca

SEQ ID NO: 239959 - DNA, 15 bp, Homo sapiens
atctggagatttcac

SEQ ID NO: 239960 - DNA, 15 bp, Homo sapiens
aatctggagatttca

SEQ ID NO: 239961 - DNA, 15 bp, Homo sapiens
aaatctggagatttc

SEQ ID NO: 239962 - DNA, 15 bp, Homo sapiens
aaaatctggagattt

SEQ ID NO: 239963 - DNA, 15 bp, Homo sapiens
aaaaatctggagatt

SEQ ID NO: 239964 - DNA, 15 bp, Homo sapiens
aaaaaatctggagat

SEQ ID NO: 239965 - DNA, 15 bp, Homo sapiens
taaaaaatctggaga

SEQ ID NO: 239966 - DNA, 15 bp, Homo sapiens
gtaaaaaatctggag

SEQ ID NO: 239967 - DNA, 15 bp, Homo sapiens
tgtaaaaaatctgga

SEQ ID NO: 239968 - DNA, 15 bp, Homo sapiens
atgtaaaaaatctgg

SEQ ID NO: 239969 - DNA, 15 bp, Homo sapiens
catgtaaaaaatctg

SEQ ID NO: 239970 - DNA, 15 bp, Homo sapiens
acatgtaaaaaatct

SEQ ID NO: 239971 - DNA, 15 bp, Homo sapiens
aacatgtaaaaaatc

SEQ ID NO: 239972 - DNA, 15 bp, Homo sapiens
caacatgtaaaaaat

SEQ ID NO: 239973 - DNA, 15 bp, Homo sapiens
acaacatgtaaaaaa

SEQ ID NO: 239974 - DNA, 15 bp, Homo sapiens
gacaacatgtaaaaa

SEQ ID NO: 239975 - DNA, 15 bp, Homo sapiens
tgacaacatgtaaaa

SEQ ID NO: 239976 - DNA, 15 bp, Homo sapiens
ttgacaacatgtaaa

SEQ ID NO: 239977 - DNA, 15 bp, Homo sapiens
attgacaacatgtaa

SEQ ID NO: 239978 - DNA, 15 bp, Homo sapiens
aattgacaacatgta

SEQ ID NO: 239979 - DNA, 15 bp, Homo sapiens
aaattgacaacatgt

SEQ ID NO: 239980 - DNA, 15 bp, Homo sapiens
taaattgacaacatg

SEQ ID NO: 239981 - DNA, 15 bp, Homo sapiens
ttaaattgacaacat

SEQ ID NO: 239982 - DNA, 15 bp, Homo sapiens
attaaattgacaaca

SEQ ID NO: 239983 - DNA, 15 bp, Homo sapiens
aattaaattgacaac

SEQ ID NO: 239984 - DNA, 15 bp, Homo sapiens
taattaaattgacaa

SEQ ID NO: 239985 - DNA, 15 bp, Homo sapiens
ttaattaaattgaca

SEQ ID NO: 239986 - DNA, 15 bp, Homo sapiens
tttaattaaattgac

SEQ ID NO: 239987 - DNA, 15 bp, Homo sapiens
ttttaattaaattga

SEQ ID NO: 239988 - DNA, 15 bp, Homo sapiens
attttaattaaattg

SEQ ID NO: 239989 - DNA, 15 bp, Homo sapiens
tattttaattaaatt

SEQ ID NO: 239990 - DNA, 15 bp, Homo sapiens
atattttaattaaat

SEQ ID NO: 239991 - DNA, 15 bp, Homo sapiens
aatattttaattaaa

SEQ ID NO: 239992 - DNA, 15 bp, Homo sapiens
taatattttaattaa

SEQ ID NO: 239993 - DNA, 15 bp, Homo sapiens
ttaatattttaatta

SEQ ID NO: 239994 - DNA, 15 bp, Homo sapiens
tttaatattttaatt

SEQ ID NO: 239995 - DNA, 15 bp, Homo sapiens
ttttaatattttaat

SEQ ID NO: 239996 - DNA, 15 bp, Homo sapiens
attttaatattttaa

SEQ ID NO: 239997 - DNA, 15 bp, Homo sapiens
gattttaatatttta

SEQ ID NO: 239998 - DNA, 15 bp, Homo sapiens
tgattttaatatttt

SEQ ID NO: 239999 - DNA, 15 bp, Homo sapiens
ctgattttaatattt

SEQ ID NO: 240000 - DNA, 15 bp, Homo sapiens
gctgattttaatatt

SEQ ID NO: 240001 - DNA, 15 bp, Homo sapiens
ggctgattttaatat

SEQ ID NO: 240002 - DNA, 15 bp, Homo sapiens
gggctgattttaata

SEQ ID NO: 240003 - DNA, 15 bp, Homo sapiens
tgggctgattttaat

SEQ ID NO: 240004 - DNA, 15 bp, Homo sapiens
ctgggctgattttaa

SEQ ID NO: 240005 - DNA, 15 bp, Homo sapiens
cctgggctgatttta

SEQ ID NO: 240006 - DNA, 15 bp, Homo sapiens
ccctgggctgatttt

SEQ ID NO: 240007 - DNA, 15 bp, Homo sapiens
cccctgggctgattt

SEQ ID NO: 240008 - DNA, 15 bp, Homo sapiens
acccctgggctgatt

SEQ ID NO: 240009 - DNA, 15 bp, Homo sapiens
gacccctgggctgat

SEQ ID NO: 240010 - DNA, 15 bp, Homo sapiens
tgacccctgggctga

SEQ ID NO: 240011 - DNA, 15 bp, Homo sapiens
ttgacccctgggctg

SEQ ID NO: 240012 - DNA, 15 bp, Homo sapiens
cttgacccctgggct

SEQ ID NO: 240013 - DNA, 15 bp, Homo sapiens
tcttgacccctgggc

SEQ ID NO: 240014 - DNA, 15 bp, Homo sapiens
gtcttgacccctggg

SEQ ID NO: 240015 - DNA, 15 bp, Homo sapiens
agtcttgacccctgg

SEQ ID NO: 240016 - DNA, 15 bp, Homo sapiens
cagtcttgacccctg

SEQ ID NO: 240017 - DNA, 15 bp, Homo sapiens
gcagtcttgacccct

SEQ ID NO: 240018 - DNA, 15 bp, Homo sapiens
agcagtcttgacccc

SEQ ID NO: 240019 - DNA, 15 bp, Homo sapiens
cagcagtcttgaccc

SEQ ID NO: 240020 - DNA, 15 bp, Homo sapiens
tcagcagtcttgacc

SEQ ID NO: 240021 - DNA, 15 bp, Homo sapiens
gtcagcagtcttgac

SEQ ID NO: 240022 - DNA, 15 bp, Homo sapiens
ggtcagcagtcttga

SEQ ID NO: 240023 - DNA, 15 bp, Homo sapiens
gggtcagcagtcttg

SEQ ID NO: 240024 - DNA, 15 bp, Homo sapiens
tgggtcagcagtctt

SEQ ID NO: 240025 - DNA, 15 bp, Homo sapiens
atgggtcagcagtct

SEQ ID NO: 240026 - DNA, 15 bp, Homo sapiens
catgggtcagcagtc

SEQ ID NO: 240027 - DNA, 15 bp, Homo sapiens
gcatgggtcagcagt

SEQ ID NO: 240028 - DNA, 15 bp, Homo sapiens
tgcatgggtcagcag

SEQ ID NO: 240029 - DNA, 15 bp, Homo sapiens
atgcatgggtcagca

SEQ ID NO: 240030 - DNA, 15 bp, Homo sapiens
catgcatgggtcagc

SEQ ID NO: 240031 - DNA, 15 bp, Homo sapiens
ccatgcatgggtcag

SEQ ID NO: 240032 - DNA, 15 bp, Homo sapiens
cccatgcatgggtca

SEQ ID NO: 240033 - DNA, 15 bp, Homo sapiens
ccccatgcatgggtc

SEQ ID NO: 240034 - DNA, 15 bp, Homo sapiens
gccccatgcatgggt

SEQ ID NO: 240035 - DNA, 15 bp, Homo sapiens
ggccccatgcatggg

SEQ ID NO: 240036 - DNA, 15 bp, Homo sapiens
aggccccatgcatgg

SEQ ID NO: 240037 - DNA, 15 bp, Homo sapiens
caggccccatgcatg

SEQ ID NO: 240038 - DNA, 15 bp, Homo sapiens
ccaggccccatgcat

SEQ ID NO: 240039 - DNA, 15 bp, Homo sapiens
cccaggccccatgca

SEQ ID NO: 240040 - DNA, 15 bp, Homo sapiens
ccccaggccccatgc

SEQ ID NO: 240041 - DNA, 15 bp, Homo sapiens
cccccaggccccatg

SEQ ID NO: 240042 - DNA, 15 bp, Homo sapiens
ccccccaggccccat

SEQ ID NO: 240043 - DNA, 15 bp, Homo sapiens
tccccccaggcccca

SEQ ID NO: 240044 - DNA, 15 bp, Homo sapiens
ttccccccaggcccc

SEQ ID NO: 240045 - DNA, 15 bp, Homo sapiens
tttccccccaggccc

SEQ ID NO: 240046 - DNA, 15 bp, Homo sapiens
gtttccccccaggcc

SEQ ID NO: 240047 - DNA, 15 bp, Homo sapiens
agtttccccccaggc

SEQ ID NO: 240048 - DNA, 15 bp, Homo sapiens
aagtttccccccagg

SEQ ID NO: 240049 - DNA, 15 bp, Homo sapiens
caagtttccccccag

SEQ ID NO: 240050 - DNA, 15 bp, Homo sapiens
acaagtttcccccca

SEQ ID NO: 240051 - DNA, 15 bp, Homo sapiens
cacaagtttcccccc

SEQ ID NO: 240052 - DNA, 15 bp, Homo sapiens
ccacaagtttccccc

SEQ ID NO: 240053 - DNA, 15 bp, Homo sapiens
cccacaagtttcccc

SEQ ID NO: 240054 - DNA, 15 bp, Homo sapiens
ccccacaagtttccc

SEQ ID NO: 240055 - DNA, 15 bp, Homo sapiens
gccccacaagtttcc

SEQ ID NO: 240056 - DNA, 15 bp, Homo sapiens
agccccacaagtttc

SEQ ID NO: 240057 - DNA, 15 bp, Homo sapiens
gagccccacaagttt

SEQ ID NO: 240058 - DNA, 15 bp, Homo sapiens
ggagccccacaagtt

SEQ ID NO: 240059 - DNA, 15 bp, Homo sapiens
tggagccccacaagt

SEQ ID NO: 240060 - DNA, 15 bp, Homo sapiens
ctggagccccacaag

SEQ ID NO: 240061 - DNA, 15 bp, Homo sapiens
gctggagccccacaa

SEQ ID NO: 240062 - DNA, 15 bp, Homo sapiens
agctggagccccaca

SEQ ID NO: 240063 - DNA, 15 bp, Homo sapiens
aagctggagccccac

SEQ ID NO: 240064 - DNA, 15 bp, Homo sapiens
caagctggagcccca

SEQ ID NO: 240065 - DNA, 15 bp, Homo sapiens
acaagctggagcccc

SEQ ID NO: 240066 - DNA, 15 bp, Homo sapiens
cacaagctggagccc

SEQ ID NO: 240067 - DNA, 15 bp, Homo sapiens
ccacaagctggagcc

SEQ ID NO: 240068 - DNA, 15 bp, Homo sapiens
gccacaagctggagc

SEQ ID NO: 240069 - DNA, 15 bp, Homo sapiens
agccacaagctggag

SEQ ID NO: 240070 - DNA, 15 bp, Homo sapiens
aagccacaagctgga

SEQ ID NO: 240071 - DNA, 15 bp, Homo sapiens
gaagccacaagctgg

SEQ ID NO: 240072 - DNA, 15 bp, Homo sapiens
agaagccacaagctg

SEQ ID NO: 240073 - DNA, 15 bp, Homo sapiens
gagaagccacaagct

SEQ ID NO: 240074 - DNA, 15 bp, Homo sapiens
agagaagccacaagc

SEQ ID NO: 240075 - DNA, 15 bp, Homo sapiens
cagagaagccacaag

SEQ ID NO: 240076 - DNA, 15 bp, Homo sapiens
acagagaagccacaa

SEQ ID NO: 240077 - DNA, 15 bp, Homo sapiens
aacagagaagccaca

SEQ ID NO: 240078 - DNA, 15 bp, Homo sapiens
caacagagaagccac

SEQ ID NO: 240079 - DNA, 15 bp, Homo sapiens
ccaacagagaagcca

SEQ ID NO: 240080 - DNA, 15 bp, Homo sapiens
gccaacagagaagcc

SEQ ID NO: 240081 - DNA, 15 bp, Homo sapiens
cgccaacagagaagc

SEQ ID NO: 240082 - DNA, 15 bp, Homo sapiens
ccgccaacagagaag

SEQ ID NO: 240083 - DNA, 15 bp, Homo sapiens
accgccaacagagaa

SEQ ID NO: 240084 - DNA, 15 bp, Homo sapiens
caccgccaacagaga

SEQ ID NO: 240085 - DNA, 15 bp, Homo sapiens
gcaccgccaacagag

SEQ ID NO: 240086 - DNA, 15 bp, Homo sapiens
tgcaccgccaacaga

SEQ ID NO: 240087 - DNA, 15 bp, Homo sapiens
ctgcaccgccaacag

SEQ ID NO: 240088 - DNA, 15 bp, Homo sapiens
gctgcaccgccaaca

SEQ ID NO: 240089 - DNA, 15 bp, Homo sapiens
agctgcaccgccaac

SEQ ID NO: 240090 - DNA, 15 bp, Homo sapiens
cagctgcaccgccaa

SEQ ID NO: 240091 - DNA, 15 bp, Homo sapiens
acagctgcaccgcca

SEQ ID NO: 240092 - DNA, 15 bp, Homo sapiens
aacagctgcaccgcc

SEQ ID NO: 240093 - DNA, 15 bp, Homo sapiens
caacagctgcaccgc

SEQ ID NO: 240094 - DNA, 15 bp, Homo sapiens
tcaacagctgcaccg

SEQ ID NO: 240095 - DNA, 15 bp, Homo sapiens
ttcaacagctgcacc

SEQ ID NO: 240096 - DNA, 15 bp, Homo sapiens
cttcaacagctgcac

SEQ ID NO: 240097 - DNA, 15 bp, Homo sapiens
tcttcaacagctgca

SEQ ID NO: 240098 - DNA, 15 bp, Homo sapiens
atcttcaacagctgc

SEQ ID NO: 240099 - DNA, 15 bp, Homo sapiens
aatcttcaacagctg

SEQ ID NO: 240100 - DNA, 15 bp, Homo sapiens
gaatcttcaacagct

SEQ ID NO: 240101 - DNA, 15 bp, Homo sapiens
ggaatcttcaacagc

SEQ ID NO: 240102 - DNA, 15 bp, Homo sapiens
aggaatcttcaacag

SEQ ID NO: 240103 - DNA, 15 bp, Homo sapiens
taggaatcttcaaca

SEQ ID NO: 240104 - DNA, 15 bp, Homo sapiens
gtaggaatcttcaac

SEQ ID NO: 240105 - DNA, 15 bp, Homo sapiens
tgtaggaatcttcaa

SEQ ID NO: 240106 - DNA, 15 bp, Homo sapiens
gtgtaggaatcttca

SEQ ID NO: 240107 - DNA, 15 bp, Homo sapiens
tgtgtaggaatcttc

SEQ ID NO: 240108 - DNA, 15 bp, Homo sapiens
gtgtgtaggaatctt

SEQ ID NO: 240109 - DNA, 15 bp, Homo sapiens
tgtgtgtaggaatct

SEQ ID NO: 240110 - DNA, 15 bp, Homo sapiens
ctgtgtgtaggaatc

SEQ ID NO: 240111 - DNA, 15 bp, Homo sapiens
cctgtgtgtaggaat

SEQ ID NO: 240112 - DNA, 15 bp, Homo sapiens
acctgtgtgtaggaa

SEQ ID NO: 240113 - DNA, 15 bp, Homo sapiens
cacctgtgtgtagga

SEQ ID NO: 240114 - DNA, 15 bp, Homo sapiens
gcacctgtgtgtagg

SEQ ID NO: 240115 - DNA, 15 bp, Homo sapiens
ggcacctgtgtgtag

SEQ ID NO: 240116 - DNA, 15 bp, Homo sapiens
tggcacctgtgtgta

SEQ ID NO: 240117 - DNA, 15 bp, Homo sapiens
gtggcacctgtgtgt

SEQ ID NO: 240118 - DNA, 15 bp, Homo sapiens
tgtggcacctgtgtg

SEQ ID NO: 240119 - DNA, 15 bp, Homo sapiens
ctgtggcacctgtgt

SEQ ID NO: 240120 - DNA, 15 bp, Homo sapiens
cctgtggcacctgtg

SEQ ID NO: 240121 - DNA, 15 bp, Homo sapiens
ccctgtggcacctgt

SEQ ID NO: 240122 - DNA, 15 bp, Homo sapiens
cccctgtggcacctg

SEQ ID NO: 240123 - DNA, 15 bp, Homo sapiens
tcccctgtggcacct

SEQ ID NO: 240124 - DNA, 15 bp, Homo sapiens
ttcccctgtggcacc

SEQ ID NO: 240125 - DNA, 15 bp, Homo sapiens
cttcccctgtggcac

SEQ ID NO: 240126 - DNA, 15 bp, Homo sapiens
tcttcccctgtggca

SEQ ID NO: 240127 - DNA, 15 bp, Homo sapiens
atcttcccctgtggc

SEQ ID NO: 240128 - DNA, 15 bp, Homo sapiens
catcttcccctgtgg

SEQ ID NO: 240129 - DNA, 15 bp, Homo sapiens
ccatcttcccctgtg

SEQ ID NO: 240130 - DNA, 15 bp, Homo sapiens
gccatcttcccctgt

SEQ ID NO: 240131 - DNA, 15 bp, Homo sapiens
tgccatcttcccctg

SEQ ID NO: 240132 - DNA, 15 bp, Homo sapiens
gtgccatcttcccct

SEQ ID NO: 240133 - DNA, 15 bp, Homo sapiens
tgtgccatcttcccc

SEQ ID NO: 240134 - DNA, 15 bp, Homo sapiens
ctgtgccatcttccc

SEQ ID NO: 240135 - DNA, 15 bp, Homo sapiens
cctgtgccatcttcc

SEQ ID NO: 240136 - DNA, 15 bp, Homo sapiens
tcctgtgccatcttc

SEQ ID NO: 240137 - DNA, 15 bp, Homo sapiens
ttcctgtgccatctt

SEQ ID NO: 240138 - DNA, 15 bp, Homo sapiens
tttcctgtgccatct

SEQ ID NO: 240139 - DNA, 15 bp, Homo sapiens
ctttcctgtgccatc

SEQ ID NO: 240140 - DNA, 15 bp, Homo sapiens
cctttcctgtgccat

SEQ ID NO: 240141 - DNA, 15 bp, Homo sapiens
tcctttcctgtgcca

SEQ ID NO: 240142 - DNA, 15 bp, Homo sapiens
ctcctttcctgtgcc

SEQ ID NO: 240143 - DNA, 15 bp, Homo sapiens
actcctttcctgtgc

SEQ ID NO: 240144 - DNA, 15 bp, Homo sapiens
cactcctttcctgtg

SEQ ID NO: 240145 - DNA, 15 bp, Homo sapiens
acactcctttcctgt

SEQ ID NO: 240146 - DNA, 15 bp, Homo sapiens
cacactcctttcctg

SEQ ID NO: 240147 - DNA, 15 bp, Homo sapiens
ccacactcctttcct

SEQ ID NO: 240148 - DNA, 15 bp, Homo sapiens
tccacactcctttcc

SEQ ID NO: 240149 - DNA, 15 bp, Homo sapiens
gtccacactcctttc

SEQ ID NO: 240150 - DNA, 15 bp, Homo sapiens
ggtccacactccttt

SEQ ID NO: 240151 - DNA, 15 bp, Homo sapiens
aggtccacactcctt

SEQ ID NO: 240152 - DNA, 15 bp, Homo sapiens
caggtccacactcct

SEQ ID NO: 240153 - DNA, 15 bp, Homo sapiens
ccaggtccacactcc

SEQ ID NO: 240154 - DNA, 15 bp, Homo sapiens
tccaggtccacactc

SEQ ID NO: 240155 - DNA, 15 bp, Homo sapiens
ctccaggtccacact

SEQ ID NO: 240156 - DNA, 15 bp, Homo sapiens
tctccaggtccacac

SEQ ID NO: 240157 - DNA, 15 bp, Homo sapiens
ttctccaggtccaca

SEQ ID NO: 240158 - DNA, 15 bp, Homo sapiens
attctccaggtccac

SEQ ID NO: 240159 - DNA, 15 bp, Homo sapiens
gattctccaggtcca

SEQ ID NO: 240160 - DNA, 15 bp, Homo sapiens
tgattctccaggtcc

SEQ ID NO: 240161 - DNA, 15 bp, Homo sapiens
ttgattctccaggtc

SEQ ID NO: 240162 - DNA, 15 bp, Homo sapiens
acttgattctccagg

SEQ ID NO: 240163 - DNA, 15 bp, Homo sapiens
tacttgattctccag

SEQ ID NO: 240164 - DNA, 15 bp, Homo sapiens
ttacttgattctcca

SEQ ID NO: 240165 - DNA, 15 bp, Homo sapiens
cttacttgattctcc

SEQ ID NO: 240166 - DNA, 15 bp, Homo sapiens
ccttacttgattctc

SEQ ID NO: 240167 - DNA, 15 bp, Homo sapiens
tccttacttgattct

SEQ ID NO: 240168 - DNA, 15 bp, Homo sapiens
ctccttacttgattc

SEQ ID NO: 240169 - DNA, 15 bp, Homo sapiens
gctccttacttgatt

SEQ ID NO: 240170 - DNA, 15 bp, Homo sapiens
tgctccttacttgat

SEQ ID NO: 240171 - DNA, 15 bp, Homo sapiens
ctgctccttacttga

SEQ ID NO: 240172 - DNA, 15 bp, Homo sapiens
cctgctccttacttg

SEQ ID NO: 240173 - DNA, 15 bp, Homo sapiens
gcctgctccttactt

SEQ ID NO: 240174 - DNA, 15 bp, Homo sapiens
tgcctgctccttact

SEQ ID NO: 240175 - DNA, 15 bp, Homo sapiens
ctgcctgctccttac

SEQ ID NO: 240176 - DNA, 15 bp, Homo sapiens
gctgcctgctcctta

SEQ ID NO: 240177 - DNA, 15 bp, Homo sapiens
tgctgcctgctcctt

SEQ ID NO: 240178 - DNA, 15 bp, Homo sapiens
ttgctgcctgctcct

SEQ ID NO: 240179 - DNA, 15 bp, Homo sapiens
gttgctgcctgctcc

SEQ ID NO: 240180 - DNA, 15 bp, Homo sapiens
agttgctgcctgctc

SEQ ID NO: 240181 - DNA, 15 bp, Homo sapiens
cagttgctgcctgct

SEQ ID NO: 240182 - DNA, 15 bp, Homo sapiens
tcagttgctgcctgc

SEQ ID NO: 240183 - DNA, 15 bp, Homo sapiens
ctcagttgctgcctg

SEQ ID NO: 240184 - DNA, 15 bp, Homo sapiens
cctcagttgctgcct

SEQ ID NO: 240185 - DNA, 15 bp, Homo sapiens
gcctcagttgctgcc

SEQ ID NO: 240186 - DNA, 15 bp, Homo sapiens
tgcctcagttgctgc

SEQ ID NO: 240187 - DNA, 15 bp, Homo sapiens
ctgcctcagttgctg

SEQ ID NO: 240188 - DNA, 15 bp, Homo sapiens
cctgcctcagttgct

SEQ ID NO: 240189 - DNA, 15 bp, Homo sapiens
ccctgcctcagttgc

SEQ ID NO: 240190 - DNA, 15 bp, Homo sapiens
gccctgcctcagttg

SEQ ID NO: 240191 - DNA, 15 bp, Homo sapiens
ggccctgcctcagtt

SEQ ID NO: 240192 - DNA, 15 bp, Homo sapiens
tggccctgcctcagt

SEQ ID NO: 240193 - DNA, 15 bp, Homo sapiens
atggccctgcctcag

SEQ ID NO: 240194 - DNA, 15 bp, Homo sapiens
tatggccctgcctca

SEQ ID NO: 240195 - DNA, 15 bp, Homo sapiens
atatggccctgcctc

SEQ ID NO: 240196 - DNA, 15 bp, Homo sapiens
catatggccctgcct

SEQ ID NO: 240197 - DNA, 15 bp, Homo sapiens
gcatatggccctgcc

SEQ ID NO: 240198 - DNA, 15 bp, Homo sapiens
tgcatatggccctgc

SEQ ID NO: 240199 - DNA, 15 bp, Homo sapiens
ttgcatatggccctg

SEQ ID NO: 240200 - DNA, 15 bp, Homo sapiens
gttgcatatggccct

SEQ ID NO: 240201 - DNA, 15 bp, Homo sapiens
agttgcatatggccc

SEQ ID NO: 240202 - DNA, 15 bp, Homo sapiens
cagttgcatatggcc

SEQ ID NO: 240203 - DNA, 15 bp, Homo sapiens
acagttgcatatggc

SEQ ID NO: 240204 - DNA, 15 bp, Homo sapiens
cacagttgcatatgg

SEQ ID NO: 240205 - DNA, 15 bp, Homo sapiens
ccacagttgcatatg

SEQ ID NO: 240206 - DNA, 15 bp, Homo sapiens
gccacagttgcatat

SEQ ID NO: 240207 - DNA, 15 bp, Homo sapiens
ggccacagttgcata

SEQ ID NO: 240208 - DNA, 15 bp, Homo sapiens
tggccacagttgcat

SEQ ID NO: 240209 - DNA, 15 bp, Homo sapiens
ctggccacagttgca

SEQ ID NO: 240210 - DNA, 15 bp, Homo sapiens
cctggccacagttgc

SEQ ID NO: 240211 - DNA, 15 bp, Homo sapiens
ccctggccacagttg

SEQ ID NO: 240212 - DNA, 15 bp, Homo sapiens
cccctggccacagtt

SEQ ID NO: 240213 - DNA, 15 bp, Homo sapiens
acccctggccacagt

SEQ ID NO: 240214 - DNA, 15 bp, Homo sapiens
gacccctggccacag

SEQ ID NO: 240215 - DNA, 15 bp, Homo sapiens
tgacccctggccaca

SEQ ID NO: 240216 - DNA, 15 bp, Homo sapiens
gtgacccctggccac

SEQ ID NO: 240217 - DNA, 15 bp, Homo sapiens
tgtgacccctggcca

SEQ ID NO: 240218 - DNA, 15 bp, Homo sapiens
atgtgacccctggcc

SEQ ID NO: 240219 - DNA, 15 bp, Homo sapiens
tatgtgacccctggc

SEQ ID NO: 240220 - DNA, 15 bp, Homo sapiens
atatgtgacccctgg

SEQ ID NO: 240221 - DNA, 15 bp, Homo sapiens
gatatgtgacccctg

SEQ ID NO: 240222 - DNA, 15 bp, Homo sapiens
tgatatgtgacccct

SEQ ID NO: 240223 - DNA, 15 bp, Homo sapiens
atgatatgtgacccc

SEQ ID NO: 240224 - DNA, 15 bp, Homo sapiens
tatgatatgtgaccc

SEQ ID NO: 240225 - DNA, 15 bp, Homo sapiens
gtatgatatgtgacc

SEQ ID NO: 240226 - DNA, 15 bp, Homo sapiens
agtatgatatgtgac

SEQ ID NO: 240227 - DNA, 15 bp, Homo sapiens
cagtatgatatgtga

SEQ ID NO: 240228 - DNA, 15 bp, Homo sapiens
tcagtatgatatgtg

SEQ ID NO: 240229 - DNA, 15 bp, Homo sapiens
ctcagtatgatatgt

SEQ ID NO: 240230 - DNA, 15 bp, Homo sapiens
gctcagtatgatatg

SEQ ID NO: 240231 - DNA, 15 bp, Homo sapiens
tgctcagtatgatat

SEQ ID NO: 240232 - DNA, 15 bp, Homo sapiens
ctgctcagtatgata

SEQ ID NO: 240233 - DNA, 15 bp, Homo sapiens
tctgctcagtatgat

SEQ ID NO: 240234 - DNA, 15 bp, Homo sapiens
ctctgctcagtatga

SEQ ID NO: 240235 - DNA, 15 bp, Homo sapiens
actctgctcagtatg

SEQ ID NO: 240236 - DNA, 15 bp, Homo sapiens
aactctgctcagtat

SEQ ID NO: 240237 - DNA, 15 bp, Homo sapiens
gaactctgctcagta

SEQ ID NO: 240238 - DNA, 15 bp, Homo sapiens
tgaactctgctcagt

SEQ ID NO: 240239 - DNA, 15 bp, Homo sapiens
gtgaactctgctcag

SEQ ID NO: 240240 - DNA, 15 bp, Homo sapiens
ggtgaactctgctca

SEQ ID NO: 240241 - DNA, 15 bp, Homo sapiens
aggtgaactctgctc

SEQ ID NO: 240242 - DNA, 15 bp, Homo sapiens
aaggtgaactctgct

SEQ ID NO: 240243 - DNA, 15 bp, Homo sapiens
caaggtgaactctgc

SEQ ID NO: 240244 - DNA, 15 bp, Homo sapiens
gcaaggtgaactctg

SEQ ID NO: 240245 - DNA, 15 bp, Homo sapiens
ggcaaggtgaactct

SEQ ID NO: 240246 - DNA, 15 bp, Homo sapiens
gggcaaggtgaactc

SEQ ID NO: 240247 - DNA, 15 bp, Homo sapiens
cgggcaaggtgaact

SEQ ID NO: 240248 - DNA, 15 bp, Homo sapiens
tcgggcaaggtgaac

SEQ ID NO: 240249 - DNA, 15 bp, Homo sapiens
ctcgggcaaggtgaa

SEQ ID NO: 240250 - DNA, 15 bp, Homo sapiens
tctcgggcaaggtga

SEQ ID NO: 240251 - DNA, 15 bp, Homo sapiens
ttctcgggcaaggtg

SEQ ID NO: 240252 - DNA, 15 bp, Homo sapiens
gttctcgggcaaggt

SEQ ID NO: 240253 - DNA, 15 bp, Homo sapiens
ggttctcgggcaagg

SEQ ID NO: 240254 - DNA, 15 bp, Homo sapiens
tggttctcgggcaag

SEQ ID NO: 240255 - DNA, 15 bp, Homo sapiens
gtggttctcgggcaa

SEQ ID NO: 240256 - DNA, 15 bp, Homo sapiens
tgtggttctcgggca

SEQ ID NO: 240257 - DNA, 15 bp, Homo sapiens
ttgtggttctcgggc

SEQ ID NO: 240258 - DNA, 15 bp, Homo sapiens
tttgtggttctcggg

SEQ ID NO: 240259 - DNA, 15 bp, Homo sapiens
gtttgtggttctcgg

SEQ ID NO: 240260 - DNA, 15 bp, Homo sapiens
ggtttgtggttctcg

SEQ ID NO: 240261 - DNA, 15 bp, Homo sapiens
gggtttgtggttctc

SEQ ID NO: 240262 - DNA, 15 bp, Homo sapiens
tgggtttgtggttct

SEQ ID NO: 240263 - DNA, 15 bp, Homo sapiens
ctgggtttgtggttc

SEQ ID NO: 240264 - DNA, 15 bp, Homo sapiens
cctgggtttgtggtt

SEQ ID NO: 240265 - DNA, 15 bp, Homo sapiens
tcctgggtttgtggt

SEQ ID NO: 240266 - DNA, 15 bp, Homo sapiens
gtcctgggtttgtgg

SEQ ID NO: 240267 - DNA, 15 bp, Homo sapiens
tgtcctgggtttgtg

SEQ ID NO: 240268 - DNA, 15 bp, Homo sapiens
ttgtcctgggtttgt

SEQ ID NO: 240269 - DNA, 15 bp, Homo sapiens
tttgtcctgggtttg

SEQ ID NO: 240270 - DNA, 15 bp, Homo sapiens
atttgtcctgggttt

SEQ ID NO: 240271 - DNA, 15 bp, Homo sapiens
tatttgtcctgggtt

SEQ ID NO: 240272 - DNA, 15 bp, Homo sapiens
ctatttgtcctgggt

SEQ ID NO: 240273 - DNA, 15 bp, Homo sapiens
tctatttgtcctggg

SEQ ID NO: 240274 - DNA, 15 bp, Homo sapiens
ttctatttgtcctgg

SEQ ID NO: 240275 - DNA, 15 bp, Homo sapiens
cttctatttgtcctg

SEQ ID NO: 240276 - DNA, 15 bp, Homo sapiens
ccttctatttgtcct

SEQ ID NO: 240277 - DNA, 15 bp, Homo sapiens
cccttctatttgtcc

SEQ ID NO: 240278 - DNA, 15 bp, Homo sapiens
tcccttctatttgtc

SEQ ID NO: 240279 - DNA, 15 bp, Homo sapiens
ttcccttctatttgt

SEQ ID NO: 240280 - DNA, 15 bp, Homo sapiens
tttcccttctatttg

SEQ ID NO: 240281 - DNA, 15 bp, Homo sapiens
gtttcccttctattt

SEQ ID NO: 240282 - DNA, 15 bp, Homo sapiens
tgtttcccttctatt

SEQ ID NO: 240283 - DNA, 15 bp, Homo sapiens
ttgtttcccttctat

SEQ ID NO: 240284 - DNA, 15 bp, Homo sapiens
tttgtttcccttcta

SEQ ID NO: 240285 - DNA, 15 bp, Homo sapiens
ttttgtttcccttct

SEQ ID NO: 240286 - DNA, 15 bp, Homo sapiens
attttgtttcccttc

SEQ ID NO: 240287 - DNA, 15 bp, Homo sapiens
tattttgtttccctt

SEQ ID NO: 240288 - DNA, 15 bp, Homo sapiens
ttattttgtttccct

SEQ ID NO: 240289 - DNA, 15 bp, Homo sapiens
tttattttgtttccc

SEQ ID NO: 240290 - DNA, 15 bp, Homo sapiens
ctttattttgtttcc

SEQ ID NO: 240291 - DNA, 15 bp, Homo sapiens
cctttattttgtttc

SEQ ID NO: 240292 - DNA, 15 bp, Homo sapiens
tcctttattttgttt

SEQ ID NO: 240293 - DNA, 15 bp, Homo sapiens
ttcctttattttgtt

SEQ ID NO: 240294 - DNA, 15 bp, Homo sapiens
tttcctttattttgt

SEQ ID NO: 240295 - DNA, 15 bp, Homo sapiens
ctttcctttattttg

SEQ ID NO: 240296 - DNA, 15 bp, Homo sapiens
cctttcctttatttt

SEQ ID NO: 240297 - DNA, 15 bp, Homo sapiens
ccctttcctttattt

SEQ ID NO: 240298 - DNA, 15 bp, Homo sapiens
tccctttcctttatt

SEQ ID NO: 240299 - DNA, 15 bp, Homo sapiens
ctccctttcctttat

SEQ ID NO: 240300 - DNA, 15 bp, Homo sapiens
gctccctttccttta

SEQ ID NO: 240301 - DNA, 15 bp, Homo sapiens
ggctccctttccttt

SEQ ID NO: 240302 - DNA, 15 bp, Homo sapiens
tggctccctttcctt

SEQ ID NO: 240303 - DNA, 15 bp, Homo sapiens
ctggctccctttcct

SEQ ID NO: 240304 - DNA, 15 bp, Homo sapiens
gctggctccctttcc

SEQ ID NO: 240305 - DNA, 15 bp, Homo sapiens
cgctggctccctttc

SEQ ID NO: 240306 - DNA, 15 bp, Homo sapiens
acgctggctcccttt

SEQ ID NO: 240307 - DNA, 15 bp, Homo sapiens
cacgctggctccctt

SEQ ID NO: 240308 - DNA, 15 bp, Homo sapiens
acacgctggctccct

SEQ ID NO: 240309 - DNA, 15 bp, Homo sapiens
gacacgctggctccc

SEQ ID NO: 240310 - DNA, 15 bp, Homo sapiens
agacacgctggctcc

SEQ ID NO: 240311 - DNA, 15 bp, Homo sapiens
gagacacgctggctc

SEQ ID NO: 240312 - DNA, 15 bp, Homo sapiens
cgagacacgctggct

SEQ ID NO: 240313 - DNA, 15 bp, Homo sapiens
acgagacacgctggc

SEQ ID NO: 240314 - DNA, 15 bp, Homo sapiens
aacgagacacgctgg

SEQ ID NO: 240315 - DNA, 15 bp, Homo sapiens
gaacgagacacgctg

SEQ ID NO: 240316 - DNA, 15 bp, Homo sapiens
tgaacgagacacgct

SEQ ID NO: 240317 - DNA, 15 bp, Homo sapiens
ctgaacgagacacgc

SEQ ID NO: 240318 - DNA, 15 bp, Homo sapiens
actgaacgagacacg

SEQ ID NO: 240319 - DNA, 15 bp, Homo sapiens
cactgaacgagacac

SEQ ID NO: 240320 - DNA, 15 bp, Homo sapiens
acactgaacgagaca

SEQ ID NO: 240321 - DNA, 15 bp, Homo sapiens
aacactgaacgagac

SEQ ID NO: 240322 - DNA, 15 bp, Homo sapiens
caacactgaacgaga

SEQ ID NO: 240323 - DNA, 15 bp, Homo sapiens
ccaacactgaacgag

SEQ ID NO: 240324 - DNA, 15 bp, Homo sapiens
cccaacactgaacga

SEQ ID NO: 240325 - DNA, 15 bp, Homo sapiens
acccaacactgaacg

SEQ ID NO: 240326 - DNA, 15 bp, Homo sapiens
tacccaacactgaac

SEQ ID NO: 240327 - DNA, 15 bp, Homo sapiens
ttacccaacactgaa

SEQ ID NO: 240328 - DNA, 15 bp, Homo sapiens
cttacccaacactga

SEQ ID NO: 240329 - DNA, 15 bp, Homo sapiens
acttacccaacactg

SEQ ID NO: 240330 - DNA, 15 bp, Homo sapiens
tacttacccaacact

SEQ ID NO: 240331 - DNA, 15 bp, Homo sapiens
ctacttacccaacac

SEQ ID NO: 240332 - DNA, 15 bp, Homo sapiens
actacttacccaaca

SEQ ID NO: 240333 - DNA, 15 bp, Homo sapiens
tactacttacccaac

SEQ ID NO: 240334 - DNA, 15 bp, Homo sapiens
atactacttacccaa

SEQ ID NO: 240335 - DNA, 15 bp, Homo sapiens
catactacttaccca

SEQ ID NO: 240336 - DNA, 15 bp, Homo sapiens
tcatactacttaccc

SEQ ID NO: 240337 - DNA, 15 bp, Homo sapiens
ttcatactacttacc

SEQ ID NO: 240338 - DNA, 15 bp, Homo sapiens
attcatactacttac

SEQ ID NO: 240339 - DNA, 15 bp, Homo sapiens
aattcatactactta

SEQ ID NO: 240340 - DNA, 15 bp, Homo sapiens
aaattcatactactt

SEQ ID NO: 240341 - DNA, 15 bp, Homo sapiens
caaattcatactact

SEQ ID NO: 240342 - DNA, 15 bp, Homo sapiens
ccaaattcatactac

SEQ ID NO: 240343 - DNA, 15 bp, Homo sapiens
accaaattcatacta

SEQ ID NO: 240344 - DNA, 15 bp, Homo sapiens
aaccaaattcatact

SEQ ID NO: 240345 - DNA, 15 bp, Homo sapiens
aaaccaaattcatac

SEQ ID NO: 240346 - DNA, 15 bp, Homo sapiens
caaaccaaattcata

SEQ ID NO: 240347 - DNA, 15 bp, Homo sapiens
acaaaccaaattcat

SEQ ID NO: 240348 - DNA, 15 bp, Homo sapiens
aacaaaccaaattca

SEQ ID NO: 240349 - DNA, 15 bp, Homo sapiens
aaacaaaccaaattc

SEQ ID NO: 240350 - DNA, 15 bp, Homo sapiens
aaaacaaaccaaatt

SEQ ID NO: 240351 - DNA, 15 bp, Homo sapiens
gaaaacaaaccaaat

SEQ ID NO: 240352 - DNA, 15 bp, Homo sapiens
ggaaaacaaaccaaa

SEQ ID NO: 240353 - DNA, 15 bp, Homo sapiens
aggaaaacaaaccaa

SEQ ID NO: 240354 - DNA, 15 bp, Homo sapiens
caggaaaacaaacca

SEQ ID NO: 240355 - DNA, 15 bp, Homo sapiens
ccaggaaaacaaacc

SEQ ID NO: 240356 - DNA, 15 bp, Homo sapiens
gccaggaaaacaaac

SEQ ID NO: 240357 - DNA, 15 bp, Homo sapiens
agccaggaaaacaaa

SEQ ID NO: 240358 - DNA, 15 bp, Homo sapiens
cagccaggaaaacaa

SEQ ID NO: 240359 - DNA, 15 bp, Homo sapiens
acagccaggaaaaca

SEQ ID NO: 240360 - DNA, 15 bp, Homo sapiens
gacagccaggaaaac

SEQ ID NO: 240361 - DNA, 15 bp, Homo sapiens
agacagccaggaaaa

SEQ ID NO: 240362 - DNA, 15 bp, Homo sapiens
aagacagccaggaaa

SEQ ID NO: 240363 - DNA, 15 bp, Homo sapiens
aaagacagccaggaa

SEQ ID NO: 240364 - DNA, 15 bp, Homo sapiens
taaagacagccagga

SEQ ID NO: 240365 - DNA, 15 bp, Homo sapiens
ttaaagacagccagg

SEQ ID NO: 240366 - DNA, 15 bp, Homo sapiens
tttaaagacagccag

SEQ ID NO: 240367 - DNA, 15 bp, Homo sapiens
ctttaaagacagcca

SEQ ID NO: 240368 - DNA, 15 bp, Homo sapiens
tctttaaagacagcc

SEQ ID NO: 240369 - DNA, 15 bp, Homo sapiens
ttctttaaagacagc

SEQ ID NO: 240370 - DNA, 15 bp, Homo sapiens
gttctttaaagacag

SEQ ID NO: 240371 - DNA, 15 bp, Homo sapiens
cgttctttaaagaca

SEQ ID NO: 240372 - DNA, 15 bp, Homo sapiens
gcgttctttaaagac

SEQ ID NO: 240373 - DNA, 15 bp, Homo sapiens
agcgttctttaaaga

SEQ ID NO: 240374 - DNA, 15 bp, Homo sapiens
cagcgttctttaaag

SEQ ID NO: 240375 - DNA, 15 bp, Homo sapiens
ccagcgttctttaaa

SEQ ID NO: 240376 - DNA, 15 bp, Homo sapiens
cccagcgttctttaa

SEQ ID NO: 240377 - DNA, 15 bp, Homo sapiens
gcccagcgttcttta

SEQ ID NO: 240378 - DNA, 15 bp, Homo sapiens
cgcccagcgttcttt

SEQ ID NO: 240379 - DNA, 15 bp, Homo sapiens
ccgcccagcgttctt

SEQ ID NO: 240380 - DNA, 15 bp, Homo sapiens
accgcccagcgttct

SEQ ID NO: 240381 - DNA, 15 bp, Homo sapiens
caccgcccagcgttc

SEQ ID NO: 240382 - DNA, 15 bp, Homo sapiens
gcaccgcccagcgtt

SEQ ID NO: 240383 - DNA, 15 bp, Homo sapiens
agcaccgcccagcgt

SEQ ID NO: 240384 - DNA, 15 bp, Homo sapiens
tagcaccgcccagcg

SEQ ID NO: 240385 - DNA, 15 bp, Homo sapiens
ctagcaccgcccagc

SEQ ID NO: 240386 - DNA, 15 bp, Homo sapiens
gctagcaccgcccag

SEQ ID NO: 240387 - DNA, 15 bp, Homo sapiens
ggctagcaccgccca

SEQ ID NO: 240388 - DNA, 15 bp, Homo sapiens
aggctagcaccgccc

SEQ ID NO: 240389 - DNA, 15 bp, Homo sapiens
caggctagcaccgcc

SEQ ID NO: 240390 - DNA, 15 bp, Homo sapiens
acaggctagcaccgc

SEQ ID NO: 240391 - DNA, 15 bp, Homo sapiens
tacaggctagcaccg

SEQ ID NO: 240392 - DNA, 15 bp, Homo sapiens
atacaggctagcacc

SEQ ID NO: 240393 - DNA, 15 bp, Homo sapiens
aatacaggctagcac

SEQ ID NO: 240394 - DNA, 15 bp, Homo sapiens
aaatacaggctagca

SEQ ID NO: 240395 - DNA, 15 bp, Homo sapiens
gaaatacaggctagc

SEQ ID NO: 240396 - DNA, 15 bp, Homo sapiens
agaaatacaggctag

SEQ ID NO: 240397 - DNA, 15 bp, Homo sapiens
cagaaatacaggcta

SEQ ID NO: 240398 - DNA, 15 bp, Homo sapiens
tcagaaatacaggct

SEQ ID NO: 240399 - DNA, 15 bp, Homo sapiens
atcagaaatacaggc

SEQ ID NO: 240400 - DNA, 15 bp, Homo sapiens
catcagaaatacagg

SEQ ID NO: 240401 - DNA, 15 bp, Homo sapiens
tcatcagaaatacag

SEQ ID NO: 240402 - DNA, 15 bp, Homo sapiens
ctcatcagaaataca

SEQ ID NO: 240403 - DNA, 15 bp, Homo sapiens
tctcatcagaaatac

SEQ ID NO: 240404 - DNA, 15 bp, Homo sapiens
ctctcatcagaaata

SEQ ID NO: 240405 - DNA, 15 bp, Homo sapiens
cctctcatcagaaat

SEQ ID NO: 240406 - DNA, 15 bp, Homo sapiens
tcctctcatcagaaa

SEQ ID NO: 240407 - DNA, 15 bp, Homo sapiens
ttcctctcatcagaa

SEQ ID NO: 240408 - DNA, 15 bp, Homo sapiens
cttcctctcatcaga

SEQ ID NO: 240409 - DNA, 15 bp, Homo sapiens
ccttcctctcatcag

SEQ ID NO: 240410 - DNA, 15 bp, Homo sapiens
cccttcctctcatca

SEQ ID NO: 240411 - DNA, 15 bp, Homo sapiens
ccccttcctctcatc

SEQ ID NO: 240412 - DNA, 15 bp, Homo sapiens
tccccttcctctcat

SEQ ID NO: 240413 - DNA, 15 bp, Homo sapiens
atccccttcctctca

SEQ ID NO: 240414 - DNA, 15 bp, Homo sapiens
aatccccttcctctc

SEQ ID NO: 240415 - DNA, 15 bp, Homo sapiens
aaatccccttcctct

SEQ ID NO: 240416 - DNA, 15 bp, Homo sapiens
taaatccccttcctc

SEQ ID NO: 240417 - DNA, 15 bp, Homo sapiens
ttaaatccccttcct

SEQ ID NO: 240418 - DNA, 15 bp, Homo sapiens
gttaaatccccttcc

SEQ ID NO: 240419 - DNA, 15 bp, Homo sapiens
ggttaaatccccttc

SEQ ID NO: 240420 - DNA, 15 bp, Homo sapiens
aggttaaatcccctt

SEQ ID NO: 240421 - DNA, 15 bp, Homo sapiens
caggttaaatcccct

SEQ ID NO: 240422 - DNA, 15 bp, Homo sapiens
acaggttaaatcccc

SEQ ID NO: 240423 - DNA, 15 bp, Homo sapiens
cacaggttaaatccc

SEQ ID NO: 240424 - DNA, 15 bp, Homo sapiens
ccacaggttaaatcc

SEQ ID NO: 240425 - DNA, 15 bp, Homo sapiens
accacaggttaaatc

SEQ ID NO: 240426 - DNA, 15 bp, Homo sapiens
aaccacaggttaaat

SEQ ID NO: 240427 - DNA, 15 bp, Homo sapiens
gaaccacaggttaaa

SEQ ID NO: 240428 - DNA, 15 bp, Homo sapiens
tgaaccacaggttaa

SEQ ID NO: 240429 - DNA, 15 bp, Homo sapiens
ttgaaccacaggtta

SEQ ID NO: 240430 - DNA, 15 bp, Homo sapiens
cttgaaccacaggtt

SEQ ID NO: 240431 - DNA, 15 bp, Homo sapiens
acttgaaccacaggt

SEQ ID NO: 240432 - DNA, 15 bp, Homo sapiens
cacttgaaccacagg

SEQ ID NO: 240433 - DNA, 15 bp, Homo sapiens
gcacttgaaccacag

SEQ ID NO: 240434 - DNA, 15 bp, Homo sapiens
tgcacttgaaccaca

SEQ ID NO: 240435 - DNA, 15 bp, Homo sapiens
gtgcacttgaaccac

SEQ ID NO: 240436 - DNA, 15 bp, Homo sapiens
agtgcacttgaacca

SEQ ID NO: 240437 - DNA, 15 bp, Homo sapiens
aagtgcacttgaacc

SEQ ID NO: 240438 - DNA, 15 bp, Homo sapiens
taagtgcacttgaac

SEQ ID NO: 240439 - DNA, 15 bp, Homo sapiens
ataagtgcacttgaa

SEQ ID NO: 240440 - DNA, 15 bp, Homo sapiens
aataagtgcacttga

SEQ ID NO: 240441 - DNA, 15 bp, Homo sapiens
aaataagtgcacttg

SEQ ID NO: 240442 - DNA, 15 bp, Homo sapiens
caaataagtgcactt

SEQ ID NO: 240443 - DNA, 15 bp, Homo sapiens
ccaaataagtgcact

SEQ ID NO: 240444 - DNA, 15 bp, Homo sapiens
tccaaataagtgcac

SEQ ID NO: 240445 - DNA, 15 bp, Homo sapiens
atccaaataagtgca

SEQ ID NO: 240446 - DNA, 15 bp, Homo sapiens
tatccaaataagtgc

SEQ ID NO: 240447 - DNA, 15 bp, Homo sapiens
ctatccaaataagtg

SEQ ID NO: 240448 - DNA, 15 bp, Homo sapiens
gctatccaaataagt

SEQ ID NO: 240449 - DNA, 15 bp, Homo sapiens
agctatccaaataag

SEQ ID NO: 240450 - DNA, 15 bp, Homo sapiens
gagctatccaaataa

SEQ ID NO: 240451 - DNA, 15 bp, Homo sapiens
tgagctatccaaata

SEQ ID NO: 240452 - DNA, 15 bp, Homo sapiens
ctgagctatccaaat

SEQ ID NO: 240453 - DNA, 15 bp, Homo sapiens
tctgagctatccaaa

SEQ ID NO: 240454 - DNA, 15 bp, Homo sapiens
ctctgagctatccaa

SEQ ID NO: 240455 - DNA, 15 bp, Homo sapiens
actctgagctatcca

SEQ ID NO: 240456 - DNA, 15 bp, Homo sapiens
gactctgagctatcc

SEQ ID NO: 240457 - DNA, 15 bp, Homo sapiens
agactctgagctatc

SEQ ID NO: 240458 - DNA, 15 bp, Homo sapiens
aagactctgagctat

SEQ ID NO: 240459 - DNA, 15 bp, Homo sapiens
gaagactctgagcta

SEQ ID NO: 240460 - DNA, 15 bp, Homo sapiens
tgaagactctgagct

SEQ ID NO: 240461 - DNA, 15 bp, Homo sapiens
atgaagactctgagc

SEQ ID NO: 240462 - DNA, 15 bp, Homo sapiens
tatgaagactctgag

SEQ ID NO: 240463 - DNA, 15 bp, Homo sapiens
atatgaagactctga

SEQ ID NO: 240464 - DNA, 15 bp, Homo sapiens
catatgaagactctg

SEQ ID NO: 240465 - DNA, 15 bp, Homo sapiens
ccatatgaagactct

SEQ ID NO: 240466 - DNA, 15 bp, Homo sapiens
accatatgaagactc

SEQ ID NO: 240467 - DNA, 15 bp, Homo sapiens
caccatatgaagact

SEQ ID NO: 240468 - DNA, 15 bp, Homo sapiens
acaccatatgaagac

SEQ ID NO: 240469 - DNA, 15 bp, Homo sapiens
aacaccatatgaaga

SEQ ID NO: 240470 - DNA, 15 bp, Homo sapiens
caacaccatatgaag

SEQ ID NO: 240471 - DNA, 15 bp, Homo sapiens
acaacaccatatgaa

SEQ ID NO: 240472 - DNA, 15 bp, Homo sapiens
aacaacaccatatga

SEQ ID NO: 240473 - DNA, 15 bp, Homo sapiens
caacaacaccatatg

SEQ ID NO: 240474 - DNA, 15 bp, Homo sapiens
acaacaacaccatat

SEQ ID NO: 240475 - DNA, 15 bp, Homo sapiens
cacaacaacaccata

SEQ ID NO: 240476 - DNA, 15 bp, Homo sapiens
gcacaacaacaccat

SEQ ID NO: 240477 - DNA, 15 bp, Homo sapiens
tgcacaacaacacca

SEQ ID NO: 240478 - DNA, 15 bp, Homo sapiens
ttgcacaacaacacc

SEQ ID NO: 240479 - DNA, 15 bp, Homo sapiens
tttgcacaacaacac

SEQ ID NO: 240480 - DNA, 15 bp, Homo sapiens
ctttgcacaacaaca

SEQ ID NO: 240481 - DNA, 15 bp, Homo sapiens
tctttgcacaacaac

SEQ ID NO: 240482 - DNA, 15 bp, Homo sapiens
ctctttgcacaacaa

SEQ ID NO: 240483 - DNA, 15 bp, Homo sapiens
gctctttgcacaaca

SEQ ID NO: 240484 - DNA, 15 bp, Homo sapiens
tgctctttgcacaac

SEQ ID NO: 240485 - DNA, 15 bp, Homo sapiens
gtgctctttgcacaa

SEQ ID NO: 240486 - DNA, 15 bp, Homo sapiens
agtgctctttgcaca

SEQ ID NO: 240487 - DNA, 15 bp, Homo sapiens
cagtgctctttgcac

SEQ ID NO: 240488 - DNA, 15 bp, Homo sapiens
ccagtgctctttgca

SEQ ID NO: 240489 - DNA, 15 bp, Homo sapiens
tccagtgctctttgc

SEQ ID NO: 240490 - DNA, 15 bp, Homo sapiens
gtccagtgctctttg

SEQ ID NO: 240491 - DNA, 15 bp, Homo sapiens
agtccagtgctcttt

SEQ ID NO: 240492 - DNA, 15 bp, Homo sapiens
tagtccagtgctctt

SEQ ID NO: 240493 - DNA, 15 bp, Homo sapiens
ctagtccagtgctct

SEQ ID NO: 240494 - DNA, 15 bp, Homo sapiens
tctagtccagtgctc

SEQ ID NO: 240495 - DNA, 15 bp, Homo sapiens
ttctagtccagtgct

SEQ ID NO: 240496 - DNA, 15 bp, Homo sapiens
cttctagtccagtgc

SEQ ID NO: 240497 - DNA, 15 bp, Homo sapiens
acttctagtccagtg

SEQ ID NO: 240498 - DNA, 15 bp, Homo sapiens
aacttctagtccagt

SEQ ID NO: 240499 - DNA, 15 bp, Homo sapiens
caacttctagtccag

SEQ ID NO: 240500 - DNA, 15 bp, Homo sapiens
ccaacttctagtcca

SEQ ID NO: 240501 - DNA, 15 bp, Homo sapiens
cccaacttctagtcc

SEQ ID NO: 240502 - DNA, 15 bp, Homo sapiens
tcccaacttctagtc

SEQ ID NO: 240503 - DNA, 15 bp, Homo sapiens
ctcccaacttctagt

SEQ ID NO: 240504 - DNA, 15 bp, Homo sapiens
tctcccaacttctag

SEQ ID NO: 240505 - DNA, 15 bp, Homo sapiens
gtctcccaacttcta

SEQ ID NO: 240506 - DNA, 15 bp, Homo sapiens
ggtctcccaacttct

SEQ ID NO: 240507 - DNA, 15 bp, Homo sapiens
aggtctcccaacttc

SEQ ID NO: 240508 - DNA, 15 bp, Homo sapiens
caggtctcccaactt

SEQ ID NO: 240509 - DNA, 15 bp, Homo sapiens
ccaggtctcccaact

SEQ ID NO: 240510 - DNA, 15 bp, Homo sapiens
tccaggtctcccaac

SEQ ID NO: 240511 - DNA, 15 bp, Homo sapiens
atccaggtctcccaa

SEQ ID NO: 240512 - DNA, 15 bp, Homo sapiens
aatccaggtctccca

SEQ ID NO: 240513 - DNA, 15 bp, Homo sapiens
taatccaggtctccc

SEQ ID NO: 240514 - DNA, 15 bp, Homo sapiens
gtaatccaggtctcc

SEQ ID NO: 240515 - DNA, 15 bp, Homo sapiens
tgtaatccaggtctc

SEQ ID NO: 240516 - DNA, 15 bp, Homo sapiens
ctgtaatccaggtct

SEQ ID NO: 240517 - DNA, 15 bp, Homo sapiens
cctgtaatccaggtc

SEQ ID NO: 240518 - DNA, 15 bp, Homo sapiens
tcctgtaatccaggt

SEQ ID NO: 240519 - DNA, 15 bp, Homo sapiens
ttcctgtaatccagg

SEQ ID NO: 240520 - DNA, 15 bp, Homo sapiens
attcctgtaatccag

SEQ ID NO: 240521 - DNA, 15 bp, Homo sapiens
cattcctgtaatcca

SEQ ID NO: 240522 - DNA, 15 bp, Homo sapiens
tcattcctgtaatcc

SEQ ID NO: 240523 - DNA, 15 bp, Homo sapiens
gtcattcctgtaatc

SEQ ID NO: 240524 - DNA, 15 bp, Homo sapiens
agtcattcctgtaat

SEQ ID NO: 240525 - DNA, 15 bp, Homo sapiens
cagtcattcctgtaa

SEQ ID NO: 240526 - DNA, 15 bp, Homo sapiens
ccagtcattcctgta

SEQ ID NO: 240527 - DNA, 15 bp, Homo sapiens
accagtcattcctgt

SEQ ID NO: 240528 - DNA, 15 bp, Homo sapiens
caccagtcattcctg

SEQ ID NO: 240529 - DNA, 15 bp, Homo sapiens
acaccagtcattcct

SEQ ID NO: 240530 - DNA, 15 bp, Homo sapiens
aacaccagtcattcc

SEQ ID NO: 240531 - DNA, 15 bp, Homo sapiens
taacaccagtcattc

SEQ ID NO: 240532 - DNA, 15 bp, Homo sapiens
ctaacaccagtcatt

SEQ ID NO: 240533 - DNA, 15 bp, Homo sapiens
gctaacaccagtcat

SEQ ID NO: 240534 - DNA, 15 bp, Homo sapiens
agctaacaccagtca

SEQ ID NO: 240535 - DNA, 15 bp, Homo sapiens
cagctaacaccagtc

SEQ ID NO: 240536 - DNA, 15 bp, Homo sapiens
tcagctaacaccagt

SEQ ID NO: 240537 - DNA, 15 bp, Homo sapiens
ctcagctaacaccag

SEQ ID NO: 240538 - DNA, 15 bp, Homo sapiens
actcagctaacacca

SEQ ID NO: 240539 - DNA, 15 bp, Homo sapiens
cactcagctaacacc

SEQ ID NO: 240540 - DNA, 15 bp, Homo sapiens
gcactcagctaacac

SEQ ID NO: 240541 - DNA, 15 bp, Homo sapiens
ggcactcagctaaca

SEQ ID NO: 240542 - DNA, 15 bp, Homo sapiens
gggcactcagctaac

SEQ ID NO: 240543 - DNA, 15 bp, Homo sapiens
ggggcactcagctaa

SEQ ID NO: 240544 - DNA, 15 bp, Homo sapiens
tggggcactcagcta

SEQ ID NO: 240545 - DNA, 15 bp, Homo sapiens
gtggggcactcagct

SEQ ID NO: 240546 - DNA, 15 bp, Homo sapiens
agtggggcactcagc

SEQ ID NO: 240547 - DNA, 15 bp, Homo sapiens
cagtggggcactcag

SEQ ID NO: 240548 - DNA, 15 bp, Homo sapiens
acagtggggcactca

SEQ ID NO: 240549 - DNA, 15 bp, Homo sapiens
cacagtggggcactc

SEQ ID NO: 240550 - DNA, 15 bp, Homo sapiens
acacagtggggcact

SEQ ID NO: 240551 - DNA, 15 bp, Homo sapiens
tacacagtggggcac

SEQ ID NO: 240552 - DNA, 15 bp, Homo sapiens
atacacagtggggca

SEQ ID NO: 240553 - DNA, 15 bp, Homo sapiens
gatacacagtggggc

SEQ ID NO: 240554 - DNA, 15 bp, Homo sapiens
tgatacacagtgggg

SEQ ID NO: 240555 - DNA, 15 bp, Homo sapiens
ctgatacacagtggg

SEQ ID NO: 240556 - DNA, 15 bp, Homo sapiens
cctgatacacagtgg

SEQ ID NO: 240557 - DNA, 15 bp, Homo sapiens
acctgatacacagtg

SEQ ID NO: 240558 - DNA, 15 bp, Homo sapiens
tacctgatacacagt

SEQ ID NO: 240559 - DNA, 15 bp, Homo sapiens
atacctgatacacag

SEQ ID NO: 240560 - DNA, 15 bp, Homo sapiens
aatacctgatacaca

SEQ ID NO: 240561 - DNA, 15 bp, Homo sapiens
aaatacctgatacac

SEQ ID NO: 240562 - DNA, 15 bp, Homo sapiens
aaaatacctgataca

SEQ ID NO: 240563 - DNA, 15 bp, Homo sapiens
caaaatacctgatac

SEQ ID NO: 240564 - DNA, 15 bp, Homo sapiens
acaaaatacctgata

SEQ ID NO: 240565 - DNA, 15 bp, Homo sapiens
cacaaaatacctgat

SEQ ID NO: 240566 - DNA, 15 bp, Homo sapiens
gcacaaaatacctga

SEQ ID NO: 240567 - DNA, 15 bp, Homo sapiens
tgcacaaaatacctg

SEQ ID NO: 240568 - DNA, 15 bp, Homo sapiens
gtgcacaaaatacct

SEQ ID NO: 240569 - DNA, 15 bp, Homo sapiens
tgtgcacaaaatacc

SEQ ID NO: 240570 - DNA, 15 bp, Homo sapiens
atgtgcacaaaatac

SEQ ID NO: 240571 - DNA, 15 bp, Homo sapiens
aatgtgcacaaaata

SEQ ID NO: 240572 - DNA, 15 bp, Homo sapiens
aaatgtgcacaaaat

SEQ ID NO: 240573 - DNA, 15 bp, Homo sapiens
aaaatgtgcacaaaa

SEQ ID NO: 240574 - DNA, 15 bp, Homo sapiens
gaaaatgtgcacaaa

SEQ ID NO: 240575 - DNA, 15 bp, Homo sapiens
tgaaaatgtgcacaa

SEQ ID NO: 240576 - DNA, 15 bp, Homo sapiens
ctgaaaatgtgcaca

SEQ ID NO: 240577 - DNA, 15 bp, Homo sapiens
actgaaaatgtgcac

SEQ ID NO: 240578 - DNA, 15 bp, Homo sapiens
tactgaaaatgtgca

SEQ ID NO: 240579 - DNA, 15 bp, Homo sapiens
ttactgaaaatgtgc

SEQ ID NO: 240580 - DNA, 15 bp, Homo sapiens
attactgaaaatgtg

SEQ ID NO: 240581 - DNA, 15 bp, Homo sapiens
aattactgaaaatgt

SEQ ID NO: 240582 - DNA, 15 bp, Homo sapiens
gaattactgaaaatg

SEQ ID NO: 240583 - DNA, 15 bp, Homo sapiens
agaattactgaaaat

SEQ ID NO: 240584 - DNA, 15 bp, Homo sapiens
gagaattactgaaaa

SEQ ID NO: 240585 - DNA, 15 bp, Homo sapiens
ggagaattactgaaa

SEQ ID NO: 240586 - DNA, 15 bp, Homo sapiens
tggagaattactgaa

SEQ ID NO: 240587 - DNA, 15 bp, Homo sapiens
ttggagaattactga

SEQ ID NO: 240588 - DNA, 15 bp, Homo sapiens
tttggagaattactg

SEQ ID NO: 240589 - DNA, 15 bp, Homo sapiens
gtttggagaattact

SEQ ID NO: 240590 - DNA, 15 bp, Homo sapiens
tgtttggagaattac

SEQ ID NO: 240591 - DNA, 15 bp, Homo sapiens
ttgtttggagaatta

SEQ ID NO: 240592 - DNA, 15 bp, Homo sapiens
gttgtttggagaatt

SEQ ID NO: 240593 - DNA, 15 bp, Homo sapiens
ggttgtttggagaat

SEQ ID NO: 240594 - DNA, 15 bp, Homo sapiens
gggttgtttggagaa

SEQ ID NO: 240595 - DNA, 15 bp, Homo sapiens
agggttgtttggaga

SEQ ID NO: 240596 - DNA, 15 bp, Homo sapiens
cagggttgtttggag

SEQ ID NO: 240597 - DNA, 15 bp, Homo sapiens
acagggttgtttgga

SEQ ID NO: 240598 - DNA, 15 bp, Homo sapiens
cacagggttgtttgg

SEQ ID NO: 240599 - DNA, 15 bp, Homo sapiens
tcacagggttgtttg

SEQ ID NO: 240600 - DNA, 15 bp, Homo sapiens
ttcacagggttgttt

SEQ ID NO: 240601 - DNA, 15 bp, Homo sapiens
cttcacagggttgtt

SEQ ID NO: 240602 - DNA, 15 bp, Homo sapiens
acttcacagggttgt

SEQ ID NO: 240603 - DNA, 15 bp, Homo sapiens
tacttcacagggttg

SEQ ID NO: 240604 - DNA, 15 bp, Homo sapiens
ctacttcacagggtt

SEQ ID NO: 240605 - DNA, 15 bp, Homo sapiens
tctacttcacagggt

SEQ ID NO: 240606 - DNA, 15 bp, Homo sapiens
ctctacttcacaggg

SEQ ID NO: 240607 - DNA, 15 bp, Homo sapiens
cctctacttcacagg

SEQ ID NO: 240608 - DNA, 15 bp, Homo sapiens
ccctctacttcacag

SEQ ID NO: 240609 - DNA, 15 bp, Homo sapiens
gccctctacttcaca

SEQ ID NO: 240610 - DNA, 15 bp, Homo sapiens
tgccctctacttcac

SEQ ID NO: 240611 - DNA, 15 bp, Homo sapiens
gtgccctctacttca

SEQ ID NO: 240612 - DNA, 15 bp, Homo sapiens
agtgccctctacttc

SEQ ID NO: 240613 - DNA, 15 bp, Homo sapiens
cagtgccctctactt

SEQ ID NO: 240614 - DNA, 15 bp, Homo sapiens
acagtgccctctact

SEQ ID NO: 240615 - DNA, 15 bp, Homo sapiens
cacagtgccctctac

SEQ ID NO: 240616 - DNA, 15 bp, Homo sapiens
tcacagtgccctcta

SEQ ID NO: 240617 - DNA, 15 bp, Homo sapiens
gtcacagtgccctct

SEQ ID NO: 240618 - DNA, 15 bp, Homo sapiens
agtcacagtgccctc

SEQ ID NO: 240619 - DNA, 15 bp, Homo sapiens
gagtcacagtgccct

SEQ ID NO: 240620 - DNA, 15 bp, Homo sapiens
agagtcacagtgccc

SEQ ID NO: 240621 - DNA, 15 bp, Homo sapiens
tagagtcacagtgcc

SEQ ID NO: 240622 - DNA, 15 bp, Homo sapiens
gtagagtcacagtgc

SEQ ID NO: 240623 - DNA, 15 bp, Homo sapiens
agtagagtcacagtg

SEQ ID NO: 240624 - DNA, 15 bp, Homo sapiens
aagtagagtcacagt

SEQ ID NO: 240625 - DNA, 15 bp, Homo sapiens
aaagtagagtcacag

SEQ ID NO: 240626 - DNA, 15 bp, Homo sapiens
aaaagtagagtcaca

SEQ ID NO: 240627 - DNA, 15 bp, Homo sapiens
aaaaagtagagtcac

SEQ ID NO: 240628 - DNA, 15 bp, Homo sapiens
gaaaaagtagagtca

SEQ ID NO: 240629 - DNA, 15 bp, Homo sapiens
tgaaaaagtagagtc

SEQ ID NO: 240630 - DNA, 15 bp, Homo sapiens
ttgaaaaagtagagt

SEQ ID NO: 240631 - DNA, 15 bp, Homo sapiens
cttgaaaaagtagag

SEQ ID NO: 240632 - DNA, 15 bp, Homo sapiens
ccttgaaaaagtaga

SEQ ID NO: 240633 - DNA, 15 bp, Homo sapiens
accttgaaaaagtag

SEQ ID NO: 240634 - DNA, 15 bp, Homo sapiens
gaccttgaaaaagta

SEQ ID NO: 240635 - DNA, 15 bp, Homo sapiens
tgaccttgaaaaagt

SEQ ID NO: 240636 - DNA, 15 bp, Homo sapiens
ttgaccttgaaaaag

SEQ ID NO: 240637 - DNA, 15 bp, Homo sapiens
cttgaccttgaaaaa

SEQ ID NO: 240638 - DNA, 15 bp, Homo sapiens
ccttgaccttgaaaa

SEQ ID NO: 240639 - DNA, 15 bp, Homo sapiens
accttgaccttgaaa

SEQ ID NO: 240640 - DNA, 15 bp, Homo sapiens
gaccttgaccttgaa

SEQ ID NO: 240641 - DNA, 15 bp, Homo sapiens
tgaccttgaccttga

SEQ ID NO: 240642 - DNA, 15 bp, Homo sapiens
gtgaccttgaccttg

SEQ ID NO: 240643 - DNA, 15 bp, Homo sapiens
tgtgaccttgacctt

SEQ ID NO: 240644 - DNA, 15 bp, Homo sapiens
ctgtgaccttgacct

SEQ ID NO: 240645 - DNA, 15 bp, Homo sapiens
tctgtgaccttgacc

SEQ ID NO: 240646 - DNA, 15 bp, Homo sapiens
ctctgtgaccttgac

SEQ ID NO: 240647 - DNA, 15 bp, Homo sapiens
actctgtgaccttga

SEQ ID NO: 240648 - DNA, 15 bp, Homo sapiens
aactctgtgaccttg

SEQ ID NO: 240649 - DNA, 15 bp, Homo sapiens
caactctgtgacctt

SEQ ID NO: 240650 - DNA, 15 bp, Homo sapiens
ccaactctgtgacct

SEQ ID NO: 240651 - DNA, 15 bp, Homo sapiens
accaactctgtgacc

SEQ ID NO: 240652 - DNA, 15 bp, Homo sapiens
gaccaactctgtgac

SEQ ID NO: 240653 - DNA, 15 bp, Homo sapiens
tgaccaactctgtga

SEQ ID NO: 240654 - DNA, 15 bp, Homo sapiens
ttgaccaactctgtg

SEQ ID NO: 240655 - DNA, 15 bp, Homo sapiens
attgaccaactctgt

SEQ ID NO: 240656 - DNA, 15 bp, Homo sapiens
cattgaccaactctg

SEQ ID NO: 240657 - DNA, 15 bp, Homo sapiens
gcattgaccaactct

SEQ ID NO: 240658 - DNA, 15 bp, Homo sapiens
tgcattgaccaactc

SEQ ID NO: 240659 - DNA, 15 bp, Homo sapiens
ttgcattgaccaact

SEQ ID NO: 240660 - DNA, 15 bp, Homo sapiens
cttgcattgaccaac

SEQ ID NO: 240661 - DNA, 15 bp, Homo sapiens
ccttgcattgaccaa

SEQ ID NO: 240662 - DNA, 15 bp, Homo sapiens
gccttgcattgacca

SEQ ID NO: 240663 - DNA, 15 bp, Homo sapiens
agccttgcattgacc

SEQ ID NO: 240664 - DNA, 15 bp, Homo sapiens
cagccttgcattgac

SEQ ID NO: 240665 - DNA, 15 bp, Homo sapiens
ccagccttgcattga

SEQ ID NO: 240666 - DNA, 15 bp, Homo sapiens
cccagccttgcattg

SEQ ID NO: 240667 - DNA, 15 bp, Homo sapiens
tcccagccttgcatt

SEQ ID NO: 240668 - DNA, 15 bp, Homo sapiens
atcccagccttgcat

SEQ ID NO: 240669 - DNA, 15 bp, Homo sapiens
aatcccagccttgca

SEQ ID NO: 240670 - DNA, 15 bp, Homo sapiens
caatcccagccttgc

SEQ ID NO: 240671 - DNA, 15 bp, Homo sapiens
ccaatcccagccttg

SEQ ID NO: 240672 - DNA, 15 bp, Homo sapiens
tccaatcccagcctt

SEQ ID NO: 240673 - DNA, 15 bp, Homo sapiens
ttccaatcccagcct

SEQ ID NO: 240674 - DNA, 15 bp, Homo sapiens
attccaatcccagcc

SEQ ID NO: 240675 - DNA, 15 bp, Homo sapiens
cattccaatcccagc

SEQ ID NO: 240676 - DNA, 15 bp, Homo sapiens
tcattccaatcccag

SEQ ID NO: 240677 - DNA, 15 bp, Homo sapiens
ctcattccaatccca

SEQ ID NO: 240678 - DNA, 15 bp, Homo sapiens
tctcattccaatccc

SEQ ID NO: 240679 - DNA, 15 bp, Homo sapiens
gtctcattccaatcc

SEQ ID NO: 240680 - DNA, 15 bp, Homo sapiens
agtctcattccaatc

SEQ ID NO: 240681 - DNA, 15 bp, Homo sapiens
aagtctcattccaat

SEQ ID NO: 240682 - DNA, 15 bp, Homo sapiens
gaagtctcattccaa

SEQ ID NO: 240683 - DNA, 15 bp, Homo sapiens
tgaagtctcattcca

SEQ ID NO: 240684 - DNA, 15 bp, Homo sapiens
ttgaagtctcattcc

SEQ ID NO: 240685 - DNA, 15 bp, Homo sapiens
tttgaagtctcattc

SEQ ID NO: 240686 - DNA, 15 bp, Homo sapiens
ctttgaagtctcatt

SEQ ID NO: 240687 - DNA, 15 bp, Homo sapiens
cctttgaagtctcat

SEQ ID NO: 240688 - DNA, 15 bp, Homo sapiens
gcctttgaagtctca

SEQ ID NO: 240689 - DNA, 15 bp, Homo sapiens
ggcctttgaagtctc

SEQ ID NO: 240690 - DNA, 15 bp, Homo sapiens
tggcctttgaagtct

SEQ ID NO: 240691 - DNA, 15 bp, Homo sapiens
ttggcctttgaagtc

SEQ ID NO: 240692 - DNA, 15 bp, Homo sapiens
cttggcctttgaagt

SEQ ID NO: 240693 - DNA, 15 bp, Homo sapiens
acttggcctttgaag

SEQ ID NO: 240694 - DNA, 15 bp, Homo sapiens
gacttggcctttgaa

SEQ ID NO: 240695 - DNA, 15 bp, Homo sapiens
agacttggcctttga

SEQ ID NO: 240696 - DNA, 15 bp, Homo sapiens
aagacttggcctttg

SEQ ID NO: 240697 - DNA, 15 bp, Homo sapiens
aaagacttggccttt

SEQ ID NO: 240698 - DNA, 15 bp, Homo sapiens
aaaagacttggcctt

SEQ ID NO: 240699 - DNA, 15 bp, Homo sapiens
gaaaagacttggcct

SEQ ID NO: 240700 - DNA, 15 bp, Homo sapiens
ggaaaagacttggcc

SEQ ID NO: 240701 - DNA, 15 bp, Homo sapiens
tggaaaagacttggc

SEQ ID NO: 240702 - DNA, 15 bp, Homo sapiens
ctggaaaagacttgg

SEQ ID NO: 240703 - DNA, 15 bp, Homo sapiens
actggaaaagacttg

SEQ ID NO: 240704 - DNA, 15 bp, Homo sapiens
tactggaaaagactt

SEQ ID NO: 240705 - DNA, 15 bp, Homo sapiens
ctactggaaaagact

SEQ ID NO: 240706 - DNA, 15 bp, Homo sapiens
tctactggaaaagac

SEQ ID NO: 240707 - DNA, 15 bp, Homo sapiens
gtctactggaaaaga

SEQ ID NO: 240708 - DNA, 15 bp, Homo sapiens
ggtctactggaaaag

SEQ ID NO: 240709 - DNA, 15 bp, Homo sapiens
gggtctactggaaaa

SEQ ID NO: 240710 - DNA, 15 bp, Homo sapiens
ggggtctactggaaa

SEQ ID NO: 240711 - DNA, 15 bp, Homo sapiens
cggggtctactggaa

SEQ ID NO: 240712 - DNA, 15 bp, Homo sapiens
gcggggtctactgga

SEQ ID NO: 240713 - DNA, 15 bp, Homo sapiens
agcggggtctactgg

SEQ ID NO: 240714 - DNA, 15 bp, Homo sapiens
tagcggggtctactg

SEQ ID NO: 240715 - DNA, 15 bp, Homo sapiens
gtagcggggtctact

SEQ ID NO: 240716 - DNA, 15 bp, Homo sapiens
agtagcggggtctac

SEQ ID NO: 240717 - DNA, 15 bp, Homo sapiens
cagtagcggggtcta

SEQ ID NO: 240718 - DNA, 15 bp, Homo sapiens
gcagtagcggggtct

SEQ ID NO: 240719 - DNA, 15 bp, Homo sapiens
tgcagtagcggggtc

SEQ ID NO: 240720 - DNA, 15 bp, Homo sapiens
gtgcagtagcggggt

SEQ ID NO: 240721 - DNA, 15 bp, Homo sapiens
agtgcagtagcgggg

SEQ ID NO: 240722 - DNA, 15 bp, Homo sapiens
cagtgcagtagcggg

SEQ ID NO: 240723 - DNA, 15 bp, Homo sapiens
ccagtgcagtagcgg

SEQ ID NO: 240724 - DNA, 15 bp, Homo sapiens
gccagtgcagtagcg

SEQ ID NO: 240725 - DNA, 15 bp, Homo sapiens
ggccagtgcagtagc

SEQ ID NO: 240726 - DNA, 15 bp, Homo sapiens
aggccagtgcagtag

SEQ ID NO: 240727 - DNA, 15 bp, Homo sapiens
taggccagtgcagta

SEQ ID NO: 240728 - DNA, 15 bp, Homo sapiens
ataggccagtgcagt

SEQ ID NO: 240729 - DNA, 15 bp, Homo sapiens
cataggccagtgcag

SEQ ID NO: 240730 - DNA, 15 bp, Homo sapiens
gcataggccagtgca

SEQ ID NO: 240731 - DNA, 15 bp, Homo sapiens
agcataggccagtgc

SEQ ID NO: 240732 - DNA, 15 bp, Homo sapiens
cagcataggccagtg

SEQ ID NO: 240733 - DNA, 15 bp, Homo sapiens
tcagcataggccagt

SEQ ID NO: 240734 - DNA, 15 bp, Homo sapiens
ctcagcataggccag

SEQ ID NO: 240735 - DNA, 15 bp, Homo sapiens
actcagcataggcca

SEQ ID NO: 240736 - DNA, 15 bp, Homo sapiens
gactcagcataggcc

SEQ ID NO: 240737 - DNA, 15 bp, Homo sapiens
agactcagcataggc

SEQ ID NO: 240738 - DNA, 15 bp, Homo sapiens
gagactcagcatagg

SEQ ID NO: 240739 - DNA, 15 bp, Homo sapiens
agagactcagcatag

SEQ ID NO: 240740 - DNA, 15 bp, Homo sapiens
gagagactcagcata

SEQ ID NO: 240741 - DNA, 15 bp, Homo sapiens
ggagagactcagcat

SEQ ID NO: 240742 - DNA, 15 bp, Homo sapiens
tggagagactcagca

SEQ ID NO: 240743 - DNA, 15 bp, Homo sapiens
gtggagagactcagc

SEQ ID NO: 240744 - DNA, 15 bp, Homo sapiens
tgtggagagactcag

SEQ ID NO: 240745 - DNA, 15 bp, Homo sapiens
atgtggagagactca

SEQ ID NO: 240746 - DNA, 15 bp, Homo sapiens
catgtggagagactc

SEQ ID NO: 240747 - DNA, 15 bp, Homo sapiens
gcatgtggagagact

SEQ ID NO: 240748 - DNA, 15 bp, Homo sapiens
agcatgtggagagac

SEQ ID NO: 240749 - DNA, 15 bp, Homo sapiens
gagcatgtggagaga

SEQ ID NO: 240750 - DNA, 15 bp, Homo sapiens
ggagcatgtggagag

SEQ ID NO: 240751 - DNA, 15 bp, Homo sapiens
tggagcatgtggaga

SEQ ID NO: 240752 - DNA, 15 bp, Homo sapiens
atggagcatgtggag

SEQ ID NO: 240753 - DNA, 15 bp, Homo sapiens
catggagcatgtgga

SEQ ID NO: 240754 - DNA, 15 bp, Homo sapiens
acatggagcatgtgg

SEQ ID NO: 240755 - DNA, 15 bp, Homo sapiens
aacatggagcatgtg

SEQ ID NO: 240756 - DNA, 15 bp, Homo sapiens
taacatggagcatgt

SEQ ID NO: 240757 - DNA, 15 bp, Homo sapiens
gtaacatggagcatg

SEQ ID NO: 240758 - DNA, 15 bp, Homo sapiens
ggtaacatggagcat

SEQ ID NO: 240759 - DNA, 15 bp, Homo sapiens
aggtaacatggagca

SEQ ID NO: 240760 - DNA, 15 bp, Homo sapiens
caggtaacatggagc

SEQ ID NO: 240761 - DNA, 15 bp, Homo sapiens
acaggtaacatggag

SEQ ID NO: 240762 - DNA, 15 bp, Homo sapiens
aacaggtaacatgga

SEQ ID NO: 240763 - DNA, 15 bp, Homo sapiens
caacaggtaacatgg

SEQ ID NO: 240764 - DNA, 15 bp, Homo sapiens
acaacaggtaacatg

SEQ ID NO: 240765 - DNA, 15 bp, Homo sapiens
cacaacaggtaacat

SEQ ID NO: 240766 - DNA, 15 bp, Homo sapiens
acacaacaggtaaca

SEQ ID NO: 240767 - DNA, 15 bp, Homo sapiens
cacacaacaggtaac

SEQ ID NO: 240768 - DNA, 15 bp, Homo sapiens
tcacacaacaggtaa

SEQ ID NO: 240769 - DNA, 15 bp, Homo sapiens
ttcacacaacaggta

SEQ ID NO: 240770 - DNA, 15 bp, Homo sapiens
gttcacacaacaggt

SEQ ID NO: 240771 - DNA, 15 bp, Homo sapiens
agttcacacaacagg

SEQ ID NO: 240772 - DNA, 15 bp, Homo sapiens
aagttcacacaacag

SEQ ID NO: 240773 - DNA, 15 bp, Homo sapiens
caagttcacacaaca

SEQ ID NO: 240774 - DNA, 15 bp, Homo sapiens
ccaagttcacacaac

SEQ ID NO: 240775 - DNA, 15 bp, Homo sapiens
tccaagttcacacaa

SEQ ID NO: 240776 - DNA, 15 bp, Homo sapiens
atccaagttcacaca

SEQ ID NO: 240777 - DNA, 15 bp, Homo sapiens
tatccaagttcacac

SEQ ID NO: 240778 - DNA, 15 bp, Homo sapiens
ctatccaagttcaca

SEQ ID NO: 240779 - DNA, 15 bp, Homo sapiens
cctatccaagttcac

SEQ ID NO: 240780 - DNA, 15 bp, Homo sapiens
acctatccaagttca

SEQ ID NO: 240781 - DNA, 15 bp, Homo sapiens
gacctatccaagttc

SEQ ID NO: 240782 - DNA, 15 bp, Homo sapiens
tgacctatccaagtt

SEQ ID NO: 240783 - DNA, 15 bp, Homo sapiens
atgacctatccaagt

SEQ ID NO: 240784 - DNA, 15 bp, Homo sapiens
gatgacctatccaag

SEQ ID NO: 240785 - DNA, 15 bp, Homo sapiens
agatgacctatccaa

SEQ ID NO: 240786 - DNA, 15 bp, Homo sapiens
tagatgacctatcca

SEQ ID NO: 240787 - DNA, 15 bp, Homo sapiens
gtagatgacctatcc

SEQ ID NO: 240788 - DNA, 15 bp, Homo sapiens
ggtagatgacctatc

SEQ ID NO: 240789 - DNA, 15 bp, Homo sapiens
tggtagatgacctat

SEQ ID NO: 240790 - DNA, 15 bp, Homo sapiens
gtggtagatgaccta

SEQ ID NO: 240791 - DNA, 15 bp, Homo sapiens
tgtggtagatgacct

SEQ ID NO: 240792 - DNA, 15 bp, Homo sapiens
ctgtggtagatgacc

SEQ ID NO: 240793 - DNA, 15 bp, Homo sapiens
tctgtggtagatgac

SEQ ID NO: 240794 - DNA, 15 bp, Homo sapiens
ctctgtggtagatga

SEQ ID NO: 240795 - DNA, 15 bp, Homo sapiens
cctctgtggtagatg

SEQ ID NO: 240796 - DNA, 15 bp, Homo sapiens
tcctctgtggtagat

SEQ ID NO: 240797 - DNA, 15 bp, Homo sapiens
ctcctctgtggtaga

SEQ ID NO: 240798 - DNA, 15 bp, Homo sapiens
gctcctctgtggtag

SEQ ID NO: 240799 - DNA, 15 bp, Homo sapiens
tgctcctctgtggta

SEQ ID NO: 240800 - DNA, 15 bp, Homo sapiens
ttgctcctctgtggt

SEQ ID NO: 240801 - DNA, 15 bp, Homo sapiens
cttgctcctctgtgg

SEQ ID NO: 240802 - DNA, 15 bp, Homo sapiens
tcttgctcctctgtg

SEQ ID NO: 240803 - DNA, 15 bp, Homo sapiens
ctcttgctcctctgt

SEQ ID NO: 240804 - DNA, 15 bp, Homo sapiens
cctcttgctcctctg

SEQ ID NO: 240805 - DNA, 15 bp, Homo sapiens
ccctcttgctcctct

SEQ ID NO: 240806 - DNA, 15 bp, Homo sapiens
cccctcttgctcctc

SEQ ID NO: 240807 - DNA, 15 bp, Homo sapiens
tcccctcttgctcct

SEQ ID NO: 240808 - DNA, 15 bp, Homo sapiens
ttcccctcttgctcc

SEQ ID NO: 240809 - DNA, 15 bp, Homo sapiens
tttcccctcttgctc

SEQ ID NO: 240810 - DNA, 15 bp, Homo sapiens
gtttcccctcttgct

SEQ ID NO: 240811 - DNA, 15 bp, Homo sapiens
agtttcccctcttgc

SEQ ID NO: 240812 - DNA, 15 bp, Homo sapiens
aagtttcccctcttg

SEQ ID NO: 240813 - DNA, 15 bp, Homo sapiens
gaagtttcccctctt

SEQ ID NO: 240814 - DNA, 15 bp, Homo sapiens
agaagtttcccctct

SEQ ID NO: 240815 - DNA, 15 bp, Homo sapiens
aagaagtttcccctc

SEQ ID NO: 240816 - DNA, 15 bp, Homo sapiens
gaagaagtttcccct

SEQ ID NO: 240817 - DNA, 15 bp, Homo sapiens
tgaagaagtttcccc

SEQ ID NO: 240818 - DNA, 15 bp, Homo sapiens
ctgaagaagtttccc

SEQ ID NO: 240819 - DNA, 15 bp, Homo sapiens
cctgaagaagtttcc

SEQ ID NO: 240820 - DNA, 15 bp, Homo sapiens
ccctgaagaagtttc

SEQ ID NO: 240821 - DNA, 15 bp, Homo sapiens
accctgaagaagttt

SEQ ID NO: 240822 - DNA, 15 bp, Homo sapiens
aaccctgaagaagtt

SEQ ID NO: 240823 - DNA, 15 bp, Homo sapiens
aaaccctgaagaagt

SEQ ID NO: 240824 - DNA, 15 bp, Homo sapiens
caaaccctgaagaag

SEQ ID NO: 240825 - DNA, 15 bp, Homo sapiens
gcaaaccctgaagaa

SEQ ID NO: 240826 - DNA, 15 bp, Homo sapiens
agcaaaccctgaaga

SEQ ID NO: 240827 - DNA, 15 bp, Homo sapiens
aagcaaaccctgaag

SEQ ID NO: 240828 - DNA, 15 bp, Homo sapiens
caagcaaaccctgaa

SEQ ID NO: 240829 - DNA, 15 bp, Homo sapiens
ccaagcaaaccctga

SEQ ID NO: 240830 - DNA, 15 bp, Homo sapiens
accaagcaaaccctg

SEQ ID NO: 240831 - DNA, 15 bp, Homo sapiens
gaccaagcaaaccct

SEQ ID NO: 240832 - DNA, 15 bp, Homo sapiens
ggaccaagcaaaccc

SEQ ID NO: 240833 - DNA, 15 bp, Homo sapiens
tggaccaagcaaacc

SEQ ID NO: 240834 - DNA, 15 bp, Homo sapiens
ctggaccaagcaaac

SEQ ID NO: 240835 - DNA, 15 bp, Homo sapiens
actggaccaagcaaa

SEQ ID NO: 240836 - DNA, 15 bp, Homo sapiens
gactggaccaagcaa

SEQ ID NO: 240837 - DNA, 15 bp, Homo sapiens
agactggaccaagca

SEQ ID NO: 240838 - DNA, 15 bp, Homo sapiens
gagactggaccaagc

SEQ ID NO: 240839 - DNA, 15 bp, Homo sapiens
tgagactggaccaag

SEQ ID NO: 240840 - DNA, 15 bp, Homo sapiens
ttgagactggaccaa

SEQ ID NO: 240841 - DNA, 15 bp, Homo sapiens
gttgagactggacca

SEQ ID NO: 240842 - DNA, 15 bp, Homo sapiens
tgttgagactggacc

SEQ ID NO: 240843 - DNA, 15 bp, Homo sapiens
atgttgagactggac

SEQ ID NO: 240844 - DNA, 15 bp, Homo sapiens
catgttgagactgga

SEQ ID NO: 240845 - DNA, 15 bp, Homo sapiens
gcatgttgagactgg

SEQ ID NO: 240846 - DNA, 15 bp, Homo sapiens
agcatgttgagactg

SEQ ID NO: 240847 - DNA, 15 bp, Homo sapiens
cagcatgttgagact

SEQ ID NO: 240848 - DNA, 15 bp, Homo sapiens
acagcatgttgagac

SEQ ID NO: 240849 - DNA, 15 bp, Homo sapiens
cacagcatgttgaga

SEQ ID NO: 240850 - DNA, 15 bp, Homo sapiens
ccacagcatgttgag

SEQ ID NO: 240851 - DNA, 15 bp, Homo sapiens
accacagcatgttga

SEQ ID NO: 240852 - DNA, 15 bp, Homo sapiens
aaccacagcatgttg

SEQ ID NO: 240853 - DNA, 15 bp, Homo sapiens
gaaccacagcatgtt

SEQ ID NO: 240854 - DNA, 15 bp, Homo sapiens
agaaccacagcatgt

SEQ ID NO: 240855 - DNA, 15 bp, Homo sapiens
cagaaccacagcatg

SEQ ID NO: 240856 - DNA, 15 bp, Homo sapiens
gcagaaccacagcat

SEQ ID NO: 240857 - DNA, 15 bp, Homo sapiens
tgcagaaccacagca

SEQ ID NO: 240858 - DNA, 15 bp, Homo sapiens
ctgcagaaccacagc

SEQ ID NO: 240859 - DNA, 15 bp, Homo sapiens
actgcagaaccacag

SEQ ID NO: 240860 - DNA, 15 bp, Homo sapiens
aactgcagaaccaca

SEQ ID NO: 240861 - DNA, 15 bp, Homo sapiens
caactgcagaaccac

SEQ ID NO: 240862 - DNA, 15 bp, Homo sapiens
tcaactgcagaacca

SEQ ID NO: 240863 - DNA, 15 bp, Homo sapiens
ctcaactgcagaacc

SEQ ID NO: 240864 - DNA, 15 bp, Homo sapiens
tctcaactgcagaac

SEQ ID NO: 240865 - DNA, 15 bp, Homo sapiens
atctcaactgcagaa

SEQ ID NO: 240866 - DNA, 15 bp, Homo sapiens
catctcaactgcaga

SEQ ID NO: 240867 - DNA, 15 bp, Homo sapiens
gcatctcaactgcag

SEQ ID NO: 240868 - DNA, 15 bp, Homo sapiens
tgcatctcaactgca

SEQ ID NO: 240869 - DNA, 15 bp, Homo sapiens
atgcatctcaactgc

SEQ ID NO: 240870 - DNA, 15 bp, Homo sapiens
catgcatctcaactg

SEQ ID NO: 240871 - DNA, 15 bp, Homo sapiens
acatgcatctcaact

SEQ ID NO: 240872 - DNA, 15 bp, Homo sapiens
aacatgcatctcaac

SEQ ID NO: 240873 - DNA, 15 bp, Homo sapiens
caacatgcatctcaa

SEQ ID NO: 240874 - DNA, 15 bp, Homo sapiens
tcaacatgcatctca

SEQ ID NO: 240875 - DNA, 15 bp, Homo sapiens
ttcaacatgcatctc

SEQ ID NO: 240876 - DNA, 15 bp, Homo sapiens
tttcaacatgcatct

SEQ ID NO: 240877 - DNA, 15 bp, Homo sapiens
atttcaacatgcatc

SEQ ID NO: 240878 - DNA, 15 bp, Homo sapiens
catttcaacatgcat

SEQ ID NO: 240879 - DNA, 15 bp, Homo sapiens
gcatttcaacatgca

SEQ ID NO: 240880 - DNA, 15 bp, Homo sapiens
tgcatttcaacatgc

SEQ ID NO: 240881 - DNA, 15 bp, Homo sapiens
atgcatttcaacatg

SEQ ID NO: 240882 - DNA, 15 bp, Homo sapiens
aatgcatttcaacat

SEQ ID NO: 240883 - DNA, 15 bp, Homo sapiens
aaatgcatttcaaca

SEQ ID NO: 240884 - DNA, 15 bp, Homo sapiens
gaaatgcatttcaac

SEQ ID NO: 240885 - DNA, 15 bp, Homo sapiens
tgaaatgcatttcaa

SEQ ID NO: 240886 - DNA, 15 bp, Homo sapiens
atgaaatgcatttca

SEQ ID NO: 240887 - DNA, 15 bp, Homo sapiens
aatgaaatgcatttc

SEQ ID NO: 240888 - DNA, 15 bp, Homo sapiens
aaatgaaatgcattt

SEQ ID NO: 240889 - DNA, 15 bp, Homo sapiens
caaatgaaatgcatt

SEQ ID NO: 240890 - DNA, 15 bp, Homo sapiens
acaaatgaaatgcat

SEQ ID NO: 240891 - DNA, 15 bp, Homo sapiens
tacaaatgaaatgca

SEQ ID NO: 240892 - DNA, 15 bp, Homo sapiens
atacaaatgaaatgc

SEQ ID NO: 240893 - DNA, 15 bp, Homo sapiens
catacaaatgaaatg

SEQ ID NO: 240894 - DNA, 15 bp, Homo sapiens
acatacaaatgaaat

SEQ ID NO: 240895 - DNA, 15 bp, Homo sapiens
aacatacaaatgaaa

SEQ ID NO: 240896 - DNA, 15 bp, Homo sapiens
caacatacaaatgaa

SEQ ID NO: 240897 - DNA, 15 bp, Homo sapiens
tcaacatacaaatga

SEQ ID NO: 240898 - DNA, 15 bp, Homo sapiens
gtcaacatacaaatg

SEQ ID NO: 240899 - DNA, 15 bp, Homo sapiens
agtcaacatacaaat

SEQ ID NO: 240900 - DNA, 15 bp, Homo sapiens
aagtcaacatacaaa

SEQ ID NO: 240901 - DNA, 15 bp, Homo sapiens
aaagtcaacatacaa

SEQ ID NO: 240902 - DNA, 15 bp, Homo sapiens
aaaagtcaacataca

SEQ ID NO: 240903 - DNA, 15 bp, Homo sapiens
aaaaagtcaacatac

SEQ ID NO: 240904 - DNA, 15 bp, Homo sapiens
aaaaaagtcaacata

SEQ ID NO: 240905 - DNA, 15 bp, Homo sapiens
aaaaaaagtcaacat

SEQ ID NO: 240906 - DNA, 15 bp, Homo sapiens
taaaaaaagtcaaca

SEQ ID NO: 240907 - DNA, 15 bp, Homo sapiens
ataaaaaaagtcaac

SEQ ID NO: 240908 - DNA, 15 bp, Homo sapiens
aataaaaaaagtcaa

SEQ ID NO: 240909 - DNA, 15 bp, Homo sapiens
gaataaaaaaagtca

SEQ ID NO: 240910 - DNA, 15 bp, Homo sapiens
agaataaaaaaagtc

SEQ ID NO: 240911 - DNA, 15 bp, Homo sapiens
tagaataaaaaaagt

SEQ ID NO: 240912 - DNA, 15 bp, Homo sapiens
ttagaataaaaaaag

SEQ ID NO: 240913 - DNA, 15 bp, Homo sapiens
tttagaataaaaaaa

SEQ ID NO: 240914 - DNA, 15 bp, Homo sapiens
ctttagaataaaaaa

SEQ ID NO: 240915 - DNA, 15 bp, Homo sapiens
cctttagaataaaaa

SEQ ID NO: 240916 - DNA, 15 bp, Homo sapiens
acctttagaataaaa

SEQ ID NO: 240917 - DNA, 15 bp, Homo sapiens
gacctttagaataaa

SEQ ID NO: 240918 - DNA, 15 bp, Homo sapiens
agacctttagaataa

SEQ ID NO: 240919 - DNA, 15 bp, Homo sapiens
aagacctttagaata

SEQ ID NO: 240920 - DNA, 15 bp, Homo sapiens
aaagacctttagaat

SEQ ID NO: 240921 - DNA, 15 bp, Homo sapiens
ccaaagacctttaga

SEQ ID NO: 240922 - DNA, 15 bp, Homo sapiens
tccaaagacctttag

SEQ ID NO: 240923 - DNA, 15 bp, Homo sapiens
atccaaagaccttta

SEQ ID NO: 240924 - DNA, 15 bp, Homo sapiens
catccaaagaccttt

SEQ ID NO: 240925 - DNA, 15 bp, Homo sapiens
acatccaaagacctt

SEQ ID NO: 240926 - DNA, 15 bp, Homo sapiens
aacatccaaagacct

SEQ ID NO: 240927 - DNA, 15 bp, Homo sapiens
aaacatccaaagacc

SEQ ID NO: 240928 - DNA, 15 bp, Homo sapiens
taaacatccaaagac

SEQ ID NO: 240929 - DNA, 15 bp, Homo sapiens
ttaaacatccaaaga

SEQ ID NO: 240930 - DNA, 15 bp, Homo sapiens
attaaacatccaaag

SEQ ID NO: 240931 - DNA, 15 bp, Homo sapiens
aattaaacatccaaa

SEQ ID NO: 240932 - DNA, 15 bp, Homo sapiens
aaattaaacatccaa

SEQ ID NO: 240933 - DNA, 15 bp, Homo sapiens
gaaattaaacatcca

SEQ ID NO: 240934 - DNA, 15 bp, Homo sapiens
tgaaattaaacatcc

SEQ ID NO: 240935 - DNA, 15 bp, Homo sapiens
ttgaaattaaacatc

SEQ ID NO: 240936 - DNA, 15 bp, Homo sapiens
tttgaaattaaacat

SEQ ID NO: 240937 - DNA, 15 bp, Homo sapiens
gtttgaaattaaaca

SEQ ID NO: 240938 - DNA, 15 bp, Homo sapiens
tgtttgaaattaaac

SEQ ID NO: 240939 - DNA, 15 bp, Homo sapiens
ttgtttgaaattaaa

SEQ ID NO: 240940 - DNA, 15 bp, Homo sapiens
tttgtttgaaattaa

SEQ ID NO: 240941 - DNA, 15 bp, Homo sapiens
ctttgtttgaaatta

SEQ ID NO: 240942 - DNA, 15 bp, Homo sapiens
tctttgtttgaaatt

SEQ ID NO: 240943 - DNA, 15 bp, Homo sapiens
ctctttgtttgaaat

SEQ ID NO: 240944 - DNA, 15 bp, Homo sapiens
gctctttgtttgaaa

SEQ ID NO: 240945 - DNA, 15 bp, Homo sapiens
agctctttgtttgaa

SEQ ID NO: 240946 - DNA, 15 bp, Homo sapiens
tagctctttgtttga

SEQ ID NO: 240947 - DNA, 15 bp, Homo sapiens
ctagctctttgtttg

SEQ ID NO: 240948 - DNA, 15 bp, Homo sapiens
tctagctctttgttt

SEQ ID NO: 240949 - DNA, 15 bp, Homo sapiens
ctctagctctttgtt

SEQ ID NO: 240950 - DNA, 15 bp, Homo sapiens
tctctagctctttgt

SEQ ID NO: 240951 - DNA, 15 bp, Homo sapiens
atctctagctctttg

SEQ ID NO: 240952 - DNA, 15 bp, Homo sapiens
aatctctagctcttt

SEQ ID NO: 240953 - DNA, 15 bp, Homo sapiens
caatctctagctctt

SEQ ID NO: 240954 - DNA, 15 bp, Homo sapiens
ccaatctctagctct

SEQ ID NO: 240955 - DNA, 15 bp, Homo sapiens
tccaatctctagctc

SEQ ID NO: 240956 - DNA, 15 bp, Homo sapiens
ctccaatctctagct

SEQ ID NO: 240957 - DNA, 15 bp, Homo sapiens
tctccaatctctagc

SEQ ID NO: 240958 - DNA, 15 bp, Homo sapiens
ctctccaatctctag

SEQ ID NO: 240959 - DNA, 15 bp, Homo sapiens
cctctccaatctcta

SEQ ID NO: 240960 - DNA, 15 bp, Homo sapiens
gcctctccaatctct

SEQ ID NO: 240961 - DNA, 15 bp, Homo sapiens
tgcctctccaatctc

SEQ ID NO: 240962 - DNA, 15 bp, Homo sapiens
atgcctctccaatct

SEQ ID NO: 240963 - DNA, 15 bp, Homo sapiens
gatgcctctccaatc

SEQ ID NO: 240964 - DNA, 15 bp, Homo sapiens
tgatgcctctccaat

SEQ ID NO: 240965 - DNA, 15 bp, Homo sapiens
ttgatgcctctccaa

SEQ ID NO: 240966 - DNA, 15 bp, Homo sapiens
attgatgcctctcca

SEQ ID NO: 240967 - DNA, 15 bp, Homo sapiens
gattgatgcctctcc

SEQ ID NO: 240968 - DNA, 15 bp, Homo sapiens
agattgatgcctctc

SEQ ID NO: 240969 - DNA, 15 bp, Homo sapiens
gagattgatgcctct

SEQ ID NO: 240970 - DNA, 15 bp, Homo sapiens
tgagattgatgcctc

SEQ ID NO: 240971 - DNA, 15 bp, Homo sapiens
ttgagattgatgcct

SEQ ID NO: 240972 - DNA, 15 bp, Homo sapiens
tttgagattgatgcc

SEQ ID NO: 240973 - DNA, 15 bp, Homo sapiens
gtttgagattgatgc

SEQ ID NO: 240974 - DNA, 15 bp, Homo sapiens
tgtttgagattgatg

SEQ ID NO: 240975 - DNA, 15 bp, Homo sapiens
ctgtttgagattgat

SEQ ID NO: 240976 - DNA, 15 bp, Homo sapiens
cctgtttgagattga

SEQ ID NO: 240977 - DNA, 15 bp, Homo sapiens
gcctgtttgagattg

SEQ ID NO: 240978 - DNA, 15 bp, Homo sapiens
tgcctgtttgagatt

SEQ ID NO: 240979 - DNA, 15 bp, Homo sapiens
ctgcctgtttgagat

SEQ ID NO: 240980 - DNA, 15 bp, Homo sapiens
gctgcctgtttgaga

SEQ ID NO: 240981 - DNA, 15 bp, Homo sapiens
cgctgcctgtttgag

SEQ ID NO: 240982 - DNA, 15 bp, Homo sapiens
ccgctgcctgtttga

SEQ ID NO: 240983 - DNA, 15 bp, Homo sapiens
gccgctgcctgtttg

SEQ ID NO: 240984 - DNA, 15 bp, Homo sapiens
tgccgctgcctgttt

SEQ ID NO: 240985 - DNA, 15 bp, Homo sapiens
ctgccgctgcctgtt

SEQ ID NO: 240986 - DNA, 15 bp, Homo sapiens
cctgccgctgcctgt

SEQ ID NO: 240987 - DNA, 15 bp, Homo sapiens
ccctgccgctgcctg

SEQ ID NO: 240988 - DNA, 15 bp, Homo sapiens
cccctgccgctgcct

SEQ ID NO: 240989 - DNA, 15 bp, Homo sapiens
acccctgccgctgcc

SEQ ID NO: 240990 - DNA, 15 bp, Homo sapiens
cacccctgccgctgc

SEQ ID NO: 240991 - DNA, 15 bp, Homo sapiens
acacccctgccgctg

SEQ ID NO: 240992 - DNA, 15 bp, Homo sapiens
aacacccctgccgct

SEQ ID NO: 240993 - DNA, 15 bp, Homo sapiens
aaacacccctgccgc

SEQ ID NO: 240994 - DNA, 15 bp, Homo sapiens
taaacacccctgccg

SEQ ID NO: 240995 - DNA, 15 bp, Homo sapiens
ctaaacacccctgcc

SEQ ID NO: 240996 - DNA, 15 bp, Homo sapiens
tctaaacacccctgc

SEQ ID NO: 240997 - DNA, 15 bp, Homo sapiens
ttctaaacacccctg

SEQ ID NO: 240998 - DNA, 15 bp, Homo sapiens
attctaaacacccct

SEQ ID NO: 240999 - DNA, 15 bp, Homo sapiens
cattctaaacacccc

SEQ ID NO: 241000 - DNA, 15 bp, Homo sapiens
tcattctaaacaccc

SEQ ID NO: 241001 - DNA, 15 bp, Homo sapiens
ttcattctaaacacc

SEQ ID NO: 241002 - DNA, 15 bp, Homo sapiens
gttcattctaaacac

SEQ ID NO: 241003 - DNA, 15 bp, Homo sapiens
agttcattctaaaca

SEQ ID NO: 241004 - DNA, 15 bp, Homo sapiens
aagttcattctaaac

SEQ ID NO: 241005 - DNA, 15 bp, Homo sapiens
caagttcattctaaa

SEQ ID NO: 241006 - DNA, 15 bp, Homo sapiens
tcaagttcattctaa

SEQ ID NO: 241007 - DNA, 15 bp, Homo sapiens
gtcaagttcattcta

SEQ ID NO: 241008 - DNA, 15 bp, Homo sapiens
tgtcaagttcattct

SEQ ID NO: 241009 - DNA, 15 bp, Homo sapiens
ctgtcaagttcattc

SEQ ID NO: 241010 - DNA, 15 bp, Homo sapiens
gctgtcaagttcatt

SEQ ID NO: 241011 - DNA, 15 bp, Homo sapiens
ggctgtcaagttcat

SEQ ID NO: 241012 - DNA, 15 bp, Homo sapiens
gggctgtcaagttca

SEQ ID NO: 241013 - DNA, 15 bp, Homo sapiens
agggctgtcaagttc

SEQ ID NO: 241014 - DNA, 15 bp, Homo sapiens
cagggctgtcaagtt

SEQ ID NO: 241015 - DNA, 15 bp, Homo sapiens
gcagggctgtcaagt

SEQ ID NO: 241016 - DNA, 15 bp, Homo sapiens
tgcagggctgtcaag

SEQ ID NO: 241017 - DNA, 15 bp, Homo sapiens
ttgcagggctgtcaa

SEQ ID NO: 241018 - DNA, 15 bp, Homo sapiens
cttgcagggctgtca

SEQ ID NO: 241019 - DNA, 15 bp, Homo sapiens
tcttgcagggctgtc

SEQ ID NO: 241020 - DNA, 15 bp, Homo sapiens
ttcttgcagggctgt

SEQ ID NO: 241021 - DNA, 15 bp, Homo sapiens
tttcttgcagggctg

SEQ ID NO: 241022 - DNA, 15 bp, Homo sapiens
ttttcttgcagggct

SEQ ID NO: 241023 - DNA, 15 bp, Homo sapiens
cttttcttgcagggc

SEQ ID NO: 241024 - DNA, 15 bp, Homo sapiens
tcttttcttgcaggg

SEQ ID NO: 241025 - DNA, 15 bp, Homo sapiens
atcttttcttgcagg

SEQ ID NO: 241026 - DNA, 15 bp, Homo sapiens
catcttttcttgcag

SEQ ID NO: 241027 - DNA, 15 bp, Homo sapiens
acatcttttcttgca

SEQ ID NO: 241028 - DNA, 15 bp, Homo sapiens
cacatcttttcttgc

SEQ ID NO: 241029 - DNA, 15 bp, Homo sapiens
acacatcttttcttg

SEQ ID NO: 241030 - DNA, 15 bp, Homo sapiens
aacacatcttttctt

SEQ ID NO: 241031 - DNA, 15 bp, Homo sapiens
gaacacatcttttct

SEQ ID NO: 241032 - DNA, 15 bp, Homo sapiens
agaacacatcttttc

SEQ ID NO: 241033 - DNA, 15 bp, Homo sapiens
aagaacacatctttt

SEQ ID NO: 241034 - DNA, 15 bp, Homo sapiens
taagaacacatcttt

SEQ ID NO: 241035 - DNA, 15 bp, Homo sapiens
ataagaacacatctt

SEQ ID NO: 241036 - DNA, 15 bp, Homo sapiens
gataagaacacatct

SEQ ID NO: 241037 - DNA, 15 bp, Homo sapiens
tgataagaacacatc

SEQ ID NO: 241038 - DNA, 15 bp, Homo sapiens
atgataagaacacat

SEQ ID NO: 241039 - DNA, 15 bp, Homo sapiens
tatgataagaacaca

SEQ ID NO: 241040 - DNA, 15 bp, Homo sapiens
atatgataagaacac

SEQ ID NO: 241041 - DNA, 15 bp, Homo sapiens
catatgataagaaca

SEQ ID NO: 241042 - DNA, 15 bp, Homo sapiens
acatatgataagaac

SEQ ID NO: 241043 - DNA, 15 bp, Homo sapiens
cacatatgataagaa

SEQ ID NO: 241044 - DNA, 15 bp, Homo sapiens
ccacatatgataaga

SEQ ID NO: 241045 - DNA, 15 bp, Homo sapiens
tccacatatgataag

SEQ ID NO: 241046 - DNA, 15 bp, Homo sapiens
ttccacatatgataa

SEQ ID NO: 241047 - DNA, 15 bp, Homo sapiens
cttccacatatgata

SEQ ID NO: 241048 - DNA, 15 bp, Homo sapiens
ccttccacatatgat

SEQ ID NO: 241049 - DNA, 15 bp, Homo sapiens
cccttccacatatga

SEQ ID NO: 241050 - DNA, 15 bp, Homo sapiens
gcccttccacatatg

SEQ ID NO: 241051 - DNA, 15 bp, Homo sapiens
agcccttccacatat

SEQ ID NO: 241052 - DNA, 15 bp, Homo sapiens
aagcccttccacata

SEQ ID NO: 241053 - DNA, 15 bp, Homo sapiens
aaagcccttccacat

SEQ ID NO: 241054 - DNA, 15 bp, Homo sapiens
aaaagcccttccaca

SEQ ID NO: 241055 - DNA, 15 bp, Homo sapiens
aaaaagcccttccac

SEQ ID NO: 241056 - DNA, 15 bp, Homo sapiens
aaaaaagcccttcca

SEQ ID NO: 241057 - DNA, 15 bp, Homo sapiens
aaaaaaagcccttcc

SEQ ID NO: 241058 - DNA, 15 bp, Homo sapiens
aaaaaaaagcccttc

SEQ ID NO: 241059 - DNA, 15 bp, Homo sapiens
aaaaaaaaagccctt

SEQ ID NO: 241060 - DNA, 15 bp, Homo sapiens
caaaaaaaaagccct

SEQ ID NO: 241061 - DNA, 15 bp, Homo sapiens
ccaaaaaaaaagccc

SEQ ID NO: 241062 - DNA, 15 bp, Homo sapiens
accaaaaaaaaagcc

SEQ ID NO: 241063 - DNA, 15 bp, Homo sapiens
taccaaaaaaaaagc

SEQ ID NO: 241064 - DNA, 15 bp, Homo sapiens
ctaccaaaaaaaaag

SEQ ID NO: 241065 - DNA, 15 bp, Homo sapiens
cctaccaaaaaaaaa

SEQ ID NO: 241066 - DNA, 15 bp, Homo sapiens
tcctaccaaaaaaaa

SEQ ID NO: 241067 - DNA, 15 bp, Homo sapiens
ttcctaccaaaaaaa

SEQ ID NO: 241068 - DNA, 15 bp, Homo sapiens
tttcctaccaaaaaa

SEQ ID NO: 241069 - DNA, 15 bp, Homo sapiens
atttcctaccaaaaa

SEQ ID NO: 241070 - DNA, 15 bp, Homo sapiens
tatttcctaccaaaa

SEQ ID NO: 241071 - DNA, 15 bp, Homo sapiens
ctatttcctaccaaa

SEQ ID NO: 241072 - DNA, 15 bp, Homo sapiens
cctatttcctaccaa

SEQ ID NO: 241073 - DNA, 15 bp, Homo sapiens
acctatttcctacca

SEQ ID NO: 241074 - DNA, 15 bp, Homo sapiens
tacctatttcctacc

SEQ ID NO: 241075 - DNA, 15 bp, Homo sapiens
gtacctatttcctac

SEQ ID NO: 241076 - DNA, 15 bp, Homo sapiens
agtacctatttccta

SEQ ID NO: 241077 - DNA, 15 bp, Homo sapiens
aagtacctatttcct

SEQ ID NO: 241078 - DNA, 15 bp, Homo sapiens
caagtacctatttcc

SEQ ID NO: 241079 - DNA, 15 bp, Homo sapiens
ccaagtacctatttc

SEQ ID NO: 241080 - DNA, 15 bp, Homo sapiens
tccaagtacctattt

SEQ ID NO: 241081 - DNA, 15 bp, Homo sapiens
gtccaagtacctatt

SEQ ID NO: 241082 - DNA, 15 bp, Homo sapiens
tgtccaagtacctat

SEQ ID NO: 241083 - DNA, 15 bp, Homo sapiens
atgtccaagtaccta

SEQ ID NO: 241084 - DNA, 15 bp, Homo sapiens
catgtccaagtacct

SEQ ID NO: 241085 - DNA, 15 bp, Homo sapiens
acatgtccaagtacc

SEQ ID NO: 241086 - DNA, 15 bp, Homo sapiens
tacatgtccaagtac

SEQ ID NO: 241087 - DNA, 15 bp, Homo sapiens
ttacatgtccaagta

SEQ ID NO: 241088 - DNA, 15 bp, Homo sapiens
tttacatgtccaagt

SEQ ID NO: 241089 - DNA, 15 bp, Homo sapiens
ttttacatgtccaag

SEQ ID NO: 241090 - DNA, 15 bp, Homo sapiens
tttttacatgtccaa

SEQ ID NO: 241091 - DNA, 15 bp, Homo sapiens
atttttacatgtcca

SEQ ID NO: 241092 - DNA, 15 bp, Homo sapiens
gatttttacatgtcc

SEQ ID NO: 241093 - DNA, 15 bp, Homo sapiens
tgatttttacatgtc

SEQ ID NO: 241094 - DNA, 15 bp, Homo sapiens
ctgatttttacatgt

SEQ ID NO: 241095 - DNA, 15 bp, Homo sapiens
cctgatttttacatg

SEQ ID NO: 241096 - DNA, 15 bp, Homo sapiens
gcctgatttttacat

SEQ ID NO: 241097 - DNA, 15 bp, Homo sapiens
tgcctgatttttaca

SEQ ID NO: 241098 - DNA, 15 bp, Homo sapiens
atgcctgatttttac

SEQ ID NO: 241099 - DNA, 15 bp, Homo sapiens
aatgcctgattttta

SEQ ID NO: 241100 - DNA, 15 bp, Homo sapiens
gaatgcctgattttt

SEQ ID NO: 241101 - DNA, 15 bp, Homo sapiens
ggaatgcctgatttt

SEQ ID NO: 241102 - DNA, 15 bp, Homo sapiens
tggaatgcctgattt

SEQ ID NO: 241103 - DNA, 15 bp, Homo sapiens
ctggaatgcctgatt

SEQ ID NO: 241104 - DNA, 15 bp, Homo sapiens
gctggaatgcctgat

SEQ ID NO: 241105 - DNA, 15 bp, Homo sapiens
tgctggaatgcctga

SEQ ID NO: 241106 - DNA, 15 bp, Homo sapiens
atgctggaatgcctg

SEQ ID NO: 241107 - DNA, 15 bp, Homo sapiens
catgctggaatgcct

SEQ ID NO: 241108 - DNA, 15 bp, Homo sapiens
ccatgctggaatgcc

SEQ ID NO: 241109 - DNA, 15 bp, Homo sapiens
gccatgctggaatgc

SEQ ID NO: 241110 - DNA, 15 bp, Homo sapiens
agccatgctggaatg

SEQ ID NO: 241111 - DNA, 15 bp, Homo sapiens
cagccatgctggaat

SEQ ID NO: 241112 - DNA, 15 bp, Homo sapiens
acagccatgctggaa

SEQ ID NO: 241113 - DNA, 15 bp, Homo sapiens
gacagccatgctgga

SEQ ID NO: 241114 - DNA, 15 bp, Homo sapiens
ggacagccatgctgg

SEQ ID NO: 241115 - DNA, 15 bp, Homo sapiens
gggacagccatgctg

SEQ ID NO: 241116 - DNA, 15 bp, Homo sapiens
ggggacagccatgct

SEQ ID NO: 241117 - DNA, 15 bp, Homo sapiens
tggggacagccatgc

SEQ ID NO: 241118 - DNA, 15 bp, Homo sapiens
ttggggacagccatg

SEQ ID NO: 241119 - DNA, 15 bp, Homo sapiens
cttggggacagccat

SEQ ID NO: 241120 - DNA, 15 bp, Homo sapiens
ccttggggacagcca

SEQ ID NO: 241121 - DNA, 15 bp, Homo sapiens
gccttggggacagcc

SEQ ID NO: 241122 - DNA, 15 bp, Homo sapiens
ggccttggggacagc

SEQ ID NO: 241123 - DNA, 15 bp, Homo sapiens
gggccttggggacag

SEQ ID NO: 241124 - DNA, 15 bp, Homo sapiens
ggggccttggggaca

SEQ ID NO: 241125 - DNA, 15 bp, Homo sapiens
gggggccttggggac

SEQ ID NO: 241126 - DNA, 15 bp, Homo sapiens
tgggggccttgggga

SEQ ID NO: 241127 - DNA, 15 bp, Homo sapiens
gtgggggccttgggg

SEQ ID NO: 241128 - DNA, 15 bp, Homo sapiens
ggtgggggccttggg

SEQ ID NO: 241129 - DNA, 15 bp, Homo sapiens
aggtgggggccttgg

SEQ ID NO: 241130 - DNA, 15 bp, Homo sapiens
caggtgggggccttg

SEQ ID NO: 241131 - DNA, 15 bp, Homo sapiens
ccaggtgggggcctt

SEQ ID NO: 241132 - DNA, 15 bp, Homo sapiens
tccaggtgggggcct

SEQ ID NO: 241133 - DNA, 15 bp, Homo sapiens
ctccaggtgggggcc

SEQ ID NO: 241134 - DNA, 15 bp, Homo sapiens
cctccaggtgggggc

SEQ ID NO: 241135 - DNA, 15 bp, Homo sapiens
gcctccaggtggggg

SEQ ID NO: 241136 - DNA, 15 bp, Homo sapiens
agcctccaggtgggg

SEQ ID NO: 241137 - DNA, 15 bp, Homo sapiens
aagcctccaggtggg

SEQ ID NO: 241138 - DNA, 15 bp, Homo sapiens
taagcctccaggtgg

SEQ ID NO: 241139 - DNA, 15 bp, Homo sapiens
ctaagcctccaggtg

SEQ ID NO: 241140 - DNA, 15 bp, Homo sapiens
tctaagcctccaggt

SEQ ID NO: 241141 - DNA, 15 bp, Homo sapiens
gtctaagcctccagg

SEQ ID NO: 241142 - DNA, 15 bp, Homo sapiens
agtctaagcctccag

SEQ ID NO: 241143 - DNA, 15 bp, Homo sapiens
cagtctaagcctcca

SEQ ID NO: 241144 - DNA, 15 bp, Homo sapiens
gcagtctaagcctcc

SEQ ID NO: 241145 - DNA, 15 bp, Homo sapiens
tgcagtctaagcctc

SEQ ID NO: 241146 - DNA, 15 bp, Homo sapiens
ctgcagtctaagcct

SEQ ID NO: 241147 - DNA, 15 bp, Homo sapiens
gctgcagtctaagcc

SEQ ID NO: 241148 - DNA, 15 bp, Homo sapiens
agctgcagtctaagc

SEQ ID NO: 241149 - DNA, 15 bp, Homo sapiens
aagctgcagtctaag

SEQ ID NO: 241150 - DNA, 15 bp, Homo sapiens
gaagctgcagtctaa

SEQ ID NO: 241151 - DNA, 15 bp, Homo sapiens
agaagctgcagtcta

SEQ ID NO: 241152 - DNA, 15 bp, Homo sapiens
cagaagctgcagtct

SEQ ID NO: 241153 - DNA, 15 bp, Homo sapiens
gcagaagctgcagtc

SEQ ID NO: 241154 - DNA, 15 bp, Homo sapiens
agcagaagctgcagt

SEQ ID NO: 241155 - DNA, 15 bp, Homo sapiens
cagcagaagctgcag

SEQ ID NO: 241156 - DNA, 15 bp, Homo sapiens
acagcagaagctgca

SEQ ID NO: 241157 - DNA, 15 bp, Homo sapiens
aacagcagaagctgc

SEQ ID NO: 241158 - DNA, 15 bp, Homo sapiens
aaacagcagaagctg

SEQ ID NO: 241159 - DNA, 15 bp, Homo sapiens
aaaacagcagaagct

SEQ ID NO: 241160 - DNA, 15 bp, Homo sapiens
gaaaacagcagaagc

SEQ ID NO: 241161 - DNA, 15 bp, Homo sapiens
tgaaaacagcagaag

SEQ ID NO: 241162 - DNA, 15 bp, Homo sapiens
atgaaaacagcagaa

SEQ ID NO: 241163 - DNA, 15 bp, Homo sapiens
tatgaaaacagcaga

SEQ ID NO: 241164 - DNA, 15 bp, Homo sapiens
atatgaaaacagcag

SEQ ID NO: 241165 - DNA, 15 bp, Homo sapiens
gatatgaaaacagca

SEQ ID NO: 241166 - DNA, 15 bp, Homo sapiens
agatatgaaaacagc

SEQ ID NO: 241167 - DNA, 15 bp, Homo sapiens
aagatatgaaaacag

SEQ ID NO: 241168 - DNA, 15 bp, Homo sapiens
aaagatatgaaaaca

SEQ ID NO: 241169 - DNA, 15 bp, Homo sapiens
gaaagatatgaaaac

SEQ ID NO: 241170 - DNA, 15 bp, Homo sapiens
agaaagatatgaaaa

SEQ ID NO: 241171 - DNA, 15 bp, Homo sapiens
gagaaagatatgaaa

SEQ ID NO: 241172 - DNA, 15 bp, Homo sapiens
ggagaaagatatgaa

SEQ ID NO: 241173 - DNA, 15 bp, Homo sapiens
gggagaaagatatga

SEQ ID NO: 241174 - DNA, 15 bp, Homo sapiens
ggggagaaagatatg

SEQ ID NO: 241175 - DNA, 15 bp, Homo sapiens
aggggagaaagatat

SEQ ID NO: 241176 - DNA, 15 bp, Homo sapiens
aaggggagaaagata

SEQ ID NO: 241177 - DNA, 15 bp, Homo sapiens
aaaggggagaaagat

SEQ ID NO: 241178 - DNA, 15 bp, Homo sapiens
aaaaggggagaaaga

SEQ ID NO: 241179 - DNA, 15 bp, Homo sapiens
taaaaggggagaaag

SEQ ID NO: 241180 - DNA, 15 bp, Homo sapiens
ataaaaggggagaaa

SEQ ID NO: 241181 - DNA, 15 bp, Homo sapiens
gataaaaggggagaa

SEQ ID NO: 241182 - DNA, 15 bp, Homo sapiens
ggataaaaggggaga

SEQ ID NO: 241183 - DNA, 15 bp, Homo sapiens
aggataaaaggggag

SEQ ID NO: 241184 - DNA, 15 bp, Homo sapiens
gaggataaaagggga

SEQ ID NO: 241185 - DNA, 15 bp, Homo sapiens
agaggataaaagggg

SEQ ID NO: 241186 - DNA, 15 bp, Homo sapiens
gagaggataaaaggg

SEQ ID NO: 241187 - DNA, 15 bp, Homo sapiens
agagaggataaaagg

SEQ ID NO: 241188 - DNA, 15 bp, Homo sapiens
cagagaggataaaag

SEQ ID NO: 241189 - DNA, 15 bp, Homo sapiens
tcagagaggataaaa

SEQ ID NO: 241190 - DNA, 15 bp, Homo sapiens
ttcagagaggataaa

SEQ ID NO: 241191 - DNA, 15 bp, Homo sapiens
attcagagaggataa

SEQ ID NO: 241192 - DNA, 15 bp, Homo sapiens
cattcagagaggata

SEQ ID NO: 241193 - DNA, 15 bp, Homo sapiens
acattcagagaggat

SEQ ID NO: 241194 - DNA, 15 bp, Homo sapiens
aacattcagagagga

SEQ ID NO: 241195 - DNA, 15 bp, Homo sapiens
aaacattcagagagg

SEQ ID NO: 241196 - DNA, 15 bp, Homo sapiens
gaaacattcagagag

SEQ ID NO: 241197 - DNA, 15 bp, Homo sapiens
ggaaacattcagaga

SEQ ID NO: 241198 - DNA, 15 bp, Homo sapiens
tggaaacattcagag

SEQ ID NO: 241199 - DNA, 15 bp, Homo sapiens
ttggaaacattcaga

SEQ ID NO: 241200 - DNA, 15 bp, Homo sapiens
tttggaaacattcag

SEQ ID NO: 241201 - DNA, 15 bp, Homo sapiens
gtttggaaacattca

SEQ ID NO: 241202 - DNA, 15 bp, Homo sapiens
ggtttggaaacattc

SEQ ID NO: 241203 - DNA, 15 bp, Homo sapiens
gggtttggaaacatt

SEQ ID NO: 241204 - DNA, 15 bp, Homo sapiens
ggggtttggaaacat

SEQ ID NO: 241205 - DNA, 15 bp, Homo sapiens
gggggtttggaaaca

SEQ ID NO: 241206 - DNA, 15 bp, Homo sapiens
tgggggtttggaaac

SEQ ID NO: 241207 - DNA, 15 bp, Homo sapiens
ttgggggtttggaaa

SEQ ID NO: 241208 - DNA, 15 bp, Homo sapiens
tttgggggtttggaa

SEQ ID NO: 241209 - DNA, 15 bp, Homo sapiens
ctttgggggtttgga

SEQ ID NO: 241210 - DNA, 15 bp, Homo sapiens
cctttgggggtttgg

SEQ ID NO: 241211 - DNA, 15 bp, Homo sapiens
tcctttgggggtttg

SEQ ID NO: 241212 - DNA, 15 bp, Homo sapiens
gtcctttgggggttt

SEQ ID NO: 241213 - DNA, 15 bp, Homo sapiens
ggtcctttgggggtt

SEQ ID NO: 241214 - DNA, 15 bp, Homo sapiens
aggtcctttgggggt

SEQ ID NO: 241215 - DNA, 15 bp, Homo sapiens
caggtcctttggggg

SEQ ID NO: 241216 - DNA, 15 bp, Homo sapiens
gcaggtcctttgggg

SEQ ID NO: 241217 - DNA, 15 bp, Homo sapiens
tgcaggtcctttggg

SEQ ID NO: 241218 - DNA, 15 bp, Homo sapiens
ttgcaggtcctttgg

SEQ ID NO: 241219 - DNA, 15 bp, Homo sapiens
gttgcaggtcctttg

SEQ ID NO: 241220 - DNA, 15 bp, Homo sapiens
agttgcaggtccttt

SEQ ID NO: 241221 - DNA, 15 bp, Homo sapiens
aagttgcaggtcctt

SEQ ID NO: 241222 - DNA, 15 bp, Homo sapiens
aaagttgcaggtcct

SEQ ID NO: 241223 - DNA, 15 bp, Homo sapiens
taaagttgcaggtcc

SEQ ID NO: 241224 - DNA, 15 bp, Homo sapiens
ttaaagttgcaggtc

SEQ ID NO: 241225 - DNA, 15 bp, Homo sapiens
tttaaagttgcaggt

SEQ ID NO: 241226 - DNA, 15 bp, Homo sapiens
ctttaaagttgcagg

SEQ ID NO: 241227 - DNA, 15 bp, Homo sapiens
tctttaaagttgcag

SEQ ID NO: 241228 - DNA, 15 bp, Homo sapiens
ctctttaaagttgca

SEQ ID NO: 241229 - DNA, 15 bp, Homo sapiens
tctctttaaagttgc

SEQ ID NO: 241230 - DNA, 15 bp, Homo sapiens
ttctctttaaagttg

SEQ ID NO: 241231 - DNA, 15 bp, Homo sapiens
tttctctttaaagtt

SEQ ID NO: 241232 - DNA, 15 bp, Homo sapiens
atttctctttaaagt

SEQ ID NO: 241233 - DNA, 15 bp, Homo sapiens
tatttctctttaaag

SEQ ID NO: 241234 - DNA, 15 bp, Homo sapiens
atatttctctttaaa

SEQ ID NO: 241235 - DNA, 15 bp, Homo sapiens
aatatttctctttaa

SEQ ID NO: 241236 - DNA, 15 bp, Homo sapiens
taatatttctcttta

SEQ ID NO: 241237 - DNA, 15 bp, Homo sapiens
ataatatttctcttt

SEQ ID NO: 241238 - DNA, 15 bp, Homo sapiens
aataatatttctctt

SEQ ID NO: 241239 - DNA, 15 bp, Homo sapiens
caataatatttctct

SEQ ID NO: 241240 - DNA, 15 bp, Homo sapiens
tcaataatatttctc

SEQ ID NO: 241241 - DNA, 15 bp, Homo sapiens
atcaataatatttct

SEQ ID NO: 241242 - DNA, 15 bp, Homo sapiens
catcaataatatttc

SEQ ID NO: 241243 - DNA, 15 bp, Homo sapiens
gcatcaataatattt

SEQ ID NO: 241244 - DNA, 15 bp, Homo sapiens
tgcatcaataatatt

SEQ ID NO: 241245 - DNA, 15 bp, Homo sapiens
ctgcatcaataatat

SEQ ID NO: 241246 - DNA, 15 bp, Homo sapiens
actgcatcaataata

SEQ ID NO: 241247 - DNA, 15 bp, Homo sapiens
aactgcatcaataat

SEQ ID NO: 241248 - DNA, 15 bp, Homo sapiens
caactgcatcaataa

SEQ ID NO: 241249 - DNA, 15 bp, Homo sapiens
tcaactgcatcaata

SEQ ID NO: 241250 - DNA, 15 bp, Homo sapiens
ttcaactgcatcaat

SEQ ID NO: 241251 - DNA, 15 bp, Homo sapiens
attcaactgcatcaa

SEQ ID NO: 241252 - DNA, 15 bp, Homo sapiens
gattcaactgcatca

SEQ ID NO: 241253 - DNA, 15 bp, Homo sapiens
agattcaactgcatc

SEQ ID NO: 241254 - DNA, 15 bp, Homo sapiens
tagattcaactgcat

SEQ ID NO: 241255 - DNA, 15 bp, Homo sapiens
atagattcaactgca

SEQ ID NO: 241256 - DNA, 15 bp, Homo sapiens
aatagattcaactgc

SEQ ID NO: 241257 - DNA, 15 bp, Homo sapiens
aaatagattcaactg

SEQ ID NO: 241258 - DNA, 15 bp, Homo sapiens
aaaatagattcaact

SEQ ID NO: 241259 - DNA, 15 bp, Homo sapiens
aaaaatagattcaac

SEQ ID NO: 241260 - DNA, 15 bp, Homo sapiens
taaaaatagattcaa

SEQ ID NO: 241261 - DNA, 15 bp, Homo sapiens
ctaaaaatagattca

SEQ ID NO: 241262 - DNA, 15 bp, Homo sapiens
gctaaaaatagattc

SEQ ID NO: 241263 - DNA, 15 bp, Homo sapiens
ggctaaaaatagatt

SEQ ID NO: 241264 - DNA, 15 bp, Homo sapiens
aggctaaaaatagat

SEQ ID NO: 241265 - DNA, 15 bp, Homo sapiens
caggctaaaaataga

SEQ ID NO: 241266 - DNA, 15 bp, Homo sapiens
gcaggctaaaaatag

SEQ ID NO: 241267 - DNA, 15 bp, Homo sapiens
agcaggctaaaaata

SEQ ID NO: 241268 - DNA, 15 bp, Homo sapiens
cagcaggctaaaaat

SEQ ID NO: 241269 - DNA, 15 bp, Homo sapiens
ccagcaggctaaaaa

SEQ ID NO: 241270 - DNA, 15 bp, Homo sapiens
cccagcaggctaaaa

SEQ ID NO: 241271 - DNA, 15 bp, Homo sapiens
ccccagcaggctaaa

SEQ ID NO: 241272 - DNA, 15 bp, Homo sapiens
accccagcaggctaa

SEQ ID NO: 241273 - DNA, 15 bp, Homo sapiens
aaccccagcaggcta

SEQ ID NO: 241274 - DNA, 15 bp, Homo sapiens
caaccccagcaggct

SEQ ID NO: 241275 - DNA, 15 bp, Homo sapiens
ccaaccccagcaggc

SEQ ID NO: 241276 - DNA, 15 bp, Homo sapiens
accaaccccagcagg

SEQ ID NO: 241277 - DNA, 15 bp, Homo sapiens
caccaaccccagcag

SEQ ID NO: 241278 - DNA, 15 bp, Homo sapiens
gcaccaaccccagca

SEQ ID NO: 241279 - DNA, 15 bp, Homo sapiens
tgcaccaaccccagc

SEQ ID NO: 241280 - DNA, 15 bp, Homo sapiens
gtgcaccaaccccag

SEQ ID NO: 241281 - DNA, 15 bp, Homo sapiens
tgtgcaccaacccca

SEQ ID NO: 241282 - DNA, 15 bp, Homo sapiens
atgtgcaccaacccc

SEQ ID NO: 241283 - DNA, 15 bp, Homo sapiens
gatgtgcaccaaccc

SEQ ID NO: 241284 - DNA, 15 bp, Homo sapiens
ggatgtgcaccaacc

SEQ ID NO: 241285 - DNA, 15 bp, Homo sapiens
tggatgtgcaccaac

SEQ ID NO: 241286 - DNA, 15 bp, Homo sapiens
ttggatgtgcaccaa

SEQ ID NO: 241287 - DNA, 15 bp, Homo sapiens
tttggatgtgcacca

SEQ ID NO: 241288 - DNA, 15 bp, Homo sapiens
ctttggatgtgcacc

SEQ ID NO: 241289 - DNA, 15 bp, Homo sapiens
gctttggatgtgcac

SEQ ID NO: 241290 - DNA, 15 bp, Homo sapiens
tgctttggatgtgca

SEQ ID NO: 241291 - DNA, 15 bp, Homo sapiens
ctgctttggatgtgc

SEQ ID NO: 241292 - DNA, 15 bp, Homo sapiens
tctgctttggatgtg

SEQ ID NO: 241293 - DNA, 15 bp, Homo sapiens
ttctgctttggatgt

SEQ ID NO: 241294 - DNA, 15 bp, Homo sapiens
cttctgctttggatg

SEQ ID NO: 241295 - DNA, 15 bp, Homo sapiens
tcttctgctttggat

SEQ ID NO: 241296 - DNA, 15 bp, Homo sapiens
ttcttctgctttgga

SEQ ID NO: 241297 - DNA, 15 bp, Homo sapiens
attcttctgctttgg

SEQ ID NO: 241298 - DNA, 15 bp, Homo sapiens
aattcttctgctttg

SEQ ID NO: 241299 - DNA, 15 bp, Homo sapiens
aaattcttctgcttt

SEQ ID NO: 241300 - DNA, 15 bp, Homo sapiens
caaattcttctgctt

SEQ ID NO: 241301 - DNA, 15 bp, Homo sapiens
ccaaattcttctgct

SEQ ID NO: 241302 - DNA, 15 bp, Homo sapiens
accaaattcttctgc

SEQ ID NO: 241303 - DNA, 15 bp, Homo sapiens
aaccaaattcttctg

SEQ ID NO: 241304 - DNA, 15 bp, Homo sapiens
aaaccaaattcttct

SEQ ID NO: 241305 - DNA, 15 bp, Homo sapiens
aaaaccaaattcttc

SEQ ID NO: 241306 - DNA, 15 bp, Homo sapiens
taaaaccaaattctt

SEQ ID NO: 241307 - DNA, 15 bp, Homo sapiens
ataaaaccaaattct

SEQ ID NO: 241308 - DNA, 15 bp, Homo sapiens
tataaaaccaaattc

SEQ ID NO: 241309 - DNA, 15 bp, Homo sapiens
atataaaaccaaatt

SEQ ID NO: 241310 - DNA, 15 bp, Homo sapiens
gatataaaaccaaat

SEQ ID NO: 241311 - DNA, 15 bp, Homo sapiens
agatataaaaccaaa

SEQ ID NO: 241312 - DNA, 15 bp, Homo sapiens
tagatataaaaccaa

SEQ ID NO: 241313 - DNA, 15 bp, Homo sapiens
atagatataaaacca

SEQ ID NO: 241314 - DNA, 15 bp, Homo sapiens
aatagatataaaacc

SEQ ID NO: 241315 - DNA, 15 bp, Homo sapiens
aaatagatataaaac

SEQ ID NO: 241316 - DNA, 15 bp, Homo sapiens
aaaatagatataaaa

SEQ ID NO: 241317 - DNA, 15 bp, Homo sapiens
taaaatagatataaa

SEQ ID NO: 241318 - DNA, 15 bp, Homo sapiens
ataaaatagatataa

SEQ ID NO: 241319 - DNA, 15 bp, Homo sapiens
gataaaatagatata

SEQ ID NO: 241320 - DNA, 15 bp, Homo sapiens
agataaaatagatat

SEQ ID NO: 241321 - DNA, 15 bp, Homo sapiens
tagataaaatagata

SEQ ID NO: 241322 - DNA, 15 bp, Homo sapiens
gtagataaaatagat

SEQ ID NO: 241323 - DNA, 15 bp, Homo sapiens
tgtagataaaataga

SEQ ID NO: 241324 - DNA, 15 bp, Homo sapiens
atgtagataaaatag

SEQ ID NO: 241325 - DNA, 15 bp, Homo sapiens
gatgtagataaaata

SEQ ID NO: 241326 - DNA, 15 bp, Homo sapiens
tgatgtagataaaat

SEQ ID NO: 241327 - DNA, 15 bp, Homo sapiens
ttgatgtagataaaa

SEQ ID NO: 241328 - DNA, 15 bp, Homo sapiens
gttgatgtagataaa

SEQ ID NO: 241329 - DNA, 15 bp, Homo sapiens
tgttgatgtagataa

SEQ ID NO: 241330 - DNA, 15 bp, Homo sapiens
gtgttgatgtagata

SEQ ID NO: 241331 - DNA, 15 bp, Homo sapiens
agtgttgatgtagat

SEQ ID NO: 241332 - DNA, 15 bp, Homo sapiens
aagtgttgatgtaga

SEQ ID NO: 241333 - DNA, 15 bp, Homo sapiens
gaagtgttgatgtag

SEQ ID NO: 241334 - DNA, 15 bp, Homo sapiens
agaagtgttgatgta

SEQ ID NO: 241335 - DNA, 15 bp, Homo sapiens
aagaagtgttgatgt

SEQ ID NO: 241336 - DNA, 15 bp, Homo sapiens
aaagaagtgttgatg

SEQ ID NO: 241337 - DNA, 15 bp, Homo sapiens
taaagaagtgttgat

SEQ ID NO: 241338 - DNA, 15 bp, Homo sapiens
gtaaagaagtgttga

SEQ ID NO: 241339 - DNA, 15 bp, Homo sapiens
ggtaaagaagtgttg

SEQ ID NO: 241340 - DNA, 15 bp, Homo sapiens
aggtaaagaagtgtt

SEQ ID NO: 241341 - DNA, 15 bp, Homo sapiens
taggtaaagaagtgt

SEQ ID NO: 241342 - DNA, 15 bp, Homo sapiens
ttaggtaaagaagtg

SEQ ID NO: 241343 - DNA, 15 bp, Homo sapiens
tttaggtaaagaagt

SEQ ID NO: 241344 - DNA, 15 bp, Homo sapiens
ttttaggtaaagaag

SEQ ID NO: 241345 - DNA, 15 bp, Homo sapiens
attttaggtaaagaa

SEQ ID NO: 241346 - DNA, 15 bp, Homo sapiens
gattttaggtaaaga

SEQ ID NO: 241347 - DNA, 15 bp, Homo sapiens
ggattttaggtaaag

SEQ ID NO: 241348 - DNA, 15 bp, Homo sapiens
tggattttaggtaaa

SEQ ID NO: 241349 - DNA, 15 bp, Homo sapiens
atggattttaggtaa

SEQ ID NO: 241350 - DNA, 15 bp, Homo sapiens
aatggattttaggta

SEQ ID NO: 241351 - DNA, 15 bp, Homo sapiens
taatggattttaggt

SEQ ID NO: 241352 - DNA, 15 bp, Homo sapiens
ttaatggattttagg

SEQ ID NO: 241353 - DNA, 15 bp, Homo sapiens
tttaatggattttag

SEQ ID NO: 241354 - DNA, 15 bp, Homo sapiens
ttttaatggatttta

SEQ ID NO: 241355 - DNA, 15 bp, Homo sapiens
cttttaatggatttt

SEQ ID NO: 241356 - DNA, 15 bp, Homo sapiens
tcttttaatggattt

SEQ ID NO: 241357 - DNA, 15 bp, Homo sapiens
atcttttaatggatt

SEQ ID NO: 241358 - DNA, 15 bp, Homo sapiens
tatcttttaatggat

SEQ ID NO: 241359 - DNA, 15 bp, Homo sapiens
ttatcttttaatgga

SEQ ID NO: 241360 - DNA, 15 bp, Homo sapiens
gttatcttttaatgg

SEQ ID NO: 241361 - DNA, 15 bp, Homo sapiens
tgttatcttttaatg

SEQ ID NO: 241362 - DNA, 15 bp, Homo sapiens
ctgttatcttttaat

SEQ ID NO: 241363 - DNA, 15 bp, Homo sapiens
tctgttatcttttaa

SEQ ID NO: 241364 - DNA, 15 bp, Homo sapiens
ttctgttatctttta

SEQ ID NO: 241365 - DNA, 15 bp, Homo sapiens
tttctgttatctttt

SEQ ID NO: 241366 - DNA, 15 bp, Homo sapiens
gtttctgttatcttt

SEQ ID NO: 241367 - DNA, 15 bp, Homo sapiens
tgtttctgttatctt

SEQ ID NO: 241368 - DNA, 15 bp, Homo sapiens
ctgtttctgttatct

SEQ ID NO: 241369 - DNA, 15 bp, Homo sapiens
tctgtttctgttatc

SEQ ID NO: 241370 - DNA, 15 bp, Homo sapiens
ctctgtttctgttat

SEQ ID NO: 241371 - DNA, 15 bp, Homo sapiens
gctctgtttctgtta

SEQ ID NO: 241372 - DNA, 15 bp, Homo sapiens
agctctgtttctgtt

SEQ ID NO: 241373 - DNA, 15 bp, Homo sapiens
cagctctgtttctgt

SEQ ID NO: 241374 - DNA, 15 bp, Homo sapiens
tcagctctgtttctg

SEQ ID NO: 241375 - DNA, 15 bp, Homo sapiens
gtcagctctgtttct

SEQ ID NO: 241376 - DNA, 15 bp, Homo sapiens
agtcagctctgtttc

SEQ ID NO: 241377 - DNA, 15 bp, Homo sapiens
aagtcagctctgttt

SEQ ID NO: 241378 - DNA, 15 bp, Homo sapiens
gaagtcagctctgtt

SEQ ID NO: 241379 - DNA, 15 bp, Homo sapiens
tgaagtcagctctgt

SEQ ID NO: 241380 - DNA, 15 bp, Homo sapiens
ctgaagtcagctctg

SEQ ID NO: 241381 - DNA, 15 bp, Homo sapiens
tctgaagtcagctct

SEQ ID NO: 241382 - DNA, 15 bp, Homo sapiens
gtctgaagtcagctc

SEQ ID NO: 241383 - DNA, 15 bp, Homo sapiens
cgtctgaagtcagct

SEQ ID NO: 241384 - DNA, 15 bp, Homo sapiens
tcgtctgaagtcagc

SEQ ID NO: 241385 - DNA, 15 bp, Homo sapiens
gtcgtctgaagtcag

SEQ ID NO: 241386 - DNA, 15 bp, Homo sapiens
tgtcgtctgaagtca

SEQ ID NO: 241387 - DNA, 15 bp, Homo sapiens
atgtcgtctgaagtc

SEQ ID NO: 241388 - DNA, 15 bp, Homo sapiens
aatgtcgtctgaagt

SEQ ID NO: 241389 - DNA, 15 bp, Homo sapiens
gaatgtcgtctgaag

SEQ ID NO: 241390 - DNA, 15 bp, Homo sapiens
tgaatgtcgtctgaa

SEQ ID NO: 241391 - DNA, 15 bp, Homo sapiens
ttgaatgtcgtctga

SEQ ID NO: 241392 - DNA, 15 bp, Homo sapiens
attgaatgtcgtctg

SEQ ID NO: 241393 - DNA, 15 bp, Homo sapiens
aattgaatgtcgtct

SEQ ID NO: 241394 - DNA, 15 bp, Homo sapiens
caattgaatgtcgtc

SEQ ID NO: 241395 - DNA, 15 bp, Homo sapiens
ccaattgaatgtcgt

SEQ ID NO: 241396 - DNA, 15 bp, Homo sapiens
accaattgaatgtcg

SEQ ID NO: 241397 - DNA, 15 bp, Homo sapiens
aaccaattgaatgtc

SEQ ID NO: 241398 - DNA, 15 bp, Homo sapiens
gaaccaattgaatgt

SEQ ID NO: 241399 - DNA, 15 bp, Homo sapiens
tgaaccaattgaatg

SEQ ID NO: 241400 - DNA, 15 bp, Homo sapiens
atgaaccaattgaat

SEQ ID NO: 241401 - DNA, 15 bp, Homo sapiens
tatgaaccaattgaa

SEQ ID NO: 241402 - DNA, 15 bp, Homo sapiens
atatgaaccaattga

SEQ ID NO: 241403 - DNA, 15 bp, Homo sapiens
aatatgaaccaattg

SEQ ID NO: 241404 - DNA, 15 bp, Homo sapiens
aaatatgaaccaatt

SEQ ID NO: 241405 - DNA, 15 bp, Homo sapiens
aaaatatgaaccaat

SEQ ID NO: 241406 - DNA, 15 bp, Homo sapiens
caaaatatgaaccaa

SEQ ID NO: 241407 - DNA, 15 bp, Homo sapiens
ccaaaatatgaacca

SEQ ID NO: 241408 - DNA, 15 bp, Homo sapiens
cccaaaatatgaacc

SEQ ID NO: 241409 - DNA, 15 bp, Homo sapiens
ccccaaaatatgaac

SEQ ID NO: 241410 - DNA, 15 bp, Homo sapiens
cccccaaaatatgaa

SEQ ID NO: 241411 - DNA, 15 bp, Homo sapiens
ccccccaaaatatga

SEQ ID NO: 241412 - DNA, 15 bp, Homo sapiens
gccccccaaaatatg

SEQ ID NO: 241413 - DNA, 15 bp, Homo sapiens
tgccccccaaaatat

SEQ ID NO: 241414 - DNA, 15 bp, Homo sapiens
ttgccccccaaaata

SEQ ID NO: 241415 - DNA, 15 bp, Homo sapiens
attgccccccaaaat

SEQ ID NO: 241416 - DNA, 15 bp, Homo sapiens
tattgccccccaaaa

SEQ ID NO: 241417 - DNA, 15 bp, Homo sapiens
atattgccccccaaa

SEQ ID NO: 241418 - DNA, 15 bp, Homo sapiens
catattgccccccaa

SEQ ID NO: 241419 - DNA, 15 bp, Homo sapiens
acatattgcccccca

SEQ ID NO: 241420 - DNA, 15 bp, Homo sapiens
gacatattgcccccc

SEQ ID NO: 241421 - DNA, 15 bp, Homo sapiens
tgacatattgccccc

SEQ ID NO: 241422 - DNA, 15 bp, Homo sapiens
atgacatattgcccc

SEQ ID NO: 241423 - DNA, 15 bp, Homo sapiens
catgacatattgccc

SEQ ID NO: 241424 - DNA, 15 bp, Homo sapiens
gcatgacatattgcc

SEQ ID NO: 241425 - DNA, 15 bp, Homo sapiens
ggcatgacatattgc

SEQ ID NO: 241426 - DNA, 15 bp, Homo sapiens
gggcatgacatattg

SEQ ID NO: 241427 - DNA, 15 bp, Homo sapiens
ggggcatgacatatt

SEQ ID NO: 241428 - DNA, 15 bp, Homo sapiens
tggggcatgacatat

SEQ ID NO: 241429 - DNA, 15 bp, Homo sapiens
gtggggcatgacata

SEQ ID NO: 241430 - DNA, 15 bp, Homo sapiens
ggtggggcatgacat

SEQ ID NO: 241431 - DNA, 15 bp, Homo sapiens
aggtggggcatgaca

SEQ ID NO: 241432 - DNA, 15 bp, Homo sapiens
aaggtggggcatgac

SEQ ID NO: 241433 - DNA, 15 bp, Homo sapiens
caaggtggggcatga

SEQ ID NO: 241434 - DNA, 15 bp, Homo sapiens
gcaaggtggggcatg

SEQ ID NO: 241435 - DNA, 15 bp, Homo sapiens
agcaaggtggggcat

SEQ ID NO: 241436 - DNA, 15 bp, Homo sapiens
cagcaaggtggggca

SEQ ID NO: 241437 - DNA, 15 bp, Homo sapiens
acagcaaggtggggc

SEQ ID NO: 241438 - DNA, 15 bp, Homo sapiens
tacagcaaggtgggg

SEQ ID NO: 241439 - DNA, 15 bp, Homo sapiens
ctacagcaaggtggg

SEQ ID NO: 241440 - DNA, 15 bp, Homo sapiens
gctacagcaaggtgg

SEQ ID NO: 241441 - DNA, 15 bp, Homo sapiens
agctacagcaaggtg

SEQ ID NO: 241442 - DNA, 15 bp, Homo sapiens
cagctacagcaaggt

SEQ ID NO: 241443 - DNA, 15 bp, Homo sapiens
tcagctacagcaagg

SEQ ID NO: 241444 - DNA, 15 bp, Homo sapiens
ctcagctacagcaag

SEQ ID NO: 241445 - DNA, 15 bp, Homo sapiens
tctcagctacagcaa

SEQ ID NO: 241446 - DNA, 15 bp, Homo sapiens
gtctcagctacagca

SEQ ID NO: 241447 - DNA, 15 bp, Homo sapiens
tgtctcagctacagc

SEQ ID NO: 241448 - DNA, 15 bp, Homo sapiens
atgtctcagctacag

SEQ ID NO: 241449 - DNA, 15 bp, Homo sapiens
catgtctcagctaca

SEQ ID NO: 241450 - DNA, 15 bp, Homo sapiens
gcatgtctcagctac

SEQ ID NO: 241451 - DNA, 15 bp, Homo sapiens
ggcatgtctcagcta

SEQ ID NO: 241452 - DNA, 15 bp, Homo sapiens
aggcatgtctcagct

SEQ ID NO: 241453 - DNA, 15 bp, Homo sapiens
aaggcatgtctcagc

SEQ ID NO: 241454 - DNA, 15 bp, Homo sapiens
aaaggcatgtctcag

SEQ ID NO: 241455 - DNA, 15 bp, Homo sapiens
taaaggcatgtctca

SEQ ID NO: 241456 - DNA, 15 bp, Homo sapiens
ttaaaggcatgtctc

SEQ ID NO: 241457 - DNA, 15 bp, Homo sapiens
gttaaaggcatgtct

SEQ ID NO: 241458 - DNA, 15 bp, Homo sapiens
tgttaaaggcatgtc

SEQ ID NO: 241459 - DNA, 15 bp, Homo sapiens
atgttaaaggcatgt

SEQ ID NO: 241460 - DNA, 15 bp, Homo sapiens
aatgttaaaggcatg

SEQ ID NO: 241461 - DNA, 15 bp, Homo sapiens
aaatgttaaaggcat

SEQ ID NO: 241462 - DNA, 15 bp, Homo sapiens
gaaatgttaaaggca

SEQ ID NO: 241463 - DNA, 15 bp, Homo sapiens
ggaaatgttaaaggc

SEQ ID NO: 241464 - DNA, 15 bp, Homo sapiens
tggaaatgttaaagg

SEQ ID NO: 241465 - DNA, 15 bp, Homo sapiens
ttggaaatgttaaag

SEQ ID NO: 241466 - DNA, 15 bp, Homo sapiens
cttggaaatgttaaa

SEQ ID NO: 241467 - DNA, 15 bp, Homo sapiens
ccttggaaatgttaa

SEQ ID NO: 241468 - DNA, 15 bp, Homo sapiens
tccttggaaatgtta

SEQ ID NO: 241469 - DNA, 15 bp, Homo sapiens
ctccttggaaatgtt

SEQ ID NO: 241470 - DNA, 15 bp, Homo sapiens
gctccttggaaatgt

SEQ ID NO: 241471 - DNA, 15 bp, Homo sapiens
ggctccttggaaatg

SEQ ID NO: 241472 - DNA, 15 bp, Homo sapiens
tggctccttggaaat

SEQ ID NO: 241473 - DNA, 15 bp, Homo sapiens
gtggctccttggaaa

SEQ ID NO: 241474 - DNA, 15 bp, Homo sapiens
tgtggctccttggaa

SEQ ID NO: 241475 - DNA, 15 bp, Homo sapiens
ctgtggctccttgga

SEQ ID NO: 241476 - DNA, 15 bp, Homo sapiens
tctgtggctccttgg

SEQ ID NO: 241477 - DNA, 15 bp, Homo sapiens
ttctgtggctccttg

SEQ ID NO: 241478 - DNA, 15 bp, Homo sapiens
tttctgtggctcctt

SEQ ID NO: 241479 - DNA, 15 bp, Homo sapiens
ttttctgtggctcct

SEQ ID NO: 241480 - DNA, 15 bp, Homo sapiens
tttttctgtggctcc

SEQ ID NO: 241481 - DNA, 15 bp, Homo sapiens
ctttttctgtggctc

SEQ ID NO: 241482 - DNA, 15 bp, Homo sapiens
tctttttctgtggct

SEQ ID NO: 241483 - DNA, 15 bp, Homo sapiens
gtctttttctgtggc

SEQ ID NO: 241484 - DNA, 15 bp, Homo sapiens
tgtctttttctgtgg

SEQ ID NO: 241485 - DNA, 15 bp, Homo sapiens
atgtctttttctgtg

SEQ ID NO: 241486 - DNA, 15 bp, Homo sapiens
tatgtctttttctgt

SEQ ID NO: 241487 - DNA, 15 bp, Homo sapiens
ctatgtctttttctg

SEQ ID NO: 241488 - DNA, 15 bp, Homo sapiens
tctatgtctttttct

SEQ ID NO: 241489 - DNA, 15 bp, Homo sapiens
ttctatgtctttttc

SEQ ID NO: 241490 - DNA, 15 bp, Homo sapiens
tttctatgtcttttt

SEQ ID NO: 241491 - DNA, 15 bp, Homo sapiens
ttttctatgtctttt

SEQ ID NO: 241492 - DNA, 15 bp, Homo sapiens
gttttctatgtcttt

SEQ ID NO: 241493 - DNA, 15 bp, Homo sapiens
ggttttctatgtctt

SEQ ID NO: 241494 - DNA, 15 bp, Homo sapiens
aggttttctatgtct

SEQ ID NO: 241495 - DNA, 15 bp, Homo sapiens
aaggttttctatgtc

SEQ ID NO: 241496 - DNA, 15 bp, Homo sapiens
gaaggttttctatgt

SEQ ID NO: 241497 - DNA, 15 bp, Homo sapiens
cgaaggttttctatg

SEQ ID NO: 241498 - DNA, 15 bp, Homo sapiens
tcgaaggttttctat

SEQ ID NO: 241499 - DNA, 15 bp, Homo sapiens
atcgaaggttttcta

SEQ ID NO: 241500 - DNA, 15 bp, Homo sapiens
aatcgaaggttttct

SEQ ID NO: 241501 - DNA, 15 bp, Homo sapiens
caatcgaaggttttc

SEQ ID NO: 241502 - DNA, 15 bp, Homo sapiens
gcaatcgaaggtttt

SEQ ID NO: 241503 - DNA, 15 bp, Homo sapiens
tgcaatcgaaggttt

SEQ ID NO: 241504 - DNA, 15 bp, Homo sapiens
atgcaatcgaaggtt

SEQ ID NO: 241505 - DNA, 15 bp, Homo sapiens
aatgcaatcgaaggt

SEQ ID NO: 241506 - DNA, 15 bp, Homo sapiens
aaatgcaatcgaagg

SEQ ID NO: 241507 - DNA, 15 bp, Homo sapiens
taaatgcaatcgaag

SEQ ID NO: 241508 - DNA, 15 bp, Homo sapiens
ctaaatgcaatcgaa

SEQ ID NO: 241509 - DNA, 15 bp, Homo sapiens
tctaaatgcaatcga

SEQ ID NO: 241510 - DNA, 15 bp, Homo sapiens
ctctaaatgcaatcg

SEQ ID NO: 241511 - DNA, 15 bp, Homo sapiens
tctctaaatgcaatc

SEQ ID NO: 241512 - DNA, 15 bp, Homo sapiens
atctctaaatgcaat

SEQ ID NO: 241513 - DNA, 15 bp, Homo sapiens
aatctctaaatgcaa

SEQ ID NO: 241514 - DNA, 15 bp, Homo sapiens
taatctctaaatgca

SEQ ID NO: 241515 - DNA, 15 bp, Homo sapiens
ctaatctctaaatgc

SEQ ID NO: 241516 - DNA, 15 bp, Homo sapiens
tctaatctctaaatg

SEQ ID NO: 241517 - DNA, 15 bp, Homo sapiens
ttctaatctctaaat

SEQ ID NO: 241518 - DNA, 15 bp, Homo sapiens
cttctaatctctaaa

SEQ ID NO: 241519 - DNA, 15 bp, Homo sapiens
tcttctaatctctaa

SEQ ID NO: 241520 - DNA, 15 bp, Homo sapiens
ctcttctaatctcta

SEQ ID NO: 241521 - DNA, 15 bp, Homo sapiens
cctcttctaatctct

SEQ ID NO: 241522 - DNA, 15 bp, Homo sapiens
tcctcttctaatctc

SEQ ID NO: 241523 - DNA, 15 bp, Homo sapiens
atcctcttctaatct

SEQ ID NO: 241524 - DNA, 15 bp, Homo sapiens
aatcctcttctaatc

SEQ ID NO: 241525 - DNA, 15 bp, Homo sapiens
aaatcctcttctaat

SEQ ID NO: 241526 - DNA, 15 bp, Homo sapiens
aaaatcctcttctaa

SEQ ID NO: 241527 - DNA, 15 bp, Homo sapiens
aaaaatcctcttcta

SEQ ID NO: 241528 - DNA, 15 bp, Homo sapiens
gaaaaatcctcttct

SEQ ID NO: 241529 - DNA, 15 bp, Homo sapiens
agaaaaatcctcttc

SEQ ID NO: 241530 - DNA, 15 bp, Homo sapiens
gagaaaaatcctctt

SEQ ID NO: 241531 - DNA, 15 bp, Homo sapiens
ggagaaaaatcctct

SEQ ID NO: 241532 - DNA, 15 bp, Homo sapiens
aggagaaaaatcctc

SEQ ID NO: 241533 - DNA, 15 bp, Homo sapiens
taggagaaaaatcct

SEQ ID NO: 241534 - DNA, 15 bp, Homo sapiens
ttaggagaaaaatcc

SEQ ID NO: 241535 - DNA, 15 bp, Homo sapiens
tttaggagaaaaatc

SEQ ID NO: 241536 - DNA, 15 bp, Homo sapiens
atttaggagaaaaat

SEQ ID NO: 241537 - DNA, 15 bp, Homo sapiens
tatttaggagaaaaa

SEQ ID NO: 241538 - DNA, 15 bp, Homo sapiens
atatttaggagaaaa

SEQ ID NO: 241539 - DNA, 15 bp, Homo sapiens
catatttaggagaaa

SEQ ID NO: 241540 - DNA, 15 bp, Homo sapiens
ccatatttaggagaa

SEQ ID NO: 241541 - DNA, 15 bp, Homo sapiens
tccatatttaggaga

SEQ ID NO: 241542 - DNA, 15 bp, Homo sapiens
ctccatatttaggag

SEQ ID NO: 241543 - DNA, 15 bp, Homo sapiens
gctccatatttagga

SEQ ID NO: 241544 - DNA, 15 bp, Homo sapiens
agctccatatttagg

SEQ ID NO: 241545 - DNA, 15 bp, Homo sapiens
cagctccatatttag

SEQ ID NO: 241546 - DNA, 15 bp, Homo sapiens
acagctccatattta

SEQ ID NO: 241547 - DNA, 15 bp, Homo sapiens
aacagctccatattt

SEQ ID NO: 241548 - DNA, 15 bp, Homo sapiens
aaacagctccatatt

SEQ ID NO: 241549 - DNA, 15 bp, Homo sapiens
gaaacagctccatat

SEQ ID NO: 241550 - DNA, 15 bp, Homo sapiens
ggaaacagctccata

SEQ ID NO: 241551 - DNA, 15 bp, Homo sapiens
aggaaacagctccat

SEQ ID NO: 241552 - DNA, 15 bp, Homo sapiens
aaggaaacagctcca

SEQ ID NO: 241553 - DNA, 15 bp, Homo sapiens
caaggaaacagctcc

SEQ ID NO: 241554 - DNA, 15 bp, Homo sapiens
tcaaggaaacagctc

SEQ ID NO: 241555 - DNA, 15 bp, Homo sapiens
gtcaaggaaacagct

SEQ ID NO: 241556 - DNA, 15 bp, Homo sapiens
agtcaaggaaacagc

SEQ ID NO: 241557 - DNA, 15 bp, Homo sapiens
gagtcaaggaaacag

SEQ ID NO: 241558 - DNA, 15 bp, Homo sapiens
tgagtcaaggaaaca

SEQ ID NO: 241559 - DNA, 15 bp, Homo sapiens
ctgagtcaaggaaac

SEQ ID NO: 241560 - DNA, 15 bp, Homo sapiens
gctgagtcaaggaaa

SEQ ID NO: 241561 - DNA, 15 bp, Homo sapiens
tgctgagtcaaggaa

SEQ ID NO: 241562 - DNA, 15 bp, Homo sapiens
ctgctgagtcaagga

SEQ ID NO: 241563 - DNA, 15 bp, Homo sapiens
cctgctgagtcaagg

SEQ ID NO: 241564 - DNA, 15 bp, Homo sapiens
acctgctgagtcaag

SEQ ID NO: 241565 - DNA, 15 bp, Homo sapiens
tacctgctgagtcaa

SEQ ID NO: 241566 - DNA, 15 bp, Homo sapiens
atacctgctgagtca

SEQ ID NO: 241567 - DNA, 15 bp, Homo sapiens
catacctgctgagtc

SEQ ID NO: 241568 - DNA, 15 bp, Homo sapiens
acatacctgctgagt

SEQ ID NO: 241569 - DNA, 15 bp, Homo sapiens
cacatacctgctgag

SEQ ID NO: 241570 - DNA, 15 bp, Homo sapiens
tcacatacctgctga

SEQ ID NO: 241571 - DNA, 15 bp, Homo sapiens
ctcacatacctgctg

SEQ ID NO: 241572 - DNA, 15 bp, Homo sapiens
tctcacatacctgct

SEQ ID NO: 241573 - DNA, 15 bp, Homo sapiens
atctcacatacctgc

SEQ ID NO: 241574 - DNA, 15 bp, Homo sapiens
catctcacatacctg

SEQ ID NO: 241575 - DNA, 15 bp, Homo sapiens
ccatctcacatacct

SEQ ID NO: 241576 - DNA, 15 bp, Homo sapiens
tccatctcacatacc

SEQ ID NO: 241577 - DNA, 15 bp, Homo sapiens
atccatctcacatac

SEQ ID NO: 241578 - DNA, 15 bp, Homo sapiens
tatccatctcacata

SEQ ID NO: 241579 - DNA, 15 bp, Homo sapiens
atatccatctcacat

SEQ ID NO: 241580 - DNA, 15 bp, Homo sapiens
catatccatctcaca

SEQ ID NO: 241581 - DNA, 15 bp, Homo sapiens
tcatatccatctcac

SEQ ID NO: 241582 - DNA, 15 bp, Homo sapiens
ttcatatccatctca

SEQ ID NO: 241583 - DNA, 15 bp, Homo sapiens
tttcatatccatctc

SEQ ID NO: 241584 - DNA, 15 bp, Homo sapiens
ctttcatatccatct

SEQ ID NO: 241585 - DNA, 15 bp, Homo sapiens
gctttcatatccatc

SEQ ID NO: 241586 - DNA, 15 bp, Homo sapiens
tgctttcatatccat

SEQ ID NO: 241587 - DNA, 15 bp, Homo sapiens
ttgctttcatatcca

SEQ ID NO: 241588 - DNA, 15 bp, Homo sapiens
tttgctttcatatcc

SEQ ID NO: 241589 - DNA, 15 bp, Homo sapiens
ttttgctttcatatc

SEQ ID NO: 241590 - DNA, 15 bp, Homo sapiens
cttttgctttcatat

SEQ ID NO: 241591 - DNA, 15 bp, Homo sapiens
tcttttgctttcata

SEQ ID NO: 241592 - DNA, 15 bp, Homo sapiens
atcttttgctttcat

SEQ ID NO: 241593 - DNA, 15 bp, Homo sapiens
catcttttgctttca

SEQ ID NO: 241594 - DNA, 15 bp, Homo sapiens
acatcttttgctttc

SEQ ID NO: 241595 - DNA, 15 bp, Homo sapiens
aacatcttttgcttt

SEQ ID NO: 241596 - DNA, 15 bp, Homo sapiens
gaacatcttttgctt

SEQ ID NO: 241597 - DNA, 15 bp, Homo sapiens
ggaacatcttttgct

SEQ ID NO: 241598 - DNA, 15 bp, Homo sapiens
gggaacatcttttgc

SEQ ID NO: 241599 - DNA, 15 bp, Homo sapiens
agggaacatcttttg

SEQ ID NO: 241600 - DNA, 15 bp, Homo sapiens
aagggaacatctttt

SEQ ID NO: 241601 - DNA, 15 bp, Homo sapiens
caagggaacatcttt

SEQ ID NO: 241602 - DNA, 15 bp, Homo sapiens
gcaagggaacatctt

SEQ ID NO: 241603 - DNA, 15 bp, Homo sapiens
ggcaagggaacatct

SEQ ID NO: 241604 - DNA, 15 bp, Homo sapiens
tggcaagggaacatc

SEQ ID NO: 241605 - DNA, 15 bp, Homo sapiens
atggcaagggaacat

SEQ ID NO: 241606 - DNA, 15 bp, Homo sapiens
catggcaagggaaca

SEQ ID NO: 241607 - DNA, 15 bp, Homo sapiens
tcatggcaagggaac

SEQ ID NO: 241608 - DNA, 15 bp, Homo sapiens
ttcatggcaagggaa

SEQ ID NO: 241609 - DNA, 15 bp, Homo sapiens
cttcatggcaaggga

SEQ ID NO: 241610 - DNA, 15 bp, Homo sapiens
gcttcatggcaaggg

SEQ ID NO: 241611 - DNA, 15 bp, Homo sapiens
tgcttcatggcaagg

SEQ ID NO: 241612 - DNA, 15 bp, Homo sapiens
ttgcttcatggcaag

SEQ ID NO: 241613 - DNA, 15 bp, Homo sapiens
cttgcttcatggcaa

SEQ ID NO: 241614 - DNA, 15 bp, Homo sapiens
acttgcttcatggca

SEQ ID NO: 241615 - DNA, 15 bp, Homo sapiens
tacttgcttcatggc

SEQ ID NO: 241616 - DNA, 15 bp, Homo sapiens
atacttgcttcatgg

SEQ ID NO: 241617 - DNA, 15 bp, Homo sapiens
aatacttgcttcatg

SEQ ID NO: 241618 - DNA, 15 bp, Homo sapiens
aaatacttgcttcat

SEQ ID NO: 241619 - DNA, 15 bp, Homo sapiens
aaaatacttgcttca

SEQ ID NO: 241620 - DNA, 15 bp, Homo sapiens
aaaaatacttgcttc

SEQ ID NO: 241621 - DNA, 15 bp, Homo sapiens
caaaaatacttgctt

SEQ ID NO: 241622 - DNA, 15 bp, Homo sapiens
tcaaaaatacttgct

SEQ ID NO: 241623 - DNA, 15 bp, Homo sapiens
ctcaaaaatacttgc

SEQ ID NO: 241624 - DNA, 15 bp, Homo sapiens
actcaaaaatacttg

SEQ ID NO: 241625 - DNA, 15 bp, Homo sapiens
gactcaaaaatactt

SEQ ID NO: 241626 - DNA, 15 bp, Homo sapiens
tgactcaaaaatact

SEQ ID NO: 241627 - DNA, 15 bp, Homo sapiens
atgactcaaaaatac

SEQ ID NO: 241628 - DNA, 15 bp, Homo sapiens
tatgactcaaaaata

SEQ ID NO: 241629 - DNA, 15 bp, Homo sapiens
ctatgactcaaaaat

SEQ ID NO: 241630 - DNA, 15 bp, Homo sapiens
tctatgactcaaaaa

SEQ ID NO: 241631 - DNA, 15 bp, Homo sapiens
atctatgactcaaaa

SEQ ID NO: 241632 - DNA, 15 bp, Homo sapiens
gatctatgactcaaa

SEQ ID NO: 241633 - DNA, 15 bp, Homo sapiens
agatctatgactcaa

SEQ ID NO: 241634 - DNA, 15 bp, Homo sapiens
aagatctatgactca

SEQ ID NO: 241635 - DNA, 15 bp, Homo sapiens
taagatctatgactc

SEQ ID NO: 241636 - DNA, 15 bp, Homo sapiens
ataagatctatgact

SEQ ID NO: 241637 - DNA, 15 bp, Homo sapiens
aataagatctatgac

SEQ ID NO: 241638 - DNA, 15 bp, Homo sapiens
caataagatctatga

SEQ ID NO: 241639 - DNA, 15 bp, Homo sapiens
tcaataagatctatg

SEQ ID NO: 241640 - DNA, 15 bp, Homo sapiens
atcaataagatctat

SEQ ID NO: 241641 - DNA, 15 bp, Homo sapiens
gatcaataagatcta

SEQ ID NO: 241642 - DNA, 15 bp, Homo sapiens
tgatcaataagatct

SEQ ID NO: 241643 - DNA, 15 bp, Homo sapiens
ctgatcaataagatc

SEQ ID NO: 241644 - DNA, 15 bp, Homo sapiens
tctgatcaataagat

SEQ ID NO: 241645 - DNA, 15 bp, Homo sapiens
gtctgatcaataaga

SEQ ID NO: 241646 - DNA, 15 bp, Homo sapiens
agtctgatcaataag

SEQ ID NO: 241647 - DNA, 15 bp, Homo sapiens
gagtctgatcaataa

SEQ ID NO: 241648 - DNA, 15 bp, Homo sapiens
tgagtctgatcaata

SEQ ID NO: 241649 - DNA, 15 bp, Homo sapiens
atgagtctgatcaat

SEQ ID NO: 241650 - DNA, 15 bp, Homo sapiens
aatgagtctgatcaa

SEQ ID NO: 241651 - DNA, 15 bp, Homo sapiens
gaatgagtctgatca

SEQ ID NO: 241652 - DNA, 15 bp, Homo sapiens
tgaatgagtctgatc

SEQ ID NO: 241653 - DNA, 15 bp, Homo sapiens
ttgaatgagtctgat

SEQ ID NO: 241654 - DNA, 15 bp, Homo sapiens
attgaatgagtctga

SEQ ID NO: 241655 - DNA, 15 bp, Homo sapiens
aattgaatgagtctg

SEQ ID NO: 241656 - DNA, 15 bp, Homo sapiens
caattgaatgagtct

SEQ ID NO: 241657 - DNA, 15 bp, Homo sapiens
ccaattgaatgagtc

SEQ ID NO: 241658 - DNA, 15 bp, Homo sapiens
tccaattgaatgagt

SEQ ID NO: 241659 - DNA, 15 bp, Homo sapiens
gtccaattgaatgag

SEQ ID NO: 241660 - DNA, 15 bp, Homo sapiens
tgtccaattgaatga

SEQ ID NO: 241661 - DNA, 15 bp, Homo sapiens
atgtccaattgaatg

SEQ ID NO: 241662 - DNA, 15 bp, Homo sapiens
aatgtccaattgaat

SEQ ID NO: 241663 - DNA, 15 bp, Homo sapiens
aaatgtccaattgaa

SEQ ID NO: 241664 - DNA, 15 bp, Homo sapiens
gaaatgtccaattga

SEQ ID NO: 241665 - DNA, 15 bp, Homo sapiens
agaaatgtccaattg

SEQ ID NO: 241666 - DNA, 15 bp, Homo sapiens
gagaaatgtccaatt

SEQ ID NO: 241667 - DNA, 15 bp, Homo sapiens
agagaaatgtccaat

SEQ ID NO: 241668 - DNA, 15 bp, Homo sapiens
aagagaaatgtccaa

SEQ ID NO: 241669 - DNA, 15 bp, Homo sapiens
caagagaaatgtcca

SEQ ID NO: 241670 - DNA, 15 bp, Homo sapiens
acaagagaaatgtcc

SEQ ID NO: 241671 - DNA, 15 bp, Homo sapiens
cacaagagaaatgtc

SEQ ID NO: 241672 - DNA, 15 bp, Homo sapiens
acacaagagaaatgt

SEQ ID NO: 241673 - DNA, 15 bp, Homo sapiens
cacacaagagaaatg

SEQ ID NO: 241674 - DNA, 15 bp, Homo sapiens
gcacacaagagaaat

SEQ ID NO: 241675 - DNA, 15 bp, Homo sapiens
tgcacacaagagaaa

SEQ ID NO: 241676 - DNA, 15 bp, Homo sapiens
gtgcacacaagagaa

SEQ ID NO: 241677 - DNA, 15 bp, Homo sapiens
tgtgcacacaagaga

SEQ ID NO: 241678 - DNA, 15 bp, Homo sapiens
gtgtgcacacaagag

SEQ ID NO: 241679 - DNA, 15 bp, Homo sapiens
tgtgtgcacacaaga

SEQ ID NO: 241680 - DNA, 15 bp, Homo sapiens
atgtgtgcacacaag

SEQ ID NO: 241681 - DNA, 15 bp, Homo sapiens
catgtgtgcacacaa

SEQ ID NO: 241682 - DNA, 15 bp, Homo sapiens
acatgtgtgcacaca

SEQ ID NO: 241683 - DNA, 15 bp, Homo sapiens
aacatgtgtgcacac

SEQ ID NO: 241684 - DNA, 15 bp, Homo sapiens
gaacatgtgtgcaca

SEQ ID NO: 241685 - DNA, 15 bp, Homo sapiens
ggaacatgtgtgcac

SEQ ID NO: 241686 - DNA, 15 bp, Homo sapiens
gggaacatgtgtgca

SEQ ID NO: 241687 - DNA, 15 bp, Homo sapiens
agggaacatgtgtgc

SEQ ID NO: 241688 - DNA, 15 bp, Homo sapiens
gagggaacatgtgtg

SEQ ID NO: 241689 - DNA, 15 bp, Homo sapiens
agagggaacatgtgt

SEQ ID NO: 241690 - DNA, 15 bp, Homo sapiens
gagagggaacatgtg

SEQ ID NO: 241691 - DNA, 15 bp, Homo sapiens
agagagggaacatgt

SEQ ID NO: 241692 - DNA, 15 bp, Homo sapiens
gagagagggaacatg

SEQ ID NO: 241693 - DNA, 15 bp, Homo sapiens
ggagagagggaacat

SEQ ID NO: 241694 - DNA, 15 bp, Homo sapiens
aggagagagggaaca

SEQ ID NO: 241695 - DNA, 15 bp, Homo sapiens
gaggagagagggaac

SEQ ID NO: 241696 - DNA, 15 bp, Homo sapiens
agaggagagagggaa

SEQ ID NO: 241697 - DNA, 15 bp, Homo sapiens
cagaggagagaggga

SEQ ID NO: 241698 - DNA, 15 bp, Homo sapiens
acagaggagagaggg

SEQ ID NO: 241699 - DNA, 15 bp, Homo sapiens
gacagaggagagagg

SEQ ID NO: 241700 - DNA, 15 bp, Homo sapiens
agacagaggagagag

SEQ ID NO: 241701 - DNA, 15 bp, Homo sapiens
gagacagaggagaga

SEQ ID NO: 241702 - DNA, 15 bp, Homo sapiens
ggagacagaggagag

SEQ ID NO: 241703 - DNA, 15 bp, Homo sapiens
aggagacagaggaga

SEQ ID NO: 241704 - DNA, 15 bp, Homo sapiens
gaggagacagaggag

SEQ ID NO: 241705 - DNA, 15 bp, Homo sapiens
ggaggagacagagga

SEQ ID NO: 241706 - DNA, 15 bp, Homo sapiens
aggaggagacagagg

SEQ ID NO: 241707 - DNA, 15 bp, Homo sapiens
caggaggagacagag

SEQ ID NO: 241708 - DNA, 15 bp, Homo sapiens
gcaggaggagacaga

SEQ ID NO: 241709 - DNA, 15 bp, Homo sapiens
ggcaggaggagacag

SEQ ID NO: 241710 - DNA, 15 bp, Homo sapiens
aggcaggaggagaca

SEQ ID NO: 241711 - DNA, 15 bp, Homo sapiens
gaggcaggaggagac

SEQ ID NO: 241712 - DNA, 15 bp, Homo sapiens
tgaggcaggaggaga

SEQ ID NO: 241713 - DNA, 15 bp, Homo sapiens
ctgaggcaggaggag

SEQ ID NO: 241714 - DNA, 15 bp, Homo sapiens
actgaggcaggagga

SEQ ID NO: 241715 - DNA, 15 bp, Homo sapiens
tactgaggcaggagg

SEQ ID NO: 241716 - DNA, 15 bp, Homo sapiens
ttactgaggcaggag

SEQ ID NO: 241717 - DNA, 15 bp, Homo sapiens
gttactgaggcagga

SEQ ID NO: 241718 - DNA, 15 bp, Homo sapiens
agttactgaggcagg

SEQ ID NO: 241719 - DNA, 15 bp, Homo sapiens
aagttactgaggcag

SEQ ID NO: 241720 - DNA, 15 bp, Homo sapiens
caagttactgaggca

SEQ ID NO: 241721 - DNA, 15 bp, Homo sapiens
acaagttactgaggc

SEQ ID NO: 241722 - DNA, 15 bp, Homo sapiens
tacaagttactgagg

SEQ ID NO: 241723 - DNA, 15 bp, Homo sapiens
ctacaagttactgag

SEQ ID NO: 241724 - DNA, 15 bp, Homo sapiens
tctacaagttactga

SEQ ID NO: 241725 - DNA, 15 bp, Homo sapiens
ctctacaagttactg

SEQ ID NO: 241726 - DNA, 15 bp, Homo sapiens
tctctacaagttact

SEQ ID NO: 241727 - DNA, 15 bp, Homo sapiens
ctctctacaagttac

SEQ ID NO: 241728 - DNA, 15 bp, Homo sapiens
tctctctacaagtta

SEQ ID NO: 241729 - DNA, 15 bp, Homo sapiens
gtctctctacaagtt

SEQ ID NO: 241730 - DNA, 15 bp, Homo sapiens
agtctctctacaagt

SEQ ID NO: 241731 - DNA, 15 bp, Homo sapiens
aagtctctctacaag

SEQ ID NO: 241732 - DNA, 15 bp, Homo sapiens
gaagtctctctacaa

SEQ ID NO: 241733 - DNA, 15 bp, Homo sapiens
ggaagtctctctaca

SEQ ID NO: 241734 - DNA, 15 bp, Homo sapiens
tggaagtctctctac

SEQ ID NO: 241735 - DNA, 15 bp, Homo sapiens
ttggaagtctctcta

SEQ ID NO: 241736 - DNA, 15 bp, Homo sapiens
tttggaagtctctct

SEQ ID NO: 241737 - DNA, 15 bp, Homo sapiens
ttttggaagtctctc

SEQ ID NO: 241738 - DNA, 15 bp, Homo sapiens
tttttggaagtctct

SEQ ID NO: 241739 - DNA, 15 bp, Homo sapiens
ctttttggaagtctc

SEQ ID NO: 241740 - DNA, 15 bp, Homo sapiens
tctttttggaagtct

SEQ ID NO: 241741 - DNA, 15 bp, Homo sapiens
ctctttttggaagtc

SEQ ID NO: 241742 - DNA, 15 bp, Homo sapiens
tctctttttggaagt

SEQ ID NO: 241743 - DNA, 15 bp, Homo sapiens
ctctctttttggaag

SEQ ID NO: 241744 - DNA, 15 bp, Homo sapiens
gctctctttttggaa

SEQ ID NO: 241745 - DNA, 15 bp, Homo sapiens
tgctctctttttgga

SEQ ID NO: 241746 - DNA, 15 bp, Homo sapiens
ctgctctctttttgg

SEQ ID NO: 241747 - DNA, 15 bp, Homo sapiens
cctgctctctttttg

SEQ ID NO: 241748 - DNA, 15 bp, Homo sapiens
acctgctctcttttt

SEQ ID NO: 241749 - DNA, 15 bp, Homo sapiens
aacctgctctctttt

SEQ ID NO: 241750 - DNA, 15 bp, Homo sapiens
aaacctgctctcttt

SEQ ID NO: 241751 - DNA, 15 bp, Homo sapiens
aaaacctgctctctt

SEQ ID NO: 241752 - DNA, 15 bp, Homo sapiens
aaaaacctgctctct

SEQ ID NO: 241753 - DNA, 15 bp, Homo sapiens
taaaaacctgctctc

SEQ ID NO: 241754 - DNA, 15 bp, Homo sapiens
ctaaaaacctgctct

SEQ ID NO: 241755 - DNA, 15 bp, Homo sapiens
tctaaaaacctgctc

SEQ ID NO: 241756 - DNA, 15 bp, Homo sapiens
ctctaaaaacctgct

SEQ ID NO: 241757 - DNA, 15 bp, Homo sapiens
actctaaaaacctgc

SEQ ID NO: 241758 - DNA, 15 bp, Homo sapiens
aactctaaaaacctg

SEQ ID NO: 241759 - DNA, 15 bp, Homo sapiens
caactctaaaaacct

SEQ ID NO: 241760 - DNA, 15 bp, Homo sapiens
tcaactctaaaaacc

SEQ ID NO: 241761 - DNA, 15 bp, Homo sapiens
ctcaactctaaaaac

SEQ ID NO: 241762 - DNA, 15 bp, Homo sapiens
tctcaactctaaaaa

SEQ ID NO: 241763 - DNA, 15 bp, Homo sapiens
ctctcaactctaaaa

SEQ ID NO: 241764 - DNA, 15 bp, Homo sapiens
actctcaactctaaa

SEQ ID NO: 241765 - DNA, 15 bp, Homo sapiens
aactctcaactctaa

SEQ ID NO: 241766 - DNA, 15 bp, Homo sapiens
taactctcaactcta

SEQ ID NO: 241767 - DNA, 15 bp, Homo sapiens
ttaactctcaactct

SEQ ID NO: 241768 - DNA, 15 bp, Homo sapiens
tttaactctcaactc

SEQ ID NO: 241769 - DNA, 15 bp, Homo sapiens
ttttaactctcaact

SEQ ID NO: 241770 - DNA, 15 bp, Homo sapiens
gttttaactctcaac

SEQ ID NO: 241771 - DNA, 15 bp, Homo sapiens
agttttaactctcaa

SEQ ID NO: 241772 - DNA, 15 bp, Homo sapiens
aagttttaactctca

SEQ ID NO: 241773 - DNA, 15 bp, Homo sapiens
gaagttttaactctc

SEQ ID NO: 241774 - DNA, 15 bp, Homo sapiens
agaagttttaactct

SEQ ID NO: 241775 - DNA, 15 bp, Homo sapiens
cagaagttttaactc

SEQ ID NO: 241776 - DNA, 15 bp, Homo sapiens
ccagaagttttaact

SEQ ID NO: 241777 - DNA, 15 bp, Homo sapiens
tccagaagttttaac

SEQ ID NO: 241778 - DNA, 15 bp, Homo sapiens
ttccagaagttttaa

SEQ ID NO: 241779 - DNA, 15 bp, Homo sapiens
attccagaagtttta

SEQ ID NO: 241780 - DNA, 15 bp, Homo sapiens
cattccagaagtttt

SEQ ID NO: 241781 - DNA, 15 bp, Homo sapiens
acattccagaagttt

SEQ ID NO: 241782 - DNA, 15 bp, Homo sapiens
aacattccagaagtt

SEQ ID NO: 241783 - DNA, 15 bp, Homo sapiens
caacattccagaagt

SEQ ID NO: 241784 - DNA, 15 bp, Homo sapiens
acaacattccagaag

SEQ ID NO: 241785 - DNA, 15 bp, Homo sapiens
aacaacattccagaa

SEQ ID NO: 241786 - DNA, 15 bp, Homo sapiens
gaacaacattccaga

SEQ ID NO: 241787 - DNA, 15 bp, Homo sapiens
agaacaacattccag

SEQ ID NO: 241788 - DNA, 15 bp, Homo sapiens
tagaacaacattcca

SEQ ID NO: 241789 - DNA, 15 bp, Homo sapiens
ctagaacaacattcc

SEQ ID NO: 241790 - DNA, 15 bp, Homo sapiens
gctagaacaacattc

SEQ ID NO: 241791 - DNA, 15 bp, Homo sapiens
agctagaacaacatt

SEQ ID NO: 241792 - DNA, 15 bp, Homo sapiens
gagctagaacaacat

SEQ ID NO: 241793 - DNA, 15 bp, Homo sapiens
ggagctagaacaaca

SEQ ID NO: 241794 - DNA, 15 bp, Homo sapiens
aggagctagaacaac

SEQ ID NO: 241795 - DNA, 15 bp, Homo sapiens
caggagctagaacaa

SEQ ID NO: 241796 - DNA, 15 bp, Homo sapiens
ccaggagctagaaca

SEQ ID NO: 241797 - DNA, 15 bp, Homo sapiens
cccaggagctagaac

SEQ ID NO: 241798 - DNA, 15 bp, Homo sapiens
ccccaggagctagaa

SEQ ID NO: 241799 - DNA, 15 bp, Homo sapiens
accccaggagctaga

SEQ ID NO: 241800 - DNA, 15 bp, Homo sapiens
aaccccaggagctag

SEQ ID NO: 241801 - DNA, 15 bp, Homo sapiens
caaccccaggagcta

SEQ ID NO: 241802 - DNA, 15 bp, Homo sapiens
ccaaccccaggagct

SEQ ID NO: 241803 - DNA, 15 bp, Homo sapiens
cccaaccccaggagc

SEQ ID NO: 241804 - DNA, 15 bp, Homo sapiens
gcccaaccccaggag

SEQ ID NO: 241805 - DNA, 15 bp, Homo sapiens
tgcccaaccccagga

SEQ ID NO: 241806 - DNA, 15 bp, Homo sapiens
ctgcccaaccccagg

SEQ ID NO: 241807 - DNA, 15 bp, Homo sapiens
cctgcccaaccccag

SEQ ID NO: 241808 - DNA, 15 bp, Homo sapiens
ccctgcccaacccca

SEQ ID NO: 241809 - DNA, 15 bp, Homo sapiens
tccctgcccaacccc

SEQ ID NO: 241810 - DNA, 15 bp, Homo sapiens
ttccctgcccaaccc

SEQ ID NO: 241811 - DNA, 15 bp, Homo sapiens
tttccctgcccaacc

SEQ ID NO: 241812 - DNA, 15 bp, Homo sapiens
ctttccctgcccaac

SEQ ID NO: 241813 - DNA, 15 bp, Homo sapiens
cctttccctgcccaa

SEQ ID NO: 241814 - DNA, 15 bp, Homo sapiens
acctttccctgccca

SEQ ID NO: 241815 - DNA, 15 bp, Homo sapiens
tacctttccctgccc

SEQ ID NO: 241816 - DNA, 15 bp, Homo sapiens
ttacctttccctgcc

SEQ ID NO: 241817 - DNA, 15 bp, Homo sapiens
attacctttccctgc

SEQ ID NO: 241818 - DNA, 15 bp, Homo sapiens
gattacctttccctg

SEQ ID NO: 241819 - DNA, 15 bp, Homo sapiens
ggattacctttccct

SEQ ID NO: 241820 - DNA, 15 bp, Homo sapiens
aggattacctttccc

SEQ ID NO: 241821 - DNA, 15 bp, Homo sapiens
gaggattacctttcc

SEQ ID NO: 241822 - DNA, 15 bp, Homo sapiens
tgaggattacctttc

SEQ ID NO: 241823 - DNA, 15 bp, Homo sapiens
ttgaggattaccttt

SEQ ID NO: 241824 - DNA, 15 bp, Homo sapiens
tttgaggattacctt

SEQ ID NO: 241825 - DNA, 15 bp, Homo sapiens
atttgaggattacct

SEQ ID NO: 241826 - DNA, 15 bp, Homo sapiens
tatttgaggattacc

SEQ ID NO: 241827 - DNA, 15 bp, Homo sapiens
atatttgaggattac

SEQ ID NO: 241828 - DNA, 15 bp, Homo sapiens
tatatttgaggatta

SEQ ID NO: 241829 - DNA, 15 bp, Homo sapiens
ctatatttgaggatt

SEQ ID NO: 241830 - DNA, 15 bp, Homo sapiens
cctatatttgaggat

SEQ ID NO: 241831 - DNA, 15 bp, Homo sapiens
acctatatttgagga

SEQ ID NO: 241832 - DNA, 15 bp, Homo sapiens
cacctatatttgagg

SEQ ID NO: 241833 - DNA, 15 bp, Homo sapiens
ccacctatatttgag

SEQ ID NO: 241834 - DNA, 15 bp, Homo sapiens
cccacctatatttga

SEQ ID NO: 241835 - DNA, 15 bp, Homo sapiens
ccccacctatatttg

SEQ ID NO: 241836 - DNA, 15 bp, Homo sapiens
gccccacctatattt

SEQ ID NO: 241837 - DNA, 15 bp, Homo sapiens
ggccccacctatatt

SEQ ID NO: 241838 - DNA, 15 bp, Homo sapiens
aggccccacctatat

SEQ ID NO: 241839 - DNA, 15 bp, Homo sapiens
gaggccccacctata

SEQ ID NO: 241840 - DNA, 15 bp, Homo sapiens
tgaggccccacctat

SEQ ID NO: 241841 - DNA, 15 bp, Homo sapiens
ctgaggccccaccta

SEQ ID NO: 241842 - DNA, 15 bp, Homo sapiens
tctgaggccccacct

SEQ ID NO: 241843 - DNA, 15 bp, Homo sapiens
ctctgaggccccacc

SEQ ID NO: 241844 - DNA, 15 bp, Homo sapiens
cctctgaggccccac

SEQ ID NO: 241845 - DNA, 15 bp, Homo sapiens
tcctctgaggcccca

SEQ ID NO: 241846 - DNA, 15 bp, Homo sapiens
ttcctctgaggcccc

SEQ ID NO: 241847 - DNA, 15 bp, Homo sapiens
cttcctctgaggccc

SEQ ID NO: 241848 - DNA, 15 bp, Homo sapiens
acttcctctgaggcc

SEQ ID NO: 241849 - DNA, 15 bp, Homo sapiens
aacttcctctgaggc

SEQ ID NO: 241850 - DNA, 15 bp, Homo sapiens
aaacttcctctgagg

SEQ ID NO: 241851 - DNA, 15 bp, Homo sapiens
caaacttcctctgag

SEQ ID NO: 241852 - DNA, 15 bp, Homo sapiens
ccaaacttcctctga

SEQ ID NO: 241853 - DNA, 15 bp, Homo sapiens
accaaacttcctctg

SEQ ID NO: 241854 - DNA, 15 bp, Homo sapiens
caccaaacttcctct

SEQ ID NO: 241855 - DNA, 15 bp, Homo sapiens
tcaccaaacttcctc

SEQ ID NO: 241856 - DNA, 15 bp, Homo sapiens
ttcaccaaacttcct

SEQ ID NO: 241857 - DNA, 15 bp, Homo sapiens
attcaccaaacttcc

SEQ ID NO: 241858 - DNA, 15 bp, Homo sapiens
gattcaccaaacttc

SEQ ID NO: 241859 - DNA, 15 bp, Homo sapiens
agattcaccaaactt

SEQ ID NO: 241860 - DNA, 15 bp, Homo sapiens
cagattcaccaaact

SEQ ID NO: 241861 - DNA, 15 bp, Homo sapiens
acagattcaccaaac

SEQ ID NO: 241862 - DNA, 15 bp, Homo sapiens
gacagattcaccaaa

SEQ ID NO: 241863 - DNA, 15 bp, Homo sapiens
tgacagattcaccaa

SEQ ID NO: 241864 - DNA, 15 bp, Homo sapiens
ttgacagattcacca

SEQ ID NO: 241865 - DNA, 15 bp, Homo sapiens
gttgacagattcacc

SEQ ID NO: 241866 - DNA, 15 bp, Homo sapiens
agttgacagattcac

SEQ ID NO: 241867 - DNA, 15 bp, Homo sapiens
tagttgacagattca

SEQ ID NO: 241868 - DNA, 15 bp, Homo sapiens
ctagttgacagattc

SEQ ID NO: 241869 - DNA, 15 bp, Homo sapiens
tctagttgacagatt

SEQ ID NO: 241870 - DNA, 15 bp, Homo sapiens
ttctagttgacagat

SEQ ID NO: 241871 - DNA, 15 bp, Homo sapiens
attctagttgacaga

SEQ ID NO: 241872 - DNA, 15 bp, Homo sapiens
aattctagttgacag

SEQ ID NO: 241873 - DNA, 15 bp, Homo sapiens
aaattctagttgaca

SEQ ID NO: 241874 - DNA, 15 bp, Homo sapiens
aaaattctagttgac

SEQ ID NO: 241875 - DNA, 15 bp, Homo sapiens
aaaaattctagttga

SEQ ID NO: 241876 - DNA, 15 bp, Homo sapiens
aaaaaattctagttg

SEQ ID NO: 241877 - DNA, 15 bp, Homo sapiens
gaaaaaattctagtt

SEQ ID NO: 241878 - DNA, 15 bp, Homo sapiens
agaaaaaattctagt

SEQ ID NO: 241879 - DNA, 15 bp, Homo sapiens
aagaaaaaattctag

SEQ ID NO: 241880 - DNA, 15 bp, Homo sapiens
caagaaaaaattcta

SEQ ID NO: 241881 - DNA, 15 bp, Homo sapiens
tcaagaaaaaattct

SEQ ID NO: 241882 - DNA, 15 bp, Homo sapiens
ttcaagaaaaaattc

SEQ ID NO: 241883 - DNA, 15 bp, Homo sapiens
tttcaagaaaaaatt

SEQ ID NO: 241884 - DNA, 15 bp, Homo sapiens
ttttcaagaaaaaat

SEQ ID NO: 241885 - DNA, 15 bp, Homo sapiens
attttcaagaaaaaa

SEQ ID NO: 241886 - DNA, 15 bp, Homo sapiens
aattttcaagaaaaa

SEQ ID NO: 241887 - DNA, 15 bp, Homo sapiens
gaattttcaagaaaa

SEQ ID NO: 241888 - DNA, 15 bp, Homo sapiens
agaattttcaagaaa

SEQ ID NO: 241889 - DNA, 15 bp, Homo sapiens
gagaattttcaagaa

SEQ ID NO: 241890 - DNA, 15 bp, Homo sapiens
tgagaattttcaaga

SEQ ID NO: 241891 - DNA, 15 bp, Homo sapiens
atgagaattttcaag

SEQ ID NO: 241892 - DNA, 15 bp, Homo sapiens
aatgagaattttcaa

SEQ ID NO: 241893 - DNA, 15 bp, Homo sapiens
caatgagaattttca

SEQ ID NO: 241894 - DNA, 15 bp, Homo sapiens
tcaatgagaattttc

SEQ ID NO: 241895 - DNA, 15 bp, Homo sapiens
ttcaatgagaatttt

SEQ ID NO: 241896 - DNA, 15 bp, Homo sapiens
cttcaatgagaattt

SEQ ID NO: 241897 - DNA, 15 bp, Homo sapiens
acttcaatgagaatt

SEQ ID NO: 241898 - DNA, 15 bp, Homo sapiens
tacttcaatgagaat

SEQ ID NO: 241899 - DNA, 15 bp, Homo sapiens
ttacttcaatgagaa

SEQ ID NO: 241900 - DNA, 15 bp, Homo sapiens
gttacttcaatgaga

SEQ ID NO: 241901 - DNA, 15 bp, Homo sapiens
ggttacttcaatgag

SEQ ID NO: 241902 - DNA, 15 bp, Homo sapiens
aggttacttcaatga

SEQ ID NO: 241903 - DNA, 15 bp, Homo sapiens
gaggttacttcaatg

SEQ ID NO: 241904 - DNA, 15 bp, Homo sapiens
agaggttacttcaat

SEQ ID NO: 241905 - DNA, 15 bp, Homo sapiens
tagaggttacttcaa

SEQ ID NO: 241906 - DNA, 15 bp, Homo sapiens
atagaggttacttca

SEQ ID NO: 241907 - DNA, 15 bp, Homo sapiens
gatagaggttacttc

SEQ ID NO: 241908 - DNA, 15 bp, Homo sapiens
ggatagaggttactt

SEQ ID NO: 241909 - DNA, 15 bp, Homo sapiens
aggatagaggttact

SEQ ID NO: 241910 - DNA, 15 bp, Homo sapiens
gaggatagaggttac

SEQ ID NO: 241911 - DNA, 15 bp, Homo sapiens
tgaggatagaggtta

SEQ ID NO: 241912 - DNA, 15 bp, Homo sapiens
ttgaggatagaggtt

SEQ ID NO: 241913 - DNA, 15 bp, Homo sapiens
tttgaggatagaggt

SEQ ID NO: 241914 - DNA, 15 bp, Homo sapiens
ctttgaggatagagg

SEQ ID NO: 241915 - DNA, 15 bp, Homo sapiens
cctttgaggatagag

SEQ ID NO: 241916 - DNA, 15 bp, Homo sapiens
tcctttgaggataga

SEQ ID NO: 241917 - DNA, 15 bp, Homo sapiens
atcctttgaggatag

SEQ ID NO: 241918 - DNA, 15 bp, Homo sapiens
aatcctttgaggata

SEQ ID NO: 241919 - DNA, 15 bp, Homo sapiens
gaatcctttgaggat

SEQ ID NO: 241920 - DNA, 15 bp, Homo sapiens
ggaatcctttgagga

SEQ ID NO: 241921 - DNA, 15 bp, Homo sapiens
tggaatcctttgagg

SEQ ID NO: 241922 - DNA, 15 bp, Homo sapiens
ttggaatcctttgag

SEQ ID NO: 241923 - DNA, 15 bp, Homo sapiens
attggaatcctttga

SEQ ID NO: 241924 - DNA, 15 bp, Homo sapiens
tattggaatcctttg

SEQ ID NO: 241925 - DNA, 15 bp, Homo sapiens
atattggaatccttt

SEQ ID NO: 241926 - DNA, 15 bp, Homo sapiens
tatattggaatcctt

SEQ ID NO: 241927 - DNA, 15 bp, Homo sapiens
gtatattggaatcct

SEQ ID NO: 241928 - DNA, 15 bp, Homo sapiens
tgtatattggaatcc

SEQ ID NO: 241929 - DNA, 15 bp, Homo sapiens
atgtatattggaatc

SEQ ID NO: 241930 - DNA, 15 bp, Homo sapiens
gatgtatattggaat

SEQ ID NO: 241931 - DNA, 15 bp, Homo sapiens
agatgtatattggaa

SEQ ID NO: 241932 - DNA, 15 bp, Homo sapiens
tagatgtatattgga

SEQ ID NO: 241933 - DNA, 15 bp, Homo sapiens
ctagatgtatattgg

SEQ ID NO: 241934 - DNA, 15 bp, Homo sapiens
cctagatgtatattg

SEQ ID NO: 241935 - DNA, 15 bp, Homo sapiens
ccctagatgtatatt

SEQ ID NO: 241936 - DNA, 15 bp, Homo sapiens
accctagatgtatat

SEQ ID NO: 241937 - DNA, 15 bp, Homo sapiens
aaccctagatgtata

SEQ ID NO: 241938 - DNA, 15 bp, Homo sapiens
caaccctagatgtat

SEQ ID NO: 241939 - DNA, 15 bp, Homo sapiens
tcaaccctagatgta

SEQ ID NO: 241940 - DNA, 15 bp, Homo sapiens
ttcaaccctagatgt

SEQ ID NO: 241941 - DNA, 15 bp, Homo sapiens
tttcaaccctagatg

SEQ ID NO: 241942 - DNA, 15 bp, Homo sapiens
ttttcaaccctagat

SEQ ID NO: 241943 - DNA, 15 bp, Homo sapiens
cttttcaaccctaga

SEQ ID NO: 241944 - DNA, 15 bp, Homo sapiens
ccttttcaaccctag

SEQ ID NO: 241945 - DNA, 15 bp, Homo sapiens
tccttttcaacccta

SEQ ID NO: 241946 - DNA, 15 bp, Homo sapiens
ttccttttcaaccct

SEQ ID NO: 241947 - DNA, 15 bp, Homo sapiens
attccttttcaaccc

SEQ ID NO: 241948 - DNA, 15 bp, Homo sapiens
cattccttttcaacc

SEQ ID NO: 241949 - DNA, 15 bp, Homo sapiens
tcattccttttcaac

SEQ ID NO: 241950 - DNA, 15 bp, Homo sapiens
ttcattccttttcaa

SEQ ID NO: 241951 - DNA, 15 bp, Homo sapiens
gttcattccttttca

SEQ ID NO: 241952 - DNA, 15 bp, Homo sapiens
agttcattccttttc

SEQ ID NO: 241953 - DNA, 15 bp, Homo sapiens
cagttcattcctttt

SEQ ID NO: 241954 - DNA, 15 bp, Homo sapiens
tcagttcattccttt

SEQ ID NO: 241955 - DNA, 15 bp, Homo sapiens
atcagttcattcctt

SEQ ID NO: 241956 - DNA, 15 bp, Homo sapiens
catcagttcattcct

SEQ ID NO: 241957 - DNA, 15 bp, Homo sapiens
ccatcagttcattcc

SEQ ID NO: 241958 - DNA, 15 bp, Homo sapiens
gccatcagttcattc

SEQ ID NO: 241959 - DNA, 15 bp, Homo sapiens
ggccatcagttcatt

SEQ ID NO: 241960 - DNA, 15 bp, Homo sapiens
aggccatcagttcat

SEQ ID NO: 241961 - DNA, 15 bp, Homo sapiens
aaggccatcagttca

SEQ ID NO: 241962 - DNA, 15 bp, Homo sapiens
taaggccatcagttc

SEQ ID NO: 241963 - DNA, 15 bp, Homo sapiens
ttaaggccatcagtt

SEQ ID NO: 241964 - DNA, 15 bp, Homo sapiens
attaaggccatcagt

SEQ ID NO: 241965 - DNA, 15 bp, Homo sapiens
gattaaggccatcag

SEQ ID NO: 241966 - DNA, 15 bp, Homo sapiens
tgattaaggccatca

SEQ ID NO: 241967 - DNA, 15 bp, Homo sapiens
ctgattaaggccatc

SEQ ID NO: 241968 - DNA, 15 bp, Homo sapiens
tctgattaaggccat

SEQ ID NO: 241969 - DNA, 15 bp, Homo sapiens
atctgattaaggcca

SEQ ID NO: 241970 - DNA, 15 bp, Homo sapiens
aatctgattaaggcc

SEQ ID NO: 241971 - DNA, 15 bp, Homo sapiens
caatctgattaaggc

SEQ ID NO: 241972 - DNA, 15 bp, Homo sapiens
tcaatctgattaagg

SEQ ID NO: 241973 - DNA, 15 bp, Homo sapiens
atcaatctgattaag

SEQ ID NO: 241974 - DNA, 15 bp, Homo sapiens
aatcaatctgattaa

SEQ ID NO: 241975 - DNA, 15 bp, Homo sapiens
aaatcaatctgatta

SEQ ID NO: 241976 - DNA, 15 bp, Homo sapiens
taaatcaatctgatt

SEQ ID NO: 241977 - DNA, 15 bp, Homo sapiens
ttaaatcaatctgat

SEQ ID NO: 241978 - DNA, 15 bp, Homo sapiens
attaaatcaatctga

SEQ ID NO: 241979 - DNA, 15 bp, Homo sapiens
cattaaatcaatctg

SEQ ID NO: 241980 - DNA, 15 bp, Homo sapiens
tcattaaatcaatct

SEQ ID NO: 241981 - DNA, 15 bp, Homo sapiens
ctcattaaatcaatc

SEQ ID NO: 241982 - DNA, 15 bp, Homo sapiens
gctcattaaatcaat

SEQ ID NO: 241983 - DNA, 15 bp, Homo sapiens
tgctcattaaatcaa

SEQ ID NO: 241984 - DNA, 15 bp, Homo sapiens
atgctcattaaatca

SEQ ID NO: 241985 - DNA, 15 bp, Homo sapiens
tatgctcattaaatc

SEQ ID NO: 241986 - DNA, 15 bp, Homo sapiens
ctatgctcattaaat

SEQ ID NO: 241987 - DNA, 15 bp, Homo sapiens
cctatgctcattaaa

SEQ ID NO: 241988 - DNA, 15 bp, Homo sapiens
ccctatgctcattaa

SEQ ID NO: 241989 - DNA, 15 bp, Homo sapiens
gccctatgctcatta

SEQ ID NO: 241990 - DNA, 15 bp, Homo sapiens
ggccctatgctcatt

SEQ ID NO: 241991 - DNA, 15 bp, Homo sapiens
tggccctatgctcat

SEQ ID NO: 241992 - DNA, 15 bp, Homo sapiens
ctggccctatgctca

SEQ ID NO: 241993 - DNA, 15 bp, Homo sapiens
tctggccctatgctc

SEQ ID NO: 241994 - DNA, 15 bp, Homo sapiens
ctctggccctatgct

SEQ ID NO: 241995 - DNA, 15 bp, Homo sapiens
gctctggccctatgc

SEQ ID NO: 241996 - DNA, 15 bp, Homo sapiens
ggctctggccctatg

SEQ ID NO: 241997 - DNA, 15 bp, Homo sapiens
tggctctggccctat

SEQ ID NO: 241998 - DNA, 15 bp, Homo sapiens
gtggctctggcccta

SEQ ID NO: 241999 - DNA, 15 bp, Homo sapiens
tgtggctctggccct

SEQ ID NO: 242000 - DNA, 15 bp, Homo sapiens
ttgtggctctggccc

SEQ ID NO: 242001 - DNA, 15 bp, Homo sapiens
cttgtggctctggcc

SEQ ID NO: 242002 - DNA, 15 bp, Homo sapiens
tcttgtggctctggc

SEQ ID NO: 242003 - DNA, 15 bp, Homo sapiens
ctcttgtggctctgg

SEQ ID NO: 242004 - DNA, 15 bp, Homo sapiens
gctcttgtggctctg

SEQ ID NO: 242005 - DNA, 15 bp, Homo sapiens
ggctcttgtggctct

SEQ ID NO: 242006 - DNA, 15 bp, Homo sapiens
gggctcttgtggctc

SEQ ID NO: 242007 - DNA, 15 bp, Homo sapiens
tgggctcttgtggct

SEQ ID NO: 242008 - DNA, 15 bp, Homo sapiens
ctgggctcttgtggc

SEQ ID NO: 242009 - DNA, 15 bp, Homo sapiens
tctgggctcttgtgg

SEQ ID NO: 242010 - DNA, 15 bp, Homo sapiens
gtctgggctcttgtg

SEQ ID NO: 242011 - DNA, 15 bp, Homo sapiens
agtctgggctcttgt

SEQ ID NO: 242012 - DNA, 15 bp, Homo sapiens
cagtctgggctcttg

SEQ ID NO: 242013 - DNA, 15 bp, Homo sapiens
ccagtctgggctctt

SEQ ID NO: 242014 - DNA, 15 bp, Homo sapiens
cccagtctgggctct

SEQ ID NO: 242015 - DNA, 15 bp, Homo sapiens
acccagtctgggctc

SEQ ID NO: 242016 - DNA, 15 bp, Homo sapiens
aacccagtctgggct

SEQ ID NO: 242017 - DNA, 15 bp, Homo sapiens
aaacccagtctgggc

SEQ ID NO: 242018 - DNA, 15 bp, Homo sapiens
taaacccagtctggg

SEQ ID NO: 242019 - DNA, 15 bp, Homo sapiens
ctaaacccagtctgg

SEQ ID NO: 242020 - DNA, 15 bp, Homo sapiens
tctaaacccagtctg

SEQ ID NO: 242021 - DNA, 15 bp, Homo sapiens
ctctaaacccagtct

SEQ ID NO: 242022 - DNA, 15 bp, Homo sapiens
actctaaacccagtc

SEQ ID NO: 242023 - DNA, 15 bp, Homo sapiens
tactctaaacccagt

SEQ ID NO: 242024 - DNA, 15 bp, Homo sapiens
ctactctaaacccag

SEQ ID NO: 242025 - DNA, 15 bp, Homo sapiens
tctactctaaaccca

SEQ ID NO: 242026 - DNA, 15 bp, Homo sapiens
ctctactctaaaccc

SEQ ID NO: 242027 - DNA, 15 bp, Homo sapiens
cctctactctaaacc

SEQ ID NO: 242028 - DNA, 15 bp, Homo sapiens
acctctactctaaac

SEQ ID NO: 242029 - DNA, 15 bp, Homo sapiens
aacctctactctaaa

SEQ ID NO: 242030 - DNA, 15 bp, Homo sapiens
gaacctctactctaa

SEQ ID NO: 242031 - DNA, 15 bp, Homo sapiens
tgaacctctactcta

SEQ ID NO: 242032 - DNA, 15 bp, Homo sapiens
gtgaacctctactct

SEQ ID NO: 242033 - DNA, 15 bp, Homo sapiens
tgtgaacctctactc

SEQ ID NO: 242034 - DNA, 15 bp, Homo sapiens
gtgtgaacctctact

SEQ ID NO: 242035 - DNA, 15 bp, Homo sapiens
tgtgtgaacctctac

SEQ ID NO: 242036 - DNA, 15 bp, Homo sapiens
atgtgtgaacctcta

SEQ ID NO: 242037 - DNA, 15 bp, Homo sapiens
catgtgtgaacctct

SEQ ID NO: 242038 - DNA, 15 bp, Homo sapiens
ccatgtgtgaacctc

SEQ ID NO: 242039 - DNA, 15 bp, Homo sapiens
gccatgtgtgaacct

SEQ ID NO: 242040 - DNA, 15 bp, Homo sapiens
ggcagccatgtgtga

SEQ ID NO: 242041 - DNA, 15 bp, Homo sapiens
tggcagccatgtgtg

SEQ ID NO: 242042 - DNA, 15 bp, Homo sapiens
ctggcagccatgtgt

SEQ ID NO: 242043 - DNA, 15 bp, Homo sapiens
actggcagccatgtg

SEQ ID NO: 242044 - DNA, 15 bp, Homo sapiens
aactggcagccatgt

SEQ ID NO: 242045 - DNA, 15 bp, Homo sapiens
taactggcagccatg

SEQ ID NO: 242046 - DNA, 15 bp, Homo sapiens
ctaactggcagccat

SEQ ID NO: 242047 - DNA, 15 bp, Homo sapiens
tctaactggcagcca

SEQ ID NO: 242048 - DNA, 15 bp, Homo sapiens
ttctaactggcagcc

SEQ ID NO: 242049 - DNA, 15 bp, Homo sapiens
attctaactggcagc

SEQ ID NO: 242050 - DNA, 15 bp, Homo sapiens
gattctaactggcag

SEQ ID NO: 242051 - DNA, 15 bp, Homo sapiens
tgattctaactggca

SEQ ID NO: 242052 - DNA, 15 bp, Homo sapiens
gtgattctaactggc

SEQ ID NO: 242053 - DNA, 15 bp, Homo sapiens
ggtgattctaactgg

SEQ ID NO: 242054 - DNA, 15 bp, Homo sapiens
aggtgattctaactg

SEQ ID NO: 242055 - DNA, 15 bp, Homo sapiens
taggtgattctaact

SEQ ID NO: 242056 - DNA, 15 bp, Homo sapiens
gtaggtgattctaac

SEQ ID NO: 242057 - DNA, 15 bp, Homo sapiens
tgtaggtgattctaa

SEQ ID NO: 242058 - DNA, 15 bp, Homo sapiens
ttgtaggtgattcta

SEQ ID NO: 242059 - DNA, 15 bp, Homo sapiens
cttgtaggtgattct

SEQ ID NO: 242060 - DNA, 15 bp, Homo sapiens
tcttgtaggtgattc

SEQ ID NO: 242061 - DNA, 15 bp, Homo sapiens
gtcttgtaggtgatt

SEQ ID NO: 242062 - DNA, 15 bp, Homo sapiens
tgtcttgtaggtgat

SEQ ID NO: 242063 - DNA, 15 bp, Homo sapiens
atgtcttgtaggtga

SEQ ID NO: 242064 - DNA, 15 bp, Homo sapiens
tatgtcttgtaggtg

SEQ ID NO: 242065 - DNA, 15 bp, Homo sapiens
ctatgtcttgtaggt

SEQ ID NO: 242066 - DNA, 15 bp, Homo sapiens
tctatgtcttgtagg

SEQ ID NO: 242067 - DNA, 15 bp, Homo sapiens
ttctatgtcttgtag

SEQ ID NO: 242068 - DNA, 15 bp, Homo sapiens
tttctatgtcttgta

SEQ ID NO: 242069 - DNA, 15 bp, Homo sapiens
ttttctatgtcttgt

SEQ ID NO: 242070 - DNA, 15 bp, Homo sapiens
tttttctatgtcttg

SEQ ID NO: 242071 - DNA, 15 bp, Homo sapiens
ttttttctatgtctt

SEQ ID NO: 242072 - DNA, 15 bp, Homo sapiens
attttttctatgtct

SEQ ID NO: 242073 - DNA, 15 bp, Homo sapiens
aattttttctatgtc

SEQ ID NO: 242074 - DNA, 15 bp, Homo sapiens
gaattttttctatgt

SEQ ID NO: 242075 - DNA, 15 bp, Homo sapiens
ggaattttttctatg

SEQ ID NO: 242076 - DNA, 15 bp, Homo sapiens
tggaattttttctat

SEQ ID NO: 242077 - DNA, 15 bp, Homo sapiens
ctggaattttttcta

SEQ ID NO: 242078 - DNA, 15 bp, Homo sapiens
gctggaattttttct

SEQ ID NO: 242079 - DNA, 15 bp, Homo sapiens
tgctggaattttttc

SEQ ID NO: 242080 - DNA, 15 bp, Homo sapiens
gtgctggaatttttt

SEQ ID NO: 242081 - DNA, 15 bp, Homo sapiens
ggtgctggaattttt

SEQ ID NO: 242082 - DNA, 15 bp, Homo sapiens
aggtgctggaatttt

SEQ ID NO: 242083 - DNA, 15 bp, Homo sapiens
taggtgctggaattt

SEQ ID NO: 242084 - DNA, 15 bp, Homo sapiens
ctaggtgctggaatt

SEQ ID NO: 242085 - DNA, 15 bp, Homo sapiens
cctaggtgctggaat

SEQ ID NO: 242086 - DNA, 15 bp, Homo sapiens
acctaggtgctggaa

SEQ ID NO: 242087 - DNA, 15 bp, Homo sapiens
gacctaggtgctgga

SEQ ID NO: 242088 - DNA, 15 bp, Homo sapiens
ggacctaggtgctgg

SEQ ID NO: 242089 - DNA, 15 bp, Homo sapiens
gggacctaggtgctg

SEQ ID NO: 242090 - DNA, 15 bp, Homo sapiens
ggggacctaggtgct

SEQ ID NO: 242091 - DNA, 15 bp, Homo sapiens
gggggacctaggtgc

SEQ ID NO: 242092 - DNA, 15 bp, Homo sapiens
agggggacctaggtg

SEQ ID NO: 242093 - DNA, 15 bp, Homo sapiens
aagggggacctaggt

SEQ ID NO: 242094 - DNA, 15 bp, Homo sapiens
gaagggggacctagg

SEQ ID NO: 242095 - DNA, 15 bp, Homo sapiens
tgaagggggacctag

SEQ ID NO: 242096 - DNA, 15 bp, Homo sapiens
ctgaagggggaccta

SEQ ID NO: 242097 - DNA, 15 bp, Homo sapiens
tctgaagggggacct

SEQ ID NO: 242098 - DNA, 15 bp, Homo sapiens
ctctgaagggggacc

SEQ ID NO: 242099 - DNA, 15 bp, Homo sapiens
tctctgaagggggac

SEQ ID NO: 242100 - DNA, 15 bp, Homo sapiens
atctctgaaggggga

SEQ ID NO: 242101 - DNA, 15 bp, Homo sapiens
aatctctgaaggggg

SEQ ID NO: 242102 - DNA, 15 bp, Homo sapiens
gaatctctgaagggg

SEQ ID NO: 242103 - DNA, 15 bp, Homo sapiens
agaatctctgaaggg

SEQ ID NO: 242104 - DNA, 15 bp, Homo sapiens
aagaatctctgaagg

SEQ ID NO: 242105 - DNA, 15 bp, Homo sapiens
taagaatctctgaag

SEQ ID NO: 242106 - DNA, 15 bp, Homo sapiens
ataagaatctctgaa

SEQ ID NO: 242107 - DNA, 15 bp, Homo sapiens
aataagaatctctga

SEQ ID NO: 242108 - DNA, 15 bp, Homo sapiens
gaataagaatctctg

SEQ ID NO: 242109 - DNA, 15 bp, Homo sapiens
tgaataagaatctct

SEQ ID NO: 242110 - DNA, 15 bp, Homo sapiens
ctgaataagaatctc

SEQ ID NO: 242111 - DNA, 15 bp, Homo sapiens
actgaataagaatct

SEQ ID NO: 242112 - DNA, 15 bp, Homo sapiens
aactgaataagaatc

SEQ ID NO: 242113 - DNA, 15 bp, Homo sapiens
caactgaataagaat

SEQ ID NO: 242114 - DNA, 15 bp, Homo sapiens
ccaactgaataagaa

SEQ ID NO: 242115 - DNA, 15 bp, Homo sapiens
accaactgaataaga

SEQ ID NO: 242116 - DNA, 15 bp, Homo sapiens
gaccaactgaataag

SEQ ID NO: 242117 - DNA, 15 bp, Homo sapiens
agaccaactgaataa

SEQ ID NO: 242118 - DNA, 15 bp, Homo sapiens
cagaccaactgaata

SEQ ID NO: 242119 - DNA, 15 bp, Homo sapiens
tcagaccaactgaat

SEQ ID NO: 242120 - DNA, 15 bp, Homo sapiens
ctcagaccaactgaa

SEQ ID NO: 242121 - DNA, 15 bp, Homo sapiens
actcagaccaactga

SEQ ID NO: 242122 - DNA, 15 bp, Homo sapiens
cactcagaccaactg

SEQ ID NO: 242123 - DNA, 15 bp, Homo sapiens
tcactcagaccaact

SEQ ID NO: 242124 - DNA, 15 bp, Homo sapiens
ctcactcagaccaac

SEQ ID NO: 242125 - DNA, 15 bp, Homo sapiens
cctcactcagaccaa

SEQ ID NO: 242126 - DNA, 15 bp, Homo sapiens
acctcactcagacca

SEQ ID NO: 242127 - DNA, 15 bp, Homo sapiens
gacctcactcagacc

SEQ ID NO: 242128 - DNA, 15 bp, Homo sapiens
agacctcactcagac

SEQ ID NO: 242129 - DNA, 15 bp, Homo sapiens
tagacctcactcaga

SEQ ID NO: 242130 - DNA, 15 bp, Homo sapiens
ctagacctcactcag

SEQ ID NO: 242131 - DNA, 15 bp, Homo sapiens
cctagacctcactca

SEQ ID NO: 242132 - DNA, 15 bp, Homo sapiens
gcctagacctcactc

SEQ ID NO: 242133 - DNA, 15 bp, Homo sapiens
agcctagacctcact

SEQ ID NO: 242134 - DNA, 15 bp, Homo sapiens
aagcctagacctcac

SEQ ID NO: 242135 - DNA, 15 bp, Homo sapiens
gaagcctagacctca

SEQ ID NO: 242136 - DNA, 15 bp, Homo sapiens
ggaagcctagacctc

SEQ ID NO: 242137 - DNA, 15 bp, Homo sapiens
tggaagcctagacct

SEQ ID NO: 242138 - DNA, 15 bp, Homo sapiens
atggaagcctagacc

SEQ ID NO: 242139 - DNA, 15 bp, Homo sapiens
tatggaagcctagac

SEQ ID NO: 242140 - DNA, 15 bp, Homo sapiens
atatggaagcctaga

SEQ ID NO: 242141 - DNA, 15 bp, Homo sapiens
aatatggaagcctag

SEQ ID NO: 242142 - DNA, 15 bp, Homo sapiens
aaatatggaagccta

SEQ ID NO: 242143 - DNA, 15 bp, Homo sapiens
aaaatatggaagcct

SEQ ID NO: 242144 - DNA, 15 bp, Homo sapiens
caaaatatggaagcc

SEQ ID NO: 242145 - DNA, 15 bp, Homo sapiens
acaaaatatggaagc

SEQ ID NO: 242146 - DNA, 15 bp, Homo sapiens
tacaaaatatggaag

SEQ ID NO: 242147 - DNA, 15 bp, Homo sapiens
ttacaaaatatggaa

SEQ ID NO: 242148 - DNA, 15 bp, Homo sapiens
tttacaaaatatgga

SEQ ID NO: 242149 - DNA, 15 bp, Homo sapiens
atttacaaaatatgg

SEQ ID NO: 242150 - DNA, 15 bp, Homo sapiens
gatttacaaaatatg

SEQ ID NO: 242151 - DNA, 15 bp, Homo sapiens
ggatttacaaaatat

SEQ ID NO: 242152 - DNA, 15 bp, Homo sapiens
aggatttacaaaata

SEQ ID NO: 242153 - DNA, 15 bp, Homo sapiens
gaggatttacaaaat

SEQ ID NO: 242154 - DNA, 15 bp, Homo sapiens
ggaggatttacaaaa

SEQ ID NO: 242155 - DNA, 15 bp, Homo sapiens
gggaggatttacaaa

SEQ ID NO: 242156 - DNA, 15 bp, Homo sapiens
tgggaggatttacaa

SEQ ID NO: 242157 - DNA, 15 bp, Homo sapiens
ctgggaggatttaca

SEQ ID NO: 242158 - DNA, 15 bp, Homo sapiens
tctgggaggatttac

SEQ ID NO: 242159 - DNA, 15 bp, Homo sapiens
atctgggaggattta

SEQ ID NO: 242160 - DNA, 15 bp, Homo sapiens
catctgggaggattt

SEQ ID NO: 242161 - DNA, 15 bp, Homo sapiens
tcatctgggaggatt

SEQ ID NO: 242162 - DNA, 15 bp, Homo sapiens
gtcatctgggaggat

SEQ ID NO: 242163 - DNA, 15 bp, Homo sapiens
agtcatctgggagga

SEQ ID NO: 242164 - DNA, 15 bp, Homo sapiens
aagtcatctgggagg

SEQ ID NO: 242165 - DNA, 15 bp, Homo sapiens
gaagtcatctgggag

SEQ ID NO: 242166 - DNA, 15 bp, Homo sapiens
tgaagtcatctggga

SEQ ID NO: 242167 - DNA, 15 bp, Homo sapiens
gtgaagtcatctggg

SEQ ID NO: 242168 - DNA, 15 bp, Homo sapiens
agtgaagtcatctgg

SEQ ID NO: 242169 - DNA, 15 bp, Homo sapiens
cagtgaagtcatctg

SEQ ID NO: 242170 - DNA, 15 bp, Homo sapiens
acagtgaagtcatct

SEQ ID NO: 242171 - DNA, 15 bp, Homo sapiens
gacagtgaagtcatc

SEQ ID NO: 242172 - DNA, 15 bp, Homo sapiens
tgacagtgaagtcat

SEQ ID NO: 242173 - DNA, 15 bp, Homo sapiens
atgacagtgaagtca

SEQ ID NO: 242174 - DNA, 15 bp, Homo sapiens
aatgacagtgaagtc

SEQ ID NO: 242175 - DNA, 15 bp, Homo sapiens
aaatgacagtgaagt

SEQ ID NO: 242176 - DNA, 15 bp, Homo sapiens
gaaatgacagtgaag

SEQ ID NO: 242177 - DNA, 15 bp, Homo sapiens
ggaaatgacagtgaa

SEQ ID NO: 242178 - DNA, 15 bp, Homo sapiens
tggaaatgacagtga

SEQ ID NO: 242179 - DNA, 15 bp, Homo sapiens
gtggaaatgacagtg

SEQ ID NO: 242180 - DNA, 15 bp, Homo sapiens
agtggaaatgacagt

SEQ ID NO: 242181 - DNA, 15 bp, Homo sapiens
gagtggaaatgacag

SEQ ID NO: 242182 - DNA, 15 bp, Homo sapiens
agagtggaaatgaca

SEQ ID NO: 242183 - DNA, 15 bp, Homo sapiens
tagagtggaaatgac

SEQ ID NO: 242184 - DNA, 15 bp, Homo sapiens
ctagagtggaaatga

SEQ ID NO: 242185 - DNA, 15 bp, Homo sapiens
tctagagtggaaatg

SEQ ID NO: 242186 - DNA, 15 bp, Homo sapiens
ctctagagtggaaat

SEQ ID NO: 242187 - DNA, 15 bp, Homo sapiens
gctctagagtggaaa

SEQ ID NO: 242188 - DNA, 15 bp, Homo sapiens
agctctagagtggaa

SEQ ID NO: 242189 - DNA, 15 bp, Homo sapiens
cagctctagagtgga

SEQ ID NO: 242190 - DNA, 15 bp, Homo sapiens
acagctctagagtgg

SEQ ID NO: 242191 - DNA, 15 bp, Homo sapiens
cacagctctagagtg

SEQ ID NO: 242192 - DNA, 15 bp, Homo sapiens
gcacagctctagagt

SEQ ID NO: 242193 - DNA, 15 bp, Homo sapiens
agcacagctctagag

SEQ ID NO: 242194 - DNA, 15 bp, Homo sapiens
aagcacagctctaga

SEQ ID NO: 242195 - DNA, 15 bp, Homo sapiens
gaagcacagctctag

SEQ ID NO: 242196 - DNA, 15 bp, Homo sapiens
ggaagcacagctcta

SEQ ID NO: 242197 - DNA, 15 bp, Homo sapiens
gggaagcacagctct

SEQ ID NO: 242198 - DNA, 15 bp, Homo sapiens
tgggaagcacagctc

SEQ ID NO: 242199 - DNA, 15 bp, Homo sapiens
ctgggaagcacagct

SEQ ID NO: 242200 - DNA, 15 bp, Homo sapiens
tctgggaagcacagc

SEQ ID NO: 242201 - DNA, 15 bp, Homo sapiens
gtctgggaagcacag

SEQ ID NO: 242202 - DNA, 15 bp, Homo sapiens
agtctgggaagcaca

SEQ ID NO: 242203 - DNA, 15 bp, Homo sapiens
gagtctgggaagcac

SEQ ID NO: 242204 - DNA, 15 bp, Homo sapiens
agagtctgggaagca

SEQ ID NO: 242205 - DNA, 15 bp, Homo sapiens
tagagtctgggaagc

SEQ ID NO: 242206 - DNA, 15 bp, Homo sapiens
ttagagtctgggaag

SEQ ID NO: 242207 - DNA, 15 bp, Homo sapiens
attagagtctgggaa

SEQ ID NO: 242208 - DNA, 15 bp, Homo sapiens
cattagagtctggga

SEQ ID NO: 242209 - DNA, 15 bp, Homo sapiens
acattagagtctggg

SEQ ID NO: 242210 - DNA, 15 bp, Homo sapiens
tacattagagtctgg

SEQ ID NO: 242211 - DNA, 15 bp, Homo sapiens
gtacattagagtctg

SEQ ID NO: 242212 - DNA, 15 bp, Homo sapiens
tgtacattagagtct

SEQ ID NO: 242213 - DNA, 15 bp, Homo sapiens
ctgtacattagagtc

SEQ ID NO: 242214 - DNA, 15 bp, Homo sapiens
cctgtacattagagt

SEQ ID NO: 242215 - DNA, 15 bp, Homo sapiens
ccctgtacattagag

SEQ ID NO: 242216 - DNA, 15 bp, Homo sapiens
tccctgtacattaga

SEQ ID NO: 242217 - DNA, 15 bp, Homo sapiens
ttccctgtacattag

SEQ ID NO: 242218 - DNA, 15 bp, Homo sapiens
tttccctgtacatta

SEQ ID NO: 242219 - DNA, 15 bp, Homo sapiens
atttccctgtacatt

SEQ ID NO: 242220 - DNA, 15 bp, Homo sapiens
aatttccctgtacat

SEQ ID NO: 242221 - DNA, 15 bp, Homo sapiens
taatttccctgtaca

SEQ ID NO: 242222 - DNA, 15 bp, Homo sapiens
gtaatttccctgtac

SEQ ID NO: 242223 - DNA, 15 bp, Homo sapiens
ggtaatttccctgta

SEQ ID NO: 242224 - DNA, 15 bp, Homo sapiens
aggtaatttccctgt

SEQ ID NO: 242225 - DNA, 15 bp, Homo sapiens
caggtaatttccctg

SEQ ID NO: 242226 - DNA, 15 bp, Homo sapiens
ccaggtaatttccct

SEQ ID NO: 242227 - DNA, 15 bp, Homo sapiens
cccaggtaatttccc

SEQ ID NO: 242228 - DNA, 15 bp, Homo sapiens
tcccaggtaatttcc

SEQ ID NO: 242229 - DNA, 15 bp, Homo sapiens
atcccaggtaatttc

SEQ ID NO: 242230 - DNA, 15 bp, Homo sapiens
aatcccaggtaattt

SEQ ID NO: 242231 - DNA, 15 bp, Homo sapiens
gaatcccaggtaatt

SEQ ID NO: 242232 - DNA, 15 bp, Homo sapiens
agaatcccaggtaat

SEQ ID NO: 242233 - DNA, 15 bp, Homo sapiens
aagaatcccaggtaa

SEQ ID NO: 242234 - DNA, 15 bp, Homo sapiens
caagaatcccaggta

SEQ ID NO: 242235 - DNA, 15 bp, Homo sapiens
acaagaatcccaggt

SEQ ID NO: 242236 - DNA, 15 bp, Homo sapiens
aacaagaatcccagg

SEQ ID NO: 242237 - DNA, 15 bp, Homo sapiens
taacaagaatcccag

SEQ ID NO: 242238 - DNA, 15 bp, Homo sapiens
ttaacaagaatccca

SEQ ID NO: 242239 - DNA, 15 bp, Homo sapiens
cttaacaagaatccc

SEQ ID NO: 242240 - DNA, 15 bp, Homo sapiens
tcttaacaagaatcc

SEQ ID NO: 242241 - DNA, 15 bp, Homo sapiens
atcttaacaagaatc

SEQ ID NO: 242242 - DNA, 15 bp, Homo sapiens
catcttaacaagaat

SEQ ID NO: 242243 - DNA, 15 bp, Homo sapiens
gcatcttaacaagaa

SEQ ID NO: 242244 - DNA, 15 bp, Homo sapiens
tgcatcttaacaaga

SEQ ID NO: 242245 - DNA, 15 bp, Homo sapiens
ctgcatcttaacaag

SEQ ID NO: 242246 - DNA, 15 bp, Homo sapiens
tctgcatcttaacaa

SEQ ID NO: 242247 - DNA, 15 bp, Homo sapiens
atctgcatcttaaca

SEQ ID NO: 242248 - DNA, 15 bp, Homo sapiens
aatctgcatcttaac

SEQ ID NO: 242249 - DNA, 15 bp, Homo sapiens
gaatctgcatcttaa

SEQ ID NO: 242250 - DNA, 15 bp, Homo sapiens
agaatctgcatctta

SEQ ID NO: 242251 - DNA, 15 bp, Homo sapiens
cagaatctgcatctt

SEQ ID NO: 242252 - DNA, 15 bp, Homo sapiens
tcagaatctgcatct

SEQ ID NO: 242253 - DNA, 15 bp, Homo sapiens
ctcagaatctgcatc

SEQ ID NO: 242254 - DNA, 15 bp, Homo sapiens
cctcagaatctgcat

SEQ ID NO: 242255 - DNA, 15 bp, Homo sapiens
tcctcagaatctgca

SEQ ID NO: 242256 - DNA, 15 bp, Homo sapiens
gtcctcagaatctgc

SEQ ID NO: 242257 - DNA, 15 bp, Homo sapiens
ggtcctcagaatctg

SEQ ID NO: 242258 - DNA, 15 bp, Homo sapiens
aggtcctcagaatct

SEQ ID NO: 242259 - DNA, 15 bp, Homo sapiens
taggtcctcagaatc

SEQ ID NO: 242260 - DNA, 15 bp, Homo sapiens
ctaggtcctcagaat

SEQ ID NO: 242261 - DNA, 15 bp, Homo sapiens
tctaggtcctcagaa

SEQ ID NO: 242262 - DNA, 15 bp, Homo sapiens
ctctaggtcctcaga

SEQ ID NO: 242263 - DNA, 15 bp, Homo sapiens
tctctaggtcctcag

SEQ ID NO: 242264 - DNA, 15 bp, Homo sapiens
ttctctaggtcctca

SEQ ID NO: 242265 - DNA, 15 bp, Homo sapiens
tttctctaggtcctc

SEQ ID NO: 242266 - DNA, 15 bp, Homo sapiens
atttctctaggtcct

SEQ ID NO: 242267 - DNA, 15 bp, Homo sapiens
catttctctaggtcc

SEQ ID NO: 242268 - DNA, 15 bp, Homo sapiens
ccatttctctaggtc

SEQ ID NO: 242269 - DNA, 15 bp, Homo sapiens
gccatttctctaggt

SEQ ID NO: 242270 - DNA, 15 bp, Homo sapiens
tgccatttctctagg

SEQ ID NO: 242271 - DNA, 15 bp, Homo sapiens
ttgccatttctctag

SEQ ID NO: 242272 - DNA, 15 bp, Homo sapiens
cttgccatttctcta

SEQ ID NO: 242273 - DNA, 15 bp, Homo sapiens
tcttgccatttctct

SEQ ID NO: 242274 - DNA, 15 bp, Homo sapiens
gtcttgccatttctc

SEQ ID NO: 242275 - DNA, 15 bp, Homo sapiens
tgtcttgccatttct

SEQ ID NO: 242276 - DNA, 15 bp, Homo sapiens
atgtcttgccatttc

SEQ ID NO: 242277 - DNA, 15 bp, Homo sapiens
tatgtcttgccattt

SEQ ID NO: 242278 - DNA, 15 bp, Homo sapiens
gtatgtcttgccatt

SEQ ID NO: 242279 - DNA, 15 bp, Homo sapiens
ggtatgtcttgccat

SEQ ID NO: 242280 - DNA, 15 bp, Homo sapiens
tggtatgtcttgcca

SEQ ID NO: 242281 - DNA, 15 bp, Homo sapiens
atggtatgtcttgcc

SEQ ID NO: 242282 - DNA, 15 bp, Homo sapiens
catggtatgtcttgc

SEQ ID NO: 242283 - DNA, 15 bp, Homo sapiens
acatggtatgtcttg

SEQ ID NO: 242284 - DNA, 15 bp, Homo sapiens
aacatggtatgtctt

SEQ ID NO: 242285 - DNA, 15 bp, Homo sapiens
gaacatggtatgtct

SEQ ID NO: 242286 - DNA, 15 bp, Homo sapiens
tgaacatggtatgtc

SEQ ID NO: 242287 - DNA, 15 bp, Homo sapiens
atgaacatggtatgt

SEQ ID NO: 242288 - DNA, 15 bp, Homo sapiens
catgaacatggtatg

SEQ ID NO: 242289 - DNA, 15 bp, Homo sapiens
ccatgaacatggtat

SEQ ID NO: 242290 - DNA, 15 bp, Homo sapiens
tccatgaacatggta

SEQ ID NO: 242291 - DNA, 15 bp, Homo sapiens
gtccatgaacatggt

SEQ ID NO: 242292 - DNA, 15 bp, Homo sapiens
agtccatgaacatgg

SEQ ID NO: 242293 - DNA, 15 bp, Homo sapiens
cagtccatgaacatg

SEQ ID NO: 242294 - DNA, 15 bp, Homo sapiens
ccagtccatgaacat

SEQ ID NO: 242295 - DNA, 15 bp, Homo sapiens
tccagtccatgaaca

SEQ ID NO: 242296 - DNA, 15 bp, Homo sapiens
ttccagtccatgaac

SEQ ID NO: 242297 - DNA, 15 bp, Homo sapiens
cttccagtccatgaa

SEQ ID NO: 242298 - DNA, 15 bp, Homo sapiens
tcttccagtccatga

SEQ ID NO: 242299 - DNA, 15 bp, Homo sapiens
gtcttccagtccatg

SEQ ID NO: 242300 - DNA, 15 bp, Homo sapiens
agtcttccagtccat

SEQ ID NO: 242301 - DNA, 15 bp, Homo sapiens
gagtcttccagtcca

SEQ ID NO: 242302 - DNA, 15 bp, Homo sapiens
tgagtcttccagtcc

SEQ ID NO: 242303 - DNA, 15 bp, Homo sapiens
atgagtcttccagtc

SEQ ID NO: 242304 - DNA, 15 bp, Homo sapiens
gatgagtcttccagt

SEQ ID NO: 242305 - DNA, 15 bp, Homo sapiens
ggatgagtcttccag

SEQ ID NO: 242306 - DNA, 15 bp, Homo sapiens
aggatgagtcttcca

SEQ ID NO: 242307 - DNA, 15 bp, Homo sapiens
taggatgagtcttcc

SEQ ID NO: 242308 - DNA, 15 bp, Homo sapiens
ctaggatgagtcttc

SEQ ID NO: 242309 - DNA, 15 bp, Homo sapiens
actaggatgagtctt

SEQ ID NO: 242310 - DNA, 15 bp, Homo sapiens
tactaggatgagtct

SEQ ID NO: 242311 - DNA, 15 bp, Homo sapiens
ttactaggatgagtc

SEQ ID NO: 242312 - DNA, 15 bp, Homo sapiens
attactaggatgagt

SEQ ID NO: 242313 - DNA, 15 bp, Homo sapiens
cattactaggatgag

SEQ ID NO: 242314 - DNA, 15 bp, Homo sapiens
ccattactaggatga

SEQ ID NO: 242315 - DNA, 15 bp, Homo sapiens
accattactaggatg

SEQ ID NO: 242316 - DNA, 15 bp, Homo sapiens
caccattactaggat

SEQ ID NO: 242317 - DNA, 15 bp, Homo sapiens
gcaccattactagga

SEQ ID NO: 242318 - DNA, 15 bp, Homo sapiens
ggcaccattactagg

SEQ ID NO: 242319 - DNA, 15 bp, Homo sapiens
tggcaccattactag

SEQ ID NO: 242320 - DNA, 15 bp, Homo sapiens
ctggcaccattacta

SEQ ID NO: 242321 - DNA, 15 bp, Homo sapiens
gctggcaccattact

SEQ ID NO: 242322 - DNA, 15 bp, Homo sapiens
agctggcaccattac

SEQ ID NO: 242323 - DNA, 15 bp, Homo sapiens
gagctggcaccatta

SEQ ID NO: 242324 - DNA, 15 bp, Homo sapiens
tgagctggcaccatt

SEQ ID NO: 242325 - DNA, 15 bp, Homo sapiens
gtgagctggcaccat

SEQ ID NO: 242326 - DNA, 15 bp, Homo sapiens
ggtgagctggcacca

SEQ ID NO: 242327 - DNA, 15 bp, Homo sapiens
gggtgagctggcacc

SEQ ID NO: 242328 - DNA, 15 bp, Homo sapiens
ggggtgagctggcac

SEQ ID NO: 242329 - DNA, 15 bp, Homo sapiens
gggggtgagctggca

SEQ ID NO: 242330 - DNA, 15 bp, Homo sapiens
tgggggtgagctggc

SEQ ID NO: 242331 - DNA, 15 bp, Homo sapiens
ctgggggtgagctgg

SEQ ID NO: 242332 - DNA, 15 bp, Homo sapiens
tctgggggtgagctg

SEQ ID NO: 242333 - DNA, 15 bp, Homo sapiens
atctgggggtgagct

SEQ ID NO: 242334 - DNA, 15 bp, Homo sapiens
aatctgggggtgagc

SEQ ID NO: 242335 - DNA, 15 bp, Homo sapiens
aaatctgggggtgag

SEQ ID NO: 242336 - DNA, 15 bp, Homo sapiens
gaaatctgggggtga

SEQ ID NO: 242337 - DNA, 15 bp, Homo sapiens
agaaatctgggggtg

SEQ ID NO: 242338 - DNA, 15 bp, Homo sapiens
gagaaatctgggggt

SEQ ID NO: 242339 - DNA, 15 bp, Homo sapiens
agagaaatctggggg

SEQ ID NO: 242340 - DNA, 15 bp, Homo sapiens
tagagaaatctgggg

SEQ ID NO: 242341 - DNA, 15 bp, Homo sapiens
gtagagaaatctggg

SEQ ID NO: 242342 - DNA, 15 bp, Homo sapiens
tgtagagaaatctgg

SEQ ID NO: 242343 - DNA, 15 bp, Homo sapiens
ctgtagagaaatctg

SEQ ID NO: 242344 - DNA, 15 bp, Homo sapiens
tctgtagagaaatct

SEQ ID NO: 242345 - DNA, 15 bp, Homo sapiens
atctgtagagaaatc

SEQ ID NO: 242346 - DNA, 15 bp, Homo sapiens
aatctgtagagaaat

SEQ ID NO: 242347 - DNA, 15 bp, Homo sapiens
aaatctgtagagaaa

SEQ ID NO: 242348 - DNA, 15 bp, Homo sapiens
taaatctgtagagaa

SEQ ID NO: 242349 - DNA, 15 bp, Homo sapiens
ttaaatctgtagaga

SEQ ID NO: 242350 - DNA, 15 bp, Homo sapiens
attaaatctgtagag

SEQ ID NO: 242351 - DNA, 15 bp, Homo sapiens
cattaaatctgtaga

SEQ ID NO: 242352 - DNA, 15 bp, Homo sapiens
acattaaatctgtag

SEQ ID NO: 242353 - DNA, 15 bp, Homo sapiens
tacattaaatctgta

SEQ ID NO: 242354 - DNA, 15 bp, Homo sapiens
ttacattaaatctgt

SEQ ID NO: 242355 - DNA, 15 bp, Homo sapiens
gttacattaaatctg

SEQ ID NO: 242356 - DNA, 15 bp, Homo sapiens
agttacattaaatct

SEQ ID NO: 242357 - DNA, 15 bp, Homo sapiens
gagttacattaaatc

SEQ ID NO: 242358 - DNA, 15 bp, Homo sapiens
ggagttacattaaat

SEQ ID NO: 242359 - DNA, 15 bp, Homo sapiens
tggagttacattaaa

SEQ ID NO: 242360 - DNA, 15 bp, Homo sapiens
ttggagttacattaa

SEQ ID NO: 242361 - DNA, 15 bp, Homo sapiens
gttggagttacatta

SEQ ID NO: 242362 - DNA, 15 bp, Homo sapiens
ggttggagttacatt

SEQ ID NO: 242363 - DNA, 15 bp, Homo sapiens
tggttggagttacat

SEQ ID NO: 242364 - DNA, 15 bp, Homo sapiens
ttggttggagttaca

SEQ ID NO: 242365 - DNA, 15 bp, Homo sapiens
tttggttggagttac

SEQ ID NO: 242366 - DNA, 15 bp, Homo sapiens
ttttggttggagtta

SEQ ID NO: 242367 - DNA, 15 bp, Homo sapiens
attttggttggagtt

SEQ ID NO: 242368 - DNA, 15 bp, Homo sapiens
gattttggttggagt

SEQ ID NO: 242369 - DNA, 15 bp, Homo sapiens
agattttggttggag

SEQ ID NO: 242370 - DNA, 15 bp, Homo sapiens
tagattttggttgga

SEQ ID NO: 242371 - DNA, 15 bp, Homo sapiens
ttagattttggttgg

SEQ ID NO: 242372 - DNA, 15 bp, Homo sapiens
cttagattttggttg

SEQ ID NO: 242373 - DNA, 15 bp, Homo sapiens
gcttagattttggtt

SEQ ID NO: 242374 - DNA, 15 bp, Homo sapiens
tgcttagattttggt

SEQ ID NO: 242375 - DNA, 15 bp, Homo sapiens
ctgcttagattttgg

SEQ ID NO: 242376 - DNA, 15 bp, Homo sapiens
cctgcttagattttg

SEQ ID NO: 242377 - DNA, 15 bp, Homo sapiens
tcctgcttagatttt

SEQ ID NO: 242378 - DNA, 15 bp, Homo sapiens
gtcctgcttagattt

SEQ ID NO: 242379 - DNA, 15 bp, Homo sapiens
agtcctgcttagatt

SEQ ID NO: 242380 - DNA, 15 bp, Homo sapiens
cagtcctgcttagat

SEQ ID NO: 242381 - DNA, 15 bp, Homo sapiens
acagtcctgcttaga

SEQ ID NO: 242382 - DNA, 15 bp, Homo sapiens
aacagtcctgcttag

SEQ ID NO: 242383 - DNA, 15 bp, Homo sapiens
aaacagtcctgctta

SEQ ID NO: 242384 - DNA, 15 bp, Homo sapiens
caaacagtcctgctt

SEQ ID NO: 242385 - DNA, 15 bp, Homo sapiens
gcaaacagtcctgct

SEQ ID NO: 242386 - DNA, 15 bp, Homo sapiens
tgcaaacagtcctgc

SEQ ID NO: 242387 - DNA, 15 bp, Homo sapiens
ctgcaaacagtcctg

SEQ ID NO: 242388 - DNA, 15 bp, Homo sapiens
tctgcaaacagtcct

SEQ ID NO: 242389 - DNA, 15 bp, Homo sapiens
atctgcaaacagtcc

SEQ ID NO: 242390 - DNA, 15 bp, Homo sapiens
tatctgcaaacagtc

SEQ ID NO: 242391 - DNA, 15 bp, Homo sapiens
atatctgcaaacagt

SEQ ID NO: 242392 - DNA, 15 bp, Homo sapiens
tatatctgcaaacag

SEQ ID NO: 242393 - DNA, 15 bp, Homo sapiens
ttatatctgcaaaca

SEQ ID NO: 242394 - DNA, 15 bp, Homo sapiens
tttatatctgcaaac

SEQ ID NO: 242395 - DNA, 15 bp, Homo sapiens
gtttatatctgcaaa

SEQ ID NO: 242396 - DNA, 15 bp, Homo sapiens
tgtttatatctgcaa

SEQ ID NO: 242397 - DNA, 15 bp, Homo sapiens
ttgtttatatctgca

SEQ ID NO: 242398 - DNA, 15 bp, Homo sapiens
tttgtttatatctgc

SEQ ID NO: 242399 - DNA, 15 bp, Homo sapiens
gtttgtttatatctg

SEQ ID NO: 242400 - DNA, 15 bp, Homo sapiens
ggtttgtttatatct

SEQ ID NO: 242401 - DNA, 15 bp, Homo sapiens
tggtttgtttatatc

SEQ ID NO: 242402 - DNA, 15 bp, Homo sapiens
ttggtttgtttatat

SEQ ID NO: 242403 - DNA, 15 bp, Homo sapiens
attggtttgtttata

SEQ ID NO: 242404 - DNA, 15 bp, Homo sapiens
aattggtttgtttat

SEQ ID NO: 242405 - DNA, 15 bp, Homo sapiens
aaattggtttgttta

SEQ ID NO: 242406 - DNA, 15 bp, Homo sapiens
gaaattggtttgttt

SEQ ID NO: 242407 - DNA, 15 bp, Homo sapiens
agaaattggtttgtt

SEQ ID NO: 242408 - DNA, 15 bp, Homo sapiens
tagaaattggtttgt

SEQ ID NO: 242409 - DNA, 15 bp, Homo sapiens
ttagaaattggtttg

SEQ ID NO: 242410 - DNA, 15 bp, Homo sapiens
tttagaaattggttt

SEQ ID NO: 242411 - DNA, 15 bp, Homo sapiens
ttttagaaattggtt

SEQ ID NO: 242412 - DNA, 15 bp, Homo sapiens
attttagaaattggt

SEQ ID NO: 242413 - DNA, 15 bp, Homo sapiens
aattttagaaattgg

SEQ ID NO: 242414 - DNA, 15 bp, Homo sapiens
aaattttagaaattg

SEQ ID NO: 242415 - DNA, 15 bp, Homo sapiens
taaattttagaaatt

SEQ ID NO: 242416 - DNA, 15 bp, Homo sapiens
ataaattttagaaat

SEQ ID NO: 242417 - DNA, 15 bp, Homo sapiens
cataaattttagaaa

SEQ ID NO: 242418 - DNA, 15 bp, Homo sapiens
acataaattttagaa

SEQ ID NO: 242419 - DNA, 15 bp, Homo sapiens
cacataaattttaga

SEQ ID NO: 242420 - DNA, 15 bp, Homo sapiens
tcacataaattttag

SEQ ID NO: 242421 - DNA, 15 bp, Homo sapiens
ttcacataaatttta

SEQ ID NO: 242422 - DNA, 15 bp, Homo sapiens
tttcacataaatttt

SEQ ID NO: 242423 - DNA, 15 bp, Homo sapiens
ttttcacataaattt

SEQ ID NO: 242424 - DNA, 15 bp, Homo sapiens
cttttcacataaatt

SEQ ID NO: 242425 - DNA, 15 bp, Homo sapiens
ccttttcacataaat

SEQ ID NO: 242426 - DNA, 15 bp, Homo sapiens
gccttttcacataaa

SEQ ID NO: 242427 - DNA, 15 bp, Homo sapiens
tgccttttcacataa

SEQ ID NO: 242428 - DNA, 15 bp, Homo sapiens
ttgccttttcacata

SEQ ID NO: 242429 - DNA, 15 bp, Homo sapiens
tttgccttttcacat

SEQ ID NO: 242430 - DNA, 15 bp, Homo sapiens
ctttgccttttcaca

SEQ ID NO: 242431 - DNA, 15 bp, Homo sapiens
gctttgccttttcac

SEQ ID NO: 242432 - DNA, 15 bp, Homo sapiens
tgctttgccttttca

SEQ ID NO: 242433 - DNA, 15 bp, Homo sapiens
ttgctttgccttttc

SEQ ID NO: 242434 - DNA, 15 bp, Homo sapiens
gttgctttgcctttt

SEQ ID NO: 242435 - DNA, 15 bp, Homo sapiens
agttgctttgccttt

SEQ ID NO: 242436 - DNA, 15 bp, Homo sapiens
tagttgctttgcctt

SEQ ID NO: 242437 - DNA, 15 bp, Homo sapiens
ctagttgctttgcct

SEQ ID NO: 242438 - DNA, 15 bp, Homo sapiens
tctagttgctttgcc

SEQ ID NO: 242439 - DNA, 15 bp, Homo sapiens
ttctagttgctttgc

SEQ ID NO: 242440 - DNA, 15 bp, Homo sapiens
attctagttgctttg

SEQ ID NO: 242441 - DNA, 15 bp, Homo sapiens
tattctagttgcttt

SEQ ID NO: 242442 - DNA, 15 bp, Homo sapiens
ctattctagttgctt

SEQ ID NO: 242443 - DNA, 15 bp, Homo sapiens
cctattctagttgct

SEQ ID NO: 242444 - DNA, 15 bp, Homo sapiens
acctattctagttgc

SEQ ID NO: 242445 - DNA, 15 bp, Homo sapiens
tacctattctagttg

SEQ ID NO: 242446 - DNA, 15 bp, Homo sapiens
ttacctattctagtt

SEQ ID NO: 242447 - DNA, 15 bp, Homo sapiens
tttacctattctagt

SEQ ID NO: 242448 - DNA, 15 bp, Homo sapiens
ttttacctattctag

SEQ ID NO: 242449 - DNA, 15 bp, Homo sapiens
attttacctattcta

SEQ ID NO: 242450 - DNA, 15 bp, Homo sapiens
tattttacctattct

SEQ ID NO: 242451 - DNA, 15 bp, Homo sapiens
ttattttacctattc

SEQ ID NO: 242452 - DNA, 15 bp, Homo sapiens
attattttacctatt

SEQ ID NO: 242453 - DNA, 15 bp, Homo sapiens
aattattttacctat

SEQ ID NO: 242454 - DNA, 15 bp, Homo sapiens
aaattattttaccta

SEQ ID NO: 242455 - DNA, 15 bp, Homo sapiens
aaaattattttacct

SEQ ID NO: 242456 - DNA, 15 bp, Homo sapiens
caaaattattttacc

SEQ ID NO: 242457 - DNA, 15 bp, Homo sapiens
tcaaaattattttac

SEQ ID NO: 242458 - DNA, 15 bp, Homo sapiens
ttcaaaattatttta

SEQ ID NO: 242459 - DNA, 15 bp, Homo sapiens
tttcaaaattatttt

SEQ ID NO: 242460 - DNA, 15 bp, Homo sapiens
ttttcaaaattattt

SEQ ID NO: 242461 - DNA, 15 bp, Homo sapiens
tttttcaaaattatt

SEQ ID NO: 242462 - DNA, 15 bp, Homo sapiens
ctttttcaaaattat

SEQ ID NO: 242463 - DNA, 15 bp, Homo sapiens
tctttttcaaaatta

SEQ ID NO: 242464 - DNA, 15 bp, Homo sapiens
ttctttttcaaaatt

SEQ ID NO: 242465 - DNA, 15 bp, Homo sapiens
cttctttttcaaaat

SEQ ID NO: 242466 - DNA, 15 bp, Homo sapiens
acttctttttcaaaa

SEQ ID NO: 242467 - DNA, 15 bp, Homo sapiens
cacttctttttcaaa

SEQ ID NO: 242468 - DNA, 15 bp, Homo sapiens
acacttctttttcaa

SEQ ID NO: 242469 - DNA, 15 bp, Homo sapiens
tacacttctttttca

SEQ ID NO: 242470 - DNA, 15 bp, Homo sapiens
atacacttctttttc

SEQ ID NO: 242471 - DNA, 15 bp, Homo sapiens
tatacacttcttttt

SEQ ID NO: 242472 - DNA, 15 bp, Homo sapiens
atatacacttctttt

SEQ ID NO: 242473 - DNA, 15 bp, Homo sapiens
aatatacacttcttt

SEQ ID NO: 242474 - DNA, 15 bp, Homo sapiens
aaatatacacttctt

SEQ ID NO: 242475 - DNA, 15 bp, Homo sapiens
caaatatacacttct

SEQ ID NO: 242476 - DNA, 15 bp, Homo sapiens
tcaaatatacacttc

SEQ ID NO: 242477 - DNA, 15 bp, Homo sapiens
ttcaaatatacactt

SEQ ID NO: 242478 - DNA, 15 bp, Homo sapiens
cttcaaatatacact

SEQ ID NO: 242479 - DNA, 15 bp, Homo sapiens
tcttcaaatatacac

SEQ ID NO: 242480 - DNA, 15 bp, Homo sapiens
ttcttcaaatataca

SEQ ID NO: 242481 - DNA, 15 bp, Homo sapiens
tttcttcaaatatac

SEQ ID NO: 242482 - DNA, 15 bp, Homo sapiens
atttcttcaaatata

SEQ ID NO: 242483 - DNA, 15 bp, Homo sapiens
gatttcttcaaatat

SEQ ID NO: 242484 - DNA, 15 bp, Homo sapiens
tgatttcttcaaata

SEQ ID NO: 242485 - DNA, 15 bp, Homo sapiens
gtgatttcttcaaat

SEQ ID NO: 242486 - DNA, 15 bp, Homo sapiens
ggtgatttcttcaaa

SEQ ID NO: 242487 - DNA, 15 bp, Homo sapiens
tggtgatttcttcaa

SEQ ID NO: 242488 - DNA, 15 bp, Homo sapiens
ttggtgatttcttca

SEQ ID NO: 242489 - DNA, 15 bp, Homo sapiens
attggtgatttcttc

SEQ ID NO: 242490 - DNA, 15 bp, Homo sapiens
gattggtgatttctt

SEQ ID NO: 242491 - DNA, 15 bp, Homo sapiens
cgattggtgatttct

SEQ ID NO: 242492 - DNA, 15 bp, Homo sapiens
gcgattggtgatttc

SEQ ID NO: 242493 - DNA, 15 bp, Homo sapiens
ggcgattggtgattt

SEQ ID NO: 242494 - DNA, 15 bp, Homo sapiens
gggcgattggtgatt

SEQ ID NO: 242495 - DNA, 15 bp, Homo sapiens
agggcgattggtgat

SEQ ID NO: 242496 - DNA, 15 bp, Homo sapiens
tagggcgattggtga

SEQ ID NO: 242497 - DNA, 15 bp, Homo sapiens
gtagggcgattggtg

SEQ ID NO: 242498 - DNA, 15 bp, Homo sapiens
ggtagggcgattggt

SEQ ID NO: 242499 - DNA, 15 bp, Homo sapiens
aggtagggcgattgg

SEQ ID NO: 242500 - DNA, 15 bp, Homo sapiens
caggtagggcgattg

SEQ ID NO: 242501 - DNA, 15 bp, Homo sapiens
tcaggtagggcgatt

SEQ ID NO: 242502 - DNA, 15 bp, Homo sapiens
atcaggtagggcgat

SEQ ID NO: 242503 - DNA, 15 bp, Homo sapiens
aatcaggtagggcga

SEQ ID NO: 242504 - DNA, 15 bp, Homo sapiens
aaatcaggtagggcg

SEQ ID NO: 242505 - DNA, 15 bp, Homo sapiens
aaaatcaggtagggc

SEQ ID NO: 242506 - DNA, 15 bp, Homo sapiens
taaaatcaggtaggg

SEQ ID NO: 242507 - DNA, 15 bp, Homo sapiens
ttaaaatcaggtagg

SEQ ID NO: 242508 - DNA, 15 bp, Homo sapiens
gttaaaatcaggtag

SEQ ID NO: 242509 - DNA, 15 bp, Homo sapiens
tgttaaaatcaggta

SEQ ID NO: 242510 - DNA, 15 bp, Homo sapiens
gtgttaaaatcaggt

SEQ ID NO: 242511 - DNA, 15 bp, Homo sapiens
agtgttaaaatcagg

SEQ ID NO: 242512 - DNA, 15 bp, Homo sapiens
aagtgttaaaatcag

SEQ ID NO: 242513 - DNA, 15 bp, Homo sapiens
caagtgttaaaatca

SEQ ID NO: 242514 - DNA, 15 bp, Homo sapiens
gcaagtgttaaaatc

SEQ ID NO: 242515 - DNA, 15 bp, Homo sapiens
agcaagtgttaaaat

SEQ ID NO: 242516 - DNA, 15 bp, Homo sapiens
tagcaagtgttaaaa

SEQ ID NO: 242517 - DNA, 15 bp, Homo sapiens
atagcaagtgttaaa

SEQ ID NO: 242518 - DNA, 15 bp, Homo sapiens
tatagcaagtgttaa

SEQ ID NO: 242519 - DNA, 15 bp, Homo sapiens
ttatagcaagtgtta

SEQ ID NO: 242520 - DNA, 15 bp, Homo sapiens
tttatagcaagtgtt

SEQ ID NO: 242521 - DNA, 15 bp, Homo sapiens
ctttatagcaagtgt

SEQ ID NO: 242522 - DNA, 15 bp, Homo sapiens
gctttatagcaagtg

SEQ ID NO: 242523 - DNA, 15 bp, Homo sapiens
agctttatagcaagt

SEQ ID NO: 242524 - DNA, 15 bp, Homo sapiens
tagctttatagcaag

SEQ ID NO: 242525 - DNA, 15 bp, Homo sapiens
atagctttatagcaa

SEQ ID NO: 242526 - DNA, 15 bp, Homo sapiens
tatagctttatagca

SEQ ID NO: 242527 - DNA, 15 bp, Homo sapiens
ctatagctttatagc

SEQ ID NO: 242528 - DNA, 15 bp, Homo sapiens
actatagctttatag

SEQ ID NO: 242529 - DNA, 15 bp, Homo sapiens
tactatagctttata

SEQ ID NO: 242530 - DNA, 15 bp, Homo sapiens
ttactatagctttat

SEQ ID NO: 242531 - DNA, 15 bp, Homo sapiens
attactatagcttta

SEQ ID NO: 242532 - DNA, 15 bp, Homo sapiens
gattactatagcttt

SEQ ID NO: 242533 - DNA, 15 bp, Homo sapiens
tgattactatagctt

SEQ ID NO: 242534 - DNA, 15 bp, Homo sapiens
ttgattactatagct

SEQ ID NO: 242535 - DNA, 15 bp, Homo sapiens
cttgattactatagc

SEQ ID NO: 242536 - DNA, 15 bp, Homo sapiens
tcttgattactatag

SEQ ID NO: 242537 - DNA, 15 bp, Homo sapiens
gtcttgattactata

SEQ ID NO: 242538 - DNA, 15 bp, Homo sapiens
tgtcttgattactat

SEQ ID NO: 242539 - DNA, 15 bp, Homo sapiens
ctgtcttgattacta

SEQ ID NO: 242540 - DNA, 15 bp, Homo sapiens
actgtcttgattact

SEQ ID NO: 242541 - DNA, 15 bp, Homo sapiens
cactgtcttgattac

SEQ ID NO: 242542 - DNA, 15 bp, Homo sapiens
acactgtcttgatta

SEQ ID NO: 242543 - DNA, 15 bp, Homo sapiens
gacactgtcttgatt

SEQ ID NO: 242544 - DNA, 15 bp, Homo sapiens
tgacactgtcttgat

SEQ ID NO: 242545 - DNA, 15 bp, Homo sapiens
atgacactgtcttga

SEQ ID NO: 242546 - DNA, 15 bp, Homo sapiens
tatgacactgtcttg

SEQ ID NO: 242547 - DNA, 15 bp, Homo sapiens
atatgacactgtctt

SEQ ID NO: 242548 - DNA, 15 bp, Homo sapiens
aatatgacactgtct

SEQ ID NO: 242549 - DNA, 15 bp, Homo sapiens
caatatgacactgtc

SEQ ID NO: 242550 - DNA, 15 bp, Homo sapiens
ccaatatgacactgt

SEQ ID NO: 242551 - DNA, 15 bp, Homo sapiens
gccaatatgacactg

SEQ ID NO: 242552 - DNA, 15 bp, Homo sapiens
tgccaatatgacact

SEQ ID NO: 242553 - DNA, 15 bp, Homo sapiens
ttgccaatatgacac

SEQ ID NO: 242554 - DNA, 15 bp, Homo sapiens
tttgccaatatgaca

SEQ ID NO: 242555 - DNA, 15 bp, Homo sapiens
ctttgccaatatgac

SEQ ID NO: 242556 - DNA, 15 bp, Homo sapiens
cctttgccaatatga

SEQ ID NO: 242557 - DNA, 15 bp, Homo sapiens
ccctttgccaatatg

SEQ ID NO: 242558 - DNA, 15 bp, Homo sapiens
tccctttgccaatat

SEQ ID NO: 242559 - DNA, 15 bp, Homo sapiens
atccctttgccaata

SEQ ID NO: 242560 - DNA, 15 bp, Homo sapiens
tatccctttgccaat

SEQ ID NO: 242561 - DNA, 15 bp, Homo sapiens
ctatccctttgccaa

SEQ ID NO: 242562 - DNA, 15 bp, Homo sapiens
tctatccctttgcca

SEQ ID NO: 242563 - DNA, 15 bp, Homo sapiens
gtctatccctttgcc

SEQ ID NO: 242564 - DNA, 15 bp, Homo sapiens
tgtctatccctttgc

SEQ ID NO: 242565 - DNA, 15 bp, Homo sapiens
gtgtctatccctttg

SEQ ID NO: 242566 - DNA, 15 bp, Homo sapiens
tgtgtctatcccttt

SEQ ID NO: 242567 - DNA, 15 bp, Homo sapiens
atgtgtctatccctt

SEQ ID NO: 242568 - DNA, 15 bp, Homo sapiens
tatgtgtctatccct

SEQ ID NO: 242569 - DNA, 15 bp, Homo sapiens
ctatgtgtctatccc

SEQ ID NO: 242570 - DNA, 15 bp, Homo sapiens
tctatgtgtctatcc

SEQ ID NO: 242571 - DNA, 15 bp, Homo sapiens
atctatgtgtctatc

SEQ ID NO: 242572 - DNA, 15 bp, Homo sapiens
gatctatgtgtctat

SEQ ID NO: 242573 - DNA, 15 bp, Homo sapiens
tgatctatgtgtcta

SEQ ID NO: 242574 - DNA, 15 bp, Homo sapiens
ttgatctatgtgtct

SEQ ID NO: 242575 - DNA, 15 bp, Homo sapiens
attgatctatgtgtc

SEQ ID NO: 242576 - DNA, 15 bp, Homo sapiens
cattgatctatgtgt

SEQ ID NO: 242577 - DNA, 15 bp, Homo sapiens
ccattgatctatgtg

SEQ ID NO: 242578 - DNA, 15 bp, Homo sapiens
tccattgatctatgt

SEQ ID NO: 242579 - DNA, 15 bp, Homo sapiens
ctccattgatctatg

SEQ ID NO: 242580 - DNA, 15 bp, Homo sapiens
actccattgatctat

SEQ ID NO: 242581 - DNA, 15 bp, Homo sapiens
tactccattgatcta

SEQ ID NO: 242582 - DNA, 15 bp, Homo sapiens
ctactccattgatct

SEQ ID NO: 242583 - DNA, 15 bp, Homo sapiens
tctactccattgatc

SEQ ID NO: 242584 - DNA, 15 bp, Homo sapiens
gtctactccattgat

SEQ ID NO: 242585 - DNA, 15 bp, Homo sapiens
agtctactccattga

SEQ ID NO: 242586 - DNA, 15 bp, Homo sapiens
tagtctactccattg

SEQ ID NO: 242587 - DNA, 15 bp, Homo sapiens
ctagtctactccatt

SEQ ID NO: 242588 - DNA, 15 bp, Homo sapiens
tctagtctactccat

SEQ ID NO: 242589 - DNA, 15 bp, Homo sapiens
ctctagtctactcca

SEQ ID NO: 242590 - DNA, 15 bp, Homo sapiens
actctagtctactcc

SEQ ID NO: 242591 - DNA, 15 bp, Homo sapiens
gactctagtctactc

SEQ ID NO: 242592 - DNA, 15 bp, Homo sapiens
ggactctagtctact

SEQ ID NO: 242593 - DNA, 15 bp, Homo sapiens
tggactctagtctac

SEQ ID NO: 242594 - DNA, 15 bp, Homo sapiens
ttggactctagtcta

SEQ ID NO: 242595 - DNA, 15 bp, Homo sapiens
tttggactctagtct

SEQ ID NO: 242596 - DNA, 15 bp, Homo sapiens
ttttggactctagtc

SEQ ID NO: 242597 - DNA, 15 bp, Homo sapiens
tttttggactctagt

SEQ ID NO: 242598 - DNA, 15 bp, Homo sapiens
atttttggactctag

SEQ ID NO: 242599 - DNA, 15 bp, Homo sapiens
tatttttggactcta

SEQ ID NO: 242600 - DNA, 15 bp, Homo sapiens
ctatttttggactct

SEQ ID NO: 242601 - DNA, 15 bp, Homo sapiens
tctatttttggactc

SEQ ID NO: 242602 - DNA, 15 bp, Homo sapiens
gtctatttttggact

SEQ ID NO: 242603 - DNA, 15 bp, Homo sapiens
ggtctatttttggac

SEQ ID NO: 242604 - DNA, 15 bp, Homo sapiens
aggtctatttttgga

SEQ ID NO: 242605 - DNA, 15 bp, Homo sapiens
taggtctatttttgg

SEQ ID NO: 242606 - DNA, 15 bp, Homo sapiens
gtaggtctatttttg

SEQ ID NO: 242607 - DNA, 15 bp, Homo sapiens
tgtaggtctattttt

SEQ ID NO: 242608 - DNA, 15 bp, Homo sapiens
ttgtaggtctatttt

SEQ ID NO: 242609 - DNA, 15 bp, Homo sapiens
gttgtaggtctattt

SEQ ID NO: 242610 - DNA, 15 bp, Homo sapiens
tgttgtaggtctatt

SEQ ID NO: 242611 - DNA, 15 bp, Homo sapiens
ttgttgtaggtctat

SEQ ID NO: 242612 - DNA, 15 bp, Homo sapiens
tttgttgtaggtcta

SEQ ID NO: 242613 - DNA, 15 bp, Homo sapiens
atttgttgtaggtct

SEQ ID NO: 242614 - DNA, 15 bp, Homo sapiens
tatttgttgtaggtc

SEQ ID NO: 242615 - DNA, 15 bp, Homo sapiens
atatttgttgtaggt

SEQ ID NO: 242616 - DNA, 15 bp, Homo sapiens
catatttgttgtagg

SEQ ID NO: 242617 - DNA, 15 bp, Homo sapiens
ccatatttgttgtag

SEQ ID NO: 242618 - DNA, 15 bp, Homo sapiens
accatatttgttgta

SEQ ID NO: 242619 - DNA, 15 bp, Homo sapiens
gaccatatttgttgt

SEQ ID NO: 242620 - DNA, 15 bp, Homo sapiens
tgaccatatttgttg

SEQ ID NO: 242621 - DNA, 15 bp, Homo sapiens
ttgaccatatttgtt

SEQ ID NO: 242622 - DNA, 15 bp, Homo sapiens
attgaccatatttgt

SEQ ID NO: 242623 - DNA, 15 bp, Homo sapiens
aattgaccatatttg

SEQ ID NO: 242624 - DNA, 15 bp, Homo sapiens
caattgaccatattt

SEQ ID NO: 242625 - DNA, 15 bp, Homo sapiens
gcaattgaccatatt

SEQ ID NO: 242626 - DNA, 15 bp, Homo sapiens
agcaattgaccatat

SEQ ID NO: 242627 - DNA, 15 bp, Homo sapiens
aagcaattgaccata

SEQ ID NO: 242628 - DNA, 15 bp, Homo sapiens
aaagcaattgaccat

SEQ ID NO: 242629 - DNA, 15 bp, Homo sapiens
caaagcaattgacca

SEQ ID NO: 242630 - DNA, 15 bp, Homo sapiens
tcaaagcaattgacc

SEQ ID NO: 242631 - DNA, 15 bp, Homo sapiens
atcaaagcaattgac

SEQ ID NO: 242632 - DNA, 15 bp, Homo sapiens
tatcaaagcaattga

SEQ ID NO: 242633 - DNA, 15 bp, Homo sapiens
ctatcaaagcaattg

SEQ ID NO: 242634 - DNA, 15 bp, Homo sapiens
tctatcaaagcaatt

SEQ ID NO: 242635 - DNA, 15 bp, Homo sapiens
ctctatcaaagcaat

SEQ ID NO: 242636 - DNA, 15 bp, Homo sapiens
cctctatcaaagcaa

SEQ ID NO: 242637 - DNA, 15 bp, Homo sapiens
acctctatcaaagca

SEQ ID NO: 242638 - DNA, 15 bp, Homo sapiens
tacctctatcaaagc

SEQ ID NO: 242639 - DNA, 15 bp, Homo sapiens
gtacctctatcaaag

SEQ ID NO: 242640 - DNA, 15 bp, Homo sapiens
tgtacctctatcaaa

SEQ ID NO: 242641 - DNA, 15 bp, Homo sapiens
ttgtacctctatcaa

SEQ ID NO: 242642 - DNA, 15 bp, Homo sapiens
tttgtacctctatca

SEQ ID NO: 242643 - DNA, 15 bp, Homo sapiens
ctttgtacctctatc

SEQ ID NO: 242644 - DNA, 15 bp, Homo sapiens
tctttgtacctctat

SEQ ID NO: 242645 - DNA, 15 bp, Homo sapiens
gtctttgtacctcta

SEQ ID NO: 242646 - DNA, 15 bp, Homo sapiens
tgtctttgtacctct

SEQ ID NO: 242647 - DNA, 15 bp, Homo sapiens
ttgtctttgtacctc

SEQ ID NO: 242648 - DNA, 15 bp, Homo sapiens
attgtctttgtacct

SEQ ID NO: 242649 - DNA, 15 bp, Homo sapiens
aattgtctttgtacc

SEQ ID NO: 242650 - DNA, 15 bp, Homo sapiens
gaattgtctttgtac

SEQ ID NO: 242651 - DNA, 15 bp, Homo sapiens
tgaattgtctttgta

SEQ ID NO: 242652 - DNA, 15 bp, Homo sapiens
ttgaattgtctttgt

SEQ ID NO: 242653 - DNA, 15 bp, Homo sapiens
attgaattgtctttg

SEQ ID NO: 242654 - DNA, 15 bp, Homo sapiens
cattgaattgtcttt

SEQ ID NO: 242655 - DNA, 15 bp, Homo sapiens
ccattgaattgtctt

SEQ ID NO: 242656 - DNA, 15 bp, Homo sapiens
tccattgaattgtct

SEQ ID NO: 242657 - DNA, 15 bp, Homo sapiens
ctccattgaattgtc

SEQ ID NO: 242658 - DNA, 15 bp, Homo sapiens
tctccattgaattgt

SEQ ID NO: 242659 - DNA, 15 bp, Homo sapiens
ttctccattgaattg

SEQ ID NO: 242660 - DNA, 15 bp, Homo sapiens
cttctccattgaatt

SEQ ID NO: 242661 - DNA, 15 bp, Homo sapiens
ccttctccattgaat

SEQ ID NO: 242662 - DNA, 15 bp, Homo sapiens
tccttctccattgaa

SEQ ID NO: 242663 - DNA, 15 bp, Homo sapiens
ctccttctccattga

SEQ ID NO: 242664 - DNA, 15 bp, Homo sapiens
actccttctccattg

SEQ ID NO: 242665 - DNA, 15 bp, Homo sapiens
gactccttctccatt

SEQ ID NO: 242666 - DNA, 15 bp, Homo sapiens
agactccttctccat

SEQ ID NO: 242667 - DNA, 15 bp, Homo sapiens
aagactccttctcca

SEQ ID NO: 242668 - DNA, 15 bp, Homo sapiens
aaagactccttctcc

SEQ ID NO: 242669 - DNA, 15 bp, Homo sapiens
aaaagactccttctc

SEQ ID NO: 242670 - DNA, 15 bp, Homo sapiens
gaaaagactccttct

SEQ ID NO: 242671 - DNA, 15 bp, Homo sapiens
agaaaagactccttc

SEQ ID NO: 242672 - DNA, 15 bp, Homo sapiens
tagaaaagactcctt

SEQ ID NO: 242673 - DNA, 15 bp, Homo sapiens
gtagaaaagactcct

SEQ ID NO: 242674 - DNA, 15 bp, Homo sapiens
tgtagaaaagactcc

SEQ ID NO: 242675 - DNA, 15 bp, Homo sapiens
ttgtagaaaagactc

SEQ ID NO: 242676 - DNA, 15 bp, Homo sapiens
attgtagaaaagact

SEQ ID NO: 242677 - DNA, 15 bp, Homo sapiens
cattgtagaaaagac

SEQ ID NO: 242678 - DNA, 15 bp, Homo sapiens
ccattgtagaaaaga

SEQ ID NO: 242679 - DNA, 15 bp, Homo sapiens
accattgtagaaaag

SEQ ID NO: 242680 - DNA, 15 bp, Homo sapiens
gaccattgtagaaaa

SEQ ID NO: 242681 - DNA, 15 bp, Homo sapiens
agaccattgtagaaa

SEQ ID NO: 242682 - DNA, 15 bp, Homo sapiens
aagaccattgtagaa

SEQ ID NO: 242683 - DNA, 15 bp, Homo sapiens
caagaccattgtaga

SEQ ID NO: 242684 - DNA, 15 bp, Homo sapiens
ccaagaccattgtag

SEQ ID NO: 242685 - DNA, 15 bp, Homo sapiens
tccaagaccattgta

SEQ ID NO: 242686 - DNA, 15 bp, Homo sapiens
ttccaagaccattgt

SEQ ID NO: 242687 - DNA, 15 bp, Homo sapiens
gttccaagaccattg

SEQ ID NO: 242688 - DNA, 15 bp, Homo sapiens
tgttccaagaccatt

SEQ ID NO: 242689 - DNA, 15 bp, Homo sapiens
ttgttccaagaccat

SEQ ID NO: 242690 - DNA, 15 bp, Homo sapiens
attgttccaagacca

SEQ ID NO: 242691 - DNA, 15 bp, Homo sapiens
aattgttccaagacc

SEQ ID NO: 242692 - DNA, 15 bp, Homo sapiens
caattgttccaagac

SEQ ID NO: 242693 - DNA, 15 bp, Homo sapiens
ccaattgttccaaga

SEQ ID NO: 242694 - DNA, 15 bp, Homo sapiens
tccaattgttccaag

SEQ ID NO: 242695 - DNA, 15 bp, Homo sapiens
gtccaattgttccaa

SEQ ID NO: 242696 - DNA, 15 bp, Homo sapiens
tgtccaattgttcca

SEQ ID NO: 242697 - DNA, 15 bp, Homo sapiens
atgtccaattgttcc

SEQ ID NO: 242698 - DNA, 15 bp, Homo sapiens
gatgtccaattgttc

SEQ ID NO: 242699 - DNA, 15 bp, Homo sapiens
ggatgtccaattgtt

SEQ ID NO: 242700 - DNA, 15 bp, Homo sapiens
tggatgtccaattgt

SEQ ID NO: 242701 - DNA, 15 bp, Homo sapiens
ttggatgtccaattg

SEQ ID NO: 242702 - DNA, 15 bp, Homo sapiens
cttggatgtccaatt

SEQ ID NO: 242703 - DNA, 15 bp, Homo sapiens
ccttggatgtccaat

SEQ ID NO: 242704 - DNA, 15 bp, Homo sapiens
cccttggatgtccaa

SEQ ID NO: 242705 - DNA, 15 bp, Homo sapiens
gcccttggatgtcca

SEQ ID NO: 242706 - DNA, 15 bp, Homo sapiens
tgcccttggatgtcc

SEQ ID NO: 242707 - DNA, 15 bp, Homo sapiens
ttgcccttggatgtc

SEQ ID NO: 242708 - DNA, 15 bp, Homo sapiens
tttgcccttggatgt

SEQ ID NO: 242709 - DNA, 15 bp, Homo sapiens
atttgcccttggatg

SEQ ID NO: 242710 - DNA, 15 bp, Homo sapiens
catttgcccttggat

SEQ ID NO: 242711 - DNA, 15 bp, Homo sapiens
tcatttgcccttgga

SEQ ID NO: 242712 - DNA, 15 bp, Homo sapiens
ttcatttgcccttgg

SEQ ID NO: 242713 - DNA, 15 bp, Homo sapiens
tttcatttgcccttg

SEQ ID NO: 242714 - DNA, 15 bp, Homo sapiens
gtttcatttgccctt

SEQ ID NO: 242715 - DNA, 15 bp, Homo sapiens
tgtttcatttgccct

SEQ ID NO: 242716 - DNA, 15 bp, Homo sapiens
ttgtttcatttgccc

SEQ ID NO: 242717 - DNA, 15 bp, Homo sapiens
tttgtttcatttgcc

SEQ ID NO: 242718 - DNA, 15 bp, Homo sapiens
ttttgtttcatttgc

SEQ ID NO: 242719 - DNA, 15 bp, Homo sapiens
gttttgtttcatttg

SEQ ID NO: 242720 - DNA, 15 bp, Homo sapiens
tgttttgtttcattt

SEQ ID NO: 242721 - DNA, 15 bp, Homo sapiens
ttgttttgtttcatt

SEQ ID NO: 242722 - DNA, 15 bp, Homo sapiens
tttgttttgtttcat

SEQ ID NO: 242723 - DNA, 15 bp, Homo sapiens
ttttgttttgtttca

SEQ ID NO: 242724 - DNA, 15 bp, Homo sapiens
gttttgttttgtttc

SEQ ID NO: 242725 - DNA, 15 bp, Homo sapiens
gctttttgttttgtt

SEQ ID NO: 242726 - DNA, 15 bp, Homo sapiens
agctttttgttttgt

SEQ ID NO: 242727 - DNA, 15 bp, Homo sapiens
gagctttttgttttg

SEQ ID NO: 242728 - DNA, 15 bp, Homo sapiens
tgagctttttgtttt

SEQ ID NO: 242729 - DNA, 15 bp, Homo sapiens
ttgagctttttgttt

SEQ ID NO: 242730 - DNA, 15 bp, Homo sapiens
gttgagctttttgtt

SEQ ID NO: 242731 - DNA, 15 bp, Homo sapiens
ggttgagctttttgt

SEQ ID NO: 242732 - DNA, 15 bp, Homo sapiens
aggttgagctttttg

SEQ ID NO: 242733 - DNA, 15 bp, Homo sapiens
taggttgagcttttt

SEQ ID NO: 242734 - DNA, 15 bp, Homo sapiens
ttaggttgagctttt

SEQ ID NO: 242735 - DNA, 15 bp, Homo sapiens
tttaggttgagcttt

SEQ ID NO: 242736 - DNA, 15 bp, Homo sapiens
gtttaggttgagctt

SEQ ID NO: 242737 - DNA, 15 bp, Homo sapiens
agtttaggttgagct

SEQ ID NO: 242738 - DNA, 15 bp, Homo sapiens
aagtttaggttgagc

SEQ ID NO: 242739 - DNA, 15 bp, Homo sapiens
gaagtttaggttgag

SEQ ID NO: 242740 - DNA, 15 bp, Homo sapiens
tgaagtttaggttga

SEQ ID NO: 242741 - DNA, 15 bp, Homo sapiens
atgaagtttaggttg

SEQ ID NO: 242742 - DNA, 15 bp, Homo sapiens
catgaagtttaggtt

SEQ ID NO: 242743 - DNA, 15 bp, Homo sapiens
acatgaagtttaggt

SEQ ID NO: 242744 - DNA, 15 bp, Homo sapiens
gacatgaagtttagg

SEQ ID NO: 242745 - DNA, 15 bp, Homo sapiens
agacatgaagtttag

SEQ ID NO: 242746 - DNA, 15 bp, Homo sapiens
aagacatgaagttta

SEQ ID NO: 242747 - DNA, 15 bp, Homo sapiens
taagacatgaagttt

SEQ ID NO: 242748 - DNA, 15 bp, Homo sapiens
ataagacatgaagtt

SEQ ID NO: 242749 - DNA, 15 bp, Homo sapiens
tataagacatgaagt

SEQ ID NO: 242750 - DNA, 15 bp, Homo sapiens
gtataagacatgaag

SEQ ID NO: 242751 - DNA, 15 bp, Homo sapiens
tgtataagacatgaa

SEQ ID NO: 242752 - DNA, 15 bp, Homo sapiens
ttgtataagacatga

SEQ ID NO: 242753 - DNA, 15 bp, Homo sapiens
tttgtataagacatg

SEQ ID NO: 242754 - DNA, 15 bp, Homo sapiens
ttttgtataagacat

SEQ ID NO: 242755 - DNA, 15 bp, Homo sapiens
tttttgtataagaca

SEQ ID NO: 242756 - DNA, 15 bp, Homo sapiens
atttttgtataagac

SEQ ID NO: 242757 - DNA, 15 bp, Homo sapiens
aatttttgtataaga

SEQ ID NO: 242758 - DNA, 15 bp, Homo sapiens
caatttttgtataag

SEQ ID NO: 242759 - DNA, 15 bp, Homo sapiens
tcaatttttgtataa

SEQ ID NO: 242760 - DNA, 15 bp, Homo sapiens
gtcaatttttgtata

SEQ ID NO: 242761 - DNA, 15 bp, Homo sapiens
agtcaatttttgtat

SEQ ID NO: 242762 - DNA, 15 bp, Homo sapiens
gagtcaatttttgta

SEQ ID NO: 242763 - DNA, 15 bp, Homo sapiens
tgagtcaatttttgt

SEQ ID NO: 242764 - DNA, 15 bp, Homo sapiens
ttgagtcaatttttg

SEQ ID NO: 242765 - DNA, 15 bp, Homo sapiens
tttgagtcaattttt

SEQ ID NO: 242766 - DNA, 15 bp, Homo sapiens
ctttgagtcaatttt

SEQ ID NO: 242767 - DNA, 15 bp, Homo sapiens
actttgagtcaattt

SEQ ID NO: 242768 - DNA, 15 bp, Homo sapiens
cactttgagtcaatt

SEQ ID NO: 242769 - DNA, 15 bp, Homo sapiens
ccactttgagtcaat

SEQ ID NO: 242770 - DNA, 15 bp, Homo sapiens
tccactttgagtcaa

SEQ ID NO: 242771 - DNA, 15 bp, Homo sapiens
atccactttgagtca

SEQ ID NO: 242772 - DNA, 15 bp, Homo sapiens
gatccactttgagtc

SEQ ID NO: 242773 - DNA, 15 bp, Homo sapiens
tgatccactttgagt

SEQ ID NO: 242774 - DNA, 15 bp, Homo sapiens
gtgatccactttgag

SEQ ID NO: 242775 - DNA, 15 bp, Homo sapiens
tgtgatccactttga

SEQ ID NO: 242776 - DNA, 15 bp, Homo sapiens
ctgtgatccactttg

SEQ ID NO: 242777 - DNA, 15 bp, Homo sapiens
tctgtgatccacttt

SEQ ID NO: 242778 - DNA, 15 bp, Homo sapiens
atctgtgatccactt

SEQ ID NO: 242779 - DNA, 15 bp, Homo sapiens
tatctgtgatccact

SEQ ID NO: 242780 - DNA, 15 bp, Homo sapiens
atatctgtgatccac

SEQ ID NO: 242781 - DNA, 15 bp, Homo sapiens
tatatctgtgatcca

SEQ ID NO: 242782 - DNA, 15 bp, Homo sapiens
ttatatctgtgatcc

SEQ ID NO: 242783 - DNA, 15 bp, Homo sapiens
cttatatctgtgatc

SEQ ID NO: 242784 - DNA, 15 bp, Homo sapiens
acttatatctgtgat

SEQ ID NO: 242785 - DNA, 15 bp, Homo sapiens
cacttatatctgtga

SEQ ID NO: 242786 - DNA, 15 bp, Homo sapiens
acacttatatctgtg

SEQ ID NO: 242787 - DNA, 15 bp, Homo sapiens
tacacttatatctgt

SEQ ID NO: 242788 - DNA, 15 bp, Homo sapiens
ttacacttatatctg

SEQ ID NO: 242789 - DNA, 15 bp, Homo sapiens
tttacacttatatct

SEQ ID NO: 242790 - DNA, 15 bp, Homo sapiens
ttttacacttatatc

SEQ ID NO: 242791 - DNA, 15 bp, Homo sapiens
gttttacacttatat

SEQ ID NO: 242792 - DNA, 15 bp, Homo sapiens
agttttacacttata

SEQ ID NO: 242793 - DNA, 15 bp, Homo sapiens
tagttttacacttat

SEQ ID NO: 242794 - DNA, 15 bp, Homo sapiens
atagttttacactta

SEQ ID NO: 242795 - DNA, 15 bp, Homo sapiens
tatagttttacactt

SEQ ID NO: 242796 - DNA, 15 bp, Homo sapiens
ttatagttttacact

SEQ ID NO: 242797 - DNA, 15 bp, Homo sapiens
tttatagttttacac

SEQ ID NO: 242798 - DNA, 15 bp, Homo sapiens
ctttatagttttaca

SEQ ID NO: 242799 - DNA, 15 bp, Homo sapiens
gctttatagttttac

SEQ ID NO: 242800 - DNA, 15 bp, Homo sapiens
agctttatagtttta

SEQ ID NO: 242801 - DNA, 15 bp, Homo sapiens
aagctttatagtttt

SEQ ID NO: 242802 - DNA, 15 bp, Homo sapiens
aaagctttatagttt

SEQ ID NO: 242803 - DNA, 15 bp, Homo sapiens
caaagctttatagtt

SEQ ID NO: 242804 - DNA, 15 bp, Homo sapiens
tcaaagctttatagt

SEQ ID NO: 242805 - DNA, 15 bp, Homo sapiens
atcaaagctttatag

SEQ ID NO: 242806 - DNA, 15 bp, Homo sapiens
tatcaaagctttata

SEQ ID NO: 242807 - DNA, 15 bp, Homo sapiens
ttatcaaagctttat

SEQ ID NO: 242808 - DNA, 15 bp, Homo sapiens
tttatcaaagcttta

SEQ ID NO: 242809 - DNA, 15 bp, Homo sapiens
ttttatcaaagcttt

SEQ ID NO: 242810 - DNA, 15 bp, Homo sapiens
tttttatcaaagctt

SEQ ID NO: 242811 - DNA, 15 bp, Homo sapiens
gtttttatcaaagct

SEQ ID NO: 242812 - DNA, 15 bp, Homo sapiens
tgtttttatcaaagc

SEQ ID NO: 242813 - DNA, 15 bp, Homo sapiens
gtgtttttatcaaag

SEQ ID NO: 242814 - DNA, 15 bp, Homo sapiens
tgtgtttttatcaaa

SEQ ID NO: 242815 - DNA, 15 bp, Homo sapiens
atgtgtttttatcaa

SEQ ID NO: 242816 - DNA, 15 bp, Homo sapiens
tatgtgtttttatca

SEQ ID NO: 242817 - DNA, 15 bp, Homo sapiens
ctatgtgtttttatc

SEQ ID NO: 242818 - DNA, 15 bp, Homo sapiens
cctatgtgtttttat

SEQ ID NO: 242819 - DNA, 15 bp, Homo sapiens
tcctatgtgttttta

SEQ ID NO: 242820 - DNA, 15 bp, Homo sapiens
ctcctatgtgttttt

SEQ ID NO: 242821 - DNA, 15 bp, Homo sapiens
tctcctatgtgtttt

SEQ ID NO: 242822 - DNA, 15 bp, Homo sapiens
ttctcctatgtgttt

SEQ ID NO: 242823 - DNA, 15 bp, Homo sapiens
tttctcctatgtgtt

SEQ ID NO: 242824 - DNA, 15 bp, Homo sapiens
ttttctcctatgtgt

SEQ ID NO: 242825 - DNA, 15 bp, Homo sapiens
attttctcctatgtg

SEQ ID NO: 242826 - DNA, 15 bp, Homo sapiens
gattttctcctatgt

SEQ ID NO: 242827 - DNA, 15 bp, Homo sapiens
agattttctcctatg

SEQ ID NO: 242828 - DNA, 15 bp, Homo sapiens
aagattttctcctat

SEQ ID NO: 242829 - DNA, 15 bp, Homo sapiens
aaagattttctccta

SEQ ID NO: 242830 - DNA, 15 bp, Homo sapiens
gaaagattttctcct

SEQ ID NO: 242831 - DNA, 15 bp, Homo sapiens
agaaagattttctcc

SEQ ID NO: 242832 - DNA, 15 bp, Homo sapiens
cagaaagattttctc

SEQ ID NO: 242833 - DNA, 15 bp, Homo sapiens
tcagaaagattttct

SEQ ID NO: 242834 - DNA, 15 bp, Homo sapiens
atcagaaagattttc

SEQ ID NO: 242835 - DNA, 15 bp, Homo sapiens
gatcagaaagatttt

SEQ ID NO: 242836 - DNA, 15 bp, Homo sapiens
agatcagaaagattt

SEQ ID NO: 242837 - DNA, 15 bp, Homo sapiens
cagatcagaaagatt

SEQ ID NO: 242838 - DNA, 15 bp, Homo sapiens
tcagatcagaaagat

SEQ ID NO: 242839 - DNA, 15 bp, Homo sapiens
ttcagatcagaaaga

SEQ ID NO: 242840 - DNA, 15 bp, Homo sapiens
gttcagatcagaaag

SEQ ID NO: 242841 - DNA, 15 bp, Homo sapiens
agttcagatcagaaa

SEQ ID NO: 242842 - DNA, 15 bp, Homo sapiens
aagttcagatcagaa

SEQ ID NO: 242843 - DNA, 15 bp, Homo sapiens
taagttcagatcaga

SEQ ID NO: 242844 - DNA, 15 bp, Homo sapiens
ctaagttcagatcag

SEQ ID NO: 242845 - DNA, 15 bp, Homo sapiens
cctaagttcagatca

SEQ ID NO: 242846 - DNA, 15 bp, Homo sapiens
acctaagttcagatc

SEQ ID NO: 242847 - DNA, 15 bp, Homo sapiens
tacctaagttcagat

SEQ ID NO: 242848 - DNA, 15 bp, Homo sapiens
ttacctaagttcaga

SEQ ID NO: 242849 - DNA, 15 bp, Homo sapiens
cttacctaagttcag

SEQ ID NO: 242850 - DNA, 15 bp, Homo sapiens
acttacctaagttca

SEQ ID NO: 242851 - DNA, 15 bp, Homo sapiens
aacttacctaagttc

SEQ ID NO: 242852 - DNA, 15 bp, Homo sapiens
taacttacctaagtt

SEQ ID NO: 242853 - DNA, 15 bp, Homo sapiens
ctaacttacctaagt

SEQ ID NO: 242854 - DNA, 15 bp, Homo sapiens
tctaacttacctaag

SEQ ID NO: 242855 - DNA, 15 bp, Homo sapiens
gtctaacttacctaa

SEQ ID NO: 242856 - DNA, 15 bp, Homo sapiens
tgtctaacttaccta

SEQ ID NO: 242857 - DNA, 15 bp, Homo sapiens
atgtctaacttacct

SEQ ID NO: 242858 - DNA, 15 bp, Homo sapiens
catgtctaacttacc

SEQ ID NO: 242859 - DNA, 15 bp, Homo sapiens
tcatgtctaacttac

SEQ ID NO: 242860 - DNA, 15 bp, Homo sapiens
gtcatgtctaactta

SEQ ID NO: 242861 - DNA, 15 bp, Homo sapiens
ggtcatgtctaactt

SEQ ID NO: 242862 - DNA, 15 bp, Homo sapiens
gggtcatgtctaact

SEQ ID NO: 242863 - DNA, 15 bp, Homo sapiens
ggggtcatgtctaac

SEQ ID NO: 242864 - DNA, 15 bp, Homo sapiens
tggggtcatgtctaa

SEQ ID NO: 242865 - DNA, 15 bp, Homo sapiens
ttggggtcatgtcta

SEQ ID NO: 242866 - DNA, 15 bp, Homo sapiens
tttggggtcatgtct

SEQ ID NO: 242867 - DNA, 15 bp, Homo sapiens
ttttggggtcatgtc

SEQ ID NO: 242868 - DNA, 15 bp, Homo sapiens
tttttggggtcatgt

SEQ ID NO: 242869 - DNA, 15 bp, Homo sapiens
ctttttggggtcatg

SEQ ID NO: 242870 - DNA, 15 bp, Homo sapiens
tctttttggggtcat

SEQ ID NO: 242871 - DNA, 15 bp, Homo sapiens
atctttttggggtca

SEQ ID NO: 242872 - DNA, 15 bp, Homo sapiens
catctttttggggtc

SEQ ID NO: 242873 - DNA, 15 bp, Homo sapiens
tcatctttttggggt

SEQ ID NO: 242874 - DNA, 15 bp, Homo sapiens
atcatctttttgggg

SEQ ID NO: 242875 - DNA, 15 bp, Homo sapiens
aatcatctttttggg

SEQ ID NO: 242876 - DNA, 15 bp, Homo sapiens
gaatcatctttttgg

SEQ ID NO: 242877 - DNA, 15 bp, Homo sapiens
tgaatcatctttttg

SEQ ID NO: 242878 - DNA, 15 bp, Homo sapiens
gtgaatcatcttttt

SEQ ID NO: 242879 - DNA, 15 bp, Homo sapiens
tgtgaatcatctttt

SEQ ID NO: 242880 - DNA, 15 bp, Homo sapiens
ttgtgaatcatcttt

SEQ ID NO: 242881 - DNA, 15 bp, Homo sapiens
tttgtgaatcatctt

SEQ ID NO: 242882 - DNA, 15 bp, Homo sapiens
ttttgtgaatcatct

SEQ ID NO: 242883 - DNA, 15 bp, Homo sapiens
cttttgtgaatcatc

SEQ ID NO: 242884 - DNA, 15 bp, Homo sapiens
tcttttgtgaatcat

SEQ ID NO: 242885 - DNA, 15 bp, Homo sapiens
ttcttttgtgaatca

SEQ ID NO: 242886 - DNA, 15 bp, Homo sapiens
tttcttttgtgaatc

SEQ ID NO: 242887 - DNA, 15 bp, Homo sapiens
ttttcttttgtgaat

SEQ ID NO: 242888 - DNA, 15 bp, Homo sapiens
tttttcttttgtgaa

SEQ ID NO: 242889 - DNA, 15 bp, Homo sapiens
atttttcttttgtga

SEQ ID NO: 242890 - DNA, 15 bp, Homo sapiens
catttttcttttgtg

SEQ ID NO: 242891 - DNA, 15 bp, Homo sapiens
ccatttttcttttgt

SEQ ID NO: 242892 - DNA, 15 bp, Homo sapiens
tccatttttcttttg

SEQ ID NO: 242893 - DNA, 15 bp, Homo sapiens
atccatttttctttt

SEQ ID NO: 242894 - DNA, 15 bp, Homo sapiens
gatccatttttcttt

SEQ ID NO: 242895 - DNA, 15 bp, Homo sapiens
tgatccatttttctt

SEQ ID NO: 242896 - DNA, 15 bp, Homo sapiens
gtgatccatttttct

SEQ ID NO: 242897 - DNA, 15 bp, Homo sapiens
agtgatccatttttc

SEQ ID NO: 242898 - DNA, 15 bp, Homo sapiens
aagtgatccattttt

SEQ ID NO: 242899 - DNA, 15 bp, Homo sapiens
taagtgatccatttt

SEQ ID NO: 242900 - DNA, 15 bp, Homo sapiens
ctaagtgatccattt

SEQ ID NO: 242901 - DNA, 15 bp, Homo sapiens
tctaagtgatccatt

SEQ ID NO: 242902 - DNA, 15 bp, Homo sapiens
gtctaagtgatccat

SEQ ID NO: 242903 - DNA, 15 bp, Homo sapiens
tgtctaagtgatcca

SEQ ID NO: 242904 - DNA, 15 bp, Homo sapiens
gtgtctaagtgatcc

SEQ ID NO: 242905 - DNA, 15 bp, Homo sapiens
cgtgtctaagtgatc

SEQ ID NO: 242906 - DNA, 15 bp, Homo sapiens
acgtgtctaagtgat

SEQ ID NO: 242907 - DNA, 15 bp, Homo sapiens
gacgtgtctaagtga

SEQ ID NO: 242908 - DNA, 15 bp, Homo sapiens
tgacgtgtctaagtg

SEQ ID NO: 242909 - DNA, 15 bp, Homo sapiens
ttgacgtgtctaagt

SEQ ID NO: 242910 - DNA, 15 bp, Homo sapiens
tttgacgtgtctaag

SEQ ID NO: 242911 - DNA, 15 bp, Homo sapiens
ttttgacgtgtctaa

SEQ ID NO: 242912 - DNA, 15 bp, Homo sapiens
attttgacgtgtcta

SEQ ID NO: 242913 - DNA, 15 bp, Homo sapiens
aattttgacgtgtct

SEQ ID NO: 242914 - DNA, 15 bp, Homo sapiens
taattttgacgtgtc

SEQ ID NO: 242915 - DNA, 15 bp, Homo sapiens
ctaattttgacgtgt

SEQ ID NO: 242916 - DNA, 15 bp, Homo sapiens
tctaattttgacgtg

SEQ ID NO: 242917 - DNA, 15 bp, Homo sapiens
ttctaattttgacgt

SEQ ID NO: 242918 - DNA, 15 bp, Homo sapiens
tttctaattttgacg

SEQ ID NO: 242919 - DNA, 15 bp, Homo sapiens
gtttctaattttgac

SEQ ID NO: 242920 - DNA, 15 bp, Homo sapiens
agtttctaattttga

SEQ ID NO: 242921 - DNA, 15 bp, Homo sapiens
tagtttctaattttg

SEQ ID NO: 242922 - DNA, 15 bp, Homo sapiens
atagtttctaatttt

SEQ ID NO: 242923 - DNA, 15 bp, Homo sapiens
aatagtttctaattt

SEQ ID NO: 242924 - DNA, 15 bp, Homo sapiens
taatagtttctaatt

SEQ ID NO: 242925 - DNA, 15 bp, Homo sapiens
ataatagtttctaat

SEQ ID NO: 242926 - DNA, 15 bp, Homo sapiens
aataatagtttctaa

SEQ ID NO: 242927 - DNA, 15 bp, Homo sapiens
gaataatagtttcta

SEQ ID NO: 242928 - DNA, 15 bp, Homo sapiens
agaataatagtttct

SEQ ID NO: 242929 - DNA, 15 bp, Homo sapiens
cagaataatagtttc

SEQ ID NO: 242930 - DNA, 15 bp, Homo sapiens
acagaataatagttt

SEQ ID NO: 242931 - DNA, 15 bp, Homo sapiens
cacagaataatagtt

SEQ ID NO: 242932 - DNA, 15 bp, Homo sapiens
tcacagaataatagt

SEQ ID NO: 242933 - DNA, 15 bp, Homo sapiens
ttcacagaataatag

SEQ ID NO: 242934 - DNA, 15 bp, Homo sapiens
tttcacagaataata

SEQ ID NO: 242935 - DNA, 15 bp, Homo sapiens
ctttcacagaataat

SEQ ID NO: 242936 - DNA, 15 bp, Homo sapiens
tctttcacagaataa

SEQ ID NO: 242937 - DNA, 15 bp, Homo sapiens
atctttcacagaata

SEQ ID NO: 242938 - DNA, 15 bp, Homo sapiens
tatctttcacagaat

SEQ ID NO: 242939 - DNA, 15 bp, Homo sapiens
gtatctttcacagaa

SEQ ID NO: 242940 - DNA, 15 bp, Homo sapiens
agtatctttcacaga

SEQ ID NO: 242941 - DNA, 15 bp, Homo sapiens
tagtatctttcacag

SEQ ID NO: 242942 - DNA, 15 bp, Homo sapiens
atagtatctttcaca

SEQ ID NO: 242943 - DNA, 15 bp, Homo sapiens
aatagtatctttcac

SEQ ID NO: 242944 - DNA, 15 bp, Homo sapiens
taatagtatctttca

SEQ ID NO: 242945 - DNA, 15 bp, Homo sapiens
ataatagtatctttc

SEQ ID NO: 242946 - DNA, 15 bp, Homo sapiens
cataatagtatcttt

SEQ ID NO: 242947 - DNA, 15 bp, Homo sapiens
tcataatagtatctt

SEQ ID NO: 242948 - DNA, 15 bp, Homo sapiens
ctcataatagtatct

SEQ ID NO: 242949 - DNA, 15 bp, Homo sapiens
tctcataatagtatc

SEQ ID NO: 242950 - DNA, 15 bp, Homo sapiens
ttctcataatagtat

SEQ ID NO: 242951 - DNA, 15 bp, Homo sapiens
attctcataatagta

SEQ ID NO: 242952 - DNA, 15 bp, Homo sapiens
cattctcataatagt

SEQ ID NO: 242953 - DNA, 15 bp, Homo sapiens
tcattctcataatag

SEQ ID NO: 242954 - DNA, 15 bp, Homo sapiens
ttcattctcataata

SEQ ID NO: 242955 - DNA, 15 bp, Homo sapiens
tttcattctcataat

SEQ ID NO: 242956 - DNA, 15 bp, Homo sapiens
ttttcattctcataa

SEQ ID NO: 242957 - DNA, 15 bp, Homo sapiens
cttttcattctcata

SEQ ID NO: 242958 - DNA, 15 bp, Homo sapiens
tcttttcattctcat

SEQ ID NO: 242959 - DNA, 15 bp, Homo sapiens
atcttttcattctca

SEQ ID NO: 242960 - DNA, 15 bp, Homo sapiens
tatcttttcattctc

SEQ ID NO: 242961 - DNA, 15 bp, Homo sapiens
ttatcttttcattct

SEQ ID NO: 242962 - DNA, 15 bp, Homo sapiens
cttatcttttcattc

SEQ ID NO: 242963 - DNA, 15 bp, Homo sapiens
gcttatcttttcatt

SEQ ID NO: 242964 - DNA, 15 bp, Homo sapiens
agcttatcttttcat

SEQ ID NO: 242965 - DNA, 15 bp, Homo sapiens
tagcttatcttttca

SEQ ID NO: 242966 - DNA, 15 bp, Homo sapiens
gtagcttatcttttc

SEQ ID NO: 242967 - DNA, 15 bp, Homo sapiens
tgtagcttatctttt

SEQ ID NO: 242968 - DNA, 15 bp, Homo sapiens
atgtagcttatcttt

SEQ ID NO: 242969 - DNA, 15 bp, Homo sapiens
tatgtagcttatctt

SEQ ID NO: 242970 - DNA, 15 bp, Homo sapiens
ttatgtagcttatct

SEQ ID NO: 242971 - DNA, 15 bp, Homo sapiens
attatgtagcttatc

SEQ ID NO: 242972 - DNA, 15 bp, Homo sapiens
cattatgtagcttat

SEQ ID NO: 242973 - DNA, 15 bp, Homo sapiens
ccattatgtagctta

SEQ ID NO: 242974 - DNA, 15 bp, Homo sapiens
cccattatgtagctt

SEQ ID NO: 242975 - DNA, 15 bp, Homo sapiens
tcccattatgtagct

SEQ ID NO: 242976 - DNA, 15 bp, Homo sapiens
ctcccattatgtagc

SEQ ID NO: 242977 - DNA, 15 bp, Homo sapiens
tctcccattatgtag

SEQ ID NO: 242978 - DNA, 15 bp, Homo sapiens
ctctcccattatgta

SEQ ID NO: 242979 - DNA, 15 bp, Homo sapiens
tctctcccattatgt

SEQ ID NO: 242980 - DNA, 15 bp, Homo sapiens
ttctctcccattatg

SEQ ID NO: 242981 - DNA, 15 bp, Homo sapiens
attctctcccattat

SEQ ID NO: 242982 - DNA, 15 bp, Homo sapiens
tattctctcccatta

SEQ ID NO: 242983 - DNA, 15 bp, Homo sapiens
gtattctctcccatt

SEQ ID NO: 242984 - DNA, 15 bp, Homo sapiens
agtattctctcccat

SEQ ID NO: 242985 - DNA, 15 bp, Homo sapiens
aagtattctctccca

SEQ ID NO: 242986 - DNA, 15 bp, Homo sapiens
taagtattctctccc

SEQ ID NO: 242987 - DNA, 15 bp, Homo sapiens
ttaagtattctctcc

SEQ ID NO: 242988 - DNA, 15 bp, Homo sapiens
tttaagtattctctc

SEQ ID NO: 242989 - DNA, 15 bp, Homo sapiens
ttttaagtattctct

SEQ ID NO: 242990 - DNA, 15 bp, Homo sapiens
tttttaagtattctc

SEQ ID NO: 242991 - DNA, 15 bp, Homo sapiens
atttttaagtattct

SEQ ID NO: 242992 - DNA, 15 bp, Homo sapiens
gatttttaagtattc

SEQ ID NO: 242993 - DNA, 15 bp, Homo sapiens
tgatttttaagtatt

SEQ ID NO: 242994 - DNA, 15 bp, Homo sapiens
gtgatttttaagtat

SEQ ID NO: 242995 - DNA, 15 bp, Homo sapiens
tgtgatttttaagta

SEQ ID NO: 242996 - DNA, 15 bp, Homo sapiens
atgtgatttttaagt

SEQ ID NO: 242997 - DNA, 15 bp, Homo sapiens
tatgtgatttttaag

SEQ ID NO: 242998 - DNA, 15 bp, Homo sapiens
atatgtgatttttaa

SEQ ID NO: 242999 - DNA, 15 bp, Homo sapiens
tatatgtgattttta

SEQ ID NO: 243000 - DNA, 15 bp, Homo sapiens
atatatgtgattttt

SEQ ID NO: 243001 - DNA, 15 bp, Homo sapiens
aatatatgtgatttt

SEQ ID NO: 243002 - DNA, 15 bp, Homo sapiens
taatatatgtgattt

SEQ ID NO: 243003 - DNA, 15 bp, Homo sapiens
gtaatatatgtgatt

SEQ ID NO: 243004 - DNA, 15 bp, Homo sapiens
tgtaatatatgtgat

SEQ ID NO: 243005 - DNA, 15 bp, Homo sapiens
ctgtaatatatgtga

SEQ ID NO: 243006 - DNA, 15 bp, Homo sapiens
tctgtaatatatgtg

SEQ ID NO: 243007 - DNA, 15 bp, Homo sapiens
ttctgtaatatatgt

SEQ ID NO: 243008 - DNA, 15 bp, Homo sapiens
cttctgtaatatatg

SEQ ID NO: 243009 - DNA, 15 bp, Homo sapiens
ccttctgtaatatat

SEQ ID NO: 243010 - DNA, 15 bp, Homo sapiens
gccttctgtaatata

SEQ ID NO: 243011 - DNA, 15 bp, Homo sapiens
agccttctgtaatat

SEQ ID NO: 243012 - DNA, 15 bp, Homo sapiens
aagccttctgtaata

SEQ ID NO: 243013 - DNA, 15 bp, Homo sapiens
aaagccttctgtaat

SEQ ID NO: 243014 - DNA, 15 bp, Homo sapiens
taaagccttctgtaa

SEQ ID NO: 243015 - DNA, 15 bp, Homo sapiens
ataaagccttctgta

SEQ ID NO: 243016 - DNA, 15 bp, Homo sapiens
tataaagccttctgt

SEQ ID NO: 243017 - DNA, 15 bp, Homo sapiens
ctataaagccttctg

SEQ ID NO: 243018 - DNA, 15 bp, Homo sapiens
gctataaagccttct

SEQ ID NO: 243019 - DNA, 15 bp, Homo sapiens
ggctataaagccttc

SEQ ID NO: 243020 - DNA, 15 bp, Homo sapiens
tggctataaagcctt

SEQ ID NO: 243021 - DNA, 15 bp, Homo sapiens
ctggctataaagcct

SEQ ID NO: 243022 - DNA, 15 bp, Homo sapiens
cctggctataaagcc

SEQ ID NO: 243023 - DNA, 15 bp, Homo sapiens
tcctggctataaagc

SEQ ID NO: 243024 - DNA, 15 bp, Homo sapiens
atcctggctataaag

SEQ ID NO: 243025 - DNA, 15 bp, Homo sapiens
tatcctggctataaa

SEQ ID NO: 243026 - DNA, 15 bp, Homo sapiens
atatcctggctataa

SEQ ID NO: 243027 - DNA, 15 bp, Homo sapiens
tatatcctggctata

SEQ ID NO: 243028 - DNA, 15 bp, Homo sapiens
atatatcctggctat

SEQ ID NO: 243029 - DNA, 15 bp, Homo sapiens
tatatatcctggcta

SEQ ID NO: 243030 - DNA, 15 bp, Homo sapiens
ttatatatcctggct

SEQ ID NO: 243031 - DNA, 15 bp, Homo sapiens
tttatatatcctggc

SEQ ID NO: 243032 - DNA, 15 bp, Homo sapiens
ctttatatatcctgg

SEQ ID NO: 243033 - DNA, 15 bp, Homo sapiens
tctttatatatcctg

SEQ ID NO: 243034 - DNA, 15 bp, Homo sapiens
ttctttatatatcct

SEQ ID NO: 243035 - DNA, 15 bp, Homo sapiens
gttctttatatatcc

SEQ ID NO: 243036 - DNA, 15 bp, Homo sapiens
agttctttatatatc

SEQ ID NO: 243037 - DNA, 15 bp, Homo sapiens
gagttctttatatat

SEQ ID NO: 243038 - DNA, 15 bp, Homo sapiens
agagttctttatata

SEQ ID NO: 243039 - DNA, 15 bp, Homo sapiens
gagagttctttatat

SEQ ID NO: 243040 - DNA, 15 bp, Homo sapiens
tgagagttctttata

SEQ ID NO: 243041 - DNA, 15 bp, Homo sapiens
ttgagagttctttat

SEQ ID NO: 243042 - DNA, 15 bp, Homo sapiens
tttgagagttcttta

SEQ ID NO: 243043 - DNA, 15 bp, Homo sapiens
ttttgagagttcttt

SEQ ID NO: 243044 - DNA, 15 bp, Homo sapiens
attttgagagttctt

SEQ ID NO: 243045 - DNA, 15 bp, Homo sapiens
aattttgagagttct

SEQ ID NO: 243046 - DNA, 15 bp, Homo sapiens
gaattttgagagttc

SEQ ID NO: 243047 - DNA, 15 bp, Homo sapiens
tgaattttgagagtt

SEQ ID NO: 243048 - DNA, 15 bp, Homo sapiens
ttgaattttgagagt

SEQ ID NO: 243049 - DNA, 15 bp, Homo sapiens
gttgaattttgagag

SEQ ID NO: 243050 - DNA, 15 bp, Homo sapiens
tgttgaattttgaga

SEQ ID NO: 243051 - DNA, 15 bp, Homo sapiens
ctgttgaattttgag

SEQ ID NO: 243052 - DNA, 15 bp, Homo sapiens
cctgttgaattttga

SEQ ID NO: 243053 - DNA, 15 bp, Homo sapiens
tcctgttgaattttg

SEQ ID NO: 243054 - DNA, 15 bp, Homo sapiens
ttcctgttgaatttt

SEQ ID NO: 243055 - DNA, 15 bp, Homo sapiens
cttcctgttgaattt

SEQ ID NO: 243056 - DNA, 15 bp, Homo sapiens
tcttcctgttgaatt

SEQ ID NO: 243057 - DNA, 15 bp, Homo sapiens
ctcttcctgttgaat

SEQ ID NO: 243058 - DNA, 15 bp, Homo sapiens
tctcttcctgttgaa

SEQ ID NO: 243059 - DNA, 15 bp, Homo sapiens
ttctcttcctgttga

SEQ ID NO: 243060 - DNA, 15 bp, Homo sapiens
gttctcttcctgttg

SEQ ID NO: 243061 - DNA, 15 bp, Homo sapiens
tgttctcttcctgtt

SEQ ID NO: 243062 - DNA, 15 bp, Homo sapiens
ttgttctcttcctgt

SEQ ID NO: 243063 - DNA, 15 bp, Homo sapiens
cttgttctcttcctg

SEQ ID NO: 243064 - DNA, 15 bp, Homo sapiens
gcttgttctcttcct

SEQ ID NO: 243065 - DNA, 15 bp, Homo sapiens
agcttgttctcttcc

SEQ ID NO: 243066 - DNA, 15 bp, Homo sapiens
tagcttgttctcttc

SEQ ID NO: 243067 - DNA, 15 bp, Homo sapiens
gtagcttgttctctt

SEQ ID NO: 243068 - DNA, 15 bp, Homo sapiens
ggtagcttgttctct

SEQ ID NO: 243069 - DNA, 15 bp, Homo sapiens
gggtagcttgttctc

SEQ ID NO: 243070 - DNA, 15 bp, Homo sapiens
tgggtagcttgttct

SEQ ID NO: 243071 - DNA, 15 bp, Homo sapiens
ttgggtagcttgttc

SEQ ID NO: 243072 - DNA, 15 bp, Homo sapiens
gttgggtagcttgtt

SEQ ID NO: 243073 - DNA, 15 bp, Homo sapiens
agttgggtagcttgt

SEQ ID NO: 243074 - DNA, 15 bp, Homo sapiens
cagttgggtagcttg

SEQ ID NO: 243075 - DNA, 15 bp, Homo sapiens
ccagttgggtagctt

SEQ ID NO: 243076 - DNA, 15 bp, Homo sapiens
tccagttgggtagct

SEQ ID NO: 243077 - DNA, 15 bp, Homo sapiens
ttccagttgggtagc

SEQ ID NO: 243078 - DNA, 15 bp, Homo sapiens
tttccagttgggtag

SEQ ID NO: 243079 - DNA, 15 bp, Homo sapiens
ttttccagttgggta

SEQ ID NO: 243080 - DNA, 15 bp, Homo sapiens
attttccagttgggt

SEQ ID NO: 243081 - DNA, 15 bp, Homo sapiens
cattttccagttggg

SEQ ID NO: 243082 - DNA, 15 bp, Homo sapiens
ccattttccagttgg

SEQ ID NO: 243083 - DNA, 15 bp, Homo sapiens
cccattttccagttg

SEQ ID NO: 243084 - DNA, 15 bp, Homo sapiens
gcccattttccagtt

SEQ ID NO: 243085 - DNA, 15 bp, Homo sapiens
tgcccattttccagt

SEQ ID NO: 243086 - DNA, 15 bp, Homo sapiens
ttgcccattttccag

SEQ ID NO: 243087 - DNA, 15 bp, Homo sapiens
ttttgcccattttcc

SEQ ID NO: 243088 - DNA, 15 bp, Homo sapiens
cttttgcccattttc

SEQ ID NO: 243089 - DNA, 15 bp, Homo sapiens
tcttttgcccatttt

SEQ ID NO: 243090 - DNA, 15 bp, Homo sapiens
gtcttttgcccattt

SEQ ID NO: 243091 - DNA, 15 bp, Homo sapiens
agtcttttgcccatt

SEQ ID NO: 243092 - DNA, 15 bp, Homo sapiens
aagtcttttgcccat

SEQ ID NO: 243093 - DNA, 15 bp, Homo sapiens
caagtcttttgccca

SEQ ID NO: 243094 - DNA, 15 bp, Homo sapiens
tcaagtcttttgccc

SEQ ID NO: 243095 - DNA, 15 bp, Homo sapiens
ttcaagtcttttgcc

SEQ ID NO: 243096 - DNA, 15 bp, Homo sapiens
attcaagtcttttgc

SEQ ID NO: 243097 - DNA, 15 bp, Homo sapiens
tattcaagtcttttg

SEQ ID NO: 243098 - DNA, 15 bp, Homo sapiens
ctattcaagtctttt

SEQ ID NO: 243099 - DNA, 15 bp, Homo sapiens
tctattcaagtcttt

SEQ ID NO: 243100 - DNA, 15 bp, Homo sapiens
gtctattcaagtctt

SEQ ID NO: 243101 - DNA, 15 bp, Homo sapiens
tgtctattcaagtct

SEQ ID NO: 243102 - DNA, 15 bp, Homo sapiens
gtgtctattcaagtc

SEQ ID NO: 243103 - DNA, 15 bp, Homo sapiens
tgtgtctattcaagt

SEQ ID NO: 243104 - DNA, 15 bp, Homo sapiens
atgtgtctattcaag

SEQ ID NO: 243105 - DNA, 15 bp, Homo sapiens
catgtgtctattcaa

SEQ ID NO: 243106 - DNA, 15 bp, Homo sapiens
tcatgtgtctattca

SEQ ID NO: 243107 - DNA, 15 bp, Homo sapiens
atcatgtgtctattc

SEQ ID NO: 243108 - DNA, 15 bp, Homo sapiens
gatcatgtgtctatt

SEQ ID NO: 243109 - DNA, 15 bp, Homo sapiens
tgatcatgtgtctat

SEQ ID NO: 243110 - DNA, 15 bp, Homo sapiens
ttgatcatgtgtcta

SEQ ID NO: 243111 - DNA, 15 bp, Homo sapiens
tttgatcatgtgtct

SEQ ID NO: 243112 - DNA, 15 bp, Homo sapiens
ctttgatcatgtgtc

SEQ ID NO: 243113 - DNA, 15 bp, Homo sapiens
tctttgatcatgtgt

SEQ ID NO: 243114 - DNA, 15 bp, Homo sapiens
ctctttgatcatgtg

SEQ ID NO: 243115 - DNA, 15 bp, Homo sapiens
cctctttgatcatgt

SEQ ID NO: 243116 - DNA, 15 bp, Homo sapiens
tcctctttgatcatg

SEQ ID NO: 243117 - DNA, 15 bp, Homo sapiens
atcctctttgatcat

SEQ ID NO: 243118 - DNA, 15 bp, Homo sapiens
tatcctctttgatca

SEQ ID NO: 243119 - DNA, 15 bp, Homo sapiens
atatcctctttgatc

SEQ ID NO: 243120 - DNA, 15 bp, Homo sapiens
aatatcctctttgat

SEQ ID NO: 243121 - DNA, 15 bp, Homo sapiens
aaatatcctctttga

SEQ ID NO: 243122 - DNA, 15 bp, Homo sapiens
caaatatcctctttg

SEQ ID NO: 243123 - DNA, 15 bp, Homo sapiens
ccaaatatcctcttt

SEQ ID NO: 243124 - DNA, 15 bp, Homo sapiens
tccaaatatcctctt

SEQ ID NO: 243125 - DNA, 15 bp, Homo sapiens
atccaaatatcctct

SEQ ID NO: 243126 - DNA, 15 bp, Homo sapiens
catccaaatatcctc

SEQ ID NO: 243127 - DNA, 15 bp, Homo sapiens
ccatccaaatatcct

SEQ ID NO: 243128 - DNA, 15 bp, Homo sapiens
gccatccaaatatcc

SEQ ID NO: 243129 - DNA, 15 bp, Homo sapiens
tgccatccaaatatc

SEQ ID NO: 243130 - DNA, 15 bp, Homo sapiens
ttgccatccaaatat

SEQ ID NO: 243131 - DNA, 15 bp, Homo sapiens
tttgccatccaaata

SEQ ID NO: 243132 - DNA, 15 bp, Homo sapiens
atttgccatccaaat

SEQ ID NO: 243133 - DNA, 15 bp, Homo sapiens
tatttgccatccaaa

SEQ ID NO: 243134 - DNA, 15 bp, Homo sapiens
ttatttgccatccaa

SEQ ID NO: 243135 - DNA, 15 bp, Homo sapiens
cttatttgccatcca

SEQ ID NO: 243136 - DNA, 15 bp, Homo sapiens
gcttatttgccatcc

SEQ ID NO: 243137 - DNA, 15 bp, Homo sapiens
agcttatttgccatc

SEQ ID NO: 243138 - DNA, 15 bp, Homo sapiens
gagcttatttgccat

SEQ ID NO: 243139 - DNA, 15 bp, Homo sapiens
tgagcttatttgcca

SEQ ID NO: 243140 - DNA, 15 bp, Homo sapiens
ctgagcttatttgcc

SEQ ID NO: 243141 - DNA, 15 bp, Homo sapiens
tctgagcttatttgc

SEQ ID NO: 243142 - DNA, 15 bp, Homo sapiens
ttctgagcttatttg

SEQ ID NO: 243143 - DNA, 15 bp, Homo sapiens
tttctgagcttattt

SEQ ID NO: 243144 - DNA, 15 bp, Homo sapiens
ttttctgagcttatt

SEQ ID NO: 243145 - DNA, 15 bp, Homo sapiens
tttttctgagcttat

SEQ ID NO: 243146 - DNA, 15 bp, Homo sapiens
ctttttctgagctta

SEQ ID NO: 243147 - DNA, 15 bp, Homo sapiens
tctttttctgagctt

SEQ ID NO: 243148 - DNA, 15 bp, Homo sapiens
ttctttttctgagct

SEQ ID NO: 243149 - DNA, 15 bp, Homo sapiens
gttctttttctgagc

SEQ ID NO: 243150 - DNA, 15 bp, Homo sapiens
tgttctttttctgag

SEQ ID NO: 243151 - DNA, 15 bp, Homo sapiens
atgttctttttctga

SEQ ID NO: 243152 - DNA, 15 bp, Homo sapiens
gatgttctttttctg

SEQ ID NO: 243153 - DNA, 15 bp, Homo sapiens
tgatgttctttttct

SEQ ID NO: 243154 - DNA, 15 bp, Homo sapiens
ctgatgttctttttc

SEQ ID NO: 243155 - DNA, 15 bp, Homo sapiens
gctgatgttcttttt

SEQ ID NO: 243156 - DNA, 15 bp, Homo sapiens
tgctgatgttctttt

SEQ ID NO: 243157 - DNA, 15 bp, Homo sapiens
atgctgatgttcttt

SEQ ID NO: 243158 - DNA, 15 bp, Homo sapiens
gatgctgatgttctt

SEQ ID NO: 243159 - DNA, 15 bp, Homo sapiens
agatgctgatgttct

SEQ ID NO: 243160 - DNA, 15 bp, Homo sapiens
aagatgctgatgttc

SEQ ID NO: 243161 - DNA, 15 bp, Homo sapiens
aaagatgctgatgtt

SEQ ID NO: 243162 - DNA, 15 bp, Homo sapiens
taaagatgctgatgt

SEQ ID NO: 243163 - DNA, 15 bp, Homo sapiens
ctaaagatgctgatg

SEQ ID NO: 243164 - DNA, 15 bp, Homo sapiens
gctaaagatgctgat

SEQ ID NO: 243165 - DNA, 15 bp, Homo sapiens
ggctaaagatgctga

SEQ ID NO: 243166 - DNA, 15 bp, Homo sapiens
tggctaaagatgctg

SEQ ID NO: 243167 - DNA, 15 bp, Homo sapiens
atggctaaagatgct

SEQ ID NO: 243168 - DNA, 15 bp, Homo sapiens
aatggctaaagatgc

SEQ ID NO: 243169 - DNA, 15 bp, Homo sapiens
taatggctaaagatg

SEQ ID NO: 243170 - DNA, 15 bp, Homo sapiens
ctaatggctaaagat

SEQ ID NO: 243171 - DNA, 15 bp, Homo sapiens
cctaatggctaaaga

SEQ ID NO: 243172 - DNA, 15 bp, Homo sapiens
ccctaatggctaaag

SEQ ID NO: 243173 - DNA, 15 bp, Homo sapiens
tccctaatggctaaa

SEQ ID NO: 243174 - DNA, 15 bp, Homo sapiens
ttccctaatggctaa

SEQ ID NO: 243175 - DNA, 15 bp, Homo sapiens
tttccctaatggcta

SEQ ID NO: 243176 - DNA, 15 bp, Homo sapiens
atttccctaatggct

SEQ ID NO: 243177 - DNA, 15 bp, Homo sapiens
catttccctaatggc

SEQ ID NO: 243178 - DNA, 15 bp, Homo sapiens
gcatttccctaatgg

SEQ ID NO: 243179 - DNA, 15 bp, Homo sapiens
tgcatttccctaatg

SEQ ID NO: 243180 - DNA, 15 bp, Homo sapiens
ttgcatttccctaat

SEQ ID NO: 243181 - DNA, 15 bp, Homo sapiens
cttgcatttccctaa

SEQ ID NO: 243182 - DNA, 15 bp, Homo sapiens
acttgcatttcccta

SEQ ID NO: 243183 - DNA, 15 bp, Homo sapiens
cacttgcatttccct

SEQ ID NO: 243184 - DNA, 15 bp, Homo sapiens
acacttgcatttccc

SEQ ID NO: 243185 - DNA, 15 bp, Homo sapiens
tacacttgcatttcc

SEQ ID NO: 243186 - DNA, 15 bp, Homo sapiens
ttacacttgcatttc

SEQ ID NO: 243187 - DNA, 15 bp, Homo sapiens
cttacacttgcattt

SEQ ID NO: 243188 - DNA, 15 bp, Homo sapiens
gcttacacttgcatt

SEQ ID NO: 243189 - DNA, 15 bp, Homo sapiens
tgcttacacttgcat

SEQ ID NO: 243190 - DNA, 15 bp, Homo sapiens
ttgcttacacttgca

SEQ ID NO: 243191 - DNA, 15 bp, Homo sapiens
attgcttacacttgc

SEQ ID NO: 243192 - DNA, 15 bp, Homo sapiens
cattgcttacacttg

SEQ ID NO: 243193 - DNA, 15 bp, Homo sapiens
tcattgcttacactt

SEQ ID NO: 243194 - DNA, 15 bp, Homo sapiens
atcattgcttacact

SEQ ID NO: 243195 - DNA, 15 bp, Homo sapiens
catcattgcttacac

SEQ ID NO: 243196 - DNA, 15 bp, Homo sapiens
tcatcattgcttaca

SEQ ID NO: 243197 - DNA, 15 bp, Homo sapiens
ctcatcattgcttac

SEQ ID NO: 243198 - DNA, 15 bp, Homo sapiens
tctcatcattgctta

SEQ ID NO: 243199 - DNA, 15 bp, Homo sapiens
atctcatcattgctt

SEQ ID NO: 243200 - DNA, 15 bp, Homo sapiens
catctcatcattgct

SEQ ID NO: 243201 - DNA, 15 bp, Homo sapiens
acatctcatcattgc

SEQ ID NO: 243202 - DNA, 15 bp, Homo sapiens
cacatctcatcattg

SEQ ID NO: 243203 - DNA, 15 bp, Homo sapiens
tcacatctcatcatt

SEQ ID NO: 243204 - DNA, 15 bp, Homo sapiens
ttcacatctcatcat

SEQ ID NO: 243205 - DNA, 15 bp, Homo sapiens
gttcacatctcatca

SEQ ID NO: 243206 - DNA, 15 bp, Homo sapiens
tgttcacatctcatc

SEQ ID NO: 243207 - DNA, 15 bp, Homo sapiens
gtgttcacatctcat

SEQ ID NO: 243208 - DNA, 15 bp, Homo sapiens
tgtgttcacatctca

SEQ ID NO: 243209 - DNA, 15 bp, Homo sapiens
gtgtgttcacatctc

SEQ ID NO: 243210 - DNA, 15 bp, Homo sapiens
ggtgtgttcacatct

SEQ ID NO: 243211 - DNA, 15 bp, Homo sapiens
aggtgtgttcacatc

SEQ ID NO: 243212 - DNA, 15 bp, Homo sapiens
taggtgtgttcacat

SEQ ID NO: 243213 - DNA, 15 bp, Homo sapiens
ataggtgtgttcaca

SEQ ID NO: 243214 - DNA, 15 bp, Homo sapiens
aataggtgtgttcac

SEQ ID NO: 243215 - DNA, 15 bp, Homo sapiens
taataggtgtgttca

SEQ ID NO: 243216 - DNA, 15 bp, Homo sapiens
ataataggtgtgttc

SEQ ID NO: 243217 - DNA, 15 bp, Homo sapiens
tataataggtgtgtt

SEQ ID NO: 243218 - DNA, 15 bp, Homo sapiens
ttataataggtgtgt

SEQ ID NO: 243219 - DNA, 15 bp, Homo sapiens
attataataggtgtg

SEQ ID NO: 243220 - DNA, 15 bp, Homo sapiens
cattataataggtgt

SEQ ID NO: 243221 - DNA, 15 bp, Homo sapiens
ccattataataggtg

SEQ ID NO: 243222 - DNA, 15 bp, Homo sapiens
gccattataataggt

SEQ ID NO: 243223 - DNA, 15 bp, Homo sapiens
agccattataatagg

SEQ ID NO: 243224 - DNA, 15 bp, Homo sapiens
cagccattataatag

SEQ ID NO: 243225 - DNA, 15 bp, Homo sapiens
tcagccattataata

SEQ ID NO: 243226 - DNA, 15 bp, Homo sapiens
ttcagccattataat

SEQ ID NO: 243227 - DNA, 15 bp, Homo sapiens
tttcagccattataa

SEQ ID NO: 243228 - DNA, 15 bp, Homo sapiens
atttcagccattata

SEQ ID NO: 243229 - DNA, 15 bp, Homo sapiens
tatttcagccattat

SEQ ID NO: 243230 - DNA, 15 bp, Homo sapiens
ttatttcagccatta

SEQ ID NO: 243231 - DNA, 15 bp, Homo sapiens
tttatttcagccatt

SEQ ID NO: 243232 - DNA, 15 bp, Homo sapiens
ttttatttcagccat

SEQ ID NO: 243233 - DNA, 15 bp, Homo sapiens
tttttatttcagcca

SEQ ID NO: 243234 - DNA, 15 bp, Homo sapiens
atttttatttcagcc

SEQ ID NO: 243235 - DNA, 15 bp, Homo sapiens
tatttttatttcagc

SEQ ID NO: 243236 - DNA, 15 bp, Homo sapiens
gtatttttatttcag

SEQ ID NO: 243237 - DNA, 15 bp, Homo sapiens
ggtatttttatttca

SEQ ID NO: 243238 - DNA, 15 bp, Homo sapiens
tggtatttttatttc

SEQ ID NO: 243239 - DNA, 15 bp, Homo sapiens
ttggtatttttattt

SEQ ID NO: 243240 - DNA, 15 bp, Homo sapiens
gttggtatttttatt

SEQ ID NO: 243241 - DNA, 15 bp, Homo sapiens
tgttggtatttttat

SEQ ID NO: 243242 - DNA, 15 bp, Homo sapiens
ttgttggtattttta

SEQ ID NO: 243243 - DNA, 15 bp, Homo sapiens
attgttggtattttt

SEQ ID NO: 243244 - DNA, 15 bp, Homo sapiens
tattgttggtatttt

SEQ ID NO: 243245 - DNA, 15 bp, Homo sapiens
gtattgttggtattt

SEQ ID NO: 243246 - DNA, 15 bp, Homo sapiens
ggtattgttggtatt

SEQ ID NO: 243247 - DNA, 15 bp, Homo sapiens
tggtattgttggtat

SEQ ID NO: 243248 - DNA, 15 bp, Homo sapiens
ttggtattgttggta

SEQ ID NO: 243249 - DNA, 15 bp, Homo sapiens
cttggtattgttggt

SEQ ID NO: 243250 - DNA, 15 bp, Homo sapiens
acttggtattgttgg

SEQ ID NO: 243251 - DNA, 15 bp, Homo sapiens
tacttggtattgttg

SEQ ID NO: 243252 - DNA, 15 bp, Homo sapiens
ctacttggtattgtt

SEQ ID NO: 243253 - DNA, 15 bp, Homo sapiens
actacttggtattgt

SEQ ID NO: 243254 - DNA, 15 bp, Homo sapiens
cactacttggtattg

SEQ ID NO: 243255 - DNA, 15 bp, Homo sapiens
tcactacttggtatt

SEQ ID NO: 243256 - DNA, 15 bp, Homo sapiens
atcactacttggtat

SEQ ID NO: 243257 - DNA, 15 bp, Homo sapiens
catcactacttggta

SEQ ID NO: 243258 - DNA, 15 bp, Homo sapiens
tcatcactacttggt

SEQ ID NO: 243259 - DNA, 15 bp, Homo sapiens
ctcatcactacttgg

SEQ ID NO: 243260 - DNA, 15 bp, Homo sapiens
cctcatcactacttg

SEQ ID NO: 243261 - DNA, 15 bp, Homo sapiens
tcctcatcactactt

SEQ ID NO: 243262 - DNA, 15 bp, Homo sapiens
atcctcatcactact

SEQ ID NO: 243263 - DNA, 15 bp, Homo sapiens
catcctcatcactac

SEQ ID NO: 243264 - DNA, 15 bp, Homo sapiens
ccatcctcatcacta

SEQ ID NO: 243265 - DNA, 15 bp, Homo sapiens
cccatcctcatcact

SEQ ID NO: 243266 - DNA, 15 bp, Homo sapiens
ccccatcctcatcac

SEQ ID NO: 243267 - DNA, 15 bp, Homo sapiens
cccccatcctcatca

SEQ ID NO: 243268 - DNA, 15 bp, Homo sapiens
ccccccatcctcatc

SEQ ID NO: 243269 - DNA, 15 bp, Homo sapiens
gccccccatcctcat

SEQ ID NO: 243270 - DNA, 15 bp, Homo sapiens
tgccccccatcctca

SEQ ID NO: 243271 - DNA, 15 bp, Homo sapiens
ttgccccccatcctc

SEQ ID NO: 243272 - DNA, 15 bp, Homo sapiens
gttgccccccatcct

SEQ ID NO: 243273 - DNA, 15 bp, Homo sapiens
agttgccccccatcc

SEQ ID NO: 243274 - DNA, 15 bp, Homo sapiens
cagttgccccccatc

SEQ ID NO: 243275 - DNA, 15 bp, Homo sapiens
ccagttgccccccat

SEQ ID NO: 243276 - DNA, 15 bp, Homo sapiens
tccagttgcccccca

SEQ ID NO: 243277 - DNA, 15 bp, Homo sapiens
ttccagttgcccccc

SEQ ID NO: 243278 - DNA, 15 bp, Homo sapiens
gttccagttgccccc

SEQ ID NO: 243279 - DNA, 15 bp, Homo sapiens
agttccagttgcccc

SEQ ID NO: 243280 - DNA, 15 bp, Homo sapiens
gagttccagttgccc

SEQ ID NO: 243281 - DNA, 15 bp, Homo sapiens
agagttccagttgcc

SEQ ID NO: 243282 - DNA, 15 bp, Homo sapiens
gagagttccagttgc

SEQ ID NO: 243283 - DNA, 15 bp, Homo sapiens
tgagagttccagttg

SEQ ID NO: 243284 - DNA, 15 bp, Homo sapiens
ctgagagttccagtt

SEQ ID NO: 243285 - DNA, 15 bp, Homo sapiens
tctgagagttccagt

SEQ ID NO: 243286 - DNA, 15 bp, Homo sapiens
gtctgagagttccag

SEQ ID NO: 243287 - DNA, 15 bp, Homo sapiens
tgtctgagagttcca

SEQ ID NO: 243288 - DNA, 15 bp, Homo sapiens
atgtctgagagttcc

SEQ ID NO: 243289 - DNA, 15 bp, Homo sapiens
aatgtctgagagttc

SEQ ID NO: 243290 - DNA, 15 bp, Homo sapiens
taatgtctgagagtt

SEQ ID NO: 243291 - DNA, 15 bp, Homo sapiens
gtaatgtctgagagt

SEQ ID NO: 243292 - DNA, 15 bp, Homo sapiens
agtaatgtctgagag

SEQ ID NO: 243293 - DNA, 15 bp, Homo sapiens
tagtaatgtctgaga

SEQ ID NO: 243294 - DNA, 15 bp, Homo sapiens
ttagtaatgtctgag

SEQ ID NO: 243295 - DNA, 15 bp, Homo sapiens
attagtaatgtctga

SEQ ID NO: 243296 - DNA, 15 bp, Homo sapiens
cattagtaatgtctg

SEQ ID NO: 243297 - DNA, 15 bp, Homo sapiens
ccattagtaatgtct

SEQ ID NO: 243298 - DNA, 15 bp, Homo sapiens
cccattagtaatgtc

SEQ ID NO: 243299 - DNA, 15 bp, Homo sapiens
tcccattagtaatgt

SEQ ID NO: 243300 - DNA, 15 bp, Homo sapiens
ttcccattagtaatg

SEQ ID NO: 243301 - DNA, 15 bp, Homo sapiens
attcccattagtaat

SEQ ID NO: 243302 - DNA, 15 bp, Homo sapiens
cattcccattagtaa

SEQ ID NO: 243303 - DNA, 15 bp, Homo sapiens
gcattcccattagta

SEQ ID NO: 243304 - DNA, 15 bp, Homo sapiens
tgcattcccattagt

SEQ ID NO: 243305 - DNA, 15 bp, Homo sapiens
ttgcattcccattag

SEQ ID NO: 243306 - DNA, 15 bp, Homo sapiens
tttgcattcccatta

SEQ ID NO: 243307 - DNA, 15 bp, Homo sapiens
ttttgcattcccatt

SEQ ID NO: 243308 - DNA, 15 bp, Homo sapiens
gttttgcattcccat

SEQ ID NO: 243309 - DNA, 15 bp, Homo sapiens
tgttttgcattccca

SEQ ID NO: 243310 - DNA, 15 bp, Homo sapiens
ttgttttgcattccc

SEQ ID NO: 243311 - DNA, 15 bp, Homo sapiens
attgttttgcattcc

SEQ ID NO: 243312 - DNA, 15 bp, Homo sapiens
cattgttttgcattc

SEQ ID NO: 243313 - DNA, 15 bp, Homo sapiens
acattgttttgcatt

SEQ ID NO: 243314 - DNA, 15 bp, Homo sapiens
aacattgttttgcat

SEQ ID NO: 243315 - DNA, 15 bp, Homo sapiens
caacattgttttgca

SEQ ID NO: 243316 - DNA, 15 bp, Homo sapiens
gcaacattgttttgc

SEQ ID NO: 243317 - DNA, 15 bp, Homo sapiens
agcaacattgttttg

SEQ ID NO: 243318 - DNA, 15 bp, Homo sapiens
tagcaacattgtttt

SEQ ID NO: 243319 - DNA, 15 bp, Homo sapiens
atagcaacattgttt

SEQ ID NO: 243320 - DNA, 15 bp, Homo sapiens
aatagcaacattgtt

SEQ ID NO: 243321 - DNA, 15 bp, Homo sapiens
gaatagcaacattgt

SEQ ID NO: 243322 - DNA, 15 bp, Homo sapiens
tgaatagcaacattg

SEQ ID NO: 243323 - DNA, 15 bp, Homo sapiens
ctgaatagcaacatt

SEQ ID NO: 243324 - DNA, 15 bp, Homo sapiens
cctgaatagcaacat

SEQ ID NO: 243325 - DNA, 15 bp, Homo sapiens
tcctgaatagcaaca

SEQ ID NO: 243326 - DNA, 15 bp, Homo sapiens
ttcctgaatagcaac

SEQ ID NO: 243327 - DNA, 15 bp, Homo sapiens
tttcctgaatagcaa

SEQ ID NO: 243328 - DNA, 15 bp, Homo sapiens
ttttcctgaatagca

SEQ ID NO: 243329 - DNA, 15 bp, Homo sapiens
gttttcctgaatagc

SEQ ID NO: 243330 - DNA, 15 bp, Homo sapiens
tgttttcctgaatag

SEQ ID NO: 243331 - DNA, 15 bp, Homo sapiens
ctgttttcctgaata

SEQ ID NO: 243332 - DNA, 15 bp, Homo sapiens
actgttttcctgaat

SEQ ID NO: 243333 - DNA, 15 bp, Homo sapiens
aactgttttcctgaa

SEQ ID NO: 243334 - DNA, 15 bp, Homo sapiens
aaactgttttcctga

SEQ ID NO: 243335 - DNA, 15 bp, Homo sapiens
taaactgttttcctg

SEQ ID NO: 243336 - DNA, 15 bp, Homo sapiens
ctaaactgttttcct

SEQ ID NO: 243337 - DNA, 15 bp, Homo sapiens
tctaaactgttttcc

SEQ ID NO: 243338 - DNA, 15 bp, Homo sapiens
ttctaaactgttttc

SEQ ID NO: 243339 - DNA, 15 bp, Homo sapiens
cttctaaactgtttt

SEQ ID NO: 243340 - DNA, 15 bp, Homo sapiens
acttctaaactgttt

SEQ ID NO: 243341 - DNA, 15 bp, Homo sapiens
aacttctaaactgtt

SEQ ID NO: 243342 - DNA, 15 bp, Homo sapiens
aaacttctaaactgt

SEQ ID NO: 243343 - DNA, 15 bp, Homo sapiens
aaaacttctaaactg

SEQ ID NO: 243344 - DNA, 15 bp, Homo sapiens
gaaaacttctaaact

SEQ ID NO: 243345 - DNA, 15 bp, Homo sapiens
agaaaacttctaaac

SEQ ID NO: 243346 - DNA, 15 bp, Homo sapiens
aagaaaacttctaaa

SEQ ID NO: 243347 - DNA, 15 bp, Homo sapiens
taagaaaacttctaa

SEQ ID NO: 243348 - DNA, 15 bp, Homo sapiens
ataagaaaacttcta

SEQ ID NO: 243349 - DNA, 15 bp, Homo sapiens
tataagaaaacttct

SEQ ID NO: 243350 - DNA, 15 bp, Homo sapiens
ttataagaaaacttc

SEQ ID NO: 243351 - DNA, 15 bp, Homo sapiens
tttataagaaaactt

SEQ ID NO: 243352 - DNA, 15 bp, Homo sapiens
ttttataagaaaact

SEQ ID NO: 243353 - DNA, 15 bp, Homo sapiens
attttataagaaaac

SEQ ID NO: 243354 - DNA, 15 bp, Homo sapiens
aattttataagaaaa

SEQ ID NO: 243355 - DNA, 15 bp, Homo sapiens
taattttataagaaa

SEQ ID NO: 243356 - DNA, 15 bp, Homo sapiens
ttaattttataagaa

SEQ ID NO: 243357 - DNA, 15 bp, Homo sapiens
cttaattttataaga

SEQ ID NO: 243358 - DNA, 15 bp, Homo sapiens
gcttaattttataag

SEQ ID NO: 243359 - DNA, 15 bp, Homo sapiens
tgcttaattttataa

SEQ ID NO: 243360 - DNA, 15 bp, Homo sapiens
atgcttaattttata

SEQ ID NO: 243361 - DNA, 15 bp, Homo sapiens
tatgcttaattttat

SEQ ID NO: 243362 - DNA, 15 bp, Homo sapiens
atatgcttaatttta

SEQ ID NO: 243363 - DNA, 15 bp, Homo sapiens
tatatgcttaatttt

SEQ ID NO: 243364 - DNA, 15 bp, Homo sapiens
gtatatgcttaattt

SEQ ID NO: 243365 - DNA, 15 bp, Homo sapiens
agtatatgcttaatt

SEQ ID NO: 243366 - DNA, 15 bp, Homo sapiens
aagtatatgcttaat

SEQ ID NO: 243367 - DNA, 15 bp, Homo sapiens
taagtatatgcttaa

SEQ ID NO: 243368 - DNA, 15 bp, Homo sapiens
ctaagtatatgctta

SEQ ID NO: 243369 - DNA, 15 bp, Homo sapiens
gctaagtatatgctt

SEQ ID NO: 243370 - DNA, 15 bp, Homo sapiens
tgctaagtatatgct

SEQ ID NO: 243371 - DNA, 15 bp, Homo sapiens
atgctaagtatatgc

SEQ ID NO: 243372 - DNA, 15 bp, Homo sapiens
tatgctaagtatatg

SEQ ID NO: 243373 - DNA, 15 bp, Homo sapiens
atatgctaagtatat

SEQ ID NO: 243374 - DNA, 15 bp, Homo sapiens
aatatgctaagtata

SEQ ID NO: 243375 - DNA, 15 bp, Homo sapiens
taatatgctaagtat

SEQ ID NO: 243376 - DNA, 15 bp, Homo sapiens
gtaatatgctaagta

SEQ ID NO: 243377 - DNA, 15 bp, Homo sapiens
ggtaatatgctaagt

SEQ ID NO: 243378 - DNA, 15 bp, Homo sapiens
tggtaatatgctaag

SEQ ID NO: 243379 - DNA, 15 bp, Homo sapiens
ctggtaatatgctaa

SEQ ID NO: 243380 - DNA, 15 bp, Homo sapiens
tctggtaatatgcta

SEQ ID NO: 243381 - DNA, 15 bp, Homo sapiens
ttctggtaatatgct

SEQ ID NO: 243382 - DNA, 15 bp, Homo sapiens
tttctggtaatatgc

SEQ ID NO: 243383 - DNA, 15 bp, Homo sapiens
atttctggtaatatg

SEQ ID NO: 243384 - DNA, 15 bp, Homo sapiens
aatttctggtaatat

SEQ ID NO: 243385 - DNA, 15 bp, Homo sapiens
gaatttctggtaata

SEQ ID NO: 243386 - DNA, 15 bp, Homo sapiens
tgaatttctggtaat

SEQ ID NO: 243387 - DNA, 15 bp, Homo sapiens
ttgaatttctggtaa

SEQ ID NO: 243388 - DNA, 15 bp, Homo sapiens
attgaatttctggta

SEQ ID NO: 243389 - DNA, 15 bp, Homo sapiens
cattgaatttctggt

SEQ ID NO: 243390 - DNA, 15 bp, Homo sapiens
acattgaatttctgg

SEQ ID NO: 243391 - DNA, 15 bp, Homo sapiens
gacattgaatttctg

SEQ ID NO: 243392 - DNA, 15 bp, Homo sapiens
agacattgaatttct

SEQ ID NO: 243393 - DNA, 15 bp, Homo sapiens
tagacattgaatttc

SEQ ID NO: 243394 - DNA, 15 bp, Homo sapiens
ctagacattgaattt

SEQ ID NO: 243395 - DNA, 15 bp, Homo sapiens
tctagacattgaatt

SEQ ID NO: 243396 - DNA, 15 bp, Homo sapiens
atctagacattgaat

SEQ ID NO: 243397 - DNA, 15 bp, Homo sapiens
tatctagacattgaa

SEQ ID NO: 243398 - DNA, 15 bp, Homo sapiens
atatctagacattga

SEQ ID NO: 243399 - DNA, 15 bp, Homo sapiens
aatatctagacattg

SEQ ID NO: 243400 - DNA, 15 bp, Homo sapiens
aaatatctagacatt

SEQ ID NO: 243401 - DNA, 15 bp, Homo sapiens
taaatatctagacat

SEQ ID NO: 243402 - DNA, 15 bp, Homo sapiens
gtaaatatctagaca

SEQ ID NO: 243403 - DNA, 15 bp, Homo sapiens
ggtaaatatctagac

SEQ ID NO: 243404 - DNA, 15 bp, Homo sapiens
gggtaaatatctaga

SEQ ID NO: 243405 - DNA, 15 bp, Homo sapiens
agggtaaatatctag

SEQ ID NO: 243406 - DNA, 15 bp, Homo sapiens
tagggtaaatatcta

SEQ ID NO: 243407 - DNA, 15 bp, Homo sapiens
ctagggtaaatatct

SEQ ID NO: 243408 - DNA, 15 bp, Homo sapiens
cctagggtaaatatc

SEQ ID NO: 243409 - DNA, 15 bp, Homo sapiens
ccctagggtaaatat

SEQ ID NO: 243410 - DNA, 15 bp, Homo sapiens
tccctagggtaaata

SEQ ID NO: 243411 - DNA, 15 bp, Homo sapiens
ttccctagggtaaat

SEQ ID NO: 243412 - DNA, 15 bp, Homo sapiens
tttccctagggtaaa

SEQ ID NO: 243413 - DNA, 15 bp, Homo sapiens
atttccctagggtaa

SEQ ID NO: 243414 - DNA, 15 bp, Homo sapiens
catttccctagggta

SEQ ID NO: 243415 - DNA, 15 bp, Homo sapiens
tcatttccctagggt

SEQ ID NO: 243416 - DNA, 15 bp, Homo sapiens
ttcatttccctaggg

SEQ ID NO: 243417 - DNA, 15 bp, Homo sapiens
tttcatttccctagg

SEQ ID NO: 243418 - DNA, 15 bp, Homo sapiens
ttttcatttccctag

SEQ ID NO: 243419 - DNA, 15 bp, Homo sapiens
gttttcatttcccta

SEQ ID NO: 243420 - DNA, 15 bp, Homo sapiens
agttttcatttccct

SEQ ID NO: 243421 - DNA, 15 bp, Homo sapiens
aagttttcatttccc

SEQ ID NO: 243422 - DNA, 15 bp, Homo sapiens
taagttttcatttcc

SEQ ID NO: 243423 - DNA, 15 bp, Homo sapiens
ttaagttttcatttc

SEQ ID NO: 243424 - DNA, 15 bp, Homo sapiens
cttaagttttcattt

SEQ ID NO: 243425 - DNA, 15 bp, Homo sapiens
acttaagttttcatt

SEQ ID NO: 243426 - DNA, 15 bp, Homo sapiens
aacttaagttttcat

SEQ ID NO: 243427 - DNA, 15 bp, Homo sapiens
aaacttaagttttca

SEQ ID NO: 243428 - DNA, 15 bp, Homo sapiens
taaacttaagttttc

SEQ ID NO: 243429 - DNA, 15 bp, Homo sapiens
gtaaacttaagtttt

SEQ ID NO: 243430 - DNA, 15 bp, Homo sapiens
tgtaaacttaagttt

SEQ ID NO: 243431 - DNA, 15 bp, Homo sapiens
ctgtaaacttaagtt

SEQ ID NO: 243432 - DNA, 15 bp, Homo sapiens
tctgtaaacttaagt

SEQ ID NO: 243433 - DNA, 15 bp, Homo sapiens
ttctgtaaacttaag

SEQ ID NO: 243434 - DNA, 15 bp, Homo sapiens
tttctgtaaacttaa

SEQ ID NO: 243435 - DNA, 15 bp, Homo sapiens
ttttctgtaaactta

SEQ ID NO: 243436 - DNA, 15 bp, Homo sapiens
tttttctgtaaactt

SEQ ID NO: 243437 - DNA, 15 bp, Homo sapiens
ttttttctgtaaact

SEQ ID NO: 243438 - DNA, 15 bp, Homo sapiens
gttttttctgtaaac

SEQ ID NO: 243439 - DNA, 15 bp, Homo sapiens
tgttttttctgtaaa

SEQ ID NO: 243440 - DNA, 15 bp, Homo sapiens
atgttttttctgtaa

SEQ ID NO: 243441 - DNA, 15 bp, Homo sapiens
aatgttttttctgta

SEQ ID NO: 243442 - DNA, 15 bp, Homo sapiens
gaatgttttttctgt

SEQ ID NO: 243443 - DNA, 15 bp, Homo sapiens
tgaatgttttttctg

SEQ ID NO: 243444 - DNA, 15 bp, Homo sapiens
atgaatgttttttct

SEQ ID NO: 243445 - DNA, 15 bp, Homo sapiens
tatgaatgttttttc

SEQ ID NO: 243446 - DNA, 15 bp, Homo sapiens
atatgaatgtttttt

SEQ ID NO: 243447 - DNA, 15 bp, Homo sapiens
tatatgaatgttttt

SEQ ID NO: 243448 - DNA, 15 bp, Homo sapiens
gtatatgaatgtttt

SEQ ID NO: 243449 - DNA, 15 bp, Homo sapiens
tgtatatgaatgttt

SEQ ID NO: 243450 - DNA, 15 bp, Homo sapiens
atgtatatgaatgtt

SEQ ID NO: 243451 - DNA, 15 bp, Homo sapiens
catgtatatgaatgt

SEQ ID NO: 243452 - DNA, 15 bp, Homo sapiens
acatgtatatgaatg

SEQ ID NO: 243453 - DNA, 15 bp, Homo sapiens
aacatgtatatgaat

SEQ ID NO: 243454 - DNA, 15 bp, Homo sapiens
aaacatgtatatgaa

SEQ ID NO: 243455 - DNA, 15 bp, Homo sapiens
caaacatgtatatga

SEQ ID NO: 243456 - DNA, 15 bp, Homo sapiens
acaaacatgtatatg

SEQ ID NO: 243457 - DNA, 15 bp, Homo sapiens
tacaaacatgtatat

SEQ ID NO: 243458 - DNA, 15 bp, Homo sapiens
ctacaaacatgtata

SEQ ID NO: 243459 - DNA, 15 bp, Homo sapiens
gctacaaacatgtat

SEQ ID NO: 243460 - DNA, 15 bp, Homo sapiens
tgctacaaacatgta

SEQ ID NO: 243461 - DNA, 15 bp, Homo sapiens
atgctacaaacatgt

SEQ ID NO: 243462 - DNA, 15 bp, Homo sapiens
gatgctacaaacatg

SEQ ID NO: 243463 - DNA, 15 bp, Homo sapiens
agatgctacaaacat

SEQ ID NO: 243464 - DNA, 15 bp, Homo sapiens
gagatgctacaaaca

SEQ ID NO: 243465 - DNA, 15 bp, Homo sapiens
agagatgctacaaac

SEQ ID NO: 243466 - DNA, 15 bp, Homo sapiens
tagagatgctacaaa

SEQ ID NO: 243467 - DNA, 15 bp, Homo sapiens
atagagatgctacaa

SEQ ID NO: 243468 - DNA, 15 bp, Homo sapiens
aatagagatgctaca

SEQ ID NO: 243469 - DNA, 15 bp, Homo sapiens
gaatagagatgctac

SEQ ID NO: 243470 - DNA, 15 bp, Homo sapiens
tgaatagagatgcta

SEQ ID NO: 243471 - DNA, 15 bp, Homo sapiens
atgaatagagatgct

SEQ ID NO: 243472 - DNA, 15 bp, Homo sapiens
tatgaatagagatgc

SEQ ID NO: 243473 - DNA, 15 bp, Homo sapiens
ttatgaatagagatg

SEQ ID NO: 243474 - DNA, 15 bp, Homo sapiens
attatgaatagagat

SEQ ID NO: 243475 - DNA, 15 bp, Homo sapiens
aattatgaatagaga

SEQ ID NO: 243476 - DNA, 15 bp, Homo sapiens
taattatgaatagag

SEQ ID NO: 243477 - DNA, 15 bp, Homo sapiens
gtaattatgaataga

SEQ ID NO: 243478 - DNA, 15 bp, Homo sapiens
ggtaattatgaatag

SEQ ID NO: 243479 - DNA, 15 bp, Homo sapiens
gggtaattatgaata

SEQ ID NO: 243480 - DNA, 15 bp, Homo sapiens
tgggtaattatgaat

SEQ ID NO: 243481 - DNA, 15 bp, Homo sapiens
ttgggtaattatgaa

SEQ ID NO: 243482 - DNA, 15 bp, Homo sapiens
tttgggtaattatga

SEQ ID NO: 243483 - DNA, 15 bp, Homo sapiens
ttttgggtaattatg

SEQ ID NO: 243484 - DNA, 15 bp, Homo sapiens
gttttgggtaattat

SEQ ID NO: 243485 - DNA, 15 bp, Homo sapiens
agttttgggtaatta

SEQ ID NO: 243486 - DNA, 15 bp, Homo sapiens
tagttttgggtaatt

SEQ ID NO: 243487 - DNA, 15 bp, Homo sapiens
ctagttttgggtaat

SEQ ID NO: 243488 - DNA, 15 bp, Homo sapiens
cctagttttgggtaa

SEQ ID NO: 243489 - DNA, 15 bp, Homo sapiens
tcctagttttgggta

SEQ ID NO: 243490 - DNA, 15 bp, Homo sapiens
ttcctagttttgggt

SEQ ID NO: 243491 - DNA, 15 bp, Homo sapiens
cttcctagttttggg

SEQ ID NO: 243492 - DNA, 15 bp, Homo sapiens
tcttcctagttttgg

SEQ ID NO: 243493 - DNA, 15 bp, Homo sapiens
ttcttcctagttttg

SEQ ID NO: 243494 - DNA, 15 bp, Homo sapiens
attcttcctagtttt

SEQ ID NO: 243495 - DNA, 15 bp, Homo sapiens
gattcttcctagttt

SEQ ID NO: 243496 - DNA, 15 bp, Homo sapiens
agattcttcctagtt

SEQ ID NO: 243497 - DNA, 15 bp, Homo sapiens
gagattcttcctagt

SEQ ID NO: 243498 - DNA, 15 bp, Homo sapiens
tgagattcttcctag

SEQ ID NO: 243499 - DNA, 15 bp, Homo sapiens
ctgagattcttccta

SEQ ID NO: 243500 - DNA, 15 bp, Homo sapiens
actgagattcttcct

SEQ ID NO: 243501 - DNA, 15 bp, Homo sapiens
cactgagattcttcc

SEQ ID NO: 243502 - DNA, 15 bp, Homo sapiens
ccactgagattcttc

SEQ ID NO: 243503 - DNA, 15 bp, Homo sapiens
cccactgagattctt

SEQ ID NO: 243504 - DNA, 15 bp, Homo sapiens
acccactgagattct

SEQ ID NO: 243505 - DNA, 15 bp, Homo sapiens
cacccactgagattc

SEQ ID NO: 243506 - DNA, 15 bp, Homo sapiens
tcacccactgagatt

SEQ ID NO: 243507 - DNA, 15 bp, Homo sapiens
ttcacccactgagat

SEQ ID NO: 243508 - DNA, 15 bp, Homo sapiens
attcacccactgaga

SEQ ID NO: 243509 - DNA, 15 bp, Homo sapiens
cattcacccactgag

SEQ ID NO: 243510 - DNA, 15 bp, Homo sapiens
ccattcacccactga

SEQ ID NO: 243511 - DNA, 15 bp, Homo sapiens
gccattcacccactg

SEQ ID NO: 243512 - DNA, 15 bp, Homo sapiens
agccattcacccact

SEQ ID NO: 243513 - DNA, 15 bp, Homo sapiens
tagccattcacccac

SEQ ID NO: 243514 - DNA, 15 bp, Homo sapiens
ttagccattcaccca

SEQ ID NO: 243515 - DNA, 15 bp, Homo sapiens
tttagccattcaccc

SEQ ID NO: 243516 - DNA, 15 bp, Homo sapiens
ttttagccattcacc

SEQ ID NO: 243517 - DNA, 15 bp, Homo sapiens
gttttagccattcac

SEQ ID NO: 243518 - DNA, 15 bp, Homo sapiens
tgttttagccattca

SEQ ID NO: 243519 - DNA, 15 bp, Homo sapiens
ttgttttagccattc

SEQ ID NO: 243520 - DNA, 15 bp, Homo sapiens
gttgttttagccatt

SEQ ID NO: 243521 - DNA, 15 bp, Homo sapiens
agttgttttagccat

SEQ ID NO: 243522 - DNA, 15 bp, Homo sapiens
cagttgttttagcca

SEQ ID NO: 243523 - DNA, 15 bp, Homo sapiens
acagttgttttagcc

SEQ ID NO: 243524 - DNA, 15 bp, Homo sapiens
cacagttgttttagc

SEQ ID NO: 243525 - DNA, 15 bp, Homo sapiens
tcacagttgttttag

SEQ ID NO: 243526 - DNA, 15 bp, Homo sapiens
atcacagttgtttta

SEQ ID NO: 243527 - DNA, 15 bp, Homo sapiens
tatcacagttgtttt

SEQ ID NO: 243528 - DNA, 15 bp, Homo sapiens
gtatcacagttgttt

SEQ ID NO: 243529 - DNA, 15 bp, Homo sapiens
tgtatcacagttgtt

SEQ ID NO: 243530 - DNA, 15 bp, Homo sapiens
atgtatcacagttgt

SEQ ID NO: 243531 - DNA, 15 bp, Homo sapiens
gatgtatcacagttg

SEQ ID NO: 243532 - DNA, 15 bp, Homo sapiens
ggatgtatcacagtt

SEQ ID NO: 243533 - DNA, 15 bp, Homo sapiens
aggatgtatcacagt

SEQ ID NO: 243534 - DNA, 15 bp, Homo sapiens
aaggatgtatcacag

SEQ ID NO: 243535 - DNA, 15 bp, Homo sapiens
taaggatgtatcaca

SEQ ID NO: 243536 - DNA, 15 bp, Homo sapiens
gtaaggatgtatcac

SEQ ID NO: 243537 - DNA, 15 bp, Homo sapiens
ggtaaggatgtatca

SEQ ID NO: 243538 - DNA, 15 bp, Homo sapiens
tggtaaggatgtatc

SEQ ID NO: 243539 - DNA, 15 bp, Homo sapiens
atggtaaggatgtat

SEQ ID NO: 243540 - DNA, 15 bp, Homo sapiens
catggtaaggatgta

SEQ ID NO: 243541 - DNA, 15 bp, Homo sapiens
tcatggtaaggatgt

SEQ ID NO: 243542 - DNA, 15 bp, Homo sapiens
ttcatggtaaggatg

SEQ ID NO: 243543 - DNA, 15 bp, Homo sapiens
attcatggtaaggat

SEQ ID NO: 243544 - DNA, 15 bp, Homo sapiens
tattcatggtaagga

SEQ ID NO: 243545 - DNA, 15 bp, Homo sapiens
gtattcatggtaagg

SEQ ID NO: 243546 - DNA, 15 bp, Homo sapiens
tgtattcatggtaag

SEQ ID NO: 243547 - DNA, 15 bp, Homo sapiens
atgtattcatggtaa

SEQ ID NO: 243548 - DNA, 15 bp, Homo sapiens
catgtattcatggta

SEQ ID NO: 243549 - DNA, 15 bp, Homo sapiens
gcatgtattcatggt

SEQ ID NO: 243550 - DNA, 15 bp, Homo sapiens
tgcatgtattcatgg

SEQ ID NO: 243551 - DNA, 15 bp, Homo sapiens
ctgcatgtattcatg

SEQ ID NO: 243552 - DNA, 15 bp, Homo sapiens
actgcatgtattcat

SEQ ID NO: 243553 - DNA, 15 bp, Homo sapiens
tactgcatgtattca

SEQ ID NO: 243554 - DNA, 15 bp, Homo sapiens
ctactgcatgtattc

SEQ ID NO: 243555 - DNA, 15 bp, Homo sapiens
gctactgcatgtatt

SEQ ID NO: 243556 - DNA, 15 bp, Homo sapiens
tgctactgcatgtat

SEQ ID NO: 243557 - DNA, 15 bp, Homo sapiens
ttgctactgcatgta

SEQ ID NO: 243558 - DNA, 15 bp, Homo sapiens
tttgctactgcatgt

SEQ ID NO: 243559 - DNA, 15 bp, Homo sapiens
ttttgctactgcatg

SEQ ID NO: 243560 - DNA, 15 bp, Homo sapiens
tttttgctactgcat

SEQ ID NO: 243561 - DNA, 15 bp, Homo sapiens
ttttttgctactgca

SEQ ID NO: 243562 - DNA, 15 bp, Homo sapiens
cttttttgctactgc

SEQ ID NO: 243563 - DNA, 15 bp, Homo sapiens
tcttttttgctactg

SEQ ID NO: 243564 - DNA, 15 bp, Homo sapiens
ttcttttttgctact

SEQ ID NO: 243565 - DNA, 15 bp, Homo sapiens
attcttttttgctac

SEQ ID NO: 243566 - DNA, 15 bp, Homo sapiens
cattcttttttgcta

SEQ ID NO: 243567 - DNA, 15 bp, Homo sapiens
tcattcttttttgct

SEQ ID NO: 243568 - DNA, 15 bp, Homo sapiens
ttcattcttttttgc

SEQ ID NO: 243569 - DNA, 15 bp, Homo sapiens
gttcattcttttttg

SEQ ID NO: 243570 - DNA, 15 bp, Homo sapiens
agttcattctttttt

SEQ ID NO: 243571 - DNA, 15 bp, Homo sapiens
tagttcattcttttt

SEQ ID NO: 243572 - DNA, 15 bp, Homo sapiens
atagttcattctttt

SEQ ID NO: 243573 - DNA, 15 bp, Homo sapiens
aatagttcattcttt

SEQ ID NO: 243574 - DNA, 15 bp, Homo sapiens
caatagttcattctt

SEQ ID NO: 243575 - DNA, 15 bp, Homo sapiens
tcaatagttcattct

SEQ ID NO: 243576 - DNA, 15 bp, Homo sapiens
atcaatagttcattc

SEQ ID NO: 243577 - DNA, 15 bp, Homo sapiens
tatcaatagttcatt

SEQ ID NO: 243578 - DNA, 15 bp, Homo sapiens
ttatcaatagttcat

SEQ ID NO: 243579 - DNA, 15 bp, Homo sapiens
tttatcaatagttca

SEQ ID NO: 243580 - DNA, 15 bp, Homo sapiens
ttttatcaatagttc

SEQ ID NO: 243581 - DNA, 15 bp, Homo sapiens
cttttatcaatagtt

SEQ ID NO: 243582 - DNA, 15 bp, Homo sapiens
gcttttatcaatagt

SEQ ID NO: 243583 - DNA, 15 bp, Homo sapiens
tgcttttatcaatag

SEQ ID NO: 243584 - DNA, 15 bp, Homo sapiens
ttgcttttatcaata

SEQ ID NO: 243585 - DNA, 15 bp, Homo sapiens
gttgcttttatcaat

SEQ ID NO: 243586 - DNA, 15 bp, Homo sapiens
tgttgcttttatcaa

SEQ ID NO: 243587 - DNA, 15 bp, Homo sapiens
ttgttgcttttatca

SEQ ID NO: 243588 - DNA, 15 bp, Homo sapiens
gttgttgcttttatc

SEQ ID NO: 243589 - DNA, 15 bp, Homo sapiens
agttgttgcttttat

SEQ ID NO: 243590 - DNA, 15 bp, Homo sapiens
aagttgttgctttta

SEQ ID NO: 243591 - DNA, 15 bp, Homo sapiens
caagttgttgctttt

SEQ ID NO: 243592 - DNA, 15 bp, Homo sapiens
ccaagttgttgcttt

SEQ ID NO: 243593 - DNA, 15 bp, Homo sapiens
tccaagttgttgctt

SEQ ID NO: 243594 - DNA, 15 bp, Homo sapiens
atccaagttgttgct

SEQ ID NO: 243595 - DNA, 15 bp, Homo sapiens
catccaagttgttgc

SEQ ID NO: 243596 - DNA, 15 bp, Homo sapiens
tcatccaagttgttg

SEQ ID NO: 243597 - DNA, 15 bp, Homo sapiens
ttcatccaagttgtt

SEQ ID NO: 243598 - DNA, 15 bp, Homo sapiens
attcatccaagttgt

SEQ ID NO: 243599 - DNA, 15 bp, Homo sapiens
gattcatccaagttg

SEQ ID NO: 243600 - DNA, 15 bp, Homo sapiens
agattcatccaagtt

SEQ ID NO: 243601 - DNA, 15 bp, Homo sapiens
gagattcatccaagt

SEQ ID NO: 243602 - DNA, 15 bp, Homo sapiens
tgagattcatccaag

SEQ ID NO: 243603 - DNA, 15 bp, Homo sapiens
ttgagattcatccaa

SEQ ID NO: 243604 - DNA, 15 bp, Homo sapiens
gttgagattcatcca

SEQ ID NO: 243605 - DNA, 15 bp, Homo sapiens
tgttgagattcatcc

SEQ ID NO: 243606 - DNA, 15 bp, Homo sapiens
ttgttgagattcatc

SEQ ID NO: 243607 - DNA, 15 bp, Homo sapiens
gttgttgagattcat

SEQ ID NO: 243608 - DNA, 15 bp, Homo sapiens
tgttgttgagattca

SEQ ID NO: 243609 - DNA, 15 bp, Homo sapiens
atgttgttgagattc

SEQ ID NO: 243610 - DNA, 15 bp, Homo sapiens
aatgttgttgagatt

SEQ ID NO: 243611 - DNA, 15 bp, Homo sapiens
aaatgttgttgagat

SEQ ID NO: 243612 - DNA, 15 bp, Homo sapiens
aaaatgttgttgaga

SEQ ID NO: 243613 - DNA, 15 bp, Homo sapiens
caaaatgttgttgag

SEQ ID NO: 243614 - DNA, 15 bp, Homo sapiens
gcaaaatgttgttga

SEQ ID NO: 243615 - DNA, 15 bp, Homo sapiens
agcaaaatgttgttg

SEQ ID NO: 243616 - DNA, 15 bp, Homo sapiens
gagcaaaatgttgtt

SEQ ID NO: 243617 - DNA, 15 bp, Homo sapiens
tgagcaaaatgttgt

SEQ ID NO: 243618 - DNA, 15 bp, Homo sapiens
ttgagcaaaatgttg

SEQ ID NO: 243619 - DNA, 15 bp, Homo sapiens
attgagcaaaatgtt

SEQ ID NO: 243620 - DNA, 15 bp, Homo sapiens
aattgagcaaaatgt

SEQ ID NO: 243621 - DNA, 15 bp, Homo sapiens
taattgagcaaaatg

SEQ ID NO: 243622 - DNA, 15 bp, Homo sapiens
ttaattgagcaaaat

SEQ ID NO: 243623 - DNA, 15 bp, Homo sapiens
tttaattgagcaaaa

SEQ ID NO: 243624 - DNA, 15 bp, Homo sapiens
ttttaattgagcaaa

SEQ ID NO: 243625 - DNA, 15 bp, Homo sapiens
tttttaattgagcaa

SEQ ID NO: 243626 - DNA, 15 bp, Homo sapiens
ttttttaattgagca

SEQ ID NO: 243627 - DNA, 15 bp, Homo sapiens
cttttttaattgagc

SEQ ID NO: 243628 - DNA, 15 bp, Homo sapiens
gcttttttaattgag

SEQ ID NO: 243629 - DNA, 15 bp, Homo sapiens
ggcttttttaattga

SEQ ID NO: 243630 - DNA, 15 bp, Homo sapiens
tggcttttttaattg

SEQ ID NO: 243631 - DNA, 15 bp, Homo sapiens
ctggcttttttaatt

SEQ ID NO: 243632 - DNA, 15 bp, Homo sapiens
gctggcttttttaat

SEQ ID NO: 243633 - DNA, 15 bp, Homo sapiens
cgctggcttttttaa

SEQ ID NO: 243634 - DNA, 15 bp, Homo sapiens
acgctggctttttta

SEQ ID NO: 243635 - DNA, 15 bp, Homo sapiens
aacgctggctttttt

SEQ ID NO: 243636 - DNA, 15 bp, Homo sapiens
taacgctggcttttt

SEQ ID NO: 243637 - DNA, 15 bp, Homo sapiens
ttaacgctggctttt

SEQ ID NO: 243638 - DNA, 15 bp, Homo sapiens
attaacgctggcttt

SEQ ID NO: 243639 - DNA, 15 bp, Homo sapiens
tattaacgctggctt

SEQ ID NO: 243640 - DNA, 15 bp, Homo sapiens
ctattaacgctggct

SEQ ID NO: 243641 - DNA, 15 bp, Homo sapiens
cctattaacgctggc

SEQ ID NO: 243642 - DNA, 15 bp, Homo sapiens
acctattaacgctgg

SEQ ID NO: 243643 - DNA, 15 bp, Homo sapiens
aacctattaacgctg

SEQ ID NO: 243644 - DNA, 15 bp, Homo sapiens
taacctattaacgct

SEQ ID NO: 243645 - DNA, 15 bp, Homo sapiens
gtaacctattaacgc

SEQ ID NO: 243646 - DNA, 15 bp, Homo sapiens
tgtaacctattaacg

SEQ ID NO: 243647 - DNA, 15 bp, Homo sapiens
atgtaacctattaac

SEQ ID NO: 243648 - DNA, 15 bp, Homo sapiens
tatgtaacctattaa

SEQ ID NO: 243649 - DNA, 15 bp, Homo sapiens
atatgtaacctatta

SEQ ID NO: 243650 - DNA, 15 bp, Homo sapiens
aatatgtaacctatt

SEQ ID NO: 243651 - DNA, 15 bp, Homo sapiens
taatatgtaacctat

SEQ ID NO: 243652 - DNA, 15 bp, Homo sapiens
ataatatgtaaccta

SEQ ID NO: 243653 - DNA, 15 bp, Homo sapiens
tataatatgtaacct

SEQ ID NO: 243654 - DNA, 15 bp, Homo sapiens
atataatatgtaacc

SEQ ID NO: 243655 - DNA, 15 bp, Homo sapiens
gatataatatgtaac

SEQ ID NO: 243656 - DNA, 15 bp, Homo sapiens
tgatataatatgtaa

SEQ ID NO: 243657 - DNA, 15 bp, Homo sapiens
ttgatataatatgta

SEQ ID NO: 243658 - DNA, 15 bp, Homo sapiens
attgatataatatgt

SEQ ID NO: 243659 - DNA, 15 bp, Homo sapiens
aattgatataatatg

SEQ ID NO: 243660 - DNA, 15 bp, Homo sapiens
aaattgatataatat

SEQ ID NO: 243661 - DNA, 15 bp, Homo sapiens
gaaattgatataata

SEQ ID NO: 243662 - DNA, 15 bp, Homo sapiens
tgaaattgatataat

SEQ ID NO: 243663 - DNA, 15 bp, Homo sapiens
atgaaattgatataa

SEQ ID NO: 243664 - DNA, 15 bp, Homo sapiens
aatgaaattgatata

SEQ ID NO: 243665 - DNA, 15 bp, Homo sapiens
aaatgaaattgatat

SEQ ID NO: 243666 - DNA, 15 bp, Homo sapiens
taaatgaaattgata

SEQ ID NO: 243667 - DNA, 15 bp, Homo sapiens
ataaatgaaattgat

SEQ ID NO: 243668 - DNA, 15 bp, Homo sapiens
cataaatgaaattga

SEQ ID NO: 243669 - DNA, 15 bp, Homo sapiens
acataaatgaaattg

SEQ ID NO: 243670 - DNA, 15 bp, Homo sapiens
aacataaatgaaatt

SEQ ID NO: 243671 - DNA, 15 bp, Homo sapiens
taacataaatgaaat

SEQ ID NO: 243672 - DNA, 15 bp, Homo sapiens
gtaacataaatgaaa

SEQ ID NO: 243673 - DNA, 15 bp, Homo sapiens
agtaacataaatgaa

SEQ ID NO: 243674 - DNA, 15 bp, Homo sapiens
aagtaacataaatga

SEQ ID NO: 243675 - DNA, 15 bp, Homo sapiens
gaagtaacataaatg

SEQ ID NO: 243676 - DNA, 15 bp, Homo sapiens
ggaagtaacataaat

SEQ ID NO: 243677 - DNA, 15 bp, Homo sapiens
aggaagtaacataaa

SEQ ID NO: 243678 - DNA, 15 bp, Homo sapiens
aaggaagtaacataa

SEQ ID NO: 243679 - DNA, 15 bp, Homo sapiens
caaggaagtaacata

SEQ ID NO: 243680 - DNA, 15 bp, Homo sapiens
ccaaggaagtaacat

SEQ ID NO: 243681 - DNA, 15 bp, Homo sapiens
tccaaggaagtaaca

SEQ ID NO: 243682 - DNA, 15 bp, Homo sapiens
atccaaggaagtaac

SEQ ID NO: 243683 - DNA, 15 bp, Homo sapiens
tatccaaggaagtaa

SEQ ID NO: 243684 - DNA, 15 bp, Homo sapiens
ctatccaaggaagta

SEQ ID NO: 243685 - DNA, 15 bp, Homo sapiens
cctatccaaggaagt

SEQ ID NO: 243686 - DNA, 15 bp, Homo sapiens
acctatccaaggaag

SEQ ID NO: 243687 - DNA, 15 bp, Homo sapiens
tacctatccaaggaa

SEQ ID NO: 243688 - DNA, 15 bp, Homo sapiens
ttacctatccaagga

SEQ ID NO: 243689 - DNA, 15 bp, Homo sapiens
tttacctatccaagg

SEQ ID NO: 243690 - DNA, 15 bp, Homo sapiens
ttttacctatccaag

SEQ ID NO: 243691 - DNA, 15 bp, Homo sapiens
gttttacctatccaa

SEQ ID NO: 243692 - DNA, 15 bp, Homo sapiens
agttttacctatcca

SEQ ID NO: 243693 - DNA, 15 bp, Homo sapiens
cagttttacctatcc

SEQ ID NO: 243694 - DNA, 15 bp, Homo sapiens
acagttttacctatc

SEQ ID NO: 243695 - DNA, 15 bp, Homo sapiens
tacagttttacctat

SEQ ID NO: 243696 - DNA, 15 bp, Homo sapiens
ctacagttttaccta

SEQ ID NO: 243697 - DNA, 15 bp, Homo sapiens
actacagttttacct

SEQ ID NO: 243698 - DNA, 15 bp, Homo sapiens
cactacagttttacc

SEQ ID NO: 243699 - DNA, 15 bp, Homo sapiens
tcactacagttttac

SEQ ID NO: 243700 - DNA, 15 bp, Homo sapiens
gtcactacagtttta

SEQ ID NO: 243701 - DNA, 15 bp, Homo sapiens
tgtcactacagtttt

SEQ ID NO: 243702 - DNA, 15 bp, Homo sapiens
ctgtcactacagttt

SEQ ID NO: 243703 - DNA, 15 bp, Homo sapiens
tctgtcactacagtt

SEQ ID NO: 243704 - DNA, 15 bp, Homo sapiens
ctctgtcactacagt

SEQ ID NO: 243705 - DNA, 15 bp, Homo sapiens
cctctgtcactacag

SEQ ID NO: 243706 - DNA, 15 bp, Homo sapiens
tcctctgtcactaca

SEQ ID NO: 243707 - DNA, 15 bp, Homo sapiens
gtcctctgtcactac

SEQ ID NO: 243708 - DNA, 15 bp, Homo sapiens
tgtcctctgtcacta

SEQ ID NO: 243709 - DNA, 15 bp, Homo sapiens
ctgtcctctgtcact

SEQ ID NO: 243710 - DNA, 15 bp, Homo sapiens
tctgtcctctgtcac

SEQ ID NO: 243711 - DNA, 15 bp, Homo sapiens
atctgtcctctgtca

SEQ ID NO: 243712 - DNA, 15 bp, Homo sapiens
aatctgtcctctgtc

SEQ ID NO: 243713 - DNA, 15 bp, Homo sapiens
taatctgtcctctgt

SEQ ID NO: 243714 - DNA, 15 bp, Homo sapiens
ctaatctgtcctctg

SEQ ID NO: 243715 - DNA, 15 bp, Homo sapiens
actaatctgtcctct

SEQ ID NO: 243716 - DNA, 15 bp, Homo sapiens
cactaatctgtcctc

SEQ ID NO: 243717 - DNA, 15 bp, Homo sapiens
ccactaatctgtcct

SEQ ID NO: 243718 - DNA, 15 bp, Homo sapiens
accactaatctgtcc

SEQ ID NO: 243719 - DNA, 15 bp, Homo sapiens
aaccactaatctgtc

SEQ ID NO: 243720 - DNA, 15 bp, Homo sapiens
taaccactaatctgt

SEQ ID NO: 243721 - DNA, 15 bp, Homo sapiens
ataaccactaatctg

SEQ ID NO: 243722 - DNA, 15 bp, Homo sapiens
aataaccactaatct

SEQ ID NO: 243723 - DNA, 15 bp, Homo sapiens
taataaccactaatc

SEQ ID NO: 243724 - DNA, 15 bp, Homo sapiens
ctaataaccactaat

SEQ ID NO: 243725 - DNA, 15 bp, Homo sapiens
actaataaccactaa

SEQ ID NO: 243726 - DNA, 15 bp, Homo sapiens
cactaataaccacta

SEQ ID NO: 243727 - DNA, 15 bp, Homo sapiens
ccactaataaccact

SEQ ID NO: 243728 - DNA, 15 bp, Homo sapiens
cccactaataaccac

SEQ ID NO: 243729 - DNA, 15 bp, Homo sapiens
acccactaataacca

SEQ ID NO: 243730 - DNA, 15 bp, Homo sapiens
tacccactaataacc

SEQ ID NO: 243731 - DNA, 15 bp, Homo sapiens
ctacccactaataac

SEQ ID NO: 243732 - DNA, 15 bp, Homo sapiens
cctacccactaataa

SEQ ID NO: 243733 - DNA, 15 bp, Homo sapiens
ccctacccactaata

SEQ ID NO: 243734 - DNA, 15 bp, Homo sapiens
cccctacccactaat

SEQ ID NO: 243735 - DNA, 15 bp, Homo sapiens
acccctacccactaa

SEQ ID NO: 243736 - DNA, 15 bp, Homo sapiens
cacccctacccacta

SEQ ID NO: 243737 - DNA, 15 bp, Homo sapiens
tcacccctacccact

SEQ ID NO: 243738 - DNA, 15 bp, Homo sapiens
atcacccctacccac

SEQ ID NO: 243739 - DNA, 15 bp, Homo sapiens
tatcacccctaccca

SEQ ID NO: 243740 - DNA, 15 bp, Homo sapiens
ctatcacccctaccc

SEQ ID NO: 243741 - DNA, 15 bp, Homo sapiens
cctatcacccctacc

SEQ ID NO: 243742 - DNA, 15 bp, Homo sapiens
acctatcacccctac

SEQ ID NO: 243743 - DNA, 15 bp, Homo sapiens
cacctatcaccccta

SEQ ID NO: 243744 - DNA, 15 bp, Homo sapiens
acacctatcacccct

SEQ ID NO: 243745 - DNA, 15 bp, Homo sapiens
cacacctatcacccc

SEQ ID NO: 243746 - DNA, 15 bp, Homo sapiens
tcacacctatcaccc

SEQ ID NO: 243747 - DNA, 15 bp, Homo sapiens
atcacacctatcacc

SEQ ID NO: 243748 - DNA, 15 bp, Homo sapiens
gatcacacctatcac

SEQ ID NO: 243749 - DNA, 15 bp, Homo sapiens
tgatcacacctatca

SEQ ID NO: 243750 - DNA, 15 bp, Homo sapiens
atgatcacacctatc

SEQ ID NO: 243751 - DNA, 15 bp, Homo sapiens
tatgatcacacctat

SEQ ID NO: 243752 - DNA, 15 bp, Homo sapiens
ttatgatcacaccta

SEQ ID NO: 243753 - DNA, 15 bp, Homo sapiens
tttatgatcacacct

SEQ ID NO: 243754 - DNA, 15 bp, Homo sapiens
ctttatgatcacacc

SEQ ID NO: 243755 - DNA, 15 bp, Homo sapiens
cctttatgatcacac

SEQ ID NO: 243756 - DNA, 15 bp, Homo sapiens
tcctttatgatcaca

SEQ ID NO: 243757 - DNA, 15 bp, Homo sapiens
atcctttatgatcac

SEQ ID NO: 243758 - DNA, 15 bp, Homo sapiens
tatcctttatgatca

SEQ ID NO: 243759 - DNA, 15 bp, Homo sapiens
ttatcctttatgatc

SEQ ID NO: 243760 - DNA, 15 bp, Homo sapiens
attatcctttatgat

SEQ ID NO: 243761 - DNA, 15 bp, Homo sapiens
cattatcctttatga

SEQ ID NO: 243762 - DNA, 15 bp, Homo sapiens
gcattatcctttatg

SEQ ID NO: 243763 - DNA, 15 bp, Homo sapiens
tgcattatcctttat

SEQ ID NO: 243764 - DNA, 15 bp, Homo sapiens
ttgcattatccttta

SEQ ID NO: 243765 - DNA, 15 bp, Homo sapiens
cttgcattatccttt

SEQ ID NO: 243766 - DNA, 15 bp, Homo sapiens
tcttgcattatcctt

SEQ ID NO: 243767 - DNA, 15 bp, Homo sapiens
atcttgcattatcct

SEQ ID NO: 243768 - DNA, 15 bp, Homo sapiens
tatcttgcattatcc

SEQ ID NO: 243769 - DNA, 15 bp, Homo sapiens
ctatcttgcattatc

SEQ ID NO: 243770 - DNA, 15 bp, Homo sapiens
actatcttgcattat

SEQ ID NO: 243771 - DNA, 15 bp, Homo sapiens
aactatcttgcatta

SEQ ID NO: 243772 - DNA, 15 bp, Homo sapiens
aaactatcttgcatt

SEQ ID NO: 243773 - DNA, 15 bp, Homo sapiens
aaaactatcttgcat

SEQ ID NO: 243774 - DNA, 15 bp, Homo sapiens
aaaaactatcttgca

SEQ ID NO: 243775 - DNA, 15 bp, Homo sapiens
caaaaactatcttgc

SEQ ID NO: 243776 - DNA, 15 bp, Homo sapiens
ccaaaaactatcttg

SEQ ID NO: 243777 - DNA, 15 bp, Homo sapiens
cccaaaaactatctt

SEQ ID NO: 243778 - DNA, 15 bp, Homo sapiens
ccccaaaaactatct

SEQ ID NO: 243779 - DNA, 15 bp, Homo sapiens
gccccaaaaactatc

SEQ ID NO: 243780 - DNA, 15 bp, Homo sapiens
tgccccaaaaactat

SEQ ID NO: 243781 - DNA, 15 bp, Homo sapiens
ctgccccaaaaacta

SEQ ID NO: 243782 - DNA, 15 bp, Homo sapiens
tctgccccaaaaact

SEQ ID NO: 243783 - DNA, 15 bp, Homo sapiens
ctctgccccaaaaac

SEQ ID NO: 243784 - DNA, 15 bp, Homo sapiens
actctgccccaaaaa

SEQ ID NO: 243785 - DNA, 15 bp, Homo sapiens
aactctgccccaaaa

SEQ ID NO: 243786 - DNA, 15 bp, Homo sapiens
caactctgccccaaa

SEQ ID NO: 243787 - DNA, 15 bp, Homo sapiens
acaactctgccccaa

SEQ ID NO: 243788 - DNA, 15 bp, Homo sapiens
aacaactctgcccca

SEQ ID NO: 243789 - DNA, 15 bp, Homo sapiens
gaacaactctgcccc

SEQ ID NO: 243790 - DNA, 15 bp, Homo sapiens
agaacaactctgccc

SEQ ID NO: 243791 - DNA, 15 bp, Homo sapiens
cagaacaactctgcc

SEQ ID NO: 243792 - DNA, 15 bp, Homo sapiens
acagaacaactctgc

SEQ ID NO: 243793 - DNA, 15 bp, Homo sapiens
tacagaacaactctg

SEQ ID NO: 243794 - DNA, 15 bp, Homo sapiens
atacagaacaactct

SEQ ID NO: 243795 - DNA, 15 bp, Homo sapiens
gatacagaacaactc

SEQ ID NO: 243796 - DNA, 15 bp, Homo sapiens
agatacagaacaact

SEQ ID NO: 243797 - DNA, 15 bp, Homo sapiens
aagatacagaacaac

SEQ ID NO: 243798 - DNA, 15 bp, Homo sapiens
caagatacagaacaa

SEQ ID NO: 243799 - DNA, 15 bp, Homo sapiens
tcaagatacagaaca

SEQ ID NO: 243800 - DNA, 15 bp, Homo sapiens
atcaagatacagaac

SEQ ID NO: 243801 - DNA, 15 bp, Homo sapiens
aatcaagatacagaa

SEQ ID NO: 243802 - DNA, 15 bp, Homo sapiens
taatcaagatacaga

SEQ ID NO: 243803 - DNA, 15 bp, Homo sapiens
ataatcaagatacag

SEQ ID NO: 243804 - DNA, 15 bp, Homo sapiens
cataatcaagataca

SEQ ID NO: 243805 - DNA, 15 bp, Homo sapiens
ccataatcaagatac

SEQ ID NO: 243806 - DNA, 15 bp, Homo sapiens
accataatcaagata

SEQ ID NO: 243807 - DNA, 15 bp, Homo sapiens
caccataatcaagat

SEQ ID NO: 243808 - DNA, 15 bp, Homo sapiens
ccaccataatcaaga

SEQ ID NO: 243809 - DNA, 15 bp, Homo sapiens
accaccataatcaag

SEQ ID NO: 243810 - DNA, 15 bp, Homo sapiens
caccaccataatcaa

SEQ ID NO: 243811 - DNA, 15 bp, Homo sapiens
ccaccaccataatca

SEQ ID NO: 243812 - DNA, 15 bp, Homo sapiens
gccaccaccataatc

SEQ ID NO: 243813 - DNA, 15 bp, Homo sapiens
agccaccaccataat

SEQ ID NO: 243814 - DNA, 15 bp, Homo sapiens
tagccaccaccataa

SEQ ID NO: 243815 - DNA, 15 bp, Homo sapiens
atagccaccaccata

SEQ ID NO: 243816 - DNA, 15 bp, Homo sapiens
tatagccaccaccat

SEQ ID NO: 243817 - DNA, 15 bp, Homo sapiens
gtatagccaccacca

SEQ ID NO: 243818 - DNA, 15 bp, Homo sapiens
tgtatagccaccacc

SEQ ID NO: 243819 - DNA, 15 bp, Homo sapiens
ttgtatagccaccac

SEQ ID NO: 243820 - DNA, 15 bp, Homo sapiens
tttgtatagccacca

SEQ ID NO: 243821 - DNA, 15 bp, Homo sapiens
atttgtatagccacc

SEQ ID NO: 243822 - DNA, 15 bp, Homo sapiens
aatttgtatagccac

SEQ ID NO: 243823 - DNA, 15 bp, Homo sapiens
caatttgtatagcca

SEQ ID NO: 243824 - DNA, 15 bp, Homo sapiens
tcaatttgtatagcc

SEQ ID NO: 243825 - DNA, 15 bp, Homo sapiens
gtcaatttgtatagc

SEQ ID NO: 243826 - DNA, 15 bp, Homo sapiens
tgtcaatttgtatag

SEQ ID NO: 243827 - DNA, 15 bp, Homo sapiens
gtgtcaatttgtata

SEQ ID NO: 243828 - DNA, 15 bp, Homo sapiens
tgtgtcaatttgtat

SEQ ID NO: 243829 - DNA, 15 bp, Homo sapiens
atgtgtcaatttgta

SEQ ID NO: 243830 - DNA, 15 bp, Homo sapiens
tatgtgtcaatttgt

SEQ ID NO: 243831 - DNA, 15 bp, Homo sapiens
atatgtgtcaatttg

SEQ ID NO: 243832 - DNA, 15 bp, Homo sapiens
tatatgtgtcaattt

SEQ ID NO: 243833 - DNA, 15 bp, Homo sapiens
gtatatgtgtcaatt

SEQ ID NO: 243834 - DNA, 15 bp, Homo sapiens
agtatatgtgtcaat

SEQ ID NO: 243835 - DNA, 15 bp, Homo sapiens
tagtatatgtgtcaa

SEQ ID NO: 243836 - DNA, 15 bp, Homo sapiens
ttagtatatgtgtca

SEQ ID NO: 243837 - DNA, 15 bp, Homo sapiens
gttagtatatgtgtc

SEQ ID NO: 243838 - DNA, 15 bp, Homo sapiens
tgttagtatatgtgt

SEQ ID NO: 243839 - DNA, 15 bp, Homo sapiens
atgttagtatatgtg

SEQ ID NO: 243840 - DNA, 15 bp, Homo sapiens
aatgttagtatatgt

SEQ ID NO: 243841 - DNA, 15 bp, Homo sapiens
gaatgttagtatatg

SEQ ID NO: 243842 - DNA, 15 bp, Homo sapiens
cgaatgttagtatat

SEQ ID NO: 243843 - DNA, 15 bp, Homo sapiens
acgaatgttagtata

SEQ ID NO: 243844 - DNA, 15 bp, Homo sapiens
tacgaatgttagtat

SEQ ID NO: 243845 - DNA, 15 bp, Homo sapiens
ctacgaatgttagta

SEQ ID NO: 243846 - DNA, 15 bp, Homo sapiens
tctacgaatgttagt

SEQ ID NO: 243847 - DNA, 15 bp, Homo sapiens
ttctacgaatgttag

SEQ ID NO: 243848 - DNA, 15 bp, Homo sapiens
gttctacgaatgtta

SEQ ID NO: 243849 - DNA, 15 bp, Homo sapiens
agttctacgaatgtt

SEQ ID NO: 243850 - DNA, 15 bp, Homo sapiens
aagttctacgaatgt

SEQ ID NO: 243851 - DNA, 15 bp, Homo sapiens
aaagttctacgaatg

SEQ ID NO: 243852 - DNA, 15 bp, Homo sapiens
taaagttctacgaat

SEQ ID NO: 243853 - DNA, 15 bp, Homo sapiens
gtaaagttctacgaa

SEQ ID NO: 243854 - DNA, 15 bp, Homo sapiens
tgtaaagttctacga

SEQ ID NO: 243855 - DNA, 15 bp, Homo sapiens
gtgtaaagttctacg

SEQ ID NO: 243856 - DNA, 15 bp, Homo sapiens
ggtgtaaagttctac

SEQ ID NO: 243857 - DNA, 15 bp, Homo sapiens
tggtgtaaagttcta

SEQ ID NO: 243858 - DNA, 15 bp, Homo sapiens
ttggtgtaaagttct

SEQ ID NO: 243859 - DNA, 15 bp, Homo sapiens
tttggtgtaaagttc

SEQ ID NO: 243860 - DNA, 15 bp, Homo sapiens
ttttggtgtaaagtt

SEQ ID NO: 243861 - DNA, 15 bp, Homo sapiens
tttttggtgtaaagt

SEQ ID NO: 243862 - DNA, 15 bp, Homo sapiens
atttttggtgtaaag

SEQ ID NO: 243863 - DNA, 15 bp, Homo sapiens
tatttttggtgtaaa

SEQ ID NO: 243864 - DNA, 15 bp, Homo sapiens
ttatttttggtgtaa

SEQ ID NO: 243865 - DNA, 15 bp, Homo sapiens
tttatttttggtgta

SEQ ID NO: 243866 - DNA, 15 bp, Homo sapiens
ttttatttttggtgt

SEQ ID NO: 243867 - DNA, 15 bp, Homo sapiens
tttttatttttggtg

SEQ ID NO: 243868 - DNA, 15 bp, Homo sapiens
ttttttatttttggt

SEQ ID NO: 243869 - DNA, 15 bp, Homo sapiens
attttttatttttgg

SEQ ID NO: 243870 - DNA, 15 bp, Homo sapiens
aattttttatttttg

SEQ ID NO: 243871 - DNA, 15 bp, Homo sapiens
taattttttattttt

SEQ ID NO: 243872 - DNA, 15 bp, Homo sapiens
ttaattttttatttt

SEQ ID NO: 243873 - DNA, 15 bp, Homo sapiens
tttaattttttattt

SEQ ID NO: 243874 - DNA, 15 bp, Homo sapiens
atttaattttttatt

SEQ ID NO: 243875 - DNA, 15 bp, Homo sapiens
aatttaattttttat

SEQ ID NO: 243876 - DNA, 15 bp, Homo sapiens
aaatttaatttttta

SEQ ID NO: 243877 - DNA, 15 bp, Homo sapiens
taaatttaatttttt

SEQ ID NO: 243878 - DNA, 15 bp, Homo sapiens
gtaaatttaattttt

SEQ ID NO: 243879 - DNA, 15 bp, Homo sapiens
agtaaatttaatttt

SEQ ID NO: 243880 - DNA, 15 bp, Homo sapiens
cagtaaatttaattt

SEQ ID NO: 243881 - DNA, 15 bp, Homo sapiens
acagtaaatttaatt

SEQ ID NO: 243882 - DNA, 15 bp, Homo sapiens
tacagtaaatttaat

SEQ ID NO: 243883 - DNA, 15 bp, Homo sapiens
atacagtaaatttaa

SEQ ID NO: 243884 - DNA, 15 bp, Homo sapiens
tatacagtaaattta

SEQ ID NO: 243885 - DNA, 15 bp, Homo sapiens
ctatacagtaaattt

SEQ ID NO: 243886 - DNA, 15 bp, Homo sapiens
actatacagtaaatt

SEQ ID NO: 243887 - DNA, 15 bp, Homo sapiens
tactatacagtaaat

SEQ ID NO: 243888 - DNA, 15 bp, Homo sapiens
ttactatacagtaaa

SEQ ID NO: 243889 - DNA, 15 bp, Homo sapiens
attactatacagtaa

SEQ ID NO: 243890 - DNA, 15 bp, Homo sapiens
aattactatacagta

SEQ ID NO: 243891 - DNA, 15 bp, Homo sapiens
aaattactatacagt

SEQ ID NO: 243892 - DNA, 15 bp, Homo sapiens
taaattactatacag

SEQ ID NO: 243893 - DNA, 15 bp, Homo sapiens
ctaaattactataca

SEQ ID NO: 243894 - DNA, 15 bp, Homo sapiens
tctaaattactatac

SEQ ID NO: 243895 - DNA, 15 bp, Homo sapiens
ttctaaattactata

SEQ ID NO: 243896 - DNA, 15 bp, Homo sapiens
tttctaaattactat

SEQ ID NO: 243897 - DNA, 15 bp, Homo sapiens
ttttctaaattacta

SEQ ID NO: 243898 - DNA, 15 bp, Homo sapiens
attttctaaattact

SEQ ID NO: 243899 - DNA, 15 bp, Homo sapiens
cattttctaaattac

SEQ ID NO: 243900 - DNA, 15 bp, Homo sapiens
tcattttctaaatta

SEQ ID NO: 243901 - DNA, 15 bp, Homo sapiens
ttcattttctaaatt

SEQ ID NO: 243902 - DNA, 15 bp, Homo sapiens
tttcattttctaaat

SEQ ID NO: 243903 - DNA, 15 bp, Homo sapiens
gtttcattttctaaa

SEQ ID NO: 243904 - DNA, 15 bp, Homo sapiens
agtttcattttctaa

SEQ ID NO: 243905 - DNA, 15 bp, Homo sapiens
aagtttcattttcta

SEQ ID NO: 243906 - DNA, 15 bp, Homo sapiens
aaagtttcattttct

SEQ ID NO: 243907 - DNA, 15 bp, Homo sapiens
aaaagtttcattttc

SEQ ID NO: 243908 - DNA, 15 bp, Homo sapiens
caaaagtttcatttt

SEQ ID NO: 243909 - DNA, 15 bp, Homo sapiens
tcaaaagtttcattt

SEQ ID NO: 243910 - DNA, 15 bp, Homo sapiens
ttcaaaagtttcatt

SEQ ID NO: 243911 - DNA, 15 bp, Homo sapiens
tttcaaaagtttcat

SEQ ID NO: 243912 - DNA, 15 bp, Homo sapiens
ttttcaaaagtttca

SEQ ID NO: 243913 - DNA, 15 bp, Homo sapiens
cttttcaaaagtttc

SEQ ID NO: 243914 - DNA, 15 bp, Homo sapiens
acttttcaaaagttt

SEQ ID NO: 243915 - DNA, 15 bp, Homo sapiens
cacttttcaaaagtt

SEQ ID NO: 243916 - DNA, 15 bp, Homo sapiens
gcacttttcaaaagt

SEQ ID NO: 243917 - DNA, 15 bp, Homo sapiens
tgcacttttcaaaag

SEQ ID NO: 243918 - DNA, 15 bp, Homo sapiens
ctgcacttttcaaaa

SEQ ID NO: 243919 - DNA, 15 bp, Homo sapiens
tctgcacttttcaaa

SEQ ID NO: 243920 - DNA, 15 bp, Homo sapiens
atctgcacttttcaa

SEQ ID NO: 243921 - DNA, 15 bp, Homo sapiens
aatctgcacttttca

SEQ ID NO: 243922 - DNA, 15 bp, Homo sapiens
gaatctgcacttttc

SEQ ID NO: 243923 - DNA, 15 bp, Homo sapiens
agaatctgcactttt

SEQ ID NO: 243924 - DNA, 15 bp, Homo sapiens
aagaatctgcacttt

SEQ ID NO: 243925 - DNA, 15 bp, Homo sapiens
taagaatctgcactt

SEQ ID NO: 243926 - DNA, 15 bp, Homo sapiens
ataagaatctgcact

SEQ ID NO: 243927 - DNA, 15 bp, Homo sapiens
aataagaatctgcac

SEQ ID NO: 243928 - DNA, 15 bp, Homo sapiens
gaataagaatctgca

SEQ ID NO: 243929 - DNA, 15 bp, Homo sapiens
tgaataagaatctgc

SEQ ID NO: 243930 - DNA, 15 bp, Homo sapiens
ttgaataagaatctg

SEQ ID NO: 243931 - DNA, 15 bp, Homo sapiens
cttgaataagaatct

SEQ ID NO: 243932 - DNA, 15 bp, Homo sapiens
tcttgaataagaatc

SEQ ID NO: 243933 - DNA, 15 bp, Homo sapiens
ctcttgaataagaat

SEQ ID NO: 243934 - DNA, 15 bp, Homo sapiens
cctcttgaataagaa

SEQ ID NO: 243935 - DNA, 15 bp, Homo sapiens
acctcttgaataaga

SEQ ID NO: 243936 - DNA, 15 bp, Homo sapiens
aacctcttgaataag

SEQ ID NO: 243937 - DNA, 15 bp, Homo sapiens
aaacctcttgaataa

SEQ ID NO: 243938 - DNA, 15 bp, Homo sapiens
taaacctcttgaata

SEQ ID NO: 243939 - DNA, 15 bp, Homo sapiens
ctaaacctcttgaat

SEQ ID NO: 243940 - DNA, 15 bp, Homo sapiens
gctaaacctcttgaa

SEQ ID NO: 243941 - DNA, 15 bp, Homo sapiens
tgctaaacctcttga

SEQ ID NO: 243942 - DNA, 15 bp, Homo sapiens
ttgctaaacctcttg

SEQ ID NO: 243943 - DNA, 15 bp, Homo sapiens
attgctaaacctctt

SEQ ID NO: 243944 - DNA, 15 bp, Homo sapiens
cattgctaaacctct

SEQ ID NO: 243945 - DNA, 15 bp, Homo sapiens
ccattgctaaacctc

SEQ ID NO: 243946 - DNA, 15 bp, Homo sapiens
cccattgctaaacct

SEQ ID NO: 243947 - DNA, 15 bp, Homo sapiens
ccccattgctaaacc

SEQ ID NO: 243948 - DNA, 15 bp, Homo sapiens
gccccattgctaaac

SEQ ID NO: 243949 - DNA, 15 bp, Homo sapiens
ggccccattgctaaa

SEQ ID NO: 243950 - DNA, 15 bp, Homo sapiens
aggccccattgctaa

SEQ ID NO: 243951 - DNA, 15 bp, Homo sapiens
caggccccattgcta

SEQ ID NO: 243952 - DNA, 15 bp, Homo sapiens
ccaggccccattgct

SEQ ID NO: 243953 - DNA, 15 bp, Homo sapiens
cccaggccccattgc

SEQ ID NO: 243954 - DNA, 15 bp, Homo sapiens
tcccaggccccattg

SEQ ID NO: 243955 - DNA, 15 bp, Homo sapiens
gtcccaggccccatt

SEQ ID NO: 243956 - DNA, 15 bp, Homo sapiens
agtcccaggccccat

SEQ ID NO: 243957 - DNA, 15 bp, Homo sapiens
gagtcccaggcccca

SEQ ID NO: 243958 - DNA, 15 bp, Homo sapiens
agagtcccaggcccc

SEQ ID NO: 243959 - DNA, 15 bp, Homo sapiens
cagagtcccaggccc

SEQ ID NO: 243960 - DNA, 15 bp, Homo sapiens
gcagagtcccaggcc

SEQ ID NO: 243961 - DNA, 15 bp, Homo sapiens
tgcagagtcccaggc

SEQ ID NO: 243962 - DNA, 15 bp, Homo sapiens
atgcagagtcccagg

SEQ ID NO: 243963 - DNA, 15 bp, Homo sapiens
aatgcagagtcccag

SEQ ID NO: 243964 - DNA, 15 bp, Homo sapiens
aaatgcagagtccca

SEQ ID NO: 243965 - DNA, 15 bp, Homo sapiens
gaaatgcagagtccc

SEQ ID NO: 243966 - DNA, 15 bp, Homo sapiens
agaaatgcagagtcc

SEQ ID NO: 243967 - DNA, 15 bp, Homo sapiens
aagaaatgcagagtc

SEQ ID NO: 243968 - DNA, 15 bp, Homo sapiens
taagaaatgcagagt

SEQ ID NO: 243969 - DNA, 15 bp, Homo sapiens
ataagaaatgcagag

SEQ ID NO: 243970 - DNA, 15 bp, Homo sapiens
tataagaaatgcaga

SEQ ID NO: 243971 - DNA, 15 bp, Homo sapiens
ttataagaaatgcag

SEQ ID NO: 243972 - DNA, 15 bp, Homo sapiens
cttataagaaatgca

SEQ ID NO: 243973 - DNA, 15 bp, Homo sapiens
gcttataagaaatgc

SEQ ID NO: 243974 - DNA, 15 bp, Homo sapiens
agcttataagaaatg

SEQ ID NO: 243975 - DNA, 15 bp, Homo sapiens
gagcttataagaaat

SEQ ID NO: 243976 - DNA, 15 bp, Homo sapiens
ggagcttataagaaa

SEQ ID NO: 243977 - DNA, 15 bp, Homo sapiens
aggagcttataagaa

SEQ ID NO: 243978 - DNA, 15 bp, Homo sapiens
caggagcttataaga

SEQ ID NO: 243979 - DNA, 15 bp, Homo sapiens
tcaggagcttataag

SEQ ID NO: 243980 - DNA, 15 bp, Homo sapiens
ctcaggagcttataa

SEQ ID NO: 243981 - DNA, 15 bp, Homo sapiens
actcaggagcttata

SEQ ID NO: 243982 - DNA, 15 bp, Homo sapiens
cactcaggagcttat

SEQ ID NO: 243983 - DNA, 15 bp, Homo sapiens
tcactcaggagctta

SEQ ID NO: 243984 - DNA, 15 bp, Homo sapiens
atcactcaggagctt

SEQ ID NO: 243985 - DNA, 15 bp, Homo sapiens
catcactcaggagct

SEQ ID NO: 243986 - DNA, 15 bp, Homo sapiens
gcatcactcaggagc

SEQ ID NO: 243987 - DNA, 15 bp, Homo sapiens
agcatcactcaggag

SEQ ID NO: 243988 - DNA, 15 bp, Homo sapiens
cagcatcactcagga

SEQ ID NO: 243989 - DNA, 15 bp, Homo sapiens
ccagcatcactcagg

SEQ ID NO: 243990 - DNA, 15 bp, Homo sapiens
cccagcatcactcag

SEQ ID NO: 243991 - DNA, 15 bp, Homo sapiens
ccccagcatcactca

SEQ ID NO: 243992 - DNA, 15 bp, Homo sapiens
gccccagcatcactc

SEQ ID NO: 243993 - DNA, 15 bp, Homo sapiens
agccccagcatcact

SEQ ID NO: 243994 - DNA, 15 bp, Homo sapiens
gagccccagcatcac

SEQ ID NO: 243995 - DNA, 15 bp, Homo sapiens
agagccccagcatca

SEQ ID NO: 243996 - DNA, 15 bp, Homo sapiens
aagagccccagcatc

SEQ ID NO: 243997 - DNA, 15 bp, Homo sapiens
caagagccccagcat

SEQ ID NO: 243998 - DNA, 15 bp, Homo sapiens
ccaagagccccagca

SEQ ID NO: 243999 - DNA, 15 bp, Homo sapiens
cccaagagccccagc

SEQ ID NO: 244000 - DNA, 15 bp, Homo sapiens
tcccaagagccccag

SEQ ID NO: 244001 - DNA, 15 bp, Homo sapiens
ttcccaagagcccca

SEQ ID NO: 244002 - DNA, 15 bp, Homo sapiens
gttcccaagagcccc

SEQ ID NO: 244003 - DNA, 15 bp, Homo sapiens
tgttcccaagagccc

SEQ ID NO: 244004 - DNA, 15 bp, Homo sapiens
gtgttcccaagagcc

SEQ ID NO: 244005 - DNA, 15 bp, Homo sapiens
tgtgttcccaagagc

SEQ ID NO: 244006 - DNA, 15 bp, Homo sapiens
ttgtgttcccaagag

SEQ ID NO: 244007 - DNA, 15 bp, Homo sapiens
cttgtgttcccaaga

SEQ ID NO: 244008 - DNA, 15 bp, Homo sapiens
acttgtgttcccaag

SEQ ID NO: 244009 - DNA, 15 bp, Homo sapiens
cacttgtgttcccaa

SEQ ID NO: 244010 - DNA, 15 bp, Homo sapiens
ccacttgtgttccca

SEQ ID NO: 244011 - DNA, 15 bp, Homo sapiens
tccacttgtgttccc

SEQ ID NO: 244012 - DNA, 15 bp, Homo sapiens
ctccacttgtgttcc

SEQ ID NO: 244013 - DNA, 15 bp, Homo sapiens
cctccacttgtgttc

SEQ ID NO: 244014 - DNA, 15 bp, Homo sapiens
ccctccacttgtgtt

SEQ ID NO: 244015 - DNA, 15 bp, Homo sapiens
cccctccacttgtgt

SEQ ID NO: 244016 - DNA, 15 bp, Homo sapiens
ccccctccacttgtg

SEQ ID NO: 244017 - DNA, 15 bp, Homo sapiens
accccctccacttgt

SEQ ID NO: 244018 - DNA, 15 bp, Homo sapiens
aaccccctccacttg

SEQ ID NO: 244019 - DNA, 15 bp, Homo sapiens
taaccccctccactt

SEQ ID NO: 244020 - DNA, 15 bp, Homo sapiens
ctaaccccctccact

SEQ ID NO: 244021 - DNA, 15 bp, Homo sapiens
cctaaccccctccac

SEQ ID NO: 244022 - DNA, 15 bp, Homo sapiens
gcctaaccccctcca

SEQ ID NO: 244023 - DNA, 15 bp, Homo sapiens
agcctaaccccctcc

SEQ ID NO: 244024 - DNA, 15 bp, Homo sapiens
gagcctaaccccctc

SEQ ID NO: 244025 - DNA, 15 bp, Homo sapiens
agagcctaaccccct

SEQ ID NO: 244026 - DNA, 15 bp, Homo sapiens
tagagcctaaccccc

SEQ ID NO: 244027 - DNA, 15 bp, Homo sapiens
gtagagcctaacccc

SEQ ID NO: 244028 - DNA, 15 bp, Homo sapiens
tgtagagcctaaccc

SEQ ID NO: 244029 - DNA, 15 bp, Homo sapiens
ctgtagagcctaacc

SEQ ID NO: 244030 - DNA, 15 bp, Homo sapiens
tctgtagagcctaac

SEQ ID NO: 244031 - DNA, 15 bp, Homo sapiens
ctctgtagagcctaa

SEQ ID NO: 244032 - DNA, 15 bp, Homo sapiens
cctctgtagagccta

SEQ ID NO: 244033 - DNA, 15 bp, Homo sapiens
tcctctgtagagcct

SEQ ID NO: 244034 - DNA, 15 bp, Homo sapiens
ttcctctgtagagcc

SEQ ID NO: 244035 - DNA, 15 bp, Homo sapiens
tttcctctgtagagc

SEQ ID NO: 244036 - DNA, 15 bp, Homo sapiens
gtttcctctgtagag

SEQ ID NO: 244037 - DNA, 15 bp, Homo sapiens
tgtttcctctgtaga

SEQ ID NO: 244038 - DNA, 15 bp, Homo sapiens
atgtttcctctgtag

SEQ ID NO: 244039 - DNA, 15 bp, Homo sapiens
gatgtttcctctgta

SEQ ID NO: 244040 - DNA, 15 bp, Homo sapiens
cgatgtttcctctgt

SEQ ID NO: 244041 - DNA, 15 bp, Homo sapiens
acgatgtttcctctg

SEQ ID NO: 244042 - DNA, 15 bp, Homo sapiens
tacgatgtttcctct

SEQ ID NO: 244043 - DNA, 15 bp, Homo sapiens
ttacgatgtttcctc

SEQ ID NO: 244044 - DNA, 15 bp, Homo sapiens
gttacgatgtttcct

SEQ ID NO: 244045 - DNA, 15 bp, Homo sapiens
tgttacgatgtttcc

SEQ ID NO: 244046 - DNA, 15 bp, Homo sapiens
atgttacgatgtttc

SEQ ID NO: 244047 - DNA, 15 bp, Homo sapiens
catgttacgatgttt

SEQ ID NO: 244048 - DNA, 15 bp, Homo sapiens
gcatgttacgatgtt

SEQ ID NO: 244049 - DNA, 15 bp, Homo sapiens
tgcatgttacgatgt

SEQ ID NO: 244050 - DNA, 15 bp, Homo sapiens
ctgcatgttacgatg

SEQ ID NO: 244051 - DNA, 15 bp, Homo sapiens
tctgcatgttacgat

SEQ ID NO: 244052 - DNA, 15 bp, Homo sapiens
atctgcatgttacga

SEQ ID NO: 244053 - DNA, 15 bp, Homo sapiens
aatctgcatgttacg

SEQ ID NO: 244054 - DNA, 15 bp, Homo sapiens
gaatctgcatgttac

SEQ ID NO: 244055 - DNA, 15 bp, Homo sapiens
tgaatctgcatgtta

SEQ ID NO: 244056 - DNA, 15 bp, Homo sapiens
ctgaatctgcatgtt

SEQ ID NO: 244057 - DNA, 15 bp, Homo sapiens
gctgaatctgcatgt

SEQ ID NO: 244058 - DNA, 15 bp, Homo sapiens
agctgaatctgcatg

SEQ ID NO: 244059 - DNA, 15 bp, Homo sapiens
gagctgaatctgcat

SEQ ID NO: 244060 - DNA, 15 bp, Homo sapiens
tgagctgaatctgca

SEQ ID NO: 244061 - DNA, 15 bp, Homo sapiens
atgagctgaatctgc

SEQ ID NO: 244062 - DNA, 15 bp, Homo sapiens
aatgagctgaatctg

SEQ ID NO: 244063 - DNA, 15 bp, Homo sapiens
aaatgagctgaatct

SEQ ID NO: 244064 - DNA, 15 bp, Homo sapiens
gaaatgagctgaatc

SEQ ID NO: 244065 - DNA, 15 bp, Homo sapiens
tgaaatgagctgaat

SEQ ID NO: 244066 - DNA, 15 bp, Homo sapiens
atgaaatgagctgaa

SEQ ID NO: 244067 - DNA, 15 bp, Homo sapiens
aatgaaatgagctga

SEQ ID NO: 244068 - DNA, 15 bp, Homo sapiens
gaatgaaatgagctg

SEQ ID NO: 244069 - DNA, 15 bp, Homo sapiens
ggaatgaaatgagct

SEQ ID NO: 244070 - DNA, 15 bp, Homo sapiens
aggaatgaaatgagc

SEQ ID NO: 244071 - DNA, 15 bp, Homo sapiens
taggaatgaaatgag

SEQ ID NO: 244072 - DNA, 15 bp, Homo sapiens
gtaggaatgaaatga

SEQ ID NO: 244073 - DNA, 15 bp, Homo sapiens
cgtaggaatgaaatg

SEQ ID NO: 244074 - DNA, 15 bp, Homo sapiens
gcgtaggaatgaaat

SEQ ID NO: 244075 - DNA, 15 bp, Homo sapiens
agcgtaggaatgaaa

SEQ ID NO: 244076 - DNA, 15 bp, Homo sapiens
cagcgtaggaatgaa

SEQ ID NO: 244077 - DNA, 15 bp, Homo sapiens
tcagcgtaggaatga

SEQ ID NO: 244078 - DNA, 15 bp, Homo sapiens
ctcagcgtaggaatg

SEQ ID NO: 244079 - DNA, 15 bp, Homo sapiens
tctcagcgtaggaat

SEQ ID NO: 244080 - DNA, 15 bp, Homo sapiens
ctctcagcgtaggaa

SEQ ID NO: 244081 - DNA, 15 bp, Homo sapiens
tctctcagcgtagga

SEQ ID NO: 244082 - DNA, 15 bp, Homo sapiens
gtctctcagcgtagg

SEQ ID NO: 244083 - DNA, 15 bp, Homo sapiens
ggtctctcagcgtag

SEQ ID NO: 244084 - DNA, 15 bp, Homo sapiens
aggtctctcagcgta

SEQ ID NO: 244085 - DNA, 15 bp, Homo sapiens
aaggtctctcagcgt

SEQ ID NO: 244086 - DNA, 15 bp, Homo sapiens
aaaggtctctcagcg

SEQ ID NO: 244087 - DNA, 15 bp, Homo sapiens
taaaggtctctcagc

SEQ ID NO: 244088 - DNA, 15 bp, Homo sapiens
ttaaaggtctctcag

SEQ ID NO: 244089 - DNA, 15 bp, Homo sapiens
gttaaaggtctctca

SEQ ID NO: 244090 - DNA, 15 bp, Homo sapiens
cgttaaaggtctctc

SEQ ID NO: 244091 - DNA, 15 bp, Homo sapiens
ccgttaaaggtctct

SEQ ID NO: 244092 - DNA, 15 bp, Homo sapiens
tccgttaaaggtctc

SEQ ID NO: 244093 - DNA, 15 bp, Homo sapiens
atccgttaaaggtct

SEQ ID NO: 244094 - DNA, 15 bp, Homo sapiens
gatccgttaaaggtc

SEQ ID NO: 244095 - DNA, 15 bp, Homo sapiens
ggatccgttaaaggt

SEQ ID NO: 244096 - DNA, 15 bp, Homo sapiens
tggatccgttaaagg

SEQ ID NO: 244097 - DNA, 15 bp, Homo sapiens
atggatccgttaaag

SEQ ID NO: 244098 - DNA, 15 bp, Homo sapiens
tatggatccgttaaa

SEQ ID NO: 244099 - DNA, 15 bp, Homo sapiens
ctatggatccgttaa

SEQ ID NO: 244100 - DNA, 15 bp, Homo sapiens
actatggatccgtta

SEQ ID NO: 244101 - DNA, 15 bp, Homo sapiens
aactatggatccgtt

SEQ ID NO: 244102 - DNA, 15 bp, Homo sapiens
gaactatggatccgt

SEQ ID NO: 244103 - DNA, 15 bp, Homo sapiens
agaactatggatccg

SEQ ID NO: 244104 - DNA, 15 bp, Homo sapiens
aagaactatggatcc

SEQ ID NO: 244105 - DNA, 15 bp, Homo sapiens
gaagaactatggatc

SEQ ID NO: 244106 - DNA, 15 bp, Homo sapiens
ggaagaactatggat

SEQ ID NO: 244107 - DNA, 15 bp, Homo sapiens
tggaagaactatgga

SEQ ID NO: 244108 - DNA, 15 bp, Homo sapiens
ttggaagaactatgg

SEQ ID NO: 244109 - DNA, 15 bp, Homo sapiens
cttggaagaactatg

SEQ ID NO: 244110 - DNA, 15 bp, Homo sapiens
tcttggaagaactat

SEQ ID NO: 244111 - DNA, 15 bp, Homo sapiens
atcttggaagaacta

SEQ ID NO: 244112 - DNA, 15 bp, Homo sapiens
tatcttggaagaact

SEQ ID NO: 244113 - DNA, 15 bp, Homo sapiens
ttatcttggaagaac

SEQ ID NO: 244114 - DNA, 15 bp, Homo sapiens
tttatcttggaagaa

SEQ ID NO: 244115 - DNA, 15 bp, Homo sapiens
ttttatcttggaaga

SEQ ID NO: 244116 - DNA, 15 bp, Homo sapiens
attttatcttggaag

SEQ ID NO: 244117 - DNA, 15 bp, Homo sapiens
aattttatcttggaa

SEQ ID NO: 244118 - DNA, 15 bp, Homo sapiens
gaattttatcttgga

SEQ ID NO: 244119 - DNA, 15 bp, Homo sapiens
tgaattttatcttgg

SEQ ID NO: 244120 - DNA, 15 bp, Homo sapiens
ttgaattttatcttg

SEQ ID NO: 244121 - DNA, 15 bp, Homo sapiens
tttgaattttatctt

SEQ ID NO: 244122 - DNA, 15 bp, Homo sapiens
atttgaattttatct

SEQ ID NO: 244123 - DNA, 15 bp, Homo sapiens
tatttgaattttatc

SEQ ID NO: 244124 - DNA, 15 bp, Homo sapiens
atatttgaattttat

SEQ ID NO: 244125 - DNA, 15 bp, Homo sapiens
aatatttgaatttta

SEQ ID NO: 244126 - DNA, 15 bp, Homo sapiens
aaatatttgaatttt

SEQ ID NO: 244127 - DNA, 15 bp, Homo sapiens
aaaatatttgaattt

SEQ ID NO: 244128 - DNA, 15 bp, Homo sapiens
taaaatatttgaatt

SEQ ID NO: 244129 - DNA, 15 bp, Homo sapiens
ataaaatatttgaat

SEQ ID NO: 244130 - DNA, 15 bp, Homo sapiens
gataaaatatttgaa

SEQ ID NO: 244131 - DNA, 15 bp, Homo sapiens
tgataaaatatttga

SEQ ID NO: 244132 - DNA, 15 bp, Homo sapiens
gtgataaaatatttg

SEQ ID NO: 244133 - DNA, 15 bp, Homo sapiens
agtgataaaatattt

SEQ ID NO: 244134 - DNA, 15 bp, Homo sapiens
aagtgataaaatatt

SEQ ID NO: 244135 - DNA, 15 bp, Homo sapiens
gaagtgataaaatat

SEQ ID NO: 244136 - DNA, 15 bp, Homo sapiens
tgaagtgataaaata

SEQ ID NO: 244137 - DNA, 15 bp, Homo sapiens
ttgaagtgataaaat

SEQ ID NO: 244138 - DNA, 15 bp, Homo sapiens
tttgaagtgataaaa

SEQ ID NO: 244139 - DNA, 15 bp, Homo sapiens
ttttgaagtgataaa

SEQ ID NO: 244140 - DNA, 15 bp, Homo sapiens
tttttgaagtgataa

SEQ ID NO: 244141 - DNA, 15 bp, Homo sapiens
ttttttgaagtgata

SEQ ID NO: 244142 - DNA, 15 bp, Homo sapiens
gttttttgaagtgat

SEQ ID NO: 244143 - DNA, 15 bp, Homo sapiens
agttttttgaagtga

SEQ ID NO: 244144 - DNA, 15 bp, Homo sapiens
aagttttttgaagtg

SEQ ID NO: 244145 - DNA, 15 bp, Homo sapiens
taagttttttgaagt

SEQ ID NO: 244146 - DNA, 15 bp, Homo sapiens
ttaagttttttgaag

SEQ ID NO: 244147 - DNA, 15 bp, Homo sapiens
tttaagttttttgaa

SEQ ID NO: 244148 - DNA, 15 bp, Homo sapiens
ctttaagttttttga

SEQ ID NO: 244149 - DNA, 15 bp, Homo sapiens
actttaagttttttg

SEQ ID NO: 244150 - DNA, 15 bp, Homo sapiens
tactttaagtttttt

SEQ ID NO: 244151 - DNA, 15 bp, Homo sapiens
ttactttaagttttt

SEQ ID NO: 244152 - DNA, 15 bp, Homo sapiens
cttactttaagtttt

SEQ ID NO: 244153 - DNA, 15 bp, Homo sapiens
gcttactttaagttt

SEQ ID NO: 244154 - DNA, 15 bp, Homo sapiens
agcttactttaagtt

SEQ ID NO: 244155 - DNA, 15 bp, Homo sapiens
gagcttactttaagt

SEQ ID NO: 244156 - DNA, 15 bp, Homo sapiens
agagcttactttaag

SEQ ID NO: 244157 - DNA, 15 bp, Homo sapiens
aagagcttactttaa

SEQ ID NO: 244158 - DNA, 15 bp, Homo sapiens
aaagagcttacttta

SEQ ID NO: 244159 - DNA, 15 bp, Homo sapiens
gaaagagcttacttt

SEQ ID NO: 244160 - DNA, 15 bp, Homo sapiens
ggaaagagcttactt

SEQ ID NO: 244161 - DNA, 15 bp, Homo sapiens
gggaaagagcttact

SEQ ID NO: 244162 - DNA, 15 bp, Homo sapiens
ggggaaagagcttac

SEQ ID NO: 244163 - DNA, 15 bp, Homo sapiens
aggggaaagagctta

SEQ ID NO: 244164 - DNA, 15 bp, Homo sapiens
caggggaaagagctt

SEQ ID NO: 244165 - DNA, 15 bp, Homo sapiens
tcaggggaaagagct

SEQ ID NO: 244166 - DNA, 15 bp, Homo sapiens
ttcaggggaaagagc

SEQ ID NO: 244167 - DNA, 15 bp, Homo sapiens
tttcaggggaaagag

SEQ ID NO: 244168 - DNA, 15 bp, Homo sapiens
atttcaggggaaaga

SEQ ID NO: 244169 - DNA, 15 bp, Homo sapiens
gatttcaggggaaag

SEQ ID NO: 244170 - DNA, 15 bp, Homo sapiens
agatttcaggggaaa

SEQ ID NO: 244171 - DNA, 15 bp, Homo sapiens
gagatttcaggggaa

SEQ ID NO: 244172 - DNA, 15 bp, Homo sapiens
ggagatttcagggga

SEQ ID NO: 244173 - DNA, 15 bp, Homo sapiens
gggagatttcagggg

SEQ ID NO: 244174 - DNA, 15 bp, Homo sapiens
tgggagatttcaggg

SEQ ID NO: 244175 - DNA, 15 bp, Homo sapiens
atgggagatttcagg

SEQ ID NO: 244176 - DNA, 15 bp, Homo sapiens
tatgggagatttcag

SEQ ID NO: 244177 - DNA, 15 bp, Homo sapiens
atatgggagatttca

SEQ ID NO: 244178 - DNA, 15 bp, Homo sapiens
gatatgggagatttc

SEQ ID NO: 244179 - DNA, 15 bp, Homo sapiens
ggatatgggagattt

SEQ ID NO: 244180 - DNA, 15 bp, Homo sapiens
gggatatgggagatt

SEQ ID NO: 244181 - DNA, 15 bp, Homo sapiens
agggatatgggagat

SEQ ID NO: 244182 - DNA, 15 bp, Homo sapiens
gagggatatgggaga

SEQ ID NO: 244183 - DNA, 15 bp, Homo sapiens
tgagggatatgggag

SEQ ID NO: 244184 - DNA, 15 bp, Homo sapiens
ctgagggatatggga

SEQ ID NO: 244185 - DNA, 15 bp, Homo sapiens
tctgagggatatggg

SEQ ID NO: 244186 - DNA, 15 bp, Homo sapiens
atctgagggatatgg

SEQ ID NO: 244187 - DNA, 15 bp, Homo sapiens
gatctgagggatatg

SEQ ID NO: 244188 - DNA, 15 bp, Homo sapiens
tgatctgagggatat

SEQ ID NO: 244189 - DNA, 15 bp, Homo sapiens
atgatctgagggata

SEQ ID NO: 244190 - DNA, 15 bp, Homo sapiens
tatgatctgagggat

SEQ ID NO: 244191 - DNA, 15 bp, Homo sapiens
gtatgatctgaggga

SEQ ID NO: 244192 - DNA, 15 bp, Homo sapiens
ggtatgatctgaggg

SEQ ID NO: 244193 - DNA, 15 bp, Homo sapiens
gggtatgatctgagg

SEQ ID NO: 244194 - DNA, 15 bp, Homo sapiens
agggtatgatctgag

SEQ ID NO: 244195 - DNA, 15 bp, Homo sapiens
tagggtatgatctga

SEQ ID NO: 244196 - DNA, 15 bp, Homo sapiens
gtagggtatgatctg

SEQ ID NO: 244197 - DNA, 15 bp, Homo sapiens
tgtagggtatgatct

SEQ ID NO: 244198 - DNA, 15 bp, Homo sapiens
ctgtagggtatgatc

SEQ ID NO: 244199 - DNA, 15 bp, Homo sapiens
gctgtagggtatgat

SEQ ID NO: 244200 - DNA, 15 bp, Homo sapiens
tgctgtagggtatga

SEQ ID NO: 244201 - DNA, 15 bp, Homo sapiens
ctgctgtagggtatg

SEQ ID NO: 244202 - DNA, 15 bp, Homo sapiens
actgctgtagggtat

SEQ ID NO: 244203 - DNA, 15 bp, Homo sapiens
cactgctgtagggta

SEQ ID NO: 244204 - DNA, 15 bp, Homo sapiens
acactgctgtagggt

SEQ ID NO: 244205 - DNA, 15 bp, Homo sapiens
tacactgctgtaggg

SEQ ID NO: 244206 - DNA, 15 bp, Homo sapiens
atacactgctgtagg

SEQ ID NO: 244207 - DNA, 15 bp, Homo sapiens
tatacactgctgtag

SEQ ID NO: 244208 - DNA, 15 bp, Homo sapiens
atatacactgctgta

SEQ ID NO: 244209 - DNA, 15 bp, Homo sapiens
aatatacactgctgt

SEQ ID NO: 244210 - DNA, 15 bp, Homo sapiens
gaatatacactgctg

SEQ ID NO: 244211 - DNA, 15 bp, Homo sapiens
agaatatacactgct

SEQ ID NO: 244212 - DNA, 15 bp, Homo sapiens
gagaatatacactgc

SEQ ID NO: 244213 - DNA, 15 bp, Homo sapiens
agagaatatacactg

SEQ ID NO: 244214 - DNA, 15 bp, Homo sapiens
cagagaatatacact

SEQ ID NO: 244215 - DNA, 15 bp, Homo sapiens
gcagagaatatacac

SEQ ID NO: 244216 - DNA, 15 bp, Homo sapiens
agcagagaatataca

SEQ ID NO: 244217 - DNA, 15 bp, Homo sapiens
aagcagagaatatac

SEQ ID NO: 244218 - DNA, 15 bp, Homo sapiens
aaagcagagaatata

SEQ ID NO: 244219 - DNA, 15 bp, Homo sapiens
caaagcagagaatat

SEQ ID NO: 244220 - DNA, 15 bp, Homo sapiens
acaaagcagagaata

SEQ ID NO: 244221 - DNA, 15 bp, Homo sapiens
aacaaagcagagaat

SEQ ID NO: 244222 - DNA, 15 bp, Homo sapiens
aaacaaagcagagaa

SEQ ID NO: 244223 - DNA, 15 bp, Homo sapiens
caaacaaagcagaga

SEQ ID NO: 244224 - DNA, 15 bp, Homo sapiens
acaaacaaagcagag

SEQ ID NO: 244225 - DNA, 15 bp, Homo sapiens
cacaaacaaagcaga

SEQ ID NO: 244226 - DNA, 15 bp, Homo sapiens
ccacaaacaaagcag

SEQ ID NO: 244227 - DNA, 15 bp, Homo sapiens
gccacaaacaaagca

SEQ ID NO: 244228 - DNA, 15 bp, Homo sapiens
ggccacaaacaaagc

SEQ ID NO: 244229 - DNA, 15 bp, Homo sapiens
aggccacaaacaaag

SEQ ID NO: 244230 - DNA, 15 bp, Homo sapiens
taggccacaaacaaa

SEQ ID NO: 244231 - DNA, 15 bp, Homo sapiens
ctaggccacaaacaa

SEQ ID NO: 244232 - DNA, 15 bp, Homo sapiens
tctaggccacaaaca

SEQ ID NO: 244233 - DNA, 15 bp, Homo sapiens
ctctaggccacaaac

SEQ ID NO: 244234 - DNA, 15 bp, Homo sapiens
actctaggccacaaa

SEQ ID NO: 244235 - DNA, 15 bp, Homo sapiens
cactctaggccacaa

SEQ ID NO: 244236 - DNA, 15 bp, Homo sapiens
gcactctaggccaca

SEQ ID NO: 244237 - DNA, 15 bp, Homo sapiens
agcactctaggccac

SEQ ID NO: 244238 - DNA, 15 bp, Homo sapiens
gagcactctaggcca

SEQ ID NO: 244239 - DNA, 15 bp, Homo sapiens
agagcactctaggcc

SEQ ID NO: 244240 - DNA, 15 bp, Homo sapiens
gagagcactctaggc

SEQ ID NO: 244241 - DNA, 15 bp, Homo sapiens
agagagcactctagg

SEQ ID NO: 244242 - DNA, 15 bp, Homo sapiens
tagagagcactctag

SEQ ID NO: 244243 - DNA, 15 bp, Homo sapiens
atagagagcactcta

SEQ ID NO: 244244 - DNA, 15 bp, Homo sapiens
gatagagagcactct

SEQ ID NO: 244245 - DNA, 15 bp, Homo sapiens
ggatagagagcactc

SEQ ID NO: 244246 - DNA, 15 bp, Homo sapiens
tggatagagagcact

SEQ ID NO: 244247 - DNA, 15 bp, Homo sapiens
gtggatagagagcac

SEQ ID NO: 244248 - DNA, 15 bp, Homo sapiens
ggtggatagagagca

SEQ ID NO: 244249 - DNA, 15 bp, Homo sapiens
gggtggatagagagc

SEQ ID NO: 244250 - DNA, 15 bp, Homo sapiens
tgggtggatagagag

SEQ ID NO: 244251 - DNA, 15 bp, Homo sapiens
atgggtggatagaga

SEQ ID NO: 244252 - DNA, 15 bp, Homo sapiens
aatgggtggatagag

SEQ ID NO: 244253 - DNA, 15 bp, Homo sapiens
gaatgggtggataga

SEQ ID NO: 244254 - DNA, 15 bp, Homo sapiens
ggaatgggtggatag

SEQ ID NO: 244255 - DNA, 15 bp, Homo sapiens
gggaatgggtggata

SEQ ID NO: 244256 - DNA, 15 bp, Homo sapiens
agggaatgggtggat

SEQ ID NO: 244257 - DNA, 15 bp, Homo sapiens
cagggaatgggtgga

SEQ ID NO: 244258 - DNA, 15 bp, Homo sapiens
ccagggaatgggtgg

SEQ ID NO: 244259 - DNA, 15 bp, Homo sapiens
tccagggaatgggtg

SEQ ID NO: 244260 - DNA, 15 bp, Homo sapiens
ctccagggaatgggt

SEQ ID NO: 244261 - DNA, 15 bp, Homo sapiens
cctccagggaatggg

SEQ ID NO: 244262 - DNA, 15 bp, Homo sapiens
tcctccagggaatgg

SEQ ID NO: 244263 - DNA, 15 bp, Homo sapiens
atcctccagggaatg

SEQ ID NO: 244264 - DNA, 15 bp, Homo sapiens
catcctccagggaat

SEQ ID NO: 244265 - DNA, 15 bp, Homo sapiens
tcatcctccagggaa

SEQ ID NO: 244266 - DNA, 15 bp, Homo sapiens
ctcatcctccaggga

SEQ ID NO: 244267 - DNA, 15 bp, Homo sapiens
actcatcctccaggg

SEQ ID NO: 244268 - DNA, 15 bp, Homo sapiens
cactcatcctccagg

SEQ ID NO: 244269 - DNA, 15 bp, Homo sapiens
tcactcatcctccag

SEQ ID NO: 244270 - DNA, 15 bp, Homo sapiens
gtcactcatcctcca

SEQ ID NO: 244271 - DNA, 15 bp, Homo sapiens
ggtcactcatcctcc

SEQ ID NO: 244272 - DNA, 15 bp, Homo sapiens
gggtcactcatcctc

SEQ ID NO: 244273 - DNA, 15 bp, Homo sapiens
ggggtcactcatcct

SEQ ID NO: 244274 - DNA, 15 bp, Homo sapiens
aggggtcactcatcc

SEQ ID NO: 244275 - DNA, 15 bp, Homo sapiens
aaggggtcactcatc

SEQ ID NO: 244276 - DNA, 15 bp, Homo sapiens
taaggggtcactcat

SEQ ID NO: 244277 - DNA, 15 bp, Homo sapiens
ctaaggggtcactca

SEQ ID NO: 244278 - DNA, 15 bp, Homo sapiens
actaaggggtcactc

SEQ ID NO: 244279 - DNA, 15 bp, Homo sapiens
gactaaggggtcact

SEQ ID NO: 244280 - DNA, 15 bp, Homo sapiens
tgactaaggggtcac

SEQ ID NO: 244281 - DNA, 15 bp, Homo sapiens
gtgactaaggggtca

SEQ ID NO: 244282 - DNA, 15 bp, Homo sapiens
agtgactaaggggtc

SEQ ID NO: 244283 - DNA, 15 bp, Homo sapiens
cagtgactaaggggt

SEQ ID NO: 244284 - DNA, 15 bp, Homo sapiens
ccagtgactaagggg

SEQ ID NO: 244285 - DNA, 15 bp, Homo sapiens
gccagtgactaaggg

SEQ ID NO: 244286 - DNA, 15 bp, Homo sapiens
ggccagtgactaagg

SEQ ID NO: 244287 - DNA, 15 bp, Homo sapiens
tggccagtgactaag

SEQ ID NO: 244288 - DNA, 15 bp, Homo sapiens
ctggccagtgactaa

SEQ ID NO: 244289 - DNA, 15 bp, Homo sapiens
gctggccagtgacta

SEQ ID NO: 244290 - DNA, 15 bp, Homo sapiens
agctggccagtgact

SEQ ID NO: 244291 - DNA, 15 bp, Homo sapiens
aagctggccagtgac

SEQ ID NO: 244292 - DNA, 15 bp, Homo sapiens
caagctggccagtga

SEQ ID NO: 244293 - DNA, 15 bp, Homo sapiens
tcaagctggccagtg

SEQ ID NO: 244294 - DNA, 15 bp, Homo sapiens
ttcaagctggccagt

SEQ ID NO: 244295 - DNA, 15 bp, Homo sapiens
tttcaagctggccag

SEQ ID NO: 244296 - DNA, 15 bp, Homo sapiens
ctttcaagctggcca

SEQ ID NO: 244297 - DNA, 15 bp, Homo sapiens
cctttcaagctggcc

SEQ ID NO: 244298 - DNA, 15 bp, Homo sapiens
gcctttcaagctggc

SEQ ID NO: 244299 - DNA, 15 bp, Homo sapiens
tgcctttcaagctgg

SEQ ID NO: 244300 - DNA, 15 bp, Homo sapiens
gtgcctttcaagctg

SEQ ID NO: 244301 - DNA, 15 bp, Homo sapiens
ggtgcctttcaagct

SEQ ID NO: 244302 - DNA, 15 bp, Homo sapiens
aggtgcctttcaagc

SEQ ID NO: 244303 - DNA, 15 bp, Homo sapiens
aaggtgcctttcaag

SEQ ID NO: 244304 - DNA, 15 bp, Homo sapiens
gaaggtgcctttcaa

SEQ ID NO: 244305 - DNA, 15 bp, Homo sapiens
ggaaggtgcctttca

SEQ ID NO: 244306 - DNA, 15 bp, Homo sapiens
gggaaggtgcctttc

SEQ ID NO: 244307 - DNA, 15 bp, Homo sapiens
tgggaaggtgccttt

SEQ ID NO: 244308 - DNA, 15 bp, Homo sapiens
ctgggaaggtgcctt

SEQ ID NO: 244309 - DNA, 15 bp, Homo sapiens
cctgggaaggtgcct

SEQ ID NO: 244310 - DNA, 15 bp, Homo sapiens
ccctgggaaggtgcc

SEQ ID NO: 244311 - DNA, 15 bp, Homo sapiens
tccctgggaaggtgc

SEQ ID NO: 244312 - DNA, 15 bp, Homo sapiens
ttccctgggaaggtg

SEQ ID NO: 244313 - DNA, 15 bp, Homo sapiens
cttccctgggaaggt

SEQ ID NO: 244314 - DNA, 15 bp, Homo sapiens
gcttccctgggaagg

SEQ ID NO: 244315 - DNA, 15 bp, Homo sapiens
ggcttccctgggaag

SEQ ID NO: 244316 - DNA, 15 bp, Homo sapiens
atggcttccctggga

SEQ ID NO: 244317 - DNA, 15 bp, Homo sapiens
gatggcttccctggg

SEQ ID NO: 244318 - DNA, 15 bp, Homo sapiens
ggatggcttccctgg

SEQ ID NO: 244319 - DNA, 15 bp, Homo sapiens
gggatggcttccctg

SEQ ID NO: 244320 - DNA, 15 bp, Homo sapiens
ggggatggcttccct

SEQ ID NO: 244321 - DNA, 15 bp, Homo sapiens
cggggatggcttccc

SEQ ID NO: 244322 - DNA, 15 bp, Homo sapiens
tcggggatggcttcc

SEQ ID NO: 244323 - DNA, 15 bp, Homo sapiens
gtcggggatggcttc

SEQ ID NO: 244324 - DNA, 15 bp, Homo sapiens
ggtcggggatggctt

SEQ ID NO: 244325 - DNA, 15 bp, Homo sapiens
gggtcggggatggct

SEQ ID NO: 244326 - DNA, 15 bp, Homo sapiens
agggtcggggatggc

SEQ ID NO: 244327 - DNA, 15 bp, Homo sapiens
cagggtcggggatgg

SEQ ID NO: 244328 - DNA, 15 bp, Homo sapiens
gcagggtcggggatg

SEQ ID NO: 244329 - DNA, 15 bp, Homo sapiens
ggcagggtcggggat

SEQ ID NO: 244330 - DNA, 15 bp, Homo sapiens
tggcagggtcgggga

SEQ ID NO: 244331 - DNA, 15 bp, Homo sapiens
ctggcagggtcgggg

SEQ ID NO: 244332 - DNA, 15 bp, Homo sapiens
actggcagggtcggg

SEQ ID NO: 244333 - DNA, 15 bp, Homo sapiens
gactggcagggtcgg

SEQ ID NO: 244334 - DNA, 15 bp, Homo sapiens
ggactggcagggtcg

SEQ ID NO: 244335 - DNA, 15 bp, Homo sapiens
gggactggcagggtc

SEQ ID NO: 244336 - DNA, 15 bp, Homo sapiens
agggactggcagggt

SEQ ID NO: 244337 - DNA, 15 bp, Homo sapiens
cagggactggcaggg

SEQ ID NO: 244338 - DNA, 15 bp, Homo sapiens
tcagggactggcagg

SEQ ID NO: 244339 - DNA, 15 bp, Homo sapiens
gtcagggactggcag

SEQ ID NO: 244340 - DNA, 15 bp, Homo sapiens
tgtcagggactggca

SEQ ID NO: 244341 - DNA, 15 bp, Homo sapiens
gtgtcagggactggc

SEQ ID NO: 244342 - DNA, 15 bp, Homo sapiens
tgtgtcagggactgg

SEQ ID NO: 244343 - DNA, 15 bp, Homo sapiens
gtgtgtcagggactg

SEQ ID NO: 244344 - DNA, 15 bp, Homo sapiens
ggtgtgtcagggact

SEQ ID NO: 244345 - DNA, 15 bp, Homo sapiens
gggtgtgtcagggac

SEQ ID NO: 244346 - DNA, 15 bp, Homo sapiens
cgggtgtgtcaggga

SEQ ID NO: 244347 - DNA, 15 bp, Homo sapiens
acgggtgtgtcaggg

SEQ ID NO: 244348 - DNA, 15 bp, Homo sapiens
cacgggtgtgtcagg

SEQ ID NO: 244349 - DNA, 15 bp, Homo sapiens
gcacgggtgtgtcag

SEQ ID NO: 244350 - DNA, 15 bp, Homo sapiens
cgcacgggtgtgtca

SEQ ID NO: 244351 - DNA, 15 bp, Homo sapiens
ccgcacgggtgtgtc

SEQ ID NO: 244352 - DNA, 15 bp, Homo sapiens
tccgcacgggtgtgt

SEQ ID NO: 244353 - DNA, 15 bp, Homo sapiens
ttccgcacgggtgtg

SEQ ID NO: 244354 - DNA, 15 bp, Homo sapiens
attccgcacgggtgt

SEQ ID NO: 244355 - DNA, 15 bp, Homo sapiens
cattccgcacgggtg

SEQ ID NO: 244356 - DNA, 15 bp, Homo sapiens
tcattccgcacgggt

SEQ ID NO: 244357 - DNA, 15 bp, Homo sapiens
ctcattccgcacggg

SEQ ID NO: 244358 - DNA, 15 bp, Homo sapiens
cctcattccgcacgg

SEQ ID NO: 244359 - DNA, 15 bp, Homo sapiens
ccctcattccgcacg

SEQ ID NO: 244360 - DNA, 15 bp, Homo sapiens
accctcattccgcac

SEQ ID NO: 244361 - DNA, 15 bp, Homo sapiens
caccctcattccgca

SEQ ID NO: 244362 - DNA, 15 bp, Homo sapiens
gcaccctcattccgc

SEQ ID NO: 244363 - DNA, 15 bp, Homo sapiens
tgcaccctcattccg

SEQ ID NO: 244364 - DNA, 15 bp, Homo sapiens
gtgcaccctcattcc

SEQ ID NO: 244365 - DNA, 15 bp, Homo sapiens
ggtgcaccctcattc

SEQ ID NO: 244366 - DNA, 15 bp, Homo sapiens
aggtgcaccctcatt

SEQ ID NO: 244367 - DNA, 15 bp, Homo sapiens
aaggtgcaccctcat

SEQ ID NO: 244368 - DNA, 15 bp, Homo sapiens
gaaggtgcaccctca

SEQ ID NO: 244369 - DNA, 15 bp, Homo sapiens
agaaggtgcaccctc

SEQ ID NO: 244370 - DNA, 15 bp, Homo sapiens
tagaaggtgcaccct

SEQ ID NO: 244371 - DNA, 15 bp, Homo sapiens
ttagaaggtgcaccc

SEQ ID NO: 244372 - DNA, 15 bp, Homo sapiens
attagaaggtgcacc

SEQ ID NO: 244373 - DNA, 15 bp, Homo sapiens
cattagaaggtgcac

SEQ ID NO: 244374 - DNA, 15 bp, Homo sapiens
gcattagaaggtgca

SEQ ID NO: 244375 - DNA, 15 bp, Homo sapiens
tgcattagaaggtgc

SEQ ID NO: 244376 - DNA, 15 bp, Homo sapiens
ctgcattagaaggtg

SEQ ID NO: 244377 - DNA, 15 bp, Homo sapiens
actgcattagaaggt

SEQ ID NO: 244378 - DNA, 15 bp, Homo sapiens
tactgcattagaagg

SEQ ID NO: 244379 - DNA, 15 bp, Homo sapiens
atactgcattagaag

SEQ ID NO: 244380 - DNA, 15 bp, Homo sapiens
catactgcattagaa

SEQ ID NO: 244381 - DNA, 15 bp, Homo sapiens
gcatactgcattaga

SEQ ID NO: 244382 - DNA, 15 bp, Homo sapiens
tgcatactgcattag

SEQ ID NO: 244383 - DNA, 15 bp, Homo sapiens
atgcatactgcatta

SEQ ID NO: 244384 - DNA, 15 bp, Homo sapiens
catgcatactgcatt

SEQ ID NO: 244385 - DNA, 15 bp, Homo sapiens
gcatgcatactgcat

SEQ ID NO: 244386 - DNA, 15 bp, Homo sapiens
agcatgcatactgca

SEQ ID NO: 244387 - DNA, 15 bp, Homo sapiens
tagcatgcatactgc

SEQ ID NO: 244388 - DNA, 15 bp, Homo sapiens
atagcatgcatactg

SEQ ID NO: 244389 - DNA, 15 bp, Homo sapiens
aatagcatgcatact

SEQ ID NO: 244390 - DNA, 15 bp, Homo sapiens
aaatagcatgcatac

SEQ ID NO: 244391 - DNA, 15 bp, Homo sapiens
aaaatagcatgcata

SEQ ID NO: 244392 - DNA, 15 bp, Homo sapiens
caaaatagcatgcat

SEQ ID NO: 244393 - DNA, 15 bp, Homo sapiens
gcaaaatagcatgca

SEQ ID NO: 244394 - DNA, 15 bp, Homo sapiens
agcaaaatagcatgc

SEQ ID NO: 244395 - DNA, 15 bp, Homo sapiens
gagcaaaatagcatg

SEQ ID NO: 244396 - DNA, 15 bp, Homo sapiens
agagcaaaatagcat

SEQ ID NO: 244397 - DNA, 15 bp, Homo sapiens
gagagcaaaatagca

SEQ ID NO: 244398 - DNA, 15 bp, Homo sapiens
tgagagcaaaatagc

SEQ ID NO: 244399 - DNA, 15 bp, Homo sapiens
atgagagcaaaatag

SEQ ID NO: 244400 - DNA, 15 bp, Homo sapiens
catgagagcaaaata

SEQ ID NO: 244401 - DNA, 15 bp, Homo sapiens
acatgagagcaaaat

SEQ ID NO: 244402 - DNA, 15 bp, Homo sapiens
aacatgagagcaaaa

SEQ ID NO: 244403 - DNA, 15 bp, Homo sapiens
gaacatgagagcaaa

SEQ ID NO: 244404 - DNA, 15 bp, Homo sapiens
agaacatgagagcaa

SEQ ID NO: 244405 - DNA, 15 bp, Homo sapiens
aagaacatgagagca

SEQ ID NO: 244406 - DNA, 15 bp, Homo sapiens
aaagaacatgagagc

SEQ ID NO: 244407 - DNA, 15 bp, Homo sapiens
gaaagaacatgagag

SEQ ID NO: 244408 - DNA, 15 bp, Homo sapiens
tgaaagaacatgaga

SEQ ID NO: 244409 - DNA, 15 bp, Homo sapiens
gtgaaagaacatgag

SEQ ID NO: 244410 - DNA, 15 bp, Homo sapiens
agtgaaagaacatga

SEQ ID NO: 244411 - DNA, 15 bp, Homo sapiens
aagtgaaagaacatg

SEQ ID NO: 244412 - DNA, 15 bp, Homo sapiens
aaagtgaaagaacat

SEQ ID NO: 244413 - DNA, 15 bp, Homo sapiens
aaaagtgaaagaaca

SEQ ID NO: 244414 - DNA, 15 bp, Homo sapiens
gaaaagtgaaagaac

SEQ ID NO: 244415 - DNA, 15 bp, Homo sapiens
tgaaaagtgaaagaa

SEQ ID NO: 244416 - DNA, 15 bp, Homo sapiens
ctgaaaagtgaaaga

SEQ ID NO: 244417 - DNA, 15 bp, Homo sapiens
tctgaaaagtgaaag

SEQ ID NO: 244418 - DNA, 15 bp, Homo sapiens
atctgaaaagtgaaa

SEQ ID NO: 244419 - DNA, 15 bp, Homo sapiens
catctgaaaagtgaa

SEQ ID NO: 244420 - DNA, 15 bp, Homo sapiens
acatctgaaaagtga

SEQ ID NO: 244421 - DNA, 15 bp, Homo sapiens
aacatctgaaaagtg

SEQ ID NO: 244422 - DNA, 15 bp, Homo sapiens
aaacatctgaaaagt

SEQ ID NO: 244423 - DNA, 15 bp, Homo sapiens
gaaacatctgaaaag

SEQ ID NO: 244424 - DNA, 15 bp, Homo sapiens
agaaacatctgaaaa

SEQ ID NO: 244425 - DNA, 15 bp, Homo sapiens
gagaaacatctgaaa

SEQ ID NO: 244426 - DNA, 15 bp, Homo sapiens
agagaaacatctgaa

SEQ ID NO: 244427 - DNA, 15 bp, Homo sapiens
gagagaaacatctga

SEQ ID NO: 244428 - DNA, 15 bp, Homo sapiens
ggagagaaacatctg

SEQ ID NO: 244429 - DNA, 15 bp, Homo sapiens
gggagagaaacatct

SEQ ID NO: 244430 - DNA, 15 bp, Homo sapiens
agggagagaaacatc

SEQ ID NO: 244431 - DNA, 15 bp, Homo sapiens
tagggagagaaacat

SEQ ID NO: 244432 - DNA, 15 bp, Homo sapiens
ctagggagagaaaca

SEQ ID NO: 244433 - DNA, 15 bp, Homo sapiens
cctagggagagaaac

SEQ ID NO: 244434 - DNA, 15 bp, Homo sapiens
tcctagggagagaaa

SEQ ID NO: 244435 - DNA, 15 bp, Homo sapiens
ttcctagggagagaa

SEQ ID NO: 244436 - DNA, 15 bp, Homo sapiens
gttcctagggagaga

SEQ ID NO: 244437 - DNA, 15 bp, Homo sapiens
tgttcctagggagag

SEQ ID NO: 244438 - DNA, 15 bp, Homo sapiens
gtgttcctagggaga

SEQ ID NO: 244439 - DNA, 15 bp, Homo sapiens
tgtgttcctagggag

SEQ ID NO: 244440 - DNA, 15 bp, Homo sapiens
ctgtgttcctaggga

SEQ ID NO: 244441 - DNA, 15 bp, Homo sapiens
cctgtgttcctaggg

SEQ ID NO: 244442 - DNA, 15 bp, Homo sapiens
gcctgtgttcctagg

SEQ ID NO: 244443 - DNA, 15 bp, Homo sapiens
agcctgtgttcctag

SEQ ID NO: 244444 - DNA, 15 bp, Homo sapiens
aagcctgtgttccta

SEQ ID NO: 244445 - DNA, 15 bp, Homo sapiens
aaagcctgtgttcct

SEQ ID NO: 244446 - DNA, 15 bp, Homo sapiens
aaaagcctgtgttcc

SEQ ID NO: 244447 - DNA, 15 bp, Homo sapiens
gaaaagcctgtgttc

SEQ ID NO: 244448 - DNA, 15 bp, Homo sapiens
tgaaaagcctgtgtt

SEQ ID NO: 244449 - DNA, 15 bp, Homo sapiens
ttgaaaagcctgtgt

SEQ ID NO: 244450 - DNA, 15 bp, Homo sapiens
tttgaaaagcctgtg

SEQ ID NO: 244451 - DNA, 15 bp, Homo sapiens
ctttgaaaagcctgt

SEQ ID NO: 244452 - DNA, 15 bp, Homo sapiens
tctttgaaaagcctg

SEQ ID NO: 244453 - DNA, 15 bp, Homo sapiens
gtctttgaaaagcct

SEQ ID NO: 244454 - DNA, 15 bp, Homo sapiens
tgtctttgaaaagcc

SEQ ID NO: 244455 - DNA, 15 bp, Homo sapiens
ttgtctttgaaaagc

SEQ ID NO: 244456 - DNA, 15 bp, Homo sapiens
cttgtctttgaaaag

SEQ ID NO: 244457 - DNA, 15 bp, Homo sapiens
tcttgtctttgaaaa

SEQ ID NO: 244458 - DNA, 15 bp, Homo sapiens
atcttgtctttgaaa

SEQ ID NO: 244459 - DNA, 15 bp, Homo sapiens
gatcttgtctttgaa

SEQ ID NO: 244460 - DNA, 15 bp, Homo sapiens
agatcttgtctttga

SEQ ID NO: 244461 - DNA, 15 bp, Homo sapiens
tagatcttgtctttg

SEQ ID NO: 244462 - DNA, 15 bp, Homo sapiens
atagatcttgtcttt

SEQ ID NO: 244463 - DNA, 15 bp, Homo sapiens
catagatcttgtctt

SEQ ID NO: 244464 - DNA, 15 bp, Homo sapiens
acatagatcttgtct

SEQ ID NO: 244465 - DNA, 15 bp, Homo sapiens
gacatagatcttgtc

SEQ ID NO: 244466 - DNA, 15 bp, Homo sapiens
agacatagatcttgt

SEQ ID NO: 244467 - DNA, 15 bp, Homo sapiens
aagacatagatcttg

SEQ ID NO: 244468 - DNA, 15 bp, Homo sapiens
caagacatagatctt

SEQ ID NO: 244469 - DNA, 15 bp, Homo sapiens
acaagacatagatct

SEQ ID NO: 244470 - DNA, 15 bp, Homo sapiens
tacaagacatagatc

SEQ ID NO: 244471 - DNA, 15 bp, Homo sapiens
ctacaagacatagat

SEQ ID NO: 244472 - DNA, 15 bp, Homo sapiens
cctacaagacataga

SEQ ID NO: 244473 - DNA, 15 bp, Homo sapiens
gcctacaagacatag

SEQ ID NO: 244474 - DNA, 15 bp, Homo sapiens
ggcctacaagacata

SEQ ID NO: 244475 - DNA, 15 bp, Homo sapiens
gggcctacaagacat

SEQ ID NO: 244476 - DNA, 15 bp, Homo sapiens
cgggcctacaagaca

SEQ ID NO: 244477 - DNA, 15 bp, Homo sapiens
ccgggcctacaagac

SEQ ID NO: 244478 - DNA, 15 bp, Homo sapiens
accgggcctacaaga

SEQ ID NO: 244479 - DNA, 15 bp, Homo sapiens
caccgggcctacaag

SEQ ID NO: 244480 - DNA, 15 bp, Homo sapiens
tcaccgggcctacaa

SEQ ID NO: 244481 - DNA, 15 bp, Homo sapiens
gtcaccgggcctaca

SEQ ID NO: 244482 - DNA, 15 bp, Homo sapiens
ggtcaccgggcctac

SEQ ID NO: 244483 - DNA, 15 bp, Homo sapiens
tggtcaccgggccta

SEQ ID NO: 244484 - DNA, 15 bp, Homo sapiens
ctggtcaccgggcct

SEQ ID NO: 244485 - DNA, 15 bp, Homo sapiens
gctggtcaccgggcc

SEQ ID NO: 244486 - DNA, 15 bp, Homo sapiens
tgctggtcaccgggc

SEQ ID NO: 244487 - DNA, 15 bp, Homo sapiens
atgctggtcaccggg

SEQ ID NO: 244488 - DNA, 15 bp, Homo sapiens
gatgctggtcaccgg

SEQ ID NO: 244489 - DNA, 15 bp, Homo sapiens
tgatgctggtcaccg

SEQ ID NO: 244490 - DNA, 15 bp, Homo sapiens
atgatgctggtcacc

SEQ ID NO: 244491 - DNA, 15 bp, Homo sapiens
catgatgctggtcac

SEQ ID NO: 244492 - DNA, 15 bp, Homo sapiens
ccatgatgctggtca

SEQ ID NO: 244493 - DNA, 15 bp, Homo sapiens
gccatgatgctggtc

SEQ ID NO: 244494 - DNA, 15 bp, Homo sapiens
tgccatgatgctggt

SEQ ID NO: 244495 - DNA, 15 bp, Homo sapiens
ttgccatgatgctgg

SEQ ID NO: 244496 - DNA, 15 bp, Homo sapiens
tttgccatgatgctg

SEQ ID NO: 244497 - DNA, 15 bp, Homo sapiens
atttgccatgatgct

SEQ ID NO: 244498 - DNA, 15 bp, Homo sapiens
tatttgccatgatgc

SEQ ID NO: 244499 - DNA, 15 bp, Homo sapiens
ctatttgccatgatg

SEQ ID NO: 244500 - DNA, 15 bp, Homo sapiens
actatttgccatgat

SEQ ID NO: 244501 - DNA, 15 bp, Homo sapiens
cactatttgccatga

SEQ ID NO: 244502 - DNA, 15 bp, Homo sapiens
tcactatttgccatg

SEQ ID NO: 244503 - DNA, 15 bp, Homo sapiens
ctcactatttgccat

SEQ ID NO: 244504 - DNA, 15 bp, Homo sapiens
cctcactatttgcca

SEQ ID NO: 244505 - DNA, 15 bp, Homo sapiens
ccctcactatttgcc

SEQ ID NO: 244506 - DNA, 15 bp, Homo sapiens
accctcactatttgc

SEQ ID NO: 244507 - DNA, 15 bp, Homo sapiens
aaccctcactatttg

SEQ ID NO: 244508 - DNA, 15 bp, Homo sapiens
caaccctcactattt

SEQ ID NO: 244509 - DNA, 15 bp, Homo sapiens
gcaaccctcactatt

SEQ ID NO: 244510 - DNA, 15 bp, Homo sapiens
agcaaccctcactat

SEQ ID NO: 244511 - DNA, 15 bp, Homo sapiens
cagcaaccctcacta

SEQ ID NO: 244512 - DNA, 15 bp, Homo sapiens
tcagcaaccctcact

SEQ ID NO: 244513 - DNA, 15 bp, Homo sapiens
ctcagcaaccctcac

SEQ ID NO: 244514 - DNA, 15 bp, Homo sapiens
cctcagcaaccctca

SEQ ID NO: 244515 - DNA, 15 bp, Homo sapiens
tcctcagcaaccctc

SEQ ID NO: 244516 - DNA, 15 bp, Homo sapiens
ctcctcagcaaccct

SEQ ID NO: 244517 - DNA, 15 bp, Homo sapiens
gctcctcagcaaccc

SEQ ID NO: 244518 - DNA, 15 bp, Homo sapiens
agctcctcagcaacc

SEQ ID NO: 244519 - DNA, 15 bp, Homo sapiens
aagctcctcagcaac

SEQ ID NO: 244520 - DNA, 15 bp, Homo sapiens
taagctcctcagcaa

SEQ ID NO: 244521 - DNA, 15 bp, Homo sapiens
gtaagctcctcagca

SEQ ID NO: 244522 - DNA, 15 bp, Homo sapiens
tgtaagctcctcagc

SEQ ID NO: 244523 - DNA, 15 bp, Homo sapiens
ctgtaagctcctcag

SEQ ID NO: 244524 - DNA, 15 bp, Homo sapiens
tctgtaagctcctca

SEQ ID NO: 244525 - DNA, 15 bp, Homo sapiens
ttctgtaagctcctc

SEQ ID NO: 244526 - DNA, 15 bp, Homo sapiens
attctgtaagctcct

SEQ ID NO: 244527 - DNA, 15 bp, Homo sapiens
cattctgtaagctcc
